United States Patent Application Publication US 2004/0241651 A1 - sequence listing, part 3

SEQ ID NO: 58803 - DNA, 13 bp, Artificial Sequence
  Oligonucleotide for detection of SNP TSC0015755
tagattttaataa

SEQ ID NO: 58804 - DNA, 13 bp, Artificial Sequence
  Oligonucleotide for detection of SNP TSC0015755
ttattaaaatcta

SEQ ID NO: 58805 - DNA, 13 bp, Artificial Sequence
  Oligonucleotide for detection of SNP TSC0015755
ttattaagatttg

SEQ ID NO: 58806 - DNA, 13 bp, Artificial Sequence
  Oligonucleotide for detection of SNP TSC0015755
caaatcttaataa

SEQ ID NO: 58807 - DNA, 13 bp, Artificial Sequence
  Oligonucleotide for detection of SNP TSC0015756
ggagaggtttttt

SEQ ID NO: 58808 - DNA, 13 bp, Artificial Sequence
  Oligonucleotide for detection of SNP TSC0015756
aaaaaacctctcc

SEQ ID NO: 58809 - DNA, 13 bp, Artificial Sequence
  Oligonucleotide for detection of SNP TSC0015756
ggagagatttttt

SEQ ID NO: 58810 - DNA, 13 bp, Artificial Sequence
  Oligonucleotide for detection of SNP TSC0015756
aaaaaatctctcc

SEQ ID NO: 58811 - DNA, 13 bp, Artificial Sequence
  Oligonucleotide for detection of SNP TSC0015757
gtttttagggagt

SEQ ID NO: 58812 - DNA, 13 bp, Artificial Sequence
  Oligonucleotide for detection of SNP TSC0015757
actccctaaaaac

SEQ ID NO: 58813 - DNA, 13 bp, Artificial Sequence
  Oligonucleotide for detection of SNP TSC0015757
gtttttggggagt

SEQ ID NO: 58814 - DNA, 13 bp, Artificial Sequence
  Oligonucleotide for detection of SNP TSC0015757
actccccaaaaac

SEQ ID NO: 58815 - DNA, 13 bp, Artificial Sequence
  Oligonucleotide for detection of SNP TSC0015757
gttttcggggagt

SEQ ID NO: 58816 - DNA, 13 bp, Artificial Sequence
  Oligonucleotide for detection of SNP TSC0015757
actccccgaaaac

SEQ ID NO: 58817 - DNA, 13 bp, Artificial Sequence
  Oligonucleotide for detection of SNP TSC0015757
attttttgagagy

SEQ ID NO: 58818 - DNA, 13 bp, Artificial Sequence
  Oligonucleotide for detection of SNP TSC0015757
rctctcaaaaaat

SEQ ID NO: 58819 - DNA, 13 bp, Artificial Sequence
  Oligonucleotide for detection of SNP TSC0015757
atttttcgagagy

SEQ ID NO: 58820 - DNA, 13 bp, Artificial Sequence
  Oligonucleotide for detection of SNP TSC0015757
rctctcgaaaaat

SEQ ID NO: 58821 - DNA, 13 bp, Artificial Sequence
  Oligonucleotide for detection of SNP TSC0015758
tgtgtgagtgtat

SEQ ID NO: 58822 - DNA, 13 bp, Artificial Sequence
  Oligonucleotide for detection of SNP TSC0015758
atacactcacaca

SEQ ID NO: 58823 - DNA, 13 bp, Artificial Sequence
  Oligonucleotide for detection of SNP TSC0015758
tgtgtgtgtgtat

SEQ ID NO: 58824 - DNA, 13 bp, Artificial Sequence
  Oligonucleotide for detection of SNP TSC0015758
atacacacacaca

SEQ ID NO: 58825 - DNA, 13 bp, Artificial Sequence
  Oligonucleotide for detection of SNP TSC0015760
tgggaggattgtt

SEQ ID NO: 58826 - DNA, 13 bp, Artificial Sequence
  Oligonucleotide for detection of SNP TSC0015760
aacaatcctccca

SEQ ID NO: 58827 - DNA, 13 bp, Artificial Sequence
  Oligonucleotide for detection of SNP TSC0015760
tgggagtattgtt

SEQ ID NO: 58828 - DNA, 13 bp, Artificial Sequence
  Oligonucleotide for detection of SNP TSC0015760
aacaatactccca

SEQ ID NO: 58829 - DNA, 13 bp, Artificial Sequence
  Oligonucleotide for detection of SNP TSC0015760
agtaattttttta

SEQ ID NO: 58830 - DNA, 13 bp, Artificial Sequence
  Oligonucleotide for detection of SNP TSC0015760
taaaaaaattact

SEQ ID NO: 58831 - DNA, 13 bp, Artificial Sequence
  Oligonucleotide for detection of SNP TSC0015761
tttttagaaaaaa

SEQ ID NO: 58832 - DNA, 13 bp, Artificial Sequence
  Oligonucleotide for detection of SNP TSC0015761
ttttttctaaaaa

SEQ ID NO: 58833 - DNA, 13 bp, Artificial Sequence
  Oligonucleotide for detection of SNP TSC0015764
ttagtagttttty

SEQ ID NO: 58834 - DNA, 13 bp, Artificial Sequence
  Oligonucleotide for detection of SNP TSC0015764
raaaaactactaa

SEQ ID NO: 58835 - DNA, 13 bp, Artificial Sequence
  Oligonucleotide for detection of SNP TSC0015765
ttttaagatataa

SEQ ID NO: 58836 - DNA, 13 bp, Artificial Sequence
  Oligonucleotide for detection of SNP TSC0015765
ttatatcttaaaa

SEQ ID NO: 58837 - DNA, 13 bp, Artificial Sequence
  Oligonucleotide for detection of SNP TSC0015765
ttttaaaatataa

SEQ ID NO: 58838 - DNA, 13 bp, Artificial Sequence
  Oligonucleotide for detection of SNP TSC0015765
ttatattttaaaa

SEQ ID NO: 58839 - DNA, 13 bp, Artificial Sequence
  Oligonucleotide for detection of SNP TSC0015767
gaaattaggtaty

SEQ ID NO: 58840 - DNA, 13 bp, Artificial Sequence
  Oligonucleotide for detection of SNP TSC0015767
ratacctaatttc

SEQ ID NO: 58841 - DNA, 13 bp, Artificial Sequence
  Oligonucleotide for detection of SNP TSC0015767
gaaattgggtaty

SEQ ID NO: 58842 - DNA, 13 bp, Artificial Sequence
  Oligonucleotide for detection of SNP TSC0015767
ratacccaatttc

SEQ ID NO: 58843 - DNA, 13 bp, Artificial Sequence
  Oligonucleotide for detection of SNP TSC0015767
gaaatcgggtaty

SEQ ID NO: 58844 - DNA, 13 bp, Artificial Sequence
  Oligonucleotide for detection of SNP TSC0015767
ratacccgatttc

SEQ ID NO: 58845 - DNA, 13 bp, Artificial Sequence
  Oligonucleotide for detection of SNP TSC0015767
gatgtttgattty

SEQ ID NO: 58846 - DNA, 13 bp, Artificial Sequence
  Oligonucleotide for detection of SNP TSC0015767
raaatcaaacatc

SEQ ID NO: 58847 - DNA, 13 bp, Artificial Sequence
  Oligonucleotide for detection of SNP TSC0015767
gatgttcgattty

SEQ ID NO: 58848 - DNA, 13 bp, Artificial Sequence
  Oligonucleotide for detection of SNP TSC0015767
raaatcgaacatc

SEQ ID NO: 58849 - DNA, 13 bp, Artificial Sequence
  Oligonucleotide for detection of SNP TSC0015771
taaataaatatat

SEQ ID NO: 58850 - DNA, 13 bp, Artificial Sequence
  Oligonucleotide for detection of SNP TSC0015771
atatatttattta

SEQ ID NO: 58851 - DNA, 13 bp, Artificial Sequence
  Oligonucleotide for detection of SNP TSC0015771
taaatatatatat

SEQ ID NO: 58852 - DNA, 13 bp, Artificial Sequence
  Oligonucleotide for detection of SNP TSC0015771
atatatatattta

SEQ ID NO: 58853 - DNA, 13 bp, Artificial Sequence
  Oligonucleotide for detection of SNP TSC0015771
atatgtttatttg

SEQ ID NO: 58854 - DNA, 13 bp, Artificial Sequence
  Oligonucleotide for detection of SNP TSC0015771
caaataaacatat

SEQ ID NO: 58855 - DNA, 13 bp, Artificial Sequence
  Oligonucleotide for detection of SNP TSC0015771
atatgtgtatttg

SEQ ID NO: 58856 - DNA, 13 bp, Artificial Sequence
  Oligonucleotide for detection of SNP TSC0015771
caaatacacatat

SEQ ID NO: 58857 - DNA, 13 bp, Artificial Sequence
  Oligonucleotide for detection of SNP TSC0015772
gaatatgtgtgta

SEQ ID NO: 58858 - DNA, 13 bp, Artificial Sequence
  Oligonucleotide for detection of SNP TSC0015772
tacacacatattc

SEQ ID NO: 58859 - DNA, 13 bp, Artificial Sequence
  Oligonucleotide for detection of SNP TSC0015772
gaatatatgtgta

SEQ ID NO: 58860 - DNA, 13 bp, Artificial Sequence
  Oligonucleotide for detection of SNP TSC0015772
tacacatatattc

SEQ ID NO: 58861 - DNA, 13 bp, Artificial Sequence
  Oligonucleotide for detection of SNP TSC0015773
aatatatatgtat

SEQ ID NO: 58862 - DNA, 13 bp, Artificial Sequence
  Oligonucleotide for detection of SNP TSC0015773
atacatatatatt

SEQ ID NO: 58863 - DNA, 13 bp, Artificial Sequence
  Oligonucleotide for detection of SNP TSC0015773
aatatagatgtat

SEQ ID NO: 58864 - DNA, 13 bp, Artificial Sequence
  Oligonucleotide for detection of SNP TSC0015773
atacatctatatt

SEQ ID NO: 58865 - DNA, 13 bp, Artificial Sequence
  Oligonucleotide for detection of SNP TSC0015773
atatatgtgtatt

SEQ ID NO: 58866 - DNA, 13 bp, Artificial Sequence
  Oligonucleotide for detection of SNP TSC0015773
aatacacatatat

SEQ ID NO: 58867 - DNA, 13 bp, Artificial Sequence
  Oligonucleotide for detection of SNP TSC0015773
atatatttgtatt

SEQ ID NO: 58868 - DNA, 13 bp, Artificial Sequence
  Oligonucleotide for detection of SNP TSC0015773
aatacaaatatat

SEQ ID NO: 58869 - DNA, 13 bp, Artificial Sequence
  Oligonucleotide for detection of SNP TSC0015774
attataagtgtga

SEQ ID NO: 58870 - DNA, 13 bp, Artificial Sequence
  Oligonucleotide for detection of SNP TSC0015774
tcacacttataat

SEQ ID NO: 58871 - DNA, 13 bp, Artificial Sequence
  Oligonucleotide for detection of SNP TSC0015774
attataggtgtga

SEQ ID NO: 58872 - DNA, 13 bp, Artificial Sequence
  Oligonucleotide for detection of SNP TSC0015774
tcacacctataat

SEQ ID NO: 58873 - DNA, 13 bp, Artificial Sequence
  Oligonucleotide for detection of SNP TSC0015775
gtttttgatttgy

SEQ ID NO: 58874 - DNA, 13 bp, Artificial Sequence
  Oligonucleotide for detection of SNP TSC0015775
rcaaatcaaaaac

SEQ ID NO: 58875 - DNA, 13 bp, Artificial Sequence
  Oligonucleotide for detection of SNP TSC0015775
gttttttatttgy

SEQ ID NO: 58876 - DNA, 13 bp, Artificial Sequence
  Oligonucleotide for detection of SNP TSC0015775
rcaaataaaaaac

SEQ ID NO: 58877 - DNA, 13 bp, Artificial Sequence
  Oligonucleotide for detection of SNP TSC0015775
gtttttgattcgy

SEQ ID NO: 58878 - DNA, 13 bp, Artificial Sequence
  Oligonucleotide for detection of SNP TSC0015775
rcgaatcaaaaac

SEQ ID NO: 58879 - DNA, 13 bp, Artificial Sequence
  Oligonucleotide for detection of SNP TSC0015775
gttttttattcgy

SEQ ID NO: 58880 - DNA, 13 bp, Artificial Sequence
  Oligonucleotide for detection of SNP TSC0015775
rcgaataaaaaac

SEQ ID NO: 58881 - DNA, 13 bp, Artificial Sequence
  Oligonucleotide for detection of SNP TSC0015775
gtgggttaaaggy

SEQ ID NO: 58882 - DNA, 13 bp, Artificial Sequence
  Oligonucleotide for detection of SNP TSC0015775
rcctttaacccac

SEQ ID NO: 58883 - DNA, 13 bp, Artificial Sequence
  Oligonucleotide for detection of SNP TSC0015775
gtgggtaaaaggy

SEQ ID NO: 58884 - DNA, 13 bp, Artificial Sequence
  Oligonucleotide for detection of SNP TSC0015775
rccttttacccac

SEQ ID NO: 58885 - DNA, 13 bp, Artificial Sequence
  Oligonucleotide for detection of SNP TSC0015775
gcgggttaaaggy

SEQ ID NO: 58886 - DNA, 13 bp, Artificial Sequence
  Oligonucleotide for detection of SNP TSC0015775
rcctttaacccgc

SEQ ID NO: 58887 - DNA, 13 bp, Artificial Sequence
  Oligonucleotide for detection of SNP TSC0015775
gcgggtaaaaggy

SEQ ID NO: 58888 - DNA, 13 bp, Artificial Sequence
  Oligonucleotide for detection of SNP TSC0015775
rccttttacccgc

SEQ ID NO: 58889 - DNA, 13 bp, Artificial Sequence
  Oligonucleotide for detection of SNP TSC0015776
tttaaagaggtaa

SEQ ID NO: 58890 - DNA, 13 bp, Artificial Sequence
  Oligonucleotide for detection of SNP TSC0015776
ttacctctttaaa

SEQ ID NO: 58891 - DNA, 13 bp, Artificial Sequence
  Oligonucleotide for detection of SNP TSC0015776
tttaaataggtaa

SEQ ID NO: 58892 - DNA, 13 bp, Artificial Sequence
  Oligonucleotide for detection of SNP TSC0015776
ttacctatttaaa

SEQ ID NO: 58893 - DNA, 13 bp, Artificial Sequence
  Oligonucleotide for detection of SNP TSC0015776
ttgtttttttgaa

SEQ ID NO: 58894 - DNA, 13 bp, Artificial Sequence
  Oligonucleotide for detection of SNP TSC0015776
ttcaaaaaaacaa

SEQ ID NO: 58895 - DNA, 13 bp, Artificial Sequence
  Oligonucleotide for detection of SNP TSC0015776
ttgtttatttgaa

SEQ ID NO: 58896 - DNA, 13 bp, Artificial Sequence
  Oligonucleotide for detection of SNP TSC0015776
ttcaaataaacaa

SEQ ID NO: 58897 - DNA, 13 bp, Artificial Sequence
  Oligonucleotide for detection of SNP TSC0015777
agagatggggggg

SEQ ID NO: 58898 - DNA, 13 bp, Artificial Sequence
  Oligonucleotide for detection of SNP TSC0015777
cccccccatctct

SEQ ID NO: 58899 - DNA, 13 bp, Artificial Sequence
  Oligonucleotide for detection of SNP TSC0015777
agagatagggggg

SEQ ID NO: 58900 - DNA, 13 bp, Artificial Sequence
  Oligonucleotide for detection of SNP TSC0015777
cccccctatctct

SEQ ID NO: 58901 - DNA, 13 bp, Artificial Sequence
  Oligonucleotide for detection of SNP TSC0015778
aagatattatgag

SEQ ID NO: 58902 - DNA, 13 bp, Artificial Sequence
  Oligonucleotide for detection of SNP TSC0015778
ctcataatatctt

SEQ ID NO: 58903 - DNA, 13 bp, Artificial Sequence
  Oligonucleotide for detection of SNP TSC0015778
aagatagtatgag

SEQ ID NO: 58904 - DNA, 13 bp, Artificial Sequence
  Oligonucleotide for detection of SNP TSC0015778
ctcatactatctt

SEQ ID NO: 58905 - DNA, 13 bp, Artificial Sequence
  Oligonucleotide for detection of SNP TSC0015778
tttatagtatttt

SEQ ID NO: 58906 - DNA, 13 bp, Artificial Sequence
  Oligonucleotide for detection of SNP TSC0015778
aaaatactataaa

SEQ ID NO: 58907 - DNA, 13 bp, Artificial Sequence
  Oligonucleotide for detection of SNP TSC0015778
tttatattatttt

SEQ ID NO: 58908 - DNA, 13 bp, Artificial Sequence
  Oligonucleotide for detection of SNP TSC0015778
aaaataatataaa

SEQ ID NO: 58909 - DNA, 13 bp, Artificial Sequence
  Oligonucleotide for detection of SNP TSC0015780
aggagaaagggga

SEQ ID NO: 58910 - DNA, 13 bp, Artificial Sequence
  Oligonucleotide for detection of SNP TSC0015780
tcccctttctcct

SEQ ID NO: 58911 - DNA, 13 bp, Artificial Sequence
  Oligonucleotide for detection of SNP TSC0015780
aggagagagggga

SEQ ID NO: 58912 - DNA, 13 bp, Artificial Sequence
  Oligonucleotide for detection of SNP TSC0015780
tcccctctctcct

SEQ ID NO: 58913 - DNA, 13 bp, Artificial Sequence
  Oligonucleotide for detection of SNP TSC0015781
ttgattgagtatt

SEQ ID NO: 58914 - DNA, 13 bp, Artificial Sequence
  Oligonucleotide for detection of SNP TSC0015781
aatactcaatcaa

SEQ ID NO: 58915 - DNA, 13 bp, Artificial Sequence
  Oligonucleotide for detection of SNP TSC0015781
ttgattaagtatt

SEQ ID NO: 58916 - DNA, 13 bp, Artificial Sequence
  Oligonucleotide for detection of SNP TSC0015781
aatacttaatcaa

SEQ ID NO: 58917 - DNA, 13 bp, Artificial Sequence
  Oligonucleotide for detection of SNP TSC0015783
ttggtggttttaa

SEQ ID NO: 58918 - DNA, 13 bp, Artificial Sequence
  Oligonucleotide for detection of SNP TSC0015783
ttaaaaccaccaa

SEQ ID NO: 58919 - DNA, 13 bp, Artificial Sequence
  Oligonucleotide for detection of SNP TSC0015783
ttggtgattttaa

SEQ ID NO: 58920 - DNA, 13 bp, Artificial Sequence
  Oligonucleotide for detection of SNP TSC0015783
ttaaaatcaccaa

SEQ ID NO: 58921 - DNA, 13 bp, Artificial Sequence
  Oligonucleotide for detection of SNP TSC0015784
agtgtaatgtagt

SEQ ID NO: 58922 - DNA, 13 bp, Artificial Sequence
  Oligonucleotide for detection of SNP TSC0015784
actacattacact

SEQ ID NO: 58923 - DNA, 13 bp, Artificial Sequence
  Oligonucleotide for detection of SNP TSC0015784
agtgtagtgtagt

SEQ ID NO: 58924 - DNA, 13 bp, Artificial Sequence
  Oligonucleotide for detection of SNP TSC0015784
actacactacact

SEQ ID NO: 58925 - DNA, 13 bp, Artificial Sequence
  Oligonucleotide for detection of SNP TSC0015786
atatttagttaga

SEQ ID NO: 58926 - DNA, 13 bp, Artificial Sequence
  Oligonucleotide for detection of SNP TSC0015786
tctaactaaatat

SEQ ID NO: 58927 - DNA, 13 bp, Artificial Sequence
  Oligonucleotide for detection of SNP TSC0015786
atatttggttaga

SEQ ID NO: 58928 - DNA, 13 bp, Artificial Sequence
  Oligonucleotide for detection of SNP TSC0015786
tctaaccaaatat

SEQ ID NO: 58929 - DNA, 13 bp, Artificial Sequence
  Oligonucleotide for detection of SNP TSC0015787
aggttggggtttt

SEQ ID NO: 58930 - DNA, 13 bp, Artificial Sequence
  Oligonucleotide for detection of SNP TSC0015787
aaaaccccaacct

SEQ ID NO: 58931 - DNA, 13 bp, Artificial Sequence
  Oligonucleotide for detection of SNP TSC0015787
aggttgaggtttt

SEQ ID NO: 58932 - DNA, 13 bp, Artificial Sequence
  Oligonucleotide for detection of SNP TSC0015787
aaaacctcaacct

SEQ ID NO: 58933 - DNA, 13 bp, Artificial Sequence
  Oligonucleotide for detection of SNP TSC0015788
taattgatgttta

SEQ ID NO: 58934 - DNA, 13 bp, Artificial Sequence
  Oligonucleotide for detection of SNP TSC0015788
taaacatcaatta

SEQ ID NO: 58935 - DNA, 13 bp, Artificial Sequence
  Oligonucleotide for detection of SNP TSC0015788
taattggtgttta

SEQ ID NO: 58936 - DNA, 13 bp, Artificial Sequence
  Oligonucleotide for detection of SNP TSC0015788
taaacaccaatta

SEQ ID NO: 58937 - DNA, 13 bp, Artificial Sequence
  Oligonucleotide for detection of SNP TSC0015788
taatcgatgttta

SEQ ID NO: 58938 - DNA, 13 bp, Artificial Sequence
  Oligonucleotide for detection of SNP TSC0015788
taaacatcgatta

SEQ ID NO: 58939 - DNA, 13 bp, Artificial Sequence
  Oligonucleotide for detection of SNP TSC0015788
taatcggtgttta

SEQ ID NO: 58940 - DNA, 13 bp, Artificial Sequence
  Oligonucleotide for detection of SNP TSC0015788
taaacaccgatta

SEQ ID NO: 58941 - DNA, 13 bp, Artificial Sequence
  Oligonucleotide for detection of SNP TSC0015790
gggggtaggggaa

SEQ ID NO: 58942 - DNA, 13 bp, Artificial Sequence
  Oligonucleotide for detection of SNP TSC0015790
ttcccctaccccc

SEQ ID NO: 58943 - DNA, 13 bp, Artificial Sequence
  Oligonucleotide for detection of SNP TSC0015790
gggggtgggggaa

SEQ ID NO: 58944 - DNA, 13 bp, Artificial Sequence
  Oligonucleotide for detection of SNP TSC0015790
ttcccccaccccc

SEQ ID NO: 58945 - DNA, 13 bp, Artificial Sequence
  Oligonucleotide for detection of SNP TSC0015790
gggggcgggggaa

SEQ ID NO: 58946 - DNA, 13 bp, Artificial Sequence
  Oligonucleotide for detection of SNP TSC0015790
ttcccccgccccc

SEQ ID NO: 58947 - DNA, 13 bp, Artificial Sequence
  Oligonucleotide for detection of SNP TSC0015791
gtagggtgtatag

SEQ ID NO: 58948 - DNA, 13 bp, Artificial Sequence
  Oligonucleotide for detection of SNP TSC0015791
ctatacaccctac

SEQ ID NO: 58949 - DNA, 13 bp, Artificial Sequence
  Oligonucleotide for detection of SNP TSC0015791
gtagggggtatag

SEQ ID NO: 58950 - DNA, 13 bp, Artificial Sequence
  Oligonucleotide for detection of SNP TSC0015791
ctataccccctac

SEQ ID NO: 58951 - DNA, 13 bp, Artificial Sequence
  Oligonucleotide for detection of SNP TSC0015791
gtagggcgtatag

SEQ ID NO: 58952 - DNA, 13 bp, Artificial Sequence
  Oligonucleotide for detection of SNP TSC0015791
ctatacgccctac

SEQ ID NO: 58953 - DNA, 13 bp, Artificial Sequence
  Oligonucleotide for detection of SNP TSC0015791
ttatatgttttgy

SEQ ID NO: 58954 - DNA, 13 bp, Artificial Sequence
  Oligonucleotide for detection of SNP TSC0015791
rcaaaacatataa

SEQ ID NO: 58955 - DNA, 13 bp, Artificial Sequence
  Oligonucleotide for detection of SNP TSC0015791
ttatattttttgy

SEQ ID NO: 58956 - DNA, 13 bp, Artificial Sequence
  Oligonucleotide for detection of SNP TSC0015791
rcaaaaaatataa

SEQ ID NO: 58957 - DNA, 13 bp, Artificial Sequence
  Oligonucleotide for detection of SNP TSC0015791
ttatacgttttgy

SEQ ID NO: 58958 - DNA, 13 bp, Artificial Sequence
  Oligonucleotide for detection of SNP TSC0015791
rcaaaacgtataa

SEQ ID NO: 58959 - DNA, 13 bp, Artificial Sequence
  Oligonucleotide for detection of SNP TSC0015799
ttgttggttttty

SEQ ID NO: 58960 - DNA, 13 bp, Artificial Sequence
  Oligonucleotide for detection of SNP TSC0015799
raaaaaccaacaa

SEQ ID NO: 58961 - DNA, 13 bp, Artificial Sequence
  Oligonucleotide for detection of SNP TSC0015799
ttgttgattttty

SEQ ID NO: 58962 - DNA, 13 bp, Artificial Sequence
  Oligonucleotide for detection of SNP TSC0015799
raaaaatcaacaa

SEQ ID NO: 58963 - DNA, 13 bp, Artificial Sequence
  Oligonucleotide for detection of SNP TSC0015801
ttattaggagttt

SEQ ID NO: 58964 - DNA, 13 bp, Artificial Sequence
  Oligonucleotide for detection of SNP TSC0015801
aaactcctaataa

SEQ ID NO: 58965 - DNA, 13 bp, Artificial Sequence
  Oligonucleotide for detection of SNP TSC0015801
ttattaagagttt

SEQ ID NO: 58966 - DNA, 13 bp, Artificial Sequence
  Oligonucleotide for detection of SNP TSC0015801
aaactcttaataa

SEQ ID NO: 58967 - DNA, 13 bp, Artificial Sequence
  Oligonucleotide for detection of SNP TSC0015802
tttttttaattat

SEQ ID NO: 58968 - DNA, 13 bp, Artificial Sequence
  Oligonucleotide for detection of SNP TSC0015802
ataattaaaaaaa

SEQ ID NO: 58969 - DNA, 13 bp, Artificial Sequence
  Oligonucleotide for detection of SNP TSC0015802
ttttttgaattat

SEQ ID NO: 58970 - DNA, 13 bp, Artificial Sequence
  Oligonucleotide for detection of SNP TSC0015802
ataattcaaaaaa

SEQ ID NO: 58971 - DNA, 13 bp, Artificial Sequence
  Oligonucleotide for detection of SNP TSC0015802
tttttcgaattat

SEQ ID NO: 58972 - DNA, 13 bp, Artificial Sequence
  Oligonucleotide for detection of SNP TSC0015802
ataattcgaaaaa

SEQ ID NO: 58973 - DNA, 13 bp, Artificial Sequence
  Oligonucleotide for detection of SNP TSC0015802
atgattggggggg

SEQ ID NO: 58974 - DNA, 13 bp, Artificial Sequence
  Oligonucleotide for detection of SNP TSC0015802
cccccccaatcat

SEQ ID NO: 58975 - DNA, 13 bp, Artificial Sequence
  Oligonucleotide for detection of SNP TSC0015802
atgatttgggggg

SEQ ID NO: 58976 - DNA, 13 bp, Artificial Sequence
  Oligonucleotide for detection of SNP TSC0015802
ccccccaaatcat

SEQ ID NO: 58977 - DNA, 13 bp, Artificial Sequence
  Oligonucleotide for detection of SNP TSC0015802
atgattcgggggg

SEQ ID NO: 58978 - DNA, 13 bp, Artificial Sequence
  Oligonucleotide for detection of SNP TSC0015802
ccccccgaatcat

SEQ ID NO: 58979 - DNA, 13 bp, Artificial Sequence
  Oligonucleotide for detection of SNP TSC0015803
gggaaagaaaaty

SEQ ID NO: 58980 - DNA, 13 bp, Artificial Sequence
  Oligonucleotide for detection of SNP TSC0015803
rattttctttccc

SEQ ID NO: 58981 - DNA, 13 bp, Artificial Sequence
  Oligonucleotide for detection of SNP TSC0015803
gggaaaaaaaaty

SEQ ID NO: 58982 - DNA, 13 bp, Artificial Sequence
  Oligonucleotide for detection of SNP TSC0015803
rattttttttccc

SEQ ID NO: 58983 - DNA, 13 bp, Artificial Sequence
  Oligonucleotide for detection of SNP TSC0015804
tagtgagtttata

SEQ ID NO: 58984 - DNA, 13 bp, Artificial Sequence
  Oligonucleotide for detection of SNP TSC0015804
tataaactcacta

SEQ ID NO: 58985 - DNA, 13 bp, Artificial Sequence
  Oligonucleotide for detection of SNP TSC0015804
tagtgattttata

SEQ ID NO: 58986 - DNA, 13 bp, Artificial Sequence
  Oligonucleotide for detection of SNP TSC0015804
tataaaatcacta

SEQ ID NO: 58987 - DNA, 13 bp, Artificial Sequence
  Oligonucleotide for detection of SNP TSC0015804
tgtggatttattg

SEQ ID NO: 58988 - DNA, 13 bp, Artificial Sequence
  Oligonucleotide for detection of SNP TSC0015804
caataaatccaca

SEQ ID NO: 58989 - DNA, 13 bp, Artificial Sequence
  Oligonucleotide for detection of SNP TSC0015804
tgtggaattattg

SEQ ID NO: 58990 - DNA, 13 bp, Artificial Sequence
  Oligonucleotide for detection of SNP TSC0015804
caataattccaca

SEQ ID NO: 58991 - DNA, 13 bp, Artificial Sequence
  Oligonucleotide for detection of SNP TSC0015806
ttaagttgtagag

SEQ ID NO: 58992 - DNA, 13 bp, Artificial Sequence
  Oligonucleotide for detection of SNP TSC0015806
ctctacaacttaa

SEQ ID NO: 58993 - DNA, 13 bp, Artificial Sequence
  Oligonucleotide for detection of SNP TSC0015806
ttaagtcgtagag

SEQ ID NO: 58994 - DNA, 13 bp, Artificial Sequence
  Oligonucleotide for detection of SNP TSC0015806
ctctacgacttaa

SEQ ID NO: 58995 - DNA, 13 bp, Artificial Sequence
  Oligonucleotide for detection of SNP TSC0015806
ttttgtggtttag

SEQ ID NO: 58996 - DNA, 13 bp, Artificial Sequence
  Oligonucleotide for detection of SNP TSC0015806
ctaaaccacaaaa

SEQ ID NO: 58997 - DNA, 13 bp, Artificial Sequence
  Oligonucleotide for detection of SNP TSC0015806
ttttgtagtttag

SEQ ID NO: 58998 - DNA, 13 bp, Artificial Sequence
  Oligonucleotide for detection of SNP TSC0015806
ctaaactacaaaa

SEQ ID NO: 58999 - DNA, 13 bp, Artificial Sequence
  Oligonucleotide for detection of SNP TSC0015806
ttttgcggtttag

SEQ ID NO: 59000 - DNA, 13 bp, Artificial Sequence
  Oligonucleotide for detection of SNP TSC0015806
ctaaaccgcaaaa

SEQ ID NO: 59001 - DNA, 13 bp, Artificial Sequence
  Oligonucleotide for detection of SNP TSC0015809
aaaattagttagg

SEQ ID NO: 59002 - DNA, 13 bp, Artificial Sequence
  Oligonucleotide for detection of SNP TSC0015809
cctaactaatttt

SEQ ID NO: 59003 - DNA, 13 bp, Artificial Sequence
  Oligonucleotide for detection of SNP TSC0015809
aaaattggttagg

SEQ ID NO: 59004 - DNA, 13 bp, Artificial Sequence
  Oligonucleotide for detection of SNP TSC0015809
cctaaccaatttt

SEQ ID NO: 59005 - DNA, 13 bp, Artificial Sequence
  Oligonucleotide for detection of SNP TSC0015810
tgaatttgggagg

SEQ ID NO: 59006 - DNA, 13 bp, Artificial Sequence
  Oligonucleotide for detection of SNP TSC0015810
cctcccaaattca

SEQ ID NO: 59007 - DNA, 13 bp, Artificial Sequence
  Oligonucleotide for detection of SNP TSC0015810
tgaattcgggagg

SEQ ID NO: 59008 - DNA, 13 bp, Artificial Sequence
  Oligonucleotide for detection of SNP TSC0015810
cctcccgaattca

SEQ ID NO: 59009 - DNA, 13 bp, Artificial Sequence
  Oligonucleotide for detection of SNP TSC0015810
tttttcgggttta

SEQ ID NO: 59010 - DNA, 13 bp, Artificial Sequence
  Oligonucleotide for detection of SNP TSC0015810
taaacccgaaaaa

SEQ ID NO: 59011 - DNA, 13 bp, Artificial Sequence
  Oligonucleotide for detection of SNP TSC0015812
tgtttaattatay

SEQ ID NO: 59012 - DNA, 13 bp, Artificial Sequence
  Oligonucleotide for detection of SNP TSC0015812
rtataattaaaca

SEQ ID NO: 59013 - DNA, 13 bp, Artificial Sequence
  Oligonucleotide for detection of SNP TSC0015812
tgtttagttatay

SEQ ID NO: 59014 - DNA, 13 bp, Artificial Sequence
  Oligonucleotide for detection of SNP TSC0015812
rtataactaaaca

SEQ ID NO: 59015 - DNA, 13 bp, Artificial Sequence
  Oligonucleotide for detection of SNP TSC0015817
tatataaatatay

SEQ ID NO: 59016 - DNA, 13 bp, Artificial Sequence
  Oligonucleotide for detection of SNP TSC0015817
rtatatttatata

SEQ ID NO: 59017 - DNA, 13 bp, Artificial Sequence
  Oligonucleotide for detection of SNP TSC0015817
tatatatatatay

SEQ ID NO: 59018 - DNA, 13 bp, Artificial Sequence
  Oligonucleotide for detection of SNP TSC0015817
rtatatatatata

SEQ ID NO: 59019 - DNA, 13 bp, Artificial Sequence
  Oligonucleotide for detection of SNP TSC0015817
gtgtgtttgtgtg

SEQ ID NO: 59020 - DNA, 13 bp, Artificial Sequence
  Oligonucleotide for detection of SNP TSC0015817
cacacaaacacac

SEQ ID NO: 59021 - DNA, 13 bp, Artificial Sequence
  Oligonucleotide for detection of SNP TSC0015818
taataattttagt

SEQ ID NO: 59022 - DNA, 13 bp, Artificial Sequence
  Oligonucleotide for detection of SNP TSC0015818
actaaaattatta

SEQ ID NO: 59023 - DNA, 13 bp, Artificial Sequence
  Oligonucleotide for detection of SNP TSC0015818
taataagtttagt

SEQ ID NO: 59024 - DNA, 13 bp, Artificial Sequence
  Oligonucleotide for detection of SNP TSC0015818
actaaacttatta

SEQ ID NO: 59025 - DNA, 13 bp, Artificial Sequence
  Oligonucleotide for detection of SNP TSC0015818
attaaggttattg

SEQ ID NO: 59026 - DNA, 13 bp, Artificial Sequence
  Oligonucleotide for detection of SNP TSC0015818
caataaccttaat

SEQ ID NO: 59027 - DNA, 13 bp, Artificial Sequence
  Oligonucleotide for detection of SNP TSC0015818
attaagtttattg

SEQ ID NO: 59028 - DNA, 13 bp, Artificial Sequence
  Oligonucleotide for detection of SNP TSC0015818
caataaacttaat

SEQ ID NO: 59029 - DNA, 13 bp, Artificial Sequence
  Oligonucleotide for detection of SNP TSC0015823
tagtgaggttagt

SEQ ID NO: 59030 - DNA, 13 bp, Artificial Sequence
  Oligonucleotide for detection of SNP TSC0015823
actaacctcacta

SEQ ID NO: 59031 - DNA, 13 bp, Artificial Sequence
  Oligonucleotide for detection of SNP TSC0015823
tagtgaagttagt

SEQ ID NO: 59032 - DNA, 13 bp, Artificial Sequence
  Oligonucleotide for detection of SNP TSC0015823
actaacttcacta

SEQ ID NO: 59033 - DNA, 13 bp, Artificial Sequence
  Oligonucleotide for detection of SNP TSC0015824
ttttatgtgtttt

SEQ ID NO: 59034 - DNA, 13 bp, Artificial Sequence
  Oligonucleotide for detection of SNP TSC0015824
aaaacacataaaa

SEQ ID NO: 59035 - DNA, 13 bp, Artificial Sequence
  Oligonucleotide for detection of SNP TSC0015824
ttttacgtgtttt

SEQ ID NO: 59036 - DNA, 13 bp, Artificial Sequence
  Oligonucleotide for detection of SNP TSC0015824
aaaacacgtaaaa

SEQ ID NO: 59037 - DNA, 13 bp, Artificial Sequence
  Oligonucleotide for detection of SNP TSC0015824
agagtaggtgaga

SEQ ID NO: 59038 - DNA, 13 bp, Artificial Sequence
  Oligonucleotide for detection of SNP TSC0015824
tctcacctactct

SEQ ID NO: 59039 - DNA, 13 bp, Artificial Sequence
  Oligonucleotide for detection of SNP TSC0015824
agagtatgtgaga

SEQ ID NO: 59040 - DNA, 13 bp, Artificial Sequence
  Oligonucleotide for detection of SNP TSC0015824
tctcacatactct

SEQ ID NO: 59041 - DNA, 13 bp, Artificial Sequence
  Oligonucleotide for detection of SNP TSC0015824
agagtacgtgaga

SEQ ID NO: 59042 - DNA, 13 bp, Artificial Sequence
  Oligonucleotide for detection of SNP TSC0015824
tctcacgtactct

SEQ ID NO: 59043 - DNA, 13 bp, Artificial Sequence
  Oligonucleotide for detection of SNP TSC0015825
tttttagtgtatg

SEQ ID NO: 59044 - DNA, 13 bp, Artificial Sequence
  Oligonucleotide for detection of SNP TSC0015825
catacactaaaaa

SEQ ID NO: 59045 - DNA, 13 bp, Artificial Sequence
  Oligonucleotide for detection of SNP TSC0015825
tttttaatgtatg

SEQ ID NO: 59046 - DNA, 13 bp, Artificial Sequence
  Oligonucleotide for detection of SNP TSC0015825
catacattaaaaa

SEQ ID NO: 59047 - DNA, 13 bp, Artificial Sequence
  Oligonucleotide for detection of SNP TSC0015826
atttttgttttaa

SEQ ID NO: 59048 - DNA, 13 bp, Artificial Sequence
  Oligonucleotide for detection of SNP TSC0015826
ttaaaacaaaaat

SEQ ID NO: 59049 - DNA, 13 bp, Artificial Sequence
  Oligonucleotide for detection of SNP TSC0015826
atttttattttaa

SEQ ID NO: 59050 - DNA, 13 bp, Artificial Sequence
  Oligonucleotide for detection of SNP TSC0015826
ttaaaataaaaat

SEQ ID NO: 59051 - DNA, 13 bp, Artificial Sequence
  Oligonucleotide for detection of SNP TSC0015827
gaagtttttaggg

SEQ ID NO: 59052 - DNA, 13 bp, Artificial Sequence
  Oligonucleotide for detection of SNP TSC0015827
ccctaaaaacttc

SEQ ID NO: 59053 - DNA, 13 bp, Artificial Sequence
  Oligonucleotide for detection of SNP TSC0015827
gaagttgttaggg

SEQ ID NO: 59054 - DNA, 13 bp, Artificial Sequence
  Oligonucleotide for detection of SNP TSC0015827
ccctaacaacttc

SEQ ID NO: 59055 - DNA, 13 bp, Artificial Sequence
  Oligonucleotide for detection of SNP TSC0015827
ttttgagaattty

SEQ ID NO: 59056 - DNA, 13 bp, Artificial Sequence
  Oligonucleotide for detection of SNP TSC0015827
raaattctcaaaa

SEQ ID NO: 59057 - DNA, 13 bp, Artificial Sequence
  Oligonucleotide for detection of SNP TSC0015828
tgtttttttcgty

SEQ ID NO: 59058 - DNA, 13 bp, Artificial Sequence
  Oligonucleotide for detection of SNP TSC0015828
racgaaaaaaaca

SEQ ID NO: 59059 - DNA, 13 bp, Artificial Sequence
  Oligonucleotide for detection of SNP TSC0015828
tgttttgttcgty

SEQ ID NO: 59060 - DNA, 13 bp, Artificial Sequence
  Oligonucleotide for detection of SNP TSC0015828
racgaacaaaaca

SEQ ID NO: 59061 - DNA, 13 bp, Artificial Sequence
  Oligonucleotide for detection of SNP TSC0015828
gatggagaaggta

SEQ ID NO: 59062 - DNA, 13 bp, Artificial Sequence
  Oligonucleotide for detection of SNP TSC0015828
taccttctccatc

SEQ ID NO: 59063 - DNA, 13 bp, Artificial Sequence
  Oligonucleotide for detection of SNP TSC0015828
gatggataaggta

SEQ ID NO: 59064 - DNA, 13 bp, Artificial Sequence
  Oligonucleotide for detection of SNP TSC0015828
taccttatccatc

SEQ ID NO: 59065 - DNA, 13 bp, Artificial Sequence
  Oligonucleotide for detection of SNP TSC0015828
gacggagaaggta

SEQ ID NO: 59066 - DNA, 13 bp, Artificial Sequence
  Oligonucleotide for detection of SNP TSC0015828
taccttctccgtc

SEQ ID NO: 59067 - DNA, 13 bp, Artificial Sequence
  Oligonucleotide for detection of SNP TSC0015828
gacggataaggta

SEQ ID NO: 59068 - DNA, 13 bp, Artificial Sequence
  Oligonucleotide for detection of SNP TSC0015828
taccttatccgtc

SEQ ID NO: 59069 - DNA, 13 bp, Artificial Sequence
  Oligonucleotide for detection of SNP TSC0015829
gttttagaagtaa

SEQ ID NO: 59070 - DNA, 13 bp, Artificial Sequence
  Oligonucleotide for detection of SNP TSC0015829
ttacttctaaaac

SEQ ID NO: 59071 - DNA, 13 bp, Artificial Sequence
  Oligonucleotide for detection of SNP TSC0015829
gttttaaaagtaa

SEQ ID NO: 59072 - DNA, 13 bp, Artificial Sequence
  Oligonucleotide for detection of SNP TSC0015829
ttacttttaaaac

SEQ ID NO: 59073 - DNA, 13 bp, Artificial Sequence
  Oligonucleotide for detection of SNP TSC0015832
agtttaaaaaggy

SEQ ID NO: 59074 - DNA, 13 bp, Artificial Sequence
  Oligonucleotide for detection of SNP TSC0015832
rcctttttaaact

SEQ ID NO: 59075 - DNA, 13 bp, Artificial Sequence
  Oligonucleotide for detection of SNP TSC0015832
agtttagaaaggy

SEQ ID NO: 59076 - DNA, 13 bp, Artificial Sequence
  Oligonucleotide for detection of SNP TSC0015832
rcctttctaaact

SEQ ID NO: 59077 - DNA, 13 bp, Artificial Sequence
  Oligonucleotide for detection of SNP TSC0015840
tttatatgttttg

SEQ ID NO: 59078 - DNA, 13 bp, Artificial Sequence
  Oligonucleotide for detection of SNP TSC0015840
caaaacatataaa

SEQ ID NO: 59079 - DNA, 13 bp, Artificial Sequence
  Oligonucleotide for detection of SNP TSC0015840
tttatacgttttg

SEQ ID NO: 59080 - DNA, 13 bp, Artificial Sequence
  Oligonucleotide for detection of SNP TSC0015840
caaaacgtataaa

SEQ ID NO: 59081 - DNA, 13 bp, Artificial Sequence
  Oligonucleotide for detection of SNP TSC0015840
taaggtgtatgag

SEQ ID NO: 59082 - DNA, 13 bp, Artificial Sequence
  Oligonucleotide for detection of SNP TSC0015840
ctcatacacctta

SEQ ID NO: 59083 - DNA, 13 bp, Artificial Sequence
  Oligonucleotide for detection of SNP TSC0015840
taaggtatatgag

SEQ ID NO: 59084 - DNA, 13 bp, Artificial Sequence
  Oligonucleotide for detection of SNP TSC0015840
ctcatatacctta

SEQ ID NO: 59085 - DNA, 13 bp, Artificial Sequence
  Oligonucleotide for detection of SNP TSC0015840
taaggcgtatgag

SEQ ID NO: 59086 - DNA, 13 bp, Artificial Sequence
  Oligonucleotide for detection of SNP TSC0015840
ctcatacgcctta

SEQ ID NO: 59087 - DNA, 13 bp, Artificial Sequence
  Oligonucleotide for detection of SNP TSC0015841
ttaaggatgagaa

SEQ ID NO: 59088 - DNA, 13 bp, Artificial Sequence
  Oligonucleotide for detection of SNP TSC0015841
ttctcatccttaa

SEQ ID NO: 59089 - DNA, 13 bp, Artificial Sequence
  Oligonucleotide for detection of SNP TSC0015841
ttaaggttgagaa

SEQ ID NO: 59090 - DNA, 13 bp, Artificial Sequence
  Oligonucleotide for detection of SNP TSC0015841
ttctcaaccttaa

SEQ ID NO: 59091 - DNA, 13 bp, Artificial Sequence
  Oligonucleotide for detection of SNP TSC0015841
tttttatttttgg

SEQ ID NO: 59092 - DNA, 13 bp, Artificial Sequence
  Oligonucleotide for detection of SNP TSC0015841
ccaaaaataaaaa

SEQ ID NO: 59093 - DNA, 13 bp, Artificial Sequence
  Oligonucleotide for detection of SNP TSC0015844
aaattggaaaagt

SEQ ID NO: 59094 - DNA, 13 bp, Artificial Sequence
  Oligonucleotide for detection of SNP TSC0015844
acttttccaattt

SEQ ID NO: 59095 - DNA, 13 bp, Artificial Sequence
  Oligonucleotide for detection of SNP TSC0015844
aaattgtaaaagt

SEQ ID NO: 59096 - DNA, 13 bp, Artificial Sequence
  Oligonucleotide for detection of SNP TSC0015844
acttttacaattt

SEQ ID NO: 59097 - DNA, 13 bp, Artificial Sequence
  Oligonucleotide for detection of SNP TSC0015844
atttttttagttt

SEQ ID NO: 59098 - DNA, 13 bp, Artificial Sequence
  Oligonucleotide for detection of SNP TSC0015844
aaactaaaaaaat

SEQ ID NO: 59099 - DNA, 13 bp, Artificial Sequence
  Oligonucleotide for detection of SNP TSC0015844
atttttatagttt

SEQ ID NO: 59100 - DNA, 13 bp, Artificial Sequence
  Oligonucleotide for detection of SNP TSC0015844
aaactataaaaat

SEQ ID NO: 59101 - DNA, 13 bp, Artificial Sequence
  Oligonucleotide for detection of SNP TSC0015845
attaaggggtttt

SEQ ID NO: 59102 - DNA, 13 bp, Artificial Sequence
  Oligonucleotide for detection of SNP TSC0015845
aaaaccccttaat

SEQ ID NO: 59103 - DNA, 13 bp, Artificial Sequence
  Oligonucleotide for detection of SNP TSC0015845
attaagtggtttt

SEQ ID NO: 59104 - DNA, 13 bp, Artificial Sequence
  Oligonucleotide for detection of SNP TSC0015845
aaaaccacttaat

SEQ ID NO: 59105 - DNA, 13 bp, Artificial Sequence
  Oligonucleotide for detection of SNP TSC0015845
agaattttttgat

SEQ ID NO: 59106 - DNA, 13 bp, Artificial Sequence
  Oligonucleotide for detection of SNP TSC0015845
atcaaaaaattct

SEQ ID NO: 59107 - DNA, 13 bp, Artificial Sequence
  Oligonucleotide for detection of SNP TSC0015845
agaattatttgat

SEQ ID NO: 59108 - DNA, 13 bp, Artificial Sequence
  Oligonucleotide for detection of SNP TSC0015845
atcaaataattct

SEQ ID NO: 59109 - DNA, 13 bp, Artificial Sequence
  Oligonucleotide for detection of SNP TSC0015849
ttatgattgaatt

SEQ ID NO: 59110 - DNA, 13 bp, Artificial Sequence
  Oligonucleotide for detection of SNP TSC0015849
aattcaatcataa

SEQ ID NO: 59111 - DNA, 13 bp, Artificial Sequence
  Oligonucleotide for detection of SNP TSC0015849
ttatgagtgaatt

SEQ ID NO: 59112 - DNA, 13 bp, Artificial Sequence
  Oligonucleotide for detection of SNP TSC0015849
aattcactcataa

SEQ ID NO: 59113 - DNA, 13 bp, Artificial Sequence
  Oligonucleotide for detection of SNP TSC0015849
agtttagttatga

SEQ ID NO: 59114 - DNA, 13 bp, Artificial Sequence
  Oligonucleotide for detection of SNP TSC0015849
tcataactaaact

SEQ ID NO: 59115 - DNA, 13 bp, Artificial Sequence
  Oligonucleotide for detection of SNP TSC0015849
agtttatttatga

SEQ ID NO: 59116 - DNA, 13 bp, Artificial Sequence
  Oligonucleotide for detection of SNP TSC0015849
tcataaataaact

SEQ ID NO: 59117 - DNA, 13 bp, Artificial Sequence
  Oligonucleotide for detection of SNP TSC0015852
tatgaaaaattty

SEQ ID NO: 59118 - DNA, 13 bp, Artificial Sequence
  Oligonucleotide for detection of SNP TSC0015852
raaatttttcata

SEQ ID NO: 59119 - DNA, 13 bp, Artificial Sequence
  Oligonucleotide for detection of SNP TSC0015852
tatgaataattty

SEQ ID NO: 59120 - DNA, 13 bp, Artificial Sequence
  Oligonucleotide for detection of SNP TSC0015852
raaattattcata

SEQ ID NO: 59121 - DNA, 13 bp, Artificial Sequence
  Oligonucleotide for detection of SNP TSC0015852
tacgaaaaattty

SEQ ID NO: 59122 - DNA, 13 bp, Artificial Sequence
  Oligonucleotide for detection of SNP TSC0015852
raaatttttcgta

SEQ ID NO: 59123 - DNA, 13 bp, Artificial Sequence
  Oligonucleotide for detection of SNP TSC0015852
tacgaataattty

SEQ ID NO: 59124 - DNA, 13 bp, Artificial Sequence
  Oligonucleotide for detection of SNP TSC0015852
raaattattcgta

SEQ ID NO: 59125 - DNA, 13 bp, Artificial Sequence
  Oligonucleotide for detection of SNP TSC0015852
gaagttttttgtg

SEQ ID NO: 59126 - DNA, 13 bp, Artificial Sequence
  Oligonucleotide for detection of SNP TSC0015852
cacaaaaaacttc

SEQ ID NO: 59127 - DNA, 13 bp, Artificial Sequence
  Oligonucleotide for detection of SNP TSC0015852
gaagttgtttgtg

SEQ ID NO: 59128 - DNA, 13 bp, Artificial Sequence
  Oligonucleotide for detection of SNP TSC0015852
cacaaacaacttc

SEQ ID NO: 59129 - DNA, 13 bp, Artificial Sequence
  Oligonucleotide for detection of SNP TSC0015852
gaagtttttcgtg

SEQ ID NO: 59130 - DNA, 13 bp, Artificial Sequence
  Oligonucleotide for detection of SNP TSC0015852
cacgaaaaacttc

SEQ ID NO: 59131 - DNA, 13 bp, Artificial Sequence
  Oligonucleotide for detection of SNP TSC0015852
gaagttgttcgtg

SEQ ID NO: 59132 - DNA, 13 bp, Artificial Sequence
  Oligonucleotide for detection of SNP TSC0015852
cacgaacaacttc

SEQ ID NO: 59133 - DNA, 13 bp, Artificial Sequence
  Oligonucleotide for detection of SNP TSC0015853
aagtaagaagtgt

SEQ ID NO: 59134 - DNA, 13 bp, Artificial Sequence
  Oligonucleotide for detection of SNP TSC0015853
acacttcttactt

SEQ ID NO: 59135 - DNA, 13 bp, Artificial Sequence
  Oligonucleotide for detection of SNP TSC0015853
aagtaaaaagtgt

SEQ ID NO: 59136 - DNA, 13 bp, Artificial Sequence
  Oligonucleotide for detection of SNP TSC0015853
acactttttactt

SEQ ID NO: 59137 - DNA, 13 bp, Artificial Sequence
  Oligonucleotide for detection of SNP TSC0015854
gaagtgaattttt

SEQ ID NO: 59138 - DNA, 13 bp, Artificial Sequence
  Oligonucleotide for detection of SNP TSC0015854
aaaaattcacttc

SEQ ID NO: 59139 - DNA, 13 bp, Artificial Sequence
  Oligonucleotide for detection of SNP TSC0015854
gaagtggattttt

SEQ ID NO: 59140 - DNA, 13 bp, Artificial Sequence
  Oligonucleotide for detection of SNP TSC0015854
aaaaatccacttc

SEQ ID NO: 59141 - DNA, 13 bp, Artificial Sequence
  Oligonucleotide for detection of SNP TSC0015855
aaaataaagaggy

SEQ ID NO: 59142 - DNA, 13 bp, Artificial Sequence
  Oligonucleotide for detection of SNP TSC0015855
rcctctttatttt

SEQ ID NO: 59143 - DNA, 13 bp, Artificial Sequence
  Oligonucleotide for detection of SNP TSC0015855
aaaatagagaggy

SEQ ID NO: 59144 - DNA, 13 bp, Artificial Sequence
  Oligonucleotide for detection of SNP TSC0015855
rcctctctatttt

SEQ ID NO: 59145 - DNA, 13 bp, Artificial Sequence
  Oligonucleotide for detection of SNP TSC0015856
gtttaggaatagg

SEQ ID NO: 59146 - DNA, 13 bp, Artificial Sequence
  Oligonucleotide for detection of SNP TSC0015856
cctattcctaaac

SEQ ID NO: 59147 - DNA, 13 bp, Artificial Sequence
  Oligonucleotide for detection of SNP TSC0015856
gtttagaaatagg

SEQ ID NO: 59148 - DNA, 13 bp, Artificial Sequence
  Oligonucleotide for detection of SNP TSC0015856
cctatttctaaac

SEQ ID NO: 59149 - DNA, 13 bp, Artificial Sequence
  Oligonucleotide for detection of SNP TSC0015857
agtttaggaatag

SEQ ID NO: 59150 - DNA, 13 bp, Artificial Sequence
  Oligonucleotide for detection of SNP TSC0015857
ctattcctaaact

SEQ ID NO: 59151 - DNA, 13 bp, Artificial Sequence
  Oligonucleotide for detection of SNP TSC0015857
agtttaagaatag

SEQ ID NO: 59152 - DNA, 13 bp, Artificial Sequence
  Oligonucleotide for detection of SNP TSC0015857
ctattcttaaact

SEQ ID NO: 59153 - DNA, 13 bp, Artificial Sequence
  Oligonucleotide for detection of SNP TSC0015861
ttgatggaaatgt

SEQ ID NO: 59154 - DNA, 13 bp, Artificial Sequence
  Oligonucleotide for detection of SNP TSC0015861
acatttccatcaa

SEQ ID NO: 59155 - DNA, 13 bp, Artificial Sequence
  Oligonucleotide for detection of SNP TSC0015861
ttgatgaaaatgt

SEQ ID NO: 59156 - DNA, 13 bp, Artificial Sequence
  Oligonucleotide for detection of SNP TSC0015861
acattttcatcaa

SEQ ID NO: 59157 - DNA, 13 bp, Artificial Sequence
  Oligonucleotide for detection of SNP TSC0015862
attgtagtattay

SEQ ID NO: 59158 - DNA, 13 bp, Artificial Sequence
  Oligonucleotide for detection of SNP TSC0015862
rtaatactacaat

SEQ ID NO: 59159 - DNA, 13 bp, Artificial Sequence
  Oligonucleotide for detection of SNP TSC0015862
attgtaatattay

SEQ ID NO: 59160 - DNA, 13 bp, Artificial Sequence
  Oligonucleotide for detection of SNP TSC0015862
rtaatattacaat

SEQ ID NO: 59161 - DNA, 13 bp, Artificial Sequence
  Oligonucleotide for detection of SNP TSC0015863
gtatatggtttgg

SEQ ID NO: 59162 - DNA, 13 bp, Artificial Sequence
  Oligonucleotide for detection of SNP TSC0015863
ccaaaccatatac

SEQ ID NO: 59163 - DNA, 13 bp, Artificial Sequence
  Oligonucleotide for detection of SNP TSC0015863
gtatatagttcgg

SEQ ID NO: 59164 - DNA, 13 bp, Artificial Sequence
  Oligonucleotide for detection of SNP TSC0015863
ccgaactatatac

SEQ ID NO: 59165 - DNA, 13 bp, Artificial Sequence
  Oligonucleotide for detection of SNP TSC0015863
gtatacggtttgg

SEQ ID NO: 59166 - DNA, 13 bp, Artificial Sequence
  Oligonucleotide for detection of SNP TSC0015863
ccaaaccgtatac

SEQ ID NO: 59167 - DNA, 13 bp, Artificial Sequence
  Oligonucleotide for detection of SNP TSC0015863
gtatatggttcgg

SEQ ID NO: 59168 - DNA, 13 bp, Artificial Sequence
  Oligonucleotide for detection of SNP TSC0015863
ccgaaccatatac

SEQ ID NO: 59169 - DNA, 13 bp, Artificial Sequence
  Oligonucleotide for detection of SNP TSC0015863
gtatacggttcgg

SEQ ID NO: 59170 - DNA, 13 bp, Artificial Sequence
  Oligonucleotide for detection of SNP TSC0015863
ccgaaccgtatac

SEQ ID NO: 59171 - DNA, 13 bp, Artificial Sequence
  Oligonucleotide for detection of SNP TSC0015863
ttgggttgtgtgy

SEQ ID NO: 59172 - DNA, 13 bp, Artificial Sequence
  Oligonucleotide for detection of SNP TSC0015863
rcacacaacccaa

SEQ ID NO: 59173 - DNA, 13 bp, Artificial Sequence
  Oligonucleotide for detection of SNP TSC0015863
tcgggttgtgtgy

SEQ ID NO: 59174 - DNA, 13 bp, Artificial Sequence
  Oligonucleotide for detection of SNP TSC0015863
rcacacaacccga

SEQ ID NO: 59175 - DNA, 13 bp, Artificial Sequence
  Oligonucleotide for detection of SNP TSC0015863
ttgggtcgtgtgy

SEQ ID NO: 59176 - DNA, 13 bp, Artificial Sequence
  Oligonucleotide for detection of SNP TSC0015863
rcacacgacccaa

SEQ ID NO: 59177 - DNA, 13 bp, Artificial Sequence
  Oligonucleotide for detection of SNP TSC0015863
tcgggtcgtgtgy

SEQ ID NO: 59178 - DNA, 13 bp, Artificial Sequence
  Oligonucleotide for detection of SNP TSC0015863
rcacacgacccga

SEQ ID NO: 59179 - DNA, 13 bp, Artificial Sequence
  Oligonucleotide for detection of SNP TSC0015864
tttaaaattttty

SEQ ID NO: 59180 - DNA, 13 bp, Artificial Sequence
  Oligonucleotide for detection of SNP TSC0015864
raaaaattttaaa

SEQ ID NO: 59181 - DNA, 13 bp, Artificial Sequence
  Oligonucleotide for detection of SNP TSC0015864
tttaaagttttty

SEQ ID NO: 59182 - DNA, 13 bp, Artificial Sequence
  Oligonucleotide for detection of SNP TSC0015864
raaaaactttaaa

SEQ ID NO: 59183 - DNA, 13 bp, Artificial Sequence
  Oligonucleotide for detection of SNP TSC0015865
tggggtaagggat

SEQ ID NO: 59184 - DNA, 13 bp, Artificial Sequence
  Oligonucleotide for detection of SNP TSC0015865
atcccttacccca

SEQ ID NO: 59185 - DNA, 13 bp, Artificial Sequence
  Oligonucleotide for detection of SNP TSC0015865
tggggtgagggat

SEQ ID NO: 59186 - DNA, 13 bp, Artificial Sequence
  Oligonucleotide for detection of SNP TSC0015865
atccctcacccca

SEQ ID NO: 59187 - DNA, 13 bp, Artificial Sequence
  Oligonucleotide for detection of SNP TSC0015865
cggggtaagggat

SEQ ID NO: 59188 - DNA, 13 bp, Artificial Sequence
  Oligonucleotide for detection of SNP TSC0015865
atcccttaccccg

SEQ ID NO: 59189 - DNA, 13 bp, Artificial Sequence
  Oligonucleotide for detection of SNP TSC0015865
cggggtgagggat

SEQ ID NO: 59190 - DNA, 13 bp, Artificial Sequence
  Oligonucleotide for detection of SNP TSC0015865
atccctcaccccg

SEQ ID NO: 59191 - DNA, 13 bp, Artificial Sequence
  Oligonucleotide for detection of SNP TSC0015865
tggggcgagggat

SEQ ID NO: 59192 - DNA, 13 bp, Artificial Sequence
  Oligonucleotide for detection of SNP TSC0015865
atccctcgcccca

SEQ ID NO: 59193 - DNA, 13 bp, Artificial Sequence
  Oligonucleotide for detection of SNP TSC0015865
cggggcgagggat

SEQ ID NO: 59194 - DNA, 13 bp, Artificial Sequence
  Oligonucleotide for detection of SNP TSC0015865
atccctcgccccg

SEQ ID NO: 59195 - DNA, 13 bp, Artificial Sequence
  Oligonucleotide for detection of SNP TSC0015865
attttttgtttcg

SEQ ID NO: 59196 - DNA, 13 bp, Artificial Sequence
  Oligonucleotide for detection of SNP TSC0015865
cgaaacaaaaaat

SEQ ID NO: 59197 - DNA, 13 bp, Artificial Sequence
  Oligonucleotide for detection of SNP TSC0015865
atttttcgtttcg

SEQ ID NO: 59198 - DNA, 13 bp, Artificial Sequence
  Oligonucleotide for detection of SNP TSC0015865
cgaaacgaaaaat

SEQ ID NO: 59199 - DNA, 13 bp, Artificial Sequence
  Oligonucleotide for detection of SNP TSC0015866
aggagagatattt

SEQ ID NO: 59200 - DNA, 13 bp, Artificial Sequence
  Oligonucleotide for detection of SNP TSC0015866
aaatatctctcct

SEQ ID NO: 59201 - DNA, 13 bp, Artificial Sequence
  Oligonucleotide for detection of SNP TSC0015866
aggagatatattt

SEQ ID NO: 59202 - DNA, 13 bp, Artificial Sequence
  Oligonucleotide for detection of SNP TSC0015866
aaatatatctcct

SEQ ID NO: 59203 - DNA, 13 bp, Artificial Sequence
  Oligonucleotide for detection of SNP TSC0015866
aggtatttttttt

SEQ ID NO: 59204 - DNA, 13 bp, Artificial Sequence
  Oligonucleotide for detection of SNP TSC0015866
aaaaaaaatacct

SEQ ID NO: 59205 - DNA, 13 bp, Artificial Sequence
  Oligonucleotide for detection of SNP TSC0015866
aggtatatttttt

SEQ ID NO: 59206 - DNA, 13 bp, Artificial Sequence
  Oligonucleotide for detection of SNP TSC0015866
aaaaaatatacct

SEQ ID NO: 59207 - DNA, 13 bp, Artificial Sequence
  Oligonucleotide for detection of SNP TSC0015867
tggaaatgtttag

SEQ ID NO: 59208 - DNA, 13 bp, Artificial Sequence
  Oligonucleotide for detection of SNP TSC0015867
ctaaacatttcca

SEQ ID NO: 59209 - DNA, 13 bp, Artificial Sequence
  Oligonucleotide for detection of SNP TSC0015867
tggaaacgtttag

SEQ ID NO: 59210 - DNA, 13 bp, Artificial Sequence
  Oligonucleotide for detection of SNP TSC0015867
ctaaacgtttcca

SEQ ID NO: 59211 - DNA, 13 bp, Artificial Sequence
  Oligonucleotide for detection of SNP TSC0015867
ttgggtgttttta

SEQ ID NO: 59212 - DNA, 13 bp, Artificial Sequence
  Oligonucleotide for detection of SNP TSC0015867
taaaaacacccaa

SEQ ID NO: 59213 - DNA, 13 bp, Artificial Sequence
  Oligonucleotide for detection of SNP TSC0015867
ttgggtattttta

SEQ ID NO: 59214 - DNA, 13 bp, Artificial Sequence
  Oligonucleotide for detection of SNP TSC0015867
taaaaatacccaa

SEQ ID NO: 59215 - DNA, 13 bp, Artificial Sequence
  Oligonucleotide for detection of SNP TSC0015867
ttgggcgttttta

SEQ ID NO: 59216 - DNA, 13 bp, Artificial Sequence
  Oligonucleotide for detection of SNP TSC0015867
taaaaacgcccaa

SEQ ID NO: 59217 - DNA, 13 bp, Artificial Sequence
  Oligonucleotide for detection of SNP TSC0015868
taagttatttata

SEQ ID NO: 59218 - DNA, 13 bp, Artificial Sequence
  Oligonucleotide for detection of SNP TSC0015868
tataaataactta

SEQ ID NO: 59219 - DNA, 13 bp, Artificial Sequence
  Oligonucleotide for detection of SNP TSC0015868
taagttgtttata

SEQ ID NO: 59220 - DNA, 13 bp, Artificial Sequence
  Oligonucleotide for detection of SNP TSC0015868
tataaacaactta

SEQ ID NO: 59221 - DNA, 13 bp, Artificial Sequence
  Oligonucleotide for detection of SNP TSC0015868
taagtcgtttata

SEQ ID NO: 59222 - DNA, 13 bp, Artificial Sequence
  Oligonucleotide for detection of SNP TSC0015868
tataaacgactta

SEQ ID NO: 59223 - DNA, 13 bp, Artificial Sequence
  Oligonucleotide for detection of SNP TSC0015868
tataaatggtttg

SEQ ID NO: 59224 - DNA, 13 bp, Artificial Sequence
  Oligonucleotide for detection of SNP TSC0015868
caaaccatttata

SEQ ID NO: 59225 - DNA, 13 bp, Artificial Sequence
  Oligonucleotide for detection of SNP TSC0015868
tataaacggtttg

SEQ ID NO: 59226 - DNA, 13 bp, Artificial Sequence
  Oligonucleotide for detection of SNP TSC0015868
caaaccgtttata

SEQ ID NO: 59227 - DNA, 13 bp, Artificial Sequence
  Oligonucleotide for detection of SNP TSC0015869
ttattggttttat

SEQ ID NO: 59228 - DNA, 13 bp, Artificial Sequence
  Oligonucleotide for detection of SNP TSC0015869
ataaaaccaataa

SEQ ID NO: 59229 - DNA, 13 bp, Artificial Sequence
  Oligonucleotide for detection of SNP TSC0015869
ttattgattttat

SEQ ID NO: 59230 - DNA, 13 bp, Artificial Sequence
  Oligonucleotide for detection of SNP TSC0015869
ataaaatcaataa

SEQ ID NO: 59231 - DNA, 13 bp, Artificial Sequence
  Oligonucleotide for detection of SNP TSC0015870
tgttttaattgag

SEQ ID NO: 59232 - DNA, 13 bp, Artificial Sequence
  Oligonucleotide for detection of SNP TSC0015870
ctcaattaaaaca

SEQ ID NO: 59233 - DNA, 13 bp, Artificial Sequence
  Oligonucleotide for detection of SNP TSC0015870
tgttttgattgag

SEQ ID NO: 59234 - DNA, 13 bp, Artificial Sequence
  Oligonucleotide for detection of SNP TSC0015870
ctcaatcaaaaca

SEQ ID NO: 59235 - DNA, 13 bp, Artificial Sequence
  Oligonucleotide for detection of SNP TSC0015870
tgtttcgattgag

SEQ ID NO: 59236 - DNA, 13 bp, Artificial Sequence
  Oligonucleotide for detection of SNP TSC0015870
ctcaatcgaaaca

SEQ ID NO: 59237 - DNA, 13 bp, Artificial Sequence
  Oligonucleotide for detection of SNP TSC0015870
tttagtcggggta

SEQ ID NO: 59238 - DNA, 13 bp, Artificial Sequence
  Oligonucleotide for detection of SNP TSC0015870
taccccgactaaa

SEQ ID NO: 59239 - DNA, 13 bp, Artificial Sequence
  Oligonucleotide for detection of SNP TSC0015873
gttattatttttg

SEQ ID NO: 59240 - DNA, 13 bp, Artificial Sequence
  Oligonucleotide for detection of SNP TSC0015873
caaaaataataac

SEQ ID NO: 59241 - DNA, 13 bp, Artificial Sequence
  Oligonucleotide for detection of SNP TSC0015873
taggggtgatggy

SEQ ID NO: 59242 - DNA, 13 bp, Artificial Sequence
  Oligonucleotide for detection of SNP TSC0015873
rccatcaccccta

SEQ ID NO: 59243 - DNA, 13 bp, Artificial Sequence
  Oligonucleotide for detection of SNP TSC0015873
taggggggatggy

SEQ ID NO: 59244 - DNA, 13 bp, Artificial Sequence
  Oligonucleotide for detection of SNP TSC0015873
rccatccccccta

SEQ ID NO: 59245 - DNA, 13 bp, Artificial Sequence
  Oligonucleotide for detection of SNP TSC0015874
tttttatgggggt

SEQ ID NO: 59246 - DNA, 13 bp, Artificial Sequence
  Oligonucleotide for detection of SNP TSC0015874
acccccataaaaa

SEQ ID NO: 59247 - DNA, 13 bp, Artificial Sequence
  Oligonucleotide for detection of SNP TSC0015874
tttttacgggggt

SEQ ID NO: 59248 - DNA, 13 bp, Artificial Sequence
  Oligonucleotide for detection of SNP TSC0015874
acccccgtaaaaa

SEQ ID NO: 59249 - DNA, 13 bp, Artificial Sequence
  Oligonucleotide for detection of SNP TSC0015875
tgtaggtggagtg

SEQ ID NO: 59250 - DNA, 13 bp, Artificial Sequence
  Oligonucleotide for detection of SNP TSC0015875
cactccacctaca

SEQ ID NO: 59251 - DNA, 13 bp, Artificial Sequence
  Oligonucleotide for detection of SNP TSC0015875
tgtaggcggagtg

SEQ ID NO: 59252 - DNA, 13 bp, Artificial Sequence
  Oligonucleotide for detection of SNP TSC0015875
cactccgcctaca

SEQ ID NO: 59253 - DNA, 13 bp, Artificial Sequence
  Oligonucleotide for detection of SNP TSC0015875
tattttgtttgta

SEQ ID NO: 59254 - DNA, 13 bp, Artificial Sequence
  Oligonucleotide for detection of SNP TSC0015875
tacaaacaaaata

SEQ ID NO: 59255 - DNA, 13 bp, Artificial Sequence
  Oligonucleotide for detection of SNP TSC0015875
tattttatttgta

SEQ ID NO: 59256 - DNA, 13 bp, Artificial Sequence
  Oligonucleotide for detection of SNP TSC0015875
tacaaataaaata

SEQ ID NO: 59257 - DNA, 13 bp, Artificial Sequence
  Oligonucleotide for detection of SNP TSC0015875
tatttcgtttgta

SEQ ID NO: 59258 - DNA, 13 bp, Artificial Sequence
  Oligonucleotide for detection of SNP TSC0015875
tacaaacgaaata

SEQ ID NO: 59259 - DNA, 13 bp, Artificial Sequence
  Oligonucleotide for detection of SNP TSC0015877
agatatataagtt

SEQ ID NO: 59260 - DNA, 13 bp, Artificial Sequence
  Oligonucleotide for detection of SNP TSC0015877
aacttatatatct

SEQ ID NO: 59261 - DNA, 13 bp, Artificial Sequence
  Oligonucleotide for detection of SNP TSC0015877
agatatgtaagtt

SEQ ID NO: 59262 - DNA, 13 bp, Artificial Sequence
  Oligonucleotide for detection of SNP TSC0015877
aacttacatatct

SEQ ID NO: 59263 - DNA, 13 bp, Artificial Sequence
  Oligonucleotide for detection of SNP TSC0015880
aggttggtgttga

SEQ ID NO: 59264 - DNA, 13 bp, Artificial Sequence
  Oligonucleotide for detection of SNP TSC0015880
tcaacaccaacct

SEQ ID NO: 59265 - DNA, 13 bp, Artificial Sequence
  Oligonucleotide for detection of SNP TSC0015880
aggttgatgttga

SEQ ID NO: 59266 - DNA, 13 bp, Artificial Sequence
  Oligonucleotide for detection of SNP TSC0015880
tcaacatcaacct

SEQ ID NO: 59267 - DNA, 13 bp, Artificial Sequence
  Oligonucleotide for detection of SNP TSC0015881
tttgtatgataga

SEQ ID NO: 59268 - DNA, 13 bp, Artificial Sequence
  Oligonucleotide for detection of SNP TSC0015881
tctatcatacaaa

SEQ ID NO: 59269 - DNA, 13 bp, Artificial Sequence
  Oligonucleotide for detection of SNP TSC0015881
tttgtacgataga

SEQ ID NO: 59270 - DNA, 13 bp, Artificial Sequence
  Oligonucleotide for detection of SNP TSC0015881
tctatcgtacaaa

SEQ ID NO: 59271 - DNA, 13 bp, Artificial Sequence
  Oligonucleotide for detection of SNP TSC0015881
tttgttgtatagg

SEQ ID NO: 59272 - DNA, 13 bp, Artificial Sequence
  Oligonucleotide for detection of SNP TSC0015881
cctatacaacaaa

SEQ ID NO: 59273 - DNA, 13 bp, Artificial Sequence
  Oligonucleotide for detection of SNP TSC0015881
tttgttatatagg

SEQ ID NO: 59274 - DNA, 13 bp, Artificial Sequence
  Oligonucleotide for detection of SNP TSC0015881
cctatataacaaa

SEQ ID NO: 59275 - DNA, 13 bp, Artificial Sequence
  Oligonucleotide for detection of SNP TSC0015881
tttgtcgtatagg

SEQ ID NO: 59276 - DNA, 13 bp, Artificial Sequence
  Oligonucleotide for detection of SNP TSC0015881
cctatacgacaaa

SEQ ID NO: 59277 - DNA, 13 bp, Artificial Sequence
  Oligonucleotide for detection of SNP TSC0015882
gatgtatgtgggg

SEQ ID NO: 59278 - DNA, 13 bp, Artificial Sequence
  Oligonucleotide for detection of SNP TSC0015882
ccccacatacatc

SEQ ID NO: 59279 - DNA, 13 bp, Artificial Sequence
  Oligonucleotide for detection of SNP TSC0015882
gatgtacgtgggg

SEQ ID NO: 59280 - DNA, 13 bp, Artificial Sequence
  Oligonucleotide for detection of SNP TSC0015882
ccccacgtacatc

SEQ ID NO: 59281 - DNA, 13 bp, Artificial Sequence
  Oligonucleotide for detection of SNP TSC0015882
ttttatgtataty

SEQ ID NO: 59282 - DNA, 13 bp, Artificial Sequence
  Oligonucleotide for detection of SNP TSC0015882
ratatacataaaa

SEQ ID NO: 59283 - DNA, 13 bp, Artificial Sequence
  Oligonucleotide for detection of SNP TSC0015882
ttttatatataty

SEQ ID NO: 59284 - DNA, 13 bp, Artificial Sequence
  Oligonucleotide for detection of SNP TSC0015882
ratatatataaaa

SEQ ID NO: 59285 - DNA, 13 bp, Artificial Sequence
  Oligonucleotide for detection of SNP TSC0015882
ttttacgtataty

SEQ ID NO: 59286 - DNA, 13 bp, Artificial Sequence
  Oligonucleotide for detection of SNP TSC0015882
ratatacgtaaaa

SEQ ID NO: 59287 - DNA, 13 bp, Artificial Sequence
  Oligonucleotide for detection of SNP TSC0015883
atttgtatgatgy

SEQ ID NO: 59288 - DNA, 13 bp, Artificial Sequence
  Oligonucleotide for detection of SNP TSC0015883
rcatcatacaaat

SEQ ID NO: 59289 - DNA, 13 bp, Artificial Sequence
  Oligonucleotide for detection of SNP TSC0015883
atttgtgtgatgy

SEQ ID NO: 59290 - DNA, 13 bp, Artificial Sequence
  Oligonucleotide for detection of SNP TSC0015883
rcatcacacaaat

SEQ ID NO: 59291 - DNA, 13 bp, Artificial Sequence
  Oligonucleotide for detection of SNP TSC0015884
gtattgtgatttt

SEQ ID NO: 59292 - DNA, 13 bp, Artificial Sequence
  Oligonucleotide for detection of SNP TSC0015884
aaaatcacaatac

SEQ ID NO: 59293 - DNA, 13 bp, Artificial Sequence
  Oligonucleotide for detection of SNP TSC0015884
gtattgcgatttt

SEQ ID NO: 59294 - DNA, 13 bp, Artificial Sequence
  Oligonucleotide for detection of SNP TSC0015884
aaaatcgcaatac

SEQ ID NO: 59295 - DNA, 13 bp, Artificial Sequence
  Oligonucleotide for detection of SNP TSC0015884
agggttgtagtgy

SEQ ID NO: 59296 - DNA, 13 bp, Artificial Sequence
  Oligonucleotide for detection of SNP TSC0015884
rcactacaaccct

SEQ ID NO: 59297 - DNA, 13 bp, Artificial Sequence
  Oligonucleotide for detection of SNP TSC0015884
agggttatagtgy

SEQ ID NO: 59298 - DNA, 13 bp, Artificial Sequence
  Oligonucleotide for detection of SNP TSC0015884
rcactataaccct

SEQ ID NO: 59299 - DNA, 13 bp, Artificial Sequence
  Oligonucleotide for detection of SNP TSC0015884
agggtcgtagtgy

SEQ ID NO: 59300 - DNA, 13 bp, Artificial Sequence
  Oligonucleotide for detection of SNP TSC0015884
rcactacgaccct

SEQ ID NO: 59301 - DNA, 13 bp, Artificial Sequence
  Oligonucleotide for detection of SNP TSC0015892
tgtttgggtgtat

SEQ ID NO: 59302 - DNA, 13 bp, Artificial Sequence
  Oligonucleotide for detection of SNP TSC0015892
atacacccaaaca

SEQ ID NO: 59303 - DNA, 13 bp, Artificial Sequence
  Oligonucleotide for detection of SNP TSC0015892
tgtttgtgtgtat

SEQ ID NO: 59304 - DNA, 13 bp, Artificial Sequence
  Oligonucleotide for detection of SNP TSC0015892
atacacacaaaca

SEQ ID NO: 59305 - DNA, 13 bp, Artificial Sequence
  Oligonucleotide for detection of SNP TSC0015892
atatatttaggta

SEQ ID NO: 59306 - DNA, 13 bp, Artificial Sequence
  Oligonucleotide for detection of SNP TSC0015892
tacctaaatatat

SEQ ID NO: 59307 - DNA, 13 bp, Artificial Sequence
  Oligonucleotide for detection of SNP TSC0015892
atatatataggta

SEQ ID NO: 59308 - DNA, 13 bp, Artificial Sequence
  Oligonucleotide for detection of SNP TSC0015892
tacctatatatat

SEQ ID NO: 59309 - DNA, 13 bp, Artificial Sequence
  Oligonucleotide for detection of SNP TSC0015893
agaaaggaatatt

SEQ ID NO: 59310 - DNA, 13 bp, Artificial Sequence
  Oligonucleotide for detection of SNP TSC0015893
aatattcctttct

SEQ ID NO: 59311 - DNA, 13 bp, Artificial Sequence
  Oligonucleotide for detection of SNP TSC0015893
agaaagaaatatt

SEQ ID NO: 59312 - DNA, 13 bp, Artificial Sequence
  Oligonucleotide for detection of SNP TSC0015893
aatatttctttct

SEQ ID NO: 59313 - DNA, 13 bp, Artificial Sequence
  Oligonucleotide for detection of SNP TSC0015894
attttgggtttgg

SEQ ID NO: 59314 - DNA, 13 bp, Artificial Sequence
  Oligonucleotide for detection of SNP TSC0015894
ccaaacccaaaat

SEQ ID NO: 59315 - DNA, 13 bp, Artificial Sequence
  Oligonucleotide for detection of SNP TSC0015894
attttgtgtttgg

SEQ ID NO: 59316 - DNA, 13 bp, Artificial Sequence
  Oligonucleotide for detection of SNP TSC0015894
ccaaacacaaaat

SEQ ID NO: 59317 - DNA, 13 bp, Artificial Sequence
  Oligonucleotide for detection of SNP TSC0015894
ttaagtttagggt

SEQ ID NO: 59318 - DNA, 13 bp, Artificial Sequence
  Oligonucleotide for detection of SNP TSC0015894
accctaaacttaa

SEQ ID NO: 59319 - DNA, 13 bp, Artificial Sequence
  Oligonucleotide for detection of SNP TSC0015894
ttaagtatagggt

SEQ ID NO: 59320 - DNA, 13 bp, Artificial Sequence
  Oligonucleotide for detection of SNP TSC0015894
accctatacttaa

SEQ ID NO: 59321 - DNA, 13 bp, Artificial Sequence
  Oligonucleotide for detection of SNP TSC0015898
agaaaagaaggag

SEQ ID NO: 59322 - DNA, 13 bp, Artificial Sequence
  Oligonucleotide for detection of SNP TSC0015898
ctccttcttttct

SEQ ID NO: 59323 - DNA, 13 bp, Artificial Sequence
  Oligonucleotide for detection of SNP TSC0015898
agaaaaaaaggag

SEQ ID NO: 59324 - DNA, 13 bp, Artificial Sequence
  Oligonucleotide for detection of SNP TSC0015898
ctcctttttttct

SEQ ID NO: 59325 - DNA, 13 bp, Artificial Sequence
  Oligonucleotide for detection of SNP TSC0015899
aagtttgtagttt

SEQ ID NO: 59326 - DNA, 13 bp, Artificial Sequence
  Oligonucleotide for detection of SNP TSC0015899
aaactacaaactt

SEQ ID NO: 59327 - DNA, 13 bp, Artificial Sequence
  Oligonucleotide for detection of SNP TSC0015899
aagtttatagttt

SEQ ID NO: 59328 - DNA, 13 bp, Artificial Sequence
  Oligonucleotide for detection of SNP TSC0015899
aaactataaactt

SEQ ID NO: 59329 - DNA, 13 bp, Artificial Sequence
  Oligonucleotide for detection of SNP TSC0015899
aagttcgtagttt

SEQ ID NO: 59330 - DNA, 13 bp, Artificial Sequence
  Oligonucleotide for detection of SNP TSC0015899
aaactacgaactt

SEQ ID NO: 59331 - DNA, 13 bp, Artificial Sequence
  Oligonucleotide for detection of SNP TSC0015904
tttgttgaattaa

SEQ ID NO: 59332 - DNA, 13 bp, Artificial Sequence
  Oligonucleotide for detection of SNP TSC0015904
ttaattcaacaaa

SEQ ID NO: 59333 - DNA, 13 bp, Artificial Sequence
  Oligonucleotide for detection of SNP TSC0015904
tttgtttaattaa

SEQ ID NO: 59334 - DNA, 13 bp, Artificial Sequence
  Oligonucleotide for detection of SNP TSC0015904
ttaattaaacaaa

SEQ ID NO: 59335 - DNA, 13 bp, Artificial Sequence
  Oligonucleotide for detection of SNP TSC0015904
ttaatttaataaa

SEQ ID NO: 59336 - DNA, 13 bp, Artificial Sequence
  Oligonucleotide for detection of SNP TSC0015904
tttattaaattaa

SEQ ID NO: 59337 - DNA, 13 bp, Artificial Sequence
  Oligonucleotide for detection of SNP TSC0015904
ttaattaaataaa

SEQ ID NO: 59338 - DNA, 13 bp, Artificial Sequence
  Oligonucleotide for detection of SNP TSC0015904
tttatttaattaa

SEQ ID NO: 59339 - DNA, 13 bp, Artificial Sequence
  Oligonucleotide for detection of SNP TSC0015906
gtggtgggggttg

SEQ ID NO: 59340 - DNA, 13 bp, Artificial Sequence
  Oligonucleotide for detection of SNP TSC0015906
caacccccaccac

SEQ ID NO: 59341 - DNA, 13 bp, Artificial Sequence
  Oligonucleotide for detection of SNP TSC0015906
gtggtgagggttg

SEQ ID NO: 59342 - DNA, 13 bp, Artificial Sequence
  Oligonucleotide for detection of SNP TSC0015906
caaccctcaccac

SEQ ID NO: 59343 - DNA, 13 bp, Artificial Sequence
  Oligonucleotide for detection of SNP TSC0015906
gcggtgggggttg

SEQ ID NO: 59344 - DNA, 13 bp, Artificial Sequence
  Oligonucleotide for detection of SNP TSC0015906
caacccccaccgc

SEQ ID NO: 59345 - DNA, 13 bp, Artificial Sequence
  Oligonucleotide for detection of SNP TSC0015906
gcggtgagggttg

SEQ ID NO: 59346 - DNA, 13 bp, Artificial Sequence
  Oligonucleotide for detection of SNP TSC0015906
caaccctcaccgc

SEQ ID NO: 59347 - DNA, 13 bp, Artificial Sequence
  Oligonucleotide for detection of SNP TSC0015906
gtggcgggggttg

SEQ ID NO: 59348 - DNA, 13 bp, Artificial Sequence
  Oligonucleotide for detection of SNP TSC0015906
caacccccgccac

SEQ ID NO: 59349 - DNA, 13 bp, Artificial Sequence
  Oligonucleotide for detection of SNP TSC0015906
gtggcgagggttg

SEQ ID NO: 59350 - DNA, 13 bp, Artificial Sequence
  Oligonucleotide for detection of SNP TSC0015906
caaccctcgccac

SEQ ID NO: 59351 - DNA, 13 bp, Artificial Sequence
  Oligonucleotide for detection of SNP TSC0015906
gcggcgggggttg

SEQ ID NO: 59352 - DNA, 13 bp, Artificial Sequence
  Oligonucleotide for detection of SNP TSC0015906
caacccccgccgc

SEQ ID NO: 59353 - DNA, 13 bp, Artificial Sequence
  Oligonucleotide for detection of SNP TSC0015906
gcggcgagggttg

SEQ ID NO: 59354 - DNA, 13 bp, Artificial Sequence
  Oligonucleotide for detection of SNP TSC0015906
caaccctcgccgc

SEQ ID NO: 59355 - DNA, 13 bp, Artificial Sequence
  Oligonucleotide for detection of SNP TSC0015907
gttgttataagtg

SEQ ID NO: 59356 - DNA, 13 bp, Artificial Sequence
  Oligonucleotide for detection of SNP TSC0015907
cacttataacaac

SEQ ID NO: 59357 - DNA, 13 bp, Artificial Sequence
  Oligonucleotide for detection of SNP TSC0015907
gttgttgtaagtg

SEQ ID NO: 59358 - DNA, 13 bp, Artificial Sequence
  Oligonucleotide for detection of SNP TSC0015907
cacttacaacaac

SEQ ID NO: 59359 - DNA, 13 bp, Artificial Sequence
  Oligonucleotide for detection of SNP TSC0015907
gttgtcgtaagtg

SEQ ID NO: 59360 - DNA, 13 bp, Artificial Sequence
  Oligonucleotide for detection of SNP TSC0015907
cacttacgacaac

SEQ ID NO: 59361 - DNA, 13 bp, Artificial Sequence
  Oligonucleotide for detection of SNP TSC0015908
gggattagagtat

SEQ ID NO: 59362 - DNA, 13 bp, Artificial Sequence
  Oligonucleotide for detection of SNP TSC0015908
atactctaatccc

SEQ ID NO: 59363 - DNA, 13 bp, Artificial Sequence
  Oligonucleotide for detection of SNP TSC0015908
gggattggagtat

SEQ ID NO: 59364 - DNA, 13 bp, Artificial Sequence
  Oligonucleotide for detection of SNP TSC0015908
atactccaatccc

SEQ ID NO: 59365 - DNA, 13 bp, Artificial Sequence
  Oligonucleotide for detection of SNP TSC0015908
gggatcggagtat

SEQ ID NO: 59366 - DNA, 13 bp, Artificial Sequence
  Oligonucleotide for detection of SNP TSC0015908
atactccgatccc

SEQ ID NO: 59367 - DNA, 13 bp, Artificial Sequence
  Oligonucleotide for detection of SNP TSC0015908
atgttttggttty

SEQ ID NO: 59368 - DNA, 13 bp, Artificial Sequence
  Oligonucleotide for detection of SNP TSC0015908
raaaccaaaacat

SEQ ID NO: 59369 - DNA, 13 bp, Artificial Sequence
  Oligonucleotide for detection of SNP TSC0015908
atgtttcggttty

SEQ ID NO: 59370 - DNA, 13 bp, Artificial Sequence
  Oligonucleotide for detection of SNP TSC0015908
raaaccgaaacat

SEQ ID NO: 59371 - DNA, 13 bp, Artificial Sequence
  Oligonucleotide for detection of SNP TSC0015909
agatataattgag

SEQ ID NO: 59372 - DNA, 13 bp, Artificial Sequence
  Oligonucleotide for detection of SNP TSC0015909
ctcaattatatct

SEQ ID NO: 59373 - DNA, 13 bp, Artificial Sequence
  Oligonucleotide for detection of SNP TSC0015909
agatattattgag

SEQ ID NO: 59374 - DNA, 13 bp, Artificial Sequence
  Oligonucleotide for detection of SNP TSC0015909
ctcaataatatct

SEQ ID NO: 59375 - DNA, 13 bp, Artificial Sequence
  Oligonucleotide for detection of SNP TSC0015909
tttagttatgttt

SEQ ID NO: 59376 - DNA, 13 bp, Artificial Sequence
  Oligonucleotide for detection of SNP TSC0015909
aaacataactaaa

SEQ ID NO: 59377 - DNA, 13 bp, Artificial Sequence
  Oligonucleotide for detection of SNP TSC0015909
tttagtaatgttt

SEQ ID NO: 59378 - DNA, 13 bp, Artificial Sequence
  Oligonucleotide for detection of SNP TSC0015909
aaacattactaaa

SEQ ID NO: 59379 - DNA, 13 bp, Artificial Sequence
  Oligonucleotide for detection of SNP TSC0015910
tttttgagggttt

SEQ ID NO: 59380 - DNA, 13 bp, Artificial Sequence
  Oligonucleotide for detection of SNP TSC0015910
aaaccctcaaaaa

SEQ ID NO: 59381 - DNA, 13 bp, Artificial Sequence
  Oligonucleotide for detection of SNP TSC0015910
tttttgggggttt

SEQ ID NO: 59382 - DNA, 13 bp, Artificial Sequence
  Oligonucleotide for detection of SNP TSC0015910
aaacccccaaaaa

SEQ ID NO: 59383 - DNA, 13 bp, Artificial Sequence
  Oligonucleotide for detection of SNP TSC0015911
gaagttgggattg

SEQ ID NO: 59384 - DNA, 13 bp, Artificial Sequence
  Oligonucleotide for detection of SNP TSC0015911
caatcccaacttc

SEQ ID NO: 59385 - DNA, 13 bp, Artificial Sequence
  Oligonucleotide for detection of SNP TSC0015911
gaagtttggattg

SEQ ID NO: 59386 - DNA, 13 bp, Artificial Sequence
  Oligonucleotide for detection of SNP TSC0015911
caatccaaacttc

SEQ ID NO: 59387 - DNA, 13 bp, Artificial Sequence
  Oligonucleotide for detection of SNP TSC0015911
gaagtcgggattg

SEQ ID NO: 59388 - DNA, 13 bp, Artificial Sequence
  Oligonucleotide for detection of SNP TSC0015911
caatcccgacttc

SEQ ID NO: 59389 - DNA, 13 bp, Artificial Sequence
  Oligonucleotide for detection of SNP TSC0015911
tagttttgattty

SEQ ID NO: 59390 - DNA, 13 bp, Artificial Sequence
  Oligonucleotide for detection of SNP TSC0015911
raaatcaaaacta

SEQ ID NO: 59391 - DNA, 13 bp, Artificial Sequence
  Oligonucleotide for detection of SNP TSC0015911
tagtttagattty

SEQ ID NO: 59392 - DNA, 13 bp, Artificial Sequence
  Oligonucleotide for detection of SNP TSC0015911
raaatctaaacta

SEQ ID NO: 59393 - DNA, 13 bp, Artificial Sequence
  Oligonucleotide for detection of SNP TSC0015911
tagtttcgattty

SEQ ID NO: 59394 - DNA, 13 bp, Artificial Sequence
  Oligonucleotide for detection of SNP TSC0015911
raaatcgaaacta

SEQ ID NO: 59395 - DNA, 13 bp, Artificial Sequence
  Oligonucleotide for detection of SNP TSC0015912
atagatatattay

SEQ ID NO: 59396 - DNA, 13 bp, Artificial Sequence
  Oligonucleotide for detection of SNP TSC0015912
rtaatatatctat

SEQ ID NO: 59397 - DNA, 13 bp, Artificial Sequence
  Oligonucleotide for detection of SNP TSC0015912
atagatgtattay

SEQ ID NO: 59398 - DNA, 13 bp, Artificial Sequence
  Oligonucleotide for detection of SNP TSC0015912
rtaatacatctat

SEQ ID NO: 59399 - DNA, 13 bp, Artificial Sequence
  Oligonucleotide for detection of SNP TSC0015913
tttgatatgttty

SEQ ID NO: 59400 - DNA, 13 bp, Artificial Sequence
  Oligonucleotide for detection of SNP TSC0015913
raaacatatcaaa

SEQ ID NO: 59401 - DNA, 13 bp, Artificial Sequence
  Oligonucleotide for detection of SNP TSC0015913
tttgatgtgttty

SEQ ID NO: 59402 - DNA, 13 bp, Artificial Sequence
  Oligonucleotide for detection of SNP TSC0015913
raaacacatcaaa

SEQ ID NO: 59403 - DNA, 13 bp, Artificial Sequence
  Oligonucleotide for detection of SNP TSC0015913
tttgatacgttty

SEQ ID NO: 59404 - DNA, 13 bp, Artificial Sequence
  Oligonucleotide for detection of SNP TSC0015913
raaacgtatcaaa

SEQ ID NO: 59405 - DNA, 13 bp, Artificial Sequence
  Oligonucleotide for detection of SNP TSC0015913
tttgatgcgttty

SEQ ID NO: 59406 - DNA, 13 bp, Artificial Sequence
  Oligonucleotide for detection of SNP TSC0015913
raaacgcatcaaa

SEQ ID NO: 59407 - DNA, 13 bp, Artificial Sequence
  Oligonucleotide for detection of SNP TSC0015914
tattgtttttgtg

SEQ ID NO: 59408 - DNA, 13 bp, Artificial Sequence
  Oligonucleotide for detection of SNP TSC0015914
cacaaaaacaata

SEQ ID NO: 59409 - DNA, 13 bp, Artificial Sequence
  Oligonucleotide for detection of SNP TSC0015914
tattgtgtttgtg

SEQ ID NO: 59410 - DNA, 13 bp, Artificial Sequence
  Oligonucleotide for detection of SNP TSC0015914
cacaaacacaata

SEQ ID NO: 59411 - DNA, 13 bp, Artificial Sequence
  Oligonucleotide for detection of SNP TSC0015914
tatagagatagtg

SEQ ID NO: 59412 - DNA, 13 bp, Artificial Sequence
  Oligonucleotide for detection of SNP TSC0015914
cactatctctata

SEQ ID NO: 59413 - DNA, 13 bp, Artificial Sequence
  Oligonucleotide for detection of SNP TSC0015914
tatagatatagtg

SEQ ID NO: 59414 - DNA, 13 bp, Artificial Sequence
  Oligonucleotide for detection of SNP TSC0015914
cactatatctata

SEQ ID NO: 59415 - DNA, 13 bp, Artificial Sequence
  Oligonucleotide for detection of SNP TSC0015915
ttaatgtggattg

SEQ ID NO: 59416 - DNA, 13 bp, Artificial Sequence
  Oligonucleotide for detection of SNP TSC0015915
caatccacattaa

SEQ ID NO: 59417 - DNA, 13 bp, Artificial Sequence
  Oligonucleotide for detection of SNP TSC0015915
ttaatgcggattg

SEQ ID NO: 59418 - DNA, 13 bp, Artificial Sequence
  Oligonucleotide for detection of SNP TSC0015915
caatccgcattaa

SEQ ID NO: 59419 - DNA, 13 bp, Artificial Sequence
  Oligonucleotide for detection of SNP TSC0015915
tagtttgtattaa

SEQ ID NO: 59420 - DNA, 13 bp, Artificial Sequence
  Oligonucleotide for detection of SNP TSC0015915
ttaatacaaacta

SEQ ID NO: 59421 - DNA, 13 bp, Artificial Sequence
  Oligonucleotide for detection of SNP TSC0015915
tagtttatattaa

SEQ ID NO: 59422 - DNA, 13 bp, Artificial Sequence
  Oligonucleotide for detection of SNP TSC0015915
ttaatataaacta

SEQ ID NO: 59423 - DNA, 13 bp, Artificial Sequence
  Oligonucleotide for detection of SNP TSC0015915
tagttcgtattaa

SEQ ID NO: 59424 - DNA, 13 bp, Artificial Sequence
  Oligonucleotide for detection of SNP TSC0015915
ttaatacgaacta

SEQ ID NO: 59425 - DNA, 13 bp, Artificial Sequence
  Oligonucleotide for detection of SNP TSC0015919
tttatagattatt

SEQ ID NO: 59426 - DNA, 13 bp, Artificial Sequence
  Oligonucleotide for detection of SNP TSC0015919
aataatctataaa

SEQ ID NO: 59427 - DNA, 13 bp, Artificial Sequence
  Oligonucleotide for detection of SNP TSC0015919
tttataaattatt

SEQ ID NO: 59428 - DNA, 13 bp, Artificial Sequence
  Oligonucleotide for detection of SNP TSC0015919
aataatttataaa

SEQ ID NO: 59429 - DNA, 13 bp, Artificial Sequence
  Oligonucleotide for detection of SNP TSC0015920
ttttttttagtaa

SEQ ID NO: 59430 - DNA, 13 bp, Artificial Sequence
  Oligonucleotide for detection of SNP TSC0015920
ttactaaaaaaaa

SEQ ID NO: 59431 - DNA, 13 bp, Artificial Sequence
  Oligonucleotide for detection of SNP TSC0015920
ttttttgtagtaa

SEQ ID NO: 59432 - DNA, 13 bp, Artificial Sequence
  Oligonucleotide for detection of SNP TSC0015920
ttactacaaaaaa

SEQ ID NO: 59433 - DNA, 13 bp, Artificial Sequence
  Oligonucleotide for detection of SNP TSC0015920
ttgttggagaggg

SEQ ID NO: 59434 - DNA, 13 bp, Artificial Sequence
  Oligonucleotide for detection of SNP TSC0015920
ccctctccaacaa

SEQ ID NO: 59435 - DNA, 13 bp, Artificial Sequence
  Oligonucleotide for detection of SNP TSC0015920
ttgttgtagaggg

SEQ ID NO: 59436 - DNA, 13 bp, Artificial Sequence
  Oligonucleotide for detection of SNP TSC0015920
ccctctacaacaa

SEQ ID NO: 59437 - DNA, 13 bp, Artificial Sequence
  Oligonucleotide for detection of SNP TSC0015921
ttgatagaggaty

SEQ ID NO: 59438 - DNA, 13 bp, Artificial Sequence
  Oligonucleotide for detection of SNP TSC0015921
ratcctctatcaa

SEQ ID NO: 59439 - DNA, 13 bp, Artificial Sequence
  Oligonucleotide for detection of SNP TSC0015921
ttgataaaggaty

SEQ ID NO: 59440 - DNA, 13 bp, Artificial Sequence
  Oligonucleotide for detection of SNP TSC0015921
ratcctttatcaa

SEQ ID NO: 59441 - DNA, 13 bp, Artificial Sequence
  Oligonucleotide for detection of SNP TSC0015924
taggtattgtgtg

SEQ ID NO: 59442 - DNA, 13 bp, Artificial Sequence
  Oligonucleotide for detection of SNP TSC0015924
cacacaataccta

SEQ ID NO: 59443 - DNA, 13 bp, Artificial Sequence
  Oligonucleotide for detection of SNP TSC0015924
taggtagtgtgtg

SEQ ID NO: 59444 - DNA, 13 bp, Artificial Sequence
  Oligonucleotide for detection of SNP TSC0015924
cacacactaccta

SEQ ID NO: 59445 - DNA, 13 bp, Artificial Sequence
  Oligonucleotide for detection of SNP TSC0015924
tatatagtgtttg

SEQ ID NO: 59446 - DNA, 13 bp, Artificial Sequence
  Oligonucleotide for detection of SNP TSC0015924
caaacactatata

SEQ ID NO: 59447 - DNA, 13 bp, Artificial Sequence
  Oligonucleotide for detection of SNP TSC0015924
tatatattgtttg

SEQ ID NO: 59448 - DNA, 13 bp, Artificial Sequence
  Oligonucleotide for detection of SNP TSC0015924
caaacaatatata

SEQ ID NO: 59449 - DNA, 13 bp, Artificial Sequence
  Oligonucleotide for detection of SNP TSC0015925
tttttaagtgatg

SEQ ID NO: 59450 - DNA, 13 bp, Artificial Sequence
  Oligonucleotide for detection of SNP TSC0015925
catcacttaaaaa

SEQ ID NO: 59451 - DNA, 13 bp, Artificial Sequence
  Oligonucleotide for detection of SNP TSC0015925
tttttaggtgatg

SEQ ID NO: 59452 - DNA, 13 bp, Artificial Sequence
  Oligonucleotide for detection of SNP TSC0015925
catcacctaaaaa

SEQ ID NO: 59453 - DNA, 13 bp, Artificial Sequence
  Oligonucleotide for detection of SNP TSC0015929
ttatagatataag

SEQ ID NO: 59454 - DNA, 13 bp, Artificial Sequence
  Oligonucleotide for detection of SNP TSC0015929
cttatatctataa

SEQ ID NO: 59455 - DNA, 13 bp, Artificial Sequence
  Oligonucleotide for detection of SNP TSC0015929
ttataggtataag

SEQ ID NO: 59456 - DNA, 13 bp, Artificial Sequence
  Oligonucleotide for detection of SNP TSC0015929
cttatacctataa

SEQ ID NO: 59457 - DNA, 13 bp, Artificial Sequence
  Oligonucleotide for detection of SNP TSC0015931
tatttgaatttty

SEQ ID NO: 59458 - DNA, 13 bp, Artificial Sequence
  Oligonucleotide for detection of SNP TSC0015931
raaaattcaaata

SEQ ID NO: 59459 - DNA, 13 bp, Artificial Sequence
  Oligonucleotide for detection of SNP TSC0015931
tatttgtatttty

SEQ ID NO: 59460 - DNA, 13 bp, Artificial Sequence
  Oligonucleotide for detection of SNP TSC0015931
raaaatacaaata

SEQ ID NO: 59461 - DNA, 13 bp, Artificial Sequence
  Oligonucleotide for detection of SNP TSC0015931
gaagatttaggtg

SEQ ID NO: 59462 - DNA, 13 bp, Artificial Sequence
  Oligonucleotide for detection of SNP TSC0015931
cacctaaatcttc

SEQ ID NO: 59463 - DNA, 13 bp, Artificial Sequence
  Oligonucleotide for detection of SNP TSC0015931
gaagatgtaggtg

SEQ ID NO: 59464 - DNA, 13 bp, Artificial Sequence
  Oligonucleotide for detection of SNP TSC0015931
cacctacatcttc

SEQ ID NO: 59465 - DNA, 13 bp, Artificial Sequence
  Oligonucleotide for detection of SNP TSC0015932
tagaaacgtttta

SEQ ID NO: 59466 - DNA, 13 bp, Artificial Sequence
  Oligonucleotide for detection of SNP TSC0015932
taaaacgtttcta

SEQ ID NO: 59467 - DNA, 13 bp, Artificial Sequence
  Oligonucleotide for detection of SNP TSC0015932
taaaatgttttta

SEQ ID NO: 59468 - DNA, 13 bp, Artificial Sequence
  Oligonucleotide for detection of SNP TSC0015932
taaaaacatttta

SEQ ID NO: 59469 - DNA, 13 bp, Artificial Sequence
  Oligonucleotide for detection of SNP TSC0015932
taaaatattttta

SEQ ID NO: 59470 - DNA, 13 bp, Artificial Sequence
  Oligonucleotide for detection of SNP TSC0015932
taaaaatatttta

SEQ ID NO: 59471 - DNA, 13 bp, Artificial Sequence
  Oligonucleotide for detection of SNP TSC0015932
taaaacgttttta

SEQ ID NO: 59472 - DNA, 13 bp, Artificial Sequence
  Oligonucleotide for detection of SNP TSC0015932
taaaaacgtttta

SEQ ID NO: 59473 - DNA, 13 bp, Artificial Sequence
  Oligonucleotide for detection of SNP TSC0015933
atgtatatatata

SEQ ID NO: 59474 - DNA, 13 bp, Artificial Sequence
  Oligonucleotide for detection of SNP TSC0015933
tatatatatacat

SEQ ID NO: 59475 - DNA, 13 bp, Artificial Sequence
  Oligonucleotide for detection of SNP TSC0015933
atgtatgtatata

SEQ ID NO: 59476 - DNA, 13 bp, Artificial Sequence
  Oligonucleotide for detection of SNP TSC0015933
tatatacatacat

SEQ ID NO: 59477 - DNA, 13 bp, Artificial Sequence
  Oligonucleotide for detection of SNP TSC0015933
atgtacgtatata

SEQ ID NO: 59478 - DNA, 13 bp, Artificial Sequence
  Oligonucleotide for detection of SNP TSC0015933
tatatacgtacat

SEQ ID NO: 59479 - DNA, 13 bp, Artificial Sequence
  Oligonucleotide for detection of SNP TSC0015933
tgtgtgcgtgtat

SEQ ID NO: 59480 - DNA, 13 bp, Artificial Sequence
  Oligonucleotide for detection of SNP TSC0015933
atacacgcacaca

SEQ ID NO: 59481 - DNA, 13 bp, Artificial Sequence
  Oligonucleotide for detection of SNP TSC0015934
gtttaggaggaag

SEQ ID NO: 59482 - DNA, 13 bp, Artificial Sequence
  Oligonucleotide for detection of SNP TSC0015934
cttcctcctaaac

SEQ ID NO: 59483 - DNA, 13 bp, Artificial Sequence
  Oligonucleotide for detection of SNP TSC0015934
gtttagaaggaag

SEQ ID NO: 59484 - DNA, 13 bp, Artificial Sequence
  Oligonucleotide for detection of SNP TSC0015934
cttccttctaaac

SEQ ID NO: 59485 - DNA, 13 bp, Artificial Sequence
  Oligonucleotide for detection of SNP TSC0015935
tttatggtaatgt

SEQ ID NO: 59486 - DNA, 13 bp, Artificial Sequence
  Oligonucleotide for detection of SNP TSC0015935
acattaccataaa

SEQ ID NO: 59487 - DNA, 13 bp, Artificial Sequence
  Oligonucleotide for detection of SNP TSC0015935
tttatgataatgt

SEQ ID NO: 59488 - DNA, 13 bp, Artificial Sequence
  Oligonucleotide for detection of SNP TSC0015935
acattatcataaa

SEQ ID NO: 59489 - DNA, 13 bp, Artificial Sequence
  Oligonucleotide for detection of SNP TSC0015936
tttagtataattt

SEQ ID NO: 59490 - DNA, 13 bp, Artificial Sequence
  Oligonucleotide for detection of SNP TSC0015936
aaattatactaaa

SEQ ID NO: 59491 - DNA, 13 bp, Artificial Sequence
  Oligonucleotide for detection of SNP TSC0015936
tttagtgtaattt

SEQ ID NO: 59492 - DNA, 13 bp, Artificial Sequence
  Oligonucleotide for detection of SNP TSC0015936
aaattacactaaa

SEQ ID NO: 59493 - DNA, 13 bp, Artificial Sequence
  Oligonucleotide for detection of SNP TSC0015936
tttagcgtaattt

SEQ ID NO: 59494 - DNA, 13 bp, Artificial Sequence
  Oligonucleotide for detection of SNP TSC0015936
aaattacgctaaa

SEQ ID NO: 59495 - DNA, 13 bp, Artificial Sequence
  Oligonucleotide for detection of SNP TSC0015936
aagttgtgttaaa

SEQ ID NO: 59496 - DNA, 13 bp, Artificial Sequence
  Oligonucleotide for detection of SNP TSC0015936
tttaacacaactt

SEQ ID NO: 59497 - DNA, 13 bp, Artificial Sequence
  Oligonucleotide for detection of SNP TSC0015936
aagttgcgttaaa

SEQ ID NO: 59498 - DNA, 13 bp, Artificial Sequence
  Oligonucleotide for detection of SNP TSC0015936
tttaacgcaactt

SEQ ID NO: 59499 - DNA, 13 bp, Artificial Sequence
  Oligonucleotide for detection of SNP TSC0015939
gttataatattty

SEQ ID NO: 59500 - DNA, 13 bp, Artificial Sequence
  Oligonucleotide for detection of SNP TSC0015939
raaatattataac

SEQ ID NO: 59501 - DNA, 13 bp, Artificial Sequence
  Oligonucleotide for detection of SNP TSC0015939
gttatattattty

SEQ ID NO: 59502 - DNA, 13 bp, Artificial Sequence
  Oligonucleotide for detection of SNP TSC0015939
raaataatataac

SEQ ID NO: 59503 - DNA, 13 bp, Artificial Sequence
  Oligonucleotide for detection of SNP TSC0015939
gggatgttataay

SEQ ID NO: 59504 - DNA, 13 bp, Artificial Sequence
  Oligonucleotide for detection of SNP TSC0015939
rttataacatccc

SEQ ID NO: 59505 - DNA, 13 bp, Artificial Sequence
  Oligonucleotide for detection of SNP TSC0015939
gggatggtataay

SEQ ID NO: 59506 - DNA, 13 bp, Artificial Sequence
  Oligonucleotide for detection of SNP TSC0015939
rttataccatccc

SEQ ID NO: 59507 - DNA, 13 bp, Artificial Sequence
  Oligonucleotide for detection of SNP TSC0015940
ggattgaaagaag

SEQ ID NO: 59508 - DNA, 13 bp, Artificial Sequence
  Oligonucleotide for detection of SNP TSC0015940
cttctttcaatcc

SEQ ID NO: 59509 - DNA, 13 bp, Artificial Sequence
  Oligonucleotide for detection of SNP TSC0015940
ggattgtaagaag

SEQ ID NO: 59510 - DNA, 13 bp, Artificial Sequence
  Oligonucleotide for detection of SNP TSC0015940
cttcttacaatcc

SEQ ID NO: 59511 - DNA, 13 bp, Artificial Sequence
  Oligonucleotide for detection of SNP TSC0015940
ttttttttagtty

SEQ ID NO: 59512 - DNA, 13 bp, Artificial Sequence
  Oligonucleotide for detection of SNP TSC0015940
raactaaaaaaaa

SEQ ID NO: 59513 - DNA, 13 bp, Artificial Sequence
  Oligonucleotide for detection of SNP TSC0015940
ttttttgtagtty

SEQ ID NO: 59514 - DNA, 13 bp, Artificial Sequence
  Oligonucleotide for detection of SNP TSC0015940
raactacaaaaaa

SEQ ID NO: 59515 - DNA, 13 bp, Artificial Sequence
  Oligonucleotide for detection of SNP TSC0015944
tataaatggagtt

SEQ ID NO: 59516 - DNA, 13 bp, Artificial Sequence
  Oligonucleotide for detection of SNP TSC0015944
aactccatttata

SEQ ID NO: 59517 - DNA, 13 bp, Artificial Sequence
  Oligonucleotide for detection of SNP TSC0015944
tataaagggagtt

SEQ ID NO: 59518 - DNA, 13 bp, Artificial Sequence
  Oligonucleotide for detection of SNP TSC0015944
aactccctttata

SEQ ID NO: 59519 - DNA, 13 bp, Artificial Sequence
  Oligonucleotide for detection of SNP TSC0015944
tataaacggagtt

SEQ ID NO: 59520 - DNA, 13 bp, Artificial Sequence
  Oligonucleotide for detection of SNP TSC0015944
aactccgtttata

SEQ ID NO: 59521 - DNA, 13 bp, Artificial Sequence
  Oligonucleotide for detection of SNP TSC0015944
aattttgtttgtg

SEQ ID NO: 59522 - DNA, 13 bp, Artificial Sequence
  Oligonucleotide for detection of SNP TSC0015944
cacaaacaaaatt

SEQ ID NO: 59523 - DNA, 13 bp, Artificial Sequence
  Oligonucleotide for detection of SNP TSC0015944
aattttttttgtg

SEQ ID NO: 59524 - DNA, 13 bp, Artificial Sequence
  Oligonucleotide for detection of SNP TSC0015944
cacaaaaaaaatt

SEQ ID NO: 59525 - DNA, 13 bp, Artificial Sequence
  Oligonucleotide for detection of SNP TSC0015944
aatttcgtttgtg

SEQ ID NO: 59526 - DNA, 13 bp, Artificial Sequence
  Oligonucleotide for detection of SNP TSC0015944
cacaaacgaaatt

SEQ ID NO: 59527 - DNA, 13 bp, Artificial Sequence
  Oligonucleotide for detection of SNP TSC0015945
tgagaaagttgga

SEQ ID NO: 59528 - DNA, 13 bp, Artificial Sequence
  Oligonucleotide for detection of SNP TSC0015945
tccaactttctca

SEQ ID NO: 59529 - DNA, 13 bp, Artificial Sequence
  Oligonucleotide for detection of SNP TSC0015945
tgagaatgttgga

SEQ ID NO: 59530 - DNA, 13 bp, Artificial Sequence
  Oligonucleotide for detection of SNP TSC0015945
tccaacattctca

SEQ ID NO: 59531 - DNA, 13 bp, Artificial Sequence
  Oligonucleotide for detection of SNP TSC0015945
tgagaacgttgga

SEQ ID NO: 59532 - DNA, 13 bp, Artificial Sequence
  Oligonucleotide for detection of SNP TSC0015945
tccaacgttctca

SEQ ID NO: 59533 - DNA, 13 bp, Artificial Sequence
  Oligonucleotide for detection of SNP TSC0015945
tttagtgttttta

SEQ ID NO: 59534 - DNA, 13 bp, Artificial Sequence
  Oligonucleotide for detection of SNP TSC0015945
taaaaacactaaa

SEQ ID NO: 59535 - DNA, 13 bp, Artificial Sequence
  Oligonucleotide for detection of SNP TSC0015945
tttagcgttttta

SEQ ID NO: 59536 - DNA, 13 bp, Artificial Sequence
  Oligonucleotide for detection of SNP TSC0015945
taaaaacgctaaa

SEQ ID NO: 59537 - DNA, 13 bp, Artificial Sequence
  Oligonucleotide for detection of SNP TSC0015946
tagagtatattgt

SEQ ID NO: 59538 - DNA, 13 bp, Artificial Sequence
  Oligonucleotide for detection of SNP TSC0015946
acaatatactcta

SEQ ID NO: 59539 - DNA, 13 bp, Artificial Sequence
  Oligonucleotide for detection of SNP TSC0015946
tagagtttattgt

SEQ ID NO: 59540 - DNA, 13 bp, Artificial Sequence
  Oligonucleotide for detection of SNP TSC0015946
acaataaactcta

SEQ ID NO: 59541 - DNA, 13 bp, Artificial Sequence
  Oligonucleotide for detection of SNP TSC0015946
tagagtatatcgt

SEQ ID NO: 59542 - DNA, 13 bp, Artificial Sequence
  Oligonucleotide for detection of SNP TSC0015946
acgatatactcta

SEQ ID NO: 59543 - DNA, 13 bp, Artificial Sequence
  Oligonucleotide for detection of SNP TSC0015946
tagagtttatcgt

SEQ ID NO: 59544 - DNA, 13 bp, Artificial Sequence
  Oligonucleotide for detection of SNP TSC0015946
acgataaactcta

SEQ ID NO: 59545 - DNA, 13 bp, Artificial Sequence
  Oligonucleotide for detection of SNP TSC0015946
atggtgtgtttta

SEQ ID NO: 59546 - DNA, 13 bp, Artificial Sequence
  Oligonucleotide for detection of SNP TSC0015946
taaaacacaccat

SEQ ID NO: 59547 - DNA, 13 bp, Artificial Sequence
  Oligonucleotide for detection of SNP TSC0015946
atggtgggtttta

SEQ ID NO: 59548 - DNA, 13 bp, Artificial Sequence
  Oligonucleotide for detection of SNP TSC0015946
taaaacccaccat

SEQ ID NO: 59549 - DNA, 13 bp, Artificial Sequence
  Oligonucleotide for detection of SNP TSC0015946
acggtgtgtttta

SEQ ID NO: 59550 - DNA, 13 bp, Artificial Sequence
  Oligonucleotide for detection of SNP TSC0015946
taaaacacaccgt

SEQ ID NO: 59551 - DNA, 13 bp, Artificial Sequence
  Oligonucleotide for detection of SNP TSC0015946
acggtgggtttta

SEQ ID NO: 59552 - DNA, 13 bp, Artificial Sequence
  Oligonucleotide for detection of SNP TSC0015946
taaaacccaccgt

SEQ ID NO: 59553 - DNA, 13 bp, Artificial Sequence
  Oligonucleotide for detection of SNP TSC0015947
tatagaaatatty

SEQ ID NO: 59554 - DNA, 13 bp, Artificial Sequence
  Oligonucleotide for detection of SNP TSC0015947
raatatttctata

SEQ ID NO: 59555 - DNA, 13 bp, Artificial Sequence
  Oligonucleotide for detection of SNP TSC0015947
tatagatatatty

SEQ ID NO: 59556 - DNA, 13 bp, Artificial Sequence
  Oligonucleotide for detection of SNP TSC0015947
raatatatctata

SEQ ID NO: 59557 - DNA, 13 bp, Artificial Sequence
  Oligonucleotide for detection of SNP TSC0015947
gagtgtttttgta

SEQ ID NO: 59558 - DNA, 13 bp, Artificial Sequence
  Oligonucleotide for detection of SNP TSC0015947
tacaaaaacactc

SEQ ID NO: 59559 - DNA, 13 bp, Artificial Sequence
  Oligonucleotide for detection of SNP TSC0015947
gagtgtatttgta

SEQ ID NO: 59560 - DNA, 13 bp, Artificial Sequence
  Oligonucleotide for detection of SNP TSC0015947
tacaaatacactc

SEQ ID NO: 59561 - DNA, 13 bp, Artificial Sequence
  Oligonucleotide for detection of SNP TSC0015948
gtatttagttttt

SEQ ID NO: 59562 - DNA, 13 bp, Artificial Sequence
  Oligonucleotide for detection of SNP TSC0015948
aaaaactaaatac

SEQ ID NO: 59563 - DNA, 13 bp, Artificial Sequence
  Oligonucleotide for detection of SNP TSC0015948
gtatttggttttt

SEQ ID NO: 59564 - DNA, 13 bp, Artificial Sequence
  Oligonucleotide for detection of SNP TSC0015948
aaaaaccaaatac

SEQ ID NO: 59565 - DNA, 13 bp, Artificial Sequence
  Oligonucleotide for detection of SNP TSC0015948
gtattcggttttt

SEQ ID NO: 59566 - DNA, 13 bp, Artificial Sequence
  Oligonucleotide for detection of SNP TSC0015948
aaaaaccgaatac

SEQ ID NO: 59567 - DNA, 13 bp, Artificial Sequence
  Oligonucleotide for detection of SNP TSC0015948
aggggttgagtgy

SEQ ID NO: 59568 - DNA, 13 bp, Artificial Sequence
  Oligonucleotide for detection of SNP TSC0015948
rcactcaacccct

SEQ ID NO: 59569 - DNA, 13 bp, Artificial Sequence
  Oligonucleotide for detection of SNP TSC0015948
aggggtcgagtgy

SEQ ID NO: 59570 - DNA, 13 bp, Artificial Sequence
  Oligonucleotide for detection of SNP TSC0015948
rcactcgacccct

SEQ ID NO: 59571 - DNA, 13 bp, Artificial Sequence
  Oligonucleotide for detection of SNP TSC0015949
ttatttatatttt

SEQ ID NO: 59572 - DNA, 13 bp, Artificial Sequence
  Oligonucleotide for detection of SNP TSC0015949
aaaatataaataa

SEQ ID NO: 59573 - DNA, 13 bp, Artificial Sequence
  Oligonucleotide for detection of SNP TSC0015949
ttatttgtatttt

SEQ ID NO: 59574 - DNA, 13 bp, Artificial Sequence
  Oligonucleotide for detection of SNP TSC0015949
aaaatacaaataa

SEQ ID NO: 59575 - DNA, 13 bp, Artificial Sequence
  Oligonucleotide for detection of SNP TSC0015949
ttattcgtatttt

SEQ ID NO: 59576 - DNA, 13 bp, Artificial Sequence
  Oligonucleotide for detection of SNP TSC0015949
aaaatacgaataa

SEQ ID NO: 59577 - DNA, 13 bp, Artificial Sequence
  Oligonucleotide for detection of SNP TSC0015949
agagtatggatag

SEQ ID NO: 59578 - DNA, 13 bp, Artificial Sequence
  Oligonucleotide for detection of SNP TSC0015949
ctatccatactct

SEQ ID NO: 59579 - DNA, 13 bp, Artificial Sequence
  Oligonucleotide for detection of SNP TSC0015949
agagtacggatag

SEQ ID NO: 59580 - DNA, 13 bp, Artificial Sequence
  Oligonucleotide for detection of SNP TSC0015949
ctatccgtactct

SEQ ID NO: 59581 - DNA, 13 bp, Artificial Sequence
  Oligonucleotide for detection of SNP TSC0015952
ggtgttgtgaggg

SEQ ID NO: 59582 - DNA, 13 bp, Artificial Sequence
  Oligonucleotide for detection of SNP TSC0015952
ccctcacaacacc

SEQ ID NO: 59583 - DNA, 13 bp, Artificial Sequence
  Oligonucleotide for detection of SNP TSC0015952
ggtgttatgaggg

SEQ ID NO: 59584 - DNA, 13 bp, Artificial Sequence
  Oligonucleotide for detection of SNP TSC0015952
ccctcataacacc

SEQ ID NO: 59585 - DNA, 13 bp, Artificial Sequence
  Oligonucleotide for detection of SNP TSC0015952
ggcgttgtgaggg

SEQ ID NO: 59586 - DNA, 13 bp, Artificial Sequence
  Oligonucleotide for detection of SNP TSC0015952
ccctcacaacgcc

SEQ ID NO: 59587 - DNA, 13 bp, Artificial Sequence
  Oligonucleotide for detection of SNP TSC0015952
ggcgttatgaggg

SEQ ID NO: 59588 - DNA, 13 bp, Artificial Sequence
  Oligonucleotide for detection of SNP TSC0015952
ccctcataacgcc

SEQ ID NO: 59589 - DNA, 13 bp, Artificial Sequence
  Oligonucleotide for detection of SNP TSC0015957
tgggggggaggag

SEQ ID NO: 59590 - DNA, 13 bp, Artificial Sequence
  Oligonucleotide for detection of SNP TSC0015957
ctcctccccccca

SEQ ID NO: 59591 - DNA, 13 bp, Artificial Sequence
  Oligonucleotide for detection of SNP TSC0015957
tgggggagaggag

SEQ ID NO: 59592 - DNA, 13 bp, Artificial Sequence
  Oligonucleotide for detection of SNP TSC0015957
ctcctctccccca

SEQ ID NO: 59593 - DNA, 13 bp, Artificial Sequence
  Oligonucleotide for detection of SNP TSC0015959
taatttagagaga

SEQ ID NO: 59594 - DNA, 13 bp, Artificial Sequence
  Oligonucleotide for detection of SNP TSC0015959
tctctctaaatta

SEQ ID NO: 59595 - DNA, 13 bp, Artificial Sequence
  Oligonucleotide for detection of SNP TSC0015959
taattttgagaga

SEQ ID NO: 59596 - DNA, 13 bp, Artificial Sequence
  Oligonucleotide for detection of SNP TSC0015959
tctctcaaaatta

SEQ ID NO: 59597 - DNA, 13 bp, Artificial Sequence
  Oligonucleotide for detection of SNP TSC0015959
taatttcgagaga

SEQ ID NO: 59598 - DNA, 13 bp, Artificial Sequence
  Oligonucleotide for detection of SNP TSC0015959
tctctcgaaatta

SEQ ID NO: 59599 - DNA, 13 bp, Artificial Sequence
  Oligonucleotide for detection of SNP TSC0015959
tttttttggatta

SEQ ID NO: 59600 - DNA, 13 bp, Artificial Sequence
  Oligonucleotide for detection of SNP TSC0015959
taatccaaaaaaa

SEQ ID NO: 59601 - DNA, 13 bp, Artificial Sequence
  Oligonucleotide for detection of SNP TSC0015959
ttttttgggatta

SEQ ID NO: 59602 - DNA, 13 bp, Artificial Sequence
  Oligonucleotide for detection of SNP TSC0015959
taatcccaaaaaa

SEQ ID NO: 59603 - DNA, 13 bp, Artificial Sequence
  Oligonucleotide for detection of SNP TSC0015959
tttttcgggatta

SEQ ID NO: 59604 - DNA, 13 bp, Artificial Sequence
  Oligonucleotide for detection of SNP TSC0015959
taatcccgaaaaa

SEQ ID NO: 59605 - DNA, 13 bp, Artificial Sequence
  Oligonucleotide for detection of SNP TSC0015960
ttaagatgtagag

SEQ ID NO: 59606 - DNA, 13 bp, Artificial Sequence
  Oligonucleotide for detection of SNP TSC0015960
ctctacatcttaa

SEQ ID NO: 59607 - DNA, 13 bp, Artificial Sequence
  Oligonucleotide for detection of SNP TSC0015960
ttaagacgtagag

SEQ ID NO: 59608 - DNA, 13 bp, Artificial Sequence
  Oligonucleotide for detection of SNP TSC0015960
ctctacgtcttaa

SEQ ID NO: 59609 - DNA, 13 bp, Artificial Sequence
  Oligonucleotide for detection of SNP TSC0015960
ttttatgttttag

SEQ ID NO: 59610 - DNA, 13 bp, Artificial Sequence
  Oligonucleotide for detection of SNP TSC0015960
ctaaaacataaaa

SEQ ID NO: 59611 - DNA, 13 bp, Artificial Sequence
  Oligonucleotide for detection of SNP TSC0015960
ttttatattttag

SEQ ID NO: 59612 - DNA, 13 bp, Artificial Sequence
  Oligonucleotide for detection of SNP TSC0015960
ctaaaatataaaa

SEQ ID NO: 59613 - DNA, 13 bp, Artificial Sequence
  Oligonucleotide for detection of SNP TSC0015960
ttttacgttttag

SEQ ID NO: 59614 - DNA, 13 bp, Artificial Sequence
  Oligonucleotide for detection of SNP TSC0015960
ctaaaacgtaaaa

SEQ ID NO: 59615 - DNA, 13 bp, Artificial Sequence
  Oligonucleotide for detection of SNP TSC0015961
agaagtatgatag

SEQ ID NO: 59616 - DNA, 13 bp, Artificial Sequence
  Oligonucleotide for detection of SNP TSC0015961
ctatcatacttct

SEQ ID NO: 59617 - DNA, 13 bp, Artificial Sequence
  Oligonucleotide for detection of SNP TSC0015961
agaagtgtgatag

SEQ ID NO: 59618 - DNA, 13 bp, Artificial Sequence
  Oligonucleotide for detection of SNP TSC0015961
ctatcacacttct

SEQ ID NO: 59619 - DNA, 13 bp, Artificial Sequence
  Oligonucleotide for detection of SNP TSC0015962
tttttgtgtggtg

SEQ ID NO: 59620 - DNA, 13 bp, Artificial Sequence
  Oligonucleotide for detection of SNP TSC0015962
caccacacaaaaa

SEQ ID NO: 59621 - DNA, 13 bp, Artificial Sequence
  Oligonucleotide for detection of SNP TSC0015962
tttttgcgtggtg

SEQ ID NO: 59622 - DNA, 13 bp, Artificial Sequence
  Oligonucleotide for detection of SNP TSC0015962
caccacgcaaaaa

SEQ ID NO: 59623 - DNA, 13 bp, Artificial Sequence
  Oligonucleotide for detection of SNP TSC0015962
tttttgtgtggcg

SEQ ID NO: 59624 - DNA, 13 bp, Artificial Sequence
  Oligonucleotide for detection of SNP TSC0015962
cgccacacaaaaa

SEQ ID NO: 59625 - DNA, 13 bp, Artificial Sequence
  Oligonucleotide for detection of SNP TSC0015962
tttttgcgtggcg

SEQ ID NO: 59626 - DNA, 13 bp, Artificial Sequence
  Oligonucleotide for detection of SNP TSC0015962
cgccacgcaaaaa

SEQ ID NO: 59627 - DNA, 13 bp, Artificial Sequence
  Oligonucleotide for detection of SNP TSC0015962
tgttatgtagggg

SEQ ID NO: 59628 - DNA, 13 bp, Artificial Sequence
  Oligonucleotide for detection of SNP TSC0015962
cccctacataaca

SEQ ID NO: 59629 - DNA, 13 bp, Artificial Sequence
  Oligonucleotide for detection of SNP TSC0015962
tgttatatagggg

SEQ ID NO: 59630 - DNA, 13 bp, Artificial Sequence
  Oligonucleotide for detection of SNP TSC0015962
cccctatataaca

SEQ ID NO: 59631 - DNA, 13 bp, Artificial Sequence
  Oligonucleotide for detection of SNP TSC0015962
cgttatgtagggg

SEQ ID NO: 59632 - DNA, 13 bp, Artificial Sequence
  Oligonucleotide for detection of SNP TSC0015962
cccctacataacg

SEQ ID NO: 59633 - DNA, 13 bp, Artificial Sequence
  Oligonucleotide for detection of SNP TSC0015962
cgttatatagggg

SEQ ID NO: 59634 - DNA, 13 bp, Artificial Sequence
  Oligonucleotide for detection of SNP TSC0015962
cccctatataacg

SEQ ID NO: 59635 - DNA, 13 bp, Artificial Sequence
  Oligonucleotide for detection of SNP TSC0015962
tgttacgtagggg

SEQ ID NO: 59636 - DNA, 13 bp, Artificial Sequence
  Oligonucleotide for detection of SNP TSC0015962
cccctacgtaaca

SEQ ID NO: 59637 - DNA, 13 bp, Artificial Sequence
  Oligonucleotide for detection of SNP TSC0015962
cgttacgtagggg

SEQ ID NO: 59638 - DNA, 13 bp, Artificial Sequence
  Oligonucleotide for detection of SNP TSC0015962
cccctacgtaacg

SEQ ID NO: 59639 - DNA, 13 bp, Artificial Sequence
  Oligonucleotide for detection of SNP TSC0015963
tttttatgtggty

SEQ ID NO: 59640 - DNA, 13 bp, Artificial Sequence
  Oligonucleotide for detection of SNP TSC0015963
raccacataaaaa

SEQ ID NO: 59641 - DNA, 13 bp, Artificial Sequence
  Oligonucleotide for detection of SNP TSC0015963
tttttaggtggty

SEQ ID NO: 59642 - DNA, 13 bp, Artificial Sequence
  Oligonucleotide for detection of SNP TSC0015963
raccacctaaaaa

SEQ ID NO: 59643 - DNA, 13 bp, Artificial Sequence
  Oligonucleotide for detection of SNP TSC0015963
tttttacgtggty

SEQ ID NO: 59644 - DNA, 13 bp, Artificial Sequence
  Oligonucleotide for detection of SNP TSC0015963
raccacgtaaaaa

SEQ ID NO: 59645 - DNA, 13 bp, Artificial Sequence
  Oligonucleotide for detection of SNP TSC0015963
gattatgtgggga

SEQ ID NO: 59646 - DNA, 13 bp, Artificial Sequence
  Oligonucleotide for detection of SNP TSC0015963
tccccacataatc

SEQ ID NO: 59647 - DNA, 13 bp, Artificial Sequence
  Oligonucleotide for detection of SNP TSC0015963
gattatttgggga

SEQ ID NO: 59648 - DNA, 13 bp, Artificial Sequence
  Oligonucleotide for detection of SNP TSC0015963
tccccaaataatc

SEQ ID NO: 59649 - DNA, 13 bp, Artificial Sequence
  Oligonucleotide for detection of SNP TSC0015963
gattacgtgggga

SEQ ID NO: 59650 - DNA, 13 bp, Artificial Sequence
  Oligonucleotide for detection of SNP TSC0015963
tccccacgtaatc

SEQ ID NO: 59651 - DNA, 13 bp, Artificial Sequence
  Oligonucleotide for detection of SNP TSC0015965
atttttggtttta

SEQ ID NO: 59652 - DNA, 13 bp, Artificial Sequence
  Oligonucleotide for detection of SNP TSC0015965
taaaaccaaaaat

SEQ ID NO: 59653 - DNA, 13 bp, Artificial Sequence
  Oligonucleotide for detection of SNP TSC0015965
atttttagtttta

SEQ ID NO: 59654 - DNA, 13 bp, Artificial Sequence
  Oligonucleotide for detection of SNP TSC0015965
taaaactaaaaat

SEQ ID NO: 59655 - DNA, 13 bp, Artificial Sequence
  Oligonucleotide for detection of SNP TSC0015966
agatgatggttta

SEQ ID NO: 59656 - DNA, 13 bp, Artificial Sequence
  Oligonucleotide for detection of SNP TSC0015966
taaaccatcatct

SEQ ID NO: 59657 - DNA, 13 bp, Artificial Sequence
  Oligonucleotide for detection of SNP TSC0015966
agatgacggttta

SEQ ID NO: 59658 - DNA, 13 bp, Artificial Sequence
  Oligonucleotide for detection of SNP TSC0015966
taaaccgtcatct

SEQ ID NO: 59659 - DNA, 13 bp, Artificial Sequence
  Oligonucleotide for detection of SNP TSC0015966
tgagttgttattt

SEQ ID NO: 59660 - DNA, 13 bp, Artificial Sequence
  Oligonucleotide for detection of SNP TSC0015966
aaataacaactca

SEQ ID NO: 59661 - DNA, 13 bp, Artificial Sequence
  Oligonucleotide for detection of SNP TSC0015966
tgagttattattt

SEQ ID NO: 59662 - DNA, 13 bp, Artificial Sequence
  Oligonucleotide for detection of SNP TSC0015966
aaataataactca

SEQ ID NO: 59663 - DNA, 13 bp, Artificial Sequence
  Oligonucleotide for detection of SNP TSC0015966
tgagtcgttattt

SEQ ID NO: 59664 - DNA, 13 bp, Artificial Sequence
  Oligonucleotide for detection of SNP TSC0015966
aaataacgactca

SEQ ID NO: 59665 - DNA, 13 bp, Artificial Sequence
  Oligonucleotide for detection of SNP TSC0015967
tatgtagttttag

SEQ ID NO: 59666 - DNA, 13 bp, Artificial Sequence
  Oligonucleotide for detection of SNP TSC0015967
ctaaaactacata

SEQ ID NO: 59667 - DNA, 13 bp, Artificial Sequence
  Oligonucleotide for detection of SNP TSC0015967
tatgtaattttag

SEQ ID NO: 59668 - DNA, 13 bp, Artificial Sequence
  Oligonucleotide for detection of SNP TSC0015967
ctaaaattacata

SEQ ID NO: 59669 - DNA, 13 bp, Artificial Sequence
  Oligonucleotide for detection of SNP TSC0015968
tttatgattagat

SEQ ID NO: 59670 - DNA, 13 bp, Artificial Sequence
  Oligonucleotide for detection of SNP TSC0015968
atctaatcataaa

SEQ ID NO: 59671 - DNA, 13 bp, Artificial Sequence
  Oligonucleotide for detection of SNP TSC0015968
tttatggttagat

SEQ ID NO: 59672 - DNA, 13 bp, Artificial Sequence
  Oligonucleotide for detection of SNP TSC0015968
atctaaccataaa

SEQ ID NO: 59673 - DNA, 13 bp, Artificial Sequence
  Oligonucleotide for detection of SNP TSC0015968
tttacgattagat

SEQ ID NO: 59674 - DNA, 13 bp, Artificial Sequence
  Oligonucleotide for detection of SNP TSC0015968
atctaatcgtaaa

SEQ ID NO: 59675 - DNA, 13 bp, Artificial Sequence
  Oligonucleotide for detection of SNP TSC0015968
tttacggttagat

SEQ ID NO: 59676 - DNA, 13 bp, Artificial Sequence
  Oligonucleotide for detection of SNP TSC0015968
atctaaccgtaaa

SEQ ID NO: 59677 - DNA, 13 bp, Artificial Sequence
  Oligonucleotide for detection of SNP TSC0015969
atttatgaatata

SEQ ID NO: 59678 - DNA, 13 bp, Artificial Sequence
  Oligonucleotide for detection of SNP TSC0015969
tatattcataaat

SEQ ID NO: 59679 - DNA, 13 bp, Artificial Sequence
  Oligonucleotide for detection of SNP TSC0015969
atttattaatata

SEQ ID NO: 59680 - DNA, 13 bp, Artificial Sequence
  Oligonucleotide for detection of SNP TSC0015969
tatattaataaat

SEQ ID NO: 59681 - DNA, 13 bp, Artificial Sequence
  Oligonucleotide for detection of SNP TSC0015969
tgtgtttataaat

SEQ ID NO: 59682 - DNA, 13 bp, Artificial Sequence
  Oligonucleotide for detection of SNP TSC0015969
atttataaacaca

SEQ ID NO: 59683 - DNA, 13 bp, Artificial Sequence
  Oligonucleotide for detection of SNP TSC0015969
tgtgttaataaat

SEQ ID NO: 59684 - DNA, 13 bp, Artificial Sequence
  Oligonucleotide for detection of SNP TSC0015969
atttattaacaca

SEQ ID NO: 59685 - DNA, 13 bp, Artificial Sequence
  Oligonucleotide for detection of SNP TSC0015972
ataggtaaggttt

SEQ ID NO: 59686 - DNA, 13 bp, Artificial Sequence
  Oligonucleotide for detection of SNP TSC0015972
aaaccttacctat

SEQ ID NO: 59687 - DNA, 13 bp, Artificial Sequence
  Oligonucleotide for detection of SNP TSC0015972
ataggtgaggttt

SEQ ID NO: 59688 - DNA, 13 bp, Artificial Sequence
  Oligonucleotide for detection of SNP TSC0015972
aaacctcacctat

SEQ ID NO: 59689 - DNA, 13 bp, Artificial Sequence
  Oligonucleotide for detection of SNP TSC0015972
ataggcgaggttt

SEQ ID NO: 59690 - DNA, 13 bp, Artificial Sequence
  Oligonucleotide for detection of SNP TSC0015972
aaacctcgcctat

SEQ ID NO: 59691 - DNA, 13 bp, Artificial Sequence
  Oligonucleotide for detection of SNP TSC0015972
aggttttgtttgt

SEQ ID NO: 59692 - DNA, 13 bp, Artificial Sequence
  Oligonucleotide for detection of SNP TSC0015972
acaaacaaaacct

SEQ ID NO: 59693 - DNA, 13 bp, Artificial Sequence
  Oligonucleotide for detection of SNP TSC0015972
aggtttcgtttgt

SEQ ID NO: 59694 - DNA, 13 bp, Artificial Sequence
  Oligonucleotide for detection of SNP TSC0015972
acaaacgaaacct

SEQ ID NO: 59695 - DNA, 13 bp, Artificial Sequence
  Oligonucleotide for detection of SNP TSC0015973
tggttgtgtgttg

SEQ ID NO: 59696 - DNA, 13 bp, Artificial Sequence
  Oligonucleotide for detection of SNP TSC0015973
caacacacaacca

SEQ ID NO: 59697 - DNA, 13 bp, Artificial Sequence
  Oligonucleotide for detection of SNP TSC0015973
tggttgcgtgttg

SEQ ID NO: 59698 - DNA, 13 bp, Artificial Sequence
  Oligonucleotide for detection of SNP TSC0015973
caacacgcaacca

SEQ ID NO: 59699 - DNA, 13 bp, Artificial Sequence
  Oligonucleotide for detection of SNP TSC0015973
taatatgtagtta

SEQ ID NO: 59700 - DNA, 13 bp, Artificial Sequence
  Oligonucleotide for detection of SNP TSC0015973
taactacatatta

SEQ ID NO: 59701 - DNA, 13 bp, Artificial Sequence
  Oligonucleotide for detection of SNP TSC0015973
taatatatagtta

SEQ ID NO: 59702 - DNA, 13 bp, Artificial Sequence
  Oligonucleotide for detection of SNP TSC0015973
taactatatatta

SEQ ID NO: 59703 - DNA, 13 bp, Artificial Sequence
  Oligonucleotide for detection of SNP TSC0015973
taatacgtagtta

SEQ ID NO: 59704 - DNA, 13 bp, Artificial Sequence
  Oligonucleotide for detection of SNP TSC0015973
taactacgtatta

SEQ ID NO: 59705 - DNA, 13 bp, Artificial Sequence
  Oligonucleotide for detection of SNP TSC0015976
ggttgtataattt

SEQ ID NO: 59706 - DNA, 13 bp, Artificial Sequence
  Oligonucleotide for detection of SNP TSC0015976
aaattatacaacc

SEQ ID NO: 59707 - DNA, 13 bp, Artificial Sequence
  Oligonucleotide for detection of SNP TSC0015976
ggttgtttaattt

SEQ ID NO: 59708 - DNA, 13 bp, Artificial Sequence
  Oligonucleotide for detection of SNP TSC0015976
aaattaaacaacc

SEQ ID NO: 59709 - DNA, 13 bp, Artificial Sequence
  Oligonucleotide for detection of SNP TSC0015976
aggttgtgtagty

SEQ ID NO: 59710 - DNA, 13 bp, Artificial Sequence
  Oligonucleotide for detection of SNP TSC0015976
ractacacaacct

SEQ ID NO: 59711 - DNA, 13 bp, Artificial Sequence
  Oligonucleotide for detection of SNP TSC0015976
aggttgggtagty

SEQ ID NO: 59712 - DNA, 13 bp, Artificial Sequence
  Oligonucleotide for detection of SNP TSC0015976
ractacccaacct

SEQ ID NO: 59713 - DNA, 13 bp, Artificial Sequence
  Oligonucleotide for detection of SNP TSC0015977
tagagtaaggtta

SEQ ID NO: 59714 - DNA, 13 bp, Artificial Sequence
  Oligonucleotide for detection of SNP TSC0015977
taaccttactcta

SEQ ID NO: 59715 - DNA, 13 bp, Artificial Sequence
  Oligonucleotide for detection of SNP TSC0015977
tagagtgaggtta

SEQ ID NO: 59716 - DNA, 13 bp, Artificial Sequence
  Oligonucleotide for detection of SNP TSC0015977
taacctcactcta

SEQ ID NO: 59717 - DNA, 13 bp, Artificial Sequence
  Oligonucleotide for detection of SNP TSC0015977
tagagcgaggtta

SEQ ID NO: 59718 - DNA, 13 bp, Artificial Sequence
  Oligonucleotide for detection of SNP TSC0015977
taacctcgctcta

SEQ ID NO: 59719 - DNA, 13 bp, Artificial Sequence
  Oligonucleotide for detection of SNP TSC0015977
tggttttgttttg

SEQ ID NO: 59720 - DNA, 13 bp, Artificial Sequence
  Oligonucleotide for detection of SNP TSC0015977
caaaacaaaacca

SEQ ID NO: 59721 - DNA, 13 bp, Artificial Sequence
  Oligonucleotide for detection of SNP TSC0015977
tggtttcgttttg

SEQ ID NO: 59722 - DNA, 13 bp, Artificial Sequence
  Oligonucleotide for detection of SNP TSC0015977
caaaacgaaacca

SEQ ID NO: 59723 - DNA, 13 bp, Artificial Sequence
  Oligonucleotide for detection of SNP TSC0015978
aattttaatttgt

SEQ ID NO: 59724 - DNA, 13 bp, Artificial Sequence
  Oligonucleotide for detection of SNP TSC0015978
acaaattaaaatt

SEQ ID NO: 59725 - DNA, 13 bp, Artificial Sequence
  Oligonucleotide for detection of SNP TSC0015978
aatttttatttgt

SEQ ID NO: 59726 - DNA, 13 bp, Artificial Sequence
  Oligonucleotide for detection of SNP TSC0015978
acaaataaaaatt

SEQ ID NO: 59727 - DNA, 13 bp, Artificial Sequence
  Oligonucleotide for detection of SNP TSC0015978
atagattaaagtt

SEQ ID NO: 59728 - DNA, 13 bp, Artificial Sequence
  Oligonucleotide for detection of SNP TSC0015978
aactttaatctat

SEQ ID NO: 59729 - DNA, 13 bp, Artificial Sequence
  Oligonucleotide for detection of SNP TSC0015978
atagataaaagtt

SEQ ID NO: 59730 - DNA, 13 bp, Artificial Sequence
  Oligonucleotide for detection of SNP TSC0015978
aacttttatctat

SEQ ID NO: 59731 - DNA, 13 bp, Artificial Sequence
  Oligonucleotide for detection of SNP TSC0015980
ttgttagtattag

SEQ ID NO: 59732 - DNA, 13 bp, Artificial Sequence
  Oligonucleotide for detection of SNP TSC0015980
ctaatactaacaa

SEQ ID NO: 59733 - DNA, 13 bp, Artificial Sequence
  Oligonucleotide for detection of SNP TSC0015980
ttgttaatattag

SEQ ID NO: 59734 - DNA, 13 bp, Artificial Sequence
  Oligonucleotide for detection of SNP TSC0015980
ctaatattaacaa

SEQ ID NO: 59735 - DNA, 13 bp, Artificial Sequence
  Oligonucleotide for detection of SNP TSC0015982
ttgtatataaaay

SEQ ID NO: 59736 - DNA, 13 bp, Artificial Sequence
  Oligonucleotide for detection of SNP TSC0015982
rttttatatacaa

SEQ ID NO: 59737 - DNA, 13 bp, Artificial Sequence
  Oligonucleotide for detection of SNP TSC0015982
ttgtatgtaaaay

SEQ ID NO: 59738 - DNA, 13 bp, Artificial Sequence
  Oligonucleotide for detection of SNP TSC0015982
rttttacatacaa

SEQ ID NO: 59739 - DNA, 13 bp, Artificial Sequence
  Oligonucleotide for detection of SNP TSC0015982
tcgtatataaaay

SEQ ID NO: 59740 - DNA, 13 bp, Artificial Sequence
  Oligonucleotide for detection of SNP TSC0015982
rttttatatacga

SEQ ID NO: 59741 - DNA, 13 bp, Artificial Sequence
  Oligonucleotide for detection of SNP TSC0015982
tcgtatgtaaaay

SEQ ID NO: 59742 - DNA, 13 bp, Artificial Sequence
  Oligonucleotide for detection of SNP TSC0015982
rttttacatacga

SEQ ID NO: 59743 - DNA, 13 bp, Artificial Sequence
  Oligonucleotide for detection of SNP TSC0015982
ttgtacgtaaaay

SEQ ID NO: 59744 - DNA, 13 bp, Artificial Sequence
  Oligonucleotide for detection of SNP TSC0015982
rttttacgtacaa

SEQ ID NO: 59745 - DNA, 13 bp, Artificial Sequence
  Oligonucleotide for detection of SNP TSC0015982
tcgtacgtaaaay

SEQ ID NO: 59746 - DNA, 13 bp, Artificial Sequence
  Oligonucleotide for detection of SNP TSC0015982
rttttacgtacga

SEQ ID NO: 59747 - DNA, 13 bp, Artificial Sequence
  Oligonucleotide for detection of SNP TSC0015982
gttttgtgtatga

SEQ ID NO: 59748 - DNA, 13 bp, Artificial Sequence
  Oligonucleotide for detection of SNP TSC0015982
tcatacacaaaac

SEQ ID NO: 59749 - DNA, 13 bp, Artificial Sequence
  Oligonucleotide for detection of SNP TSC0015982
gttttgtgtacga

SEQ ID NO: 59750 - DNA, 13 bp, Artificial Sequence
  Oligonucleotide for detection of SNP TSC0015982
tcgtacacaaaac

SEQ ID NO: 59751 - DNA, 13 bp, Artificial Sequence
  Oligonucleotide for detection of SNP TSC0015982
gttttgcgtatga

SEQ ID NO: 59752 - DNA, 13 bp, Artificial Sequence
  Oligonucleotide for detection of SNP TSC0015982
tcatacgcaaaac

SEQ ID NO: 59753 - DNA, 13 bp, Artificial Sequence
  Oligonucleotide for detection of SNP TSC0015982
gttttgcgtacga

SEQ ID NO: 59754 - DNA, 13 bp, Artificial Sequence
  Oligonucleotide for detection of SNP TSC0015982
tcgtacgcaaaac

SEQ ID NO: 59755 - DNA, 13 bp, Artificial Sequence
  Oligonucleotide for detection of SNP TSC0015983
tattttaaaaggy

SEQ ID NO: 59756 - DNA, 13 bp, Artificial Sequence
  Oligonucleotide for detection of SNP TSC0015983
rccttttaaaata

SEQ ID NO: 59757 - DNA, 13 bp, Artificial Sequence
  Oligonucleotide for detection of SNP TSC0015983
tatttttaaaggy

SEQ ID NO: 59758 - DNA, 13 bp, Artificial Sequence
  Oligonucleotide for detection of SNP TSC0015983
rcctttaaaaata

SEQ ID NO: 59759 - DNA, 13 bp, Artificial Sequence
  Oligonucleotide for detection of SNP TSC0015983
gttttttgaaata

SEQ ID NO: 59760 - DNA, 13 bp, Artificial Sequence
  Oligonucleotide for detection of SNP TSC0015983
tatttcaaaaaac

SEQ ID NO: 59761 - DNA, 13 bp, Artificial Sequence
  Oligonucleotide for detection of SNP TSC0015983
gtttttggaaata

SEQ ID NO: 59762 - DNA, 13 bp, Artificial Sequence
  Oligonucleotide for detection of SNP TSC0015983
tatttccaaaaac

SEQ ID NO: 59763 - DNA, 13 bp, Artificial Sequence
  Oligonucleotide for detection of SNP TSC0015985
tattttgatatty

SEQ ID NO: 59764 - DNA, 13 bp, Artificial Sequence
  Oligonucleotide for detection of SNP TSC0015985
raatatcaaaata

SEQ ID NO: 59765 - DNA, 13 bp, Artificial Sequence
  Oligonucleotide for detection of SNP TSC0015985
tatttttatatty

SEQ ID NO: 59766 - DNA, 13 bp, Artificial Sequence
  Oligonucleotide for detection of SNP TSC0015985
raatataaaaata

SEQ ID NO: 59767 - DNA, 13 bp, Artificial Sequence
  Oligonucleotide for detection of SNP TSC0015985
ggatattaaggtg

SEQ ID NO: 59768 - DNA, 13 bp, Artificial Sequence
  Oligonucleotide for detection of SNP TSC0015985
caccttaatatcc

SEQ ID NO: 59769 - DNA, 13 bp, Artificial Sequence
  Oligonucleotide for detection of SNP TSC0015985
ggatataaaggtg

SEQ ID NO: 59770 - DNA, 13 bp, Artificial Sequence
  Oligonucleotide for detection of SNP TSC0015985
cacctttatatcc

SEQ ID NO: 59771 - DNA, 13 bp, Artificial Sequence
  Oligonucleotide for detection of SNP TSC0015988
aatgggaaaaata

SEQ ID NO: 59772 - DNA, 13 bp, Artificial Sequence
  Oligonucleotide for detection of SNP TSC0015988
tatttttcccatt

SEQ ID NO: 59773 - DNA, 13 bp, Artificial Sequence
  Oligonucleotide for detection of SNP TSC0015988
aatggggaaaata

SEQ ID NO: 59774 - DNA, 13 bp, Artificial Sequence
  Oligonucleotide for detection of SNP TSC0015988
tattttccccatt

SEQ ID NO: 59775 - DNA, 13 bp, Artificial Sequence
  Oligonucleotide for detection of SNP TSC0015989
aaatgtatatgta

SEQ ID NO: 59776 - DNA, 13 bp, Artificial Sequence
  Oligonucleotide for detection of SNP TSC0015989
tacatatacattt

SEQ ID NO: 59777 - DNA, 13 bp, Artificial Sequence
  Oligonucleotide for detection of SNP TSC0015989
aaatgtgtatgta

SEQ ID NO: 59778 - DNA, 13 bp, Artificial Sequence
  Oligonucleotide for detection of SNP TSC0015989
tacatacacattt

SEQ ID NO: 59779 - DNA, 13 bp, Artificial Sequence
  Oligonucleotide for detection of SNP TSC0015993
attagtggtgaty

SEQ ID NO: 59780 - DNA, 13 bp, Artificial Sequence
  Oligonucleotide for detection of SNP TSC0015993
ratcaccactaat

SEQ ID NO: 59781 - DNA, 13 bp, Artificial Sequence
  Oligonucleotide for detection of SNP TSC0015993
attagttgtgaty

SEQ ID NO: 59782 - DNA, 13 bp, Artificial Sequence
  Oligonucleotide for detection of SNP TSC0015993
ratcacaactaat

SEQ ID NO: 59783 - DNA, 13 bp, Artificial Sequence
  Oligonucleotide for detection of SNP TSC0015993
attagcggtgaty

SEQ ID NO: 59784 - DNA, 13 bp, Artificial Sequence
  Oligonucleotide for detection of SNP TSC0015993
ratcaccgctaat

SEQ ID NO: 59785 - DNA, 13 bp, Artificial Sequence
  Oligonucleotide for detection of SNP TSC0015993
ggttattgttaat

SEQ ID NO: 59786 - DNA, 13 bp, Artificial Sequence
  Oligonucleotide for detection of SNP TSC0015993
attaacaataacc

SEQ ID NO: 59787 - DNA, 13 bp, Artificial Sequence
  Oligonucleotide for detection of SNP TSC0015993
ggttatagttaat

SEQ ID NO: 59788 - DNA, 13 bp, Artificial Sequence
  Oligonucleotide for detection of SNP TSC0015993
attaactataacc

SEQ ID NO: 59789 - DNA, 13 bp, Artificial Sequence
  Oligonucleotide for detection of SNP TSC0015993
ggttatcgttaat

SEQ ID NO: 59790 - DNA, 13 bp, Artificial Sequence
  Oligonucleotide for detection of SNP TSC0015993
attaacgataacc

SEQ ID NO: 59791 - DNA, 13 bp, Artificial Sequence
  Oligonucleotide for detection of SNP TSC0015994
tagatgtgattgt

SEQ ID NO: 59792 - DNA, 13 bp, Artificial Sequence
  Oligonucleotide for detection of SNP TSC0015994
acaatcacatcta

SEQ ID NO: 59793 - DNA, 13 bp, Artificial Sequence
  Oligonucleotide for detection of SNP TSC0015994
tagatgcgattgt

SEQ ID NO: 59794 - DNA, 13 bp, Artificial Sequence
  Oligonucleotide for detection of SNP TSC0015994
acaatcgcatcta

SEQ ID NO: 59795 - DNA, 13 bp, Artificial Sequence
  Oligonucleotide for detection of SNP TSC0015994
ataattgtattta

SEQ ID NO: 59796 - DNA, 13 bp, Artificial Sequence
  Oligonucleotide for detection of SNP TSC0015994
taaatacaattat

SEQ ID NO: 59797 - DNA, 13 bp, Artificial Sequence
  Oligonucleotide for detection of SNP TSC0015994
ataattatattta

SEQ ID NO: 59798 - DNA, 13 bp, Artificial Sequence
  Oligonucleotide for detection of SNP TSC0015994
taaatataattat

SEQ ID NO: 59799 - DNA, 13 bp, Artificial Sequence
  Oligonucleotide for detection of SNP TSC0015994
ataatcgtattta

SEQ ID NO: 59800 - DNA, 13 bp, Artificial Sequence
  Oligonucleotide for detection of SNP TSC0015994
taaatacgattat

SEQ ID NO: 59801 - DNA, 13 bp, Artificial Sequence
  Oligonucleotide for detection of SNP TSC0015999
aggagataaatgg

SEQ ID NO: 59802 - DNA, 13 bp, Artificial Sequence
  Oligonucleotide for detection of SNP TSC0015999
ccatttatctcct

SEQ ID NO: 59803 - DNA, 13 bp, Artificial Sequence
  Oligonucleotide for detection of SNP TSC0015999
aggagagaaatgg

SEQ ID NO: 59804 - DNA, 13 bp, Artificial Sequence
  Oligonucleotide for detection of SNP TSC0015999
ccatttctctcct

SEQ ID NO: 59805 - DNA, 13 bp, Artificial Sequence
  Oligonucleotide for detection of SNP TSC0016002
ttatttatgaaag

SEQ ID NO: 59806 - DNA, 13 bp, Artificial Sequence
  Oligonucleotide for detection of SNP TSC0016002
ctttcataaataa

SEQ ID NO: 59807 - DNA, 13 bp, Artificial Sequence
  Oligonucleotide for detection of SNP TSC0016002
ttatttgtgaaag

SEQ ID NO: 59808 - DNA, 13 bp, Artificial Sequence
  Oligonucleotide for detection of SNP TSC0016002
ctttcacaaataa

SEQ ID NO: 59809 - DNA, 13 bp, Artificial Sequence
  Oligonucleotide for detection of SNP TSC0016002
ttattcgtgaaag

SEQ ID NO: 59810 - DNA, 13 bp, Artificial Sequence
  Oligonucleotide for detection of SNP TSC0016002
ctttcacgaataa

SEQ ID NO: 59811 - DNA, 13 bp, Artificial Sequence
  Oligonucleotide for detection of SNP TSC0016002
tttttatggatag

SEQ ID NO: 59812 - DNA, 13 bp, Artificial Sequence
  Oligonucleotide for detection of SNP TSC0016002
ctatccataaaaa

SEQ ID NO: 59813 - DNA, 13 bp, Artificial Sequence
  Oligonucleotide for detection of SNP TSC0016002
tttttacggatag

SEQ ID NO: 59814 - DNA, 13 bp, Artificial Sequence
  Oligonucleotide for detection of SNP TSC0016002
ctatccgtaaaaa

SEQ ID NO: 59815 - DNA, 13 bp, Artificial Sequence
  Oligonucleotide for detection of SNP TSC0016003
aagtttaggtagg

SEQ ID NO: 59816 - DNA, 13 bp, Artificial Sequence
  Oligonucleotide for detection of SNP TSC0016003
cctacctaaactt

SEQ ID NO: 59817 - DNA, 13 bp, Artificial Sequence
  Oligonucleotide for detection of SNP TSC0016003
aagtttgggtagg

SEQ ID NO: 59818 - DNA, 13 bp, Artificial Sequence
  Oligonucleotide for detection of SNP TSC0016003
cctacccaaactt

SEQ ID NO: 59819 - DNA, 13 bp, Artificial Sequence
  Oligonucleotide for detection of SNP TSC0016003
aagttcgggtagg

SEQ ID NO: 59820 - DNA, 13 bp, Artificial Sequence
  Oligonucleotide for detection of SNP TSC0016003
cctacccgaactt

SEQ ID NO: 59821 - DNA, 13 bp, Artificial Sequence
  Oligonucleotide for detection of SNP TSC0016003
tttgtttgagttt

SEQ ID NO: 59822 - DNA, 13 bp, Artificial Sequence
  Oligonucleotide for detection of SNP TSC0016003
aaactcaaacaaa

SEQ ID NO: 59823 - DNA, 13 bp, Artificial Sequence
  Oligonucleotide for detection of SNP TSC0016003
tttgttcgagttt

SEQ ID NO: 59824 - DNA, 13 bp, Artificial Sequence
  Oligonucleotide for detection of SNP TSC0016003
aaactcgaacaaa

SEQ ID NO: 59825 - DNA, 13 bp, Artificial Sequence
  Oligonucleotide for detection of SNP TSC0016007
ttttttagagtgt

SEQ ID NO: 59826 - DNA, 13 bp, Artificial Sequence
  Oligonucleotide for detection of SNP TSC0016007
acactctaaaaaa

SEQ ID NO: 59827 - DNA, 13 bp, Artificial Sequence
  Oligonucleotide for detection of SNP TSC0016007
ttttttggagtgt

SEQ ID NO: 59828 - DNA, 13 bp, Artificial Sequence
  Oligonucleotide for detection of SNP TSC0016007
acactccaaaaaa

SEQ ID NO: 59829 - DNA, 13 bp, Artificial Sequence
  Oligonucleotide for detection of SNP TSC0016007
tttttcggagtgt

SEQ ID NO: 59830 - DNA, 13 bp, Artificial Sequence
  Oligonucleotide for detection of SNP TSC0016007
acactccgaaaaa

SEQ ID NO: 59831 - DNA, 13 bp, Artificial Sequence
  Oligonucleotide for detection of SNP TSC0016007
atattttggagag

SEQ ID NO: 59832 - DNA, 13 bp, Artificial Sequence
  Oligonucleotide for detection of SNP TSC0016007
ctctccaaaatat

SEQ ID NO: 59833 - DNA, 13 bp, Artificial Sequence
  Oligonucleotide for detection of SNP TSC0016007
atatttcggagag

SEQ ID NO: 59834 - DNA, 13 bp, Artificial Sequence
  Oligonucleotide for detection of SNP TSC0016007
ctctccgaaatat

SEQ ID NO: 59835 - DNA, 13 bp, Artificial Sequence
  Oligonucleotide for detection of SNP TSC0016008
tataatgataaag

SEQ ID NO: 59836 - DNA, 13 bp, Artificial Sequence
  Oligonucleotide for detection of SNP TSC0016008
ctttatcattata

SEQ ID NO: 59837 - DNA, 13 bp, Artificial Sequence
  Oligonucleotide for detection of SNP TSC0016008
tataattataaag

SEQ ID NO: 59838 - DNA, 13 bp, Artificial Sequence
  Oligonucleotide for detection of SNP TSC0016008
ctttataattata

SEQ ID NO: 59839 - DNA, 13 bp, Artificial Sequence
  Oligonucleotide for detection of SNP TSC0016008
ttttattattgta

SEQ ID NO: 59840 - DNA, 13 bp, Artificial Sequence
  Oligonucleotide for detection of SNP TSC0016008
tacaataataaaa

SEQ ID NO: 59841 - DNA, 13 bp, Artificial Sequence
  Oligonucleotide for detection of SNP TSC0016008
ttttataattgta

SEQ ID NO: 59842 - DNA, 13 bp, Artificial Sequence
  Oligonucleotide for detection of SNP TSC0016008
tacaattataaaa

SEQ ID NO: 59843 - DNA, 13 bp, Artificial Sequence
  Oligonucleotide for detection of SNP TSC0016009
tttaaaaagtaga

SEQ ID NO: 59844 - DNA, 13 bp, Artificial Sequence
  Oligonucleotide for detection of SNP TSC0016009
tctactttttaaa

SEQ ID NO: 59845 - DNA, 13 bp, Artificial Sequence
  Oligonucleotide for detection of SNP TSC0016009
tttaaagagtaga

SEQ ID NO: 59846 - DNA, 13 bp, Artificial Sequence
  Oligonucleotide for detection of SNP TSC0016009
tctactctttaaa

SEQ ID NO: 59847 - DNA, 13 bp, Artificial Sequence
  Oligonucleotide for detection of SNP TSC0016010
gataattgttttt

SEQ ID NO: 59848 - DNA, 13 bp, Artificial Sequence
  Oligonucleotide for detection of SNP TSC0016010
aaaaacaattatc

SEQ ID NO: 59849 - DNA, 13 bp, Artificial Sequence
  Oligonucleotide for detection of SNP TSC0016010
gataatggttttt

SEQ ID NO: 59850 - DNA, 13 bp, Artificial Sequence
  Oligonucleotide for detection of SNP TSC0016010
aaaaaccattatc

SEQ ID NO: 59851 - DNA, 13 bp, Artificial Sequence
  Oligonucleotide for detection of SNP TSC0016010
gataatcgttttt

SEQ ID NO: 59852 - DNA, 13 bp, Artificial Sequence
  Oligonucleotide for detection of SNP TSC0016010
aaaaacgattatc

SEQ ID NO: 59853 - DNA, 13 bp, Artificial Sequence
  Oligonucleotide for detection of SNP TSC0016010
aaaagtgattaty

SEQ ID NO: 59854 - DNA, 13 bp, Artificial Sequence
  Oligonucleotide for detection of SNP TSC0016010
rataatcactttt

SEQ ID NO: 59855 - DNA, 13 bp, Artificial Sequence
  Oligonucleotide for detection of SNP TSC0016010
aaaagttattaty

SEQ ID NO: 59856 - DNA, 13 bp, Artificial Sequence
  Oligonucleotide for detection of SNP TSC0016010
rataataactttt

SEQ ID NO: 59857 - DNA, 13 bp, Artificial Sequence
  Oligonucleotide for detection of SNP TSC0016010
aaaagcgattaty

SEQ ID NO: 59858 - DNA, 13 bp, Artificial Sequence
  Oligonucleotide for detection of SNP TSC0016010
rataatcgctttt

SEQ ID NO: 59859 - DNA, 13 bp, Artificial Sequence
  Oligonucleotide for detection of SNP TSC0016011
tgttataaggagy

SEQ ID NO: 59860 - DNA, 13 bp, Artificial Sequence
  Oligonucleotide for detection of SNP TSC0016011
rctccttataaca

SEQ ID NO: 59861 - DNA, 13 bp, Artificial Sequence
  Oligonucleotide for detection of SNP TSC0016011
tgttatgaggagy

SEQ ID NO: 59862 - DNA, 13 bp, Artificial Sequence
  Oligonucleotide for detection of SNP TSC0016011
rctcctcataaca

SEQ ID NO: 59863 - DNA, 13 bp, Artificial Sequence
  Oligonucleotide for detection of SNP TSC0016011
cgttataaggagy

SEQ ID NO: 59864 - DNA, 13 bp, Artificial Sequence
  Oligonucleotide for detection of SNP TSC0016011
rctccttataacg

SEQ ID NO: 59865 - DNA, 13 bp, Artificial Sequence
  Oligonucleotide for detection of SNP TSC0016011
cgttatgaggagy

SEQ ID NO: 59866 - DNA, 13 bp, Artificial Sequence
  Oligonucleotide for detection of SNP TSC0016011
rctcctcataacg

SEQ ID NO: 59867 - DNA, 13 bp, Artificial Sequence
  Oligonucleotide for detection of SNP TSC0016011
tgttacgaggagy

SEQ ID NO: 59868 - DNA, 13 bp, Artificial Sequence
  Oligonucleotide for detection of SNP TSC0016011
rctcctcgtaaca

SEQ ID NO: 59869 - DNA, 13 bp, Artificial Sequence
  Oligonucleotide for detection of SNP TSC0016011
cgttacgaggagy

SEQ ID NO: 59870 - DNA, 13 bp, Artificial Sequence
  Oligonucleotide for detection of SNP TSC0016011
rctcctcgtaacg

SEQ ID NO: 59871 - DNA, 13 bp, Artificial Sequence
  Oligonucleotide for detection of SNP TSC0016011
gttttttgtggtg

SEQ ID NO: 59872 - DNA, 13 bp, Artificial Sequence
  Oligonucleotide for detection of SNP TSC0016011
caccacaaaaaac

SEQ ID NO: 59873 - DNA, 13 bp, Artificial Sequence
  Oligonucleotide for detection of SNP TSC0016011
gttttttgtggcg

SEQ ID NO: 59874 - DNA, 13 bp, Artificial Sequence
  Oligonucleotide for detection of SNP TSC0016011
cgccacaaaaaac

SEQ ID NO: 59875 - DNA, 13 bp, Artificial Sequence
  Oligonucleotide for detection of SNP TSC0016011
gtttttcgtggtg

SEQ ID NO: 59876 - DNA, 13 bp, Artificial Sequence
  Oligonucleotide for detection of SNP TSC0016011
caccacgaaaaac

SEQ ID NO: 59877 - DNA, 13 bp, Artificial Sequence
  Oligonucleotide for detection of SNP TSC0016011
gtttttcgtggcg

SEQ ID NO: 59878 - DNA, 13 bp, Artificial Sequence
  Oligonucleotide for detection of SNP TSC0016011
cgccacgaaaaac

SEQ ID NO: 59879 - DNA, 13 bp, Artificial Sequence
  Oligonucleotide for detection of SNP TSC0016012
atagtaggtgtty

SEQ ID NO: 59880 - DNA, 13 bp, Artificial Sequence
  Oligonucleotide for detection of SNP TSC0016012
raacacctactat

SEQ ID NO: 59881 - DNA, 13 bp, Artificial Sequence
  Oligonucleotide for detection of SNP TSC0016012
atagtaagtgtty

SEQ ID NO: 59882 - DNA, 13 bp, Artificial Sequence
  Oligonucleotide for detection of SNP TSC0016012
raacacttactat

SEQ ID NO: 59883 - DNA, 13 bp, Artificial Sequence
  Oligonucleotide for detection of SNP TSC0016013
gatatatgttttg

SEQ ID NO: 59884 - DNA, 13 bp, Artificial Sequence
  Oligonucleotide for detection of SNP TSC0016013
caaaacatatatc

SEQ ID NO: 59885 - DNA, 13 bp, Artificial Sequence
  Oligonucleotide for detection of SNP TSC0016013
gatatacgttttg

SEQ ID NO: 59886 - DNA, 13 bp, Artificial Sequence
  Oligonucleotide for detection of SNP TSC0016013
caaaacgtatatc

SEQ ID NO: 59887 - DNA, 13 bp, Artificial Sequence
  Oligonucleotide for detection of SNP TSC0016013
taaaatgtataty

SEQ ID NO: 59888 - DNA, 13 bp, Artificial Sequence
  Oligonucleotide for detection of SNP TSC0016013
ratatacatttta

SEQ ID NO: 59889 - DNA, 13 bp, Artificial Sequence
  Oligonucleotide for detection of SNP TSC0016013
taaaatatataty

SEQ ID NO: 59890 - DNA, 13 bp, Artificial Sequence
  Oligonucleotide for detection of SNP TSC0016013
ratatatatttta

SEQ ID NO: 59891 - DNA, 13 bp, Artificial Sequence
  Oligonucleotide for detection of SNP TSC0016013
taaaacgtataty

SEQ ID NO: 59892 - DNA, 13 bp, Artificial Sequence
  Oligonucleotide for detection of SNP TSC0016013
ratatacgtttta

SEQ ID NO: 59893 - DNA, 13 bp, Artificial Sequence
  Oligonucleotide for detection of SNP TSC0016014
agattggttatga

SEQ ID NO: 59894 - DNA, 13 bp, Artificial Sequence
  Oligonucleotide for detection of SNP TSC0016014
tcataaccaatct

SEQ ID NO: 59895 - DNA, 13 bp, Artificial Sequence
  Oligonucleotide for detection of SNP TSC0016014
agattgattatga

SEQ ID NO: 59896 - DNA, 13 bp, Artificial Sequence
  Oligonucleotide for detection of SNP TSC0016014
tcataatcaatct

SEQ ID NO: 59897 - DNA, 13 bp, Artificial Sequence
  Oligonucleotide for detection of SNP TSC0016016
attattgagttag

SEQ ID NO: 59898 - DNA, 13 bp, Artificial Sequence
  Oligonucleotide for detection of SNP TSC0016016
ctaactcaataat

SEQ ID NO: 59899 - DNA, 13 bp, Artificial Sequence
  Oligonucleotide for detection of SNP TSC0016016
attattaagttag

SEQ ID NO: 59900 - DNA, 13 bp, Artificial Sequence
  Oligonucleotide for detection of SNP TSC0016016
ctaacttaataat

SEQ ID NO: 59901 - DNA, 13 bp, Artificial Sequence
  Oligonucleotide for detection of SNP TSC0016017
tttttatatgtta

SEQ ID NO: 59902 - DNA, 13 bp, Artificial Sequence
  Oligonucleotide for detection of SNP TSC0016017
taacatataaaaa

SEQ ID NO: 59903 - DNA, 13 bp, Artificial Sequence
  Oligonucleotide for detection of SNP TSC0016017
tttttagatgtta

SEQ ID NO: 59904 - DNA, 13 bp, Artificial Sequence
  Oligonucleotide for detection of SNP TSC0016017
taacatctaaaaa

SEQ ID NO: 59905 - DNA, 13 bp, Artificial Sequence
  Oligonucleotide for detection of SNP TSC0016017
taatatgtgaggg

SEQ ID NO: 59906 - DNA, 13 bp, Artificial Sequence
  Oligonucleotide for detection of SNP TSC0016017
ccctcacatatta

SEQ ID NO: 59907 - DNA, 13 bp, Artificial Sequence
  Oligonucleotide for detection of SNP TSC0016017
taatatttgaggg

SEQ ID NO: 59908 - DNA, 13 bp, Artificial Sequence
  Oligonucleotide for detection of SNP TSC0016017
ccctcaaatatta

SEQ ID NO: 59909 - DNA, 13 bp, Artificial Sequence
  Oligonucleotide for detection of SNP TSC0016019
gttttttgagtay

SEQ ID NO: 59910 - DNA, 13 bp, Artificial Sequence
  Oligonucleotide for detection of SNP TSC0016019
rtactcaaaaaac

SEQ ID NO: 59911 - DNA, 13 bp, Artificial Sequence
  Oligonucleotide for detection of SNP TSC0016019
gtttttcgagtay

SEQ ID NO: 59912 - DNA, 13 bp, Artificial Sequence
  Oligonucleotide for detection of SNP TSC0016019
rtactcgaaaaac

SEQ ID NO: 59913 - DNA, 13 bp, Artificial Sequence
  Oligonucleotide for detection of SNP TSC0016019
gtatttgggaggy

SEQ ID NO: 59914 - DNA, 13 bp, Artificial Sequence
  Oligonucleotide for detection of SNP TSC0016019
rcctcccaaatac

SEQ ID NO: 59915 - DNA, 13 bp, Artificial Sequence
  Oligonucleotide for detection of SNP TSC0016019
gtatttaggaggy

SEQ ID NO: 59916 - DNA, 13 bp, Artificial Sequence
  Oligonucleotide for detection of SNP TSC0016019
rcctcctaaatac

SEQ ID NO: 59917 - DNA, 13 bp, Artificial Sequence
  Oligonucleotide for detection of SNP TSC0016019
gtattcgggaggy

SEQ ID NO: 59918 - DNA, 13 bp, Artificial Sequence
  Oligonucleotide for detection of SNP TSC0016019
rcctcccgaatac

SEQ ID NO: 59919 - DNA, 13 bp, Artificial Sequence
  Oligonucleotide for detection of SNP TSC0016020
ttaggggtattty

SEQ ID NO: 59920 - DNA, 13 bp, Artificial Sequence
  Oligonucleotide for detection of SNP TSC0016020
raaatacccctaa

SEQ ID NO: 59921 - DNA, 13 bp, Artificial Sequence
  Oligonucleotide for detection of SNP TSC0016020
ttagggatattty

SEQ ID NO: 59922 - DNA, 13 bp, Artificial Sequence
  Oligonucleotide for detection of SNP TSC0016020
raaatatccctaa

SEQ ID NO: 59923 - DNA, 13 bp, Artificial Sequence
  Oligonucleotide for detection of SNP TSC0016021
aaaggtgaatggy

SEQ ID NO: 59924 - DNA, 13 bp, Artificial Sequence
  Oligonucleotide for detection of SNP TSC0016021
rccattcaccttt

SEQ ID NO: 59925 - DNA, 13 bp, Artificial Sequence
  Oligonucleotide for detection of SNP TSC0016021
aaaggttaatggy

SEQ ID NO: 59926 - DNA, 13 bp, Artificial Sequence
  Oligonucleotide for detection of SNP TSC0016021
rccattaaccttt

SEQ ID NO: 59927 - DNA, 13 bp, Artificial Sequence
  Oligonucleotide for detection of SNP TSC0016021
aaaggtgaacggy

SEQ ID NO: 59928 - DNA, 13 bp, Artificial Sequence
  Oligonucleotide for detection of SNP TSC0016021
rccgttcaccttt

SEQ ID NO: 59929 - DNA, 13 bp, Artificial Sequence
  Oligonucleotide for detection of SNP TSC0016021
aaaggttaacggy

SEQ ID NO: 59930 - DNA, 13 bp, Artificial Sequence
  Oligonucleotide for detection of SNP TSC0016021
rccgttaaccttt

SEQ ID NO: 59931 - DNA, 13 bp, Artificial Sequence
  Oligonucleotide for detection of SNP TSC0016021
gttgtttattttt

SEQ ID NO: 59932 - DNA, 13 bp, Artificial Sequence
  Oligonucleotide for detection of SNP TSC0016021
aaaaataaacaac

SEQ ID NO: 59933 - DNA, 13 bp, Artificial Sequence
  Oligonucleotide for detection of SNP TSC0016021
gttgttaattttt

SEQ ID NO: 59934 - DNA, 13 bp, Artificial Sequence
  Oligonucleotide for detection of SNP TSC0016021
aaaaattaacaac

SEQ ID NO: 59935 - DNA, 13 bp, Artificial Sequence
  Oligonucleotide for detection of SNP TSC0016021
gtcgtttattttt

SEQ ID NO: 59936 - DNA, 13 bp, Artificial Sequence
  Oligonucleotide for detection of SNP TSC0016021
aaaaataaacgac

SEQ ID NO: 59937 - DNA, 13 bp, Artificial Sequence
  Oligonucleotide for detection of SNP TSC0016021
gtcgttaattttt

SEQ ID NO: 59938 - DNA, 13 bp, Artificial Sequence
  Oligonucleotide for detection of SNP TSC0016021
aaaaattaacgac

SEQ ID NO: 59939 - DNA, 13 bp, Artificial Sequence
  Oligonucleotide for detection of SNP TSC0016022
taaaaatgttaat

SEQ ID NO: 59940 - DNA, 13 bp, Artificial Sequence
  Oligonucleotide for detection of SNP TSC0016022
attaacattttta

SEQ ID NO: 59941 - DNA, 13 bp, Artificial Sequence
  Oligonucleotide for detection of SNP TSC0016022
taaaaacgttaat

SEQ ID NO: 59942 - DNA, 13 bp, Artificial Sequence
  Oligonucleotide for detection of SNP TSC0016022
attaacgttttta

SEQ ID NO: 59943 - DNA, 13 bp, Artificial Sequence
  Oligonucleotide for detection of SNP TSC0016022
attggtgtttttg

SEQ ID NO: 59944 - DNA, 13 bp, Artificial Sequence
  Oligonucleotide for detection of SNP TSC0016022
caaaaacaccaat

SEQ ID NO: 59945 - DNA, 13 bp, Artificial Sequence
  Oligonucleotide for detection of SNP TSC0016022
attggtatttttg

SEQ ID NO: 59946 - DNA, 13 bp, Artificial Sequence
  Oligonucleotide for detection of SNP TSC0016022
caaaaataccaat

SEQ ID NO: 59947 - DNA, 13 bp, Artificial Sequence
  Oligonucleotide for detection of SNP TSC0016022
attggcgtttttg

SEQ ID NO: 59948 - DNA, 13 bp, Artificial Sequence
  Oligonucleotide for detection of SNP TSC0016022
caaaaacgccaat

SEQ ID NO: 59949 - DNA, 13 bp, Artificial Sequence
  Oligonucleotide for detection of SNP TSC0016023
gaagaggggaagg

SEQ ID NO: 59950 - DNA, 13 bp, Artificial Sequence
  Oligonucleotide for detection of SNP TSC0016023
ccttcccctcttc

SEQ ID NO: 59951 - DNA, 13 bp, Artificial Sequence
  Oligonucleotide for detection of SNP TSC0016023
gaagagtggaagg

SEQ ID NO: 59952 - DNA, 13 bp, Artificial Sequence
  Oligonucleotide for detection of SNP TSC0016023
ccttccactcttc

SEQ ID NO: 59953 - DNA, 13 bp, Artificial Sequence
  Oligonucleotide for detection of SNP TSC0016026
aaggatattttta

SEQ ID NO: 59954 - DNA, 13 bp, Artificial Sequence
  Oligonucleotide for detection of SNP TSC0016026
taaaaatatcctt

SEQ ID NO: 59955 - DNA, 13 bp, Artificial Sequence
  Oligonucleotide for detection of SNP TSC0016026
aaggatgttttta

SEQ ID NO: 59956 - DNA, 13 bp, Artificial Sequence
  Oligonucleotide for detection of SNP TSC0016026
taaaaacatcctt

SEQ ID NO: 59957 - DNA, 13 bp, Artificial Sequence
  Oligonucleotide for detection of SNP TSC0016027
tgttttattagay

SEQ ID NO: 59958 - DNA, 13 bp, Artificial Sequence
  Oligonucleotide for detection of SNP TSC0016027
rtctaataaaaca

SEQ ID NO: 59959 - DNA, 13 bp, Artificial Sequence
  Oligonucleotide for detection of SNP TSC0016027
tgttttgttagay

SEQ ID NO: 59960 - DNA, 13 bp, Artificial Sequence
  Oligonucleotide for detection of SNP TSC0016027
rtctaacaaaaca

SEQ ID NO: 59961 - DNA, 13 bp, Artificial Sequence
  Oligonucleotide for detection of SNP TSC0016027
tgtttcgttagay

SEQ ID NO: 59962 - DNA, 13 bp, Artificial Sequence
  Oligonucleotide for detection of SNP TSC0016027
rtctaacgaaaca

SEQ ID NO: 59963 - DNA, 13 bp, Artificial Sequence
  Oligonucleotide for detection of SNP TSC0016027
gtttgatgaagta

SEQ ID NO: 59964 - DNA, 13 bp, Artificial Sequence
  Oligonucleotide for detection of SNP TSC0016027
tacttcatcaaac

SEQ ID NO: 59965 - DNA, 13 bp, Artificial Sequence
  Oligonucleotide for detection of SNP TSC0016027
gtttgacgaagta

SEQ ID NO: 59966 - DNA, 13 bp, Artificial Sequence
  Oligonucleotide for detection of SNP TSC0016027
tacttcgtcaaac

SEQ ID NO: 59967 - DNA, 13 bp, Artificial Sequence
  Oligonucleotide for detection of SNP TSC0016029
gaaaatgaggttt

SEQ ID NO: 59968 - DNA, 13 bp, Artificial Sequence
  Oligonucleotide for detection of SNP TSC0016029
aaacctcattttc

SEQ ID NO: 59969 - DNA, 13 bp, Artificial Sequence
  Oligonucleotide for detection of SNP TSC0016029
gaaaataaggttt

SEQ ID NO: 59970 - DNA, 13 bp, Artificial Sequence
  Oligonucleotide for detection of SNP TSC0016029
aaaccttattttc

SEQ ID NO: 59971 - DNA, 13 bp, Artificial Sequence
  Oligonucleotide for detection of SNP TSC0016030
gtttatgtttgtt

SEQ ID NO: 59972 - DNA, 13 bp, Artificial Sequence
  Oligonucleotide for detection of SNP TSC0016030
aacaaacataaac

SEQ ID NO: 59973 - DNA, 13 bp, Artificial Sequence
  Oligonucleotide for detection of SNP TSC0016030
gtttatatttgtt

SEQ ID NO: 59974 - DNA, 13 bp, Artificial Sequence
  Oligonucleotide for detection of SNP TSC0016030
aacaaatataaac

SEQ ID NO: 59975 - DNA, 13 bp, Artificial Sequence
  Oligonucleotide for detection of SNP TSC0016031
attttggttattt

SEQ ID NO: 59976 - DNA, 13 bp, Artificial Sequence
  Oligonucleotide for detection of SNP TSC0016031
aaataaccaaaat

SEQ ID NO: 59977 - DNA, 13 bp, Artificial Sequence
  Oligonucleotide for detection of SNP TSC0016031
attttgattattt

SEQ ID NO: 59978 - DNA, 13 bp, Artificial Sequence
  Oligonucleotide for detection of SNP TSC0016031
aaataatcaaaat

SEQ ID NO: 59979 - DNA, 13 bp, Artificial Sequence
  Oligonucleotide for detection of SNP TSC0016032
tgaggtatttttt

SEQ ID NO: 59980 - DNA, 13 bp, Artificial Sequence
  Oligonucleotide for detection of SNP TSC0016032
aaaaaatacctca

SEQ ID NO: 59981 - DNA, 13 bp, Artificial Sequence
  Oligonucleotide for detection of SNP TSC0016032
tgaggtgtttttt

SEQ ID NO: 59982 - DNA, 13 bp, Artificial Sequence
  Oligonucleotide for detection of SNP TSC0016032
aaaaaacacctca

SEQ ID NO: 59983 - DNA, 13 bp, Artificial Sequence
  Oligonucleotide for detection of SNP TSC0016032
tgaggcgtttttt

SEQ ID NO: 59984 - DNA, 13 bp, Artificial Sequence
  Oligonucleotide for detection of SNP TSC0016032
aaaaaacgcctca

SEQ ID NO: 59985 - DNA, 13 bp, Artificial Sequence
  Oligonucleotide for detection of SNP TSC0016032
aggaggtgtttta

SEQ ID NO: 59986 - DNA, 13 bp, Artificial Sequence
  Oligonucleotide for detection of SNP TSC0016032
taaaacacctcct

SEQ ID NO: 59987 - DNA, 13 bp, Artificial Sequence
  Oligonucleotide for detection of SNP TSC0016032
aggaggcgtttta

SEQ ID NO: 59988 - DNA, 13 bp, Artificial Sequence
  Oligonucleotide for detection of SNP TSC0016032
taaaacgcctcct

SEQ ID NO: 59989 - DNA, 13 bp, Artificial Sequence
  Oligonucleotide for detection of SNP TSC0016033
ttttggggagtty

SEQ ID NO: 59990 - DNA, 13 bp, Artificial Sequence
  Oligonucleotide for detection of SNP TSC0016033
raactccccaaaa

SEQ ID NO: 59991 - DNA, 13 bp, Artificial Sequence
  Oligonucleotide for detection of SNP TSC0016033
ttttggtgagtty

SEQ ID NO: 59992 - DNA, 13 bp, Artificial Sequence
  Oligonucleotide for detection of SNP TSC0016033
raactcaccaaaa

SEQ ID NO: 59993 - DNA, 13 bp, Artificial Sequence
  Oligonucleotide for detection of SNP TSC0016033
gagttttttaggg

SEQ ID NO: 59994 - DNA, 13 bp, Artificial Sequence
  Oligonucleotide for detection of SNP TSC0016033
ccctaaaaaactc

SEQ ID NO: 59995 - DNA, 13 bp, Artificial Sequence
  Oligonucleotide for detection of SNP TSC0016033
gagtttattaggg

SEQ ID NO: 59996 - DNA, 13 bp, Artificial Sequence
  Oligonucleotide for detection of SNP TSC0016033
ccctaataaactc

SEQ ID NO: 59997 - DNA, 13 bp, Artificial Sequence
  Oligonucleotide for detection of SNP TSC0016034
ttatatgtaggta

SEQ ID NO: 59998 - DNA, 13 bp, Artificial Sequence
  Oligonucleotide for detection of SNP TSC0016034
tacctacatataa

SEQ ID NO: 59999 - DNA, 13 bp, Artificial Sequence
  Oligonucleotide for detection of SNP TSC0016034
ttatatataggta

SEQ ID NO: 60000 - DNA, 13 bp, Artificial Sequence
  Oligonucleotide for detection of SNP TSC0016034
tacctatatataa

SEQ ID NO: 60001 - DNA, 13 bp, Artificial Sequence
  Oligonucleotide for detection of SNP TSC0016036
atggtaatttaay

SEQ ID NO: 60002 - DNA, 13 bp, Artificial Sequence
  Oligonucleotide for detection of SNP TSC0016036
rttaaattaccat

SEQ ID NO: 60003 - DNA, 13 bp, Artificial Sequence
  Oligonucleotide for detection of SNP TSC0016036
atggtagtttaay

SEQ ID NO: 60004 - DNA, 13 bp, Artificial Sequence
  Oligonucleotide for detection of SNP TSC0016036
rttaaactaccat

SEQ ID NO: 60005 - DNA, 13 bp, Artificial Sequence
  Oligonucleotide for detection of SNP TSC0016037
gtttgttgtatga

SEQ ID NO: 60006 - DNA, 13 bp, Artificial Sequence
  Oligonucleotide for detection of SNP TSC0016037
tcatacaacaaac

SEQ ID NO: 60007 - DNA, 13 bp, Artificial Sequence
  Oligonucleotide for detection of SNP TSC0016037
gtttgtcgtatga

SEQ ID NO: 60008 - DNA, 13 bp, Artificial Sequence
  Oligonucleotide for detection of SNP TSC0016037
tcatacgacaaac

SEQ ID NO: 60009 - DNA, 13 bp, Artificial Sequence
  Oligonucleotide for detection of SNP TSC0016037
ttatgtgataggy

SEQ ID NO: 60010 - DNA, 13 bp, Artificial Sequence
  Oligonucleotide for detection of SNP TSC0016037
rcctatcacataa

SEQ ID NO: 60011 - DNA, 13 bp, Artificial Sequence
  Oligonucleotide for detection of SNP TSC0016037
ttatgtaataggy

SEQ ID NO: 60012 - DNA, 13 bp, Artificial Sequence
  Oligonucleotide for detection of SNP TSC0016037
rcctattacataa

SEQ ID NO: 60013 - DNA, 13 bp, Artificial Sequence
  Oligonucleotide for detection of SNP TSC0016037
ttatgcgataggy

SEQ ID NO: 60014 - DNA, 13 bp, Artificial Sequence
  Oligonucleotide for detection of SNP TSC0016037
rcctatcgcataa

SEQ ID NO: 60015 - DNA, 13 bp, Artificial Sequence
  Oligonucleotide for detection of SNP TSC0016038
tggtgtagttttg

SEQ ID NO: 60016 - DNA, 13 bp, Artificial Sequence
  Oligonucleotide for detection of SNP TSC0016038
caaaactacacca

SEQ ID NO: 60017 - DNA, 13 bp, Artificial Sequence
  Oligonucleotide for detection of SNP TSC0016038
tggtgttgttttg

SEQ ID NO: 60018 - DNA, 13 bp, Artificial Sequence
  Oligonucleotide for detection of SNP TSC0016038
caaaacaacacca

SEQ ID NO: 60019 - DNA, 13 bp, Artificial Sequence
  Oligonucleotide for detection of SNP TSC0016038
tggtgtcgttttg

SEQ ID NO: 60020 - DNA, 13 bp, Artificial Sequence
  Oligonucleotide for detection of SNP TSC0016038
caaaacgacacca

SEQ ID NO: 60021 - DNA, 13 bp, Artificial Sequence
  Oligonucleotide for detection of SNP TSC0016038
tagggttgtatta

SEQ ID NO: 60022 - DNA, 13 bp, Artificial Sequence
  Oligonucleotide for detection of SNP TSC0016038
taatacaacccta

SEQ ID NO: 60023 - DNA, 13 bp, Artificial Sequence
  Oligonucleotide for detection of SNP TSC0016038
tagggtggtatta

SEQ ID NO: 60024 - DNA, 13 bp, Artificial Sequence
  Oligonucleotide for detection of SNP TSC0016038
taataccacccta

SEQ ID NO: 60025 - DNA, 13 bp, Artificial Sequence
  Oligonucleotide for detection of SNP TSC0016038
tagggcggtatta

SEQ ID NO: 60026 - DNA, 13 bp, Artificial Sequence
  Oligonucleotide for detection of SNP TSC0016038
taataccgcccta

SEQ ID NO: 60027 - DNA, 13 bp, Artificial Sequence
  Oligonucleotide for detection of SNP TSC0016041
gaaaagatatgta

SEQ ID NO: 60028 - DNA, 13 bp, Artificial Sequence
  Oligonucleotide for detection of SNP TSC0016041
tacatatcttttc

SEQ ID NO: 60029 - DNA, 13 bp, Artificial Sequence
  Oligonucleotide for detection of SNP TSC0016041
gaaaagttatgta

SEQ ID NO: 60030 - DNA, 13 bp, Artificial Sequence
  Oligonucleotide for detection of SNP TSC0016041
tacataacttttc

SEQ ID NO: 60031 - DNA, 13 bp, Artificial Sequence
  Oligonucleotide for detection of SNP TSC0016041
gaaaagatacgta

SEQ ID NO: 60032 - DNA, 13 bp, Artificial Sequence
  Oligonucleotide for detection of SNP TSC0016041
tacgtatcttttc

SEQ ID NO: 60033 - DNA, 13 bp, Artificial Sequence
  Oligonucleotide for detection of SNP TSC0016041
gaaaagttacgta

SEQ ID NO: 60034 - DNA, 13 bp, Artificial Sequence
  Oligonucleotide for detection of SNP TSC0016041
tacgtaacttttc

SEQ ID NO: 60035 - DNA, 13 bp, Artificial Sequence
  Oligonucleotide for detection of SNP TSC0016041
tgtgtgtttttty

SEQ ID NO: 60036 - DNA, 13 bp, Artificial Sequence
  Oligonucleotide for detection of SNP TSC0016041
raaaaaacacaca

SEQ ID NO: 60037 - DNA, 13 bp, Artificial Sequence
  Oligonucleotide for detection of SNP TSC0016041
tgtgtggttttty

SEQ ID NO: 60038 - DNA, 13 bp, Artificial Sequence
  Oligonucleotide for detection of SNP TSC0016041
raaaaaccacaca

SEQ ID NO: 60039 - DNA, 13 bp, Artificial Sequence
  Oligonucleotide for detection of SNP TSC0016041
tgcgtgtttttty

SEQ ID NO: 60040 - DNA, 13 bp, Artificial Sequence
  Oligonucleotide for detection of SNP TSC0016041
raaaaaacacgca

SEQ ID NO: 60041 - DNA, 13 bp, Artificial Sequence
  Oligonucleotide for detection of SNP TSC0016041
tgcgtggttttty

SEQ ID NO: 60042 - DNA, 13 bp, Artificial Sequence
  Oligonucleotide for detection of SNP TSC0016041
raaaaaccacgca

SEQ ID NO: 60043 - DNA, 13 bp, Artificial Sequence
  Oligonucleotide for detection of SNP TSC0016042
tgtttaggagtta

SEQ ID NO: 60044 - DNA, 13 bp, Artificial Sequence
  Oligonucleotide for detection of SNP TSC0016042
taactcctaaaca

SEQ ID NO: 60045 - DNA, 13 bp, Artificial Sequence
  Oligonucleotide for detection of SNP TSC0016042
tgtttaagagtta

SEQ ID NO: 60046 - DNA, 13 bp, Artificial Sequence
  Oligonucleotide for detection of SNP TSC0016042
taactcttaaaca

SEQ ID NO: 60047 - DNA, 13 bp, Artificial Sequence
  Oligonucleotide for detection of SNP TSC0016048
aaattaagtgtat

SEQ ID NO: 60048 - DNA, 13 bp, Artificial Sequence
  Oligonucleotide for detection of SNP TSC0016048
atacacttaattt

SEQ ID NO: 60049 - DNA, 13 bp, Artificial Sequence
  Oligonucleotide for detection of SNP TSC0016048
aaattatgtgtat

SEQ ID NO: 60050 - DNA, 13 bp, Artificial Sequence
  Oligonucleotide for detection of SNP TSC0016048
atacacataattt

SEQ ID NO: 60051 - DNA, 13 bp, Artificial Sequence
  Oligonucleotide for detection of SNP TSC0016048
atatatttaattt

SEQ ID NO: 60052 - DNA, 13 bp, Artificial Sequence
  Oligonucleotide for detection of SNP TSC0016048
aaattaaatatat

SEQ ID NO: 60053 - DNA, 13 bp, Artificial Sequence
  Oligonucleotide for detection of SNP TSC0016048
atatatataattt

SEQ ID NO: 60054 - DNA, 13 bp, Artificial Sequence
  Oligonucleotide for detection of SNP TSC0016048
aaattatatatat

SEQ ID NO: 60055 - DNA, 13 bp, Artificial Sequence
  Oligonucleotide for detection of SNP TSC0016049
tattattggttty

SEQ ID NO: 60056 - DNA, 13 bp, Artificial Sequence
  Oligonucleotide for detection of SNP TSC0016049
raaaccaataata

SEQ ID NO: 60057 - DNA, 13 bp, Artificial Sequence
  Oligonucleotide for detection of SNP TSC0016049
tattatcggttty

SEQ ID NO: 60058 - DNA, 13 bp, Artificial Sequence
  Oligonucleotide for detection of SNP TSC0016049
raaaccgataata

SEQ ID NO: 60059 - DNA, 13 bp, Artificial Sequence
  Oligonucleotide for detection of SNP TSC0016049
gggattgatgatg

SEQ ID NO: 60060 - DNA, 13 bp, Artificial Sequence
  Oligonucleotide for detection of SNP TSC0016049
catcatcaatccc

SEQ ID NO: 60061 - DNA, 13 bp, Artificial Sequence
  Oligonucleotide for detection of SNP TSC0016049
gggattaatgatg

SEQ ID NO: 60062 - DNA, 13 bp, Artificial Sequence
  Oligonucleotide for detection of SNP TSC0016049
catcattaatccc

SEQ ID NO: 60063 - DNA, 13 bp, Artificial Sequence
  Oligonucleotide for detection of SNP TSC0016049
gggatcgatgatg

SEQ ID NO: 60064 - DNA, 13 bp, Artificial Sequence
  Oligonucleotide for detection of SNP TSC0016049
catcatcgatccc

SEQ ID NO: 60065 - DNA, 13 bp, Artificial Sequence
  Oligonucleotide for detection of SNP TSC0016052
ttagggggggggg

SEQ ID NO: 60066 - DNA, 13 bp, Artificial Sequence
  Oligonucleotide for detection of SNP TSC0016052
cccccccccctaa

SEQ ID NO: 60067 - DNA, 13 bp, Artificial Sequence
  Oligonucleotide for detection of SNP TSC0016052
ttagggtgggggg

SEQ ID NO: 60068 - DNA, 13 bp, Artificial Sequence
  Oligonucleotide for detection of SNP TSC0016052
ccccccaccctaa

SEQ ID NO: 60069 - DNA, 13 bp, Artificial Sequence
  Oligonucleotide for detection of SNP TSC0016053
tttaatatttgtt

SEQ ID NO: 60070 - DNA, 13 bp, Artificial Sequence
  Oligonucleotide for detection of SNP TSC0016053
aacaaatattaaa

SEQ ID NO: 60071 - DNA, 13 bp, Artificial Sequence
  Oligonucleotide for detection of SNP TSC0016053
tttaatgtttgtt

SEQ ID NO: 60072 - DNA, 13 bp, Artificial Sequence
  Oligonucleotide for detection of SNP TSC0016053
aacaaacattaaa

SEQ ID NO: 60073 - DNA, 13 bp, Artificial Sequence
  Oligonucleotide for detection of SNP TSC0016054
atataaatagtgg

SEQ ID NO: 60074 - DNA, 13 bp, Artificial Sequence
  Oligonucleotide for detection of SNP TSC0016054
ccactatttatat

SEQ ID NO: 60075 - DNA, 13 bp, Artificial Sequence
  Oligonucleotide for detection of SNP TSC0016054
atataagtagtgg

SEQ ID NO: 60076 - DNA, 13 bp, Artificial Sequence
  Oligonucleotide for detection of SNP TSC0016054
ccactacttatat

SEQ ID NO: 60077 - DNA, 13 bp, Artificial Sequence
  Oligonucleotide for detection of SNP TSC0016055
aattagataatat

SEQ ID NO: 60078 - DNA, 13 bp, Artificial Sequence
  Oligonucleotide for detection of SNP TSC0016055
atattatctaatt

SEQ ID NO: 60079 - DNA, 13 bp, Artificial Sequence
  Oligonucleotide for detection of SNP TSC0016055
aattaggtaatat

SEQ ID NO: 60080 - DNA, 13 bp, Artificial Sequence
  Oligonucleotide for detection of SNP TSC0016055
atattacctaatt

SEQ ID NO: 60081 - DNA, 13 bp, Artificial Sequence
  Oligonucleotide for detection of SNP TSC0016056
gggagatagaata

SEQ ID NO: 60082 - DNA, 13 bp, Artificial Sequence
  Oligonucleotide for detection of SNP TSC0016056
tattctatctccc

SEQ ID NO: 60083 - DNA, 13 bp, Artificial Sequence
  Oligonucleotide for detection of SNP TSC0016056
gggagaaagaata

SEQ ID NO: 60084 - DNA, 13 bp, Artificial Sequence
  Oligonucleotide for detection of SNP TSC0016056
tattctttctccc

SEQ ID NO: 60085 - DNA, 13 bp, Artificial Sequence
  Oligonucleotide for detection of SNP TSC0016057
ttgggagatagaa

SEQ ID NO: 60086 - DNA, 13 bp, Artificial Sequence
  Oligonucleotide for detection of SNP TSC0016057
ttctatctcccaa

SEQ ID NO: 60087 - DNA, 13 bp, Artificial Sequence
  Oligonucleotide for detection of SNP TSC0016057
ttgggaaatagaa

SEQ ID NO: 60088 - DNA, 13 bp, Artificial Sequence
  Oligonucleotide for detection of SNP TSC0016057
ttctatttcccaa

SEQ ID NO: 60089 - DNA, 13 bp, Artificial Sequence
  Oligonucleotide for detection of SNP TSC0016059
agaaatgtgttty

SEQ ID NO: 60090 - DNA, 13 bp, Artificial Sequence
  Oligonucleotide for detection of SNP TSC0016059
raaacacatttct

SEQ ID NO: 60091 - DNA, 13 bp, Artificial Sequence
  Oligonucleotide for detection of SNP TSC0016059
agaaatatgttty

SEQ ID NO: 60092 - DNA, 13 bp, Artificial Sequence
  Oligonucleotide for detection of SNP TSC0016059
raaacatatttct

SEQ ID NO: 60093 - DNA, 13 bp, Artificial Sequence
  Oligonucleotide for detection of SNP TSC0016061
gggggtatttaga

SEQ ID NO: 60094 - DNA, 13 bp, Artificial Sequence
  Oligonucleotide for detection of SNP TSC0016061
tctaaataccccc

SEQ ID NO: 60095 - DNA, 13 bp, Artificial Sequence
  Oligonucleotide for detection of SNP TSC0016061
gggggtgtttaga

SEQ ID NO: 60096 - DNA, 13 bp, Artificial Sequence
  Oligonucleotide for detection of SNP TSC0016061
tctaaacaccccc

SEQ ID NO: 60097 - DNA, 13 bp, Artificial Sequence
  Oligonucleotide for detection of SNP TSC0016061
gggggcgtttaga

SEQ ID NO: 60098 - DNA, 13 bp, Artificial Sequence
  Oligonucleotide for detection of SNP TSC0016061
tctaaacgccccc

SEQ ID NO: 60099 - DNA, 13 bp, Artificial Sequence
  Oligonucleotide for detection of SNP TSC0016061
tttaagtgtttty

SEQ ID NO: 60100 - DNA, 13 bp, Artificial Sequence
  Oligonucleotide for detection of SNP TSC0016061
raaaacacttaaa

SEQ ID NO: 60101 - DNA, 13 bp, Artificial Sequence
  Oligonucleotide for detection of SNP TSC0016061
tttaagcgtttty

SEQ ID NO: 60102 - DNA, 13 bp, Artificial Sequence
  Oligonucleotide for detection of SNP TSC0016061
raaaacgcttaaa

SEQ ID NO: 60103 - DNA, 13 bp, Artificial Sequence
  Oligonucleotide for detection of SNP TSC0016063
taagttatggttt

SEQ ID NO: 60104 - DNA, 13 bp, Artificial Sequence
  Oligonucleotide for detection of SNP TSC0016063
aaaccataactta

SEQ ID NO: 60105 - DNA, 13 bp, Artificial Sequence
  Oligonucleotide for detection of SNP TSC0016063
taagttttggttt

SEQ ID NO: 60106 - DNA, 13 bp, Artificial Sequence
  Oligonucleotide for detection of SNP TSC0016063
aaaccaaaactta

SEQ ID NO: 60107 - DNA, 13 bp, Artificial Sequence
  Oligonucleotide for detection of SNP TSC0016063
aaattatgatttg

SEQ ID NO: 60108 - DNA, 13 bp, Artificial Sequence
  Oligonucleotide for detection of SNP TSC0016063
caaatcataattt

SEQ ID NO: 60109 - DNA, 13 bp, Artificial Sequence
  Oligonucleotide for detection of SNP TSC0016063
aaattaagatttg

SEQ ID NO: 60110 - DNA, 13 bp, Artificial Sequence
  Oligonucleotide for detection of SNP TSC0016063
caaatcttaattt

SEQ ID NO: 60111 - DNA, 13 bp, Artificial Sequence
  Oligonucleotide for detection of SNP TSC0016064
atagtaaattggg

SEQ ID NO: 60112 - DNA, 13 bp, Artificial Sequence
  Oligonucleotide for detection of SNP TSC0016064
cccaatttactat

SEQ ID NO: 60113 - DNA, 13 bp, Artificial Sequence
  Oligonucleotide for detection of SNP TSC0016064
atagtatattggg

SEQ ID NO: 60114 - DNA, 13 bp, Artificial Sequence
  Oligonucleotide for detection of SNP TSC0016064
cccaatatactat

SEQ ID NO: 60115 - DNA, 13 bp, Artificial Sequence
  Oligonucleotide for detection of SNP TSC0016064
tttagtttgttat

SEQ ID NO: 60116 - DNA, 13 bp, Artificial Sequence
  Oligonucleotide for detection of SNP TSC0016064
ataacaaactaaa

SEQ ID NO: 60117 - DNA, 13 bp, Artificial Sequence
  Oligonucleotide for detection of SNP TSC0016064
tttagtgtgttat

SEQ ID NO: 60118 - DNA, 13 bp, Artificial Sequence
  Oligonucleotide for detection of SNP TSC0016064
ataacacactaaa

SEQ ID NO: 60119 - DNA, 13 bp, Artificial Sequence
  Oligonucleotide for detection of SNP TSC0016071
aatagagtttatt

SEQ ID NO: 60120 - DNA, 13 bp, Artificial Sequence
  Oligonucleotide for detection of SNP TSC0016071
aataaactctatt

SEQ ID NO: 60121 - DNA, 13 bp, Artificial Sequence
  Oligonucleotide for detection of SNP TSC0016071
aatagaatttatt

SEQ ID NO: 60122 - DNA, 13 bp, Artificial Sequence
  Oligonucleotide for detection of SNP TSC0016071
aataaattctatt

SEQ ID NO: 60123 - DNA, 13 bp, Artificial Sequence
  Oligonucleotide for detection of SNP TSC0016073
ggaaaggggggaa

SEQ ID NO: 60124 - DNA, 13 bp, Artificial Sequence
  Oligonucleotide for detection of SNP TSC0016073
ttcccccctttcc

SEQ ID NO: 60125 - DNA, 13 bp, Artificial Sequence
  Oligonucleotide for detection of SNP TSC0016073
ggaaagtggggaa

SEQ ID NO: 60126 - DNA, 13 bp, Artificial Sequence
  Oligonucleotide for detection of SNP TSC0016073
ttccccactttcc

SEQ ID NO: 60127 - DNA, 13 bp, Artificial Sequence
  Oligonucleotide for detection of SNP TSC0016074
ttaaatatagtat

SEQ ID NO: 60128 - DNA, 13 bp, Artificial Sequence
  Oligonucleotide for detection of SNP TSC0016074
atactatatttaa

SEQ ID NO: 60129 - DNA, 13 bp, Artificial Sequence
  Oligonucleotide for detection of SNP TSC0016074
ttaaatgtagtat

SEQ ID NO: 60130 - DNA, 13 bp, Artificial Sequence
  Oligonucleotide for detection of SNP TSC0016074
atactacatttaa

SEQ ID NO: 60131 - DNA, 13 bp, Artificial Sequence
  Oligonucleotide for detection of SNP TSC0016074
ttaaacgtagtat

SEQ ID NO: 60132 - DNA, 13 bp, Artificial Sequence
  Oligonucleotide for detection of SNP TSC0016074
atactacgtttaa

SEQ ID NO: 60133 - DNA, 13 bp, Artificial Sequence
  Oligonucleotide for detection of SNP TSC0016074
atgttgtgtttag

SEQ ID NO: 60134 - DNA, 13 bp, Artificial Sequence
  Oligonucleotide for detection of SNP TSC0016074
ctaaacacaacat

SEQ ID NO: 60135 - DNA, 13 bp, Artificial Sequence
  Oligonucleotide for detection of SNP TSC0016074
atgttgcgtttag

SEQ ID NO: 60136 - DNA, 13 bp, Artificial Sequence
  Oligonucleotide for detection of SNP TSC0016074
ctaaacgcaacat

SEQ ID NO: 60137 - DNA, 13 bp, Artificial Sequence
  Oligonucleotide for detection of SNP TSC0016075
aatgttatttttt

SEQ ID NO: 60138 - DNA, 13 bp, Artificial Sequence
  Oligonucleotide for detection of SNP TSC0016075
aaaaaataacatt

SEQ ID NO: 60139 - DNA, 13 bp, Artificial Sequence
  Oligonucleotide for detection of SNP TSC0016075
aatgttgtttttt

SEQ ID NO: 60140 - DNA, 13 bp, Artificial Sequence
  Oligonucleotide for detection of SNP TSC0016075
aaaaaacaacatt

SEQ ID NO: 60141 - DNA, 13 bp, Artificial Sequence
  Oligonucleotide for detection of SNP TSC0016075
aacgttatttttt

SEQ ID NO: 60142 - DNA, 13 bp, Artificial Sequence
  Oligonucleotide for detection of SNP TSC0016075
aaaaaataacgtt

SEQ ID NO: 60143 - DNA, 13 bp, Artificial Sequence
  Oligonucleotide for detection of SNP TSC0016075
aacgttgtttttt

SEQ ID NO: 60144 - DNA, 13 bp, Artificial Sequence
  Oligonucleotide for detection of SNP TSC0016075
aaaaaacaacgtt

SEQ ID NO: 60145 - DNA, 13 bp, Artificial Sequence
  Oligonucleotide for detection of SNP TSC0016075
aatgtcgtttttt

SEQ ID NO: 60146 - DNA, 13 bp, Artificial Sequence
  Oligonucleotide for detection of SNP TSC0016075
aaaaaacgacatt

SEQ ID NO: 60147 - DNA, 13 bp, Artificial Sequence
  Oligonucleotide for detection of SNP TSC0016075
aacgtcgtttttt

SEQ ID NO: 60148 - DNA, 13 bp, Artificial Sequence
  Oligonucleotide for detection of SNP TSC0016075
aaaaaacgacgtt

SEQ ID NO: 60149 - DNA, 13 bp, Artificial Sequence
  Oligonucleotide for detection of SNP TSC0016075
agaaagtggtgtt

SEQ ID NO: 60150 - DNA, 13 bp, Artificial Sequence
  Oligonucleotide for detection of SNP TSC0016075
aacaccactttct

SEQ ID NO: 60151 - DNA, 13 bp, Artificial Sequence
  Oligonucleotide for detection of SNP TSC0016075
agaaagtggcgtt

SEQ ID NO: 60152 - DNA, 13 bp, Artificial Sequence
  Oligonucleotide for detection of SNP TSC0016075
aacgccactttct

SEQ ID NO: 60153 - DNA, 13 bp, Artificial Sequence
  Oligonucleotide for detection of SNP TSC0016075
agaaagcggtgtt

SEQ ID NO: 60154 - DNA, 13 bp, Artificial Sequence
  Oligonucleotide for detection of SNP TSC0016075
aacaccgctttct

SEQ ID NO: 60155 - DNA, 13 bp, Artificial Sequence
  Oligonucleotide for detection of SNP TSC0016075
agaaagcggcgtt

SEQ ID NO: 60156 - DNA, 13 bp, Artificial Sequence
  Oligonucleotide for detection of SNP TSC0016075
aacgccgctttct

SEQ ID NO: 60157 - DNA, 13 bp, Artificial Sequence
  Oligonucleotide for detection of SNP TSC0016076
tatttagtttttg

SEQ ID NO: 60158 - DNA, 13 bp, Artificial Sequence
  Oligonucleotide for detection of SNP TSC0016076
caaaaactaaata

SEQ ID NO: 60159 - DNA, 13 bp, Artificial Sequence
  Oligonucleotide for detection of SNP TSC0016076
tatttaatttttg

SEQ ID NO: 60160 - DNA, 13 bp, Artificial Sequence
  Oligonucleotide for detection of SNP TSC0016076
caaaaattaaata

SEQ ID NO: 60161 - DNA, 13 bp, Artificial Sequence
  Oligonucleotide for detection of SNP TSC0016077
tttttttgttacg

SEQ ID NO: 60162 - DNA, 13 bp, Artificial Sequence
  Oligonucleotide for detection of SNP TSC0016077
cgtaacaaaaaaa

SEQ ID NO: 60163 - DNA, 13 bp, Artificial Sequence
  Oligonucleotide for detection of SNP TSC0016077
ttttttcgttacg

SEQ ID NO: 60164 - DNA, 13 bp, Artificial Sequence
  Oligonucleotide for detection of SNP TSC0016077
cgtaacgaaaaaa

SEQ ID NO: 60165 - DNA, 13 bp, Artificial Sequence
  Oligonucleotide for detection of SNP TSC0016077
tgtagtgagaagg

SEQ ID NO: 60166 - DNA, 13 bp, Artificial Sequence
  Oligonucleotide for detection of SNP TSC0016077
ccttctcactaca

SEQ ID NO: 60167 - DNA, 13 bp, Artificial Sequence
  Oligonucleotide for detection of SNP TSC0016077
tgtagtaagaagg

SEQ ID NO: 60168 - DNA, 13 bp, Artificial Sequence
  Oligonucleotide for detection of SNP TSC0016077
ccttcttactaca

SEQ ID NO: 60169 - DNA, 13 bp, Artificial Sequence
  Oligonucleotide for detection of SNP TSC0016077
cgtagtgagaagg

SEQ ID NO: 60170 - DNA, 13 bp, Artificial Sequence
  Oligonucleotide for detection of SNP TSC0016077
ccttctcactacg

SEQ ID NO: 60171 - DNA, 13 bp, Artificial Sequence
  Oligonucleotide for detection of SNP TSC0016077
cgtagtaagaagg

SEQ ID NO: 60172 - DNA, 13 bp, Artificial Sequence
  Oligonucleotide for detection of SNP TSC0016077
ccttcttactacg

SEQ ID NO: 60173 - DNA, 13 bp, Artificial Sequence
  Oligonucleotide for detection of SNP TSC0016077
tgtagcgagaagg

SEQ ID NO: 60174 - DNA, 13 bp, Artificial Sequence
  Oligonucleotide for detection of SNP TSC0016077
ccttctcgctaca

SEQ ID NO: 60175 - DNA, 13 bp, Artificial Sequence
  Oligonucleotide for detection of SNP TSC0016077
cgtagcgagaagg

SEQ ID NO: 60176 - DNA, 13 bp, Artificial Sequence
  Oligonucleotide for detection of SNP TSC0016077
ccttctcgctacg

SEQ ID NO: 60177 - DNA, 13 bp, Artificial Sequence
  Oligonucleotide for detection of SNP TSC0016078
tgattaagagatt

SEQ ID NO: 60178 - DNA, 13 bp, Artificial Sequence
  Oligonucleotide for detection of SNP TSC0016078
aatctcttaatca

SEQ ID NO: 60179 - DNA, 13 bp, Artificial Sequence
  Oligonucleotide for detection of SNP TSC0016078
tgattaggagatt

SEQ ID NO: 60180 - DNA, 13 bp, Artificial Sequence
  Oligonucleotide for detection of SNP TSC0016078
aatctcctaatca

SEQ ID NO: 60181 - DNA, 13 bp, Artificial Sequence
  Oligonucleotide for detection of SNP TSC0016079
aattgggatgtta

SEQ ID NO: 60182 - DNA, 13 bp, Artificial Sequence
  Oligonucleotide for detection of SNP TSC0016079
taacatcccaatt

SEQ ID NO: 60183 - DNA, 13 bp, Artificial Sequence
  Oligonucleotide for detection of SNP TSC0016079
aattggaatgtta

SEQ ID NO: 60184 - DNA, 13 bp, Artificial Sequence
  Oligonucleotide for detection of SNP TSC0016079
taacattccaatt

SEQ ID NO: 60185 - DNA, 13 bp, Artificial Sequence
  Oligonucleotide for detection of SNP TSC0016080
tgagaaagtttay

SEQ ID NO: 60186 - DNA, 13 bp, Artificial Sequence
  Oligonucleotide for detection of SNP TSC0016080
rtaaactttctca

SEQ ID NO: 60187 - DNA, 13 bp, Artificial Sequence
  Oligonucleotide for detection of SNP TSC0016080
tgagaaggtttay

SEQ ID NO: 60188 - DNA, 13 bp, Artificial Sequence
  Oligonucleotide for detection of SNP TSC0016080
rtaaaccttctca

SEQ ID NO: 60189 - DNA, 13 bp, Artificial Sequence
  Oligonucleotide for detection of SNP TSC0016081
atttttgtttgtt

SEQ ID NO: 60190 - DNA, 13 bp, Artificial Sequence
  Oligonucleotide for detection of SNP TSC0016081
aacaaacaaaaat

SEQ ID NO: 60191 - DNA, 13 bp, Artificial Sequence
  Oligonucleotide for detection of SNP TSC0016081
attttcgtttgtt

SEQ ID NO: 60192 - DNA, 13 bp, Artificial Sequence
  Oligonucleotide for detection of SNP TSC0016081
aacaaacgaaaat

SEQ ID NO: 60193 - DNA, 13 bp, Artificial Sequence
  Oligonucleotide for detection of SNP TSC0016081
agtagagggaagt

SEQ ID NO: 60194 - DNA, 13 bp, Artificial Sequence
  Oligonucleotide for detection of SNP TSC0016081
acttccctctact

SEQ ID NO: 60195 - DNA, 13 bp, Artificial Sequence
  Oligonucleotide for detection of SNP TSC0016081
agtagatggaagt

SEQ ID NO: 60196 - DNA, 13 bp, Artificial Sequence
  Oligonucleotide for detection of SNP TSC0016081
acttccatctact

SEQ ID NO: 60197 - DNA, 13 bp, Artificial Sequence
  Oligonucleotide for detection of SNP TSC0016081
agtagacggaagt

SEQ ID NO: 60198 - DNA, 13 bp, Artificial Sequence
  Oligonucleotide for detection of SNP TSC0016081
acttccgtctact

SEQ ID NO: 60199 - DNA, 13 bp, Artificial Sequence
  Oligonucleotide for detection of SNP TSC0016082
tttagatgggttg

SEQ ID NO: 60200 - DNA, 13 bp, Artificial Sequence
  Oligonucleotide for detection of SNP TSC0016082
caacccatctaaa

SEQ ID NO: 60201 - DNA, 13 bp, Artificial Sequence
  Oligonucleotide for detection of SNP TSC0016082
tttagacgggttg

SEQ ID NO: 60202 - DNA, 13 bp, Artificial Sequence
  Oligonucleotide for detection of SNP TSC0016082
caacccgtctaaa

SEQ ID NO: 60203 - DNA, 13 bp, Artificial Sequence
  Oligonucleotide for detection of SNP TSC0016082
tttagatgggtcg

SEQ ID NO: 60204 - DNA, 13 bp, Artificial Sequence
  Oligonucleotide for detection of SNP TSC0016082
cgacccatctaaa

SEQ ID NO: 60205 - DNA, 13 bp, Artificial Sequence
  Oligonucleotide for detection of SNP TSC0016082
tttagacgggtcg

SEQ ID NO: 60206 - DNA, 13 bp, Artificial Sequence
  Oligonucleotide for detection of SNP TSC0016082
cgacccgtctaaa

SEQ ID NO: 60207 - DNA, 13 bp, Artificial Sequence
  Oligonucleotide for detection of SNP TSC0016082
tggtttgtttaga

SEQ ID NO: 60208 - DNA, 13 bp, Artificial Sequence
  Oligonucleotide for detection of SNP TSC0016082
tctaaacaaacca

SEQ ID NO: 60209 - DNA, 13 bp, Artificial Sequence
  Oligonucleotide for detection of SNP TSC0016082
cggtttgtttaga

SEQ ID NO: 60210 - DNA, 13 bp, Artificial Sequence
  Oligonucleotide for detection of SNP TSC0016082
tctaaacaaaccg

SEQ ID NO: 60211 - DNA, 13 bp, Artificial Sequence
  Oligonucleotide for detection of SNP TSC0016082
cggtttatttaga

SEQ ID NO: 60212 - DNA, 13 bp, Artificial Sequence
  Oligonucleotide for detection of SNP TSC0016082
tctaaataaaccg

SEQ ID NO: 60213 - DNA, 13 bp, Artificial Sequence
  Oligonucleotide for detection of SNP TSC0016082
tggttcgtttaga

SEQ ID NO: 60214 - DNA, 13 bp, Artificial Sequence
  Oligonucleotide for detection of SNP TSC0016082
tctaaacgaacca

SEQ ID NO: 60215 - DNA, 13 bp, Artificial Sequence
  Oligonucleotide for detection of SNP TSC0016082
cggttcgtttaga

SEQ ID NO: 60216 - DNA, 13 bp, Artificial Sequence
  Oligonucleotide for detection of SNP TSC0016082
tctaaacgaaccg

SEQ ID NO: 60217 - DNA, 13 bp, Artificial Sequence
  Oligonucleotide for detection of SNP TSC0016083
tggtatgtttatg

SEQ ID NO: 60218 - DNA, 13 bp, Artificial Sequence
  Oligonucleotide for detection of SNP TSC0016083
cataaacatacca

SEQ ID NO: 60219 - DNA, 13 bp, Artificial Sequence
  Oligonucleotide for detection of SNP TSC0016083
tggtatttttatg

SEQ ID NO: 60220 - DNA, 13 bp, Artificial Sequence
  Oligonucleotide for detection of SNP TSC0016083
cataaaaatacca

SEQ ID NO: 60221 - DNA, 13 bp, Artificial Sequence
  Oligonucleotide for detection of SNP TSC0016084
ttaatatgtttty

SEQ ID NO: 60222 - DNA, 13 bp, Artificial Sequence
  Oligonucleotide for detection of SNP TSC0016084
raaaacatattaa

SEQ ID NO: 60223 - DNA, 13 bp, Artificial Sequence
  Oligonucleotide for detection of SNP TSC0016084
ttaatacgtttty

SEQ ID NO: 60224 - DNA, 13 bp, Artificial Sequence
  Oligonucleotide for detection of SNP TSC0016084
raaaacgtattaa

SEQ ID NO: 60225 - DNA, 13 bp, Artificial Sequence
  Oligonucleotide for detection of SNP TSC0016084
ggagatgtgttgg

SEQ ID NO: 60226 - DNA, 13 bp, Artificial Sequence
  Oligonucleotide for detection of SNP TSC0016084
ccaacacatctcc

SEQ ID NO: 60227 - DNA, 13 bp, Artificial Sequence
  Oligonucleotide for detection of SNP TSC0016084
ggagatatgttgg

SEQ ID NO: 60228 - DNA, 13 bp, Artificial Sequence
  Oligonucleotide for detection of SNP TSC0016084
ccaacatatctcc

SEQ ID NO: 60229 - DNA, 13 bp, Artificial Sequence
  Oligonucleotide for detection of SNP TSC0016084
ggagacgtgttgg

SEQ ID NO: 60230 - DNA, 13 bp, Artificial Sequence
  Oligonucleotide for detection of SNP TSC0016084
ccaacacgtctcc

SEQ ID NO: 60231 - DNA, 13 bp, Artificial Sequence
  Oligonucleotide for detection of SNP TSC0016085
gaattttgtgaag

SEQ ID NO: 60232 - DNA, 13 bp, Artificial Sequence
  Oligonucleotide for detection of SNP TSC0016085
cttcacaaaattc

SEQ ID NO: 60233 - DNA, 13 bp, Artificial Sequence
  Oligonucleotide for detection of SNP TSC0016085
gaatttggtgaag

SEQ ID NO: 60234 - DNA, 13 bp, Artificial Sequence
  Oligonucleotide for detection of SNP TSC0016085
cttcaccaaattc

SEQ ID NO: 60235 - DNA, 13 bp, Artificial Sequence
  Oligonucleotide for detection of SNP TSC0016085
gaatttcgtgaag

SEQ ID NO: 60236 - DNA, 13 bp, Artificial Sequence
  Oligonucleotide for detection of SNP TSC0016085
cttcacgaaattc

SEQ ID NO: 60237 - DNA, 13 bp, Artificial Sequence
  Oligonucleotide for detection of SNP TSC0016085
gaattcggtgaag

SEQ ID NO: 60238 - DNA, 13 bp, Artificial Sequence
  Oligonucleotide for detection of SNP TSC0016085
cttcaccgaattc

SEQ ID NO: 60239 - DNA, 13 bp, Artificial Sequence
  Oligonucleotide for detection of SNP TSC0016085
ttttatggaatty

SEQ ID NO: 60240 - DNA, 13 bp, Artificial Sequence
  Oligonucleotide for detection of SNP TSC0016085
raattccataaaa

SEQ ID NO: 60241 - DNA, 13 bp, Artificial Sequence
  Oligonucleotide for detection of SNP TSC0016085
ttttattgaatty

SEQ ID NO: 60242 - DNA, 13 bp, Artificial Sequence
  Oligonucleotide for detection of SNP TSC0016085
raattcaataaaa

SEQ ID NO: 60243 - DNA, 13 bp, Artificial Sequence
  Oligonucleotide for detection of SNP TSC0016085
ttttacggaatty

SEQ ID NO: 60244 - DNA, 13 bp, Artificial Sequence
  Oligonucleotide for detection of SNP TSC0016085
raattccgtaaaa

SEQ ID NO: 60245 - DNA, 13 bp, Artificial Sequence
  Oligonucleotide for detection of SNP TSC0016085
ttttatcgaatty

SEQ ID NO: 60246 - DNA, 13 bp, Artificial Sequence
  Oligonucleotide for detection of SNP TSC0016085
raattcgataaaa

SEQ ID NO: 60247 - DNA, 13 bp, Artificial Sequence
  Oligonucleotide for detection of SNP TSC0016086
gtgtttagagaga

SEQ ID NO: 60248 - DNA, 13 bp, Artificial Sequence
  Oligonucleotide for detection of SNP TSC0016086
tctctctaaacac

SEQ ID NO: 60249 - DNA, 13 bp, Artificial Sequence
  Oligonucleotide for detection of SNP TSC0016086
gtgtttggagaga

SEQ ID NO: 60250 - DNA, 13 bp, Artificial Sequence
  Oligonucleotide for detection of SNP TSC0016086
tctctccaaacac

SEQ ID NO: 60251 - DNA, 13 bp, Artificial Sequence
  Oligonucleotide for detection of SNP TSC0016086
gtgttcggagaga

SEQ ID NO: 60252 - DNA, 13 bp, Artificial Sequence
  Oligonucleotide for detection of SNP TSC0016086
tctctccgaacac

SEQ ID NO: 60253 - DNA, 13 bp, Artificial Sequence
  Oligonucleotide for detection of SNP TSC0016091
ttgtatataggat

SEQ ID NO: 60254 - DNA, 13 bp, Artificial Sequence
  Oligonucleotide for detection of SNP TSC0016091
atcctatatacaa

SEQ ID NO: 60255 - DNA, 13 bp, Artificial Sequence
  Oligonucleotide for detection of SNP TSC0016091
ttgtatgtaggat

SEQ ID NO: 60256 - DNA, 13 bp, Artificial Sequence
  Oligonucleotide for detection of SNP TSC0016091
atcctacatacaa

SEQ ID NO: 60257 - DNA, 13 bp, Artificial Sequence
  Oligonucleotide for detection of SNP TSC0016097
attttagatatay

SEQ ID NO: 60258 - DNA, 13 bp, Artificial Sequence
  Oligonucleotide for detection of SNP TSC0016097
rtatatctaaaat

SEQ ID NO: 60259 - DNA, 13 bp, Artificial Sequence
  Oligonucleotide for detection of SNP TSC0016097
attttaaatatay

SEQ ID NO: 60260 - DNA, 13 bp, Artificial Sequence
  Oligonucleotide for detection of SNP TSC0016097
rtatatttaaaat

SEQ ID NO: 60261 - DNA, 13 bp, Artificial Sequence
  Oligonucleotide for detection of SNP TSC0016098
ttaaggattagtg

SEQ ID NO: 60262 - DNA, 13 bp, Artificial Sequence
  Oligonucleotide for detection of SNP TSC0016098
cactaatccttaa

SEQ ID NO: 60263 - DNA, 13 bp, Artificial Sequence
  Oligonucleotide for detection of SNP TSC0016098
ttaagggttagtg

SEQ ID NO: 60264 - DNA, 13 bp, Artificial Sequence
  Oligonucleotide for detection of SNP TSC0016098
cactaacccttaa

SEQ ID NO: 60265 - DNA, 13 bp, Artificial Sequence
  Oligonucleotide for detection of SNP TSC0016099
ggtgataaaatgg

SEQ ID NO: 60266 - DNA, 13 bp, Artificial Sequence
  Oligonucleotide for detection of SNP TSC0016099
ccattttatcacc

SEQ ID NO: 60267 - DNA, 13 bp, Artificial Sequence
  Oligonucleotide for detection of SNP TSC0016099
ggtgattaaatgg

SEQ ID NO: 60268 - DNA, 13 bp, Artificial Sequence
  Oligonucleotide for detection of SNP TSC0016099
ccatttaatcacc

SEQ ID NO: 60269 - DNA, 13 bp, Artificial Sequence
  Oligonucleotide for detection of SNP TSC0016099
ttattttattaty

SEQ ID NO: 60270 - DNA, 13 bp, Artificial Sequence
  Oligonucleotide for detection of SNP TSC0016099
rataataaaataa

SEQ ID NO: 60271 - DNA, 13 bp, Artificial Sequence
  Oligonucleotide for detection of SNP TSC0016100
atatataaagtat

SEQ ID NO: 60272 - DNA, 13 bp, Artificial Sequence
  Oligonucleotide for detection of SNP TSC0016100
atactttatatat

SEQ ID NO: 60273 - DNA, 13 bp, Artificial Sequence
  Oligonucleotide for detection of SNP TSC0016100
atatatgaagtat

SEQ ID NO: 60274 - DNA, 13 bp, Artificial Sequence
  Oligonucleotide for detection of SNP TSC0016100
atacttcatatat

SEQ ID NO: 60275 - DNA, 13 bp, Artificial Sequence
  Oligonucleotide for detection of SNP TSC0016100
atatacgaagtat

SEQ ID NO: 60276 - DNA, 13 bp, Artificial Sequence
  Oligonucleotide for detection of SNP TSC0016100
atacttcgtatat

SEQ ID NO: 60277 - DNA, 13 bp, Artificial Sequence
  Oligonucleotide for detection of SNP TSC0016100
atgttttgtatat

SEQ ID NO: 60278 - DNA, 13 bp, Artificial Sequence
  Oligonucleotide for detection of SNP TSC0016100
atatacaaaacat

SEQ ID NO: 60279 - DNA, 13 bp, Artificial Sequence
  Oligonucleotide for detection of SNP TSC0016100
atgtttcgtatat

SEQ ID NO: 60280 - DNA, 13 bp, Artificial Sequence
  Oligonucleotide for detection of SNP TSC0016100
atatacgaaacat

SEQ ID NO: 60281 - DNA, 13 bp, Artificial Sequence
  Oligonucleotide for detection of SNP TSC0016101
aaattaattttty

SEQ ID NO: 60282 - DNA, 13 bp, Artificial Sequence
  Oligonucleotide for detection of SNP TSC0016101
raaaaattaattt

SEQ ID NO: 60283 - DNA, 13 bp, Artificial Sequence
  Oligonucleotide for detection of SNP TSC0016101
aaattagttttty

SEQ ID NO: 60284 - DNA, 13 bp, Artificial Sequence
  Oligonucleotide for detection of SNP TSC0016101
raaaaactaattt

SEQ ID NO: 60285 - DNA, 13 bp, Artificial Sequence
  Oligonucleotide for detection of SNP TSC0016104
ttttgtattttgg

SEQ ID NO: 60286 - DNA, 13 bp, Artificial Sequence
  Oligonucleotide for detection of SNP TSC0016104
ccaaaatacaaaa

SEQ ID NO: 60287 - DNA, 13 bp, Artificial Sequence
  Oligonucleotide for detection of SNP TSC0016104
ttttgtgttttgg

SEQ ID NO: 60288 - DNA, 13 bp, Artificial Sequence
  Oligonucleotide for detection of SNP TSC0016104
ccaaaacacaaaa

SEQ ID NO: 60289 - DNA, 13 bp, Artificial Sequence
  Oligonucleotide for detection of SNP TSC0016105
tgttgaaaggtty

SEQ ID NO: 60290 - DNA, 13 bp, Artificial Sequence
  Oligonucleotide for detection of SNP TSC0016105
raacctttcaaca

SEQ ID NO: 60291 - DNA, 13 bp, Artificial Sequence
  Oligonucleotide for detection of SNP TSC0016105
tgttgagaggtty

SEQ ID NO: 60292 - DNA, 13 bp, Artificial Sequence
  Oligonucleotide for detection of SNP TSC0016105
raacctctcaaca

SEQ ID NO: 60293 - DNA, 13 bp, Artificial Sequence
  Oligonucleotide for detection of SNP TSC0016105
cgttgaaaggtty

SEQ ID NO: 60294 - DNA, 13 bp, Artificial Sequence
  Oligonucleotide for detection of SNP TSC0016105
raacctttcaacg

SEQ ID NO: 60295 - DNA, 13 bp, Artificial Sequence
  Oligonucleotide for detection of SNP TSC0016105
cgttgagaggtty

SEQ ID NO: 60296 - DNA, 13 bp, Artificial Sequence
  Oligonucleotide for detection of SNP TSC0016105
raacctctcaacg

SEQ ID NO: 60297 - DNA, 13 bp, Artificial Sequence
  Oligonucleotide for detection of SNP TSC0016105
tgtcgaaaggtty

SEQ ID NO: 60298 - DNA, 13 bp, Artificial Sequence
  Oligonucleotide for detection of SNP TSC0016105
raacctttcgaca

SEQ ID NO: 60299 - DNA, 13 bp, Artificial Sequence
  Oligonucleotide for detection of SNP TSC0016105
tgtcgagaggtty

SEQ ID NO: 60300 - DNA, 13 bp, Artificial Sequence
  Oligonucleotide for detection of SNP TSC0016105
raacctctcgaca

SEQ ID NO: 60301 - DNA, 13 bp, Artificial Sequence
  Oligonucleotide for detection of SNP TSC0016105
cgtcgaaaggtty

SEQ ID NO: 60302 - DNA, 13 bp, Artificial Sequence
  Oligonucleotide for detection of SNP TSC0016105
raacctttcgacg

SEQ ID NO: 60303 - DNA, 13 bp, Artificial Sequence
  Oligonucleotide for detection of SNP TSC0016105
cgtcgagaggtty

SEQ ID NO: 60304 - DNA, 13 bp, Artificial Sequence
  Oligonucleotide for detection of SNP TSC0016105
raacctctcgacg

SEQ ID NO: 60305 - DNA, 13 bp, Artificial Sequence
  Oligonucleotide for detection of SNP TSC0016106
tatattgttagta

SEQ ID NO: 60306 - DNA, 13 bp, Artificial Sequence
  Oligonucleotide for detection of SNP TSC0016106
tactaacaatata

SEQ ID NO: 60307 - DNA, 13 bp, Artificial Sequence
  Oligonucleotide for detection of SNP TSC0016106
tatatttttagta

SEQ ID NO: 60308 - DNA, 13 bp, Artificial Sequence
  Oligonucleotide for detection of SNP TSC0016106
tactaaaaatata

SEQ ID NO: 60309 - DNA, 13 bp, Artificial Sequence
  Oligonucleotide for detection of SNP TSC0016106
tgttggtaatgtg

SEQ ID NO: 60310 - DNA, 13 bp, Artificial Sequence
  Oligonucleotide for detection of SNP TSC0016106
cacattaccaaca

SEQ ID NO: 60311 - DNA, 13 bp, Artificial Sequence
  Oligonucleotide for detection of SNP TSC0016106
tgttggaaatgtg

SEQ ID NO: 60312 - DNA, 13 bp, Artificial Sequence
  Oligonucleotide for detection of SNP TSC0016106
cacatttccaaca

SEQ ID NO: 60313 - DNA, 13 bp, Artificial Sequence
  Oligonucleotide for detection of SNP TSC0016107
aagttaaggttty

SEQ ID NO: 60314 - DNA, 13 bp, Artificial Sequence
  Oligonucleotide for detection of SNP TSC0016107
raaaccttaactt

SEQ ID NO: 60315 - DNA, 13 bp, Artificial Sequence
  Oligonucleotide for detection of SNP TSC0016107
aagttatggttty

SEQ ID NO: 60316 - DNA, 13 bp, Artificial Sequence
  Oligonucleotide for detection of SNP TSC0016107
raaaccataactt

SEQ ID NO: 60317 - DNA, 13 bp, Artificial Sequence
  Oligonucleotide for detection of SNP TSC0016107
gaggttttagttt

SEQ ID NO: 60318 - DNA, 13 bp, Artificial Sequence
  Oligonucleotide for detection of SNP TSC0016107
aaactaaaacctc

SEQ ID NO: 60319 - DNA, 13 bp, Artificial Sequence
  Oligonucleotide for detection of SNP TSC0016107
gaggttatagttt

SEQ ID NO: 60320 - DNA, 13 bp, Artificial Sequence
  Oligonucleotide for detection of SNP TSC0016107
aaactataacctc

SEQ ID NO: 60321 - DNA, 13 bp, Artificial Sequence
  Oligonucleotide for detection of SNP TSC0016108
ttaaagattattt

SEQ ID NO: 60322 - DNA, 13 bp, Artificial Sequence
  Oligonucleotide for detection of SNP TSC0016108
aaataatctttaa

SEQ ID NO: 60323 - DNA, 13 bp, Artificial Sequence
  Oligonucleotide for detection of SNP TSC0016109
attttaggtatag

SEQ ID NO: 60324 - DNA, 13 bp, Artificial Sequence
  Oligonucleotide for detection of SNP TSC0016109
ctatacctaaaat

SEQ ID NO: 60325 - DNA, 13 bp, Artificial Sequence
  Oligonucleotide for detection of SNP TSC0016109
attttatgtatag

SEQ ID NO: 60326 - DNA, 13 bp, Artificial Sequence
  Oligonucleotide for detection of SNP TSC0016109
ctatacataaaat

SEQ ID NO: 60327 - DNA, 13 bp, Artificial Sequence
  Oligonucleotide for detection of SNP TSC0016109
ttatgtttagaat

SEQ ID NO: 60328 - DNA, 13 bp, Artificial Sequence
  Oligonucleotide for detection of SNP TSC0016109
attctaaacataa

SEQ ID NO: 60329 - DNA, 13 bp, Artificial Sequence
  Oligonucleotide for detection of SNP TSC0016109
ttatgtatagaat

SEQ ID NO: 60330 - DNA, 13 bp, Artificial Sequence
  Oligonucleotide for detection of SNP TSC0016109
attctatacataa

SEQ ID NO: 60331 - DNA, 13 bp, Artificial Sequence
  Oligonucleotide for detection of SNP TSC0016110
ttgtttggattat

SEQ ID NO: 60332 - DNA, 13 bp, Artificial Sequence
  Oligonucleotide for detection of SNP TSC0016110
ataatccaaacaa

SEQ ID NO: 60333 - DNA, 13 bp, Artificial Sequence
  Oligonucleotide for detection of SNP TSC0016110
ttgtttagattat

SEQ ID NO: 60334 - DNA, 13 bp, Artificial Sequence
  Oligonucleotide for detection of SNP TSC0016110
ataatctaaacaa

SEQ ID NO: 60335 - DNA, 13 bp, Artificial Sequence
  Oligonucleotide for detection of SNP TSC0016110
tcgtttggattat

SEQ ID NO: 60336 - DNA, 13 bp, Artificial Sequence
  Oligonucleotide for detection of SNP TSC0016110
ataatccaaacga

SEQ ID NO: 60337 - DNA, 13 bp, Artificial Sequence
  Oligonucleotide for detection of SNP TSC0016110
tcgtttagattat

SEQ ID NO: 60338 - DNA, 13 bp, Artificial Sequence
  Oligonucleotide for detection of SNP TSC0016110
ataatctaaacga

SEQ ID NO: 60339 - DNA, 13 bp, Artificial Sequence
  Oligonucleotide for detection of SNP TSC0016114
tggagagaggatg

SEQ ID NO: 60340 - DNA, 13 bp, Artificial Sequence
  Oligonucleotide for detection of SNP TSC0016114
catcctctctcca

SEQ ID NO: 60341 - DNA, 13 bp, Artificial Sequence
  Oligonucleotide for detection of SNP TSC0016114
tggagaaaggatg

SEQ ID NO: 60342 - DNA, 13 bp, Artificial Sequence
  Oligonucleotide for detection of SNP TSC0016114
catcctttctcca

SEQ ID NO: 60343 - DNA, 13 bp, Artificial Sequence
  Oligonucleotide for detection of SNP TSC0016114
tggagagaggacg

SEQ ID NO: 60344 - DNA, 13 bp, Artificial Sequence
  Oligonucleotide for detection of SNP TSC0016114
cgtcctctctcca

SEQ ID NO: 60345 - DNA, 13 bp, Artificial Sequence
  Oligonucleotide for detection of SNP TSC0016114
tggagaaaggacg

SEQ ID NO: 60346 - DNA, 13 bp, Artificial Sequence
  Oligonucleotide for detection of SNP TSC0016114
cgtcctttctcca

SEQ ID NO: 60347 - DNA, 13 bp, Artificial Sequence
  Oligonucleotide for detection of SNP TSC0016115
agttattttatga

SEQ ID NO: 60348 - DNA, 13 bp, Artificial Sequence
  Oligonucleotide for detection of SNP TSC0016115
tcataaaataact

SEQ ID NO: 60349 - DNA, 13 bp, Artificial Sequence
  Oligonucleotide for detection of SNP TSC0016115
agttatgttatga

SEQ ID NO: 60350 - DNA, 13 bp, Artificial Sequence
  Oligonucleotide for detection of SNP TSC0016115
tcataacataact

SEQ ID NO: 60351 - DNA, 13 bp, Artificial Sequence
  Oligonucleotide for detection of SNP TSC0016115
ttataagataatt

SEQ ID NO: 60352 - DNA, 13 bp, Artificial Sequence
  Oligonucleotide for detection of SNP TSC0016115
aattatcttataa

SEQ ID NO: 60353 - DNA, 13 bp, Artificial Sequence
  Oligonucleotide for detection of SNP TSC0016115
ttataatataatt

SEQ ID NO: 60354 - DNA, 13 bp, Artificial Sequence
  Oligonucleotide for detection of SNP TSC0016115
aattatattataa

SEQ ID NO: 60355 - DNA, 13 bp, Artificial Sequence
  Oligonucleotide for detection of SNP TSC0016118
tagtaagatttta

SEQ ID NO: 60356 - DNA, 13 bp, Artificial Sequence
  Oligonucleotide for detection of SNP TSC0016118
taaaatcttacta

SEQ ID NO: 60357 - DNA, 13 bp, Artificial Sequence
  Oligonucleotide for detection of SNP TSC0016118
tagtaaaatttta

SEQ ID NO: 60358 - DNA, 13 bp, Artificial Sequence
  Oligonucleotide for detection of SNP TSC0016118
taaaattttacta

SEQ ID NO: 60359 - DNA, 13 bp, Artificial Sequence
  Oligonucleotide for detection of SNP TSC0016119
gtttttagttatt

SEQ ID NO: 60360 - DNA, 13 bp, Artificial Sequence
  Oligonucleotide for detection of SNP TSC0016119
aataactaaaaac

SEQ ID NO: 60361 - DNA, 13 bp, Artificial Sequence
  Oligonucleotide for detection of SNP TSC0016119
gtttttggttatt

SEQ ID NO: 60362 - DNA, 13 bp, Artificial Sequence
  Oligonucleotide for detection of SNP TSC0016119
aataaccaaaaac

SEQ ID NO: 60363 - DNA, 13 bp, Artificial Sequence
  Oligonucleotide for detection of SNP TSC0016119
gttttcggttatt

SEQ ID NO: 60364 - DNA, 13 bp, Artificial Sequence
  Oligonucleotide for detection of SNP TSC0016119
aataaccgaaaac

SEQ ID NO: 60365 - DNA, 13 bp, Artificial Sequence
  Oligonucleotide for detection of SNP TSC0016119
agtggttgggggy

SEQ ID NO: 60366 - DNA, 13 bp, Artificial Sequence
  Oligonucleotide for detection of SNP TSC0016119
rcccccaaccact

SEQ ID NO: 60367 - DNA, 13 bp, Artificial Sequence
  Oligonucleotide for detection of SNP TSC0016119
agtggtcgggggy

SEQ ID NO: 60368 - DNA, 13 bp, Artificial Sequence
  Oligonucleotide for detection of SNP TSC0016119
rcccccgaccact

SEQ ID NO: 60369 - DNA, 13 bp, Artificial Sequence
  Oligonucleotide for detection of SNP TSC0016123
taaatttgttata

SEQ ID NO: 60370 - DNA, 13 bp, Artificial Sequence
  Oligonucleotide for detection of SNP TSC0016123
tataacaaattta

SEQ ID NO: 60371 - DNA, 13 bp, Artificial Sequence
  Oligonucleotide for detection of SNP TSC0016123
taaattcgttata

SEQ ID NO: 60372 - DNA, 13 bp, Artificial Sequence
  Oligonucleotide for detection of SNP TSC0016123
tataacgaattta

SEQ ID NO: 60373 - DNA, 13 bp, Artificial Sequence
  Oligonucleotide for detection of SNP TSC0016123
tatggtgggttta

SEQ ID NO: 60374 - DNA, 13 bp, Artificial Sequence
  Oligonucleotide for detection of SNP TSC0016123
taaacccaccata

SEQ ID NO: 60375 - DNA, 13 bp, Artificial Sequence
  Oligonucleotide for detection of SNP TSC0016123
tatggtaggttta

SEQ ID NO: 60376 - DNA, 13 bp, Artificial Sequence
  Oligonucleotide for detection of SNP TSC0016123
taaacctaccata

SEQ ID NO: 60377 - DNA, 13 bp, Artificial Sequence
  Oligonucleotide for detection of SNP TSC0016123
tatggcgggttta

SEQ ID NO: 60378 - DNA, 13 bp, Artificial Sequence
  Oligonucleotide for detection of SNP TSC0016123
taaacccgccata

SEQ ID NO: 60379 - DNA, 13 bp, Artificial Sequence
  Oligonucleotide for detection of SNP TSC0016124
tttaaagttagta

SEQ ID NO: 60380 - DNA, 13 bp, Artificial Sequence
  Oligonucleotide for detection of SNP TSC0016124
tactaactttaaa

SEQ ID NO: 60381 - DNA, 13 bp, Artificial Sequence
  Oligonucleotide for detection of SNP TSC0016124
tttaaaattagta

SEQ ID NO: 60382 - DNA, 13 bp, Artificial Sequence
  Oligonucleotide for detection of SNP TSC0016124
tactaattttaaa

SEQ ID NO: 60383 - DNA, 13 bp, Artificial Sequence
  Oligonucleotide for detection of SNP TSC0016125
gaatttattattt

SEQ ID NO: 60384 - DNA, 13 bp, Artificial Sequence
  Oligonucleotide for detection of SNP TSC0016125
aaataataaattc

SEQ ID NO: 60385 - DNA, 13 bp, Artificial Sequence
  Oligonucleotide for detection of SNP TSC0016125
gaatttgttattt

SEQ ID NO: 60386 - DNA, 13 bp, Artificial Sequence
  Oligonucleotide for detection of SNP TSC0016125
aaataacaaattc

SEQ ID NO: 60387 - DNA, 13 bp, Artificial Sequence
  Oligonucleotide for detection of SNP TSC0016126
gtggttgtgtttt

SEQ ID NO: 60388 - DNA, 13 bp, Artificial Sequence
  Oligonucleotide for detection of SNP TSC0016126
aaaacacaaccac

SEQ ID NO: 60389 - DNA, 13 bp, Artificial Sequence
  Oligonucleotide for detection of SNP TSC0016126
gtggttatgtttt

SEQ ID NO: 60390 - DNA, 13 bp, Artificial Sequence
  Oligonucleotide for detection of SNP TSC0016126
aaaacataaccac

SEQ ID NO: 60391 - DNA, 13 bp, Artificial Sequence
  Oligonucleotide for detection of SNP TSC0016128
gttatggtgtaga

SEQ ID NO: 60392 - DNA, 13 bp, Artificial Sequence
  Oligonucleotide for detection of SNP TSC0016128
tctacaccataac

SEQ ID NO: 60393 - DNA, 13 bp, Artificial Sequence
  Oligonucleotide for detection of SNP TSC0016128
gttatgatgtaga

SEQ ID NO: 60394 - DNA, 13 bp, Artificial Sequence
  Oligonucleotide for detection of SNP TSC0016128
tctacatcataac

SEQ ID NO: 60395 - DNA, 13 bp, Artificial Sequence
  Oligonucleotide for detection of SNP TSC0016128
gttacggtgtaga

SEQ ID NO: 60396 - DNA, 13 bp, Artificial Sequence
  Oligonucleotide for detection of SNP TSC0016128
tctacaccgtaac

SEQ ID NO: 60397 - DNA, 13 bp, Artificial Sequence
  Oligonucleotide for detection of SNP TSC0016128
gttacgatgtaga

SEQ ID NO: 60398 - DNA, 13 bp, Artificial Sequence
  Oligonucleotide for detection of SNP TSC0016128
tctacatcgtaac

SEQ ID NO: 60399 - DNA, 13 bp, Artificial Sequence
  Oligonucleotide for detection of SNP TSC0016129
tggtggtgcgaty

SEQ ID NO: 60400 - DNA, 13 bp, Artificial Sequence
  Oligonucleotide for detection of SNP TSC0016129
ratcgcaccacca

SEQ ID NO: 60401 - DNA, 13 bp, Artificial Sequence
  Oligonucleotide for detection of SNP TSC0016129
cggtggtgcgaty

SEQ ID NO: 60402 - DNA, 13 bp, Artificial Sequence
  Oligonucleotide for detection of SNP TSC0016129
ratcgcaccaccg

SEQ ID NO: 60403 - DNA, 13 bp, Artificial Sequence
  Oligonucleotide for detection of SNP TSC0016129
tggtggcgcgaty

SEQ ID NO: 60404 - DNA, 13 bp, Artificial Sequence
  Oligonucleotide for detection of SNP TSC0016129
ratcgcgccacca

SEQ ID NO: 60405 - DNA, 13 bp, Artificial Sequence
  Oligonucleotide for detection of SNP TSC0016129
cggtggcgcgaty

SEQ ID NO: 60406 - DNA, 13 bp, Artificial Sequence
  Oligonucleotide for detection of SNP TSC0016129
ratcgcgccaccg

SEQ ID NO: 60407 - DNA, 13 bp, Artificial Sequence
  Oligonucleotide for detection of SNP TSC0016129
gattgtattatcg

SEQ ID NO: 60408 - DNA, 13 bp, Artificial Sequence
  Oligonucleotide for detection of SNP TSC0016129
cgataatacaatc

SEQ ID NO: 60409 - DNA, 13 bp, Artificial Sequence
  Oligonucleotide for detection of SNP TSC0016129
gattgtgttatcg

SEQ ID NO: 60410 - DNA, 13 bp, Artificial Sequence
  Oligonucleotide for detection of SNP TSC0016129
cgataacacaatc

SEQ ID NO: 60411 - DNA, 13 bp, Artificial Sequence
  Oligonucleotide for detection of SNP TSC0016129
gatcgtattatcg

SEQ ID NO: 60412 - DNA, 13 bp, Artificial Sequence
  Oligonucleotide for detection of SNP TSC0016129
cgataatacgatc

SEQ ID NO: 60413 - DNA, 13 bp, Artificial Sequence
  Oligonucleotide for detection of SNP TSC0016129
gatcgtgttatcg

SEQ ID NO: 60414 - DNA, 13 bp, Artificial Sequence
  Oligonucleotide for detection of SNP TSC0016129
cgataacacgatc

SEQ ID NO: 60415 - DNA, 13 bp, Artificial Sequence
  Oligonucleotide for detection of SNP TSC0016129
gattgcgttatcg

SEQ ID NO: 60416 - DNA, 13 bp, Artificial Sequence
  Oligonucleotide for detection of SNP TSC0016129
cgataacgcaatc

SEQ ID NO: 60417 - DNA, 13 bp, Artificial Sequence
  Oligonucleotide for detection of SNP TSC0016129
gatcgcgttatcg

SEQ ID NO: 60418 - DNA, 13 bp, Artificial Sequence
  Oligonucleotide for detection of SNP TSC0016129
cgataacgcgatc

SEQ ID NO: 60419 - DNA, 13 bp, Artificial Sequence
  Oligonucleotide for detection of SNP TSC0016133
taagttaagtttt

SEQ ID NO: 60420 - DNA, 13 bp, Artificial Sequence
  Oligonucleotide for detection of SNP TSC0016133
aaaacttaactta

SEQ ID NO: 60421 - DNA, 13 bp, Artificial Sequence
  Oligonucleotide for detection of SNP TSC0016133
taagtttagtttt

SEQ ID NO: 60422 - DNA, 13 bp, Artificial Sequence
  Oligonucleotide for detection of SNP TSC0016133
aaaactaaactta

SEQ ID NO: 60423 - DNA, 13 bp, Artificial Sequence
  Oligonucleotide for detection of SNP TSC0016133
agggtttggtttg

SEQ ID NO: 60424 - DNA, 13 bp, Artificial Sequence
  Oligonucleotide for detection of SNP TSC0016133
caaaccaaaccct

SEQ ID NO: 60425 - DNA, 13 bp, Artificial Sequence
  Oligonucleotide for detection of SNP TSC0016133
agggttgggtttg

SEQ ID NO: 60426 - DNA, 13 bp, Artificial Sequence
  Oligonucleotide for detection of SNP TSC0016133
caaacccaaccct

SEQ ID NO: 60427 - DNA, 13 bp, Artificial Sequence
  Oligonucleotide for detection of SNP TSC0016134
ttttgaagtaatt

SEQ ID NO: 60428 - DNA, 13 bp, Artificial Sequence
  Oligonucleotide for detection of SNP TSC0016134
aattacttcaaaa

SEQ ID NO: 60429 - DNA, 13 bp, Artificial Sequence
  Oligonucleotide for detection of SNP TSC0016134
ttttgatgtaatt

SEQ ID NO: 60430 - DNA, 13 bp, Artificial Sequence
  Oligonucleotide for detection of SNP TSC0016134
aattacatcaaaa

SEQ ID NO: 60431 - DNA, 13 bp, Artificial Sequence
  Oligonucleotide for detection of SNP TSC0016134
agttattttaaag

SEQ ID NO: 60432 - DNA, 13 bp, Artificial Sequence
  Oligonucleotide for detection of SNP TSC0016134
ctttaaaataact

SEQ ID NO: 60433 - DNA, 13 bp, Artificial Sequence
  Oligonucleotide for detection of SNP TSC0016134
agttatattaaag

SEQ ID NO: 60434 - DNA, 13 bp, Artificial Sequence
  Oligonucleotide for detection of SNP TSC0016134
ctttaatataact

SEQ ID NO: 60435 - DNA, 13 bp, Artificial Sequence
  Oligonucleotide for detection of SNP TSC0016135
taggtaatgtgty

SEQ ID NO: 60436 - DNA, 13 bp, Artificial Sequence
  Oligonucleotide for detection of SNP TSC0016135
racacattaccta

SEQ ID NO: 60437 - DNA, 13 bp, Artificial Sequence
  Oligonucleotide for detection of SNP TSC0016135
taggtagtgtgty

SEQ ID NO: 60438 - DNA, 13 bp, Artificial Sequence
  Oligonucleotide for detection of SNP TSC0016135
racacactaccta

SEQ ID NO: 60439 - DNA, 13 bp, Artificial Sequence
  Oligonucleotide for detection of SNP TSC0016138
agtattattttat

SEQ ID NO: 60440 - DNA, 13 bp, Artificial Sequence
  Oligonucleotide for detection of SNP TSC0016138
ataaaataatact

SEQ ID NO: 60441 - DNA, 13 bp, Artificial Sequence
  Oligonucleotide for detection of SNP TSC0016138
agtattgttttat

SEQ ID NO: 60442 - DNA, 13 bp, Artificial Sequence
  Oligonucleotide for detection of SNP TSC0016138
ataaaacaatact

SEQ ID NO: 60443 - DNA, 13 bp, Artificial Sequence
  Oligonucleotide for detection of SNP TSC0016138
agtatcgttttat

SEQ ID NO: 60444 - DNA, 13 bp, Artificial Sequence
  Oligonucleotide for detection of SNP TSC0016138
ataaaacgatact

SEQ ID NO: 60445 - DNA, 13 bp, Artificial Sequence
  Oligonucleotide for detection of SNP TSC0016138
atggggtggtgtt

SEQ ID NO: 60446 - DNA, 13 bp, Artificial Sequence
  Oligonucleotide for detection of SNP TSC0016138
aacaccaccccat

SEQ ID NO: 60447 - DNA, 13 bp, Artificial Sequence
  Oligonucleotide for detection of SNP TSC0016138
atggggcggtgtt

SEQ ID NO: 60448 - DNA, 13 bp, Artificial Sequence
  Oligonucleotide for detection of SNP TSC0016138
aacaccgccccat

SEQ ID NO: 60449 - DNA, 13 bp, Artificial Sequence
  Oligonucleotide for detection of SNP TSC0016139
gggagaatttgat

SEQ ID NO: 60450 - DNA, 13 bp, Artificial Sequence
  Oligonucleotide for detection of SNP TSC0016139
atcaaattctccc

SEQ ID NO: 60451 - DNA, 13 bp, Artificial Sequence
  Oligonucleotide for detection of SNP TSC0016139
gggagattttgat

SEQ ID NO: 60452 - DNA, 13 bp, Artificial Sequence
  Oligonucleotide for detection of SNP TSC0016139
atcaaaatctccc

SEQ ID NO: 60453 - DNA, 13 bp, Artificial Sequence
  Oligonucleotide for detection of SNP TSC0016139
attaggtttttty

SEQ ID NO: 60454 - DNA, 13 bp, Artificial Sequence
  Oligonucleotide for detection of SNP TSC0016139
raaaaaacctaat

SEQ ID NO: 60455 - DNA, 13 bp, Artificial Sequence
  Oligonucleotide for detection of SNP TSC0016139
attagggttttty

SEQ ID NO: 60456 - DNA, 13 bp, Artificial Sequence
  Oligonucleotide for detection of SNP TSC0016139
raaaaaccctaat

SEQ ID NO: 60457 - DNA, 13 bp, Artificial Sequence
  Oligonucleotide for detection of SNP TSC0016140
ataggaggtagta

SEQ ID NO: 60458 - DNA, 13 bp, Artificial Sequence
  Oligonucleotide for detection of SNP TSC0016140
tactacctcctat

SEQ ID NO: 60459 - DNA, 13 bp, Artificial Sequence
  Oligonucleotide for detection of SNP TSC0016140
ataggaagtagta

SEQ ID NO: 60460 - DNA, 13 bp, Artificial Sequence
  Oligonucleotide for detection of SNP TSC0016140
tactacttcctat

SEQ ID NO: 60461 - DNA, 13 bp, Artificial Sequence
  Oligonucleotide for detection of SNP TSC0016143
tttaagagatagg

SEQ ID NO: 60462 - DNA, 13 bp, Artificial Sequence
  Oligonucleotide for detection of SNP TSC0016143
cctatctcttaaa

SEQ ID NO: 60463 - DNA, 13 bp, Artificial Sequence
  Oligonucleotide for detection of SNP TSC0016145
gattttgggttty

SEQ ID NO: 60464 - DNA, 13 bp, Artificial Sequence
  Oligonucleotide for detection of SNP TSC0016145
raaacccaaaatc

SEQ ID NO: 60465 - DNA, 13 bp, Artificial Sequence
  Oligonucleotide for detection of SNP TSC0016145
gattttaggttty

SEQ ID NO: 60466 - DNA, 13 bp, Artificial Sequence
  Oligonucleotide for detection of SNP TSC0016145
raaacctaaaatc

SEQ ID NO: 60467 - DNA, 13 bp, Artificial Sequence
  Oligonucleotide for detection of SNP TSC0016146
attaaggtagttt

SEQ ID NO: 60468 - DNA, 13 bp, Artificial Sequence
  Oligonucleotide for detection of SNP TSC0016146
aaactaccttaat

SEQ ID NO: 60469 - DNA, 13 bp, Artificial Sequence
  Oligonucleotide for detection of SNP TSC0016146
attaagttagttt

SEQ ID NO: 60470 - DNA, 13 bp, Artificial Sequence
  Oligonucleotide for detection of SNP TSC0016146
aaactaacttaat

SEQ ID NO: 60471 - DNA, 13 bp, Artificial Sequence
  Oligonucleotide for detection of SNP TSC0016146
aagttattttaat

SEQ ID NO: 60472 - DNA, 13 bp, Artificial Sequence
  Oligonucleotide for detection of SNP TSC0016146
attaaaataactt

SEQ ID NO: 60473 - DNA, 13 bp, Artificial Sequence
  Oligonucleotide for detection of SNP TSC0016146
aagttaatttaat

SEQ ID NO: 60474 - DNA, 13 bp, Artificial Sequence
  Oligonucleotide for detection of SNP TSC0016146
attaaattaactt

SEQ ID NO: 60475 - DNA, 13 bp, Artificial Sequence
  Oligonucleotide for detection of SNP TSC0016149
ggataaatttatt

SEQ ID NO: 60476 - DNA, 13 bp, Artificial Sequence
  Oligonucleotide for detection of SNP TSC0016149
aataaatttatcc

SEQ ID NO: 60477 - DNA, 13 bp, Artificial Sequence
  Oligonucleotide for detection of SNP TSC0016149
ggataagtttatt

SEQ ID NO: 60478 - DNA, 13 bp, Artificial Sequence
  Oligonucleotide for detection of SNP TSC0016149
aataaacttatcc

SEQ ID NO: 60479 - DNA, 13 bp, Artificial Sequence
  Oligonucleotide for detection of SNP TSC0016150
tggttaggttaay

SEQ ID NO: 60480 - DNA, 13 bp, Artificial Sequence
  Oligonucleotide for detection of SNP TSC0016150
rttaacctaacca

SEQ ID NO: 60481 - DNA, 13 bp, Artificial Sequence
  Oligonucleotide for detection of SNP TSC0016150
tggttaagttaay

SEQ ID NO: 60482 - DNA, 13 bp, Artificial Sequence
  Oligonucleotide for detection of SNP TSC0016150
rttaacttaacca

SEQ ID NO: 60483 - DNA, 13 bp, Artificial Sequence
  Oligonucleotide for detection of SNP TSC0016151
tttaataaagttg

SEQ ID NO: 60484 - DNA, 13 bp, Artificial Sequence
  Oligonucleotide for detection of SNP TSC0016151
caactttattaaa

SEQ ID NO: 60485 - DNA, 13 bp, Artificial Sequence
  Oligonucleotide for detection of SNP TSC0016151
tttaattaagttg

SEQ ID NO: 60486 - DNA, 13 bp, Artificial Sequence
  Oligonucleotide for detection of SNP TSC0016151
caacttaattaaa

SEQ ID NO: 60487 - DNA, 13 bp, Artificial Sequence
  Oligonucleotide for detection of SNP TSC0016151
taatttgattgga

SEQ ID NO: 60488 - DNA, 13 bp, Artificial Sequence
  Oligonucleotide for detection of SNP TSC0016151
tccaatcaaatta

SEQ ID NO: 60489 - DNA, 13 bp, Artificial Sequence
  Oligonucleotide for detection of SNP TSC0016152
ttttaaattatta

SEQ ID NO: 60490 - DNA, 13 bp, Artificial Sequence
  Oligonucleotide for detection of SNP TSC0016152
taataatttaaaa

SEQ ID NO: 60491 - DNA, 13 bp, Artificial Sequence
  Oligonucleotide for detection of SNP TSC0016152
ttttaagttatta

SEQ ID NO: 60492 - DNA, 13 bp, Artificial Sequence
  Oligonucleotide for detection of SNP TSC0016152
taataacttaaaa

SEQ ID NO: 60493 - DNA, 13 bp, Artificial Sequence
  Oligonucleotide for detection of SNP TSC0016153
ttatttaaaagag

SEQ ID NO: 60494 - DNA, 13 bp, Artificial Sequence
  Oligonucleotide for detection of SNP TSC0016153
ctcttttaaataa

SEQ ID NO: 60495 - DNA, 13 bp, Artificial Sequence
  Oligonucleotide for detection of SNP TSC0016153
ttattttaaagag

SEQ ID NO: 60496 - DNA, 13 bp, Artificial Sequence
  Oligonucleotide for detection of SNP TSC0016153
ctctttaaaataa

SEQ ID NO: 60497 - DNA, 13 bp, Artificial Sequence
  Oligonucleotide for detection of SNP TSC0016153
tttttttaagtaa

SEQ ID NO: 60498 - DNA, 13 bp, Artificial Sequence
  Oligonucleotide for detection of SNP TSC0016153
ttacttaaaaaaa

SEQ ID NO: 60499 - DNA, 13 bp, Artificial Sequence
  Oligonucleotide for detection of SNP TSC0016153
ttttttgaagtaa

SEQ ID NO: 60500 - DNA, 13 bp, Artificial Sequence
  Oligonucleotide for detection of SNP TSC0016153
ttacttcaaaaaa

SEQ ID NO: 60501 - DNA, 13 bp, Artificial Sequence
  Oligonucleotide for detection of SNP TSC0016154
gtaaatgtgatgy

SEQ ID NO: 60502 - DNA, 13 bp, Artificial Sequence
  Oligonucleotide for detection of SNP TSC0016154
rcatcacatttac

SEQ ID NO: 60503 - DNA, 13 bp, Artificial Sequence
  Oligonucleotide for detection of SNP TSC0016154
gtaaatatgatgy

SEQ ID NO: 60504 - DNA, 13 bp, Artificial Sequence
  Oligonucleotide for detection of SNP TSC0016154
rcatcatatttac

SEQ ID NO: 60505 - DNA, 13 bp, Artificial Sequence
  Oligonucleotide for detection of SNP TSC0016154
gtaaatgcgatgy

SEQ ID NO: 60506 - DNA, 13 bp, Artificial Sequence
  Oligonucleotide for detection of SNP TSC0016154
rcatcgcatttac

SEQ ID NO: 60507 - DNA, 13 bp, Artificial Sequence
  Oligonucleotide for detection of SNP TSC0016154
gtaaatacgatgy

SEQ ID NO: 60508 - DNA, 13 bp, Artificial Sequence
  Oligonucleotide for detection of SNP TSC0016154
rcatcgtatttac

SEQ ID NO: 60509 - DNA, 13 bp, Artificial Sequence
  Oligonucleotide for detection of SNP TSC0016156
agggtagttttta

SEQ ID NO: 60510 - DNA, 13 bp, Artificial Sequence
  Oligonucleotide for detection of SNP TSC0016156
taaaaactaccct

SEQ ID NO: 60511 - DNA, 13 bp, Artificial Sequence
  Oligonucleotide for detection of SNP TSC0016156
agggtatttttta

SEQ ID NO: 60512 - DNA, 13 bp, Artificial Sequence
  Oligonucleotide for detection of SNP TSC0016156
taaaaaataccct

SEQ ID NO: 60513 - DNA, 13 bp, Artificial Sequence
  Oligonucleotide for detection of SNP TSC0016156
taaaaattatttt

SEQ ID NO: 60514 - DNA, 13 bp, Artificial Sequence
  Oligonucleotide for detection of SNP TSC0016156
aaaataattttta

SEQ ID NO: 60515 - DNA, 13 bp, Artificial Sequence
  Oligonucleotide for detection of SNP TSC0016156
taaaaaatatttt

SEQ ID NO: 60516 - DNA, 13 bp, Artificial Sequence
  Oligonucleotide for detection of SNP TSC0016156
aaaatatttttta

SEQ ID NO: 60517 - DNA, 13 bp, Artificial Sequence
  Oligonucleotide for detection of SNP TSC0016157
aggtattgttgty

SEQ ID NO: 60518 - DNA, 13 bp, Artificial Sequence
  Oligonucleotide for detection of SNP TSC0016157
racaacaatacct

SEQ ID NO: 60519 - DNA, 13 bp, Artificial Sequence
  Oligonucleotide for detection of SNP TSC0016157
aggtatcgttgty

SEQ ID NO: 60520 - DNA, 13 bp, Artificial Sequence
  Oligonucleotide for detection of SNP TSC0016157
racaacgatacct

SEQ ID NO: 60521 - DNA, 13 bp, Artificial Sequence
  Oligonucleotide for detection of SNP TSC0016157
ggtaatgatgttt

SEQ ID NO: 60522 - DNA, 13 bp, Artificial Sequence
  Oligonucleotide for detection of SNP TSC0016157
aaacatcattacc

SEQ ID NO: 60523 - DNA, 13 bp, Artificial Sequence
  Oligonucleotide for detection of SNP TSC0016157
ggtaataatgttt

SEQ ID NO: 60524 - DNA, 13 bp, Artificial Sequence
  Oligonucleotide for detection of SNP TSC0016157
aaacattattacc

SEQ ID NO: 60525 - DNA, 13 bp, Artificial Sequence
  Oligonucleotide for detection of SNP TSC0016157
ggtaacgatgttt

SEQ ID NO: 60526 - DNA, 13 bp, Artificial Sequence
  Oligonucleotide for detection of SNP TSC0016157
aaacatcgttacc

SEQ ID NO: 60527 - DNA, 13 bp, Artificial Sequence
  Oligonucleotide for detection of SNP TSC0016158
tttttagtttatt

SEQ ID NO: 60528 - DNA, 13 bp, Artificial Sequence
  Oligonucleotide for detection of SNP TSC0016158
aataaactaaaaa

SEQ ID NO: 60529 - DNA, 13 bp, Artificial Sequence
  Oligonucleotide for detection of SNP TSC0016158
agtagggtaaagg

SEQ ID NO: 60530 - DNA, 13 bp, Artificial Sequence
  Oligonucleotide for detection of SNP TSC0016158
cctttaccctact

SEQ ID NO: 60531 - DNA, 13 bp, Artificial Sequence
  Oligonucleotide for detection of SNP TSC0016158
agtaggttaaagg

SEQ ID NO: 60532 - DNA, 13 bp, Artificial Sequence
  Oligonucleotide for detection of SNP TSC0016158
cctttaacctact

SEQ ID NO: 60533 - DNA, 13 bp, Artificial Sequence
  Oligonucleotide for detection of SNP TSC0016159
agagagtgagaat

SEQ ID NO: 60534 - DNA, 13 bp, Artificial Sequence
  Oligonucleotide for detection of SNP TSC0016159
attctcactctct

SEQ ID NO: 60535 - DNA, 13 bp, Artificial Sequence
  Oligonucleotide for detection of SNP TSC0016159
agagagagagaat

SEQ ID NO: 60536 - DNA, 13 bp, Artificial Sequence
  Oligonucleotide for detection of SNP TSC0016159
attctctctctct

SEQ ID NO: 60537 - DNA, 13 bp, Artificial Sequence
  Oligonucleotide for detection of SNP TSC0016159
agagagcgagaat

SEQ ID NO: 60538 - DNA, 13 bp, Artificial Sequence
  Oligonucleotide for detection of SNP TSC0016159
attctcgctctct

SEQ ID NO: 60539 - DNA, 13 bp, Artificial Sequence
  Oligonucleotide for detection of SNP TSC0016162
ggaaatattattt

SEQ ID NO: 60540 - DNA, 13 bp, Artificial Sequence
  Oligonucleotide for detection of SNP TSC0016162
aaataatatttcc

SEQ ID NO: 60541 - DNA, 13 bp, Artificial Sequence
  Oligonucleotide for detection of SNP TSC0016162
ggaaattttattt

SEQ ID NO: 60542 - DNA, 13 bp, Artificial Sequence
  Oligonucleotide for detection of SNP TSC0016162
aaataaaatttcc

SEQ ID NO: 60543 - DNA, 13 bp, Artificial Sequence
  Oligonucleotide for detection of SNP TSC0016162
agatggtgtttty

SEQ ID NO: 60544 - DNA, 13 bp, Artificial Sequence
  Oligonucleotide for detection of SNP TSC0016162
raaaacaccatct

SEQ ID NO: 60545 - DNA, 13 bp, Artificial Sequence
  Oligonucleotide for detection of SNP TSC0016163
tgtggtggtgtay

SEQ ID NO: 60546 - DNA, 13 bp, Artificial Sequence
  Oligonucleotide for detection of SNP TSC0016163
rtacaccaccaca

SEQ ID NO: 60547 - DNA, 13 bp, Artificial Sequence
  Oligonucleotide for detection of SNP TSC0016163
tgtggtagtgtay

SEQ ID NO: 60548 - DNA, 13 bp, Artificial Sequence
  Oligonucleotide for detection of SNP TSC0016163
rtacactaccaca

SEQ ID NO: 60549 - DNA, 13 bp, Artificial Sequence
  Oligonucleotide for detection of SNP TSC0016163
cgtggtggtgtay

SEQ ID NO: 60550 - DNA, 13 bp, Artificial Sequence
  Oligonucleotide for detection of SNP TSC0016163
rtacaccaccacg

SEQ ID NO: 60551 - DNA, 13 bp, Artificial Sequence
  Oligonucleotide for detection of SNP TSC0016163
cgtggtagtgtay

SEQ ID NO: 60552 - DNA, 13 bp, Artificial Sequence
  Oligonucleotide for detection of SNP TSC0016163
rtacactaccacg

SEQ ID NO: 60553 - DNA, 13 bp, Artificial Sequence
  Oligonucleotide for detection of SNP TSC0016163
tgtggtggcgtay

SEQ ID NO: 60554 - DNA, 13 bp, Artificial Sequence
  Oligonucleotide for detection of SNP TSC0016163
rtacgccaccaca

SEQ ID NO: 60555 - DNA, 13 bp, Artificial Sequence
  Oligonucleotide for detection of SNP TSC0016163
tgtggtagcgtay

SEQ ID NO: 60556 - DNA, 13 bp, Artificial Sequence
  Oligonucleotide for detection of SNP TSC0016163
rtacgctaccaca

SEQ ID NO: 60557 - DNA, 13 bp, Artificial Sequence
  Oligonucleotide for detection of SNP TSC0016163
cgtggtggcgtay

SEQ ID NO: 60558 - DNA, 13 bp, Artificial Sequence
  Oligonucleotide for detection of SNP TSC0016163
rtacgccaccacg

SEQ ID NO: 60559 - DNA, 13 bp, Artificial Sequence
  Oligonucleotide for detection of SNP TSC0016163
cgtggtagcgtay

SEQ ID NO: 60560 - DNA, 13 bp, Artificial Sequence
  Oligonucleotide for detection of SNP TSC0016163
rtacgctaccacg

SEQ ID NO: 60561 - DNA, 13 bp, Artificial Sequence
  Oligonucleotide for detection of SNP TSC0016164
ttaggtattttgg

SEQ ID NO: 60562 - DNA, 13 bp, Artificial Sequence
  Oligonucleotide for detection of SNP TSC0016164
ccaaaatacctaa

SEQ ID NO: 60563 - DNA, 13 bp, Artificial Sequence
  Oligonucleotide for detection of SNP TSC0016164
ttaggtgttttgg

SEQ ID NO: 60564 - DNA, 13 bp, Artificial Sequence
  Oligonucleotide for detection of SNP TSC0016164
ccaaaacacctaa

SEQ ID NO: 60565 - DNA, 13 bp, Artificial Sequence
  Oligonucleotide for detection of SNP TSC0016164
ttaggcgttttgg

SEQ ID NO: 60566 - DNA, 13 bp, Artificial Sequence
  Oligonucleotide for detection of SNP TSC0016164
ccaaaacgcctaa

SEQ ID NO: 60567 - DNA, 13 bp, Artificial Sequence
  Oligonucleotide for detection of SNP TSC0016164
ttaggatgtttgg

SEQ ID NO: 60568 - DNA, 13 bp, Artificial Sequence
  Oligonucleotide for detection of SNP TSC0016164
ccaaacatcctaa

SEQ ID NO: 60569 - DNA, 13 bp, Artificial Sequence
  Oligonucleotide for detection of SNP TSC0016164
ttaggacgtttgg

SEQ ID NO: 60570 - DNA, 13 bp, Artificial Sequence
  Oligonucleotide for detection of SNP TSC0016164
ccaaacgtcctaa

SEQ ID NO: 60571 - DNA, 13 bp, Artificial Sequence
  Oligonucleotide for detection of SNP TSC0016166
aaaaataagttty

SEQ ID NO: 60572 - DNA, 13 bp, Artificial Sequence
  Oligonucleotide for detection of SNP TSC0016166
raaacttattttt

SEQ ID NO: 60573 - DNA, 13 bp, Artificial Sequence
  Oligonucleotide for detection of SNP TSC0016166
aaaaatgagttty

SEQ ID NO: 60574 - DNA, 13 bp, Artificial Sequence
  Oligonucleotide for detection of SNP TSC0016166
raaactcattttt

SEQ ID NO: 60575 - DNA, 13 bp, Artificial Sequence
  Oligonucleotide for detection of SNP TSC0016169
tagttagaggata

SEQ ID NO: 60576 - DNA, 13 bp, Artificial Sequence
  Oligonucleotide for detection of SNP TSC0016169
tatcctctaacta

SEQ ID NO: 60577 - DNA, 13 bp, Artificial Sequence
  Oligonucleotide for detection of SNP TSC0016169
tagttaaaggata

SEQ ID NO: 60578 - DNA, 13 bp, Artificial Sequence
  Oligonucleotide for detection of SNP TSC0016169
tatcctttaacta

SEQ ID NO: 60579 - DNA, 13 bp, Artificial Sequence
  Oligonucleotide for detection of SNP TSC0016170
ttttataggatag

SEQ ID NO: 60580 - DNA, 13 bp, Artificial Sequence
  Oligonucleotide for detection of SNP TSC0016170
ctatcctataaaa

SEQ ID NO: 60581 - DNA, 13 bp, Artificial Sequence
  Oligonucleotide for detection of SNP TSC0016170
ttttatgggatag

SEQ ID NO: 60582 - DNA, 13 bp, Artificial Sequence
  Oligonucleotide for detection of SNP TSC0016170
ctatcccataaaa

SEQ ID NO: 60583 - DNA, 13 bp, Artificial Sequence
  Oligonucleotide for detection of SNP TSC0016171
ttttaagagtata

SEQ ID NO: 60584 - DNA, 13 bp, Artificial Sequence
  Oligonucleotide for detection of SNP TSC0016171
tatactcttaaaa

SEQ ID NO: 60585 - DNA, 13 bp, Artificial Sequence
  Oligonucleotide for detection of SNP TSC0016171
ttttaaaagtata

SEQ ID NO: 60586 - DNA, 13 bp, Artificial Sequence
  Oligonucleotide for detection of SNP TSC0016171
tatacttttaaaa

SEQ ID NO: 60587 - DNA, 13 bp, Artificial Sequence
  Oligonucleotide for detection of SNP TSC0016175
aaaataaggaata

SEQ ID NO: 60588 - DNA, 13 bp, Artificial Sequence
  Oligonucleotide for detection of SNP TSC0016175
tattccttatttt

SEQ ID NO: 60589 - DNA, 13 bp, Artificial Sequence
  Oligonucleotide for detection of SNP TSC0016175
aaaatatggaata

SEQ ID NO: 60590 - DNA, 13 bp, Artificial Sequence
  Oligonucleotide for detection of SNP TSC0016175
tattccatatttt

SEQ ID NO: 60591 - DNA, 13 bp, Artificial Sequence
  Oligonucleotide for detection of SNP TSC0016175
aaaatacggaata

SEQ ID NO: 60592 - DNA, 13 bp, Artificial Sequence
  Oligonucleotide for detection of SNP TSC0016175
tattccgtatttt

SEQ ID NO: 60593 - DNA, 13 bp, Artificial Sequence
  Oligonucleotide for detection of SNP TSC0016177
tgaggggatgtty

SEQ ID NO: 60594 - DNA, 13 bp, Artificial Sequence
  Oligonucleotide for detection of SNP TSC0016177
raacatcccctca

SEQ ID NO: 60595 - DNA, 13 bp, Artificial Sequence
  Oligonucleotide for detection of SNP TSC0016177
tgagggaatgtty

SEQ ID NO: 60596 - DNA, 13 bp, Artificial Sequence
  Oligonucleotide for detection of SNP TSC0016177
raacattccctca

SEQ ID NO: 60597 - DNA, 13 bp, Artificial Sequence
  Oligonucleotide for detection of SNP TSC0016177
tgaggggacgtty

SEQ ID NO: 60598 - DNA, 13 bp, Artificial Sequence
  Oligonucleotide for detection of SNP TSC0016177
raacgtcccctca

SEQ ID NO: 60599 - DNA, 13 bp, Artificial Sequence
  Oligonucleotide for detection of SNP TSC0016177
tgagggaacgtty

SEQ ID NO: 60600 - DNA, 13 bp, Artificial Sequence
  Oligonucleotide for detection of SNP TSC0016177
raacgttccctca

SEQ ID NO: 60601 - DNA, 13 bp, Artificial Sequence
  Oligonucleotide for detection of SNP TSC0016178
aggttgattatty

SEQ ID NO: 60602 - DNA, 13 bp, Artificial Sequence
  Oligonucleotide for detection of SNP TSC0016178
raataatcaacct

SEQ ID NO: 60603 - DNA, 13 bp, Artificial Sequence
  Oligonucleotide for detection of SNP TSC0016178
aggttggttatty

SEQ ID NO: 60604 - DNA, 13 bp, Artificial Sequence
  Oligonucleotide for detection of SNP TSC0016178
raataaccaacct

SEQ ID NO: 60605 - DNA, 13 bp, Artificial Sequence
  Oligonucleotide for detection of SNP TSC0016179
ttaggaattatta

SEQ ID NO: 60606 - DNA, 13 bp, Artificial Sequence
  Oligonucleotide for detection of SNP TSC0016179
taataattcctaa

SEQ ID NO: 60607 - DNA, 13 bp, Artificial Sequence
  Oligonucleotide for detection of SNP TSC0016179
ttaggagttatta

SEQ ID NO: 60608 - DNA, 13 bp, Artificial Sequence
  Oligonucleotide for detection of SNP TSC0016179
taataactcctaa

SEQ ID NO: 60609 - DNA, 13 bp, Artificial Sequence
  Oligonucleotide for detection of SNP TSC0016180
gtagtgatgtgat

SEQ ID NO: 60610 - DNA, 13 bp, Artificial Sequence
  Oligonucleotide for detection of SNP TSC0016180
atcacatcactac

SEQ ID NO: 60611 - DNA, 13 bp, Artificial Sequence
  Oligonucleotide for detection of SNP TSC0016180
gtagtggtgcgat

SEQ ID NO: 60612 - DNA, 13 bp, Artificial Sequence
  Oligonucleotide for detection of SNP TSC0016180
atcgcaccactac

SEQ ID NO: 60613 - DNA, 13 bp, Artificial Sequence
  Oligonucleotide for detection of SNP TSC0016180
gtagtgatgcgat

SEQ ID NO: 60614 - DNA, 13 bp, Artificial Sequence
  Oligonucleotide for detection of SNP TSC0016180
atcgcatcactac

SEQ ID NO: 60615 - DNA, 13 bp, Artificial Sequence
  Oligonucleotide for detection of SNP TSC0016184
aagtttgatgatg

SEQ ID NO: 60616 - DNA, 13 bp, Artificial Sequence
  Oligonucleotide for detection of SNP TSC0016184
catcatcaaactt

SEQ ID NO: 60617 - DNA, 13 bp, Artificial Sequence
  Oligonucleotide for detection of SNP TSC0016184
aagtttaatgatg

SEQ ID NO: 60618 - DNA, 13 bp, Artificial Sequence
  Oligonucleotide for detection of SNP TSC0016184
catcattaaactt

SEQ ID NO: 60619 - DNA, 13 bp, Artificial Sequence
  Oligonucleotide for detection of SNP TSC0016186
ggtaattgtttty

SEQ ID NO: 60620 - DNA, 13 bp, Artificial Sequence
  Oligonucleotide for detection of SNP TSC0016186
raaaacaattacc

SEQ ID NO: 60621 - DNA, 13 bp, Artificial Sequence
  Oligonucleotide for detection of SNP TSC0016186
ggtaatcgtttty

SEQ ID NO: 60622 - DNA, 13 bp, Artificial Sequence
  Oligonucleotide for detection of SNP TSC0016186
raaaacgattacc

SEQ ID NO: 60623 - DNA, 13 bp, Artificial Sequence
  Oligonucleotide for detection of SNP TSC0016186
gggagtggttgty

SEQ ID NO: 60624 - DNA, 13 bp, Artificial Sequence
  Oligonucleotide for detection of SNP TSC0016186
racaaccactccc

SEQ ID NO: 60625 - DNA, 13 bp, Artificial Sequence
  Oligonucleotide for detection of SNP TSC0016186
gggagtagttgty

SEQ ID NO: 60626 - DNA, 13 bp, Artificial Sequence
  Oligonucleotide for detection of SNP TSC0016186
racaactactccc

SEQ ID NO: 60627 - DNA, 13 bp, Artificial Sequence
  Oligonucleotide for detection of SNP TSC0016186
gggagcggttgty

SEQ ID NO: 60628 - DNA, 13 bp, Artificial Sequence
  Oligonucleotide for detection of SNP TSC0016186
racaaccgctccc

SEQ ID NO: 60629 - DNA, 13 bp, Artificial Sequence
  Oligonucleotide for detection of SNP TSC0016187
gttttgtgtagga

SEQ ID NO: 60630 - DNA, 13 bp, Artificial Sequence
  Oligonucleotide for detection of SNP TSC0016187
tcctacacaaaac

SEQ ID NO: 60631 - DNA, 13 bp, Artificial Sequence
  Oligonucleotide for detection of SNP TSC0016187
gttttgcgtagga

SEQ ID NO: 60632 - DNA, 13 bp, Artificial Sequence
  Oligonucleotide for detection of SNP TSC0016187
tcctacgcaaaac

SEQ ID NO: 60633 - DNA, 13 bp, Artificial Sequence
  Oligonucleotide for detection of SNP TSC0016187
ttttgtgtagggy

SEQ ID NO: 60634 - DNA, 13 bp, Artificial Sequence
  Oligonucleotide for detection of SNP TSC0016187
rccctacacaaaa

SEQ ID NO: 60635 - DNA, 13 bp, Artificial Sequence
  Oligonucleotide for detection of SNP TSC0016187
ttttgtatagggy

SEQ ID NO: 60636 - DNA, 13 bp, Artificial Sequence
  Oligonucleotide for detection of SNP TSC0016187
rccctatacaaaa

SEQ ID NO: 60637 - DNA, 13 bp, Artificial Sequence
  Oligonucleotide for detection of SNP TSC0016187
ttttgcgtagggy

SEQ ID NO: 60638 - DNA, 13 bp, Artificial Sequence
  Oligonucleotide for detection of SNP TSC0016187
rccctacgcaaaa

SEQ ID NO: 60639 - DNA, 13 bp, Artificial Sequence
  Oligonucleotide for detection of SNP TSC0016188
tatttttaaattg

SEQ ID NO: 60640 - DNA, 13 bp, Artificial Sequence
  Oligonucleotide for detection of SNP TSC0016188
caatttaaaaata

SEQ ID NO: 60641 - DNA, 13 bp, Artificial Sequence
  Oligonucleotide for detection of SNP TSC0016188
tattttgaaattg

SEQ ID NO: 60642 - DNA, 13 bp, Artificial Sequence
  Oligonucleotide for detection of SNP TSC0016188
caatttcaaaata

SEQ ID NO: 60643 - DNA, 13 bp, Artificial Sequence
  Oligonucleotide for detection of SNP TSC0016188
tagtttgaaggta

SEQ ID NO: 60644 - DNA, 13 bp, Artificial Sequence
  Oligonucleotide for detection of SNP TSC0016188
taccttcaaacta

SEQ ID NO: 60645 - DNA, 13 bp, Artificial Sequence
  Oligonucleotide for detection of SNP TSC0016188
tagttttaaggta

SEQ ID NO: 60646 - DNA, 13 bp, Artificial Sequence
  Oligonucleotide for detection of SNP TSC0016188
taccttaaaacta

SEQ ID NO: 60647 - DNA, 13 bp, Artificial Sequence
  Oligonucleotide for detection of SNP TSC0016190
tattagtgttaaa

SEQ ID NO: 60648 - DNA, 13 bp, Artificial Sequence
  Oligonucleotide for detection of SNP TSC0016190
tttaacactaata

SEQ ID NO: 60649 - DNA, 13 bp, Artificial Sequence
  Oligonucleotide for detection of SNP TSC0016190
tattagcgttaaa

SEQ ID NO: 60650 - DNA, 13 bp, Artificial Sequence
  Oligonucleotide for detection of SNP TSC0016190
tttaacgctaata

SEQ ID NO: 60651 - DNA, 13 bp, Artificial Sequence
  Oligonucleotide for detection of SNP TSC0016190
tttggtgttaata

SEQ ID NO: 60652 - DNA, 13 bp, Artificial Sequence
  Oligonucleotide for detection of SNP TSC0016190
tattaacaccaaa

SEQ ID NO: 60653 - DNA, 13 bp, Artificial Sequence
  Oligonucleotide for detection of SNP TSC0016190
tttggtattaata

SEQ ID NO: 60654 - DNA, 13 bp, Artificial Sequence
  Oligonucleotide for detection of SNP TSC0016190
tattaataccaaa

SEQ ID NO: 60655 - DNA, 13 bp, Artificial Sequence
  Oligonucleotide for detection of SNP TSC0016190
tttggcgttaata

SEQ ID NO: 60656 - DNA, 13 bp, Artificial Sequence
  Oligonucleotide for detection of SNP TSC0016190
tattaacgccaaa

SEQ ID NO: 60657 - DNA, 13 bp, Artificial Sequence
  Oligonucleotide for detection of SNP TSC0016191
tatgttgggtttt

SEQ ID NO: 60658 - DNA, 13 bp, Artificial Sequence
  Oligonucleotide for detection of SNP TSC0016191
aaaacccaacata

SEQ ID NO: 60659 - DNA, 13 bp, Artificial Sequence
  Oligonucleotide for detection of SNP TSC0016191
tatgtttggtttt

SEQ ID NO: 60660 - DNA, 13 bp, Artificial Sequence
  Oligonucleotide for detection of SNP TSC0016191
aaaaccaaacata

SEQ ID NO: 60661 - DNA, 13 bp, Artificial Sequence
  Oligonucleotide for detection of SNP TSC0016191
agggtttagtata

SEQ ID NO: 60662 - DNA, 13 bp, Artificial Sequence
  Oligonucleotide for detection of SNP TSC0016191
tatactaaaccct

SEQ ID NO: 60663 - DNA, 13 bp, Artificial Sequence
  Oligonucleotide for detection of SNP TSC0016191
agggttaagtata

SEQ ID NO: 60664 - DNA, 13 bp, Artificial Sequence
  Oligonucleotide for detection of SNP TSC0016191
tatacttaaccct

SEQ ID NO: 60665 - DNA, 13 bp, Artificial Sequence
  Oligonucleotide for detection of SNP TSC0016192
gattatatttaag

SEQ ID NO: 60666 - DNA, 13 bp, Artificial Sequence
  Oligonucleotide for detection of SNP TSC0016192
cttaaatataatc

SEQ ID NO: 60667 - DNA, 13 bp, Artificial Sequence
  Oligonucleotide for detection of SNP TSC0016192
gattatgtttaag

SEQ ID NO: 60668 - DNA, 13 bp, Artificial Sequence
  Oligonucleotide for detection of SNP TSC0016192
cttaaacataatc

SEQ ID NO: 60669 - DNA, 13 bp, Artificial Sequence
  Oligonucleotide for detection of SNP TSC0016192
gattacgtttaag

SEQ ID NO: 60670 - DNA, 13 bp, Artificial Sequence
  Oligonucleotide for detection of SNP TSC0016192
cttaaacgtaatc

SEQ ID NO: 60671 - DNA, 13 bp, Artificial Sequence
  Oligonucleotide for detection of SNP TSC0016192
tttgagtgtagty

SEQ ID NO: 60672 - DNA, 13 bp, Artificial Sequence
  Oligonucleotide for detection of SNP TSC0016192
ractacactcaaa

SEQ ID NO: 60673 - DNA, 13 bp, Artificial Sequence
  Oligonucleotide for detection of SNP TSC0016192
tttgagcgtagty

SEQ ID NO: 60674 - DNA, 13 bp, Artificial Sequence
  Oligonucleotide for detection of SNP TSC0016192
ractacgctcaaa

SEQ ID NO: 60675 - DNA, 13 bp, Artificial Sequence
  Oligonucleotide for detection of SNP TSC0016193
aatttaatattty

SEQ ID NO: 60676 - DNA, 13 bp, Artificial Sequence
  Oligonucleotide for detection of SNP TSC0016193
raaatattaaatt

SEQ ID NO: 60677 - DNA, 13 bp, Artificial Sequence
  Oligonucleotide for detection of SNP TSC0016193
aatttagtattty

SEQ ID NO: 60678 - DNA, 13 bp, Artificial Sequence
  Oligonucleotide for detection of SNP TSC0016193
raaatactaaatt

SEQ ID NO: 60679 - DNA, 13 bp, Artificial Sequence
  Oligonucleotide for detection of SNP TSC0016194
ttaaggggttttg

SEQ ID NO: 60680 - DNA, 13 bp, Artificial Sequence
  Oligonucleotide for detection of SNP TSC0016194
caaaaccccttaa

SEQ ID NO: 60681 - DNA, 13 bp, Artificial Sequence
  Oligonucleotide for detection of SNP TSC0016194
ttaaggagttttg

SEQ ID NO: 60682 - DNA, 13 bp, Artificial Sequence
  Oligonucleotide for detection of SNP TSC0016194
caaaactccttaa

SEQ ID NO: 60683 - DNA, 13 bp, Artificial Sequence
  Oligonucleotide for detection of SNP TSC0016195
tgataaggaatag

SEQ ID NO: 60684 - DNA, 13 bp, Artificial Sequence
  Oligonucleotide for detection of SNP TSC0016195
ctattccttatca

SEQ ID NO: 60685 - DNA, 13 bp, Artificial Sequence
  Oligonucleotide for detection of SNP TSC0016195
tgataatgaatag

SEQ ID NO: 60686 - DNA, 13 bp, Artificial Sequence
  Oligonucleotide for detection of SNP TSC0016195
ctattcattatca

SEQ ID NO: 60687 - DNA, 13 bp, Artificial Sequence
  Oligonucleotide for detection of SNP TSC0016195
ttgttttttgtta

SEQ ID NO: 60688 - DNA, 13 bp, Artificial Sequence
  Oligonucleotide for detection of SNP TSC0016195
taacaaaaaacaa

SEQ ID NO: 60689 - DNA, 13 bp, Artificial Sequence
  Oligonucleotide for detection of SNP TSC0016195
ttgtttattgtta

SEQ ID NO: 60690 - DNA, 13 bp, Artificial Sequence
  Oligonucleotide for detection of SNP TSC0016195
taacaataaacaa

SEQ ID NO: 60691 - DNA, 13 bp, Artificial Sequence
  Oligonucleotide for detection of SNP TSC0016196
ggggttaaaatty

SEQ ID NO: 60692 - DNA, 13 bp, Artificial Sequence
  Oligonucleotide for detection of SNP TSC0016196
raattttaacccc

SEQ ID NO: 60693 - DNA, 13 bp, Artificial Sequence
  Oligonucleotide for detection of SNP TSC0016196
ggggttgaaatty

SEQ ID NO: 60694 - DNA, 13 bp, Artificial Sequence
  Oligonucleotide for detection of SNP TSC0016196
raatttcaacccc

SEQ ID NO: 60695 - DNA, 13 bp, Artificial Sequence
  Oligonucleotide for detection of SNP TSC0016197
gggttaaaatttg

SEQ ID NO: 60696 - DNA, 13 bp, Artificial Sequence
  Oligonucleotide for detection of SNP TSC0016197
caaattttaaccc

SEQ ID NO: 60697 - DNA, 13 bp, Artificial Sequence
  Oligonucleotide for detection of SNP TSC0016197
gggttataatttg

SEQ ID NO: 60698 - DNA, 13 bp, Artificial Sequence
  Oligonucleotide for detection of SNP TSC0016197
caaattataaccc

SEQ ID NO: 60699 - DNA, 13 bp, Artificial Sequence
  Oligonucleotide for detection of SNP TSC0016197
gggttaaaattcg

SEQ ID NO: 60700 - DNA, 13 bp, Artificial Sequence
  Oligonucleotide for detection of SNP TSC0016197
cgaattttaaccc

SEQ ID NO: 60701 - DNA, 13 bp, Artificial Sequence
  Oligonucleotide for detection of SNP TSC0016197
gggttataattcg

SEQ ID NO: 60702 - DNA, 13 bp, Artificial Sequence
  Oligonucleotide for detection of SNP TSC0016197
cgaattataaccc

SEQ ID NO: 60703 - DNA, 13 bp, Artificial Sequence
  Oligonucleotide for detection of SNP TSC0016197
tggattttaatty

SEQ ID NO: 60704 - DNA, 13 bp, Artificial Sequence
  Oligonucleotide for detection of SNP TSC0016197
raattaaaatcca

SEQ ID NO: 60705 - DNA, 13 bp, Artificial Sequence
  Oligonucleotide for detection of SNP TSC0016197
tggattataatty

SEQ ID NO: 60706 - DNA, 13 bp, Artificial Sequence
  Oligonucleotide for detection of SNP TSC0016197
raattataatcca

SEQ ID NO: 60707 - DNA, 13 bp, Artificial Sequence
  Oligonucleotide for detection of SNP TSC0016197
cggattttaatty

SEQ ID NO: 60708 - DNA, 13 bp, Artificial Sequence
  Oligonucleotide for detection of SNP TSC0016197
raattaaaatccg

SEQ ID NO: 60709 - DNA, 13 bp, Artificial Sequence
  Oligonucleotide for detection of SNP TSC0016197
cggattataatty

SEQ ID NO: 60710 - DNA, 13 bp, Artificial Sequence
  Oligonucleotide for detection of SNP TSC0016197
raattataatccg

SEQ ID NO: 60711 - DNA, 13 bp, Artificial Sequence
  Oligonucleotide for detection of SNP TSC0016198
ttttttcgaatay

SEQ ID NO: 60712 - DNA, 13 bp, Artificial Sequence
  Oligonucleotide for detection of SNP TSC0016198
rtattcgaaaaaa

SEQ ID NO: 60713 - DNA, 13 bp, Artificial Sequence
  Oligonucleotide for detection of SNP TSC0016198
gtgtttggggagg

SEQ ID NO: 60714 - DNA, 13 bp, Artificial Sequence
  Oligonucleotide for detection of SNP TSC0016198
cctccccaaacac

SEQ ID NO: 60715 - DNA, 13 bp, Artificial Sequence
  Oligonucleotide for detection of SNP TSC0016198
gtgtttagggagg

SEQ ID NO: 60716 - DNA, 13 bp, Artificial Sequence
  Oligonucleotide for detection of SNP TSC0016198
cctccctaaacac

SEQ ID NO: 60717 - DNA, 13 bp, Artificial Sequence
  Oligonucleotide for detection of SNP TSC0016198
gtgttcggggagg

SEQ ID NO: 60718 - DNA, 13 bp, Artificial Sequence
  Oligonucleotide for detection of SNP TSC0016198
cctccccgaacac

SEQ ID NO: 60719 - DNA, 13 bp, Artificial Sequence
  Oligonucleotide for detection of SNP TSC0016204
tattatatttttg

SEQ ID NO: 60720 - DNA, 13 bp, Artificial Sequence
  Oligonucleotide for detection of SNP TSC0016204
caaaaatataata

SEQ ID NO: 60721 - DNA, 13 bp, Artificial Sequence
  Oligonucleotide for detection of SNP TSC0016204
tattatgtttttg

SEQ ID NO: 60722 - DNA, 13 bp, Artificial Sequence
  Oligonucleotide for detection of SNP TSC0016204
caaaaacataata

SEQ ID NO: 60723 - DNA, 13 bp, Artificial Sequence
  Oligonucleotide for detection of SNP TSC0016204
tattacgtttttg

SEQ ID NO: 60724 - DNA, 13 bp, Artificial Sequence
  Oligonucleotide for detection of SNP TSC0016204
caaaaacgtaata

SEQ ID NO: 60725 - DNA, 13 bp, Artificial Sequence
  Oligonucleotide for detection of SNP TSC0016204
taaaggtgtaatg

SEQ ID NO: 60726 - DNA, 13 bp, Artificial Sequence
  Oligonucleotide for detection of SNP TSC0016204
cattacaccttta

SEQ ID NO: 60727 - DNA, 13 bp, Artificial Sequence
  Oligonucleotide for detection of SNP TSC0016204
taaaggcgtaatg

SEQ ID NO: 60728 - DNA, 13 bp, Artificial Sequence
  Oligonucleotide for detection of SNP TSC0016204
cattacgccttta

SEQ ID NO: 60729 - DNA, 13 bp, Artificial Sequence
  Oligonucleotide for detection of SNP TSC0016205
agttagggtattt

SEQ ID NO: 60730 - DNA, 13 bp, Artificial Sequence
  Oligonucleotide for detection of SNP TSC0016205
aaataccctaact

SEQ ID NO: 60731 - DNA, 13 bp, Artificial Sequence
  Oligonucleotide for detection of SNP TSC0016205
agttagagtattt

SEQ ID NO: 60732 - DNA, 13 bp, Artificial Sequence
  Oligonucleotide for detection of SNP TSC0016205
aaatactctaact

SEQ ID NO: 60733 - DNA, 13 bp, Artificial Sequence
  Oligonucleotide for detection of SNP TSC0016206
tttttttgtaagt

SEQ ID NO: 60734 - DNA, 13 bp, Artificial Sequence
  Oligonucleotide for detection of SNP TSC0016206
acttacaaaaaaa

SEQ ID NO: 60735 - DNA, 13 bp, Artificial Sequence
  Oligonucleotide for detection of SNP TSC0016206
ttttttcgtaagt

SEQ ID NO: 60736 - DNA, 13 bp, Artificial Sequence
  Oligonucleotide for detection of SNP TSC0016206
acttacgaaaaaa

SEQ ID NO: 60737 - DNA, 13 bp, Artificial Sequence
  Oligonucleotide for detection of SNP TSC0016206
tttttcggtaagt

SEQ ID NO: 60738 - DNA, 13 bp, Artificial Sequence
  Oligonucleotide for detection of SNP TSC0016206
acttaccgaaaaa

SEQ ID NO: 60739 - DNA, 13 bp, Artificial Sequence
  Oligonucleotide for detection of SNP TSC0016206
atttgtggagaga

SEQ ID NO: 60740 - DNA, 13 bp, Artificial Sequence
  Oligonucleotide for detection of SNP TSC0016206
tctctccacaaat

SEQ ID NO: 60741 - DNA, 13 bp, Artificial Sequence
  Oligonucleotide for detection of SNP TSC0016206
atttgttgagaga

SEQ ID NO: 60742 - DNA, 13 bp, Artificial Sequence
  Oligonucleotide for detection of SNP TSC0016206
tctctcaacaaat

SEQ ID NO: 60743 - DNA, 13 bp, Artificial Sequence
  Oligonucleotide for detection of SNP TSC0016206
atttgcggagaga

SEQ ID NO: 60744 - DNA, 13 bp, Artificial Sequence
  Oligonucleotide for detection of SNP TSC0016206
tctctccgcaaat

SEQ ID NO: 60745 - DNA, 13 bp, Artificial Sequence
  Oligonucleotide for detection of SNP TSC0016206
atttgtcgagaga

SEQ ID NO: 60746 - DNA, 13 bp, Artificial Sequence
  Oligonucleotide for detection of SNP TSC0016206
tctctcgacaaat

SEQ ID NO: 60747 - DNA, 13 bp, Artificial Sequence
  Oligonucleotide for detection of SNP TSC0016207
atagaaaggagay

SEQ ID NO: 60748 - DNA, 13 bp, Artificial Sequence
  Oligonucleotide for detection of SNP TSC0016207
rtctcctttctat

SEQ ID NO: 60749 - DNA, 13 bp, Artificial Sequence
  Oligonucleotide for detection of SNP TSC0016207
atagaagggagay

SEQ ID NO: 60750 - DNA, 13 bp, Artificial Sequence
  Oligonucleotide for detection of SNP TSC0016207
rtctcccttctat

SEQ ID NO: 60751 - DNA, 13 bp, Artificial Sequence
  Oligonucleotide for detection of SNP TSC0016208
ttagtttttttga

SEQ ID NO: 60752 - DNA, 13 bp, Artificial Sequence
  Oligonucleotide for detection of SNP TSC0016208
tcaaaaaaactaa

SEQ ID NO: 60753 - DNA, 13 bp, Artificial Sequence
  Oligonucleotide for detection of SNP TSC0016208
ttagaatgattgg

SEQ ID NO: 60754 - DNA, 13 bp, Artificial Sequence
  Oligonucleotide for detection of SNP TSC0016208
ccaatcattctaa

SEQ ID NO: 60755 - DNA, 13 bp, Artificial Sequence
  Oligonucleotide for detection of SNP TSC0016208
ttagaaagattgg

SEQ ID NO: 60756 - DNA, 13 bp, Artificial Sequence
  Oligonucleotide for detection of SNP TSC0016208
ccaatctttctaa

SEQ ID NO: 60757 - DNA, 13 bp, Artificial Sequence
  Oligonucleotide for detection of SNP TSC0016210
agtagattttttt

SEQ ID NO: 60758 - DNA, 13 bp, Artificial Sequence
  Oligonucleotide for detection of SNP TSC0016210
aaaaaaatctact

SEQ ID NO: 60759 - DNA, 13 bp, Artificial Sequence
  Oligonucleotide for detection of SNP TSC0016210
agtagagtttttt

SEQ ID NO: 60760 - DNA, 13 bp, Artificial Sequence
  Oligonucleotide for detection of SNP TSC0016210
aaaaaactctact

SEQ ID NO: 60761 - DNA, 13 bp, Artificial Sequence
  Oligonucleotide for detection of SNP TSC0016210
aaaagggtttgtt

SEQ ID NO: 60762 - DNA, 13 bp, Artificial Sequence
  Oligonucleotide for detection of SNP TSC0016210
aacaaaccctttt

SEQ ID NO: 60763 - DNA, 13 bp, Artificial Sequence
  Oligonucleotide for detection of SNP TSC0016210
aaaaggttttgtt

SEQ ID NO: 60764 - DNA, 13 bp, Artificial Sequence
  Oligonucleotide for detection of SNP TSC0016210
aacaaaacctttt

SEQ ID NO: 60765 - DNA, 13 bp, Artificial Sequence
  Oligonucleotide for detection of SNP TSC0016211
aatttgtgggtta

SEQ ID NO: 60766 - DNA, 13 bp, Artificial Sequence
  Oligonucleotide for detection of SNP TSC0016211
taacccacaaatt

SEQ ID NO: 60767 - DNA, 13 bp, Artificial Sequence
  Oligonucleotide for detection of SNP TSC0016211
aatttgcgggtta

SEQ ID NO: 60768 - DNA, 13 bp, Artificial Sequence
  Oligonucleotide for detection of SNP TSC0016211
taacccgcaaatt

SEQ ID NO: 60769 - DNA, 13 bp, Artificial Sequence
  Oligonucleotide for detection of SNP TSC0016211
tagtttgtagatt

SEQ ID NO: 60770 - DNA, 13 bp, Artificial Sequence
  Oligonucleotide for detection of SNP TSC0016211
aatctacaaacta

SEQ ID NO: 60771 - DNA, 13 bp, Artificial Sequence
  Oligonucleotide for detection of SNP TSC0016211
tagtttatagatt

SEQ ID NO: 60772 - DNA, 13 bp, Artificial Sequence
  Oligonucleotide for detection of SNP TSC0016211
aatctataaacta

SEQ ID NO: 60773 - DNA, 13 bp, Artificial Sequence
  Oligonucleotide for detection of SNP TSC0016211
tagttcgtagatt

SEQ ID NO: 60774 - DNA, 13 bp, Artificial Sequence
  Oligonucleotide for detection of SNP TSC0016211
aatctacgaacta

SEQ ID NO: 60775 - DNA, 13 bp, Artificial Sequence
  Oligonucleotide for detection of SNP TSC0016212
tgggttatttgtt

SEQ ID NO: 60776 - DNA, 13 bp, Artificial Sequence
  Oligonucleotide for detection of SNP TSC0016212
aacaaataaccca

SEQ ID NO: 60777 - DNA, 13 bp, Artificial Sequence
  Oligonucleotide for detection of SNP TSC0016212
tgggttgtttgtt

SEQ ID NO: 60778 - DNA, 13 bp, Artificial Sequence
  Oligonucleotide for detection of SNP TSC0016212
aacaaacaaccca

SEQ ID NO: 60779 - DNA, 13 bp, Artificial Sequence
  Oligonucleotide for detection of SNP TSC0016212
cgggttatttgtt

SEQ ID NO: 60780 - DNA, 13 bp, Artificial Sequence
  Oligonucleotide for detection of SNP TSC0016212
aacaaataacccg

SEQ ID NO: 60781 - DNA, 13 bp, Artificial Sequence
  Oligonucleotide for detection of SNP TSC0016212
cgggttgtttgtt

SEQ ID NO: 60782 - DNA, 13 bp, Artificial Sequence
  Oligonucleotide for detection of SNP TSC0016212
aacaaacaacccg

SEQ ID NO: 60783 - DNA, 13 bp, Artificial Sequence
  Oligonucleotide for detection of SNP TSC0016213
ttagttatattat

SEQ ID NO: 60784 - DNA, 13 bp, Artificial Sequence
  Oligonucleotide for detection of SNP TSC0016213
ataatataactaa

SEQ ID NO: 60785 - DNA, 13 bp, Artificial Sequence
  Oligonucleotide for detection of SNP TSC0016213
ttagttgtattat

SEQ ID NO: 60786 - DNA, 13 bp, Artificial Sequence
  Oligonucleotide for detection of SNP TSC0016213
ataatacaactaa

SEQ ID NO: 60787 - DNA, 13 bp, Artificial Sequence
  Oligonucleotide for detection of SNP TSC0016214
agttatattatga

SEQ ID NO: 60788 - DNA, 13 bp, Artificial Sequence
  Oligonucleotide for detection of SNP TSC0016214
tcataatataact

SEQ ID NO: 60789 - DNA, 13 bp, Artificial Sequence
  Oligonucleotide for detection of SNP TSC0016214
ttatagggtagtt

SEQ ID NO: 60790 - DNA, 13 bp, Artificial Sequence
  Oligonucleotide for detection of SNP TSC0016214
aactaccctataa

SEQ ID NO: 60791 - DNA, 13 bp, Artificial Sequence
  Oligonucleotide for detection of SNP TSC0016215
tagttgtgatata

SEQ ID NO: 60792 - DNA, 13 bp, Artificial Sequence
  Oligonucleotide for detection of SNP TSC0016215
tatatcacaacta

SEQ ID NO: 60793 - DNA, 13 bp, Artificial Sequence
  Oligonucleotide for detection of SNP TSC0016215
tagttgggatata

SEQ ID NO: 60794 - DNA, 13 bp, Artificial Sequence
  Oligonucleotide for detection of SNP TSC0016215
tatatcccaacta

SEQ ID NO: 60795 - DNA, 13 bp, Artificial Sequence
  Oligonucleotide for detection of SNP TSC0016215
tagtcgtgatata

SEQ ID NO: 60796 - DNA, 13 bp, Artificial Sequence
  Oligonucleotide for detection of SNP TSC0016215
tatatcacgacta

SEQ ID NO: 60797 - DNA, 13 bp, Artificial Sequence
  Oligonucleotide for detection of SNP TSC0016215
tagtcgggatata

SEQ ID NO: 60798 - DNA, 13 bp, Artificial Sequence
  Oligonucleotide for detection of SNP TSC0016215
tatatcccgacta

SEQ ID NO: 60799 - DNA, 13 bp, Artificial Sequence
  Oligonucleotide for detection of SNP TSC0016215
tagttgcgatata

SEQ ID NO: 60800 - DNA, 13 bp, Artificial Sequence
  Oligonucleotide for detection of SNP TSC0016215
tatatcgcaacta

SEQ ID NO: 60801 - DNA, 13 bp, Artificial Sequence
  Oligonucleotide for detection of SNP TSC0016215
tagtcgcgatata

SEQ ID NO: 60802 - DNA, 13 bp, Artificial Sequence
  Oligonucleotide for detection of SNP TSC0016215
tatatcgcgacta

SEQ ID NO: 60803 - DNA, 13 bp, Artificial Sequence
  Oligonucleotide for detection of SNP TSC0016215
tgtgttgtgattg

SEQ ID NO: 60804 - DNA, 13 bp, Artificial Sequence
  Oligonucleotide for detection of SNP TSC0016215
caatcacaacaca

SEQ ID NO: 60805 - DNA, 13 bp, Artificial Sequence
  Oligonucleotide for detection of SNP TSC0016215
tgtgttttgattg

SEQ ID NO: 60806 - DNA, 13 bp, Artificial Sequence
  Oligonucleotide for detection of SNP TSC0016215
caatcaaaacaca

SEQ ID NO: 60807 - DNA, 13 bp, Artificial Sequence
  Oligonucleotide for detection of SNP TSC0016215
tgtgtcgtgattg

SEQ ID NO: 60808 - DNA, 13 bp, Artificial Sequence
  Oligonucleotide for detection of SNP TSC0016215
caatcacgacaca

SEQ ID NO: 60809 - DNA, 13 bp, Artificial Sequence
  Oligonucleotide for detection of SNP TSC0016215
tgtgtttcgattg

SEQ ID NO: 60810 - DNA, 13 bp, Artificial Sequence
  Oligonucleotide for detection of SNP TSC0016215
caatcgaaacaca

SEQ ID NO: 60811 - DNA, 13 bp, Artificial Sequence
  Oligonucleotide for detection of SNP TSC0016215
tgtgttgcgattg

SEQ ID NO: 60812 - DNA, 13 bp, Artificial Sequence
  Oligonucleotide for detection of SNP TSC0016215
caatcgcaacaca

SEQ ID NO: 60813 - DNA, 13 bp, Artificial Sequence
  Oligonucleotide for detection of SNP TSC0016215
tgtgtcgcgattg

SEQ ID NO: 60814 - DNA, 13 bp, Artificial Sequence
  Oligonucleotide for detection of SNP TSC0016215
caatcgcgacaca

SEQ ID NO: 60815 - DNA, 13 bp, Artificial Sequence
  Oligonucleotide for detection of SNP TSC0016216
tggttcgttttta

SEQ ID NO: 60816 - DNA, 13 bp, Artificial Sequence
  Oligonucleotide for detection of SNP TSC0016216
taaaaacgaacca

SEQ ID NO: 60817 - DNA, 13 bp, Artificial Sequence
  Oligonucleotide for detection of SNP TSC0016216
tggaaatgagtta

SEQ ID NO: 60818 - DNA, 13 bp, Artificial Sequence
  Oligonucleotide for detection of SNP TSC0016216
taactcatttcca

SEQ ID NO: 60819 - DNA, 13 bp, Artificial Sequence
  Oligonucleotide for detection of SNP TSC0016216
tggaaacgagtta

SEQ ID NO: 60820 - DNA, 13 bp, Artificial Sequence
  Oligonucleotide for detection of SNP TSC0016216
taactcgtttcca

SEQ ID NO: 60821 - DNA, 13 bp, Artificial Sequence
  Oligonucleotide for detection of SNP TSC0016217
agttattggggaa

SEQ ID NO: 60822 - DNA, 13 bp, Artificial Sequence
  Oligonucleotide for detection of SNP TSC0016217
ttccccaataact

SEQ ID NO: 60823 - DNA, 13 bp, Artificial Sequence
  Oligonucleotide for detection of SNP TSC0016217
agttatcggggaa

SEQ ID NO: 60824 - DNA, 13 bp, Artificial Sequence
  Oligonucleotide for detection of SNP TSC0016217
ttccccgataact

SEQ ID NO: 60825 - DNA, 13 bp, Artificial Sequence
  Oligonucleotide for detection of SNP TSC0016217
ttttttggtggtt

SEQ ID NO: 60826 - DNA, 13 bp, Artificial Sequence
  Oligonucleotide for detection of SNP TSC0016217
aaccaccaaaaaa

SEQ ID NO: 60827 - DNA, 13 bp, Artificial Sequence
  Oligonucleotide for detection of SNP TSC0016217
tttttcggtggtt

SEQ ID NO: 60828 - DNA, 13 bp, Artificial Sequence
  Oligonucleotide for detection of SNP TSC0016217
aaccaccgaaaaa

SEQ ID NO: 60829 - DNA, 13 bp, Artificial Sequence
  Oligonucleotide for detection of SNP TSC0016218
ttggtaatggtty

SEQ ID NO: 60830 - DNA, 13 bp, Artificial Sequence
  Oligonucleotide for detection of SNP TSC0016218
raaccattaccaa

SEQ ID NO: 60831 - DNA, 13 bp, Artificial Sequence
  Oligonucleotide for detection of SNP TSC0016218
ttggtattggtty

SEQ ID NO: 60832 - DNA, 13 bp, Artificial Sequence
  Oligonucleotide for detection of SNP TSC0016218
raaccaataccaa

SEQ ID NO: 60833 - DNA, 13 bp, Artificial Sequence
  Oligonucleotide for detection of SNP TSC0016218
ttggtaacggtty

SEQ ID NO: 60834 - DNA, 13 bp, Artificial Sequence
  Oligonucleotide for detection of SNP TSC0016218
raaccgttaccaa

SEQ ID NO: 60835 - DNA, 13 bp, Artificial Sequence
  Oligonucleotide for detection of SNP TSC0016218
ttggtatcggtty

SEQ ID NO: 60836 - DNA, 13 bp, Artificial Sequence
  Oligonucleotide for detection of SNP TSC0016218
raaccgataccaa

SEQ ID NO: 60837 - DNA, 13 bp, Artificial Sequence
  Oligonucleotide for detection of SNP TSC0016218
ggattgttattag

SEQ ID NO: 60838 - DNA, 13 bp, Artificial Sequence
  Oligonucleotide for detection of SNP TSC0016218
ctaataacaatcc

SEQ ID NO: 60839 - DNA, 13 bp, Artificial Sequence
  Oligonucleotide for detection of SNP TSC0016218
ggattggtattag

SEQ ID NO: 60840 - DNA, 13 bp, Artificial Sequence
  Oligonucleotide for detection of SNP TSC0016218
ctaataccaatcc

SEQ ID NO: 60841 - DNA, 13 bp, Artificial Sequence
  Oligonucleotide for detection of SNP TSC0016218
ggatcgttattag

SEQ ID NO: 60842 - DNA, 13 bp, Artificial Sequence
  Oligonucleotide for detection of SNP TSC0016218
ctaataacgatcc

SEQ ID NO: 60843 - DNA, 13 bp, Artificial Sequence
  Oligonucleotide for detection of SNP TSC0016218
ggatcggtattag

SEQ ID NO: 60844 - DNA, 13 bp, Artificial Sequence
  Oligonucleotide for detection of SNP TSC0016218
ctaataccgatcc

SEQ ID NO: 60845 - DNA, 13 bp, Artificial Sequence
  Oligonucleotide for detection of SNP TSC0016224
aggttgtagtgta

SEQ ID NO: 60846 - DNA, 13 bp, Artificial Sequence
  Oligonucleotide for detection of SNP TSC0016224
tacactacaacct

SEQ ID NO: 60847 - DNA, 13 bp, Artificial Sequence
  Oligonucleotide for detection of SNP TSC0016224
aggttggagtgta

SEQ ID NO: 60848 - DNA, 13 bp, Artificial Sequence
  Oligonucleotide for detection of SNP TSC0016224
tacactccaacct

SEQ ID NO: 60849 - DNA, 13 bp, Artificial Sequence
  Oligonucleotide for detection of SNP TSC0016224
tgtattgtagttt

SEQ ID NO: 60850 - DNA, 13 bp, Artificial Sequence
  Oligonucleotide for detection of SNP TSC0016224
aaactacaataca

SEQ ID NO: 60851 - DNA, 13 bp, Artificial Sequence
  Oligonucleotide for detection of SNP TSC0016224
tgtattttagttt

SEQ ID NO: 60852 - DNA, 13 bp, Artificial Sequence
  Oligonucleotide for detection of SNP TSC0016224
aaactaaaataca

SEQ ID NO: 60853 - DNA, 13 bp, Artificial Sequence
  Oligonucleotide for detection of SNP TSC0016225
taattttgtattt

SEQ ID NO: 60854 - DNA, 13 bp, Artificial Sequence
  Oligonucleotide for detection of SNP TSC0016225
aaatacaaaatta

SEQ ID NO: 60855 - DNA, 13 bp, Artificial Sequence
  Oligonucleotide for detection of SNP TSC0016225
taatttcgtattt

SEQ ID NO: 60856 - DNA, 13 bp, Artificial Sequence
  Oligonucleotide for detection of SNP TSC0016225
aaatacgaaatta

SEQ ID NO: 60857 - DNA, 13 bp, Artificial Sequence
  Oligonucleotide for detection of SNP TSC0016225
aaatatgaaatta

SEQ ID NO: 60858 - DNA, 13 bp, Artificial Sequence
  Oligonucleotide for detection of SNP TSC0016225
taatttcatattt

SEQ ID NO: 60859 - DNA, 13 bp, Artificial Sequence
  Oligonucleotide for detection of SNP TSC0016225
aaatataaaatta

SEQ ID NO: 60860 - DNA, 13 bp, Artificial Sequence
  Oligonucleotide for detection of SNP TSC0016225
taattttatattt

SEQ ID NO: 60861 - DNA, 13 bp, Artificial Sequence
  Oligonucleotide for detection of SNP TSC0016226
tgtttgagtatta

SEQ ID NO: 60862 - DNA, 13 bp, Artificial Sequence
  Oligonucleotide for detection of SNP TSC0016226
taatactcaaaca

SEQ ID NO: 60863 - DNA, 13 bp, Artificial Sequence
  Oligonucleotide for detection of SNP TSC0016226
tgtttgggtatta

SEQ ID NO: 60864 - DNA, 13 bp, Artificial Sequence
  Oligonucleotide for detection of SNP TSC0016226
taatacccaaaca

SEQ ID NO: 60865 - DNA, 13 bp, Artificial Sequence
  Oligonucleotide for detection of SNP TSC0016227
ttaaaagttataa

SEQ ID NO: 60866 - DNA, 13 bp, Artificial Sequence
  Oligonucleotide for detection of SNP TSC0016227
ttataacttttaa

SEQ ID NO: 60867 - DNA, 13 bp, Artificial Sequence
  Oligonucleotide for detection of SNP TSC0016228
ttaaaaaaattat

SEQ ID NO: 60868 - DNA, 13 bp, Artificial Sequence
  Oligonucleotide for detection of SNP TSC0016228
ataatttttttaa

SEQ ID NO: 60869 - DNA, 13 bp, Artificial Sequence
  Oligonucleotide for detection of SNP TSC0016228
ttaaaagaattat

SEQ ID NO: 60870 - DNA, 13 bp, Artificial Sequence
  Oligonucleotide for detection of SNP TSC0016228
ataattcttttaa

SEQ ID NO: 60871 - DNA, 13 bp, Artificial Sequence
  Oligonucleotide for detection of SNP TSC0016229
gtttttgggggaa

SEQ ID NO: 60872 - DNA, 13 bp, Artificial Sequence
  Oligonucleotide for detection of SNP TSC0016229
ttcccccaaaaac

SEQ ID NO: 60873 - DNA, 13 bp, Artificial Sequence
  Oligonucleotide for detection of SNP TSC0016229
gtttttaggggaa

SEQ ID NO: 60874 - DNA, 13 bp, Artificial Sequence
  Oligonucleotide for detection of SNP TSC0016229
ttcccctaaaaac

SEQ ID NO: 60875 - DNA, 13 bp, Artificial Sequence
  Oligonucleotide for detection of SNP TSC0016230
gatgtgagtttta

SEQ ID NO: 60876 - DNA, 13 bp, Artificial Sequence
  Oligonucleotide for detection of SNP TSC0016230
taaaactcacatc

SEQ ID NO: 60877 - DNA, 13 bp, Artificial Sequence
  Oligonucleotide for detection of SNP TSC0016230
gatgtgggtttta

SEQ ID NO: 60878 - DNA, 13 bp, Artificial Sequence
  Oligonucleotide for detection of SNP TSC0016230
taaaacccacatc

SEQ ID NO: 60879 - DNA, 13 bp, Artificial Sequence
  Oligonucleotide for detection of SNP TSC0016231
gaaaatatttaga

SEQ ID NO: 60880 - DNA, 13 bp, Artificial Sequence
  Oligonucleotide for detection of SNP TSC0016231
tctaaatattttc

SEQ ID NO: 60881 - DNA, 13 bp, Artificial Sequence
  Oligonucleotide for detection of SNP TSC0016231
gaaaatgtttaga

SEQ ID NO: 60882 - DNA, 13 bp, Artificial Sequence
  Oligonucleotide for detection of SNP TSC0016231
tctaaacattttc

SEQ ID NO: 60883 - DNA, 13 bp, Artificial Sequence
  Oligonucleotide for detection of SNP TSC0016232
tttttttgtgttt

SEQ ID NO: 60884 - DNA, 13 bp, Artificial Sequence
  Oligonucleotide for detection of SNP TSC0016232
aaacacaaaaaaa

SEQ ID NO: 60885 - DNA, 13 bp, Artificial Sequence
  Oligonucleotide for detection of SNP TSC0016232
ttttttcgtgttt

SEQ ID NO: 60886 - DNA, 13 bp, Artificial Sequence
  Oligonucleotide for detection of SNP TSC0016232
aaacacgaaaaaa

SEQ ID NO: 60887 - DNA, 13 bp, Artificial Sequence
  Oligonucleotide for detection of SNP TSC0016232
tttttttgcgttt

SEQ ID NO: 60888 - DNA, 13 bp, Artificial Sequence
  Oligonucleotide for detection of SNP TSC0016232
aaacgcaaaaaaa

SEQ ID NO: 60889 - DNA, 13 bp, Artificial Sequence
  Oligonucleotide for detection of SNP TSC0016232
ttttttcgcgttt

SEQ ID NO: 60890 - DNA, 13 bp, Artificial Sequence
  Oligonucleotide for detection of SNP TSC0016232
aaacgcgaaaaaa

SEQ ID NO: 60891 - DNA, 13 bp, Artificial Sequence
  Oligonucleotide for detection of SNP TSC0016232
aaatgtgagaaaa

SEQ ID NO: 60892 - DNA, 13 bp, Artificial Sequence
  Oligonucleotide for detection of SNP TSC0016232
ttttctcacattt

SEQ ID NO: 60893 - DNA, 13 bp, Artificial Sequence
  Oligonucleotide for detection of SNP TSC0016232
aaatgtaagaaaa

SEQ ID NO: 60894 - DNA, 13 bp, Artificial Sequence
  Oligonucleotide for detection of SNP TSC0016232
ttttcttacattt

SEQ ID NO: 60895 - DNA, 13 bp, Artificial Sequence
  Oligonucleotide for detection of SNP TSC0016232
aaacgtgagaaaa

SEQ ID NO: 60896 - DNA, 13 bp, Artificial Sequence
  Oligonucleotide for detection of SNP TSC0016232
ttttctcacgttt

SEQ ID NO: 60897 - DNA, 13 bp, Artificial Sequence
  Oligonucleotide for detection of SNP TSC0016232
aaacgtaagaaaa

SEQ ID NO: 60898 - DNA, 13 bp, Artificial Sequence
  Oligonucleotide for detection of SNP TSC0016232
ttttcttacgttt

SEQ ID NO: 60899 - DNA, 13 bp, Artificial Sequence
  Oligonucleotide for detection of SNP TSC0016232
aaatgcgagaaaa

SEQ ID NO: 60900 - DNA, 13 bp, Artificial Sequence
  Oligonucleotide for detection of SNP TSC0016232
ttttctcgcattt

SEQ ID NO: 60901 - DNA, 13 bp, Artificial Sequence
  Oligonucleotide for detection of SNP TSC0016232
aaacgcgagaaaa

SEQ ID NO: 60902 - DNA, 13 bp, Artificial Sequence
  Oligonucleotide for detection of SNP TSC0016232
ttttctcgcgttt

SEQ ID NO: 60903 - DNA, 13 bp, Artificial Sequence
  Oligonucleotide for detection of SNP TSC0016233
tttgttttggagy

SEQ ID NO: 60904 - DNA, 13 bp, Artificial Sequence
  Oligonucleotide for detection of SNP TSC0016233
rctccaaaacaaa

SEQ ID NO: 60905 - DNA, 13 bp, Artificial Sequence
  Oligonucleotide for detection of SNP TSC0016233
tttgttgtggagy

SEQ ID NO: 60906 - DNA, 13 bp, Artificial Sequence
  Oligonucleotide for detection of SNP TSC0016233
rctccacaacaaa

SEQ ID NO: 60907 - DNA, 13 bp, Artificial Sequence
  Oligonucleotide for detection of SNP TSC0016233
ttcgttttggagy

SEQ ID NO: 60908 - DNA, 13 bp, Artificial Sequence
  Oligonucleotide for detection of SNP TSC0016233
rctccaaaacgaa

SEQ ID NO: 60909 - DNA, 13 bp, Artificial Sequence
  Oligonucleotide for detection of SNP TSC0016233
ttcgttgtggagy

SEQ ID NO: 60910 - DNA, 13 bp, Artificial Sequence
  Oligonucleotide for detection of SNP TSC0016233
rctccacaacgaa

SEQ ID NO: 60911 - DNA, 13 bp, Artificial Sequence
  Oligonucleotide for detection of SNP TSC0016233
tttgtttcggagy

SEQ ID NO: 60912 - DNA, 13 bp, Artificial Sequence
  Oligonucleotide for detection of SNP TSC0016233
rctccgaaacaaa

SEQ ID NO: 60913 - DNA, 13 bp, Artificial Sequence
  Oligonucleotide for detection of SNP TSC0016233
tttgttgcggagy

SEQ ID NO: 60914 - DNA, 13 bp, Artificial Sequence
  Oligonucleotide for detection of SNP TSC0016233
rctccgcaacaaa

SEQ ID NO: 60915 - DNA, 13 bp, Artificial Sequence
  Oligonucleotide for detection of SNP TSC0016233
ttcgtttcggagy

SEQ ID NO: 60916 - DNA, 13 bp, Artificial Sequence
  Oligonucleotide for detection of SNP TSC0016233
rctccgaaacgaa

SEQ ID NO: 60917 - DNA, 13 bp, Artificial Sequence
  Oligonucleotide for detection of SNP TSC0016233
ttcgttgcggagy

SEQ ID NO: 60918 - DNA, 13 bp, Artificial Sequence
  Oligonucleotide for detection of SNP TSC0016233
rctccgcaacgaa

SEQ ID NO: 60919 - DNA, 13 bp, Artificial Sequence
  Oligonucleotide for detection of SNP TSC0016233
gttttggagtgag

SEQ ID NO: 60920 - DNA, 13 bp, Artificial Sequence
  Oligonucleotide for detection of SNP TSC0016233
ctcactccaaaac

SEQ ID NO: 60921 - DNA, 13 bp, Artificial Sequence
  Oligonucleotide for detection of SNP TSC0016233
gttttgtagtgag

SEQ ID NO: 60922 - DNA, 13 bp, Artificial Sequence
  Oligonucleotide for detection of SNP TSC0016233
ctcactacaaaac

SEQ ID NO: 60923 - DNA, 13 bp, Artificial Sequence
  Oligonucleotide for detection of SNP TSC0016233
gtttcggagtgag

SEQ ID NO: 60924 - DNA, 13 bp, Artificial Sequence
  Oligonucleotide for detection of SNP TSC0016233
ctcactccgaaac

SEQ ID NO: 60925 - DNA, 13 bp, Artificial Sequence
  Oligonucleotide for detection of SNP TSC0016233
gtttcgtagtgag

SEQ ID NO: 60926 - DNA, 13 bp, Artificial Sequence
  Oligonucleotide for detection of SNP TSC0016233
ctcactacgaaac

SEQ ID NO: 60927 - DNA, 13 bp, Artificial Sequence
  Oligonucleotide for detection of SNP TSC0016233
gttttggagcgag

SEQ ID NO: 60928 - DNA, 13 bp, Artificial Sequence
  Oligonucleotide for detection of SNP TSC0016233
ctcgctccaaaac

SEQ ID NO: 60929 - DNA, 13 bp, Artificial Sequence
  Oligonucleotide for detection of SNP TSC0016233
gttttgtagcgag

SEQ ID NO: 60930 - DNA, 13 bp, Artificial Sequence
  Oligonucleotide for detection of SNP TSC0016233
ctcgctacaaaac

SEQ ID NO: 60931 - DNA, 13 bp, Artificial Sequence
  Oligonucleotide for detection of SNP TSC0016233
gtttcggagcgag

SEQ ID NO: 60932 - DNA, 13 bp, Artificial Sequence
  Oligonucleotide for detection of SNP TSC0016233
ctcgctccgaaac

SEQ ID NO: 60933 - DNA, 13 bp, Artificial Sequence
  Oligonucleotide for detection of SNP TSC0016233
gtttcgtagcgag

SEQ ID NO: 60934 - DNA, 13 bp, Artificial Sequence
  Oligonucleotide for detection of SNP TSC0016233
ctcgctacgaaac

SEQ ID NO: 60935 - DNA, 13 bp, Artificial Sequence
  Oligonucleotide for detection of SNP TSC0016238
agaagggttgtgt

SEQ ID NO: 60936 - DNA, 13 bp, Artificial Sequence
  Oligonucleotide for detection of SNP TSC0016238
acacaacccttct

SEQ ID NO: 60937 - DNA, 13 bp, Artificial Sequence
  Oligonucleotide for detection of SNP TSC0016238
agaaggtttgtgt

SEQ ID NO: 60938 - DNA, 13 bp, Artificial Sequence
  Oligonucleotide for detection of SNP TSC0016238
acacaaaccttct

SEQ ID NO: 60939 - DNA, 13 bp, Artificial Sequence
  Oligonucleotide for detection of SNP TSC0016238
agaagggttgcgt

SEQ ID NO: 60940 - DNA, 13 bp, Artificial Sequence
  Oligonucleotide for detection of SNP TSC0016238
acgcaacccttct

SEQ ID NO: 60941 - DNA, 13 bp, Artificial Sequence
  Oligonucleotide for detection of SNP TSC0016238
agaaggtttgcgt

SEQ ID NO: 60942 - DNA, 13 bp, Artificial Sequence
  Oligonucleotide for detection of SNP TSC0016238
acgcaaaccttct

SEQ ID NO: 60943 - DNA, 13 bp, Artificial Sequence
  Oligonucleotide for detection of SNP TSC0016238
atgtagttttttt

SEQ ID NO: 60944 - DNA, 13 bp, Artificial Sequence
  Oligonucleotide for detection of SNP TSC0016238
aaaaaaactacat

SEQ ID NO: 60945 - DNA, 13 bp, Artificial Sequence
  Oligonucleotide for detection of SNP TSC0016238
atgtagatttttt

SEQ ID NO: 60946 - DNA, 13 bp, Artificial Sequence
  Oligonucleotide for detection of SNP TSC0016238
aaaaaatctacat

SEQ ID NO: 60947 - DNA, 13 bp, Artificial Sequence
  Oligonucleotide for detection of SNP TSC0016238
acgtagttttttt

SEQ ID NO: 60948 - DNA, 13 bp, Artificial Sequence
  Oligonucleotide for detection of SNP TSC0016238
aaaaaaactacgt

SEQ ID NO: 60949 - DNA, 13 bp, Artificial Sequence
  Oligonucleotide for detection of SNP TSC0016238
acgtagatttttt

SEQ ID NO: 60950 - DNA, 13 bp, Artificial Sequence
  Oligonucleotide for detection of SNP TSC0016238
aaaaaatctacgt

SEQ ID NO: 60951 - DNA, 13 bp, Artificial Sequence
  Oligonucleotide for detection of SNP TSC0016239
agtgaaggaggta

SEQ ID NO: 60952 - DNA, 13 bp, Artificial Sequence
  Oligonucleotide for detection of SNP TSC0016239
tacctccttcact

SEQ ID NO: 60953 - DNA, 13 bp, Artificial Sequence
  Oligonucleotide for detection of SNP TSC0016239
agtgaatgaggta

SEQ ID NO: 60954 - DNA, 13 bp, Artificial Sequence
  Oligonucleotide for detection of SNP TSC0016239
tacctcattcact

SEQ ID NO: 60955 - DNA, 13 bp, Artificial Sequence
  Oligonucleotide for detection of SNP TSC0016240
tttgagtgttgag

SEQ ID NO: 60956 - DNA, 13 bp, Artificial Sequence
  Oligonucleotide for detection of SNP TSC0016240
ctcaacactcaaa

SEQ ID NO: 60957 - DNA, 13 bp, Artificial Sequence
  Oligonucleotide for detection of SNP TSC0016240
tttgagcgttgag

SEQ ID NO: 60958 - DNA, 13 bp, Artificial Sequence
  Oligonucleotide for detection of SNP TSC0016240
ctcaacgctcaaa

SEQ ID NO: 60959 - DNA, 13 bp, Artificial Sequence
  Oligonucleotide for detection of SNP TSC0016240
tttaatgtttagg

SEQ ID NO: 60960 - DNA, 13 bp, Artificial Sequence
  Oligonucleotide for detection of SNP TSC0016240
cctaaacattaaa

SEQ ID NO: 60961 - DNA, 13 bp, Artificial Sequence
  Oligonucleotide for detection of SNP TSC0016240
tttaatatttagg

SEQ ID NO: 60962 - DNA, 13 bp, Artificial Sequence
  Oligonucleotide for detection of SNP TSC0016240
cctaaatattaaa

SEQ ID NO: 60963 - DNA, 13 bp, Artificial Sequence
  Oligonucleotide for detection of SNP TSC0016240
tttaacgtttagg

SEQ ID NO: 60964 - DNA, 13 bp, Artificial Sequence
  Oligonucleotide for detection of SNP TSC0016240
cctaaacgttaaa

SEQ ID NO: 60965 - DNA, 13 bp, Artificial Sequence
  Oligonucleotide for detection of SNP TSC0016241
agttagaaggtaa

SEQ ID NO: 60966 - DNA, 13 bp, Artificial Sequence
  Oligonucleotide for detection of SNP TSC0016241
ttaccttctaact

SEQ ID NO: 60967 - DNA, 13 bp, Artificial Sequence
  Oligonucleotide for detection of SNP TSC0016241
agttagtaggtaa

SEQ ID NO: 60968 - DNA, 13 bp, Artificial Sequence
  Oligonucleotide for detection of SNP TSC0016241
ttacctactaact

SEQ ID NO: 60969 - DNA, 13 bp, Artificial Sequence
  Oligonucleotide for detection of SNP TSC0016241
ttgttttttagtt

SEQ ID NO: 60970 - DNA, 13 bp, Artificial Sequence
  Oligonucleotide for detection of SNP TSC0016241
aactaaaaaacaa

SEQ ID NO: 60971 - DNA, 13 bp, Artificial Sequence
  Oligonucleotide for detection of SNP TSC0016241
ttgtttgttagtt

SEQ ID NO: 60972 - DNA, 13 bp, Artificial Sequence
  Oligonucleotide for detection of SNP TSC0016241
aactaacaaacaa

SEQ ID NO: 60973 - DNA, 13 bp, Artificial Sequence
  Oligonucleotide for detection of SNP TSC0016244
ttttaaattatag

SEQ ID NO: 60974 - DNA, 13 bp, Artificial Sequence
  Oligonucleotide for detection of SNP TSC0016244
ctataatttaaaa

SEQ ID NO: 60975 - DNA, 13 bp, Artificial Sequence
  Oligonucleotide for detection of SNP TSC0016244
ttttaagttatag

SEQ ID NO: 60976 - DNA, 13 bp, Artificial Sequence
  Oligonucleotide for detection of SNP TSC0016244
ctataacttaaaa

SEQ ID NO: 60977 - DNA, 13 bp, Artificial Sequence
  Oligonucleotide for detection of SNP TSC0016245
tttgtgatgtaay

SEQ ID NO: 60978 - DNA, 13 bp, Artificial Sequence
  Oligonucleotide for detection of SNP TSC0016245
rttacatcacaaa

SEQ ID NO: 60979 - DNA, 13 bp, Artificial Sequence
  Oligonucleotide for detection of SNP TSC0016245
tttgtggtgtaay

SEQ ID NO: 60980 - DNA, 13 bp, Artificial Sequence
  Oligonucleotide for detection of SNP TSC0016245
rttacaccacaaa

SEQ ID NO: 60981 - DNA, 13 bp, Artificial Sequence
  Oligonucleotide for detection of SNP TSC0016245
ttcgtgatgtaay

SEQ ID NO: 60982 - DNA, 13 bp, Artificial Sequence
  Oligonucleotide for detection of SNP TSC0016245
rttacatcacgaa

SEQ ID NO: 60983 - DNA, 13 bp, Artificial Sequence
  Oligonucleotide for detection of SNP TSC0016245
ttcgtggtgtaay

SEQ ID NO: 60984 - DNA, 13 bp, Artificial Sequence
  Oligonucleotide for detection of SNP TSC0016245
rttacaccacgaa

SEQ ID NO: 60985 - DNA, 13 bp, Artificial Sequence
  Oligonucleotide for detection of SNP TSC0016246
ggaggtggaggtt

SEQ ID NO: 60986 - DNA, 13 bp, Artificial Sequence
  Oligonucleotide for detection of SNP TSC0016246
aacctccacctcc

SEQ ID NO: 60987 - DNA, 13 bp, Artificial Sequence
  Oligonucleotide for detection of SNP TSC0016246
ggaggtagaggtt

SEQ ID NO: 60988 - DNA, 13 bp, Artificial Sequence
  Oligonucleotide for detection of SNP TSC0016246
aacctctacctcc

SEQ ID NO: 60989 - DNA, 13 bp, Artificial Sequence
  Oligonucleotide for detection of SNP TSC0016251
tattttatagttg

SEQ ID NO: 60990 - DNA, 13 bp, Artificial Sequence
  Oligonucleotide for detection of SNP TSC0016251
caactataaaata

SEQ ID NO: 60991 - DNA, 13 bp, Artificial Sequence
  Oligonucleotide for detection of SNP TSC0016251
tattttttagttg

SEQ ID NO: 60992 - DNA, 13 bp, Artificial Sequence
  Oligonucleotide for detection of SNP TSC0016251
caactaaaaaata

SEQ ID NO: 60993 - DNA, 13 bp, Artificial Sequence
  Oligonucleotide for detection of SNP TSC0016251
taattatgagatg

SEQ ID NO: 60994 - DNA, 13 bp, Artificial Sequence
  Oligonucleotide for detection of SNP TSC0016251
catctcataatta

SEQ ID NO: 60995 - DNA, 13 bp, Artificial Sequence
  Oligonucleotide for detection of SNP TSC0016251
taattaggagatg

SEQ ID NO: 60996 - DNA, 13 bp, Artificial Sequence
  Oligonucleotide for detection of SNP TSC0016251
catctcctaatta

SEQ ID NO: 60997 - DNA, 13 bp, Artificial Sequence
  Oligonucleotide for detection of SNP TSC0016252
agttataaagtag

SEQ ID NO: 60998 - DNA, 13 bp, Artificial Sequence
  Oligonucleotide for detection of SNP TSC0016252
ctactttataact

SEQ ID NO: 60999 - DNA, 13 bp, Artificial Sequence
  Oligonucleotide for detection of SNP TSC0016252
agttattaagtag

SEQ ID NO: 61000 - DNA, 13 bp, Artificial Sequence
  Oligonucleotide for detection of SNP TSC0016252
ctacttaataact

SEQ ID NO: 61001 - DNA, 13 bp, Artificial Sequence
  Oligonucleotide for detection of SNP TSC0016252
ttgttttgtggtt

SEQ ID NO: 61002 - DNA, 13 bp, Artificial Sequence
  Oligonucleotide for detection of SNP TSC0016252
aaccacaaaacaa

SEQ ID NO: 61003 - DNA, 13 bp, Artificial Sequence
  Oligonucleotide for detection of SNP TSC0016252
ttgtttagtggtt

SEQ ID NO: 61004 - DNA, 13 bp, Artificial Sequence
  Oligonucleotide for detection of SNP TSC0016252
aaccactaaacaa

SEQ ID NO: 61005 - DNA, 13 bp, Artificial Sequence
  Oligonucleotide for detection of SNP TSC0016253
tttgttattaggg

SEQ ID NO: 61006 - DNA, 13 bp, Artificial Sequence
  Oligonucleotide for detection of SNP TSC0016253
ccctaataacaaa

SEQ ID NO: 61007 - DNA, 13 bp, Artificial Sequence
  Oligonucleotide for detection of SNP TSC0016253
tttgttgttaggg

SEQ ID NO: 61008 - DNA, 13 bp, Artificial Sequence
  Oligonucleotide for detection of SNP TSC0016253
ccctaacaacaaa

SEQ ID NO: 61009 - DNA, 13 bp, Artificial Sequence
  Oligonucleotide for detection of SNP TSC0016255
tgggtgtgtaaga

SEQ ID NO: 61010 - DNA, 13 bp, Artificial Sequence
  Oligonucleotide for detection of SNP TSC0016255
tcttacacaccca

SEQ ID NO: 61011 - DNA, 13 bp, Artificial Sequence
  Oligonucleotide for detection of SNP TSC0016255
tgggtgcgtaaga

SEQ ID NO: 61012 - DNA, 13 bp, Artificial Sequence
  Oligonucleotide for detection of SNP TSC0016255
tcttacgcaccca

SEQ ID NO: 61013 - DNA, 13 bp, Artificial Sequence
  Oligonucleotide for detection of SNP TSC0016255
ttttgtgtattta

SEQ ID NO: 61014 - DNA, 13 bp, Artificial Sequence
  Oligonucleotide for detection of SNP TSC0016255
taaatacacaaaa

SEQ ID NO: 61015 - DNA, 13 bp, Artificial Sequence
  Oligonucleotide for detection of SNP TSC0016255
ttttgcgtattta

SEQ ID NO: 61016 - DNA, 13 bp, Artificial Sequence
  Oligonucleotide for detection of SNP TSC0016255
taaatacgcaaaa

SEQ ID NO: 61017 - DNA, 13 bp, Artificial Sequence
  Oligonucleotide for detection of SNP TSC0016256
ttaattgttttgt

SEQ ID NO: 61018 - DNA, 13 bp, Artificial Sequence
  Oligonucleotide for detection of SNP TSC0016256
acaaaacaattaa

SEQ ID NO: 61019 - DNA, 13 bp, Artificial Sequence
  Oligonucleotide for detection of SNP TSC0016256
ttaatttttttgt

SEQ ID NO: 61020 - DNA, 13 bp, Artificial Sequence
  Oligonucleotide for detection of SNP TSC0016256
acaaaaaaattaa

SEQ ID NO: 61021 - DNA, 13 bp, Artificial Sequence
  Oligonucleotide for detection of SNP TSC0016256
ataaaataattaa

SEQ ID NO: 61022 - DNA, 13 bp, Artificial Sequence
  Oligonucleotide for detection of SNP TSC0016256
ttaattattttat

SEQ ID NO: 61023 - DNA, 13 bp, Artificial Sequence
  Oligonucleotide for detection of SNP TSC0016256
ataaaaaaattaa

SEQ ID NO: 61024 - DNA, 13 bp, Artificial Sequence
  Oligonucleotide for detection of SNP TSC0016256
ttaatttttttat

SEQ ID NO: 61025 - DNA, 13 bp, Artificial Sequence
  Oligonucleotide for detection of SNP TSC0016257
gtagtagattatg

SEQ ID NO: 61026 - DNA, 13 bp, Artificial Sequence
  Oligonucleotide for detection of SNP TSC0016257
cataatctactac

SEQ ID NO: 61027 - DNA, 13 bp, Artificial Sequence
  Oligonucleotide for detection of SNP TSC0016257
gtagtaaattatg

SEQ ID NO: 61028 - DNA, 13 bp, Artificial Sequence
  Oligonucleotide for detection of SNP TSC0016257
cataatttactac

SEQ ID NO: 61029 - DNA, 13 bp, Artificial Sequence
  Oligonucleotide for detection of SNP TSC0016258
gattgaagtgtgg

SEQ ID NO: 61030 - DNA, 13 bp, Artificial Sequence
  Oligonucleotide for detection of SNP TSC0016258
ccacacttcaatc

SEQ ID NO: 61031 - DNA, 13 bp, Artificial Sequence
  Oligonucleotide for detection of SNP TSC0016258
gattgaggtgtgg

SEQ ID NO: 61032 - DNA, 13 bp, Artificial Sequence
  Oligonucleotide for detection of SNP TSC0016258
ccacacctcaatc

SEQ ID NO: 61033 - DNA, 13 bp, Artificial Sequence
  Oligonucleotide for detection of SNP TSC0016258
gattgaagtgcgg

SEQ ID NO: 61034 - DNA, 13 bp, Artificial Sequence
  Oligonucleotide for detection of SNP TSC0016258
ccgcacttcaatc

SEQ ID NO: 61035 - DNA, 13 bp, Artificial Sequence
  Oligonucleotide for detection of SNP TSC0016258
gattgaggtgcgg

SEQ ID NO: 61036 - DNA, 13 bp, Artificial Sequence
  Oligonucleotide for detection of SNP TSC0016258
ccgcacctcaatc

SEQ ID NO: 61037 - DNA, 13 bp, Artificial Sequence
  Oligonucleotide for detection of SNP TSC0016260
ttggaggagaaag

SEQ ID NO: 61038 - DNA, 13 bp, Artificial Sequence
  Oligonucleotide for detection of SNP TSC0016260
ctttctcctccaa

SEQ ID NO: 61039 - DNA, 13 bp, Artificial Sequence
  Oligonucleotide for detection of SNP TSC0016260
ttggagtagaaag

SEQ ID NO: 61040 - DNA, 13 bp, Artificial Sequence
  Oligonucleotide for detection of SNP TSC0016260
ctttctactccaa

SEQ ID NO: 61041 - DNA, 13 bp, Artificial Sequence
  Oligonucleotide for detection of SNP TSC0016264
aggtatgagaaty

SEQ ID NO: 61042 - DNA, 13 bp, Artificial Sequence
  Oligonucleotide for detection of SNP TSC0016264
rattctcatacct

SEQ ID NO: 61043 - DNA, 13 bp, Artificial Sequence
  Oligonucleotide for detection of SNP TSC0016264
aggtataagaaty

SEQ ID NO: 61044 - DNA, 13 bp, Artificial Sequence
  Oligonucleotide for detection of SNP TSC0016264
rattcttatacct

SEQ ID NO: 61045 - DNA, 13 bp, Artificial Sequence
  Oligonucleotide for detection of SNP TSC0016265
ggagatggagaag

SEQ ID NO: 61046 - DNA, 13 bp, Artificial Sequence
  Oligonucleotide for detection of SNP TSC0016265
cttctccatctcc

SEQ ID NO: 61047 - DNA, 13 bp, Artificial Sequence
  Oligonucleotide for detection of SNP TSC0016265
ggagattgagaag

SEQ ID NO: 61048 - DNA, 13 bp, Artificial Sequence
  Oligonucleotide for detection of SNP TSC0016265
cttctcaatctcc

SEQ ID NO: 61049 - DNA, 13 bp, Artificial Sequence
  Oligonucleotide for detection of SNP TSC0016265
ggagacggagaag

SEQ ID NO: 61050 - DNA, 13 bp, Artificial Sequence
  Oligonucleotide for detection of SNP TSC0016265
cttctccgtctcc

SEQ ID NO: 61051 - DNA, 13 bp, Artificial Sequence
  Oligonucleotide for detection of SNP TSC0016266
atagttataaagt

SEQ ID NO: 61052 - DNA, 13 bp, Artificial Sequence
  Oligonucleotide for detection of SNP TSC0016266
actttataactat

SEQ ID NO: 61053 - DNA, 13 bp, Artificial Sequence
  Oligonucleotide for detection of SNP TSC0016266
atagttgtaaagt

SEQ ID NO: 61054 - DNA, 13 bp, Artificial Sequence
  Oligonucleotide for detection of SNP TSC0016266
actttacaactat

SEQ ID NO: 61055 - DNA, 13 bp, Artificial Sequence
  Oligonucleotide for detection of SNP TSC0016266
atagtcgtaaagt

SEQ ID NO: 61056 - DNA, 13 bp, Artificial Sequence
  Oligonucleotide for detection of SNP TSC0016266
actttacgactat

SEQ ID NO: 61057 - DNA, 13 bp, Artificial Sequence
  Oligonucleotide for detection of SNP TSC0016266
attttatggttat

SEQ ID NO: 61058 - DNA, 13 bp, Artificial Sequence
  Oligonucleotide for detection of SNP TSC0016266
ataaccataaaat

SEQ ID NO: 61059 - DNA, 13 bp, Artificial Sequence
  Oligonucleotide for detection of SNP TSC0016266
attttacggttat

SEQ ID NO: 61060 - DNA, 13 bp, Artificial Sequence
  Oligonucleotide for detection of SNP TSC0016266
ataaccgtaaaat

SEQ ID NO: 61061 - DNA, 13 bp, Artificial Sequence
  Oligonucleotide for detection of SNP TSC0016268
gagataaattgty

SEQ ID NO: 61062 - DNA, 13 bp, Artificial Sequence
  Oligonucleotide for detection of SNP TSC0016268
racaatttatctc

SEQ ID NO: 61063 - DNA, 13 bp, Artificial Sequence
  Oligonucleotide for detection of SNP TSC0016268
gagatagattgty

SEQ ID NO: 61064 - DNA, 13 bp, Artificial Sequence
  Oligonucleotide for detection of SNP TSC0016268
racaatctatctc

SEQ ID NO: 61065 - DNA, 13 bp, Artificial Sequence
  Oligonucleotide for detection of SNP TSC0016269
ttttatattaaag

SEQ ID NO: 61066 - DNA, 13 bp, Artificial Sequence
  Oligonucleotide for detection of SNP TSC0016269
ctttaatataaaa

SEQ ID NO: 61067 - DNA, 13 bp, Artificial Sequence
  Oligonucleotide for detection of SNP TSC0016269
ttttatgttaaag

SEQ ID NO: 61068 - DNA, 13 bp, Artificial Sequence
  Oligonucleotide for detection of SNP TSC0016269
ctttaacataaaa

SEQ ID NO: 61069 - DNA, 13 bp, Artificial Sequence
  Oligonucleotide for detection of SNP TSC0016269
ttttacgttaaag

SEQ ID NO: 61070 - DNA, 13 bp, Artificial Sequence
  Oligonucleotide for detection of SNP TSC0016269
ctttaacgtaaaa

SEQ ID NO: 61071 - DNA, 13 bp, Artificial Sequence
  Oligonucleotide for detection of SNP TSC0016269
ttttaatgtaaaa

SEQ ID NO: 61072 - DNA, 13 bp, Artificial Sequence
  Oligonucleotide for detection of SNP TSC0016269
ttttacattaaaa

SEQ ID NO: 61073 - DNA, 13 bp, Artificial Sequence
  Oligonucleotide for detection of SNP TSC0016269
ttttaacgtaaaa

SEQ ID NO: 61074 - DNA, 13 bp, Artificial Sequence
  Oligonucleotide for detection of SNP TSC0016269
ttttacgttaaaa

SEQ ID NO: 61075 - DNA, 13 bp, Artificial Sequence
  Oligonucleotide for detection of SNP TSC0016272
tataggaggtatt

SEQ ID NO: 61076 - DNA, 13 bp, Artificial Sequence
  Oligonucleotide for detection of SNP TSC0016272
aatacctcctata

SEQ ID NO: 61077 - DNA, 13 bp, Artificial Sequence
  Oligonucleotide for detection of SNP TSC0016272
tatagggggtatt

SEQ ID NO: 61078 - DNA, 13 bp, Artificial Sequence
  Oligonucleotide for detection of SNP TSC0016272
aataccccctata

SEQ ID NO: 61079 - DNA, 13 bp, Artificial Sequence
  Oligonucleotide for detection of SNP TSC0016274
tgggtagaatgaa

SEQ ID NO: 61080 - DNA, 13 bp, Artificial Sequence
  Oligonucleotide for detection of SNP TSC0016274
ttcattctaccca

SEQ ID NO: 61081 - DNA, 13 bp, Artificial Sequence
  Oligonucleotide for detection of SNP TSC0016274
tgggtaaaatgaa

SEQ ID NO: 61082 - DNA, 13 bp, Artificial Sequence
  Oligonucleotide for detection of SNP TSC0016274
ttcattttaccca

SEQ ID NO: 61083 - DNA, 13 bp, Artificial Sequence
  Oligonucleotide for detection of SNP TSC0016278
tttgaggtagaag

SEQ ID NO: 61084 - DNA, 13 bp, Artificial Sequence
  Oligonucleotide for detection of SNP TSC0016278
cttctacctcaaa

SEQ ID NO: 61085 - DNA, 13 bp, Artificial Sequence
  Oligonucleotide for detection of SNP TSC0016278
tttgagatagaag

SEQ ID NO: 61086 - DNA, 13 bp, Artificial Sequence
  Oligonucleotide for detection of SNP TSC0016278
cttctatctcaaa

SEQ ID NO: 61087 - DNA, 13 bp, Artificial Sequence
  Oligonucleotide for detection of SNP TSC0016279
ttatttgaggagg

SEQ ID NO: 61088 - DNA, 13 bp, Artificial Sequence
  Oligonucleotide for detection of SNP TSC0016279
cctcctcaaataa

SEQ ID NO: 61089 - DNA, 13 bp, Artificial Sequence
  Oligonucleotide for detection of SNP TSC0016279
ttatttaaggagg

SEQ ID NO: 61090 - DNA, 13 bp, Artificial Sequence
  Oligonucleotide for detection of SNP TSC0016279
cctccttaaataa

SEQ ID NO: 61091 - DNA, 13 bp, Artificial Sequence
  Oligonucleotide for detection of SNP TSC0016280
ttgatggttgtty

SEQ ID NO: 61092 - DNA, 13 bp, Artificial Sequence
  Oligonucleotide for detection of SNP TSC0016280
raacaaccatcaa

SEQ ID NO: 61093 - DNA, 13 bp, Artificial Sequence
  Oligonucleotide for detection of SNP TSC0016280
ttgatgattgtty

SEQ ID NO: 61094 - DNA, 13 bp, Artificial Sequence
  Oligonucleotide for detection of SNP TSC0016280
raacaatcatcaa

SEQ ID NO: 61095 - DNA, 13 bp, Artificial Sequence
  Oligonucleotide for detection of SNP TSC0016280
ttgatggtcgtty

SEQ ID NO: 61096 - DNA, 13 bp, Artificial Sequence
  Oligonucleotide for detection of SNP TSC0016280
raacgaccatcaa

SEQ ID NO: 61097 - DNA, 13 bp, Artificial Sequence
  Oligonucleotide for detection of SNP TSC0016280
ttgatgatcgtty

SEQ ID NO: 61098 - DNA, 13 bp, Artificial Sequence
  Oligonucleotide for detection of SNP TSC0016280
raacgatcatcaa

SEQ ID NO: 61099 - DNA, 13 bp, Artificial Sequence
  Oligonucleotide for detection of SNP TSC0016281
ggttttaggagta

SEQ ID NO: 61100 - DNA, 13 bp, Artificial Sequence
  Oligonucleotide for detection of SNP TSC0016281
tactcctaaaacc

SEQ ID NO: 61101 - DNA, 13 bp, Artificial Sequence
  Oligonucleotide for detection of SNP TSC0016281
ggttttgggagta

SEQ ID NO: 61102 - DNA, 13 bp, Artificial Sequence
  Oligonucleotide for detection of SNP TSC0016281
tactcccaaaacc

SEQ ID NO: 61103 - DNA, 13 bp, Artificial Sequence
  Oligonucleotide for detection of SNP TSC0016281
ggtttcgggagta

SEQ ID NO: 61104 - DNA, 13 bp, Artificial Sequence
  Oligonucleotide for detection of SNP TSC0016281
tactcccgaaacc

SEQ ID NO: 61105 - DNA, 13 bp, Artificial Sequence
  Oligonucleotide for detection of SNP TSC0016281
tgtttttgggaty

SEQ ID NO: 61106 - DNA, 13 bp, Artificial Sequence
  Oligonucleotide for detection of SNP TSC0016281
ratcccaaaaaca

SEQ ID NO: 61107 - DNA, 13 bp, Artificial Sequence
  Oligonucleotide for detection of SNP TSC0016281
tgttttcgggaty

SEQ ID NO: 61108 - DNA, 13 bp, Artificial Sequence
  Oligonucleotide for detection of SNP TSC0016281
ratcccgaaaaca

SEQ ID NO: 61109 - DNA, 13 bp, Artificial Sequence
  Oligonucleotide for detection of SNP TSC0016282
ggtgggtgtggtt

SEQ ID NO: 61110 - DNA, 13 bp, Artificial Sequence
  Oligonucleotide for detection of SNP TSC0016282
aaccacacccacc

SEQ ID NO: 61111 - DNA, 13 bp, Artificial Sequence
  Oligonucleotide for detection of SNP TSC0016282
ggtgggcgtggtt

SEQ ID NO: 61112 - DNA, 13 bp, Artificial Sequence
  Oligonucleotide for detection of SNP TSC0016282
aaccacgcccacc

SEQ ID NO: 61113 - DNA, 13 bp, Artificial Sequence
  Oligonucleotide for detection of SNP TSC0016282
agttatgtttaty

SEQ ID NO: 61114 - DNA, 13 bp, Artificial Sequence
  Oligonucleotide for detection of SNP TSC0016282
rataaacataact

SEQ ID NO: 61115 - DNA, 13 bp, Artificial Sequence
  Oligonucleotide for detection of SNP TSC0016282
agttatatttaty

SEQ ID NO: 61116 - DNA, 13 bp, Artificial Sequence
  Oligonucleotide for detection of SNP TSC0016282
rataaatataact

SEQ ID NO: 61117 - DNA, 13 bp, Artificial Sequence
  Oligonucleotide for detection of SNP TSC0016282
agttacgtttaty

SEQ ID NO: 61118 - DNA, 13 bp, Artificial Sequence
  Oligonucleotide for detection of SNP TSC0016282
rataaacgtaact

SEQ ID NO: 61119 - DNA, 13 bp, Artificial Sequence
  Oligonucleotide for detection of SNP TSC0016283
aatttttgtgtat

SEQ ID NO: 61120 - DNA, 13 bp, Artificial Sequence
  Oligonucleotide for detection of SNP TSC0016283
atacacaaaaatt

SEQ ID NO: 61121 - DNA, 13 bp, Artificial Sequence
  Oligonucleotide for detection of SNP TSC0016283
aattttcgtgtat

SEQ ID NO: 61122 - DNA, 13 bp, Artificial Sequence
  Oligonucleotide for detection of SNP TSC0016283
atacacgaaaatt

SEQ ID NO: 61123 - DNA, 13 bp, Artificial Sequence
  Oligonucleotide for detection of SNP TSC0016283
aatttttgcgtat

SEQ ID NO: 61124 - DNA, 13 bp, Artificial Sequence
  Oligonucleotide for detection of SNP TSC0016283
atacgcaaaaatt

SEQ ID NO: 61125 - DNA, 13 bp, Artificial Sequence
  Oligonucleotide for detection of SNP TSC0016283
aattttcgcgtat

SEQ ID NO: 61126 - DNA, 13 bp, Artificial Sequence
  Oligonucleotide for detection of SNP TSC0016283
atacgcgaaaatt

SEQ ID NO: 61127 - DNA, 13 bp, Artificial Sequence
  Oligonucleotide for detection of SNP TSC0016283
atatgtggaagtt

SEQ ID NO: 61128 - DNA, 13 bp, Artificial Sequence
  Oligonucleotide for detection of SNP TSC0016283
aacttccacatat

SEQ ID NO: 61129 - DNA, 13 bp, Artificial Sequence
  Oligonucleotide for detection of SNP TSC0016283
atatgtagaagtt

SEQ ID NO: 61130 - DNA, 13 bp, Artificial Sequence
  Oligonucleotide for detection of SNP TSC0016283
aacttctacatat

SEQ ID NO: 61131 - DNA, 13 bp, Artificial Sequence
  Oligonucleotide for detection of SNP TSC0016283
atacgtggaagtt

SEQ ID NO: 61132 - DNA, 13 bp, Artificial Sequence
  Oligonucleotide for detection of SNP TSC0016283
aacttccacgtat

SEQ ID NO: 61133 - DNA, 13 bp, Artificial Sequence
  Oligonucleotide for detection of SNP TSC0016283
atacgtagaagtt

SEQ ID NO: 61134 - DNA, 13 bp, Artificial Sequence
  Oligonucleotide for detection of SNP TSC0016283
aacttctacgtat

SEQ ID NO: 61135 - DNA, 13 bp, Artificial Sequence
  Oligonucleotide for detection of SNP TSC0016283
atatgcggaagtt

SEQ ID NO: 61136 - DNA, 13 bp, Artificial Sequence
  Oligonucleotide for detection of SNP TSC0016283
aacttccgcatat

SEQ ID NO: 61137 - DNA, 13 bp, Artificial Sequence
  Oligonucleotide for detection of SNP TSC0016283
atacgcggaagtt

SEQ ID NO: 61138 - DNA, 13 bp, Artificial Sequence
  Oligonucleotide for detection of SNP TSC0016283
aacttccgcgtat

SEQ ID NO: 61139 - DNA, 13 bp, Artificial Sequence
  Oligonucleotide for detection of SNP TSC0016285
tgtttgggggtta

SEQ ID NO: 61140 - DNA, 13 bp, Artificial Sequence
  Oligonucleotide for detection of SNP TSC0016285
taacccccaaaca

SEQ ID NO: 61141 - DNA, 13 bp, Artificial Sequence
  Oligonucleotide for detection of SNP TSC0016285
tgtttgagggtta

SEQ ID NO: 61142 - DNA, 13 bp, Artificial Sequence
  Oligonucleotide for detection of SNP TSC0016285
taaccctcaaaca

SEQ ID NO: 61143 - DNA, 13 bp, Artificial Sequence
  Oligonucleotide for detection of SNP TSC0016286
tagatatgtttgy

SEQ ID NO: 61144 - DNA, 13 bp, Artificial Sequence
  Oligonucleotide for detection of SNP TSC0016286
rcaaacatatcta

SEQ ID NO: 61145 - DNA, 13 bp, Artificial Sequence
  Oligonucleotide for detection of SNP TSC0016286
tagatacgtttgy

SEQ ID NO: 61146 - DNA, 13 bp, Artificial Sequence
  Oligonucleotide for detection of SNP TSC0016286
rcaaacgtatcta

SEQ ID NO: 61147 - DNA, 13 bp, Artificial Sequence
  Oligonucleotide for detection of SNP TSC0016286
gtaggtgtgtttg

SEQ ID NO: 61148 - DNA, 13 bp, Artificial Sequence
  Oligonucleotide for detection of SNP TSC0016286
caaacacacctac

SEQ ID NO: 61149 - DNA, 13 bp, Artificial Sequence
  Oligonucleotide for detection of SNP TSC0016286
gtaggtatgtttg

SEQ ID NO: 61150 - DNA, 13 bp, Artificial Sequence
  Oligonucleotide for detection of SNP TSC0016286
caaacatacctac

SEQ ID NO: 61151 - DNA, 13 bp, Artificial Sequence
  Oligonucleotide for detection of SNP TSC0016286
gtaggcgtgtttg

SEQ ID NO: 61152 - DNA, 13 bp, Artificial Sequence
  Oligonucleotide for detection of SNP TSC0016286
caaacacgcctac

SEQ ID NO: 61153 - DNA, 13 bp, Artificial Sequence
  Oligonucleotide for detection of SNP TSC0016288
ttttagttttttg

SEQ ID NO: 61154 - DNA, 13 bp, Artificial Sequence
  Oligonucleotide for detection of SNP TSC0016288
caaaaaactaaaa

SEQ ID NO: 61155 - DNA, 13 bp, Artificial Sequence
  Oligonucleotide for detection of SNP TSC0016288
ttttaggtttttg

SEQ ID NO: 61156 - DNA, 13 bp, Artificial Sequence
  Oligonucleotide for detection of SNP TSC0016288
caaaaacctaaaa

SEQ ID NO: 61157 - DNA, 13 bp, Artificial Sequence
  Oligonucleotide for detection of SNP TSC0016288
taggagtttgagg

SEQ ID NO: 61158 - DNA, 13 bp, Artificial Sequence
  Oligonucleotide for detection of SNP TSC0016288
cctcaaactccta

SEQ ID NO: 61159 - DNA, 13 bp, Artificial Sequence
  Oligonucleotide for detection of SNP TSC0016289
ttatgggtataty

SEQ ID NO: 61160 - DNA, 13 bp, Artificial Sequence
  Oligonucleotide for detection of SNP TSC0016289
ratatacccataa

SEQ ID NO: 61161 - DNA, 13 bp, Artificial Sequence
  Oligonucleotide for detection of SNP TSC0016289
ttatggttataty

SEQ ID NO: 61162 - DNA, 13 bp, Artificial Sequence
  Oligonucleotide for detection of SNP TSC0016289
ratataaccataa

SEQ ID NO: 61163 - DNA, 13 bp, Artificial Sequence
  Oligonucleotide for detection of SNP TSC0016289
ttacgggtataty

SEQ ID NO: 61164 - DNA, 13 bp, Artificial Sequence
  Oligonucleotide for detection of SNP TSC0016289
ratatacccgtaa

SEQ ID NO: 61165 - DNA, 13 bp, Artificial Sequence
  Oligonucleotide for detection of SNP TSC0016289
ttacggttataty

SEQ ID NO: 61166 - DNA, 13 bp, Artificial Sequence
  Oligonucleotide for detection of SNP TSC0016289
ratataaccgtaa

SEQ ID NO: 61167 - DNA, 13 bp, Artificial Sequence
  Oligonucleotide for detection of SNP TSC0016289
ggtgtgtttgtag

SEQ ID NO: 61168 - DNA, 13 bp, Artificial Sequence
  Oligonucleotide for detection of SNP TSC0016289
ctacaaacacacc

SEQ ID NO: 61169 - DNA, 13 bp, Artificial Sequence
  Oligonucleotide for detection of SNP TSC0016289
ggtgtgattgtag

SEQ ID NO: 61170 - DNA, 13 bp, Artificial Sequence
  Oligonucleotide for detection of SNP TSC0016289
ctacaatcacacc

SEQ ID NO: 61171 - DNA, 13 bp, Artificial Sequence
  Oligonucleotide for detection of SNP TSC0016289
ggtgtgttcgtag

SEQ ID NO: 61172 - DNA, 13 bp, Artificial Sequence
  Oligonucleotide for detection of SNP TSC0016289
ctacgaacacacc

SEQ ID NO: 61173 - DNA, 13 bp, Artificial Sequence
  Oligonucleotide for detection of SNP TSC0016289
ggtgtgatcgtag

SEQ ID NO: 61174 - DNA, 13 bp, Artificial Sequence
  Oligonucleotide for detection of SNP TSC0016289
ctacgatcacacc

SEQ ID NO: 61175 - DNA, 13 bp, Artificial Sequence
  Oligonucleotide for detection of SNP TSC0016290
gagattttattty

SEQ ID NO: 61176 - DNA, 13 bp, Artificial Sequence
  Oligonucleotide for detection of SNP TSC0016290
raaataaaatctc

SEQ ID NO: 61177 - DNA, 13 bp, Artificial Sequence
  Oligonucleotide for detection of SNP TSC0016290
gagattgtattty

SEQ ID NO: 61178 - DNA, 13 bp, Artificial Sequence
  Oligonucleotide for detection of SNP TSC0016290
raaatacaatctc

SEQ ID NO: 61179 - DNA, 13 bp, Artificial Sequence
  Oligonucleotide for detection of SNP TSC0016291
aatgaagtaatta

SEQ ID NO: 61180 - DNA, 13 bp, Artificial Sequence
  Oligonucleotide for detection of SNP TSC0016291
taattacttcatt

SEQ ID NO: 61181 - DNA, 13 bp, Artificial Sequence
  Oligonucleotide for detection of SNP TSC0016291
aatgaaataatta

SEQ ID NO: 61182 - DNA, 13 bp, Artificial Sequence
  Oligonucleotide for detection of SNP TSC0016291
taattatttcatt

SEQ ID NO: 61183 - DNA, 13 bp, Artificial Sequence
  Oligonucleotide for detection of SNP TSC0016293
gatttaatttgaa

SEQ ID NO: 61184 - DNA, 13 bp, Artificial Sequence
  Oligonucleotide for detection of SNP TSC0016293
ttcaaattaaatc

SEQ ID NO: 61185 - DNA, 13 bp, Artificial Sequence
  Oligonucleotide for detection of SNP TSC0016293
gatttagtttgaa

SEQ ID NO: 61186 - DNA, 13 bp, Artificial Sequence
  Oligonucleotide for detection of SNP TSC0016293
ttcaaactaaatc

SEQ ID NO: 61187 - DNA, 13 bp, Artificial Sequence
  Oligonucleotide for detection of SNP TSC0016294
tagatgaaagaga

SEQ ID NO: 61188 - DNA, 13 bp, Artificial Sequence
  Oligonucleotide for detection of SNP TSC0016294
tctctttcatcta

SEQ ID NO: 61189 - DNA, 13 bp, Artificial Sequence
  Oligonucleotide for detection of SNP TSC0016294
tagatggaagaga

SEQ ID NO: 61190 - DNA, 13 bp, Artificial Sequence
  Oligonucleotide for detection of SNP TSC0016294
tctcttccatcta

SEQ ID NO: 61191 - DNA, 13 bp, Artificial Sequence
  Oligonucleotide for detection of SNP TSC0016296
tttaatagtaaty

SEQ ID NO: 61192 - DNA, 13 bp, Artificial Sequence
  Oligonucleotide for detection of SNP TSC0016296
rattactattaaa

SEQ ID NO: 61193 - DNA, 13 bp, Artificial Sequence
  Oligonucleotide for detection of SNP TSC0016296
tttaatggtaaty

SEQ ID NO: 61194 - DNA, 13 bp, Artificial Sequence
  Oligonucleotide for detection of SNP TSC0016296
rattaccattaaa

SEQ ID NO: 61195 - DNA, 13 bp, Artificial Sequence
  Oligonucleotide for detection of SNP TSC0016298
ataaggttaggay

SEQ ID NO: 61196 - DNA, 13 bp, Artificial Sequence
  Oligonucleotide for detection of SNP TSC0016298
rtcctaaccttat

SEQ ID NO: 61197 - DNA, 13 bp, Artificial Sequence
  Oligonucleotide for detection of SNP TSC0016298
ataagggtaggay

SEQ ID NO: 61198 - DNA, 13 bp, Artificial Sequence
  Oligonucleotide for detection of SNP TSC0016298
rtcctacccttat

SEQ ID NO: 61199 - DNA, 13 bp, Artificial Sequence
  Oligonucleotide for detection of SNP TSC0016298
gttttggttttat

SEQ ID NO: 61200 - DNA, 13 bp, Artificial Sequence
  Oligonucleotide for detection of SNP TSC0016298
ataaaaccaaaac

SEQ ID NO: 61201 - DNA, 13 bp, Artificial Sequence
  Oligonucleotide for detection of SNP TSC0016298
gttttgtttttat

SEQ ID NO: 61202 - DNA, 13 bp, Artificial Sequence
  Oligonucleotide for detection of SNP TSC0016298
ataaaaacaaaac

SEQ ID NO: 61203 - DNA, 13 bp, Artificial Sequence
  Oligonucleotide for detection of SNP TSC0016299
gtgtttaggtatg

SEQ ID NO: 61204 - DNA, 13 bp, Artificial Sequence
  Oligonucleotide for detection of SNP TSC0016299
catacctaaacac

SEQ ID NO: 61205 - DNA, 13 bp, Artificial Sequence
  Oligonucleotide for detection of SNP TSC0016299
gtgtttgggtatg

SEQ ID NO: 61206 - DNA, 13 bp, Artificial Sequence
  Oligonucleotide for detection of SNP TSC0016299
catacccaaacac

SEQ ID NO: 61207 - DNA, 13 bp, Artificial Sequence
  Oligonucleotide for detection of SNP TSC0016299
gtgtttaggtacg

SEQ ID NO: 61208 - DNA, 13 bp, Artificial Sequence
  Oligonucleotide for detection of SNP TSC0016299
cgtacctaaacac

SEQ ID NO: 61209 - DNA, 13 bp, Artificial Sequence
  Oligonucleotide for detection of SNP TSC0016299
gtgtttgggtacg

SEQ ID NO: 61210 - DNA, 13 bp, Artificial Sequence
  Oligonucleotide for detection of SNP TSC0016299
cgtacccaaacac

SEQ ID NO: 61211 - DNA, 13 bp, Artificial Sequence
  Oligonucleotide for detection of SNP TSC0016300
attaggataattt

SEQ ID NO: 61212 - DNA, 13 bp, Artificial Sequence
  Oligonucleotide for detection of SNP TSC0016300
aaattatcctaat

SEQ ID NO: 61213 - DNA, 13 bp, Artificial Sequence
  Oligonucleotide for detection of SNP TSC0016300
attaggttaattt

SEQ ID NO: 61214 - DNA, 13 bp, Artificial Sequence
  Oligonucleotide for detection of SNP TSC0016300
aaattaacctaat

SEQ ID NO: 61215 - DNA, 13 bp, Artificial Sequence
  Oligonucleotide for detection of SNP TSC0016300
aaattattttggt

SEQ ID NO: 61216 - DNA, 13 bp, Artificial Sequence
  Oligonucleotide for detection of SNP TSC0016300
accaaaataattt

SEQ ID NO: 61217 - DNA, 13 bp, Artificial Sequence
  Oligonucleotide for detection of SNP TSC0016300
aaattagtttggt

SEQ ID NO: 61218 - DNA, 13 bp, Artificial Sequence
  Oligonucleotide for detection of SNP TSC0016300
accaaactaattt

SEQ ID NO: 61219 - DNA, 13 bp, Artificial Sequence
  Oligonucleotide for detection of SNP TSC0016301
tgtggaaggggag

SEQ ID NO: 61220 - DNA, 13 bp, Artificial Sequence
  Oligonucleotide for detection of SNP TSC0016301
ctccccttccaca

SEQ ID NO: 61221 - DNA, 13 bp, Artificial Sequence
  Oligonucleotide for detection of SNP TSC0016301
tgtggagggggag

SEQ ID NO: 61222 - DNA, 13 bp, Artificial Sequence
  Oligonucleotide for detection of SNP TSC0016301
ctccccctccaca

SEQ ID NO: 61223 - DNA, 13 bp, Artificial Sequence
  Oligonucleotide for detection of SNP TSC0016302
aggattttttgtg

SEQ ID NO: 61224 - DNA, 13 bp, Artificial Sequence
  Oligonucleotide for detection of SNP TSC0016302
cacaaaaaatcct

SEQ ID NO: 61225 - DNA, 13 bp, Artificial Sequence
  Oligonucleotide for detection of SNP TSC0016302
aggattgtttgtg

SEQ ID NO: 61226 - DNA, 13 bp, Artificial Sequence
  Oligonucleotide for detection of SNP TSC0016302
cacaaacaatcct

SEQ ID NO: 61227 - DNA, 13 bp, Artificial Sequence
  Oligonucleotide for detection of SNP TSC0016302
tatagagagtttt

SEQ ID NO: 61228 - DNA, 13 bp, Artificial Sequence
  Oligonucleotide for detection of SNP TSC0016302
aaaactctctata

SEQ ID NO: 61229 - DNA, 13 bp, Artificial Sequence
  Oligonucleotide for detection of SNP TSC0016302
tatagatagtttt

SEQ ID NO: 61230 - DNA, 13 bp, Artificial Sequence
  Oligonucleotide for detection of SNP TSC0016302
aaaactatctata

SEQ ID NO: 61231 - DNA, 13 bp, Artificial Sequence
  Oligonucleotide for detection of SNP TSC0016303
atttataattggt

SEQ ID NO: 61232 - DNA, 13 bp, Artificial Sequence
  Oligonucleotide for detection of SNP TSC0016303
accaattataaat

SEQ ID NO: 61233 - DNA, 13 bp, Artificial Sequence
  Oligonucleotide for detection of SNP TSC0016303
atttatgattggt

SEQ ID NO: 61234 - DNA, 13 bp, Artificial Sequence
  Oligonucleotide for detection of SNP TSC0016303
accaatcataaat

SEQ ID NO: 61235 - DNA, 13 bp, Artificial Sequence
  Oligonucleotide for detection of SNP TSC0016303
atttataatcggt

SEQ ID NO: 61236 - DNA, 13 bp, Artificial Sequence
  Oligonucleotide for detection of SNP TSC0016303
accgattataaat

SEQ ID NO: 61237 - DNA, 13 bp, Artificial Sequence
  Oligonucleotide for detection of SNP TSC0016303
atttacgattggt

SEQ ID NO: 61238 - DNA, 13 bp, Artificial Sequence
  Oligonucleotide for detection of SNP TSC0016303
accaatcgtaaat

SEQ ID NO: 61239 - DNA, 13 bp, Artificial Sequence
  Oligonucleotide for detection of SNP TSC0016303
atttatgatcggt

SEQ ID NO: 61240 - DNA, 13 bp, Artificial Sequence
  Oligonucleotide for detection of SNP TSC0016303
accgatcataaat

SEQ ID NO: 61241 - DNA, 13 bp, Artificial Sequence
  Oligonucleotide for detection of SNP TSC0016303
atttacgatcggt

SEQ ID NO: 61242 - DNA, 13 bp, Artificial Sequence
  Oligonucleotide for detection of SNP TSC0016303
accgatcgtaaat

SEQ ID NO: 61243 - DNA, 13 bp, Artificial Sequence
  Oligonucleotide for detection of SNP TSC0016303
attgattgtaggt

SEQ ID NO: 61244 - DNA, 13 bp, Artificial Sequence
  Oligonucleotide for detection of SNP TSC0016303
acctacaatcaat

SEQ ID NO: 61245 - DNA, 13 bp, Artificial Sequence
  Oligonucleotide for detection of SNP TSC0016303
atcgattgtaggt

SEQ ID NO: 61246 - DNA, 13 bp, Artificial Sequence
  Oligonucleotide for detection of SNP TSC0016303
acctacaatcgat

SEQ ID NO: 61247 - DNA, 13 bp, Artificial Sequence
  Oligonucleotide for detection of SNP TSC0016303
attgatcgtaggt

SEQ ID NO: 61248 - DNA, 13 bp, Artificial Sequence
  Oligonucleotide for detection of SNP TSC0016303
acctacgatcaat

SEQ ID NO: 61249 - DNA, 13 bp, Artificial Sequence
  Oligonucleotide for detection of SNP TSC0016303
atcgatcgtaggt

SEQ ID NO: 61250 - DNA, 13 bp, Artificial Sequence
  Oligonucleotide for detection of SNP TSC0016303
acctacgatcgat

SEQ ID NO: 61251 - DNA, 13 bp, Artificial Sequence
  Oligonucleotide for detection of SNP TSC0016306
atgaatattaatt

SEQ ID NO: 61252 - DNA, 13 bp, Artificial Sequence
  Oligonucleotide for detection of SNP TSC0016306
aattaatattcat

SEQ ID NO: 61253 - DNA, 13 bp, Artificial Sequence
  Oligonucleotide for detection of SNP TSC0016306
atgaattttaatt

SEQ ID NO: 61254 - DNA, 13 bp, Artificial Sequence
  Oligonucleotide for detection of SNP TSC0016306
aattaaaattcat

SEQ ID NO: 61255 - DNA, 13 bp, Artificial Sequence
  Oligonucleotide for detection of SNP TSC0016306
aattagtatttat

SEQ ID NO: 61256 - DNA, 13 bp, Artificial Sequence
  Oligonucleotide for detection of SNP TSC0016306
ataaatactaatt

SEQ ID NO: 61257 - DNA, 13 bp, Artificial Sequence
  Oligonucleotide for detection of SNP TSC0016306
aattagaatttat

SEQ ID NO: 61258 - DNA, 13 bp, Artificial Sequence
  Oligonucleotide for detection of SNP TSC0016306
ataaattctaatt

SEQ ID NO: 61259 - DNA, 13 bp, Artificial Sequence
  Oligonucleotide for detection of SNP TSC0016307
aaggaggagtaag

SEQ ID NO: 61260 - DNA, 13 bp, Artificial Sequence
  Oligonucleotide for detection of SNP TSC0016307
cttactcctcctt

SEQ ID NO: 61261 - DNA, 13 bp, Artificial Sequence
  Oligonucleotide for detection of SNP TSC0016307
aaggagaagtaag

SEQ ID NO: 61262 - DNA, 13 bp, Artificial Sequence
  Oligonucleotide for detection of SNP TSC0016307
cttacttctcctt

SEQ ID NO: 61263 - DNA, 13 bp, Artificial Sequence
  Oligonucleotide for detection of SNP TSC0016312
gtaggtgttaagt

SEQ ID NO: 61264 - DNA, 13 bp, Artificial Sequence
  Oligonucleotide for detection of SNP TSC0016312
acttaacacctac

SEQ ID NO: 61265 - DNA, 13 bp, Artificial Sequence
  Oligonucleotide for detection of SNP TSC0016312
gtaggttttaagt

SEQ ID NO: 61266 - DNA, 13 bp, Artificial Sequence
  Oligonucleotide for detection of SNP TSC0016312
acttaaaacctac

SEQ ID NO: 61267 - DNA, 13 bp, Artificial Sequence
  Oligonucleotide for detection of SNP TSC0016312
atttgatatttgy

SEQ ID NO: 61268 - DNA, 13 bp, Artificial Sequence
  Oligonucleotide for detection of SNP TSC0016312
rcaaatatcaaat

SEQ ID NO: 61269 - DNA, 13 bp, Artificial Sequence
  Oligonucleotide for detection of SNP TSC0016312
atttgaaatttgy

SEQ ID NO: 61270 - DNA, 13 bp, Artificial Sequence
  Oligonucleotide for detection of SNP TSC0016312
rcaaatttcaaat

SEQ ID NO: 61271 - DNA, 13 bp, Artificial Sequence
  Oligonucleotide for detection of SNP TSC0016313
tttttaatttgty

SEQ ID NO: 61272 - DNA, 13 bp, Artificial Sequence
  Oligonucleotide for detection of SNP TSC0016313
racaaattaaaaa

SEQ ID NO: 61273 - DNA, 13 bp, Artificial Sequence
  Oligonucleotide for detection of SNP TSC0016313
tttttattttgty

SEQ ID NO: 61274 - DNA, 13 bp, Artificial Sequence
  Oligonucleotide for detection of SNP TSC0016313
racaaaataaaaa

SEQ ID NO: 61275 - DNA, 13 bp, Artificial Sequence
  Oligonucleotide for detection of SNP TSC0016313
tttttaattcgty

SEQ ID NO: 61276 - DNA, 13 bp, Artificial Sequence
  Oligonucleotide for detection of SNP TSC0016313
racgaattaaaaa

SEQ ID NO: 61277 - DNA, 13 bp, Artificial Sequence
  Oligonucleotide for detection of SNP TSC0016313
tttttatttcgty

SEQ ID NO: 61278 - DNA, 13 bp, Artificial Sequence
  Oligonucleotide for detection of SNP TSC0016313
racgaaataaaaa

SEQ ID NO: 61279 - DNA, 13 bp, Artificial Sequence
  Oligonucleotide for detection of SNP TSC0016313
gatgggttgagga

SEQ ID NO: 61280 - DNA, 13 bp, Artificial Sequence
  Oligonucleotide for detection of SNP TSC0016313
tcctcaacccatc

SEQ ID NO: 61281 - DNA, 13 bp, Artificial Sequence
  Oligonucleotide for detection of SNP TSC0016313
gatggggtgagga

SEQ ID NO: 61282 - DNA, 13 bp, Artificial Sequence
  Oligonucleotide for detection of SNP TSC0016313
tcctcaccccatc

SEQ ID NO: 61283 - DNA, 13 bp, Artificial Sequence
  Oligonucleotide for detection of SNP TSC0016313
gacgggttgagga

SEQ ID NO: 61284 - DNA, 13 bp, Artificial Sequence
  Oligonucleotide for detection of SNP TSC0016313
tcctcaacccgtc

SEQ ID NO: 61285 - DNA, 13 bp, Artificial Sequence
  Oligonucleotide for detection of SNP TSC0016313
gacggggtgagga

SEQ ID NO: 61286 - DNA, 13 bp, Artificial Sequence
  Oligonucleotide for detection of SNP TSC0016313
tcctcaccccgtc

SEQ ID NO: 61287 - DNA, 13 bp, Artificial Sequence
  Oligonucleotide for detection of SNP TSC0016314
tttaatatttgtg

SEQ ID NO: 61288 - DNA, 13 bp, Artificial Sequence
  Oligonucleotide for detection of SNP TSC0016314
cacaaatattaaa

SEQ ID NO: 61289 - DNA, 13 bp, Artificial Sequence
  Oligonucleotide for detection of SNP TSC0016314
tttaatgtttgtg

SEQ ID NO: 61290 - DNA, 13 bp, Artificial Sequence
  Oligonucleotide for detection of SNP TSC0016314
cacaaacattaaa

SEQ ID NO: 61291 - DNA, 13 bp, Artificial Sequence
  Oligonucleotide for detection of SNP TSC0016315
ggggaaatttagy

SEQ ID NO: 61292 - DNA, 13 bp, Artificial Sequence
  Oligonucleotide for detection of SNP TSC0016315
rctaaatttcccc

SEQ ID NO: 61293 - DNA, 13 bp, Artificial Sequence
  Oligonucleotide for detection of SNP TSC0016315
ggggaattttagy

SEQ ID NO: 61294 - DNA, 13 bp, Artificial Sequence
  Oligonucleotide for detection of SNP TSC0016315
rctaaaattcccc

SEQ ID NO: 61295 - DNA, 13 bp, Artificial Sequence
  Oligonucleotide for detection of SNP TSC0016315
gttggatttttty

SEQ ID NO: 61296 - DNA, 13 bp, Artificial Sequence
  Oligonucleotide for detection of SNP TSC0016315
raaaaaatccaac

SEQ ID NO: 61297 - DNA, 13 bp, Artificial Sequence
  Oligonucleotide for detection of SNP TSC0016315
gttggaattttty

SEQ ID NO: 61298 - DNA, 13 bp, Artificial Sequence
  Oligonucleotide for detection of SNP TSC0016315
raaaaattccaac

SEQ ID NO: 61299 - DNA, 13 bp, Artificial Sequence
  Oligonucleotide for detection of SNP TSC0016317
aggtgggatttgg

SEQ ID NO: 61300 - DNA, 13 bp, Artificial Sequence
  Oligonucleotide for detection of SNP TSC0016317
ccaaatcccacct

SEQ ID NO: 61301 - DNA, 13 bp, Artificial Sequence
  Oligonucleotide for detection of SNP TSC0016317
aggtggtatttgg

SEQ ID NO: 61302 - DNA, 13 bp, Artificial Sequence
  Oligonucleotide for detection of SNP TSC0016317
ccaaataccacct

SEQ ID NO: 61303 - DNA, 13 bp, Artificial Sequence
  Oligonucleotide for detection of SNP TSC0016317
ttaaattttattt

SEQ ID NO: 61304 - DNA, 13 bp, Artificial Sequence
  Oligonucleotide for detection of SNP TSC0016317
aaataaaatttaa

SEQ ID NO: 61305 - DNA, 13 bp, Artificial Sequence
  Oligonucleotide for detection of SNP TSC0016317
ttaaatattattt

SEQ ID NO: 61306 - DNA, 13 bp, Artificial Sequence
  Oligonucleotide for detection of SNP TSC0016317
aaataatatttaa

SEQ ID NO: 61307 - DNA, 13 bp, Artificial Sequence
  Oligonucleotide for detection of SNP TSC0016321
attttaattgaat

SEQ ID NO: 61308 - DNA, 13 bp, Artificial Sequence
  Oligonucleotide for detection of SNP TSC0016321
attcaattaaaat

SEQ ID NO: 61309 - DNA, 13 bp, Artificial Sequence
  Oligonucleotide for detection of SNP TSC0016321
attttagttgaat

SEQ ID NO: 61310 - DNA, 13 bp, Artificial Sequence
  Oligonucleotide for detection of SNP TSC0016321
attcaactaaaat

SEQ ID NO: 61311 - DNA, 13 bp, Artificial Sequence
  Oligonucleotide for detection of SNP TSC0016324
gtatatgttttty

SEQ ID NO: 61312 - DNA, 13 bp, Artificial Sequence
  Oligonucleotide for detection of SNP TSC0016324
raaaaacatatac

SEQ ID NO: 61313 - DNA, 13 bp, Artificial Sequence
  Oligonucleotide for detection of SNP TSC0016325
agtttatgggagy

SEQ ID NO: 61314 - DNA, 13 bp, Artificial Sequence
  Oligonucleotide for detection of SNP TSC0016325
rctcccataaact

SEQ ID NO: 61315 - DNA, 13 bp, Artificial Sequence
  Oligonucleotide for detection of SNP TSC0016325
agtttacgggagy

SEQ ID NO: 61316 - DNA, 13 bp, Artificial Sequence
  Oligonucleotide for detection of SNP TSC0016325
rctcccgtaaact

SEQ ID NO: 61317 - DNA, 13 bp, Artificial Sequence
  Oligonucleotide for detection of SNP TSC0016325
gtttttgtagatt

SEQ ID NO: 61318 - DNA, 13 bp, Artificial Sequence
  Oligonucleotide for detection of SNP TSC0016325
aatctacaaaaac

SEQ ID NO: 61319 - DNA, 13 bp, Artificial Sequence
  Oligonucleotide for detection of SNP TSC0016325
gtttttatagatt

SEQ ID NO: 61320 - DNA, 13 bp, Artificial Sequence
  Oligonucleotide for detection of SNP TSC0016325
aatctataaaaac

SEQ ID NO: 61321 - DNA, 13 bp, Artificial Sequence
  Oligonucleotide for detection of SNP TSC0016325
gttttcgtagatt

SEQ ID NO: 61322 - DNA, 13 bp, Artificial Sequence
  Oligonucleotide for detection of SNP TSC0016325
aatctacgaaaac

SEQ ID NO: 61323 - DNA, 13 bp, Artificial Sequence
  Oligonucleotide for detection of SNP TSC0016326
tgtttatggttty

SEQ ID NO: 61324 - DNA, 13 bp, Artificial Sequence
  Oligonucleotide for detection of SNP TSC0016326
raaaccataaaca

SEQ ID NO: 61325 - DNA, 13 bp, Artificial Sequence
  Oligonucleotide for detection of SNP TSC0016326
tgtttacggttty

SEQ ID NO: 61326 - DNA, 13 bp, Artificial Sequence
  Oligonucleotide for detection of SNP TSC0016326
raaaccgtaaaca

SEQ ID NO: 61327 - DNA, 13 bp, Artificial Sequence
  Oligonucleotide for detection of SNP TSC0016326
gggattgtgagta

SEQ ID NO: 61328 - DNA, 13 bp, Artificial Sequence
  Oligonucleotide for detection of SNP TSC0016326
tactcacaatccc

SEQ ID NO: 61329 - DNA, 13 bp, Artificial Sequence
  Oligonucleotide for detection of SNP TSC0016326
gggattatgagta

SEQ ID NO: 61330 - DNA, 13 bp, Artificial Sequence
  Oligonucleotide for detection of SNP TSC0016326
tactcataatccc

SEQ ID NO: 61331 - DNA, 13 bp, Artificial Sequence
  Oligonucleotide for detection of SNP TSC0016326
gggatcgtgagta

SEQ ID NO: 61332 - DNA, 13 bp, Artificial Sequence
  Oligonucleotide for detection of SNP TSC0016326
tactcacgatccc

SEQ ID NO: 61333 - DNA, 13 bp, Artificial Sequence
  Oligonucleotide for detection of SNP TSC0016327
gagggagaaggga

SEQ ID NO: 61334 - DNA, 13 bp, Artificial Sequence
  Oligonucleotide for detection of SNP TSC0016327
tcccttctccctc

SEQ ID NO: 61335 - DNA, 13 bp, Artificial Sequence
  Oligonucleotide for detection of SNP TSC0016327
gagggaaaaggga

SEQ ID NO: 61336 - DNA, 13 bp, Artificial Sequence
  Oligonucleotide for detection of SNP TSC0016327
tcccttttccctc

SEQ ID NO: 61337 - DNA, 13 bp, Artificial Sequence
  Oligonucleotide for detection of SNP TSC0016328
tttttagagggag

SEQ ID NO: 61338 - DNA, 13 bp, Artificial Sequence
  Oligonucleotide for detection of SNP TSC0016328
ctccctctaaaaa

SEQ ID NO: 61339 - DNA, 13 bp, Artificial Sequence
  Oligonucleotide for detection of SNP TSC0016328
tttttaaagggag

SEQ ID NO: 61340 - DNA, 13 bp, Artificial Sequence
  Oligonucleotide for detection of SNP TSC0016328
ctccctttaaaaa

SEQ ID NO: 61341 - DNA, 13 bp, Artificial Sequence
  Oligonucleotide for detection of SNP TSC0016329
atgtggaatttag

SEQ ID NO: 61342 - DNA, 13 bp, Artificial Sequence
  Oligonucleotide for detection of SNP TSC0016329
ctaaattccacat

SEQ ID NO: 61343 - DNA, 13 bp, Artificial Sequence
  Oligonucleotide for detection of SNP TSC0016329
atgtgggatttag

SEQ ID NO: 61344 - DNA, 13 bp, Artificial Sequence
  Oligonucleotide for detection of SNP TSC0016329
ctaaatcccacat

SEQ ID NO: 61345 - DNA, 13 bp, Artificial Sequence
  Oligonucleotide for detection of SNP TSC0016329
acgtggaatttag

SEQ ID NO: 61346 - DNA, 13 bp, Artificial Sequence
  Oligonucleotide for detection of SNP TSC0016329
ctaaattccacgt

SEQ ID NO: 61347 - DNA, 13 bp, Artificial Sequence
  Oligonucleotide for detection of SNP TSC0016329
acgtgggatttag

SEQ ID NO: 61348 - DNA, 13 bp, Artificial Sequence
  Oligonucleotide for detection of SNP TSC0016329
ctaaatcccacgt

SEQ ID NO: 61349 - DNA, 13 bp, Artificial Sequence
  Oligonucleotide for detection of SNP TSC0016329
atgcggaatttag

SEQ ID NO: 61350 - DNA, 13 bp, Artificial Sequence
  Oligonucleotide for detection of SNP TSC0016329
ctaaattccgcat

SEQ ID NO: 61351 - DNA, 13 bp, Artificial Sequence
  Oligonucleotide for detection of SNP TSC0016329
atgcgggatttag

SEQ ID NO: 61352 - DNA, 13 bp, Artificial Sequence
  Oligonucleotide for detection of SNP TSC0016329
ctaaatcccgcat

SEQ ID NO: 61353 - DNA, 13 bp, Artificial Sequence
  Oligonucleotide for detection of SNP TSC0016329
acgcggaatttag

SEQ ID NO: 61354 - DNA, 13 bp, Artificial Sequence
  Oligonucleotide for detection of SNP TSC0016329
ctaaattccgcgt

SEQ ID NO: 61355 - DNA, 13 bp, Artificial Sequence
  Oligonucleotide for detection of SNP TSC0016329
acgcgggatttag

SEQ ID NO: 61356 - DNA, 13 bp, Artificial Sequence
  Oligonucleotide for detection of SNP TSC0016329
ctaaatcccgcgt

SEQ ID NO: 61357 - DNA, 13 bp, Artificial Sequence
  Oligonucleotide for detection of SNP TSC0016335
tgttagattgtta

SEQ ID NO: 61358 - DNA, 13 bp, Artificial Sequence
  Oligonucleotide for detection of SNP TSC0016335
taacaatctaaca

SEQ ID NO: 61359 - DNA, 13 bp, Artificial Sequence
  Oligonucleotide for detection of SNP TSC0016335
tgttaggttgtta

SEQ ID NO: 61360 - DNA, 13 bp, Artificial Sequence
  Oligonucleotide for detection of SNP TSC0016335
taacaacctaaca

SEQ ID NO: 61361 - DNA, 13 bp, Artificial Sequence
  Oligonucleotide for detection of SNP TSC0016336
ttagaaatataag

SEQ ID NO: 61362 - DNA, 13 bp, Artificial Sequence
  Oligonucleotide for detection of SNP TSC0016336
cttatatttctaa

SEQ ID NO: 61363 - DNA, 13 bp, Artificial Sequence
  Oligonucleotide for detection of SNP TSC0016336
ttagaagtataag

SEQ ID NO: 61364 - DNA, 13 bp, Artificial Sequence
  Oligonucleotide for detection of SNP TSC0016336
cttatacttctaa

SEQ ID NO: 61365 - DNA, 13 bp, Artificial Sequence
  Oligonucleotide for detection of SNP TSC0016337
attgggaaaaaaa

SEQ ID NO: 61366 - DNA, 13 bp, Artificial Sequence
  Oligonucleotide for detection of SNP TSC0016337
tttttttcccaat

SEQ ID NO: 61367 - DNA, 13 bp, Artificial Sequence
  Oligonucleotide for detection of SNP TSC0016337
attggggaaaaaa

SEQ ID NO: 61368 - DNA, 13 bp, Artificial Sequence
  Oligonucleotide for detection of SNP TSC0016337
ttttttccccaat

SEQ ID NO: 61369 - DNA, 13 bp, Artificial Sequence
  Oligonucleotide for detection of SNP TSC0016338
gaaatgattagga

SEQ ID NO: 61370 - DNA, 13 bp, Artificial Sequence
  Oligonucleotide for detection of SNP TSC0016338
tcctaatcatttc

SEQ ID NO: 61371 - DNA, 13 bp, Artificial Sequence
  Oligonucleotide for detection of SNP TSC0016338
gaaatgtttagga

SEQ ID NO: 61372 - DNA, 13 bp, Artificial Sequence
  Oligonucleotide for detection of SNP TSC0016338
tcctaaacatttc

SEQ ID NO: 61373 - DNA, 13 bp, Artificial Sequence
  Oligonucleotide for detection of SNP TSC0016338
ttttaattattty

SEQ ID NO: 61374 - DNA, 13 bp, Artificial Sequence
  Oligonucleotide for detection of SNP TSC0016338
raaataattaaaa

SEQ ID NO: 61375 - DNA, 13 bp, Artificial Sequence
  Oligonucleotide for detection of SNP TSC0016338
ttttaaatattty

SEQ ID NO: 61376 - DNA, 13 bp, Artificial Sequence
  Oligonucleotide for detection of SNP TSC0016338
raaatatttaaaa

SEQ ID NO: 61377 - DNA, 13 bp, Artificial Sequence
  Oligonucleotide for detection of SNP TSC0016340
ggtatgggtgggt

SEQ ID NO: 61378 - DNA, 13 bp, Artificial Sequence
  Oligonucleotide for detection of SNP TSC0016340
acccacccatacc

SEQ ID NO: 61379 - DNA, 13 bp, Artificial Sequence
  Oligonucleotide for detection of SNP TSC0016340
ggtatgagtgggt

SEQ ID NO: 61380 - DNA, 13 bp, Artificial Sequence
  Oligonucleotide for detection of SNP TSC0016340
acccactcatacc

SEQ ID NO: 61381 - DNA, 13 bp, Artificial Sequence
  Oligonucleotide for detection of SNP TSC0016341
aatgtgatttttt

SEQ ID NO: 61382 - DNA, 13 bp, Artificial Sequence
  Oligonucleotide for detection of SNP TSC0016341
aaaaaatcacatt

SEQ ID NO: 61383 - DNA, 13 bp, Artificial Sequence
  Oligonucleotide for detection of SNP TSC0016341
aatgtgttttttt

SEQ ID NO: 61384 - DNA, 13 bp, Artificial Sequence
  Oligonucleotide for detection of SNP TSC0016341
aaaaaaacacatt

SEQ ID NO: 61385 - DNA, 13 bp, Artificial Sequence
  Oligonucleotide for detection of SNP TSC0016341
agagaattatatt

SEQ ID NO: 61386 - DNA, 13 bp, Artificial Sequence
  Oligonucleotide for detection of SNP TSC0016341
aatataattctct

SEQ ID NO: 61387 - DNA, 13 bp, Artificial Sequence
  Oligonucleotide for detection of SNP TSC0016341
agagaagtatatt

SEQ ID NO: 61388 - DNA, 13 bp, Artificial Sequence
  Oligonucleotide for detection of SNP TSC0016341
aatatacttctct

SEQ ID NO: 61389 - DNA, 13 bp, Artificial Sequence
  Oligonucleotide for detection of SNP TSC0016342
ttaatatgattta

SEQ ID NO: 61390 - DNA, 13 bp, Artificial Sequence
  Oligonucleotide for detection of SNP TSC0016342
taaatcatattaa

SEQ ID NO: 61391 - DNA, 13 bp, Artificial Sequence
  Oligonucleotide for detection of SNP TSC0016342
ttaatacgattta

SEQ ID NO: 61392 - DNA, 13 bp, Artificial Sequence
  Oligonucleotide for detection of SNP TSC0016342
taaatcgtattaa

SEQ ID NO: 61393 - DNA, 13 bp, Artificial Sequence
  Oligonucleotide for detection of SNP TSC0016342
tgaattgtgttgg

SEQ ID NO: 61394 - DNA, 13 bp, Artificial Sequence
  Oligonucleotide for detection of SNP TSC0016342
ccaacacaattca

SEQ ID NO: 61395 - DNA, 13 bp, Artificial Sequence
  Oligonucleotide for detection of SNP TSC0016342
tgaattatgttgg

SEQ ID NO: 61396 - DNA, 13 bp, Artificial Sequence
  Oligonucleotide for detection of SNP TSC0016342
ccaacataattca

SEQ ID NO: 61397 - DNA, 13 bp, Artificial Sequence
  Oligonucleotide for detection of SNP TSC0016342
tgaatcgtgttgg

SEQ ID NO: 61398 - DNA, 13 bp, Artificial Sequence
  Oligonucleotide for detection of SNP TSC0016342
ccaacacgattca

SEQ ID NO: 61399 - DNA, 13 bp, Artificial Sequence
  Oligonucleotide for detection of SNP TSC0016347
ttaaggtgggtgg

SEQ ID NO: 61400 - DNA, 13 bp, Artificial Sequence
  Oligonucleotide for detection of SNP TSC0016347
ccacccaccttaa

SEQ ID NO: 61401 - DNA, 13 bp, Artificial Sequence
  Oligonucleotide for detection of SNP TSC0016347
ttaaggcgggtgg

SEQ ID NO: 61402 - DNA, 13 bp, Artificial Sequence
  Oligonucleotide for detection of SNP TSC0016347
ccacccgccttaa

SEQ ID NO: 61403 - DNA, 13 bp, Artificial Sequence
  Oligonucleotide for detection of SNP TSC0016347
ttaaggtgggcgg

SEQ ID NO: 61404 - DNA, 13 bp, Artificial Sequence
  Oligonucleotide for detection of SNP TSC0016347
ccgcccaccttaa

SEQ ID NO: 61405 - DNA, 13 bp, Artificial Sequence
  Oligonucleotide for detection of SNP TSC0016347
ttaaggcgggcgg

SEQ ID NO: 61406 - DNA, 13 bp, Artificial Sequence
  Oligonucleotide for detection of SNP TSC0016347
ccgcccgccttaa

SEQ ID NO: 61407 - DNA, 13 bp, Artificial Sequence
  Oligonucleotide for detection of SNP TSC0016348
ttatttattatty

SEQ ID NO: 61408 - DNA, 13 bp, Artificial Sequence
  Oligonucleotide for detection of SNP TSC0016348
raataataaataa

SEQ ID NO: 61409 - DNA, 13 bp, Artificial Sequence
  Oligonucleotide for detection of SNP TSC0016348
gggtagtgggtag

SEQ ID NO: 61410 - DNA, 13 bp, Artificial Sequence
  Oligonucleotide for detection of SNP TSC0016348
ctacccactaccc

SEQ ID NO: 61411 - DNA, 13 bp, Artificial Sequence
  Oligonucleotide for detection of SNP TSC0016348
gggtagcgggtag

SEQ ID NO: 61412 - DNA, 13 bp, Artificial Sequence
  Oligonucleotide for detection of SNP TSC0016348
ctacccgctaccc

SEQ ID NO: 61413 - DNA, 13 bp, Artificial Sequence
  Oligonucleotide for detection of SNP TSC0016349
gattgttgtttty

SEQ ID NO: 61414 - DNA, 13 bp, Artificial Sequence
  Oligonucleotide for detection of SNP TSC0016349
raaaacaacaatc

SEQ ID NO: 61415 - DNA, 13 bp, Artificial Sequence
  Oligonucleotide for detection of SNP TSC0016349
gattgtcgtttty

SEQ ID NO: 61416 - DNA, 13 bp, Artificial Sequence
  Oligonucleotide for detection of SNP TSC0016349
raaaacgacaatc

SEQ ID NO: 61417 - DNA, 13 bp, Artificial Sequence
  Oligonucleotide for detection of SNP TSC0016349
gggagtgataaty

SEQ ID NO: 61418 - DNA, 13 bp, Artificial Sequence
  Oligonucleotide for detection of SNP TSC0016349
rattatcactccc

SEQ ID NO: 61419 - DNA, 13 bp, Artificial Sequence
  Oligonucleotide for detection of SNP TSC0016349
gggagtaataaty

SEQ ID NO: 61420 - DNA, 13 bp, Artificial Sequence
  Oligonucleotide for detection of SNP TSC0016349
rattattactccc

SEQ ID NO: 61421 - DNA, 13 bp, Artificial Sequence
  Oligonucleotide for detection of SNP TSC0016349
gggagcgataaty

SEQ ID NO: 61422 - DNA, 13 bp, Artificial Sequence
  Oligonucleotide for detection of SNP TSC0016349
rattatcgctccc

SEQ ID NO: 61423 - DNA, 13 bp, Artificial Sequence
  Oligonucleotide for detection of SNP TSC0016350
aattagaggagga

SEQ ID NO: 61424 - DNA, 13 bp, Artificial Sequence
  Oligonucleotide for detection of SNP TSC0016350
tcctcctctaatt

SEQ ID NO: 61425 - DNA, 13 bp, Artificial Sequence
  Oligonucleotide for detection of SNP TSC0016350
aattaggggagga

SEQ ID NO: 61426 - DNA, 13 bp, Artificial Sequence
  Oligonucleotide for detection of SNP TSC0016350
tcctcccctaatt

SEQ ID NO: 61427 - DNA, 13 bp, Artificial Sequence
  Oligonucleotide for detection of SNP TSC0016351
tgggtatgggttg

SEQ ID NO: 61428 - DNA, 13 bp, Artificial Sequence
  Oligonucleotide for detection of SNP TSC0016351
caacccataccca

SEQ ID NO: 61429 - DNA, 13 bp, Artificial Sequence
  Oligonucleotide for detection of SNP TSC0016351
cgggtatgggttg

SEQ ID NO: 61430 - DNA, 13 bp, Artificial Sequence
  Oligonucleotide for detection of SNP TSC0016351
caacccatacccg

SEQ ID NO: 61431 - DNA, 13 bp, Artificial Sequence
  Oligonucleotide for detection of SNP TSC0016351
tgggtacgggttg

SEQ ID NO: 61432 - DNA, 13 bp, Artificial Sequence
  Oligonucleotide for detection of SNP TSC0016351
caacccgtaccca

SEQ ID NO: 61433 - DNA, 13 bp, Artificial Sequence
  Oligonucleotide for detection of SNP TSC0016351
tgggtatgggtcg

SEQ ID NO: 61434 - DNA, 13 bp, Artificial Sequence
  Oligonucleotide for detection of SNP TSC0016351
cgacccataccca

SEQ ID NO: 61435 - DNA, 13 bp, Artificial Sequence
  Oligonucleotide for detection of SNP TSC0016351
cgggtatgggtcg

SEQ ID NO: 61436 - DNA, 13 bp, Artificial Sequence
  Oligonucleotide for detection of SNP TSC0016351
cgacccatacccg

SEQ ID NO: 61437 - DNA, 13 bp, Artificial Sequence
  Oligonucleotide for detection of SNP TSC0016351
cgggtacgggttg

SEQ ID NO: 61438 - DNA, 13 bp, Artificial Sequence
  Oligonucleotide for detection of SNP TSC0016351
caacccgtacccg

SEQ ID NO: 61439 - DNA, 13 bp, Artificial Sequence
  Oligonucleotide for detection of SNP TSC0016351
tgggtacgggtcg

SEQ ID NO: 61440 - DNA, 13 bp, Artificial Sequence
  Oligonucleotide for detection of SNP TSC0016351
cgacccgtaccca

SEQ ID NO: 61441 - DNA, 13 bp, Artificial Sequence
  Oligonucleotide for detection of SNP TSC0016351
cgggtacgggtcg

SEQ ID NO: 61442 - DNA, 13 bp, Artificial Sequence
  Oligonucleotide for detection of SNP TSC0016351
cgacccgtacccg

SEQ ID NO: 61443 - DNA, 13 bp, Artificial Sequence
  Oligonucleotide for detection of SNP TSC0016351
tggtttgtgtttg

SEQ ID NO: 61444 - DNA, 13 bp, Artificial Sequence
  Oligonucleotide for detection of SNP TSC0016351
caaacacaaacca

SEQ ID NO: 61445 - DNA, 13 bp, Artificial Sequence
  Oligonucleotide for detection of SNP TSC0016351
tggtttatgtttg

SEQ ID NO: 61446 - DNA, 13 bp, Artificial Sequence
  Oligonucleotide for detection of SNP TSC0016351
caaacataaacca

SEQ ID NO: 61447 - DNA, 13 bp, Artificial Sequence
  Oligonucleotide for detection of SNP TSC0016351
cggtttgtgtttg

SEQ ID NO: 61448 - DNA, 13 bp, Artificial Sequence
  Oligonucleotide for detection of SNP TSC0016351
caaacacaaaccg

SEQ ID NO: 61449 - DNA, 13 bp, Artificial Sequence
  Oligonucleotide for detection of SNP TSC0016351
cggtttatgtttg

SEQ ID NO: 61450 - DNA, 13 bp, Artificial Sequence
  Oligonucleotide for detection of SNP TSC0016351
caaacataaaccg

SEQ ID NO: 61451 - DNA, 13 bp, Artificial Sequence
  Oligonucleotide for detection of SNP TSC0016351
tggttcgtgtttg

SEQ ID NO: 61452 - DNA, 13 bp, Artificial Sequence
  Oligonucleotide for detection of SNP TSC0016351
caaacacgaacca

SEQ ID NO: 61453 - DNA, 13 bp, Artificial Sequence
  Oligonucleotide for detection of SNP TSC0016351
tggtttatgttcg

SEQ ID NO: 61454 - DNA, 13 bp, Artificial Sequence
  Oligonucleotide for detection of SNP TSC0016351
cgaacataaacca

SEQ ID NO: 61455 - DNA, 13 bp, Artificial Sequence
  Oligonucleotide for detection of SNP TSC0016351
tggtttgtgttcg

SEQ ID NO: 61456 - DNA, 13 bp, Artificial Sequence
  Oligonucleotide for detection of SNP TSC0016351
cgaacacaaacca

SEQ ID NO: 61457 - DNA, 13 bp, Artificial Sequence
  Oligonucleotide for detection of SNP TSC0016351
cggtttatgttcg

SEQ ID NO: 61458 - DNA, 13 bp, Artificial Sequence
  Oligonucleotide for detection of SNP TSC0016351
cgaacataaaccg

SEQ ID NO: 61459 - DNA, 13 bp, Artificial Sequence
  Oligonucleotide for detection of SNP TSC0016351
cggttcgtgtttg

SEQ ID NO: 61460 - DNA, 13 bp, Artificial Sequence
  Oligonucleotide for detection of SNP TSC0016351
caaacacgaaccg

SEQ ID NO: 61461 - DNA, 13 bp, Artificial Sequence
  Oligonucleotide for detection of SNP TSC0016351
cggtttgtgttcg

SEQ ID NO: 61462 - DNA, 13 bp, Artificial Sequence
  Oligonucleotide for detection of SNP TSC0016351
cgaacacaaaccg

SEQ ID NO: 61463 - DNA, 13 bp, Artificial Sequence
  Oligonucleotide for detection of SNP TSC0016351
tggttcgtgttcg

SEQ ID NO: 61464 - DNA, 13 bp, Artificial Sequence
  Oligonucleotide for detection of SNP TSC0016351
cgaacacgaacca

SEQ ID NO: 61465 - DNA, 13 bp, Artificial Sequence
  Oligonucleotide for detection of SNP TSC0016351
cggttcgtgttcg

SEQ ID NO: 61466 - DNA, 13 bp, Artificial Sequence
  Oligonucleotide for detection of SNP TSC0016351
cgaacacgaaccg

SEQ ID NO: 61467 - DNA, 13 bp, Artificial Sequence
  Oligonucleotide for detection of SNP TSC0016355
ttaaatgtagaga

SEQ ID NO: 61468 - DNA, 13 bp, Artificial Sequence
  Oligonucleotide for detection of SNP TSC0016355
tctctacatttaa

SEQ ID NO: 61469 - DNA, 13 bp, Artificial Sequence
  Oligonucleotide for detection of SNP TSC0016355
ttaaatatagaga

SEQ ID NO: 61470 - DNA, 13 bp, Artificial Sequence
  Oligonucleotide for detection of SNP TSC0016355
tctctatatttaa

SEQ ID NO: 61471 - DNA, 13 bp, Artificial Sequence
  Oligonucleotide for detection of SNP TSC0016356
tgtttaaataagy

SEQ ID NO: 61472 - DNA, 13 bp, Artificial Sequence
  Oligonucleotide for detection of SNP TSC0016356
rcttatttaaaca

SEQ ID NO: 61473 - DNA, 13 bp, Artificial Sequence
  Oligonucleotide for detection of SNP TSC0016356
tgtttatataagy

SEQ ID NO: 61474 - DNA, 13 bp, Artificial Sequence
  Oligonucleotide for detection of SNP TSC0016356
rcttatataaaca

SEQ ID NO: 61475 - DNA, 13 bp, Artificial Sequence
  Oligonucleotide for detection of SNP TSC0016356
gtttatttgaata

SEQ ID NO: 61476 - DNA, 13 bp, Artificial Sequence
  Oligonucleotide for detection of SNP TSC0016356
tattcaaataaac

SEQ ID NO: 61477 - DNA, 13 bp, Artificial Sequence
  Oligonucleotide for detection of SNP TSC0016356
gtttatatgaata

SEQ ID NO: 61478 - DNA, 13 bp, Artificial Sequence
  Oligonucleotide for detection of SNP TSC0016356
tattcatataaac

SEQ ID NO: 61479 - DNA, 13 bp, Artificial Sequence
  Oligonucleotide for detection of SNP TSC0016361
taatttattttty

SEQ ID NO: 61480 - DNA, 13 bp, Artificial Sequence
  Oligonucleotide for detection of SNP TSC0016361
raaaaataaatta

SEQ ID NO: 61481 - DNA, 13 bp, Artificial Sequence
  Oligonucleotide for detection of SNP TSC0016361
taatttgttttty

SEQ ID NO: 61482 - DNA, 13 bp, Artificial Sequence
  Oligonucleotide for detection of SNP TSC0016361
raaaaacaaatta

SEQ ID NO: 61483 - DNA, 13 bp, Artificial Sequence
  Oligonucleotide for detection of SNP TSC0016361
taattcgttttty

SEQ ID NO: 61484 - DNA, 13 bp, Artificial Sequence
  Oligonucleotide for detection of SNP TSC0016361
raaaaacgaatta

SEQ ID NO: 61485 - DNA, 13 bp, Artificial Sequence
  Oligonucleotide for detection of SNP TSC0016361
gaaaggtgaatta

SEQ ID NO: 61486 - DNA, 13 bp, Artificial Sequence
  Oligonucleotide for detection of SNP TSC0016361
taattcacctttc

SEQ ID NO: 61487 - DNA, 13 bp, Artificial Sequence
  Oligonucleotide for detection of SNP TSC0016361
gaaaggcgaatta

SEQ ID NO: 61488 - DNA, 13 bp, Artificial Sequence
  Oligonucleotide for detection of SNP TSC0016361
taattcgcctttc

SEQ ID NO: 61489 - DNA, 13 bp, Artificial Sequence
  Oligonucleotide for detection of SNP TSC0016362
aagtgtatatgta

SEQ ID NO: 61490 - DNA, 13 bp, Artificial Sequence
  Oligonucleotide for detection of SNP TSC0016362
tacatatacactt

SEQ ID NO: 61491 - DNA, 13 bp, Artificial Sequence
  Oligonucleotide for detection of SNP TSC0016362
aagtgtgtatgta

SEQ ID NO: 61492 - DNA, 13 bp, Artificial Sequence
  Oligonucleotide for detection of SNP TSC0016362
tacatacacactt

SEQ ID NO: 61493 - DNA, 13 bp, Artificial Sequence
  Oligonucleotide for detection of SNP TSC0016363
tagtatattattt

SEQ ID NO: 61494 - DNA, 13 bp, Artificial Sequence
  Oligonucleotide for detection of SNP TSC0016363
aaataatatacta

SEQ ID NO: 61495 - DNA, 13 bp, Artificial Sequence
  Oligonucleotide for detection of SNP TSC0016363
tagtatgttattt

SEQ ID NO: 61496 - DNA, 13 bp, Artificial Sequence
  Oligonucleotide for detection of SNP TSC0016363
aaataacatacta

SEQ ID NO: 61497 - DNA, 13 bp, Artificial Sequence
  Oligonucleotide for detection of SNP TSC0016364
attaatatagaga

SEQ ID NO: 61498 - DNA, 13 bp, Artificial Sequence
  Oligonucleotide for detection of SNP TSC0016364
tctctatattaat

SEQ ID NO: 61499 - DNA, 13 bp, Artificial Sequence
  Oligonucleotide for detection of SNP TSC0016364
attaatgtagaga

SEQ ID NO: 61500 - DNA, 13 bp, Artificial Sequence
  Oligonucleotide for detection of SNP TSC0016364
tctctacattaat

SEQ ID NO: 61501 - DNA, 13 bp, Artificial Sequence
  Oligonucleotide for detection of SNP TSC0016364
attaacgtagaga

SEQ ID NO: 61502 - DNA, 13 bp, Artificial Sequence
  Oligonucleotide for detection of SNP TSC0016364
tctctacgttaat

SEQ ID NO: 61503 - DNA, 13 bp, Artificial Sequence
  Oligonucleotide for detection of SNP TSC0016364
tttttatgttgat

SEQ ID NO: 61504 - DNA, 13 bp, Artificial Sequence
  Oligonucleotide for detection of SNP TSC0016364
atcaacataaaaa

SEQ ID NO: 61505 - DNA, 13 bp, Artificial Sequence
  Oligonucleotide for detection of SNP TSC0016364
tttttacgttgat

SEQ ID NO: 61506 - DNA, 13 bp, Artificial Sequence
  Oligonucleotide for detection of SNP TSC0016364
atcaacgtaaaaa

SEQ ID NO: 61507 - DNA, 13 bp, Artificial Sequence
  Oligonucleotide for detection of SNP TSC0016365
tttaggggaattt

SEQ ID NO: 61508 - DNA, 13 bp, Artificial Sequence
  Oligonucleotide for detection of SNP TSC0016365
aaattcccctaaa

SEQ ID NO: 61509 - DNA, 13 bp, Artificial Sequence
  Oligonucleotide for detection of SNP TSC0016365
tttaggagaattt

SEQ ID NO: 61510 - DNA, 13 bp, Artificial Sequence
  Oligonucleotide for detection of SNP TSC0016365
aaattctcctaaa

SEQ ID NO: 61511 - DNA, 13 bp, Artificial Sequence
  Oligonucleotide for detection of SNP TSC0016366
tggtttattgtaa

SEQ ID NO: 61512 - DNA, 13 bp, Artificial Sequence
  Oligonucleotide for detection of SNP TSC0016366
ttacaataaacca

SEQ ID NO: 61513 - DNA, 13 bp, Artificial Sequence
  Oligonucleotide for detection of SNP TSC0016366
tggtttgttgtaa

SEQ ID NO: 61514 - DNA, 13 bp, Artificial Sequence
  Oligonucleotide for detection of SNP TSC0016366
ttacaacaaacca

SEQ ID NO: 61515 - DNA, 13 bp, Artificial Sequence
  Oligonucleotide for detection of SNP TSC0016366
tggttcgttgtaa

SEQ ID NO: 61516 - DNA, 13 bp, Artificial Sequence
  Oligonucleotide for detection of SNP TSC0016366
ttacaacgaacca

SEQ ID NO: 61517 - DNA, 13 bp, Artificial Sequence
  Oligonucleotide for detection of SNP TSC0016366
ttgtagtgagtta

SEQ ID NO: 61518 - DNA, 13 bp, Artificial Sequence
  Oligonucleotide for detection of SNP TSC0016366
taactcactacaa

SEQ ID NO: 61519 - DNA, 13 bp, Artificial Sequence
  Oligonucleotide for detection of SNP TSC0016366
ttgtagcgagtta

SEQ ID NO: 61520 - DNA, 13 bp, Artificial Sequence
  Oligonucleotide for detection of SNP TSC0016366
taactcgctacaa

SEQ ID NO: 61521 - DNA, 13 bp, Artificial Sequence
  Oligonucleotide for detection of SNP TSC0016367
attttggttttty

SEQ ID NO: 61522 - DNA, 13 bp, Artificial Sequence
  Oligonucleotide for detection of SNP TSC0016367
raaaaaccaaaat

SEQ ID NO: 61523 - DNA, 13 bp, Artificial Sequence
  Oligonucleotide for detection of SNP TSC0016367
gggaggttaaggt

SEQ ID NO: 61524 - DNA, 13 bp, Artificial Sequence
  Oligonucleotide for detection of SNP TSC0016367
accttaacctccc

SEQ ID NO: 61525 - DNA, 13 bp, Artificial Sequence
  Oligonucleotide for detection of SNP TSC0016367
gggaggataaggt

SEQ ID NO: 61526 - DNA, 13 bp, Artificial Sequence
  Oligonucleotide for detection of SNP TSC0016367
accttatcctccc

SEQ ID NO: 61527 - DNA, 13 bp, Artificial Sequence
  Oligonucleotide for detection of SNP TSC0016369
ttgtgggggttat

SEQ ID NO: 61528 - DNA, 13 bp, Artificial Sequence
  Oligonucleotide for detection of SNP TSC0016369
ataacccccacaa

SEQ ID NO: 61529 - DNA, 13 bp, Artificial Sequence
  Oligonucleotide for detection of SNP TSC0016369
ttgtggaggttat

SEQ ID NO: 61530 - DNA, 13 bp, Artificial Sequence
  Oligonucleotide for detection of SNP TSC0016369
ataacctccacaa

SEQ ID NO: 61531 - DNA, 13 bp, Artificial Sequence
  Oligonucleotide for detection of SNP TSC0016371
taagatagaatga

SEQ ID NO: 61532 - DNA, 13 bp, Artificial Sequence
  Oligonucleotide for detection of SNP TSC0016371
tcattctatctta

SEQ ID NO: 61533 - DNA, 13 bp, Artificial Sequence
  Oligonucleotide for detection of SNP TSC0016371
taagattgaatga

SEQ ID NO: 61534 - DNA, 13 bp, Artificial Sequence
  Oligonucleotide for detection of SNP TSC0016371
tcattcaatctta

SEQ ID NO: 61535 - DNA, 13 bp, Artificial Sequence
  Oligonucleotide for detection of SNP TSC0016371
ttattttatttta

SEQ ID NO: 61536 - DNA, 13 bp, Artificial Sequence
  Oligonucleotide for detection of SNP TSC0016371
taaaataaaataa

SEQ ID NO: 61537 - DNA, 13 bp, Artificial Sequence
  Oligonucleotide for detection of SNP TSC0016371
ttatttaatttta

SEQ ID NO: 61538 - DNA, 13 bp, Artificial Sequence
  Oligonucleotide for detection of SNP TSC0016371
taaaattaaataa

SEQ ID NO: 61539 - DNA, 13 bp, Artificial Sequence
  Oligonucleotide for detection of SNP TSC0016372
ttataaaatggtt

SEQ ID NO: 61540 - DNA, 13 bp, Artificial Sequence
  Oligonucleotide for detection of SNP TSC0016372
aaccattttataa

SEQ ID NO: 61541 - DNA, 13 bp, Artificial Sequence
  Oligonucleotide for detection of SNP TSC0016372
ttataagatggtt

SEQ ID NO: 61542 - DNA, 13 bp, Artificial Sequence
  Oligonucleotide for detection of SNP TSC0016372
aaccatcttataa

SEQ ID NO: 61543 - DNA, 13 bp, Artificial Sequence
  Oligonucleotide for detection of SNP TSC0016376
ggatattggagta

SEQ ID NO: 61544 - DNA, 13 bp, Artificial Sequence
  Oligonucleotide for detection of SNP TSC0016376
tactccaatatcc

SEQ ID NO: 61545 - DNA, 13 bp, Artificial Sequence
  Oligonucleotide for detection of SNP TSC0016376
ggatatcggagta

SEQ ID NO: 61546 - DNA, 13 bp, Artificial Sequence
  Oligonucleotide for detection of SNP TSC0016376
tactccgatatcc

SEQ ID NO: 61547 - DNA, 13 bp, Artificial Sequence
  Oligonucleotide for detection of SNP TSC0016376
tgttttggtgtty

SEQ ID NO: 61548 - DNA, 13 bp, Artificial Sequence
  Oligonucleotide for detection of SNP TSC0016376
raacaccaaaaca

SEQ ID NO: 61549 - DNA, 13 bp, Artificial Sequence
  Oligonucleotide for detection of SNP TSC0016376
tgttttagtgtty

SEQ ID NO: 61550 - DNA, 13 bp, Artificial Sequence
  Oligonucleotide for detection of SNP TSC0016376
raacactaaaaca

SEQ ID NO: 61551 - DNA, 13 bp, Artificial Sequence
  Oligonucleotide for detection of SNP TSC0016376
tgtttcggtgtty

SEQ ID NO: 61552 - DNA, 13 bp, Artificial Sequence
  Oligonucleotide for detection of SNP TSC0016376
raacaccgaaaca

SEQ ID NO: 61553 - DNA, 13 bp, Artificial Sequence
  Oligonucleotide for detection of SNP TSC0016381
tggggggaaaatt

SEQ ID NO: 61554 - DNA, 13 bp, Artificial Sequence
  Oligonucleotide for detection of SNP TSC0016381
aattttcccccca

SEQ ID NO: 61555 - DNA, 13 bp, Artificial Sequence
  Oligonucleotide for detection of SNP TSC0016381
tgggggaaaaatt

SEQ ID NO: 61556 - DNA, 13 bp, Artificial Sequence
  Oligonucleotide for detection of SNP TSC0016381
aatttttccccca

SEQ ID NO: 61557 - DNA, 13 bp, Artificial Sequence
  Oligonucleotide for detection of SNP TSC0016386
taggtttttggta

SEQ ID NO: 61558 - DNA, 13 bp, Artificial Sequence
  Oligonucleotide for detection of SNP TSC0016386
taccaaaaaccta

SEQ ID NO: 61559 - DNA, 13 bp, Artificial Sequence
  Oligonucleotide for detection of SNP TSC0016386
taggttgttggta

SEQ ID NO: 61560 - DNA, 13 bp, Artificial Sequence
  Oligonucleotide for detection of SNP TSC0016386
taccaacaaccta

SEQ ID NO: 61561 - DNA, 13 bp, Artificial Sequence
  Oligonucleotide for detection of SNP TSC0016386
taggttttcggta

SEQ ID NO: 61562 - DNA, 13 bp, Artificial Sequence
  Oligonucleotide for detection of SNP TSC0016386
taccgaaaaccta

SEQ ID NO: 61563 - DNA, 13 bp, Artificial Sequence
  Oligonucleotide for detection of SNP TSC0016386
taggtcgttggta

SEQ ID NO: 61564 - DNA, 13 bp, Artificial Sequence
  Oligonucleotide for detection of SNP TSC0016386
taccaacgaccta

SEQ ID NO: 61565 - DNA, 13 bp, Artificial Sequence
  Oligonucleotide for detection of SNP TSC0016386
taggttgtcggta

SEQ ID NO: 61566 - DNA, 13 bp, Artificial Sequence
  Oligonucleotide for detection of SNP TSC0016386
taccgacaaccta

SEQ ID NO: 61567 - DNA, 13 bp, Artificial Sequence
  Oligonucleotide for detection of SNP TSC0016386
taggtcgtcggta

SEQ ID NO: 61568 - DNA, 13 bp, Artificial Sequence
  Oligonucleotide for detection of SNP TSC0016386
taccgacgaccta

SEQ ID NO: 61569 - DNA, 13 bp, Artificial Sequence
  Oligonucleotide for detection of SNP TSC0016386
tattgaggatttg

SEQ ID NO: 61570 - DNA, 13 bp, Artificial Sequence
  Oligonucleotide for detection of SNP TSC0016386
caaatcctcaata

SEQ ID NO: 61571 - DNA, 13 bp, Artificial Sequence
  Oligonucleotide for detection of SNP TSC0016386
tattgatgatttg

SEQ ID NO: 61572 - DNA, 13 bp, Artificial Sequence
  Oligonucleotide for detection of SNP TSC0016386
caaatcatcaata

SEQ ID NO: 61573 - DNA, 13 bp, Artificial Sequence
  Oligonucleotide for detection of SNP TSC0016386
tatcgaggatttg

SEQ ID NO: 61574 - DNA, 13 bp, Artificial Sequence
  Oligonucleotide for detection of SNP TSC0016386
caaatcctcgata

SEQ ID NO: 61575 - DNA, 13 bp, Artificial Sequence
  Oligonucleotide for detection of SNP TSC0016386
tatcgatgatttg

SEQ ID NO: 61576 - DNA, 13 bp, Artificial Sequence
  Oligonucleotide for detection of SNP TSC0016386
caaatcatcgata

SEQ ID NO: 61577 - DNA, 13 bp, Artificial Sequence
  Oligonucleotide for detection of SNP TSC0016386
tattgacgatttg

SEQ ID NO: 61578 - DNA, 13 bp, Artificial Sequence
  Oligonucleotide for detection of SNP TSC0016386
caaatcgtcaata

SEQ ID NO: 61579 - DNA, 13 bp, Artificial Sequence
  Oligonucleotide for detection of SNP TSC0016386
tatcgacgatttg

SEQ ID NO: 61580 - DNA, 13 bp, Artificial Sequence
  Oligonucleotide for detection of SNP TSC0016386
caaatcgtcgata

SEQ ID NO: 61581 - DNA, 13 bp, Artificial Sequence
  Oligonucleotide for detection of SNP TSC0016387
tgaggtaggtatg

SEQ ID NO: 61582 - DNA, 13 bp, Artificial Sequence
  Oligonucleotide for detection of SNP TSC0016387
catacctacctca

SEQ ID NO: 61583 - DNA, 13 bp, Artificial Sequence
  Oligonucleotide for detection of SNP TSC0016387
tgaggtgggtatg

SEQ ID NO: 61584 - DNA, 13 bp, Artificial Sequence
  Oligonucleotide for detection of SNP TSC0016387
catacccacctca

SEQ ID NO: 61585 - DNA, 13 bp, Artificial Sequence
  Oligonucleotide for detection of SNP TSC0016387
tgaggcgggtatg

SEQ ID NO: 61586 - DNA, 13 bp, Artificial Sequence
  Oligonucleotide for detection of SNP TSC0016387
catacccgcctca

SEQ ID NO: 61587 - DNA, 13 bp, Artificial Sequence
  Oligonucleotide for detection of SNP TSC0016387
tatgtttgtttta

SEQ ID NO: 61588 - DNA, 13 bp, Artificial Sequence
  Oligonucleotide for detection of SNP TSC0016387
taaaacaaacata

SEQ ID NO: 61589 - DNA, 13 bp, Artificial Sequence
  Oligonucleotide for detection of SNP TSC0016387
tatgttcgtttta

SEQ ID NO: 61590 - DNA, 13 bp, Artificial Sequence
  Oligonucleotide for detection of SNP TSC0016387
taaaacgaacata

SEQ ID NO: 61591 - DNA, 13 bp, Artificial Sequence
  Oligonucleotide for detection of SNP TSC0016388
tttggaatgtgta

SEQ ID NO: 61592 - DNA, 13 bp, Artificial Sequence
  Oligonucleotide for detection of SNP TSC0016388
tacacattccaaa

SEQ ID NO: 61593 - DNA, 13 bp, Artificial Sequence
  Oligonucleotide for detection of SNP TSC0016388
tttggagtgtgta

SEQ ID NO: 61594 - DNA, 13 bp, Artificial Sequence
  Oligonucleotide for detection of SNP TSC0016388
tacacactccaaa

SEQ ID NO: 61595 - DNA, 13 bp, Artificial Sequence
  Oligonucleotide for detection of SNP TSC0016388
ttcggaatgtgta

SEQ ID NO: 61596 - DNA, 13 bp, Artificial Sequence
  Oligonucleotide for detection of SNP TSC0016388
tacacattccgaa

SEQ ID NO: 61597 - DNA, 13 bp, Artificial Sequence
  Oligonucleotide for detection of SNP TSC0016388
ttcggagtgtgta

SEQ ID NO: 61598 - DNA, 13 bp, Artificial Sequence
  Oligonucleotide for detection of SNP TSC0016388
tacacactccgaa

SEQ ID NO: 61599 - DNA, 13 bp, Artificial Sequence
  Oligonucleotide for detection of SNP TSC0016388
tttggaacgtgta

SEQ ID NO: 61600 - DNA, 13 bp, Artificial Sequence
  Oligonucleotide for detection of SNP TSC0016388
tacacgttccaaa

SEQ ID NO: 61601 - DNA, 13 bp, Artificial Sequence
  Oligonucleotide for detection of SNP TSC0016388
tttggagcgtgta

SEQ ID NO: 61602 - DNA, 13 bp, Artificial Sequence
  Oligonucleotide for detection of SNP TSC0016388
tacacgctccaaa

SEQ ID NO: 61603 - DNA, 13 bp, Artificial Sequence
  Oligonucleotide for detection of SNP TSC0016388
ttcggaacgtgta

SEQ ID NO: 61604 - DNA, 13 bp, Artificial Sequence
  Oligonucleotide for detection of SNP TSC0016388
tacacgttccgaa

SEQ ID NO: 61605 - DNA, 13 bp, Artificial Sequence
  Oligonucleotide for detection of SNP TSC0016388
ttcggagcgtgta

SEQ ID NO: 61606 - DNA, 13 bp, Artificial Sequence
  Oligonucleotide for detection of SNP TSC0016388
tacacgctccgaa

SEQ ID NO: 61607 - DNA, 13 bp, Artificial Sequence
  Oligonucleotide for detection of SNP TSC0016391
gggggagatgttt

SEQ ID NO: 61608 - DNA, 13 bp, Artificial Sequence
  Oligonucleotide for detection of SNP TSC0016391
aaacatctccccc

SEQ ID NO: 61609 - DNA, 13 bp, Artificial Sequence
  Oligonucleotide for detection of SNP TSC0016391
gggggaaatgttt

SEQ ID NO: 61610 - DNA, 13 bp, Artificial Sequence
  Oligonucleotide for detection of SNP TSC0016391
aaacatttccccc

SEQ ID NO: 61611 - DNA, 13 bp, Artificial Sequence
  Oligonucleotide for detection of SNP TSC0016392
agggagaggaagy

SEQ ID NO: 61612 - DNA, 13 bp, Artificial Sequence
  Oligonucleotide for detection of SNP TSC0016392
rcttcctctccct

SEQ ID NO: 61613 - DNA, 13 bp, Artificial Sequence
  Oligonucleotide for detection of SNP TSC0016392
agggaggggaagy

SEQ ID NO: 61614 - DNA, 13 bp, Artificial Sequence
  Oligonucleotide for detection of SNP TSC0016392
rcttcccctccct

SEQ ID NO: 61615 - DNA, 13 bp, Artificial Sequence
  Oligonucleotide for detection of SNP TSC0016393
tggggaaaggatg

SEQ ID NO: 61616 - DNA, 13 bp, Artificial Sequence
  Oligonucleotide for detection of SNP TSC0016393
catcctttcccca

SEQ ID NO: 61617 - DNA, 13 bp, Artificial Sequence
  Oligonucleotide for detection of SNP TSC0016393
tggggagaggatg

SEQ ID NO: 61618 - DNA, 13 bp, Artificial Sequence
  Oligonucleotide for detection of SNP TSC0016393
catcctctcccca

SEQ ID NO: 61619 - DNA, 13 bp, Artificial Sequence
  Oligonucleotide for detection of SNP TSC0016394
aagattttgtttt

SEQ ID NO: 61620 - DNA, 13 bp, Artificial Sequence
  Oligonucleotide for detection of SNP TSC0016394
aaaacaaaatctt

SEQ ID NO: 61621 - DNA, 13 bp, Artificial Sequence
  Oligonucleotide for detection of SNP TSC0016394
aagattgtgtttt

SEQ ID NO: 61622 - DNA, 13 bp, Artificial Sequence
  Oligonucleotide for detection of SNP TSC0016394
aaaacacaatctt

SEQ ID NO: 61623 - DNA, 13 bp, Artificial Sequence
  Oligonucleotide for detection of SNP TSC0016394
agaatagagtttt

SEQ ID NO: 61624 - DNA, 13 bp, Artificial Sequence
  Oligonucleotide for detection of SNP TSC0016394
aaaactctattct

SEQ ID NO: 61625 - DNA, 13 bp, Artificial Sequence
  Oligonucleotide for detection of SNP TSC0016394
agaatatagtttt

SEQ ID NO: 61626 - DNA, 13 bp, Artificial Sequence
  Oligonucleotide for detection of SNP TSC0016394
aaaactatattct

SEQ ID NO: 61627 - DNA, 13 bp, Artificial Sequence
  Oligonucleotide for detection of SNP TSC0016395
gttattagtgtat

SEQ ID NO: 61628 - DNA, 13 bp, Artificial Sequence
  Oligonucleotide for detection of SNP TSC0016395
atacactaataac

SEQ ID NO: 61629 - DNA, 13 bp, Artificial Sequence
  Oligonucleotide for detection of SNP TSC0016395
gttatttgtgtat

SEQ ID NO: 61630 - DNA, 13 bp, Artificial Sequence
  Oligonucleotide for detection of SNP TSC0016395
atacacaaataac

SEQ ID NO: 61631 - DNA, 13 bp, Artificial Sequence
  Oligonucleotide for detection of SNP TSC0016395
gttattcgtgtat

SEQ ID NO: 61632 - DNA, 13 bp, Artificial Sequence
  Oligonucleotide for detection of SNP TSC0016395
atacacgaataac

SEQ ID NO: 61633 - DNA, 13 bp, Artificial Sequence
  Oligonucleotide for detection of SNP TSC0016395
atatattggtaay

SEQ ID NO: 61634 - DNA, 13 bp, Artificial Sequence
  Oligonucleotide for detection of SNP TSC0016395
rttaccaatatat

SEQ ID NO: 61635 - DNA, 13 bp, Artificial Sequence
  Oligonucleotide for detection of SNP TSC0016395
atatatgggtaay

SEQ ID NO: 61636 - DNA, 13 bp, Artificial Sequence
  Oligonucleotide for detection of SNP TSC0016395
rttacccatatat

SEQ ID NO: 61637 - DNA, 13 bp, Artificial Sequence
  Oligonucleotide for detection of SNP TSC0016395
atatacgggtaay

SEQ ID NO: 61638 - DNA, 13 bp, Artificial Sequence
  Oligonucleotide for detection of SNP TSC0016395
rttacccgtatat

SEQ ID NO: 61639 - DNA, 13 bp, Artificial Sequence
  Oligonucleotide for detection of SNP TSC0016396
agggggggggagg

SEQ ID NO: 61640 - DNA, 13 bp, Artificial Sequence
  Oligonucleotide for detection of SNP TSC0016396
cctccccccccct

SEQ ID NO: 61641 - DNA, 13 bp, Artificial Sequence
  Oligonucleotide for detection of SNP TSC0016396
agggggtgggagg

SEQ ID NO: 61642 - DNA, 13 bp, Artificial Sequence
  Oligonucleotide for detection of SNP TSC0016396
cctcccaccccct

SEQ ID NO: 61643 - DNA, 13 bp, Artificial Sequence
  Oligonucleotide for detection of SNP TSC0016398
gtgttttatttga

SEQ ID NO: 61644 - DNA, 13 bp, Artificial Sequence
  Oligonucleotide for detection of SNP TSC0016398
tcaaataaaacac

SEQ ID NO: 61645 - DNA, 13 bp, Artificial Sequence
  Oligonucleotide for detection of SNP TSC0016398
gtgtttgatttga

SEQ ID NO: 61646 - DNA, 13 bp, Artificial Sequence
  Oligonucleotide for detection of SNP TSC0016398
tcaaatcaaacac

SEQ ID NO: 61647 - DNA, 13 bp, Artificial Sequence
  Oligonucleotide for detection of SNP TSC0016398
gtgttcgatttga

SEQ ID NO: 61648 - DNA, 13 bp, Artificial Sequence
  Oligonucleotide for detection of SNP TSC0016398
tcaaatcgaacac

SEQ ID NO: 61649 - DNA, 13 bp, Artificial Sequence
  Oligonucleotide for detection of SNP TSC0016398
ttaagtgggatay

SEQ ID NO: 61650 - DNA, 13 bp, Artificial Sequence
  Oligonucleotide for detection of SNP TSC0016398
rtatcccacttaa

SEQ ID NO: 61651 - DNA, 13 bp, Artificial Sequence
  Oligonucleotide for detection of SNP TSC0016398
ttaagttggatay

SEQ ID NO: 61652 - DNA, 13 bp, Artificial Sequence
  Oligonucleotide for detection of SNP TSC0016398
rtatccaacttaa

SEQ ID NO: 61653 - DNA, 13 bp, Artificial Sequence
  Oligonucleotide for detection of SNP TSC0016398
ttaagtcggatay

SEQ ID NO: 61654 - DNA, 13 bp, Artificial Sequence
  Oligonucleotide for detection of SNP TSC0016398
rtatccgacttaa

SEQ ID NO: 61655 - DNA, 13 bp, Artificial Sequence
  Oligonucleotide for detection of SNP TSC0016399
aaaggtggttttg

SEQ ID NO: 61656 - DNA, 13 bp, Artificial Sequence
  Oligonucleotide for detection of SNP TSC0016399
caaaaccaccttt

SEQ ID NO: 61657 - DNA, 13 bp, Artificial Sequence
  Oligonucleotide for detection of SNP TSC0016399
aaaggtagttttg

SEQ ID NO: 61658 - DNA, 13 bp, Artificial Sequence
  Oligonucleotide for detection of SNP TSC0016399
caaaactaccttt

SEQ ID NO: 61659 - DNA, 13 bp, Artificial Sequence
  Oligonucleotide for detection of SNP TSC0016400
gaaaagtgggggy

SEQ ID NO: 61660 - DNA, 13 bp, Artificial Sequence
  Oligonucleotide for detection of SNP TSC0016400
rcccccacttttc

SEQ ID NO: 61661 - DNA, 13 bp, Artificial Sequence
  Oligonucleotide for detection of SNP TSC0016400
gaaaagcgggggy

SEQ ID NO: 61662 - DNA, 13 bp, Artificial Sequence
  Oligonucleotide for detection of SNP TSC0016400
rcccccgcttttc

SEQ ID NO: 61663 - DNA, 13 bp, Artificial Sequence
  Oligonucleotide for detection of SNP TSC0016401
tttttgaagttgy

SEQ ID NO: 61664 - DNA, 13 bp, Artificial Sequence
  Oligonucleotide for detection of SNP TSC0016401
rcaacttcaaaaa

SEQ ID NO: 61665 - DNA, 13 bp, Artificial Sequence
  Oligonucleotide for detection of SNP TSC0016401
tttttgtagttgy

SEQ ID NO: 61666 - DNA, 13 bp, Artificial Sequence
  Oligonucleotide for detection of SNP TSC0016401
rcaactacaaaaa

SEQ ID NO: 61667 - DNA, 13 bp, Artificial Sequence
  Oligonucleotide for detection of SNP TSC0016401
ttttcgaagttgy

SEQ ID NO: 61668 - DNA, 13 bp, Artificial Sequence
  Oligonucleotide for detection of SNP TSC0016401
rcaacttcgaaaa

SEQ ID NO: 61669 - DNA, 13 bp, Artificial Sequence
  Oligonucleotide for detection of SNP TSC0016401
ttttcgtagttgy

SEQ ID NO: 61670 - DNA, 13 bp, Artificial Sequence
  Oligonucleotide for detection of SNP TSC0016401
rcaactacgaaaa

SEQ ID NO: 61671 - DNA, 13 bp, Artificial Sequence
  Oligonucleotide for detection of SNP TSC0016401
gtaattttgggaa

SEQ ID NO: 61672 - DNA, 13 bp, Artificial Sequence
  Oligonucleotide for detection of SNP TSC0016401
ttcccaaaattac

SEQ ID NO: 61673 - DNA, 13 bp, Artificial Sequence
  Oligonucleotide for detection of SNP TSC0016401
gtaattgtgggaa

SEQ ID NO: 61674 - DNA, 13 bp, Artificial Sequence
  Oligonucleotide for detection of SNP TSC0016401
ttcccacaattac

SEQ ID NO: 61675 - DNA, 13 bp, Artificial Sequence
  Oligonucleotide for detection of SNP TSC0016401
gtaatttcgggaa

SEQ ID NO: 61676 - DNA, 13 bp, Artificial Sequence
  Oligonucleotide for detection of SNP TSC0016401
ttcccgaaattac

SEQ ID NO: 61677 - DNA, 13 bp, Artificial Sequence
  Oligonucleotide for detection of SNP TSC0016401
gtaattgcgggaa

SEQ ID NO: 61678 - DNA, 13 bp, Artificial Sequence
  Oligonucleotide for detection of SNP TSC0016401
ttcccgcaattac

SEQ ID NO: 61679 - DNA, 13 bp, Artificial Sequence
  Oligonucleotide for detection of SNP TSC0016404
gtattaattttta

SEQ ID NO: 61680 - DNA, 13 bp, Artificial Sequence
  Oligonucleotide for detection of SNP TSC0016404
taaaaattaatac

SEQ ID NO: 61681 - DNA, 13 bp, Artificial Sequence
  Oligonucleotide for detection of SNP TSC0016404
gtattatttttta

SEQ ID NO: 61682 - DNA, 13 bp, Artificial Sequence
  Oligonucleotide for detection of SNP TSC0016404
taaaaaataatac

SEQ ID NO: 61683 - DNA, 13 bp, Artificial Sequence
  Oligonucleotide for detection of SNP TSC0016404
tgagaattgatay

SEQ ID NO: 61684 - DNA, 13 bp, Artificial Sequence
  Oligonucleotide for detection of SNP TSC0016404
rtatcaattctca

SEQ ID NO: 61685 - DNA, 13 bp, Artificial Sequence
  Oligonucleotide for detection of SNP TSC0016404
tgagaagtgatay

SEQ ID NO: 61686 - DNA, 13 bp, Artificial Sequence
  Oligonucleotide for detection of SNP TSC0016404
rtatcacttctca

SEQ ID NO: 61687 - DNA, 13 bp, Artificial Sequence
  Oligonucleotide for detection of SNP TSC0016405
tttataaatgatg

SEQ ID NO: 61688 - DNA, 13 bp, Artificial Sequence
  Oligonucleotide for detection of SNP TSC0016405
catcatttataaa

SEQ ID NO: 61689 - DNA, 13 bp, Artificial Sequence
  Oligonucleotide for detection of SNP TSC0016405
tttatagatgatg

SEQ ID NO: 61690 - DNA, 13 bp, Artificial Sequence
  Oligonucleotide for detection of SNP TSC0016405
catcatctataaa

SEQ ID NO: 61691 - DNA, 13 bp, Artificial Sequence
  Oligonucleotide for detection of SNP TSC0016406
ggggtataggttt

SEQ ID NO: 61692 - DNA, 13 bp, Artificial Sequence
  Oligonucleotide for detection of SNP TSC0016406
aaacctatacccc

SEQ ID NO: 61693 - DNA, 13 bp, Artificial Sequence
  Oligonucleotide for detection of SNP TSC0016406
ggggtagaggttt

SEQ ID NO: 61694 - DNA, 13 bp, Artificial Sequence
  Oligonucleotide for detection of SNP TSC0016406
aaacctctacccc

SEQ ID NO: 61695 - DNA, 13 bp, Artificial Sequence
  Oligonucleotide for detection of SNP TSC0016406
aggtttgtgttty

SEQ ID NO: 61696 - DNA, 13 bp, Artificial Sequence
  Oligonucleotide for detection of SNP TSC0016406
raaacacaaacct

SEQ ID NO: 61697 - DNA, 13 bp, Artificial Sequence
  Oligonucleotide for detection of SNP TSC0016406
aggtttttgttty

SEQ ID NO: 61698 - DNA, 13 bp, Artificial Sequence
  Oligonucleotide for detection of SNP TSC0016406
raaacaaaaacct

SEQ ID NO: 61699 - DNA, 13 bp, Artificial Sequence
  Oligonucleotide for detection of SNP TSC0016407
tatattgagtttg

SEQ ID NO: 61700 - DNA, 13 bp, Artificial Sequence
  Oligonucleotide for detection of SNP TSC0016407
caaactcaatata

SEQ ID NO: 61701 - DNA, 13 bp, Artificial Sequence
  Oligonucleotide for detection of SNP TSC0016407
tatattaagtttg

SEQ ID NO: 61702 - DNA, 13 bp, Artificial Sequence
  Oligonucleotide for detection of SNP TSC0016407
caaacttaatata

SEQ ID NO: 61703 - DNA, 13 bp, Artificial Sequence
  Oligonucleotide for detection of SNP TSC0016408
tttgatagggttg

SEQ ID NO: 61704 - DNA, 13 bp, Artificial Sequence
  Oligonucleotide for detection of SNP TSC0016408
caaccctatcaaa

SEQ ID NO: 61705 - DNA, 13 bp, Artificial Sequence
  Oligonucleotide for detection of SNP TSC0016408
tttgatggggttg

SEQ ID NO: 61706 - DNA, 13 bp, Artificial Sequence
  Oligonucleotide for detection of SNP TSC0016408
caaccccatcaaa

SEQ ID NO: 61707 - DNA, 13 bp, Artificial Sequence
  Oligonucleotide for detection of SNP TSC0016408
tttgacggggttg

SEQ ID NO: 61708 - DNA, 13 bp, Artificial Sequence
  Oligonucleotide for detection of SNP TSC0016408
caaccccgtcaaa

SEQ ID NO: 61709 - DNA, 13 bp, Artificial Sequence
  Oligonucleotide for detection of SNP TSC0016408
tagttttgttaaa

SEQ ID NO: 61710 - DNA, 13 bp, Artificial Sequence
  Oligonucleotide for detection of SNP TSC0016408
tttaacaaaacta

SEQ ID NO: 61711 - DNA, 13 bp, Artificial Sequence
  Oligonucleotide for detection of SNP TSC0016408
tagtttcgttaaa

SEQ ID NO: 61712 - DNA, 13 bp, Artificial Sequence
  Oligonucleotide for detection of SNP TSC0016408
tttaacgaaacta

SEQ ID NO: 61713 - DNA, 13 bp, Artificial Sequence
  Oligonucleotide for detection of SNP TSC0016410
tgaggttgggaga

SEQ ID NO: 61714 - DNA, 13 bp, Artificial Sequence
  Oligonucleotide for detection of SNP TSC0016410
tctcccaacctca

SEQ ID NO: 61715 - DNA, 13 bp, Artificial Sequence
  Oligonucleotide for detection of SNP TSC0016410
tgaggtcgggaga

SEQ ID NO: 61716 - DNA, 13 bp, Artificial Sequence
  Oligonucleotide for detection of SNP TSC0016410
tctcccgacctca

SEQ ID NO: 61717 - DNA, 13 bp, Artificial Sequence
  Oligonucleotide for detection of SNP TSC0016410
ttttttaatttta

SEQ ID NO: 61718 - DNA, 13 bp, Artificial Sequence
  Oligonucleotide for detection of SNP TSC0016410
taaaattaaaaaa

SEQ ID NO: 61719 - DNA, 13 bp, Artificial Sequence
  Oligonucleotide for detection of SNP TSC0016410
tttttcgatttta

SEQ ID NO: 61720 - DNA, 13 bp, Artificial Sequence
  Oligonucleotide for detection of SNP TSC0016410
taaaatcgaaaaa

SEQ ID NO: 61721 - DNA, 13 bp, Artificial Sequence
  Oligonucleotide for detection of SNP TSC0016411
aaaaatataaaaa

SEQ ID NO: 61722 - DNA, 13 bp, Artificial Sequence
  Oligonucleotide for detection of SNP TSC0016411
tttttatattttt

SEQ ID NO: 61723 - DNA, 13 bp, Artificial Sequence
  Oligonucleotide for detection of SNP TSC0016411
tttttggattttt

SEQ ID NO: 61724 - DNA, 13 bp, Artificial Sequence
  Oligonucleotide for detection of SNP TSC0016411
aaaaatccaaaaa

SEQ ID NO: 61725 - DNA, 13 bp, Artificial Sequence
  Oligonucleotide for detection of SNP TSC0016412
aaaaaaggtaggg

SEQ ID NO: 61726 - DNA, 13 bp, Artificial Sequence
  Oligonucleotide for detection of SNP TSC0016412
ccctacctttttt

SEQ ID NO: 61727 - DNA, 13 bp, Artificial Sequence
  Oligonucleotide for detection of SNP TSC0016412
aaaaaaagtaggg

SEQ ID NO: 61728 - DNA, 13 bp, Artificial Sequence
  Oligonucleotide for detection of SNP TSC0016412
ccctacttttttt

SEQ ID NO: 61729 - DNA, 13 bp, Artificial Sequence
  Oligonucleotide for detection of SNP TSC0016413
atgaagttaaata

SEQ ID NO: 61730 - DNA, 13 bp, Artificial Sequence
  Oligonucleotide for detection of SNP TSC0016413
tatttaacttcat

SEQ ID NO: 61731 - DNA, 13 bp, Artificial Sequence
  Oligonucleotide for detection of SNP TSC0016413
atgaagataaata

SEQ ID NO: 61732 - DNA, 13 bp, Artificial Sequence
  Oligonucleotide for detection of SNP TSC0016413
tatttatcttcat

SEQ ID NO: 61733 - DNA, 13 bp, Artificial Sequence
  Oligonucleotide for detection of SNP TSC0016414
aatgaagttaaat

SEQ ID NO: 61734 - DNA, 13 bp, Artificial Sequence
  Oligonucleotide for detection of SNP TSC0016414
atttaacttcatt

SEQ ID NO: 61735 - DNA, 13 bp, Artificial Sequence
  Oligonucleotide for detection of SNP TSC0016414
aatgaaattaaat

SEQ ID NO: 61736 - DNA, 13 bp, Artificial Sequence
  Oligonucleotide for detection of SNP TSC0016414
atttaatttcatt

SEQ ID NO: 61737 - DNA, 13 bp, Artificial Sequence
  Oligonucleotide for detection of SNP TSC0016417
gaaggtaggtgag

SEQ ID NO: 61738 - DNA, 13 bp, Artificial Sequence
  Oligonucleotide for detection of SNP TSC0016417
ctcacctaccttc

SEQ ID NO: 61739 - DNA, 13 bp, Artificial Sequence
  Oligonucleotide for detection of SNP TSC0016417
gaaggtgggtgag

SEQ ID NO: 61740 - DNA, 13 bp, Artificial Sequence
  Oligonucleotide for detection of SNP TSC0016417
ctcacccaccttc

SEQ ID NO: 61741 - DNA, 13 bp, Artificial Sequence
  Oligonucleotide for detection of SNP TSC0016417
gaaggcgggtgag

SEQ ID NO: 61742 - DNA, 13 bp, Artificial Sequence
  Oligonucleotide for detection of SNP TSC0016417
ctcacccgccttc

SEQ ID NO: 61743 - DNA, 13 bp, Artificial Sequence
  Oligonucleotide for detection of SNP TSC0016418
ttttatataaaag

SEQ ID NO: 61744 - DNA, 13 bp, Artificial Sequence
  Oligonucleotide for detection of SNP TSC0016418
cttttatataaaa

SEQ ID NO: 61745 - DNA, 13 bp, Artificial Sequence
  Oligonucleotide for detection of SNP TSC0016418
ttttatgtaaaag

SEQ ID NO: 61746 - DNA, 13 bp, Artificial Sequence
  Oligonucleotide for detection of SNP TSC0016418
cttttacataaaa

SEQ ID NO: 61747 - DNA, 13 bp, Artificial Sequence
  Oligonucleotide for detection of SNP TSC0016418
ttttacgtaaaag

SEQ ID NO: 61748 - DNA, 13 bp, Artificial Sequence
  Oligonucleotide for detection of SNP TSC0016418
cttttacgtaaaa

SEQ ID NO: 61749 - DNA, 13 bp, Artificial Sequence
  Oligonucleotide for detection of SNP TSC0016418
tttttatgtagag

SEQ ID NO: 61750 - DNA, 13 bp, Artificial Sequence
  Oligonucleotide for detection of SNP TSC0016418
ctctacataaaaa

SEQ ID NO: 61751 - DNA, 13 bp, Artificial Sequence
  Oligonucleotide for detection of SNP TSC0016418
tttttacgtagag

SEQ ID NO: 61752 - DNA, 13 bp, Artificial Sequence
  Oligonucleotide for detection of SNP TSC0016418
ctctacgtaaaaa

SEQ ID NO: 61753 - DNA, 13 bp, Artificial Sequence
  Oligonucleotide for detection of SNP TSC0016421
agtttaaaattty

SEQ ID NO: 61754 - DNA, 13 bp, Artificial Sequence
  Oligonucleotide for detection of SNP TSC0016421
raaattttaaact

SEQ ID NO: 61755 - DNA, 13 bp, Artificial Sequence
  Oligonucleotide for detection of SNP TSC0016421
agtttagaattty

SEQ ID NO: 61756 - DNA, 13 bp, Artificial Sequence
  Oligonucleotide for detection of SNP TSC0016421
raaattctaaact

SEQ ID NO: 61757 - DNA, 13 bp, Artificial Sequence
  Oligonucleotide for detection of SNP TSC0016422
aggtagatggatt

SEQ ID NO: 61758 - DNA, 13 bp, Artificial Sequence
  Oligonucleotide for detection of SNP TSC0016422
aatccatctacct

SEQ ID NO: 61759 - DNA, 13 bp, Artificial Sequence
  Oligonucleotide for detection of SNP TSC0016422
aggtaggtggatt

SEQ ID NO: 61760 - DNA, 13 bp, Artificial Sequence
  Oligonucleotide for detection of SNP TSC0016422
aatccacctacct

SEQ ID NO: 61761 - DNA, 13 bp, Artificial Sequence
  Oligonucleotide for detection of SNP TSC0016422
aggtagacggatt

SEQ ID NO: 61762 - DNA, 13 bp, Artificial Sequence
  Oligonucleotide for detection of SNP TSC0016422
aatccgtctacct

SEQ ID NO: 61763 - DNA, 13 bp, Artificial Sequence
  Oligonucleotide for detection of SNP TSC0016422
aggtaggcggatt

SEQ ID NO: 61764 - DNA, 13 bp, Artificial Sequence
  Oligonucleotide for detection of SNP TSC0016422
aatccgcctacct

SEQ ID NO: 61765 - DNA, 13 bp, Artificial Sequence
  Oligonucleotide for detection of SNP TSC0016423
ggtagatggattg

SEQ ID NO: 61766 - DNA, 13 bp, Artificial Sequence
  Oligonucleotide for detection of SNP TSC0016423
caatccatctacc

SEQ ID NO: 61767 - DNA, 13 bp, Artificial Sequence
  Oligonucleotide for detection of SNP TSC0016423
ggtagacggattg

SEQ ID NO: 61768 - DNA, 13 bp, Artificial Sequence
  Oligonucleotide for detection of SNP TSC0016423
caatccgtctacc

SEQ ID NO: 61769 - DNA, 13 bp, Artificial Sequence
  Oligonucleotide for detection of SNP TSC0016423
taatttgtttgty

SEQ ID NO: 61770 - DNA, 13 bp, Artificial Sequence
  Oligonucleotide for detection of SNP TSC0016423
racaaacaaatta

SEQ ID NO: 61771 - DNA, 13 bp, Artificial Sequence
  Oligonucleotide for detection of SNP TSC0016423
taatttatttgty

SEQ ID NO: 61772 - DNA, 13 bp, Artificial Sequence
  Oligonucleotide for detection of SNP TSC0016423
racaaataaatta

SEQ ID NO: 61773 - DNA, 13 bp, Artificial Sequence
  Oligonucleotide for detection of SNP TSC0016423
taattcgtttgty

SEQ ID NO: 61774 - DNA, 13 bp, Artificial Sequence
  Oligonucleotide for detection of SNP TSC0016423
racaaacgaatta

SEQ ID NO: 61775 - DNA, 13 bp, Artificial Sequence
  Oligonucleotide for detection of SNP TSC0016424
tgaaattaatagt

SEQ ID NO: 61776 - DNA, 13 bp, Artificial Sequence
  Oligonucleotide for detection of SNP TSC0016424
actattaatttca

SEQ ID NO: 61777 - DNA, 13 bp, Artificial Sequence
  Oligonucleotide for detection of SNP TSC0016424
tgaaatgaatagt

SEQ ID NO: 61778 - DNA, 13 bp, Artificial Sequence
  Oligonucleotide for detection of SNP TSC0016424
actattcatttca

SEQ ID NO: 61779 - DNA, 13 bp, Artificial Sequence
  Oligonucleotide for detection of SNP TSC0016424
tgaaacgaatagt

SEQ ID NO: 61780 - DNA, 13 bp, Artificial Sequence
  Oligonucleotide for detection of SNP TSC0016424
actattcgtttca

SEQ ID NO: 61781 - DNA, 13 bp, Artificial Sequence
  Oligonucleotide for detection of SNP TSC0016424
attattggtttta

SEQ ID NO: 61782 - DNA, 13 bp, Artificial Sequence
  Oligonucleotide for detection of SNP TSC0016424
taaaaccaataat

SEQ ID NO: 61783 - DNA, 13 bp, Artificial Sequence
  Oligonucleotide for detection of SNP TSC0016424
attatttgtttta

SEQ ID NO: 61784 - DNA, 13 bp, Artificial Sequence
  Oligonucleotide for detection of SNP TSC0016424
taaaacaaataat

SEQ ID NO: 61785 - DNA, 13 bp, Artificial Sequence
  Oligonucleotide for detection of SNP TSC0016424
attattcgtttta

SEQ ID NO: 61786 - DNA, 13 bp, Artificial Sequence
  Oligonucleotide for detection of SNP TSC0016424
taaaacgaataat

SEQ ID NO: 61787 - DNA, 13 bp, Artificial Sequence
  Oligonucleotide for detection of SNP TSC0016425
atatgtgaatgtt

SEQ ID NO: 61788 - DNA, 13 bp, Artificial Sequence
  Oligonucleotide for detection of SNP TSC0016425
aacattcacatat

SEQ ID NO: 61789 - DNA, 13 bp, Artificial Sequence
  Oligonucleotide for detection of SNP TSC0016425
atatgtaaatgtt

SEQ ID NO: 61790 - DNA, 13 bp, Artificial Sequence
  Oligonucleotide for detection of SNP TSC0016425
aacatttacatat

SEQ ID NO: 61791 - DNA, 13 bp, Artificial Sequence
  Oligonucleotide for detection of SNP TSC0016427
ttatttaggttgg

SEQ ID NO: 61792 - DNA, 13 bp, Artificial Sequence
  Oligonucleotide for detection of SNP TSC0016427
ccaacctaaataa

SEQ ID NO: 61793 - DNA, 13 bp, Artificial Sequence
  Oligonucleotide for detection of SNP TSC0016427
ttatttgggttgg

SEQ ID NO: 61794 - DNA, 13 bp, Artificial Sequence
  Oligonucleotide for detection of SNP TSC0016427
ccaacccaaataa

SEQ ID NO: 61795 - DNA, 13 bp, Artificial Sequence
  Oligonucleotide for detection of SNP TSC0016427
ttattcgggttgg

SEQ ID NO: 61796 - DNA, 13 bp, Artificial Sequence
  Oligonucleotide for detection of SNP TSC0016427
ccaacccgaataa

SEQ ID NO: 61797 - DNA, 13 bp, Artificial Sequence
  Oligonucleotide for detection of SNP TSC0016427
ttagtttgggtga

SEQ ID NO: 61798 - DNA, 13 bp, Artificial Sequence
  Oligonucleotide for detection of SNP TSC0016427
tcacccaaactaa

SEQ ID NO: 61799 - DNA, 13 bp, Artificial Sequence
  Oligonucleotide for detection of SNP TSC0016427
ttagttcgggtga

SEQ ID NO: 61800 - DNA, 13 bp, Artificial Sequence
  Oligonucleotide for detection of SNP TSC0016427
tcacccgaactaa

SEQ ID NO: 61801 - DNA, 13 bp, Artificial Sequence
  Oligonucleotide for detection of SNP TSC0016428
agagttaatattt

SEQ ID NO: 61802 - DNA, 13 bp, Artificial Sequence
  Oligonucleotide for detection of SNP TSC0016428
aaatattaactct

SEQ ID NO: 61803 - DNA, 13 bp, Artificial Sequence
  Oligonucleotide for detection of SNP TSC0016428
agagtttatattt

SEQ ID NO: 61804 - DNA, 13 bp, Artificial Sequence
  Oligonucleotide for detection of SNP TSC0016428
aaatataaactct

SEQ ID NO: 61805 - DNA, 13 bp, Artificial Sequence
  Oligonucleotide for detection of SNP TSC0016428
aaatgttggtttt

SEQ ID NO: 61806 - DNA, 13 bp, Artificial Sequence
  Oligonucleotide for detection of SNP TSC0016428
aaaaccaacattt

SEQ ID NO: 61807 - DNA, 13 bp, Artificial Sequence
  Oligonucleotide for detection of SNP TSC0016428
aaatgtgggtttt

SEQ ID NO: 61808 - DNA, 13 bp, Artificial Sequence
  Oligonucleotide for detection of SNP TSC0016428
aaaacccacattt

SEQ ID NO: 61809 - DNA, 13 bp, Artificial Sequence
  Oligonucleotide for detection of SNP TSC0016429
agattagtattty

SEQ ID NO: 61810 - DNA, 13 bp, Artificial Sequence
  Oligonucleotide for detection of SNP TSC0016429
raaatactaatct

SEQ ID NO: 61811 - DNA, 13 bp, Artificial Sequence
  Oligonucleotide for detection of SNP TSC0016429
agattaatattty

SEQ ID NO: 61812 - DNA, 13 bp, Artificial Sequence
  Oligonucleotide for detection of SNP TSC0016429
raaatattaatct

SEQ ID NO: 61813 - DNA, 13 bp, Artificial Sequence
  Oligonucleotide for detection of SNP TSC0016430
agttgtttatgag

SEQ ID NO: 61814 - DNA, 13 bp, Artificial Sequence
  Oligonucleotide for detection of SNP TSC0016430
ctcataaacaact

SEQ ID NO: 61815 - DNA, 13 bp, Artificial Sequence
  Oligonucleotide for detection of SNP TSC0016430
agttgtgtatgag

SEQ ID NO: 61816 - DNA, 13 bp, Artificial Sequence
  Oligonucleotide for detection of SNP TSC0016430
ctcatacacaact

SEQ ID NO: 61817 - DNA, 13 bp, Artificial Sequence
  Oligonucleotide for detection of SNP TSC0016430
tttatagataatt

SEQ ID NO: 61818 - DNA, 13 bp, Artificial Sequence
  Oligonucleotide for detection of SNP TSC0016430
aattatctataaa

SEQ ID NO: 61819 - DNA, 13 bp, Artificial Sequence
  Oligonucleotide for detection of SNP TSC0016430
tttatatataatt

SEQ ID NO: 61820 - DNA, 13 bp, Artificial Sequence
  Oligonucleotide for detection of SNP TSC0016430
aattatatataaa

SEQ ID NO: 61821 - DNA, 13 bp, Artificial Sequence
  Oligonucleotide for detection of SNP TSC0016431
tgatagtaattat

SEQ ID NO: 61822 - DNA, 13 bp, Artificial Sequence
  Oligonucleotide for detection of SNP TSC0016431
ataattactatca

SEQ ID NO: 61823 - DNA, 13 bp, Artificial Sequence
  Oligonucleotide for detection of SNP TSC0016431
tgataggaattat

SEQ ID NO: 61824 - DNA, 13 bp, Artificial Sequence
  Oligonucleotide for detection of SNP TSC0016431
ataattcctatca

SEQ ID NO: 61825 - DNA, 13 bp, Artificial Sequence
  Oligonucleotide for detection of SNP TSC0016431
atgattgttatta

SEQ ID NO: 61826 - DNA, 13 bp, Artificial Sequence
  Oligonucleotide for detection of SNP TSC0016431
taataacaatcat

SEQ ID NO: 61827 - DNA, 13 bp, Artificial Sequence
  Oligonucleotide for detection of SNP TSC0016431
atgatttttatta

SEQ ID NO: 61828 - DNA, 13 bp, Artificial Sequence
  Oligonucleotide for detection of SNP TSC0016431
taataaaaatcat

SEQ ID NO: 61829 - DNA, 13 bp, Artificial Sequence
  Oligonucleotide for detection of SNP TSC0016433
ttttgtattgggy

SEQ ID NO: 61830 - DNA, 13 bp, Artificial Sequence
  Oligonucleotide for detection of SNP TSC0016433
rcccaatacaaaa

SEQ ID NO: 61831 - DNA, 13 bp, Artificial Sequence
  Oligonucleotide for detection of SNP TSC0016433
ttttgttttgggy

SEQ ID NO: 61832 - DNA, 13 bp, Artificial Sequence
  Oligonucleotide for detection of SNP TSC0016433
rcccaaaacaaaa

SEQ ID NO: 61833 - DNA, 13 bp, Artificial Sequence
  Oligonucleotide for detection of SNP TSC0016433
gtttagtgtaaag

SEQ ID NO: 61834 - DNA, 13 bp, Artificial Sequence
  Oligonucleotide for detection of SNP TSC0016433
ctttacactaaac

SEQ ID NO: 61835 - DNA, 13 bp, Artificial Sequence
  Oligonucleotide for detection of SNP TSC0016433
gtttagagtaaag

SEQ ID NO: 61836 - DNA, 13 bp, Artificial Sequence
  Oligonucleotide for detection of SNP TSC0016433
ctttactctaaac

SEQ ID NO: 61837 - DNA, 13 bp, Artificial Sequence
  Oligonucleotide for detection of SNP TSC0016434
ttgttggtttttg

SEQ ID NO: 61838 - DNA, 13 bp, Artificial Sequence
  Oligonucleotide for detection of SNP TSC0016434
caaaaaccaacaa

SEQ ID NO: 61839 - DNA, 13 bp, Artificial Sequence
  Oligonucleotide for detection of SNP TSC0016434
ttgttgttttttg

SEQ ID NO: 61840 - DNA, 13 bp, Artificial Sequence
  Oligonucleotide for detection of SNP TSC0016434
caaaaaacaacaa

SEQ ID NO: 61841 - DNA, 13 bp, Artificial Sequence
  Oligonucleotide for detection of SNP TSC0016434
taaggattaataa

SEQ ID NO: 61842 - DNA, 13 bp, Artificial Sequence
  Oligonucleotide for detection of SNP TSC0016434
ttattaatcctta

SEQ ID NO: 61843 - DNA, 13 bp, Artificial Sequence
  Oligonucleotide for detection of SNP TSC0016434
taaggaataataa

SEQ ID NO: 61844 - DNA, 13 bp, Artificial Sequence
  Oligonucleotide for detection of SNP TSC0016434
ttattattcctta

SEQ ID NO: 61845 - DNA, 13 bp, Artificial Sequence
  Oligonucleotide for detection of SNP TSC0016435
taagaagtgttaa

SEQ ID NO: 61846 - DNA, 13 bp, Artificial Sequence
  Oligonucleotide for detection of SNP TSC0016435
ttaacacttctta

SEQ ID NO: 61847 - DNA, 13 bp, Artificial Sequence
  Oligonucleotide for detection of SNP TSC0016435
taagaaatgttaa

SEQ ID NO: 61848 - DNA, 13 bp, Artificial Sequence
  Oligonucleotide for detection of SNP TSC0016435
ttaacatttctta

SEQ ID NO: 61849 - DNA, 13 bp, Artificial Sequence
  Oligonucleotide for detection of SNP TSC0016436
ttaaaattgtatt

SEQ ID NO: 61850 - DNA, 13 bp, Artificial Sequence
  Oligonucleotide for detection of SNP TSC0016436
aatacaattttaa

SEQ ID NO: 61851 - DNA, 13 bp, Artificial Sequence
  Oligonucleotide for detection of SNP TSC0016436
ttaaaagtgtatt

SEQ ID NO: 61852 - DNA, 13 bp, Artificial Sequence
  Oligonucleotide for detection of SNP TSC0016436
aatacacttttaa

SEQ ID NO: 61853 - DNA, 13 bp, Artificial Sequence
  Oligonucleotide for detection of SNP TSC0016436
agtgtagttttaa

SEQ ID NO: 61854 - DNA, 13 bp, Artificial Sequence
  Oligonucleotide for detection of SNP TSC0016436
ttaaaactacact

SEQ ID NO: 61855 - DNA, 13 bp, Artificial Sequence
  Oligonucleotide for detection of SNP TSC0016436
agtgtatttttaa

SEQ ID NO: 61856 - DNA, 13 bp, Artificial Sequence
  Oligonucleotide for detection of SNP TSC0016436
ttaaaaatacact

SEQ ID NO: 61857 - DNA, 13 bp, Artificial Sequence
  Oligonucleotide for detection of SNP TSC0016437
tgtttaattttty

SEQ ID NO: 61858 - DNA, 13 bp, Artificial Sequence
  Oligonucleotide for detection of SNP TSC0016437
raaaaattaaaca

SEQ ID NO: 61859 - DNA, 13 bp, Artificial Sequence
  Oligonucleotide for detection of SNP TSC0016437
tgtttagttttty

SEQ ID NO: 61860 - DNA, 13 bp, Artificial Sequence
  Oligonucleotide for detection of SNP TSC0016437
raaaaactaaaca

SEQ ID NO: 61861 - DNA, 13 bp, Artificial Sequence
  Oligonucleotide for detection of SNP TSC0016438
tttaaagttaaaa

SEQ ID NO: 61862 - DNA, 13 bp, Artificial Sequence
  Oligonucleotide for detection of SNP TSC0016438
ttttaactttaaa

SEQ ID NO: 61863 - DNA, 13 bp, Artificial Sequence
  Oligonucleotide for detection of SNP TSC0016440
gtttgttgatgaa

SEQ ID NO: 61864 - DNA, 13 bp, Artificial Sequence
  Oligonucleotide for detection of SNP TSC0016440
ttcatcaacaaac

SEQ ID NO: 61865 - DNA, 13 bp, Artificial Sequence
  Oligonucleotide for detection of SNP TSC0016440
gtttgtcgatgaa

SEQ ID NO: 61866 - DNA, 13 bp, Artificial Sequence
  Oligonucleotide for detection of SNP TSC0016440
ttcatcgacaaac

SEQ ID NO: 61867 - DNA, 13 bp, Artificial Sequence
  Oligonucleotide for detection of SNP TSC0016440
tttattggtaaay

SEQ ID NO: 61868 - DNA, 13 bp, Artificial Sequence
  Oligonucleotide for detection of SNP TSC0016440
rtttaccaataaa

SEQ ID NO: 61869 - DNA, 13 bp, Artificial Sequence
  Oligonucleotide for detection of SNP TSC0016440
tttattagtaaay

SEQ ID NO: 61870 - DNA, 13 bp, Artificial Sequence
  Oligonucleotide for detection of SNP TSC0016440
rtttactaataaa

SEQ ID NO: 61871 - DNA, 13 bp, Artificial Sequence
  Oligonucleotide for detection of SNP TSC0016440
tttatcggtaaay

SEQ ID NO: 61872 - DNA, 13 bp, Artificial Sequence
  Oligonucleotide for detection of SNP TSC0016440
rtttaccgataaa

SEQ ID NO: 61873 - DNA, 13 bp, Artificial Sequence
  Oligonucleotide for detection of SNP TSC0016441
gtgtatatgtaga

SEQ ID NO: 61874 - DNA, 13 bp, Artificial Sequence
  Oligonucleotide for detection of SNP TSC0016441
tctacatatacac

SEQ ID NO: 61875 - DNA, 13 bp, Artificial Sequence
  Oligonucleotide for detection of SNP TSC0016441
gtgtatgtgtaga

SEQ ID NO: 61876 - DNA, 13 bp, Artificial Sequence
  Oligonucleotide for detection of SNP TSC0016441
tctacacatacac

SEQ ID NO: 61877 - DNA, 13 bp, Artificial Sequence
  Oligonucleotide for detection of SNP TSC0016441
gtgtacgtgtaga

SEQ ID NO: 61878 - DNA, 13 bp, Artificial Sequence
  Oligonucleotide for detection of SNP TSC0016441
tctacacgtacac

SEQ ID NO: 61879 - DNA, 13 bp, Artificial Sequence
  Oligonucleotide for detection of SNP TSC0016441
tttatatgtgtay

SEQ ID NO: 61880 - DNA, 13 bp, Artificial Sequence
  Oligonucleotide for detection of SNP TSC0016441
rtacacatataaa

SEQ ID NO: 61881 - DNA, 13 bp, Artificial Sequence
  Oligonucleotide for detection of SNP TSC0016441
tttatacgtgtay

SEQ ID NO: 61882 - DNA, 13 bp, Artificial Sequence
  Oligonucleotide for detection of SNP TSC0016441
rtacacgtataaa

SEQ ID NO: 61883 - DNA, 13 bp, Artificial Sequence
  Oligonucleotide for detection of SNP TSC0016443
tatagagtgtgty

SEQ ID NO: 61884 - DNA, 13 bp, Artificial Sequence
  Oligonucleotide for detection of SNP TSC0016443
racacactctata

SEQ ID NO: 61885 - DNA, 13 bp, Artificial Sequence
  Oligonucleotide for detection of SNP TSC0016443
tatagaatgtgty

SEQ ID NO: 61886 - DNA, 13 bp, Artificial Sequence
  Oligonucleotide for detection of SNP TSC0016443
racacattctata

SEQ ID NO: 61887 - DNA, 13 bp, Artificial Sequence
  Oligonucleotide for detection of SNP TSC0016444
tgggaatgtggga

SEQ ID NO: 61888 - DNA, 13 bp, Artificial Sequence
  Oligonucleotide for detection of SNP TSC0016444
tcccacattccca

SEQ ID NO: 61889 - DNA, 13 bp, Artificial Sequence
  Oligonucleotide for detection of SNP TSC0016444
tgggaacgtggga

SEQ ID NO: 61890 - DNA, 13 bp, Artificial Sequence
  Oligonucleotide for detection of SNP TSC0016444
tcccacgttccca

SEQ ID NO: 61891 - DNA, 13 bp, Artificial Sequence
  Oligonucleotide for detection of SNP TSC0016446
gtgatttgaaagy

SEQ ID NO: 61892 - DNA, 13 bp, Artificial Sequence
  Oligonucleotide for detection of SNP TSC0016446
rctttcaaatcac

SEQ ID NO: 61893 - DNA, 13 bp, Artificial Sequence
  Oligonucleotide for detection of SNP TSC0016446
gtgattcgaaagy

SEQ ID NO: 61894 - DNA, 13 bp, Artificial Sequence
  Oligonucleotide for detection of SNP TSC0016446
rctttcgaatcac

SEQ ID NO: 61895 - DNA, 13 bp, Artificial Sequence
  Oligonucleotide for detection of SNP TSC0016446
gtttttgagttay

SEQ ID NO: 61896 - DNA, 13 bp, Artificial Sequence
  Oligonucleotide for detection of SNP TSC0016446
rtaactcaaaaac

SEQ ID NO: 61897 - DNA, 13 bp, Artificial Sequence
  Oligonucleotide for detection of SNP TSC0016446
gtttttaagttay

SEQ ID NO: 61898 - DNA, 13 bp, Artificial Sequence
  Oligonucleotide for detection of SNP TSC0016446
rtaacttaaaaac

SEQ ID NO: 61899 - DNA, 13 bp, Artificial Sequence
  Oligonucleotide for detection of SNP TSC0016446
gttttcgagttay

SEQ ID NO: 61900 - DNA, 13 bp, Artificial Sequence
  Oligonucleotide for detection of SNP TSC0016446
rtaactcgaaaac

SEQ ID NO: 61901 - DNA, 13 bp, Artificial Sequence
  Oligonucleotide for detection of SNP TSC0016447
tttttaagttttg

SEQ ID NO: 61902 - DNA, 13 bp, Artificial Sequence
  Oligonucleotide for detection of SNP TSC0016447
caaaacttaaaaa

SEQ ID NO: 61903 - DNA, 13 bp, Artificial Sequence
  Oligonucleotide for detection of SNP TSC0016447
tttttaggttttg

SEQ ID NO: 61904 - DNA, 13 bp, Artificial Sequence
  Oligonucleotide for detection of SNP TSC0016447
caaaacctaaaaa

SEQ ID NO: 61905 - DNA, 13 bp, Artificial Sequence
  Oligonucleotide for detection of SNP TSC0016453
gtgtttgtagtag

SEQ ID NO: 61906 - DNA, 13 bp, Artificial Sequence
  Oligonucleotide for detection of SNP TSC0016453
ctactacaaacac

SEQ ID NO: 61907 - DNA, 13 bp, Artificial Sequence
  Oligonucleotide for detection of SNP TSC0016453
gtgtttatagtag

SEQ ID NO: 61908 - DNA, 13 bp, Artificial Sequence
  Oligonucleotide for detection of SNP TSC0016453
ctactataaacac

SEQ ID NO: 61909 - DNA, 13 bp, Artificial Sequence
  Oligonucleotide for detection of SNP TSC0016454
gaattttgatttt

SEQ ID NO: 61910 - DNA, 13 bp, Artificial Sequence
  Oligonucleotide for detection of SNP TSC0016454
aaaatcaaaattc

SEQ ID NO: 61911 - DNA, 13 bp, Artificial Sequence
  Oligonucleotide for detection of SNP TSC0016454
gaatttcgatttt

SEQ ID NO: 61912 - DNA, 13 bp, Artificial Sequence
  Oligonucleotide for detection of SNP TSC0016454
aaaatcgaaattc

SEQ ID NO: 61913 - DNA, 13 bp, Artificial Sequence
  Oligonucleotide for detection of SNP TSC0016454
agggttgggatty

SEQ ID NO: 61914 - DNA, 13 bp, Artificial Sequence
  Oligonucleotide for detection of SNP TSC0016454
raatcccaaccct

SEQ ID NO: 61915 - DNA, 13 bp, Artificial Sequence
  Oligonucleotide for detection of SNP TSC0016454
agggttaggatty

SEQ ID NO: 61916 - DNA, 13 bp, Artificial Sequence
  Oligonucleotide for detection of SNP TSC0016454
raatcctaaccct

SEQ ID NO: 61917 - DNA, 13 bp, Artificial Sequence
  Oligonucleotide for detection of SNP TSC0016454
agggtcgggatty

SEQ ID NO: 61918 - DNA, 13 bp, Artificial Sequence
  Oligonucleotide for detection of SNP TSC0016454
raatcccgaccct

SEQ ID NO: 61919 - DNA, 13 bp, Artificial Sequence
  Oligonucleotide for detection of SNP TSC0016458
attttagaggaat

SEQ ID NO: 61920 - DNA, 13 bp, Artificial Sequence
  Oligonucleotide for detection of SNP TSC0016458
attcctctaaaat

SEQ ID NO: 61921 - DNA, 13 bp, Artificial Sequence
  Oligonucleotide for detection of SNP TSC0016458
attttaaaggaat

SEQ ID NO: 61922 - DNA, 13 bp, Artificial Sequence
  Oligonucleotide for detection of SNP TSC0016458
attcctttaaaat

SEQ ID NO: 61923 - DNA, 13 bp, Artificial Sequence
  Oligonucleotide for detection of SNP TSC0016459
ttatgtagggtag

SEQ ID NO: 61924 - DNA, 13 bp, Artificial Sequence
  Oligonucleotide for detection of SNP TSC0016459
ctaccctacataa

SEQ ID NO: 61925 - DNA, 13 bp, Artificial Sequence
  Oligonucleotide for detection of SNP TSC0016459
ttatgtggggtag

SEQ ID NO: 61926 - DNA, 13 bp, Artificial Sequence
  Oligonucleotide for detection of SNP TSC0016459
ctaccccacataa

SEQ ID NO: 61927 - DNA, 13 bp, Artificial Sequence
  Oligonucleotide for detection of SNP TSC0016460
ggaaatatggatg

SEQ ID NO: 61928 - DNA, 13 bp, Artificial Sequence
  Oligonucleotide for detection of SNP TSC0016460
catccatatttcc

SEQ ID NO: 61929 - DNA, 13 bp, Artificial Sequence
  Oligonucleotide for detection of SNP TSC0016460
ggaaatgtggatg

SEQ ID NO: 61930 - DNA, 13 bp, Artificial Sequence
  Oligonucleotide for detection of SNP TSC0016460
catccacatttcc

SEQ ID NO: 61931 - DNA, 13 bp, Artificial Sequence
  Oligonucleotide for detection of SNP TSC0016460
ggaaatatggacg

SEQ ID NO: 61932 - DNA, 13 bp, Artificial Sequence
  Oligonucleotide for detection of SNP TSC0016460
cgtccatatttcc

SEQ ID NO: 61933 - DNA, 13 bp, Artificial Sequence
  Oligonucleotide for detection of SNP TSC0016460
ggaaacgtggatg

SEQ ID NO: 61934 - DNA, 13 bp, Artificial Sequence
  Oligonucleotide for detection of SNP TSC0016460
catccacgtttcc

SEQ ID NO: 61935 - DNA, 13 bp, Artificial Sequence
  Oligonucleotide for detection of SNP TSC0016460
ggaaatgtggacg

SEQ ID NO: 61936 - DNA, 13 bp, Artificial Sequence
  Oligonucleotide for detection of SNP TSC0016460
cgtccacatttcc

SEQ ID NO: 61937 - DNA, 13 bp, Artificial Sequence
  Oligonucleotide for detection of SNP TSC0016460
ggaaacgtggacg

SEQ ID NO: 61938 - DNA, 13 bp, Artificial Sequence
  Oligonucleotide for detection of SNP TSC0016460
cgtccacgtttcc

SEQ ID NO: 61939 - DNA, 13 bp, Artificial Sequence
  Oligonucleotide for detection of SNP TSC0016460
tgtttatgtttty

SEQ ID NO: 61940 - DNA, 13 bp, Artificial Sequence
  Oligonucleotide for detection of SNP TSC0016460
raaaacataaaca

SEQ ID NO: 61941 - DNA, 13 bp, Artificial Sequence
  Oligonucleotide for detection of SNP TSC0016460
cgtttatgtttty

SEQ ID NO: 61942 - DNA, 13 bp, Artificial Sequence
  Oligonucleotide for detection of SNP TSC0016460
raaaacataaacg

SEQ ID NO: 61943 - DNA, 13 bp, Artificial Sequence
  Oligonucleotide for detection of SNP TSC0016460
tgtttacgtttty

SEQ ID NO: 61944 - DNA, 13 bp, Artificial Sequence
  Oligonucleotide for detection of SNP TSC0016460
raaaacgtaaaca

SEQ ID NO: 61945 - DNA, 13 bp, Artificial Sequence
  Oligonucleotide for detection of SNP TSC0016460
cgtttacgtttty

SEQ ID NO: 61946 - DNA, 13 bp, Artificial Sequence
  Oligonucleotide for detection of SNP TSC0016460
raaaacgtaaacg

SEQ ID NO: 61947 - DNA, 13 bp, Artificial Sequence
  Oligonucleotide for detection of SNP TSC0016462
tttaaaagataaa

SEQ ID NO: 61948 - DNA, 13 bp, Artificial Sequence
  Oligonucleotide for detection of SNP TSC0016462
tttatcttttaaa

SEQ ID NO: 61949 - DNA, 13 bp, Artificial Sequence
  Oligonucleotide for detection of SNP TSC0016462
tttaaaggataaa

SEQ ID NO: 61950 - DNA, 13 bp, Artificial Sequence
  Oligonucleotide for detection of SNP TSC0016462
tttatcctttaaa

SEQ ID NO: 61951 - DNA, 13 bp, Artificial Sequence
  Oligonucleotide for detection of SNP TSC0016463
ataggtatatagy

SEQ ID NO: 61952 - DNA, 13 bp, Artificial Sequence
  Oligonucleotide for detection of SNP TSC0016463
rctatatacctat

SEQ ID NO: 61953 - DNA, 13 bp, Artificial Sequence
  Oligonucleotide for detection of SNP TSC0016463
ataggtgtatagy

SEQ ID NO: 61954 - DNA, 13 bp, Artificial Sequence
  Oligonucleotide for detection of SNP TSC0016463
rctatacacctat

SEQ ID NO: 61955 - DNA, 13 bp, Artificial Sequence
  Oligonucleotide for detection of SNP TSC0016464
aaagtagatttta

SEQ ID NO: 61956 - DNA, 13 bp, Artificial Sequence
  Oligonucleotide for detection of SNP TSC0016464
taaaatctacttt

SEQ ID NO: 61957 - DNA, 13 bp, Artificial Sequence
  Oligonucleotide for detection of SNP TSC0016464
aaagtaaatttta

SEQ ID NO: 61958 - DNA, 13 bp, Artificial Sequence
  Oligonucleotide for detection of SNP TSC0016464
taaaatttacttt

SEQ ID NO: 61959 - DNA, 13 bp, Artificial Sequence
  Oligonucleotide for detection of SNP TSC0016466
aatattaggttta

SEQ ID NO: 61960 - DNA, 13 bp, Artificial Sequence
  Oligonucleotide for detection of SNP TSC0016466
taaacctaatatt

SEQ ID NO: 61961 - DNA, 13 bp, Artificial Sequence
  Oligonucleotide for detection of SNP TSC0016466
aatatttggttta

SEQ ID NO: 61962 - DNA, 13 bp, Artificial Sequence
  Oligonucleotide for detection of SNP TSC0016466
taaaccaaatatt

SEQ ID NO: 61963 - DNA, 13 bp, Artificial Sequence
  Oligonucleotide for detection of SNP TSC0016466
tgagtttagtgtt

SEQ ID NO: 61964 - DNA, 13 bp, Artificial Sequence
  Oligonucleotide for detection of SNP TSC0016466
aacactaaactca

SEQ ID NO: 61965 - DNA, 13 bp, Artificial Sequence
  Oligonucleotide for detection of SNP TSC0016466
tgagttaagtgtt

SEQ ID NO: 61966 - DNA, 13 bp, Artificial Sequence
  Oligonucleotide for detection of SNP TSC0016466
aacacttaactca

SEQ ID NO: 61967 - DNA, 13 bp, Artificial Sequence
  Oligonucleotide for detection of SNP TSC0016467
ttaagtatgtttg

SEQ ID NO: 61968 - DNA, 13 bp, Artificial Sequence
  Oligonucleotide for detection of SNP TSC0016467
caaacatacttaa

SEQ ID NO: 61969 - DNA, 13 bp, Artificial Sequence
  Oligonucleotide for detection of SNP TSC0016467
ttaagtttgtttg

SEQ ID NO: 61970 - DNA, 13 bp, Artificial Sequence
  Oligonucleotide for detection of SNP TSC0016467
caaacaaacttaa

SEQ ID NO: 61971 - DNA, 13 bp, Artificial Sequence
  Oligonucleotide for detection of SNP TSC0016467
taaatatatttga

SEQ ID NO: 61972 - DNA, 13 bp, Artificial Sequence
  Oligonucleotide for detection of SNP TSC0016467
tcaaatatattta

SEQ ID NO: 61973 - DNA, 13 bp, Artificial Sequence
  Oligonucleotide for detection of SNP TSC0016467
taaataaatttga

SEQ ID NO: 61974 - DNA, 13 bp, Artificial Sequence
  Oligonucleotide for detection of SNP TSC0016467
tcaaatttattta

SEQ ID NO: 61975 - DNA, 13 bp, Artificial Sequence
  Oligonucleotide for detection of SNP TSC0016469
atgttaaaggaat

SEQ ID NO: 61976 - DNA, 13 bp, Artificial Sequence
  Oligonucleotide for detection of SNP TSC0016469
attcctttaacat

SEQ ID NO: 61977 - DNA, 13 bp, Artificial Sequence
  Oligonucleotide for detection of SNP TSC0016469
atgttataggaat

SEQ ID NO: 61978 - DNA, 13 bp, Artificial Sequence
  Oligonucleotide for detection of SNP TSC0016469
attcctataacat

SEQ ID NO: 61979 - DNA, 13 bp, Artificial Sequence
  Oligonucleotide for detection of SNP TSC0016469
atttttttaatat

SEQ ID NO: 61980 - DNA, 13 bp, Artificial Sequence
  Oligonucleotide for detection of SNP TSC0016469
atattaaaaaaat

SEQ ID NO: 61981 - DNA, 13 bp, Artificial Sequence
  Oligonucleotide for detection of SNP TSC0016469
atttttgtaatat

SEQ ID NO: 61982 - DNA, 13 bp, Artificial Sequence
  Oligonucleotide for detection of SNP TSC0016469
atattacaaaaat

SEQ ID NO: 61983 - DNA, 13 bp, Artificial Sequence
  Oligonucleotide for detection of SNP TSC0016471
gatgagggatatt

SEQ ID NO: 61984 - DNA, 13 bp, Artificial Sequence
  Oligonucleotide for detection of SNP TSC0016471
aatatccctcatc

SEQ ID NO: 61985 - DNA, 13 bp, Artificial Sequence
  Oligonucleotide for detection of SNP TSC0016471
gatgagtgatatt

SEQ ID NO: 61986 - DNA, 13 bp, Artificial Sequence
  Oligonucleotide for detection of SNP TSC0016471
aatatcactcatc

SEQ ID NO: 61987 - DNA, 13 bp, Artificial Sequence
  Oligonucleotide for detection of SNP TSC0016471
aatattttttaty

SEQ ID NO: 61988 - DNA, 13 bp, Artificial Sequence
  Oligonucleotide for detection of SNP TSC0016471
rataaaaaatatt

SEQ ID NO: 61989 - DNA, 13 bp, Artificial Sequence
  Oligonucleotide for detection of SNP TSC0016471
aatattatttaty

SEQ ID NO: 61990 - DNA, 13 bp, Artificial Sequence
  Oligonucleotide for detection of SNP TSC0016471
rataaataatatt

SEQ ID NO: 61991 - DNA, 13 bp, Artificial Sequence
  Oligonucleotide for detection of SNP TSC0016472
ttataggttttgy

SEQ ID NO: 61992 - DNA, 13 bp, Artificial Sequence
  Oligonucleotide for detection of SNP TSC0016472
rcaaaacctataa

SEQ ID NO: 61993 - DNA, 13 bp, Artificial Sequence
  Oligonucleotide for detection of SNP TSC0016472
ttatagtttttgy

SEQ ID NO: 61994 - DNA, 13 bp, Artificial Sequence
  Oligonucleotide for detection of SNP TSC0016472
rcaaaaactataa

SEQ ID NO: 61995 - DNA, 13 bp, Artificial Sequence
  Oligonucleotide for detection of SNP TSC0016472
gtagggtttgtaa

SEQ ID NO: 61996 - DNA, 13 bp, Artificial Sequence
  Oligonucleotide for detection of SNP TSC0016472
ttacaaaccctac

SEQ ID NO: 61997 - DNA, 13 bp, Artificial Sequence
  Oligonucleotide for detection of SNP TSC0016472
gtagggattgtaa

SEQ ID NO: 61998 - DNA, 13 bp, Artificial Sequence
  Oligonucleotide for detection of SNP TSC0016472
ttacaatccctac

SEQ ID NO: 61999 - DNA, 13 bp, Artificial Sequence
  Oligonucleotide for detection of SNP TSC0016473
tttttcgttgtty

SEQ ID NO: 62000 - DNA, 13 bp, Artificial Sequence
  Oligonucleotide for detection of SNP TSC0016473
raacaacgaaaaa

SEQ ID NO: 62001 - DNA, 13 bp, Artificial Sequence
  Oligonucleotide for detection of SNP TSC0016473
gggtagtgggaag

SEQ ID NO: 62002 - DNA, 13 bp, Artificial Sequence
  Oligonucleotide for detection of SNP TSC0016473
cttcccactaccc

SEQ ID NO: 62003 - DNA, 13 bp, Artificial Sequence
  Oligonucleotide for detection of SNP TSC0016473
gggtagcgggaag

SEQ ID NO: 62004 - DNA, 13 bp, Artificial Sequence
  Oligonucleotide for detection of SNP TSC0016473
cttcccgctaccc

SEQ ID NO: 62005 - DNA, 13 bp, Artificial Sequence
  Oligonucleotide for detection of SNP TSC0016474
gggaagagttttt

SEQ ID NO: 62006 - DNA, 13 bp, Artificial Sequence
  Oligonucleotide for detection of SNP TSC0016474
aaaaactcttccc

SEQ ID NO: 62007 - DNA, 13 bp, Artificial Sequence
  Oligonucleotide for detection of SNP TSC0016474
gggaagggttttt

SEQ ID NO: 62008 - DNA, 13 bp, Artificial Sequence
  Oligonucleotide for detection of SNP TSC0016474
aaaaacccttccc

SEQ ID NO: 62009 - DNA, 13 bp, Artificial Sequence
  Oligonucleotide for detection of SNP TSC0016475
gttatataaaatt

SEQ ID NO: 62010 - DNA, 13 bp, Artificial Sequence
  Oligonucleotide for detection of SNP TSC0016475
aattttatataac

SEQ ID NO: 62011 - DNA, 13 bp, Artificial Sequence
  Oligonucleotide for detection of SNP TSC0016475
gttatagaaaatt

SEQ ID NO: 62012 - DNA, 13 bp, Artificial Sequence
  Oligonucleotide for detection of SNP TSC0016475
aattttctataac

SEQ ID NO: 62013 - DNA, 13 bp, Artificial Sequence
  Oligonucleotide for detection of SNP TSC0016475
agttttgtatggy

SEQ ID NO: 62014 - DNA, 13 bp, Artificial Sequence
  Oligonucleotide for detection of SNP TSC0016475
rccatacaaaact

SEQ ID NO: 62015 - DNA, 13 bp, Artificial Sequence
  Oligonucleotide for detection of SNP TSC0016475
agttttttatggy

SEQ ID NO: 62016 - DNA, 13 bp, Artificial Sequence
  Oligonucleotide for detection of SNP TSC0016475
rccataaaaaact

SEQ ID NO: 62017 - DNA, 13 bp, Artificial Sequence
  Oligonucleotide for detection of SNP TSC0016477
ttttttgaggggy

SEQ ID NO: 62018 - DNA, 13 bp, Artificial Sequence
  Oligonucleotide for detection of SNP TSC0016477
rcccctcaaaaaa

SEQ ID NO: 62019 - DNA, 13 bp, Artificial Sequence
  Oligonucleotide for detection of SNP TSC0016477
ttttttaaggggy

SEQ ID NO: 62020 - DNA, 13 bp, Artificial Sequence
  Oligonucleotide for detection of SNP TSC0016477
rccccttaaaaaa

SEQ ID NO: 62021 - DNA, 13 bp, Artificial Sequence
  Oligonucleotide for detection of SNP TSC0016480
tttttaattttty

SEQ ID NO: 62022 - DNA, 13 bp, Artificial Sequence
  Oligonucleotide for detection of SNP TSC0016480
raaaaattaaaaa

SEQ ID NO: 62023 - DNA, 13 bp, Artificial Sequence
  Oligonucleotide for detection of SNP TSC0016481
gaagaagaggaaa

SEQ ID NO: 62024 - DNA, 13 bp, Artificial Sequence
  Oligonucleotide for detection of SNP TSC0016481
tttcctcttcttc

SEQ ID NO: 62025 - DNA, 13 bp, Artificial Sequence
  Oligonucleotide for detection of SNP TSC0016481
gaagaaaaggaaa

SEQ ID NO: 62026 - DNA, 13 bp, Artificial Sequence
  Oligonucleotide for detection of SNP TSC0016481
tttccttttcttc

SEQ ID NO: 62027 - DNA, 13 bp, Artificial Sequence
  Oligonucleotide for detection of SNP TSC0016482
atgtttaggttta

SEQ ID NO: 62028 - DNA, 13 bp, Artificial Sequence
  Oligonucleotide for detection of SNP TSC0016482
taaacctaaacat

SEQ ID NO: 62029 - DNA, 13 bp, Artificial Sequence
  Oligonucleotide for detection of SNP TSC0016482
atgtttgggttta

SEQ ID NO: 62030 - DNA, 13 bp, Artificial Sequence
  Oligonucleotide for detection of SNP TSC0016482
taaacccaaacat

SEQ ID NO: 62031 - DNA, 13 bp, Artificial Sequence
  Oligonucleotide for detection of SNP TSC0016482
atgttcgggttta

SEQ ID NO: 62032 - DNA, 13 bp, Artificial Sequence
  Oligonucleotide for detection of SNP TSC0016482
taaacccgaacat

SEQ ID NO: 62033 - DNA, 13 bp, Artificial Sequence
  Oligonucleotide for detection of SNP TSC0016482
tgggtttgagtat

SEQ ID NO: 62034 - DNA, 13 bp, Artificial Sequence
  Oligonucleotide for detection of SNP TSC0016482
atactcaaaccca

SEQ ID NO: 62035 - DNA, 13 bp, Artificial Sequence
  Oligonucleotide for detection of SNP TSC0016482
tgggttcgagtat

SEQ ID NO: 62036 - DNA, 13 bp, Artificial Sequence
  Oligonucleotide for detection of SNP TSC0016482
atactcgaaccca

SEQ ID NO: 62037 - DNA, 13 bp, Artificial Sequence
  Oligonucleotide for detection of SNP TSC0016483
attatagtgttty

SEQ ID NO: 62038 - DNA, 13 bp, Artificial Sequence
  Oligonucleotide for detection of SNP TSC0016483
raaacactataat

SEQ ID NO: 62039 - DNA, 13 bp, Artificial Sequence
  Oligonucleotide for detection of SNP TSC0016483
attataatgttty

SEQ ID NO: 62040 - DNA, 13 bp, Artificial Sequence
  Oligonucleotide for detection of SNP TSC0016483
raaacattataat

SEQ ID NO: 62041 - DNA, 13 bp, Artificial Sequence
  Oligonucleotide for detection of SNP TSC0016484
atatatgttttta

SEQ ID NO: 62042 - DNA, 13 bp, Artificial Sequence
  Oligonucleotide for detection of SNP TSC0016484
taaaaacatatat

SEQ ID NO: 62043 - DNA, 13 bp, Artificial Sequence
  Oligonucleotide for detection of SNP TSC0016484
atatattttttta

SEQ ID NO: 62044 - DNA, 13 bp, Artificial Sequence
  Oligonucleotide for detection of SNP TSC0016484
taaaaaaatatat

SEQ ID NO: 62045 - DNA, 13 bp, Artificial Sequence
  Oligonucleotide for detection of SNP TSC0016484
taaaggtatatat

SEQ ID NO: 62046 - DNA, 13 bp, Artificial Sequence
  Oligonucleotide for detection of SNP TSC0016484
atatataccttta

SEQ ID NO: 62047 - DNA, 13 bp, Artificial Sequence
  Oligonucleotide for detection of SNP TSC0016484
taaaggaatatat

SEQ ID NO: 62048 - DNA, 13 bp, Artificial Sequence
  Oligonucleotide for detection of SNP TSC0016484
atatattccttta

SEQ ID NO: 62049 - DNA, 13 bp, Artificial Sequence
  Oligonucleotide for detection of SNP TSC0016489
agtttaagtaata

SEQ ID NO: 62050 - DNA, 13 bp, Artificial Sequence
  Oligonucleotide for detection of SNP TSC0016489
tattacttaaact

SEQ ID NO: 62051 - DNA, 13 bp, Artificial Sequence
  Oligonucleotide for detection of SNP TSC0016489
agtttaggtaata

SEQ ID NO: 62052 - DNA, 13 bp, Artificial Sequence
  Oligonucleotide for detection of SNP TSC0016489
tattacctaaact

SEQ ID NO: 62053 - DNA, 13 bp, Artificial Sequence
  Oligonucleotide for detection of SNP TSC0016490
tttagttattaat

SEQ ID NO: 62054 - DNA, 13 bp, Artificial Sequence
  Oligonucleotide for detection of SNP TSC0016490
attaataactaaa

SEQ ID NO: 62055 - DNA, 13 bp, Artificial Sequence
  Oligonucleotide for detection of SNP TSC0016490
tttagtgattaat

SEQ ID NO: 62056 - DNA, 13 bp, Artificial Sequence
  Oligonucleotide for detection of SNP TSC0016490
attaatcactaaa

SEQ ID NO: 62057 - DNA, 13 bp, Artificial Sequence
  Oligonucleotide for detection of SNP TSC0016490
attggtgattaag

SEQ ID NO: 62058 - DNA, 13 bp, Artificial Sequence
  Oligonucleotide for detection of SNP TSC0016490
cttaatcaccaat

SEQ ID NO: 62059 - DNA, 13 bp, Artificial Sequence
  Oligonucleotide for detection of SNP TSC0016490
attggttattaag

SEQ ID NO: 62060 - DNA, 13 bp, Artificial Sequence
  Oligonucleotide for detection of SNP TSC0016490
cttaataaccaat

SEQ ID NO: 62061 - DNA, 13 bp, Artificial Sequence
  Oligonucleotide for detection of SNP TSC0016491
ggtttatgtgtaa

SEQ ID NO: 62062 - DNA, 13 bp, Artificial Sequence
  Oligonucleotide for detection of SNP TSC0016491
ttacacataaacc

SEQ ID NO: 62063 - DNA, 13 bp, Artificial Sequence
  Oligonucleotide for detection of SNP TSC0016491
ggtttacgtgtaa

SEQ ID NO: 62064 - DNA, 13 bp, Artificial Sequence
  Oligonucleotide for detection of SNP TSC0016491
ttacacgtaaacc

SEQ ID NO: 62065 - DNA, 13 bp, Artificial Sequence
  Oligonucleotide for detection of SNP TSC0016491
ggtttatgcgtaa

SEQ ID NO: 62066 - DNA, 13 bp, Artificial Sequence
  Oligonucleotide for detection of SNP TSC0016491
ttacgcataaacc

SEQ ID NO: 62067 - DNA, 13 bp, Artificial Sequence
  Oligonucleotide for detection of SNP TSC0016491
ggtttacgcgtaa

SEQ ID NO: 62068 - DNA, 13 bp, Artificial Sequence
  Oligonucleotide for detection of SNP TSC0016491
ttacgcgtaaacc

SEQ ID NO: 62069 - DNA, 13 bp, Artificial Sequence
  Oligonucleotide for detection of SNP TSC0016491
ttatgtgtggaty

SEQ ID NO: 62070 - DNA, 13 bp, Artificial Sequence
  Oligonucleotide for detection of SNP TSC0016491
ratccacacataa

SEQ ID NO: 62071 - DNA, 13 bp, Artificial Sequence
  Oligonucleotide for detection of SNP TSC0016491
ttatgtatggaty

SEQ ID NO: 62072 - DNA, 13 bp, Artificial Sequence
  Oligonucleotide for detection of SNP TSC0016491
ratccatacataa

SEQ ID NO: 62073 - DNA, 13 bp, Artificial Sequence
  Oligonucleotide for detection of SNP TSC0016491
ttacgtgtggaty

SEQ ID NO: 62074 - DNA, 13 bp, Artificial Sequence
  Oligonucleotide for detection of SNP TSC0016491
ratccacacgtaa

SEQ ID NO: 62075 - DNA, 13 bp, Artificial Sequence
  Oligonucleotide for detection of SNP TSC0016491
ttacgtatggaty

SEQ ID NO: 62076 - DNA, 13 bp, Artificial Sequence
  Oligonucleotide for detection of SNP TSC0016491
ratccatacgtaa

SEQ ID NO: 62077 - DNA, 13 bp, Artificial Sequence
  Oligonucleotide for detection of SNP TSC0016491
ttatgcgtggaty

SEQ ID NO: 62078 - DNA, 13 bp, Artificial Sequence
  Oligonucleotide for detection of SNP TSC0016491
ratccacgcataa

SEQ ID NO: 62079 - DNA, 13 bp, Artificial Sequence
  Oligonucleotide for detection of SNP TSC0016491
ttacgcgtggaty

SEQ ID NO: 62080 - DNA, 13 bp, Artificial Sequence
  Oligonucleotide for detection of SNP TSC0016491
ratccacgcgtaa

SEQ ID NO: 62081 - DNA, 13 bp, Artificial Sequence
  Oligonucleotide for detection of SNP TSC0016492
tttatgtgtaaga

SEQ ID NO: 62082 - DNA, 13 bp, Artificial Sequence
  Oligonucleotide for detection of SNP TSC0016492
tcttacacataaa

SEQ ID NO: 62083 - DNA, 13 bp, Artificial Sequence
  Oligonucleotide for detection of SNP TSC0016492
tttacgtgtaaga

SEQ ID NO: 62084 - DNA, 13 bp, Artificial Sequence
  Oligonucleotide for detection of SNP TSC0016492
tcttacacgtaaa

SEQ ID NO: 62085 - DNA, 13 bp, Artificial Sequence
  Oligonucleotide for detection of SNP TSC0016492
tttatgcgtaaga

SEQ ID NO: 62086 - DNA, 13 bp, Artificial Sequence
  Oligonucleotide for detection of SNP TSC0016492
tcttacgcataaa

SEQ ID NO: 62087 - DNA, 13 bp, Artificial Sequence
  Oligonucleotide for detection of SNP TSC0016492
tttacgcgtaaga

SEQ ID NO: 62088 - DNA, 13 bp, Artificial Sequence
  Oligonucleotide for detection of SNP TSC0016492
tcttacgcgtaaa

SEQ ID NO: 62089 - DNA, 13 bp, Artificial Sequence
  Oligonucleotide for detection of SNP TSC0016492
ttttatgtgtgga

SEQ ID NO: 62090 - DNA, 13 bp, Artificial Sequence
  Oligonucleotide for detection of SNP TSC0016492
tccacacataaaa

SEQ ID NO: 62091 - DNA, 13 bp, Artificial Sequence
  Oligonucleotide for detection of SNP TSC0016492
ttttatatgtgga

SEQ ID NO: 62092 - DNA, 13 bp, Artificial Sequence
  Oligonucleotide for detection of SNP TSC0016492
tccacatataaaa

SEQ ID NO: 62093 - DNA, 13 bp, Artificial Sequence
  Oligonucleotide for detection of SNP TSC0016492
ttttacgtgtgga

SEQ ID NO: 62094 - DNA, 13 bp, Artificial Sequence
  Oligonucleotide for detection of SNP TSC0016492
tccacacgtaaaa

SEQ ID NO: 62095 - DNA, 13 bp, Artificial Sequence
  Oligonucleotide for detection of SNP TSC0016492
ttttatacgtgga

SEQ ID NO: 62096 - DNA, 13 bp, Artificial Sequence
  Oligonucleotide for detection of SNP TSC0016492
tccacgtataaaa

SEQ ID NO: 62097 - DNA, 13 bp, Artificial Sequence
  Oligonucleotide for detection of SNP TSC0016492
ttttatgcgtgga

SEQ ID NO: 62098 - DNA, 13 bp, Artificial Sequence
  Oligonucleotide for detection of SNP TSC0016492
tccacgcataaaa

SEQ ID NO: 62099 - DNA, 13 bp, Artificial Sequence
  Oligonucleotide for detection of SNP TSC0016492
ttttacgcgtgga

SEQ ID NO: 62100 - DNA, 13 bp, Artificial Sequence
  Oligonucleotide for detection of SNP TSC0016492
tccacgcgtaaaa

SEQ ID NO: 62101 - DNA, 13 bp, Artificial Sequence
  Oligonucleotide for detection of SNP TSC0016493
gggggaggtgtgg

SEQ ID NO: 62102 - DNA, 13 bp, Artificial Sequence
  Oligonucleotide for detection of SNP TSC0016493
ccacacctccccc

SEQ ID NO: 62103 - DNA, 13 bp, Artificial Sequence
  Oligonucleotide for detection of SNP TSC0016493
gggggaagtgtgg

SEQ ID NO: 62104 - DNA, 13 bp, Artificial Sequence
  Oligonucleotide for detection of SNP TSC0016493
ccacacttccccc

SEQ ID NO: 62105 - DNA, 13 bp, Artificial Sequence
  Oligonucleotide for detection of SNP TSC0016493
gggggaggtgcgg

SEQ ID NO: 62106 - DNA, 13 bp, Artificial Sequence
  Oligonucleotide for detection of SNP TSC0016493
ccgcacctccccc

SEQ ID NO: 62107 - DNA, 13 bp, Artificial Sequence
  Oligonucleotide for detection of SNP TSC0016493
gggggaagtgcgg

SEQ ID NO: 62108 - DNA, 13 bp, Artificial Sequence
  Oligonucleotide for detection of SNP TSC0016493
ccgcacttccccc

SEQ ID NO: 62109 - DNA, 13 bp, Artificial Sequence
  Oligonucleotide for detection of SNP TSC0016494
gaaggaaagtggy

SEQ ID NO: 62110 - DNA, 13 bp, Artificial Sequence
  Oligonucleotide for detection of SNP TSC0016494
rccactttccttc

SEQ ID NO: 62111 - DNA, 13 bp, Artificial Sequence
  Oligonucleotide for detection of SNP TSC0016494
gaaggagagtggy

SEQ ID NO: 62112 - DNA, 13 bp, Artificial Sequence
  Oligonucleotide for detection of SNP TSC0016494
rccactctccttc

SEQ ID NO: 62113 - DNA, 13 bp, Artificial Sequence
  Oligonucleotide for detection of SNP TSC0016494
gaaggaaagcggy

SEQ ID NO: 62114 - DNA, 13 bp, Artificial Sequence
  Oligonucleotide for detection of SNP TSC0016494
rccgctttccttc

SEQ ID NO: 62115 - DNA, 13 bp, Artificial Sequence
  Oligonucleotide for detection of SNP TSC0016494
gaaggagagcggy

SEQ ID NO: 62116 - DNA, 13 bp, Artificial Sequence
  Oligonucleotide for detection of SNP TSC0016494
rccgctctccttc

SEQ ID NO: 62117 - DNA, 13 bp, Artificial Sequence
  Oligonucleotide for detection of SNP TSC0016499
tttttgcgtgtgt

SEQ ID NO: 62118 - DNA, 13 bp, Artificial Sequence
  Oligonucleotide for detection of SNP TSC0016499
acacacgcaaaaa

SEQ ID NO: 62119 - DNA, 13 bp, Artificial Sequence
  Oligonucleotide for detection of SNP TSC0016499
atatatttaggga

SEQ ID NO: 62120 - DNA, 13 bp, Artificial Sequence
  Oligonucleotide for detection of SNP TSC0016499
tccctaaatatat

SEQ ID NO: 62121 - DNA, 13 bp, Artificial Sequence
  Oligonucleotide for detection of SNP TSC0016499
atatatgtaggga

SEQ ID NO: 62122 - DNA, 13 bp, Artificial Sequence
  Oligonucleotide for detection of SNP TSC0016499
tccctacatatat

SEQ ID NO: 62123 - DNA, 13 bp, Artificial Sequence
  Oligonucleotide for detection of SNP TSC0016499
atatacgtaggga

SEQ ID NO: 62124 - DNA, 13 bp, Artificial Sequence
  Oligonucleotide for detection of SNP TSC0016499
tccctacgtatat

SEQ ID NO: 62125 - DNA, 13 bp, Artificial Sequence
  Oligonucleotide for detection of SNP TSC0016500
tgatataggttgy

SEQ ID NO: 62126 - DNA, 13 bp, Artificial Sequence
  Oligonucleotide for detection of SNP TSC0016500
rcaacctatatca

SEQ ID NO: 62127 - DNA, 13 bp, Artificial Sequence
  Oligonucleotide for detection of SNP TSC0016500
tgatatgggttgy

SEQ ID NO: 62128 - DNA, 13 bp, Artificial Sequence
  Oligonucleotide for detection of SNP TSC0016500
rcaacccatatca

SEQ ID NO: 62129 - DNA, 13 bp, Artificial Sequence
  Oligonucleotide for detection of SNP TSC0016502
atttaagaggtta

SEQ ID NO: 62130 - DNA, 13 bp, Artificial Sequence
  Oligonucleotide for detection of SNP TSC0016502
taacctcttaaat

SEQ ID NO: 62131 - DNA, 13 bp, Artificial Sequence
  Oligonucleotide for detection of SNP TSC0016502
atttaaaaggtta

SEQ ID NO: 62132 - DNA, 13 bp, Artificial Sequence
  Oligonucleotide for detection of SNP TSC0016502
taaccttttaaat

SEQ ID NO: 62133 - DNA, 13 bp, Artificial Sequence
  Oligonucleotide for detection of SNP TSC0016504
gtatgttgtttga

SEQ ID NO: 62134 - DNA, 13 bp, Artificial Sequence
  Oligonucleotide for detection of SNP TSC0016504
tcaaacaacatac

SEQ ID NO: 62135 - DNA, 13 bp, Artificial Sequence
  Oligonucleotide for detection of SNP TSC0016504
gtatgtcgtttga

SEQ ID NO: 62136 - DNA, 13 bp, Artificial Sequence
  Oligonucleotide for detection of SNP TSC0016504
tcaaacgacatac

SEQ ID NO: 62137 - DNA, 13 bp, Artificial Sequence
  Oligonucleotide for detection of SNP TSC0016504
gtatgttgttcga

SEQ ID NO: 62138 - DNA, 13 bp, Artificial Sequence
  Oligonucleotide for detection of SNP TSC0016504
tcgaacaacatac

SEQ ID NO: 62139 - DNA, 13 bp, Artificial Sequence
  Oligonucleotide for detection of SNP TSC0016504
gtatgtcgttcga

SEQ ID NO: 62140 - DNA, 13 bp, Artificial Sequence
  Oligonucleotide for detection of SNP TSC0016504
tcgaacgacatac

SEQ ID NO: 62141 - DNA, 13 bp, Artificial Sequence
  Oligonucleotide for detection of SNP TSC0016504
ttgaatggtatay

SEQ ID NO: 62142 - DNA, 13 bp, Artificial Sequence
  Oligonucleotide for detection of SNP TSC0016504
rtataccattcaa

SEQ ID NO: 62143 - DNA, 13 bp, Artificial Sequence
  Oligonucleotide for detection of SNP TSC0016504
ttgaatagtatay

SEQ ID NO: 62144 - DNA, 13 bp, Artificial Sequence
  Oligonucleotide for detection of SNP TSC0016504
rtatactattcaa

SEQ ID NO: 62145 - DNA, 13 bp, Artificial Sequence
  Oligonucleotide for detection of SNP TSC0016504
tcgaatggtatay

SEQ ID NO: 62146 - DNA, 13 bp, Artificial Sequence
  Oligonucleotide for detection of SNP TSC0016504
rtataccattcga

SEQ ID NO: 62147 - DNA, 13 bp, Artificial Sequence
  Oligonucleotide for detection of SNP TSC0016504
tcgaatagtatay

SEQ ID NO: 62148 - DNA, 13 bp, Artificial Sequence
  Oligonucleotide for detection of SNP TSC0016504
rtatactattcga

SEQ ID NO: 62149 - DNA, 13 bp, Artificial Sequence
  Oligonucleotide for detection of SNP TSC0016504
ttgaacggtatay

SEQ ID NO: 62150 - DNA, 13 bp, Artificial Sequence
  Oligonucleotide for detection of SNP TSC0016504
rtataccgttcaa

SEQ ID NO: 62151 - DNA, 13 bp, Artificial Sequence
  Oligonucleotide for detection of SNP TSC0016504
tcgaacggtatay

SEQ ID NO: 62152 - DNA, 13 bp, Artificial Sequence
  Oligonucleotide for detection of SNP TSC0016504
rtataccgttcga

SEQ ID NO: 62153 - DNA, 13 bp, Artificial Sequence
  Oligonucleotide for detection of SNP TSC0016508
attttagttttgg

SEQ ID NO: 62154 - DNA, 13 bp, Artificial Sequence
  Oligonucleotide for detection of SNP TSC0016508
ccaaaactaaaat

SEQ ID NO: 62155 - DNA, 13 bp, Artificial Sequence
  Oligonucleotide for detection of SNP TSC0016508
attttaattttgg

SEQ ID NO: 62156 - DNA, 13 bp, Artificial Sequence
  Oligonucleotide for detection of SNP TSC0016508
ccaaaattaaaat

SEQ ID NO: 62157 - DNA, 13 bp, Artificial Sequence
  Oligonucleotide for detection of SNP TSC0016509
gtttttaaggtag

SEQ ID NO: 62158 - DNA, 13 bp, Artificial Sequence
  Oligonucleotide for detection of SNP TSC0016509
ctaccttaaaaac

SEQ ID NO: 62159 - DNA, 13 bp, Artificial Sequence
  Oligonucleotide for detection of SNP TSC0016509
gtttttgaggtag

SEQ ID NO: 62160 - DNA, 13 bp, Artificial Sequence
  Oligonucleotide for detection of SNP TSC0016509
ctacctcaaaaac

SEQ ID NO: 62161 - DNA, 13 bp, Artificial Sequence
  Oligonucleotide for detection of SNP TSC0016510
agttatagagtta

SEQ ID NO: 62162 - DNA, 13 bp, Artificial Sequence
  Oligonucleotide for detection of SNP TSC0016510
taactctataact

SEQ ID NO: 62163 - DNA, 13 bp, Artificial Sequence
  Oligonucleotide for detection of SNP TSC0016510
agttatggagtta

SEQ ID NO: 62164 - DNA, 13 bp, Artificial Sequence
  Oligonucleotide for detection of SNP TSC0016510
taactccataact

SEQ ID NO: 62165 - DNA, 13 bp, Artificial Sequence
  Oligonucleotide for detection of SNP TSC0016510
agttacggagtta

SEQ ID NO: 62166 - DNA, 13 bp, Artificial Sequence
  Oligonucleotide for detection of SNP TSC0016510
taactccgtaact

SEQ ID NO: 62167 - DNA, 13 bp, Artificial Sequence
  Oligonucleotide for detection of SNP TSC0016510
taattttgtaatt

SEQ ID NO: 62168 - DNA, 13 bp, Artificial Sequence
  Oligonucleotide for detection of SNP TSC0016510
aattacaaaatta

SEQ ID NO: 62169 - DNA, 13 bp, Artificial Sequence
  Oligonucleotide for detection of SNP TSC0016510
taatttcgtaatt

SEQ ID NO: 62170 - DNA, 13 bp, Artificial Sequence
  Oligonucleotide for detection of SNP TSC0016510
aattacgaaatta

SEQ ID NO: 62171 - DNA, 13 bp, Artificial Sequence
  Oligonucleotide for detection of SNP TSC0016511
atgtttagtttta

SEQ ID NO: 62172 - DNA, 13 bp, Artificial Sequence
  Oligonucleotide for detection of SNP TSC0016511
taaaactaaacat

SEQ ID NO: 62173 - DNA, 13 bp, Artificial Sequence
  Oligonucleotide for detection of SNP TSC0016511
atgtttggtttta

SEQ ID NO: 62174 - DNA, 13 bp, Artificial Sequence
  Oligonucleotide for detection of SNP TSC0016511
taaaaccaaacat

SEQ ID NO: 62175 - DNA, 13 bp, Artificial Sequence
  Oligonucleotide for detection of SNP TSC0016511
atgttcggtttta

SEQ ID NO: 62176 - DNA, 13 bp, Artificial Sequence
  Oligonucleotide for detection of SNP TSC0016511
taaaaccgaacat

SEQ ID NO: 62177 - DNA, 13 bp, Artificial Sequence
  Oligonucleotide for detection of SNP TSC0016511
tgaggttgggtat

SEQ ID NO: 62178 - DNA, 13 bp, Artificial Sequence
  Oligonucleotide for detection of SNP TSC0016511
atacccaacctca

SEQ ID NO: 62179 - DNA, 13 bp, Artificial Sequence
  Oligonucleotide for detection of SNP TSC0016511
tgaggtcgggtat

SEQ ID NO: 62180 - DNA, 13 bp, Artificial Sequence
  Oligonucleotide for detection of SNP TSC0016511
atacccgacctca

SEQ ID NO: 62181 - DNA, 13 bp, Artificial Sequence
  Oligonucleotide for detection of SNP TSC0016512
gtgggttgttttt

SEQ ID NO: 62182 - DNA, 13 bp, Artificial Sequence
  Oligonucleotide for detection of SNP TSC0016512
aaaaacaacccac

SEQ ID NO: 62183 - DNA, 13 bp, Artificial Sequence
  Oligonucleotide for detection of SNP TSC0016512
gcgggttgttttt

SEQ ID NO: 62184 - DNA, 13 bp, Artificial Sequence
  Oligonucleotide for detection of SNP TSC0016512
aaaaacaacccgc

SEQ ID NO: 62185 - DNA, 13 bp, Artificial Sequence
  Oligonucleotide for detection of SNP TSC0016512
gtgggtcgttttt

SEQ ID NO: 62186 - DNA, 13 bp, Artificial Sequence
  Oligonucleotide for detection of SNP TSC0016512
aaaaacgacccac

SEQ ID NO: 62187 - DNA, 13 bp, Artificial Sequence
  Oligonucleotide for detection of SNP TSC0016512
gcgggtcgttttt

SEQ ID NO: 62188 - DNA, 13 bp, Artificial Sequence
  Oligonucleotide for detection of SNP TSC0016512
aaaaacgacccgc

SEQ ID NO: 62189 - DNA, 13 bp, Artificial Sequence
  Oligonucleotide for detection of SNP TSC0016512
aggggtgatttgy

SEQ ID NO: 62190 - DNA, 13 bp, Artificial Sequence
  Oligonucleotide for detection of SNP TSC0016512
rcaaatcacccct

SEQ ID NO: 62191 - DNA, 13 bp, Artificial Sequence
  Oligonucleotide for detection of SNP TSC0016512
aggggtaatttgy

SEQ ID NO: 62192 - DNA, 13 bp, Artificial Sequence
  Oligonucleotide for detection of SNP TSC0016512
rcaaattacccct

SEQ ID NO: 62193 - DNA, 13 bp, Artificial Sequence
  Oligonucleotide for detection of SNP TSC0016512
aggggcgatttgy

SEQ ID NO: 62194 - DNA, 13 bp, Artificial Sequence
  Oligonucleotide for detection of SNP TSC0016512
rcaaatcgcccct

SEQ ID NO: 62195 - DNA, 13 bp, Artificial Sequence
  Oligonucleotide for detection of SNP TSC0016512
aggggtaattcgy

SEQ ID NO: 62196 - DNA, 13 bp, Artificial Sequence
  Oligonucleotide for detection of SNP TSC0016512
rcgaattacccct

SEQ ID NO: 62197 - DNA, 13 bp, Artificial Sequence
  Oligonucleotide for detection of SNP TSC0016512
aggggtgattcgy

SEQ ID NO: 62198 - DNA, 13 bp, Artificial Sequence
  Oligonucleotide for detection of SNP TSC0016512
rcgaatcacccct

SEQ ID NO: 62199 - DNA, 13 bp, Artificial Sequence
  Oligonucleotide for detection of SNP TSC0016512
aggggcgattcgy

SEQ ID NO: 62200 - DNA, 13 bp, Artificial Sequence
  Oligonucleotide for detection of SNP TSC0016512
rcgaatcgcccct

SEQ ID NO: 62201 - DNA, 13 bp, Artificial Sequence
  Oligonucleotide for detection of SNP TSC0016513
aaaagtggttttt

SEQ ID NO: 62202 - DNA, 13 bp, Artificial Sequence
  Oligonucleotide for detection of SNP TSC0016513
aaaaaccactttt

SEQ ID NO: 62203 - DNA, 13 bp, Artificial Sequence
  Oligonucleotide for detection of SNP TSC0016513
aaaagttgttttt

SEQ ID NO: 62204 - DNA, 13 bp, Artificial Sequence
  Oligonucleotide for detection of SNP TSC0016513
aaaaacaactttt

SEQ ID NO: 62205 - DNA, 13 bp, Artificial Sequence
  Oligonucleotide for detection of SNP TSC0016513
aaaaattattttt

SEQ ID NO: 62206 - DNA, 13 bp, Artificial Sequence
  Oligonucleotide for detection of SNP TSC0016513
aaaaataattttt

SEQ ID NO: 62207 - DNA, 13 bp, Artificial Sequence
  Oligonucleotide for detection of SNP TSC0016514
ttttttggttaga

SEQ ID NO: 62208 - DNA, 13 bp, Artificial Sequence
  Oligonucleotide for detection of SNP TSC0016514
tctaaccaaaaaa

SEQ ID NO: 62209 - DNA, 13 bp, Artificial Sequence
  Oligonucleotide for detection of SNP TSC0016514
tttttttgttaga

SEQ ID NO: 62210 - DNA, 13 bp, Artificial Sequence
  Oligonucleotide for detection of SNP TSC0016514
tctaacaaaaaaa

SEQ ID NO: 62211 - DNA, 13 bp, Artificial Sequence
  Oligonucleotide for detection of SNP TSC0016514
tttttcggttaga

SEQ ID NO: 62212 - DNA, 13 bp, Artificial Sequence
  Oligonucleotide for detection of SNP TSC0016514
tctaaccgaaaaa

SEQ ID NO: 62213 - DNA, 13 bp, Artificial Sequence
  Oligonucleotide for detection of SNP TSC0016514
tttgattgaagaa

SEQ ID NO: 62214 - DNA, 13 bp, Artificial Sequence
  Oligonucleotide for detection of SNP TSC0016514
ttcttcaatcaaa

SEQ ID NO: 62215 - DNA, 13 bp, Artificial Sequence
  Oligonucleotide for detection of SNP TSC0016514
tttgatagaagaa

SEQ ID NO: 62216 - DNA, 13 bp, Artificial Sequence
  Oligonucleotide for detection of SNP TSC0016514
ttcttctatcaaa

SEQ ID NO: 62217 - DNA, 13 bp, Artificial Sequence
  Oligonucleotide for detection of SNP TSC0016514
tttgatcgaagaa

SEQ ID NO: 62218 - DNA, 13 bp, Artificial Sequence
  Oligonucleotide for detection of SNP TSC0016514
ttcttcgatcaaa

SEQ ID NO: 62219 - DNA, 13 bp, Artificial Sequence
  Oligonucleotide for detection of SNP TSC0016515
tgagtaaggttgy

SEQ ID NO: 62220 - DNA, 13 bp, Artificial Sequence
  Oligonucleotide for detection of SNP TSC0016515
rcaaccttactca

SEQ ID NO: 62221 - DNA, 13 bp, Artificial Sequence
  Oligonucleotide for detection of SNP TSC0016515
tgagtatggttgy

SEQ ID NO: 62222 - DNA, 13 bp, Artificial Sequence
  Oligonucleotide for detection of SNP TSC0016515
rcaaccatactca

SEQ ID NO: 62223 - DNA, 13 bp, Artificial Sequence
  Oligonucleotide for detection of SNP TSC0016515
gtagttttattta

SEQ ID NO: 62224 - DNA, 13 bp, Artificial Sequence
  Oligonucleotide for detection of SNP TSC0016515
taaataaaactac

SEQ ID NO: 62225 - DNA, 13 bp, Artificial Sequence
  Oligonucleotide for detection of SNP TSC0016515
gtagttatattta

SEQ ID NO: 62226 - DNA, 13 bp, Artificial Sequence
  Oligonucleotide for detection of SNP TSC0016515
taaatataactac

SEQ ID NO: 62227 - DNA, 13 bp, Artificial Sequence
  Oligonucleotide for detection of SNP TSC0016518
tttttgtttatag

SEQ ID NO: 62228 - DNA, 13 bp, Artificial Sequence
  Oligonucleotide for detection of SNP TSC0016518
ctataaacaaaaa

SEQ ID NO: 62229 - DNA, 13 bp, Artificial Sequence
  Oligonucleotide for detection of SNP TSC0016518
tttttggttatag

SEQ ID NO: 62230 - DNA, 13 bp, Artificial Sequence
  Oligonucleotide for detection of SNP TSC0016518
ctataaccaaaaa

SEQ ID NO: 62231 - DNA, 13 bp, Artificial Sequence
  Oligonucleotide for detection of SNP TSC0016518
ttgtgagtaggag

SEQ ID NO: 62232 - DNA, 13 bp, Artificial Sequence
  Oligonucleotide for detection of SNP TSC0016518
ctcctactcacaa

SEQ ID NO: 62233 - DNA, 13 bp, Artificial Sequence
  Oligonucleotide for detection of SNP TSC0016518
ttgtgattaggag

SEQ ID NO: 62234 - DNA, 13 bp, Artificial Sequence
  Oligonucleotide for detection of SNP TSC0016518
ctcctaatcacaa

SEQ ID NO: 62235 - DNA, 13 bp, Artificial Sequence
  Oligonucleotide for detection of SNP TSC0016519
aggaagaagagtg

SEQ ID NO: 62236 - DNA, 13 bp, Artificial Sequence
  Oligonucleotide for detection of SNP TSC0016519
cactcttcttcct

SEQ ID NO: 62237 - DNA, 13 bp, Artificial Sequence
  Oligonucleotide for detection of SNP TSC0016519
aggaagtagagtg

SEQ ID NO: 62238 - DNA, 13 bp, Artificial Sequence
  Oligonucleotide for detection of SNP TSC0016519
cactctacttcct

SEQ ID NO: 62239 - DNA, 13 bp, Artificial Sequence
  Oligonucleotide for detection of SNP TSC0016520
attatgtggtagg

SEQ ID NO: 62240 - DNA, 13 bp, Artificial Sequence
  Oligonucleotide for detection of SNP TSC0016520
cctaccacataat

SEQ ID NO: 62241 - DNA, 13 bp, Artificial Sequence
  Oligonucleotide for detection of SNP TSC0016520
attacgtggtagg

SEQ ID NO: 62242 - DNA, 13 bp, Artificial Sequence
  Oligonucleotide for detection of SNP TSC0016520
cctaccacgtaat

SEQ ID NO: 62243 - DNA, 13 bp, Artificial Sequence
  Oligonucleotide for detection of SNP TSC0016520
attatgcggtagg

SEQ ID NO: 62244 - DNA, 13 bp, Artificial Sequence
  Oligonucleotide for detection of SNP TSC0016520
cctaccgcataat

SEQ ID NO: 62245 - DNA, 13 bp, Artificial Sequence
  Oligonucleotide for detection of SNP TSC0016520
attacgcggtagg

SEQ ID NO: 62246 - DNA, 13 bp, Artificial Sequence
  Oligonucleotide for detection of SNP TSC0016520
cctaccgcgtaat

SEQ ID NO: 62247 - DNA, 13 bp, Artificial Sequence
  Oligonucleotide for detection of SNP TSC0016520
tttgttgtgtgat

SEQ ID NO: 62248 - DNA, 13 bp, Artificial Sequence
  Oligonucleotide for detection of SNP TSC0016520
atcacacaacaaa

SEQ ID NO: 62249 - DNA, 13 bp, Artificial Sequence
  Oligonucleotide for detection of SNP TSC0016520
tttgttatgtgat

SEQ ID NO: 62250 - DNA, 13 bp, Artificial Sequence
  Oligonucleotide for detection of SNP TSC0016520
atcacataacaaa

SEQ ID NO: 62251 - DNA, 13 bp, Artificial Sequence
  Oligonucleotide for detection of SNP TSC0016520
tttgtcgtgtgat

SEQ ID NO: 62252 - DNA, 13 bp, Artificial Sequence
  Oligonucleotide for detection of SNP TSC0016520
atcacacgacaaa

SEQ ID NO: 62253 - DNA, 13 bp, Artificial Sequence
  Oligonucleotide for detection of SNP TSC0016520
tttgttacgtgat

SEQ ID NO: 62254 - DNA, 13 bp, Artificial Sequence
  Oligonucleotide for detection of SNP TSC0016520
atcacgtaacaaa

SEQ ID NO: 62255 - DNA, 13 bp, Artificial Sequence
  Oligonucleotide for detection of SNP TSC0016520
tttgttgcgtgat

SEQ ID NO: 62256 - DNA, 13 bp, Artificial Sequence
  Oligonucleotide for detection of SNP TSC0016520
atcacgcaacaaa

SEQ ID NO: 62257 - DNA, 13 bp, Artificial Sequence
  Oligonucleotide for detection of SNP TSC0016520
tttgtcgcgtgat

SEQ ID NO: 62258 - DNA, 13 bp, Artificial Sequence
  Oligonucleotide for detection of SNP TSC0016520
atcacgcgacaaa

SEQ ID NO: 62259 - DNA, 13 bp, Artificial Sequence
  Oligonucleotide for detection of SNP TSC0016521
gaggttgaggaga

SEQ ID NO: 62260 - DNA, 13 bp, Artificial Sequence
  Oligonucleotide for detection of SNP TSC0016521
tctcctcaacctc

SEQ ID NO: 62261 - DNA, 13 bp, Artificial Sequence
  Oligonucleotide for detection of SNP TSC0016521
gaggtttaggaga

SEQ ID NO: 62262 - DNA, 13 bp, Artificial Sequence
  Oligonucleotide for detection of SNP TSC0016521
tctcctaaacctc

SEQ ID NO: 62263 - DNA, 13 bp, Artificial Sequence
  Oligonucleotide for detection of SNP TSC0016521
gaggtcgaggaga

SEQ ID NO: 62264 - DNA, 13 bp, Artificial Sequence
  Oligonucleotide for detection of SNP TSC0016521
tctcctcgacctc

SEQ ID NO: 62265 - DNA, 13 bp, Artificial Sequence
  Oligonucleotide for detection of SNP TSC0016522
attttgatttttt

SEQ ID NO: 62266 - DNA, 13 bp, Artificial Sequence
  Oligonucleotide for detection of SNP TSC0016522
aaaaaatcaaaat

SEQ ID NO: 62267 - DNA, 13 bp, Artificial Sequence
  Oligonucleotide for detection of SNP TSC0016522
attttgttttttt

SEQ ID NO: 62268 - DNA, 13 bp, Artificial Sequence
  Oligonucleotide for detection of SNP TSC0016522
aaaaaaacaaaat

SEQ ID NO: 62269 - DNA, 13 bp, Artificial Sequence
  Oligonucleotide for detection of SNP TSC0016522
aaaaagttaagat

SEQ ID NO: 62270 - DNA, 13 bp, Artificial Sequence
  Oligonucleotide for detection of SNP TSC0016522
atcttaacttttt

SEQ ID NO: 62271 - DNA, 13 bp, Artificial Sequence
  Oligonucleotide for detection of SNP TSC0016522
aaaaaggtaagat

SEQ ID NO: 62272 - DNA, 13 bp, Artificial Sequence
  Oligonucleotide for detection of SNP TSC0016522
atcttaccttttt

SEQ ID NO: 62273 - DNA, 13 bp, Artificial Sequence
  Oligonucleotide for detection of SNP TSC0016523
aggtatagataty

SEQ ID NO: 62274 - DNA, 13 bp, Artificial Sequence
  Oligonucleotide for detection of SNP TSC0016523
ratatctatacct

SEQ ID NO: 62275 - DNA, 13 bp, Artificial Sequence
  Oligonucleotide for detection of SNP TSC0016523
aggtattgataty

SEQ ID NO: 62276 - DNA, 13 bp, Artificial Sequence
  Oligonucleotide for detection of SNP TSC0016523
ratatcaatacct

SEQ ID NO: 62277 - DNA, 13 bp, Artificial Sequence
  Oligonucleotide for detection of SNP TSC0016523
ggtatttatgttt

SEQ ID NO: 62278 - DNA, 13 bp, Artificial Sequence
  Oligonucleotide for detection of SNP TSC0016523
aaacataaatacc

SEQ ID NO: 62279 - DNA, 13 bp, Artificial Sequence
  Oligonucleotide for detection of SNP TSC0016523
ggtattaatgttt

SEQ ID NO: 62280 - DNA, 13 bp, Artificial Sequence
  Oligonucleotide for detection of SNP TSC0016523
aaacattaatacc

SEQ ID NO: 62281 - DNA, 13 bp, Artificial Sequence
  Oligonucleotide for detection of SNP TSC0016524
tttttcgtgaaaa

SEQ ID NO: 62282 - DNA, 13 bp, Artificial Sequence
  Oligonucleotide for detection of SNP TSC0016524
ttttcacgaaaaa

SEQ ID NO: 62283 - DNA, 13 bp, Artificial Sequence
  Oligonucleotide for detection of SNP TSC0016524
tttttaggagaga

SEQ ID NO: 62284 - DNA, 13 bp, Artificial Sequence
  Oligonucleotide for detection of SNP TSC0016524
tctctcctaaaaa

SEQ ID NO: 62285 - DNA, 13 bp, Artificial Sequence
  Oligonucleotide for detection of SNP TSC0016524
tttttatgagaga

SEQ ID NO: 62286 - DNA, 13 bp, Artificial Sequence
  Oligonucleotide for detection of SNP TSC0016524
tctctcataaaaa

SEQ ID NO: 62287 - DNA, 13 bp, Artificial Sequence
  Oligonucleotide for detection of SNP TSC0016524
tttttacgagaga

SEQ ID NO: 62288 - DNA, 13 bp, Artificial Sequence
  Oligonucleotide for detection of SNP TSC0016524
tctctcgtaaaaa

SEQ ID NO: 62289 - DNA, 13 bp, Artificial Sequence
  Oligonucleotide for detection of SNP TSC0016525
aataaatatttga

SEQ ID NO: 62290 - DNA, 13 bp, Artificial Sequence
  Oligonucleotide for detection of SNP TSC0016525
tcaaatatttatt

SEQ ID NO: 62291 - DNA, 13 bp, Artificial Sequence
  Oligonucleotide for detection of SNP TSC0016525
aataaagatttga

SEQ ID NO: 62292 - DNA, 13 bp, Artificial Sequence
  Oligonucleotide for detection of SNP TSC0016525
tcaaatctttatt

SEQ ID NO: 62293 - DNA, 13 bp, Artificial Sequence
  Oligonucleotide for detection of SNP TSC0016525
ttaagtgtttatt

SEQ ID NO: 62294 - DNA, 13 bp, Artificial Sequence
  Oligonucleotide for detection of SNP TSC0016525
aataaacacttaa

SEQ ID NO: 62295 - DNA, 13 bp, Artificial Sequence
  Oligonucleotide for detection of SNP TSC0016525
ttaagtttttatt

SEQ ID NO: 62296 - DNA, 13 bp, Artificial Sequence
  Oligonucleotide for detection of SNP TSC0016525
aataaaaacttaa

SEQ ID NO: 62297 - DNA, 13 bp, Artificial Sequence
  Oligonucleotide for detection of SNP TSC0016528
taaaaataaaaay

SEQ ID NO: 62298 - DNA, 13 bp, Artificial Sequence
  Oligonucleotide for detection of SNP TSC0016528
rtttttattttta

SEQ ID NO: 62299 - DNA, 13 bp, Artificial Sequence
  Oligonucleotide for detection of SNP TSC0016528
taaaaaaaaaaay

SEQ ID NO: 62300 - DNA, 13 bp, Artificial Sequence
  Oligonucleotide for detection of SNP TSC0016528
rttttttttttta

SEQ ID NO: 62301 - DNA, 13 bp, Artificial Sequence
  Oligonucleotide for detection of SNP TSC0016529
atttgatagatta

SEQ ID NO: 62302 - DNA, 13 bp, Artificial Sequence
  Oligonucleotide for detection of SNP TSC0016529
taatctatcaaat

SEQ ID NO: 62303 - DNA, 13 bp, Artificial Sequence
  Oligonucleotide for detection of SNP TSC0016529
atttgagagatta

SEQ ID NO: 62304 - DNA, 13 bp, Artificial Sequence
  Oligonucleotide for detection of SNP TSC0016529
taatctctcaaat

SEQ ID NO: 62305 - DNA, 13 bp, Artificial Sequence
  Oligonucleotide for detection of SNP TSC0016529
tagtttgttagat

SEQ ID NO: 62306 - DNA, 13 bp, Artificial Sequence
  Oligonucleotide for detection of SNP TSC0016529
atctaacaaacta

SEQ ID NO: 62307 - DNA, 13 bp, Artificial Sequence
  Oligonucleotide for detection of SNP TSC0016529
tagttttttagat

SEQ ID NO: 62308 - DNA, 13 bp, Artificial Sequence
  Oligonucleotide for detection of SNP TSC0016529
atctaaaaaacta

SEQ ID NO: 62309 - DNA, 13 bp, Artificial Sequence
  Oligonucleotide for detection of SNP TSC0016530
ttgatttattgga

SEQ ID NO: 62310 - DNA, 13 bp, Artificial Sequence
  Oligonucleotide for detection of SNP TSC0016530
tccaataaatcaa

SEQ ID NO: 62311 - DNA, 13 bp, Artificial Sequence
  Oligonucleotide for detection of SNP TSC0016530
ttgattgattgga

SEQ ID NO: 62312 - DNA, 13 bp, Artificial Sequence
  Oligonucleotide for detection of SNP TSC0016530
tccaatcaatcaa

SEQ ID NO: 62313 - DNA, 13 bp, Artificial Sequence
  Oligonucleotide for detection of SNP TSC0016530
ttgatcgattgga

SEQ ID NO: 62314 - DNA, 13 bp, Artificial Sequence
  Oligonucleotide for detection of SNP TSC0016530
tccaatcgatcaa

SEQ ID NO: 62315 - DNA, 13 bp, Artificial Sequence
  Oligonucleotide for detection of SNP TSC0016530
tttagtggattaa

SEQ ID NO: 62316 - DNA, 13 bp, Artificial Sequence
  Oligonucleotide for detection of SNP TSC0016530
ttaatccactaaa

SEQ ID NO: 62317 - DNA, 13 bp, Artificial Sequence
  Oligonucleotide for detection of SNP TSC0016530
tttagttgattaa

SEQ ID NO: 62318 - DNA, 13 bp, Artificial Sequence
  Oligonucleotide for detection of SNP TSC0016530
ttaatcaactaaa

SEQ ID NO: 62319 - DNA, 13 bp, Artificial Sequence
  Oligonucleotide for detection of SNP TSC0016530
tttagtcgattaa

SEQ ID NO: 62320 - DNA, 13 bp, Artificial Sequence
  Oligonucleotide for detection of SNP TSC0016530
ttaatcgactaaa

SEQ ID NO: 62321 - DNA, 13 bp, Artificial Sequence
  Oligonucleotide for detection of SNP TSC0016531
gagataaaaaaga

SEQ ID NO: 62322 - DNA, 13 bp, Artificial Sequence
  Oligonucleotide for detection of SNP TSC0016531
tcttttttatctc

SEQ ID NO: 62323 - DNA, 13 bp, Artificial Sequence
  Oligonucleotide for detection of SNP TSC0016531
gagatagaaaaga

SEQ ID NO: 62324 - DNA, 13 bp, Artificial Sequence
  Oligonucleotide for detection of SNP TSC0016531
tcttttctatctc

SEQ ID NO: 62325 - DNA, 13 bp, Artificial Sequence
  Oligonucleotide for detection of SNP TSC0016532
tgttttaagtggy

SEQ ID NO: 62326 - DNA, 13 bp, Artificial Sequence
  Oligonucleotide for detection of SNP TSC0016532
rccacttaaaaca

SEQ ID NO: 62327 - DNA, 13 bp, Artificial Sequence
  Oligonucleotide for detection of SNP TSC0016532
tgttttgagtggy

SEQ ID NO: 62328 - DNA, 13 bp, Artificial Sequence
  Oligonucleotide for detection of SNP TSC0016532
rccactcaaaaca

SEQ ID NO: 62329 - DNA, 13 bp, Artificial Sequence
  Oligonucleotide for detection of SNP TSC0016532
tgtttcgagtggy

SEQ ID NO: 62330 - DNA, 13 bp, Artificial Sequence
  Oligonucleotide for detection of SNP TSC0016532
rccactcgaaaca

SEQ ID NO: 62331 - DNA, 13 bp, Artificial Sequence
  Oligonucleotide for detection of SNP TSC0016532
gttatttgagata

SEQ ID NO: 62332 - DNA, 13 bp, Artificial Sequence
  Oligonucleotide for detection of SNP TSC0016532
tatctcaaataac

SEQ ID NO: 62333 - DNA, 13 bp, Artificial Sequence
  Oligonucleotide for detection of SNP TSC0016532
gttattcgagata

SEQ ID NO: 62334 - DNA, 13 bp, Artificial Sequence
  Oligonucleotide for detection of SNP TSC0016532
tatctcgaataac

SEQ ID NO: 62335 - DNA, 13 bp, Artificial Sequence
  Oligonucleotide for detection of SNP TSC0016533
tagaaagaatatt

SEQ ID NO: 62336 - DNA, 13 bp, Artificial Sequence
  Oligonucleotide for detection of SNP TSC0016533
aatattctttcta

SEQ ID NO: 62337 - DNA, 13 bp, Artificial Sequence
  Oligonucleotide for detection of SNP TSC0016533
tagaaaaaatatt

SEQ ID NO: 62338 - DNA, 13 bp, Artificial Sequence
  Oligonucleotide for detection of SNP TSC0016533
aatattttttcta

SEQ ID NO: 62339 - DNA, 13 bp, Artificial Sequence
  Oligonucleotide for detection of SNP TSC0016534
ttttttatgaggg

SEQ ID NO: 62340 - DNA, 13 bp, Artificial Sequence
  Oligonucleotide for detection of SNP TSC0016534
ccctcataaaaaa

SEQ ID NO: 62341 - DNA, 13 bp, Artificial Sequence
  Oligonucleotide for detection of SNP TSC0016534
ttttttgtgaggg

SEQ ID NO: 62342 - DNA, 13 bp, Artificial Sequence
  Oligonucleotide for detection of SNP TSC0016534
ccctcacaaaaaa

SEQ ID NO: 62343 - DNA, 13 bp, Artificial Sequence
  Oligonucleotide for detection of SNP TSC0016534
tttttcgtgaggg

SEQ ID NO: 62344 - DNA, 13 bp, Artificial Sequence
  Oligonucleotide for detection of SNP TSC0016534
ccctcacgaaaaa

SEQ ID NO: 62345 - DNA, 13 bp, Artificial Sequence
  Oligonucleotide for detection of SNP TSC0016534
tttttatggagag

SEQ ID NO: 62346 - DNA, 13 bp, Artificial Sequence
  Oligonucleotide for detection of SNP TSC0016534
ctctccataaaaa

SEQ ID NO: 62347 - DNA, 13 bp, Artificial Sequence
  Oligonucleotide for detection of SNP TSC0016534
tttttacggagag

SEQ ID NO: 62348 - DNA, 13 bp, Artificial Sequence
  Oligonucleotide for detection of SNP TSC0016534
ctctccgtaaaaa

SEQ ID NO: 62349 - DNA, 13 bp, Artificial Sequence
  Oligonucleotide for detection of SNP TSC0016535
attttgggatttg

SEQ ID NO: 62350 - DNA, 13 bp, Artificial Sequence
  Oligonucleotide for detection of SNP TSC0016535
caaatcccaaaat

SEQ ID NO: 62351 - DNA, 13 bp, Artificial Sequence
  Oligonucleotide for detection of SNP TSC0016535
attttgtgatttg

SEQ ID NO: 62352 - DNA, 13 bp, Artificial Sequence
  Oligonucleotide for detection of SNP TSC0016535
caaatcacaaaat

SEQ ID NO: 62353 - DNA, 13 bp, Artificial Sequence
  Oligonucleotide for detection of SNP TSC0016535
atttcgggatttg

SEQ ID NO: 62354 - DNA, 13 bp, Artificial Sequence
  Oligonucleotide for detection of SNP TSC0016535
caaatcccgaaat

SEQ ID NO: 62355 - DNA, 13 bp, Artificial Sequence
  Oligonucleotide for detection of SNP TSC0016535
atttcgtgatttg

SEQ ID NO: 62356 - DNA, 13 bp, Artificial Sequence
  Oligonucleotide for detection of SNP TSC0016535
caaatcacgaaat

SEQ ID NO: 62357 - DNA, 13 bp, Artificial Sequence
  Oligonucleotide for detection of SNP TSC0016535
tagattttgaggt

SEQ ID NO: 62358 - DNA, 13 bp, Artificial Sequence
  Oligonucleotide for detection of SNP TSC0016535
acctcaaaatcta

SEQ ID NO: 62359 - DNA, 13 bp, Artificial Sequence
  Oligonucleotide for detection of SNP TSC0016535
tagattatgaggt

SEQ ID NO: 62360 - DNA, 13 bp, Artificial Sequence
  Oligonucleotide for detection of SNP TSC0016535
acctcataatcta

SEQ ID NO: 62361 - DNA, 13 bp, Artificial Sequence
  Oligonucleotide for detection of SNP TSC0016535
tagatttcgaggt

SEQ ID NO: 62362 - DNA, 13 bp, Artificial Sequence
  Oligonucleotide for detection of SNP TSC0016535
acctcgaaatcta

SEQ ID NO: 62363 - DNA, 13 bp, Artificial Sequence
  Oligonucleotide for detection of SNP TSC0016535
tagattacgaggt

SEQ ID NO: 62364 - DNA, 13 bp, Artificial Sequence
  Oligonucleotide for detection of SNP TSC0016535
acctcgtaatcta

SEQ ID NO: 62365 - DNA, 13 bp, Artificial Sequence
  Oligonucleotide for detection of SNP TSC0016537
agaggaagagggy

SEQ ID NO: 62366 - DNA, 13 bp, Artificial Sequence
  Oligonucleotide for detection of SNP TSC0016537
rccctcttcctct

SEQ ID NO: 62367 - DNA, 13 bp, Artificial Sequence
  Oligonucleotide for detection of SNP TSC0016537
agaggaggagggy

SEQ ID NO: 62368 - DNA, 13 bp, Artificial Sequence
  Oligonucleotide for detection of SNP TSC0016537
rccctcctcctct

SEQ ID NO: 62369 - DNA, 13 bp, Artificial Sequence
  Oligonucleotide for detection of SNP TSC0016538
tttttttgggagg

SEQ ID NO: 62370 - DNA, 13 bp, Artificial Sequence
  Oligonucleotide for detection of SNP TSC0016538
cctcccaaaaaaa

SEQ ID NO: 62371 - DNA, 13 bp, Artificial Sequence
  Oligonucleotide for detection of SNP TSC0016538
ttttttcgggagg

SEQ ID NO: 62372 - DNA, 13 bp, Artificial Sequence
  Oligonucleotide for detection of SNP TSC0016538
cctcccgaaaaaa

SEQ ID NO: 62373 - DNA, 13 bp, Artificial Sequence
  Oligonucleotide for detection of SNP TSC0016538
ttttttgggagga

SEQ ID NO: 62374 - DNA, 13 bp, Artificial Sequence
  Oligonucleotide for detection of SNP TSC0016538
tcctcccaaaaaa

SEQ ID NO: 62375 - DNA, 13 bp, Artificial Sequence
  Oligonucleotide for detection of SNP TSC0016538
ttttttaggagga

SEQ ID NO: 62376 - DNA, 13 bp, Artificial Sequence
  Oligonucleotide for detection of SNP TSC0016538
tcctcctaaaaaa

SEQ ID NO: 62377 - DNA, 13 bp, Artificial Sequence
  Oligonucleotide for detection of SNP TSC0016538
tttttcgggagga

SEQ ID NO: 62378 - DNA, 13 bp, Artificial Sequence
  Oligonucleotide for detection of SNP TSC0016538
tcctcccgaaaaa

SEQ ID NO: 62379 - DNA, 13 bp, Artificial Sequence
  Oligonucleotide for detection of SNP TSC0016539
ttatggttttttg

SEQ ID NO: 62380 - DNA, 13 bp, Artificial Sequence
  Oligonucleotide for detection of SNP TSC0016539
caaaaaaccataa

SEQ ID NO: 62381 - DNA, 13 bp, Artificial Sequence
  Oligonucleotide for detection of SNP TSC0016539
ttatgggtttttg

SEQ ID NO: 62382 - DNA, 13 bp, Artificial Sequence
  Oligonucleotide for detection of SNP TSC0016539
caaaaacccataa

SEQ ID NO: 62383 - DNA, 13 bp, Artificial Sequence
  Oligonucleotide for detection of SNP TSC0016539
tagggggttatgg

SEQ ID NO: 62384 - DNA, 13 bp, Artificial Sequence
  Oligonucleotide for detection of SNP TSC0016539
ccataacccccta

SEQ ID NO: 62385 - DNA, 13 bp, Artificial Sequence
  Oligonucleotide for detection of SNP TSC0016539
taggggtttatgg

SEQ ID NO: 62386 - DNA, 13 bp, Artificial Sequence
  Oligonucleotide for detection of SNP TSC0016539
ccataaaccccta

SEQ ID NO: 62387 - DNA, 13 bp, Artificial Sequence
  Oligonucleotide for detection of SNP TSC0016541
ttttttaggtgty

SEQ ID NO: 62388 - DNA, 13 bp, Artificial Sequence
  Oligonucleotide for detection of SNP TSC0016541
racacctaaaaaa

SEQ ID NO: 62389 - DNA, 13 bp, Artificial Sequence
  Oligonucleotide for detection of SNP TSC0016541
ggtatttgagaag

SEQ ID NO: 62390 - DNA, 13 bp, Artificial Sequence
  Oligonucleotide for detection of SNP TSC0016541
cttctcaaatacc

SEQ ID NO: 62391 - DNA, 13 bp, Artificial Sequence
  Oligonucleotide for detection of SNP TSC0016541
ggtattcgagaag

SEQ ID NO: 62392 - DNA, 13 bp, Artificial Sequence
  Oligonucleotide for detection of SNP TSC0016541
cttctcgaatacc

SEQ ID NO: 62393 - DNA, 13 bp, Artificial Sequence
  Oligonucleotide for detection of SNP TSC0016542
aagttagaagaaa

SEQ ID NO: 62394 - DNA, 13 bp, Artificial Sequence
  Oligonucleotide for detection of SNP TSC0016542
tttcttctaactt

SEQ ID NO: 62395 - DNA, 13 bp, Artificial Sequence
  Oligonucleotide for detection of SNP TSC0016542
aagttaaaagaaa

SEQ ID NO: 62396 - DNA, 13 bp, Artificial Sequence
  Oligonucleotide for detection of SNP TSC0016542
tttcttttaactt

SEQ ID NO: 62397 - DNA, 13 bp, Artificial Sequence
  Oligonucleotide for detection of SNP TSC0016543
tatatgaaagtta

SEQ ID NO: 62398 - DNA, 13 bp, Artificial Sequence
  Oligonucleotide for detection of SNP TSC0016543
taactttcatata

SEQ ID NO: 62399 - DNA, 13 bp, Artificial Sequence
  Oligonucleotide for detection of SNP TSC0016543
tatatggaagtta

SEQ ID NO: 62400 - DNA, 13 bp, Artificial Sequence
  Oligonucleotide for detection of SNP TSC0016543
taacttccatata

SEQ ID NO: 62401 - DNA, 13 bp, Artificial Sequence
  Oligonucleotide for detection of SNP TSC0016543
tatacgaaagtta

SEQ ID NO: 62402 - DNA, 13 bp, Artificial Sequence
  Oligonucleotide for detection of SNP TSC0016543
taactttcgtata

SEQ ID NO: 62403 - DNA, 13 bp, Artificial Sequence
  Oligonucleotide for detection of SNP TSC0016543
tatacggaagtta

SEQ ID NO: 62404 - DNA, 13 bp, Artificial Sequence
  Oligonucleotide for detection of SNP TSC0016543
taacttccgtata

SEQ ID NO: 62405 - DNA, 13 bp, Artificial Sequence
  Oligonucleotide for detection of SNP TSC0016544
tttagtgatttat

SEQ ID NO: 62406 - DNA, 13 bp, Artificial Sequence
  Oligonucleotide for detection of SNP TSC0016544
ataaatcactaaa

SEQ ID NO: 62407 - DNA, 13 bp, Artificial Sequence
  Oligonucleotide for detection of SNP TSC0016544
tttagtaatttat

SEQ ID NO: 62408 - DNA, 13 bp, Artificial Sequence
  Oligonucleotide for detection of SNP TSC0016544
ataaattactaaa

SEQ ID NO: 62409 - DNA, 13 bp, Artificial Sequence
  Oligonucleotide for detection of SNP TSC0016546
attgtttgtgttg

SEQ ID NO: 62410 - DNA, 13 bp, Artificial Sequence
  Oligonucleotide for detection of SNP TSC0016546
caacacaaacaat

SEQ ID NO: 62411 - DNA, 13 bp, Artificial Sequence
  Oligonucleotide for detection of SNP TSC0016546
attgttcgtgttg

SEQ ID NO: 62412 - DNA, 13 bp, Artificial Sequence
  Oligonucleotide for detection of SNP TSC0016546
caacacgaacaat

SEQ ID NO: 62413 - DNA, 13 bp, Artificial Sequence
  Oligonucleotide for detection of SNP TSC0016546
attgtttgcgttg

SEQ ID NO: 62414 - DNA, 13 bp, Artificial Sequence
  Oligonucleotide for detection of SNP TSC0016546
caacgcaaacaat

SEQ ID NO: 62415 - DNA, 13 bp, Artificial Sequence
  Oligonucleotide for detection of SNP TSC0016546
attgttcgcgttg

SEQ ID NO: 62416 - DNA, 13 bp, Artificial Sequence
  Oligonucleotide for detection of SNP TSC0016546
caacgcgaacaat

SEQ ID NO: 62417 - DNA, 13 bp, Artificial Sequence
  Oligonucleotide for detection of SNP TSC0016546
tagtgtgggtaat

SEQ ID NO: 62418 - DNA, 13 bp, Artificial Sequence
  Oligonucleotide for detection of SNP TSC0016546
attacccacacta

SEQ ID NO: 62419 - DNA, 13 bp, Artificial Sequence
  Oligonucleotide for detection of SNP TSC0016546
tagtgtaggtaat

SEQ ID NO: 62420 - DNA, 13 bp, Artificial Sequence
  Oligonucleotide for detection of SNP TSC0016546
attacctacacta

SEQ ID NO: 62421 - DNA, 13 bp, Artificial Sequence
  Oligonucleotide for detection of SNP TSC0016546
tagcgtgggtaat

SEQ ID NO: 62422 - DNA, 13 bp, Artificial Sequence
  Oligonucleotide for detection of SNP TSC0016546
attacccacgcta

SEQ ID NO: 62423 - DNA, 13 bp, Artificial Sequence
  Oligonucleotide for detection of SNP TSC0016546
tagcgtaggtaat

SEQ ID NO: 62424 - DNA, 13 bp, Artificial Sequence
  Oligonucleotide for detection of SNP TSC0016546
attacctacgcta

SEQ ID NO: 62425 - DNA, 13 bp, Artificial Sequence
  Oligonucleotide for detection of SNP TSC0016546
tagtgcgggtaat

SEQ ID NO: 62426 - DNA, 13 bp, Artificial Sequence
  Oligonucleotide for detection of SNP TSC0016546
attacccgcacta

SEQ ID NO: 62427 - DNA, 13 bp, Artificial Sequence
  Oligonucleotide for detection of SNP TSC0016546
tagcgcgggtaat

SEQ ID NO: 62428 - DNA, 13 bp, Artificial Sequence
  Oligonucleotide for detection of SNP TSC0016546
attacccgcgcta

SEQ ID NO: 62429 - DNA, 13 bp, Artificial Sequence
  Oligonucleotide for detection of SNP TSC0016547
gaatgggtgatta

SEQ ID NO: 62430 - DNA, 13 bp, Artificial Sequence
  Oligonucleotide for detection of SNP TSC0016547
taatcacccattc

SEQ ID NO: 62431 - DNA, 13 bp, Artificial Sequence
  Oligonucleotide for detection of SNP TSC0016547
gaatggatgatta

SEQ ID NO: 62432 - DNA, 13 bp, Artificial Sequence
  Oligonucleotide for detection of SNP TSC0016547
taatcatccattc

SEQ ID NO: 62433 - DNA, 13 bp, Artificial Sequence
  Oligonucleotide for detection of SNP TSC0016548
tgttaagtaatta

SEQ ID NO: 62434 - DNA, 13 bp, Artificial Sequence
  Oligonucleotide for detection of SNP TSC0016548
taattacttaaca

SEQ ID NO: 62435 - DNA, 13 bp, Artificial Sequence
  Oligonucleotide for detection of SNP TSC0016548
tgttaaataatta

SEQ ID NO: 62436 - DNA, 13 bp, Artificial Sequence
  Oligonucleotide for detection of SNP TSC0016548
taattatttaaca

SEQ ID NO: 62437 - DNA, 13 bp, Artificial Sequence
  Oligonucleotide for detection of SNP TSC0016550
atttatagaggaa

SEQ ID NO: 62438 - DNA, 13 bp, Artificial Sequence
  Oligonucleotide for detection of SNP TSC0016550
ttcctctataaat

SEQ ID NO: 62439 - DNA, 13 bp, Artificial Sequence
  Oligonucleotide for detection of SNP TSC0016550
atttatggaggaa

SEQ ID NO: 62440 - DNA, 13 bp, Artificial Sequence
  Oligonucleotide for detection of SNP TSC0016550
ttcctccataaat

SEQ ID NO: 62441 - DNA, 13 bp, Artificial Sequence
  Oligonucleotide for detection of SNP TSC0016550
atttacggaggaa

SEQ ID NO: 62442 - DNA, 13 bp, Artificial Sequence
  Oligonucleotide for detection of SNP TSC0016550
ttcctccgtaaat

SEQ ID NO: 62443 - DNA, 13 bp, Artificial Sequence
  Oligonucleotide for detection of SNP TSC0016550
tttttttgtgggt

SEQ ID NO: 62444 - DNA, 13 bp, Artificial Sequence
  Oligonucleotide for detection of SNP TSC0016550
acccacaaaaaaa

SEQ ID NO: 62445 - DNA, 13 bp, Artificial Sequence
  Oligonucleotide for detection of SNP TSC0016550
ttttttcgtgggt

SEQ ID NO: 62446 - DNA, 13 bp, Artificial Sequence
  Oligonucleotide for detection of SNP TSC0016550
acccacgaaaaaa

SEQ ID NO: 62447 - DNA, 13 bp, Artificial Sequence
  Oligonucleotide for detection of SNP TSC0016551
ataggaaaattgy

SEQ ID NO: 62448 - DNA, 13 bp, Artificial Sequence
  Oligonucleotide for detection of SNP TSC0016551
rcaattttcctat

SEQ ID NO: 62449 - DNA, 13 bp, Artificial Sequence
  Oligonucleotide for detection of SNP TSC0016551
ataggagaattgy

SEQ ID NO: 62450 - DNA, 13 bp, Artificial Sequence
  Oligonucleotide for detection of SNP TSC0016551
rcaattctcctat

SEQ ID NO: 62451 - DNA, 13 bp, Artificial Sequence
  Oligonucleotide for detection of SNP TSC0016551
ataggaaaatcgy

SEQ ID NO: 62452 - DNA, 13 bp, Artificial Sequence
  Oligonucleotide for detection of SNP TSC0016551
rcgattttcctat

SEQ ID NO: 62453 - DNA, 13 bp, Artificial Sequence
  Oligonucleotide for detection of SNP TSC0016551
ataggagaatcgy

SEQ ID NO: 62454 - DNA, 13 bp, Artificial Sequence
  Oligonucleotide for detection of SNP TSC0016551
rcgattctcctat

SEQ ID NO: 62455 - DNA, 13 bp, Artificial Sequence
  Oligonucleotide for detection of SNP TSC0016554
aaagggattttty

SEQ ID NO: 62456 - DNA, 13 bp, Artificial Sequence
  Oligonucleotide for detection of SNP TSC0016554
raaaaatcccttt

SEQ ID NO: 62457 - DNA, 13 bp, Artificial Sequence
  Oligonucleotide for detection of SNP TSC0016554
aaaggggttttty

SEQ ID NO: 62458 - DNA, 13 bp, Artificial Sequence
  Oligonucleotide for detection of SNP TSC0016554
raaaaaccccttt

SEQ ID NO: 62459 - DNA, 13 bp, Artificial Sequence
  Oligonucleotide for detection of SNP TSC0016555
aattaagtaaata

SEQ ID NO: 62460 - DNA, 13 bp, Artificial Sequence
  Oligonucleotide for detection of SNP TSC0016555
tatttacttaatt

SEQ ID NO: 62461 - DNA, 13 bp, Artificial Sequence
  Oligonucleotide for detection of SNP TSC0016558
tttaaagtaaaag

SEQ ID NO: 62462 - DNA, 13 bp, Artificial Sequence
  Oligonucleotide for detection of SNP TSC0016558
cttttactttaaa

SEQ ID NO: 62463 - DNA, 13 bp, Artificial Sequence
  Oligonucleotide for detection of SNP TSC0016558
tttaaaataaaag

SEQ ID NO: 62464 - DNA, 13 bp, Artificial Sequence
  Oligonucleotide for detection of SNP TSC0016558
cttttattttaaa

SEQ ID NO: 62465 - DNA, 13 bp, Artificial Sequence
  Oligonucleotide for detection of SNP TSC0016561
tttaaggtttagg

SEQ ID NO: 62466 - DNA, 13 bp, Artificial Sequence
  Oligonucleotide for detection of SNP TSC0016561
cctaaaccttaaa

SEQ ID NO: 62467 - DNA, 13 bp, Artificial Sequence
  Oligonucleotide for detection of SNP TSC0016561
tttaagttttagg

SEQ ID NO: 62468 - DNA, 13 bp, Artificial Sequence
  Oligonucleotide for detection of SNP TSC0016561
cctaaaacttaaa

SEQ ID NO: 62469 - DNA, 13 bp, Artificial Sequence
  Oligonucleotide for detection of SNP TSC0016561
tttagattttggg

SEQ ID NO: 62470 - DNA, 13 bp, Artificial Sequence
  Oligonucleotide for detection of SNP TSC0016561
cccaaaatctaaa

SEQ ID NO: 62471 - DNA, 13 bp, Artificial Sequence
  Oligonucleotide for detection of SNP TSC0016561
tttagaatttggg

SEQ ID NO: 62472 - DNA, 13 bp, Artificial Sequence
  Oligonucleotide for detection of SNP TSC0016561
cccaaattctaaa

SEQ ID NO: 62473 - DNA, 13 bp, Artificial Sequence
  Oligonucleotide for detection of SNP TSC0016564
tagttagtgattt

SEQ ID NO: 62474 - DNA, 13 bp, Artificial Sequence
  Oligonucleotide for detection of SNP TSC0016564
aaatcactaacta

SEQ ID NO: 62475 - DNA, 13 bp, Artificial Sequence
  Oligonucleotide for detection of SNP TSC0016564
tagttaatgattt

SEQ ID NO: 62476 - DNA, 13 bp, Artificial Sequence
  Oligonucleotide for detection of SNP TSC0016564
aaatcattaacta

SEQ ID NO: 62477 - DNA, 13 bp, Artificial Sequence
  Oligonucleotide for detection of SNP TSC0016567
tgatttattttga

SEQ ID NO: 62478 - DNA, 13 bp, Artificial Sequence
  Oligonucleotide for detection of SNP TSC0016567
tcaaaataaatca

SEQ ID NO: 62479 - DNA, 13 bp, Artificial Sequence
  Oligonucleotide for detection of SNP TSC0016567
tgatttgttttga

SEQ ID NO: 62480 - DNA, 13 bp, Artificial Sequence
  Oligonucleotide for detection of SNP TSC0016567
tcaaaacaaatca

SEQ ID NO: 62481 - DNA, 13 bp, Artificial Sequence
  Oligonucleotide for detection of SNP TSC0016567
tgattcgttttga

SEQ ID NO: 62482 - DNA, 13 bp, Artificial Sequence
  Oligonucleotide for detection of SNP TSC0016567
tcaaaacgaatca

SEQ ID NO: 62483 - DNA, 13 bp, Artificial Sequence
  Oligonucleotide for detection of SNP TSC0016567
ttaggatgagtta

SEQ ID NO: 62484 - DNA, 13 bp, Artificial Sequence
  Oligonucleotide for detection of SNP TSC0016567
taactcatcctaa

SEQ ID NO: 62485 - DNA, 13 bp, Artificial Sequence
  Oligonucleotide for detection of SNP TSC0016567
ttaggacgagtta

SEQ ID NO: 62486 - DNA, 13 bp, Artificial Sequence
  Oligonucleotide for detection of SNP TSC0016567
taactcgtcctaa

SEQ ID NO: 62487 - DNA, 13 bp, Artificial Sequence
  Oligonucleotide for detection of SNP TSC0016568
tgtgggggtgtgt

SEQ ID NO: 62488 - DNA, 13 bp, Artificial Sequence
  Oligonucleotide for detection of SNP TSC0016568
acacacccccaca

SEQ ID NO: 62489 - DNA, 13 bp, Artificial Sequence
  Oligonucleotide for detection of SNP TSC0016568
tgtgggtgtgtgt

SEQ ID NO: 62490 - DNA, 13 bp, Artificial Sequence
  Oligonucleotide for detection of SNP TSC0016568
acacacacccaca

SEQ ID NO: 62491 - DNA, 13 bp, Artificial Sequence
  Oligonucleotide for detection of SNP TSC0016568
atatatttttata

SEQ ID NO: 62492 - DNA, 13 bp, Artificial Sequence
  Oligonucleotide for detection of SNP TSC0016568
tataaaaatatat

SEQ ID NO: 62493 - DNA, 13 bp, Artificial Sequence
  Oligonucleotide for detection of SNP TSC0016568
atatatatttata

SEQ ID NO: 62494 - DNA, 13 bp, Artificial Sequence
  Oligonucleotide for detection of SNP TSC0016568
tataaatatatat

SEQ ID NO: 62495 - DNA, 13 bp, Artificial Sequence
  Oligonucleotide for detection of SNP TSC0016574
tgttgtaggtgty

SEQ ID NO: 62496 - DNA, 13 bp, Artificial Sequence
  Oligonucleotide for detection of SNP TSC0016574
racacctacaaca

SEQ ID NO: 62497 - DNA, 13 bp, Artificial Sequence
  Oligonucleotide for detection of SNP TSC0016574
tgttgtgggtgty

SEQ ID NO: 62498 - DNA, 13 bp, Artificial Sequence
  Oligonucleotide for detection of SNP TSC0016574
racacccacaaca

SEQ ID NO: 62499 - DNA, 13 bp, Artificial Sequence
  Oligonucleotide for detection of SNP TSC0016574
tgttgcgggtgty

SEQ ID NO: 62500 - DNA, 13 bp, Artificial Sequence
  Oligonucleotide for detection of SNP TSC0016574
racacccgcaaca

SEQ ID NO: 62501 - DNA, 13 bp, Artificial Sequence
  Oligonucleotide for detection of SNP TSC0016574
ggtatttgtagta

SEQ ID NO: 62502 - DNA, 13 bp, Artificial Sequence
  Oligonucleotide for detection of SNP TSC0016574
tactacaaatacc

SEQ ID NO: 62503 - DNA, 13 bp, Artificial Sequence
  Oligonucleotide for detection of SNP TSC0016574
ggtattcgtagta

SEQ ID NO: 62504 - DNA, 13 bp, Artificial Sequence
  Oligonucleotide for detection of SNP TSC0016574
tactacgaatacc

SEQ ID NO: 62505 - DNA, 13 bp, Artificial Sequence
  Oligonucleotide for detection of SNP TSC0016576
atgtgtataagay

SEQ ID NO: 62506 - DNA, 13 bp, Artificial Sequence
  Oligonucleotide for detection of SNP TSC0016576
rtcttatacacat

SEQ ID NO: 62507 - DNA, 13 bp, Artificial Sequence
  Oligonucleotide for detection of SNP TSC0016576
atgtgtgtaagay

SEQ ID NO: 62508 - DNA, 13 bp, Artificial Sequence
  Oligonucleotide for detection of SNP TSC0016576
rtcttacacacat

SEQ ID NO: 62509 - DNA, 13 bp, Artificial Sequence
  Oligonucleotide for detection of SNP TSC0016577
tgtgtgtggtggg

SEQ ID NO: 62510 - DNA, 13 bp, Artificial Sequence
  Oligonucleotide for detection of SNP TSC0016577
cccaccacacaca

SEQ ID NO: 62511 - DNA, 13 bp, Artificial Sequence
  Oligonucleotide for detection of SNP TSC0016577
tgtgtgcggtggg

SEQ ID NO: 62512 - DNA, 13 bp, Artificial Sequence
  Oligonucleotide for detection of SNP TSC0016577
cccaccgcacaca

SEQ ID NO: 62513 - DNA, 13 bp, Artificial Sequence
  Oligonucleotide for detection of SNP TSC0016579
gggtgtattggga

SEQ ID NO: 62514 - DNA, 13 bp, Artificial Sequence
  Oligonucleotide for detection of SNP TSC0016579
tcccaatacaccc

SEQ ID NO: 62515 - DNA, 13 bp, Artificial Sequence
  Oligonucleotide for detection of SNP TSC0016579
gggtgtgttggga

SEQ ID NO: 62516 - DNA, 13 bp, Artificial Sequence
  Oligonucleotide for detection of SNP TSC0016579
tcccaacacaccc

SEQ ID NO: 62517 - DNA, 13 bp, Artificial Sequence
  Oligonucleotide for detection of SNP TSC0016579
gggtgcgttggga

SEQ ID NO: 62518 - DNA, 13 bp, Artificial Sequence
  Oligonucleotide for detection of SNP TSC0016579
tcccaacgcaccc

SEQ ID NO: 62519 - DNA, 13 bp, Artificial Sequence
  Oligonucleotide for detection of SNP TSC0016579
ttttagtgtatty

SEQ ID NO: 62520 - DNA, 13 bp, Artificial Sequence
  Oligonucleotide for detection of SNP TSC0016579
raatacactaaaa

SEQ ID NO: 62521 - DNA, 13 bp, Artificial Sequence
  Oligonucleotide for detection of SNP TSC0016579
ttttagcgtatty

SEQ ID NO: 62522 - DNA, 13 bp, Artificial Sequence
  Oligonucleotide for detection of SNP TSC0016579
raatacgctaaaa

SEQ ID NO: 62523 - DNA, 13 bp, Artificial Sequence
  Oligonucleotide for detection of SNP TSC0016581
agttttattttta

SEQ ID NO: 62524 - DNA, 13 bp, Artificial Sequence
  Oligonucleotide for detection of SNP TSC0016581
taaaaataaaact

SEQ ID NO: 62525 - DNA, 13 bp, Artificial Sequence
  Oligonucleotide for detection of SNP TSC0016581
agttttgttttta

SEQ ID NO: 62526 - DNA, 13 bp, Artificial Sequence
  Oligonucleotide for detection of SNP TSC0016581
taaaaacaaaact

SEQ ID NO: 62527 - DNA, 13 bp, Artificial Sequence
  Oligonucleotide for detection of SNP TSC0016581
agtttcgttttta

SEQ ID NO: 62528 - DNA, 13 bp, Artificial Sequence
  Oligonucleotide for detection of SNP TSC0016581
taaaaacgaaact

SEQ ID NO: 62529 - DNA, 13 bp, Artificial Sequence
  Oligonucleotide for detection of SNP TSC0016581
tgggagtgaggtt

SEQ ID NO: 62530 - DNA, 13 bp, Artificial Sequence
  Oligonucleotide for detection of SNP TSC0016581
aacctcactccca

SEQ ID NO: 62531 - DNA, 13 bp, Artificial Sequence
  Oligonucleotide for detection of SNP TSC0016581
tgggagcgaggtt

SEQ ID NO: 62532 - DNA, 13 bp, Artificial Sequence
  Oligonucleotide for detection of SNP TSC0016581
aacctcgctccca

SEQ ID NO: 62533 - DNA, 13 bp, Artificial Sequence
  Oligonucleotide for detection of SNP TSC0016582
tatataagaattt

SEQ ID NO: 62534 - DNA, 13 bp, Artificial Sequence
  Oligonucleotide for detection of SNP TSC0016582
aaattcttatata

SEQ ID NO: 62535 - DNA, 13 bp, Artificial Sequence
  Oligonucleotide for detection of SNP TSC0016582
tatataggaattt

SEQ ID NO: 62536 - DNA, 13 bp, Artificial Sequence
  Oligonucleotide for detection of SNP TSC0016582
aaattcctatata

SEQ ID NO: 62537 - DNA, 13 bp, Artificial Sequence
  Oligonucleotide for detection of SNP TSC0016583
tttaaagtttgty

SEQ ID NO: 62538 - DNA, 13 bp, Artificial Sequence
  Oligonucleotide for detection of SNP TSC0016583
racaaactttaaa

SEQ ID NO: 62539 - DNA, 13 bp, Artificial Sequence
  Oligonucleotide for detection of SNP TSC0016583
tttaaaatttgty

SEQ ID NO: 62540 - DNA, 13 bp, Artificial Sequence
  Oligonucleotide for detection of SNP TSC0016583
racaaattttaaa

SEQ ID NO: 62541 - DNA, 13 bp, Artificial Sequence
  Oligonucleotide for detection of SNP TSC0016584
gtgtttaaagagg

SEQ ID NO: 62542 - DNA, 13 bp, Artificial Sequence
  Oligonucleotide for detection of SNP TSC0016584
cctctttaaacac

SEQ ID NO: 62543 - DNA, 13 bp, Artificial Sequence
  Oligonucleotide for detection of SNP TSC0016584
gtgttttaagagg

SEQ ID NO: 62544 - DNA, 13 bp, Artificial Sequence
  Oligonucleotide for detection of SNP TSC0016584
cctcttaaaacac

SEQ ID NO: 62545 - DNA, 13 bp, Artificial Sequence
  Oligonucleotide for detection of SNP TSC0016584
tttttttaagtay

SEQ ID NO: 62546 - DNA, 13 bp, Artificial Sequence
  Oligonucleotide for detection of SNP TSC0016584
rtacttaaaaaaa

SEQ ID NO: 62547 - DNA, 13 bp, Artificial Sequence
  Oligonucleotide for detection of SNP TSC0016584
ttttttaaagtay

SEQ ID NO: 62548 - DNA, 13 bp, Artificial Sequence
  Oligonucleotide for detection of SNP TSC0016584
rtactttaaaaaa

SEQ ID NO: 62549 - DNA, 13 bp, Artificial Sequence
  Oligonucleotide for detection of SNP TSC0016585
ttttgcgagaaaa

SEQ ID NO: 62550 - DNA, 13 bp, Artificial Sequence
  Oligonucleotide for detection of SNP TSC0016585
ttttctcgcaaaa

SEQ ID NO: 62551 - DNA, 13 bp, Artificial Sequence
  Oligonucleotide for detection of SNP TSC0016585
tttttttgtagag

SEQ ID NO: 62552 - DNA, 13 bp, Artificial Sequence
  Oligonucleotide for detection of SNP TSC0016585
ctctacaaaaaaa

SEQ ID NO: 62553 - DNA, 13 bp, Artificial Sequence
  Oligonucleotide for detection of SNP TSC0016585
ttttttcgtagag

SEQ ID NO: 62554 - DNA, 13 bp, Artificial Sequence
  Oligonucleotide for detection of SNP TSC0016585
ctctacgaaaaaa

SEQ ID NO: 62555 - DNA, 13 bp, Artificial Sequence
  Oligonucleotide for detection of SNP TSC0016586
ttttaagtagaay

SEQ ID NO: 62556 - DNA, 13 bp, Artificial Sequence
  Oligonucleotide for detection of SNP TSC0016586
rttctacttaaaa

SEQ ID NO: 62557 - DNA, 13 bp, Artificial Sequence
  Oligonucleotide for detection of SNP TSC0016586
ttttaaatagaay

SEQ ID NO: 62558 - DNA, 13 bp, Artificial Sequence
  Oligonucleotide for detection of SNP TSC0016586
rttctatttaaaa

SEQ ID NO: 62559 - DNA, 13 bp, Artificial Sequence
  Oligonucleotide for detection of SNP TSC0016587
ggattagtgtgga

SEQ ID NO: 62560 - DNA, 13 bp, Artificial Sequence
  Oligonucleotide for detection of SNP TSC0016587
tccacactaatcc

SEQ ID NO: 62561 - DNA, 13 bp, Artificial Sequence
  Oligonucleotide for detection of SNP TSC0016587
ggattaatgtgga

SEQ ID NO: 62562 - DNA, 13 bp, Artificial Sequence
  Oligonucleotide for detection of SNP TSC0016587
tccacattaatcc

SEQ ID NO: 62563 - DNA, 13 bp, Artificial Sequence
  Oligonucleotide for detection of SNP TSC0016588
ttttattaggttt

SEQ ID NO: 62564 - DNA, 13 bp, Artificial Sequence
  Oligonucleotide for detection of SNP TSC0016588
aaacctaataaaa

SEQ ID NO: 62565 - DNA, 13 bp, Artificial Sequence
  Oligonucleotide for detection of SNP TSC0016588
ttttatgaggttt

SEQ ID NO: 62566 - DNA, 13 bp, Artificial Sequence
  Oligonucleotide for detection of SNP TSC0016588
aaacctcataaaa

SEQ ID NO: 62567 - DNA, 13 bp, Artificial Sequence
  Oligonucleotide for detection of SNP TSC0016588
aggtttgatagga

SEQ ID NO: 62568 - DNA, 13 bp, Artificial Sequence
  Oligonucleotide for detection of SNP TSC0016588
tcctatcaaacct

SEQ ID NO: 62569 - DNA, 13 bp, Artificial Sequence
  Oligonucleotide for detection of SNP TSC0016588
aggttttatagga

SEQ ID NO: 62570 - DNA, 13 bp, Artificial Sequence
  Oligonucleotide for detection of SNP TSC0016588
tcctataaaacct

SEQ ID NO: 62571 - DNA, 13 bp, Artificial Sequence
  Oligonucleotide for detection of SNP TSC0016589
gttaggggggtga

SEQ ID NO: 62572 - DNA, 13 bp, Artificial Sequence
  Oligonucleotide for detection of SNP TSC0016589
tcacccccctaac

SEQ ID NO: 62573 - DNA, 13 bp, Artificial Sequence
  Oligonucleotide for detection of SNP TSC0016589
gttaggtgggtga

SEQ ID NO: 62574 - DNA, 13 bp, Artificial Sequence
  Oligonucleotide for detection of SNP TSC0016589
tcacccacctaac

SEQ ID NO: 62575 - DNA, 13 bp, Artificial Sequence
  Oligonucleotide for detection of SNP TSC0016589
gttaggggggcga

SEQ ID NO: 62576 - DNA, 13 bp, Artificial Sequence
  Oligonucleotide for detection of SNP TSC0016589
tcgcccccctaac

SEQ ID NO: 62577 - DNA, 13 bp, Artificial Sequence
  Oligonucleotide for detection of SNP TSC0016589
gttaggtgggcga

SEQ ID NO: 62578 - DNA, 13 bp, Artificial Sequence
  Oligonucleotide for detection of SNP TSC0016589
tcgcccacctaac

SEQ ID NO: 62579 - DNA, 13 bp, Artificial Sequence
  Oligonucleotide for detection of SNP TSC0016589
ttgtttatttgay

SEQ ID NO: 62580 - DNA, 13 bp, Artificial Sequence
  Oligonucleotide for detection of SNP TSC0016589
rtcaaataaacaa

SEQ ID NO: 62581 - DNA, 13 bp, Artificial Sequence
  Oligonucleotide for detection of SNP TSC0016589
tcgtttttttgay

SEQ ID NO: 62582 - DNA, 13 bp, Artificial Sequence
  Oligonucleotide for detection of SNP TSC0016589
rtcaaaaaaacga

SEQ ID NO: 62583 - DNA, 13 bp, Artificial Sequence
  Oligonucleotide for detection of SNP TSC0016589
tcgtttatttgay

SEQ ID NO: 62584 - DNA, 13 bp, Artificial Sequence
  Oligonucleotide for detection of SNP TSC0016589
rtcaaataaacga

SEQ ID NO: 62585 - DNA, 13 bp, Artificial Sequence
  Oligonucleotide for detection of SNP TSC0016591
atttatagaggta

SEQ ID NO: 62586 - DNA, 13 bp, Artificial Sequence
  Oligonucleotide for detection of SNP TSC0016591
tacctctataaat

SEQ ID NO: 62587 - DNA, 13 bp, Artificial Sequence
  Oligonucleotide for detection of SNP TSC0016591
atttatggaggta

SEQ ID NO: 62588 - DNA, 13 bp, Artificial Sequence
  Oligonucleotide for detection of SNP TSC0016591
tacctccataaat

SEQ ID NO: 62589 - DNA, 13 bp, Artificial Sequence
  Oligonucleotide for detection of SNP TSC0016591
atttacggaggta

SEQ ID NO: 62590 - DNA, 13 bp, Artificial Sequence
  Oligonucleotide for detection of SNP TSC0016591
tacctccgtaaat

SEQ ID NO: 62591 - DNA, 13 bp, Artificial Sequence
  Oligonucleotide for detection of SNP TSC0016591
tgtttttgtgagt

SEQ ID NO: 62592 - DNA, 13 bp, Artificial Sequence
  Oligonucleotide for detection of SNP TSC0016591
actcacaaaaaca

SEQ ID NO: 62593 - DNA, 13 bp, Artificial Sequence
  Oligonucleotide for detection of SNP TSC0016591
tgttttcgtgagt

SEQ ID NO: 62594 - DNA, 13 bp, Artificial Sequence
  Oligonucleotide for detection of SNP TSC0016591
actcacgaaaaca

SEQ ID NO: 62595 - DNA, 13 bp, Artificial Sequence
  Oligonucleotide for detection of SNP TSC0016592
ggttggggaagtt

SEQ ID NO: 62596 - DNA, 13 bp, Artificial Sequence
  Oligonucleotide for detection of SNP TSC0016592
aacttccccaacc

SEQ ID NO: 62597 - DNA, 13 bp, Artificial Sequence
  Oligonucleotide for detection of SNP TSC0016592
ggttggtgaagtt

SEQ ID NO: 62598 - DNA, 13 bp, Artificial Sequence
  Oligonucleotide for detection of SNP TSC0016592
aacttcaccaacc

SEQ ID NO: 62599 - DNA, 13 bp, Artificial Sequence
  Oligonucleotide for detection of SNP TSC0016592
aatttttttagty

SEQ ID NO: 62600 - DNA, 13 bp, Artificial Sequence
  Oligonucleotide for detection of SNP TSC0016592
ractaaaaaaatt

SEQ ID NO: 62601 - DNA, 13 bp, Artificial Sequence
  Oligonucleotide for detection of SNP TSC0016592
aattttattagty

SEQ ID NO: 62602 - DNA, 13 bp, Artificial Sequence
  Oligonucleotide for detection of SNP TSC0016592
ractaataaaatt

SEQ ID NO: 62603 - DNA, 13 bp, Artificial Sequence
  Oligonucleotide for detection of SNP TSC0016593
aaaagatgttagg

SEQ ID NO: 62604 - DNA, 13 bp, Artificial Sequence
  Oligonucleotide for detection of SNP TSC0016593
cctaacatctttt

SEQ ID NO: 62605 - DNA, 13 bp, Artificial Sequence
  Oligonucleotide for detection of SNP TSC0016593
aaaagacgttagg

SEQ ID NO: 62606 - DNA, 13 bp, Artificial Sequence
  Oligonucleotide for detection of SNP TSC0016593
cctaacgtctttt

SEQ ID NO: 62607 - DNA, 13 bp, Artificial Sequence
  Oligonucleotide for detection of SNP TSC0016595
ggaaggtgggtta

SEQ ID NO: 62608 - DNA, 13 bp, Artificial Sequence
  Oligonucleotide for detection of SNP TSC0016595
taacccaccttcc

SEQ ID NO: 62609 - DNA, 13 bp, Artificial Sequence
  Oligonucleotide for detection of SNP TSC0016595
ggaaggcgggtta

SEQ ID NO: 62610 - DNA, 13 bp, Artificial Sequence
  Oligonucleotide for detection of SNP TSC0016595
taacccgccttcc

SEQ ID NO: 62611 - DNA, 13 bp, Artificial Sequence
  Oligonucleotide for detection of SNP TSC0016595
tgatttgttttty

SEQ ID NO: 62612 - DNA, 13 bp, Artificial Sequence
  Oligonucleotide for detection of SNP TSC0016595
raaaaacaaatca

SEQ ID NO: 62613 - DNA, 13 bp, Artificial Sequence
  Oligonucleotide for detection of SNP TSC0016595
tgatttattttty

SEQ ID NO: 62614 - DNA, 13 bp, Artificial Sequence
  Oligonucleotide for detection of SNP TSC0016595
raaaaataaatca

SEQ ID NO: 62615 - DNA, 13 bp, Artificial Sequence
  Oligonucleotide for detection of SNP TSC0016595
tgattcgttttty

SEQ ID NO: 62616 - DNA, 13 bp, Artificial Sequence
  Oligonucleotide for detection of SNP TSC0016595
raaaaacgaatca

SEQ ID NO: 62617 - DNA, 13 bp, Artificial Sequence
  Oligonucleotide for detection of SNP TSC0016596
ttgaaggatgaaa

SEQ ID NO: 62618 - DNA, 13 bp, Artificial Sequence
  Oligonucleotide for detection of SNP TSC0016596
tttcatccttcaa

SEQ ID NO: 62619 - DNA, 13 bp, Artificial Sequence
  Oligonucleotide for detection of SNP TSC0016596
ttgaagtatgaaa

SEQ ID NO: 62620 - DNA, 13 bp, Artificial Sequence
  Oligonucleotide for detection of SNP TSC0016596
tttcatacttcaa

SEQ ID NO: 62621 - DNA, 13 bp, Artificial Sequence
  Oligonucleotide for detection of SNP TSC0016596
ttttattttttag

SEQ ID NO: 62622 - DNA, 13 bp, Artificial Sequence
  Oligonucleotide for detection of SNP TSC0016596
ctaaaaaataaaa

SEQ ID NO: 62623 - DNA, 13 bp, Artificial Sequence
  Oligonucleotide for detection of SNP TSC0016597
tttattttttaty

SEQ ID NO: 62624 - DNA, 13 bp, Artificial Sequence
  Oligonucleotide for detection of SNP TSC0016597
rataaaaaataaa

SEQ ID NO: 62625 - DNA, 13 bp, Artificial Sequence
  Oligonucleotide for detection of SNP TSC0016597
ggtgaagggtagg

SEQ ID NO: 62626 - DNA, 13 bp, Artificial Sequence
  Oligonucleotide for detection of SNP TSC0016597
cctacccttcacc

SEQ ID NO: 62627 - DNA, 13 bp, Artificial Sequence
  Oligonucleotide for detection of SNP TSC0016597
ggtgaatggtagg

SEQ ID NO: 62628 - DNA, 13 bp, Artificial Sequence
  Oligonucleotide for detection of SNP TSC0016597
cctaccattcacc

SEQ ID NO: 62629 - DNA, 13 bp, Artificial Sequence
  Oligonucleotide for detection of SNP TSC0016597
ggtgaacggtagg

SEQ ID NO: 62630 - DNA, 13 bp, Artificial Sequence
  Oligonucleotide for detection of SNP TSC0016597
cctaccgttcacc

SEQ ID NO: 62631 - DNA, 13 bp, Artificial Sequence
  Oligonucleotide for detection of SNP TSC0016598
attagatggtaaa

SEQ ID NO: 62632 - DNA, 13 bp, Artificial Sequence
  Oligonucleotide for detection of SNP TSC0016598
tttaccatctaat

SEQ ID NO: 62633 - DNA, 13 bp, Artificial Sequence
  Oligonucleotide for detection of SNP TSC0016598
attagagggtaaa

SEQ ID NO: 62634 - DNA, 13 bp, Artificial Sequence
  Oligonucleotide for detection of SNP TSC0016598
tttaccctctaat

SEQ ID NO: 62635 - DNA, 13 bp, Artificial Sequence
  Oligonucleotide for detection of SNP TSC0016598
attagacggtaaa

SEQ ID NO: 62636 - DNA, 13 bp, Artificial Sequence
  Oligonucleotide for detection of SNP TSC0016598
tttaccgtctaat

SEQ ID NO: 62637 - DNA, 13 bp, Artificial Sequence
  Oligonucleotide for detection of SNP TSC0016598
tttattgtttaat

SEQ ID NO: 62638 - DNA, 13 bp, Artificial Sequence
  Oligonucleotide for detection of SNP TSC0016598
attaaacaataaa

SEQ ID NO: 62639 - DNA, 13 bp, Artificial Sequence
  Oligonucleotide for detection of SNP TSC0016598
tttattttttaat

SEQ ID NO: 62640 - DNA, 13 bp, Artificial Sequence
  Oligonucleotide for detection of SNP TSC0016598
attaaaaaataaa

SEQ ID NO: 62641 - DNA, 13 bp, Artificial Sequence
  Oligonucleotide for detection of SNP TSC0016598
tttatcgtttaat

SEQ ID NO: 62642 - DNA, 13 bp, Artificial Sequence
  Oligonucleotide for detection of SNP TSC0016598
attaaacgataaa

SEQ ID NO: 62643 - DNA, 13 bp, Artificial Sequence
  Oligonucleotide for detection of SNP TSC0016599
gtgatgtggagta

SEQ ID NO: 62644 - DNA, 13 bp, Artificial Sequence
  Oligonucleotide for detection of SNP TSC0016599
tactccacatcac

SEQ ID NO: 62645 - DNA, 13 bp, Artificial Sequence
  Oligonucleotide for detection of SNP TSC0016599
gtgacgtggagta

SEQ ID NO: 62646 - DNA, 13 bp, Artificial Sequence
  Oligonucleotide for detection of SNP TSC0016599
tactccacgtcac

SEQ ID NO: 62647 - DNA, 13 bp, Artificial Sequence
  Oligonucleotide for detection of SNP TSC0016599
gtgatgcggagta

SEQ ID NO: 62648 - DNA, 13 bp, Artificial Sequence
  Oligonucleotide for detection of SNP TSC0016599
tactccgcatcac

SEQ ID NO: 62649 - DNA, 13 bp, Artificial Sequence
  Oligonucleotide for detection of SNP TSC0016599
gtgacgcggagta

SEQ ID NO: 62650 - DNA, 13 bp, Artificial Sequence
  Oligonucleotide for detection of SNP TSC0016599
tactccgcgtcac

SEQ ID NO: 62651 - DNA, 13 bp, Artificial Sequence
  Oligonucleotide for detection of SNP TSC0016599
tgttttgtgttay

SEQ ID NO: 62652 - DNA, 13 bp, Artificial Sequence
  Oligonucleotide for detection of SNP TSC0016599
rtaacacaaaaca

SEQ ID NO: 62653 - DNA, 13 bp, Artificial Sequence
  Oligonucleotide for detection of SNP TSC0016599
tgttttatgttay

SEQ ID NO: 62654 - DNA, 13 bp, Artificial Sequence
  Oligonucleotide for detection of SNP TSC0016599
rtaacataaaaca

SEQ ID NO: 62655 - DNA, 13 bp, Artificial Sequence
  Oligonucleotide for detection of SNP TSC0016599
tgtttcgtgttay

SEQ ID NO: 62656 - DNA, 13 bp, Artificial Sequence
  Oligonucleotide for detection of SNP TSC0016599
rtaacacgaaaca

SEQ ID NO: 62657 - DNA, 13 bp, Artificial Sequence
  Oligonucleotide for detection of SNP TSC0016599
tgttttacgttay

SEQ ID NO: 62658 - DNA, 13 bp, Artificial Sequence
  Oligonucleotide for detection of SNP TSC0016599
rtaacgtaaaaca

SEQ ID NO: 62659 - DNA, 13 bp, Artificial Sequence
  Oligonucleotide for detection of SNP TSC0016599
tgttttgcgttay

SEQ ID NO: 62660 - DNA, 13 bp, Artificial Sequence
  Oligonucleotide for detection of SNP TSC0016599
rtaacgcaaaaca

SEQ ID NO: 62661 - DNA, 13 bp, Artificial Sequence
  Oligonucleotide for detection of SNP TSC0016599
tgtttcgcgttay

SEQ ID NO: 62662 - DNA, 13 bp, Artificial Sequence
  Oligonucleotide for detection of SNP TSC0016599
rtaacgcgaaaca

SEQ ID NO: 62663 - DNA, 13 bp, Artificial Sequence
  Oligonucleotide for detection of SNP TSC0016602
gtttatatgtgty

SEQ ID NO: 62664 - DNA, 13 bp, Artificial Sequence
  Oligonucleotide for detection of SNP TSC0016602
racacatataaac

SEQ ID NO: 62665 - DNA, 13 bp, Artificial Sequence
  Oligonucleotide for detection of SNP TSC0016602
gtttatttgtgty

SEQ ID NO: 62666 - DNA, 13 bp, Artificial Sequence
  Oligonucleotide for detection of SNP TSC0016602
racacaaataaac

SEQ ID NO: 62667 - DNA, 13 bp, Artificial Sequence
  Oligonucleotide for detection of SNP TSC0016602
ggtatatgtgggy

SEQ ID NO: 62668 - DNA, 13 bp, Artificial Sequence
  Oligonucleotide for detection of SNP TSC0016602
rcccacatatacc

SEQ ID NO: 62669 - DNA, 13 bp, Artificial Sequence
  Oligonucleotide for detection of SNP TSC0016602
ggtataggtgggy

SEQ ID NO: 62670 - DNA, 13 bp, Artificial Sequence
  Oligonucleotide for detection of SNP TSC0016602
rcccacctatacc

SEQ ID NO: 62671 - DNA, 13 bp, Artificial Sequence
  Oligonucleotide for detection of SNP TSC0016604
tttatgaatttta

SEQ ID NO: 62672 - DNA, 13 bp, Artificial Sequence
  Oligonucleotide for detection of SNP TSC0016604
taaaattcataaa

SEQ ID NO: 62673 - DNA, 13 bp, Artificial Sequence
  Oligonucleotide for detection of SNP TSC0016605
gaagagataaagg

SEQ ID NO: 62674 - DNA, 13 bp, Artificial Sequence
  Oligonucleotide for detection of SNP TSC0016605
cctttatctcttc

SEQ ID NO: 62675 - DNA, 13 bp, Artificial Sequence
  Oligonucleotide for detection of SNP TSC0016605
gaagaggtaaagg

SEQ ID NO: 62676 - DNA, 13 bp, Artificial Sequence
  Oligonucleotide for detection of SNP TSC0016605
cctttacctcttc

SEQ ID NO: 62677 - DNA, 13 bp, Artificial Sequence
  Oligonucleotide for detection of SNP TSC0016606
gagaggtggtttg

SEQ ID NO: 62678 - DNA, 13 bp, Artificial Sequence
  Oligonucleotide for detection of SNP TSC0016606
caaaccacctctc

SEQ ID NO: 62679 - DNA, 13 bp, Artificial Sequence
  Oligonucleotide for detection of SNP TSC0016606
gagaggcggtttg

SEQ ID NO: 62680 - DNA, 13 bp, Artificial Sequence
  Oligonucleotide for detection of SNP TSC0016606
caaaccgcctctc

SEQ ID NO: 62681 - DNA, 13 bp, Artificial Sequence
  Oligonucleotide for detection of SNP TSC0016606
taagttgttttty

SEQ ID NO: 62682 - DNA, 13 bp, Artificial Sequence
  Oligonucleotide for detection of SNP TSC0016606
raaaaacaactta

SEQ ID NO: 62683 - DNA, 13 bp, Artificial Sequence
  Oligonucleotide for detection of SNP TSC0016606
taagttattttty

SEQ ID NO: 62684 - DNA, 13 bp, Artificial Sequence
  Oligonucleotide for detection of SNP TSC0016606
raaaaataactta

SEQ ID NO: 62685 - DNA, 13 bp, Artificial Sequence
  Oligonucleotide for detection of SNP TSC0016606
taagtcgttttty

SEQ ID NO: 62686 - DNA, 13 bp, Artificial Sequence
  Oligonucleotide for detection of SNP TSC0016606
raaaaacgactta

SEQ ID NO: 62687 - DNA, 13 bp, Artificial Sequence
  Oligonucleotide for detection of SNP TSC0016608
ataatatggagta

SEQ ID NO: 62688 - DNA, 13 bp, Artificial Sequence
  Oligonucleotide for detection of SNP TSC0016608
tactccatattat

SEQ ID NO: 62689 - DNA, 13 bp, Artificial Sequence
  Oligonucleotide for detection of SNP TSC0016608
ataatacggagta

SEQ ID NO: 62690 - DNA, 13 bp, Artificial Sequence
  Oligonucleotide for detection of SNP TSC0016608
tactccgtattat

SEQ ID NO: 62691 - DNA, 13 bp, Artificial Sequence
  Oligonucleotide for detection of SNP TSC0016608
tgttttgtgttat

SEQ ID NO: 62692 - DNA, 13 bp, Artificial Sequence
  Oligonucleotide for detection of SNP TSC0016608
ataacacaaaaca

SEQ ID NO: 62693 - DNA, 13 bp, Artificial Sequence
  Oligonucleotide for detection of SNP TSC0016608
tgttttatgttat

SEQ ID NO: 62694 - DNA, 13 bp, Artificial Sequence
  Oligonucleotide for detection of SNP TSC0016608
ataacataaaaca

SEQ ID NO: 62695 - DNA, 13 bp, Artificial Sequence
  Oligonucleotide for detection of SNP TSC0016608
tgtttcgtgttat

SEQ ID NO: 62696 - DNA, 13 bp, Artificial Sequence
  Oligonucleotide for detection of SNP TSC0016608
ataacacgaaaca

SEQ ID NO: 62697 - DNA, 13 bp, Artificial Sequence
  Oligonucleotide for detection of SNP TSC0016609
gtgtttatgtagg

SEQ ID NO: 62698 - DNA, 13 bp, Artificial Sequence
  Oligonucleotide for detection of SNP TSC0016609
cctacataaacac

SEQ ID NO: 62699 - DNA, 13 bp, Artificial Sequence
  Oligonucleotide for detection of SNP TSC0016609
gtgtttgtgtagg

SEQ ID NO: 62700 - DNA, 13 bp, Artificial Sequence
  Oligonucleotide for detection of SNP TSC0016609
cctacacaaacac

SEQ ID NO: 62701 - DNA, 13 bp, Artificial Sequence
  Oligonucleotide for detection of SNP TSC0016610
taatgaagtttta

SEQ ID NO: 62702 - DNA, 13 bp, Artificial Sequence
  Oligonucleotide for detection of SNP TSC0016610
taaaacttcatta

SEQ ID NO: 62703 - DNA, 13 bp, Artificial Sequence
  Oligonucleotide for detection of SNP TSC0016610
taatgaggtttta

SEQ ID NO: 62704 - DNA, 13 bp, Artificial Sequence
  Oligonucleotide for detection of SNP TSC0016610
taaaacctcatta

SEQ ID NO: 62705 - DNA, 13 bp, Artificial Sequence
  Oligonucleotide for detection of SNP TSC0016613
gtgttttgttaty

SEQ ID NO: 62706 - DNA, 13 bp, Artificial Sequence
  Oligonucleotide for detection of SNP TSC0016613
rataacaaaacac

SEQ ID NO: 62707 - DNA, 13 bp, Artificial Sequence
  Oligonucleotide for detection of SNP TSC0016613
gcgttttgttaty

SEQ ID NO: 62708 - DNA, 13 bp, Artificial Sequence
  Oligonucleotide for detection of SNP TSC0016613
rataacaaaacgc

SEQ ID NO: 62709 - DNA, 13 bp, Artificial Sequence
  Oligonucleotide for detection of SNP TSC0016613
gtgtttcgttaty

SEQ ID NO: 62710 - DNA, 13 bp, Artificial Sequence
  Oligonucleotide for detection of SNP TSC0016613
rataacgaaacac

SEQ ID NO: 62711 - DNA, 13 bp, Artificial Sequence
  Oligonucleotide for detection of SNP TSC0016613
gcgtttcgttaty

SEQ ID NO: 62712 - DNA, 13 bp, Artificial Sequence
  Oligonucleotide for detection of SNP TSC0016613
rataacgaaacgc

SEQ ID NO: 62713 - DNA, 13 bp, Artificial Sequence
  Oligonucleotide for detection of SNP TSC0016613
ggtggtggaatgy

SEQ ID NO: 62714 - DNA, 13 bp, Artificial Sequence
  Oligonucleotide for detection of SNP TSC0016613
rcattccaccacc

SEQ ID NO: 62715 - DNA, 13 bp, Artificial Sequence
  Oligonucleotide for detection of SNP TSC0016613
ggtggtagaatgy

SEQ ID NO: 62716 - DNA, 13 bp, Artificial Sequence
  Oligonucleotide for detection of SNP TSC0016613
rcattctaccacc

SEQ ID NO: 62717 - DNA, 13 bp, Artificial Sequence
  Oligonucleotide for detection of SNP TSC0016613
ggtggcggaatgy

SEQ ID NO: 62718 - DNA, 13 bp, Artificial Sequence
  Oligonucleotide for detection of SNP TSC0016613
rcattccgccacc

SEQ ID NO: 62719 - DNA, 13 bp, Artificial Sequence
  Oligonucleotide for detection of SNP TSC0016613
ggtggtagaacgy

SEQ ID NO: 62720 - DNA, 13 bp, Artificial Sequence
  Oligonucleotide for detection of SNP TSC0016613
rcgttctaccacc

SEQ ID NO: 62721 - DNA, 13 bp, Artificial Sequence
  Oligonucleotide for detection of SNP TSC0016613
ggtggtggaacgy

SEQ ID NO: 62722 - DNA, 13 bp, Artificial Sequence
  Oligonucleotide for detection of SNP TSC0016613
rcgttccaccacc

SEQ ID NO: 62723 - DNA, 13 bp, Artificial Sequence
  Oligonucleotide for detection of SNP TSC0016613
ggtggcggaacgy

SEQ ID NO: 62724 - DNA, 13 bp, Artificial Sequence
  Oligonucleotide for detection of SNP TSC0016613
rcgttccgccacc

SEQ ID NO: 62725 - DNA, 13 bp, Artificial Sequence
  Oligonucleotide for detection of SNP TSC0016614
atggttattttag

SEQ ID NO: 62726 - DNA, 13 bp, Artificial Sequence
  Oligonucleotide for detection of SNP TSC0016614
ctaaaataaccat

SEQ ID NO: 62727 - DNA, 13 bp, Artificial Sequence
  Oligonucleotide for detection of SNP TSC0016614
atggtttttttag

SEQ ID NO: 62728 - DNA, 13 bp, Artificial Sequence
  Oligonucleotide for detection of SNP TSC0016614
ctaaaaaaaccat

SEQ ID NO: 62729 - DNA, 13 bp, Artificial Sequence
  Oligonucleotide for detection of SNP TSC0016614
ttggggtggttat

SEQ ID NO: 62730 - DNA, 13 bp, Artificial Sequence
  Oligonucleotide for detection of SNP TSC0016614
ataaccaccccaa

SEQ ID NO: 62731 - DNA, 13 bp, Artificial Sequence
  Oligonucleotide for detection of SNP TSC0016614
ttgggggggttat

SEQ ID NO: 62732 - DNA, 13 bp, Artificial Sequence
  Oligonucleotide for detection of SNP TSC0016614
ataacccccccaa

SEQ ID NO: 62733 - DNA, 13 bp, Artificial Sequence
  Oligonucleotide for detection of SNP TSC0016618
tatttgtggtaga

SEQ ID NO: 62734 - DNA, 13 bp, Artificial Sequence
  Oligonucleotide for detection of SNP TSC0016618
tctaccacaaata

SEQ ID NO: 62735 - DNA, 13 bp, Artificial Sequence
  Oligonucleotide for detection of SNP TSC0016618
tatttgcggtaga

SEQ ID NO: 62736 - DNA, 13 bp, Artificial Sequence
  Oligonucleotide for detection of SNP TSC0016618
tctaccgcaaata

SEQ ID NO: 62737 - DNA, 13 bp, Artificial Sequence
  Oligonucleotide for detection of SNP TSC0016618
tttgttgtaggtg

SEQ ID NO: 62738 - DNA, 13 bp, Artificial Sequence
  Oligonucleotide for detection of SNP TSC0016618
cacctacaacaaa

SEQ ID NO: 62739 - DNA, 13 bp, Artificial Sequence
  Oligonucleotide for detection of SNP TSC0016618
tttgttataggtg

SEQ ID NO: 62740 - DNA, 13 bp, Artificial Sequence
  Oligonucleotide for detection of SNP TSC0016618
cacctataacaaa

SEQ ID NO: 62741 - DNA, 13 bp, Artificial Sequence
  Oligonucleotide for detection of SNP TSC0016618
tttgtcgtaggtg

SEQ ID NO: 62742 - DNA, 13 bp, Artificial Sequence
  Oligonucleotide for detection of SNP TSC0016618
cacctacgacaaa

SEQ ID NO: 62743 - DNA, 13 bp, Artificial Sequence
  Oligonucleotide for detection of SNP TSC0016619
ttagtatgggttt

SEQ ID NO: 62744 - DNA, 13 bp, Artificial Sequence
  Oligonucleotide for detection of SNP TSC0016619
aaacccatactaa

SEQ ID NO: 62745 - DNA, 13 bp, Artificial Sequence
  Oligonucleotide for detection of SNP TSC0016619
ttagtacgggttt

SEQ ID NO: 62746 - DNA, 13 bp, Artificial Sequence
  Oligonucleotide for detection of SNP TSC0016619
aaacccgtactaa

SEQ ID NO: 62747 - DNA, 13 bp, Artificial Sequence
  Oligonucleotide for detection of SNP TSC0016619
aagtttgtgttgg

SEQ ID NO: 62748 - DNA, 13 bp, Artificial Sequence
  Oligonucleotide for detection of SNP TSC0016619
ccaacacaaactt

SEQ ID NO: 62749 - DNA, 13 bp, Artificial Sequence
  Oligonucleotide for detection of SNP TSC0016619
aagtttatgttgg

SEQ ID NO: 62750 - DNA, 13 bp, Artificial Sequence
  Oligonucleotide for detection of SNP TSC0016619
ccaacataaactt

SEQ ID NO: 62751 - DNA, 13 bp, Artificial Sequence
  Oligonucleotide for detection of SNP TSC0016619
aagttcgtgttgg

SEQ ID NO: 62752 - DNA, 13 bp, Artificial Sequence
  Oligonucleotide for detection of SNP TSC0016619
ccaacacgaactt

SEQ ID NO: 62753 - DNA, 13 bp, Artificial Sequence
  Oligonucleotide for detection of SNP TSC0016620
tatggtggtttag

SEQ ID NO: 62754 - DNA, 13 bp, Artificial Sequence
  Oligonucleotide for detection of SNP TSC0016620
ctaaaccaccata

SEQ ID NO: 62755 - DNA, 13 bp, Artificial Sequence
  Oligonucleotide for detection of SNP TSC0016620
tatggtagtttag

SEQ ID NO: 62756 - DNA, 13 bp, Artificial Sequence
  Oligonucleotide for detection of SNP TSC0016620
ctaaactaccata

SEQ ID NO: 62757 - DNA, 13 bp, Artificial Sequence
  Oligonucleotide for detection of SNP TSC0016621
tggggtattttag

SEQ ID NO: 62758 - DNA, 13 bp, Artificial Sequence
  Oligonucleotide for detection of SNP TSC0016621
ctaaaatacccca

SEQ ID NO: 62759 - DNA, 13 bp, Artificial Sequence
  Oligonucleotide for detection of SNP TSC0016621
tggggttttttag

SEQ ID NO: 62760 - DNA, 13 bp, Artificial Sequence
  Oligonucleotide for detection of SNP TSC0016621
ctaaaaaacccca

SEQ ID NO: 62761 - DNA, 13 bp, Artificial Sequence
  Oligonucleotide for detection of SNP TSC0016621
ttgaggtgtttta

SEQ ID NO: 62762 - DNA, 13 bp, Artificial Sequence
  Oligonucleotide for detection of SNP TSC0016621
taaaacacctcaa

SEQ ID NO: 62763 - DNA, 13 bp, Artificial Sequence
  Oligonucleotide for detection of SNP TSC0016621
ttgaggggtttta

SEQ ID NO: 62764 - DNA, 13 bp, Artificial Sequence
  Oligonucleotide for detection of SNP TSC0016621
taaaacccctcaa

SEQ ID NO: 62765 - DNA, 13 bp, Artificial Sequence
  Oligonucleotide for detection of SNP TSC0016622
ttatgtaggaggt

SEQ ID NO: 62766 - DNA, 13 bp, Artificial Sequence
  Oligonucleotide for detection of SNP TSC0016622
acctcctacataa

SEQ ID NO: 62767 - DNA, 13 bp, Artificial Sequence
  Oligonucleotide for detection of SNP TSC0016622
ttatgttggaggt

SEQ ID NO: 62768 - DNA, 13 bp, Artificial Sequence
  Oligonucleotide for detection of SNP TSC0016622
acctccaacataa

SEQ ID NO: 62769 - DNA, 13 bp, Artificial Sequence
  Oligonucleotide for detection of SNP TSC0016622
ttatgtcggaggt

SEQ ID NO: 62770 - DNA, 13 bp, Artificial Sequence
  Oligonucleotide for detection of SNP TSC0016622
acctccgacataa

SEQ ID NO: 62771 - DNA, 13 bp, Artificial Sequence
  Oligonucleotide for detection of SNP TSC0016622
attttttgtatgg

SEQ ID NO: 62772 - DNA, 13 bp, Artificial Sequence
  Oligonucleotide for detection of SNP TSC0016622
ccatacaaaaaat

SEQ ID NO: 62773 - DNA, 13 bp, Artificial Sequence
  Oligonucleotide for detection of SNP TSC0016622
atttttggtatgg

SEQ ID NO: 62774 - DNA, 13 bp, Artificial Sequence
  Oligonucleotide for detection of SNP TSC0016622
ccataccaaaaat

SEQ ID NO: 62775 - DNA, 13 bp, Artificial Sequence
  Oligonucleotide for detection of SNP TSC0016622
attttcggtatgg

SEQ ID NO: 62776 - DNA, 13 bp, Artificial Sequence
  Oligonucleotide for detection of SNP TSC0016622
ccataccgaaaat

SEQ ID NO: 62777 - DNA, 13 bp, Artificial Sequence
  Oligonucleotide for detection of SNP TSC0016623
taggatagggggg

SEQ ID NO: 62778 - DNA, 13 bp, Artificial Sequence
  Oligonucleotide for detection of SNP TSC0016623
cccccctatccta

SEQ ID NO: 62779 - DNA, 13 bp, Artificial Sequence
  Oligonucleotide for detection of SNP TSC0016623
taggatggggggg

SEQ ID NO: 62780 - DNA, 13 bp, Artificial Sequence
  Oligonucleotide for detection of SNP TSC0016623
cccccccatccta

SEQ ID NO: 62781 - DNA, 13 bp, Artificial Sequence
  Oligonucleotide for detection of SNP TSC0016623
taggacggggggg

SEQ ID NO: 62782 - DNA, 13 bp, Artificial Sequence
  Oligonucleotide for detection of SNP TSC0016623
cccccccgtccta

SEQ ID NO: 62783 - DNA, 13 bp, Artificial Sequence
  Oligonucleotide for detection of SNP TSC0016624
aagtatgataata

SEQ ID NO: 62784 - DNA, 13 bp, Artificial Sequence
  Oligonucleotide for detection of SNP TSC0016624
tattatcatactt

SEQ ID NO: 62785 - DNA, 13 bp, Artificial Sequence
  Oligonucleotide for detection of SNP TSC0016624
aagtataataata

SEQ ID NO: 62786 - DNA, 13 bp, Artificial Sequence
  Oligonucleotide for detection of SNP TSC0016624
tattattatactt

SEQ ID NO: 62787 - DNA, 13 bp, Artificial Sequence
  Oligonucleotide for detection of SNP TSC0016625
tagtatgaggtat

SEQ ID NO: 62788 - DNA, 13 bp, Artificial Sequence
  Oligonucleotide for detection of SNP TSC0016625
atacctcatacta

SEQ ID NO: 62789 - DNA, 13 bp, Artificial Sequence
  Oligonucleotide for detection of SNP TSC0016625
tagtattaggtat

SEQ ID NO: 62790 - DNA, 13 bp, Artificial Sequence
  Oligonucleotide for detection of SNP TSC0016625
atacctaatacta

SEQ ID NO: 62791 - DNA, 13 bp, Artificial Sequence
  Oligonucleotide for detection of SNP TSC0016625
atattttatgtta

SEQ ID NO: 62792 - DNA, 13 bp, Artificial Sequence
  Oligonucleotide for detection of SNP TSC0016625
taacataaaatat

SEQ ID NO: 62793 - DNA, 13 bp, Artificial Sequence
  Oligonucleotide for detection of SNP TSC0016625
atatttaatgtta

SEQ ID NO: 62794 - DNA, 13 bp, Artificial Sequence
  Oligonucleotide for detection of SNP TSC0016625
taacattaaatat

SEQ ID NO: 62795 - DNA, 13 bp, Artificial Sequence
  Oligonucleotide for detection of SNP TSC0016626
ggaggagataatg

SEQ ID NO: 62796 - DNA, 13 bp, Artificial Sequence
  Oligonucleotide for detection of SNP TSC0016626
cattatctcctcc

SEQ ID NO: 62797 - DNA, 13 bp, Artificial Sequence
  Oligonucleotide for detection of SNP TSC0016626
ggaggaaataatg

SEQ ID NO: 62798 - DNA, 13 bp, Artificial Sequence
  Oligonucleotide for detection of SNP TSC0016626
cattatttcctcc

SEQ ID NO: 62799 - DNA, 13 bp, Artificial Sequence
  Oligonucleotide for detection of SNP TSC0016627
gggataaaaatty

SEQ ID NO: 62800 - DNA, 13 bp, Artificial Sequence
  Oligonucleotide for detection of SNP TSC0016627
raatttttatccc

SEQ ID NO: 62801 - DNA, 13 bp, Artificial Sequence
  Oligonucleotide for detection of SNP TSC0016627
gggatataaatty

SEQ ID NO: 62802 - DNA, 13 bp, Artificial Sequence
  Oligonucleotide for detection of SNP TSC0016627
raatttatatccc

SEQ ID NO: 62803 - DNA, 13 bp, Artificial Sequence
  Oligonucleotide for detection of SNP TSC0016627
ggatttttgttty

SEQ ID NO: 62804 - DNA, 13 bp, Artificial Sequence
  Oligonucleotide for detection of SNP TSC0016627
raaacaaaaatcc

SEQ ID NO: 62805 - DNA, 13 bp, Artificial Sequence
  Oligonucleotide for detection of SNP TSC0016627
ggatttgtgttty

SEQ ID NO: 62806 - DNA, 13 bp, Artificial Sequence
  Oligonucleotide for detection of SNP TSC0016627
raaacacaaatcc

SEQ ID NO: 62807 - DNA, 13 bp, Artificial Sequence
  Oligonucleotide for detection of SNP TSC0016628
gttttagatgtag

SEQ ID NO: 62808 - DNA, 13 bp, Artificial Sequence
  Oligonucleotide for detection of SNP TSC0016628
ctacatctaaaac

SEQ ID NO: 62809 - DNA, 13 bp, Artificial Sequence
  Oligonucleotide for detection of SNP TSC0016628
gttttaaatgtag

SEQ ID NO: 62810 - DNA, 13 bp, Artificial Sequence
  Oligonucleotide for detection of SNP TSC0016628
ctacatttaaaac

SEQ ID NO: 62811 - DNA, 13 bp, Artificial Sequence
  Oligonucleotide for detection of SNP TSC0016628
gttttagacgtag

SEQ ID NO: 62812 - DNA, 13 bp, Artificial Sequence
  Oligonucleotide for detection of SNP TSC0016628
ctacgtctaaaac

SEQ ID NO: 62813 - DNA, 13 bp, Artificial Sequence
  Oligonucleotide for detection of SNP TSC0016628
gttttaaacgtag

SEQ ID NO: 62814 - DNA, 13 bp, Artificial Sequence
  Oligonucleotide for detection of SNP TSC0016628
ctacgtttaaaac

SEQ ID NO: 62815 - DNA, 13 bp, Artificial Sequence
  Oligonucleotide for detection of SNP TSC0016629
gagtatgggatat

SEQ ID NO: 62816 - DNA, 13 bp, Artificial Sequence
  Oligonucleotide for detection of SNP TSC0016629
atatcccatactc

SEQ ID NO: 62817 - DNA, 13 bp, Artificial Sequence
  Oligonucleotide for detection of SNP TSC0016629
gagtattggatat

SEQ ID NO: 62818 - DNA, 13 bp, Artificial Sequence
  Oligonucleotide for detection of SNP TSC0016629
atatccaatactc

SEQ ID NO: 62819 - DNA, 13 bp, Artificial Sequence
  Oligonucleotide for detection of SNP TSC0016629
gagtacgggatat

SEQ ID NO: 62820 - DNA, 13 bp, Artificial Sequence
  Oligonucleotide for detection of SNP TSC0016629
atatcccgtactc

SEQ ID NO: 62821 - DNA, 13 bp, Artificial Sequence
  Oligonucleotide for detection of SNP TSC0016629
atattttgtgtty

SEQ ID NO: 62822 - DNA, 13 bp, Artificial Sequence
  Oligonucleotide for detection of SNP TSC0016629
raacacaaaatat

SEQ ID NO: 62823 - DNA, 13 bp, Artificial Sequence
  Oligonucleotide for detection of SNP TSC0016629
atatttagtgtty

SEQ ID NO: 62824 - DNA, 13 bp, Artificial Sequence
  Oligonucleotide for detection of SNP TSC0016629
raacactaaatat

SEQ ID NO: 62825 - DNA, 13 bp, Artificial Sequence
  Oligonucleotide for detection of SNP TSC0016629
atatttcgtgtty

SEQ ID NO: 62826 - DNA, 13 bp, Artificial Sequence
  Oligonucleotide for detection of SNP TSC0016629
raacacgaaatat

SEQ ID NO: 62827 - DNA, 13 bp, Artificial Sequence
  Oligonucleotide for detection of SNP TSC0016631
ttgattattgaag

SEQ ID NO: 62828 - DNA, 13 bp, Artificial Sequence
  Oligonucleotide for detection of SNP TSC0016631
cttcaataatcaa

SEQ ID NO: 62829 - DNA, 13 bp, Artificial Sequence
  Oligonucleotide for detection of SNP TSC0016631
ttgattgttgaag

SEQ ID NO: 62830 - DNA, 13 bp, Artificial Sequence
  Oligonucleotide for detection of SNP TSC0016631
cttcaacaatcaa

SEQ ID NO: 62831 - DNA, 13 bp, Artificial Sequence
  Oligonucleotide for detection of SNP TSC0016631
ttgatcgttgaag

SEQ ID NO: 62832 - DNA, 13 bp, Artificial Sequence
  Oligonucleotide for detection of SNP TSC0016631
cttcaacgatcaa

SEQ ID NO: 62833 - DNA, 13 bp, Artificial Sequence
  Oligonucleotide for detection of SNP TSC0016631
ttttaatgattaa

SEQ ID NO: 62834 - DNA, 13 bp, Artificial Sequence
  Oligonucleotide for detection of SNP TSC0016631
ttaatcattaaaa

SEQ ID NO: 62835 - DNA, 13 bp, Artificial Sequence
  Oligonucleotide for detection of SNP TSC0016631
ttttaacgattaa

SEQ ID NO: 62836 - DNA, 13 bp, Artificial Sequence
  Oligonucleotide for detection of SNP TSC0016631
ttaatcgttaaaa

SEQ ID NO: 62837 - DNA, 13 bp, Artificial Sequence
  Oligonucleotide for detection of SNP TSC0016635
tatatttggttta

SEQ ID NO: 62838 - DNA, 13 bp, Artificial Sequence
  Oligonucleotide for detection of SNP TSC0016635
taaaccaaatata

SEQ ID NO: 62839 - DNA, 13 bp, Artificial Sequence
  Oligonucleotide for detection of SNP TSC0016635
tatattgggttta

SEQ ID NO: 62840 - DNA, 13 bp, Artificial Sequence
  Oligonucleotide for detection of SNP TSC0016635
taaacccaatata

SEQ ID NO: 62841 - DNA, 13 bp, Artificial Sequence
  Oligonucleotide for detection of SNP TSC0016635
tatattcggttta

SEQ ID NO: 62842 - DNA, 13 bp, Artificial Sequence
  Oligonucleotide for detection of SNP TSC0016635
taaaccgaatata

SEQ ID NO: 62843 - DNA, 13 bp, Artificial Sequence
  Oligonucleotide for detection of SNP TSC0016635
tatatcgggttta

SEQ ID NO: 62844 - DNA, 13 bp, Artificial Sequence
  Oligonucleotide for detection of SNP TSC0016635
taaacccgatata

SEQ ID NO: 62845 - DNA, 13 bp, Artificial Sequence
  Oligonucleotide for detection of SNP TSC0016635
tgggttggatgtg

SEQ ID NO: 62846 - DNA, 13 bp, Artificial Sequence
  Oligonucleotide for detection of SNP TSC0016635
cacatccaaccca

SEQ ID NO: 62847 - DNA, 13 bp, Artificial Sequence
  Oligonucleotide for detection of SNP TSC0016635
tgggtttgatgtg

SEQ ID NO: 62848 - DNA, 13 bp, Artificial Sequence
  Oligonucleotide for detection of SNP TSC0016635
cacatcaaaccca

SEQ ID NO: 62849 - DNA, 13 bp, Artificial Sequence
  Oligonucleotide for detection of SNP TSC0016635
tgggtcggatgtg

SEQ ID NO: 62850 - DNA, 13 bp, Artificial Sequence
  Oligonucleotide for detection of SNP TSC0016635
cacatccgaccca

SEQ ID NO: 62851 - DNA, 13 bp, Artificial Sequence
  Oligonucleotide for detection of SNP TSC0016635
tgggttcgatgtg

SEQ ID NO: 62852 - DNA, 13 bp, Artificial Sequence
  Oligonucleotide for detection of SNP TSC0016635
cacatcgaaccca

SEQ ID NO: 62853 - DNA, 13 bp, Artificial Sequence
  Oligonucleotide for detection of SNP TSC0016637
aatttgtttttgg

SEQ ID NO: 62854 - DNA, 13 bp, Artificial Sequence
  Oligonucleotide for detection of SNP TSC0016637
ccaaaaacaaatt

SEQ ID NO: 62855 - DNA, 13 bp, Artificial Sequence
  Oligonucleotide for detection of SNP TSC0016637
aatttggttttgg

SEQ ID NO: 62856 - DNA, 13 bp, Artificial Sequence
  Oligonucleotide for detection of SNP TSC0016637
ccaaaaccaaatt

SEQ ID NO: 62857 - DNA, 13 bp, Artificial Sequence
  Oligonucleotide for detection of SNP TSC0016637
ttaaaggtaaatt

SEQ ID NO: 62858 - DNA, 13 bp, Artificial Sequence
  Oligonucleotide for detection of SNP TSC0016637
aatttacctttaa

SEQ ID NO: 62859 - DNA, 13 bp, Artificial Sequence
  Oligonucleotide for detection of SNP TSC0016637
ttaaagttaaatt

SEQ ID NO: 62860 - DNA, 13 bp, Artificial Sequence
  Oligonucleotide for detection of SNP TSC0016637
aatttaactttaa

SEQ ID NO: 62861 - DNA, 13 bp, Artificial Sequence
  Oligonucleotide for detection of SNP TSC0016638
gatggggagatag

SEQ ID NO: 62862 - DNA, 13 bp, Artificial Sequence
  Oligonucleotide for detection of SNP TSC0016638
ctatctccccatc

SEQ ID NO: 62863 - DNA, 13 bp, Artificial Sequence
  Oligonucleotide for detection of SNP TSC0016638
gatgggaagatag

SEQ ID NO: 62864 - DNA, 13 bp, Artificial Sequence
  Oligonucleotide for detection of SNP TSC0016638
ctatcttcccatc

SEQ ID NO: 62865 - DNA, 13 bp, Artificial Sequence
  Oligonucleotide for detection of SNP TSC0016639
agaggtattttty

SEQ ID NO: 62866 - DNA, 13 bp, Artificial Sequence
  Oligonucleotide for detection of SNP TSC0016639
raaaaatacctct

SEQ ID NO: 62867 - DNA, 13 bp, Artificial Sequence
  Oligonucleotide for detection of SNP TSC0016639
agaggttttttty

SEQ ID NO: 62868 - DNA, 13 bp, Artificial Sequence
  Oligonucleotide for detection of SNP TSC0016639
raaaaaaacctct

SEQ ID NO: 62869 - DNA, 13 bp, Artificial Sequence
  Oligonucleotide for detection of SNP TSC0016639
gggaggtattttt

SEQ ID NO: 62870 - DNA, 13 bp, Artificial Sequence
  Oligonucleotide for detection of SNP TSC0016639
aaaaatacctccc

SEQ ID NO: 62871 - DNA, 13 bp, Artificial Sequence
  Oligonucleotide for detection of SNP TSC0016639
gggagggattttt

SEQ ID NO: 62872 - DNA, 13 bp, Artificial Sequence
  Oligonucleotide for detection of SNP TSC0016639
aaaaatccctccc

SEQ ID NO: 62873 - DNA, 13 bp, Artificial Sequence
  Oligonucleotide for detection of SNP TSC0016640
gtatttaatttty

SEQ ID NO: 62874 - DNA, 13 bp, Artificial Sequence
  Oligonucleotide for detection of SNP TSC0016640
raaaattaaatac

SEQ ID NO: 62875 - DNA, 13 bp, Artificial Sequence
  Oligonucleotide for detection of SNP TSC0016640
gtattttatttty

SEQ ID NO: 62876 - DNA, 13 bp, Artificial Sequence
  Oligonucleotide for detection of SNP TSC0016640
raaaataaaatac

SEQ ID NO: 62877 - DNA, 13 bp, Artificial Sequence
  Oligonucleotide for detection of SNP TSC0016640
gaggattagatgy

SEQ ID NO: 62878 - DNA, 13 bp, Artificial Sequence
  Oligonucleotide for detection of SNP TSC0016640
rcatctaatcctc

SEQ ID NO: 62879 - DNA, 13 bp, Artificial Sequence
  Oligonucleotide for detection of SNP TSC0016640
gaggatgagatgy

SEQ ID NO: 62880 - DNA, 13 bp, Artificial Sequence
  Oligonucleotide for detection of SNP TSC0016640
rcatctcatcctc

SEQ ID NO: 62881 - DNA, 13 bp, Artificial Sequence
  Oligonucleotide for detection of SNP TSC0016644
ggatatgggtttg

SEQ ID NO: 62882 - DNA, 13 bp, Artificial Sequence
  Oligonucleotide for detection of SNP TSC0016644
caaacccatatcc

SEQ ID NO: 62883 - DNA, 13 bp, Artificial Sequence
  Oligonucleotide for detection of SNP TSC0016644
ggatattggtttg

SEQ ID NO: 62884 - DNA, 13 bp, Artificial Sequence
  Oligonucleotide for detection of SNP TSC0016644
caaaccaatatcc

SEQ ID NO: 62885 - DNA, 13 bp, Artificial Sequence
  Oligonucleotide for detection of SNP TSC0016644
taaatttatatty

SEQ ID NO: 62886 - DNA, 13 bp, Artificial Sequence
  Oligonucleotide for detection of SNP TSC0016644
raatataaattta

SEQ ID NO: 62887 - DNA, 13 bp, Artificial Sequence
  Oligonucleotide for detection of SNP TSC0016644
taaattaatatty

SEQ ID NO: 62888 - DNA, 13 bp, Artificial Sequence
  Oligonucleotide for detection of SNP TSC0016644
raatattaattta

SEQ ID NO: 62889 - DNA, 13 bp, Artificial Sequence
  Oligonucleotide for detection of SNP TSC0016646
aggtattgatttt

SEQ ID NO: 62890 - DNA, 13 bp, Artificial Sequence
  Oligonucleotide for detection of SNP TSC0016646
aaaatcaatacct

SEQ ID NO: 62891 - DNA, 13 bp, Artificial Sequence
  Oligonucleotide for detection of SNP TSC0016646
aggtatcgatttt

SEQ ID NO: 62892 - DNA, 13 bp, Artificial Sequence
  Oligonucleotide for detection of SNP TSC0016646
aaaatcgatacct

SEQ ID NO: 62893 - DNA, 13 bp, Artificial Sequence
  Oligonucleotide for detection of SNP TSC0016646
agggttgatgttt

SEQ ID NO: 62894 - DNA, 13 bp, Artificial Sequence
  Oligonucleotide for detection of SNP TSC0016646
aaacatcaaccct

SEQ ID NO: 62895 - DNA, 13 bp, Artificial Sequence
  Oligonucleotide for detection of SNP TSC0016646
agggttaatgttt

SEQ ID NO: 62896 - DNA, 13 bp, Artificial Sequence
  Oligonucleotide for detection of SNP TSC0016646
aaacattaaccct

SEQ ID NO: 62897 - DNA, 13 bp, Artificial Sequence
  Oligonucleotide for detection of SNP TSC0016646
agggtcgatgttt

SEQ ID NO: 62898 - DNA, 13 bp, Artificial Sequence
  Oligonucleotide for detection of SNP TSC0016646
aaacatcgaccct

SEQ ID NO: 62899 - DNA, 13 bp, Artificial Sequence
  Oligonucleotide for detection of SNP TSC0016647
atatatttgttay

SEQ ID NO: 62900 - DNA, 13 bp, Artificial Sequence
  Oligonucleotide for detection of SNP TSC0016647
rtaacaaatatat

SEQ ID NO: 62901 - DNA, 13 bp, Artificial Sequence
  Oligonucleotide for detection of SNP TSC0016647
atatatgtgttay

SEQ ID NO: 62902 - DNA, 13 bp, Artificial Sequence
  Oligonucleotide for detection of SNP TSC0016647
rtaacacatatat

SEQ ID NO: 62903 - DNA, 13 bp, Artificial Sequence
  Oligonucleotide for detection of SNP TSC0016647
atatacgtgttay

SEQ ID NO: 62904 - DNA, 13 bp, Artificial Sequence
  Oligonucleotide for detection of SNP TSC0016647
rtaacacgtatat

SEQ ID NO: 62905 - DNA, 13 bp, Artificial Sequence
  Oligonucleotide for detection of SNP TSC0016647
gtaataggtgtgt

SEQ ID NO: 62906 - DNA, 13 bp, Artificial Sequence
  Oligonucleotide for detection of SNP TSC0016647
acacacctattac

SEQ ID NO: 62907 - DNA, 13 bp, Artificial Sequence
  Oligonucleotide for detection of SNP TSC0016647
gtaatatgtgtgt

SEQ ID NO: 62908 - DNA, 13 bp, Artificial Sequence
  Oligonucleotide for detection of SNP TSC0016647
acacacatattac

SEQ ID NO: 62909 - DNA, 13 bp, Artificial Sequence
  Oligonucleotide for detection of SNP TSC0016647
gtaatacgtgtgt

SEQ ID NO: 62910 - DNA, 13 bp, Artificial Sequence
  Oligonucleotide for detection of SNP TSC0016647
acacacgtattac

SEQ ID NO: 62911 - DNA, 13 bp, Artificial Sequence
  Oligonucleotide for detection of SNP TSC0016648
aggttttgttgag

SEQ ID NO: 62912 - DNA, 13 bp, Artificial Sequence
  Oligonucleotide for detection of SNP TSC0016648
ctcaacaaaacct

SEQ ID NO: 62913 - DNA, 13 bp, Artificial Sequence
  Oligonucleotide for detection of SNP TSC0016648
aggtttcgttgag

SEQ ID NO: 62914 - DNA, 13 bp, Artificial Sequence
  Oligonucleotide for detection of SNP TSC0016648
ctcaacgaaacct

SEQ ID NO: 62915 - DNA, 13 bp, Artificial Sequence
  Oligonucleotide for detection of SNP TSC0016648
aggttttgtcgag

SEQ ID NO: 62916 - DNA, 13 bp, Artificial Sequence
  Oligonucleotide for detection of SNP TSC0016648
ctcgacaaaacct

SEQ ID NO: 62917 - DNA, 13 bp, Artificial Sequence
  Oligonucleotide for detection of SNP TSC0016648
aggtttcgtcgag

SEQ ID NO: 62918 - DNA, 13 bp, Artificial Sequence
  Oligonucleotide for detection of SNP TSC0016648
ctcgacgaaacct

SEQ ID NO: 62919 - DNA, 13 bp, Artificial Sequence
  Oligonucleotide for detection of SNP TSC0016648
tttggtggggttt

SEQ ID NO: 62920 - DNA, 13 bp, Artificial Sequence
  Oligonucleotide for detection of SNP TSC0016648
aaaccccaccaaa

SEQ ID NO: 62921 - DNA, 13 bp, Artificial Sequence
  Oligonucleotide for detection of SNP TSC0016648
tttggtagggttt

SEQ ID NO: 62922 - DNA, 13 bp, Artificial Sequence
  Oligonucleotide for detection of SNP TSC0016648
aaaccctaccaaa

SEQ ID NO: 62923 - DNA, 13 bp, Artificial Sequence
  Oligonucleotide for detection of SNP TSC0016648
ttcggtggggttt

SEQ ID NO: 62924 - DNA, 13 bp, Artificial Sequence
  Oligonucleotide for detection of SNP TSC0016648
aaaccccaccgaa

SEQ ID NO: 62925 - DNA, 13 bp, Artificial Sequence
  Oligonucleotide for detection of SNP TSC0016648
ttcggtagggttt

SEQ ID NO: 62926 - DNA, 13 bp, Artificial Sequence
  Oligonucleotide for detection of SNP TSC0016648
aaaccctaccgaa

SEQ ID NO: 62927 - DNA, 13 bp, Artificial Sequence
  Oligonucleotide for detection of SNP TSC0016648
tttggcggggttt

SEQ ID NO: 62928 - DNA, 13 bp, Artificial Sequence
  Oligonucleotide for detection of SNP TSC0016648
aaaccccgccaaa

SEQ ID NO: 62929 - DNA, 13 bp, Artificial Sequence
  Oligonucleotide for detection of SNP TSC0016648
ttcggcggggttt

SEQ ID NO: 62930 - DNA, 13 bp, Artificial Sequence
  Oligonucleotide for detection of SNP TSC0016648
aaaccccgccgaa

SEQ ID NO: 62931 - DNA, 13 bp, Artificial Sequence
  Oligonucleotide for detection of SNP TSC0016650
tttttggttagtt

SEQ ID NO: 62932 - DNA, 13 bp, Artificial Sequence
  Oligonucleotide for detection of SNP TSC0016650
aactaaccaaaaa

SEQ ID NO: 62933 - DNA, 13 bp, Artificial Sequence
  Oligonucleotide for detection of SNP TSC0016650
tttttgtttagtt

SEQ ID NO: 62934 - DNA, 13 bp, Artificial Sequence
  Oligonucleotide for detection of SNP TSC0016650
aactaaacaaaaa

SEQ ID NO: 62935 - DNA, 13 bp, Artificial Sequence
  Oligonucleotide for detection of SNP TSC0016650
ttttcggttagtt

SEQ ID NO: 62936 - DNA, 13 bp, Artificial Sequence
  Oligonucleotide for detection of SNP TSC0016650
aactaaccgaaaa

SEQ ID NO: 62937 - DNA, 13 bp, Artificial Sequence
  Oligonucleotide for detection of SNP TSC0016650
ttttcgtttagtt

SEQ ID NO: 62938 - DNA, 13 bp, Artificial Sequence
  Oligonucleotide for detection of SNP TSC0016650
aactaaacgaaaa

SEQ ID NO: 62939 - DNA, 13 bp, Artificial Sequence
  Oligonucleotide for detection of SNP TSC0016650
aattagttggaga

SEQ ID NO: 62940 - DNA, 13 bp, Artificial Sequence
  Oligonucleotide for detection of SNP TSC0016650
tctccaactaatt

SEQ ID NO: 62941 - DNA, 13 bp, Artificial Sequence
  Oligonucleotide for detection of SNP TSC0016650
aattagatggaga

SEQ ID NO: 62942 - DNA, 13 bp, Artificial Sequence
  Oligonucleotide for detection of SNP TSC0016650
tctccatctaatt

SEQ ID NO: 62943 - DNA, 13 bp, Artificial Sequence
  Oligonucleotide for detection of SNP TSC0016650
aattagtcggaga

SEQ ID NO: 62944 - DNA, 13 bp, Artificial Sequence
  Oligonucleotide for detection of SNP TSC0016650
tctccgactaatt

SEQ ID NO: 62945 - DNA, 13 bp, Artificial Sequence
  Oligonucleotide for detection of SNP TSC0016650
aattagacggaga

SEQ ID NO: 62946 - DNA, 13 bp, Artificial Sequence
  Oligonucleotide for detection of SNP TSC0016650
tctccgtctaatt

SEQ ID NO: 62947 - DNA, 13 bp, Artificial Sequence
  Oligonucleotide for detection of SNP TSC0016651
tggaggggtatta

SEQ ID NO: 62948 - DNA, 13 bp, Artificial Sequence
  Oligonucleotide for detection of SNP TSC0016651
taatacccctcca

SEQ ID NO: 62949 - DNA, 13 bp, Artificial Sequence
  Oligonucleotide for detection of SNP TSC0016651
tggaggtgtatta

SEQ ID NO: 62950 - DNA, 13 bp, Artificial Sequence
  Oligonucleotide for detection of SNP TSC0016651
taatacacctcca

SEQ ID NO: 62951 - DNA, 13 bp, Artificial Sequence
  Oligonucleotide for detection of SNP TSC0016654
taaagaagtttaa

SEQ ID NO: 62952 - DNA, 13 bp, Artificial Sequence
  Oligonucleotide for detection of SNP TSC0016654
ttaaacttcttta

SEQ ID NO: 62953 - DNA, 13 bp, Artificial Sequence
  Oligonucleotide for detection of SNP TSC0016654
taaagatgtttaa

SEQ ID NO: 62954 - DNA, 13 bp, Artificial Sequence
  Oligonucleotide for detection of SNP TSC0016654
ttaaacatcttta

SEQ ID NO: 62955 - DNA, 13 bp, Artificial Sequence
  Oligonucleotide for detection of SNP TSC0016654
taaagacgtttaa

SEQ ID NO: 62956 - DNA, 13 bp, Artificial Sequence
  Oligonucleotide for detection of SNP TSC0016654
ttaaacgtcttta

SEQ ID NO: 62957 - DNA, 13 bp, Artificial Sequence
  Oligonucleotide for detection of SNP TSC0016654
ttgggtttttttg

SEQ ID NO: 62958 - DNA, 13 bp, Artificial Sequence
  Oligonucleotide for detection of SNP TSC0016654
caaaaaaacccaa

SEQ ID NO: 62959 - DNA, 13 bp, Artificial Sequence
  Oligonucleotide for detection of SNP TSC0016654
ttgggcgtttttg

SEQ ID NO: 62960 - DNA, 13 bp, Artificial Sequence
  Oligonucleotide for detection of SNP TSC0016654
caaaaacgcccaa

SEQ ID NO: 62961 - DNA, 13 bp, Artificial Sequence
  Oligonucleotide for detection of SNP TSC0016655
atttattggttty

SEQ ID NO: 62962 - DNA, 13 bp, Artificial Sequence
  Oligonucleotide for detection of SNP TSC0016655
raaaccaataaat

SEQ ID NO: 62963 - DNA, 13 bp, Artificial Sequence
  Oligonucleotide for detection of SNP TSC0016655
atttatcggttty

SEQ ID NO: 62964 - DNA, 13 bp, Artificial Sequence
  Oligonucleotide for detection of SNP TSC0016655
raaaccgataaat

SEQ ID NO: 62965 - DNA, 13 bp, Artificial Sequence
  Oligonucleotide for detection of SNP TSC0016655
ggagttgatgaat

SEQ ID NO: 62966 - DNA, 13 bp, Artificial Sequence
  Oligonucleotide for detection of SNP TSC0016655
attcatcaactcc

SEQ ID NO: 62967 - DNA, 13 bp, Artificial Sequence
  Oligonucleotide for detection of SNP TSC0016655
ggagttaatgaat

SEQ ID NO: 62968 - DNA, 13 bp, Artificial Sequence
  Oligonucleotide for detection of SNP TSC0016655
attcattaactcc

SEQ ID NO: 62969 - DNA, 13 bp, Artificial Sequence
  Oligonucleotide for detection of SNP TSC0016655
ggagtcgatgaat

SEQ ID NO: 62970 - DNA, 13 bp, Artificial Sequence
  Oligonucleotide for detection of SNP TSC0016655
attcatcgactcc

SEQ ID NO: 62971 - DNA, 13 bp, Artificial Sequence
  Oligonucleotide for detection of SNP TSC0016656
tttaagtgtttta

SEQ ID NO: 62972 - DNA, 13 bp, Artificial Sequence
  Oligonucleotide for detection of SNP TSC0016656
taaaacacttaaa

SEQ ID NO: 62973 - DNA, 13 bp, Artificial Sequence
  Oligonucleotide for detection of SNP TSC0016656
tttaagcgtttta

SEQ ID NO: 62974 - DNA, 13 bp, Artificial Sequence
  Oligonucleotide for detection of SNP TSC0016656
taaaacgcttaaa

SEQ ID NO: 62975 - DNA, 13 bp, Artificial Sequence
  Oligonucleotide for detection of SNP TSC0016656
tggaatgtttggg

SEQ ID NO: 62976 - DNA, 13 bp, Artificial Sequence
  Oligonucleotide for detection of SNP TSC0016656
cccaaacattcca

SEQ ID NO: 62977 - DNA, 13 bp, Artificial Sequence
  Oligonucleotide for detection of SNP TSC0016656
tggaatatttggg

SEQ ID NO: 62978 - DNA, 13 bp, Artificial Sequence
  Oligonucleotide for detection of SNP TSC0016656
cccaaatattcca

SEQ ID NO: 62979 - DNA, 13 bp, Artificial Sequence
  Oligonucleotide for detection of SNP TSC0016656
tggaacgtttggg

SEQ ID NO: 62980 - DNA, 13 bp, Artificial Sequence
  Oligonucleotide for detection of SNP TSC0016656
cccaaacgttcca

SEQ ID NO: 62981 - DNA, 13 bp, Artificial Sequence
  Oligonucleotide for detection of SNP TSC0016657
tgtgtagaggtaa

SEQ ID NO: 62982 - DNA, 13 bp, Artificial Sequence
  Oligonucleotide for detection of SNP TSC0016657
ttacctctacaca

SEQ ID NO: 62983 - DNA, 13 bp, Artificial Sequence
  Oligonucleotide for detection of SNP TSC0016657
tgtgtaaaggtaa

SEQ ID NO: 62984 - DNA, 13 bp, Artificial Sequence
  Oligonucleotide for detection of SNP TSC0016657
ttacctttacaca

SEQ ID NO: 62985 - DNA, 13 bp, Artificial Sequence
  Oligonucleotide for detection of SNP TSC0016657
cgtgtagaggtaa

SEQ ID NO: 62986 - DNA, 13 bp, Artificial Sequence
  Oligonucleotide for detection of SNP TSC0016657
ttacctctacacg

SEQ ID NO: 62987 - DNA, 13 bp, Artificial Sequence
  Oligonucleotide for detection of SNP TSC0016657
cgtgtaaaggtaa

SEQ ID NO: 62988 - DNA, 13 bp, Artificial Sequence
  Oligonucleotide for detection of SNP TSC0016657
ttacctttacacg

SEQ ID NO: 62989 - DNA, 13 bp, Artificial Sequence
  Oligonucleotide for detection of SNP TSC0016658
attatagtaaatt

SEQ ID NO: 62990 - DNA, 13 bp, Artificial Sequence
  Oligonucleotide for detection of SNP TSC0016658
aatttactataat

SEQ ID NO: 62991 - DNA, 13 bp, Artificial Sequence
  Oligonucleotide for detection of SNP TSC0016658
attataataaatt

SEQ ID NO: 62992 - DNA, 13 bp, Artificial Sequence
  Oligonucleotide for detection of SNP TSC0016658
aatttattataat

SEQ ID NO: 62993 - DNA, 13 bp, Artificial Sequence
  Oligonucleotide for detection of SNP TSC0016660
tggattgggattt

SEQ ID NO: 62994 - DNA, 13 bp, Artificial Sequence
  Oligonucleotide for detection of SNP TSC0016660
aaatcccaatcca

SEQ ID NO: 62995 - DNA, 13 bp, Artificial Sequence
  Oligonucleotide for detection of SNP TSC0016660
tggatttggattt

SEQ ID NO: 62996 - DNA, 13 bp, Artificial Sequence
  Oligonucleotide for detection of SNP TSC0016660
aaatccaaatcca

SEQ ID NO: 62997 - DNA, 13 bp, Artificial Sequence
  Oligonucleotide for detection of SNP TSC0016660
agattttaattta

SEQ ID NO: 62998 - DNA, 13 bp, Artificial Sequence
  Oligonucleotide for detection of SNP TSC0016660
taaattaaaatct

SEQ ID NO: 62999 - DNA, 13 bp, Artificial Sequence
  Oligonucleotide for detection of SNP TSC0016660
agatttaaattta

SEQ ID NO: 63000 - DNA, 13 bp, Artificial Sequence
  Oligonucleotide for detection of SNP TSC0016660
taaatttaaatct

SEQ ID NO: 63001 - DNA, 13 bp, Artificial Sequence
  Oligonucleotide for detection of SNP TSC0016661
ataatatggtaty

SEQ ID NO: 63002 - DNA, 13 bp, Artificial Sequence
  Oligonucleotide for detection of SNP TSC0016661
rataccatattat

SEQ ID NO: 63003 - DNA, 13 bp, Artificial Sequence
  Oligonucleotide for detection of SNP TSC0016661
ataatacggtaty

SEQ ID NO: 63004 - DNA, 13 bp, Artificial Sequence
  Oligonucleotide for detection of SNP TSC0016661
rataccgtattat

SEQ ID NO: 63005 - DNA, 13 bp, Artificial Sequence
  Oligonucleotide for detection of SNP TSC0016661
ggtattgtattat

SEQ ID NO: 63006 - DNA, 13 bp, Artificial Sequence
  Oligonucleotide for detection of SNP TSC0016661
ataatacaatacc

SEQ ID NO: 63007 - DNA, 13 bp, Artificial Sequence
  Oligonucleotide for detection of SNP TSC0016661
ggtattatattat

SEQ ID NO: 63008 - DNA, 13 bp, Artificial Sequence
  Oligonucleotide for detection of SNP TSC0016661
ataatataatacc

SEQ ID NO: 63009 - DNA, 13 bp, Artificial Sequence
  Oligonucleotide for detection of SNP TSC0016661
ggtatcgtattat

SEQ ID NO: 63010 - DNA, 13 bp, Artificial Sequence
  Oligonucleotide for detection of SNP TSC0016661
ataatacgatacc

SEQ ID NO: 63011 - DNA, 13 bp, Artificial Sequence
  Oligonucleotide for detection of SNP TSC0016662
aattaatttggtg

SEQ ID NO: 63012 - DNA, 13 bp, Artificial Sequence
  Oligonucleotide for detection of SNP TSC0016662
caccaaattaatt

SEQ ID NO: 63013 - DNA, 13 bp, Artificial Sequence
  Oligonucleotide for detection of SNP TSC0016662
aattaagttggtg

SEQ ID NO: 63014 - DNA, 13 bp, Artificial Sequence
  Oligonucleotide for detection of SNP TSC0016662
caccaacttaatt

SEQ ID NO: 63015 - DNA, 13 bp, Artificial Sequence
  Oligonucleotide for detection of SNP TSC0016662
aattaatttggcg

SEQ ID NO: 63016 - DNA, 13 bp, Artificial Sequence
  Oligonucleotide for detection of SNP TSC0016662
cgccaaattaatt

SEQ ID NO: 63017 - DNA, 13 bp, Artificial Sequence
  Oligonucleotide for detection of SNP TSC0016662
aattaagttggcg

SEQ ID NO: 63018 - DNA, 13 bp, Artificial Sequence
  Oligonucleotide for detection of SNP TSC0016662
cgccaacttaatt

SEQ ID NO: 63019 - DNA, 13 bp, Artificial Sequence
  Oligonucleotide for detection of SNP TSC0016662
tgttaagttggtt

SEQ ID NO: 63020 - DNA, 13 bp, Artificial Sequence
  Oligonucleotide for detection of SNP TSC0016662
aaccaacttaaca

SEQ ID NO: 63021 - DNA, 13 bp, Artificial Sequence
  Oligonucleotide for detection of SNP TSC0016662
tgttaatttggtt

SEQ ID NO: 63022 - DNA, 13 bp, Artificial Sequence
  Oligonucleotide for detection of SNP TSC0016662
aaccaaattaaca

SEQ ID NO: 63023 - DNA, 13 bp, Artificial Sequence
  Oligonucleotide for detection of SNP TSC0016662
cgttaagttggtt

SEQ ID NO: 63024 - DNA, 13 bp, Artificial Sequence
  Oligonucleotide for detection of SNP TSC0016662
aaccaacttaacg

SEQ ID NO: 63025 - DNA, 13 bp, Artificial Sequence
  Oligonucleotide for detection of SNP TSC0016662
cgttaatttggtt

SEQ ID NO: 63026 - DNA, 13 bp, Artificial Sequence
  Oligonucleotide for detection of SNP TSC0016662
aaccaaattaacg

SEQ ID NO: 63027 - DNA, 13 bp, Artificial Sequence
  Oligonucleotide for detection of SNP TSC0016663
aagttagatagta

SEQ ID NO: 63028 - DNA, 13 bp, Artificial Sequence
  Oligonucleotide for detection of SNP TSC0016663
tactatctaactt

SEQ ID NO: 63029 - DNA, 13 bp, Artificial Sequence
  Oligonucleotide for detection of SNP TSC0016663
aagttaaatagta

SEQ ID NO: 63030 - DNA, 13 bp, Artificial Sequence
  Oligonucleotide for detection of SNP TSC0016663
tactatttaactt

SEQ ID NO: 63031 - DNA, 13 bp, Artificial Sequence
  Oligonucleotide for detection of SNP TSC0016664
tttggtagtattt

SEQ ID NO: 63032 - DNA, 13 bp, Artificial Sequence
  Oligonucleotide for detection of SNP TSC0016664
aaatactaccaaa

SEQ ID NO: 63033 - DNA, 13 bp, Artificial Sequence
  Oligonucleotide for detection of SNP TSC0016664
tttggtggtattt

SEQ ID NO: 63034 - DNA, 13 bp, Artificial Sequence
  Oligonucleotide for detection of SNP TSC0016664
aaataccaccaaa

SEQ ID NO: 63035 - DNA, 13 bp, Artificial Sequence
  Oligonucleotide for detection of SNP TSC0016664
tttggcggtattt

SEQ ID NO: 63036 - DNA, 13 bp, Artificial Sequence
  Oligonucleotide for detection of SNP TSC0016664
aaataccgccaaa

SEQ ID NO: 63037 - DNA, 13 bp, Artificial Sequence
  Oligonucleotide for detection of SNP TSC0016664
aagtattgttaag

SEQ ID NO: 63038 - DNA, 13 bp, Artificial Sequence
  Oligonucleotide for detection of SNP TSC0016664
cttaacaatactt

SEQ ID NO: 63039 - DNA, 13 bp, Artificial Sequence
  Oligonucleotide for detection of SNP TSC0016664
aagtatcgttaag

SEQ ID NO: 63040 - DNA, 13 bp, Artificial Sequence
  Oligonucleotide for detection of SNP TSC0016664
cttaacgatactt

SEQ ID NO: 63041 - DNA, 13 bp, Artificial Sequence
  Oligonucleotide for detection of SNP TSC0016665
gagtttagttttt

SEQ ID NO: 63042 - DNA, 13 bp, Artificial Sequence
  Oligonucleotide for detection of SNP TSC0016665
aaaaactaaactc

SEQ ID NO: 63043 - DNA, 13 bp, Artificial Sequence
  Oligonucleotide for detection of SNP TSC0016665
gagtttggttttt

SEQ ID NO: 63044 - DNA, 13 bp, Artificial Sequence
  Oligonucleotide for detection of SNP TSC0016665
aaaaaccaaactc

SEQ ID NO: 63045 - DNA, 13 bp, Artificial Sequence
  Oligonucleotide for detection of SNP TSC0016665
gagttcggttttt

SEQ ID NO: 63046 - DNA, 13 bp, Artificial Sequence
  Oligonucleotide for detection of SNP TSC0016665
aaaaaccgaactc

SEQ ID NO: 63047 - DNA, 13 bp, Artificial Sequence
  Oligonucleotide for detection of SNP TSC0016665
aggagttgggtty

SEQ ID NO: 63048 - DNA, 13 bp, Artificial Sequence
  Oligonucleotide for detection of SNP TSC0016665
raacccaactcct

SEQ ID NO: 63049 - DNA, 13 bp, Artificial Sequence
  Oligonucleotide for detection of SNP TSC0016665
aggagtcgggtty

SEQ ID NO: 63050 - DNA, 13 bp, Artificial Sequence
  Oligonucleotide for detection of SNP TSC0016665
raacccgactcct

SEQ ID NO: 63051 - DNA, 13 bp, Artificial Sequence
  Oligonucleotide for detection of SNP TSC0016667
gagagataggaat

SEQ ID NO: 63052 - DNA, 13 bp, Artificial Sequence
  Oligonucleotide for detection of SNP TSC0016667
attcctatctctc

SEQ ID NO: 63053 - DNA, 13 bp, Artificial Sequence
  Oligonucleotide for detection of SNP TSC0016667
gagagagaggaat

SEQ ID NO: 63054 - DNA, 13 bp, Artificial Sequence
  Oligonucleotide for detection of SNP TSC0016667
attcctctctctc

SEQ ID NO: 63055 - DNA, 13 bp, Artificial Sequence
  Oligonucleotide for detection of SNP TSC0016667
attttttttttty

SEQ ID NO: 63056 - DNA, 13 bp, Artificial Sequence
  Oligonucleotide for detection of SNP TSC0016667
raaaaaaaaaaat

SEQ ID NO: 63057 - DNA, 13 bp, Artificial Sequence
  Oligonucleotide for detection of SNP TSC0016670
aagtaatgttggg

SEQ ID NO: 63058 - DNA, 13 bp, Artificial Sequence
  Oligonucleotide for detection of SNP TSC0016670
cccaacattactt

SEQ ID NO: 63059 - DNA, 13 bp, Artificial Sequence
  Oligonucleotide for detection of SNP TSC0016670
aagtaacgttggg

SEQ ID NO: 63060 - DNA, 13 bp, Artificial Sequence
  Oligonucleotide for detection of SNP TSC0016670
cccaacgttactt

SEQ ID NO: 63061 - DNA, 13 bp, Artificial Sequence
  Oligonucleotide for detection of SNP TSC0016670
tttagtgttgttt

SEQ ID NO: 63062 - DNA, 13 bp, Artificial Sequence
  Oligonucleotide for detection of SNP TSC0016670
aaacaacactaaa

SEQ ID NO: 63063 - DNA, 13 bp, Artificial Sequence
  Oligonucleotide for detection of SNP TSC0016670
tttagtattgttt

SEQ ID NO: 63064 - DNA, 13 bp, Artificial Sequence
  Oligonucleotide for detection of SNP TSC0016670
aaacaatactaaa

SEQ ID NO: 63065 - DNA, 13 bp, Artificial Sequence
  Oligonucleotide for detection of SNP TSC0016670
tttagcgttgttt

SEQ ID NO: 63066 - DNA, 13 bp, Artificial Sequence
  Oligonucleotide for detection of SNP TSC0016670
aaacaacgctaaa

SEQ ID NO: 63067 - DNA, 13 bp, Artificial Sequence
  Oligonucleotide for detection of SNP TSC0016671
tagtttaaaggty

SEQ ID NO: 63068 - DNA, 13 bp, Artificial Sequence
  Oligonucleotide for detection of SNP TSC0016671
racctttaaacta

SEQ ID NO: 63069 - DNA, 13 bp, Artificial Sequence
  Oligonucleotide for detection of SNP TSC0016671
tagtttgaaggty

SEQ ID NO: 63070 - DNA, 13 bp, Artificial Sequence
  Oligonucleotide for detection of SNP TSC0016671
raccttcaaacta

SEQ ID NO: 63071 - DNA, 13 bp, Artificial Sequence
  Oligonucleotide for detection of SNP TSC0016672
gattttgggaggy

SEQ ID NO: 63072 - DNA, 13 bp, Artificial Sequence
  Oligonucleotide for detection of SNP TSC0016672
rcctcccaaaatc

SEQ ID NO: 63073 - DNA, 13 bp, Artificial Sequence
  Oligonucleotide for detection of SNP TSC0016672
gattttaggaggy

SEQ ID NO: 63074 - DNA, 13 bp, Artificial Sequence
  Oligonucleotide for detection of SNP TSC0016672
rcctcctaaaatc

SEQ ID NO: 63075 - DNA, 13 bp, Artificial Sequence
  Oligonucleotide for detection of SNP TSC0016672
gatttcgggaggy

SEQ ID NO: 63076 - DNA, 13 bp, Artificial Sequence
  Oligonucleotide for detection of SNP TSC0016672
rcctcccgaaatc

SEQ ID NO: 63077 - DNA, 13 bp, Artificial Sequence
  Oligonucleotide for detection of SNP TSC0016675
gatagaggtattt

SEQ ID NO: 63078 - DNA, 13 bp, Artificial Sequence
  Oligonucleotide for detection of SNP TSC0016675
aaatacctctatc

SEQ ID NO: 63079 - DNA, 13 bp, Artificial Sequence
  Oligonucleotide for detection of SNP TSC0016675
gatagatgtattt

SEQ ID NO: 63080 - DNA, 13 bp, Artificial Sequence
  Oligonucleotide for detection of SNP TSC0016675
aaatacatctatc

SEQ ID NO: 63081 - DNA, 13 bp, Artificial Sequence
  Oligonucleotide for detection of SNP TSC0016675
aggtatttttaty

SEQ ID NO: 63082 - DNA, 13 bp, Artificial Sequence
  Oligonucleotide for detection of SNP TSC0016675
rataaaaatacct

SEQ ID NO: 63083 - DNA, 13 bp, Artificial Sequence
  Oligonucleotide for detection of SNP TSC0016675
aggtatatttaty

SEQ ID NO: 63084 - DNA, 13 bp, Artificial Sequence
  Oligonucleotide for detection of SNP TSC0016675
rataaatatacct

SEQ ID NO: 63085 - DNA, 13 bp, Artificial Sequence
  Oligonucleotide for detection of SNP TSC0016678
ggattttgttagg

SEQ ID NO: 63086 - DNA, 13 bp, Artificial Sequence
  Oligonucleotide for detection of SNP TSC0016678
cctaacaaaatcc

SEQ ID NO: 63087 - DNA, 13 bp, Artificial Sequence
  Oligonucleotide for detection of SNP TSC0016678
ggatttcgttagg

SEQ ID NO: 63088 - DNA, 13 bp, Artificial Sequence
  Oligonucleotide for detection of SNP TSC0016678
cctaacgaaatcc

SEQ ID NO: 63089 - DNA, 13 bp, Artificial Sequence
  Oligonucleotide for detection of SNP TSC0016678
tttggtgggatty

SEQ ID NO: 63090 - DNA, 13 bp, Artificial Sequence
  Oligonucleotide for detection of SNP TSC0016678
raatcccaccaaa

SEQ ID NO: 63091 - DNA, 13 bp, Artificial Sequence
  Oligonucleotide for detection of SNP TSC0016678
tttggtaggatty

SEQ ID NO: 63092 - DNA, 13 bp, Artificial Sequence
  Oligonucleotide for detection of SNP TSC0016678
raatcctaccaaa

SEQ ID NO: 63093 - DNA, 13 bp, Artificial Sequence
  Oligonucleotide for detection of SNP TSC0016678
tttggcgggatty

SEQ ID NO: 63094 - DNA, 13 bp, Artificial Sequence
  Oligonucleotide for detection of SNP TSC0016678
raatcccgccaaa

SEQ ID NO: 63095 - DNA, 13 bp, Artificial Sequence
  Oligonucleotide for detection of SNP TSC0016679
tatataatttgtt

SEQ ID NO: 63096 - DNA, 13 bp, Artificial Sequence
  Oligonucleotide for detection of SNP TSC0016679
aacaaattatata

SEQ ID NO: 63097 - DNA, 13 bp, Artificial Sequence
  Oligonucleotide for detection of SNP TSC0016679
tatatagtttgtt

SEQ ID NO: 63098 - DNA, 13 bp, Artificial Sequence
  Oligonucleotide for detection of SNP TSC0016679
aacaaactatata

SEQ ID NO: 63099 - DNA, 13 bp, Artificial Sequence
  Oligonucleotide for detection of SNP TSC0016680
ggggattgggaay

SEQ ID NO: 63100 - DNA, 13 bp, Artificial Sequence
  Oligonucleotide for detection of SNP TSC0016680
rttcccaatcccc

SEQ ID NO: 63101 - DNA, 13 bp, Artificial Sequence
  Oligonucleotide for detection of SNP TSC0016680
ggggatagggaay

SEQ ID NO: 63102 - DNA, 13 bp, Artificial Sequence
  Oligonucleotide for detection of SNP TSC0016680
rttccctatcccc

SEQ ID NO: 63103 - DNA, 13 bp, Artificial Sequence
  Oligonucleotide for detection of SNP TSC0016680
ggggatcgggaay

SEQ ID NO: 63104 - DNA, 13 bp, Artificial Sequence
  Oligonucleotide for detection of SNP TSC0016680
rttcccgatcccc

SEQ ID NO: 63105 - DNA, 13 bp, Artificial Sequence
  Oligonucleotide for detection of SNP TSC0016681
attattaaagata

SEQ ID NO: 63106 - DNA, 13 bp, Artificial Sequence
  Oligonucleotide for detection of SNP TSC0016681
tatctttaataat

SEQ ID NO: 63107 - DNA, 13 bp, Artificial Sequence
  Oligonucleotide for detection of SNP TSC0016681
attattgaagata

SEQ ID NO: 63108 - DNA, 13 bp, Artificial Sequence
  Oligonucleotide for detection of SNP TSC0016681
tatcttcaataat

SEQ ID NO: 63109 - DNA, 13 bp, Artificial Sequence
  Oligonucleotide for detection of SNP TSC0016682
ataagtatgagty

SEQ ID NO: 63110 - DNA, 13 bp, Artificial Sequence
  Oligonucleotide for detection of SNP TSC0016682
ractcatacttat

SEQ ID NO: 63111 - DNA, 13 bp, Artificial Sequence
  Oligonucleotide for detection of SNP TSC0016682
ataagtgtgagty

SEQ ID NO: 63112 - DNA, 13 bp, Artificial Sequence
  Oligonucleotide for detection of SNP TSC0016682
ractcacacttat

SEQ ID NO: 63113 - DNA, 13 bp, Artificial Sequence
  Oligonucleotide for detection of SNP TSC0016682
ataagcgtgagty

SEQ ID NO: 63114 - DNA, 13 bp, Artificial Sequence
  Oligonucleotide for detection of SNP TSC0016682
ractcacgcttat

SEQ ID NO: 63115 - DNA, 13 bp, Artificial Sequence
  Oligonucleotide for detection of SNP TSC0016683
atgtttaaaaaay

SEQ ID NO: 63116 - DNA, 13 bp, Artificial Sequence
  Oligonucleotide for detection of SNP TSC0016683
rttttttaaacat

SEQ ID NO: 63117 - DNA, 13 bp, Artificial Sequence
  Oligonucleotide for detection of SNP TSC0016683
atgtttgaaaaay

SEQ ID NO: 63118 - DNA, 13 bp, Artificial Sequence
  Oligonucleotide for detection of SNP TSC0016683
rtttttcaaacat

SEQ ID NO: 63119 - DNA, 13 bp, Artificial Sequence
  Oligonucleotide for detection of SNP TSC0016683
atgttcgaaaaay

SEQ ID NO: 63120 - DNA, 13 bp, Artificial Sequence
  Oligonucleotide for detection of SNP TSC0016683
rtttttcgaacat

SEQ ID NO: 63121 - DNA, 13 bp, Artificial Sequence
  Oligonucleotide for detection of SNP TSC0016683
gttttttgagtat

SEQ ID NO: 63122 - DNA, 13 bp, Artificial Sequence
  Oligonucleotide for detection of SNP TSC0016683
atactcaaaaaac

SEQ ID NO: 63123 - DNA, 13 bp, Artificial Sequence
  Oligonucleotide for detection of SNP TSC0016683
gtttttcgagtat

SEQ ID NO: 63124 - DNA, 13 bp, Artificial Sequence
  Oligonucleotide for detection of SNP TSC0016683
atactcgaaaaac

SEQ ID NO: 63125 - DNA, 13 bp, Artificial Sequence
  Oligonucleotide for detection of SNP TSC0016684
ttttatagattay

SEQ ID NO: 63126 - DNA, 13 bp, Artificial Sequence
  Oligonucleotide for detection of SNP TSC0016684
rtaatctataaaa

SEQ ID NO: 63127 - DNA, 13 bp, Artificial Sequence
  Oligonucleotide for detection of SNP TSC0016684
ttttatggattay

SEQ ID NO: 63128 - DNA, 13 bp, Artificial Sequence
  Oligonucleotide for detection of SNP TSC0016684
rtaatccataaaa

SEQ ID NO: 63129 - DNA, 13 bp, Artificial Sequence
  Oligonucleotide for detection of SNP TSC0016684
ttttacggattay

SEQ ID NO: 63130 - DNA, 13 bp, Artificial Sequence
  Oligonucleotide for detection of SNP TSC0016684
rtaatccgtaaaa

SEQ ID NO: 63131 - DNA, 13 bp, Artificial Sequence
  Oligonucleotide for detection of SNP TSC0016684
gtggtttgtggga

SEQ ID NO: 63132 - DNA, 13 bp, Artificial Sequence
  Oligonucleotide for detection of SNP TSC0016684
tcccacaaaccac

SEQ ID NO: 63133 - DNA, 13 bp, Artificial Sequence
  Oligonucleotide for detection of SNP TSC0016684
gtggttcgtggga

SEQ ID NO: 63134 - DNA, 13 bp, Artificial Sequence
  Oligonucleotide for detection of SNP TSC0016684
tcccacgaaccac

SEQ ID NO: 63135 - DNA, 13 bp, Artificial Sequence
  Oligonucleotide for detection of SNP TSC0016685
ggatttatgtaaa

SEQ ID NO: 63136 - DNA, 13 bp, Artificial Sequence
  Oligonucleotide for detection of SNP TSC0016685
tttacataaatcc

SEQ ID NO: 63137 - DNA, 13 bp, Artificial Sequence
  Oligonucleotide for detection of SNP TSC0016685
ggatttgtgtaaa

SEQ ID NO: 63138 - DNA, 13 bp, Artificial Sequence
  Oligonucleotide for detection of SNP TSC0016685
tttacacaaatcc

SEQ ID NO: 63139 - DNA, 13 bp, Artificial Sequence
  Oligonucleotide for detection of SNP TSC0016685
ggattcgtgtaaa

SEQ ID NO: 63140 - DNA, 13 bp, Artificial Sequence
  Oligonucleotide for detection of SNP TSC0016685
tttacacgaatcc

SEQ ID NO: 63141 - DNA, 13 bp, Artificial Sequence
  Oligonucleotide for detection of SNP TSC0016685
tttatatgaatty

SEQ ID NO: 63142 - DNA, 13 bp, Artificial Sequence
  Oligonucleotide for detection of SNP TSC0016685
raattcatataaa

SEQ ID NO: 63143 - DNA, 13 bp, Artificial Sequence
  Oligonucleotide for detection of SNP TSC0016685
tttatacgaatty

SEQ ID NO: 63144 - DNA, 13 bp, Artificial Sequence
  Oligonucleotide for detection of SNP TSC0016685
raattcgtataaa

SEQ ID NO: 63145 - DNA, 13 bp, Artificial Sequence
  Oligonucleotide for detection of SNP TSC0016686
ggggagggtagga

SEQ ID NO: 63146 - DNA, 13 bp, Artificial Sequence
  Oligonucleotide for detection of SNP TSC0016686
tcctaccctcccc

SEQ ID NO: 63147 - DNA, 13 bp, Artificial Sequence
  Oligonucleotide for detection of SNP TSC0016686
ggggagagtagga

SEQ ID NO: 63148 - DNA, 13 bp, Artificial Sequence
  Oligonucleotide for detection of SNP TSC0016686
tcctactctcccc

SEQ ID NO: 63149 - DNA, 13 bp, Artificial Sequence
  Oligonucleotide for detection of SNP TSC0016687
aaaagaattggag

SEQ ID NO: 63150 - DNA, 13 bp, Artificial Sequence
  Oligonucleotide for detection of SNP TSC0016687
ctccaattctttt

SEQ ID NO: 63151 - DNA, 13 bp, Artificial Sequence
  Oligonucleotide for detection of SNP TSC0016687
aaaagagttggag

SEQ ID NO: 63152 - DNA, 13 bp, Artificial Sequence
  Oligonucleotide for detection of SNP TSC0016687
ctccaactctttt

SEQ ID NO: 63153 - DNA, 13 bp, Artificial Sequence
  Oligonucleotide for detection of SNP TSC0016688
ttttttattaggt

SEQ ID NO: 63154 - DNA, 13 bp, Artificial Sequence
  Oligonucleotide for detection of SNP TSC0016688
acctaataaaaaa

SEQ ID NO: 63155 - DNA, 13 bp, Artificial Sequence
  Oligonucleotide for detection of SNP TSC0016688
ttttttgttaggt

SEQ ID NO: 63156 - DNA, 13 bp, Artificial Sequence
  Oligonucleotide for detection of SNP TSC0016688
acctaacaaaaaa

SEQ ID NO: 63157 - DNA, 13 bp, Artificial Sequence
  Oligonucleotide for detection of SNP TSC0016688
tttttcgttaggt

SEQ ID NO: 63158 - DNA, 13 bp, Artificial Sequence
  Oligonucleotide for detection of SNP TSC0016688
acctaacgaaaaa

SEQ ID NO: 63159 - DNA, 13 bp, Artificial Sequence
  Oligonucleotide for detection of SNP TSC0016688
atttggtgaaggg

SEQ ID NO: 63160 - DNA, 13 bp, Artificial Sequence
  Oligonucleotide for detection of SNP TSC0016688
cccttcaccaaat

SEQ ID NO: 63161 - DNA, 13 bp, Artificial Sequence
  Oligonucleotide for detection of SNP TSC0016688
atttggcgaaggg

SEQ ID NO: 63162 - DNA, 13 bp, Artificial Sequence
  Oligonucleotide for detection of SNP TSC0016688
cccttcgccaaat

SEQ ID NO: 63163 - DNA, 13 bp, Artificial Sequence
  Oligonucleotide for detection of SNP TSC0016689
ttatgaattagtt

SEQ ID NO: 63164 - DNA, 13 bp, Artificial Sequence
  Oligonucleotide for detection of SNP TSC0016689
aactaattcataa

SEQ ID NO: 63165 - DNA, 13 bp, Artificial Sequence
  Oligonucleotide for detection of SNP TSC0016689
ttatgatttagtt

SEQ ID NO: 63166 - DNA, 13 bp, Artificial Sequence
  Oligonucleotide for detection of SNP TSC0016689
aactaaatcataa

SEQ ID NO: 63167 - DNA, 13 bp, Artificial Sequence
  Oligonucleotide for detection of SNP TSC0016689
ttacgaattagtt

SEQ ID NO: 63168 - DNA, 13 bp, Artificial Sequence
  Oligonucleotide for detection of SNP TSC0016689
aactaattcgtaa

SEQ ID NO: 63169 - DNA, 13 bp, Artificial Sequence
  Oligonucleotide for detection of SNP TSC0016689
ttacgatttagtt

SEQ ID NO: 63170 - DNA, 13 bp, Artificial Sequence
  Oligonucleotide for detection of SNP TSC0016689
aactaaatcgtaa

SEQ ID NO: 63171 - DNA, 13 bp, Artificial Sequence
  Oligonucleotide for detection of SNP TSC0016689
agttgatttgtgg

SEQ ID NO: 63172 - DNA, 13 bp, Artificial Sequence
  Oligonucleotide for detection of SNP TSC0016689
ccacaaatcaact

SEQ ID NO: 63173 - DNA, 13 bp, Artificial Sequence
  Oligonucleotide for detection of SNP TSC0016689
agttgagttgtgg

SEQ ID NO: 63174 - DNA, 13 bp, Artificial Sequence
  Oligonucleotide for detection of SNP TSC0016689
ccacaactcaact

SEQ ID NO: 63175 - DNA, 13 bp, Artificial Sequence
  Oligonucleotide for detection of SNP TSC0016689
agttgattcgtgg

SEQ ID NO: 63176 - DNA, 13 bp, Artificial Sequence
  Oligonucleotide for detection of SNP TSC0016689
ccacgaatcaact

SEQ ID NO: 63177 - DNA, 13 bp, Artificial Sequence
  Oligonucleotide for detection of SNP TSC0016689
agttgagtcgtgg

SEQ ID NO: 63178 - DNA, 13 bp, Artificial Sequence
  Oligonucleotide for detection of SNP TSC0016689
ccacgactcaact

SEQ ID NO: 63179 - DNA, 13 bp, Artificial Sequence
  Oligonucleotide for detection of SNP TSC0016690
tgttgaagagtat

SEQ ID NO: 63180 - DNA, 13 bp, Artificial Sequence
  Oligonucleotide for detection of SNP TSC0016690
atactcttcaaca

SEQ ID NO: 63181 - DNA, 13 bp, Artificial Sequence
  Oligonucleotide for detection of SNP TSC0016690
tgttgaggagtat

SEQ ID NO: 63182 - DNA, 13 bp, Artificial Sequence
  Oligonucleotide for detection of SNP TSC0016690
atactcctcaaca

SEQ ID NO: 63183 - DNA, 13 bp, Artificial Sequence
  Oligonucleotide for detection of SNP TSC0016691
ttgttattgttta

SEQ ID NO: 63184 - DNA, 13 bp, Artificial Sequence
  Oligonucleotide for detection of SNP TSC0016691
taaacaataacaa

SEQ ID NO: 63185 - DNA, 13 bp, Artificial Sequence
  Oligonucleotide for detection of SNP TSC0016691
ttgttagtgttta

SEQ ID NO: 63186 - DNA, 13 bp, Artificial Sequence
  Oligonucleotide for detection of SNP TSC0016691
taaacactaacaa

SEQ ID NO: 63187 - DNA, 13 bp, Artificial Sequence
  Oligonucleotide for detection of SNP TSC0016691
taaatagtagtaa

SEQ ID NO: 63188 - DNA, 13 bp, Artificial Sequence
  Oligonucleotide for detection of SNP TSC0016691
ttactactattta

SEQ ID NO: 63189 - DNA, 13 bp, Artificial Sequence
  Oligonucleotide for detection of SNP TSC0016691
taaatattagtaa

SEQ ID NO: 63190 - DNA, 13 bp, Artificial Sequence
  Oligonucleotide for detection of SNP TSC0016691
ttactaatattta

SEQ ID NO: 63191 - DNA, 13 bp, Artificial Sequence
  Oligonucleotide for detection of SNP TSC0016694
ataattgttaaat

SEQ ID NO: 63192 - DNA, 13 bp, Artificial Sequence
  Oligonucleotide for detection of SNP TSC0016694
atttaacaattat

SEQ ID NO: 63193 - DNA, 13 bp, Artificial Sequence
  Oligonucleotide for detection of SNP TSC0016694
ataattattaaat

SEQ ID NO: 63194 - DNA, 13 bp, Artificial Sequence
  Oligonucleotide for detection of SNP TSC0016694
atttaataattat

SEQ ID NO: 63195 - DNA, 13 bp, Artificial Sequence
  Oligonucleotide for detection of SNP TSC0016695
aaatggaatgtty

SEQ ID NO: 63196 - DNA, 13 bp, Artificial Sequence
  Oligonucleotide for detection of SNP TSC0016695
raacattccattt

SEQ ID NO: 63197 - DNA, 13 bp, Artificial Sequence
  Oligonucleotide for detection of SNP TSC0016695
aaatgggatgtty

SEQ ID NO: 63198 - DNA, 13 bp, Artificial Sequence
  Oligonucleotide for detection of SNP TSC0016695
raacatcccattt

SEQ ID NO: 63199 - DNA, 13 bp, Artificial Sequence
  Oligonucleotide for detection of SNP TSC0016696
ggaggagtgttta

SEQ ID NO: 63200 - DNA, 13 bp, Artificial Sequence
  Oligonucleotide for detection of SNP TSC0016696
taaacactcctcc

SEQ ID NO: 63201 - DNA, 13 bp, Artificial Sequence
  Oligonucleotide for detection of SNP TSC0016696
ggaggaatgttta

SEQ ID NO: 63202 - DNA, 13 bp, Artificial Sequence
  Oligonucleotide for detection of SNP TSC0016696
taaacattcctcc

SEQ ID NO: 63203 - DNA, 13 bp, Artificial Sequence
  Oligonucleotide for detection of SNP TSC0016696
ggaggagcgttta

SEQ ID NO: 63204 - DNA, 13 bp, Artificial Sequence
  Oligonucleotide for detection of SNP TSC0016696
taaacgctcctcc

SEQ ID NO: 63205 - DNA, 13 bp, Artificial Sequence
  Oligonucleotide for detection of SNP TSC0016696
ggaggaacgttta

SEQ ID NO: 63206 - DNA, 13 bp, Artificial Sequence
  Oligonucleotide for detection of SNP TSC0016696
taaacgttcctcc

SEQ ID NO: 63207 - DNA, 13 bp, Artificial Sequence
  Oligonucleotide for detection of SNP TSC0016698
aattttatgtgty

SEQ ID NO: 63208 - DNA, 13 bp, Artificial Sequence
  Oligonucleotide for detection of SNP TSC0016698
racacataaaatt

SEQ ID NO: 63209 - DNA, 13 bp, Artificial Sequence
  Oligonucleotide for detection of SNP TSC0016698
aattttgtgtgty

SEQ ID NO: 63210 - DNA, 13 bp, Artificial Sequence
  Oligonucleotide for detection of SNP TSC0016698
racacacaaaatt

SEQ ID NO: 63211 - DNA, 13 bp, Artificial Sequence
  Oligonucleotide for detection of SNP TSC0016698
aatttcgtgtgty

SEQ ID NO: 63212 - DNA, 13 bp, Artificial Sequence
  Oligonucleotide for detection of SNP TSC0016698
racacacgaaatt

SEQ ID NO: 63213 - DNA, 13 bp, Artificial Sequence
  Oligonucleotide for detection of SNP TSC0016698
ggtatatggggtt

SEQ ID NO: 63214 - DNA, 13 bp, Artificial Sequence
  Oligonucleotide for detection of SNP TSC0016698
aaccccatatacc

SEQ ID NO: 63215 - DNA, 13 bp, Artificial Sequence
  Oligonucleotide for detection of SNP TSC0016698
ggtatacggggtt

SEQ ID NO: 63216 - DNA, 13 bp, Artificial Sequence
  Oligonucleotide for detection of SNP TSC0016698
aaccccgtatacc

SEQ ID NO: 63217 - DNA, 13 bp, Artificial Sequence
  Oligonucleotide for detection of SNP TSC0016702
ttttaaatattta

SEQ ID NO: 63218 - DNA, 13 bp, Artificial Sequence
  Oligonucleotide for detection of SNP TSC0016702
taaatatttaaaa

SEQ ID NO: 63219 - DNA, 13 bp, Artificial Sequence
  Oligonucleotide for detection of SNP TSC0016702
ttttaagtattta

SEQ ID NO: 63220 - DNA, 13 bp, Artificial Sequence
  Oligonucleotide for detection of SNP TSC0016702
taaatacttaaaa

SEQ ID NO: 63221 - DNA, 13 bp, Artificial Sequence
  Oligonucleotide for detection of SNP TSC0016703
aataaataatagy

SEQ ID NO: 63222 - DNA, 13 bp, Artificial Sequence
  Oligonucleotide for detection of SNP TSC0016703
rctattatttatt

SEQ ID NO: 63223 - DNA, 13 bp, Artificial Sequence
  Oligonucleotide for detection of SNP TSC0016703
aataaagaatagy

SEQ ID NO: 63224 - DNA, 13 bp, Artificial Sequence
  Oligonucleotide for detection of SNP TSC0016703
rctattctttatt

SEQ ID NO: 63225 - DNA, 13 bp, Artificial Sequence
  Oligonucleotide for detection of SNP TSC0016703
gttgttgtttgtt

SEQ ID NO: 63226 - DNA, 13 bp, Artificial Sequence
  Oligonucleotide for detection of SNP TSC0016703
aacaaacaacaac

SEQ ID NO: 63227 - DNA, 13 bp, Artificial Sequence
  Oligonucleotide for detection of SNP TSC0016703
gttgttttttgtt

SEQ ID NO: 63228 - DNA, 13 bp, Artificial Sequence
  Oligonucleotide for detection of SNP TSC0016703
aacaaaaaacaac

SEQ ID NO: 63229 - DNA, 13 bp, Artificial Sequence
  Oligonucleotide for detection of SNP TSC0016704
atagtttttatta

SEQ ID NO: 63230 - DNA, 13 bp, Artificial Sequence
  Oligonucleotide for detection of SNP TSC0016704
taataaaaactat

SEQ ID NO: 63231 - DNA, 13 bp, Artificial Sequence
  Oligonucleotide for detection of SNP TSC0016704
tgatgggaattgt

SEQ ID NO: 63232 - DNA, 13 bp, Artificial Sequence
  Oligonucleotide for detection of SNP TSC0016704
acaattcccatca

SEQ ID NO: 63233 - DNA, 13 bp, Artificial Sequence
  Oligonucleotide for detection of SNP TSC0016704
tgatggtaattgt

SEQ ID NO: 63234 - DNA, 13 bp, Artificial Sequence
  Oligonucleotide for detection of SNP TSC0016704
acaattaccatca

SEQ ID NO: 63235 - DNA, 13 bp, Artificial Sequence
  Oligonucleotide for detection of SNP TSC0016705
tgtggtgtaaaga

SEQ ID NO: 63236 - DNA, 13 bp, Artificial Sequence
  Oligonucleotide for detection of SNP TSC0016705
tctttacaccaca

SEQ ID NO: 63237 - DNA, 13 bp, Artificial Sequence
  Oligonucleotide for detection of SNP TSC0016705
tgtggtttaaaga

SEQ ID NO: 63238 - DNA, 13 bp, Artificial Sequence
  Oligonucleotide for detection of SNP TSC0016705
tctttaaaccaca

SEQ ID NO: 63239 - DNA, 13 bp, Artificial Sequence
  Oligonucleotide for detection of SNP TSC0016705
tttttgtattata

SEQ ID NO: 63240 - DNA, 13 bp, Artificial Sequence
  Oligonucleotide for detection of SNP TSC0016705
tataatacaaaaa

SEQ ID NO: 63241 - DNA, 13 bp, Artificial Sequence
  Oligonucleotide for detection of SNP TSC0016705
tttttgaattata

SEQ ID NO: 63242 - DNA, 13 bp, Artificial Sequence
  Oligonucleotide for detection of SNP TSC0016705
tataattcaaaaa

SEQ ID NO: 63243 - DNA, 13 bp, Artificial Sequence
  Oligonucleotide for detection of SNP TSC0016708
atatttgtgttta

SEQ ID NO: 63244 - DNA, 13 bp, Artificial Sequence
  Oligonucleotide for detection of SNP TSC0016708
taaacacaaatat

SEQ ID NO: 63245 - DNA, 13 bp, Artificial Sequence
  Oligonucleotide for detection of SNP TSC0016708
atatttatgttta

SEQ ID NO: 63246 - DNA, 13 bp, Artificial Sequence
  Oligonucleotide for detection of SNP TSC0016708
taaacataaatat

SEQ ID NO: 63247 - DNA, 13 bp, Artificial Sequence
  Oligonucleotide for detection of SNP TSC0016709
gtagtggtagtag

SEQ ID NO: 63248 - DNA, 13 bp, Artificial Sequence
  Oligonucleotide for detection of SNP TSC0016709
ctactaccactac

SEQ ID NO: 63249 - DNA, 13 bp, Artificial Sequence
  Oligonucleotide for detection of SNP TSC0016709
gtagtgatagtag

SEQ ID NO: 63250 - DNA, 13 bp, Artificial Sequence
  Oligonucleotide for detection of SNP TSC0016709
ctactatcactac

SEQ ID NO: 63251 - DNA, 13 bp, Artificial Sequence
  Oligonucleotide for detection of SNP TSC0016710
ggggggttgaggg

SEQ ID NO: 63252 - DNA, 13 bp, Artificial Sequence
  Oligonucleotide for detection of SNP TSC0016710
ccctcaacccccc

SEQ ID NO: 63253 - DNA, 13 bp, Artificial Sequence
  Oligonucleotide for detection of SNP TSC0016710
ggggggatgaggg

SEQ ID NO: 63254 - DNA, 13 bp, Artificial Sequence
  Oligonucleotide for detection of SNP TSC0016710
ccctcatcccccc

SEQ ID NO: 63255 - DNA, 13 bp, Artificial Sequence
  Oligonucleotide for detection of SNP TSC0016711
gtgattaaatgtt

SEQ ID NO: 63256 - DNA, 13 bp, Artificial Sequence
  Oligonucleotide for detection of SNP TSC0016711
aacatttaatcac

SEQ ID NO: 63257 - DNA, 13 bp, Artificial Sequence
  Oligonucleotide for detection of SNP TSC0016711
gtgattgaatgtt

SEQ ID NO: 63258 - DNA, 13 bp, Artificial Sequence
  Oligonucleotide for detection of SNP TSC0016711
aacattcaatcac

SEQ ID NO: 63259 - DNA, 13 bp, Artificial Sequence
  Oligonucleotide for detection of SNP TSC0016716
gattggtgggggy

SEQ ID NO: 63260 - DNA, 13 bp, Artificial Sequence
  Oligonucleotide for detection of SNP TSC0016716
rcccccaccaatc

SEQ ID NO: 63261 - DNA, 13 bp, Artificial Sequence
  Oligonucleotide for detection of SNP TSC0016716
gatcggtgggggy

SEQ ID NO: 63262 - DNA, 13 bp, Artificial Sequence
  Oligonucleotide for detection of SNP TSC0016716
rcccccaccgatc

SEQ ID NO: 63263 - DNA, 13 bp, Artificial Sequence
  Oligonucleotide for detection of SNP TSC0016716
gattggcgggggy

SEQ ID NO: 63264 - DNA, 13 bp, Artificial Sequence
  Oligonucleotide for detection of SNP TSC0016716
rcccccgccaatc

SEQ ID NO: 63265 - DNA, 13 bp, Artificial Sequence
  Oligonucleotide for detection of SNP TSC0016716
gatcggcgggggy

SEQ ID NO: 63266 - DNA, 13 bp, Artificial Sequence
  Oligonucleotide for detection of SNP TSC0016716
rcccccgccgatc

SEQ ID NO: 63267 - DNA, 13 bp, Artificial Sequence
  Oligonucleotide for detection of SNP TSC0016716
gtttttattgaty

SEQ ID NO: 63268 - DNA, 13 bp, Artificial Sequence
  Oligonucleotide for detection of SNP TSC0016716
ratcaataaaaac

SEQ ID NO: 63269 - DNA, 13 bp, Artificial Sequence
  Oligonucleotide for detection of SNP TSC0016716
gttttcgttgaty

SEQ ID NO: 63270 - DNA, 13 bp, Artificial Sequence
  Oligonucleotide for detection of SNP TSC0016716
ratcaacgaaaac

SEQ ID NO: 63271 - DNA, 13 bp, Artificial Sequence
  Oligonucleotide for detection of SNP TSC0016716
gtttttatcgaty

SEQ ID NO: 63272 - DNA, 13 bp, Artificial Sequence
  Oligonucleotide for detection of SNP TSC0016716
ratcgataaaaac

SEQ ID NO: 63273 - DNA, 13 bp, Artificial Sequence
  Oligonucleotide for detection of SNP TSC0016716
gtttttgtcgaty

SEQ ID NO: 63274 - DNA, 13 bp, Artificial Sequence
  Oligonucleotide for detection of SNP TSC0016716
ratcgacaaaaac

SEQ ID NO: 63275 - DNA, 13 bp, Artificial Sequence
  Oligonucleotide for detection of SNP TSC0016716
gttttcgtcgaty

SEQ ID NO: 63276 - DNA, 13 bp, Artificial Sequence
  Oligonucleotide for detection of SNP TSC0016716
ratcgacgaaaac

SEQ ID NO: 63277 - DNA, 13 bp, Artificial Sequence
  Oligonucleotide for detection of SNP TSC0016717
ggtttaagggtty

SEQ ID NO: 63278 - DNA, 13 bp, Artificial Sequence
  Oligonucleotide for detection of SNP TSC0016717
raacccttaaacc

SEQ ID NO: 63279 - DNA, 13 bp, Artificial Sequence
  Oligonucleotide for detection of SNP TSC0016717
ggtttaggggtty

SEQ ID NO: 63280 - DNA, 13 bp, Artificial Sequence
  Oligonucleotide for detection of SNP TSC0016717
raacccctaaacc

SEQ ID NO: 63281 - DNA, 13 bp, Artificial Sequence
  Oligonucleotide for detection of SNP TSC0016718
gtttatttaaaat

SEQ ID NO: 63282 - DNA, 13 bp, Artificial Sequence
  Oligonucleotide for detection of SNP TSC0016718
attttaaataaac

SEQ ID NO: 63283 - DNA, 13 bp, Artificial Sequence
  Oligonucleotide for detection of SNP TSC0016718
gtttatgtaaaat

SEQ ID NO: 63284 - DNA, 13 bp, Artificial Sequence
  Oligonucleotide for detection of SNP TSC0016718
attttacataaac

SEQ ID NO: 63285 - DNA, 13 bp, Artificial Sequence
  Oligonucleotide for detection of SNP TSC0016718
attttagataaay

SEQ ID NO: 63286 - DNA, 13 bp, Artificial Sequence
  Oligonucleotide for detection of SNP TSC0016718
rtttatctaaaat

SEQ ID NO: 63287 - DNA, 13 bp, Artificial Sequence
  Oligonucleotide for detection of SNP TSC0016718
attttatataaay

SEQ ID NO: 63288 - DNA, 13 bp, Artificial Sequence
  Oligonucleotide for detection of SNP TSC0016718
rtttatataaaat

SEQ ID NO: 63289 - DNA, 13 bp, Artificial Sequence
  Oligonucleotide for detection of SNP TSC0016721
tggtggaagttgy

SEQ ID NO: 63290 - DNA, 13 bp, Artificial Sequence
  Oligonucleotide for detection of SNP TSC0016721
rcaacttccacca

SEQ ID NO: 63291 - DNA, 13 bp, Artificial Sequence
  Oligonucleotide for detection of SNP TSC0016721
tggtgggagttgy

SEQ ID NO: 63292 - DNA, 13 bp, Artificial Sequence
  Oligonucleotide for detection of SNP TSC0016721
rcaactcccacca

SEQ ID NO: 63293 - DNA, 13 bp, Artificial Sequence
  Oligonucleotide for detection of SNP TSC0016722
gagaagggagaag

SEQ ID NO: 63294 - DNA, 13 bp, Artificial Sequence
  Oligonucleotide for detection of SNP TSC0016722
cttctcccttctc

SEQ ID NO: 63295 - DNA, 13 bp, Artificial Sequence
  Oligonucleotide for detection of SNP TSC0016722
gagaagtgagaag

SEQ ID NO: 63296 - DNA, 13 bp, Artificial Sequence
  Oligonucleotide for detection of SNP TSC0016722
cttctcacttctc

SEQ ID NO: 63297 - DNA, 13 bp, Artificial Sequence
  Oligonucleotide for detection of SNP TSC0016723
ttttttaagtatt

SEQ ID NO: 63298 - DNA, 13 bp, Artificial Sequence
  Oligonucleotide for detection of SNP TSC0016723
aatacttaaaaaa

SEQ ID NO: 63299 - DNA, 13 bp, Artificial Sequence
  Oligonucleotide for detection of SNP TSC0016723
agtatttggaaaa

SEQ ID NO: 63300 - DNA, 13 bp, Artificial Sequence
  Oligonucleotide for detection of SNP TSC0016723
ttttccaaatact

SEQ ID NO: 63301 - DNA, 13 bp, Artificial Sequence
  Oligonucleotide for detection of SNP TSC0016723
agtattaggaaaa

SEQ ID NO: 63302 - DNA, 13 bp, Artificial Sequence
  Oligonucleotide for detection of SNP TSC0016723
ttttcctaatact

SEQ ID NO: 63303 - DNA, 13 bp, Artificial Sequence
  Oligonucleotide for detection of SNP TSC0016724
aagtataaggagy

SEQ ID NO: 63304 - DNA, 13 bp, Artificial Sequence
  Oligonucleotide for detection of SNP TSC0016724
rctccttatactt

SEQ ID NO: 63305 - DNA, 13 bp, Artificial Sequence
  Oligonucleotide for detection of SNP TSC0016724
aagtatgaggagy

SEQ ID NO: 63306 - DNA, 13 bp, Artificial Sequence
  Oligonucleotide for detection of SNP TSC0016724
rctcctcatactt

SEQ ID NO: 63307 - DNA, 13 bp, Artificial Sequence
  Oligonucleotide for detection of SNP TSC0016726
gtttaaagttgtg

SEQ ID NO: 63308 - DNA, 13 bp, Artificial Sequence
  Oligonucleotide for detection of SNP TSC0016726
cacaactttaaac

SEQ ID NO: 63309 - DNA, 13 bp, Artificial Sequence
  Oligonucleotide for detection of SNP TSC0016726
gtttaatgttgtg

SEQ ID NO: 63310 - DNA, 13 bp, Artificial Sequence
  Oligonucleotide for detection of SNP TSC0016726
cacaacattaaac

SEQ ID NO: 63311 - DNA, 13 bp, Artificial Sequence
  Oligonucleotide for detection of SNP TSC0016726
tatagttttaagy

SEQ ID NO: 63312 - DNA, 13 bp, Artificial Sequence
  Oligonucleotide for detection of SNP TSC0016726
rcttaaaactata

SEQ ID NO: 63313 - DNA, 13 bp, Artificial Sequence
  Oligonucleotide for detection of SNP TSC0016726
tatagtattaagy

SEQ ID NO: 63314 - DNA, 13 bp, Artificial Sequence
  Oligonucleotide for detection of SNP TSC0016726
rcttaatactata

SEQ ID NO: 63315 - DNA, 13 bp, Artificial Sequence
  Oligonucleotide for detection of SNP TSC0016729
aatgatattagta

SEQ ID NO: 63316 - DNA, 13 bp, Artificial Sequence
  Oligonucleotide for detection of SNP TSC0016729
tactaatatcatt

SEQ ID NO: 63317 - DNA, 13 bp, Artificial Sequence
  Oligonucleotide for detection of SNP TSC0016729
aatgatgttagta

SEQ ID NO: 63318 - DNA, 13 bp, Artificial Sequence
  Oligonucleotide for detection of SNP TSC0016729
tactaacatcatt

SEQ ID NO: 63319 - DNA, 13 bp, Artificial Sequence
  Oligonucleotide for detection of SNP TSC0016729
aatgacgttagta

SEQ ID NO: 63320 - DNA, 13 bp, Artificial Sequence
  Oligonucleotide for detection of SNP TSC0016729
tactaacgtcatt

SEQ ID NO: 63321 - DNA, 13 bp, Artificial Sequence
  Oligonucleotide for detection of SNP TSC0016729
tgttgatgttatt

SEQ ID NO: 63322 - DNA, 13 bp, Artificial Sequence
  Oligonucleotide for detection of SNP TSC0016729
aataacatcaaca

SEQ ID NO: 63323 - DNA, 13 bp, Artificial Sequence
  Oligonucleotide for detection of SNP TSC0016729
tgttgacgttatt

SEQ ID NO: 63324 - DNA, 13 bp, Artificial Sequence
  Oligonucleotide for detection of SNP TSC0016729
aataacgtcaaca

SEQ ID NO: 63325 - DNA, 13 bp, Artificial Sequence
  Oligonucleotide for detection of SNP TSC0016731
ggttttatggtgy

SEQ ID NO: 63326 - DNA, 13 bp, Artificial Sequence
  Oligonucleotide for detection of SNP TSC0016731
rcaccataaaacc

SEQ ID NO: 63327 - DNA, 13 bp, Artificial Sequence
  Oligonucleotide for detection of SNP TSC0016731
ggttttgtggtgy

SEQ ID NO: 63328 - DNA, 13 bp, Artificial Sequence
  Oligonucleotide for detection of SNP TSC0016731
rcaccacaaaacc

SEQ ID NO: 63329 - DNA, 13 bp, Artificial Sequence
  Oligonucleotide for detection of SNP TSC0016731
ggtttcgtggtgy

SEQ ID NO: 63330 - DNA, 13 bp, Artificial Sequence
  Oligonucleotide for detection of SNP TSC0016731
rcaccacgaaacc

SEQ ID NO: 63331 - DNA, 13 bp, Artificial Sequence
  Oligonucleotide for detection of SNP TSC0016731
gtattatgaggty

SEQ ID NO: 63332 - DNA, 13 bp, Artificial Sequence
  Oligonucleotide for detection of SNP TSC0016731
racctcataatac

SEQ ID NO: 63333 - DNA, 13 bp, Artificial Sequence
  Oligonucleotide for detection of SNP TSC0016731
gtattacgaggty

SEQ ID NO: 63334 - DNA, 13 bp, Artificial Sequence
  Oligonucleotide for detection of SNP TSC0016731
racctcgtaatac

SEQ ID NO: 63335 - DNA, 13 bp, Artificial Sequence
  Oligonucleotide for detection of SNP TSC0016732
attagtgttttaa

SEQ ID NO: 63336 - DNA, 13 bp, Artificial Sequence
  Oligonucleotide for detection of SNP TSC0016732
ttaaaacactaat

SEQ ID NO: 63337 - DNA, 13 bp, Artificial Sequence
  Oligonucleotide for detection of SNP TSC0016732
attagtattttaa

SEQ ID NO: 63338 - DNA, 13 bp, Artificial Sequence
  Oligonucleotide for detection of SNP TSC0016732
ttaaaatactaat

SEQ ID NO: 63339 - DNA, 13 bp, Artificial Sequence
  Oligonucleotide for detection of SNP TSC0016734
gttgatattttta

SEQ ID NO: 63340 - DNA, 13 bp, Artificial Sequence
  Oligonucleotide for detection of SNP TSC0016734
taaaaatatcaac

SEQ ID NO: 63341 - DNA, 13 bp, Artificial Sequence
  Oligonucleotide for detection of SNP TSC0016734
gttgattttttta

SEQ ID NO: 63342 - DNA, 13 bp, Artificial Sequence
  Oligonucleotide for detection of SNP TSC0016734
taaaaaaatcaac

SEQ ID NO: 63343 - DNA, 13 bp, Artificial Sequence
  Oligonucleotide for detection of SNP TSC0016734
tagaagtattagy

SEQ ID NO: 63344 - DNA, 13 bp, Artificial Sequence
  Oligonucleotide for detection of SNP TSC0016734
rctaatacttcta

SEQ ID NO: 63345 - DNA, 13 bp, Artificial Sequence
  Oligonucleotide for detection of SNP TSC0016734
tagaaggattagy

SEQ ID NO: 63346 - DNA, 13 bp, Artificial Sequence
  Oligonucleotide for detection of SNP TSC0016734
rctaatccttcta

SEQ ID NO: 63347 - DNA, 13 bp, Artificial Sequence
  Oligonucleotide for detection of SNP TSC0016735
aaatgaaaattgt

SEQ ID NO: 63348 - DNA, 13 bp, Artificial Sequence
  Oligonucleotide for detection of SNP TSC0016735
acaattttcattt

SEQ ID NO: 63349 - DNA, 13 bp, Artificial Sequence
  Oligonucleotide for detection of SNP TSC0016735
aaatgataattgt

SEQ ID NO: 63350 - DNA, 13 bp, Artificial Sequence
  Oligonucleotide for detection of SNP TSC0016735
acaattatcattt

SEQ ID NO: 63351 - DNA, 13 bp, Artificial Sequence
  Oligonucleotide for detection of SNP TSC0016735
atagtttttattt

SEQ ID NO: 63352 - DNA, 13 bp, Artificial Sequence
  Oligonucleotide for detection of SNP TSC0016735
aaataaaaactat

SEQ ID NO: 63353 - DNA, 13 bp, Artificial Sequence
  Oligonucleotide for detection of SNP TSC0016735
atagttgttattt

SEQ ID NO: 63354 - DNA, 13 bp, Artificial Sequence
  Oligonucleotide for detection of SNP TSC0016735
aaataacaactat

SEQ ID NO: 63355 - DNA, 13 bp, Artificial Sequence
  Oligonucleotide for detection of SNP TSC0016741
ttataaatgatty

SEQ ID NO: 63356 - DNA, 13 bp, Artificial Sequence
  Oligonucleotide for detection of SNP TSC0016741
raatcatttataa

SEQ ID NO: 63357 - DNA, 13 bp, Artificial Sequence
  Oligonucleotide for detection of SNP TSC0016741
ttataattgatty

SEQ ID NO: 63358 - DNA, 13 bp, Artificial Sequence
  Oligonucleotide for detection of SNP TSC0016741
raatcaattataa

SEQ ID NO: 63359 - DNA, 13 bp, Artificial Sequence
  Oligonucleotide for detection of SNP TSC0016741
gagttatttgtaa

SEQ ID NO: 63360 - DNA, 13 bp, Artificial Sequence
  Oligonucleotide for detection of SNP TSC0016741
ttacaaataactc

SEQ ID NO: 63361 - DNA, 13 bp, Artificial Sequence
  Oligonucleotide for detection of SNP TSC0016741
gagttagttgtaa

SEQ ID NO: 63362 - DNA, 13 bp, Artificial Sequence
  Oligonucleotide for detection of SNP TSC0016741
ttacaactaactc

SEQ ID NO: 63363 - DNA, 13 bp, Artificial Sequence
  Oligonucleotide for detection of SNP TSC0016742
ggagagttggaga

SEQ ID NO: 63364 - DNA, 13 bp, Artificial Sequence
  Oligonucleotide for detection of SNP TSC0016742
tctccaactctcc

SEQ ID NO: 63365 - DNA, 13 bp, Artificial Sequence
  Oligonucleotide for detection of SNP TSC0016745
ttggttatgtttt

SEQ ID NO: 63366 - DNA, 13 bp, Artificial Sequence
  Oligonucleotide for detection of SNP TSC0016745
aaaacataaccaa

SEQ ID NO: 63367 - DNA, 13 bp, Artificial Sequence
  Oligonucleotide for detection of SNP TSC0016745
ttggttgtgtttt

SEQ ID NO: 63368 - DNA, 13 bp, Artificial Sequence
  Oligonucleotide for detection of SNP TSC0016745
aaaacacaaccaa

SEQ ID NO: 63369 - DNA, 13 bp, Artificial Sequence
  Oligonucleotide for detection of SNP TSC0016746
gatataattattt

SEQ ID NO: 63370 - DNA, 13 bp, Artificial Sequence
  Oligonucleotide for detection of SNP TSC0016746
aaataattatatc

SEQ ID NO: 63371 - DNA, 13 bp, Artificial Sequence
  Oligonucleotide for detection of SNP TSC0016746
gatatatttattt

SEQ ID NO: 63372 - DNA, 13 bp, Artificial Sequence
  Oligonucleotide for detection of SNP TSC0016746
aaataaatatatc

SEQ ID NO: 63373 - DNA, 13 bp, Artificial Sequence
  Oligonucleotide for detection of SNP TSC0016746
aagtggttgtaty

SEQ ID NO: 63374 - DNA, 13 bp, Artificial Sequence
  Oligonucleotide for detection of SNP TSC0016746
ratacaaccactt

SEQ ID NO: 63375 - DNA, 13 bp, Artificial Sequence
  Oligonucleotide for detection of SNP TSC0016746
aagtgggtgtaty

SEQ ID NO: 63376 - DNA, 13 bp, Artificial Sequence
  Oligonucleotide for detection of SNP TSC0016746
ratacacccactt

SEQ ID NO: 63377 - DNA, 13 bp, Artificial Sequence
  Oligonucleotide for detection of SNP TSC0016747
aaaagtattgttg

SEQ ID NO: 63378 - DNA, 13 bp, Artificial Sequence
  Oligonucleotide for detection of SNP TSC0016747
caacaatactttt

SEQ ID NO: 63379 - DNA, 13 bp, Artificial Sequence
  Oligonucleotide for detection of SNP TSC0016747
aaaagttttgttg

SEQ ID NO: 63380 - DNA, 13 bp, Artificial Sequence
  Oligonucleotide for detection of SNP TSC0016747
caacaaaactttt

SEQ ID NO: 63381 - DNA, 13 bp, Artificial Sequence
  Oligonucleotide for detection of SNP TSC0016747
taatagtgttttt

SEQ ID NO: 63382 - DNA, 13 bp, Artificial Sequence
  Oligonucleotide for detection of SNP TSC0016747
aaaaacactatta

SEQ ID NO: 63383 - DNA, 13 bp, Artificial Sequence
  Oligonucleotide for detection of SNP TSC0016747
taatagagttttt

SEQ ID NO: 63384 - DNA, 13 bp, Artificial Sequence
  Oligonucleotide for detection of SNP TSC0016747
aaaaactctatta

SEQ ID NO: 63385 - DNA, 13 bp, Artificial Sequence
  Oligonucleotide for detection of SNP TSC0016748
attttaatttgay

SEQ ID NO: 63386 - DNA, 13 bp, Artificial Sequence
  Oligonucleotide for detection of SNP TSC0016748
rtcaaattaaaat

SEQ ID NO: 63387 - DNA, 13 bp, Artificial Sequence
  Oligonucleotide for detection of SNP TSC0016748
attttagtttgay

SEQ ID NO: 63388 - DNA, 13 bp, Artificial Sequence
  Oligonucleotide for detection of SNP TSC0016748
rtcaaactaaaat

SEQ ID NO: 63389 - DNA, 13 bp, Artificial Sequence
  Oligonucleotide for detection of SNP TSC0016749
tttgatagtataa

SEQ ID NO: 63390 - DNA, 13 bp, Artificial Sequence
  Oligonucleotide for detection of SNP TSC0016749
ttatactatcaaa

SEQ ID NO: 63391 - DNA, 13 bp, Artificial Sequence
  Oligonucleotide for detection of SNP TSC0016749
tttgattgtataa

SEQ ID NO: 63392 - DNA, 13 bp, Artificial Sequence
  Oligonucleotide for detection of SNP TSC0016749
ttatacaatcaaa

SEQ ID NO: 63393 - DNA, 13 bp, Artificial Sequence
  Oligonucleotide for detection of SNP TSC0016749
tttgatcgtataa

SEQ ID NO: 63394 - DNA, 13 bp, Artificial Sequence
  Oligonucleotide for detection of SNP TSC0016749
ttatacgatcaaa

SEQ ID NO: 63395 - DNA, 13 bp, Artificial Sequence
  Oligonucleotide for detection of SNP TSC0016749
ttatattgttaga

SEQ ID NO: 63396 - DNA, 13 bp, Artificial Sequence
  Oligonucleotide for detection of SNP TSC0016749
tctaacaatataa

SEQ ID NO: 63397 - DNA, 13 bp, Artificial Sequence
  Oligonucleotide for detection of SNP TSC0016749
ttatatggttaga

SEQ ID NO: 63398 - DNA, 13 bp, Artificial Sequence
  Oligonucleotide for detection of SNP TSC0016749
tctaaccatataa

SEQ ID NO: 63399 - DNA, 13 bp, Artificial Sequence
  Oligonucleotide for detection of SNP TSC0016749
ttatacggttaga

SEQ ID NO: 63400 - DNA, 13 bp, Artificial Sequence
  Oligonucleotide for detection of SNP TSC0016749
tctaaccgtataa

SEQ ID NO: 63401 - DNA, 13 bp, Artificial Sequence
  Oligonucleotide for detection of SNP TSC0016751
tgaagattgttty

SEQ ID NO: 63402 - DNA, 13 bp, Artificial Sequence
  Oligonucleotide for detection of SNP TSC0016751
raaacaatcttca

SEQ ID NO: 63403 - DNA, 13 bp, Artificial Sequence
  Oligonucleotide for detection of SNP TSC0016751
tgaagagtgttty

SEQ ID NO: 63404 - DNA, 13 bp, Artificial Sequence
  Oligonucleotide for detection of SNP TSC0016751
raaacactcttca

SEQ ID NO: 63405 - DNA, 13 bp, Artificial Sequence
  Oligonucleotide for detection of SNP TSC0016751
gaaatagttttta

SEQ ID NO: 63406 - DNA, 13 bp, Artificial Sequence
  Oligonucleotide for detection of SNP TSC0016751
taaaaactatttc

SEQ ID NO: 63407 - DNA, 13 bp, Artificial Sequence
  Oligonucleotide for detection of SNP TSC0016751
gaaatatttttta

SEQ ID NO: 63408 - DNA, 13 bp, Artificial Sequence
  Oligonucleotide for detection of SNP TSC0016751
taaaaaatatttc

SEQ ID NO: 63409 - DNA, 13 bp, Artificial Sequence
  Oligonucleotide for detection of SNP TSC0016753
ttaaggtggggat

SEQ ID NO: 63410 - DNA, 13 bp, Artificial Sequence
  Oligonucleotide for detection of SNP TSC0016753
atccccaccttaa

SEQ ID NO: 63411 - DNA, 13 bp, Artificial Sequence
  Oligonucleotide for detection of SNP TSC0016753
ttaagggggggat

SEQ ID NO: 63412 - DNA, 13 bp, Artificial Sequence
  Oligonucleotide for detection of SNP TSC0016753
atcccccccttaa

SEQ ID NO: 63413 - DNA, 13 bp, Artificial Sequence
  Oligonucleotide for detection of SNP TSC0016754
ggagtaagtgttg

SEQ ID NO: 63414 - DNA, 13 bp, Artificial Sequence
  Oligonucleotide for detection of SNP TSC0016754
caacacttactcc

SEQ ID NO: 63415 - DNA, 13 bp, Artificial Sequence
  Oligonucleotide for detection of SNP TSC0016754
ggagtaggtgttg

SEQ ID NO: 63416 - DNA, 13 bp, Artificial Sequence
  Oligonucleotide for detection of SNP TSC0016754
caacacctactcc

SEQ ID NO: 63417 - DNA, 13 bp, Artificial Sequence
  Oligonucleotide for detection of SNP TSC0016755
ttttagtttttgg

SEQ ID NO: 63418 - DNA, 13 bp, Artificial Sequence
  Oligonucleotide for detection of SNP TSC0016755
ccaaaaactaaaa

SEQ ID NO: 63419 - DNA, 13 bp, Artificial Sequence
  Oligonucleotide for detection of SNP TSC0016755
ttttaggttttgg

SEQ ID NO: 63420 - DNA, 13 bp, Artificial Sequence
  Oligonucleotide for detection of SNP TSC0016755
ccaaaacctaaaa

SEQ ID NO: 63421 - DNA, 13 bp, Artificial Sequence
  Oligonucleotide for detection of SNP TSC0016755
ttaaaagttgaag

SEQ ID NO: 63422 - DNA, 13 bp, Artificial Sequence
  Oligonucleotide for detection of SNP TSC0016755
cttcaacttttaa

SEQ ID NO: 63423 - DNA, 13 bp, Artificial Sequence
  Oligonucleotide for detection of SNP TSC0016755
ttaaaatttgaag

SEQ ID NO: 63424 - DNA, 13 bp, Artificial Sequence
  Oligonucleotide for detection of SNP TSC0016755
cttcaaattttaa

SEQ ID NO: 63425 - DNA, 13 bp, Artificial Sequence
  Oligonucleotide for detection of SNP TSC0016761
ttgttcgtttatt

SEQ ID NO: 63426 - DNA, 13 bp, Artificial Sequence
  Oligonucleotide for detection of SNP TSC0016761
aataaacgaacaa

SEQ ID NO: 63427 - DNA, 13 bp, Artificial Sequence
  Oligonucleotide for detection of SNP TSC0016761
aataaatgaatag

SEQ ID NO: 63428 - DNA, 13 bp, Artificial Sequence
  Oligonucleotide for detection of SNP TSC0016761
ctattcatttatt

SEQ ID NO: 63429 - DNA, 13 bp, Artificial Sequence
  Oligonucleotide for detection of SNP TSC0016761
aataaacgaatag

SEQ ID NO: 63430 - DNA, 13 bp, Artificial Sequence
  Oligonucleotide for detection of SNP TSC0016761
ctattcgtttatt

SEQ ID NO: 63431 - DNA, 13 bp, Artificial Sequence
  Oligonucleotide for detection of SNP TSC0016762
tttatattaaata

SEQ ID NO: 63432 - DNA, 13 bp, Artificial Sequence
  Oligonucleotide for detection of SNP TSC0016762
tatttaatataaa

SEQ ID NO: 63433 - DNA, 13 bp, Artificial Sequence
  Oligonucleotide for detection of SNP TSC0016762
tttatagtaaata

SEQ ID NO: 63434 - DNA, 13 bp, Artificial Sequence
  Oligonucleotide for detection of SNP TSC0016762
tatttactataaa

SEQ ID NO: 63435 - DNA, 13 bp, Artificial Sequence
  Oligonucleotide for detection of SNP TSC0016762
tgtttggtgtaag

SEQ ID NO: 63436 - DNA, 13 bp, Artificial Sequence
  Oligonucleotide for detection of SNP TSC0016762
cttacaccaaaca

SEQ ID NO: 63437 - DNA, 13 bp, Artificial Sequence
  Oligonucleotide for detection of SNP TSC0016762
tgtttgttgtaag

SEQ ID NO: 63438 - DNA, 13 bp, Artificial Sequence
  Oligonucleotide for detection of SNP TSC0016762
cttacaacaaaca

SEQ ID NO: 63439 - DNA, 13 bp, Artificial Sequence
  Oligonucleotide for detection of SNP TSC0016763
aaaagtagtgtta

SEQ ID NO: 63440 - DNA, 13 bp, Artificial Sequence
  Oligonucleotide for detection of SNP TSC0016763
taacactactttt

SEQ ID NO: 63441 - DNA, 13 bp, Artificial Sequence
  Oligonucleotide for detection of SNP TSC0016763
aaaagtggtgtta

SEQ ID NO: 63442 - DNA, 13 bp, Artificial Sequence
  Oligonucleotide for detection of SNP TSC0016763
taacaccactttt

SEQ ID NO: 63443 - DNA, 13 bp, Artificial Sequence
  Oligonucleotide for detection of SNP TSC0016763
aaaagcggtgtta

SEQ ID NO: 63444 - DNA, 13 bp, Artificial Sequence
  Oligonucleotide for detection of SNP TSC0016763
taacaccgctttt

SEQ ID NO: 63445 - DNA, 13 bp, Artificial Sequence
  Oligonucleotide for detection of SNP TSC0016763
tggtattgttttt

SEQ ID NO: 63446 - DNA, 13 bp, Artificial Sequence
  Oligonucleotide for detection of SNP TSC0016763
aaaaacaatacca

SEQ ID NO: 63447 - DNA, 13 bp, Artificial Sequence
  Oligonucleotide for detection of SNP TSC0016763
tggtatcgttttt

SEQ ID NO: 63448 - DNA, 13 bp, Artificial Sequence
  Oligonucleotide for detection of SNP TSC0016763
aaaaacgatacca

SEQ ID NO: 63449 - DNA, 13 bp, Artificial Sequence
  Oligonucleotide for detection of SNP TSC0016764
ttaaggtagagty

SEQ ID NO: 63450 - DNA, 13 bp, Artificial Sequence
  Oligonucleotide for detection of SNP TSC0016764
ractctaccttaa

SEQ ID NO: 63451 - DNA, 13 bp, Artificial Sequence
  Oligonucleotide for detection of SNP TSC0016764
ttaagggagagty

SEQ ID NO: 63452 - DNA, 13 bp, Artificial Sequence
  Oligonucleotide for detection of SNP TSC0016764
ractctcccttaa

SEQ ID NO: 63453 - DNA, 13 bp, Artificial Sequence
  Oligonucleotide for detection of SNP TSC0016765
aaaaatgtaggag

SEQ ID NO: 63454 - DNA, 13 bp, Artificial Sequence
  Oligonucleotide for detection of SNP TSC0016765
ctcctacattttt

SEQ ID NO: 63455 - DNA, 13 bp, Artificial Sequence
  Oligonucleotide for detection of SNP TSC0016765
aaaaatttaggag

SEQ ID NO: 63456 - DNA, 13 bp, Artificial Sequence
  Oligonucleotide for detection of SNP TSC0016765
ctcctaaattttt

SEQ ID NO: 63457 - DNA, 13 bp, Artificial Sequence
  Oligonucleotide for detection of SNP TSC0016767
ataggtttttgtg

SEQ ID NO: 63458 - DNA, 13 bp, Artificial Sequence
  Oligonucleotide for detection of SNP TSC0016767
cacaaaaacctat

SEQ ID NO: 63459 - DNA, 13 bp, Artificial Sequence
  Oligonucleotide for detection of SNP TSC0016767
ataggtgtttgtg

SEQ ID NO: 63460 - DNA, 13 bp, Artificial Sequence
  Oligonucleotide for detection of SNP TSC0016767
cacaaacacctat

SEQ ID NO: 63461 - DNA, 13 bp, Artificial Sequence
  Oligonucleotide for detection of SNP TSC0016767
tatagagatttgt

SEQ ID NO: 63462 - DNA, 13 bp, Artificial Sequence
  Oligonucleotide for detection of SNP TSC0016767
acaaatctctata

SEQ ID NO: 63463 - DNA, 13 bp, Artificial Sequence
  Oligonucleotide for detection of SNP TSC0016767
tatagatatttgt

SEQ ID NO: 63464 - DNA, 13 bp, Artificial Sequence
  Oligonucleotide for detection of SNP TSC0016767
acaaatatctata

SEQ ID NO: 63465 - DNA, 13 bp, Artificial Sequence
  Oligonucleotide for detection of SNP TSC0016770
aaataaatatgtg

SEQ ID NO: 63466 - DNA, 13 bp, Artificial Sequence
  Oligonucleotide for detection of SNP TSC0016770
cacatatttattt

SEQ ID NO: 63467 - DNA, 13 bp, Artificial Sequence
  Oligonucleotide for detection of SNP TSC0016770
aaataattatgtg

SEQ ID NO: 63468 - DNA, 13 bp, Artificial Sequence
  Oligonucleotide for detection of SNP TSC0016770
cacataattattt

SEQ ID NO: 63469 - DNA, 13 bp, Artificial Sequence
  Oligonucleotide for detection of SNP TSC0016770
tatatgtttgttt

SEQ ID NO: 63470 - DNA, 13 bp, Artificial Sequence
  Oligonucleotide for detection of SNP TSC0016770
aaacaaacatata

SEQ ID NO: 63471 - DNA, 13 bp, Artificial Sequence
  Oligonucleotide for detection of SNP TSC0016770
tatatggttgttt

SEQ ID NO: 63472 - DNA, 13 bp, Artificial Sequence
  Oligonucleotide for detection of SNP TSC0016770
aaacaaccatata

SEQ ID NO: 63473 - DNA, 13 bp, Artificial Sequence
  Oligonucleotide for detection of SNP TSC0016772
tattagggagagt

SEQ ID NO: 63474 - DNA, 13 bp, Artificial Sequence
  Oligonucleotide for detection of SNP TSC0016772
actctccctaata

SEQ ID NO: 63475 - DNA, 13 bp, Artificial Sequence
  Oligonucleotide for detection of SNP TSC0016772
tattagtgagagt

SEQ ID NO: 63476 - DNA, 13 bp, Artificial Sequence
  Oligonucleotide for detection of SNP TSC0016772
actctcactaata

SEQ ID NO: 63477 - DNA, 13 bp, Artificial Sequence
  Oligonucleotide for detection of SNP TSC0016772
attttttttaata

SEQ ID NO: 63478 - DNA, 13 bp, Artificial Sequence
  Oligonucleotide for detection of SNP TSC0016772
tattaaaaaaaat

SEQ ID NO: 63479 - DNA, 13 bp, Artificial Sequence
  Oligonucleotide for detection of SNP TSC0016773
aagttatttttty

SEQ ID NO: 63480 - DNA, 13 bp, Artificial Sequence
  Oligonucleotide for detection of SNP TSC0016773
raaaaaataactt

SEQ ID NO: 63481 - DNA, 13 bp, Artificial Sequence
  Oligonucleotide for detection of SNP TSC0016773
aagttagttttty

SEQ ID NO: 63482 - DNA, 13 bp, Artificial Sequence
  Oligonucleotide for detection of SNP TSC0016773
raaaaactaactt

SEQ ID NO: 63483 - DNA, 13 bp, Artificial Sequence
  Oligonucleotide for detection of SNP TSC0016773
ggaaaagtggttt

SEQ ID NO: 63484 - DNA, 13 bp, Artificial Sequence
  Oligonucleotide for detection of SNP TSC0016773
aaaccacttttcc

SEQ ID NO: 63485 - DNA, 13 bp, Artificial Sequence
  Oligonucleotide for detection of SNP TSC0016773
ggaaaattggttt

SEQ ID NO: 63486 - DNA, 13 bp, Artificial Sequence
  Oligonucleotide for detection of SNP TSC0016773
aaaccaattttcc

SEQ ID NO: 63487 - DNA, 13 bp, Artificial Sequence
  Oligonucleotide for detection of SNP TSC0016777
aattattagaaty

SEQ ID NO: 63488 - DNA, 13 bp, Artificial Sequence
  Oligonucleotide for detection of SNP TSC0016777
rattctaataatt

SEQ ID NO: 63489 - DNA, 13 bp, Artificial Sequence
  Oligonucleotide for detection of SNP TSC0016777
aattatgagaaty

SEQ ID NO: 63490 - DNA, 13 bp, Artificial Sequence
  Oligonucleotide for detection of SNP TSC0016777
rattctcataatt

SEQ ID NO: 63491 - DNA, 13 bp, Artificial Sequence
  Oligonucleotide for detection of SNP TSC0016777
aattacgagaaty

SEQ ID NO: 63492 - DNA, 13 bp, Artificial Sequence
  Oligonucleotide for detection of SNP TSC0016777
rattctcgtaatt

SEQ ID NO: 63493 - DNA, 13 bp, Artificial Sequence
  Oligonucleotide for detection of SNP TSC0016777
gattttggtaatt

SEQ ID NO: 63494 - DNA, 13 bp, Artificial Sequence
  Oligonucleotide for detection of SNP TSC0016777
aattaccaaaatc

SEQ ID NO: 63495 - DNA, 13 bp, Artificial Sequence
  Oligonucleotide for detection of SNP TSC0016777
gatttttgtaatt

SEQ ID NO: 63496 - DNA, 13 bp, Artificial Sequence
  Oligonucleotide for detection of SNP TSC0016777
aattacaaaaatc

SEQ ID NO: 63497 - DNA, 13 bp, Artificial Sequence
  Oligonucleotide for detection of SNP TSC0016777
gattttcgtaatt

SEQ ID NO: 63498 - DNA, 13 bp, Artificial Sequence
  Oligonucleotide for detection of SNP TSC0016777
aattacgaaaatc

SEQ ID NO: 63499 - DNA, 13 bp, Artificial Sequence
  Oligonucleotide for detection of SNP TSC0016778
ttggtgggtggtg

SEQ ID NO: 63500 - DNA, 13 bp, Artificial Sequence
  Oligonucleotide for detection of SNP TSC0016778
caccacccaccaa

SEQ ID NO: 63501 - DNA, 13 bp, Artificial Sequence
  Oligonucleotide for detection of SNP TSC0016778
ttggtgagtggtg

SEQ ID NO: 63502 - DNA, 13 bp, Artificial Sequence
  Oligonucleotide for detection of SNP TSC0016778
caccactcaccaa

SEQ ID NO: 63503 - DNA, 13 bp, Artificial Sequence
  Oligonucleotide for detection of SNP TSC0016779
taatgggtttaty

SEQ ID NO: 63504 - DNA, 13 bp, Artificial Sequence
  Oligonucleotide for detection of SNP TSC0016779
rataaacccatta

SEQ ID NO: 63505 - DNA, 13 bp, Artificial Sequence
  Oligonucleotide for detection of SNP TSC0016779
taatggatttaty

SEQ ID NO: 63506 - DNA, 13 bp, Artificial Sequence
  Oligonucleotide for detection of SNP TSC0016779
rataaatccatta

SEQ ID NO: 63507 - DNA, 13 bp, Artificial Sequence
  Oligonucleotide for detection of SNP TSC0016780
ggtttggataatg

SEQ ID NO: 63508 - DNA, 13 bp, Artificial Sequence
  Oligonucleotide for detection of SNP TSC0016780
cattatccaaacc

SEQ ID NO: 63509 - DNA, 13 bp, Artificial Sequence
  Oligonucleotide for detection of SNP TSC0016780
ggtttgaataatg

SEQ ID NO: 63510 - DNA, 13 bp, Artificial Sequence
  Oligonucleotide for detection of SNP TSC0016780
cattattcaaacc

SEQ ID NO: 63511 - DNA, 13 bp, Artificial Sequence
  Oligonucleotide for detection of SNP TSC0016780
ggttcggataatg

SEQ ID NO: 63512 - DNA, 13 bp, Artificial Sequence
  Oligonucleotide for detection of SNP TSC0016780
cattatccgaacc

SEQ ID NO: 63513 - DNA, 13 bp, Artificial Sequence
  Oligonucleotide for detection of SNP TSC0016780
ggttcgaataatg

SEQ ID NO: 63514 - DNA, 13 bp, Artificial Sequence
  Oligonucleotide for detection of SNP TSC0016780
cattattcgaacc

SEQ ID NO: 63515 - DNA, 13 bp, Artificial Sequence
  Oligonucleotide for detection of SNP TSC0016781
ttgttgaataaga

SEQ ID NO: 63516 - DNA, 13 bp, Artificial Sequence
  Oligonucleotide for detection of SNP TSC0016781
tcttattcaacaa

SEQ ID NO: 63517 - DNA, 13 bp, Artificial Sequence
  Oligonucleotide for detection of SNP TSC0016781
ttgttggataaga

SEQ ID NO: 63518 - DNA, 13 bp, Artificial Sequence
  Oligonucleotide for detection of SNP TSC0016781
tcttatccaacaa

SEQ ID NO: 63519 - DNA, 13 bp, Artificial Sequence
  Oligonucleotide for detection of SNP TSC0016782
tagtataggtttt

SEQ ID NO: 63520 - DNA, 13 bp, Artificial Sequence
  Oligonucleotide for detection of SNP TSC0016782
aaaacctatacta

SEQ ID NO: 63521 - DNA, 13 bp, Artificial Sequence
  Oligonucleotide for detection of SNP TSC0016782
tagtatgggtttt

SEQ ID NO: 63522 - DNA, 13 bp, Artificial Sequence
  Oligonucleotide for detection of SNP TSC0016782
aaaacccatacta

SEQ ID NO: 63523 - DNA, 13 bp, Artificial Sequence
  Oligonucleotide for detection of SNP TSC0016782
tagtacgggtttt

SEQ ID NO: 63524 - DNA, 13 bp, Artificial Sequence
  Oligonucleotide for detection of SNP TSC0016782
aaaacccgtacta

SEQ ID NO: 63525 - DNA, 13 bp, Artificial Sequence
  Oligonucleotide for detection of SNP TSC0016782
aaggtttgtgttg

SEQ ID NO: 63526 - DNA, 13 bp, Artificial Sequence
  Oligonucleotide for detection of SNP TSC0016782
caacacaaacctt

SEQ ID NO: 63527 - DNA, 13 bp, Artificial Sequence
  Oligonucleotide for detection of SNP TSC0016782
aaggttcgtgttg

SEQ ID NO: 63528 - DNA, 13 bp, Artificial Sequence
  Oligonucleotide for detection of SNP TSC0016782
caacacgaacctt

SEQ ID NO: 63529 - DNA, 13 bp, Artificial Sequence
  Oligonucleotide for detection of SNP TSC0016783
tatgggatatagy

SEQ ID NO: 63530 - DNA, 13 bp, Artificial Sequence
  Oligonucleotide for detection of SNP TSC0016783
rctatatcccata

SEQ ID NO: 63531 - DNA, 13 bp, Artificial Sequence
  Oligonucleotide for detection of SNP TSC0016783
tatggggtatagy

SEQ ID NO: 63532 - DNA, 13 bp, Artificial Sequence
  Oligonucleotide for detection of SNP TSC0016783
rctataccccata

SEQ ID NO: 63533 - DNA, 13 bp, Artificial Sequence
  Oligonucleotide for detection of SNP TSC0016783
tacgggatatagy

SEQ ID NO: 63534 - DNA, 13 bp, Artificial Sequence
  Oligonucleotide for detection of SNP TSC0016783
rctatatcccgta

SEQ ID NO: 63535 - DNA, 13 bp, Artificial Sequence
  Oligonucleotide for detection of SNP TSC0016783
tacggggtatagy

SEQ ID NO: 63536 - DNA, 13 bp, Artificial Sequence
  Oligonucleotide for detection of SNP TSC0016783
rctataccccgta

SEQ ID NO: 63537 - DNA, 13 bp, Artificial Sequence
  Oligonucleotide for detection of SNP TSC0016784
tggtttaattttt

SEQ ID NO: 63538 - DNA, 13 bp, Artificial Sequence
  Oligonucleotide for detection of SNP TSC0016784
aaaaattaaacca

SEQ ID NO: 63539 - DNA, 13 bp, Artificial Sequence
  Oligonucleotide for detection of SNP TSC0016784
tggttttattttt

SEQ ID NO: 63540 - DNA, 13 bp, Artificial Sequence
  Oligonucleotide for detection of SNP TSC0016784
aaaaataaaacca

SEQ ID NO: 63541 - DNA, 13 bp, Artificial Sequence
  Oligonucleotide for detection of SNP TSC0016784
aaaaattagatta

SEQ ID NO: 63542 - DNA, 13 bp, Artificial Sequence
  Oligonucleotide for detection of SNP TSC0016784
taatctaattttt

SEQ ID NO: 63543 - DNA, 13 bp, Artificial Sequence
  Oligonucleotide for detection of SNP TSC0016784
aaaaatgagatta

SEQ ID NO: 63544 - DNA, 13 bp, Artificial Sequence
  Oligonucleotide for detection of SNP TSC0016784
taatctcattttt

SEQ ID NO: 63545 - DNA, 13 bp, Artificial Sequence
  Oligonucleotide for detection of SNP TSC0016785
aggtagatataga

SEQ ID NO: 63546 - DNA, 13 bp, Artificial Sequence
  Oligonucleotide for detection of SNP TSC0016785
tctatatctacct

SEQ ID NO: 63547 - DNA, 13 bp, Artificial Sequence
  Oligonucleotide for detection of SNP TSC0016785
aggtagttataga

SEQ ID NO: 63548 - DNA, 13 bp, Artificial Sequence
  Oligonucleotide for detection of SNP TSC0016785
tctataactacct

SEQ ID NO: 63549 - DNA, 13 bp, Artificial Sequence
  Oligonucleotide for detection of SNP TSC0016785
tttatgtttgttt

SEQ ID NO: 63550 - DNA, 13 bp, Artificial Sequence
  Oligonucleotide for detection of SNP TSC0016785
aaacaaacataaa

SEQ ID NO: 63551 - DNA, 13 bp, Artificial Sequence
  Oligonucleotide for detection of SNP TSC0016785
tttatggttgttt

SEQ ID NO: 63552 - DNA, 13 bp, Artificial Sequence
  Oligonucleotide for detection of SNP TSC0016785
aaacaaccataaa

SEQ ID NO: 63553 - DNA, 13 bp, Artificial Sequence
  Oligonucleotide for detection of SNP TSC0016786
gtttatagtaggt

SEQ ID NO: 63554 - DNA, 13 bp, Artificial Sequence
  Oligonucleotide for detection of SNP TSC0016786
acctactataaac

SEQ ID NO: 63555 - DNA, 13 bp, Artificial Sequence
  Oligonucleotide for detection of SNP TSC0016786
gtttatggtaggt

SEQ ID NO: 63556 - DNA, 13 bp, Artificial Sequence
  Oligonucleotide for detection of SNP TSC0016786
acctaccataaac

SEQ ID NO: 63557 - DNA, 13 bp, Artificial Sequence
  Oligonucleotide for detection of SNP TSC0016786
gtttacggtaggt

SEQ ID NO: 63558 - DNA, 13 bp, Artificial Sequence
  Oligonucleotide for detection of SNP TSC0016786
acctaccgtaaac

SEQ ID NO: 63559 - DNA, 13 bp, Artificial Sequence
  Oligonucleotide for detection of SNP TSC0016786
atttattgtggay

SEQ ID NO: 63560 - DNA, 13 bp, Artificial Sequence
  Oligonucleotide for detection of SNP TSC0016786
rtccacaataaat

SEQ ID NO: 63561 - DNA, 13 bp, Artificial Sequence
  Oligonucleotide for detection of SNP TSC0016786
atttatcgtggay

SEQ ID NO: 63562 - DNA, 13 bp, Artificial Sequence
  Oligonucleotide for detection of SNP TSC0016786
rtccacgataaat

SEQ ID NO: 63563 - DNA, 13 bp, Artificial Sequence
  Oligonucleotide for detection of SNP TSC0016787
taggtagatttgg

SEQ ID NO: 63564 - DNA, 13 bp, Artificial Sequence
  Oligonucleotide for detection of SNP TSC0016787
ccaaatctaccta

SEQ ID NO: 63565 - DNA, 13 bp, Artificial Sequence
  Oligonucleotide for detection of SNP TSC0016787
taggtaaatttgg

SEQ ID NO: 63566 - DNA, 13 bp, Artificial Sequence
  Oligonucleotide for detection of SNP TSC0016787
ccaaatttaccta

SEQ ID NO: 63567 - DNA, 13 bp, Artificial Sequence
  Oligonucleotide for detection of SNP TSC0016788
tggtgaagatgat

SEQ ID NO: 63568 - DNA, 13 bp, Artificial Sequence
  Oligonucleotide for detection of SNP TSC0016788
atcatcttcacca

SEQ ID NO: 63569 - DNA, 13 bp, Artificial Sequence
  Oligonucleotide for detection of SNP TSC0016788
tggtgatgatgat

SEQ ID NO: 63570 - DNA, 13 bp, Artificial Sequence
  Oligonucleotide for detection of SNP TSC0016788
atcatcatcacca

SEQ ID NO: 63571 - DNA, 13 bp, Artificial Sequence
  Oligonucleotide for detection of SNP TSC0016788
attatttttatta

SEQ ID NO: 63572 - DNA, 13 bp, Artificial Sequence
  Oligonucleotide for detection of SNP TSC0016788
taataaaaataat

SEQ ID NO: 63573 - DNA, 13 bp, Artificial Sequence
  Oligonucleotide for detection of SNP TSC0016789
atttatatgttty

SEQ ID NO: 63574 - DNA, 13 bp, Artificial Sequence
  Oligonucleotide for detection of SNP TSC0016789
raaacatataaat

SEQ ID NO: 63575 - DNA, 13 bp, Artificial Sequence
  Oligonucleotide for detection of SNP TSC0016789
atttatgtgttty

SEQ ID NO: 63576 - DNA, 13 bp, Artificial Sequence
  Oligonucleotide for detection of SNP TSC0016789
raaacacataaat

SEQ ID NO: 63577 - DNA, 13 bp, Artificial Sequence
  Oligonucleotide for detection of SNP TSC0016789
atttacgtgttty

SEQ ID NO: 63578 - DNA, 13 bp, Artificial Sequence
  Oligonucleotide for detection of SNP TSC0016789
raaacacgtaaat

SEQ ID NO: 63579 - DNA, 13 bp, Artificial Sequence
  Oligonucleotide for detection of SNP TSC0016789
gagatatgtgggt

SEQ ID NO: 63580 - DNA, 13 bp, Artificial Sequence
  Oligonucleotide for detection of SNP TSC0016789
acccacatatctc

SEQ ID NO: 63581 - DNA, 13 bp, Artificial Sequence
  Oligonucleotide for detection of SNP TSC0016789
gagatacgtgggt

SEQ ID NO: 63582 - DNA, 13 bp, Artificial Sequence
  Oligonucleotide for detection of SNP TSC0016789
acccacgtatctc

SEQ ID NO: 63583 - DNA, 13 bp, Artificial Sequence
  Oligonucleotide for detection of SNP TSC0016790
gtttttagtagty

SEQ ID NO: 63584 - DNA, 13 bp, Artificial Sequence
  Oligonucleotide for detection of SNP TSC0016790
ractactaaaaac

SEQ ID NO: 63585 - DNA, 13 bp, Artificial Sequence
  Oligonucleotide for detection of SNP TSC0016790
gtttttggtagty

SEQ ID NO: 63586 - DNA, 13 bp, Artificial Sequence
  Oligonucleotide for detection of SNP TSC0016790
ractaccaaaaac

SEQ ID NO: 63587 - DNA, 13 bp, Artificial Sequence
  Oligonucleotide for detection of SNP TSC0016790
gttttcggtagty

SEQ ID NO: 63588 - DNA, 13 bp, Artificial Sequence
  Oligonucleotide for detection of SNP TSC0016790
ractaccgaaaac

SEQ ID NO: 63589 - DNA, 13 bp, Artificial Sequence
  Oligonucleotide for detection of SNP TSC0016790
ggttattggaagy

SEQ ID NO: 63590 - DNA, 13 bp, Artificial Sequence
  Oligonucleotide for detection of SNP TSC0016790
rcttccaataacc

SEQ ID NO: 63591 - DNA, 13 bp, Artificial Sequence
  Oligonucleotide for detection of SNP TSC0016790
ggttatcggaagy

SEQ ID NO: 63592 - DNA, 13 bp, Artificial Sequence
  Oligonucleotide for detection of SNP TSC0016790
rcttccgataacc

SEQ ID NO: 63593 - DNA, 13 bp, Artificial Sequence
  Oligonucleotide for detection of SNP TSC0016791
ttttttaagttga

SEQ ID NO: 63594 - DNA, 13 bp, Artificial Sequence
  Oligonucleotide for detection of SNP TSC0016791
tcaacttaaaaaa

SEQ ID NO: 63595 - DNA, 13 bp, Artificial Sequence
  Oligonucleotide for detection of SNP TSC0016791
tttttttagttga

SEQ ID NO: 63596 - DNA, 13 bp, Artificial Sequence
  Oligonucleotide for detection of SNP TSC0016791
tcaactaaaaaaa

SEQ ID NO: 63597 - DNA, 13 bp, Artificial Sequence
  Oligonucleotide for detection of SNP TSC0016791
ttagtttggaaag

SEQ ID NO: 63598 - DNA, 13 bp, Artificial Sequence
  Oligonucleotide for detection of SNP TSC0016791
ctttccaaactaa

SEQ ID NO: 63599 - DNA, 13 bp, Artificial Sequence
  Oligonucleotide for detection of SNP TSC0016791
ttagttgggaaag

SEQ ID NO: 63600 - DNA, 13 bp, Artificial Sequence
  Oligonucleotide for detection of SNP TSC0016791
ctttcccaactaa

SEQ ID NO: 63601 - DNA, 13 bp, Artificial Sequence
  Oligonucleotide for detection of SNP TSC0016792
tttttaagttgay

SEQ ID NO: 63602 - DNA, 13 bp, Artificial Sequence
  Oligonucleotide for detection of SNP TSC0016792
rtcaacttaaaaa

SEQ ID NO: 63603 - DNA, 13 bp, Artificial Sequence
  Oligonucleotide for detection of SNP TSC0016792
tttttatgttgay

SEQ ID NO: 63604 - DNA, 13 bp, Artificial Sequence
  Oligonucleotide for detection of SNP TSC0016792
rtcaacataaaaa

SEQ ID NO: 63605 - DNA, 13 bp, Artificial Sequence
  Oligonucleotide for detection of SNP TSC0016792
gttagtttggaaa

SEQ ID NO: 63606 - DNA, 13 bp, Artificial Sequence
  Oligonucleotide for detection of SNP TSC0016792
tttccaaactaac

SEQ ID NO: 63607 - DNA, 13 bp, Artificial Sequence
  Oligonucleotide for detection of SNP TSC0016792
gttagtatggaaa

SEQ ID NO: 63608 - DNA, 13 bp, Artificial Sequence
  Oligonucleotide for detection of SNP TSC0016792
tttccatactaac

SEQ ID NO: 63609 - DNA, 13 bp, Artificial Sequence
  Oligonucleotide for detection of SNP TSC0016793
ggtgtaattttty

SEQ ID NO: 63610 - DNA, 13 bp, Artificial Sequence
  Oligonucleotide for detection of SNP TSC0016793
raaaaattacacc

SEQ ID NO: 63611 - DNA, 13 bp, Artificial Sequence
  Oligonucleotide for detection of SNP TSC0016793
ggtgtagttttty

SEQ ID NO: 63612 - DNA, 13 bp, Artificial Sequence
  Oligonucleotide for detection of SNP TSC0016793
raaaaactacacc

SEQ ID NO: 63613 - DNA, 13 bp, Artificial Sequence
  Oligonucleotide for detection of SNP TSC0016794
gtttaaattttay

SEQ ID NO: 63614 - DNA, 13 bp, Artificial Sequence
  Oligonucleotide for detection of SNP TSC0016794
rtaaaatttaaac

SEQ ID NO: 63615 - DNA, 13 bp, Artificial Sequence
  Oligonucleotide for detection of SNP TSC0016794
gtttaatttttay

SEQ ID NO: 63616 - DNA, 13 bp, Artificial Sequence
  Oligonucleotide for detection of SNP TSC0016794
rtaaaaattaaac

SEQ ID NO: 63617 - DNA, 13 bp, Artificial Sequence
  Oligonucleotide for detection of SNP TSC0016794
gtgggatttggay

SEQ ID NO: 63618 - DNA, 13 bp, Artificial Sequence
  Oligonucleotide for detection of SNP TSC0016794
rtccaaatcccac

SEQ ID NO: 63619 - DNA, 13 bp, Artificial Sequence
  Oligonucleotide for detection of SNP TSC0016794
gtgggagttggay

SEQ ID NO: 63620 - DNA, 13 bp, Artificial Sequence
  Oligonucleotide for detection of SNP TSC0016794
rtccaactcccac

SEQ ID NO: 63621 - DNA, 13 bp, Artificial Sequence
  Oligonucleotide for detection of SNP TSC0016795
gattagggattag

SEQ ID NO: 63622 - DNA, 13 bp, Artificial Sequence
  Oligonucleotide for detection of SNP TSC0016795
ctaatccctaatc

SEQ ID NO: 63623 - DNA, 13 bp, Artificial Sequence
  Oligonucleotide for detection of SNP TSC0016795
gattagagattag

SEQ ID NO: 63624 - DNA, 13 bp, Artificial Sequence
  Oligonucleotide for detection of SNP TSC0016795
ctaatctctaatc

SEQ ID NO: 63625 - DNA, 13 bp, Artificial Sequence
  Oligonucleotide for detection of SNP TSC0016797
ggaaaagtggtat

SEQ ID NO: 63626 - DNA, 13 bp, Artificial Sequence
  Oligonucleotide for detection of SNP TSC0016797
ataccacttttcc

SEQ ID NO: 63627 - DNA, 13 bp, Artificial Sequence
  Oligonucleotide for detection of SNP TSC0016797
ggaaaaatggtat

SEQ ID NO: 63628 - DNA, 13 bp, Artificial Sequence
  Oligonucleotide for detection of SNP TSC0016797
ataccatttttcc

SEQ ID NO: 63629 - DNA, 13 bp, Artificial Sequence
  Oligonucleotide for detection of SNP TSC0016797
ggaaaagcggtat

SEQ ID NO: 63630 - DNA, 13 bp, Artificial Sequence
  Oligonucleotide for detection of SNP TSC0016797
ataccgcttttcc

SEQ ID NO: 63631 - DNA, 13 bp, Artificial Sequence
  Oligonucleotide for detection of SNP TSC0016797
ggaaaaacggtat

SEQ ID NO: 63632 - DNA, 13 bp, Artificial Sequence
  Oligonucleotide for detection of SNP TSC0016797
ataccgtttttcc

SEQ ID NO: 63633 - DNA, 13 bp, Artificial Sequence
  Oligonucleotide for detection of SNP TSC0016798
attgggaataagg

SEQ ID NO: 63634 - DNA, 13 bp, Artificial Sequence
  Oligonucleotide for detection of SNP TSC0016798
ccttattcccaat

SEQ ID NO: 63635 - DNA, 13 bp, Artificial Sequence
  Oligonucleotide for detection of SNP TSC0016798
attggggataagg

SEQ ID NO: 63636 - DNA, 13 bp, Artificial Sequence
  Oligonucleotide for detection of SNP TSC0016798
ccttatccccaat

SEQ ID NO: 63637 - DNA, 13 bp, Artificial Sequence
  Oligonucleotide for detection of SNP TSC0016798
atcgggaataagg

SEQ ID NO: 63638 - DNA, 13 bp, Artificial Sequence
  Oligonucleotide for detection of SNP TSC0016798
ccttattcccgat

SEQ ID NO: 63639 - DNA, 13 bp, Artificial Sequence
  Oligonucleotide for detection of SNP TSC0016798
atcggggataagg

SEQ ID NO: 63640 - DNA, 13 bp, Artificial Sequence
  Oligonucleotide for detection of SNP TSC0016798
ccttatccccgat

SEQ ID NO: 63641 - DNA, 13 bp, Artificial Sequence
  Oligonucleotide for detection of SNP TSC0016800
tttttgtaattag

SEQ ID NO: 63642 - DNA, 13 bp, Artificial Sequence
  Oligonucleotide for detection of SNP TSC0016800
ctaattacaaaaa

SEQ ID NO: 63643 - DNA, 13 bp, Artificial Sequence
  Oligonucleotide for detection of SNP TSC0016800
tttttggaattag

SEQ ID NO: 63644 - DNA, 13 bp, Artificial Sequence
  Oligonucleotide for detection of SNP TSC0016800
ctaattccaaaaa

SEQ ID NO: 63645 - DNA, 13 bp, Artificial Sequence
  Oligonucleotide for detection of SNP TSC0016800
ttgattgtaggag

SEQ ID NO: 63646 - DNA, 13 bp, Artificial Sequence
  Oligonucleotide for detection of SNP TSC0016800
ctcctacaatcaa

SEQ ID NO: 63647 - DNA, 13 bp, Artificial Sequence
  Oligonucleotide for detection of SNP TSC0016800
ttgattttaggag

SEQ ID NO: 63648 - DNA, 13 bp, Artificial Sequence
  Oligonucleotide for detection of SNP TSC0016800
ctcctaaaatcaa

SEQ ID NO: 63649 - DNA, 13 bp, Artificial Sequence
  Oligonucleotide for detection of SNP TSC0016802
gttgtgggttatt

SEQ ID NO: 63650 - DNA, 13 bp, Artificial Sequence
  Oligonucleotide for detection of SNP TSC0016802
aataacccacaac

SEQ ID NO: 63651 - DNA, 13 bp, Artificial Sequence
  Oligonucleotide for detection of SNP TSC0016802
gttgtgagttatt

SEQ ID NO: 63652 - DNA, 13 bp, Artificial Sequence
  Oligonucleotide for detection of SNP TSC0016802
aataactcacaac

SEQ ID NO: 63653 - DNA, 13 bp, Artificial Sequence
  Oligonucleotide for detection of SNP TSC0016805
gttgttgatttgy

SEQ ID NO: 63654 - DNA, 13 bp, Artificial Sequence
  Oligonucleotide for detection of SNP TSC0016805
rcaaatcaacaac

SEQ ID NO: 63655 - DNA, 13 bp, Artificial Sequence
  Oligonucleotide for detection of SNP TSC0016805
gttgtttatttgy

SEQ ID NO: 63656 - DNA, 13 bp, Artificial Sequence
  Oligonucleotide for detection of SNP TSC0016805
rcaaataaacaac

SEQ ID NO: 63657 - DNA, 13 bp, Artificial Sequence
  Oligonucleotide for detection of SNP TSC0016805
gtaagttagtagy

SEQ ID NO: 63658 - DNA, 13 bp, Artificial Sequence
  Oligonucleotide for detection of SNP TSC0016805
rctactaacttac

SEQ ID NO: 63659 - DNA, 13 bp, Artificial Sequence
  Oligonucleotide for detection of SNP TSC0016805
gtaagtaagtagy

SEQ ID NO: 63660 - DNA, 13 bp, Artificial Sequence
  Oligonucleotide for detection of SNP TSC0016805
rctacttacttac

SEQ ID NO: 63661 - DNA, 13 bp, Artificial Sequence
  Oligonucleotide for detection of SNP TSC0016808
gatattatataat

SEQ ID NO: 63662 - DNA, 13 bp, Artificial Sequence
  Oligonucleotide for detection of SNP TSC0016808
attatataatatc

SEQ ID NO: 63663 - DNA, 13 bp, Artificial Sequence
  Oligonucleotide for detection of SNP TSC0016808
gatattgtataat

SEQ ID NO: 63664 - DNA, 13 bp, Artificial Sequence
  Oligonucleotide for detection of SNP TSC0016808
attatacaatatc

SEQ ID NO: 63665 - DNA, 13 bp, Artificial Sequence
  Oligonucleotide for detection of SNP TSC0016808
gatatcgtataat

SEQ ID NO: 63666 - DNA, 13 bp, Artificial Sequence
  Oligonucleotide for detection of SNP TSC0016808
attatacgatatc

SEQ ID NO: 63667 - DNA, 13 bp, Artificial Sequence
  Oligonucleotide for detection of SNP TSC0016808
attatatggtaty

SEQ ID NO: 63668 - DNA, 13 bp, Artificial Sequence
  Oligonucleotide for detection of SNP TSC0016808
rataccatataat

SEQ ID NO: 63669 - DNA, 13 bp, Artificial Sequence
  Oligonucleotide for detection of SNP TSC0016808
attatacggtaty

SEQ ID NO: 63670 - DNA, 13 bp, Artificial Sequence
  Oligonucleotide for detection of SNP TSC0016808
rataccgtataat

SEQ ID NO: 63671 - DNA, 13 bp, Artificial Sequence
  Oligonucleotide for detection of SNP TSC0016809
gatttgattttgy

SEQ ID NO: 63672 - DNA, 13 bp, Artificial Sequence
  Oligonucleotide for detection of SNP TSC0016809
rcaaaatcaaatc

SEQ ID NO: 63673 - DNA, 13 bp, Artificial Sequence
  Oligonucleotide for detection of SNP TSC0016814
ttttgaggatgaa

SEQ ID NO: 63674 - DNA, 13 bp, Artificial Sequence
  Oligonucleotide for detection of SNP TSC0016814
ttcatcctcaaaa

SEQ ID NO: 63675 - DNA, 13 bp, Artificial Sequence
  Oligonucleotide for detection of SNP TSC0016814
ttttgaagatgaa

SEQ ID NO: 63676 - DNA, 13 bp, Artificial Sequence
  Oligonucleotide for detection of SNP TSC0016814
ttcatcttcaaaa

SEQ ID NO: 63677 - DNA, 13 bp, Artificial Sequence
  Oligonucleotide for detection of SNP TSC0016816
gtggggaataaaa

SEQ ID NO: 63678 - DNA, 13 bp, Artificial Sequence
  Oligonucleotide for detection of SNP TSC0016816
ttttattccccac

SEQ ID NO: 63679 - DNA, 13 bp, Artificial Sequence
  Oligonucleotide for detection of SNP TSC0016816
gtgggggataaaa

SEQ ID NO: 63680 - DNA, 13 bp, Artificial Sequence
  Oligonucleotide for detection of SNP TSC0016816
ttttatcccccac

SEQ ID NO: 63681 - DNA, 13 bp, Artificial Sequence
  Oligonucleotide for detection of SNP TSC0016819
tattgagggttgg

SEQ ID NO: 63682 - DNA, 13 bp, Artificial Sequence
  Oligonucleotide for detection of SNP TSC0016819
ccaaccctcaata

SEQ ID NO: 63683 - DNA, 13 bp, Artificial Sequence
  Oligonucleotide for detection of SNP TSC0016819
tattgaaggttgg

SEQ ID NO: 63684 - DNA, 13 bp, Artificial Sequence
  Oligonucleotide for detection of SNP TSC0016819
ccaaccttcaata

SEQ ID NO: 63685 - DNA, 13 bp, Artificial Sequence
  Oligonucleotide for detection of SNP TSC0016820
ggttttatgaaag

SEQ ID NO: 63686 - DNA, 13 bp, Artificial Sequence
  Oligonucleotide for detection of SNP TSC0016820
ctttcataaaacc

SEQ ID NO: 63687 - DNA, 13 bp, Artificial Sequence
  Oligonucleotide for detection of SNP TSC0016820
ggttttttgaaag

SEQ ID NO: 63688 - DNA, 13 bp, Artificial Sequence
  Oligonucleotide for detection of SNP TSC0016820
ctttcaaaaaacc

SEQ ID NO: 63689 - DNA, 13 bp, Artificial Sequence
  Oligonucleotide for detection of SNP TSC0016820
tttttatggagty

SEQ ID NO: 63690 - DNA, 13 bp, Artificial Sequence
  Oligonucleotide for detection of SNP TSC0016820
ractccataaaaa

SEQ ID NO: 63691 - DNA, 13 bp, Artificial Sequence
  Oligonucleotide for detection of SNP TSC0016820
tttttaaggagty

SEQ ID NO: 63692 - DNA, 13 bp, Artificial Sequence
  Oligonucleotide for detection of SNP TSC0016820
ractccttaaaaa

SEQ ID NO: 63693 - DNA, 13 bp, Artificial Sequence
  Oligonucleotide for detection of SNP TSC0016821
tattaagtttttt

SEQ ID NO: 63694 - DNA, 13 bp, Artificial Sequence
  Oligonucleotide for detection of SNP TSC0016821
aaaaaacttaata

SEQ ID NO: 63695 - DNA, 13 bp, Artificial Sequence
  Oligonucleotide for detection of SNP TSC0016821
tattaaatttttt

SEQ ID NO: 63696 - DNA, 13 bp, Artificial Sequence
  Oligonucleotide for detection of SNP TSC0016821
aaaaaatttaata

SEQ ID NO: 63697 - DNA, 13 bp, Artificial Sequence
  Oligonucleotide for detection of SNP TSC0016823
gttggatgtagtg

SEQ ID NO: 63698 - DNA, 13 bp, Artificial Sequence
  Oligonucleotide for detection of SNP TSC0016823
cactacatccaac

SEQ ID NO: 63699 - DNA, 13 bp, Artificial Sequence
  Oligonucleotide for detection of SNP TSC0016823
gtcggatgtagtg

SEQ ID NO: 63700 - DNA, 13 bp, Artificial Sequence
  Oligonucleotide for detection of SNP TSC0016823
cactacatccgac

SEQ ID NO: 63701 - DNA, 13 bp, Artificial Sequence
  Oligonucleotide for detection of SNP TSC0016823
gttggacgtagtg

SEQ ID NO: 63702 - DNA, 13 bp, Artificial Sequence
  Oligonucleotide for detection of SNP TSC0016823
cactacgtccaac

SEQ ID NO: 63703 - DNA, 13 bp, Artificial Sequence
  Oligonucleotide for detection of SNP TSC0016823
gtcggacgtagtg

SEQ ID NO: 63704 - DNA, 13 bp, Artificial Sequence
  Oligonucleotide for detection of SNP TSC0016823
cactacgtccgac

SEQ ID NO: 63705 - DNA, 13 bp, Artificial Sequence
  Oligonucleotide for detection of SNP TSC0016825
tttagagttatat

SEQ ID NO: 63706 - DNA, 13 bp, Artificial Sequence
  Oligonucleotide for detection of SNP TSC0016825
atataactctaaa

SEQ ID NO: 63707 - DNA, 13 bp, Artificial Sequence
  Oligonucleotide for detection of SNP TSC0016825
tttagaattatat

SEQ ID NO: 63708 - DNA, 13 bp, Artificial Sequence
  Oligonucleotide for detection of SNP TSC0016825
atataattctaaa

SEQ ID NO: 63709 - DNA, 13 bp, Artificial Sequence
  Oligonucleotide for detection of SNP TSC0016826
taggttggtgttt

SEQ ID NO: 63710 - DNA, 13 bp, Artificial Sequence
  Oligonucleotide for detection of SNP TSC0016826
aaacaccaaccta

SEQ ID NO: 63711 - DNA, 13 bp, Artificial Sequence
  Oligonucleotide for detection of SNP TSC0016826
taggtcggtgttt

SEQ ID NO: 63712 - DNA, 13 bp, Artificial Sequence
  Oligonucleotide for detection of SNP TSC0016826
aaacaccgaccta

SEQ ID NO: 63713 - DNA, 13 bp, Artificial Sequence
  Oligonucleotide for detection of SNP TSC0016826
aggtatgggttta

SEQ ID NO: 63714 - DNA, 13 bp, Artificial Sequence
  Oligonucleotide for detection of SNP TSC0016826
taaacccatacct

SEQ ID NO: 63715 - DNA, 13 bp, Artificial Sequence
  Oligonucleotide for detection of SNP TSC0016826
aggtattggttta

SEQ ID NO: 63716 - DNA, 13 bp, Artificial Sequence
  Oligonucleotide for detection of SNP TSC0016826
taaaccaatacct

SEQ ID NO: 63717 - DNA, 13 bp, Artificial Sequence
  Oligonucleotide for detection of SNP TSC0016826
aggtacgggttta

SEQ ID NO: 63718 - DNA, 13 bp, Artificial Sequence
  Oligonucleotide for detection of SNP TSC0016826
taaacccgtacct

SEQ ID NO: 63719 - DNA, 13 bp, Artificial Sequence
  Oligonucleotide for detection of SNP TSC0016826
aggtatcggttta

SEQ ID NO: 63720 - DNA, 13 bp, Artificial Sequence
  Oligonucleotide for detection of SNP TSC0016826
taaaccgatacct

SEQ ID NO: 63721 - DNA, 13 bp, Artificial Sequence
  Oligonucleotide for detection of SNP TSC0016827
agaattgtattta

SEQ ID NO: 63722 - DNA, 13 bp, Artificial Sequence
  Oligonucleotide for detection of SNP TSC0016827
taaatacaattct

SEQ ID NO: 63723 - DNA, 13 bp, Artificial Sequence
  Oligonucleotide for detection of SNP TSC0016827
agaattttattta

SEQ ID NO: 63724 - DNA, 13 bp, Artificial Sequence
  Oligonucleotide for detection of SNP TSC0016827
taaataaaattct

SEQ ID NO: 63725 - DNA, 13 bp, Artificial Sequence
  Oligonucleotide for detection of SNP TSC0016827
tgaatgtagtttt

SEQ ID NO: 63726 - DNA, 13 bp, Artificial Sequence
  Oligonucleotide for detection of SNP TSC0016827
aaaactacattca

SEQ ID NO: 63727 - DNA, 13 bp, Artificial Sequence
  Oligonucleotide for detection of SNP TSC0016827
tgaatgaagtttt

SEQ ID NO: 63728 - DNA, 13 bp, Artificial Sequence
  Oligonucleotide for detection of SNP TSC0016827
aaaacttcattca

SEQ ID NO: 63729 - DNA, 13 bp, Artificial Sequence
  Oligonucleotide for detection of SNP TSC0016828
ggttttgatgtaa

SEQ ID NO: 63730 - DNA, 13 bp, Artificial Sequence
  Oligonucleotide for detection of SNP TSC0016828
ttacatcaaaacc

SEQ ID NO: 63731 - DNA, 13 bp, Artificial Sequence
  Oligonucleotide for detection of SNP TSC0016828
ggttttaatgtaa

SEQ ID NO: 63732 - DNA, 13 bp, Artificial Sequence
  Oligonucleotide for detection of SNP TSC0016828
ttacattaaaacc

SEQ ID NO: 63733 - DNA, 13 bp, Artificial Sequence
  Oligonucleotide for detection of SNP TSC0016829
tataatatttgtt

SEQ ID NO: 63734 - DNA, 13 bp, Artificial Sequence
  Oligonucleotide for detection of SNP TSC0016829
aacaaatattata

SEQ ID NO: 63735 - DNA, 13 bp, Artificial Sequence
  Oligonucleotide for detection of SNP TSC0016829
tataatgtttgtt

SEQ ID NO: 63736 - DNA, 13 bp, Artificial Sequence
  Oligonucleotide for detection of SNP TSC0016829
aacaaacattata

SEQ ID NO: 63737 - DNA, 13 bp, Artificial Sequence
  Oligonucleotide for detection of SNP TSC0016830
tttgagataaaaa

SEQ ID NO: 63738 - DNA, 13 bp, Artificial Sequence
  Oligonucleotide for detection of SNP TSC0016830
tttttatctcaaa

SEQ ID NO: 63739 - DNA, 13 bp, Artificial Sequence
  Oligonucleotide for detection of SNP TSC0016830
tttgagttaaaaa

SEQ ID NO: 63740 - DNA, 13 bp, Artificial Sequence
  Oligonucleotide for detection of SNP TSC0016830
tttttaactcaaa

SEQ ID NO: 63741 - DNA, 13 bp, Artificial Sequence
  Oligonucleotide for detection of SNP TSC0016830
tttttgttttagg

SEQ ID NO: 63742 - DNA, 13 bp, Artificial Sequence
  Oligonucleotide for detection of SNP TSC0016830
cctaaaacaaaaa

SEQ ID NO: 63743 - DNA, 13 bp, Artificial Sequence
  Oligonucleotide for detection of SNP TSC0016832
taaaaaatatgaa

SEQ ID NO: 63744 - DNA, 13 bp, Artificial Sequence
  Oligonucleotide for detection of SNP TSC0016832
ttcatatttttta

SEQ ID NO: 63745 - DNA, 13 bp, Artificial Sequence
  Oligonucleotide for detection of SNP TSC0016832
taaaaagtatgaa

SEQ ID NO: 63746 - DNA, 13 bp, Artificial Sequence
  Oligonucleotide for detection of SNP TSC0016832
ttcatacttttta

SEQ ID NO: 63747 - DNA, 13 bp, Artificial Sequence
  Oligonucleotide for detection of SNP TSC0016832
taaaaaatacgaa

SEQ ID NO: 63748 - DNA, 13 bp, Artificial Sequence
  Oligonucleotide for detection of SNP TSC0016832
ttcgtatttttta

SEQ ID NO: 63749 - DNA, 13 bp, Artificial Sequence
  Oligonucleotide for detection of SNP TSC0016832
taaaaagtacgaa

SEQ ID NO: 63750 - DNA, 13 bp, Artificial Sequence
  Oligonucleotide for detection of SNP TSC0016832
ttcgtacttttta

SEQ ID NO: 63751 - DNA, 13 bp, Artificial Sequence
  Oligonucleotide for detection of SNP TSC0016833
ttggaaggtttaa

SEQ ID NO: 63752 - DNA, 13 bp, Artificial Sequence
  Oligonucleotide for detection of SNP TSC0016833
ttaaaccttccaa

SEQ ID NO: 63753 - DNA, 13 bp, Artificial Sequence
  Oligonucleotide for detection of SNP TSC0016833
ttggaaagtttaa

SEQ ID NO: 63754 - DNA, 13 bp, Artificial Sequence
  Oligonucleotide for detection of SNP TSC0016833
ttaaactttccaa

SEQ ID NO: 63755 - DNA, 13 bp, Artificial Sequence
  Oligonucleotide for detection of SNP TSC0016834
ttaattgttttta

SEQ ID NO: 63756 - DNA, 13 bp, Artificial Sequence
  Oligonucleotide for detection of SNP TSC0016834
taaaaacaattaa

SEQ ID NO: 63757 - DNA, 13 bp, Artificial Sequence
  Oligonucleotide for detection of SNP TSC0016834
ttaattattttta

SEQ ID NO: 63758 - DNA, 13 bp, Artificial Sequence
  Oligonucleotide for detection of SNP TSC0016834
taaaaataattaa

SEQ ID NO: 63759 - DNA, 13 bp, Artificial Sequence
  Oligonucleotide for detection of SNP TSC0016835
ttggtgataaata

SEQ ID NO: 63760 - DNA, 13 bp, Artificial Sequence
  Oligonucleotide for detection of SNP TSC0016835
tatttatcaccaa

SEQ ID NO: 63761 - DNA, 13 bp, Artificial Sequence
  Oligonucleotide for detection of SNP TSC0016835
ttggtgttaaata

SEQ ID NO: 63762 - DNA, 13 bp, Artificial Sequence
  Oligonucleotide for detection of SNP TSC0016835
tatttaacaccaa

SEQ ID NO: 63763 - DNA, 13 bp, Artificial Sequence
  Oligonucleotide for detection of SNP TSC0016835
tatttattattag

SEQ ID NO: 63764 - DNA, 13 bp, Artificial Sequence
  Oligonucleotide for detection of SNP TSC0016835
ctaataataaata

SEQ ID NO: 63765 - DNA, 13 bp, Artificial Sequence
  Oligonucleotide for detection of SNP TSC0016835
tatttaatattag

SEQ ID NO: 63766 - DNA, 13 bp, Artificial Sequence
  Oligonucleotide for detection of SNP TSC0016835
ctaatattaaata

SEQ ID NO: 63767 - DNA, 13 bp, Artificial Sequence
  Oligonucleotide for detection of SNP TSC0016838
ttatgtttatttt

SEQ ID NO: 63768 - DNA, 13 bp, Artificial Sequence
  Oligonucleotide for detection of SNP TSC0016838
aaaataaacataa

SEQ ID NO: 63769 - DNA, 13 bp, Artificial Sequence
  Oligonucleotide for detection of SNP TSC0016838
aaaatatatatga

SEQ ID NO: 63770 - DNA, 13 bp, Artificial Sequence
  Oligonucleotide for detection of SNP TSC0016838
tcatatatatttt

SEQ ID NO: 63771 - DNA, 13 bp, Artificial Sequence
  Oligonucleotide for detection of SNP TSC0016838
aaaatagatatga

SEQ ID NO: 63772 - DNA, 13 bp, Artificial Sequence
  Oligonucleotide for detection of SNP TSC0016838
tcatatctatttt

SEQ ID NO: 63773 - DNA, 13 bp, Artificial Sequence
  Oligonucleotide for detection of SNP TSC0016839
aatgagaatttta

SEQ ID NO: 63774 - DNA, 13 bp, Artificial Sequence
  Oligonucleotide for detection of SNP TSC0016839
taaaattctcatt

SEQ ID NO: 63775 - DNA, 13 bp, Artificial Sequence
  Oligonucleotide for detection of SNP TSC0016839
aatgagtatttta

SEQ ID NO: 63776 - DNA, 13 bp, Artificial Sequence
  Oligonucleotide for detection of SNP TSC0016839
taaaatactcatt

SEQ ID NO: 63777 - DNA, 13 bp, Artificial Sequence
  Oligonucleotide for detection of SNP TSC0016839
tgaaatttttatt

SEQ ID NO: 63778 - DNA, 13 bp, Artificial Sequence
  Oligonucleotide for detection of SNP TSC0016839
aataaaaatttca

SEQ ID NO: 63779 - DNA, 13 bp, Artificial Sequence
  Oligonucleotide for detection of SNP TSC0016839
tgaaatgtttatt

SEQ ID NO: 63780 - DNA, 13 bp, Artificial Sequence
  Oligonucleotide for detection of SNP TSC0016839
aataaacatttca

SEQ ID NO: 63781 - DNA, 13 bp, Artificial Sequence
  Oligonucleotide for detection of SNP TSC0016840
gtttttaaaagta

SEQ ID NO: 63782 - DNA, 13 bp, Artificial Sequence
  Oligonucleotide for detection of SNP TSC0016840
tacttttaaaaac

SEQ ID NO: 63783 - DNA, 13 bp, Artificial Sequence
  Oligonucleotide for detection of SNP TSC0016840
gttttttaaagta

SEQ ID NO: 63784 - DNA, 13 bp, Artificial Sequence
  Oligonucleotide for detection of SNP TSC0016840
tactttaaaaaac

SEQ ID NO: 63785 - DNA, 13 bp, Artificial Sequence
  Oligonucleotide for detection of SNP TSC0016840
tatttttaaaaay

SEQ ID NO: 63786 - DNA, 13 bp, Artificial Sequence
  Oligonucleotide for detection of SNP TSC0016840
rtttttaaaaata

SEQ ID NO: 63787 - DNA, 13 bp, Artificial Sequence
  Oligonucleotide for detection of SNP TSC0016840
tattttaaaaaay

SEQ ID NO: 63788 - DNA, 13 bp, Artificial Sequence
  Oligonucleotide for detection of SNP TSC0016840
rttttttaaaata

SEQ ID NO: 63789 - DNA, 13 bp, Artificial Sequence
  Oligonucleotide for detection of SNP TSC0016844
gattgtatattga

SEQ ID NO: 63790 - DNA, 13 bp, Artificial Sequence
  Oligonucleotide for detection of SNP TSC0016844
tcaatatacaatc

SEQ ID NO: 63791 - DNA, 13 bp, Artificial Sequence
  Oligonucleotide for detection of SNP TSC0016844
gattgtgtattga

SEQ ID NO: 63792 - DNA, 13 bp, Artificial Sequence
  Oligonucleotide for detection of SNP TSC0016844
tcaatacacaatc

SEQ ID NO: 63793 - DNA, 13 bp, Artificial Sequence
  Oligonucleotide for detection of SNP TSC0016844
gattgtatatcga

SEQ ID NO: 63794 - DNA, 13 bp, Artificial Sequence
  Oligonucleotide for detection of SNP TSC0016844
tcgatatacaatc

SEQ ID NO: 63795 - DNA, 13 bp, Artificial Sequence
  Oligonucleotide for detection of SNP TSC0016844
gattgtgtatcga

SEQ ID NO: 63796 - DNA, 13 bp, Artificial Sequence
  Oligonucleotide for detection of SNP TSC0016844
tcgatacacaatc

SEQ ID NO: 63797 - DNA, 13 bp, Artificial Sequence
  Oligonucleotide for detection of SNP TSC0016845
aaattggataaay

SEQ ID NO: 63798 - DNA, 13 bp, Artificial Sequence
  Oligonucleotide for detection of SNP TSC0016845
rtttatccaattt

SEQ ID NO: 63799 - DNA, 13 bp, Artificial Sequence
  Oligonucleotide for detection of SNP TSC0016845
aaattgaataaay

SEQ ID NO: 63800 - DNA, 13 bp, Artificial Sequence
  Oligonucleotide for detection of SNP TSC0016845
rtttattcaattt

SEQ ID NO: 63801 - DNA, 13 bp, Artificial Sequence
  Oligonucleotide for detection of SNP TSC0016846
aattttaattaty

SEQ ID NO: 63802 - DNA, 13 bp, Artificial Sequence
  Oligonucleotide for detection of SNP TSC0016846
rataattaaaatt

SEQ ID NO: 63803 - DNA, 13 bp, Artificial Sequence
  Oligonucleotide for detection of SNP TSC0016846
aattttgattaty

SEQ ID NO: 63804 - DNA, 13 bp, Artificial Sequence
  Oligonucleotide for detection of SNP TSC0016846
rataatcaaaatt

SEQ ID NO: 63805 - DNA, 13 bp, Artificial Sequence
  Oligonucleotide for detection of SNP TSC0016846
aatttcgattaty

SEQ ID NO: 63806 - DNA, 13 bp, Artificial Sequence
  Oligonucleotide for detection of SNP TSC0016846
rataatcgaaatt

SEQ ID NO: 63807 - DNA, 13 bp, Artificial Sequence
  Oligonucleotide for detection of SNP TSC0016846
gatggttggggtt

SEQ ID NO: 63808 - DNA, 13 bp, Artificial Sequence
  Oligonucleotide for detection of SNP TSC0016846
aaccccaaccatc

SEQ ID NO: 63809 - DNA, 13 bp, Artificial Sequence
  Oligonucleotide for detection of SNP TSC0016846
gatggtcggggtt

SEQ ID NO: 63810 - DNA, 13 bp, Artificial Sequence
  Oligonucleotide for detection of SNP TSC0016846
aaccccgaccatc

SEQ ID NO: 63811 - DNA, 13 bp, Artificial Sequence
  Oligonucleotide for detection of SNP TSC0016847
tttgagaaagtta

SEQ ID NO: 63812 - DNA, 13 bp, Artificial Sequence
  Oligonucleotide for detection of SNP TSC0016847
taactttctcaaa

SEQ ID NO: 63813 - DNA, 13 bp, Artificial Sequence
  Oligonucleotide for detection of SNP TSC0016847
tttgaggaagtta

SEQ ID NO: 63814 - DNA, 13 bp, Artificial Sequence
  Oligonucleotide for detection of SNP TSC0016847
taacttcctcaaa

SEQ ID NO: 63815 - DNA, 13 bp, Artificial Sequence
  Oligonucleotide for detection of SNP TSC0016848
gattagattatat

SEQ ID NO: 63816 - DNA, 13 bp, Artificial Sequence
  Oligonucleotide for detection of SNP TSC0016848
atataatctaatc

SEQ ID NO: 63817 - DNA, 13 bp, Artificial Sequence
  Oligonucleotide for detection of SNP TSC0016848
gattaggttatat

SEQ ID NO: 63818 - DNA, 13 bp, Artificial Sequence
  Oligonucleotide for detection of SNP TSC0016848
atataacctaatc

SEQ ID NO: 63819 - DNA, 13 bp, Artificial Sequence
  Oligonucleotide for detection of SNP TSC0016853
tagtaagatggty

SEQ ID NO: 63820 - DNA, 13 bp, Artificial Sequence
  Oligonucleotide for detection of SNP TSC0016853
raccatcttacta

SEQ ID NO: 63821 - DNA, 13 bp, Artificial Sequence
  Oligonucleotide for detection of SNP TSC0016853
tagtaaaatggty

SEQ ID NO: 63822 - DNA, 13 bp, Artificial Sequence
  Oligonucleotide for detection of SNP TSC0016853
raccattttacta

SEQ ID NO: 63823 - DNA, 13 bp, Artificial Sequence
  Oligonucleotide for detection of SNP TSC0016854
gaagaaggttaty

SEQ ID NO: 63824 - DNA, 13 bp, Artificial Sequence
  Oligonucleotide for detection of SNP TSC0016854
rataaccttcttc

SEQ ID NO: 63825 - DNA, 13 bp, Artificial Sequence
  Oligonucleotide for detection of SNP TSC0016854
gaagaaagttaty

SEQ ID NO: 63826 - DNA, 13 bp, Artificial Sequence
  Oligonucleotide for detection of SNP TSC0016854
rataactttcttc

SEQ ID NO: 63827 - DNA, 13 bp, Artificial Sequence
  Oligonucleotide for detection of SNP TSC0016855
ttagggataaaaa

SEQ ID NO: 63828 - DNA, 13 bp, Artificial Sequence
  Oligonucleotide for detection of SNP TSC0016855
tttttatccctaa

SEQ ID NO: 63829 - DNA, 13 bp, Artificial Sequence
  Oligonucleotide for detection of SNP TSC0016855
ttagggttaaaaa

SEQ ID NO: 63830 - DNA, 13 bp, Artificial Sequence
  Oligonucleotide for detection of SNP TSC0016855
tttttaaccctaa

SEQ ID NO: 63831 - DNA, 13 bp, Artificial Sequence
  Oligonucleotide for detection of SNP TSC0016855
tttttgtttttgg

SEQ ID NO: 63832 - DNA, 13 bp, Artificial Sequence
  Oligonucleotide for detection of SNP TSC0016855
ccaaaaacaaaaa

SEQ ID NO: 63833 - DNA, 13 bp, Artificial Sequence
  Oligonucleotide for detection of SNP TSC0016855
tttttggttttgg

SEQ ID NO: 63834 - DNA, 13 bp, Artificial Sequence
  Oligonucleotide for detection of SNP TSC0016855
ccaaaaccaaaaa

SEQ ID NO: 63835 - DNA, 13 bp, Artificial Sequence
  Oligonucleotide for detection of SNP TSC0016856
tttttgtttttgt

SEQ ID NO: 63836 - DNA, 13 bp, Artificial Sequence
  Oligonucleotide for detection of SNP TSC0016856
acaaaaacaaaaa

SEQ ID NO: 63837 - DNA, 13 bp, Artificial Sequence
  Oligonucleotide for detection of SNP TSC0016856
tttttggttttgt

SEQ ID NO: 63838 - DNA, 13 bp, Artificial Sequence
  Oligonucleotide for detection of SNP TSC0016856
acaaaaccaaaaa

SEQ ID NO: 63839 - DNA, 13 bp, Artificial Sequence
  Oligonucleotide for detection of SNP TSC0016857
ataaaaataaaay

SEQ ID NO: 63840 - DNA, 13 bp, Artificial Sequence
  Oligonucleotide for detection of SNP TSC0016857
rttttatttttat

SEQ ID NO: 63841 - DNA, 13 bp, Artificial Sequence
  Oligonucleotide for detection of SNP TSC0016857
ataaaattaaaay

SEQ ID NO: 63842 - DNA, 13 bp, Artificial Sequence
  Oligonucleotide for detection of SNP TSC0016857
rttttaattttat

SEQ ID NO: 63843 - DNA, 13 bp, Artificial Sequence
  Oligonucleotide for detection of SNP TSC0016857
gttttgtttttgt

SEQ ID NO: 63844 - DNA, 13 bp, Artificial Sequence
  Oligonucleotide for detection of SNP TSC0016857
acaaaaacaaaac

SEQ ID NO: 63845 - DNA, 13 bp, Artificial Sequence
  Oligonucleotide for detection of SNP TSC0016857
gttttggttttgt

SEQ ID NO: 63846 - DNA, 13 bp, Artificial Sequence
  Oligonucleotide for detection of SNP TSC0016857
acaaaaccaaaac

SEQ ID NO: 63847 - DNA, 13 bp, Artificial Sequence
  Oligonucleotide for detection of SNP TSC0016858
gaaataaggttgg

SEQ ID NO: 63848 - DNA, 13 bp, Artificial Sequence
  Oligonucleotide for detection of SNP TSC0016858
ccaaccttatttc

SEQ ID NO: 63849 - DNA, 13 bp, Artificial Sequence
  Oligonucleotide for detection of SNP TSC0016858
gaaatatggttgg

SEQ ID NO: 63850 - DNA, 13 bp, Artificial Sequence
  Oligonucleotide for detection of SNP TSC0016858
ccaaccatatttc

SEQ ID NO: 63851 - DNA, 13 bp, Artificial Sequence
  Oligonucleotide for detection of SNP TSC0016858
gaaataaggtcgg

SEQ ID NO: 63852 - DNA, 13 bp, Artificial Sequence
  Oligonucleotide for detection of SNP TSC0016858
ccgaccttatttc

SEQ ID NO: 63853 - DNA, 13 bp, Artificial Sequence
  Oligonucleotide for detection of SNP TSC0016858
gaaatatggtcgg

SEQ ID NO: 63854 - DNA, 13 bp, Artificial Sequence
  Oligonucleotide for detection of SNP TSC0016858
ccgaccatatttc

SEQ ID NO: 63855 - DNA, 13 bp, Artificial Sequence
  Oligonucleotide for detection of SNP TSC0016858
ttggttttgttty

SEQ ID NO: 63856 - DNA, 13 bp, Artificial Sequence
  Oligonucleotide for detection of SNP TSC0016858
raaacaaaaccaa

SEQ ID NO: 63857 - DNA, 13 bp, Artificial Sequence
  Oligonucleotide for detection of SNP TSC0016858
ttggttatgttty

SEQ ID NO: 63858 - DNA, 13 bp, Artificial Sequence
  Oligonucleotide for detection of SNP TSC0016858
raaacataaccaa

SEQ ID NO: 63859 - DNA, 13 bp, Artificial Sequence
  Oligonucleotide for detection of SNP TSC0016858
tcggttttgttty

SEQ ID NO: 63860 - DNA, 13 bp, Artificial Sequence
  Oligonucleotide for detection of SNP TSC0016858
raaacaaaaccga

SEQ ID NO: 63861 - DNA, 13 bp, Artificial Sequence
  Oligonucleotide for detection of SNP TSC0016858
tcggttatgttty

SEQ ID NO: 63862 - DNA, 13 bp, Artificial Sequence
  Oligonucleotide for detection of SNP TSC0016858
raaacataaccga

SEQ ID NO: 63863 - DNA, 13 bp, Artificial Sequence
  Oligonucleotide for detection of SNP TSC0016859
tttatagatggaa

SEQ ID NO: 63864 - DNA, 13 bp, Artificial Sequence
  Oligonucleotide for detection of SNP TSC0016859
ttccatctataaa

SEQ ID NO: 63865 - DNA, 13 bp, Artificial Sequence
  Oligonucleotide for detection of SNP TSC0016859
tttataaatggaa

SEQ ID NO: 63866 - DNA, 13 bp, Artificial Sequence
  Oligonucleotide for detection of SNP TSC0016859
ttccatttataaa

SEQ ID NO: 63867 - DNA, 13 bp, Artificial Sequence
  Oligonucleotide for detection of SNP TSC0016860
tgttttatagtty

SEQ ID NO: 63868 - DNA, 13 bp, Artificial Sequence
  Oligonucleotide for detection of SNP TSC0016860
raactataaaaca

SEQ ID NO: 63869 - DNA, 13 bp, Artificial Sequence
  Oligonucleotide for detection of SNP TSC0016861
aagattgaggttg

SEQ ID NO: 63870 - DNA, 13 bp, Artificial Sequence
  Oligonucleotide for detection of SNP TSC0016861
caacctcaatctt

SEQ ID NO: 63871 - DNA, 13 bp, Artificial Sequence
  Oligonucleotide for detection of SNP TSC0016861
aagattaaggttg

SEQ ID NO: 63872 - DNA, 13 bp, Artificial Sequence
  Oligonucleotide for detection of SNP TSC0016861
caaccttaatctt

SEQ ID NO: 63873 - DNA, 13 bp, Artificial Sequence
  Oligonucleotide for detection of SNP TSC0016865
aggttagtgttga

SEQ ID NO: 63874 - DNA, 13 bp, Artificial Sequence
  Oligonucleotide for detection of SNP TSC0016865
tcaacactaacct

SEQ ID NO: 63875 - DNA, 13 bp, Artificial Sequence
  Oligonucleotide for detection of SNP TSC0016865
aggttattgttga

SEQ ID NO: 63876 - DNA, 13 bp, Artificial Sequence
  Oligonucleotide for detection of SNP TSC0016865
tcaacaataacct

SEQ ID NO: 63877 - DNA, 13 bp, Artificial Sequence
  Oligonucleotide for detection of SNP TSC0016865
ttaatattgattt

SEQ ID NO: 63878 - DNA, 13 bp, Artificial Sequence
  Oligonucleotide for detection of SNP TSC0016865
aaatcaatattaa

SEQ ID NO: 63879 - DNA, 13 bp, Artificial Sequence
  Oligonucleotide for detection of SNP TSC0016865
ttaataatgattt

SEQ ID NO: 63880 - DNA, 13 bp, Artificial Sequence
  Oligonucleotide for detection of SNP TSC0016865
aaatcattattaa

SEQ ID NO: 63881 - DNA, 13 bp, Artificial Sequence
  Oligonucleotide for detection of SNP TSC0016866
gggggaaggggtg

SEQ ID NO: 63882 - DNA, 13 bp, Artificial Sequence
  Oligonucleotide for detection of SNP TSC0016866
caccccttccccc

SEQ ID NO: 63883 - DNA, 13 bp, Artificial Sequence
  Oligonucleotide for detection of SNP TSC0016867
ggttgggtgttgt

SEQ ID NO: 63884 - DNA, 13 bp, Artificial Sequence
  Oligonucleotide for detection of SNP TSC0016867
acaacacccaacc

SEQ ID NO: 63885 - DNA, 13 bp, Artificial Sequence
  Oligonucleotide for detection of SNP TSC0016867
ggttggttgttgt

SEQ ID NO: 63886 - DNA, 13 bp, Artificial Sequence
  Oligonucleotide for detection of SNP TSC0016867
acaacaaccaacc

SEQ ID NO: 63887 - DNA, 13 bp, Artificial Sequence
  Oligonucleotide for detection of SNP TSC0016867
ggttgggcgttgt

SEQ ID NO: 63888 - DNA, 13 bp, Artificial Sequence
  Oligonucleotide for detection of SNP TSC0016867
acaacgcccaacc

SEQ ID NO: 63889 - DNA, 13 bp, Artificial Sequence
  Oligonucleotide for detection of SNP TSC0016867
ggttggtcgttgt

SEQ ID NO: 63890 - DNA, 13 bp, Artificial Sequence
  Oligonucleotide for detection of SNP TSC0016867
acaacgaccaacc

SEQ ID NO: 63891 - DNA, 13 bp, Artificial Sequence
  Oligonucleotide for detection of SNP TSC0016867
atagtgtttagty

SEQ ID NO: 63892 - DNA, 13 bp, Artificial Sequence
  Oligonucleotide for detection of SNP TSC0016867
ractaaacactat

SEQ ID NO: 63893 - DNA, 13 bp, Artificial Sequence
  Oligonucleotide for detection of SNP TSC0016867
atagtgattagty

SEQ ID NO: 63894 - DNA, 13 bp, Artificial Sequence
  Oligonucleotide for detection of SNP TSC0016867
ractaatcactat

SEQ ID NO: 63895 - DNA, 13 bp, Artificial Sequence
  Oligonucleotide for detection of SNP TSC0016867
atagcgtttagty

SEQ ID NO: 63896 - DNA, 13 bp, Artificial Sequence
  Oligonucleotide for detection of SNP TSC0016867
ractaaacgctat

SEQ ID NO: 63897 - DNA, 13 bp, Artificial Sequence
  Oligonucleotide for detection of SNP TSC0016867
atagcgattagty

SEQ ID NO: 63898 - DNA, 13 bp, Artificial Sequence
  Oligonucleotide for detection of SNP TSC0016867
ractaatcgctat

SEQ ID NO: 63899 - DNA, 13 bp, Artificial Sequence
  Oligonucleotide for detection of SNP TSC0016871
tttgtaaaatata

SEQ ID NO: 63900 - DNA, 13 bp, Artificial Sequence
  Oligonucleotide for detection of SNP TSC0016871
tatattttacaaa

SEQ ID NO: 63901 - DNA, 13 bp, Artificial Sequence
  Oligonucleotide for detection of SNP TSC0016871
tttgtataatata

SEQ ID NO: 63902 - DNA, 13 bp, Artificial Sequence
  Oligonucleotide for detection of SNP TSC0016871
tatattatacaaa

SEQ ID NO: 63903 - DNA, 13 bp, Artificial Sequence
  Oligonucleotide for detection of SNP TSC0016871
tgtgttttataag

SEQ ID NO: 63904 - DNA, 13 bp, Artificial Sequence
  Oligonucleotide for detection of SNP TSC0016871
cttataaaacaca

SEQ ID NO: 63905 - DNA, 13 bp, Artificial Sequence
  Oligonucleotide for detection of SNP TSC0016871
tgtgttgtataag

SEQ ID NO: 63906 - DNA, 13 bp, Artificial Sequence
  Oligonucleotide for detection of SNP TSC0016871
cttatacaacaca

SEQ ID NO: 63907 - DNA, 13 bp, Artificial Sequence
  Oligonucleotide for detection of SNP TSC0016872
atgttagtttttg

SEQ ID NO: 63908 - DNA, 13 bp, Artificial Sequence
  Oligonucleotide for detection of SNP TSC0016872
caaaaactaacat

SEQ ID NO: 63909 - DNA, 13 bp, Artificial Sequence
  Oligonucleotide for detection of SNP TSC0016872
atgttaatttttg

SEQ ID NO: 63910 - DNA, 13 bp, Artificial Sequence
  Oligonucleotide for detection of SNP TSC0016872
caaaaattaacat

SEQ ID NO: 63911 - DNA, 13 bp, Artificial Sequence
  Oligonucleotide for detection of SNP TSC0016873
ttgttggtattgg

SEQ ID NO: 63912 - DNA, 13 bp, Artificial Sequence
  Oligonucleotide for detection of SNP TSC0016873
ccaataccaacaa

SEQ ID NO: 63913 - DNA, 13 bp, Artificial Sequence
  Oligonucleotide for detection of SNP TSC0016873
ttgttgttattgg

SEQ ID NO: 63914 - DNA, 13 bp, Artificial Sequence
  Oligonucleotide for detection of SNP TSC0016873
ccaataacaacaa

SEQ ID NO: 63915 - DNA, 13 bp, Artificial Sequence
  Oligonucleotide for detection of SNP TSC0016873
tcgttggtattgg

SEQ ID NO: 63916 - DNA, 13 bp, Artificial Sequence
  Oligonucleotide for detection of SNP TSC0016873
ccaataccaacga

SEQ ID NO: 63917 - DNA, 13 bp, Artificial Sequence
  Oligonucleotide for detection of SNP TSC0016873
tcgttgttattgg

SEQ ID NO: 63918 - DNA, 13 bp, Artificial Sequence
  Oligonucleotide for detection of SNP TSC0016873
ccaataacaacga

SEQ ID NO: 63919 - DNA, 13 bp, Artificial Sequence
  Oligonucleotide for detection of SNP TSC0016873
ttaatgttaatga

SEQ ID NO: 63920 - DNA, 13 bp, Artificial Sequence
  Oligonucleotide for detection of SNP TSC0016873
tcattaacattaa

SEQ ID NO: 63921 - DNA, 13 bp, Artificial Sequence
  Oligonucleotide for detection of SNP TSC0016873
ttaatgataatga

SEQ ID NO: 63922 - DNA, 13 bp, Artificial Sequence
  Oligonucleotide for detection of SNP TSC0016873
tcattatcattaa

SEQ ID NO: 63923 - DNA, 13 bp, Artificial Sequence
  Oligonucleotide for detection of SNP TSC0016873
ttaatgttaacga

SEQ ID NO: 63924 - DNA, 13 bp, Artificial Sequence
  Oligonucleotide for detection of SNP TSC0016873
tcgttaacattaa

SEQ ID NO: 63925 - DNA, 13 bp, Artificial Sequence
  Oligonucleotide for detection of SNP TSC0016873
ttaatgataacga

SEQ ID NO: 63926 - DNA, 13 bp, Artificial Sequence
  Oligonucleotide for detection of SNP TSC0016873
tcgttatcattaa

SEQ ID NO: 63927 - DNA, 13 bp, Artificial Sequence
  Oligonucleotide for detection of SNP TSC0016874
atattggtattty

SEQ ID NO: 63928 - DNA, 13 bp, Artificial Sequence
  Oligonucleotide for detection of SNP TSC0016874
raaataccaatat

SEQ ID NO: 63929 - DNA, 13 bp, Artificial Sequence
  Oligonucleotide for detection of SNP TSC0016874
atattgttattty

SEQ ID NO: 63930 - DNA, 13 bp, Artificial Sequence
  Oligonucleotide for detection of SNP TSC0016874
raaataacaatat

SEQ ID NO: 63931 - DNA, 13 bp, Artificial Sequence
  Oligonucleotide for detection of SNP TSC0016874
gagatgttagtgt

SEQ ID NO: 63932 - DNA, 13 bp, Artificial Sequence
  Oligonucleotide for detection of SNP TSC0016874
acactaacatctc

SEQ ID NO: 63933 - DNA, 13 bp, Artificial Sequence
  Oligonucleotide for detection of SNP TSC0016874
gagatgatagtgt

SEQ ID NO: 63934 - DNA, 13 bp, Artificial Sequence
  Oligonucleotide for detection of SNP TSC0016874
acactatcatctc

SEQ ID NO: 63935 - DNA, 13 bp, Artificial Sequence
  Oligonucleotide for detection of SNP TSC0016877
agggataattttg

SEQ ID NO: 63936 - DNA, 13 bp, Artificial Sequence
  Oligonucleotide for detection of SNP TSC0016877
caaaattatccct

SEQ ID NO: 63937 - DNA, 13 bp, Artificial Sequence
  Oligonucleotide for detection of SNP TSC0016877
agggatgattttg

SEQ ID NO: 63938 - DNA, 13 bp, Artificial Sequence
  Oligonucleotide for detection of SNP TSC0016877
caaaatcatccct

SEQ ID NO: 63939 - DNA, 13 bp, Artificial Sequence
  Oligonucleotide for detection of SNP TSC0016878
ttgttaatgttga

SEQ ID NO: 63940 - DNA, 13 bp, Artificial Sequence
  Oligonucleotide for detection of SNP TSC0016878
tcaacattaacaa

SEQ ID NO: 63941 - DNA, 13 bp, Artificial Sequence
  Oligonucleotide for detection of SNP TSC0016878
ttgttagtgttga

SEQ ID NO: 63942 - DNA, 13 bp, Artificial Sequence
  Oligonucleotide for detection of SNP TSC0016878
tcaacactaacaa

SEQ ID NO: 63943 - DNA, 13 bp, Artificial Sequence
  Oligonucleotide for detection of SNP TSC0016878
tcgttaatgttga

SEQ ID NO: 63944 - DNA, 13 bp, Artificial Sequence
  Oligonucleotide for detection of SNP TSC0016878
tcaacattaacga

SEQ ID NO: 63945 - DNA, 13 bp, Artificial Sequence
  Oligonucleotide for detection of SNP TSC0016878
tcgttagtgttga

SEQ ID NO: 63946 - DNA, 13 bp, Artificial Sequence
  Oligonucleotide for detection of SNP TSC0016878
tcaacactaacga

SEQ ID NO: 63947 - DNA, 13 bp, Artificial Sequence
  Oligonucleotide for detection of SNP TSC0016883
gtttttaaagtaa

SEQ ID NO: 63948 - DNA, 13 bp, Artificial Sequence
  Oligonucleotide for detection of SNP TSC0016883
ttactttaaaaac

SEQ ID NO: 63949 - DNA, 13 bp, Artificial Sequence
  Oligonucleotide for detection of SNP TSC0016883
gtttttgaagtaa

SEQ ID NO: 63950 - DNA, 13 bp, Artificial Sequence
  Oligonucleotide for detection of SNP TSC0016883
ttacttcaaaaac

SEQ ID NO: 63951 - DNA, 13 bp, Artificial Sequence
  Oligonucleotide for detection of SNP TSC0016883
gttttcgaagtaa

SEQ ID NO: 63952 - DNA, 13 bp, Artificial Sequence
  Oligonucleotide for detection of SNP TSC0016883
ttacttcgaaaac

SEQ ID NO: 63953 - DNA, 13 bp, Artificial Sequence
  Oligonucleotide for detection of SNP TSC0016883
ttgttttgggagy

SEQ ID NO: 63954 - DNA, 13 bp, Artificial Sequence
  Oligonucleotide for detection of SNP TSC0016883
rctcccaaaacaa

SEQ ID NO: 63955 - DNA, 13 bp, Artificial Sequence
  Oligonucleotide for detection of SNP TSC0016883
ttgtttcgggagy

SEQ ID NO: 63956 - DNA, 13 bp, Artificial Sequence
  Oligonucleotide for detection of SNP TSC0016883
rctcccgaaacaa

SEQ ID NO: 63957 - DNA, 13 bp, Artificial Sequence
  Oligonucleotide for detection of SNP TSC0016887
tattgggtttggy

SEQ ID NO: 63958 - DNA, 13 bp, Artificial Sequence
  Oligonucleotide for detection of SNP TSC0016887
rccaaacccaata

SEQ ID NO: 63959 - DNA, 13 bp, Artificial Sequence
  Oligonucleotide for detection of SNP TSC0016887
tattggttttggy

SEQ ID NO: 63960 - DNA, 13 bp, Artificial Sequence
  Oligonucleotide for detection of SNP TSC0016887
rccaaaaccaata

SEQ ID NO: 63961 - DNA, 13 bp, Artificial Sequence
  Oligonucleotide for detection of SNP TSC0016887
tatcgggtttggy

SEQ ID NO: 63962 - DNA, 13 bp, Artificial Sequence
  Oligonucleotide for detection of SNP TSC0016887
rccaaacccgata

SEQ ID NO: 63963 - DNA, 13 bp, Artificial Sequence
  Oligonucleotide for detection of SNP TSC0016887
tatcggttttggy

SEQ ID NO: 63964 - DNA, 13 bp, Artificial Sequence
  Oligonucleotide for detection of SNP TSC0016887
rccaaaaccgata

SEQ ID NO: 63965 - DNA, 13 bp, Artificial Sequence
  Oligonucleotide for detection of SNP TSC0016887
gttaggtttggtg

SEQ ID NO: 63966 - DNA, 13 bp, Artificial Sequence
  Oligonucleotide for detection of SNP TSC0016887
caccaaacctaac

SEQ ID NO: 63967 - DNA, 13 bp, Artificial Sequence
  Oligonucleotide for detection of SNP TSC0016887
gttaggattggtg

SEQ ID NO: 63968 - DNA, 13 bp, Artificial Sequence
  Oligonucleotide for detection of SNP TSC0016887
caccaatcctaac

SEQ ID NO: 63969 - DNA, 13 bp, Artificial Sequence
  Oligonucleotide for detection of SNP TSC0016887
gttaggttcggtg

SEQ ID NO: 63970 - DNA, 13 bp, Artificial Sequence
  Oligonucleotide for detection of SNP TSC0016887
caccgaacctaac

SEQ ID NO: 63971 - DNA, 13 bp, Artificial Sequence
  Oligonucleotide for detection of SNP TSC0016887
gttaggatcggtg

SEQ ID NO: 63972 - DNA, 13 bp, Artificial Sequence
  Oligonucleotide for detection of SNP TSC0016887
caccgatcctaac

SEQ ID NO: 63973 - DNA, 13 bp, Artificial Sequence
  Oligonucleotide for detection of SNP TSC0016888
ttaatgatgaagt

SEQ ID NO: 63974 - DNA, 13 bp, Artificial Sequence
  Oligonucleotide for detection of SNP TSC0016888
acttcatcattaa

SEQ ID NO: 63975 - DNA, 13 bp, Artificial Sequence
  Oligonucleotide for detection of SNP TSC0016888
ttaatggtgaagt

SEQ ID NO: 63976 - DNA, 13 bp, Artificial Sequence
  Oligonucleotide for detection of SNP TSC0016888
acttcaccattaa

SEQ ID NO: 63977 - DNA, 13 bp, Artificial Sequence
  Oligonucleotide for detection of SNP TSC0016890
agtgttattgttt

SEQ ID NO: 63978 - DNA, 13 bp, Artificial Sequence
  Oligonucleotide for detection of SNP TSC0016890
aaacaataacact

SEQ ID NO: 63979 - DNA, 13 bp, Artificial Sequence
  Oligonucleotide for detection of SNP TSC0016890
agtgttgttgttt

SEQ ID NO: 63980 - DNA, 13 bp, Artificial Sequence
  Oligonucleotide for detection of SNP TSC0016890
aaacaacaacact

SEQ ID NO: 63981 - DNA, 13 bp, Artificial Sequence
  Oligonucleotide for detection of SNP TSC0016890
agcgttattgttt

SEQ ID NO: 63982 - DNA, 13 bp, Artificial Sequence
  Oligonucleotide for detection of SNP TSC0016890
aaacaataacgct

SEQ ID NO: 63983 - DNA, 13 bp, Artificial Sequence
  Oligonucleotide for detection of SNP TSC0016890
agcgttgttgttt

SEQ ID NO: 63984 - DNA, 13 bp, Artificial Sequence
  Oligonucleotide for detection of SNP TSC0016890
aaacaacaacgct

SEQ ID NO: 63985 - DNA, 13 bp, Artificial Sequence
  Oligonucleotide for detection of SNP TSC0016890
agtgtcgttgttt

SEQ ID NO: 63986 - DNA, 13 bp, Artificial Sequence
  Oligonucleotide for detection of SNP TSC0016890
aaacaacgacact

SEQ ID NO: 63987 - DNA, 13 bp, Artificial Sequence
  Oligonucleotide for detection of SNP TSC0016890
agcgtcgttgttt

SEQ ID NO: 63988 - DNA, 13 bp, Artificial Sequence
  Oligonucleotide for detection of SNP TSC0016890
aaacaacgacgct

SEQ ID NO: 63989 - DNA, 13 bp, Artificial Sequence
  Oligonucleotide for detection of SNP TSC0016890
aggtagtgatgtt

SEQ ID NO: 63990 - DNA, 13 bp, Artificial Sequence
  Oligonucleotide for detection of SNP TSC0016890
aacatcactacct

SEQ ID NO: 63991 - DNA, 13 bp, Artificial Sequence
  Oligonucleotide for detection of SNP TSC0016890
aggtagtgacgtt

SEQ ID NO: 63992 - DNA, 13 bp, Artificial Sequence
  Oligonucleotide for detection of SNP TSC0016890
aacgtcactacct

SEQ ID NO: 63993 - DNA, 13 bp, Artificial Sequence
  Oligonucleotide for detection of SNP TSC0016890
aggtagcgatgtt

SEQ ID NO: 63994 - DNA, 13 bp, Artificial Sequence
  Oligonucleotide for detection of SNP TSC0016890
aacatcgctacct

SEQ ID NO: 63995 - DNA, 13 bp, Artificial Sequence
  Oligonucleotide for detection of SNP TSC0016890
aggtagcgacgtt

SEQ ID NO: 63996 - DNA, 13 bp, Artificial Sequence
  Oligonucleotide for detection of SNP TSC0016890
aacgtcgctacct

SEQ ID NO: 63997 - DNA, 13 bp, Artificial Sequence
  Oligonucleotide for detection of SNP TSC0016893
ttttttgtattat

SEQ ID NO: 63998 - DNA, 13 bp, Artificial Sequence
  Oligonucleotide for detection of SNP TSC0016893
ataatacaaaaaa

SEQ ID NO: 63999 - DNA, 13 bp, Artificial Sequence
  Oligonucleotide for detection of SNP TSC0016893
tttttcgtattat

SEQ ID NO: 64000 - DNA, 13 bp, Artificial Sequence
  Oligonucleotide for detection of SNP TSC0016893
ataatacgaaaaa

SEQ ID NO: 64001 - DNA, 13 bp, Artificial Sequence
  Oligonucleotide for detection of SNP TSC0016893
ataatgtggaggg

SEQ ID NO: 64002 - DNA, 13 bp, Artificial Sequence
  Oligonucleotide for detection of SNP TSC0016893
ccctccacattat

SEQ ID NO: 64003 - DNA, 13 bp, Artificial Sequence
  Oligonucleotide for detection of SNP TSC0016893
ataatgaggaggg

SEQ ID NO: 64004 - DNA, 13 bp, Artificial Sequence
  Oligonucleotide for detection of SNP TSC0016893
ccctcctcattat

SEQ ID NO: 64005 - DNA, 13 bp, Artificial Sequence
  Oligonucleotide for detection of SNP TSC0016893
ataatgcggaggg

SEQ ID NO: 64006 - DNA, 13 bp, Artificial Sequence
  Oligonucleotide for detection of SNP TSC0016893
ccctccgcattat

SEQ ID NO: 64007 - DNA, 13 bp, Artificial Sequence
  Oligonucleotide for detection of SNP TSC0016894
aaattggtgtttt

SEQ ID NO: 64008 - DNA, 13 bp, Artificial Sequence
  Oligonucleotide for detection of SNP TSC0016894
aaaacaccaattt

SEQ ID NO: 64009 - DNA, 13 bp, Artificial Sequence
  Oligonucleotide for detection of SNP TSC0016894
aaattgttgtttt

SEQ ID NO: 64010 - DNA, 13 bp, Artificial Sequence
  Oligonucleotide for detection of SNP TSC0016894
aaaacaacaattt

SEQ ID NO: 64011 - DNA, 13 bp, Artificial Sequence
  Oligonucleotide for detection of SNP TSC0016894
agaatattaattt

SEQ ID NO: 64012 - DNA, 13 bp, Artificial Sequence
  Oligonucleotide for detection of SNP TSC0016894
aaattaatattct

SEQ ID NO: 64013 - DNA, 13 bp, Artificial Sequence
  Oligonucleotide for detection of SNP TSC0016894
agaataataattt

SEQ ID NO: 64014 - DNA, 13 bp, Artificial Sequence
  Oligonucleotide for detection of SNP TSC0016894
aaattattattct

SEQ ID NO: 64015 - DNA, 13 bp, Artificial Sequence
  Oligonucleotide for detection of SNP TSC0016896
gaagatagagaag

SEQ ID NO: 64016 - DNA, 13 bp, Artificial Sequence
  Oligonucleotide for detection of SNP TSC0016896
cttctctatcttc

SEQ ID NO: 64017 - DNA, 13 bp, Artificial Sequence
  Oligonucleotide for detection of SNP TSC0016896
gaagatggagaag

SEQ ID NO: 64018 - DNA, 13 bp, Artificial Sequence
  Oligonucleotide for detection of SNP TSC0016896
cttctccatcttc

SEQ ID NO: 64019 - DNA, 13 bp, Artificial Sequence
  Oligonucleotide for detection of SNP TSC0016898
tttattattagtt

SEQ ID NO: 64020 - DNA, 13 bp, Artificial Sequence
  Oligonucleotide for detection of SNP TSC0016898
aactaataataaa

SEQ ID NO: 64021 - DNA, 13 bp, Artificial Sequence
  Oligonucleotide for detection of SNP TSC0016898
tttatttttagtt

SEQ ID NO: 64022 - DNA, 13 bp, Artificial Sequence
  Oligonucleotide for detection of SNP TSC0016898
aactaaaaataaa

SEQ ID NO: 64023 - DNA, 13 bp, Artificial Sequence
  Oligonucleotide for detection of SNP TSC0016898
agttaatggtgga

SEQ ID NO: 64024 - DNA, 13 bp, Artificial Sequence
  Oligonucleotide for detection of SNP TSC0016898
tccaccattaact

SEQ ID NO: 64025 - DNA, 13 bp, Artificial Sequence
  Oligonucleotide for detection of SNP TSC0016898
agttaagggtgga

SEQ ID NO: 64026 - DNA, 13 bp, Artificial Sequence
  Oligonucleotide for detection of SNP TSC0016898
tccacccttaact

SEQ ID NO: 64027 - DNA, 13 bp, Artificial Sequence
  Oligonucleotide for detection of SNP TSC0016899
gtgtagggataga

SEQ ID NO: 64028 - DNA, 13 bp, Artificial Sequence
  Oligonucleotide for detection of SNP TSC0016899
tctatccctacac

SEQ ID NO: 64029 - DNA, 13 bp, Artificial Sequence
  Oligonucleotide for detection of SNP TSC0016899
gtgtagagataga

SEQ ID NO: 64030 - DNA, 13 bp, Artificial Sequence
  Oligonucleotide for detection of SNP TSC0016899
tctatctctacac

SEQ ID NO: 64031 - DNA, 13 bp, Artificial Sequence
  Oligonucleotide for detection of SNP TSC0016900
aatgttattttta

SEQ ID NO: 64032 - DNA, 13 bp, Artificial Sequence
  Oligonucleotide for detection of SNP TSC0016900
taaaaataacatt

SEQ ID NO: 64033 - DNA, 13 bp, Artificial Sequence
  Oligonucleotide for detection of SNP TSC0016900
aatgttgttttta

SEQ ID NO: 64034 - DNA, 13 bp, Artificial Sequence
  Oligonucleotide for detection of SNP TSC0016900
taaaaacaacatt

SEQ ID NO: 64035 - DNA, 13 bp, Artificial Sequence
  Oligonucleotide for detection of SNP TSC0016900
aacgttattttta

SEQ ID NO: 64036 - DNA, 13 bp, Artificial Sequence
  Oligonucleotide for detection of SNP TSC0016900
taaaaataacgtt

SEQ ID NO: 64037 - DNA, 13 bp, Artificial Sequence
  Oligonucleotide for detection of SNP TSC0016900
aacgttgttttta

SEQ ID NO: 64038 - DNA, 13 bp, Artificial Sequence
  Oligonucleotide for detection of SNP TSC0016900
taaaaacaacgtt

SEQ ID NO: 64039 - DNA, 13 bp, Artificial Sequence
  Oligonucleotide for detection of SNP TSC0016901
aattttattttaa

SEQ ID NO: 64040 - DNA, 13 bp, Artificial Sequence
  Oligonucleotide for detection of SNP TSC0016901
ttaaaataaaatt

SEQ ID NO: 64041 - DNA, 13 bp, Artificial Sequence
  Oligonucleotide for detection of SNP TSC0016901
aattttgttttaa

SEQ ID NO: 64042 - DNA, 13 bp, Artificial Sequence
  Oligonucleotide for detection of SNP TSC0016901
ttaaaacaaaatt

SEQ ID NO: 64043 - DNA, 13 bp, Artificial Sequence
  Oligonucleotide for detection of SNP TSC0016901
aatttcgttttaa

SEQ ID NO: 64044 - DNA, 13 bp, Artificial Sequence
  Oligonucleotide for detection of SNP TSC0016901
ttaaaacgaaatt

SEQ ID NO: 64045 - DNA, 13 bp, Artificial Sequence
  Oligonucleotide for detection of SNP TSC0016901
ttgagatggagtt

SEQ ID NO: 64046 - DNA, 13 bp, Artificial Sequence
  Oligonucleotide for detection of SNP TSC0016901
aactccatctcaa

SEQ ID NO: 64047 - DNA, 13 bp, Artificial Sequence
  Oligonucleotide for detection of SNP TSC0016901
ttgagacggagtt

SEQ ID NO: 64048 - DNA, 13 bp, Artificial Sequence
  Oligonucleotide for detection of SNP TSC0016901
aactccgtctcaa

SEQ ID NO: 64049 - DNA, 13 bp, Artificial Sequence
  Oligonucleotide for detection of SNP TSC0016902
aataatatttgay

SEQ ID NO: 64050 - DNA, 13 bp, Artificial Sequence
  Oligonucleotide for detection of SNP TSC0016902
rtcaaatattatt

SEQ ID NO: 64051 - DNA, 13 bp, Artificial Sequence
  Oligonucleotide for detection of SNP TSC0016902
aataatgtttgay

SEQ ID NO: 64052 - DNA, 13 bp, Artificial Sequence
  Oligonucleotide for detection of SNP TSC0016902
rtcaaacattatt

SEQ ID NO: 64053 - DNA, 13 bp, Artificial Sequence
  Oligonucleotide for detection of SNP TSC0016903
tttaaggaatttt

SEQ ID NO: 64054 - DNA, 13 bp, Artificial Sequence
  Oligonucleotide for detection of SNP TSC0016903
aaaattccttaaa

SEQ ID NO: 64055 - DNA, 13 bp, Artificial Sequence
  Oligonucleotide for detection of SNP TSC0016903
tttaagtaatttt

SEQ ID NO: 64056 - DNA, 13 bp, Artificial Sequence
  Oligonucleotide for detection of SNP TSC0016903
aaaattacttaaa

SEQ ID NO: 64057 - DNA, 13 bp, Artificial Sequence
  Oligonucleotide for detection of SNP TSC0016904
tatttgagttata

SEQ ID NO: 64058 - DNA, 13 bp, Artificial Sequence
  Oligonucleotide for detection of SNP TSC0016904
tataactcaaata

SEQ ID NO: 64059 - DNA, 13 bp, Artificial Sequence
  Oligonucleotide for detection of SNP TSC0016904
tatttgtgttata

SEQ ID NO: 64060 - DNA, 13 bp, Artificial Sequence
  Oligonucleotide for detection of SNP TSC0016904
tataacacaaata

SEQ ID NO: 64061 - DNA, 13 bp, Artificial Sequence
  Oligonucleotide for detection of SNP TSC0016904
tgtggtttaggtg

SEQ ID NO: 64062 - DNA, 13 bp, Artificial Sequence
  Oligonucleotide for detection of SNP TSC0016904
cacctaaaccaca

SEQ ID NO: 64063 - DNA, 13 bp, Artificial Sequence
  Oligonucleotide for detection of SNP TSC0016904
tgtggtataggtg

SEQ ID NO: 64064 - DNA, 13 bp, Artificial Sequence
  Oligonucleotide for detection of SNP TSC0016904
cacctataccaca

SEQ ID NO: 64065 - DNA, 13 bp, Artificial Sequence
  Oligonucleotide for detection of SNP TSC0016905
tgtattgtagagg

SEQ ID NO: 64066 - DNA, 13 bp, Artificial Sequence
  Oligonucleotide for detection of SNP TSC0016905
cctctacaataca

SEQ ID NO: 64067 - DNA, 13 bp, Artificial Sequence
  Oligonucleotide for detection of SNP TSC0016905
tgtattttagagg

SEQ ID NO: 64068 - DNA, 13 bp, Artificial Sequence
  Oligonucleotide for detection of SNP TSC0016905
cctctaaaataca

SEQ ID NO: 64069 - DNA, 13 bp, Artificial Sequence
  Oligonucleotide for detection of SNP TSC0016905
tgtatcgtagagg

SEQ ID NO: 64070 - DNA, 13 bp, Artificial Sequence
  Oligonucleotide for detection of SNP TSC0016905
cctctacgataca

SEQ ID NO: 64071 - DNA, 13 bp, Artificial Sequence
  Oligonucleotide for detection of SNP TSC0016905
tttttgtggtgta

SEQ ID NO: 64072 - DNA, 13 bp, Artificial Sequence
  Oligonucleotide for detection of SNP TSC0016905
tacaccacaaaaa

SEQ ID NO: 64073 - DNA, 13 bp, Artificial Sequence
  Oligonucleotide for detection of SNP TSC0016905
tttttgaggtgta

SEQ ID NO: 64074 - DNA, 13 bp, Artificial Sequence
  Oligonucleotide for detection of SNP TSC0016905
tacacctcaaaaa

SEQ ID NO: 64075 - DNA, 13 bp, Artificial Sequence
  Oligonucleotide for detection of SNP TSC0016905
tttttgcggtgta

SEQ ID NO: 64076 - DNA, 13 bp, Artificial Sequence
  Oligonucleotide for detection of SNP TSC0016905
tacaccgcaaaaa

SEQ ID NO: 64077 - DNA, 13 bp, Artificial Sequence
  Oligonucleotide for detection of SNP TSC0016907
attttaggaggag

SEQ ID NO: 64078 - DNA, 13 bp, Artificial Sequence
  Oligonucleotide for detection of SNP TSC0016907
ctcctcctaaaat

SEQ ID NO: 64079 - DNA, 13 bp, Artificial Sequence
  Oligonucleotide for detection of SNP TSC0016907
attttaagaggag

SEQ ID NO: 64080 - DNA, 13 bp, Artificial Sequence
  Oligonucleotide for detection of SNP TSC0016907
ctcctcttaaaat

SEQ ID NO: 64081 - DNA, 13 bp, Artificial Sequence
  Oligonucleotide for detection of SNP TSC0016908
tagttagtttttg

SEQ ID NO: 64082 - DNA, 13 bp, Artificial Sequence
  Oligonucleotide for detection of SNP TSC0016908
caaaaactaacta

SEQ ID NO: 64083 - DNA, 13 bp, Artificial Sequence
  Oligonucleotide for detection of SNP TSC0016908
tagttaatttttg

SEQ ID NO: 64084 - DNA, 13 bp, Artificial Sequence
  Oligonucleotide for detection of SNP TSC0016908
caaaaattaacta

SEQ ID NO: 64085 - DNA, 13 bp, Artificial Sequence
  Oligonucleotide for detection of SNP TSC0016910
aattgtaatatag

SEQ ID NO: 64086 - DNA, 13 bp, Artificial Sequence
  Oligonucleotide for detection of SNP TSC0016910
ctatattacaatt

SEQ ID NO: 64087 - DNA, 13 bp, Artificial Sequence
  Oligonucleotide for detection of SNP TSC0016910
aattgtgatatag

SEQ ID NO: 64088 - DNA, 13 bp, Artificial Sequence
  Oligonucleotide for detection of SNP TSC0016910
ctatatcacaatt

SEQ ID NO: 64089 - DNA, 13 bp, Artificial Sequence
  Oligonucleotide for detection of SNP TSC0016912
atgtttaaaattt

SEQ ID NO: 64090 - DNA, 13 bp, Artificial Sequence
  Oligonucleotide for detection of SNP TSC0016912
aaattttaaacat

SEQ ID NO: 64091 - DNA, 13 bp, Artificial Sequence
  Oligonucleotide for detection of SNP TSC0016912
atgttttaaattt

SEQ ID NO: 64092 - DNA, 13 bp, Artificial Sequence
  Oligonucleotide for detection of SNP TSC0016912
aaatttaaaacat

SEQ ID NO: 64093 - DNA, 13 bp, Artificial Sequence
  Oligonucleotide for detection of SNP TSC0016912
aaattttaaatat

SEQ ID NO: 64094 - DNA, 13 bp, Artificial Sequence
  Oligonucleotide for detection of SNP TSC0016912
atatttaaaattt

SEQ ID NO: 64095 - DNA, 13 bp, Artificial Sequence
  Oligonucleotide for detection of SNP TSC0016912
aaatttaaaatat

SEQ ID NO: 64096 - DNA, 13 bp, Artificial Sequence
  Oligonucleotide for detection of SNP TSC0016912
atattttaaattt

SEQ ID NO: 64097 - DNA, 13 bp, Artificial Sequence
  Oligonucleotide for detection of SNP TSC0016913
aaatttattattt

SEQ ID NO: 64098 - DNA, 13 bp, Artificial Sequence
  Oligonucleotide for detection of SNP TSC0016913
aaataataaattt

SEQ ID NO: 64099 - DNA, 13 bp, Artificial Sequence
  Oligonucleotide for detection of SNP TSC0016913
aaatttgttattt

SEQ ID NO: 64100 - DNA, 13 bp, Artificial Sequence
  Oligonucleotide for detection of SNP TSC0016913
aaataacaaattt

SEQ ID NO: 64101 - DNA, 13 bp, Artificial Sequence
  Oligonucleotide for detection of SNP TSC0016915
ataggtatttaty

SEQ ID NO: 64102 - DNA, 13 bp, Artificial Sequence
  Oligonucleotide for detection of SNP TSC0016915
rataaatacctat

SEQ ID NO: 64103 - DNA, 13 bp, Artificial Sequence
  Oligonucleotide for detection of SNP TSC0016915
ataggtgtttaty

SEQ ID NO: 64104 - DNA, 13 bp, Artificial Sequence
  Oligonucleotide for detection of SNP TSC0016915
rataaacacctat

SEQ ID NO: 64105 - DNA, 13 bp, Artificial Sequence
  Oligonucleotide for detection of SNP TSC0016915
ataggcgtttaty

SEQ ID NO: 64106 - DNA, 13 bp, Artificial Sequence
  Oligonucleotide for detection of SNP TSC0016915
rataaacgcctat

SEQ ID NO: 64107 - DNA, 13 bp, Artificial Sequence
  Oligonucleotide for detection of SNP TSC0016918
tttttttttatty

SEQ ID NO: 64108 - DNA, 13 bp, Artificial Sequence
  Oligonucleotide for detection of SNP TSC0016918
raataaaaaaaaa

SEQ ID NO: 64109 - DNA, 13 bp, Artificial Sequence
  Oligonucleotide for detection of SNP TSC0016918
gggtggtaggggg

SEQ ID NO: 64110 - DNA, 13 bp, Artificial Sequence
  Oligonucleotide for detection of SNP TSC0016918
ccccctaccaccc

SEQ ID NO: 64111 - DNA, 13 bp, Artificial Sequence
  Oligonucleotide for detection of SNP TSC0016918
gggtggaaggggg

SEQ ID NO: 64112 - DNA, 13 bp, Artificial Sequence
  Oligonucleotide for detection of SNP TSC0016918
cccccttccaccc

SEQ ID NO: 64113 - DNA, 13 bp, Artificial Sequence
  Oligonucleotide for detection of SNP TSC0016920
atattggtttaaa

SEQ ID NO: 64114 - DNA, 13 bp, Artificial Sequence
  Oligonucleotide for detection of SNP TSC0016920
tttaaaccaatat

SEQ ID NO: 64115 - DNA, 13 bp, Artificial Sequence
  Oligonucleotide for detection of SNP TSC0016920
atattgttttaaa

SEQ ID NO: 64116 - DNA, 13 bp, Artificial Sequence
  Oligonucleotide for detection of SNP TSC0016920
tttaaaacaatat

SEQ ID NO: 64117 - DNA, 13 bp, Artificial Sequence
  Oligonucleotide for detection of SNP TSC0016920
tttagattaatat

SEQ ID NO: 64118 - DNA, 13 bp, Artificial Sequence
  Oligonucleotide for detection of SNP TSC0016920
atattaatctaaa

SEQ ID NO: 64119 - DNA, 13 bp, Artificial Sequence
  Oligonucleotide for detection of SNP TSC0016920
tttagaataatat

SEQ ID NO: 64120 - DNA, 13 bp, Artificial Sequence
  Oligonucleotide for detection of SNP TSC0016920
atattattctaaa

SEQ ID NO: 64121 - DNA, 13 bp, Artificial Sequence
  Oligonucleotide for detection of SNP TSC0016923
gtttatgtttggt

SEQ ID NO: 64122 - DNA, 13 bp, Artificial Sequence
  Oligonucleotide for detection of SNP TSC0016923
accaaacataaac

SEQ ID NO: 64123 - DNA, 13 bp, Artificial Sequence
  Oligonucleotide for detection of SNP TSC0016923
gtttatatttggt

SEQ ID NO: 64124 - DNA, 13 bp, Artificial Sequence
  Oligonucleotide for detection of SNP TSC0016923
accaaatataaac

SEQ ID NO: 64125 - DNA, 13 bp, Artificial Sequence
  Oligonucleotide for detection of SNP TSC0016924
gaagggattaggg

SEQ ID NO: 64126 - DNA, 13 bp, Artificial Sequence
  Oligonucleotide for detection of SNP TSC0016924
ccctaatcccttc

SEQ ID NO: 64127 - DNA, 13 bp, Artificial Sequence
  Oligonucleotide for detection of SNP TSC0016924
gaaggggttaggg

SEQ ID NO: 64128 - DNA, 13 bp, Artificial Sequence
  Oligonucleotide for detection of SNP TSC0016924
ccctaaccccttc

SEQ ID NO: 64129 - DNA, 13 bp, Artificial Sequence
  Oligonucleotide for detection of SNP TSC0016925
tttttatggtgtt

SEQ ID NO: 64130 - DNA, 13 bp, Artificial Sequence
  Oligonucleotide for detection of SNP TSC0016925
aacaccataaaaa

SEQ ID NO: 64131 - DNA, 13 bp, Artificial Sequence
  Oligonucleotide for detection of SNP TSC0016925
tttttacggtgtt

SEQ ID NO: 64132 - DNA, 13 bp, Artificial Sequence
  Oligonucleotide for detection of SNP TSC0016925
aacaccgtaaaaa

SEQ ID NO: 64133 - DNA, 13 bp, Artificial Sequence
  Oligonucleotide for detection of SNP TSC0016925
tttttatggcgtt

SEQ ID NO: 64134 - DNA, 13 bp, Artificial Sequence
  Oligonucleotide for detection of SNP TSC0016925
aacgccataaaaa

SEQ ID NO: 64135 - DNA, 13 bp, Artificial Sequence
  Oligonucleotide for detection of SNP TSC0016925
tttttacggcgtt

SEQ ID NO: 64136 - DNA, 13 bp, Artificial Sequence
  Oligonucleotide for detection of SNP TSC0016925
aacgccgtaaaaa

SEQ ID NO: 64137 - DNA, 13 bp, Artificial Sequence
  Oligonucleotide for detection of SNP TSC0016925
aatgttgtgagga

SEQ ID NO: 64138 - DNA, 13 bp, Artificial Sequence
  Oligonucleotide for detection of SNP TSC0016925
tcctcacaacatt

SEQ ID NO: 64139 - DNA, 13 bp, Artificial Sequence
  Oligonucleotide for detection of SNP TSC0016925
aatgttatgagga

SEQ ID NO: 64140 - DNA, 13 bp, Artificial Sequence
  Oligonucleotide for detection of SNP TSC0016925
tcctcataacatt

SEQ ID NO: 64141 - DNA, 13 bp, Artificial Sequence
  Oligonucleotide for detection of SNP TSC0016925
aacgttgtgagga

SEQ ID NO: 64142 - DNA, 13 bp, Artificial Sequence
  Oligonucleotide for detection of SNP TSC0016925
tcctcacaacgtt

SEQ ID NO: 64143 - DNA, 13 bp, Artificial Sequence
  Oligonucleotide for detection of SNP TSC0016925
aacgttatgagga

SEQ ID NO: 64144 - DNA, 13 bp, Artificial Sequence
  Oligonucleotide for detection of SNP TSC0016925
tcctcataacgtt

SEQ ID NO: 64145 - DNA, 13 bp, Artificial Sequence
  Oligonucleotide for detection of SNP TSC0016925
aatgtcgtgagga

SEQ ID NO: 64146 - DNA, 13 bp, Artificial Sequence
  Oligonucleotide for detection of SNP TSC0016925
tcctcacgacatt

SEQ ID NO: 64147 - DNA, 13 bp, Artificial Sequence
  Oligonucleotide for detection of SNP TSC0016925
aacgtcgtgagga

SEQ ID NO: 64148 - DNA, 13 bp, Artificial Sequence
  Oligonucleotide for detection of SNP TSC0016925
tcctcacgacgtt

SEQ ID NO: 64149 - DNA, 13 bp, Artificial Sequence
  Oligonucleotide for detection of SNP TSC0016927
attaaaatattgt

SEQ ID NO: 64150 - DNA, 13 bp, Artificial Sequence
  Oligonucleotide for detection of SNP TSC0016927
acaatattttaat

SEQ ID NO: 64151 - DNA, 13 bp, Artificial Sequence
  Oligonucleotide for detection of SNP TSC0016927
attaaagtattgt

SEQ ID NO: 64152 - DNA, 13 bp, Artificial Sequence
  Oligonucleotide for detection of SNP TSC0016927
acaatactttaat

SEQ ID NO: 64153 - DNA, 13 bp, Artificial Sequence
  Oligonucleotide for detection of SNP TSC0016928
atattatggttat

SEQ ID NO: 64154 - DNA, 13 bp, Artificial Sequence
  Oligonucleotide for detection of SNP TSC0016928
ataaccataatat

SEQ ID NO: 64155 - DNA, 13 bp, Artificial Sequence
  Oligonucleotide for detection of SNP TSC0016928
atattacggttat

SEQ ID NO: 64156 - DNA, 13 bp, Artificial Sequence
  Oligonucleotide for detection of SNP TSC0016928
ataaccgtaatat

SEQ ID NO: 64157 - DNA, 13 bp, Artificial Sequence
  Oligonucleotide for detection of SNP TSC0016928
ataattgtaatat

SEQ ID NO: 64158 - DNA, 13 bp, Artificial Sequence
  Oligonucleotide for detection of SNP TSC0016928
atattacaattat

SEQ ID NO: 64159 - DNA, 13 bp, Artificial Sequence
  Oligonucleotide for detection of SNP TSC0016928
ataattataatat

SEQ ID NO: 64160 - DNA, 13 bp, Artificial Sequence
  Oligonucleotide for detection of SNP TSC0016928
atattataattat

SEQ ID NO: 64161 - DNA, 13 bp, Artificial Sequence
  Oligonucleotide for detection of SNP TSC0016928
ataatcgtaatat

SEQ ID NO: 64162 - DNA, 13 bp, Artificial Sequence
  Oligonucleotide for detection of SNP TSC0016928
atattacgattat

SEQ ID NO: 64163 - DNA, 13 bp, Artificial Sequence
  Oligonucleotide for detection of SNP TSC0016929
atatgaagaattg

SEQ ID NO: 64164 - DNA, 13 bp, Artificial Sequence
  Oligonucleotide for detection of SNP TSC0016929
caattcttcatat

SEQ ID NO: 64165 - DNA, 13 bp, Artificial Sequence
  Oligonucleotide for detection of SNP TSC0016929
atatgatgaattg

SEQ ID NO: 64166 - DNA, 13 bp, Artificial Sequence
  Oligonucleotide for detection of SNP TSC0016929
caattcatcatat

SEQ ID NO: 64167 - DNA, 13 bp, Artificial Sequence
  Oligonucleotide for detection of SNP TSC0016929
taattttttatgt

SEQ ID NO: 64168 - DNA, 13 bp, Artificial Sequence
  Oligonucleotide for detection of SNP TSC0016929
acataaaaaatta

SEQ ID NO: 64169 - DNA, 13 bp, Artificial Sequence
  Oligonucleotide for detection of SNP TSC0016929
taatttattatgt

SEQ ID NO: 64170 - DNA, 13 bp, Artificial Sequence
  Oligonucleotide for detection of SNP TSC0016929
acataataaatta

SEQ ID NO: 64171 - DNA, 13 bp, Artificial Sequence
  Oligonucleotide for detection of SNP TSC0016930
ttgaatatatgag

SEQ ID NO: 64172 - DNA, 13 bp, Artificial Sequence
  Oligonucleotide for detection of SNP TSC0016930
ctcatatattcaa

SEQ ID NO: 64173 - DNA, 13 bp, Artificial Sequence
  Oligonucleotide for detection of SNP TSC0016930
ttgaatttatgag

SEQ ID NO: 64174 - DNA, 13 bp, Artificial Sequence
  Oligonucleotide for detection of SNP TSC0016930
ctcataaattcaa

SEQ ID NO: 64175 - DNA, 13 bp, Artificial Sequence
  Oligonucleotide for detection of SNP TSC0016930
tttataagtttaa

SEQ ID NO: 64176 - DNA, 13 bp, Artificial Sequence
  Oligonucleotide for detection of SNP TSC0016930
ttaaacttataaa

SEQ ID NO: 64177 - DNA, 13 bp, Artificial Sequence
  Oligonucleotide for detection of SNP TSC0016932
aattagtgaaata

SEQ ID NO: 64178 - DNA, 13 bp, Artificial Sequence
  Oligonucleotide for detection of SNP TSC0016932
tatttcactaatt

SEQ ID NO: 64179 - DNA, 13 bp, Artificial Sequence
  Oligonucleotide for detection of SNP TSC0016932
aattagcgaaata

SEQ ID NO: 64180 - DNA, 13 bp, Artificial Sequence
  Oligonucleotide for detection of SNP TSC0016932
tatttcgctaatt

SEQ ID NO: 64181 - DNA, 13 bp, Artificial Sequence
  Oligonucleotide for detection of SNP TSC0016932
tattttgttgatt

SEQ ID NO: 64182 - DNA, 13 bp, Artificial Sequence
  Oligonucleotide for detection of SNP TSC0016932
aatcaacaaaata

SEQ ID NO: 64183 - DNA, 13 bp, Artificial Sequence
  Oligonucleotide for detection of SNP TSC0016932
tattttattgatt

SEQ ID NO: 64184 - DNA, 13 bp, Artificial Sequence
  Oligonucleotide for detection of SNP TSC0016932
aatcaataaaata

SEQ ID NO: 64185 - DNA, 13 bp, Artificial Sequence
  Oligonucleotide for detection of SNP TSC0016932
tatttcgttgatt

SEQ ID NO: 64186 - DNA, 13 bp, Artificial Sequence
  Oligonucleotide for detection of SNP TSC0016932
aatcaacgaaata

SEQ ID NO: 64187 - DNA, 13 bp, Artificial Sequence
  Oligonucleotide for detection of SNP TSC0016935
gttttagtaatay

SEQ ID NO: 64188 - DNA, 13 bp, Artificial Sequence
  Oligonucleotide for detection of SNP TSC0016935
rtattactaaaac

SEQ ID NO: 64189 - DNA, 13 bp, Artificial Sequence
  Oligonucleotide for detection of SNP TSC0016935
gttttaataatay

SEQ ID NO: 64190 - DNA, 13 bp, Artificial Sequence
  Oligonucleotide for detection of SNP TSC0016935
rtattattaaaac

SEQ ID NO: 64191 - DNA, 13 bp, Artificial Sequence
  Oligonucleotide for detection of SNP TSC0016938
ggaaatataatgg

SEQ ID NO: 64192 - DNA, 13 bp, Artificial Sequence
  Oligonucleotide for detection of SNP TSC0016938
ccattatatttcc

SEQ ID NO: 64193 - DNA, 13 bp, Artificial Sequence
  Oligonucleotide for detection of SNP TSC0016938
ggaaatttaatgg

SEQ ID NO: 64194 - DNA, 13 bp, Artificial Sequence
  Oligonucleotide for detection of SNP TSC0016938
ccattaaatttcc

SEQ ID NO: 64195 - DNA, 13 bp, Artificial Sequence
  Oligonucleotide for detection of SNP TSC0016938
ttattatatttty

SEQ ID NO: 64196 - DNA, 13 bp, Artificial Sequence
  Oligonucleotide for detection of SNP TSC0016938
raaaatataataa

SEQ ID NO: 64197 - DNA, 13 bp, Artificial Sequence
  Oligonucleotide for detection of SNP TSC0016938
ttattagatttty

SEQ ID NO: 64198 - DNA, 13 bp, Artificial Sequence
  Oligonucleotide for detection of SNP TSC0016938
raaaatctaataa

SEQ ID NO: 64199 - DNA, 13 bp, Artificial Sequence
  Oligonucleotide for detection of SNP TSC0016942
ggttttttttttg

SEQ ID NO: 64200 - DNA, 13 bp, Artificial Sequence
  Oligonucleotide for detection of SNP TSC0016942
caaaaaaaaaacc

SEQ ID NO: 64201 - DNA, 13 bp, Artificial Sequence
  Oligonucleotide for detection of SNP TSC0016942
ggttttgtttttg

SEQ ID NO: 64202 - DNA, 13 bp, Artificial Sequence
  Oligonucleotide for detection of SNP TSC0016942
caaaaacaaaacc

SEQ ID NO: 64203 - DNA, 13 bp, Artificial Sequence
  Oligonucleotide for detection of SNP TSC0016942
ggtttcgtttttg

SEQ ID NO: 64204 - DNA, 13 bp, Artificial Sequence
  Oligonucleotide for detection of SNP TSC0016942
caaaaacgaaacc

SEQ ID NO: 64205 - DNA, 13 bp, Artificial Sequence
  Oligonucleotide for detection of SNP TSC0016942
taagaagggaaty

SEQ ID NO: 64206 - DNA, 13 bp, Artificial Sequence
  Oligonucleotide for detection of SNP TSC0016942
rattcccttctta

SEQ ID NO: 64207 - DNA, 13 bp, Artificial Sequence
  Oligonucleotide for detection of SNP TSC0016942
taagaatggaaty

SEQ ID NO: 64208 - DNA, 13 bp, Artificial Sequence
  Oligonucleotide for detection of SNP TSC0016942
rattccattctta

SEQ ID NO: 64209 - DNA, 13 bp, Artificial Sequence
  Oligonucleotide for detection of SNP TSC0016942
taagaacggaaty

SEQ ID NO: 64210 - DNA, 13 bp, Artificial Sequence
  Oligonucleotide for detection of SNP TSC0016942
rattccgttctta

SEQ ID NO: 64211 - DNA, 13 bp, Artificial Sequence
  Oligonucleotide for detection of SNP TSC0016943
tttatttttttty

SEQ ID NO: 64212 - DNA, 13 bp, Artificial Sequence
  Oligonucleotide for detection of SNP TSC0016943
raaaaaaaataaa

SEQ ID NO: 64213 - DNA, 13 bp, Artificial Sequence
  Oligonucleotide for detection of SNP TSC0016943
gggagggaatgga

SEQ ID NO: 64214 - DNA, 13 bp, Artificial Sequence
  Oligonucleotide for detection of SNP TSC0016943
tccattccctccc

SEQ ID NO: 64215 - DNA, 13 bp, Artificial Sequence
  Oligonucleotide for detection of SNP TSC0016943
gggaggtaatgga

SEQ ID NO: 64216 - DNA, 13 bp, Artificial Sequence
  Oligonucleotide for detection of SNP TSC0016943
tccattacctccc

SEQ ID NO: 64217 - DNA, 13 bp, Artificial Sequence
  Oligonucleotide for detection of SNP TSC0016944
attgttggtttty

SEQ ID NO: 64218 - DNA, 13 bp, Artificial Sequence
  Oligonucleotide for detection of SNP TSC0016944
raaaaccaacaat

SEQ ID NO: 64219 - DNA, 13 bp, Artificial Sequence
  Oligonucleotide for detection of SNP TSC0016944
attgtttgtttty

SEQ ID NO: 64220 - DNA, 13 bp, Artificial Sequence
  Oligonucleotide for detection of SNP TSC0016944
raaaacaaacaat

SEQ ID NO: 64221 - DNA, 13 bp, Artificial Sequence
  Oligonucleotide for detection of SNP TSC0016944
atcgttggtttty

SEQ ID NO: 64222 - DNA, 13 bp, Artificial Sequence
  Oligonucleotide for detection of SNP TSC0016944
raaaaccaacgat

SEQ ID NO: 64223 - DNA, 13 bp, Artificial Sequence
  Oligonucleotide for detection of SNP TSC0016944
atcgtttgtttty

SEQ ID NO: 64224 - DNA, 13 bp, Artificial Sequence
  Oligonucleotide for detection of SNP TSC0016944
raaaacaaacgat

SEQ ID NO: 64225 - DNA, 13 bp, Artificial Sequence
  Oligonucleotide for detection of SNP TSC0016944
gaaaattaatgat

SEQ ID NO: 64226 - DNA, 13 bp, Artificial Sequence
  Oligonucleotide for detection of SNP TSC0016944
atcattaattttc

SEQ ID NO: 64227 - DNA, 13 bp, Artificial Sequence
  Oligonucleotide for detection of SNP TSC0016944
gaaaataaatgat

SEQ ID NO: 64228 - DNA, 13 bp, Artificial Sequence
  Oligonucleotide for detection of SNP TSC0016944
atcatttattttc

SEQ ID NO: 64229 - DNA, 13 bp, Artificial Sequence
  Oligonucleotide for detection of SNP TSC0016944
gaaaattaacgat

SEQ ID NO: 64230 - DNA, 13 bp, Artificial Sequence
  Oligonucleotide for detection of SNP TSC0016944
atcgttaattttc

SEQ ID NO: 64231 - DNA, 13 bp, Artificial Sequence
  Oligonucleotide for detection of SNP TSC0016944
gaaaataaacgat

SEQ ID NO: 64232 - DNA, 13 bp, Artificial Sequence
  Oligonucleotide for detection of SNP TSC0016944
atcgtttattttc

SEQ ID NO: 64233 - DNA, 13 bp, Artificial Sequence
  Oligonucleotide for detection of SNP TSC0016945
tggataaagttgy

SEQ ID NO: 64234 - DNA, 13 bp, Artificial Sequence
  Oligonucleotide for detection of SNP TSC0016945
rcaactttatcca

SEQ ID NO: 64235 - DNA, 13 bp, Artificial Sequence
  Oligonucleotide for detection of SNP TSC0016945
tggatatagttgy

SEQ ID NO: 64236 - DNA, 13 bp, Artificial Sequence
  Oligonucleotide for detection of SNP TSC0016945
rcaactatatcca

SEQ ID NO: 64237 - DNA, 13 bp, Artificial Sequence
  Oligonucleotide for detection of SNP TSC0016945
cggataaagttgy

SEQ ID NO: 64238 - DNA, 13 bp, Artificial Sequence
  Oligonucleotide for detection of SNP TSC0016945
rcaactttatccg

SEQ ID NO: 64239 - DNA, 13 bp, Artificial Sequence
  Oligonucleotide for detection of SNP TSC0016945
cggatatagttgy

SEQ ID NO: 64240 - DNA, 13 bp, Artificial Sequence
  Oligonucleotide for detection of SNP TSC0016945
rcaactatatccg

SEQ ID NO: 64241 - DNA, 13 bp, Artificial Sequence
  Oligonucleotide for detection of SNP TSC0016945
gtagttttatttg

SEQ ID NO: 64242 - DNA, 13 bp, Artificial Sequence
  Oligonucleotide for detection of SNP TSC0016945
caaataaaactac

SEQ ID NO: 64243 - DNA, 13 bp, Artificial Sequence
  Oligonucleotide for detection of SNP TSC0016945
gtagttatatttg

SEQ ID NO: 64244 - DNA, 13 bp, Artificial Sequence
  Oligonucleotide for detection of SNP TSC0016945
caaatataactac

SEQ ID NO: 64245 - DNA, 13 bp, Artificial Sequence
  Oligonucleotide for detection of SNP TSC0016945
gtagttttattcg

SEQ ID NO: 64246 - DNA, 13 bp, Artificial Sequence
  Oligonucleotide for detection of SNP TSC0016945
cgaataaaactac

SEQ ID NO: 64247 - DNA, 13 bp, Artificial Sequence
  Oligonucleotide for detection of SNP TSC0016945
gtagttatattcg

SEQ ID NO: 64248 - DNA, 13 bp, Artificial Sequence
  Oligonucleotide for detection of SNP TSC0016945
cgaatataactac

SEQ ID NO: 64249 - DNA, 13 bp, Artificial Sequence
  Oligonucleotide for detection of SNP TSC0016946
ggataaagttgty

SEQ ID NO: 64250 - DNA, 13 bp, Artificial Sequence
  Oligonucleotide for detection of SNP TSC0016946
racaactttatcc

SEQ ID NO: 64251 - DNA, 13 bp, Artificial Sequence
  Oligonucleotide for detection of SNP TSC0016946
ggataaggttgty

SEQ ID NO: 64252 - DNA, 13 bp, Artificial Sequence
  Oligonucleotide for detection of SNP TSC0016946
racaaccttatcc

SEQ ID NO: 64253 - DNA, 13 bp, Artificial Sequence
  Oligonucleotide for detection of SNP TSC0016952
gaattgtttttat

SEQ ID NO: 64254 - DNA, 13 bp, Artificial Sequence
  Oligonucleotide for detection of SNP TSC0016952
ataaaaacaattc

SEQ ID NO: 64255 - DNA, 13 bp, Artificial Sequence
  Oligonucleotide for detection of SNP TSC0016952
gaattggttttat

SEQ ID NO: 64256 - DNA, 13 bp, Artificial Sequence
  Oligonucleotide for detection of SNP TSC0016952
ataaaaccaattc

SEQ ID NO: 64257 - DNA, 13 bp, Artificial Sequence
  Oligonucleotide for detection of SNP TSC0016952
atgaaggtaatty

SEQ ID NO: 64258 - DNA, 13 bp, Artificial Sequence
  Oligonucleotide for detection of SNP TSC0016952
raattaccttcat

SEQ ID NO: 64259 - DNA, 13 bp, Artificial Sequence
  Oligonucleotide for detection of SNP TSC0016952
atgaagttaatty

SEQ ID NO: 64260 - DNA, 13 bp, Artificial Sequence
  Oligonucleotide for detection of SNP TSC0016952
raattaacttcat

SEQ ID NO: 64261 - DNA, 13 bp, Artificial Sequence
  Oligonucleotide for detection of SNP TSC0016953
gttatttttttta

SEQ ID NO: 64262 - DNA, 13 bp, Artificial Sequence
  Oligonucleotide for detection of SNP TSC0016953
taaaaaaaataac

SEQ ID NO: 64263 - DNA, 13 bp, Artificial Sequence
  Oligonucleotide for detection of SNP TSC0016953
tgaagatagtgay

SEQ ID NO: 64264 - DNA, 13 bp, Artificial Sequence
  Oligonucleotide for detection of SNP TSC0016953
rtcactatcttca

SEQ ID NO: 64265 - DNA, 13 bp, Artificial Sequence
  Oligonucleotide for detection of SNP TSC0016953
tgaagaaagtgay

SEQ ID NO: 64266 - DNA, 13 bp, Artificial Sequence
  Oligonucleotide for detection of SNP TSC0016953
rtcactttcttca

SEQ ID NO: 64267 - DNA, 13 bp, Artificial Sequence
  Oligonucleotide for detection of SNP TSC0016954
attgggaagatat

SEQ ID NO: 64268 - DNA, 13 bp, Artificial Sequence
  Oligonucleotide for detection of SNP TSC0016954
atatcttcccaat

SEQ ID NO: 64269 - DNA, 13 bp, Artificial Sequence
  Oligonucleotide for detection of SNP TSC0016954
attggggagatat

SEQ ID NO: 64270 - DNA, 13 bp, Artificial Sequence
  Oligonucleotide for detection of SNP TSC0016954
atatctccccaat

SEQ ID NO: 64271 - DNA, 13 bp, Artificial Sequence
  Oligonucleotide for detection of SNP TSC0016955
agataggggttgg

SEQ ID NO: 64272 - DNA, 13 bp, Artificial Sequence
  Oligonucleotide for detection of SNP TSC0016955
ccaacccctatct

SEQ ID NO: 64273 - DNA, 13 bp, Artificial Sequence
  Oligonucleotide for detection of SNP TSC0016955
agatagtggttgg

SEQ ID NO: 64274 - DNA, 13 bp, Artificial Sequence
  Oligonucleotide for detection of SNP TSC0016955
ccaaccactatct

SEQ ID NO: 64275 - DNA, 13 bp, Artificial Sequence
  Oligonucleotide for detection of SNP TSC0016955
ttagtttttgttt

SEQ ID NO: 64276 - DNA, 13 bp, Artificial Sequence
  Oligonucleotide for detection of SNP TSC0016955
aaacaaaaactaa

SEQ ID NO: 64277 - DNA, 13 bp, Artificial Sequence
  Oligonucleotide for detection of SNP TSC0016955
ttagttattgttt

SEQ ID NO: 64278 - DNA, 13 bp, Artificial Sequence
  Oligonucleotide for detection of SNP TSC0016955
aaacaataactaa

SEQ ID NO: 64279 - DNA, 13 bp, Artificial Sequence
  Oligonucleotide for detection of SNP TSC0016957
tgttagggattat

SEQ ID NO: 64280 - DNA, 13 bp, Artificial Sequence
  Oligonucleotide for detection of SNP TSC0016957
ataatccctaaca

SEQ ID NO: 64281 - DNA, 13 bp, Artificial Sequence
  Oligonucleotide for detection of SNP TSC0016957
tgttagtgattat

SEQ ID NO: 64282 - DNA, 13 bp, Artificial Sequence
  Oligonucleotide for detection of SNP TSC0016957
ataatcactaaca

SEQ ID NO: 64283 - DNA, 13 bp, Artificial Sequence
  Oligonucleotide for detection of SNP TSC0016957
atagtttttggta

SEQ ID NO: 64284 - DNA, 13 bp, Artificial Sequence
  Oligonucleotide for detection of SNP TSC0016957
taccaaaaactat

SEQ ID NO: 64285 - DNA, 13 bp, Artificial Sequence
  Oligonucleotide for detection of SNP TSC0016957
atagttattggta

SEQ ID NO: 64286 - DNA, 13 bp, Artificial Sequence
  Oligonucleotide for detection of SNP TSC0016957
taccaataactat

SEQ ID NO: 64287 - DNA, 13 bp, Artificial Sequence
  Oligonucleotide for detection of SNP TSC0016960
ttgtttattggaa

SEQ ID NO: 64288 - DNA, 13 bp, Artificial Sequence
  Oligonucleotide for detection of SNP TSC0016960
ttccaataaacaa

SEQ ID NO: 64289 - DNA, 13 bp, Artificial Sequence
  Oligonucleotide for detection of SNP TSC0016960
ttgtttgttggaa

SEQ ID NO: 64290 - DNA, 13 bp, Artificial Sequence
  Oligonucleotide for detection of SNP TSC0016960
ttccaacaaacaa

SEQ ID NO: 64291 - DNA, 13 bp, Artificial Sequence
  Oligonucleotide for detection of SNP TSC0016960
ttgttcgttggaa

SEQ ID NO: 64292 - DNA, 13 bp, Artificial Sequence
  Oligonucleotide for detection of SNP TSC0016960
ttccaacgaacaa

SEQ ID NO: 64293 - DNA, 13 bp, Artificial Sequence
  Oligonucleotide for detection of SNP TSC0016960
ttttagtgggtag

SEQ ID NO: 64294 - DNA, 13 bp, Artificial Sequence
  Oligonucleotide for detection of SNP TSC0016960
ctacccactaaaa

SEQ ID NO: 64295 - DNA, 13 bp, Artificial Sequence
  Oligonucleotide for detection of SNP TSC0016960
ttttagcgggtag

SEQ ID NO: 64296 - DNA, 13 bp, Artificial Sequence
  Oligonucleotide for detection of SNP TSC0016960
ctacccgctaaaa

SEQ ID NO: 64297 - DNA, 13 bp, Artificial Sequence
  Oligonucleotide for detection of SNP TSC0016961
tggagtatggggg

SEQ ID NO: 64298 - DNA, 13 bp, Artificial Sequence
  Oligonucleotide for detection of SNP TSC0016961
cccccatactcca

SEQ ID NO: 64299 - DNA, 13 bp, Artificial Sequence
  Oligonucleotide for detection of SNP TSC0016961
tggagtgtggggg

SEQ ID NO: 64300 - DNA, 13 bp, Artificial Sequence
  Oligonucleotide for detection of SNP TSC0016961
cccccacactcca

SEQ ID NO: 64301 - DNA, 13 bp, Artificial Sequence
  Oligonucleotide for detection of SNP TSC0016961
tggagcgtggggg

SEQ ID NO: 64302 - DNA, 13 bp, Artificial Sequence
  Oligonucleotide for detection of SNP TSC0016961
cccccacgctcca

SEQ ID NO: 64303 - DNA, 13 bp, Artificial Sequence
  Oligonucleotide for detection of SNP TSC0016962
gttgaatgagtaa

SEQ ID NO: 64304 - DNA, 13 bp, Artificial Sequence
  Oligonucleotide for detection of SNP TSC0016962
ttactcattcaac

SEQ ID NO: 64305 - DNA, 13 bp, Artificial Sequence
  Oligonucleotide for detection of SNP TSC0016962
gttgaacgagtaa

SEQ ID NO: 64306 - DNA, 13 bp, Artificial Sequence
  Oligonucleotide for detection of SNP TSC0016962
ttactcgttcaac

SEQ ID NO: 64307 - DNA, 13 bp, Artificial Sequence
  Oligonucleotide for detection of SNP TSC0016963
agttgtaaaatgg

SEQ ID NO: 64308 - DNA, 13 bp, Artificial Sequence
  Oligonucleotide for detection of SNP TSC0016963
ccattttacaact

SEQ ID NO: 64309 - DNA, 13 bp, Artificial Sequence
  Oligonucleotide for detection of SNP TSC0016963
agttgttaaatgg

SEQ ID NO: 64310 - DNA, 13 bp, Artificial Sequence
  Oligonucleotide for detection of SNP TSC0016963
ccatttaacaact

SEQ ID NO: 64311 - DNA, 13 bp, Artificial Sequence
  Oligonucleotide for detection of SNP TSC0016963
ttattttatagtt

SEQ ID NO: 64312 - DNA, 13 bp, Artificial Sequence
  Oligonucleotide for detection of SNP TSC0016963
aactataaaataa

SEQ ID NO: 64313 - DNA, 13 bp, Artificial Sequence
  Oligonucleotide for detection of SNP TSC0016963
ttatttaatagtt

SEQ ID NO: 64314 - DNA, 13 bp, Artificial Sequence
  Oligonucleotide for detection of SNP TSC0016963
aactattaaataa

SEQ ID NO: 64315 - DNA, 13 bp, Artificial Sequence
  Oligonucleotide for detection of SNP TSC0016972
tagaaaaatattt

SEQ ID NO: 64316 - DNA, 13 bp, Artificial Sequence
  Oligonucleotide for detection of SNP TSC0016972
aaatatttttcta

SEQ ID NO: 64317 - DNA, 13 bp, Artificial Sequence
  Oligonucleotide for detection of SNP TSC0016972
tagaaagatattt

SEQ ID NO: 64318 - DNA, 13 bp, Artificial Sequence
  Oligonucleotide for detection of SNP TSC0016972
aaatatctttcta

SEQ ID NO: 64319 - DNA, 13 bp, Artificial Sequence
  Oligonucleotide for detection of SNP TSC0016973
tgtttgttagtty

SEQ ID NO: 64320 - DNA, 13 bp, Artificial Sequence
  Oligonucleotide for detection of SNP TSC0016973
raactaacaaaca

SEQ ID NO: 64321 - DNA, 13 bp, Artificial Sequence
  Oligonucleotide for detection of SNP TSC0016973
tgtttggtagtty

SEQ ID NO: 64322 - DNA, 13 bp, Artificial Sequence
  Oligonucleotide for detection of SNP TSC0016973
raactaccaaaca

SEQ ID NO: 64323 - DNA, 13 bp, Artificial Sequence
  Oligonucleotide for detection of SNP TSC0016973
ggattagtaggta

SEQ ID NO: 64324 - DNA, 13 bp, Artificial Sequence
  Oligonucleotide for detection of SNP TSC0016973
tacctactaatcc

SEQ ID NO: 64325 - DNA, 13 bp, Artificial Sequence
  Oligonucleotide for detection of SNP TSC0016973
ggattattaggta

SEQ ID NO: 64326 - DNA, 13 bp, Artificial Sequence
  Oligonucleotide for detection of SNP TSC0016973
tacctaataatcc

SEQ ID NO: 64327 - DNA, 13 bp, Artificial Sequence
  Oligonucleotide for detection of SNP TSC0016974
agtgtgggatttt

SEQ ID NO: 64328 - DNA, 13 bp, Artificial Sequence
  Oligonucleotide for detection of SNP TSC0016974
aaaatcccacact

SEQ ID NO: 64329 - DNA, 13 bp, Artificial Sequence
  Oligonucleotide for detection of SNP TSC0016974
agtgtgagatttt

SEQ ID NO: 64330 - DNA, 13 bp, Artificial Sequence
  Oligonucleotide for detection of SNP TSC0016974
aaaatctcacact

SEQ ID NO: 64331 - DNA, 13 bp, Artificial Sequence
  Oligonucleotide for detection of SNP TSC0016975
gttttaatttgty

SEQ ID NO: 64332 - DNA, 13 bp, Artificial Sequence
  Oligonucleotide for detection of SNP TSC0016975
racaaattaaaac

SEQ ID NO: 64333 - DNA, 13 bp, Artificial Sequence
  Oligonucleotide for detection of SNP TSC0016975
gttttagtttgty

SEQ ID NO: 64334 - DNA, 13 bp, Artificial Sequence
  Oligonucleotide for detection of SNP TSC0016975
racaaactaaaac

SEQ ID NO: 64335 - DNA, 13 bp, Artificial Sequence
  Oligonucleotide for detection of SNP TSC0016975
gttttaattcgty

SEQ ID NO: 64336 - DNA, 13 bp, Artificial Sequence
  Oligonucleotide for detection of SNP TSC0016975
racgaattaaaac

SEQ ID NO: 64337 - DNA, 13 bp, Artificial Sequence
  Oligonucleotide for detection of SNP TSC0016975
gttttagttcgty

SEQ ID NO: 64338 - DNA, 13 bp, Artificial Sequence
  Oligonucleotide for detection of SNP TSC0016975
racgaactaaaac

SEQ ID NO: 64339 - DNA, 13 bp, Artificial Sequence
  Oligonucleotide for detection of SNP TSC0016976
atgtagttttgag

SEQ ID NO: 64340 - DNA, 13 bp, Artificial Sequence
  Oligonucleotide for detection of SNP TSC0016976
ctcaaaactacat

SEQ ID NO: 64341 - DNA, 13 bp, Artificial Sequence
  Oligonucleotide for detection of SNP TSC0016976
atgtaggtttgag

SEQ ID NO: 64342 - DNA, 13 bp, Artificial Sequence
  Oligonucleotide for detection of SNP TSC0016976
ctcaaacctacat

SEQ ID NO: 64343 - DNA, 13 bp, Artificial Sequence
  Oligonucleotide for detection of SNP TSC0016976
acgtagttttgag

SEQ ID NO: 64344 - DNA, 13 bp, Artificial Sequence
  Oligonucleotide for detection of SNP TSC0016976
ctcaaaactacgt

SEQ ID NO: 64345 - DNA, 13 bp, Artificial Sequence
  Oligonucleotide for detection of SNP TSC0016976
acgtaggtttgag

SEQ ID NO: 64346 - DNA, 13 bp, Artificial Sequence
  Oligonucleotide for detection of SNP TSC0016976
ctcaaacctacgt

SEQ ID NO: 64347 - DNA, 13 bp, Artificial Sequence
  Oligonucleotide for detection of SNP TSC0016976
tttaaggttgtgt

SEQ ID NO: 64348 - DNA, 13 bp, Artificial Sequence
  Oligonucleotide for detection of SNP TSC0016976
acacaaccttaaa

SEQ ID NO: 64349 - DNA, 13 bp, Artificial Sequence
  Oligonucleotide for detection of SNP TSC0016976
tttaagtttgtgt

SEQ ID NO: 64350 - DNA, 13 bp, Artificial Sequence
  Oligonucleotide for detection of SNP TSC0016976
acacaaacttaaa

SEQ ID NO: 64351 - DNA, 13 bp, Artificial Sequence
  Oligonucleotide for detection of SNP TSC0016976
tttaaggttgcgt

SEQ ID NO: 64352 - DNA, 13 bp, Artificial Sequence
  Oligonucleotide for detection of SNP TSC0016976
acgcaaccttaaa

SEQ ID NO: 64353 - DNA, 13 bp, Artificial Sequence
  Oligonucleotide for detection of SNP TSC0016976
tttaagtttgcgt

SEQ ID NO: 64354 - DNA, 13 bp, Artificial Sequence
  Oligonucleotide for detection of SNP TSC0016976
acgcaaacttaaa

SEQ ID NO: 64355 - DNA, 13 bp, Artificial Sequence
  Oligonucleotide for detection of SNP TSC0016977
ttataggggtgga

SEQ ID NO: 64356 - DNA, 13 bp, Artificial Sequence
  Oligonucleotide for detection of SNP TSC0016977
tccacccctataa

SEQ ID NO: 64357 - DNA, 13 bp, Artificial Sequence
  Oligonucleotide for detection of SNP TSC0016977
ttatagaggtgga

SEQ ID NO: 64358 - DNA, 13 bp, Artificial Sequence
  Oligonucleotide for detection of SNP TSC0016977
tccacctctataa

SEQ ID NO: 64359 - DNA, 13 bp, Artificial Sequence
  Oligonucleotide for detection of SNP TSC0016978
aaggttgttttag

SEQ ID NO: 64360 - DNA, 13 bp, Artificial Sequence
  Oligonucleotide for detection of SNP TSC0016978
ctaaaacaacctt

SEQ ID NO: 64361 - DNA, 13 bp, Artificial Sequence
  Oligonucleotide for detection of SNP TSC0016978
aaggttattttag

SEQ ID NO: 64362 - DNA, 13 bp, Artificial Sequence
  Oligonucleotide for detection of SNP TSC0016978
ctaaaataacctt

SEQ ID NO: 64363 - DNA, 13 bp, Artificial Sequence
  Oligonucleotide for detection of SNP TSC0016979
tttagagagtaty

SEQ ID NO: 64364 - DNA, 13 bp, Artificial Sequence
  Oligonucleotide for detection of SNP TSC0016979
ratactctctaaa

SEQ ID NO: 64365 - DNA, 13 bp, Artificial Sequence
  Oligonucleotide for detection of SNP TSC0016979
tttagaaagtaty

SEQ ID NO: 64366 - DNA, 13 bp, Artificial Sequence
  Oligonucleotide for detection of SNP TSC0016979
ratactttctaaa

SEQ ID NO: 64367 - DNA, 13 bp, Artificial Sequence
  Oligonucleotide for detection of SNP TSC0016980
aggtggattttga

SEQ ID NO: 64368 - DNA, 13 bp, Artificial Sequence
  Oligonucleotide for detection of SNP TSC0016980
tcaaaatccacct

SEQ ID NO: 64369 - DNA, 13 bp, Artificial Sequence
  Oligonucleotide for detection of SNP TSC0016980
aggtggtttttga

SEQ ID NO: 64370 - DNA, 13 bp, Artificial Sequence
  Oligonucleotide for detection of SNP TSC0016980
tcaaaaaccacct

SEQ ID NO: 64371 - DNA, 13 bp, Artificial Sequence
  Oligonucleotide for detection of SNP TSC0016980
ttaaaatttattt

SEQ ID NO: 64372 - DNA, 13 bp, Artificial Sequence
  Oligonucleotide for detection of SNP TSC0016980
aaataaattttaa

SEQ ID NO: 64373 - DNA, 13 bp, Artificial Sequence
  Oligonucleotide for detection of SNP TSC0016981
gttttagtgagga

SEQ ID NO: 64374 - DNA, 13 bp, Artificial Sequence
  Oligonucleotide for detection of SNP TSC0016981
tcctcactaaaac

SEQ ID NO: 64375 - DNA, 13 bp, Artificial Sequence
  Oligonucleotide for detection of SNP TSC0016981
gttttaatgagga

SEQ ID NO: 64376 - DNA, 13 bp, Artificial Sequence
  Oligonucleotide for detection of SNP TSC0016981
tcctcattaaaac

SEQ ID NO: 64377 - DNA, 13 bp, Artificial Sequence
  Oligonucleotide for detection of SNP TSC0016982
ggattttagttay

SEQ ID NO: 64378 - DNA, 13 bp, Artificial Sequence
  Oligonucleotide for detection of SNP TSC0016982
rtaactaaaatcc

SEQ ID NO: 64379 - DNA, 13 bp, Artificial Sequence
  Oligonucleotide for detection of SNP TSC0016982
ggatttgagttay

SEQ ID NO: 64380 - DNA, 13 bp, Artificial Sequence
  Oligonucleotide for detection of SNP TSC0016982
rtaactcaaatcc

SEQ ID NO: 64381 - DNA, 13 bp, Artificial Sequence
  Oligonucleotide for detection of SNP TSC0016982
gtaattgaggtty

SEQ ID NO: 64382 - DNA, 13 bp, Artificial Sequence
  Oligonucleotide for detection of SNP TSC0016982
raacctcaattac

SEQ ID NO: 64383 - DNA, 13 bp, Artificial Sequence
  Oligonucleotide for detection of SNP TSC0016982
gtaatttaggtty

SEQ ID NO: 64384 - DNA, 13 bp, Artificial Sequence
  Oligonucleotide for detection of SNP TSC0016982
raacctaaattac

SEQ ID NO: 64385 - DNA, 13 bp, Artificial Sequence
  Oligonucleotide for detection of SNP TSC0016983
gtagaagttatty

SEQ ID NO: 64386 - DNA, 13 bp, Artificial Sequence
  Oligonucleotide for detection of SNP TSC0016983
raataacttctac

SEQ ID NO: 64387 - DNA, 13 bp, Artificial Sequence
  Oligonucleotide for detection of SNP TSC0016983
gtagaaattatty

SEQ ID NO: 64388 - DNA, 13 bp, Artificial Sequence
  Oligonucleotide for detection of SNP TSC0016983
raataatttctac

SEQ ID NO: 64389 - DNA, 13 bp, Artificial Sequence
  Oligonucleotide for detection of SNP TSC0016984
ataatttatggag

SEQ ID NO: 64390 - DNA, 13 bp, Artificial Sequence
  Oligonucleotide for detection of SNP TSC0016984
ctccataaattat

SEQ ID NO: 64391 - DNA, 13 bp, Artificial Sequence
  Oligonucleotide for detection of SNP TSC0016984
ataattgatggag

SEQ ID NO: 64392 - DNA, 13 bp, Artificial Sequence
  Oligonucleotide for detection of SNP TSC0016984
ctccatcaattat

SEQ ID NO: 64393 - DNA, 13 bp, Artificial Sequence
  Oligonucleotide for detection of SNP TSC0016984
ataatcgatggag

SEQ ID NO: 64394 - DNA, 13 bp, Artificial Sequence
  Oligonucleotide for detection of SNP TSC0016984
ctccatcgattat

SEQ ID NO: 64395 - DNA, 13 bp, Artificial Sequence
  Oligonucleotide for detection of SNP TSC0016984
ttttatgggttgt

SEQ ID NO: 64396 - DNA, 13 bp, Artificial Sequence
  Oligonucleotide for detection of SNP TSC0016984
acaacccataaaa

SEQ ID NO: 64397 - DNA, 13 bp, Artificial Sequence
  Oligonucleotide for detection of SNP TSC0016984
ttttattggttgt

SEQ ID NO: 64398 - DNA, 13 bp, Artificial Sequence
  Oligonucleotide for detection of SNP TSC0016984
acaaccaataaaa

SEQ ID NO: 64399 - DNA, 13 bp, Artificial Sequence
  Oligonucleotide for detection of SNP TSC0016984
ttttatcggttgt

SEQ ID NO: 64400 - DNA, 13 bp, Artificial Sequence
  Oligonucleotide for detection of SNP TSC0016984
acaaccgataaaa

SEQ ID NO: 64401 - DNA, 13 bp, Artificial Sequence
  Oligonucleotide for detection of SNP TSC0016987
gaaaggatttggg

SEQ ID NO: 64402 - DNA, 13 bp, Artificial Sequence
  Oligonucleotide for detection of SNP TSC0016987
cccaaatcctttc

SEQ ID NO: 64403 - DNA, 13 bp, Artificial Sequence
  Oligonucleotide for detection of SNP TSC0016987
gaaagggtttggg

SEQ ID NO: 64404 - DNA, 13 bp, Artificial Sequence
  Oligonucleotide for detection of SNP TSC0016987
cccaaaccctttc

SEQ ID NO: 64405 - DNA, 13 bp, Artificial Sequence
  Oligonucleotide for detection of SNP TSC0016988
ttattgtttttty

SEQ ID NO: 64406 - DNA, 13 bp, Artificial Sequence
  Oligonucleotide for detection of SNP TSC0016988
raaaaaacaataa

SEQ ID NO: 64407 - DNA, 13 bp, Artificial Sequence
  Oligonucleotide for detection of SNP TSC0016988
ttattggttttty

SEQ ID NO: 64408 - DNA, 13 bp, Artificial Sequence
  Oligonucleotide for detection of SNP TSC0016988
raaaaaccaataa

SEQ ID NO: 64409 - DNA, 13 bp, Artificial Sequence
  Oligonucleotide for detection of SNP TSC0016988
ggaaaagtaatgg

SEQ ID NO: 64410 - DNA, 13 bp, Artificial Sequence
  Oligonucleotide for detection of SNP TSC0016988
ccattacttttcc

SEQ ID NO: 64411 - DNA, 13 bp, Artificial Sequence
  Oligonucleotide for detection of SNP TSC0016988
ggaaaattaatgg

SEQ ID NO: 64412 - DNA, 13 bp, Artificial Sequence
  Oligonucleotide for detection of SNP TSC0016988
ccattaattttcc

SEQ ID NO: 64413 - DNA, 13 bp, Artificial Sequence
  Oligonucleotide for detection of SNP TSC0016989
agtttatgggagg

SEQ ID NO: 64414 - DNA, 13 bp, Artificial Sequence
  Oligonucleotide for detection of SNP TSC0016989
cctcccataaact

SEQ ID NO: 64415 - DNA, 13 bp, Artificial Sequence
  Oligonucleotide for detection of SNP TSC0016989
agtttacgggagg

SEQ ID NO: 64416 - DNA, 13 bp, Artificial Sequence
  Oligonucleotide for detection of SNP TSC0016989
cctcccgtaaact

SEQ ID NO: 64417 - DNA, 13 bp, Artificial Sequence
  Oligonucleotide for detection of SNP TSC0016989
ttttttgtgggtt

SEQ ID NO: 64418 - DNA, 13 bp, Artificial Sequence
  Oligonucleotide for detection of SNP TSC0016989
aacccacaaaaaa

SEQ ID NO: 64419 - DNA, 13 bp, Artificial Sequence
  Oligonucleotide for detection of SNP TSC0016989
ttttttatgggtt

SEQ ID NO: 64420 - DNA, 13 bp, Artificial Sequence
  Oligonucleotide for detection of SNP TSC0016989
aacccataaaaaa

SEQ ID NO: 64421 - DNA, 13 bp, Artificial Sequence
  Oligonucleotide for detection of SNP TSC0016989
tttttcgtgggtt

SEQ ID NO: 64422 - DNA, 13 bp, Artificial Sequence
  Oligonucleotide for detection of SNP TSC0016989
aacccacgaaaaa

SEQ ID NO: 64423 - DNA, 13 bp, Artificial Sequence
  Oligonucleotide for detection of SNP TSC0016991
gatattatattay

SEQ ID NO: 64424 - DNA, 13 bp, Artificial Sequence
  Oligonucleotide for detection of SNP TSC0016991
rtaatataatatc

SEQ ID NO: 64425 - DNA, 13 bp, Artificial Sequence
  Oligonucleotide for detection of SNP TSC0016991
gatattgtattay

SEQ ID NO: 64426 - DNA, 13 bp, Artificial Sequence
  Oligonucleotide for detection of SNP TSC0016991
rtaatacaatatc

SEQ ID NO: 64427 - DNA, 13 bp, Artificial Sequence
  Oligonucleotide for detection of SNP TSC0016992
gggtttagttttt

SEQ ID NO: 64428 - DNA, 13 bp, Artificial Sequence
  Oligonucleotide for detection of SNP TSC0016992
aaaaactaaaccc

SEQ ID NO: 64429 - DNA, 13 bp, Artificial Sequence
  Oligonucleotide for detection of SNP TSC0016992
gggtttggttttt

SEQ ID NO: 64430 - DNA, 13 bp, Artificial Sequence
  Oligonucleotide for detection of SNP TSC0016992
aaaaaccaaaccc

SEQ ID NO: 64431 - DNA, 13 bp, Artificial Sequence
  Oligonucleotide for detection of SNP TSC0016992
gggttcggttttt

SEQ ID NO: 64432 - DNA, 13 bp, Artificial Sequence
  Oligonucleotide for detection of SNP TSC0016992
aaaaaccgaaccc

SEQ ID NO: 64433 - DNA, 13 bp, Artificial Sequence
  Oligonucleotide for detection of SNP TSC0016992
aaagattgggtty

SEQ ID NO: 64434 - DNA, 13 bp, Artificial Sequence
  Oligonucleotide for detection of SNP TSC0016992
raacccaatcttt

SEQ ID NO: 64435 - DNA, 13 bp, Artificial Sequence
  Oligonucleotide for detection of SNP TSC0016992
aaagatcgggtty

SEQ ID NO: 64436 - DNA, 13 bp, Artificial Sequence
  Oligonucleotide for detection of SNP TSC0016992
raacccgatcttt

SEQ ID NO: 64437 - DNA, 13 bp, Artificial Sequence
  Oligonucleotide for detection of SNP TSC0016993
aatatatgttggt

SEQ ID NO: 64438 - DNA, 13 bp, Artificial Sequence
  Oligonucleotide for detection of SNP TSC0016993
accaacatatatt

SEQ ID NO: 64439 - DNA, 13 bp, Artificial Sequence
  Oligonucleotide for detection of SNP TSC0016993
aatatacgttggt

SEQ ID NO: 64440 - DNA, 13 bp, Artificial Sequence
  Oligonucleotide for detection of SNP TSC0016993
accaacgtatatt

SEQ ID NO: 64441 - DNA, 13 bp, Artificial Sequence
  Oligonucleotide for detection of SNP TSC0016993
attagtgtgtgtt

SEQ ID NO: 64442 - DNA, 13 bp, Artificial Sequence
  Oligonucleotide for detection of SNP TSC0016993
aacacacactaat

SEQ ID NO: 64443 - DNA, 13 bp, Artificial Sequence
  Oligonucleotide for detection of SNP TSC0016993
attagtatgtgtt

SEQ ID NO: 64444 - DNA, 13 bp, Artificial Sequence
  Oligonucleotide for detection of SNP TSC0016993
aacacatactaat

SEQ ID NO: 64445 - DNA, 13 bp, Artificial Sequence
  Oligonucleotide for detection of SNP TSC0016993
attagcgtgtgtt

SEQ ID NO: 64446 - DNA, 13 bp, Artificial Sequence
  Oligonucleotide for detection of SNP TSC0016993
aacacacgctaat

SEQ ID NO: 64447 - DNA, 13 bp, Artificial Sequence
  Oligonucleotide for detection of SNP TSC0016995
ttttaggggtagt

SEQ ID NO: 64448 - DNA, 13 bp, Artificial Sequence
  Oligonucleotide for detection of SNP TSC0016995
actacccctaaaa

SEQ ID NO: 64449 - DNA, 13 bp, Artificial Sequence
  Oligonucleotide for detection of SNP TSC0016995
ttttagtggtagt

SEQ ID NO: 64450 - DNA, 13 bp, Artificial Sequence
  Oligonucleotide for detection of SNP TSC0016995
actaccactaaaa

SEQ ID NO: 64451 - DNA, 13 bp, Artificial Sequence
  Oligonucleotide for detection of SNP TSC0016995
attatttttaaaa

SEQ ID NO: 64452 - DNA, 13 bp, Artificial Sequence
  Oligonucleotide for detection of SNP TSC0016995
ttttaaaaataat

SEQ ID NO: 64453 - DNA, 13 bp, Artificial Sequence
  Oligonucleotide for detection of SNP TSC0016995
attattattaaaa

SEQ ID NO: 64454 - DNA, 13 bp, Artificial Sequence
  Oligonucleotide for detection of SNP TSC0016995
ttttaataataat

SEQ ID NO: 64455 - DNA, 13 bp, Artificial Sequence
  Oligonucleotide for detection of SNP TSC0016997
tgataagaagttt

SEQ ID NO: 64456 - DNA, 13 bp, Artificial Sequence
  Oligonucleotide for detection of SNP TSC0016997
aaacttcttatca

SEQ ID NO: 64457 - DNA, 13 bp, Artificial Sequence
  Oligonucleotide for detection of SNP TSC0016997
tgataaaaagttt

SEQ ID NO: 64458 - DNA, 13 bp, Artificial Sequence
  Oligonucleotide for detection of SNP TSC0016997
aaactttttatca

SEQ ID NO: 64459 - DNA, 13 bp, Artificial Sequence
  Oligonucleotide for detection of SNP TSC0017000
tatatggtgttgg

SEQ ID NO: 64460 - DNA, 13 bp, Artificial Sequence
  Oligonucleotide for detection of SNP TSC0017000
ccaacaccatata

SEQ ID NO: 64461 - DNA, 13 bp, Artificial Sequence
  Oligonucleotide for detection of SNP TSC0017000
tatatgatgttgg

SEQ ID NO: 64462 - DNA, 13 bp, Artificial Sequence
  Oligonucleotide for detection of SNP TSC0017000
ccaacatcatata

SEQ ID NO: 64463 - DNA, 13 bp, Artificial Sequence
  Oligonucleotide for detection of SNP TSC0017001
tttttaatgatga

SEQ ID NO: 64464 - DNA, 13 bp, Artificial Sequence
  Oligonucleotide for detection of SNP TSC0017001
tcatcattaaaaa

SEQ ID NO: 64465 - DNA, 13 bp, Artificial Sequence
  Oligonucleotide for detection of SNP TSC0017001
tttttagtgatga

SEQ ID NO: 64466 - DNA, 13 bp, Artificial Sequence
  Oligonucleotide for detection of SNP TSC0017001
tcatcactaaaaa

SEQ ID NO: 64467 - DNA, 13 bp, Artificial Sequence
  Oligonucleotide for detection of SNP TSC0017002
tttattatggatt

SEQ ID NO: 64468 - DNA, 13 bp, Artificial Sequence
  Oligonucleotide for detection of SNP TSC0017002
aatccataataaa

SEQ ID NO: 64469 - DNA, 13 bp, Artificial Sequence
  Oligonucleotide for detection of SNP TSC0017002
tttattgtggatt

SEQ ID NO: 64470 - DNA, 13 bp, Artificial Sequence
  Oligonucleotide for detection of SNP TSC0017002
aatccacaataaa

SEQ ID NO: 64471 - DNA, 13 bp, Artificial Sequence
  Oligonucleotide for detection of SNP TSC0017002
tttatcgtggatt

SEQ ID NO: 64472 - DNA, 13 bp, Artificial Sequence
  Oligonucleotide for detection of SNP TSC0017002
aatccacgataaa

SEQ ID NO: 64473 - DNA, 13 bp, Artificial Sequence
  Oligonucleotide for detection of SNP TSC0017002
agtttatggtgaa

SEQ ID NO: 64474 - DNA, 13 bp, Artificial Sequence
  Oligonucleotide for detection of SNP TSC0017002
ttcaccataaact

SEQ ID NO: 64475 - DNA, 13 bp, Artificial Sequence
  Oligonucleotide for detection of SNP TSC0017002
agtttacggtgaa

SEQ ID NO: 64476 - DNA, 13 bp, Artificial Sequence
  Oligonucleotide for detection of SNP TSC0017002
ttcaccgtaaact

SEQ ID NO: 64477 - DNA, 13 bp, Artificial Sequence
  Oligonucleotide for detection of SNP TSC0017003
gtatttatatgaa

SEQ ID NO: 64478 - DNA, 13 bp, Artificial Sequence
  Oligonucleotide for detection of SNP TSC0017003
ttcatataaatac

SEQ ID NO: 64479 - DNA, 13 bp, Artificial Sequence
  Oligonucleotide for detection of SNP TSC0017003
gtatttgtatgaa

SEQ ID NO: 64480 - DNA, 13 bp, Artificial Sequence
  Oligonucleotide for detection of SNP TSC0017003
ttcatacaaatac

SEQ ID NO: 64481 - DNA, 13 bp, Artificial Sequence
  Oligonucleotide for detection of SNP TSC0017004
tgaagaatatgga

SEQ ID NO: 64482 - DNA, 13 bp, Artificial Sequence
  Oligonucleotide for detection of SNP TSC0017004
tccatattcttca

SEQ ID NO: 64483 - DNA, 13 bp, Artificial Sequence
  Oligonucleotide for detection of SNP TSC0017004
tgaagagtatgga

SEQ ID NO: 64484 - DNA, 13 bp, Artificial Sequence
  Oligonucleotide for detection of SNP TSC0017004
tccatactcttca

SEQ ID NO: 64485 - DNA, 13 bp, Artificial Sequence
  Oligonucleotide for detection of SNP TSC0017005
atagagagttttt

SEQ ID NO: 64486 - DNA, 13 bp, Artificial Sequence
  Oligonucleotide for detection of SNP TSC0017005
aaaaactctctat

SEQ ID NO: 64487 - DNA, 13 bp, Artificial Sequence
  Oligonucleotide for detection of SNP TSC0017005
atagagggttttt

SEQ ID NO: 64488 - DNA, 13 bp, Artificial Sequence
  Oligonucleotide for detection of SNP TSC0017005
aaaaaccctctat

SEQ ID NO: 64489 - DNA, 13 bp, Artificial Sequence
  Oligonucleotide for detection of SNP TSC0017010
tggattaaatgty

SEQ ID NO: 64490 - DNA, 13 bp, Artificial Sequence
  Oligonucleotide for detection of SNP TSC0017010
racatttaatcca

SEQ ID NO: 64491 - DNA, 13 bp, Artificial Sequence
  Oligonucleotide for detection of SNP TSC0017010
tggattgaatgty

SEQ ID NO: 64492 - DNA, 13 bp, Artificial Sequence
  Oligonucleotide for detection of SNP TSC0017010
racattcaatcca

SEQ ID NO: 64493 - DNA, 13 bp, Artificial Sequence
  Oligonucleotide for detection of SNP TSC0017011
aattttagttttg

SEQ ID NO: 64494 - DNA, 13 bp, Artificial Sequence
  Oligonucleotide for detection of SNP TSC0017011
caaaactaaaatt

SEQ ID NO: 64495 - DNA, 13 bp, Artificial Sequence
  Oligonucleotide for detection of SNP TSC0017011
aattttggttttg

SEQ ID NO: 64496 - DNA, 13 bp, Artificial Sequence
  Oligonucleotide for detection of SNP TSC0017011
caaaaccaaaatt

SEQ ID NO: 64497 - DNA, 13 bp, Artificial Sequence
  Oligonucleotide for detection of SNP TSC0017012
tttgtttgtatgg

SEQ ID NO: 64498 - DNA, 13 bp, Artificial Sequence
  Oligonucleotide for detection of SNP TSC0017012
ccatacaaacaaa

SEQ ID NO: 64499 - DNA, 13 bp, Artificial Sequence
  Oligonucleotide for detection of SNP TSC0017012
tttgttcgtatgg

SEQ ID NO: 64500 - DNA, 13 bp, Artificial Sequence
  Oligonucleotide for detection of SNP TSC0017012
ccatacgaacaaa

SEQ ID NO: 64501 - DNA, 13 bp, Artificial Sequence
  Oligonucleotide for detection of SNP TSC0017012
ttatgtgagtaga

SEQ ID NO: 64502 - DNA, 13 bp, Artificial Sequence
  Oligonucleotide for detection of SNP TSC0017012
tctactcacataa

SEQ ID NO: 64503 - DNA, 13 bp, Artificial Sequence
  Oligonucleotide for detection of SNP TSC0017012
ttatgtaagtaga

SEQ ID NO: 64504 - DNA, 13 bp, Artificial Sequence
  Oligonucleotide for detection of SNP TSC0017012
tctacttacataa

SEQ ID NO: 64505 - DNA, 13 bp, Artificial Sequence
  Oligonucleotide for detection of SNP TSC0017012
ttatgcgagtaga

SEQ ID NO: 64506 - DNA, 13 bp, Artificial Sequence
  Oligonucleotide for detection of SNP TSC0017012
tctactcgcataa

SEQ ID NO: 64507 - DNA, 13 bp, Artificial Sequence
  Oligonucleotide for detection of SNP TSC0017013
tataagatgtaaa

SEQ ID NO: 64508 - DNA, 13 bp, Artificial Sequence
  Oligonucleotide for detection of SNP TSC0017013
tttacatcttata

SEQ ID NO: 64509 - DNA, 13 bp, Artificial Sequence
  Oligonucleotide for detection of SNP TSC0017013
tataaggtgtaaa

SEQ ID NO: 64510 - DNA, 13 bp, Artificial Sequence
  Oligonucleotide for detection of SNP TSC0017013
tttacaccttata

SEQ ID NO: 64511 - DNA, 13 bp, Artificial Sequence
  Oligonucleotide for detection of SNP TSC0017016
gtttaggttggty

SEQ ID NO: 64512 - DNA, 13 bp, Artificial Sequence
  Oligonucleotide for detection of SNP TSC0017016
raccaacctaaac

SEQ ID NO: 64513 - DNA, 13 bp, Artificial Sequence
  Oligonucleotide for detection of SNP TSC0017016
gtttagattggty

SEQ ID NO: 64514 - DNA, 13 bp, Artificial Sequence
  Oligonucleotide for detection of SNP TSC0017016
raccaatctaaac

SEQ ID NO: 64515 - DNA, 13 bp, Artificial Sequence
  Oligonucleotide for detection of SNP TSC0017017
ttggatagattga

SEQ ID NO: 64516 - DNA, 13 bp, Artificial Sequence
  Oligonucleotide for detection of SNP TSC0017017
tcaatctatccaa

SEQ ID NO: 64517 - DNA, 13 bp, Artificial Sequence
  Oligonucleotide for detection of SNP TSC0017017
ttggattgattga

SEQ ID NO: 64518 - DNA, 13 bp, Artificial Sequence
  Oligonucleotide for detection of SNP TSC0017017
tcaatcaatccaa

SEQ ID NO: 64519 - DNA, 13 bp, Artificial Sequence
  Oligonucleotide for detection of SNP TSC0017017
ttagtttatttag

SEQ ID NO: 64520 - DNA, 13 bp, Artificial Sequence
  Oligonucleotide for detection of SNP TSC0017017
ctaaataaactaa

SEQ ID NO: 64521 - DNA, 13 bp, Artificial Sequence
  Oligonucleotide for detection of SNP TSC0017017
ttagttaatttag

SEQ ID NO: 64522 - DNA, 13 bp, Artificial Sequence
  Oligonucleotide for detection of SNP TSC0017017
ctaaattaactaa

SEQ ID NO: 64523 - DNA, 13 bp, Artificial Sequence
  Oligonucleotide for detection of SNP TSC0017018
attttatatttgt

SEQ ID NO: 64524 - DNA, 13 bp, Artificial Sequence
  Oligonucleotide for detection of SNP TSC0017018
acaaatataaaat

SEQ ID NO: 64525 - DNA, 13 bp, Artificial Sequence
  Oligonucleotide for detection of SNP TSC0017018
attttagatttgt

SEQ ID NO: 64526 - DNA, 13 bp, Artificial Sequence
  Oligonucleotide for detection of SNP TSC0017018
acaaatctaaaat

SEQ ID NO: 64527 - DNA, 13 bp, Artificial Sequence
  Oligonucleotide for detection of SNP TSC0017018
ataggtgtggggt

SEQ ID NO: 64528 - DNA, 13 bp, Artificial Sequence
  Oligonucleotide for detection of SNP TSC0017018
accccacacctat

SEQ ID NO: 64529 - DNA, 13 bp, Artificial Sequence
  Oligonucleotide for detection of SNP TSC0017018
ataggtttggggt

SEQ ID NO: 64530 - DNA, 13 bp, Artificial Sequence
  Oligonucleotide for detection of SNP TSC0017018
accccaaacctat

SEQ ID NO: 64531 - DNA, 13 bp, Artificial Sequence
  Oligonucleotide for detection of SNP TSC0017019
attttaattatty

SEQ ID NO: 64532 - DNA, 13 bp, Artificial Sequence
  Oligonucleotide for detection of SNP TSC0017019
raataattaaaat

SEQ ID NO: 64533 - DNA, 13 bp, Artificial Sequence
  Oligonucleotide for detection of SNP TSC0017019
attttagttatty

SEQ ID NO: 64534 - DNA, 13 bp, Artificial Sequence
  Oligonucleotide for detection of SNP TSC0017019
raataactaaaat

SEQ ID NO: 64535 - DNA, 13 bp, Artificial Sequence
  Oligonucleotide for detection of SNP TSC0017021
ttgtttgagggaa

SEQ ID NO: 64536 - DNA, 13 bp, Artificial Sequence
  Oligonucleotide for detection of SNP TSC0017021
ttccctcaaacaa

SEQ ID NO: 64537 - DNA, 13 bp, Artificial Sequence
  Oligonucleotide for detection of SNP TSC0017021
ttgtttaagggaa

SEQ ID NO: 64538 - DNA, 13 bp, Artificial Sequence
  Oligonucleotide for detection of SNP TSC0017021
ttcccttaaacaa

SEQ ID NO: 64539 - DNA, 13 bp, Artificial Sequence
  Oligonucleotide for detection of SNP TSC0017021
tcgtttgagggaa

SEQ ID NO: 64540 - DNA, 13 bp, Artificial Sequence
  Oligonucleotide for detection of SNP TSC0017021
ttccctcaaacga

SEQ ID NO: 64541 - DNA, 13 bp, Artificial Sequence
  Oligonucleotide for detection of SNP TSC0017021
tcgtttaagggaa

SEQ ID NO: 64542 - DNA, 13 bp, Artificial Sequence
  Oligonucleotide for detection of SNP TSC0017021
ttcccttaaacga

SEQ ID NO: 64543 - DNA, 13 bp, Artificial Sequence
  Oligonucleotide for detection of SNP TSC0017022
agaggatgggttg

SEQ ID NO: 64544 - DNA, 13 bp, Artificial Sequence
  Oligonucleotide for detection of SNP TSC0017022
caacccatcctct

SEQ ID NO: 64545 - DNA, 13 bp, Artificial Sequence
  Oligonucleotide for detection of SNP TSC0017022
agaggaggggttg

SEQ ID NO: 64546 - DNA, 13 bp, Artificial Sequence
  Oligonucleotide for detection of SNP TSC0017022
caacccctcctct

SEQ ID NO: 64547 - DNA, 13 bp, Artificial Sequence
  Oligonucleotide for detection of SNP TSC0017022
agaggacgggttg

SEQ ID NO: 64548 - DNA, 13 bp, Artificial Sequence
  Oligonucleotide for detection of SNP TSC0017022
caacccgtcctct

SEQ ID NO: 64549 - DNA, 13 bp, Artificial Sequence
  Oligonucleotide for detection of SNP TSC0017022
taattcgtttttt

SEQ ID NO: 64550 - DNA, 13 bp, Artificial Sequence
  Oligonucleotide for detection of SNP TSC0017022
aaaaaacgaatta

SEQ ID NO: 64551 - DNA, 13 bp, Artificial Sequence
  Oligonucleotide for detection of SNP TSC0017023
tagagggtgaggy

SEQ ID NO: 64552 - DNA, 13 bp, Artificial Sequence
  Oligonucleotide for detection of SNP TSC0017023
rcctcaccctcta

SEQ ID NO: 64553 - DNA, 13 bp, Artificial Sequence
  Oligonucleotide for detection of SNP TSC0017023
tagaggttgaggy

SEQ ID NO: 64554 - DNA, 13 bp, Artificial Sequence
  Oligonucleotide for detection of SNP TSC0017023
rcctcaacctcta

SEQ ID NO: 64555 - DNA, 13 bp, Artificial Sequence
  Oligonucleotide for detection of SNP TSC0017023
gttttattttttg

SEQ ID NO: 64556 - DNA, 13 bp, Artificial Sequence
  Oligonucleotide for detection of SNP TSC0017023
caaaaaataaaac

SEQ ID NO: 64557 - DNA, 13 bp, Artificial Sequence
  Oligonucleotide for detection of SNP TSC0017026
ttttgtatggatt

SEQ ID NO: 64558 - DNA, 13 bp, Artificial Sequence
  Oligonucleotide for detection of SNP TSC0017026
aatccatacaaaa

SEQ ID NO: 64559 - DNA, 13 bp, Artificial Sequence
  Oligonucleotide for detection of SNP TSC0017026
ttttgtttggatt

SEQ ID NO: 64560 - DNA, 13 bp, Artificial Sequence
  Oligonucleotide for detection of SNP TSC0017026
aatccaaacaaaa

SEQ ID NO: 64561 - DNA, 13 bp, Artificial Sequence
  Oligonucleotide for detection of SNP TSC0017026
aatttatgtagaa

SEQ ID NO: 64562 - DNA, 13 bp, Artificial Sequence
  Oligonucleotide for detection of SNP TSC0017026
ttctacataaatt

SEQ ID NO: 64563 - DNA, 13 bp, Artificial Sequence
  Oligonucleotide for detection of SNP TSC0017026
aatttaggtagaa

SEQ ID NO: 64564 - DNA, 13 bp, Artificial Sequence
  Oligonucleotide for detection of SNP TSC0017026
ttctacctaaatt

SEQ ID NO: 64565 - DNA, 13 bp, Artificial Sequence
  Oligonucleotide for detection of SNP TSC0017030
tagatgatttatt

SEQ ID NO: 64566 - DNA, 13 bp, Artificial Sequence
  Oligonucleotide for detection of SNP TSC0017030
aataaatcatcta

SEQ ID NO: 64567 - DNA, 13 bp, Artificial Sequence
  Oligonucleotide for detection of SNP TSC0017030
tagatggtttatt

SEQ ID NO: 64568 - DNA, 13 bp, Artificial Sequence
  Oligonucleotide for detection of SNP TSC0017030
aataaaccatcta

SEQ ID NO: 64569 - DNA, 13 bp, Artificial Sequence
  Oligonucleotide for detection of SNP TSC0017031
agattttggggtt

SEQ ID NO: 64570 - DNA, 13 bp, Artificial Sequence
  Oligonucleotide for detection of SNP TSC0017031
aaccccaaaatct

SEQ ID NO: 64571 - DNA, 13 bp, Artificial Sequence
  Oligonucleotide for detection of SNP TSC0017031
agatttcggggtt

SEQ ID NO: 64572 - DNA, 13 bp, Artificial Sequence
  Oligonucleotide for detection of SNP TSC0017031
aaccccgaaatct

SEQ ID NO: 64573 - DNA, 13 bp, Artificial Sequence
  Oligonucleotide for detection of SNP TSC0017031
agttttgaagttt

SEQ ID NO: 64574 - DNA, 13 bp, Artificial Sequence
  Oligonucleotide for detection of SNP TSC0017031
aaacttcaaaact

SEQ ID NO: 64575 - DNA, 13 bp, Artificial Sequence
  Oligonucleotide for detection of SNP TSC0017031
agttttaaagttt

SEQ ID NO: 64576 - DNA, 13 bp, Artificial Sequence
  Oligonucleotide for detection of SNP TSC0017031
aaactttaaaact

SEQ ID NO: 64577 - DNA, 13 bp, Artificial Sequence
  Oligonucleotide for detection of SNP TSC0017031
agtttcgaagttt

SEQ ID NO: 64578 - DNA, 13 bp, Artificial Sequence
  Oligonucleotide for detection of SNP TSC0017031
aaacttcgaaact

SEQ ID NO: 64579 - DNA, 13 bp, Artificial Sequence
  Oligonucleotide for detection of SNP TSC0017032
aattagtgtttty

SEQ ID NO: 64580 - DNA, 13 bp, Artificial Sequence
  Oligonucleotide for detection of SNP TSC0017032
raaaacactaatt

SEQ ID NO: 64581 - DNA, 13 bp, Artificial Sequence
  Oligonucleotide for detection of SNP TSC0017032
aattagcgtttty

SEQ ID NO: 64582 - DNA, 13 bp, Artificial Sequence
  Oligonucleotide for detection of SNP TSC0017032
raaaacgctaatt

SEQ ID NO: 64583 - DNA, 13 bp, Artificial Sequence
  Oligonucleotide for detection of SNP TSC0017032
ggaagtgttagtt

SEQ ID NO: 64584 - DNA, 13 bp, Artificial Sequence
  Oligonucleotide for detection of SNP TSC0017032
aactaacacttcc

SEQ ID NO: 64585 - DNA, 13 bp, Artificial Sequence
  Oligonucleotide for detection of SNP TSC0017032
ggaagtattagtt

SEQ ID NO: 64586 - DNA, 13 bp, Artificial Sequence
  Oligonucleotide for detection of SNP TSC0017032
aactaatacttcc

SEQ ID NO: 64587 - DNA, 13 bp, Artificial Sequence
  Oligonucleotide for detection of SNP TSC0017032
ggaagcgttagtt

SEQ ID NO: 64588 - DNA, 13 bp, Artificial Sequence
  Oligonucleotide for detection of SNP TSC0017032
aactaacgcttcc

SEQ ID NO: 64589 - DNA, 13 bp, Artificial Sequence
  Oligonucleotide for detection of SNP TSC0017033
gggttaaattgaa

SEQ ID NO: 64590 - DNA, 13 bp, Artificial Sequence
  Oligonucleotide for detection of SNP TSC0017033
ttcaatttaaccc

SEQ ID NO: 64591 - DNA, 13 bp, Artificial Sequence
  Oligonucleotide for detection of SNP TSC0017033
gggttagattgaa

SEQ ID NO: 64592 - DNA, 13 bp, Artificial Sequence
  Oligonucleotide for detection of SNP TSC0017033
ttcaatctaaccc

SEQ ID NO: 64593 - DNA, 13 bp, Artificial Sequence
  Oligonucleotide for detection of SNP TSC0017034
tttttagtaaaaa

SEQ ID NO: 64594 - DNA, 13 bp, Artificial Sequence
  Oligonucleotide for detection of SNP TSC0017034
tttttactaaaaa

SEQ ID NO: 64595 - DNA, 13 bp, Artificial Sequence
  Oligonucleotide for detection of SNP TSC0017034
tttttaataaaaa

SEQ ID NO: 64596 - DNA, 13 bp, Artificial Sequence
  Oligonucleotide for detection of SNP TSC0017034
tttttattaaaaa

SEQ ID NO: 64597 - DNA, 13 bp, Artificial Sequence
  Oligonucleotide for detection of SNP TSC0017038
gtgggggggttgg

SEQ ID NO: 64598 - DNA, 13 bp, Artificial Sequence
  Oligonucleotide for detection of SNP TSC0017038
ccaacccccccac

SEQ ID NO: 64599 - DNA, 13 bp, Artificial Sequence
  Oligonucleotide for detection of SNP TSC0017038
gtggggtggttgg

SEQ ID NO: 64600 - DNA, 13 bp, Artificial Sequence
  Oligonucleotide for detection of SNP TSC0017038
ccaaccaccccac

SEQ ID NO: 64601 - DNA, 13 bp, Artificial Sequence
  Oligonucleotide for detection of SNP TSC0017038
ttagtttttttay

SEQ ID NO: 64602 - DNA, 13 bp, Artificial Sequence
  Oligonucleotide for detection of SNP TSC0017038
rtaaaaaaactaa

SEQ ID NO: 64603 - DNA, 13 bp, Artificial Sequence
  Oligonucleotide for detection of SNP TSC0017038
ttagttattttay

SEQ ID NO: 64604 - DNA, 13 bp, Artificial Sequence
  Oligonucleotide for detection of SNP TSC0017038
rtaaaataactaa

SEQ ID NO: 64605 - DNA, 13 bp, Artificial Sequence
  Oligonucleotide for detection of SNP TSC0017039
atttgaggttagg

SEQ ID NO: 64606 - DNA, 13 bp, Artificial Sequence
  Oligonucleotide for detection of SNP TSC0017039
cctaacctcaaat

SEQ ID NO: 64607 - DNA, 13 bp, Artificial Sequence
  Oligonucleotide for detection of SNP TSC0017039
atttgatgttagg

SEQ ID NO: 64608 - DNA, 13 bp, Artificial Sequence
  Oligonucleotide for detection of SNP TSC0017039
cctaacatcaaat

SEQ ID NO: 64609 - DNA, 13 bp, Artificial Sequence
  Oligonucleotide for detection of SNP TSC0017039
tttgattttaggt

SEQ ID NO: 64610 - DNA, 13 bp, Artificial Sequence
  Oligonucleotide for detection of SNP TSC0017039
acctaaaatcaaa

SEQ ID NO: 64611 - DNA, 13 bp, Artificial Sequence
  Oligonucleotide for detection of SNP TSC0017039
tttgatattaggt

SEQ ID NO: 64612 - DNA, 13 bp, Artificial Sequence
  Oligonucleotide for detection of SNP TSC0017039
acctaatatcaaa

SEQ ID NO: 64613 - DNA, 13 bp, Artificial Sequence
  Oligonucleotide for detection of SNP TSC0017041
ggataaatgaagg

SEQ ID NO: 64614 - DNA, 13 bp, Artificial Sequence
  Oligonucleotide for detection of SNP TSC0017041
ccttcatttatcc

SEQ ID NO: 64615 - DNA, 13 bp, Artificial Sequence
  Oligonucleotide for detection of SNP TSC0017041
ggataagtgaagg

SEQ ID NO: 64616 - DNA, 13 bp, Artificial Sequence
  Oligonucleotide for detection of SNP TSC0017041
ccttcacttatcc

SEQ ID NO: 64617 - DNA, 13 bp, Artificial Sequence
  Oligonucleotide for detection of SNP TSC0017043
ggtaatattttta

SEQ ID NO: 64618 - DNA, 13 bp, Artificial Sequence
  Oligonucleotide for detection of SNP TSC0017043
taaaaatattacc

SEQ ID NO: 64619 - DNA, 13 bp, Artificial Sequence
  Oligonucleotide for detection of SNP TSC0017043
ggtaattttttta

SEQ ID NO: 64620 - DNA, 13 bp, Artificial Sequence
  Oligonucleotide for detection of SNP TSC0017043
taaaaaaattacc

SEQ ID NO: 64621 - DNA, 13 bp, Artificial Sequence
  Oligonucleotide for detection of SNP TSC0017043
tggggatgttaty

SEQ ID NO: 64622 - DNA, 13 bp, Artificial Sequence
  Oligonucleotide for detection of SNP TSC0017043
rataacatcccca

SEQ ID NO: 64623 - DNA, 13 bp, Artificial Sequence
  Oligonucleotide for detection of SNP TSC0017043
tggggaagttaty

SEQ ID NO: 64624 - DNA, 13 bp, Artificial Sequence
  Oligonucleotide for detection of SNP TSC0017043
rataacttcccca

SEQ ID NO: 64625 - DNA, 13 bp, Artificial Sequence
  Oligonucleotide for detection of SNP TSC0017045
ggtggtatttaag

SEQ ID NO: 64626 - DNA, 13 bp, Artificial Sequence
  Oligonucleotide for detection of SNP TSC0017045
cttaaataccacc

SEQ ID NO: 64627 - DNA, 13 bp, Artificial Sequence
  Oligonucleotide for detection of SNP TSC0017045
ggtggtttttaag

SEQ ID NO: 64628 - DNA, 13 bp, Artificial Sequence
  Oligonucleotide for detection of SNP TSC0017045
cttaaaaaccacc

SEQ ID NO: 64629 - DNA, 13 bp, Artificial Sequence
  Oligonucleotide for detection of SNP TSC0017045
tttgagtgttaty

SEQ ID NO: 64630 - DNA, 13 bp, Artificial Sequence
  Oligonucleotide for detection of SNP TSC0017045
rataacactcaaa

SEQ ID NO: 64631 - DNA, 13 bp, Artificial Sequence
  Oligonucleotide for detection of SNP TSC0017045
tttgagagttaty

SEQ ID NO: 64632 - DNA, 13 bp, Artificial Sequence
  Oligonucleotide for detection of SNP TSC0017045
rataactctcaaa

SEQ ID NO: 64633 - DNA, 13 bp, Artificial Sequence
  Oligonucleotide for detection of SNP TSC0017048
attagaatttaat

SEQ ID NO: 64634 - DNA, 13 bp, Artificial Sequence
  Oligonucleotide for detection of SNP TSC0017048
attaaattctaat

SEQ ID NO: 64635 - DNA, 13 bp, Artificial Sequence
  Oligonucleotide for detection of SNP TSC0017048
attagagtttaat

SEQ ID NO: 64636 - DNA, 13 bp, Artificial Sequence
  Oligonucleotide for detection of SNP TSC0017048
attaaactctaat

SEQ ID NO: 64637 - DNA, 13 bp, Artificial Sequence
  Oligonucleotide for detection of SNP TSC0017049
aattagtggagga

SEQ ID NO: 64638 - DNA, 13 bp, Artificial Sequence
  Oligonucleotide for detection of SNP TSC0017049
tcctccactaatt

SEQ ID NO: 64639 - DNA, 13 bp, Artificial Sequence
  Oligonucleotide for detection of SNP TSC0017049
tttttttttggtt

SEQ ID NO: 64640 - DNA, 13 bp, Artificial Sequence
  Oligonucleotide for detection of SNP TSC0017049
aaccaaaaaaaaa

SEQ ID NO: 64641 - DNA, 13 bp, Artificial Sequence
  Oligonucleotide for detection of SNP TSC0017049
ttttttattggtt

SEQ ID NO: 64642 - DNA, 13 bp, Artificial Sequence
  Oligonucleotide for detection of SNP TSC0017049
aaccaataaaaaa

SEQ ID NO: 64643 - DNA, 13 bp, Artificial Sequence
  Oligonucleotide for detection of SNP TSC0017050
ggtgtttttatty

SEQ ID NO: 64644 - DNA, 13 bp, Artificial Sequence
  Oligonucleotide for detection of SNP TSC0017050
raataaaaacacc

SEQ ID NO: 64645 - DNA, 13 bp, Artificial Sequence
  Oligonucleotide for detection of SNP TSC0017050
ggtgttgttatty

SEQ ID NO: 64646 - DNA, 13 bp, Artificial Sequence
  Oligonucleotide for detection of SNP TSC0017050
raataacaacacc

SEQ ID NO: 64647 - DNA, 13 bp, Artificial Sequence
  Oligonucleotide for detection of SNP TSC0017050
gaatgggaataty

SEQ ID NO: 64648 - DNA, 13 bp, Artificial Sequence
  Oligonucleotide for detection of SNP TSC0017050
ratattcccattc

SEQ ID NO: 64649 - DNA, 13 bp, Artificial Sequence
  Oligonucleotide for detection of SNP TSC0017050
gaatggtaataty

SEQ ID NO: 64650 - DNA, 13 bp, Artificial Sequence
  Oligonucleotide for detection of SNP TSC0017050
ratattaccattc

SEQ ID NO: 64651 - DNA, 13 bp, Artificial Sequence
  Oligonucleotide for detection of SNP TSC0017051
aaatgtgtatttg

SEQ ID NO: 64652 - DNA, 13 bp, Artificial Sequence
  Oligonucleotide for detection of SNP TSC0017051
caaatacacattt

SEQ ID NO: 64653 - DNA, 13 bp, Artificial Sequence
  Oligonucleotide for detection of SNP TSC0017051
aaatgtttatttg

SEQ ID NO: 64654 - DNA, 13 bp, Artificial Sequence
  Oligonucleotide for detection of SNP TSC0017051
caaataaacattt

SEQ ID NO: 64655 - DNA, 13 bp, Artificial Sequence
  Oligonucleotide for detection of SNP TSC0017051
taaatgtatattt

SEQ ID NO: 64656 - DNA, 13 bp, Artificial Sequence
  Oligonucleotide for detection of SNP TSC0017051
aaatatacattta

SEQ ID NO: 64657 - DNA, 13 bp, Artificial Sequence
  Oligonucleotide for detection of SNP TSC0017051
taaatgaatattt

SEQ ID NO: 64658 - DNA, 13 bp, Artificial Sequence
  Oligonucleotide for detection of SNP TSC0017051
aaatattcattta

SEQ ID NO: 64659 - DNA, 13 bp, Artificial Sequence
  Oligonucleotide for detection of SNP TSC0017052
ggagttaaagagt

SEQ ID NO: 64660 - DNA, 13 bp, Artificial Sequence
  Oligonucleotide for detection of SNP TSC0017052
actctttaactcc

SEQ ID NO: 64661 - DNA, 13 bp, Artificial Sequence
  Oligonucleotide for detection of SNP TSC0017052
ggagttgaagagt

SEQ ID NO: 64662 - DNA, 13 bp, Artificial Sequence
  Oligonucleotide for detection of SNP TSC0017052
actcttcaactcc

SEQ ID NO: 64663 - DNA, 13 bp, Artificial Sequence
  Oligonucleotide for detection of SNP TSC0017052
ggagtcgaagagt

SEQ ID NO: 64664 - DNA, 13 bp, Artificial Sequence
  Oligonucleotide for detection of SNP TSC0017052
actcttcgactcc

SEQ ID NO: 64665 - DNA, 13 bp, Artificial Sequence
  Oligonucleotide for detection of SNP TSC0017053
atttagggaatat

SEQ ID NO: 64666 - DNA, 13 bp, Artificial Sequence
  Oligonucleotide for detection of SNP TSC0017053
atattccctaaat

SEQ ID NO: 64667 - DNA, 13 bp, Artificial Sequence
  Oligonucleotide for detection of SNP TSC0017053
atttagagaatat

SEQ ID NO: 64668 - DNA, 13 bp, Artificial Sequence
  Oligonucleotide for detection of SNP TSC0017053
atattctctaaat

SEQ ID NO: 64669 - DNA, 13 bp, Artificial Sequence
  Oligonucleotide for detection of SNP TSC0017054
aggggaaaaaaaa

SEQ ID NO: 64670 - DNA, 13 bp, Artificial Sequence
  Oligonucleotide for detection of SNP TSC0017054
ttttttttcccct

SEQ ID NO: 64671 - DNA, 13 bp, Artificial Sequence
  Oligonucleotide for detection of SNP TSC0017054
aggggagaaaaaa

SEQ ID NO: 64672 - DNA, 13 bp, Artificial Sequence
  Oligonucleotide for detection of SNP TSC0017054
ttttttctcccct

SEQ ID NO: 64673 - DNA, 13 bp, Artificial Sequence
  Oligonucleotide for detection of SNP TSC0017056
atgtttgtaagty

SEQ ID NO: 64674 - DNA, 13 bp, Artificial Sequence
  Oligonucleotide for detection of SNP TSC0017056
racttacaaacat

SEQ ID NO: 64675 - DNA, 13 bp, Artificial Sequence
  Oligonucleotide for detection of SNP TSC0017056
atgtttataagty

SEQ ID NO: 64676 - DNA, 13 bp, Artificial Sequence
  Oligonucleotide for detection of SNP TSC0017056
racttataaacat

SEQ ID NO: 64677 - DNA, 13 bp, Artificial Sequence
  Oligonucleotide for detection of SNP TSC0017057
aataaaaaaatag

SEQ ID NO: 64678 - DNA, 13 bp, Artificial Sequence
  Oligonucleotide for detection of SNP TSC0017057
ctatttttttatt

SEQ ID NO: 64679 - DNA, 13 bp, Artificial Sequence
  Oligonucleotide for detection of SNP TSC0017057
aataaagaaatag

SEQ ID NO: 64680 - DNA, 13 bp, Artificial Sequence
  Oligonucleotide for detection of SNP TSC0017057
ctatttctttatt

SEQ ID NO: 64681 - DNA, 13 bp, Artificial Sequence
  Oligonucleotide for detection of SNP TSC0017058
ggttgtaatgtta

SEQ ID NO: 64682 - DNA, 13 bp, Artificial Sequence
  Oligonucleotide for detection of SNP TSC0017058
taacattacaacc

SEQ ID NO: 64683 - DNA, 13 bp, Artificial Sequence
  Oligonucleotide for detection of SNP TSC0017058
ggttgtgatgtta

SEQ ID NO: 64684 - DNA, 13 bp, Artificial Sequence
  Oligonucleotide for detection of SNP TSC0017058
taacatcacaacc

SEQ ID NO: 64685 - DNA, 13 bp, Artificial Sequence
  Oligonucleotide for detection of SNP TSC0017058
ggttgcgatgtta

SEQ ID NO: 64686 - DNA, 13 bp, Artificial Sequence
  Oligonucleotide for detection of SNP TSC0017058
taacatcgcaacc

SEQ ID NO: 64687 - DNA, 13 bp, Artificial Sequence
  Oligonucleotide for detection of SNP TSC0017058
tggtattgtagty

SEQ ID NO: 64688 - DNA, 13 bp, Artificial Sequence
  Oligonucleotide for detection of SNP TSC0017058
ractacaatacca

SEQ ID NO: 64689 - DNA, 13 bp, Artificial Sequence
  Oligonucleotide for detection of SNP TSC0017058
tggtatcgtagty

SEQ ID NO: 64690 - DNA, 13 bp, Artificial Sequence
  Oligonucleotide for detection of SNP TSC0017058
ractacgatacca

SEQ ID NO: 64691 - DNA, 13 bp, Artificial Sequence
  Oligonucleotide for detection of SNP TSC0017060
aaaagaatgtagy

SEQ ID NO: 64692 - DNA, 13 bp, Artificial Sequence
  Oligonucleotide for detection of SNP TSC0017060
rctacattctttt

SEQ ID NO: 64693 - DNA, 13 bp, Artificial Sequence
  Oligonucleotide for detection of SNP TSC0017060
aaaagagtgtagy

SEQ ID NO: 64694 - DNA, 13 bp, Artificial Sequence
  Oligonucleotide for detection of SNP TSC0017060
rctacactctttt

SEQ ID NO: 64695 - DNA, 13 bp, Artificial Sequence
  Oligonucleotide for detection of SNP TSC0017062
tgtttaatttggg

SEQ ID NO: 64696 - DNA, 13 bp, Artificial Sequence
  Oligonucleotide for detection of SNP TSC0017062
cccaaattaaaca

SEQ ID NO: 64697 - DNA, 13 bp, Artificial Sequence
  Oligonucleotide for detection of SNP TSC0017062
tgtttattttggg

SEQ ID NO: 64698 - DNA, 13 bp, Artificial Sequence
  Oligonucleotide for detection of SNP TSC0017062
cccaaaataaaca

SEQ ID NO: 64699 - DNA, 13 bp, Artificial Sequence
  Oligonucleotide for detection of SNP TSC0017062
cgtttaatttggg

SEQ ID NO: 64700 - DNA, 13 bp, Artificial Sequence
  Oligonucleotide for detection of SNP TSC0017062
cccaaattaaacg

SEQ ID NO: 64701 - DNA, 13 bp, Artificial Sequence
  Oligonucleotide for detection of SNP TSC0017062
cgtttattttggg

SEQ ID NO: 64702 - DNA, 13 bp, Artificial Sequence
  Oligonucleotide for detection of SNP TSC0017062
cccaaaataaacg

SEQ ID NO: 64703 - DNA, 13 bp, Artificial Sequence
  Oligonucleotide for detection of SNP TSC0017062
tttaggttgggtg

SEQ ID NO: 64704 - DNA, 13 bp, Artificial Sequence
  Oligonucleotide for detection of SNP TSC0017062
cacccaacctaaa

SEQ ID NO: 64705 - DNA, 13 bp, Artificial Sequence
  Oligonucleotide for detection of SNP TSC0017062
tttagggtgggtg

SEQ ID NO: 64706 - DNA, 13 bp, Artificial Sequence
  Oligonucleotide for detection of SNP TSC0017062
cacccaccctaaa

SEQ ID NO: 64707 - DNA, 13 bp, Artificial Sequence
  Oligonucleotide for detection of SNP TSC0017062
tttaggttgggcg

SEQ ID NO: 64708 - DNA, 13 bp, Artificial Sequence
  Oligonucleotide for detection of SNP TSC0017062
cgcccaacctaaa

SEQ ID NO: 64709 - DNA, 13 bp, Artificial Sequence
  Oligonucleotide for detection of SNP TSC0017062
tttagggtgggcg

SEQ ID NO: 64710 - DNA, 13 bp, Artificial Sequence
  Oligonucleotide for detection of SNP TSC0017062
cgcccaccctaaa

SEQ ID NO: 64711 - DNA, 13 bp, Artificial Sequence
  Oligonucleotide for detection of SNP TSC0017064
gttgtaagtagta

SEQ ID NO: 64712 - DNA, 13 bp, Artificial Sequence
  Oligonucleotide for detection of SNP TSC0017064
tactacttacaac

SEQ ID NO: 64713 - DNA, 13 bp, Artificial Sequence
  Oligonucleotide for detection of SNP TSC0017064
gttgtatgtagta

SEQ ID NO: 64714 - DNA, 13 bp, Artificial Sequence
  Oligonucleotide for detection of SNP TSC0017064
tactacatacaac

SEQ ID NO: 64715 - DNA, 13 bp, Artificial Sequence
  Oligonucleotide for detection of SNP TSC0017064
tgttgtttatagy

SEQ ID NO: 64716 - DNA, 13 bp, Artificial Sequence
  Oligonucleotide for detection of SNP TSC0017064
rctataaacaaca

SEQ ID NO: 64717 - DNA, 13 bp, Artificial Sequence
  Oligonucleotide for detection of SNP TSC0017064
tgttgtatatagy

SEQ ID NO: 64718 - DNA, 13 bp, Artificial Sequence
  Oligonucleotide for detection of SNP TSC0017064
rctatatacaaca

SEQ ID NO: 64719 - DNA, 13 bp, Artificial Sequence
  Oligonucleotide for detection of SNP TSC0017066
gtttcgtgttttt

SEQ ID NO: 64720 - DNA, 13 bp, Artificial Sequence
  Oligonucleotide for detection of SNP TSC0017066
aaaaacacgaaac

SEQ ID NO: 64721 - DNA, 13 bp, Artificial Sequence
  Oligonucleotide for detection of SNP TSC0017066
gttttgcgttttt

SEQ ID NO: 64722 - DNA, 13 bp, Artificial Sequence
  Oligonucleotide for detection of SNP TSC0017066
aaaaacgcaaaac

SEQ ID NO: 64723 - DNA, 13 bp, Artificial Sequence
  Oligonucleotide for detection of SNP TSC0017066
gtttcgcgttttt

SEQ ID NO: 64724 - DNA, 13 bp, Artificial Sequence
  Oligonucleotide for detection of SNP TSC0017066
aaaaacgcgaaac

SEQ ID NO: 64725 - DNA, 13 bp, Artificial Sequence
  Oligonucleotide for detection of SNP TSC0017066
aagagtgtgaagy

SEQ ID NO: 64726 - DNA, 13 bp, Artificial Sequence
  Oligonucleotide for detection of SNP TSC0017066
rcttcacactctt

SEQ ID NO: 64727 - DNA, 13 bp, Artificial Sequence
  Oligonucleotide for detection of SNP TSC0017066
aagagtatgaagy

SEQ ID NO: 64728 - DNA, 13 bp, Artificial Sequence
  Oligonucleotide for detection of SNP TSC0017066
rcttcatactctt

SEQ ID NO: 64729 - DNA, 13 bp, Artificial Sequence
  Oligonucleotide for detection of SNP TSC0017066
aagagcgtgaagy

SEQ ID NO: 64730 - DNA, 13 bp, Artificial Sequence
  Oligonucleotide for detection of SNP TSC0017066
rcttcacgctctt

SEQ ID NO: 64731 - DNA, 13 bp, Artificial Sequence
  Oligonucleotide for detection of SNP TSC0017066
aagagtacgaagy

SEQ ID NO: 64732 - DNA, 13 bp, Artificial Sequence
  Oligonucleotide for detection of SNP TSC0017066
rcttcgtactctt

SEQ ID NO: 64733 - DNA, 13 bp, Artificial Sequence
  Oligonucleotide for detection of SNP TSC0017066
aagagtgcgaagy

SEQ ID NO: 64734 - DNA, 13 bp, Artificial Sequence
  Oligonucleotide for detection of SNP TSC0017066
rcttcgcactctt

SEQ ID NO: 64735 - DNA, 13 bp, Artificial Sequence
  Oligonucleotide for detection of SNP TSC0017066
aagagcgcgaagy

SEQ ID NO: 64736 - DNA, 13 bp, Artificial Sequence
  Oligonucleotide for detection of SNP TSC0017066
rcttcgcgctctt

SEQ ID NO: 64737 - DNA, 13 bp, Artificial Sequence
  Oligonucleotide for detection of SNP TSC0017067
aaaaaagttagtt

SEQ ID NO: 64738 - DNA, 13 bp, Artificial Sequence
  Oligonucleotide for detection of SNP TSC0017067
aactaactttttt

SEQ ID NO: 64739 - DNA, 13 bp, Artificial Sequence
  Oligonucleotide for detection of SNP TSC0017067
aaaaaaattagtt

SEQ ID NO: 64740 - DNA, 13 bp, Artificial Sequence
  Oligonucleotide for detection of SNP TSC0017067
aactaattttttt

SEQ ID NO: 64741 - DNA, 13 bp, Artificial Sequence
  Oligonucleotide for detection of SNP TSC0017068
aaattagaggtgy

SEQ ID NO: 64742 - DNA, 13 bp, Artificial Sequence
  Oligonucleotide for detection of SNP TSC0017068
rcacctctaattt

SEQ ID NO: 64743 - DNA, 13 bp, Artificial Sequence
  Oligonucleotide for detection of SNP TSC0017068
aaattaaaggtgy

SEQ ID NO: 64744 - DNA, 13 bp, Artificial Sequence
  Oligonucleotide for detection of SNP TSC0017068
rcacctttaattt

SEQ ID NO: 64745 - DNA, 13 bp, Artificial Sequence
  Oligonucleotide for detection of SNP TSC0017072
ggttggagttggy

SEQ ID NO: 64746 - DNA, 13 bp, Artificial Sequence
  Oligonucleotide for detection of SNP TSC0017072
rccaactccaacc

SEQ ID NO: 64747 - DNA, 13 bp, Artificial Sequence
  Oligonucleotide for detection of SNP TSC0017072
ggttggggttggy

SEQ ID NO: 64748 - DNA, 13 bp, Artificial Sequence
  Oligonucleotide for detection of SNP TSC0017072
rccaaccccaacc

SEQ ID NO: 64749 - DNA, 13 bp, Artificial Sequence
  Oligonucleotide for detection of SNP TSC0017073
ttaataaggtttt

SEQ ID NO: 64750 - DNA, 13 bp, Artificial Sequence
  Oligonucleotide for detection of SNP TSC0017073
aaaaccttattaa

SEQ ID NO: 64751 - DNA, 13 bp, Artificial Sequence
  Oligonucleotide for detection of SNP TSC0017073
ttaatagggtttt

SEQ ID NO: 64752 - DNA, 13 bp, Artificial Sequence
  Oligonucleotide for detection of SNP TSC0017073
aaaaccctattaa

SEQ ID NO: 64753 - DNA, 13 bp, Artificial Sequence
  Oligonucleotide for detection of SNP TSC0017075
atgtttagtaaaa

SEQ ID NO: 64754 - DNA, 13 bp, Artificial Sequence
  Oligonucleotide for detection of SNP TSC0017075
ttttactaaacat

SEQ ID NO: 64755 - DNA, 13 bp, Artificial Sequence
  Oligonucleotide for detection of SNP TSC0017075
atgtttggtaaaa

SEQ ID NO: 64756 - DNA, 13 bp, Artificial Sequence
  Oligonucleotide for detection of SNP TSC0017075
ttttaccaaacat

SEQ ID NO: 64757 - DNA, 13 bp, Artificial Sequence
  Oligonucleotide for detection of SNP TSC0017075
acgtttagtaaaa

SEQ ID NO: 64758 - DNA, 13 bp, Artificial Sequence
  Oligonucleotide for detection of SNP TSC0017075
ttttactaaacgt

SEQ ID NO: 64759 - DNA, 13 bp, Artificial Sequence
  Oligonucleotide for detection of SNP TSC0017075
acgtttggtaaaa

SEQ ID NO: 64760 - DNA, 13 bp, Artificial Sequence
  Oligonucleotide for detection of SNP TSC0017075
ttttaccaaacgt

SEQ ID NO: 64761 - DNA, 13 bp, Artificial Sequence
  Oligonucleotide for detection of SNP TSC0017075
atgttcggtaaaa

SEQ ID NO: 64762 - DNA, 13 bp, Artificial Sequence
  Oligonucleotide for detection of SNP TSC0017075
ttttaccgaacat

SEQ ID NO: 64763 - DNA, 13 bp, Artificial Sequence
  Oligonucleotide for detection of SNP TSC0017075
acgttcggtaaaa

SEQ ID NO: 64764 - DNA, 13 bp, Artificial Sequence
  Oligonucleotide for detection of SNP TSC0017075
ttttaccgaacgt

SEQ ID NO: 64765 - DNA, 13 bp, Artificial Sequence
  Oligonucleotide for detection of SNP TSC0017075
ttttgttgggtgt

SEQ ID NO: 64766 - DNA, 13 bp, Artificial Sequence
  Oligonucleotide for detection of SNP TSC0017075
acacccaacaaaa

SEQ ID NO: 64767 - DNA, 13 bp, Artificial Sequence
  Oligonucleotide for detection of SNP TSC0017075
ttttgttgggcgt

SEQ ID NO: 64768 - DNA, 13 bp, Artificial Sequence
  Oligonucleotide for detection of SNP TSC0017075
acgcccaacaaaa

SEQ ID NO: 64769 - DNA, 13 bp, Artificial Sequence
  Oligonucleotide for detection of SNP TSC0017075
ttttgtcgggtgt

SEQ ID NO: 64770 - DNA, 13 bp, Artificial Sequence
  Oligonucleotide for detection of SNP TSC0017075
acacccgacaaaa

SEQ ID NO: 64771 - DNA, 13 bp, Artificial Sequence
  Oligonucleotide for detection of SNP TSC0017075
ttttgtcgggcgt

SEQ ID NO: 64772 - DNA, 13 bp, Artificial Sequence
  Oligonucleotide for detection of SNP TSC0017075
acgcccgacaaaa

SEQ ID NO: 64773 - DNA, 13 bp, Artificial Sequence
  Oligonucleotide for detection of SNP TSC0017077
ttgagggttatty

SEQ ID NO: 64774 - DNA, 13 bp, Artificial Sequence
  Oligonucleotide for detection of SNP TSC0017077
raataaccctcaa

SEQ ID NO: 64775 - DNA, 13 bp, Artificial Sequence
  Oligonucleotide for detection of SNP TSC0017077
ttgaggattatty

SEQ ID NO: 64776 - DNA, 13 bp, Artificial Sequence
  Oligonucleotide for detection of SNP TSC0017077
raataatcctcaa

SEQ ID NO: 64777 - DNA, 13 bp, Artificial Sequence
  Oligonucleotide for detection of SNP TSC0017077
tcgagggttatty

SEQ ID NO: 64778 - DNA, 13 bp, Artificial Sequence
  Oligonucleotide for detection of SNP TSC0017077
raataaccctcga

SEQ ID NO: 64779 - DNA, 13 bp, Artificial Sequence
  Oligonucleotide for detection of SNP TSC0017077
tcgaggattatty

SEQ ID NO: 64780 - DNA, 13 bp, Artificial Sequence
  Oligonucleotide for detection of SNP TSC0017077
raataatcctcga

SEQ ID NO: 64781 - DNA, 13 bp, Artificial Sequence
  Oligonucleotide for detection of SNP TSC0017078
ggagggaaaaaaa

SEQ ID NO: 64782 - DNA, 13 bp, Artificial Sequence
  Oligonucleotide for detection of SNP TSC0017078
tttttttccctcc

SEQ ID NO: 64783 - DNA, 13 bp, Artificial Sequence
  Oligonucleotide for detection of SNP TSC0017078
ggaggggaaaaaa

SEQ ID NO: 64784 - DNA, 13 bp, Artificial Sequence
  Oligonucleotide for detection of SNP TSC0017078
ttttttcccctcc

SEQ ID NO: 64785 - DNA, 13 bp, Artificial Sequence
  Oligonucleotide for detection of SNP TSC0017079
tatgttagggatg

SEQ ID NO: 64786 - DNA, 13 bp, Artificial Sequence
  Oligonucleotide for detection of SNP TSC0017079
catccctaacata

SEQ ID NO: 64787 - DNA, 13 bp, Artificial Sequence
  Oligonucleotide for detection of SNP TSC0017079
tatgttggggatg

SEQ ID NO: 64788 - DNA, 13 bp, Artificial Sequence
  Oligonucleotide for detection of SNP TSC0017079
catccccaacata

SEQ ID NO: 64789 - DNA, 13 bp, Artificial Sequence
  Oligonucleotide for detection of SNP TSC0017081
atgataatttttt

SEQ ID NO: 64790 - DNA, 13 bp, Artificial Sequence
  Oligonucleotide for detection of SNP TSC0017081
aaaaaattatcat

SEQ ID NO: 64791 - DNA, 13 bp, Artificial Sequence
  Oligonucleotide for detection of SNP TSC0017081
atgatagtttttt

SEQ ID NO: 64792 - DNA, 13 bp, Artificial Sequence
  Oligonucleotide for detection of SNP TSC0017081
aaaaaactatcat

SEQ ID NO: 64793 - DNA, 13 bp, Artificial Sequence
  Oligonucleotide for detection of SNP TSC0017082
tataaaggagtaa

SEQ ID NO: 64794 - DNA, 13 bp, Artificial Sequence
  Oligonucleotide for detection of SNP TSC0017082
ttactcctttata

SEQ ID NO: 64795 - DNA, 13 bp, Artificial Sequence
  Oligonucleotide for detection of SNP TSC0017082
tataaaagagtaa

SEQ ID NO: 64796 - DNA, 13 bp, Artificial Sequence
  Oligonucleotide for detection of SNP TSC0017082
ttactcttttata

SEQ ID NO: 64797 - DNA, 13 bp, Artificial Sequence
  Oligonucleotide for detection of SNP TSC0017083
atagagaaggttt

SEQ ID NO: 64798 - DNA, 13 bp, Artificial Sequence
  Oligonucleotide for detection of SNP TSC0017083
aaaccttctctat

SEQ ID NO: 64799 - DNA, 13 bp, Artificial Sequence
  Oligonucleotide for detection of SNP TSC0017083
atagaggaggttt

SEQ ID NO: 64800 - DNA, 13 bp, Artificial Sequence
  Oligonucleotide for detection of SNP TSC0017083
aaacctcctctat

SEQ ID NO: 64801 - DNA, 13 bp, Artificial Sequence
  Oligonucleotide for detection of SNP TSC0017084
tttttgaagttay

SEQ ID NO: 64802 - DNA, 13 bp, Artificial Sequence
  Oligonucleotide for detection of SNP TSC0017084
rtaacttcaaaaa

SEQ ID NO: 64803 - DNA, 13 bp, Artificial Sequence
  Oligonucleotide for detection of SNP TSC0017084
tttttgtagttay

SEQ ID NO: 64804 - DNA, 13 bp, Artificial Sequence
  Oligonucleotide for detection of SNP TSC0017084
rtaactacaaaaa

SEQ ID NO: 64805 - DNA, 13 bp, Artificial Sequence
  Oligonucleotide for detection of SNP TSC0017084
gtgattttaaggg

SEQ ID NO: 64806 - DNA, 13 bp, Artificial Sequence
  Oligonucleotide for detection of SNP TSC0017084
cccttaaaatcac

SEQ ID NO: 64807 - DNA, 13 bp, Artificial Sequence
  Oligonucleotide for detection of SNP TSC0017084
gtgattgtaaggg

SEQ ID NO: 64808 - DNA, 13 bp, Artificial Sequence
  Oligonucleotide for detection of SNP TSC0017084
cccttacaatcac

SEQ ID NO: 64809 - DNA, 13 bp, Artificial Sequence
  Oligonucleotide for detection of SNP TSC0017085
ataaaaaaaaaay

SEQ ID NO: 64810 - DNA, 13 bp, Artificial Sequence
  Oligonucleotide for detection of SNP TSC0017085
rttttttttttat

SEQ ID NO: 64811 - DNA, 13 bp, Artificial Sequence
  Oligonucleotide for detection of SNP TSC0017085
ataaaataaaaay

SEQ ID NO: 64812 - DNA, 13 bp, Artificial Sequence
  Oligonucleotide for detection of SNP TSC0017085
rtttttattttat

SEQ ID NO: 64813 - DNA, 13 bp, Artificial Sequence
  Oligonucleotide for detection of SNP TSC0017085
gttttttttttgt

SEQ ID NO: 64814 - DNA, 13 bp, Artificial Sequence
  Oligonucleotide for detection of SNP TSC0017085
acaaaaaaaaaac

SEQ ID NO: 64815 - DNA, 13 bp, Artificial Sequence
  Oligonucleotide for detection of SNP TSC0017085
gtttttgttttgt

SEQ ID NO: 64816 - DNA, 13 bp, Artificial Sequence
  Oligonucleotide for detection of SNP TSC0017085
acaaaacaaaaac

SEQ ID NO: 64817 - DNA, 13 bp, Artificial Sequence
  Oligonucleotide for detection of SNP TSC0017086
aatttttggatat

SEQ ID NO: 64818 - DNA, 13 bp, Artificial Sequence
  Oligonucleotide for detection of SNP TSC0017086
atatccaaaaatt

SEQ ID NO: 64819 - DNA, 13 bp, Artificial Sequence
  Oligonucleotide for detection of SNP TSC0017086
aattttcggatat

SEQ ID NO: 64820 - DNA, 13 bp, Artificial Sequence
  Oligonucleotide for detection of SNP TSC0017086
atatccgaaaatt

SEQ ID NO: 64821 - DNA, 13 bp, Artificial Sequence
  Oligonucleotide for detection of SNP TSC0017086
atgtttgagaatt

SEQ ID NO: 64822 - DNA, 13 bp, Artificial Sequence
  Oligonucleotide for detection of SNP TSC0017086
aattctcaaacat

SEQ ID NO: 64823 - DNA, 13 bp, Artificial Sequence
  Oligonucleotide for detection of SNP TSC0017086
atgtttaagaatt

SEQ ID NO: 64824 - DNA, 13 bp, Artificial Sequence
  Oligonucleotide for detection of SNP TSC0017086
aattcttaaacat

SEQ ID NO: 64825 - DNA, 13 bp, Artificial Sequence
  Oligonucleotide for detection of SNP TSC0017086
atgttcgagaatt

SEQ ID NO: 64826 - DNA, 13 bp, Artificial Sequence
  Oligonucleotide for detection of SNP TSC0017086
aattctcgaacat

SEQ ID NO: 64827 - DNA, 13 bp, Artificial Sequence
  Oligonucleotide for detection of SNP TSC0017087
taaggtaagggtg

SEQ ID NO: 64828 - DNA, 13 bp, Artificial Sequence
  Oligonucleotide for detection of SNP TSC0017087
cacccttacctta

SEQ ID NO: 64829 - DNA, 13 bp, Artificial Sequence
  Oligonucleotide for detection of SNP TSC0017087
taaggtgagggtg

SEQ ID NO: 64830 - DNA, 13 bp, Artificial Sequence
  Oligonucleotide for detection of SNP TSC0017087
caccctcacctta

SEQ ID NO: 64831 - DNA, 13 bp, Artificial Sequence
  Oligonucleotide for detection of SNP TSC0017087
taaggcgagggtg

SEQ ID NO: 64832 - DNA, 13 bp, Artificial Sequence
  Oligonucleotide for detection of SNP TSC0017087
caccctcgcctta

SEQ ID NO: 64833 - DNA, 13 bp, Artificial Sequence
  Oligonucleotide for detection of SNP TSC0017087
tatttttgttttg

SEQ ID NO: 64834 - DNA, 13 bp, Artificial Sequence
  Oligonucleotide for detection of SNP TSC0017087
caaaacaaaaata

SEQ ID NO: 64835 - DNA, 13 bp, Artificial Sequence
  Oligonucleotide for detection of SNP TSC0017087
tattttcgttttg

SEQ ID NO: 64836 - DNA, 13 bp, Artificial Sequence
  Oligonucleotide for detection of SNP TSC0017087
caaaacgaaaata

SEQ ID NO: 64837 - DNA, 13 bp, Artificial Sequence
  Oligonucleotide for detection of SNP TSC0017088
agatatatgttta

SEQ ID NO: 64838 - DNA, 13 bp, Artificial Sequence
  Oligonucleotide for detection of SNP TSC0017088
taaacatatatct

SEQ ID NO: 64839 - DNA, 13 bp, Artificial Sequence
  Oligonucleotide for detection of SNP TSC0017088
agatatgtgttta

SEQ ID NO: 64840 - DNA, 13 bp, Artificial Sequence
  Oligonucleotide for detection of SNP TSC0017088
taaacacatatct

SEQ ID NO: 64841 - DNA, 13 bp, Artificial Sequence
  Oligonucleotide for detection of SNP TSC0017088
agatacgtgttta

SEQ ID NO: 64842 - DNA, 13 bp, Artificial Sequence
  Oligonucleotide for detection of SNP TSC0017088
taaacacgtatct

SEQ ID NO: 64843 - DNA, 13 bp, Artificial Sequence
  Oligonucleotide for detection of SNP TSC0017088
tgggtatgtgttt

SEQ ID NO: 64844 - DNA, 13 bp, Artificial Sequence
  Oligonucleotide for detection of SNP TSC0017088
aaacacataccca

SEQ ID NO: 64845 - DNA, 13 bp, Artificial Sequence
  Oligonucleotide for detection of SNP TSC0017088
tgggtacgtgttt

SEQ ID NO: 64846 - DNA, 13 bp, Artificial Sequence
  Oligonucleotide for detection of SNP TSC0017088
aaacacgtaccca

SEQ ID NO: 64847 - DNA, 13 bp, Artificial Sequence
  Oligonucleotide for detection of SNP TSC0017089
gagtttagtttat

SEQ ID NO: 64848 - DNA, 13 bp, Artificial Sequence
  Oligonucleotide for detection of SNP TSC0017089
ataaactaaactc

SEQ ID NO: 64849 - DNA, 13 bp, Artificial Sequence
  Oligonucleotide for detection of SNP TSC0017089
gagtttggtttat

SEQ ID NO: 64850 - DNA, 13 bp, Artificial Sequence
  Oligonucleotide for detection of SNP TSC0017089
ataaaccaaactc

SEQ ID NO: 64851 - DNA, 13 bp, Artificial Sequence
  Oligonucleotide for detection of SNP TSC0017089
gagttcggtttat

SEQ ID NO: 64852 - DNA, 13 bp, Artificial Sequence
  Oligonucleotide for detection of SNP TSC0017089
ataaaccgaactc

SEQ ID NO: 64853 - DNA, 13 bp, Artificial Sequence
  Oligonucleotide for detection of SNP TSC0017089
ataggttgggtty

SEQ ID NO: 64854 - DNA, 13 bp, Artificial Sequence
  Oligonucleotide for detection of SNP TSC0017089
raacccaacctat

SEQ ID NO: 64855 - DNA, 13 bp, Artificial Sequence
  Oligonucleotide for detection of SNP TSC0017089
ataggtcgggtty

SEQ ID NO: 64856 - DNA, 13 bp, Artificial Sequence
  Oligonucleotide for detection of SNP TSC0017089
raacccgacctat

SEQ ID NO: 64857 - DNA, 13 bp, Artificial Sequence
  Oligonucleotide for detection of SNP TSC0017090
atggtgagtagty

SEQ ID NO: 64858 - DNA, 13 bp, Artificial Sequence
  Oligonucleotide for detection of SNP TSC0017090
ractactcaccat

SEQ ID NO: 64859 - DNA, 13 bp, Artificial Sequence
  Oligonucleotide for detection of SNP TSC0017090
atggtgggtagty

SEQ ID NO: 64860 - DNA, 13 bp, Artificial Sequence
  Oligonucleotide for detection of SNP TSC0017090
ractacccaccat

SEQ ID NO: 64861 - DNA, 13 bp, Artificial Sequence
  Oligonucleotide for detection of SNP TSC0017091
tttaaagtgtttt

SEQ ID NO: 64862 - DNA, 13 bp, Artificial Sequence
  Oligonucleotide for detection of SNP TSC0017091
aaaacactttaaa

SEQ ID NO: 64863 - DNA, 13 bp, Artificial Sequence
  Oligonucleotide for detection of SNP TSC0017091
tttaaaatgtttt

SEQ ID NO: 64864 - DNA, 13 bp, Artificial Sequence
  Oligonucleotide for detection of SNP TSC0017091
aaaacattttaaa

SEQ ID NO: 64865 - DNA, 13 bp, Artificial Sequence
  Oligonucleotide for detection of SNP TSC0017092
agtaggggttgaa

SEQ ID NO: 64866 - DNA, 13 bp, Artificial Sequence
  Oligonucleotide for detection of SNP TSC0017092
ttcaacccctact

SEQ ID NO: 64867 - DNA, 13 bp, Artificial Sequence
  Oligonucleotide for detection of SNP TSC0017092
agtaggtgttgaa

SEQ ID NO: 64868 - DNA, 13 bp, Artificial Sequence
  Oligonucleotide for detection of SNP TSC0017092
ttcaacacctact

SEQ ID NO: 64869 - DNA, 13 bp, Artificial Sequence
  Oligonucleotide for detection of SNP TSC0017092
tttagtttttgtt

SEQ ID NO: 64870 - DNA, 13 bp, Artificial Sequence
  Oligonucleotide for detection of SNP TSC0017092
aacaaaaactaaa

SEQ ID NO: 64871 - DNA, 13 bp, Artificial Sequence
  Oligonucleotide for detection of SNP TSC0017092
tttagtatttgtt

SEQ ID NO: 64872 - DNA, 13 bp, Artificial Sequence
  Oligonucleotide for detection of SNP TSC0017092
aacaaatactaaa

SEQ ID NO: 64873 - DNA, 13 bp, Artificial Sequence
  Oligonucleotide for detection of SNP TSC0017093
ggggtagagggag

SEQ ID NO: 64874 - DNA, 13 bp, Artificial Sequence
  Oligonucleotide for detection of SNP TSC0017093
ctccctctacccc

SEQ ID NO: 64875 - DNA, 13 bp, Artificial Sequence
  Oligonucleotide for detection of SNP TSC0017093
ggggtatagggag

SEQ ID NO: 64876 - DNA, 13 bp, Artificial Sequence
  Oligonucleotide for detection of SNP TSC0017093
ctccctatacccc

SEQ ID NO: 64877 - DNA, 13 bp, Artificial Sequence
  Oligonucleotide for detection of SNP TSC0017097
gattgggttttat

SEQ ID NO: 64878 - DNA, 13 bp, Artificial Sequence
  Oligonucleotide for detection of SNP TSC0017097
ataaaacccaatc

SEQ ID NO: 64879 - DNA, 13 bp, Artificial Sequence
  Oligonucleotide for detection of SNP TSC0017097
gattggattttat

SEQ ID NO: 64880 - DNA, 13 bp, Artificial Sequence
  Oligonucleotide for detection of SNP TSC0017097
ataaaatccaatc

SEQ ID NO: 64881 - DNA, 13 bp, Artificial Sequence
  Oligonucleotide for detection of SNP TSC0017098
gatgttgtgtttg

SEQ ID NO: 64882 - DNA, 13 bp, Artificial Sequence
  Oligonucleotide for detection of SNP TSC0017098
caaacacaacatc

SEQ ID NO: 64883 - DNA, 13 bp, Artificial Sequence
  Oligonucleotide for detection of SNP TSC0017098
gatgttttgtttg

SEQ ID NO: 64884 - DNA, 13 bp, Artificial Sequence
  Oligonucleotide for detection of SNP TSC0017098
caaacaaaacatc

SEQ ID NO: 64885 - DNA, 13 bp, Artificial Sequence
  Oligonucleotide for detection of SNP TSC0017098
tagatatagtaty

SEQ ID NO: 64886 - DNA, 13 bp, Artificial Sequence
  Oligonucleotide for detection of SNP TSC0017098
ratactatatcta

SEQ ID NO: 64887 - DNA, 13 bp, Artificial Sequence
  Oligonucleotide for detection of SNP TSC0017098
tagataaagtaty

SEQ ID NO: 64888 - DNA, 13 bp, Artificial Sequence
  Oligonucleotide for detection of SNP TSC0017098
ratactttatcta

SEQ ID NO: 64889 - DNA, 13 bp, Artificial Sequence
  Oligonucleotide for detection of SNP TSC0017099
tatagaaaaatga

SEQ ID NO: 64890 - DNA, 13 bp, Artificial Sequence
  Oligonucleotide for detection of SNP TSC0017099
tcatttttctata

SEQ ID NO: 64891 - DNA, 13 bp, Artificial Sequence
  Oligonucleotide for detection of SNP TSC0017099
tatagataaatga

SEQ ID NO: 64892 - DNA, 13 bp, Artificial Sequence
  Oligonucleotide for detection of SNP TSC0017099
tcatttatctata

SEQ ID NO: 64893 - DNA, 13 bp, Artificial Sequence
  Oligonucleotide for detection of SNP TSC0017099
tatagaaaaacga

SEQ ID NO: 64894 - DNA, 13 bp, Artificial Sequence
  Oligonucleotide for detection of SNP TSC0017099
tcgtttttctata

SEQ ID NO: 64895 - DNA, 13 bp, Artificial Sequence
  Oligonucleotide for detection of SNP TSC0017099
tatagataaacga

SEQ ID NO: 64896 - DNA, 13 bp, Artificial Sequence
  Oligonucleotide for detection of SNP TSC0017099
tcgtttatctata

SEQ ID NO: 64897 - DNA, 13 bp, Artificial Sequence
  Oligonucleotide for detection of SNP TSC0017099
ttgtttatttatg

SEQ ID NO: 64898 - DNA, 13 bp, Artificial Sequence
  Oligonucleotide for detection of SNP TSC0017099
cataaataaacaa

SEQ ID NO: 64899 - DNA, 13 bp, Artificial Sequence
  Oligonucleotide for detection of SNP TSC0017099
tcgtttttttatg

SEQ ID NO: 64900 - DNA, 13 bp, Artificial Sequence
  Oligonucleotide for detection of SNP TSC0017099
cataaaaaaacga

SEQ ID NO: 64901 - DNA, 13 bp, Artificial Sequence
  Oligonucleotide for detection of SNP TSC0017099
tcgtttatttatg

SEQ ID NO: 64902 - DNA, 13 bp, Artificial Sequence
  Oligonucleotide for detection of SNP TSC0017099
cataaataaacga

SEQ ID NO: 64903 - DNA, 13 bp, Artificial Sequence
  Oligonucleotide for detection of SNP TSC0017100
agtagtgggtaga

SEQ ID NO: 64904 - DNA, 13 bp, Artificial Sequence
  Oligonucleotide for detection of SNP TSC0017100
tctacccactact

SEQ ID NO: 64905 - DNA, 13 bp, Artificial Sequence
  Oligonucleotide for detection of SNP TSC0017100
agtagttggtaga

SEQ ID NO: 64906 - DNA, 13 bp, Artificial Sequence
  Oligonucleotide for detection of SNP TSC0017100
tctaccaactact

SEQ ID NO: 64907 - DNA, 13 bp, Artificial Sequence
  Oligonucleotide for detection of SNP TSC0017100
tttatttattgtt

SEQ ID NO: 64908 - DNA, 13 bp, Artificial Sequence
  Oligonucleotide for detection of SNP TSC0017100
aacaataaataaa

SEQ ID NO: 64909 - DNA, 13 bp, Artificial Sequence
  Oligonucleotide for detection of SNP TSC0017100
tttattaattgtt

SEQ ID NO: 64910 - DNA, 13 bp, Artificial Sequence
  Oligonucleotide for detection of SNP TSC0017100
aacaattaataaa

SEQ ID NO: 64911 - DNA, 13 bp, Artificial Sequence
  Oligonucleotide for detection of SNP TSC0017101
gttaagtgggtgy

SEQ ID NO: 64912 - DNA, 13 bp, Artificial Sequence
  Oligonucleotide for detection of SNP TSC0017101
rcacccacttaac

SEQ ID NO: 64913 - DNA, 13 bp, Artificial Sequence
  Oligonucleotide for detection of SNP TSC0017101
gttaagcgggtgy

SEQ ID NO: 64914 - DNA, 13 bp, Artificial Sequence
  Oligonucleotide for detection of SNP TSC0017101
rcacccgcttaac

SEQ ID NO: 64915 - DNA, 13 bp, Artificial Sequence
  Oligonucleotide for detection of SNP TSC0017101
gtatttgtttaay

SEQ ID NO: 64916 - DNA, 13 bp, Artificial Sequence
  Oligonucleotide for detection of SNP TSC0017101
rttaaacaaatac

SEQ ID NO: 64917 - DNA, 13 bp, Artificial Sequence
  Oligonucleotide for detection of SNP TSC0017101
gtatttatttaay

SEQ ID NO: 64918 - DNA, 13 bp, Artificial Sequence
  Oligonucleotide for detection of SNP TSC0017101
rttaaataaatac

SEQ ID NO: 64919 - DNA, 13 bp, Artificial Sequence
  Oligonucleotide for detection of SNP TSC0017101
gtattcgtttaay

SEQ ID NO: 64920 - DNA, 13 bp, Artificial Sequence
  Oligonucleotide for detection of SNP TSC0017101
rttaaacgaatac

SEQ ID NO: 64921 - DNA, 13 bp, Artificial Sequence
  Oligonucleotide for detection of SNP TSC0017102
tagtggggtaggt

SEQ ID NO: 64922 - DNA, 13 bp, Artificial Sequence
  Oligonucleotide for detection of SNP TSC0017102
acctaccccacta

SEQ ID NO: 64923 - DNA, 13 bp, Artificial Sequence
  Oligonucleotide for detection of SNP TSC0017102
tagtggagtaggt

SEQ ID NO: 64924 - DNA, 13 bp, Artificial Sequence
  Oligonucleotide for detection of SNP TSC0017102
acctactccacta

SEQ ID NO: 64925 - DNA, 13 bp, Artificial Sequence
  Oligonucleotide for detection of SNP TSC0017104
gtgtttattatta

SEQ ID NO: 64926 - DNA, 13 bp, Artificial Sequence
  Oligonucleotide for detection of SNP TSC0017104
taataataaacac

SEQ ID NO: 64927 - DNA, 13 bp, Artificial Sequence
  Oligonucleotide for detection of SNP TSC0017104
gtgtttgttatta

SEQ ID NO: 64928 - DNA, 13 bp, Artificial Sequence
  Oligonucleotide for detection of SNP TSC0017104
taataacaaacac

SEQ ID NO: 64929 - DNA, 13 bp, Artificial Sequence
  Oligonucleotide for detection of SNP TSC0017104
gcgtttattatta

SEQ ID NO: 64930 - DNA, 13 bp, Artificial Sequence
  Oligonucleotide for detection of SNP TSC0017104
taataataaacgc

SEQ ID NO: 64931 - DNA, 13 bp, Artificial Sequence
  Oligonucleotide for detection of SNP TSC0017104
gcgtttgttatta

SEQ ID NO: 64932 - DNA, 13 bp, Artificial Sequence
  Oligonucleotide for detection of SNP TSC0017104
taataacaaacgc

SEQ ID NO: 64933 - DNA, 13 bp, Artificial Sequence
  Oligonucleotide for detection of SNP TSC0017104
gtgttcgttatta

SEQ ID NO: 64934 - DNA, 13 bp, Artificial Sequence
  Oligonucleotide for detection of SNP TSC0017104
taataacgaacac

SEQ ID NO: 64935 - DNA, 13 bp, Artificial Sequence
  Oligonucleotide for detection of SNP TSC0017104
gcgttcgttatta

SEQ ID NO: 64936 - DNA, 13 bp, Artificial Sequence
  Oligonucleotide for detection of SNP TSC0017104
taataacgaacgc

SEQ ID NO: 64937 - DNA, 13 bp, Artificial Sequence
  Oligonucleotide for detection of SNP TSC0017104
tggtggtgggtgy

SEQ ID NO: 64938 - DNA, 13 bp, Artificial Sequence
  Oligonucleotide for detection of SNP TSC0017104
rcacccaccacca

SEQ ID NO: 64939 - DNA, 13 bp, Artificial Sequence
  Oligonucleotide for detection of SNP TSC0017104
tggtggtgggcgy

SEQ ID NO: 64940 - DNA, 13 bp, Artificial Sequence
  Oligonucleotide for detection of SNP TSC0017104
rcgcccaccacca

SEQ ID NO: 64941 - DNA, 13 bp, Artificial Sequence
  Oligonucleotide for detection of SNP TSC0017104
tggtggcgggtgy

SEQ ID NO: 64942 - DNA, 13 bp, Artificial Sequence
  Oligonucleotide for detection of SNP TSC0017104
rcacccgccacca

SEQ ID NO: 64943 - DNA, 13 bp, Artificial Sequence
  Oligonucleotide for detection of SNP TSC0017104
tggtggcgggcgy

SEQ ID NO: 64944 - DNA, 13 bp, Artificial Sequence
  Oligonucleotide for detection of SNP TSC0017104
rcgcccgccacca

SEQ ID NO: 64945 - DNA, 13 bp, Artificial Sequence
  Oligonucleotide for detection of SNP TSC0017107
aggtatggtggtt

SEQ ID NO: 64946 - DNA, 13 bp, Artificial Sequence
  Oligonucleotide for detection of SNP TSC0017107
aaccaccatacct

SEQ ID NO: 64947 - DNA, 13 bp, Artificial Sequence
  Oligonucleotide for detection of SNP TSC0017107
aggtatagtggtt

SEQ ID NO: 64948 - DNA, 13 bp, Artificial Sequence
  Oligonucleotide for detection of SNP TSC0017107
aaccactatacct

SEQ ID NO: 64949 - DNA, 13 bp, Artificial Sequence
  Oligonucleotide for detection of SNP TSC0017107
aggtacggtggtt

SEQ ID NO: 64950 - DNA, 13 bp, Artificial Sequence
  Oligonucleotide for detection of SNP TSC0017107
aaccaccgtacct

SEQ ID NO: 64951 - DNA, 13 bp, Artificial Sequence
  Oligonucleotide for detection of SNP TSC0017108
attttgatagatg

SEQ ID NO: 64952 - DNA, 13 bp, Artificial Sequence
  Oligonucleotide for detection of SNP TSC0017108
catctatcaaaat

SEQ ID NO: 64953 - DNA, 13 bp, Artificial Sequence
  Oligonucleotide for detection of SNP TSC0017108
attttgttagatg

SEQ ID NO: 64954 - DNA, 13 bp, Artificial Sequence
  Oligonucleotide for detection of SNP TSC0017108
catctaacaaaat

SEQ ID NO: 64955 - DNA, 13 bp, Artificial Sequence
  Oligonucleotide for detection of SNP TSC0017108
tatttattagggt

SEQ ID NO: 64956 - DNA, 13 bp, Artificial Sequence
  Oligonucleotide for detection of SNP TSC0017108
accctaataaata

SEQ ID NO: 64957 - DNA, 13 bp, Artificial Sequence
  Oligonucleotide for detection of SNP TSC0017108
tatttagtagggt

SEQ ID NO: 64958 - DNA, 13 bp, Artificial Sequence
  Oligonucleotide for detection of SNP TSC0017108
accctactaaata

SEQ ID NO: 64959 - DNA, 13 bp, Artificial Sequence
  Oligonucleotide for detection of SNP TSC0017109
tattttaggttaa

SEQ ID NO: 64960 - DNA, 13 bp, Artificial Sequence
  Oligonucleotide for detection of SNP TSC0017109
ttaacctaaaata

SEQ ID NO: 64961 - DNA, 13 bp, Artificial Sequence
  Oligonucleotide for detection of SNP TSC0017109
tattttgggttaa

SEQ ID NO: 64962 - DNA, 13 bp, Artificial Sequence
  Oligonucleotide for detection of SNP TSC0017109
ttaacccaaaata

SEQ ID NO: 64963 - DNA, 13 bp, Artificial Sequence
  Oligonucleotide for detection of SNP TSC0017115
tttgtagaaaaty

SEQ ID NO: 64964 - DNA, 13 bp, Artificial Sequence
  Oligonucleotide for detection of SNP TSC0017115
rattttctacaaa

SEQ ID NO: 64965 - DNA, 13 bp, Artificial Sequence
  Oligonucleotide for detection of SNP TSC0017115
tttgtaaaaaaty

SEQ ID NO: 64966 - DNA, 13 bp, Artificial Sequence
  Oligonucleotide for detection of SNP TSC0017115
rattttttacaaa

SEQ ID NO: 64967 - DNA, 13 bp, Artificial Sequence
  Oligonucleotide for detection of SNP TSC0017116
ttttagtgttggt

SEQ ID NO: 64968 - DNA, 13 bp, Artificial Sequence
  Oligonucleotide for detection of SNP TSC0017116
accaacactaaaa

SEQ ID NO: 64969 - DNA, 13 bp, Artificial Sequence
  Oligonucleotide for detection of SNP TSC0017116
ttttagcgttggt

SEQ ID NO: 64970 - DNA, 13 bp, Artificial Sequence
  Oligonucleotide for detection of SNP TSC0017116
accaacgctaaaa

SEQ ID NO: 64971 - DNA, 13 bp, Artificial Sequence
  Oligonucleotide for detection of SNP TSC0017116
attaatgttgaga

SEQ ID NO: 64972 - DNA, 13 bp, Artificial Sequence
  Oligonucleotide for detection of SNP TSC0017116
tctcaacattaat

SEQ ID NO: 64973 - DNA, 13 bp, Artificial Sequence
  Oligonucleotide for detection of SNP TSC0017116
attaatattgaga

SEQ ID NO: 64974 - DNA, 13 bp, Artificial Sequence
  Oligonucleotide for detection of SNP TSC0017116
tctcaatattaat

SEQ ID NO: 64975 - DNA, 13 bp, Artificial Sequence
  Oligonucleotide for detection of SNP TSC0017116
attaacgttgaga

SEQ ID NO: 64976 - DNA, 13 bp, Artificial Sequence
  Oligonucleotide for detection of SNP TSC0017116
tctcaacgttaat

SEQ ID NO: 64977 - DNA, 13 bp, Artificial Sequence
  Oligonucleotide for detection of SNP TSC0017117
tggttgattttat

SEQ ID NO: 64978 - DNA, 13 bp, Artificial Sequence
  Oligonucleotide for detection of SNP TSC0017117
ataaaatcaacca

SEQ ID NO: 64979 - DNA, 13 bp, Artificial Sequence
  Oligonucleotide for detection of SNP TSC0017118
tggttaaagagtt

SEQ ID NO: 64980 - DNA, 13 bp, Artificial Sequence
  Oligonucleotide for detection of SNP TSC0017118
aactctttaacca

SEQ ID NO: 64981 - DNA, 13 bp, Artificial Sequence
  Oligonucleotide for detection of SNP TSC0017118
tggttatagagtt

SEQ ID NO: 64982 - DNA, 13 bp, Artificial Sequence
  Oligonucleotide for detection of SNP TSC0017118
aactctataacca

SEQ ID NO: 64983 - DNA, 13 bp, Artificial Sequence
  Oligonucleotide for detection of SNP TSC0017118
agttttttagtta

SEQ ID NO: 64984 - DNA, 13 bp, Artificial Sequence
  Oligonucleotide for detection of SNP TSC0017118
taactaaaaaact

SEQ ID NO: 64985 - DNA, 13 bp, Artificial Sequence
  Oligonucleotide for detection of SNP TSC0017118
agttttgtagtta

SEQ ID NO: 64986 - DNA, 13 bp, Artificial Sequence
  Oligonucleotide for detection of SNP TSC0017118
taactacaaaact

SEQ ID NO: 64987 - DNA, 13 bp, Artificial Sequence
  Oligonucleotide for detection of SNP TSC0017119
ggttagaaaaata

SEQ ID NO: 64988 - DNA, 13 bp, Artificial Sequence
  Oligonucleotide for detection of SNP TSC0017119
tatttttctaacc

SEQ ID NO: 64989 - DNA, 13 bp, Artificial Sequence
  Oligonucleotide for detection of SNP TSC0017119
ggttaggaaaata

SEQ ID NO: 64990 - DNA, 13 bp, Artificial Sequence
  Oligonucleotide for detection of SNP TSC0017119
tattttcctaacc

SEQ ID NO: 64991 - DNA, 13 bp, Artificial Sequence
  Oligonucleotide for detection of SNP TSC0017120
gttttggagggtt

SEQ ID NO: 64992 - DNA, 13 bp, Artificial Sequence
  Oligonucleotide for detection of SNP TSC0017120
aaccctccaaaac

SEQ ID NO: 64993 - DNA, 13 bp, Artificial Sequence
  Oligonucleotide for detection of SNP TSC0017120
gttttgaagggtt

SEQ ID NO: 64994 - DNA, 13 bp, Artificial Sequence
  Oligonucleotide for detection of SNP TSC0017120
aacccttcaaaac

SEQ ID NO: 64995 - DNA, 13 bp, Artificial Sequence
  Oligonucleotide for detection of SNP TSC0017129
aatttttttagay

SEQ ID NO: 64996 - DNA, 13 bp, Artificial Sequence
  Oligonucleotide for detection of SNP TSC0017129
rtctaaaaaaatt

SEQ ID NO: 64997 - DNA, 13 bp, Artificial Sequence
  Oligonucleotide for detection of SNP TSC0017129
aattttgttagay

SEQ ID NO: 64998 - DNA, 13 bp, Artificial Sequence
  Oligonucleotide for detection of SNP TSC0017129
rtctaacaaaatt

SEQ ID NO: 64999 - DNA, 13 bp, Artificial Sequence
  Oligonucleotide for detection of SNP TSC0017129
gtttaagagaatt

SEQ ID NO: 65000 - DNA, 13 bp, Artificial Sequence
  Oligonucleotide for detection of SNP TSC0017129
aattctcttaaac

SEQ ID NO: 65001 - DNA, 13 bp, Artificial Sequence
  Oligonucleotide for detection of SNP TSC0017129
gtttaatagaatt

SEQ ID NO: 65002 - DNA, 13 bp, Artificial Sequence
  Oligonucleotide for detection of SNP TSC0017129
aattctattaaac

SEQ ID NO: 65003 - DNA, 13 bp, Artificial Sequence
  Oligonucleotide for detection of SNP TSC0017130
tatttagtttgat

SEQ ID NO: 65004 - DNA, 13 bp, Artificial Sequence
  Oligonucleotide for detection of SNP TSC0017130
atcaaactaaata

SEQ ID NO: 65005 - DNA, 13 bp, Artificial Sequence
  Oligonucleotide for detection of SNP TSC0017130
tatttaatttgat

SEQ ID NO: 65006 - DNA, 13 bp, Artificial Sequence
  Oligonucleotide for detection of SNP TSC0017130
atcaaattaaata

SEQ ID NO: 65007 - DNA, 13 bp, Artificial Sequence
  Oligonucleotide for detection of SNP TSC0017131
taaaaaaaaagaa

SEQ ID NO: 65008 - DNA, 13 bp, Artificial Sequence
  Oligonucleotide for detection of SNP TSC0017131
ttcttttttttta

SEQ ID NO: 65009 - DNA, 13 bp, Artificial Sequence
  Oligonucleotide for detection of SNP TSC0017131
taaaaataaagaa

SEQ ID NO: 65010 - DNA, 13 bp, Artificial Sequence
  Oligonucleotide for detection of SNP TSC0017131
ttctttattttta

SEQ ID NO: 65011 - DNA, 13 bp, Artificial Sequence
  Oligonucleotide for detection of SNP TSC0017132
atgtttattagty

SEQ ID NO: 65012 - DNA, 13 bp, Artificial Sequence
  Oligonucleotide for detection of SNP TSC0017132
ractaataaacat

SEQ ID NO: 65013 - DNA, 13 bp, Artificial Sequence
  Oligonucleotide for detection of SNP TSC0017132
atgttttttagty

SEQ ID NO: 65014 - DNA, 13 bp, Artificial Sequence
  Oligonucleotide for detection of SNP TSC0017132
ractaaaaaacat

SEQ ID NO: 65015 - DNA, 13 bp, Artificial Sequence
  Oligonucleotide for detection of SNP TSC0017132
gattaataaatat

SEQ ID NO: 65016 - DNA, 13 bp, Artificial Sequence
  Oligonucleotide for detection of SNP TSC0017132
atatttattaatc

SEQ ID NO: 65017 - DNA, 13 bp, Artificial Sequence
  Oligonucleotide for detection of SNP TSC0017132
gattaagaaatat

SEQ ID NO: 65018 - DNA, 13 bp, Artificial Sequence
  Oligonucleotide for detection of SNP TSC0017132
atatttcttaatc

SEQ ID NO: 65019 - DNA, 13 bp, Artificial Sequence
  Oligonucleotide for detection of SNP TSC0017135
gtggggagggggg

SEQ ID NO: 65020 - DNA, 13 bp, Artificial Sequence
  Oligonucleotide for detection of SNP TSC0017135
cccccctccccac

SEQ ID NO: 65021 - DNA, 13 bp, Artificial Sequence
  Oligonucleotide for detection of SNP TSC0017135
gtggggggggggg

SEQ ID NO: 65022 - DNA, 13 bp, Artificial Sequence
  Oligonucleotide for detection of SNP TSC0017135
cccccccccccac

SEQ ID NO: 65023 - DNA, 13 bp, Artificial Sequence
  Oligonucleotide for detection of SNP TSC0017135
gcggggagggggg

SEQ ID NO: 65024 - DNA, 13 bp, Artificial Sequence
  Oligonucleotide for detection of SNP TSC0017135
cccccctccccgc

SEQ ID NO: 65025 - DNA, 13 bp, Artificial Sequence
  Oligonucleotide for detection of SNP TSC0017135
gcggggggggggg

SEQ ID NO: 65026 - DNA, 13 bp, Artificial Sequence
  Oligonucleotide for detection of SNP TSC0017135
cccccccccccgc

SEQ ID NO: 65027 - DNA, 13 bp, Artificial Sequence
  Oligonucleotide for detection of SNP TSC0017136
ttttattaggata

SEQ ID NO: 65028 - DNA, 13 bp, Artificial Sequence
  Oligonucleotide for detection of SNP TSC0017136
tatcctaataaaa

SEQ ID NO: 65029 - DNA, 13 bp, Artificial Sequence
  Oligonucleotide for detection of SNP TSC0017136
ttttatgaggata

SEQ ID NO: 65030 - DNA, 13 bp, Artificial Sequence
  Oligonucleotide for detection of SNP TSC0017136
tatcctcataaaa

SEQ ID NO: 65031 - DNA, 13 bp, Artificial Sequence
  Oligonucleotide for detection of SNP TSC0017136
tgttttgatagga

SEQ ID NO: 65032 - DNA, 13 bp, Artificial Sequence
  Oligonucleotide for detection of SNP TSC0017136
tcctatcaaaaca

SEQ ID NO: 65033 - DNA, 13 bp, Artificial Sequence
  Oligonucleotide for detection of SNP TSC0017136
tgtttttatagga

SEQ ID NO: 65034 - DNA, 13 bp, Artificial Sequence
  Oligonucleotide for detection of SNP TSC0017136
tcctataaaaaca

SEQ ID NO: 65035 - DNA, 13 bp, Artificial Sequence
  Oligonucleotide for detection of SNP TSC0017137
agtttatggatga

SEQ ID NO: 65036 - DNA, 13 bp, Artificial Sequence
  Oligonucleotide for detection of SNP TSC0017137
tcatccataaact

SEQ ID NO: 65037 - DNA, 13 bp, Artificial Sequence
  Oligonucleotide for detection of SNP TSC0017137
agtttacggatga

SEQ ID NO: 65038 - DNA, 13 bp, Artificial Sequence
  Oligonucleotide for detection of SNP TSC0017137
tcatccgtaaact

SEQ ID NO: 65039 - DNA, 13 bp, Artificial Sequence
  Oligonucleotide for detection of SNP TSC0017137
ttatttgtgaatt

SEQ ID NO: 65040 - DNA, 13 bp, Artificial Sequence
  Oligonucleotide for detection of SNP TSC0017137
aattcacaaataa

SEQ ID NO: 65041 - DNA, 13 bp, Artificial Sequence
  Oligonucleotide for detection of SNP TSC0017137
ttatttatgaatt

SEQ ID NO: 65042 - DNA, 13 bp, Artificial Sequence
  Oligonucleotide for detection of SNP TSC0017137
aattcataaataa

SEQ ID NO: 65043 - DNA, 13 bp, Artificial Sequence
  Oligonucleotide for detection of SNP TSC0017137
ttattcgtgaatt

SEQ ID NO: 65044 - DNA, 13 bp, Artificial Sequence
  Oligonucleotide for detection of SNP TSC0017137
aattcacgaataa

SEQ ID NO: 65045 - DNA, 13 bp, Artificial Sequence
  Oligonucleotide for detection of SNP TSC0017138
tttggatggtagy

SEQ ID NO: 65046 - DNA, 13 bp, Artificial Sequence
  Oligonucleotide for detection of SNP TSC0017138
rctaccatccaaa

SEQ ID NO: 65047 - DNA, 13 bp, Artificial Sequence
  Oligonucleotide for detection of SNP TSC0017138
tttggacggtagy

SEQ ID NO: 65048 - DNA, 13 bp, Artificial Sequence
  Oligonucleotide for detection of SNP TSC0017138
rctaccgtccaaa

SEQ ID NO: 65049 - DNA, 13 bp, Artificial Sequence
  Oligonucleotide for detection of SNP TSC0017138
gttgttgtttagg

SEQ ID NO: 65050 - DNA, 13 bp, Artificial Sequence
  Oligonucleotide for detection of SNP TSC0017138
cctaaacaacaac

SEQ ID NO: 65051 - DNA, 13 bp, Artificial Sequence
  Oligonucleotide for detection of SNP TSC0017138
gttgttatttagg

SEQ ID NO: 65052 - DNA, 13 bp, Artificial Sequence
  Oligonucleotide for detection of SNP TSC0017138
cctaaataacaac

SEQ ID NO: 65053 - DNA, 13 bp, Artificial Sequence
  Oligonucleotide for detection of SNP TSC0017138
gttgtcgtttagg

SEQ ID NO: 65054 - DNA, 13 bp, Artificial Sequence
  Oligonucleotide for detection of SNP TSC0017138
cctaaacgacaac

SEQ ID NO: 65055 - DNA, 13 bp, Artificial Sequence
  Oligonucleotide for detection of SNP TSC0017139
tagttatgttttt

SEQ ID NO: 65056 - DNA, 13 bp, Artificial Sequence
  Oligonucleotide for detection of SNP TSC0017139
aaaaacataacta

SEQ ID NO: 65057 - DNA, 13 bp, Artificial Sequence
  Oligonucleotide for detection of SNP TSC0017139
tagttacgttttt

SEQ ID NO: 65058 - DNA, 13 bp, Artificial Sequence
  Oligonucleotide for detection of SNP TSC0017139
aaaaacgtaacta

SEQ ID NO: 65059 - DNA, 13 bp, Artificial Sequence
  Oligonucleotide for detection of SNP TSC0017139
aggggtgtgattg

SEQ ID NO: 65060 - DNA, 13 bp, Artificial Sequence
  Oligonucleotide for detection of SNP TSC0017139
caatcacacccct

SEQ ID NO: 65061 - DNA, 13 bp, Artificial Sequence
  Oligonucleotide for detection of SNP TSC0017139
aggggtatgattg

SEQ ID NO: 65062 - DNA, 13 bp, Artificial Sequence
  Oligonucleotide for detection of SNP TSC0017139
caatcatacccct

SEQ ID NO: 65063 - DNA, 13 bp, Artificial Sequence
  Oligonucleotide for detection of SNP TSC0017139
aggggcgtgattg

SEQ ID NO: 65064 - DNA, 13 bp, Artificial Sequence
  Oligonucleotide for detection of SNP TSC0017139
caatcacgcccct

SEQ ID NO: 65065 - DNA, 13 bp, Artificial Sequence
  Oligonucleotide for detection of SNP TSC0017140
aggaaatggaggy

SEQ ID NO: 65066 - DNA, 13 bp, Artificial Sequence
  Oligonucleotide for detection of SNP TSC0017140
rcctccatttcct

SEQ ID NO: 65067 - DNA, 13 bp, Artificial Sequence
  Oligonucleotide for detection of SNP TSC0017140
aggaaacggaggy

SEQ ID NO: 65068 - DNA, 13 bp, Artificial Sequence
  Oligonucleotide for detection of SNP TSC0017140
rcctccgtttcct

SEQ ID NO: 65069 - DNA, 13 bp, Artificial Sequence
  Oligonucleotide for detection of SNP TSC0017143
tttattgtatgaa

SEQ ID NO: 65070 - DNA, 13 bp, Artificial Sequence
  Oligonucleotide for detection of SNP TSC0017143
ttcatacaataaa

SEQ ID NO: 65071 - DNA, 13 bp, Artificial Sequence
  Oligonucleotide for detection of SNP TSC0017143
tttattatatgaa

SEQ ID NO: 65072 - DNA, 13 bp, Artificial Sequence
  Oligonucleotide for detection of SNP TSC0017143
ttcatataataaa

SEQ ID NO: 65073 - DNA, 13 bp, Artificial Sequence
  Oligonucleotide for detection of SNP TSC0017145
gtaatttggggaa

SEQ ID NO: 65074 - DNA, 13 bp, Artificial Sequence
  Oligonucleotide for detection of SNP TSC0017145
ttccccaaattac

SEQ ID NO: 65075 - DNA, 13 bp, Artificial Sequence
  Oligonucleotide for detection of SNP TSC0017145
gtaattgggggaa

SEQ ID NO: 65076 - DNA, 13 bp, Artificial Sequence
  Oligonucleotide for detection of SNP TSC0017145
ttcccccaattac

SEQ ID NO: 65077 - DNA, 13 bp, Artificial Sequence
  Oligonucleotide for detection of SNP TSC0017145
gtaattcggggaa

SEQ ID NO: 65078 - DNA, 13 bp, Artificial Sequence
  Oligonucleotide for detection of SNP TSC0017145
ttccccgaattac

SEQ ID NO: 65079 - DNA, 13 bp, Artificial Sequence
  Oligonucleotide for detection of SNP TSC0017145
ttttttgagttgy

SEQ ID NO: 65080 - DNA, 13 bp, Artificial Sequence
  Oligonucleotide for detection of SNP TSC0017145
rcaactcaaaaaa

SEQ ID NO: 65081 - DNA, 13 bp, Artificial Sequence
  Oligonucleotide for detection of SNP TSC0017145
tttttttagttgy

SEQ ID NO: 65082 - DNA, 13 bp, Artificial Sequence
  Oligonucleotide for detection of SNP TSC0017145
rcaactaaaaaaa

SEQ ID NO: 65083 - DNA, 13 bp, Artificial Sequence
  Oligonucleotide for detection of SNP TSC0017145
tttttcgagttgy

SEQ ID NO: 65084 - DNA, 13 bp, Artificial Sequence
  Oligonucleotide for detection of SNP TSC0017145
rcaactcgaaaaa

SEQ ID NO: 65085 - DNA, 13 bp, Artificial Sequence
  Oligonucleotide for detection of SNP TSC0017148
ggtaagaagatta

SEQ ID NO: 65086 - DNA, 13 bp, Artificial Sequence
  Oligonucleotide for detection of SNP TSC0017148
taatcttcttacc

SEQ ID NO: 65087 - DNA, 13 bp, Artificial Sequence
  Oligonucleotide for detection of SNP TSC0017148
ggtaaggagatta

SEQ ID NO: 65088 - DNA, 13 bp, Artificial Sequence
  Oligonucleotide for detection of SNP TSC0017148
taatctccttacc

SEQ ID NO: 65089 - DNA, 13 bp, Artificial Sequence
  Oligonucleotide for detection of SNP TSC0017150
ttttaaagtgttg

SEQ ID NO: 65090 - DNA, 13 bp, Artificial Sequence
  Oligonucleotide for detection of SNP TSC0017150
caacactttaaaa

SEQ ID NO: 65091 - DNA, 13 bp, Artificial Sequence
  Oligonucleotide for detection of SNP TSC0017150
ttttaatgtgttg

SEQ ID NO: 65092 - DNA, 13 bp, Artificial Sequence
  Oligonucleotide for detection of SNP TSC0017150
caacacattaaaa

SEQ ID NO: 65093 - DNA, 13 bp, Artificial Sequence
  Oligonucleotide for detection of SNP TSC0017150
ttttaacgtgttg

SEQ ID NO: 65094 - DNA, 13 bp, Artificial Sequence
  Oligonucleotide for detection of SNP TSC0017150
caacacgttaaaa

SEQ ID NO: 65095 - DNA, 13 bp, Artificial Sequence
  Oligonucleotide for detection of SNP TSC0017150
tagtattttgaga

SEQ ID NO: 65096 - DNA, 13 bp, Artificial Sequence
  Oligonucleotide for detection of SNP TSC0017150
tctcaaaatacta

SEQ ID NO: 65097 - DNA, 13 bp, Artificial Sequence
  Oligonucleotide for detection of SNP TSC0017150
tagtatgttgaga

SEQ ID NO: 65098 - DNA, 13 bp, Artificial Sequence
  Oligonucleotide for detection of SNP TSC0017150
tctcaacatacta

SEQ ID NO: 65099 - DNA, 13 bp, Artificial Sequence
  Oligonucleotide for detection of SNP TSC0017150
tagtacgttgaga

SEQ ID NO: 65100 - DNA, 13 bp, Artificial Sequence
  Oligonucleotide for detection of SNP TSC0017150
tctcaacgtacta

SEQ ID NO: 65101 - DNA, 13 bp, Artificial Sequence
  Oligonucleotide for detection of SNP TSC0017151
gggtagtggtgtg

SEQ ID NO: 65102 - DNA, 13 bp, Artificial Sequence
  Oligonucleotide for detection of SNP TSC0017151
cacaccactaccc

SEQ ID NO: 65103 - DNA, 13 bp, Artificial Sequence
  Oligonucleotide for detection of SNP TSC0017151
gggtaggggtgtg

SEQ ID NO: 65104 - DNA, 13 bp, Artificial Sequence
  Oligonucleotide for detection of SNP TSC0017151
cacacccctaccc

SEQ ID NO: 65105 - DNA, 13 bp, Artificial Sequence
  Oligonucleotide for detection of SNP TSC0017151
gggtagcggtgtg

SEQ ID NO: 65106 - DNA, 13 bp, Artificial Sequence
  Oligonucleotide for detection of SNP TSC0017151
cacaccgctaccc

SEQ ID NO: 65107 - DNA, 13 bp, Artificial Sequence
  Oligonucleotide for detection of SNP TSC0017151
tatattgttgtty

SEQ ID NO: 65108 - DNA, 13 bp, Artificial Sequence
  Oligonucleotide for detection of SNP TSC0017151
raacaacaatata

SEQ ID NO: 65109 - DNA, 13 bp, Artificial Sequence
  Oligonucleotide for detection of SNP TSC0017151
tatatttttgtty

SEQ ID NO: 65110 - DNA, 13 bp, Artificial Sequence
  Oligonucleotide for detection of SNP TSC0017151
raacaaaaatata

SEQ ID NO: 65111 - DNA, 13 bp, Artificial Sequence
  Oligonucleotide for detection of SNP TSC0017151
tatatcgttgtty

SEQ ID NO: 65112 - DNA, 13 bp, Artificial Sequence
  Oligonucleotide for detection of SNP TSC0017151
raacaacgatata

SEQ ID NO: 65113 - DNA, 13 bp, Artificial Sequence
  Oligonucleotide for detection of SNP TSC0017152
gggtgttgtttga

SEQ ID NO: 65114 - DNA, 13 bp, Artificial Sequence
  Oligonucleotide for detection of SNP TSC0017152
tcaaacaacaccc

SEQ ID NO: 65115 - DNA, 13 bp, Artificial Sequence
  Oligonucleotide for detection of SNP TSC0017152
gggcgttgtttga

SEQ ID NO: 65116 - DNA, 13 bp, Artificial Sequence
  Oligonucleotide for detection of SNP TSC0017152
tcaaacaacgccc

SEQ ID NO: 65117 - DNA, 13 bp, Artificial Sequence
  Oligonucleotide for detection of SNP TSC0017152
gggtgtcgtttga

SEQ ID NO: 65118 - DNA, 13 bp, Artificial Sequence
  Oligonucleotide for detection of SNP TSC0017152
tcaaacgacaccc

SEQ ID NO: 65119 - DNA, 13 bp, Artificial Sequence
  Oligonucleotide for detection of SNP TSC0017152
gggtgttgttcga

SEQ ID NO: 65120 - DNA, 13 bp, Artificial Sequence
  Oligonucleotide for detection of SNP TSC0017152
tcgaacaacaccc

SEQ ID NO: 65121 - DNA, 13 bp, Artificial Sequence
  Oligonucleotide for detection of SNP TSC0017152
gggcgttgttcga

SEQ ID NO: 65122 - DNA, 13 bp, Artificial Sequence
  Oligonucleotide for detection of SNP TSC0017152
tcgaacaacgccc

SEQ ID NO: 65123 - DNA, 13 bp, Artificial Sequence
  Oligonucleotide for detection of SNP TSC0017152
gggcgtcgtttga

SEQ ID NO: 65124 - DNA, 13 bp, Artificial Sequence
  Oligonucleotide for detection of SNP TSC0017152
tcaaacgacgccc

SEQ ID NO: 65125 - DNA, 13 bp, Artificial Sequence
  Oligonucleotide for detection of SNP TSC0017152
gggtgtcgttcga

SEQ ID NO: 65126 - DNA, 13 bp, Artificial Sequence
  Oligonucleotide for detection of SNP TSC0017152
tcgaacgacaccc

SEQ ID NO: 65127 - DNA, 13 bp, Artificial Sequence
  Oligonucleotide for detection of SNP TSC0017152
gggcgtcgttcga

SEQ ID NO: 65128 - DNA, 13 bp, Artificial Sequence
  Oligonucleotide for detection of SNP TSC0017152
tcgaacgacgccc

SEQ ID NO: 65129 - DNA, 13 bp, Artificial Sequence
  Oligonucleotide for detection of SNP TSC0017152
ttgggtggtgtty

SEQ ID NO: 65130 - DNA, 13 bp, Artificial Sequence
  Oligonucleotide for detection of SNP TSC0017152
raacaccacccaa

SEQ ID NO: 65131 - DNA, 13 bp, Artificial Sequence
  Oligonucleotide for detection of SNP TSC0017152
ttgggtagtgtty

SEQ ID NO: 65132 - DNA, 13 bp, Artificial Sequence
  Oligonucleotide for detection of SNP TSC0017152
raacactacccaa

SEQ ID NO: 65133 - DNA, 13 bp, Artificial Sequence
  Oligonucleotide for detection of SNP TSC0017152
tcgggtggtgtty

SEQ ID NO: 65134 - DNA, 13 bp, Artificial Sequence
  Oligonucleotide for detection of SNP TSC0017152
raacaccacccga

SEQ ID NO: 65135 - DNA, 13 bp, Artificial Sequence
  Oligonucleotide for detection of SNP TSC0017152
tcgggtagtgtty

SEQ ID NO: 65136 - DNA, 13 bp, Artificial Sequence
  Oligonucleotide for detection of SNP TSC0017152
raacactacccga

SEQ ID NO: 65137 - DNA, 13 bp, Artificial Sequence
  Oligonucleotide for detection of SNP TSC0017152
ttgggcggtgtty

SEQ ID NO: 65138 - DNA, 13 bp, Artificial Sequence
  Oligonucleotide for detection of SNP TSC0017152
raacaccgcccaa

SEQ ID NO: 65139 - DNA, 13 bp, Artificial Sequence
  Oligonucleotide for detection of SNP TSC0017152
ttgggtagcgtty

SEQ ID NO: 65140 - DNA, 13 bp, Artificial Sequence
  Oligonucleotide for detection of SNP TSC0017152
raacgctacccaa

SEQ ID NO: 65141 - DNA, 13 bp, Artificial Sequence
  Oligonucleotide for detection of SNP TSC0017152
ttgggtggcgtty

SEQ ID NO: 65142 - DNA, 13 bp, Artificial Sequence
  Oligonucleotide for detection of SNP TSC0017152
raacgccacccaa

SEQ ID NO: 65143 - DNA, 13 bp, Artificial Sequence
  Oligonucleotide for detection of SNP TSC0017152
tcgggtagcgtty

SEQ ID NO: 65144 - DNA, 13 bp, Artificial Sequence
  Oligonucleotide for detection of SNP TSC0017152
raacgctacccga

SEQ ID NO: 65145 - DNA, 13 bp, Artificial Sequence
  Oligonucleotide for detection of SNP TSC0017152
tcgggcggtgtty

SEQ ID NO: 65146 - DNA, 13 bp, Artificial Sequence
  Oligonucleotide for detection of SNP TSC0017152
raacaccgcccga

SEQ ID NO: 65147 - DNA, 13 bp, Artificial Sequence
  Oligonucleotide for detection of SNP TSC0017152
tcgggtggcgtty

SEQ ID NO: 65148 - DNA, 13 bp, Artificial Sequence
  Oligonucleotide for detection of SNP TSC0017152
raacgccacccga

SEQ ID NO: 65149 - DNA, 13 bp, Artificial Sequence
  Oligonucleotide for detection of SNP TSC0017152
ttgggcggcgtty

SEQ ID NO: 65150 - DNA, 13 bp, Artificial Sequence
  Oligonucleotide for detection of SNP TSC0017152
raacgccgcccaa

SEQ ID NO: 65151 - DNA, 13 bp, Artificial Sequence
  Oligonucleotide for detection of SNP TSC0017152
tcgggcggcgtty

SEQ ID NO: 65152 - DNA, 13 bp, Artificial Sequence
  Oligonucleotide for detection of SNP TSC0017152
raacgccgcccga

SEQ ID NO: 65153 - DNA, 13 bp, Artificial Sequence
  Oligonucleotide for detection of SNP TSC0017153
gagtagtgttggg

SEQ ID NO: 65154 - DNA, 13 bp, Artificial Sequence
  Oligonucleotide for detection of SNP TSC0017153
cccaacactactc

SEQ ID NO: 65155 - DNA, 13 bp, Artificial Sequence
  Oligonucleotide for detection of SNP TSC0017153
gagtagcgttggg

SEQ ID NO: 65156 - DNA, 13 bp, Artificial Sequence
  Oligonucleotide for detection of SNP TSC0017153
cccaacgctactc

SEQ ID NO: 65157 - DNA, 13 bp, Artificial Sequence
  Oligonucleotide for detection of SNP TSC0017154
ttgatttggtagg

SEQ ID NO: 65158 - DNA, 13 bp, Artificial Sequence
  Oligonucleotide for detection of SNP TSC0017154
cctaccaaatcaa

SEQ ID NO: 65159 - DNA, 13 bp, Artificial Sequence
  Oligonucleotide for detection of SNP TSC0017154
ttgattcggtagg

SEQ ID NO: 65160 - DNA, 13 bp, Artificial Sequence
  Oligonucleotide for detection of SNP TSC0017154
cctaccgaatcaa

SEQ ID NO: 65161 - DNA, 13 bp, Artificial Sequence
  Oligonucleotide for detection of SNP TSC0017154
tttattgaattag

SEQ ID NO: 65162 - DNA, 13 bp, Artificial Sequence
  Oligonucleotide for detection of SNP TSC0017154
ctaattcaataaa

SEQ ID NO: 65163 - DNA, 13 bp, Artificial Sequence
  Oligonucleotide for detection of SNP TSC0017154
tttattaaattag

SEQ ID NO: 65164 - DNA, 13 bp, Artificial Sequence
  Oligonucleotide for detection of SNP TSC0017154
ctaatttaataaa

SEQ ID NO: 65165 - DNA, 13 bp, Artificial Sequence
  Oligonucleotide for detection of SNP TSC0017154
tttatcgaattag

SEQ ID NO: 65166 - DNA, 13 bp, Artificial Sequence
  Oligonucleotide for detection of SNP TSC0017154
ctaattcgataaa

SEQ ID NO: 65167 - DNA, 13 bp, Artificial Sequence
  Oligonucleotide for detection of SNP TSC0017155
tattttattttay

SEQ ID NO: 65168 - DNA, 13 bp, Artificial Sequence
  Oligonucleotide for detection of SNP TSC0017155
rtaaaataaaata

SEQ ID NO: 65169 - DNA, 13 bp, Artificial Sequence
  Oligonucleotide for detection of SNP TSC0017155
tattttgttttay

SEQ ID NO: 65170 - DNA, 13 bp, Artificial Sequence
  Oligonucleotide for detection of SNP TSC0017155
rtaaaacaaaata

SEQ ID NO: 65171 - DNA, 13 bp, Artificial Sequence
  Oligonucleotide for detection of SNP TSC0017157
gtatatatatttg

SEQ ID NO: 65172 - DNA, 13 bp, Artificial Sequence
  Oligonucleotide for detection of SNP TSC0017157
caaatatatatac

SEQ ID NO: 65173 - DNA, 13 bp, Artificial Sequence
  Oligonucleotide for detection of SNP TSC0017157
gtatatgtatttg

SEQ ID NO: 65174 - DNA, 13 bp, Artificial Sequence
  Oligonucleotide for detection of SNP TSC0017157
caaatacatatac

SEQ ID NO: 65175 - DNA, 13 bp, Artificial Sequence
  Oligonucleotide for detection of SNP TSC0017157
gtatacgtatttg

SEQ ID NO: 65176 - DNA, 13 bp, Artificial Sequence
  Oligonucleotide for detection of SNP TSC0017157
caaatacgtatac

SEQ ID NO: 65177 - DNA, 13 bp, Artificial Sequence
  Oligonucleotide for detection of SNP TSC0017157
taggtatgtgtgy

SEQ ID NO: 65178 - DNA, 13 bp, Artificial Sequence
  Oligonucleotide for detection of SNP TSC0017157
rcacacataccta

SEQ ID NO: 65179 - DNA, 13 bp, Artificial Sequence
  Oligonucleotide for detection of SNP TSC0017157
taggtacgtgtgy

SEQ ID NO: 65180 - DNA, 13 bp, Artificial Sequence
  Oligonucleotide for detection of SNP TSC0017157
rcacacgtaccta

SEQ ID NO: 65181 - DNA, 13 bp, Artificial Sequence
  Oligonucleotide for detection of SNP TSC0017158
gtagaaaattttt

SEQ ID NO: 65182 - DNA, 13 bp, Artificial Sequence
  Oligonucleotide for detection of SNP TSC0017158
aaaaattttctac

SEQ ID NO: 65183 - DNA, 13 bp, Artificial Sequence
  Oligonucleotide for detection of SNP TSC0017158
gtagaagattttt

SEQ ID NO: 65184 - DNA, 13 bp, Artificial Sequence
  Oligonucleotide for detection of SNP TSC0017158
aaaaatcttctac

SEQ ID NO: 65185 - DNA, 13 bp, Artificial Sequence
  Oligonucleotide for detection of SNP TSC0017159
tgaaagagagtaa

SEQ ID NO: 65186 - DNA, 13 bp, Artificial Sequence
  Oligonucleotide for detection of SNP TSC0017159
ttactctctttca

SEQ ID NO: 65187 - DNA, 13 bp, Artificial Sequence
  Oligonucleotide for detection of SNP TSC0017159
tgaaagggagtaa

SEQ ID NO: 65188 - DNA, 13 bp, Artificial Sequence
  Oligonucleotide for detection of SNP TSC0017159
ttactccctttca

SEQ ID NO: 65189 - DNA, 13 bp, Artificial Sequence
  Oligonucleotide for detection of SNP TSC0017160
gatagggaatgta

SEQ ID NO: 65190 - DNA, 13 bp, Artificial Sequence
  Oligonucleotide for detection of SNP TSC0017160
tacattccctatc

SEQ ID NO: 65191 - DNA, 13 bp, Artificial Sequence
  Oligonucleotide for detection of SNP TSC0017160
gataggaaatgta

SEQ ID NO: 65192 - DNA, 13 bp, Artificial Sequence
  Oligonucleotide for detection of SNP TSC0017160
tacatttcctatc

SEQ ID NO: 65193 - DNA, 13 bp, Artificial Sequence
  Oligonucleotide for detection of SNP TSC0017162
agatatagttaaa

SEQ ID NO: 65194 - DNA, 13 bp, Artificial Sequence
  Oligonucleotide for detection of SNP TSC0017162
tttaactatatct

SEQ ID NO: 65195 - DNA, 13 bp, Artificial Sequence
  Oligonucleotide for detection of SNP TSC0017162
agatattgttaaa

SEQ ID NO: 65196 - DNA, 13 bp, Artificial Sequence
  Oligonucleotide for detection of SNP TSC0017162
tttaacaatatct

SEQ ID NO: 65197 - DNA, 13 bp, Artificial Sequence
  Oligonucleotide for detection of SNP TSC0017162
agatatcgttaaa

SEQ ID NO: 65198 - DNA, 13 bp, Artificial Sequence
  Oligonucleotide for detection of SNP TSC0017162
tttaacgatatct

SEQ ID NO: 65199 - DNA, 13 bp, Artificial Sequence
  Oligonucleotide for detection of SNP TSC0017162
tttgattatgttt

SEQ ID NO: 65200 - DNA, 13 bp, Artificial Sequence
  Oligonucleotide for detection of SNP TSC0017162
aaacataatcaaa

SEQ ID NO: 65201 - DNA, 13 bp, Artificial Sequence
  Oligonucleotide for detection of SNP TSC0017162
tttgatgatgttt

SEQ ID NO: 65202 - DNA, 13 bp, Artificial Sequence
  Oligonucleotide for detection of SNP TSC0017162
aaacatcatcaaa

SEQ ID NO: 65203 - DNA, 13 bp, Artificial Sequence
  Oligonucleotide for detection of SNP TSC0017162
tttgacgatgttt

SEQ ID NO: 65204 - DNA, 13 bp, Artificial Sequence
  Oligonucleotide for detection of SNP TSC0017162
aaacatcgtcaaa

SEQ ID NO: 65205 - DNA, 13 bp, Artificial Sequence
  Oligonucleotide for detection of SNP TSC0017163
ggttttatgttaa

SEQ ID NO: 65206 - DNA, 13 bp, Artificial Sequence
  Oligonucleotide for detection of SNP TSC0017163
ttaacataaaacc

SEQ ID NO: 65207 - DNA, 13 bp, Artificial Sequence
  Oligonucleotide for detection of SNP TSC0017163
ggttttgtgttaa

SEQ ID NO: 65208 - DNA, 13 bp, Artificial Sequence
  Oligonucleotide for detection of SNP TSC0017163
ttaacacaaaacc

SEQ ID NO: 65209 - DNA, 13 bp, Artificial Sequence
  Oligonucleotide for detection of SNP TSC0017163
ggtttcgtgttaa

SEQ ID NO: 65210 - DNA, 13 bp, Artificial Sequence
  Oligonucleotide for detection of SNP TSC0017163
ttaacacgaaacc

SEQ ID NO: 65211 - DNA, 13 bp, Artificial Sequence
  Oligonucleotide for detection of SNP TSC0017163
ttagtatggggty

SEQ ID NO: 65212 - DNA, 13 bp, Artificial Sequence
  Oligonucleotide for detection of SNP TSC0017163
raccccatactaa

SEQ ID NO: 65213 - DNA, 13 bp, Artificial Sequence
  Oligonucleotide for detection of SNP TSC0017163
ttagtacggggty

SEQ ID NO: 65214 - DNA, 13 bp, Artificial Sequence
  Oligonucleotide for detection of SNP TSC0017163
raccccgtactaa

SEQ ID NO: 65215 - DNA, 13 bp, Artificial Sequence
  Oligonucleotide for detection of SNP TSC0017166
gggagttgggtta

SEQ ID NO: 65216 - DNA, 13 bp, Artificial Sequence
  Oligonucleotide for detection of SNP TSC0017166
taacccaactccc

SEQ ID NO: 65217 - DNA, 13 bp, Artificial Sequence
  Oligonucleotide for detection of SNP TSC0017166
gggagtcgggtta

SEQ ID NO: 65218 - DNA, 13 bp, Artificial Sequence
  Oligonucleotide for detection of SNP TSC0017166
taacccgactccc

SEQ ID NO: 65219 - DNA, 13 bp, Artificial Sequence
  Oligonucleotide for detection of SNP TSC0017166
tagtttgatttty

SEQ ID NO: 65220 - DNA, 13 bp, Artificial Sequence
  Oligonucleotide for detection of SNP TSC0017166
raaaatcaaacta

SEQ ID NO: 65221 - DNA, 13 bp, Artificial Sequence
  Oligonucleotide for detection of SNP TSC0017166
tagtttaatttty

SEQ ID NO: 65222 - DNA, 13 bp, Artificial Sequence
  Oligonucleotide for detection of SNP TSC0017166
raaaattaaacta

SEQ ID NO: 65223 - DNA, 13 bp, Artificial Sequence
  Oligonucleotide for detection of SNP TSC0017166
tagttcgatttty

SEQ ID NO: 65224 - DNA, 13 bp, Artificial Sequence
  Oligonucleotide for detection of SNP TSC0017166
raaaatcgaacta

SEQ ID NO: 65225 - DNA, 13 bp, Artificial Sequence
  Oligonucleotide for detection of SNP TSC0017167
tatggaaggagaa

SEQ ID NO: 65226 - DNA, 13 bp, Artificial Sequence
  Oligonucleotide for detection of SNP TSC0017167
ttctccttccata

SEQ ID NO: 65227 - DNA, 13 bp, Artificial Sequence
  Oligonucleotide for detection of SNP TSC0017167
tatggagggagaa

SEQ ID NO: 65228 - DNA, 13 bp, Artificial Sequence
  Oligonucleotide for detection of SNP TSC0017167
ttctccctccata

SEQ ID NO: 65229 - DNA, 13 bp, Artificial Sequence
  Oligonucleotide for detection of SNP TSC0017168
atataaaagttgg

SEQ ID NO: 65230 - DNA, 13 bp, Artificial Sequence
  Oligonucleotide for detection of SNP TSC0017168
ccaacttttatat

SEQ ID NO: 65231 - DNA, 13 bp, Artificial Sequence
  Oligonucleotide for detection of SNP TSC0017168
atataagagttgg

SEQ ID NO: 65232 - DNA, 13 bp, Artificial Sequence
  Oligonucleotide for detection of SNP TSC0017168
ccaactcttatat

SEQ ID NO: 65233 - DNA, 13 bp, Artificial Sequence
  Oligonucleotide for detection of SNP TSC0017169
aatgaaataaagy

SEQ ID NO: 65234 - DNA, 13 bp, Artificial Sequence
  Oligonucleotide for detection of SNP TSC0017169
rctttatttcatt

SEQ ID NO: 65235 - DNA, 13 bp, Artificial Sequence
  Oligonucleotide for detection of SNP TSC0017169
aatgaattaaagy

SEQ ID NO: 65236 - DNA, 13 bp, Artificial Sequence
  Oligonucleotide for detection of SNP TSC0017169
rctttaattcatt

SEQ ID NO: 65237 - DNA, 13 bp, Artificial Sequence
  Oligonucleotide for detection of SNP TSC0017169
gttttgttttatt

SEQ ID NO: 65238 - DNA, 13 bp, Artificial Sequence
  Oligonucleotide for detection of SNP TSC0017169
aataaaacaaaac

SEQ ID NO: 65239 - DNA, 13 bp, Artificial Sequence
  Oligonucleotide for detection of SNP TSC0017169
gttttggtttatt

SEQ ID NO: 65240 - DNA, 13 bp, Artificial Sequence
  Oligonucleotide for detection of SNP TSC0017169
aataaaccaaaac

SEQ ID NO: 65241 - DNA, 13 bp, Artificial Sequence
  Oligonucleotide for detection of SNP TSC0017170
tgaagaagatttt

SEQ ID NO: 65242 - DNA, 13 bp, Artificial Sequence
  Oligonucleotide for detection of SNP TSC0017170
aaaatcttcttca

SEQ ID NO: 65243 - DNA, 13 bp, Artificial Sequence
  Oligonucleotide for detection of SNP TSC0017170
tgaagatgatttt

SEQ ID NO: 65244 - DNA, 13 bp, Artificial Sequence
  Oligonucleotide for detection of SNP TSC0017170
aaaatcatcttca

SEQ ID NO: 65245 - DNA, 13 bp, Artificial Sequence
  Oligonucleotide for detection of SNP TSC0017170
tgaagacgatttt

SEQ ID NO: 65246 - DNA, 13 bp, Artificial Sequence
  Oligonucleotide for detection of SNP TSC0017170
aaaatcgtcttca

SEQ ID NO: 65247 - DNA, 13 bp, Artificial Sequence
  Oligonucleotide for detection of SNP TSC0017170
agggtttttttta

SEQ ID NO: 65248 - DNA, 13 bp, Artificial Sequence
  Oligonucleotide for detection of SNP TSC0017170
taaaaaaaaccct

SEQ ID NO: 65249 - DNA, 13 bp, Artificial Sequence
  Oligonucleotide for detection of SNP TSC0017170
agggttgttttta

SEQ ID NO: 65250 - DNA, 13 bp, Artificial Sequence
  Oligonucleotide for detection of SNP TSC0017170
taaaaacaaccct

SEQ ID NO: 65251 - DNA, 13 bp, Artificial Sequence
  Oligonucleotide for detection of SNP TSC0017170
agggtcgttttta

SEQ ID NO: 65252 - DNA, 13 bp, Artificial Sequence
  Oligonucleotide for detection of SNP TSC0017170
taaaaacgaccct

SEQ ID NO: 65253 - DNA, 13 bp, Artificial Sequence
  Oligonucleotide for detection of SNP TSC0017174
tatttggttattt

SEQ ID NO: 65254 - DNA, 13 bp, Artificial Sequence
  Oligonucleotide for detection of SNP TSC0017174
aaataaccaaata

SEQ ID NO: 65255 - DNA, 13 bp, Artificial Sequence
  Oligonucleotide for detection of SNP TSC0017174
tatttgtttattt

SEQ ID NO: 65256 - DNA, 13 bp, Artificial Sequence
  Oligonucleotide for detection of SNP TSC0017174
aaataaacaaata

SEQ ID NO: 65257 - DNA, 13 bp, Artificial Sequence
  Oligonucleotide for detection of SNP TSC0017174
aaatgattaaata

SEQ ID NO: 65258 - DNA, 13 bp, Artificial Sequence
  Oligonucleotide for detection of SNP TSC0017174
tatttaatcattt

SEQ ID NO: 65259 - DNA, 13 bp, Artificial Sequence
  Oligonucleotide for detection of SNP TSC0017174
aaatgaataaata

SEQ ID NO: 65260 - DNA, 13 bp, Artificial Sequence
  Oligonucleotide for detection of SNP TSC0017174
tatttattcattt

SEQ ID NO: 65261 - DNA, 13 bp, Artificial Sequence
  Oligonucleotide for detection of SNP TSC0017182
tgtttggtttttg

SEQ ID NO: 65262 - DNA, 13 bp, Artificial Sequence
  Oligonucleotide for detection of SNP TSC0017182
caaaaaccaaaca

SEQ ID NO: 65263 - DNA, 13 bp, Artificial Sequence
  Oligonucleotide for detection of SNP TSC0017182
tgtttgttttttg

SEQ ID NO: 65264 - DNA, 13 bp, Artificial Sequence
  Oligonucleotide for detection of SNP TSC0017182
caaaaaacaaaca

SEQ ID NO: 65265 - DNA, 13 bp, Artificial Sequence
  Oligonucleotide for detection of SNP TSC0017182
taaaaaataaata

SEQ ID NO: 65266 - DNA, 13 bp, Artificial Sequence
  Oligonucleotide for detection of SNP TSC0017182
tatttatttttta

SEQ ID NO: 65267 - DNA, 13 bp, Artificial Sequence
  Oligonucleotide for detection of SNP TSC0017187
atttgtattagaa

SEQ ID NO: 65268 - DNA, 13 bp, Artificial Sequence
  Oligonucleotide for detection of SNP TSC0017187
ttctaatacaaat

SEQ ID NO: 65269 - DNA, 13 bp, Artificial Sequence
  Oligonucleotide for detection of SNP TSC0017187
atttgttttagaa

SEQ ID NO: 65270 - DNA, 13 bp, Artificial Sequence
  Oligonucleotide for detection of SNP TSC0017187
ttctaaaacaaat

SEQ ID NO: 65271 - DNA, 13 bp, Artificial Sequence
  Oligonucleotide for detection of SNP TSC0017187
ttttgatataggt

SEQ ID NO: 65272 - DNA, 13 bp, Artificial Sequence
  Oligonucleotide for detection of SNP TSC0017187
acctatatcaaaa

SEQ ID NO: 65273 - DNA, 13 bp, Artificial Sequence
  Oligonucleotide for detection of SNP TSC0017187
ttttgagataggt

SEQ ID NO: 65274 - DNA, 13 bp, Artificial Sequence
  Oligonucleotide for detection of SNP TSC0017187
acctatctcaaaa

SEQ ID NO: 65275 - DNA, 13 bp, Artificial Sequence
  Oligonucleotide for detection of SNP TSC0017188
aaaggtaattgta

SEQ ID NO: 65276 - DNA, 13 bp, Artificial Sequence
  Oligonucleotide for detection of SNP TSC0017188
tacaattaccttt

SEQ ID NO: 65277 - DNA, 13 bp, Artificial Sequence
  Oligonucleotide for detection of SNP TSC0017188
aaaggtgattgta

SEQ ID NO: 65278 - DNA, 13 bp, Artificial Sequence
  Oligonucleotide for detection of SNP TSC0017188
tacaatcaccttt

SEQ ID NO: 65279 - DNA, 13 bp, Artificial Sequence
  Oligonucleotide for detection of SNP TSC0017188
aaaggcgattgta

SEQ ID NO: 65280 - DNA, 13 bp, Artificial Sequence
  Oligonucleotide for detection of SNP TSC0017188
tacaatcgccttt

SEQ ID NO: 65281 - DNA, 13 bp, Artificial Sequence
  Oligonucleotide for detection of SNP TSC0017188
tgtaatcgttttt

SEQ ID NO: 65282 - DNA, 13 bp, Artificial Sequence
  Oligonucleotide for detection of SNP TSC0017188
aaaaacgattaca

SEQ ID NO: 65283 - DNA, 13 bp, Artificial Sequence
  Oligonucleotide for detection of SNP TSC0017191
ggttatattggaa

SEQ ID NO: 65284 - DNA, 13 bp, Artificial Sequence
  Oligonucleotide for detection of SNP TSC0017191
ttccaatataacc

SEQ ID NO: 65285 - DNA, 13 bp, Artificial Sequence
  Oligonucleotide for detection of SNP TSC0017191
ggttatgttggaa

SEQ ID NO: 65286 - DNA, 13 bp, Artificial Sequence
  Oligonucleotide for detection of SNP TSC0017191
ttccaacataacc

SEQ ID NO: 65287 - DNA, 13 bp, Artificial Sequence
  Oligonucleotide for detection of SNP TSC0017191
ggttacgttggaa

SEQ ID NO: 65288 - DNA, 13 bp, Artificial Sequence
  Oligonucleotide for detection of SNP TSC0017191
ttccaacgtaacc

SEQ ID NO: 65289 - DNA, 13 bp, Artificial Sequence
  Oligonucleotide for detection of SNP TSC0017191
ttttagtgtggty

SEQ ID NO: 65290 - DNA, 13 bp, Artificial Sequence
  Oligonucleotide for detection of SNP TSC0017191
raccacactaaaa

SEQ ID NO: 65291 - DNA, 13 bp, Artificial Sequence
  Oligonucleotide for detection of SNP TSC0017191
ttttagcgtggty

SEQ ID NO: 65292 - DNA, 13 bp, Artificial Sequence
  Oligonucleotide for detection of SNP TSC0017191
raccacgctaaaa

SEQ ID NO: 65293 - DNA, 13 bp, Artificial Sequence
  Oligonucleotide for detection of SNP TSC0017192
gtgtgttgtttty

SEQ ID NO: 65294 - DNA, 13 bp, Artificial Sequence
  Oligonucleotide for detection of SNP TSC0017192
raaaacaacacac

SEQ ID NO: 65295 - DNA, 13 bp, Artificial Sequence
  Oligonucleotide for detection of SNP TSC0017192
gtgtgtcgtttty

SEQ ID NO: 65296 - DNA, 13 bp, Artificial Sequence
  Oligonucleotide for detection of SNP TSC0017192
raaaacgacacac

SEQ ID NO: 65297 - DNA, 13 bp, Artificial Sequence
  Oligonucleotide for detection of SNP TSC0017192
ggaagtggtatay

SEQ ID NO: 65298 - DNA, 13 bp, Artificial Sequence
  Oligonucleotide for detection of SNP TSC0017192
rtataccacttcc

SEQ ID NO: 65299 - DNA, 13 bp, Artificial Sequence
  Oligonucleotide for detection of SNP TSC0017192
ggaagtagtatay

SEQ ID NO: 65300 - DNA, 13 bp, Artificial Sequence
  Oligonucleotide for detection of SNP TSC0017192
rtatactacttcc

SEQ ID NO: 65301 - DNA, 13 bp, Artificial Sequence
  Oligonucleotide for detection of SNP TSC0017192
ggaagcggtatay

SEQ ID NO: 65302 - DNA, 13 bp, Artificial Sequence
  Oligonucleotide for detection of SNP TSC0017192
rtataccgcttcc

SEQ ID NO: 65303 - DNA, 13 bp, Artificial Sequence
  Oligonucleotide for detection of SNP TSC0017196
agtttatgaatty

SEQ ID NO: 65304 - DNA, 13 bp, Artificial Sequence
  Oligonucleotide for detection of SNP TSC0017196
raattcataaact

SEQ ID NO: 65305 - DNA, 13 bp, Artificial Sequence
  Oligonucleotide for detection of SNP TSC0017196
agtttacgaatty

SEQ ID NO: 65306 - DNA, 13 bp, Artificial Sequence
  Oligonucleotide for detection of SNP TSC0017196
raattcgtaaact

SEQ ID NO: 65307 - DNA, 13 bp, Artificial Sequence
  Oligonucleotide for detection of SNP TSC0017196
gagtttgtggatt

SEQ ID NO: 65308 - DNA, 13 bp, Artificial Sequence
  Oligonucleotide for detection of SNP TSC0017196
aatccacaaactc

SEQ ID NO: 65309 - DNA, 13 bp, Artificial Sequence
  Oligonucleotide for detection of SNP TSC0017196
gagtttatggatt

SEQ ID NO: 65310 - DNA, 13 bp, Artificial Sequence
  Oligonucleotide for detection of SNP TSC0017196
aatccataaactc

SEQ ID NO: 65311 - DNA, 13 bp, Artificial Sequence
  Oligonucleotide for detection of SNP TSC0017196
gagttcgtggatt

SEQ ID NO: 65312 - DNA, 13 bp, Artificial Sequence
  Oligonucleotide for detection of SNP TSC0017196
aatccacgaactc

SEQ ID NO: 65313 - DNA, 13 bp, Artificial Sequence
  Oligonucleotide for detection of SNP TSC0017197
tgaggagaaaaaa

SEQ ID NO: 65314 - DNA, 13 bp, Artificial Sequence
  Oligonucleotide for detection of SNP TSC0017197
ttttttctcctca

SEQ ID NO: 65315 - DNA, 13 bp, Artificial Sequence
  Oligonucleotide for detection of SNP TSC0017197
tgaggataaaaaa

SEQ ID NO: 65316 - DNA, 13 bp, Artificial Sequence
  Oligonucleotide for detection of SNP TSC0017197
ttttttatcctca

SEQ ID NO: 65317 - DNA, 13 bp, Artificial Sequence
  Oligonucleotide for detection of SNP TSC0017199
atggagtggtgta

SEQ ID NO: 65318 - DNA, 13 bp, Artificial Sequence
  Oligonucleotide for detection of SNP TSC0017199
tacaccactccat

SEQ ID NO: 65319 - DNA, 13 bp, Artificial Sequence
  Oligonucleotide for detection of SNP TSC0017199
atggagcggtgta

SEQ ID NO: 65320 - DNA, 13 bp, Artificial Sequence
  Oligonucleotide for detection of SNP TSC0017199
tacaccgctccat

SEQ ID NO: 65321 - DNA, 13 bp, Artificial Sequence
  Oligonucleotide for detection of SNP TSC0017199
atggagtggcgta

SEQ ID NO: 65322 - DNA, 13 bp, Artificial Sequence
  Oligonucleotide for detection of SNP TSC0017199
tacgccactccat

SEQ ID NO: 65323 - DNA, 13 bp, Artificial Sequence
  Oligonucleotide for detection of SNP TSC0017199
atggagcggcgta

SEQ ID NO: 65324 - DNA, 13 bp, Artificial Sequence
  Oligonucleotide for detection of SNP TSC0017199
tacgccgctccat

SEQ ID NO: 65325 - DNA, 13 bp, Artificial Sequence
  Oligonucleotide for detection of SNP TSC0017199
tatgttgttttat

SEQ ID NO: 65326 - DNA, 13 bp, Artificial Sequence
  Oligonucleotide for detection of SNP TSC0017199
ataaaacaacata

SEQ ID NO: 65327 - DNA, 13 bp, Artificial Sequence
  Oligonucleotide for detection of SNP TSC0017199
tatgttattttat

SEQ ID NO: 65328 - DNA, 13 bp, Artificial Sequence
  Oligonucleotide for detection of SNP TSC0017199
ataaaataacata

SEQ ID NO: 65329 - DNA, 13 bp, Artificial Sequence
  Oligonucleotide for detection of SNP TSC0017199
tacgttgttttat

SEQ ID NO: 65330 - DNA, 13 bp, Artificial Sequence
  Oligonucleotide for detection of SNP TSC0017199
ataaaacaacgta

SEQ ID NO: 65331 - DNA, 13 bp, Artificial Sequence
  Oligonucleotide for detection of SNP TSC0017199
tacgttattttat

SEQ ID NO: 65332 - DNA, 13 bp, Artificial Sequence
  Oligonucleotide for detection of SNP TSC0017199
ataaaataacgta

SEQ ID NO: 65333 - DNA, 13 bp, Artificial Sequence
  Oligonucleotide for detection of SNP TSC0017199
tatgtcgttttat

SEQ ID NO: 65334 - DNA, 13 bp, Artificial Sequence
  Oligonucleotide for detection of SNP TSC0017199
ataaaacgacata

SEQ ID NO: 65335 - DNA, 13 bp, Artificial Sequence
  Oligonucleotide for detection of SNP TSC0017199
tacgtcgttttat

SEQ ID NO: 65336 - DNA, 13 bp, Artificial Sequence
  Oligonucleotide for detection of SNP TSC0017199
ataaaacgacgta

SEQ ID NO: 65337 - DNA, 13 bp, Artificial Sequence
  Oligonucleotide for detection of SNP TSC0017200
atttttagttaay

SEQ ID NO: 65338 - DNA, 13 bp, Artificial Sequence
  Oligonucleotide for detection of SNP TSC0017200
rttaactaaaaat

SEQ ID NO: 65339 - DNA, 13 bp, Artificial Sequence
  Oligonucleotide for detection of SNP TSC0017200
atttttggttaay

SEQ ID NO: 65340 - DNA, 13 bp, Artificial Sequence
  Oligonucleotide for detection of SNP TSC0017200
rttaaccaaaaat

SEQ ID NO: 65341 - DNA, 13 bp, Artificial Sequence
  Oligonucleotide for detection of SNP TSC0017207
ttattgttttaty

SEQ ID NO: 65342 - DNA, 13 bp, Artificial Sequence
  Oligonucleotide for detection of SNP TSC0017207
rataaaacaataa

SEQ ID NO: 65343 - DNA, 13 bp, Artificial Sequence
  Oligonucleotide for detection of SNP TSC0017207
ttattggtttaty

SEQ ID NO: 65344 - DNA, 13 bp, Artificial Sequence
  Oligonucleotide for detection of SNP TSC0017207
rataaaccaataa

SEQ ID NO: 65345 - DNA, 13 bp, Artificial Sequence
  Oligonucleotide for detection of SNP TSC0017207
gataaagtagtga

SEQ ID NO: 65346 - DNA, 13 bp, Artificial Sequence
  Oligonucleotide for detection of SNP TSC0017207
tcactactttatc

SEQ ID NO: 65347 - DNA, 13 bp, Artificial Sequence
  Oligonucleotide for detection of SNP TSC0017207
gataaattagtga

SEQ ID NO: 65348 - DNA, 13 bp, Artificial Sequence
  Oligonucleotide for detection of SNP TSC0017207
tcactaatttatc

SEQ ID NO: 65349 - DNA, 13 bp, Artificial Sequence
  Oligonucleotide for detection of SNP TSC0017208
ttttaaattttga

SEQ ID NO: 65350 - DNA, 13 bp, Artificial Sequence
  Oligonucleotide for detection of SNP TSC0017208
tcaaaatttaaaa

SEQ ID NO: 65351 - DNA, 13 bp, Artificial Sequence
  Oligonucleotide for detection of SNP TSC0017208
ttttaatttttga

SEQ ID NO: 65352 - DNA, 13 bp, Artificial Sequence
  Oligonucleotide for detection of SNP TSC0017208
tcaaaaattaaaa

SEQ ID NO: 65353 - DNA, 13 bp, Artificial Sequence
  Oligonucleotide for detection of SNP TSC0017208
ttaggatttggag

SEQ ID NO: 65354 - DNA, 13 bp, Artificial Sequence
  Oligonucleotide for detection of SNP TSC0017208
ctccaaatcctaa

SEQ ID NO: 65355 - DNA, 13 bp, Artificial Sequence
  Oligonucleotide for detection of SNP TSC0017208
ttaggagttggag

SEQ ID NO: 65356 - DNA, 13 bp, Artificial Sequence
  Oligonucleotide for detection of SNP TSC0017208
ctccaactcctaa

SEQ ID NO: 65357 - DNA, 13 bp, Artificial Sequence
  Oligonucleotide for detection of SNP TSC0017209
tttatgagttggg

SEQ ID NO: 65358 - DNA, 13 bp, Artificial Sequence
  Oligonucleotide for detection of SNP TSC0017209
cccaactcataaa

SEQ ID NO: 65359 - DNA, 13 bp, Artificial Sequence
  Oligonucleotide for detection of SNP TSC0017209
tttatgggttggg

SEQ ID NO: 65360 - DNA, 13 bp, Artificial Sequence
  Oligonucleotide for detection of SNP TSC0017209
cccaacccataaa

SEQ ID NO: 65361 - DNA, 13 bp, Artificial Sequence
  Oligonucleotide for detection of SNP TSC0017210
gggttatggtgay

SEQ ID NO: 65362 - DNA, 13 bp, Artificial Sequence
  Oligonucleotide for detection of SNP TSC0017210
rtcaccataaccc

SEQ ID NO: 65363 - DNA, 13 bp, Artificial Sequence
  Oligonucleotide for detection of SNP TSC0017210
gggttacggtgay

SEQ ID NO: 65364 - DNA, 13 bp, Artificial Sequence
  Oligonucleotide for detection of SNP TSC0017210
rtcaccgtaaccc

SEQ ID NO: 65365 - DNA, 13 bp, Artificial Sequence
  Oligonucleotide for detection of SNP TSC0017210
gggttatggcgay

SEQ ID NO: 65366 - DNA, 13 bp, Artificial Sequence
  Oligonucleotide for detection of SNP TSC0017210
rtcgccataaccc

SEQ ID NO: 65367 - DNA, 13 bp, Artificial Sequence
  Oligonucleotide for detection of SNP TSC0017210
gggttacggcgay

SEQ ID NO: 65368 - DNA, 13 bp, Artificial Sequence
  Oligonucleotide for detection of SNP TSC0017210
rtcgccgtaaccc

SEQ ID NO: 65369 - DNA, 13 bp, Artificial Sequence
  Oligonucleotide for detection of SNP TSC0017210
gttgttgtagtty

SEQ ID NO: 65370 - DNA, 13 bp, Artificial Sequence
  Oligonucleotide for detection of SNP TSC0017210
raactacaacaac

SEQ ID NO: 65371 - DNA, 13 bp, Artificial Sequence
  Oligonucleotide for detection of SNP TSC0017210
gttgttatagtty

SEQ ID NO: 65372 - DNA, 13 bp, Artificial Sequence
  Oligonucleotide for detection of SNP TSC0017210
raactataacaac

SEQ ID NO: 65373 - DNA, 13 bp, Artificial Sequence
  Oligonucleotide for detection of SNP TSC0017210
gtcgttgtagtty

SEQ ID NO: 65374 - DNA, 13 bp, Artificial Sequence
  Oligonucleotide for detection of SNP TSC0017210
raactacaacgac

SEQ ID NO: 65375 - DNA, 13 bp, Artificial Sequence
  Oligonucleotide for detection of SNP TSC0017210
gtcgttatagtty

SEQ ID NO: 65376 - DNA, 13 bp, Artificial Sequence
  Oligonucleotide for detection of SNP TSC0017210
raactataacgac

SEQ ID NO: 65377 - DNA, 13 bp, Artificial Sequence
  Oligonucleotide for detection of SNP TSC0017210
gttgtcgtagtty

SEQ ID NO: 65378 - DNA, 13 bp, Artificial Sequence
  Oligonucleotide for detection of SNP TSC0017210
raactacgacaac

SEQ ID NO: 65379 - DNA, 13 bp, Artificial Sequence
  Oligonucleotide for detection of SNP TSC0017210
gtcgtcgtagtty

SEQ ID NO: 65380 - DNA, 13 bp, Artificial Sequence
  Oligonucleotide for detection of SNP TSC0017210
raactacgacgac

SEQ ID NO: 65381 - DNA, 13 bp, Artificial Sequence
  Oligonucleotide for detection of SNP TSC0017213
tgagagtgatggy

SEQ ID NO: 65382 - DNA, 13 bp, Artificial Sequence
  Oligonucleotide for detection of SNP TSC0017213
rccatcactctca

SEQ ID NO: 65383 - DNA, 13 bp, Artificial Sequence
  Oligonucleotide for detection of SNP TSC0017213
tgagagagatggy

SEQ ID NO: 65384 - DNA, 13 bp, Artificial Sequence
  Oligonucleotide for detection of SNP TSC0017213
rccatctctctca

SEQ ID NO: 65385 - DNA, 13 bp, Artificial Sequence
  Oligonucleotide for detection of SNP TSC0017217
aatagttgttgta

SEQ ID NO: 65386 - DNA, 13 bp, Artificial Sequence
  Oligonucleotide for detection of SNP TSC0017217
tacaacaactatt

SEQ ID NO: 65387 - DNA, 13 bp, Artificial Sequence
  Oligonucleotide for detection of SNP TSC0017217
aatagtcgttgta

SEQ ID NO: 65388 - DNA, 13 bp, Artificial Sequence
  Oligonucleotide for detection of SNP TSC0017217
tacaacgactatt

SEQ ID NO: 65389 - DNA, 13 bp, Artificial Sequence
  Oligonucleotide for detection of SNP TSC0017217
tgtagtgattatt

SEQ ID NO: 65390 - DNA, 13 bp, Artificial Sequence
  Oligonucleotide for detection of SNP TSC0017217
aataatcactaca

SEQ ID NO: 65391 - DNA, 13 bp, Artificial Sequence
  Oligonucleotide for detection of SNP TSC0017217
tgtagtaattatt

SEQ ID NO: 65392 - DNA, 13 bp, Artificial Sequence
  Oligonucleotide for detection of SNP TSC0017217
aataattactaca

SEQ ID NO: 65393 - DNA, 13 bp, Artificial Sequence
  Oligonucleotide for detection of SNP TSC0017217
tgtagcgattatt

SEQ ID NO: 65394 - DNA, 13 bp, Artificial Sequence
  Oligonucleotide for detection of SNP TSC0017217
aataatcgctaca

SEQ ID NO: 65395 - DNA, 13 bp, Artificial Sequence
  Oligonucleotide for detection of SNP TSC0017219
ttattgggtttag

SEQ ID NO: 65396 - DNA, 13 bp, Artificial Sequence
  Oligonucleotide for detection of SNP TSC0017219
ctaaacccaataa

SEQ ID NO: 65397 - DNA, 13 bp, Artificial Sequence
  Oligonucleotide for detection of SNP TSC0017219
ttattgtgtttag

SEQ ID NO: 65398 - DNA, 13 bp, Artificial Sequence
  Oligonucleotide for detection of SNP TSC0017219
ctaaacacaataa

SEQ ID NO: 65399 - DNA, 13 bp, Artificial Sequence
  Oligonucleotide for detection of SNP TSC0017219
ttatcgggtttag

SEQ ID NO: 65400 - DNA, 13 bp, Artificial Sequence
  Oligonucleotide for detection of SNP TSC0017219
ctaaacccgataa

SEQ ID NO: 65401 - DNA, 13 bp, Artificial Sequence
  Oligonucleotide for detection of SNP TSC0017219
ttatcgtgtttag

SEQ ID NO: 65402 - DNA, 13 bp, Artificial Sequence
  Oligonucleotide for detection of SNP TSC0017219
ctaaacacgataa

SEQ ID NO: 65403 - DNA, 13 bp, Artificial Sequence
  Oligonucleotide for detection of SNP TSC0017219
ttgggtttggtgg

SEQ ID NO: 65404 - DNA, 13 bp, Artificial Sequence
  Oligonucleotide for detection of SNP TSC0017219
ccaccaaacccaa

SEQ ID NO: 65405 - DNA, 13 bp, Artificial Sequence
  Oligonucleotide for detection of SNP TSC0017219
ttgggttcggtgg

SEQ ID NO: 65406 - DNA, 13 bp, Artificial Sequence
  Oligonucleotide for detection of SNP TSC0017219
ccaccgaacccaa

SEQ ID NO: 65407 - DNA, 13 bp, Artificial Sequence
  Oligonucleotide for detection of SNP TSC0017219
ttgggtacggtgg

SEQ ID NO: 65408 - DNA, 13 bp, Artificial Sequence
  Oligonucleotide for detection of SNP TSC0017219
ccaccgtacccaa

SEQ ID NO: 65409 - DNA, 13 bp, Artificial Sequence
  Oligonucleotide for detection of SNP TSC0017220
ttttagggatggg

SEQ ID NO: 65410 - DNA, 13 bp, Artificial Sequence
  Oligonucleotide for detection of SNP TSC0017220
cccatccctaaaa

SEQ ID NO: 65411 - DNA, 13 bp, Artificial Sequence
  Oligonucleotide for detection of SNP TSC0017220
ttttagtgatggg

SEQ ID NO: 65412 - DNA, 13 bp, Artificial Sequence
  Oligonucleotide for detection of SNP TSC0017220
cccatcactaaaa

SEQ ID NO: 65413 - DNA, 13 bp, Artificial Sequence
  Oligonucleotide for detection of SNP TSC0017220
ttttagggacggg

SEQ ID NO: 65414 - DNA, 13 bp, Artificial Sequence
  Oligonucleotide for detection of SNP TSC0017220
cccgtccctaaaa

SEQ ID NO: 65415 - DNA, 13 bp, Artificial Sequence
  Oligonucleotide for detection of SNP TSC0017220
ttttagtgacggg

SEQ ID NO: 65416 - DNA, 13 bp, Artificial Sequence
  Oligonucleotide for detection of SNP TSC0017220
cccgtcactaaaa

SEQ ID NO: 65417 - DNA, 13 bp, Artificial Sequence
  Oligonucleotide for detection of SNP TSC0017220
tttgtttttagaa

SEQ ID NO: 65418 - DNA, 13 bp, Artificial Sequence
  Oligonucleotide for detection of SNP TSC0017220
ttctaaaaacaaa

SEQ ID NO: 65419 - DNA, 13 bp, Artificial Sequence
  Oligonucleotide for detection of SNP TSC0017220
tttgttattagaa

SEQ ID NO: 65420 - DNA, 13 bp, Artificial Sequence
  Oligonucleotide for detection of SNP TSC0017220
ttctaataacaaa

SEQ ID NO: 65421 - DNA, 13 bp, Artificial Sequence
  Oligonucleotide for detection of SNP TSC0017220
ttcgtttttagaa

SEQ ID NO: 65422 - DNA, 13 bp, Artificial Sequence
  Oligonucleotide for detection of SNP TSC0017220
ttctaaaaacgaa

SEQ ID NO: 65423 - DNA, 13 bp, Artificial Sequence
  Oligonucleotide for detection of SNP TSC0017220
ttcgttattagaa

SEQ ID NO: 65424 - DNA, 13 bp, Artificial Sequence
  Oligonucleotide for detection of SNP TSC0017220
ttctaataacgaa

SEQ ID NO: 65425 - DNA, 13 bp, Artificial Sequence
  Oligonucleotide for detection of SNP TSC0017221
aagttgggtatag

SEQ ID NO: 65426 - DNA, 13 bp, Artificial Sequence
  Oligonucleotide for detection of SNP TSC0017221
ctatacccaactt

SEQ ID NO: 65427 - DNA, 13 bp, Artificial Sequence
  Oligonucleotide for detection of SNP TSC0017221
aagttgagtatag

SEQ ID NO: 65428 - DNA, 13 bp, Artificial Sequence
  Oligonucleotide for detection of SNP TSC0017221
ctatactcaactt

SEQ ID NO: 65429 - DNA, 13 bp, Artificial Sequence
  Oligonucleotide for detection of SNP TSC0017224
taaagtggggtty

SEQ ID NO: 65430 - DNA, 13 bp, Artificial Sequence
  Oligonucleotide for detection of SNP TSC0017224
raaccccacttta

SEQ ID NO: 65431 - DNA, 13 bp, Artificial Sequence
  Oligonucleotide for detection of SNP TSC0017224
taaagttgggtty

SEQ ID NO: 65432 - DNA, 13 bp, Artificial Sequence
  Oligonucleotide for detection of SNP TSC0017224
raacccaacttta

SEQ ID NO: 65433 - DNA, 13 bp, Artificial Sequence
  Oligonucleotide for detection of SNP TSC0017224
taaagcggggtty

SEQ ID NO: 65434 - DNA, 13 bp, Artificial Sequence
  Oligonucleotide for detection of SNP TSC0017224
raaccccgcttta

SEQ ID NO: 65435 - DNA, 13 bp, Artificial Sequence
  Oligonucleotide for detection of SNP TSC0017224
gagtttagttttg

SEQ ID NO: 65436 - DNA, 13 bp, Artificial Sequence
  Oligonucleotide for detection of SNP TSC0017224
caaaactaaactc

SEQ ID NO: 65437 - DNA, 13 bp, Artificial Sequence
  Oligonucleotide for detection of SNP TSC0017228
ggagtgaggagtg

SEQ ID NO: 65438 - DNA, 13 bp, Artificial Sequence
  Oligonucleotide for detection of SNP TSC0017228
cactcctcactcc

SEQ ID NO: 65439 - DNA, 13 bp, Artificial Sequence
  Oligonucleotide for detection of SNP TSC0017228
ggagtggggagtg

SEQ ID NO: 65440 - DNA, 13 bp, Artificial Sequence
  Oligonucleotide for detection of SNP TSC0017228
cactccccactcc

SEQ ID NO: 65441 - DNA, 13 bp, Artificial Sequence
  Oligonucleotide for detection of SNP TSC0017228
ggagcgaggagtg

SEQ ID NO: 65442 - DNA, 13 bp, Artificial Sequence
  Oligonucleotide for detection of SNP TSC0017228
cactcctcgctcc

SEQ ID NO: 65443 - DNA, 13 bp, Artificial Sequence
  Oligonucleotide for detection of SNP TSC0017228
ggagcggggagtg

SEQ ID NO: 65444 - DNA, 13 bp, Artificial Sequence
  Oligonucleotide for detection of SNP TSC0017228
cactccccgctcc

SEQ ID NO: 65445 - DNA, 13 bp, Artificial Sequence
  Oligonucleotide for detection of SNP TSC0017229
ggattatggtttg

SEQ ID NO: 65446 - DNA, 13 bp, Artificial Sequence
  Oligonucleotide for detection of SNP TSC0017229
caaaccataatcc

SEQ ID NO: 65447 - DNA, 13 bp, Artificial Sequence
  Oligonucleotide for detection of SNP TSC0017229
ggattacggtttg

SEQ ID NO: 65448 - DNA, 13 bp, Artificial Sequence
  Oligonucleotide for detection of SNP TSC0017229
caaaccgtaatcc

SEQ ID NO: 65449 - DNA, 13 bp, Artificial Sequence
  Oligonucleotide for detection of SNP TSC0017229
ggattatggttcg

SEQ ID NO: 65450 - DNA, 13 bp, Artificial Sequence
  Oligonucleotide for detection of SNP TSC0017229
cgaaccataatcc

SEQ ID NO: 65451 - DNA, 13 bp, Artificial Sequence
  Oligonucleotide for detection of SNP TSC0017229
ggattacggttcg

SEQ ID NO: 65452 - DNA, 13 bp, Artificial Sequence
  Oligonucleotide for detection of SNP TSC0017229
cgaaccgtaatcc

SEQ ID NO: 65453 - DNA, 13 bp, Artificial Sequence
  Oligonucleotide for detection of SNP TSC0017229
tgagttgtggtty

SEQ ID NO: 65454 - DNA, 13 bp, Artificial Sequence
  Oligonucleotide for detection of SNP TSC0017229
raaccacaactca

SEQ ID NO: 65455 - DNA, 13 bp, Artificial Sequence
  Oligonucleotide for detection of SNP TSC0017229
tgagttatggtty

SEQ ID NO: 65456 - DNA, 13 bp, Artificial Sequence
  Oligonucleotide for detection of SNP TSC0017229
raaccataactca

SEQ ID NO: 65457 - DNA, 13 bp, Artificial Sequence
  Oligonucleotide for detection of SNP TSC0017229
cgagttgtggtty

SEQ ID NO: 65458 - DNA, 13 bp, Artificial Sequence
  Oligonucleotide for detection of SNP TSC0017229
raaccacaactcg

SEQ ID NO: 65459 - DNA, 13 bp, Artificial Sequence
  Oligonucleotide for detection of SNP TSC0017229
cgagttatggtty

SEQ ID NO: 65460 - DNA, 13 bp, Artificial Sequence
  Oligonucleotide for detection of SNP TSC0017229
raaccataactcg

SEQ ID NO: 65461 - DNA, 13 bp, Artificial Sequence
  Oligonucleotide for detection of SNP TSC0017229
tgagtcgtggtty

SEQ ID NO: 65462 - DNA, 13 bp, Artificial Sequence
  Oligonucleotide for detection of SNP TSC0017229
raaccacgactca

SEQ ID NO: 65463 - DNA, 13 bp, Artificial Sequence
  Oligonucleotide for detection of SNP TSC0017229
cgagtcgtggtty

SEQ ID NO: 65464 - DNA, 13 bp, Artificial Sequence
  Oligonucleotide for detection of SNP TSC0017229
raaccacgactcg

SEQ ID NO: 65465 - DNA, 13 bp, Artificial Sequence
  Oligonucleotide for detection of SNP TSC0017230
gaaagtggagtag

SEQ ID NO: 65466 - DNA, 13 bp, Artificial Sequence
  Oligonucleotide for detection of SNP TSC0017230
ctactccactttc

SEQ ID NO: 65467 - DNA, 13 bp, Artificial Sequence
  Oligonucleotide for detection of SNP TSC0017230
gaaagtagagtag

SEQ ID NO: 65468 - DNA, 13 bp, Artificial Sequence
  Oligonucleotide for detection of SNP TSC0017230
ctactctactttc

SEQ ID NO: 65469 - DNA, 13 bp, Artificial Sequence
  Oligonucleotide for detection of SNP TSC0017231
ttttgatattttg

SEQ ID NO: 65470 - DNA, 13 bp, Artificial Sequence
  Oligonucleotide for detection of SNP TSC0017231
caaaatatcaaaa

SEQ ID NO: 65471 - DNA, 13 bp, Artificial Sequence
  Oligonucleotide for detection of SNP TSC0017231
ttttgagattttg

SEQ ID NO: 65472 - DNA, 13 bp, Artificial Sequence
  Oligonucleotide for detection of SNP TSC0017231
caaaatctcaaaa

SEQ ID NO: 65473 - DNA, 13 bp, Artificial Sequence
  Oligonucleotide for detection of SNP TSC0017231
taaggtgttaaga

SEQ ID NO: 65474 - DNA, 13 bp, Artificial Sequence
  Oligonucleotide for detection of SNP TSC0017231
tcttaacacctta

SEQ ID NO: 65475 - DNA, 13 bp, Artificial Sequence
  Oligonucleotide for detection of SNP TSC0017231
taaggttttaaga

SEQ ID NO: 65476 - DNA, 13 bp, Artificial Sequence
  Oligonucleotide for detection of SNP TSC0017231
tcttaaaacctta

SEQ ID NO: 65477 - DNA, 13 bp, Artificial Sequence
  Oligonucleotide for detection of SNP TSC0017232
ggtaggggaaggy

SEQ ID NO: 65478 - DNA, 13 bp, Artificial Sequence
  Oligonucleotide for detection of SNP TSC0017232
rccttcccctacc

SEQ ID NO: 65479 - DNA, 13 bp, Artificial Sequence
  Oligonucleotide for detection of SNP TSC0017232
ggtaggagaaggy

SEQ ID NO: 65480 - DNA, 13 bp, Artificial Sequence
  Oligonucleotide for detection of SNP TSC0017232
rccttctcctacc

SEQ ID NO: 65481 - DNA, 13 bp, Artificial Sequence
  Oligonucleotide for detection of SNP TSC0017235
tatttagttttty

SEQ ID NO: 65482 - DNA, 13 bp, Artificial Sequence
  Oligonucleotide for detection of SNP TSC0017235
raaaaactaaata

SEQ ID NO: 65483 - DNA, 13 bp, Artificial Sequence
  Oligonucleotide for detection of SNP TSC0017236
gttggtaagaaty

SEQ ID NO: 65484 - DNA, 13 bp, Artificial Sequence
  Oligonucleotide for detection of SNP TSC0017236
rattcttaccaac

SEQ ID NO: 65485 - DNA, 13 bp, Artificial Sequence
  Oligonucleotide for detection of SNP TSC0017236
gttggtgagaaty

SEQ ID NO: 65486 - DNA, 13 bp, Artificial Sequence
  Oligonucleotide for detection of SNP TSC0017236
rattctcaccaac

SEQ ID NO: 65487 - DNA, 13 bp, Artificial Sequence
  Oligonucleotide for detection of SNP TSC0017238
gaagatatagata

SEQ ID NO: 65488 - DNA, 13 bp, Artificial Sequence
  Oligonucleotide for detection of SNP TSC0017238
tatctatatcttc

SEQ ID NO: 65489 - DNA, 13 bp, Artificial Sequence
  Oligonucleotide for detection of SNP TSC0017238
gaagatttagata

SEQ ID NO: 65490 - DNA, 13 bp, Artificial Sequence
  Oligonucleotide for detection of SNP TSC0017238
tatctaaatcttc

SEQ ID NO: 65491 - DNA, 13 bp, Artificial Sequence
  Oligonucleotide for detection of SNP TSC0017238
tgtttgtgtttty

SEQ ID NO: 65492 - DNA, 13 bp, Artificial Sequence
  Oligonucleotide for detection of SNP TSC0017238
raaaacacaaaca

SEQ ID NO: 65493 - DNA, 13 bp, Artificial Sequence
  Oligonucleotide for detection of SNP TSC0017238
tgtttgggtttty

SEQ ID NO: 65494 - DNA, 13 bp, Artificial Sequence
  Oligonucleotide for detection of SNP TSC0017238
raaaacccaaaca

SEQ ID NO: 65495 - DNA, 13 bp, Artificial Sequence
  Oligonucleotide for detection of SNP TSC0017239
attaaaaaaaaaa

SEQ ID NO: 65496 - DNA, 13 bp, Artificial Sequence
  Oligonucleotide for detection of SNP TSC0017239
ttttttttttaat

SEQ ID NO: 65497 - DNA, 13 bp, Artificial Sequence
  Oligonucleotide for detection of SNP TSC0017239
attaaataaaaaa

SEQ ID NO: 65498 - DNA, 13 bp, Artificial Sequence
  Oligonucleotide for detection of SNP TSC0017239
ttttttatttaat

SEQ ID NO: 65499 - DNA, 13 bp, Artificial Sequence
  Oligonucleotide for detection of SNP TSC0017240
taggatgattaty

SEQ ID NO: 65500 - DNA, 13 bp, Artificial Sequence
  Oligonucleotide for detection of SNP TSC0017240
rataatcatccta

SEQ ID NO: 65501 - DNA, 13 bp, Artificial Sequence
  Oligonucleotide for detection of SNP TSC0017240
taggataattaty

SEQ ID NO: 65502 - DNA, 13 bp, Artificial Sequence
  Oligonucleotide for detection of SNP TSC0017240
rataattatccta

SEQ ID NO: 65503 - DNA, 13 bp, Artificial Sequence
  Oligonucleotide for detection of SNP TSC0017243
ttaagagtagaay

SEQ ID NO: 65504 - DNA, 13 bp, Artificial Sequence
  Oligonucleotide for detection of SNP TSC0017243
rttctactcttaa

SEQ ID NO: 65505 - DNA, 13 bp, Artificial Sequence
  Oligonucleotide for detection of SNP TSC0017243
ttaagaatagaay

SEQ ID NO: 65506 - DNA, 13 bp, Artificial Sequence
  Oligonucleotide for detection of SNP TSC0017243
rttctattcttaa

SEQ ID NO: 65507 - DNA, 13 bp, Artificial Sequence
  Oligonucleotide for detection of SNP TSC0017244
taaagatggaaga

SEQ ID NO: 65508 - DNA, 13 bp, Artificial Sequence
  Oligonucleotide for detection of SNP TSC0017244
tcttccatcttta

SEQ ID NO: 65509 - DNA, 13 bp, Artificial Sequence
  Oligonucleotide for detection of SNP TSC0017244
taaagacggaaga

SEQ ID NO: 65510 - DNA, 13 bp, Artificial Sequence
  Oligonucleotide for detection of SNP TSC0017244
tcttccgtcttta

SEQ ID NO: 65511 - DNA, 13 bp, Artificial Sequence
  Oligonucleotide for detection of SNP TSC0017245
gtaaggtagtata

SEQ ID NO: 65512 - DNA, 13 bp, Artificial Sequence
  Oligonucleotide for detection of SNP TSC0017245
tatactaccttac

SEQ ID NO: 65513 - DNA, 13 bp, Artificial Sequence
  Oligonucleotide for detection of SNP TSC0017245
gtaagggagtata

SEQ ID NO: 65514 - DNA, 13 bp, Artificial Sequence
  Oligonucleotide for detection of SNP TSC0017245
tatactcccttac

SEQ ID NO: 65515 - DNA, 13 bp, Artificial Sequence
  Oligonucleotide for detection of SNP TSC0017245
tatgttgttttgy

SEQ ID NO: 65516 - DNA, 13 bp, Artificial Sequence
  Oligonucleotide for detection of SNP TSC0017245
rcaaaacaacata

SEQ ID NO: 65517 - DNA, 13 bp, Artificial Sequence
  Oligonucleotide for detection of SNP TSC0017245
tatgtttttttgy

SEQ ID NO: 65518 - DNA, 13 bp, Artificial Sequence
  Oligonucleotide for detection of SNP TSC0017245
rcaaaaaaacata

SEQ ID NO: 65519 - DNA, 13 bp, Artificial Sequence
  Oligonucleotide for detection of SNP TSC0017246
gagatagaaatta

SEQ ID NO: 65520 - DNA, 13 bp, Artificial Sequence
  Oligonucleotide for detection of SNP TSC0017246
taatttctatctc

SEQ ID NO: 65521 - DNA, 13 bp, Artificial Sequence
  Oligonucleotide for detection of SNP TSC0017246
gagataaaaatta

SEQ ID NO: 65522 - DNA, 13 bp, Artificial Sequence
  Oligonucleotide for detection of SNP TSC0017246
taatttttatctc

SEQ ID NO: 65523 - DNA, 13 bp, Artificial Sequence
  Oligonucleotide for detection of SNP TSC0017247
agagggtgtggat

SEQ ID NO: 65524 - DNA, 13 bp, Artificial Sequence
  Oligonucleotide for detection of SNP TSC0017247
atccacaccctct

SEQ ID NO: 65525 - DNA, 13 bp, Artificial Sequence
  Oligonucleotide for detection of SNP TSC0017247
agagggcgtggat

SEQ ID NO: 65526 - DNA, 13 bp, Artificial Sequence
  Oligonucleotide for detection of SNP TSC0017247
atccacgccctct

SEQ ID NO: 65527 - DNA, 13 bp, Artificial Sequence
  Oligonucleotide for detection of SNP TSC0017247
atttatgtttttt

SEQ ID NO: 65528 - DNA, 13 bp, Artificial Sequence
  Oligonucleotide for detection of SNP TSC0017247
aaaaaacataaat

SEQ ID NO: 65529 - DNA, 13 bp, Artificial Sequence
  Oligonucleotide for detection of SNP TSC0017247
atttatatttttt

SEQ ID NO: 65530 - DNA, 13 bp, Artificial Sequence
  Oligonucleotide for detection of SNP TSC0017247
aaaaaatataaat

SEQ ID NO: 65531 - DNA, 13 bp, Artificial Sequence
  Oligonucleotide for detection of SNP TSC0017247
atttacgtttttt

SEQ ID NO: 65532 - DNA, 13 bp, Artificial Sequence
  Oligonucleotide for detection of SNP TSC0017247
aaaaaacgtaaat

SEQ ID NO: 65533 - DNA, 13 bp, Artificial Sequence
  Oligonucleotide for detection of SNP TSC0017248
agaaggggtagaa

SEQ ID NO: 65534 - DNA, 13 bp, Artificial Sequence
  Oligonucleotide for detection of SNP TSC0017248
ttctaccccttct

SEQ ID NO: 65535 - DNA, 13 bp, Artificial Sequence
  Oligonucleotide for detection of SNP TSC0017248
agaaggtgtagaa

SEQ ID NO: 65536 - DNA, 13 bp, Artificial Sequence
  Oligonucleotide for detection of SNP TSC0017248
ttctacaccttct

SEQ ID NO: 65537 - DNA, 13 bp, Artificial Sequence
  Oligonucleotide for detection of SNP TSC0017248
agaaggcgtagaa

SEQ ID NO: 65538 - DNA, 13 bp, Artificial Sequence
  Oligonucleotide for detection of SNP TSC0017248
ttctacgccttct

SEQ ID NO: 65539 - DNA, 13 bp, Artificial Sequence
  Oligonucleotide for detection of SNP TSC0017249
ttagggagtttaa

SEQ ID NO: 65540 - DNA, 13 bp, Artificial Sequence
  Oligonucleotide for detection of SNP TSC0017249
ttaaactccctaa

SEQ ID NO: 65541 - DNA, 13 bp, Artificial Sequence
  Oligonucleotide for detection of SNP TSC0017249
ttagggtgtttaa

SEQ ID NO: 65542 - DNA, 13 bp, Artificial Sequence
  Oligonucleotide for detection of SNP TSC0017249
ttaaacaccctaa

SEQ ID NO: 65543 - DNA, 13 bp, Artificial Sequence
  Oligonucleotide for detection of SNP TSC0017249
ttagggcgtttaa

SEQ ID NO: 65544 - DNA, 13 bp, Artificial Sequence
  Oligonucleotide for detection of SNP TSC0017249
ttaaacgccctaa

SEQ ID NO: 65545 - DNA, 13 bp, Artificial Sequence
  Oligonucleotide for detection of SNP TSC0017249
ttggattttttaa

SEQ ID NO: 65546 - DNA, 13 bp, Artificial Sequence
  Oligonucleotide for detection of SNP TSC0017249
ttaaaaaatccaa

SEQ ID NO: 65547 - DNA, 13 bp, Artificial Sequence
  Oligonucleotide for detection of SNP TSC0017249
ttggatgttttaa

SEQ ID NO: 65548 - DNA, 13 bp, Artificial Sequence
  Oligonucleotide for detection of SNP TSC0017249
ttaaaacatccaa

SEQ ID NO: 65549 - DNA, 13 bp, Artificial Sequence
  Oligonucleotide for detection of SNP TSC0017249
ttggacgttttaa

SEQ ID NO: 65550 - DNA, 13 bp, Artificial Sequence
  Oligonucleotide for detection of SNP TSC0017249
ttaaaacgtccaa

SEQ ID NO: 65551 - DNA, 13 bp, Artificial Sequence
  Oligonucleotide for detection of SNP TSC0017252
gggagggggaggt

SEQ ID NO: 65552 - DNA, 13 bp, Artificial Sequence
  Oligonucleotide for detection of SNP TSC0017252
acctccccctccc

SEQ ID NO: 65553 - DNA, 13 bp, Artificial Sequence
  Oligonucleotide for detection of SNP TSC0017252
gggaggtggaggt

SEQ ID NO: 65554 - DNA, 13 bp, Artificial Sequence
  Oligonucleotide for detection of SNP TSC0017252
acctccacctccc

SEQ ID NO: 65555 - DNA, 13 bp, Artificial Sequence
  Oligonucleotide for detection of SNP TSC0017253
tattttgtttagy

SEQ ID NO: 65556 - DNA, 13 bp, Artificial Sequence
  Oligonucleotide for detection of SNP TSC0017253
rctaaacaaaata

SEQ ID NO: 65557 - DNA, 13 bp, Artificial Sequence
  Oligonucleotide for detection of SNP TSC0017253
tattttttttagy

SEQ ID NO: 65558 - DNA, 13 bp, Artificial Sequence
  Oligonucleotide for detection of SNP TSC0017253
rctaaaaaaaata

SEQ ID NO: 65559 - DNA, 13 bp, Artificial Sequence
  Oligonucleotide for detection of SNP TSC0017253
tatttcgtttagy

SEQ ID NO: 65560 - DNA, 13 bp, Artificial Sequence
  Oligonucleotide for detection of SNP TSC0017253
rctaaacgaaata

SEQ ID NO: 65561 - DNA, 13 bp, Artificial Sequence
  Oligonucleotide for detection of SNP TSC0017253
gttgagtggagta

SEQ ID NO: 65562 - DNA, 13 bp, Artificial Sequence
  Oligonucleotide for detection of SNP TSC0017253
tactccactcaac

SEQ ID NO: 65563 - DNA, 13 bp, Artificial Sequence
  Oligonucleotide for detection of SNP TSC0017253
gttgagaggagta

SEQ ID NO: 65564 - DNA, 13 bp, Artificial Sequence
  Oligonucleotide for detection of SNP TSC0017253
tactcctctcaac

SEQ ID NO: 65565 - DNA, 13 bp, Artificial Sequence
  Oligonucleotide for detection of SNP TSC0017253
gttgagcggagta

SEQ ID NO: 65566 - DNA, 13 bp, Artificial Sequence
  Oligonucleotide for detection of SNP TSC0017253
tactccgctcaac

SEQ ID NO: 65567 - DNA, 13 bp, Artificial Sequence
  Oligonucleotide for detection of SNP TSC0017254
gattatatgtata

SEQ ID NO: 65568 - DNA, 13 bp, Artificial Sequence
  Oligonucleotide for detection of SNP TSC0017254
tatacatataatc

SEQ ID NO: 65569 - DNA, 13 bp, Artificial Sequence
  Oligonucleotide for detection of SNP TSC0017254
gattatgtgtata

SEQ ID NO: 65570 - DNA, 13 bp, Artificial Sequence
  Oligonucleotide for detection of SNP TSC0017254
tatacacataatc

SEQ ID NO: 65571 - DNA, 13 bp, Artificial Sequence
  Oligonucleotide for detection of SNP TSC0017254
gattacgtgtata

SEQ ID NO: 65572 - DNA, 13 bp, Artificial Sequence
  Oligonucleotide for detection of SNP TSC0017254
tatacacgtaatc

SEQ ID NO: 65573 - DNA, 13 bp, Artificial Sequence
  Oligonucleotide for detection of SNP TSC0017254
tatatatgtagty

SEQ ID NO: 65574 - DNA, 13 bp, Artificial Sequence
  Oligonucleotide for detection of SNP TSC0017254
ractacatatata

SEQ ID NO: 65575 - DNA, 13 bp, Artificial Sequence
  Oligonucleotide for detection of SNP TSC0017254
tatatacgtagty

SEQ ID NO: 65576 - DNA, 13 bp, Artificial Sequence
  Oligonucleotide for detection of SNP TSC0017254
ractacgtatata

SEQ ID NO: 65577 - DNA, 13 bp, Artificial Sequence
  Oligonucleotide for detection of SNP TSC0017257
agtattatgtatt

SEQ ID NO: 65578 - DNA, 13 bp, Artificial Sequence
  Oligonucleotide for detection of SNP TSC0017257
aatacataatact

SEQ ID NO: 65579 - DNA, 13 bp, Artificial Sequence
  Oligonucleotide for detection of SNP TSC0017257
agtattttgtatt

SEQ ID NO: 65580 - DNA, 13 bp, Artificial Sequence
  Oligonucleotide for detection of SNP TSC0017257
aatacaaaatact

SEQ ID NO: 65581 - DNA, 13 bp, Artificial Sequence
  Oligonucleotide for detection of SNP TSC0017257
agtattacgtatt

SEQ ID NO: 65582 - DNA, 13 bp, Artificial Sequence
  Oligonucleotide for detection of SNP TSC0017257
aatacgtaatact

SEQ ID NO: 65583 - DNA, 13 bp, Artificial Sequence
  Oligonucleotide for detection of SNP TSC0017257
agtatttcgtatt

SEQ ID NO: 65584 - DNA, 13 bp, Artificial Sequence
  Oligonucleotide for detection of SNP TSC0017257
aatacgaaatact

SEQ ID NO: 65585 - DNA, 13 bp, Artificial Sequence
  Oligonucleotide for detection of SNP TSC0017257
agtatgtaatgtt

SEQ ID NO: 65586 - DNA, 13 bp, Artificial Sequence
  Oligonucleotide for detection of SNP TSC0017257
aacattacatact

SEQ ID NO: 65587 - DNA, 13 bp, Artificial Sequence
  Oligonucleotide for detection of SNP TSC0017257
agtatgaaatgtt

SEQ ID NO: 65588 - DNA, 13 bp, Artificial Sequence
  Oligonucleotide for detection of SNP TSC0017257
aacatttcatact

SEQ ID NO: 65589 - DNA, 13 bp, Artificial Sequence
  Oligonucleotide for detection of SNP TSC0017257
agtacgtaatgtt

SEQ ID NO: 65590 - DNA, 13 bp, Artificial Sequence
  Oligonucleotide for detection of SNP TSC0017257
aacattacgtact

SEQ ID NO: 65591 - DNA, 13 bp, Artificial Sequence
  Oligonucleotide for detection of SNP TSC0017257
agtacgaaatgtt

SEQ ID NO: 65592 - DNA, 13 bp, Artificial Sequence
  Oligonucleotide for detection of SNP TSC0017257
aacatttcgtact

SEQ ID NO: 65593 - DNA, 13 bp, Artificial Sequence
  Oligonucleotide for detection of SNP TSC0017265
atttcgtttttty

SEQ ID NO: 65594 - DNA, 13 bp, Artificial Sequence
  Oligonucleotide for detection of SNP TSC0017265
raaaaaacgaaat

SEQ ID NO: 65595 - DNA, 13 bp, Artificial Sequence
  Oligonucleotide for detection of SNP TSC0017265
atttcggttttty

SEQ ID NO: 65596 - DNA, 13 bp, Artificial Sequence
  Oligonucleotide for detection of SNP TSC0017265
raaaaaccgaaat

SEQ ID NO: 65597 - DNA, 13 bp, Artificial Sequence
  Oligonucleotide for detection of SNP TSC0017265
gggagggtggagt

SEQ ID NO: 65598 - DNA, 13 bp, Artificial Sequence
  Oligonucleotide for detection of SNP TSC0017265
actccaccctccc

SEQ ID NO: 65599 - DNA, 13 bp, Artificial Sequence
  Oligonucleotide for detection of SNP TSC0017265
gggaggttggagt

SEQ ID NO: 65600 - DNA, 13 bp, Artificial Sequence
  Oligonucleotide for detection of SNP TSC0017265
actccaacctccc

SEQ ID NO: 65601 - DNA, 13 bp, Artificial Sequence
  Oligonucleotide for detection of SNP TSC0017265
gggagggcggagt

SEQ ID NO: 65602 - DNA, 13 bp, Artificial Sequence
  Oligonucleotide for detection of SNP TSC0017265
actccgccctccc

SEQ ID NO: 65603 - DNA, 13 bp, Artificial Sequence
  Oligonucleotide for detection of SNP TSC0017265
gggaggtcggagt

SEQ ID NO: 65604 - DNA, 13 bp, Artificial Sequence
  Oligonucleotide for detection of SNP TSC0017265
actccgacctccc

SEQ ID NO: 65605 - DNA, 13 bp, Artificial Sequence
  Oligonucleotide for detection of SNP TSC0017267
ggatgtagtttty

SEQ ID NO: 65606 - DNA, 13 bp, Artificial Sequence
  Oligonucleotide for detection of SNP TSC0017267
raaaactacatcc

SEQ ID NO: 65607 - DNA, 13 bp, Artificial Sequence
  Oligonucleotide for detection of SNP TSC0017267
ggatgtggtttty

SEQ ID NO: 65608 - DNA, 13 bp, Artificial Sequence
  Oligonucleotide for detection of SNP TSC0017267
raaaaccacatcc

SEQ ID NO: 65609 - DNA, 13 bp, Artificial Sequence
  Oligonucleotide for detection of SNP TSC0017271
gtaagttgaagtt

SEQ ID NO: 65610 - DNA, 13 bp, Artificial Sequence
  Oligonucleotide for detection of SNP TSC0017271
aacttcaacttac

SEQ ID NO: 65611 - DNA, 13 bp, Artificial Sequence
  Oligonucleotide for detection of SNP TSC0017271
gtaagtggaagtt

SEQ ID NO: 65612 - DNA, 13 bp, Artificial Sequence
  Oligonucleotide for detection of SNP TSC0017271
aacttccacttac

SEQ ID NO: 65613 - DNA, 13 bp, Artificial Sequence
  Oligonucleotide for detection of SNP TSC0017271
gtaagtcgaagtt

SEQ ID NO: 65614 - DNA, 13 bp, Artificial Sequence
  Oligonucleotide for detection of SNP TSC0017271
aacttcgacttac

SEQ ID NO: 65615 - DNA, 13 bp, Artificial Sequence
  Oligonucleotide for detection of SNP TSC0017271
aattttgatttgy

SEQ ID NO: 65616 - DNA, 13 bp, Artificial Sequence
  Oligonucleotide for detection of SNP TSC0017271
rcaaatcaaaatt

SEQ ID NO: 65617 - DNA, 13 bp, Artificial Sequence
  Oligonucleotide for detection of SNP TSC0017271
aatttcgatttgy

SEQ ID NO: 65618 - DNA, 13 bp, Artificial Sequence
  Oligonucleotide for detection of SNP TSC0017271
rcaaatcgaaatt

SEQ ID NO: 65619 - DNA, 13 bp, Artificial Sequence
  Oligonucleotide for detection of SNP TSC0017272
ttagaaaatatta

SEQ ID NO: 65620 - DNA, 13 bp, Artificial Sequence
  Oligonucleotide for detection of SNP TSC0017272
taatattttctaa

SEQ ID NO: 65621 - DNA, 13 bp, Artificial Sequence
  Oligonucleotide for detection of SNP TSC0017272
ttagaagatatta

SEQ ID NO: 65622 - DNA, 13 bp, Artificial Sequence
  Oligonucleotide for detection of SNP TSC0017272
taatatcttctaa

SEQ ID NO: 65623 - DNA, 13 bp, Artificial Sequence
  Oligonucleotide for detection of SNP TSC0017273
aatgggggtaaga

SEQ ID NO: 65624 - DNA, 13 bp, Artificial Sequence
  Oligonucleotide for detection of SNP TSC0017273
tcttacccccatt

SEQ ID NO: 65625 - DNA, 13 bp, Artificial Sequence
  Oligonucleotide for detection of SNP TSC0017273
aatgggagtaaga

SEQ ID NO: 65626 - DNA, 13 bp, Artificial Sequence
  Oligonucleotide for detection of SNP TSC0017273
tcttactcccatt

SEQ ID NO: 65627 - DNA, 13 bp, Artificial Sequence
  Oligonucleotide for detection of SNP TSC0017274
gaatttataatty

SEQ ID NO: 65628 - DNA, 13 bp, Artificial Sequence
  Oligonucleotide for detection of SNP TSC0017274
raattataaattc

SEQ ID NO: 65629 - DNA, 13 bp, Artificial Sequence
  Oligonucleotide for detection of SNP TSC0017274
gaatttgtaatty

SEQ ID NO: 65630 - DNA, 13 bp, Artificial Sequence
  Oligonucleotide for detection of SNP TSC0017274
raattacaaattc

SEQ ID NO: 65631 - DNA, 13 bp, Artificial Sequence
  Oligonucleotide for detection of SNP TSC0017274
gaattcgtaatty

SEQ ID NO: 65632 - DNA, 13 bp, Artificial Sequence
  Oligonucleotide for detection of SNP TSC0017274
raattacgaattc

SEQ ID NO: 65633 - DNA, 13 bp, Artificial Sequence
  Oligonucleotide for detection of SNP TSC0017274
ggattgtggatty

SEQ ID NO: 65634 - DNA, 13 bp, Artificial Sequence
  Oligonucleotide for detection of SNP TSC0017274
raatccacaatcc

SEQ ID NO: 65635 - DNA, 13 bp, Artificial Sequence
  Oligonucleotide for detection of SNP TSC0017274
ggattgcggatty

SEQ ID NO: 65636 - DNA, 13 bp, Artificial Sequence
  Oligonucleotide for detection of SNP TSC0017274
raatccgcaatcc

SEQ ID NO: 65637 - DNA, 13 bp, Artificial Sequence
  Oligonucleotide for detection of SNP TSC0017275
atgagtggaatgg

SEQ ID NO: 65638 - DNA, 13 bp, Artificial Sequence
  Oligonucleotide for detection of SNP TSC0017275
ccattccactcat

SEQ ID NO: 65639 - DNA, 13 bp, Artificial Sequence
  Oligonucleotide for detection of SNP TSC0017275
atgagtagaatgg

SEQ ID NO: 65640 - DNA, 13 bp, Artificial Sequence
  Oligonucleotide for detection of SNP TSC0017275
ccattctactcat

SEQ ID NO: 65641 - DNA, 13 bp, Artificial Sequence
  Oligonucleotide for detection of SNP TSC0017275
atgagcggaatgg

SEQ ID NO: 65642 - DNA, 13 bp, Artificial Sequence
  Oligonucleotide for detection of SNP TSC0017275
ccattccgctcat

SEQ ID NO: 65643 - DNA, 13 bp, Artificial Sequence
  Oligonucleotide for detection of SNP TSC0017277
aaatttgaattta

SEQ ID NO: 65644 - DNA, 13 bp, Artificial Sequence
  Oligonucleotide for detection of SNP TSC0017277
taaattcaaattt

SEQ ID NO: 65645 - DNA, 13 bp, Artificial Sequence
  Oligonucleotide for detection of SNP TSC0017277
aaatttaaattta

SEQ ID NO: 65646 - DNA, 13 bp, Artificial Sequence
  Oligonucleotide for detection of SNP TSC0017277
taaatttaaattt

SEQ ID NO: 65647 - DNA, 13 bp, Artificial Sequence
  Oligonucleotide for detection of SNP TSC0017281
ttatgtgtatggt

SEQ ID NO: 65648 - DNA, 13 bp, Artificial Sequence
  Oligonucleotide for detection of SNP TSC0017281
accatacacataa

SEQ ID NO: 65649 - DNA, 13 bp, Artificial Sequence
  Oligonucleotide for detection of SNP TSC0017281
ttatgtatatggt

SEQ ID NO: 65650 - DNA, 13 bp, Artificial Sequence
  Oligonucleotide for detection of SNP TSC0017281
accatatacataa

SEQ ID NO: 65651 - DNA, 13 bp, Artificial Sequence
  Oligonucleotide for detection of SNP TSC0017282
taggaagagagtt

SEQ ID NO: 65652 - DNA, 13 bp, Artificial Sequence
  Oligonucleotide for detection of SNP TSC0017282
aactctcttccta

SEQ ID NO: 65653 - DNA, 13 bp, Artificial Sequence
  Oligonucleotide for detection of SNP TSC0017282
taggaaaagagtt

SEQ ID NO: 65654 - DNA, 13 bp, Artificial Sequence
  Oligonucleotide for detection of SNP TSC0017282
aactcttttccta

SEQ ID NO: 65655 - DNA, 13 bp, Artificial Sequence
  Oligonucleotide for detection of SNP TSC0017283
ggagttagtttag

SEQ ID NO: 65656 - DNA, 13 bp, Artificial Sequence
  Oligonucleotide for detection of SNP TSC0017283
ctaaactaactcc

SEQ ID NO: 65657 - DNA, 13 bp, Artificial Sequence
  Oligonucleotide for detection of SNP TSC0017283
ggagttggtttag

SEQ ID NO: 65658 - DNA, 13 bp, Artificial Sequence
  Oligonucleotide for detection of SNP TSC0017283
ctaaaccaactcc

SEQ ID NO: 65659 - DNA, 13 bp, Artificial Sequence
  Oligonucleotide for detection of SNP TSC0017285
tatggggttttgg

SEQ ID NO: 65660 - DNA, 13 bp, Artificial Sequence
  Oligonucleotide for detection of SNP TSC0017285
ccaaaaccccata

SEQ ID NO: 65661 - DNA, 13 bp, Artificial Sequence
  Oligonucleotide for detection of SNP TSC0017285
tatgggattttgg

SEQ ID NO: 65662 - DNA, 13 bp, Artificial Sequence
  Oligonucleotide for detection of SNP TSC0017285
ccaaaatcccata

SEQ ID NO: 65663 - DNA, 13 bp, Artificial Sequence
  Oligonucleotide for detection of SNP TSC0017286
gtttatattatay

SEQ ID NO: 65664 - DNA, 13 bp, Artificial Sequence
  Oligonucleotide for detection of SNP TSC0017286
rtataatataaac

SEQ ID NO: 65665 - DNA, 13 bp, Artificial Sequence
  Oligonucleotide for detection of SNP TSC0017286
gtttattttatay

SEQ ID NO: 65666 - DNA, 13 bp, Artificial Sequence
  Oligonucleotide for detection of SNP TSC0017286
rtataaaataaac

SEQ ID NO: 65667 - DNA, 13 bp, Artificial Sequence
  Oligonucleotide for detection of SNP TSC0017286
gtgtaatataaay

SEQ ID NO: 65668 - DNA, 13 bp, Artificial Sequence
  Oligonucleotide for detection of SNP TSC0017286
rtttatattacac

SEQ ID NO: 65669 - DNA, 13 bp, Artificial Sequence
  Oligonucleotide for detection of SNP TSC0017286
gtgtaaaataaay

SEQ ID NO: 65670 - DNA, 13 bp, Artificial Sequence
  Oligonucleotide for detection of SNP TSC0017286
rtttattttacac

SEQ ID NO: 65671 - DNA, 13 bp, Artificial Sequence
  Oligonucleotide for detection of SNP TSC0017287
atatagagaaaag

SEQ ID NO: 65672 - DNA, 13 bp, Artificial Sequence
  Oligonucleotide for detection of SNP TSC0017287
cttttctctatat

SEQ ID NO: 65673 - DNA, 13 bp, Artificial Sequence
  Oligonucleotide for detection of SNP TSC0017287
atatagggaaaag

SEQ ID NO: 65674 - DNA, 13 bp, Artificial Sequence
  Oligonucleotide for detection of SNP TSC0017287
cttttccctatat

SEQ ID NO: 65675 - DNA, 13 bp, Artificial Sequence
  Oligonucleotide for detection of SNP TSC0017290
gtgtattgtttgg

SEQ ID NO: 65676 - DNA, 13 bp, Artificial Sequence
  Oligonucleotide for detection of SNP TSC0017290
ccaaacaatacac

SEQ ID NO: 65677 - DNA, 13 bp, Artificial Sequence
  Oligonucleotide for detection of SNP TSC0017290
gtgtatggtttgg

SEQ ID NO: 65678 - DNA, 13 bp, Artificial Sequence
  Oligonucleotide for detection of SNP TSC0017290
ccaaaccatacac

SEQ ID NO: 65679 - DNA, 13 bp, Artificial Sequence
  Oligonucleotide for detection of SNP TSC0017290
gcgtattgtttgg

SEQ ID NO: 65680 - DNA, 13 bp, Artificial Sequence
  Oligonucleotide for detection of SNP TSC0017290
ccaaacaatacgc

SEQ ID NO: 65681 - DNA, 13 bp, Artificial Sequence
  Oligonucleotide for detection of SNP TSC0017290
gcgtatggtttgg

SEQ ID NO: 65682 - DNA, 13 bp, Artificial Sequence
  Oligonucleotide for detection of SNP TSC0017290
ccaaaccatacgc

SEQ ID NO: 65683 - DNA, 13 bp, Artificial Sequence
  Oligonucleotide for detection of SNP TSC0017290
gtgtatcgtttgg

SEQ ID NO: 65684 - DNA, 13 bp, Artificial Sequence
  Oligonucleotide for detection of SNP TSC0017290
ccaaacgatacac

SEQ ID NO: 65685 - DNA, 13 bp, Artificial Sequence
  Oligonucleotide for detection of SNP TSC0017290
gtgtacggtttgg

SEQ ID NO: 65686 - DNA, 13 bp, Artificial Sequence
  Oligonucleotide for detection of SNP TSC0017290
ccaaaccgtacac

SEQ ID NO: 65687 - DNA, 13 bp, Artificial Sequence
  Oligonucleotide for detection of SNP TSC0017290
gcgtatcgtttgg

SEQ ID NO: 65688 - DNA, 13 bp, Artificial Sequence
  Oligonucleotide for detection of SNP TSC0017290
ccaaacgatacgc

SEQ ID NO: 65689 - DNA, 13 bp, Artificial Sequence
  Oligonucleotide for detection of SNP TSC0017290
gcgtacggtttgg

SEQ ID NO: 65690 - DNA, 13 bp, Artificial Sequence
  Oligonucleotide for detection of SNP TSC0017290
ccaaaccgtacgc

SEQ ID NO: 65691 - DNA, 13 bp, Artificial Sequence
  Oligonucleotide for detection of SNP TSC0017290
ttaggtggtgtgy

SEQ ID NO: 65692 - DNA, 13 bp, Artificial Sequence
  Oligonucleotide for detection of SNP TSC0017290
rcacaccacctaa

SEQ ID NO: 65693 - DNA, 13 bp, Artificial Sequence
  Oligonucleotide for detection of SNP TSC0017290
ttaggttgtgtgy

SEQ ID NO: 65694 - DNA, 13 bp, Artificial Sequence
  Oligonucleotide for detection of SNP TSC0017290
rcacacaacctaa

SEQ ID NO: 65695 - DNA, 13 bp, Artificial Sequence
  Oligonucleotide for detection of SNP TSC0017290
ttaggcggtgtgy

SEQ ID NO: 65696 - DNA, 13 bp, Artificial Sequence
  Oligonucleotide for detection of SNP TSC0017290
rcacaccgcctaa

SEQ ID NO: 65697 - DNA, 13 bp, Artificial Sequence
  Oligonucleotide for detection of SNP TSC0017290
ttaggtcgtgtgy

SEQ ID NO: 65698 - DNA, 13 bp, Artificial Sequence
  Oligonucleotide for detection of SNP TSC0017290
rcacacgacctaa

SEQ ID NO: 65699 - DNA, 13 bp, Artificial Sequence
  Oligonucleotide for detection of SNP TSC0017290
ttaggtggtgcgy

SEQ ID NO: 65700 - DNA, 13 bp, Artificial Sequence
  Oligonucleotide for detection of SNP TSC0017290
rcgcaccacctaa

SEQ ID NO: 65701 - DNA, 13 bp, Artificial Sequence
  Oligonucleotide for detection of SNP TSC0017290
ttaggttgtgcgy

SEQ ID NO: 65702 - DNA, 13 bp, Artificial Sequence
  Oligonucleotide for detection of SNP TSC0017290
rcgcacaacctaa

SEQ ID NO: 65703 - DNA, 13 bp, Artificial Sequence
  Oligonucleotide for detection of SNP TSC0017290
ttaggcggtgcgy

SEQ ID NO: 65704 - DNA, 13 bp, Artificial Sequence
  Oligonucleotide for detection of SNP TSC0017290
rcgcaccgcctaa

SEQ ID NO: 65705 - DNA, 13 bp, Artificial Sequence
  Oligonucleotide for detection of SNP TSC0017290
ttaggtcgtgcgy

SEQ ID NO: 65706 - DNA, 13 bp, Artificial Sequence
  Oligonucleotide for detection of SNP TSC0017290
rcgcacgacctaa

SEQ ID NO: 65707 - DNA, 13 bp, Artificial Sequence
  Oligonucleotide for detection of SNP TSC0017291
gggtagatttaga

SEQ ID NO: 65708 - DNA, 13 bp, Artificial Sequence
  Oligonucleotide for detection of SNP TSC0017291
tctaaatctaccc

SEQ ID NO: 65709 - DNA, 13 bp, Artificial Sequence
  Oligonucleotide for detection of SNP TSC0017291
gggtaggtttaga

SEQ ID NO: 65710 - DNA, 13 bp, Artificial Sequence
  Oligonucleotide for detection of SNP TSC0017291
tctaaacctaccc

SEQ ID NO: 65711 - DNA, 13 bp, Artificial Sequence
  Oligonucleotide for detection of SNP TSC0017292
gttgagataaggt

SEQ ID NO: 65712 - DNA, 13 bp, Artificial Sequence
  Oligonucleotide for detection of SNP TSC0017292
accttatctcaac

SEQ ID NO: 65713 - DNA, 13 bp, Artificial Sequence
  Oligonucleotide for detection of SNP TSC0017292
gttgaggtaaggt

SEQ ID NO: 65714 - DNA, 13 bp, Artificial Sequence
  Oligonucleotide for detection of SNP TSC0017292
accttacctcaac

SEQ ID NO: 65715 - DNA, 13 bp, Artificial Sequence
  Oligonucleotide for detection of SNP TSC0017293
tatataaatagga

SEQ ID NO: 65716 - DNA, 13 bp, Artificial Sequence
  Oligonucleotide for detection of SNP TSC0017293
tcctatttatata

SEQ ID NO: 65717 - DNA, 13 bp, Artificial Sequence
  Oligonucleotide for detection of SNP TSC0017293
tatatatatagga

SEQ ID NO: 65718 - DNA, 13 bp, Artificial Sequence
  Oligonucleotide for detection of SNP TSC0017293
tcctatatatata

SEQ ID NO: 65719 - DNA, 13 bp, Artificial Sequence
  Oligonucleotide for detection of SNP TSC0017293
ttttgtgtgtgtg

SEQ ID NO: 65720 - DNA, 13 bp, Artificial Sequence
  Oligonucleotide for detection of SNP TSC0017293
cacacacacaaaa

SEQ ID NO: 65721 - DNA, 13 bp, Artificial Sequence
  Oligonucleotide for detection of SNP TSC0017294
atgaggtttggtg

SEQ ID NO: 65722 - DNA, 13 bp, Artificial Sequence
  Oligonucleotide for detection of SNP TSC0017294
caccaaacctcat

SEQ ID NO: 65723 - DNA, 13 bp, Artificial Sequence
  Oligonucleotide for detection of SNP TSC0017294
atgagggttggtg

SEQ ID NO: 65724 - DNA, 13 bp, Artificial Sequence
  Oligonucleotide for detection of SNP TSC0017294
caccaaccctcat

SEQ ID NO: 65725 - DNA, 13 bp, Artificial Sequence
  Oligonucleotide for detection of SNP TSC0017294
atgaggtttggcg

SEQ ID NO: 65726 - DNA, 13 bp, Artificial Sequence
  Oligonucleotide for detection of SNP TSC0017294
cgccaaacctcat

SEQ ID NO: 65727 - DNA, 13 bp, Artificial Sequence
  Oligonucleotide for detection of SNP TSC0017294
atgagggttggcg

SEQ ID NO: 65728 - DNA, 13 bp, Artificial Sequence
  Oligonucleotide for detection of SNP TSC0017294
cgccaaccctcat

SEQ ID NO: 65729 - DNA, 13 bp, Artificial Sequence
  Oligonucleotide for detection of SNP TSC0017294
tgttaggttttat

SEQ ID NO: 65730 - DNA, 13 bp, Artificial Sequence
  Oligonucleotide for detection of SNP TSC0017294
ataaaacctaaca

SEQ ID NO: 65731 - DNA, 13 bp, Artificial Sequence
  Oligonucleotide for detection of SNP TSC0017294
tgttagtttttat

SEQ ID NO: 65732 - DNA, 13 bp, Artificial Sequence
  Oligonucleotide for detection of SNP TSC0017294
ataaaaactaaca

SEQ ID NO: 65733 - DNA, 13 bp, Artificial Sequence
  Oligonucleotide for detection of SNP TSC0017294
cgttaggttttat

SEQ ID NO: 65734 - DNA, 13 bp, Artificial Sequence
  Oligonucleotide for detection of SNP TSC0017294
ataaaacctaacg

SEQ ID NO: 65735 - DNA, 13 bp, Artificial Sequence
  Oligonucleotide for detection of SNP TSC0017294
cgttagtttttat

SEQ ID NO: 65736 - DNA, 13 bp, Artificial Sequence
  Oligonucleotide for detection of SNP TSC0017294
ataaaaactaacg

SEQ ID NO: 65737 - DNA, 13 bp, Artificial Sequence
  Oligonucleotide for detection of SNP TSC0017295
atggtggtgatat

SEQ ID NO: 65738 - DNA, 13 bp, Artificial Sequence
  Oligonucleotide for detection of SNP TSC0017295
atatcaccaccat

SEQ ID NO: 65739 - DNA, 13 bp, Artificial Sequence
  Oligonucleotide for detection of SNP TSC0017295
atggtgatgatat

SEQ ID NO: 65740 - DNA, 13 bp, Artificial Sequence
  Oligonucleotide for detection of SNP TSC0017295
atatcatcaccat

SEQ ID NO: 65741 - DNA, 13 bp, Artificial Sequence
  Oligonucleotide for detection of SNP TSC0017295
atggtggcgatat

SEQ ID NO: 65742 - DNA, 13 bp, Artificial Sequence
  Oligonucleotide for detection of SNP TSC0017295
atatcgccaccat

SEQ ID NO: 65743 - DNA, 13 bp, Artificial Sequence
  Oligonucleotide for detection of SNP TSC0017295
atggtgacgatat

SEQ ID NO: 65744 - DNA, 13 bp, Artificial Sequence
  Oligonucleotide for detection of SNP TSC0017295
atatcgtcaccat

SEQ ID NO: 65745 - DNA, 13 bp, Artificial Sequence
  Oligonucleotide for detection of SNP TSC0017303
tgaggtaaataty

SEQ ID NO: 65746 - DNA, 13 bp, Artificial Sequence
  Oligonucleotide for detection of SNP TSC0017303
ratatttacctca

SEQ ID NO: 65747 - DNA, 13 bp, Artificial Sequence
  Oligonucleotide for detection of SNP TSC0017303
tgaggtgaataty

SEQ ID NO: 65748 - DNA, 13 bp, Artificial Sequence
  Oligonucleotide for detection of SNP TSC0017303
ratattcacctca

SEQ ID NO: 65749 - DNA, 13 bp, Artificial Sequence
  Oligonucleotide for detection of SNP TSC0017307
ttagttaaatgga

SEQ ID NO: 65750 - DNA, 13 bp, Artificial Sequence
  Oligonucleotide for detection of SNP TSC0017307
tccatttaactaa

SEQ ID NO: 65751 - DNA, 13 bp, Artificial Sequence
  Oligonucleotide for detection of SNP TSC0017307
ttagttgaatgga

SEQ ID NO: 65752 - DNA, 13 bp, Artificial Sequence
  Oligonucleotide for detection of SNP TSC0017307
tccattcaactaa

SEQ ID NO: 65753 - DNA, 13 bp, Artificial Sequence
  Oligonucleotide for detection of SNP TSC0017307
ttagtcgaatgga

SEQ ID NO: 65754 - DNA, 13 bp, Artificial Sequence
  Oligonucleotide for detection of SNP TSC0017307
tccattcgactaa

SEQ ID NO: 65755 - DNA, 13 bp, Artificial Sequence
  Oligonucleotide for detection of SNP TSC0017307
tttatttggttaa

SEQ ID NO: 65756 - DNA, 13 bp, Artificial Sequence
  Oligonucleotide for detection of SNP TSC0017307
ttaaccaaataaa

SEQ ID NO: 65757 - DNA, 13 bp, Artificial Sequence
  Oligonucleotide for detection of SNP TSC0017307
tttattcggttaa

SEQ ID NO: 65758 - DNA, 13 bp, Artificial Sequence
  Oligonucleotide for detection of SNP TSC0017307
ttaaccgaataaa

SEQ ID NO: 65759 - DNA, 13 bp, Artificial Sequence
  Oligonucleotide for detection of SNP TSC0017310
tttttgtgggtat

SEQ ID NO: 65760 - DNA, 13 bp, Artificial Sequence
  Oligonucleotide for detection of SNP TSC0017310
atacccacaaaaa

SEQ ID NO: 65761 - DNA, 13 bp, Artificial Sequence
  Oligonucleotide for detection of SNP TSC0017310
ttttcgtgggtat

SEQ ID NO: 65762 - DNA, 13 bp, Artificial Sequence
  Oligonucleotide for detection of SNP TSC0017310
atacccacgaaaa

SEQ ID NO: 65763 - DNA, 13 bp, Artificial Sequence
  Oligonucleotide for detection of SNP TSC0017310
tttttgcgggtat

SEQ ID NO: 65764 - DNA, 13 bp, Artificial Sequence
  Oligonucleotide for detection of SNP TSC0017310
atacccgcaaaaa

SEQ ID NO: 65765 - DNA, 13 bp, Artificial Sequence
  Oligonucleotide for detection of SNP TSC0017310
ttttcgcgggtat

SEQ ID NO: 65766 - DNA, 13 bp, Artificial Sequence
  Oligonucleotide for detection of SNP TSC0017310
atacccgcgaaaa

SEQ ID NO: 65767 - DNA, 13 bp, Artificial Sequence
  Oligonucleotide for detection of SNP TSC0017310
atatttgtgggag

SEQ ID NO: 65768 - DNA, 13 bp, Artificial Sequence
  Oligonucleotide for detection of SNP TSC0017310
ctcccacaaatat

SEQ ID NO: 65769 - DNA, 13 bp, Artificial Sequence
  Oligonucleotide for detection of SNP TSC0017310
atatttatgggag

SEQ ID NO: 65770 - DNA, 13 bp, Artificial Sequence
  Oligonucleotide for detection of SNP TSC0017310
ctcccataaatat

SEQ ID NO: 65771 - DNA, 13 bp, Artificial Sequence
  Oligonucleotide for detection of SNP TSC0017310
atattcgtgggag

SEQ ID NO: 65772 - DNA, 13 bp, Artificial Sequence
  Oligonucleotide for detection of SNP TSC0017310
ctcccacgaatat

SEQ ID NO: 65773 - DNA, 13 bp, Artificial Sequence
  Oligonucleotide for detection of SNP TSC0017310
atatttacgggag

SEQ ID NO: 65774 - DNA, 13 bp, Artificial Sequence
  Oligonucleotide for detection of SNP TSC0017310
ctcccgtaaatat

SEQ ID NO: 65775 - DNA, 13 bp, Artificial Sequence
  Oligonucleotide for detection of SNP TSC0017310
atatttgcgggag

SEQ ID NO: 65776 - DNA, 13 bp, Artificial Sequence
  Oligonucleotide for detection of SNP TSC0017310
ctcccgcaaatat

SEQ ID NO: 65777 - DNA, 13 bp, Artificial Sequence
  Oligonucleotide for detection of SNP TSC0017310
atattcgcgggag

SEQ ID NO: 65778 - DNA, 13 bp, Artificial Sequence
  Oligonucleotide for detection of SNP TSC0017310
ctcccgcgaatat

SEQ ID NO: 65779 - DNA, 13 bp, Artificial Sequence
  Oligonucleotide for detection of SNP TSC0017311
gggtggagggaag

SEQ ID NO: 65780 - DNA, 13 bp, Artificial Sequence
  Oligonucleotide for detection of SNP TSC0017311
cttccctccaccc

SEQ ID NO: 65781 - DNA, 13 bp, Artificial Sequence
  Oligonucleotide for detection of SNP TSC0017311
gggtggggggaag

SEQ ID NO: 65782 - DNA, 13 bp, Artificial Sequence
  Oligonucleotide for detection of SNP TSC0017311
cttccccccaccc

SEQ ID NO: 65783 - DNA, 13 bp, Artificial Sequence
  Oligonucleotide for detection of SNP TSC0017312
ggatgtatttaat

SEQ ID NO: 65784 - DNA, 13 bp, Artificial Sequence
  Oligonucleotide for detection of SNP TSC0017312
attaaatacatcc

SEQ ID NO: 65785 - DNA, 13 bp, Artificial Sequence
  Oligonucleotide for detection of SNP TSC0017312
ggatgtgtttaat

SEQ ID NO: 65786 - DNA, 13 bp, Artificial Sequence
  Oligonucleotide for detection of SNP TSC0017312
attaaacacatcc

SEQ ID NO: 65787 - DNA, 13 bp, Artificial Sequence
  Oligonucleotide for detection of SNP TSC0017313
aaatataaagata

SEQ ID NO: 65788 - DNA, 13 bp, Artificial Sequence
  Oligonucleotide for detection of SNP TSC0017313
tatctttatattt

SEQ ID NO: 65789 - DNA, 13 bp, Artificial Sequence
  Oligonucleotide for detection of SNP TSC0017313
aaatatgaagata

SEQ ID NO: 65790 - DNA, 13 bp, Artificial Sequence
  Oligonucleotide for detection of SNP TSC0017313
tatcttcatattt

SEQ ID NO: 65791 - DNA, 13 bp, Artificial Sequence
  Oligonucleotide for detection of SNP TSC0017313
aaatacgaagata

SEQ ID NO: 65792 - DNA, 13 bp, Artificial Sequence
  Oligonucleotide for detection of SNP TSC0017313
tatcttcgtattt

SEQ ID NO: 65793 - DNA, 13 bp, Artificial Sequence
  Oligonucleotide for detection of SNP TSC0017314
ttgggtaatagag

SEQ ID NO: 65794 - DNA, 13 bp, Artificial Sequence
  Oligonucleotide for detection of SNP TSC0017314
ctctattacccaa

SEQ ID NO: 65795 - DNA, 13 bp, Artificial Sequence
  Oligonucleotide for detection of SNP TSC0017314
ttgggtgatagag

SEQ ID NO: 65796 - DNA, 13 bp, Artificial Sequence
  Oligonucleotide for detection of SNP TSC0017314
ctctatcacccaa

SEQ ID NO: 65797 - DNA, 13 bp, Artificial Sequence
  Oligonucleotide for detection of SNP TSC0017314
ttgggcgatagag

SEQ ID NO: 65798 - DNA, 13 bp, Artificial Sequence
  Oligonucleotide for detection of SNP TSC0017314
ctctatcgcccaa

SEQ ID NO: 65799 - DNA, 13 bp, Artificial Sequence
  Oligonucleotide for detection of SNP TSC0017314
ttttgttgtttag

SEQ ID NO: 65800 - DNA, 13 bp, Artificial Sequence
  Oligonucleotide for detection of SNP TSC0017314
ctaaacaacaaaa

SEQ ID NO: 65801 - DNA, 13 bp, Artificial Sequence
  Oligonucleotide for detection of SNP TSC0017314
ttttgtcgtttag

SEQ ID NO: 65802 - DNA, 13 bp, Artificial Sequence
  Oligonucleotide for detection of SNP TSC0017314
ctaaacgacaaaa

SEQ ID NO: 65803 - DNA, 13 bp, Artificial Sequence
  Oligonucleotide for detection of SNP TSC0017321
tgttttaatttta

SEQ ID NO: 65804 - DNA, 13 bp, Artificial Sequence
  Oligonucleotide for detection of SNP TSC0017321
taaaattaaaaca

SEQ ID NO: 65805 - DNA, 13 bp, Artificial Sequence
  Oligonucleotide for detection of SNP TSC0017321
tgttttgatttta

SEQ ID NO: 65806 - DNA, 13 bp, Artificial Sequence
  Oligonucleotide for detection of SNP TSC0017321
taaaatcaaaaca

SEQ ID NO: 65807 - DNA, 13 bp, Artificial Sequence
  Oligonucleotide for detection of SNP TSC0017322
ttaattgttatgy

SEQ ID NO: 65808 - DNA, 13 bp, Artificial Sequence
  Oligonucleotide for detection of SNP TSC0017322
rcataacaattaa

SEQ ID NO: 65809 - DNA, 13 bp, Artificial Sequence
  Oligonucleotide for detection of SNP TSC0017322
ttaattattatgy

SEQ ID NO: 65810 - DNA, 13 bp, Artificial Sequence
  Oligonucleotide for detection of SNP TSC0017322
rcataataattaa

SEQ ID NO: 65811 - DNA, 13 bp, Artificial Sequence
  Oligonucleotide for detection of SNP TSC0017326
ggagtgatgattt

SEQ ID NO: 65812 - DNA, 13 bp, Artificial Sequence
  Oligonucleotide for detection of SNP TSC0017326
aaatcatcactcc

SEQ ID NO: 65813 - DNA, 13 bp, Artificial Sequence
  Oligonucleotide for detection of SNP TSC0017326
ggagtggtgattt

SEQ ID NO: 65814 - DNA, 13 bp, Artificial Sequence
  Oligonucleotide for detection of SNP TSC0017326
aaatcaccactcc

SEQ ID NO: 65815 - DNA, 13 bp, Artificial Sequence
  Oligonucleotide for detection of SNP TSC0017328
tatattaattaat

SEQ ID NO: 65816 - DNA, 13 bp, Artificial Sequence
  Oligonucleotide for detection of SNP TSC0017328
attaattaatata

SEQ ID NO: 65817 - DNA, 13 bp, Artificial Sequence
  Oligonucleotide for detection of SNP TSC0017328
tatatttattaat

SEQ ID NO: 65818 - DNA, 13 bp, Artificial Sequence
  Oligonucleotide for detection of SNP TSC0017328
attaataaatata

SEQ ID NO: 65819 - DNA, 13 bp, Artificial Sequence
  Oligonucleotide for detection of SNP TSC0017329
ttaattaatattt

SEQ ID NO: 65820 - DNA, 13 bp, Artificial Sequence
  Oligonucleotide for detection of SNP TSC0017329
aaatattaattaa

SEQ ID NO: 65821 - DNA, 13 bp, Artificial Sequence
  Oligonucleotide for detection of SNP TSC0017329
ttaatttatattt

SEQ ID NO: 65822 - DNA, 13 bp, Artificial Sequence
  Oligonucleotide for detection of SNP TSC0017329
aaatataaattaa

SEQ ID NO: 65823 - DNA, 13 bp, Artificial Sequence
  Oligonucleotide for detection of SNP TSC0017330
aatagagaaatty

SEQ ID NO: 65824 - DNA, 13 bp, Artificial Sequence
  Oligonucleotide for detection of SNP TSC0017330
raatttctctatt

SEQ ID NO: 65825 - DNA, 13 bp, Artificial Sequence
  Oligonucleotide for detection of SNP TSC0017330
aatagaaaaatty

SEQ ID NO: 65826 - DNA, 13 bp, Artificial Sequence
  Oligonucleotide for detection of SNP TSC0017330
raatttttctatt

SEQ ID NO: 65827 - DNA, 13 bp, Artificial Sequence
  Oligonucleotide for detection of SNP TSC0017334
gtgggagaggtgt

SEQ ID NO: 65828 - DNA, 13 bp, Artificial Sequence
  Oligonucleotide for detection of SNP TSC0017334
acacctctcccac

SEQ ID NO: 65829 - DNA, 13 bp, Artificial Sequence
  Oligonucleotide for detection of SNP TSC0017334
gtgggaaaggtgt

SEQ ID NO: 65830 - DNA, 13 bp, Artificial Sequence
  Oligonucleotide for detection of SNP TSC0017334
acacctttcccac

SEQ ID NO: 65831 - DNA, 13 bp, Artificial Sequence
  Oligonucleotide for detection of SNP TSC0017336
gtaattttagtat

SEQ ID NO: 65832 - DNA, 13 bp, Artificial Sequence
  Oligonucleotide for detection of SNP TSC0017336
atactaaaattac

SEQ ID NO: 65833 - DNA, 13 bp, Artificial Sequence
  Oligonucleotide for detection of SNP TSC0017336
gtaattgtagtat

SEQ ID NO: 65834 - DNA, 13 bp, Artificial Sequence
  Oligonucleotide for detection of SNP TSC0017336
atactacaattac

SEQ ID NO: 65835 - DNA, 13 bp, Artificial Sequence
  Oligonucleotide for detection of SNP TSC0017336
gtaatcgtagtat

SEQ ID NO: 65836 - DNA, 13 bp, Artificial Sequence
  Oligonucleotide for detection of SNP TSC0017336
atactacgattac

SEQ ID NO: 65837 - DNA, 13 bp, Artificial Sequence
  Oligonucleotide for detection of SNP TSC0017336
atgttaggattay

SEQ ID NO: 65838 - DNA, 13 bp, Artificial Sequence
  Oligonucleotide for detection of SNP TSC0017336
rtaatcctaacat

SEQ ID NO: 65839 - DNA, 13 bp, Artificial Sequence
  Oligonucleotide for detection of SNP TSC0017336
atgttatgattay

SEQ ID NO: 65840 - DNA, 13 bp, Artificial Sequence
  Oligonucleotide for detection of SNP TSC0017336
rtaatcataacat

SEQ ID NO: 65841 - DNA, 13 bp, Artificial Sequence
  Oligonucleotide for detection of SNP TSC0017336
atgttacgattay

SEQ ID NO: 65842 - DNA, 13 bp, Artificial Sequence
  Oligonucleotide for detection of SNP TSC0017336
rtaatcgtaacat

SEQ ID NO: 65843 - DNA, 13 bp, Artificial Sequence
  Oligonucleotide for detection of SNP TSC0017337
tgttatgttggty

SEQ ID NO: 65844 - DNA, 13 bp, Artificial Sequence
  Oligonucleotide for detection of SNP TSC0017337
raccaacataaca

SEQ ID NO: 65845 - DNA, 13 bp, Artificial Sequence
  Oligonucleotide for detection of SNP TSC0017337
tgttatattggty

SEQ ID NO: 65846 - DNA, 13 bp, Artificial Sequence
  Oligonucleotide for detection of SNP TSC0017337
raccaatataaca

SEQ ID NO: 65847 - DNA, 13 bp, Artificial Sequence
  Oligonucleotide for detection of SNP TSC0017337
cgttatgttggty

SEQ ID NO: 65848 - DNA, 13 bp, Artificial Sequence
  Oligonucleotide for detection of SNP TSC0017337
raccaacataacg

SEQ ID NO: 65849 - DNA, 13 bp, Artificial Sequence
  Oligonucleotide for detection of SNP TSC0017337
cgttatattggty

SEQ ID NO: 65850 - DNA, 13 bp, Artificial Sequence
  Oligonucleotide for detection of SNP TSC0017337
raccaatataacg

SEQ ID NO: 65851 - DNA, 13 bp, Artificial Sequence
  Oligonucleotide for detection of SNP TSC0017338
gttaatatagcga

SEQ ID NO: 65852 - DNA, 13 bp, Artificial Sequence
  Oligonucleotide for detection of SNP TSC0017338
tcgctatattaac

SEQ ID NO: 65853 - DNA, 13 bp, Artificial Sequence
  Oligonucleotide for detection of SNP TSC0017338
gttaatttagcga

SEQ ID NO: 65854 - DNA, 13 bp, Artificial Sequence
  Oligonucleotide for detection of SNP TSC0017338
tcgctaaattaac

SEQ ID NO: 65855 - DNA, 13 bp, Artificial Sequence
  Oligonucleotide for detection of SNP TSC0017338
ttgttatgttggy

SEQ ID NO: 65856 - DNA, 13 bp, Artificial Sequence
  Oligonucleotide for detection of SNP TSC0017338
rccaacataacaa

SEQ ID NO: 65857 - DNA, 13 bp, Artificial Sequence
  Oligonucleotide for detection of SNP TSC0017338
ttgttaagttggy

SEQ ID NO: 65858 - DNA, 13 bp, Artificial Sequence
  Oligonucleotide for detection of SNP TSC0017338
rccaacttaacaa

SEQ ID NO: 65859 - DNA, 13 bp, Artificial Sequence
  Oligonucleotide for detection of SNP TSC0017338
tcgttatgttggy

SEQ ID NO: 65860 - DNA, 13 bp, Artificial Sequence
  Oligonucleotide for detection of SNP TSC0017338
rccaacataacga

SEQ ID NO: 65861 - DNA, 13 bp, Artificial Sequence
  Oligonucleotide for detection of SNP TSC0017338
tcgttaagttggy

SEQ ID NO: 65862 - DNA, 13 bp, Artificial Sequence
  Oligonucleotide for detection of SNP TSC0017338
rccaacttaacga

SEQ ID NO: 65863 - DNA, 13 bp, Artificial Sequence
  Oligonucleotide for detection of SNP TSC0017339
tagtaaattgagy

SEQ ID NO: 65864 - DNA, 13 bp, Artificial Sequence
  Oligonucleotide for detection of SNP TSC0017339
rctcaatttacta

SEQ ID NO: 65865 - DNA, 13 bp, Artificial Sequence
  Oligonucleotide for detection of SNP TSC0017339
tagtaatttgagy

SEQ ID NO: 65866 - DNA, 13 bp, Artificial Sequence
  Oligonucleotide for detection of SNP TSC0017339
rctcaaattacta

SEQ ID NO: 65867 - DNA, 13 bp, Artificial Sequence
  Oligonucleotide for detection of SNP TSC0017339
gtttagtttattg

SEQ ID NO: 65868 - DNA, 13 bp, Artificial Sequence
  Oligonucleotide for detection of SNP TSC0017339
caataaactaaac

SEQ ID NO: 65869 - DNA, 13 bp, Artificial Sequence
  Oligonucleotide for detection of SNP TSC0017339
gtttaggttattg

SEQ ID NO: 65870 - DNA, 13 bp, Artificial Sequence
  Oligonucleotide for detection of SNP TSC0017339
caataacctaaac

SEQ ID NO: 65871 - DNA, 13 bp, Artificial Sequence
  Oligonucleotide for detection of SNP TSC0017341
ggttgtgggggag

SEQ ID NO: 65872 - DNA, 13 bp, Artificial Sequence
  Oligonucleotide for detection of SNP TSC0017341
ctcccccacaacc

SEQ ID NO: 65873 - DNA, 13 bp, Artificial Sequence
  Oligonucleotide for detection of SNP TSC0017341
ggttgtaggggag

SEQ ID NO: 65874 - DNA, 13 bp, Artificial Sequence
  Oligonucleotide for detection of SNP TSC0017341
ctcccctacaacc

SEQ ID NO: 65875 - DNA, 13 bp, Artificial Sequence
  Oligonucleotide for detection of SNP TSC0017342
tttgtttgtttcg

SEQ ID NO: 65876 - DNA, 13 bp, Artificial Sequence
  Oligonucleotide for detection of SNP TSC0017342
cgaaacaaacaaa

SEQ ID NO: 65877 - DNA, 13 bp, Artificial Sequence
  Oligonucleotide for detection of SNP TSC0017342
tttgttcgtttcg

SEQ ID NO: 65878 - DNA, 13 bp, Artificial Sequence
  Oligonucleotide for detection of SNP TSC0017342
cgaaacgaacaaa

SEQ ID NO: 65879 - DNA, 13 bp, Artificial Sequence
  Oligonucleotide for detection of SNP TSC0017342
tgaggtgggtaga

SEQ ID NO: 65880 - DNA, 13 bp, Artificial Sequence
  Oligonucleotide for detection of SNP TSC0017342
tctacccacctca

SEQ ID NO: 65881 - DNA, 13 bp, Artificial Sequence
  Oligonucleotide for detection of SNP TSC0017342
tgaggtaggtaga

SEQ ID NO: 65882 - DNA, 13 bp, Artificial Sequence
  Oligonucleotide for detection of SNP TSC0017342
tctacctacctca

SEQ ID NO: 65883 - DNA, 13 bp, Artificial Sequence
  Oligonucleotide for detection of SNP TSC0017342
cgaggtgggtaga

SEQ ID NO: 65884 - DNA, 13 bp, Artificial Sequence
  Oligonucleotide for detection of SNP TSC0017342
tctacccacctcg

SEQ ID NO: 65885 - DNA, 13 bp, Artificial Sequence
  Oligonucleotide for detection of SNP TSC0017342
cgaggtaggtaga

SEQ ID NO: 65886 - DNA, 13 bp, Artificial Sequence
  Oligonucleotide for detection of SNP TSC0017342
tctacctacctcg

SEQ ID NO: 65887 - DNA, 13 bp, Artificial Sequence
  Oligonucleotide for detection of SNP TSC0017342
tgaggcgggtaga

SEQ ID NO: 65888 - DNA, 13 bp, Artificial Sequence
  Oligonucleotide for detection of SNP TSC0017342
tctacccgcctca

SEQ ID NO: 65889 - DNA, 13 bp, Artificial Sequence
  Oligonucleotide for detection of SNP TSC0017342
cgaggcgggtaga

SEQ ID NO: 65890 - DNA, 13 bp, Artificial Sequence
  Oligonucleotide for detection of SNP TSC0017342
tctacccgcctcg

SEQ ID NO: 65891 - DNA, 13 bp, Artificial Sequence
  Oligonucleotide for detection of SNP TSC0017344
tattttatgtaty

SEQ ID NO: 65892 - DNA, 13 bp, Artificial Sequence
  Oligonucleotide for detection of SNP TSC0017344
ratacataaaata

SEQ ID NO: 65893 - DNA, 13 bp, Artificial Sequence
  Oligonucleotide for detection of SNP TSC0017344
tattttgtgtaty

SEQ ID NO: 65894 - DNA, 13 bp, Artificial Sequence
  Oligonucleotide for detection of SNP TSC0017344
ratacacaaaata

SEQ ID NO: 65895 - DNA, 13 bp, Artificial Sequence
  Oligonucleotide for detection of SNP TSC0017344
tatttcgtgtaty

SEQ ID NO: 65896 - DNA, 13 bp, Artificial Sequence
  Oligonucleotide for detection of SNP TSC0017344
ratacacgaaata

SEQ ID NO: 65897 - DNA, 13 bp, Artificial Sequence
  Oligonucleotide for detection of SNP TSC0017344
ggtatatgggata

SEQ ID NO: 65898 - DNA, 13 bp, Artificial Sequence
  Oligonucleotide for detection of SNP TSC0017344
tatcccatatacc

SEQ ID NO: 65899 - DNA, 13 bp, Artificial Sequence
  Oligonucleotide for detection of SNP TSC0017344
ggtatacgggata

SEQ ID NO: 65900 - DNA, 13 bp, Artificial Sequence
  Oligonucleotide for detection of SNP TSC0017344
tatcccgtatacc

SEQ ID NO: 65901 - DNA, 13 bp, Artificial Sequence
  Oligonucleotide for detection of SNP TSC0017345
ggtgagaagtaat

SEQ ID NO: 65902 - DNA, 13 bp, Artificial Sequence
  Oligonucleotide for detection of SNP TSC0017345
attacttctcacc

SEQ ID NO: 65903 - DNA, 13 bp, Artificial Sequence
  Oligonucleotide for detection of SNP TSC0017345
ggtgagtagtaat

SEQ ID NO: 65904 - DNA, 13 bp, Artificial Sequence
  Oligonucleotide for detection of SNP TSC0017345
attactactcacc

SEQ ID NO: 65905 - DNA, 13 bp, Artificial Sequence
  Oligonucleotide for detection of SNP TSC0017345
attgttttttaty

SEQ ID NO: 65906 - DNA, 13 bp, Artificial Sequence
  Oligonucleotide for detection of SNP TSC0017345
rataaaaaacaat

SEQ ID NO: 65907 - DNA, 13 bp, Artificial Sequence
  Oligonucleotide for detection of SNP TSC0017345
attgttatttaty

SEQ ID NO: 65908 - DNA, 13 bp, Artificial Sequence
  Oligonucleotide for detection of SNP TSC0017345
rataaataacaat

SEQ ID NO: 65909 - DNA, 13 bp, Artificial Sequence
  Oligonucleotide for detection of SNP TSC0017347
taatttaggtttg

SEQ ID NO: 65910 - DNA, 13 bp, Artificial Sequence
  Oligonucleotide for detection of SNP TSC0017347
caaacctaaatta

SEQ ID NO: 65911 - DNA, 13 bp, Artificial Sequence
  Oligonucleotide for detection of SNP TSC0017347
taatttgggtttg

SEQ ID NO: 65912 - DNA, 13 bp, Artificial Sequence
  Oligonucleotide for detection of SNP TSC0017347
caaacccaaatta

SEQ ID NO: 65913 - DNA, 13 bp, Artificial Sequence
  Oligonucleotide for detection of SNP TSC0017347
taattcgggtttg

SEQ ID NO: 65914 - DNA, 13 bp, Artificial Sequence
  Oligonucleotide for detection of SNP TSC0017347
caaacccgaatta

SEQ ID NO: 65915 - DNA, 13 bp, Artificial Sequence
  Oligonucleotide for detection of SNP TSC0017347
taggtttgagtta

SEQ ID NO: 65916 - DNA, 13 bp, Artificial Sequence
  Oligonucleotide for detection of SNP TSC0017347
taactcaaaccta

SEQ ID NO: 65917 - DNA, 13 bp, Artificial Sequence
  Oligonucleotide for detection of SNP TSC0017347
taggttcgagtta

SEQ ID NO: 65918 - DNA, 13 bp, Artificial Sequence
  Oligonucleotide for detection of SNP TSC0017347
taactcgaaccta

SEQ ID NO: 65919 - DNA, 13 bp, Artificial Sequence
  Oligonucleotide for detection of SNP TSC0017349
ggtgatataatga

SEQ ID NO: 65920 - DNA, 13 bp, Artificial Sequence
  Oligonucleotide for detection of SNP TSC0017349
tcattatatcacc

SEQ ID NO: 65921 - DNA, 13 bp, Artificial Sequence
  Oligonucleotide for detection of SNP TSC0017349
ggtgatgtaatga

SEQ ID NO: 65922 - DNA, 13 bp, Artificial Sequence
  Oligonucleotide for detection of SNP TSC0017349
tcattacatcacc

SEQ ID NO: 65923 - DNA, 13 bp, Artificial Sequence
  Oligonucleotide for detection of SNP TSC0017349
ggtgacgtaatga

SEQ ID NO: 65924 - DNA, 13 bp, Artificial Sequence
  Oligonucleotide for detection of SNP TSC0017349
tcattacgtcacc

SEQ ID NO: 65925 - DNA, 13 bp, Artificial Sequence
  Oligonucleotide for detection of SNP TSC0017349
ttattatgttaty

SEQ ID NO: 65926 - DNA, 13 bp, Artificial Sequence
  Oligonucleotide for detection of SNP TSC0017349
rataacataataa

SEQ ID NO: 65927 - DNA, 13 bp, Artificial Sequence
  Oligonucleotide for detection of SNP TSC0017349
ttattacgttaty

SEQ ID NO: 65928 - DNA, 13 bp, Artificial Sequence
  Oligonucleotide for detection of SNP TSC0017349
rataacgtaataa

SEQ ID NO: 65929 - DNA, 13 bp, Artificial Sequence
  Oligonucleotide for detection of SNP TSC0017350
ggtgtatgttggg

SEQ ID NO: 65930 - DNA, 13 bp, Artificial Sequence
  Oligonucleotide for detection of SNP TSC0017350
cccaacatacacc

SEQ ID NO: 65931 - DNA, 13 bp, Artificial Sequence
  Oligonucleotide for detection of SNP TSC0017350
ggtgtaggttggg

SEQ ID NO: 65932 - DNA, 13 bp, Artificial Sequence
  Oligonucleotide for detection of SNP TSC0017350
cccaacctacacc

SEQ ID NO: 65933 - DNA, 13 bp, Artificial Sequence
  Oligonucleotide for detection of SNP TSC0017350
ggcgtatgttggg

SEQ ID NO: 65934 - DNA, 13 bp, Artificial Sequence
  Oligonucleotide for detection of SNP TSC0017350
cccaacatacgcc

SEQ ID NO: 65935 - DNA, 13 bp, Artificial Sequence
  Oligonucleotide for detection of SNP TSC0017350
ggcgtaggttggg

SEQ ID NO: 65936 - DNA, 13 bp, Artificial Sequence
  Oligonucleotide for detection of SNP TSC0017350
cccaacctacgcc

SEQ ID NO: 65937 - DNA, 13 bp, Artificial Sequence
  Oligonucleotide for detection of SNP TSC0017350
ggtgtacgttggg

SEQ ID NO: 65938 - DNA, 13 bp, Artificial Sequence
  Oligonucleotide for detection of SNP TSC0017350
cccaacgtacacc

SEQ ID NO: 65939 - DNA, 13 bp, Artificial Sequence
  Oligonucleotide for detection of SNP TSC0017350
ggcgtacgttggg

SEQ ID NO: 65940 - DNA, 13 bp, Artificial Sequence
  Oligonucleotide for detection of SNP TSC0017350
cccaacgtacgcc

SEQ ID NO: 65941 - DNA, 13 bp, Artificial Sequence
  Oligonucleotide for detection of SNP TSC0017350
tttaatgtgtgty

SEQ ID NO: 65942 - DNA, 13 bp, Artificial Sequence
  Oligonucleotide for detection of SNP TSC0017350
racacacattaaa

SEQ ID NO: 65943 - DNA, 13 bp, Artificial Sequence
  Oligonucleotide for detection of SNP TSC0017350
tttaatttgtgty

SEQ ID NO: 65944 - DNA, 13 bp, Artificial Sequence
  Oligonucleotide for detection of SNP TSC0017350
racacaaattaaa

SEQ ID NO: 65945 - DNA, 13 bp, Artificial Sequence
  Oligonucleotide for detection of SNP TSC0017350
tttaacgtgtgty

SEQ ID NO: 65946 - DNA, 13 bp, Artificial Sequence
  Oligonucleotide for detection of SNP TSC0017350
racacacgttaaa

SEQ ID NO: 65947 - DNA, 13 bp, Artificial Sequence
  Oligonucleotide for detection of SNP TSC0017350
tttaatttgcgty

SEQ ID NO: 65948 - DNA, 13 bp, Artificial Sequence
  Oligonucleotide for detection of SNP TSC0017350
racgcaaattaaa

SEQ ID NO: 65949 - DNA, 13 bp, Artificial Sequence
  Oligonucleotide for detection of SNP TSC0017350
tttaatgtgcgty

SEQ ID NO: 65950 - DNA, 13 bp, Artificial Sequence
  Oligonucleotide for detection of SNP TSC0017350
racgcacattaaa

SEQ ID NO: 65951 - DNA, 13 bp, Artificial Sequence
  Oligonucleotide for detection of SNP TSC0017350
tttaacgtgcgty

SEQ ID NO: 65952 - DNA, 13 bp, Artificial Sequence
  Oligonucleotide for detection of SNP TSC0017350
racgcacgttaaa

SEQ ID NO: 65953 - DNA, 13 bp, Artificial Sequence
  Oligonucleotide for detection of SNP TSC0017351
aggatgtagaggt

SEQ ID NO: 65954 - DNA, 13 bp, Artificial Sequence
  Oligonucleotide for detection of SNP TSC0017351
acctctacatcct

SEQ ID NO: 65955 - DNA, 13 bp, Artificial Sequence
  Oligonucleotide for detection of SNP TSC0017351
aggatggagaggt

SEQ ID NO: 65956 - DNA, 13 bp, Artificial Sequence
  Oligonucleotide for detection of SNP TSC0017351
acctctccatcct

SEQ ID NO: 65957 - DNA, 13 bp, Artificial Sequence
  Oligonucleotide for detection of SNP TSC0017351
atttttttatttt

SEQ ID NO: 65958 - DNA, 13 bp, Artificial Sequence
  Oligonucleotide for detection of SNP TSC0017351
aaaataaaaaaat

SEQ ID NO: 65959 - DNA, 13 bp, Artificial Sequence
  Oligonucleotide for detection of SNP TSC0017352
tttgggggttttg

SEQ ID NO: 65960 - DNA, 13 bp, Artificial Sequence
  Oligonucleotide for detection of SNP TSC0017352
caaaacccccaaa

SEQ ID NO: 65961 - DNA, 13 bp, Artificial Sequence
  Oligonucleotide for detection of SNP TSC0017352
tttgggagttttg

SEQ ID NO: 65962 - DNA, 13 bp, Artificial Sequence
  Oligonucleotide for detection of SNP TSC0017352
caaaactcccaaa

SEQ ID NO: 65963 - DNA, 13 bp, Artificial Sequence
  Oligonucleotide for detection of SNP TSC0017353
ggtgtagggtaag

SEQ ID NO: 65964 - DNA, 13 bp, Artificial Sequence
  Oligonucleotide for detection of SNP TSC0017353
cttaccctacacc

SEQ ID NO: 65965 - DNA, 13 bp, Artificial Sequence
  Oligonucleotide for detection of SNP TSC0017353
ggtgtaaggtaag

SEQ ID NO: 65966 - DNA, 13 bp, Artificial Sequence
  Oligonucleotide for detection of SNP TSC0017353
cttaccttacacc

SEQ ID NO: 65967 - DNA, 13 bp, Artificial Sequence
  Oligonucleotide for detection of SNP TSC0017355
ttttggatgttgg

SEQ ID NO: 65968 - DNA, 13 bp, Artificial Sequence
  Oligonucleotide for detection of SNP TSC0017355
ccaacatccaaaa

SEQ ID NO: 65969 - DNA, 13 bp, Artificial Sequence
  Oligonucleotide for detection of SNP TSC0017355
ttttgggtgttgg

SEQ ID NO: 65970 - DNA, 13 bp, Artificial Sequence
  Oligonucleotide for detection of SNP TSC0017355
ccaacacccaaaa

SEQ ID NO: 65971 - DNA, 13 bp, Artificial Sequence
  Oligonucleotide for detection of SNP TSC0017355
tttcggatgttgg

SEQ ID NO: 65972 - DNA, 13 bp, Artificial Sequence
  Oligonucleotide for detection of SNP TSC0017355
ccaacatccgaaa

SEQ ID NO: 65973 - DNA, 13 bp, Artificial Sequence
  Oligonucleotide for detection of SNP TSC0017355
tttcgggtgttgg

SEQ ID NO: 65974 - DNA, 13 bp, Artificial Sequence
  Oligonucleotide for detection of SNP TSC0017355
ccaacacccgaaa

SEQ ID NO: 65975 - DNA, 13 bp, Artificial Sequence
  Oligonucleotide for detection of SNP TSC0017355
ttttggacgttgg

SEQ ID NO: 65976 - DNA, 13 bp, Artificial Sequence
  Oligonucleotide for detection of SNP TSC0017355
ccaacgtccaaaa

SEQ ID NO: 65977 - DNA, 13 bp, Artificial Sequence
  Oligonucleotide for detection of SNP TSC0017355
ttttgggcgttgg

SEQ ID NO: 65978 - DNA, 13 bp, Artificial Sequence
  Oligonucleotide for detection of SNP TSC0017355
ccaacgcccaaaa

SEQ ID NO: 65979 - DNA, 13 bp, Artificial Sequence
  Oligonucleotide for detection of SNP TSC0017355
tttcggacgttgg

SEQ ID NO: 65980 - DNA, 13 bp, Artificial Sequence
  Oligonucleotide for detection of SNP TSC0017355
ccaacgtccgaaa

SEQ ID NO: 65981 - DNA, 13 bp, Artificial Sequence
  Oligonucleotide for detection of SNP TSC0017355
tttcgggcgttgg

SEQ ID NO: 65982 - DNA, 13 bp, Artificial Sequence
  Oligonucleotide for detection of SNP TSC0017355
ccaacgcccgaaa

SEQ ID NO: 65983 - DNA, 13 bp, Artificial Sequence
  Oligonucleotide for detection of SNP TSC0017356
ttagggatttgtt

SEQ ID NO: 65984 - DNA, 13 bp, Artificial Sequence
  Oligonucleotide for detection of SNP TSC0017356
aacaaatccctaa

SEQ ID NO: 65985 - DNA, 13 bp, Artificial Sequence
  Oligonucleotide for detection of SNP TSC0017356
ttaggggtttgtt

SEQ ID NO: 65986 - DNA, 13 bp, Artificial Sequence
  Oligonucleotide for detection of SNP TSC0017356
aacaaacccctaa

SEQ ID NO: 65987 - DNA, 13 bp, Artificial Sequence
  Oligonucleotide for detection of SNP TSC0017356
ttagggattcgtt

SEQ ID NO: 65988 - DNA, 13 bp, Artificial Sequence
  Oligonucleotide for detection of SNP TSC0017356
aacgaatccctaa

SEQ ID NO: 65989 - DNA, 13 bp, Artificial Sequence
  Oligonucleotide for detection of SNP TSC0017356
ttaggggttcgtt

SEQ ID NO: 65990 - DNA, 13 bp, Artificial Sequence
  Oligonucleotide for detection of SNP TSC0017356
aacgaacccctaa

SEQ ID NO: 65991 - DNA, 13 bp, Artificial Sequence
  Oligonucleotide for detection of SNP TSC0017357
gggatttgttttg

SEQ ID NO: 65992 - DNA, 13 bp, Artificial Sequence
  Oligonucleotide for detection of SNP TSC0017357
caaaacaaatccc

SEQ ID NO: 65993 - DNA, 13 bp, Artificial Sequence
  Oligonucleotide for detection of SNP TSC0017357
gggattcgttttg

SEQ ID NO: 65994 - DNA, 13 bp, Artificial Sequence
  Oligonucleotide for detection of SNP TSC0017357
caaaacgaatccc

SEQ ID NO: 65995 - DNA, 13 bp, Artificial Sequence
  Oligonucleotide for detection of SNP TSC0017357
tagagtgagttty

SEQ ID NO: 65996 - DNA, 13 bp, Artificial Sequence
  Oligonucleotide for detection of SNP TSC0017357
raaactcactcta

SEQ ID NO: 65997 - DNA, 13 bp, Artificial Sequence
  Oligonucleotide for detection of SNP TSC0017357
tagagtaagttty

SEQ ID NO: 65998 - DNA, 13 bp, Artificial Sequence
  Oligonucleotide for detection of SNP TSC0017357
raaacttactcta

SEQ ID NO: 65999 - DNA, 13 bp, Artificial Sequence
  Oligonucleotide for detection of SNP TSC0017357
tagagcgagttty

SEQ ID NO: 66000 - DNA, 13 bp, Artificial Sequence
  Oligonucleotide for detection of SNP TSC0017357
raaactcgctcta

SEQ ID NO: 66001 - DNA, 13 bp, Artificial Sequence
  Oligonucleotide for detection of SNP TSC0017363
gagaggtgggagg

SEQ ID NO: 66002 - DNA, 13 bp, Artificial Sequence
  Oligonucleotide for detection of SNP TSC0017363
cctcccacctctc

SEQ ID NO: 66003 - DNA, 13 bp, Artificial Sequence
  Oligonucleotide for detection of SNP TSC0017363
gagaggggggagg

SEQ ID NO: 66004 - DNA, 13 bp, Artificial Sequence
  Oligonucleotide for detection of SNP TSC0017363
cctcccccctctc

SEQ ID NO: 66005 - DNA, 13 bp, Artificial Sequence
  Oligonucleotide for detection of SNP TSC0017365
aggtaagtattgt

SEQ ID NO: 66006 - DNA, 13 bp, Artificial Sequence
  Oligonucleotide for detection of SNP TSC0017365
acaatacttacct

SEQ ID NO: 66007 - DNA, 13 bp, Artificial Sequence
  Oligonucleotide for detection of SNP TSC0017365
aggtaaatattgt

SEQ ID NO: 66008 - DNA, 13 bp, Artificial Sequence
  Oligonucleotide for detection of SNP TSC0017365
acaatatttacct

SEQ ID NO: 66009 - DNA, 13 bp, Artificial Sequence
  Oligonucleotide for detection of SNP TSC0017366
ttttattgttgtt

SEQ ID NO: 66010 - DNA, 13 bp, Artificial Sequence
  Oligonucleotide for detection of SNP TSC0017366
aacaacaataaaa

SEQ ID NO: 66011 - DNA, 13 bp, Artificial Sequence
  Oligonucleotide for detection of SNP TSC0017366
ttttatcgttgtt

SEQ ID NO: 66012 - DNA, 13 bp, Artificial Sequence
  Oligonucleotide for detection of SNP TSC0017366
aacaacgataaaa

SEQ ID NO: 66013 - DNA, 13 bp, Artificial Sequence
  Oligonucleotide for detection of SNP TSC0017366
aatagttatggga

SEQ ID NO: 66014 - DNA, 13 bp, Artificial Sequence
  Oligonucleotide for detection of SNP TSC0017366
tcccataactatt

SEQ ID NO: 66015 - DNA, 13 bp, Artificial Sequence
  Oligonucleotide for detection of SNP TSC0017366
aatagtgatggga

SEQ ID NO: 66016 - DNA, 13 bp, Artificial Sequence
  Oligonucleotide for detection of SNP TSC0017366
tcccatcactatt

SEQ ID NO: 66017 - DNA, 13 bp, Artificial Sequence
  Oligonucleotide for detection of SNP TSC0017366
aatagcgatggga

SEQ ID NO: 66018 - DNA, 13 bp, Artificial Sequence
  Oligonucleotide for detection of SNP TSC0017366
tcccatcgctatt

SEQ ID NO: 66019 - DNA, 13 bp, Artificial Sequence
  Oligonucleotide for detection of SNP TSC0017369
ttttagaaagtty

SEQ ID NO: 66020 - DNA, 13 bp, Artificial Sequence
  Oligonucleotide for detection of SNP TSC0017369
raactttctaaaa

SEQ ID NO: 66021 - DNA, 13 bp, Artificial Sequence
  Oligonucleotide for detection of SNP TSC0017369
ttttaggaagtty

SEQ ID NO: 66022 - DNA, 13 bp, Artificial Sequence
  Oligonucleotide for detection of SNP TSC0017369
raacttcctaaaa

SEQ ID NO: 66023 - DNA, 13 bp, Artificial Sequence
  Oligonucleotide for detection of SNP TSC0017371
tataaaatgttty

SEQ ID NO: 66024 - DNA, 13 bp, Artificial Sequence
  Oligonucleotide for detection of SNP TSC0017371
raaacattttata

SEQ ID NO: 66025 - DNA, 13 bp, Artificial Sequence
  Oligonucleotide for detection of SNP TSC0017371
tataaagtgttty

SEQ ID NO: 66026 - DNA, 13 bp, Artificial Sequence
  Oligonucleotide for detection of SNP TSC0017371
raaacactttata

SEQ ID NO: 66027 - DNA, 13 bp, Artificial Sequence
  Oligonucleotide for detection of SNP TSC0017371
tataaaacgttty

SEQ ID NO: 66028 - DNA, 13 bp, Artificial Sequence
  Oligonucleotide for detection of SNP TSC0017371
raaacgttttata

SEQ ID NO: 66029 - DNA, 13 bp, Artificial Sequence
  Oligonucleotide for detection of SNP TSC0017371
tataaagcgttty

SEQ ID NO: 66030 - DNA, 13 bp, Artificial Sequence
  Oligonucleotide for detection of SNP TSC0017371
raaacgctttata

SEQ ID NO: 66031 - DNA, 13 bp, Artificial Sequence
  Oligonucleotide for detection of SNP TSC0017372
atggatattattt

SEQ ID NO: 66032 - DNA, 13 bp, Artificial Sequence
  Oligonucleotide for detection of SNP TSC0017372
aaataatatccat

SEQ ID NO: 66033 - DNA, 13 bp, Artificial Sequence
  Oligonucleotide for detection of SNP TSC0017372
atggatgttattt

SEQ ID NO: 66034 - DNA, 13 bp, Artificial Sequence
  Oligonucleotide for detection of SNP TSC0017372
aaataacatccat

SEQ ID NO: 66035 - DNA, 13 bp, Artificial Sequence
  Oligonucleotide for detection of SNP TSC0017372
atggacgttattt

SEQ ID NO: 66036 - DNA, 13 bp, Artificial Sequence
  Oligonucleotide for detection of SNP TSC0017372
aaataacgtccat

SEQ ID NO: 66037 - DNA, 13 bp, Artificial Sequence
  Oligonucleotide for detection of SNP TSC0017372
agatgatgtttat

SEQ ID NO: 66038 - DNA, 13 bp, Artificial Sequence
  Oligonucleotide for detection of SNP TSC0017372
ataaacatcatct

SEQ ID NO: 66039 - DNA, 13 bp, Artificial Sequence
  Oligonucleotide for detection of SNP TSC0017372
agatgacgtttat

SEQ ID NO: 66040 - DNA, 13 bp, Artificial Sequence
  Oligonucleotide for detection of SNP TSC0017372
ataaacgtcatct

SEQ ID NO: 66041 - DNA, 13 bp, Artificial Sequence
  Oligonucleotide for detection of SNP TSC0017373
ttatatattaggg

SEQ ID NO: 66042 - DNA, 13 bp, Artificial Sequence
  Oligonucleotide for detection of SNP TSC0017373
ccctaatatataa

SEQ ID NO: 66043 - DNA, 13 bp, Artificial Sequence
  Oligonucleotide for detection of SNP TSC0017373
ttatatgttaggg

SEQ ID NO: 66044 - DNA, 13 bp, Artificial Sequence
  Oligonucleotide for detection of SNP TSC0017373
ccctaacatataa

SEQ ID NO: 66045 - DNA, 13 bp, Artificial Sequence
  Oligonucleotide for detection of SNP TSC0017376
tgtaatatattag

SEQ ID NO: 66046 - DNA, 13 bp, Artificial Sequence
  Oligonucleotide for detection of SNP TSC0017376
ctaatatattaca

SEQ ID NO: 66047 - DNA, 13 bp, Artificial Sequence
  Oligonucleotide for detection of SNP TSC0017376
tgtaatgtattag

SEQ ID NO: 66048 - DNA, 13 bp, Artificial Sequence
  Oligonucleotide for detection of SNP TSC0017376
ctaatacattaca

SEQ ID NO: 66049 - DNA, 13 bp, Artificial Sequence
  Oligonucleotide for detection of SNP TSC0017377
gagtttattgggt

SEQ ID NO: 66050 - DNA, 13 bp, Artificial Sequence
  Oligonucleotide for detection of SNP TSC0017377
acccaataaactc

SEQ ID NO: 66051 - DNA, 13 bp, Artificial Sequence
  Oligonucleotide for detection of SNP TSC0017377
gagtttgttgggt

SEQ ID NO: 66052 - DNA, 13 bp, Artificial Sequence
  Oligonucleotide for detection of SNP TSC0017377
acccaacaaactc

SEQ ID NO: 66053 - DNA, 13 bp, Artificial Sequence
  Oligonucleotide for detection of SNP TSC0017377
gagttcgttgggt

SEQ ID NO: 66054 - DNA, 13 bp, Artificial Sequence
  Oligonucleotide for detection of SNP TSC0017377
acccaacgaactc

SEQ ID NO: 66055 - DNA, 13 bp, Artificial Sequence
  Oligonucleotide for detection of SNP TSC0017377
atttaatggatty

SEQ ID NO: 66056 - DNA, 13 bp, Artificial Sequence
  Oligonucleotide for detection of SNP TSC0017377
raatccattaaat

SEQ ID NO: 66057 - DNA, 13 bp, Artificial Sequence
  Oligonucleotide for detection of SNP TSC0017377
atttaacggatty

SEQ ID NO: 66058 - DNA, 13 bp, Artificial Sequence
  Oligonucleotide for detection of SNP TSC0017377
raatccgttaaat

SEQ ID NO: 66059 - DNA, 13 bp, Artificial Sequence
  Oligonucleotide for detection of SNP TSC0017378
gagagaaagagaa

SEQ ID NO: 66060 - DNA, 13 bp, Artificial Sequence
  Oligonucleotide for detection of SNP TSC0017378
ttctctttctctc

SEQ ID NO: 66061 - DNA, 13 bp, Artificial Sequence
  Oligonucleotide for detection of SNP TSC0017378
gagagagagagaa

SEQ ID NO: 66062 - DNA, 13 bp, Artificial Sequence
  Oligonucleotide for detection of SNP TSC0017378
ttctctctctctc

SEQ ID NO: 66063 - DNA, 13 bp, Artificial Sequence
  Oligonucleotide for detection of SNP TSC0017379
agggttatttttt

SEQ ID NO: 66064 - DNA, 13 bp, Artificial Sequence
  Oligonucleotide for detection of SNP TSC0017379
aaaaaataaccct

SEQ ID NO: 66065 - DNA, 13 bp, Artificial Sequence
  Oligonucleotide for detection of SNP TSC0017379
agggttttttttt

SEQ ID NO: 66066 - DNA, 13 bp, Artificial Sequence
  Oligonucleotide for detection of SNP TSC0017379
aaaaaaaaaccct

SEQ ID NO: 66067 - DNA, 13 bp, Artificial Sequence
  Oligonucleotide for detection of SNP TSC0017379
aggggataatttt

SEQ ID NO: 66068 - DNA, 13 bp, Artificial Sequence
  Oligonucleotide for detection of SNP TSC0017379
aaaattatcccct

SEQ ID NO: 66069 - DNA, 13 bp, Artificial Sequence
  Oligonucleotide for detection of SNP TSC0017379
aggggaaaatttt

SEQ ID NO: 66070 - DNA, 13 bp, Artificial Sequence
  Oligonucleotide for detection of SNP TSC0017379
aaaattttcccct

SEQ ID NO: 66071 - DNA, 13 bp, Artificial Sequence
  Oligonucleotide for detection of SNP TSC0017380
aaaatagttgatg

SEQ ID NO: 66072 - DNA, 13 bp, Artificial Sequence
  Oligonucleotide for detection of SNP TSC0017380
catcaactatttt

SEQ ID NO: 66073 - DNA, 13 bp, Artificial Sequence
  Oligonucleotide for detection of SNP TSC0017380
aaaataattgatg

SEQ ID NO: 66074 - DNA, 13 bp, Artificial Sequence
  Oligonucleotide for detection of SNP TSC0017380
catcaattatttt

SEQ ID NO: 66075 - DNA, 13 bp, Artificial Sequence
  Oligonucleotide for detection of SNP TSC0017381
ttttgatgtgttg

SEQ ID NO: 66076 - DNA, 13 bp, Artificial Sequence
  Oligonucleotide for detection of SNP TSC0017381
caacacatcaaaa

SEQ ID NO: 66077 - DNA, 13 bp, Artificial Sequence
  Oligonucleotide for detection of SNP TSC0017381
tttcgatgtgttg

SEQ ID NO: 66078 - DNA, 13 bp, Artificial Sequence
  Oligonucleotide for detection of SNP TSC0017381
caacacatcgaaa

SEQ ID NO: 66079 - DNA, 13 bp, Artificial Sequence
  Oligonucleotide for detection of SNP TSC0017381
ttttgacgtgttg

SEQ ID NO: 66080 - DNA, 13 bp, Artificial Sequence
  Oligonucleotide for detection of SNP TSC0017381
caacacgtcaaaa

SEQ ID NO: 66081 - DNA, 13 bp, Artificial Sequence
  Oligonucleotide for detection of SNP TSC0017381
ttttgatgcgttg

SEQ ID NO: 66082 - DNA, 13 bp, Artificial Sequence
  Oligonucleotide for detection of SNP TSC0017381
caacgcatcaaaa

SEQ ID NO: 66083 - DNA, 13 bp, Artificial Sequence
  Oligonucleotide for detection of SNP TSC0017381
tttcgatgcgttg

SEQ ID NO: 66084 - DNA, 13 bp, Artificial Sequence
  Oligonucleotide for detection of SNP TSC0017381
caacgcatcgaaa

SEQ ID NO: 66085 - DNA, 13 bp, Artificial Sequence
  Oligonucleotide for detection of SNP TSC0017381
tttcgacgtgttg

SEQ ID NO: 66086 - DNA, 13 bp, Artificial Sequence
  Oligonucleotide for detection of SNP TSC0017381
caacacgtcgaaa

SEQ ID NO: 66087 - DNA, 13 bp, Artificial Sequence
  Oligonucleotide for detection of SNP TSC0017381
ttttgacgcgttg

SEQ ID NO: 66088 - DNA, 13 bp, Artificial Sequence
  Oligonucleotide for detection of SNP TSC0017381
caacgcgtcaaaa

SEQ ID NO: 66089 - DNA, 13 bp, Artificial Sequence
  Oligonucleotide for detection of SNP TSC0017381
tttcgacgcgttg

SEQ ID NO: 66090 - DNA, 13 bp, Artificial Sequence
  Oligonucleotide for detection of SNP TSC0017381
caacgcgtcgaaa

SEQ ID NO: 66091 - DNA, 13 bp, Artificial Sequence
  Oligonucleotide for detection of SNP TSC0017381
tagtgtgttgggg

SEQ ID NO: 66092 - DNA, 13 bp, Artificial Sequence
  Oligonucleotide for detection of SNP TSC0017381
ccccaacacacta

SEQ ID NO: 66093 - DNA, 13 bp, Artificial Sequence
  Oligonucleotide for detection of SNP TSC0017381
tagtgtattgggg

SEQ ID NO: 66094 - DNA, 13 bp, Artificial Sequence
  Oligonucleotide for detection of SNP TSC0017381
ccccaatacacta

SEQ ID NO: 66095 - DNA, 13 bp, Artificial Sequence
  Oligonucleotide for detection of SNP TSC0017381
tagcgtgttgggg

SEQ ID NO: 66096 - DNA, 13 bp, Artificial Sequence
  Oligonucleotide for detection of SNP TSC0017381
ccccaacacgcta

SEQ ID NO: 66097 - DNA, 13 bp, Artificial Sequence
  Oligonucleotide for detection of SNP TSC0017381
tagcgtattgggg

SEQ ID NO: 66098 - DNA, 13 bp, Artificial Sequence
  Oligonucleotide for detection of SNP TSC0017381
ccccaatacgcta

SEQ ID NO: 66099 - DNA, 13 bp, Artificial Sequence
  Oligonucleotide for detection of SNP TSC0017381
tagtgcgttgggg

SEQ ID NO: 66100 - DNA, 13 bp, Artificial Sequence
  Oligonucleotide for detection of SNP TSC0017381
ccccaacgcacta

SEQ ID NO: 66101 - DNA, 13 bp, Artificial Sequence
  Oligonucleotide for detection of SNP TSC0017381
tagtgtatcgggg

SEQ ID NO: 66102 - DNA, 13 bp, Artificial Sequence
  Oligonucleotide for detection of SNP TSC0017381
ccccgatacacta

SEQ ID NO: 66103 - DNA, 13 bp, Artificial Sequence
  Oligonucleotide for detection of SNP TSC0017381
tagtgtgtcgggg

SEQ ID NO: 66104 - DNA, 13 bp, Artificial Sequence
  Oligonucleotide for detection of SNP TSC0017381
ccccgacacacta

SEQ ID NO: 66105 - DNA, 13 bp, Artificial Sequence
  Oligonucleotide for detection of SNP TSC0017381
tagcgtatcgggg

SEQ ID NO: 66106 - DNA, 13 bp, Artificial Sequence
  Oligonucleotide for detection of SNP TSC0017381
ccccgatacgcta

SEQ ID NO: 66107 - DNA, 13 bp, Artificial Sequence
  Oligonucleotide for detection of SNP TSC0017381
tagcgcgttgggg

SEQ ID NO: 66108 - DNA, 13 bp, Artificial Sequence
  Oligonucleotide for detection of SNP TSC0017381
ccccaacgcgcta

SEQ ID NO: 66109 - DNA, 13 bp, Artificial Sequence
  Oligonucleotide for detection of SNP TSC0017381
tagcgtgtcgggg

SEQ ID NO: 66110 - DNA, 13 bp, Artificial Sequence
  Oligonucleotide for detection of SNP TSC0017381
ccccgacacgcta

SEQ ID NO: 66111 - DNA, 13 bp, Artificial Sequence
  Oligonucleotide for detection of SNP TSC0017381
tagtgcgtcgggg

SEQ ID NO: 66112 - DNA, 13 bp, Artificial Sequence
  Oligonucleotide for detection of SNP TSC0017381
ccccgacgcacta

SEQ ID NO: 66113 - DNA, 13 bp, Artificial Sequence
  Oligonucleotide for detection of SNP TSC0017381
tagcgcgtcgggg

SEQ ID NO: 66114 - DNA, 13 bp, Artificial Sequence
  Oligonucleotide for detection of SNP TSC0017381
ccccgacgcgcta

SEQ ID NO: 66115 - DNA, 13 bp, Artificial Sequence
  Oligonucleotide for detection of SNP TSC0017382
tttttgggttggt

SEQ ID NO: 66116 - DNA, 13 bp, Artificial Sequence
  Oligonucleotide for detection of SNP TSC0017382
accaacccaaaaa

SEQ ID NO: 66117 - DNA, 13 bp, Artificial Sequence
  Oligonucleotide for detection of SNP TSC0017382
tttttgagttggt

SEQ ID NO: 66118 - DNA, 13 bp, Artificial Sequence
  Oligonucleotide for detection of SNP TSC0017382
accaactcaaaaa

SEQ ID NO: 66119 - DNA, 13 bp, Artificial Sequence
  Oligonucleotide for detection of SNP TSC0017382
tttttgggtcggt

SEQ ID NO: 66120 - DNA, 13 bp, Artificial Sequence
  Oligonucleotide for detection of SNP TSC0017382
accgacccaaaaa

SEQ ID NO: 66121 - DNA, 13 bp, Artificial Sequence
  Oligonucleotide for detection of SNP TSC0017382
tttttgagtcggt

SEQ ID NO: 66122 - DNA, 13 bp, Artificial Sequence
  Oligonucleotide for detection of SNP TSC0017382
accgactcaaaaa

SEQ ID NO: 66123 - DNA, 13 bp, Artificial Sequence
  Oligonucleotide for detection of SNP TSC0017383
ttgttaatttgag

SEQ ID NO: 66124 - DNA, 13 bp, Artificial Sequence
  Oligonucleotide for detection of SNP TSC0017383
ctcaaattaacaa

SEQ ID NO: 66125 - DNA, 13 bp, Artificial Sequence
  Oligonucleotide for detection of SNP TSC0017383
ttgttagtttgag

SEQ ID NO: 66126 - DNA, 13 bp, Artificial Sequence
  Oligonucleotide for detection of SNP TSC0017383
ctcaaactaacaa

SEQ ID NO: 66127 - DNA, 13 bp, Artificial Sequence
  Oligonucleotide for detection of SNP TSC0017384
tgtatttggttag

SEQ ID NO: 66128 - DNA, 13 bp, Artificial Sequence
  Oligonucleotide for detection of SNP TSC0017384
ctaaccaaataca

SEQ ID NO: 66129 - DNA, 13 bp, Artificial Sequence
  Oligonucleotide for detection of SNP TSC0017384
tgtattgggttag

SEQ ID NO: 66130 - DNA, 13 bp, Artificial Sequence
  Oligonucleotide for detection of SNP TSC0017384
ctaacccaataca

SEQ ID NO: 66131 - DNA, 13 bp, Artificial Sequence
  Oligonucleotide for detection of SNP TSC0017384
tgtattcggttag

SEQ ID NO: 66132 - DNA, 13 bp, Artificial Sequence
  Oligonucleotide for detection of SNP TSC0017384
ctaaccgaataca

SEQ ID NO: 66133 - DNA, 13 bp, Artificial Sequence
  Oligonucleotide for detection of SNP TSC0017384
tgtatcgggttag

SEQ ID NO: 66134 - DNA, 13 bp, Artificial Sequence
  Oligonucleotide for detection of SNP TSC0017384
ctaacccgataca

SEQ ID NO: 66135 - DNA, 13 bp, Artificial Sequence
  Oligonucleotide for detection of SNP TSC0017384
ttggtttggtgta

SEQ ID NO: 66136 - DNA, 13 bp, Artificial Sequence
  Oligonucleotide for detection of SNP TSC0017384
tacaccaaaccaa

SEQ ID NO: 66137 - DNA, 13 bp, Artificial Sequence
  Oligonucleotide for detection of SNP TSC0017384
ttggttcggtgta

SEQ ID NO: 66138 - DNA, 13 bp, Artificial Sequence
  Oligonucleotide for detection of SNP TSC0017384
tacaccgaaccaa

SEQ ID NO: 66139 - DNA, 13 bp, Artificial Sequence
  Oligonucleotide for detection of SNP TSC0017385
gtaggtatagtta

SEQ ID NO: 66140 - DNA, 13 bp, Artificial Sequence
  Oligonucleotide for detection of SNP TSC0017385
taactatacctac

SEQ ID NO: 66141 - DNA, 13 bp, Artificial Sequence
  Oligonucleotide for detection of SNP TSC0017385
gtaggtgtagtta

SEQ ID NO: 66142 - DNA, 13 bp, Artificial Sequence
  Oligonucleotide for detection of SNP TSC0017385
taactacacctac

SEQ ID NO: 66143 - DNA, 13 bp, Artificial Sequence
  Oligonucleotide for detection of SNP TSC0017387
tttattatgttag

SEQ ID NO: 66144 - DNA, 13 bp, Artificial Sequence
  Oligonucleotide for detection of SNP TSC0017387
ctaacataataaa

SEQ ID NO: 66145 - DNA, 13 bp, Artificial Sequence
  Oligonucleotide for detection of SNP TSC0017387
tttattgtgttag

SEQ ID NO: 66146 - DNA, 13 bp, Artificial Sequence
  Oligonucleotide for detection of SNP TSC0017387
ctaacacaataaa

SEQ ID NO: 66147 - DNA, 13 bp, Artificial Sequence
  Oligonucleotide for detection of SNP TSC0017387
tttatcgtgttag

SEQ ID NO: 66148 - DNA, 13 bp, Artificial Sequence
  Oligonucleotide for detection of SNP TSC0017387
ctaacacgataaa

SEQ ID NO: 66149 - DNA, 13 bp, Artificial Sequence
  Oligonucleotide for detection of SNP TSC0017388
tgtagtataagga

SEQ ID NO: 66150 - DNA, 13 bp, Artificial Sequence
  Oligonucleotide for detection of SNP TSC0017388
tccttatactaca

SEQ ID NO: 66151 - DNA, 13 bp, Artificial Sequence
  Oligonucleotide for detection of SNP TSC0017388
tgtagtgtaagga

SEQ ID NO: 66152 - DNA, 13 bp, Artificial Sequence
  Oligonucleotide for detection of SNP TSC0017388
tccttacactaca

SEQ ID NO: 66153 - DNA, 13 bp, Artificial Sequence
  Oligonucleotide for detection of SNP TSC0017388
tgtagcgtaagga

SEQ ID NO: 66154 - DNA, 13 bp, Artificial Sequence
  Oligonucleotide for detection of SNP TSC0017388
tccttacgctaca

SEQ ID NO: 66155 - DNA, 13 bp, Artificial Sequence
  Oligonucleotide for detection of SNP TSC0017388
tttttgtgttata

SEQ ID NO: 66156 - DNA, 13 bp, Artificial Sequence
  Oligonucleotide for detection of SNP TSC0017388
tataacacaaaaa

SEQ ID NO: 66157 - DNA, 13 bp, Artificial Sequence
  Oligonucleotide for detection of SNP TSC0017388
tttttgcgttata

SEQ ID NO: 66158 - DNA, 13 bp, Artificial Sequence
  Oligonucleotide for detection of SNP TSC0017388
tataacgcaaaaa

SEQ ID NO: 66159 - DNA, 13 bp, Artificial Sequence
  Oligonucleotide for detection of SNP TSC0017389
tgttttagtaatt

SEQ ID NO: 66160 - DNA, 13 bp, Artificial Sequence
  Oligonucleotide for detection of SNP TSC0017389
aattactaaaaca

SEQ ID NO: 66161 - DNA, 13 bp, Artificial Sequence
  Oligonucleotide for detection of SNP TSC0017389
tgttttggtaatt

SEQ ID NO: 66162 - DNA, 13 bp, Artificial Sequence
  Oligonucleotide for detection of SNP TSC0017389
aattaccaaaaca

SEQ ID NO: 66163 - DNA, 13 bp, Artificial Sequence
  Oligonucleotide for detection of SNP TSC0017394
aggagagtaatgg

SEQ ID NO: 66164 - DNA, 13 bp, Artificial Sequence
  Oligonucleotide for detection of SNP TSC0017394
ccattactctcct

SEQ ID NO: 66165 - DNA, 13 bp, Artificial Sequence
  Oligonucleotide for detection of SNP TSC0017394
aggagaataatgg

SEQ ID NO: 66166 - DNA, 13 bp, Artificial Sequence
  Oligonucleotide for detection of SNP TSC0017394
ccattattctcct

SEQ ID NO: 66167 - DNA, 13 bp, Artificial Sequence
  Oligonucleotide for detection of SNP TSC0017395
aagggagtataaa

SEQ ID NO: 66168 - DNA, 13 bp, Artificial Sequence
  Oligonucleotide for detection of SNP TSC0017395
tttatactccctt

SEQ ID NO: 66169 - DNA, 13 bp, Artificial Sequence
  Oligonucleotide for detection of SNP TSC0017395
aagggaatataaa

SEQ ID NO: 66170 - DNA, 13 bp, Artificial Sequence
  Oligonucleotide for detection of SNP TSC0017395
tttatattccctt

SEQ ID NO: 66171 - DNA, 13 bp, Artificial Sequence
  Oligonucleotide for detection of SNP TSC0017396
tggaaaggtagtt

SEQ ID NO: 66172 - DNA, 13 bp, Artificial Sequence
  Oligonucleotide for detection of SNP TSC0017396
aactacctttcca

SEQ ID NO: 66173 - DNA, 13 bp, Artificial Sequence
  Oligonucleotide for detection of SNP TSC0017396
tggaaatgtagtt

SEQ ID NO: 66174 - DNA, 13 bp, Artificial Sequence
  Oligonucleotide for detection of SNP TSC0017396
aactacatttcca

SEQ ID NO: 66175 - DNA, 13 bp, Artificial Sequence
  Oligonucleotide for detection of SNP TSC0017396
agttgttttttta

SEQ ID NO: 66176 - DNA, 13 bp, Artificial Sequence
  Oligonucleotide for detection of SNP TSC0017396
taaaaaaacaact

SEQ ID NO: 66177 - DNA, 13 bp, Artificial Sequence
  Oligonucleotide for detection of SNP TSC0017396
agttgtattttta

SEQ ID NO: 66178 - DNA, 13 bp, Artificial Sequence
  Oligonucleotide for detection of SNP TSC0017396
taaaaatacaact

SEQ ID NO: 66179 - DNA, 13 bp, Artificial Sequence
  Oligonucleotide for detection of SNP TSC0017399
tagtggatgaaga

SEQ ID NO: 66180 - DNA, 13 bp, Artificial Sequence
  Oligonucleotide for detection of SNP TSC0017399
tcttcatccacta

SEQ ID NO: 66181 - DNA, 13 bp, Artificial Sequence
  Oligonucleotide for detection of SNP TSC0017399
tagtgggtgaaga

SEQ ID NO: 66182 - DNA, 13 bp, Artificial Sequence
  Oligonucleotide for detection of SNP TSC0017399
tcttcacccacta

SEQ ID NO: 66183 - DNA, 13 bp, Artificial Sequence
  Oligonucleotide for detection of SNP TSC0017400
atattaatgatag

SEQ ID NO: 66184 - DNA, 13 bp, Artificial Sequence
  Oligonucleotide for detection of SNP TSC0017400
ctatcattaatat

SEQ ID NO: 66185 - DNA, 13 bp, Artificial Sequence
  Oligonucleotide for detection of SNP TSC0017400
atattagtgatag

SEQ ID NO: 66186 - DNA, 13 bp, Artificial Sequence
  Oligonucleotide for detection of SNP TSC0017400
ctatcactaatat

SEQ ID NO: 66187 - DNA, 13 bp, Artificial Sequence
  Oligonucleotide for detection of SNP TSC0017401
tgaagaattagtt

SEQ ID NO: 66188 - DNA, 13 bp, Artificial Sequence
  Oligonucleotide for detection of SNP TSC0017401
aactaattcttca

SEQ ID NO: 66189 - DNA, 13 bp, Artificial Sequence
  Oligonucleotide for detection of SNP TSC0017401
tgaagagttagtt

SEQ ID NO: 66190 - DNA, 13 bp, Artificial Sequence
  Oligonucleotide for detection of SNP TSC0017401
aactaactcttca

SEQ ID NO: 66191 - DNA, 13 bp, Artificial Sequence
  Oligonucleotide for detection of SNP TSC0017402
atttgtatttttg

SEQ ID NO: 66192 - DNA, 13 bp, Artificial Sequence
  Oligonucleotide for detection of SNP TSC0017402
caaaaatacaaat

SEQ ID NO: 66193 - DNA, 13 bp, Artificial Sequence
  Oligonucleotide for detection of SNP TSC0017402
atttgtgtttttg

SEQ ID NO: 66194 - DNA, 13 bp, Artificial Sequence
  Oligonucleotide for detection of SNP TSC0017402
caaaaacacaaat

SEQ ID NO: 66195 - DNA, 13 bp, Artificial Sequence
  Oligonucleotide for detection of SNP TSC0017402
attcgtatttttg

SEQ ID NO: 66196 - DNA, 13 bp, Artificial Sequence
  Oligonucleotide for detection of SNP TSC0017402
caaaaatacgaat

SEQ ID NO: 66197 - DNA, 13 bp, Artificial Sequence
  Oligonucleotide for detection of SNP TSC0017402
attcgtgtttttg

SEQ ID NO: 66198 - DNA, 13 bp, Artificial Sequence
  Oligonucleotide for detection of SNP TSC0017402
caaaaacacgaat

SEQ ID NO: 66199 - DNA, 13 bp, Artificial Sequence
  Oligonucleotide for detection of SNP TSC0017402
atttgcgtttttg

SEQ ID NO: 66200 - DNA, 13 bp, Artificial Sequence
  Oligonucleotide for detection of SNP TSC0017402
caaaaacgcaaat

SEQ ID NO: 66201 - DNA, 13 bp, Artificial Sequence
  Oligonucleotide for detection of SNP TSC0017402
attcgcgtttttg

SEQ ID NO: 66202 - DNA, 13 bp, Artificial Sequence
  Oligonucleotide for detection of SNP TSC0017402
caaaaacgcgaat

SEQ ID NO: 66203 - DNA, 13 bp, Artificial Sequence
  Oligonucleotide for detection of SNP TSC0017402
taaaaatgtggat

SEQ ID NO: 66204 - DNA, 13 bp, Artificial Sequence
  Oligonucleotide for detection of SNP TSC0017402
atccacattttta

SEQ ID NO: 66205 - DNA, 13 bp, Artificial Sequence
  Oligonucleotide for detection of SNP TSC0017402
taaaaatgcggat

SEQ ID NO: 66206 - DNA, 13 bp, Artificial Sequence
  Oligonucleotide for detection of SNP TSC0017402
atccgcattttta

SEQ ID NO: 66207 - DNA, 13 bp, Artificial Sequence
  Oligonucleotide for detection of SNP TSC0017402
taaaaacgtggat

SEQ ID NO: 66208 - DNA, 13 bp, Artificial Sequence
  Oligonucleotide for detection of SNP TSC0017402
atccacgttttta

SEQ ID NO: 66209 - DNA, 13 bp, Artificial Sequence
  Oligonucleotide for detection of SNP TSC0017402
taaaaacgcggat

SEQ ID NO: 66210 - DNA, 13 bp, Artificial Sequence
  Oligonucleotide for detection of SNP TSC0017402
atccgcgttttta

SEQ ID NO: 66211 - DNA, 13 bp, Artificial Sequence
  Oligonucleotide for detection of SNP TSC0017407
tagtgtaataaga

SEQ ID NO: 66212 - DNA, 13 bp, Artificial Sequence
  Oligonucleotide for detection of SNP TSC0017407
tcttattacacta

SEQ ID NO: 66213 - DNA, 13 bp, Artificial Sequence
  Oligonucleotide for detection of SNP TSC0017407
tagtgtgataaga

SEQ ID NO: 66214 - DNA, 13 bp, Artificial Sequence
  Oligonucleotide for detection of SNP TSC0017407
tcttatcacacta

SEQ ID NO: 66215 - DNA, 13 bp, Artificial Sequence
  Oligonucleotide for detection of SNP TSC0017407
tagcgtaataaga

SEQ ID NO: 66216 - DNA, 13 bp, Artificial Sequence
  Oligonucleotide for detection of SNP TSC0017407
tcttattacgcta

SEQ ID NO: 66217 - DNA, 13 bp, Artificial Sequence
  Oligonucleotide for detection of SNP TSC0017407
tagcgtgataaga

SEQ ID NO: 66218 - DNA, 13 bp, Artificial Sequence
  Oligonucleotide for detection of SNP TSC0017407
tcttatcacgcta

SEQ ID NO: 66219 - DNA, 13 bp, Artificial Sequence
  Oligonucleotide for detection of SNP TSC0017408
gatagtataatty

SEQ ID NO: 66220 - DNA, 13 bp, Artificial Sequence
  Oligonucleotide for detection of SNP TSC0017408
raattatactatc

SEQ ID NO: 66221 - DNA, 13 bp, Artificial Sequence
  Oligonucleotide for detection of SNP TSC0017408
gatagtttaatty

SEQ ID NO: 66222 - DNA, 13 bp, Artificial Sequence
  Oligonucleotide for detection of SNP TSC0017408
raattaaactatc

SEQ ID NO: 66223 - DNA, 13 bp, Artificial Sequence
  Oligonucleotide for detection of SNP TSC0017408
ggattatattgty

SEQ ID NO: 66224 - DNA, 13 bp, Artificial Sequence
  Oligonucleotide for detection of SNP TSC0017408
racaatataatcc

SEQ ID NO: 66225 - DNA, 13 bp, Artificial Sequence
  Oligonucleotide for detection of SNP TSC0017408
ggattagattgty

SEQ ID NO: 66226 - DNA, 13 bp, Artificial Sequence
  Oligonucleotide for detection of SNP TSC0017408
racaatctaatcc

SEQ ID NO: 66227 - DNA, 13 bp, Artificial Sequence
  Oligonucleotide for detection of SNP TSC0017409
tgttggggaatty

SEQ ID NO: 66228 - DNA, 13 bp, Artificial Sequence
  Oligonucleotide for detection of SNP TSC0017409
raattccccaaca

SEQ ID NO: 66229 - DNA, 13 bp, Artificial Sequence
  Oligonucleotide for detection of SNP TSC0017409
tgttggtgaatty

SEQ ID NO: 66230 - DNA, 13 bp, Artificial Sequence
  Oligonucleotide for detection of SNP TSC0017409
raattcaccaaca

SEQ ID NO: 66231 - DNA, 13 bp, Artificial Sequence
  Oligonucleotide for detection of SNP TSC0017409
gagttttttagta

SEQ ID NO: 66232 - DNA, 13 bp, Artificial Sequence
  Oligonucleotide for detection of SNP TSC0017409
tactaaaaaactc

SEQ ID NO: 66233 - DNA, 13 bp, Artificial Sequence
  Oligonucleotide for detection of SNP TSC0017409
gagtttattagta

SEQ ID NO: 66234 - DNA, 13 bp, Artificial Sequence
  Oligonucleotide for detection of SNP TSC0017409
tactaataaactc

SEQ ID NO: 66235 - DNA, 13 bp, Artificial Sequence
  Oligonucleotide for detection of SNP TSC0017414
gatattagttttt

SEQ ID NO: 66236 - DNA, 13 bp, Artificial Sequence
  Oligonucleotide for detection of SNP TSC0017414
aaaaactaatatc

SEQ ID NO: 66237 - DNA, 13 bp, Artificial Sequence
  Oligonucleotide for detection of SNP TSC0017414
gatatttgttttt

SEQ ID NO: 66238 - DNA, 13 bp, Artificial Sequence
  Oligonucleotide for detection of SNP TSC0017414
aaaaacaaatatc

SEQ ID NO: 66239 - DNA, 13 bp, Artificial Sequence
  Oligonucleotide for detection of SNP TSC0017414
agggattggtgty

SEQ ID NO: 66240 - DNA, 13 bp, Artificial Sequence
  Oligonucleotide for detection of SNP TSC0017414
racaccaatccct

SEQ ID NO: 66241 - DNA, 13 bp, Artificial Sequence
  Oligonucleotide for detection of SNP TSC0017414
agggataggtgty

SEQ ID NO: 66242 - DNA, 13 bp, Artificial Sequence
  Oligonucleotide for detection of SNP TSC0017414
racacctatccct

SEQ ID NO: 66243 - DNA, 13 bp, Artificial Sequence
  Oligonucleotide for detection of SNP TSC0017415
tatgtaggtttgt

SEQ ID NO: 66244 - DNA, 13 bp, Artificial Sequence
  Oligonucleotide for detection of SNP TSC0017415
acaaacctacata

SEQ ID NO: 66245 - DNA, 13 bp, Artificial Sequence
  Oligonucleotide for detection of SNP TSC0017415
tatgtaagtttgt

SEQ ID NO: 66246 - DNA, 13 bp, Artificial Sequence
  Oligonucleotide for detection of SNP TSC0017415
acaaacttacata

SEQ ID NO: 66247 - DNA, 13 bp, Artificial Sequence
  Oligonucleotide for detection of SNP TSC0017416
tagtaatttttty

SEQ ID NO: 66248 - DNA, 13 bp, Artificial Sequence
  Oligonucleotide for detection of SNP TSC0017416
raaaaaattacta

SEQ ID NO: 66249 - DNA, 13 bp, Artificial Sequence
  Oligonucleotide for detection of SNP TSC0017416
tagtaagttttty

SEQ ID NO: 66250 - DNA, 13 bp, Artificial Sequence
  Oligonucleotide for detection of SNP TSC0017416
raaaaacttacta

SEQ ID NO: 66251 - DNA, 13 bp, Artificial Sequence
  Oligonucleotide for detection of SNP TSC0017416
gaagaggttatta

SEQ ID NO: 66252 - DNA, 13 bp, Artificial Sequence
  Oligonucleotide for detection of SNP TSC0017416
taataacctcttc

SEQ ID NO: 66253 - DNA, 13 bp, Artificial Sequence
  Oligonucleotide for detection of SNP TSC0017416
gaagagtttatta

SEQ ID NO: 66254 - DNA, 13 bp, Artificial Sequence
  Oligonucleotide for detection of SNP TSC0017416
taataaactcttc

SEQ ID NO: 66255 - DNA, 13 bp, Artificial Sequence
  Oligonucleotide for detection of SNP TSC0017417
gtgtttgtttatt

SEQ ID NO: 66256 - DNA, 13 bp, Artificial Sequence
  Oligonucleotide for detection of SNP TSC0017417
aataaacaaacac

SEQ ID NO: 66257 - DNA, 13 bp, Artificial Sequence
  Oligonucleotide for detection of SNP TSC0017417
gtgtttttttatt

SEQ ID NO: 66258 - DNA, 13 bp, Artificial Sequence
  Oligonucleotide for detection of SNP TSC0017417
aataaaaaaacac

SEQ ID NO: 66259 - DNA, 13 bp, Artificial Sequence
  Oligonucleotide for detection of SNP TSC0017417
agtggatagatay

SEQ ID NO: 66260 - DNA, 13 bp, Artificial Sequence
  Oligonucleotide for detection of SNP TSC0017417
rtatctatccact

SEQ ID NO: 66261 - DNA, 13 bp, Artificial Sequence
  Oligonucleotide for detection of SNP TSC0017417
agtggaaagatay

SEQ ID NO: 66262 - DNA, 13 bp, Artificial Sequence
  Oligonucleotide for detection of SNP TSC0017417
rtatctttccact

SEQ ID NO: 66263 - DNA, 13 bp, Artificial Sequence
  Oligonucleotide for detection of SNP TSC0017418
agtattatggtty

SEQ ID NO: 66264 - DNA, 13 bp, Artificial Sequence
  Oligonucleotide for detection of SNP TSC0017418
raaccataatact

SEQ ID NO: 66265 - DNA, 13 bp, Artificial Sequence
  Oligonucleotide for detection of SNP TSC0017418
agtattgtggtty

SEQ ID NO: 66266 - DNA, 13 bp, Artificial Sequence
  Oligonucleotide for detection of SNP TSC0017418
raaccacaatact

SEQ ID NO: 66267 - DNA, 13 bp, Artificial Sequence
  Oligonucleotide for detection of SNP TSC0017418
agtattacggtty

SEQ ID NO: 66268 - DNA, 13 bp, Artificial Sequence
  Oligonucleotide for detection of SNP TSC0017418
raaccgtaatact

SEQ ID NO: 66269 - DNA, 13 bp, Artificial Sequence
  Oligonucleotide for detection of SNP TSC0017418
agtatcgtggtty

SEQ ID NO: 66270 - DNA, 13 bp, Artificial Sequence
  Oligonucleotide for detection of SNP TSC0017418
raaccacgatact

SEQ ID NO: 66271 - DNA, 13 bp, Artificial Sequence
  Oligonucleotide for detection of SNP TSC0017418
agtattgcggtty

SEQ ID NO: 66272 - DNA, 13 bp, Artificial Sequence
  Oligonucleotide for detection of SNP TSC0017418
raaccgcaatact

SEQ ID NO: 66273 - DNA, 13 bp, Artificial Sequence
  Oligonucleotide for detection of SNP TSC0017418
agtatcgcggtty

SEQ ID NO: 66274 - DNA, 13 bp, Artificial Sequence
  Oligonucleotide for detection of SNP TSC0017418
raaccgcgatact

SEQ ID NO: 66275 - DNA, 13 bp, Artificial Sequence
  Oligonucleotide for detection of SNP TSC0017418
ggattgtggtgtt

SEQ ID NO: 66276 - DNA, 13 bp, Artificial Sequence
  Oligonucleotide for detection of SNP TSC0017418
aacaccacaatcc

SEQ ID NO: 66277 - DNA, 13 bp, Artificial Sequence
  Oligonucleotide for detection of SNP TSC0017418
ggatcgtggtgtt

SEQ ID NO: 66278 - DNA, 13 bp, Artificial Sequence
  Oligonucleotide for detection of SNP TSC0017418
aacaccacgatcc

SEQ ID NO: 66279 - DNA, 13 bp, Artificial Sequence
  Oligonucleotide for detection of SNP TSC0017418
ggattgcggtgtt

SEQ ID NO: 66280 - DNA, 13 bp, Artificial Sequence
  Oligonucleotide for detection of SNP TSC0017418
aacaccgcaatcc

SEQ ID NO: 66281 - DNA, 13 bp, Artificial Sequence
  Oligonucleotide for detection of SNP TSC0017418
ggatcgcggtgtt

SEQ ID NO: 66282 - DNA, 13 bp, Artificial Sequence
  Oligonucleotide for detection of SNP TSC0017418
aacaccgcgatcc

SEQ ID NO: 66283 - DNA, 13 bp, Artificial Sequence
  Oligonucleotide for detection of SNP TSC0017419
tttgttatataty

SEQ ID NO: 66284 - DNA, 13 bp, Artificial Sequence
  Oligonucleotide for detection of SNP TSC0017419
ratatataacaaa

SEQ ID NO: 66285 - DNA, 13 bp, Artificial Sequence
  Oligonucleotide for detection of SNP TSC0017419
tttgttttataty

SEQ ID NO: 66286 - DNA, 13 bp, Artificial Sequence
  Oligonucleotide for detection of SNP TSC0017419
ratataaaacaaa

SEQ ID NO: 66287 - DNA, 13 bp, Artificial Sequence
  Oligonucleotide for detection of SNP TSC0017419
ttcgttatataty

SEQ ID NO: 66288 - DNA, 13 bp, Artificial Sequence
  Oligonucleotide for detection of SNP TSC0017419
ratatataacgaa

SEQ ID NO: 66289 - DNA, 13 bp, Artificial Sequence
  Oligonucleotide for detection of SNP TSC0017419
ttcgttttataty

SEQ ID NO: 66290 - DNA, 13 bp, Artificial Sequence
  Oligonucleotide for detection of SNP TSC0017419
ratataaaacgaa

SEQ ID NO: 66291 - DNA, 13 bp, Artificial Sequence
  Oligonucleotide for detection of SNP TSC0017419
gatgtataatgag

SEQ ID NO: 66292 - DNA, 13 bp, Artificial Sequence
  Oligonucleotide for detection of SNP TSC0017419
ctcattatacatc

SEQ ID NO: 66293 - DNA, 13 bp, Artificial Sequence
  Oligonucleotide for detection of SNP TSC0017419
gatgtagaatgag

SEQ ID NO: 66294 - DNA, 13 bp, Artificial Sequence
  Oligonucleotide for detection of SNP TSC0017419
ctcattctacatc

SEQ ID NO: 66295 - DNA, 13 bp, Artificial Sequence
  Oligonucleotide for detection of SNP TSC0017419
gatgtataacgag

SEQ ID NO: 66296 - DNA, 13 bp, Artificial Sequence
  Oligonucleotide for detection of SNP TSC0017419
ctcgttatacatc

SEQ ID NO: 66297 - DNA, 13 bp, Artificial Sequence
  Oligonucleotide for detection of SNP TSC0017419
gatgtagaacgag

SEQ ID NO: 66298 - DNA, 13 bp, Artificial Sequence
  Oligonucleotide for detection of SNP TSC0017419
ctcgttctacatc

SEQ ID NO: 66299 - DNA, 13 bp, Artificial Sequence
  Oligonucleotide for detection of SNP TSC0017420
ggaagaaataggy

SEQ ID NO: 66300 - DNA, 13 bp, Artificial Sequence
  Oligonucleotide for detection of SNP TSC0017420
rcctatttcttcc

SEQ ID NO: 66301 - DNA, 13 bp, Artificial Sequence
  Oligonucleotide for detection of SNP TSC0017420
ggaagatataggy

SEQ ID NO: 66302 - DNA, 13 bp, Artificial Sequence
  Oligonucleotide for detection of SNP TSC0017420
rcctatatcttcc

SEQ ID NO: 66303 - DNA, 13 bp, Artificial Sequence
  Oligonucleotide for detection of SNP TSC0017420
gtttgttttttty

SEQ ID NO: 66304 - DNA, 13 bp, Artificial Sequence
  Oligonucleotide for detection of SNP TSC0017420
raaaaaaacaaac

SEQ ID NO: 66305 - DNA, 13 bp, Artificial Sequence
  Oligonucleotide for detection of SNP TSC0017420
gtttgtgttttty

SEQ ID NO: 66306 - DNA, 13 bp, Artificial Sequence
  Oligonucleotide for detection of SNP TSC0017420
raaaaacacaaac

SEQ ID NO: 66307 - DNA, 13 bp, Artificial Sequence
  Oligonucleotide for detection of SNP TSC0017421
gagaatattttty

SEQ ID NO: 66308 - DNA, 13 bp, Artificial Sequence
  Oligonucleotide for detection of SNP TSC0017421
raaaaatattctc

SEQ ID NO: 66309 - DNA, 13 bp, Artificial Sequence
  Oligonucleotide for detection of SNP TSC0017421
gagaattttttty

SEQ ID NO: 66310 - DNA, 13 bp, Artificial Sequence
  Oligonucleotide for detection of SNP TSC0017421
raaaaaaattctc

SEQ ID NO: 66311 - DNA, 13 bp, Artificial Sequence
  Oligonucleotide for detection of SNP TSC0017421
gggaggtgtttty

SEQ ID NO: 66312 - DNA, 13 bp, Artificial Sequence
  Oligonucleotide for detection of SNP TSC0017421
raaaacacctccc

SEQ ID NO: 66313 - DNA, 13 bp, Artificial Sequence
  Oligonucleotide for detection of SNP TSC0017421
gggaggagtttty

SEQ ID NO: 66314 - DNA, 13 bp, Artificial Sequence
  Oligonucleotide for detection of SNP TSC0017421
raaaactcctccc

SEQ ID NO: 66315 - DNA, 13 bp, Artificial Sequence
  Oligonucleotide for detection of SNP TSC0017422
ttaaatattttgy

SEQ ID NO: 66316 - DNA, 13 bp, Artificial Sequence
  Oligonucleotide for detection of SNP TSC0017422
rcaaaatatttaa

SEQ ID NO: 66317 - DNA, 13 bp, Artificial Sequence
  Oligonucleotide for detection of SNP TSC0017422
ttaaatgttttgy

SEQ ID NO: 66318 - DNA, 13 bp, Artificial Sequence
  Oligonucleotide for detection of SNP TSC0017422
rcaaaacatttaa

SEQ ID NO: 66319 - DNA, 13 bp, Artificial Sequence
  Oligonucleotide for detection of SNP TSC0017422
ttaaacgttttgy

SEQ ID NO: 66320 - DNA, 13 bp, Artificial Sequence
  Oligonucleotide for detection of SNP TSC0017422
rcaaaacgtttaa

SEQ ID NO: 66321 - DNA, 13 bp, Artificial Sequence
  Oligonucleotide for detection of SNP TSC0017422
gtaaaatgtttag

SEQ ID NO: 66322 - DNA, 13 bp, Artificial Sequence
  Oligonucleotide for detection of SNP TSC0017422
ctaaacattttac

SEQ ID NO: 66323 - DNA, 13 bp, Artificial Sequence
  Oligonucleotide for detection of SNP TSC0017422
gtaaaacgtttag

SEQ ID NO: 66324 - DNA, 13 bp, Artificial Sequence
  Oligonucleotide for detection of SNP TSC0017422
ctaaacgttttac

SEQ ID NO: 66325 - DNA, 13 bp, Artificial Sequence
  Oligonucleotide for detection of SNP TSC0017423
aaagtaagtttty

SEQ ID NO: 66326 - DNA, 13 bp, Artificial Sequence
  Oligonucleotide for detection of SNP TSC0017423
raaaacttacttt

SEQ ID NO: 66327 - DNA, 13 bp, Artificial Sequence
  Oligonucleotide for detection of SNP TSC0017423
aaagtaggtttty

SEQ ID NO: 66328 - DNA, 13 bp, Artificial Sequence
  Oligonucleotide for detection of SNP TSC0017423
raaaacctacttt

SEQ ID NO: 66329 - DNA, 13 bp, Artificial Sequence
  Oligonucleotide for detection of SNP TSC0017424
ttattgggttttt

SEQ ID NO: 66330 - DNA, 13 bp, Artificial Sequence
  Oligonucleotide for detection of SNP TSC0017424
aaaaacccaataa

SEQ ID NO: 66331 - DNA, 13 bp, Artificial Sequence
  Oligonucleotide for detection of SNP TSC0017424
aaaggtttagtaa

SEQ ID NO: 66332 - DNA, 13 bp, Artificial Sequence
  Oligonucleotide for detection of SNP TSC0017424
ttactaaaccttt

SEQ ID NO: 66333 - DNA, 13 bp, Artificial Sequence
  Oligonucleotide for detection of SNP TSC0017424
aaaggtatagtaa

SEQ ID NO: 66334 - DNA, 13 bp, Artificial Sequence
  Oligonucleotide for detection of SNP TSC0017424
ttactataccttt

SEQ ID NO: 66335 - DNA, 13 bp, Artificial Sequence
  Oligonucleotide for detection of SNP TSC0017427
aaatttgagtagg

SEQ ID NO: 66336 - DNA, 13 bp, Artificial Sequence
  Oligonucleotide for detection of SNP TSC0017427
cctactcaaattt

SEQ ID NO: 66337 - DNA, 13 bp, Artificial Sequence
  Oligonucleotide for detection of SNP TSC0017427
aaattttagtagg

SEQ ID NO: 66338 - DNA, 13 bp, Artificial Sequence
  Oligonucleotide for detection of SNP TSC0017427
cctactaaaattt

SEQ ID NO: 66339 - DNA, 13 bp, Artificial Sequence
  Oligonucleotide for detection of SNP TSC0017427
tttgtttaaattt

SEQ ID NO: 66340 - DNA, 13 bp, Artificial Sequence
  Oligonucleotide for detection of SNP TSC0017427
aaatttaaacaaa

SEQ ID NO: 66341 - DNA, 13 bp, Artificial Sequence
  Oligonucleotide for detection of SNP TSC0017428
aattatttaatty

SEQ ID NO: 66342 - DNA, 13 bp, Artificial Sequence
  Oligonucleotide for detection of SNP TSC0017428
raattaaataatt

SEQ ID NO: 66343 - DNA, 13 bp, Artificial Sequence
  Oligonucleotide for detection of SNP TSC0017428
aattatgtaatty

SEQ ID NO: 66344 - DNA, 13 bp, Artificial Sequence
  Oligonucleotide for detection of SNP TSC0017428
raattacataatt

SEQ ID NO: 66345 - DNA, 13 bp, Artificial Sequence
  Oligonucleotide for detection of SNP TSC0017428
aattacgtaatty

SEQ ID NO: 66346 - DNA, 13 bp, Artificial Sequence
  Oligonucleotide for detection of SNP TSC0017428
raattacgtaatt

SEQ ID NO: 66347 - DNA, 13 bp, Artificial Sequence
  Oligonucleotide for detection of SNP TSC0017428
ggattgggtggtt

SEQ ID NO: 66348 - DNA, 13 bp, Artificial Sequence
  Oligonucleotide for detection of SNP TSC0017428
aaccacccaatcc

SEQ ID NO: 66349 - DNA, 13 bp, Artificial Sequence
  Oligonucleotide for detection of SNP TSC0017428
ggattgtgtggtt

SEQ ID NO: 66350 - DNA, 13 bp, Artificial Sequence
  Oligonucleotide for detection of SNP TSC0017428
aaccacacaatcc

SEQ ID NO: 66351 - DNA, 13 bp, Artificial Sequence
  Oligonucleotide for detection of SNP TSC0017428
ggattgcgtggtt

SEQ ID NO: 66352 - DNA, 13 bp, Artificial Sequence
  Oligonucleotide for detection of SNP TSC0017428
aaccacgcaatcc

SEQ ID NO: 66353 - DNA, 13 bp, Artificial Sequence
  Oligonucleotide for detection of SNP TSC0017429
attaaaatagaag

SEQ ID NO: 66354 - DNA, 13 bp, Artificial Sequence
  Oligonucleotide for detection of SNP TSC0017429
cttctattttaat

SEQ ID NO: 66355 - DNA, 13 bp, Artificial Sequence
  Oligonucleotide for detection of SNP TSC0017429
attaaagtagaag

SEQ ID NO: 66356 - DNA, 13 bp, Artificial Sequence
  Oligonucleotide for detection of SNP TSC0017429
cttctactttaat

SEQ ID NO: 66357 - DNA, 13 bp, Artificial Sequence
  Oligonucleotide for detection of SNP TSC0017430
ataagaggggaay

SEQ ID NO: 66358 - DNA, 13 bp, Artificial Sequence
  Oligonucleotide for detection of SNP TSC0017430
rttcccctcttat

SEQ ID NO: 66359 - DNA, 13 bp, Artificial Sequence
  Oligonucleotide for detection of SNP TSC0017430
ataagaagggaay

SEQ ID NO: 66360 - DNA, 13 bp, Artificial Sequence
  Oligonucleotide for detection of SNP TSC0017430
rttcccttcttat

SEQ ID NO: 66361 - DNA, 13 bp, Artificial Sequence
  Oligonucleotide for detection of SNP TSC0017431
ttttatattttgy

SEQ ID NO: 66362 - DNA, 13 bp, Artificial Sequence
  Oligonucleotide for detection of SNP TSC0017431
rcaaaatataaaa

SEQ ID NO: 66363 - DNA, 13 bp, Artificial Sequence
  Oligonucleotide for detection of SNP TSC0017431
gtaaagtatgggg

SEQ ID NO: 66364 - DNA, 13 bp, Artificial Sequence
  Oligonucleotide for detection of SNP TSC0017431
ccccatactttac

SEQ ID NO: 66365 - DNA, 13 bp, Artificial Sequence
  Oligonucleotide for detection of SNP TSC0017431
gtaaaggatgggg

SEQ ID NO: 66366 - DNA, 13 bp, Artificial Sequence
  Oligonucleotide for detection of SNP TSC0017431
ccccatcctttac

SEQ ID NO: 66367 - DNA, 13 bp, Artificial Sequence
  Oligonucleotide for detection of SNP TSC0017432
ttagagggtttty

SEQ ID NO: 66368 - DNA, 13 bp, Artificial Sequence
  Oligonucleotide for detection of SNP TSC0017432
raaaaccctctaa

SEQ ID NO: 66369 - DNA, 13 bp, Artificial Sequence
  Oligonucleotide for detection of SNP TSC0017432
ttagagagtttty

SEQ ID NO: 66370 - DNA, 13 bp, Artificial Sequence
  Oligonucleotide for detection of SNP TSC0017432
raaaactctctaa

SEQ ID NO: 66371 - DNA, 13 bp, Artificial Sequence
  Oligonucleotide for detection of SNP TSC0017434
tgagggagggaay

SEQ ID NO: 66372 - DNA, 13 bp, Artificial Sequence
  Oligonucleotide for detection of SNP TSC0017434
rttccctccctca

SEQ ID NO: 66373 - DNA, 13 bp, Artificial Sequence
  Oligonucleotide for detection of SNP TSC0017434
tgagggggggaay

SEQ ID NO: 66374 - DNA, 13 bp, Artificial Sequence
  Oligonucleotide for detection of SNP TSC0017434
rttccccccctca

SEQ ID NO: 66375 - DNA, 13 bp, Artificial Sequence
  Oligonucleotide for detection of SNP TSC0017435
ttgtgatgttagt

SEQ ID NO: 66376 - DNA, 13 bp, Artificial Sequence
  Oligonucleotide for detection of SNP TSC0017435
actaacatcacaa

SEQ ID NO: 66377 - DNA, 13 bp, Artificial Sequence
  Oligonucleotide for detection of SNP TSC0017435
ttgtgaggttagt

SEQ ID NO: 66378 - DNA, 13 bp, Artificial Sequence
  Oligonucleotide for detection of SNP TSC0017435
actaacctcacaa

SEQ ID NO: 66379 - DNA, 13 bp, Artificial Sequence
  Oligonucleotide for detection of SNP TSC0017435
ttgtgacgttagt

SEQ ID NO: 66380 - DNA, 13 bp, Artificial Sequence
  Oligonucleotide for detection of SNP TSC0017435
actaacgtcacaa

SEQ ID NO: 66381 - DNA, 13 bp, Artificial Sequence
  Oligonucleotide for detection of SNP TSC0017435
attgatgttatag

SEQ ID NO: 66382 - DNA, 13 bp, Artificial Sequence
  Oligonucleotide for detection of SNP TSC0017435
ctataacatcaat

SEQ ID NO: 66383 - DNA, 13 bp, Artificial Sequence
  Oligonucleotide for detection of SNP TSC0017435
attgattttatag

SEQ ID NO: 66384 - DNA, 13 bp, Artificial Sequence
  Oligonucleotide for detection of SNP TSC0017435
ctataaaatcaat

SEQ ID NO: 66385 - DNA, 13 bp, Artificial Sequence
  Oligonucleotide for detection of SNP TSC0017435
attgacgttatag

SEQ ID NO: 66386 - DNA, 13 bp, Artificial Sequence
  Oligonucleotide for detection of SNP TSC0017435
ctataacgtcaat

SEQ ID NO: 66387 - DNA, 13 bp, Artificial Sequence
  Oligonucleotide for detection of SNP TSC0017438
ttgttttgtttgy

SEQ ID NO: 66388 - DNA, 13 bp, Artificial Sequence
  Oligonucleotide for detection of SNP TSC0017438
rcaaacaaaacaa

SEQ ID NO: 66389 - DNA, 13 bp, Artificial Sequence
  Oligonucleotide for detection of SNP TSC0017438
ttgtttcgtttgy

SEQ ID NO: 66390 - DNA, 13 bp, Artificial Sequence
  Oligonucleotide for detection of SNP TSC0017438
rcaaacgaaacaa

SEQ ID NO: 66391 - DNA, 13 bp, Artificial Sequence
  Oligonucleotide for detection of SNP TSC0017438
ttgttttgttcgy

SEQ ID NO: 66392 - DNA, 13 bp, Artificial Sequence
  Oligonucleotide for detection of SNP TSC0017438
rcgaacaaaacaa

SEQ ID NO: 66393 - DNA, 13 bp, Artificial Sequence
  Oligonucleotide for detection of SNP TSC0017438
ttgtttcgttcgy

SEQ ID NO: 66394 - DNA, 13 bp, Artificial Sequence
  Oligonucleotide for detection of SNP TSC0017438
rcgaacgaaacaa

SEQ ID NO: 66395 - DNA, 13 bp, Artificial Sequence
  Oligonucleotide for detection of SNP TSC0017438
gtggatggggtag

SEQ ID NO: 66396 - DNA, 13 bp, Artificial Sequence
  Oligonucleotide for detection of SNP TSC0017438
ctaccccatccac

SEQ ID NO: 66397 - DNA, 13 bp, Artificial Sequence
  Oligonucleotide for detection of SNP TSC0017438
gtggatagggtag

SEQ ID NO: 66398 - DNA, 13 bp, Artificial Sequence
  Oligonucleotide for detection of SNP TSC0017438
ctaccctatccac

SEQ ID NO: 66399 - DNA, 13 bp, Artificial Sequence
  Oligonucleotide for detection of SNP TSC0017438
gcggatggggtag

SEQ ID NO: 66400 - DNA, 13 bp, Artificial Sequence
  Oligonucleotide for detection of SNP TSC0017438
ctaccccatccgc

SEQ ID NO: 66401 - DNA, 13 bp, Artificial Sequence
  Oligonucleotide for detection of SNP TSC0017438
gcggatagggtag

SEQ ID NO: 66402 - DNA, 13 bp, Artificial Sequence
  Oligonucleotide for detection of SNP TSC0017438
ctaccctatccgc

SEQ ID NO: 66403 - DNA, 13 bp, Artificial Sequence
  Oligonucleotide for detection of SNP TSC0017438
gtggacggggtag

SEQ ID NO: 66404 - DNA, 13 bp, Artificial Sequence
  Oligonucleotide for detection of SNP TSC0017438
ctaccccgtccac

SEQ ID NO: 66405 - DNA, 13 bp, Artificial Sequence
  Oligonucleotide for detection of SNP TSC0017438
gcggacggggtag

SEQ ID NO: 66406 - DNA, 13 bp, Artificial Sequence
  Oligonucleotide for detection of SNP TSC0017438
ctaccccgtccgc

SEQ ID NO: 66407 - DNA, 13 bp, Artificial Sequence
  Oligonucleotide for detection of SNP TSC0017440
tatgttatagtgy

SEQ ID NO: 66408 - DNA, 13 bp, Artificial Sequence
  Oligonucleotide for detection of SNP TSC0017440
rcactataacata

SEQ ID NO: 66409 - DNA, 13 bp, Artificial Sequence
  Oligonucleotide for detection of SNP TSC0017440
tatgttgtagtgy

SEQ ID NO: 66410 - DNA, 13 bp, Artificial Sequence
  Oligonucleotide for detection of SNP TSC0017440
rcactacaacata

SEQ ID NO: 66411 - DNA, 13 bp, Artificial Sequence
  Oligonucleotide for detection of SNP TSC0017440
tatgttatagcgy

SEQ ID NO: 66412 - DNA, 13 bp, Artificial Sequence
  Oligonucleotide for detection of SNP TSC0017440
rcgctataacata

SEQ ID NO: 66413 - DNA, 13 bp, Artificial Sequence
  Oligonucleotide for detection of SNP TSC0017440
tatgtcgtagtgy

SEQ ID NO: 66414 - DNA, 13 bp, Artificial Sequence
  Oligonucleotide for detection of SNP TSC0017440
rcactacgacata

SEQ ID NO: 66415 - DNA, 13 bp, Artificial Sequence
  Oligonucleotide for detection of SNP TSC0017440
tatgttgtagcgy

SEQ ID NO: 66416 - DNA, 13 bp, Artificial Sequence
  Oligonucleotide for detection of SNP TSC0017440
rcgctacaacata

SEQ ID NO: 66417 - DNA, 13 bp, Artificial Sequence
  Oligonucleotide for detection of SNP TSC0017440
tatgtcgtagcgy

SEQ ID NO: 66418 - DNA, 13 bp, Artificial Sequence
  Oligonucleotide for detection of SNP TSC0017440
rcgctacgacata

SEQ ID NO: 66419 - DNA, 13 bp, Artificial Sequence
  Oligonucleotide for detection of SNP TSC0017440
gtgttgtgatatg

SEQ ID NO: 66420 - DNA, 13 bp, Artificial Sequence
  Oligonucleotide for detection of SNP TSC0017440
catatcacaacac

SEQ ID NO: 66421 - DNA, 13 bp, Artificial Sequence
  Oligonucleotide for detection of SNP TSC0017440
gcgttgtgatatg

SEQ ID NO: 66422 - DNA, 13 bp, Artificial Sequence
  Oligonucleotide for detection of SNP TSC0017440
catatcacaacgc

SEQ ID NO: 66423 - DNA, 13 bp, Artificial Sequence
  Oligonucleotide for detection of SNP TSC0017440
gtgttgcgatatg

SEQ ID NO: 66424 - DNA, 13 bp, Artificial Sequence
  Oligonucleotide for detection of SNP TSC0017440
catatcgcaacac

SEQ ID NO: 66425 - DNA, 13 bp, Artificial Sequence
  Oligonucleotide for detection of SNP TSC0017440
gcgttgcgatatg

SEQ ID NO: 66426 - DNA, 13 bp, Artificial Sequence
  Oligonucleotide for detection of SNP TSC0017440
catatcgcaacgc

SEQ ID NO: 66427 - DNA, 13 bp, Artificial Sequence
  Oligonucleotide for detection of SNP TSC0017443
attggagtagtat

SEQ ID NO: 66428 - DNA, 13 bp, Artificial Sequence
  Oligonucleotide for detection of SNP TSC0017443
atactactccaat

SEQ ID NO: 66429 - DNA, 13 bp, Artificial Sequence
  Oligonucleotide for detection of SNP TSC0017443
attggaatagtat

SEQ ID NO: 66430 - DNA, 13 bp, Artificial Sequence
  Oligonucleotide for detection of SNP TSC0017443
atactattccaat

SEQ ID NO: 66431 - DNA, 13 bp, Artificial Sequence
  Oligonucleotide for detection of SNP TSC0017455
gttagagaggtag

SEQ ID NO: 66432 - DNA, 13 bp, Artificial Sequence
  Oligonucleotide for detection of SNP TSC0017455
ctacctctctaac

SEQ ID NO: 66433 - DNA, 13 bp, Artificial Sequence
  Oligonucleotide for detection of SNP TSC0017455
gttagaaaggtag

SEQ ID NO: 66434 - DNA, 13 bp, Artificial Sequence
  Oligonucleotide for detection of SNP TSC0017455
ctacctttctaac

SEQ ID NO: 66435 - DNA, 13 bp, Artificial Sequence
  Oligonucleotide for detection of SNP TSC0017456
ttgttagagaggy

SEQ ID NO: 66436 - DNA, 13 bp, Artificial Sequence
  Oligonucleotide for detection of SNP TSC0017456
rcctctctaacaa

SEQ ID NO: 66437 - DNA, 13 bp, Artificial Sequence
  Oligonucleotide for detection of SNP TSC0017456
ttgttaaagaggy

SEQ ID NO: 66438 - DNA, 13 bp, Artificial Sequence
  Oligonucleotide for detection of SNP TSC0017456
rcctctttaacaa

SEQ ID NO: 66439 - DNA, 13 bp, Artificial Sequence
  Oligonucleotide for detection of SNP TSC0017457
tttaagggttttg

SEQ ID NO: 66440 - DNA, 13 bp, Artificial Sequence
  Oligonucleotide for detection of SNP TSC0017457
caaaacccttaaa

SEQ ID NO: 66441 - DNA, 13 bp, Artificial Sequence
  Oligonucleotide for detection of SNP TSC0017457
tttaagtgttttg

SEQ ID NO: 66442 - DNA, 13 bp, Artificial Sequence
  Oligonucleotide for detection of SNP TSC0017457
caaaacacttaaa

SEQ ID NO: 66443 - DNA, 13 bp, Artificial Sequence
  Oligonucleotide for detection of SNP TSC0017457
tagaatttttgga

SEQ ID NO: 66444 - DNA, 13 bp, Artificial Sequence
  Oligonucleotide for detection of SNP TSC0017457
tccaaaaattcta

SEQ ID NO: 66445 - DNA, 13 bp, Artificial Sequence
  Oligonucleotide for detection of SNP TSC0017457
tagaatatttgga

SEQ ID NO: 66446 - DNA, 13 bp, Artificial Sequence
  Oligonucleotide for detection of SNP TSC0017457
tccaaatattcta

SEQ ID NO: 66447 - DNA, 13 bp, Artificial Sequence
  Oligonucleotide for detection of SNP TSC0017458
tagatggaaagtt

SEQ ID NO: 66448 - DNA, 13 bp, Artificial Sequence
  Oligonucleotide for detection of SNP TSC0017458
aactttccatcta

SEQ ID NO: 66449 - DNA, 13 bp, Artificial Sequence
  Oligonucleotide for detection of SNP TSC0017458
tagatgtaaagtt

SEQ ID NO: 66450 - DNA, 13 bp, Artificial Sequence
  Oligonucleotide for detection of SNP TSC0017458
aactttacatcta

SEQ ID NO: 66451 - DNA, 13 bp, Artificial Sequence
  Oligonucleotide for detection of SNP TSC0017460
ttgtgtaggttty

SEQ ID NO: 66452 - DNA, 13 bp, Artificial Sequence
  Oligonucleotide for detection of SNP TSC0017460
raaacctacacaa

SEQ ID NO: 66453 - DNA, 13 bp, Artificial Sequence
  Oligonucleotide for detection of SNP TSC0017460
ttgtgttggttty

SEQ ID NO: 66454 - DNA, 13 bp, Artificial Sequence
  Oligonucleotide for detection of SNP TSC0017460
raaaccaacacaa

SEQ ID NO: 66455 - DNA, 13 bp, Artificial Sequence
  Oligonucleotide for detection of SNP TSC0017460
ttgtgtcggttty

SEQ ID NO: 66456 - DNA, 13 bp, Artificial Sequence
  Oligonucleotide for detection of SNP TSC0017460
raaaccgacacaa

SEQ ID NO: 66457 - DNA, 13 bp, Artificial Sequence
  Oligonucleotide for detection of SNP TSC0017460
gaagtttgtatag

SEQ ID NO: 66458 - DNA, 13 bp, Artificial Sequence
  Oligonucleotide for detection of SNP TSC0017460
ctatacaaacttc

SEQ ID NO: 66459 - DNA, 13 bp, Artificial Sequence
  Oligonucleotide for detection of SNP TSC0017460
gaagttggtatag

SEQ ID NO: 66460 - DNA, 13 bp, Artificial Sequence
  Oligonucleotide for detection of SNP TSC0017460
ctataccaacttc

SEQ ID NO: 66461 - DNA, 13 bp, Artificial Sequence
  Oligonucleotide for detection of SNP TSC0017460
gaagtcggtatag

SEQ ID NO: 66462 - DNA, 13 bp, Artificial Sequence
  Oligonucleotide for detection of SNP TSC0017460
ctataccgacttc

SEQ ID NO: 66463 - DNA, 13 bp, Artificial Sequence
  Oligonucleotide for detection of SNP TSC0017468
ggattaagagtaa

SEQ ID NO: 66464 - DNA, 13 bp, Artificial Sequence
  Oligonucleotide for detection of SNP TSC0017468
ttactcttaatcc

SEQ ID NO: 66465 - DNA, 13 bp, Artificial Sequence
  Oligonucleotide for detection of SNP TSC0017468
ggattaggagtaa

SEQ ID NO: 66466 - DNA, 13 bp, Artificial Sequence
  Oligonucleotide for detection of SNP TSC0017468
ttactcctaatcc

SEQ ID NO: 66467 - DNA, 13 bp, Artificial Sequence
  Oligonucleotide for detection of SNP TSC0017469
ttttggtgtattt

SEQ ID NO: 66468 - DNA, 13 bp, Artificial Sequence
  Oligonucleotide for detection of SNP TSC0017469
aaatacaccaaaa

SEQ ID NO: 66469 - DNA, 13 bp, Artificial Sequence
  Oligonucleotide for detection of SNP TSC0017469
ttttggcgtattt

SEQ ID NO: 66470 - DNA, 13 bp, Artificial Sequence
  Oligonucleotide for detection of SNP TSC0017469
aaatacgccaaaa

SEQ ID NO: 66471 - DNA, 13 bp, Artificial Sequence
  Oligonucleotide for detection of SNP TSC0017469
aggtatgttaggg

SEQ ID NO: 66472 - DNA, 13 bp, Artificial Sequence
  Oligonucleotide for detection of SNP TSC0017469
ccctaacatacct

SEQ ID NO: 66473 - DNA, 13 bp, Artificial Sequence
  Oligonucleotide for detection of SNP TSC0017469
aggtatattaggg

SEQ ID NO: 66474 - DNA, 13 bp, Artificial Sequence
  Oligonucleotide for detection of SNP TSC0017469
ccctaatatacct

SEQ ID NO: 66475 - DNA, 13 bp, Artificial Sequence
  Oligonucleotide for detection of SNP TSC0017469
aggtacgttaggg

SEQ ID NO: 66476 - DNA, 13 bp, Artificial Sequence
  Oligonucleotide for detection of SNP TSC0017469
ccctaacgtacct

SEQ ID NO: 66477 - DNA, 13 bp, Artificial Sequence
  Oligonucleotide for detection of SNP TSC0017470
gaaggtgtgatgt

SEQ ID NO: 66478 - DNA, 13 bp, Artificial Sequence
  Oligonucleotide for detection of SNP TSC0017470
acatcacaccttc

SEQ ID NO: 66479 - DNA, 13 bp, Artificial Sequence
  Oligonucleotide for detection of SNP TSC0017470
gaaggtatgatgt

SEQ ID NO: 66480 - DNA, 13 bp, Artificial Sequence
  Oligonucleotide for detection of SNP TSC0017470
acatcataccttc

SEQ ID NO: 66481 - DNA, 13 bp, Artificial Sequence
  Oligonucleotide for detection of SNP TSC0017471
tgttgttgggtag

SEQ ID NO: 66482 - DNA, 13 bp, Artificial Sequence
  Oligonucleotide for detection of SNP TSC0017471
ctacccaacaaca

SEQ ID NO: 66483 - DNA, 13 bp, Artificial Sequence
  Oligonucleotide for detection of SNP TSC0017471
cgttgttgggtag

SEQ ID NO: 66484 - DNA, 13 bp, Artificial Sequence
  Oligonucleotide for detection of SNP TSC0017471
ctacccaacaacg

SEQ ID NO: 66485 - DNA, 13 bp, Artificial Sequence
  Oligonucleotide for detection of SNP TSC0017471
tgttgtcgggtag

SEQ ID NO: 66486 - DNA, 13 bp, Artificial Sequence
  Oligonucleotide for detection of SNP TSC0017471
ctacccgacaaca

SEQ ID NO: 66487 - DNA, 13 bp, Artificial Sequence
  Oligonucleotide for detection of SNP TSC0017471
cgttgtcgggtag

SEQ ID NO: 66488 - DNA, 13 bp, Artificial Sequence
  Oligonucleotide for detection of SNP TSC0017471
ctacccgacaacg

SEQ ID NO: 66489 - DNA, 13 bp, Artificial Sequence
  Oligonucleotide for detection of SNP TSC0017471
ttgtttgatagtg

SEQ ID NO: 66490 - DNA, 13 bp, Artificial Sequence
  Oligonucleotide for detection of SNP TSC0017471
cactatcaaacaa

SEQ ID NO: 66491 - DNA, 13 bp, Artificial Sequence
  Oligonucleotide for detection of SNP TSC0017471
ttgtttaatagtg

SEQ ID NO: 66492 - DNA, 13 bp, Artificial Sequence
  Oligonucleotide for detection of SNP TSC0017471
cactattaaacaa

SEQ ID NO: 66493 - DNA, 13 bp, Artificial Sequence
  Oligonucleotide for detection of SNP TSC0017471
ttgttcgatagtg

SEQ ID NO: 66494 - DNA, 13 bp, Artificial Sequence
  Oligonucleotide for detection of SNP TSC0017471
cactatcgaacaa

SEQ ID NO: 66495 - DNA, 13 bp, Artificial Sequence
  Oligonucleotide for detection of SNP TSC0017471
ttgtttaatagcg

SEQ ID NO: 66496 - DNA, 13 bp, Artificial Sequence
  Oligonucleotide for detection of SNP TSC0017471
cgctattaaacaa

SEQ ID NO: 66497 - DNA, 13 bp, Artificial Sequence
  Oligonucleotide for detection of SNP TSC0017471
ttgtttgatagcg

SEQ ID NO: 66498 - DNA, 13 bp, Artificial Sequence
  Oligonucleotide for detection of SNP TSC0017471
cgctatcaaacaa

SEQ ID NO: 66499 - DNA, 13 bp, Artificial Sequence
  Oligonucleotide for detection of SNP TSC0017471
ttgttcgatagcg

SEQ ID NO: 66500 - DNA, 13 bp, Artificial Sequence
  Oligonucleotide for detection of SNP TSC0017471
cgctatcgaacaa

SEQ ID NO: 66501 - DNA, 13 bp, Artificial Sequence
  Oligonucleotide for detection of SNP TSC0017472
gtgttttgtgttg

SEQ ID NO: 66502 - DNA, 13 bp, Artificial Sequence
  Oligonucleotide for detection of SNP TSC0017472
caacacaaaacac

SEQ ID NO: 66503 - DNA, 13 bp, Artificial Sequence
  Oligonucleotide for detection of SNP TSC0017472
gtgtttcgtgttg

SEQ ID NO: 66504 - DNA, 13 bp, Artificial Sequence
  Oligonucleotide for detection of SNP TSC0017472
caacacgaaacac

SEQ ID NO: 66505 - DNA, 13 bp, Artificial Sequence
  Oligonucleotide for detection of SNP TSC0017472
tagtatggggtay

SEQ ID NO: 66506 - DNA, 13 bp, Artificial Sequence
  Oligonucleotide for detection of SNP TSC0017472
rtaccccatacta

SEQ ID NO: 66507 - DNA, 13 bp, Artificial Sequence
  Oligonucleotide for detection of SNP TSC0017472
tagtatagggtay

SEQ ID NO: 66508 - DNA, 13 bp, Artificial Sequence
  Oligonucleotide for detection of SNP TSC0017472
rtaccctatacta

SEQ ID NO: 66509 - DNA, 13 bp, Artificial Sequence
  Oligonucleotide for detection of SNP TSC0017472
tagtacggggtay

SEQ ID NO: 66510 - DNA, 13 bp, Artificial Sequence
  Oligonucleotide for detection of SNP TSC0017472
rtaccccgtacta

SEQ ID NO: 66511 - DNA, 13 bp, Artificial Sequence
  Oligonucleotide for detection of SNP TSC0017473
aggataaaggggg

SEQ ID NO: 66512 - DNA, 13 bp, Artificial Sequence
  Oligonucleotide for detection of SNP TSC0017473
ccccctttatcct

SEQ ID NO: 66513 - DNA, 13 bp, Artificial Sequence
  Oligonucleotide for detection of SNP TSC0017473
aggatagaggggg

SEQ ID NO: 66514 - DNA, 13 bp, Artificial Sequence
  Oligonucleotide for detection of SNP TSC0017473
ccccctctatcct

SEQ ID NO: 66515 - DNA, 13 bp, Artificial Sequence
  Oligonucleotide for detection of SNP TSC0017474
tagagatgggaaa

SEQ ID NO: 66516 - DNA, 13 bp, Artificial Sequence
  Oligonucleotide for detection of SNP TSC0017474
tttcccatctcta

SEQ ID NO: 66517 - DNA, 13 bp, Artificial Sequence
  Oligonucleotide for detection of SNP TSC0017474
tagagacgggaaa

SEQ ID NO: 66518 - DNA, 13 bp, Artificial Sequence
  Oligonucleotide for detection of SNP TSC0017474
tttcccgtctcta

SEQ ID NO: 66519 - DNA, 13 bp, Artificial Sequence
  Oligonucleotide for detection of SNP TSC0017475
gagttatgaggaa

SEQ ID NO: 66520 - DNA, 13 bp, Artificial Sequence
  Oligonucleotide for detection of SNP TSC0017475
ttcctcataactc

SEQ ID NO: 66521 - DNA, 13 bp, Artificial Sequence
  Oligonucleotide for detection of SNP TSC0017475
gagttacgaggaa

SEQ ID NO: 66522 - DNA, 13 bp, Artificial Sequence
  Oligonucleotide for detection of SNP TSC0017475
ttcctcgtaactc

SEQ ID NO: 66523 - DNA, 13 bp, Artificial Sequence
  Oligonucleotide for detection of SNP TSC0017475
ttttttatagtty

SEQ ID NO: 66524 - DNA, 13 bp, Artificial Sequence
  Oligonucleotide for detection of SNP TSC0017475
raactataaaaaa

SEQ ID NO: 66525 - DNA, 13 bp, Artificial Sequence
  Oligonucleotide for detection of SNP TSC0017475
tttttcgtagtty

SEQ ID NO: 66526 - DNA, 13 bp, Artificial Sequence
  Oligonucleotide for detection of SNP TSC0017475
raactacgaaaaa

SEQ ID NO: 66527 - DNA, 13 bp, Artificial Sequence
  Oligonucleotide for detection of SNP TSC0017476
attgatagtttty

SEQ ID NO: 66528 - DNA, 13 bp, Artificial Sequence
  Oligonucleotide for detection of SNP TSC0017476
raaaactatcaat

SEQ ID NO: 66529 - DNA, 13 bp, Artificial Sequence
  Oligonucleotide for detection of SNP TSC0017476
attgatggtttty

SEQ ID NO: 66530 - DNA, 13 bp, Artificial Sequence
  Oligonucleotide for detection of SNP TSC0017476
raaaaccatcaat

SEQ ID NO: 66531 - DNA, 13 bp, Artificial Sequence
  Oligonucleotide for detection of SNP TSC0017476
attgacggtttty

SEQ ID NO: 66532 - DNA, 13 bp, Artificial Sequence
  Oligonucleotide for detection of SNP TSC0017476
raaaaccgtcaat

SEQ ID NO: 66533 - DNA, 13 bp, Artificial Sequence
  Oligonucleotide for detection of SNP TSC0017476
gaaggttgttaat

SEQ ID NO: 66534 - DNA, 13 bp, Artificial Sequence
  Oligonucleotide for detection of SNP TSC0017476
attaacaaccttc

SEQ ID NO: 66535 - DNA, 13 bp, Artificial Sequence
  Oligonucleotide for detection of SNP TSC0017476
gaaggtcgttaat

SEQ ID NO: 66536 - DNA, 13 bp, Artificial Sequence
  Oligonucleotide for detection of SNP TSC0017476
attaacgaccttc

SEQ ID NO: 66537 - DNA, 13 bp, Artificial Sequence
  Oligonucleotide for detection of SNP TSC0017477
ttgttagtattay

SEQ ID NO: 66538 - DNA, 13 bp, Artificial Sequence
  Oligonucleotide for detection of SNP TSC0017477
rtaatactaacaa

SEQ ID NO: 66539 - DNA, 13 bp, Artificial Sequence
  Oligonucleotide for detection of SNP TSC0017477
ttgttaatattay

SEQ ID NO: 66540 - DNA, 13 bp, Artificial Sequence
  Oligonucleotide for detection of SNP TSC0017477
rtaatattaacaa

SEQ ID NO: 66541 - DNA, 13 bp, Artificial Sequence
  Oligonucleotide for detection of SNP TSC0017481
ttttttttgaggt

SEQ ID NO: 66542 - DNA, 13 bp, Artificial Sequence
  Oligonucleotide for detection of SNP TSC0017481
acctcaaaaaaaa

SEQ ID NO: 66543 - DNA, 13 bp, Artificial Sequence
  Oligonucleotide for detection of SNP TSC0017481
ttttttatgaggt

SEQ ID NO: 66544 - DNA, 13 bp, Artificial Sequence
  Oligonucleotide for detection of SNP TSC0017481
acctcataaaaaa

SEQ ID NO: 66545 - DNA, 13 bp, Artificial Sequence
  Oligonucleotide for detection of SNP TSC0017482
gttgatattgtag

SEQ ID NO: 66546 - DNA, 13 bp, Artificial Sequence
  Oligonucleotide for detection of SNP TSC0017482
ctacaatatcaac

SEQ ID NO: 66547 - DNA, 13 bp, Artificial Sequence
  Oligonucleotide for detection of SNP TSC0017482
gttgatgttgtag

SEQ ID NO: 66548 - DNA, 13 bp, Artificial Sequence
  Oligonucleotide for detection of SNP TSC0017482
ctacaacatcaac

SEQ ID NO: 66549 - DNA, 13 bp, Artificial Sequence
  Oligonucleotide for detection of SNP TSC0017482
gttgacgttgtag

SEQ ID NO: 66550 - DNA, 13 bp, Artificial Sequence
  Oligonucleotide for detection of SNP TSC0017482
ctacaacgtcaac

SEQ ID NO: 66551 - DNA, 13 bp, Artificial Sequence
  Oligonucleotide for detection of SNP TSC0017482
ttataatgttagy

SEQ ID NO: 66552 - DNA, 13 bp, Artificial Sequence
  Oligonucleotide for detection of SNP TSC0017482
rctaacattataa

SEQ ID NO: 66553 - DNA, 13 bp, Artificial Sequence
  Oligonucleotide for detection of SNP TSC0017482
ttataacgttagy

SEQ ID NO: 66554 - DNA, 13 bp, Artificial Sequence
  Oligonucleotide for detection of SNP TSC0017482
rctaacgttataa

SEQ ID NO: 66555 - DNA, 13 bp, Artificial Sequence
  Oligonucleotide for detection of SNP TSC0017483
tatttatgtttty

SEQ ID NO: 66556 - DNA, 13 bp, Artificial Sequence
  Oligonucleotide for detection of SNP TSC0017483
raaaacataaata

SEQ ID NO: 66557 - DNA, 13 bp, Artificial Sequence
  Oligonucleotide for detection of SNP TSC0017483
tatttacgtttty

SEQ ID NO: 66558 - DNA, 13 bp, Artificial Sequence
  Oligonucleotide for detection of SNP TSC0017483
raaaacgtaaata

SEQ ID NO: 66559 - DNA, 13 bp, Artificial Sequence
  Oligonucleotide for detection of SNP TSC0017483
gagagtgtggatg

SEQ ID NO: 66560 - DNA, 13 bp, Artificial Sequence
  Oligonucleotide for detection of SNP TSC0017483
catccacactctc

SEQ ID NO: 66561 - DNA, 13 bp, Artificial Sequence
  Oligonucleotide for detection of SNP TSC0017483
gagagtatggatg

SEQ ID NO: 66562 - DNA, 13 bp, Artificial Sequence
  Oligonucleotide for detection of SNP TSC0017483
catccatactctc

SEQ ID NO: 66563 - DNA, 13 bp, Artificial Sequence
  Oligonucleotide for detection of SNP TSC0017483
gagagcgtggatg

SEQ ID NO: 66564 - DNA, 13 bp, Artificial Sequence
  Oligonucleotide for detection of SNP TSC0017483
catccacgctctc

SEQ ID NO: 66565 - DNA, 13 bp, Artificial Sequence
  Oligonucleotide for detection of SNP TSC0017484
tggtagtgttaaa

SEQ ID NO: 66566 - DNA, 13 bp, Artificial Sequence
  Oligonucleotide for detection of SNP TSC0017484
tttaacactacca

SEQ ID NO: 66567 - DNA, 13 bp, Artificial Sequence
  Oligonucleotide for detection of SNP TSC0017484
tggtagcgttaaa

SEQ ID NO: 66568 - DNA, 13 bp, Artificial Sequence
  Oligonucleotide for detection of SNP TSC0017484
tttaacgctacca

SEQ ID NO: 66569 - DNA, 13 bp, Artificial Sequence
  Oligonucleotide for detection of SNP TSC0017484
tttggtgttgtta

SEQ ID NO: 66570 - DNA, 13 bp, Artificial Sequence
  Oligonucleotide for detection of SNP TSC0017484
taacaacaccaaa

SEQ ID NO: 66571 - DNA, 13 bp, Artificial Sequence
  Oligonucleotide for detection of SNP TSC0017484
tttggtattgtta

SEQ ID NO: 66572 - DNA, 13 bp, Artificial Sequence
  Oligonucleotide for detection of SNP TSC0017484
taacaataccaaa

SEQ ID NO: 66573 - DNA, 13 bp, Artificial Sequence
  Oligonucleotide for detection of SNP TSC0017484
tttggcgttgtta

SEQ ID NO: 66574 - DNA, 13 bp, Artificial Sequence
  Oligonucleotide for detection of SNP TSC0017484
taacaacgccaaa

SEQ ID NO: 66575 - DNA, 13 bp, Artificial Sequence
  Oligonucleotide for detection of SNP TSC0017488
agtgttgtgaaga

SEQ ID NO: 66576 - DNA, 13 bp, Artificial Sequence
  Oligonucleotide for detection of SNP TSC0017488
tcttcacaacact

SEQ ID NO: 66577 - DNA, 13 bp, Artificial Sequence
  Oligonucleotide for detection of SNP TSC0017488
agtgttatgaaga

SEQ ID NO: 66578 - DNA, 13 bp, Artificial Sequence
  Oligonucleotide for detection of SNP TSC0017488
tcttcataacact

SEQ ID NO: 66579 - DNA, 13 bp, Artificial Sequence
  Oligonucleotide for detection of SNP TSC0017489
tgtgggtgggtgg

SEQ ID NO: 66580 - DNA, 13 bp, Artificial Sequence
  Oligonucleotide for detection of SNP TSC0017489
ccacccacccaca

SEQ ID NO: 66581 - DNA, 13 bp, Artificial Sequence
  Oligonucleotide for detection of SNP TSC0017489
cgtgggtgggtgg

SEQ ID NO: 66582 - DNA, 13 bp, Artificial Sequence
  Oligonucleotide for detection of SNP TSC0017489
ccacccacccacg

SEQ ID NO: 66583 - DNA, 13 bp, Artificial Sequence
  Oligonucleotide for detection of SNP TSC0017489
tgcgggtgggtgg

SEQ ID NO: 66584 - DNA, 13 bp, Artificial Sequence
  Oligonucleotide for detection of SNP TSC0017489
ccacccacccgca

SEQ ID NO: 66585 - DNA, 13 bp, Artificial Sequence
  Oligonucleotide for detection of SNP TSC0017489
tgtgggcgggtgg

SEQ ID NO: 66586 - DNA, 13 bp, Artificial Sequence
  Oligonucleotide for detection of SNP TSC0017489
ccacccgcccaca

SEQ ID NO: 66587 - DNA, 13 bp, Artificial Sequence
  Oligonucleotide for detection of SNP TSC0017489
tgtgggtgggcgg

SEQ ID NO: 66588 - DNA, 13 bp, Artificial Sequence
  Oligonucleotide for detection of SNP TSC0017489
ccgcccacccaca

SEQ ID NO: 66589 - DNA, 13 bp, Artificial Sequence
  Oligonucleotide for detection of SNP TSC0017489
cgcgggtgggtgg

SEQ ID NO: 66590 - DNA, 13 bp, Artificial Sequence
  Oligonucleotide for detection of SNP TSC0017489
ccacccacccgcg

SEQ ID NO: 66591 - DNA, 13 bp, Artificial Sequence
  Oligonucleotide for detection of SNP TSC0017489
cgtgggtgggcgg

SEQ ID NO: 66592 - DNA, 13 bp, Artificial Sequence
  Oligonucleotide for detection of SNP TSC0017489
ccgcccacccacg

SEQ ID NO: 66593 - DNA, 13 bp, Artificial Sequence
  Oligonucleotide for detection of SNP TSC0017489
cgtgggcgggtgg

SEQ ID NO: 66594 - DNA, 13 bp, Artificial Sequence
  Oligonucleotide for detection of SNP TSC0017489
ccacccgcccacg

SEQ ID NO: 66595 - DNA, 13 bp, Artificial Sequence
  Oligonucleotide for detection of SNP TSC0017489
tgcgggtgggcgg

SEQ ID NO: 66596 - DNA, 13 bp, Artificial Sequence
  Oligonucleotide for detection of SNP TSC0017489
ccgcccacccgca

SEQ ID NO: 66597 - DNA, 13 bp, Artificial Sequence
  Oligonucleotide for detection of SNP TSC0017489
cgcgggtgggcgg

SEQ ID NO: 66598 - DNA, 13 bp, Artificial Sequence
  Oligonucleotide for detection of SNP TSC0017489
ccgcccacccgcg

SEQ ID NO: 66599 - DNA, 13 bp, Artificial Sequence
  Oligonucleotide for detection of SNP TSC0017489
tgcgggcgggtgg

SEQ ID NO: 66600 - DNA, 13 bp, Artificial Sequence
  Oligonucleotide for detection of SNP TSC0017489
ccacccgcccgca

SEQ ID NO: 66601 - DNA, 13 bp, Artificial Sequence
  Oligonucleotide for detection of SNP TSC0017489
tgtgggcgggcgg

SEQ ID NO: 66602 - DNA, 13 bp, Artificial Sequence
  Oligonucleotide for detection of SNP TSC0017489
ccgcccgcccaca

SEQ ID NO: 66603 - DNA, 13 bp, Artificial Sequence
  Oligonucleotide for detection of SNP TSC0017489
cgcgggcgggtgg

SEQ ID NO: 66604 - DNA, 13 bp, Artificial Sequence
  Oligonucleotide for detection of SNP TSC0017489
ccacccgcccgcg

SEQ ID NO: 66605 - DNA, 13 bp, Artificial Sequence
  Oligonucleotide for detection of SNP TSC0017489
cgtgggcgggcgg

SEQ ID NO: 66606 - DNA, 13 bp, Artificial Sequence
  Oligonucleotide for detection of SNP TSC0017489
ccgcccgcccacg

SEQ ID NO: 66607 - DNA, 13 bp, Artificial Sequence
  Oligonucleotide for detection of SNP TSC0017489
tgcgggcgggcgg

SEQ ID NO: 66608 - DNA, 13 bp, Artificial Sequence
  Oligonucleotide for detection of SNP TSC0017489
ccgcccgcccgca

SEQ ID NO: 66609 - DNA, 13 bp, Artificial Sequence
  Oligonucleotide for detection of SNP TSC0017489
cgcgggcgggcgg

SEQ ID NO: 66610 - DNA, 13 bp, Artificial Sequence
  Oligonucleotide for detection of SNP TSC0017489
ccgcccgcccgcg

SEQ ID NO: 66611 - DNA, 13 bp, Artificial Sequence
  Oligonucleotide for detection of SNP TSC0017489
ttgtttgtttgtg

SEQ ID NO: 66612 - DNA, 13 bp, Artificial Sequence
  Oligonucleotide for detection of SNP TSC0017489
cacaaacaaacaa

SEQ ID NO: 66613 - DNA, 13 bp, Artificial Sequence
  Oligonucleotide for detection of SNP TSC0017489
ttgtttatttgtg

SEQ ID NO: 66614 - DNA, 13 bp, Artificial Sequence
  Oligonucleotide for detection of SNP TSC0017489
cacaaataaacaa

SEQ ID NO: 66615 - DNA, 13 bp, Artificial Sequence
  Oligonucleotide for detection of SNP TSC0017489
tcgtttgtttgtg

SEQ ID NO: 66616 - DNA, 13 bp, Artificial Sequence
  Oligonucleotide for detection of SNP TSC0017489
cacaaacaaacga

SEQ ID NO: 66617 - DNA, 13 bp, Artificial Sequence
  Oligonucleotide for detection of SNP TSC0017489
tcgtttatttgtg

SEQ ID NO: 66618 - DNA, 13 bp, Artificial Sequence
  Oligonucleotide for detection of SNP TSC0017489
cacaaataaacga

SEQ ID NO: 66619 - DNA, 13 bp, Artificial Sequence
  Oligonucleotide for detection of SNP TSC0017489
ttgttcgtttgtg

SEQ ID NO: 66620 - DNA, 13 bp, Artificial Sequence
  Oligonucleotide for detection of SNP TSC0017489
cacaaacgaacaa

SEQ ID NO: 66621 - DNA, 13 bp, Artificial Sequence
  Oligonucleotide for detection of SNP TSC0017489
ttgtttattcgtg

SEQ ID NO: 66622 - DNA, 13 bp, Artificial Sequence
  Oligonucleotide for detection of SNP TSC0017489
cacgaataaacaa

SEQ ID NO: 66623 - DNA, 13 bp, Artificial Sequence
  Oligonucleotide for detection of SNP TSC0017489
ttgtttgttcgtg

SEQ ID NO: 66624 - DNA, 13 bp, Artificial Sequence
  Oligonucleotide for detection of SNP TSC0017489
cacgaacaaacaa

SEQ ID NO: 66625 - DNA, 13 bp, Artificial Sequence
  Oligonucleotide for detection of SNP TSC0017489
ttgtttatttgcg

SEQ ID NO: 66626 - DNA, 13 bp, Artificial Sequence
  Oligonucleotide for detection of SNP TSC0017489
cgcaaataaacaa

SEQ ID NO: 66627 - DNA, 13 bp, Artificial Sequence
  Oligonucleotide for detection of SNP TSC0017489
ttgtttgtttgcg

SEQ ID NO: 66628 - DNA, 13 bp, Artificial Sequence
  Oligonucleotide for detection of SNP TSC0017489
cgcaaacaaacaa

SEQ ID NO: 66629 - DNA, 13 bp, Artificial Sequence
  Oligonucleotide for detection of SNP TSC0017489
tcgtttattcgtg

SEQ ID NO: 66630 - DNA, 13 bp, Artificial Sequence
  Oligonucleotide for detection of SNP TSC0017489
cacgaataaacga

SEQ ID NO: 66631 - DNA, 13 bp, Artificial Sequence
  Oligonucleotide for detection of SNP TSC0017489
tcgttcgtttgtg

SEQ ID NO: 66632 - DNA, 13 bp, Artificial Sequence
  Oligonucleotide for detection of SNP TSC0017489
cacaaacgaacga

SEQ ID NO: 66633 - DNA, 13 bp, Artificial Sequence
  Oligonucleotide for detection of SNP TSC0017489
tcgtttatttgcg

SEQ ID NO: 66634 - DNA, 13 bp, Artificial Sequence
  Oligonucleotide for detection of SNP TSC0017489
cgcaaataaacga

SEQ ID NO: 66635 - DNA, 13 bp, Artificial Sequence
  Oligonucleotide for detection of SNP TSC0017489
tcgtttgttcgtg

SEQ ID NO: 66636 - DNA, 13 bp, Artificial Sequence
  Oligonucleotide for detection of SNP TSC0017489
cacgaacaaacga

SEQ ID NO: 66637 - DNA, 13 bp, Artificial Sequence
  Oligonucleotide for detection of SNP TSC0017489
ttgtttattcgcg

SEQ ID NO: 66638 - DNA, 13 bp, Artificial Sequence
  Oligonucleotide for detection of SNP TSC0017489
cgcgaataaacaa

SEQ ID NO: 66639 - DNA, 13 bp, Artificial Sequence
  Oligonucleotide for detection of SNP TSC0017489
tcgtttgtttgcg

SEQ ID NO: 66640 - DNA, 13 bp, Artificial Sequence
  Oligonucleotide for detection of SNP TSC0017489
cgcaaacaaacga

SEQ ID NO: 66641 - DNA, 13 bp, Artificial Sequence
  Oligonucleotide for detection of SNP TSC0017489
tcgtttattcgcg

SEQ ID NO: 66642 - DNA, 13 bp, Artificial Sequence
  Oligonucleotide for detection of SNP TSC0017489
cgcgaataaacga

SEQ ID NO: 66643 - DNA, 13 bp, Artificial Sequence
  Oligonucleotide for detection of SNP TSC0017489
ttgttcgttcgtg

SEQ ID NO: 66644 - DNA, 13 bp, Artificial Sequence
  Oligonucleotide for detection of SNP TSC0017489
cacgaacgaacaa

SEQ ID NO: 66645 - DNA, 13 bp, Artificial Sequence
  Oligonucleotide for detection of SNP TSC0017489
ttgttcgtttgcg

SEQ ID NO: 66646 - DNA, 13 bp, Artificial Sequence
  Oligonucleotide for detection of SNP TSC0017489
cgcaaacgaacaa

SEQ ID NO: 66647 - DNA, 13 bp, Artificial Sequence
  Oligonucleotide for detection of SNP TSC0017489
ttgtttgttcgcg

SEQ ID NO: 66648 - DNA, 13 bp, Artificial Sequence
  Oligonucleotide for detection of SNP TSC0017489
cgcgaacaaacaa

SEQ ID NO: 66649 - DNA, 13 bp, Artificial Sequence
  Oligonucleotide for detection of SNP TSC0017489
tcgttcgttcgtg

SEQ ID NO: 66650 - DNA, 13 bp, Artificial Sequence
  Oligonucleotide for detection of SNP TSC0017489
cacgaacgaacga

SEQ ID NO: 66651 - DNA, 13 bp, Artificial Sequence
  Oligonucleotide for detection of SNP TSC0017489
tcgttcgtttgcg

SEQ ID NO: 66652 - DNA, 13 bp, Artificial Sequence
  Oligonucleotide for detection of SNP TSC0017489
cgcaaacgaacga

SEQ ID NO: 66653 - DNA, 13 bp, Artificial Sequence
  Oligonucleotide for detection of SNP TSC0017489
tcgtttgttcgcg

SEQ ID NO: 66654 - DNA, 13 bp, Artificial Sequence
  Oligonucleotide for detection of SNP TSC0017489
cgcgaacaaacga

SEQ ID NO: 66655 - DNA, 13 bp, Artificial Sequence
  Oligonucleotide for detection of SNP TSC0017489
ttgttcgttcgcg

SEQ ID NO: 66656 - DNA, 13 bp, Artificial Sequence
  Oligonucleotide for detection of SNP TSC0017489
cgcgaacgaacaa

SEQ ID NO: 66657 - DNA, 13 bp, Artificial Sequence
  Oligonucleotide for detection of SNP TSC0017489
tcgttcgttcgcg

SEQ ID NO: 66658 - DNA, 13 bp, Artificial Sequence
  Oligonucleotide for detection of SNP TSC0017489
cgcgaacgaacga

SEQ ID NO: 66659 - DNA, 13 bp, Artificial Sequence
  Oligonucleotide for detection of SNP TSC0017490
gattttatttaty

SEQ ID NO: 66660 - DNA, 13 bp, Artificial Sequence
  Oligonucleotide for detection of SNP TSC0017490
rataaataaaatc

SEQ ID NO: 66661 - DNA, 13 bp, Artificial Sequence
  Oligonucleotide for detection of SNP TSC0017490
gattttgtttaty

SEQ ID NO: 66662 - DNA, 13 bp, Artificial Sequence
  Oligonucleotide for detection of SNP TSC0017490
rataaacaaaatc

SEQ ID NO: 66663 - DNA, 13 bp, Artificial Sequence
  Oligonucleotide for detection of SNP TSC0017490
gatttcgtttaty

SEQ ID NO: 66664 - DNA, 13 bp, Artificial Sequence
  Oligonucleotide for detection of SNP TSC0017490
rataaacgaaatc

SEQ ID NO: 66665 - DNA, 13 bp, Artificial Sequence
  Oligonucleotide for detection of SNP TSC0017490
ggtgaatgaagty

SEQ ID NO: 66666 - DNA, 13 bp, Artificial Sequence
  Oligonucleotide for detection of SNP TSC0017490
racttcattcacc

SEQ ID NO: 66667 - DNA, 13 bp, Artificial Sequence
  Oligonucleotide for detection of SNP TSC0017490
ggtgaacgaagty

SEQ ID NO: 66668 - DNA, 13 bp, Artificial Sequence
  Oligonucleotide for detection of SNP TSC0017490
racttcgttcacc

SEQ ID NO: 66669 - DNA, 13 bp, Artificial Sequence
  Oligonucleotide for detection of SNP TSC0017491
gtagttgggatta

SEQ ID NO: 66670 - DNA, 13 bp, Artificial Sequence
  Oligonucleotide for detection of SNP TSC0017491
taatcccaactac

SEQ ID NO: 66671 - DNA, 13 bp, Artificial Sequence
  Oligonucleotide for detection of SNP TSC0017491
gtagttaggatta

SEQ ID NO: 66672 - DNA, 13 bp, Artificial Sequence
  Oligonucleotide for detection of SNP TSC0017491
taatcctaactac

SEQ ID NO: 66673 - DNA, 13 bp, Artificial Sequence
  Oligonucleotide for detection of SNP TSC0017492
agggagggttata

SEQ ID NO: 66674 - DNA, 13 bp, Artificial Sequence
  Oligonucleotide for detection of SNP TSC0017492
tataaccctccct

SEQ ID NO: 66675 - DNA, 13 bp, Artificial Sequence
  Oligonucleotide for detection of SNP TSC0017492
agggagagttata

SEQ ID NO: 66676 - DNA, 13 bp, Artificial Sequence
  Oligonucleotide for detection of SNP TSC0017492
tataactctccct

SEQ ID NO: 66677 - DNA, 13 bp, Artificial Sequence
  Oligonucleotide for detection of SNP TSC0017494
taaatgatttaaa

SEQ ID NO: 66678 - DNA, 13 bp, Artificial Sequence
  Oligonucleotide for detection of SNP TSC0017494
tttaaatcattta

SEQ ID NO: 66679 - DNA, 13 bp, Artificial Sequence
  Oligonucleotide for detection of SNP TSC0017494
taaatgttttaaa

SEQ ID NO: 66680 - DNA, 13 bp, Artificial Sequence
  Oligonucleotide for detection of SNP TSC0017494
tttaaaacattta

SEQ ID NO: 66681 - DNA, 13 bp, Artificial Sequence
  Oligonucleotide for detection of SNP TSC0017494
tttggattattta

SEQ ID NO: 66682 - DNA, 13 bp, Artificial Sequence
  Oligonucleotide for detection of SNP TSC0017494
taaataatccaaa

SEQ ID NO: 66683 - DNA, 13 bp, Artificial Sequence
  Oligonucleotide for detection of SNP TSC0017494
tttggaatattta

SEQ ID NO: 66684 - DNA, 13 bp, Artificial Sequence
  Oligonucleotide for detection of SNP TSC0017494
taaatattccaaa

SEQ ID NO: 66685 - DNA, 13 bp, Artificial Sequence
  Oligonucleotide for detection of SNP TSC0017495
ttgagggtggttg

SEQ ID NO: 66686 - DNA, 13 bp, Artificial Sequence
  Oligonucleotide for detection of SNP TSC0017495
caaccaccctcaa

SEQ ID NO: 66687 - DNA, 13 bp, Artificial Sequence
  Oligonucleotide for detection of SNP TSC0017495
ttgaggttggttg

SEQ ID NO: 66688 - DNA, 13 bp, Artificial Sequence
  Oligonucleotide for detection of SNP TSC0017495
caaccaacctcaa

SEQ ID NO: 66689 - DNA, 13 bp, Artificial Sequence
  Oligonucleotide for detection of SNP TSC0017495
tagttatttttag

SEQ ID NO: 66690 - DNA, 13 bp, Artificial Sequence
  Oligonucleotide for detection of SNP TSC0017495
ctaaaaataacta

SEQ ID NO: 66691 - DNA, 13 bp, Artificial Sequence
  Oligonucleotide for detection of SNP TSC0017495
tagttaattttag

SEQ ID NO: 66692 - DNA, 13 bp, Artificial Sequence
  Oligonucleotide for detection of SNP TSC0017495
ctaaaattaacta

SEQ ID NO: 66693 - DNA, 13 bp, Artificial Sequence
  Oligonucleotide for detection of SNP TSC0017496
tagagtaattgtt

SEQ ID NO: 66694 - DNA, 13 bp, Artificial Sequence
  Oligonucleotide for detection of SNP TSC0017496
aacaattactcta

SEQ ID NO: 66695 - DNA, 13 bp, Artificial Sequence
  Oligonucleotide for detection of SNP TSC0017496
tagagtgattgtt

SEQ ID NO: 66696 - DNA, 13 bp, Artificial Sequence
  Oligonucleotide for detection of SNP TSC0017496
aacaatcactcta

SEQ ID NO: 66697 - DNA, 13 bp, Artificial Sequence
  Oligonucleotide for detection of SNP TSC0017499
gtgtaatggtggy

SEQ ID NO: 66698 - DNA, 13 bp, Artificial Sequence
  Oligonucleotide for detection of SNP TSC0017499
rccaccattacac

SEQ ID NO: 66699 - DNA, 13 bp, Artificial Sequence
  Oligonucleotide for detection of SNP TSC0017499
gtgtaagggtggy

SEQ ID NO: 66700 - DNA, 13 bp, Artificial Sequence
  Oligonucleotide for detection of SNP TSC0017499
rccacccttacac

SEQ ID NO: 66701 - DNA, 13 bp, Artificial Sequence
  Oligonucleotide for detection of SNP TSC0017499
gcgtaatggtggy

SEQ ID NO: 66702 - DNA, 13 bp, Artificial Sequence
  Oligonucleotide for detection of SNP TSC0017499
rccaccattacgc

SEQ ID NO: 66703 - DNA, 13 bp, Artificial Sequence
  Oligonucleotide for detection of SNP TSC0017499
gcgtaagggtggy

SEQ ID NO: 66704 - DNA, 13 bp, Artificial Sequence
  Oligonucleotide for detection of SNP TSC0017499
rccacccttacgc

SEQ ID NO: 66705 - DNA, 13 bp, Artificial Sequence
  Oligonucleotide for detection of SNP TSC0017499
gtgtaacggtggy

SEQ ID NO: 66706 - DNA, 13 bp, Artificial Sequence
  Oligonucleotide for detection of SNP TSC0017499
rccaccgttacac

SEQ ID NO: 66707 - DNA, 13 bp, Artificial Sequence
  Oligonucleotide for detection of SNP TSC0017499
gtgtaagggcggy

SEQ ID NO: 66708 - DNA, 13 bp, Artificial Sequence
  Oligonucleotide for detection of SNP TSC0017499
rccgcccttacac

SEQ ID NO: 66709 - DNA, 13 bp, Artificial Sequence
  Oligonucleotide for detection of SNP TSC0017499
gtgtaatggcggy

SEQ ID NO: 66710 - DNA, 13 bp, Artificial Sequence
  Oligonucleotide for detection of SNP TSC0017499
rccgccattacac

SEQ ID NO: 66711 - DNA, 13 bp, Artificial Sequence
  Oligonucleotide for detection of SNP TSC0017499
gcgtaagggcggy

SEQ ID NO: 66712 - DNA, 13 bp, Artificial Sequence
  Oligonucleotide for detection of SNP TSC0017499
rccgcccttacgc

SEQ ID NO: 66713 - DNA, 13 bp, Artificial Sequence
  Oligonucleotide for detection of SNP TSC0017499
gcgtaacggtggy

SEQ ID NO: 66714 - DNA, 13 bp, Artificial Sequence
  Oligonucleotide for detection of SNP TSC0017499
rccaccgttacgc

SEQ ID NO: 66715 - DNA, 13 bp, Artificial Sequence
  Oligonucleotide for detection of SNP TSC0017499
gcgtaatggcggy

SEQ ID NO: 66716 - DNA, 13 bp, Artificial Sequence
  Oligonucleotide for detection of SNP TSC0017499
rccgccattacgc

SEQ ID NO: 66717 - DNA, 13 bp, Artificial Sequence
  Oligonucleotide for detection of SNP TSC0017499
gtgtaacggcggy

SEQ ID NO: 66718 - DNA, 13 bp, Artificial Sequence
  Oligonucleotide for detection of SNP TSC0017499
rccgccgttacac

SEQ ID NO: 66719 - DNA, 13 bp, Artificial Sequence
  Oligonucleotide for detection of SNP TSC0017499
gcgtaacggcggy

SEQ ID NO: 66720 - DNA, 13 bp, Artificial Sequence
  Oligonucleotide for detection of SNP TSC0017499
rccgccgttacgc

SEQ ID NO: 66721 - DNA, 13 bp, Artificial Sequence
  Oligonucleotide for detection of SNP TSC0017499
gttgttgttgtgy

SEQ ID NO: 66722 - DNA, 13 bp, Artificial Sequence
  Oligonucleotide for detection of SNP TSC0017499
rcacaacaacaac

SEQ ID NO: 66723 - DNA, 13 bp, Artificial Sequence
  Oligonucleotide for detection of SNP TSC0017499
gttgtttttgtgy

SEQ ID NO: 66724 - DNA, 13 bp, Artificial Sequence
  Oligonucleotide for detection of SNP TSC0017499
rcacaaaaacaac

SEQ ID NO: 66725 - DNA, 13 bp, Artificial Sequence
  Oligonucleotide for detection of SNP TSC0017499
gtcgttgttgtgy

SEQ ID NO: 66726 - DNA, 13 bp, Artificial Sequence
  Oligonucleotide for detection of SNP TSC0017499
rcacaacaacgac

SEQ ID NO: 66727 - DNA, 13 bp, Artificial Sequence
  Oligonucleotide for detection of SNP TSC0017499
gtcgtttttgtgy

SEQ ID NO: 66728 - DNA, 13 bp, Artificial Sequence
  Oligonucleotide for detection of SNP TSC0017499
rcacaaaaacgac

SEQ ID NO: 66729 - DNA, 13 bp, Artificial Sequence
  Oligonucleotide for detection of SNP TSC0017499
gttgtcgttgtgy

SEQ ID NO: 66730 - DNA, 13 bp, Artificial Sequence
  Oligonucleotide for detection of SNP TSC0017499
rcacaacgacaac

SEQ ID NO: 66731 - DNA, 13 bp, Artificial Sequence
  Oligonucleotide for detection of SNP TSC0017499
gttgtttttgcgy

SEQ ID NO: 66732 - DNA, 13 bp, Artificial Sequence
  Oligonucleotide for detection of SNP TSC0017499
rcgcaaaaacaac

SEQ ID NO: 66733 - DNA, 13 bp, Artificial Sequence
  Oligonucleotide for detection of SNP TSC0017499
gttgttgttgcgy

SEQ ID NO: 66734 - DNA, 13 bp, Artificial Sequence
  Oligonucleotide for detection of SNP TSC0017499
rcgcaacaacaac

SEQ ID NO: 66735 - DNA, 13 bp, Artificial Sequence
  Oligonucleotide for detection of SNP TSC0017499
gtcgtttttgcgy

SEQ ID NO: 66736 - DNA, 13 bp, Artificial Sequence
  Oligonucleotide for detection of SNP TSC0017499
rcgcaaaaacgac

SEQ ID NO: 66737 - DNA, 13 bp, Artificial Sequence
  Oligonucleotide for detection of SNP TSC0017499
gtcgtcgttgtgy

SEQ ID NO: 66738 - DNA, 13 bp, Artificial Sequence
  Oligonucleotide for detection of SNP TSC0017499
rcacaacgacgac

SEQ ID NO: 66739 - DNA, 13 bp, Artificial Sequence
  Oligonucleotide for detection of SNP TSC0017499
gtcgttgttgcgy

SEQ ID NO: 66740 - DNA, 13 bp, Artificial Sequence
  Oligonucleotide for detection of SNP TSC0017499
rcgcaacaacgac

SEQ ID NO: 66741 - DNA, 13 bp, Artificial Sequence
  Oligonucleotide for detection of SNP TSC0017499
gttgtcgttgcgy

SEQ ID NO: 66742 - DNA, 13 bp, Artificial Sequence
  Oligonucleotide for detection of SNP TSC0017499
rcgcaacgacaac

SEQ ID NO: 66743 - DNA, 13 bp, Artificial Sequence
  Oligonucleotide for detection of SNP TSC0017499
gtcgtcgttgcgy

SEQ ID NO: 66744 - DNA, 13 bp, Artificial Sequence
  Oligonucleotide for detection of SNP TSC0017499
rcgcaacgacgac

SEQ ID NO: 66745 - DNA, 13 bp, Artificial Sequence
  Oligonucleotide for detection of SNP TSC0017500
gatgttgttgata

SEQ ID NO: 66746 - DNA, 13 bp, Artificial Sequence
  Oligonucleotide for detection of SNP TSC0017500
tatcaacaacatc

SEQ ID NO: 66747 - DNA, 13 bp, Artificial Sequence
  Oligonucleotide for detection of SNP TSC0017500
gatgttattgata

SEQ ID NO: 66748 - DNA, 13 bp, Artificial Sequence
  Oligonucleotide for detection of SNP TSC0017500
tatcaataacatc

SEQ ID NO: 66749 - DNA, 13 bp, Artificial Sequence
  Oligonucleotide for detection of SNP TSC0017501
tgtttaatgtttt

SEQ ID NO: 66750 - DNA, 13 bp, Artificial Sequence
  Oligonucleotide for detection of SNP TSC0017501
aaaacattaaaca

SEQ ID NO: 66751 - DNA, 13 bp, Artificial Sequence
  Oligonucleotide for detection of SNP TSC0017501
tgtttattgtttt

SEQ ID NO: 66752 - DNA, 13 bp, Artificial Sequence
  Oligonucleotide for detection of SNP TSC0017501
aaaacaataaaca

SEQ ID NO: 66753 - DNA, 13 bp, Artificial Sequence
  Oligonucleotide for detection of SNP TSC0017501
aggatattgaata

SEQ ID NO: 66754 - DNA, 13 bp, Artificial Sequence
  Oligonucleotide for detection of SNP TSC0017501
tattcaatatcct

SEQ ID NO: 66755 - DNA, 13 bp, Artificial Sequence
  Oligonucleotide for detection of SNP TSC0017501
aggataatgaata

SEQ ID NO: 66756 - DNA, 13 bp, Artificial Sequence
  Oligonucleotide for detection of SNP TSC0017501
tattcattatcct

SEQ ID NO: 66757 - DNA, 13 bp, Artificial Sequence
  Oligonucleotide for detection of SNP TSC0017502
ttgggtaggttgt

SEQ ID NO: 66758 - DNA, 13 bp, Artificial Sequence
  Oligonucleotide for detection of SNP TSC0017502
acaacctacccaa

SEQ ID NO: 66759 - DNA, 13 bp, Artificial Sequence
  Oligonucleotide for detection of SNP TSC0017502
ttgggtgggttgt

SEQ ID NO: 66760 - DNA, 13 bp, Artificial Sequence
  Oligonucleotide for detection of SNP TSC0017502
acaacccacccaa

SEQ ID NO: 66761 - DNA, 13 bp, Artificial Sequence
  Oligonucleotide for detection of SNP TSC0017502
tcgggtaggttgt

SEQ ID NO: 66762 - DNA, 13 bp, Artificial Sequence
  Oligonucleotide for detection of SNP TSC0017502
acaacctacccga

SEQ ID NO: 66763 - DNA, 13 bp, Artificial Sequence
  Oligonucleotide for detection of SNP TSC0017502
tcgggtgggttgt

SEQ ID NO: 66764 - DNA, 13 bp, Artificial Sequence
  Oligonucleotide for detection of SNP TSC0017502
acaacccacccga

SEQ ID NO: 66765 - DNA, 13 bp, Artificial Sequence
  Oligonucleotide for detection of SNP TSC0017502
ttgggcgggttgt

SEQ ID NO: 66766 - DNA, 13 bp, Artificial Sequence
  Oligonucleotide for detection of SNP TSC0017502
acaacccgcccaa

SEQ ID NO: 66767 - DNA, 13 bp, Artificial Sequence
  Oligonucleotide for detection of SNP TSC0017502
tcgggcgggttgt

SEQ ID NO: 66768 - DNA, 13 bp, Artificial Sequence
  Oligonucleotide for detection of SNP TSC0017502
acaacccgcccga

SEQ ID NO: 66769 - DNA, 13 bp, Artificial Sequence
  Oligonucleotide for detection of SNP TSC0017502
atagtttgtttgg

SEQ ID NO: 66770 - DNA, 13 bp, Artificial Sequence
  Oligonucleotide for detection of SNP TSC0017502
ccaaacaaactat

SEQ ID NO: 66771 - DNA, 13 bp, Artificial Sequence
  Oligonucleotide for detection of SNP TSC0017502
atagtttgttcgg

SEQ ID NO: 66772 - DNA, 13 bp, Artificial Sequence
  Oligonucleotide for detection of SNP TSC0017502
ccgaacaaactat

SEQ ID NO: 66773 - DNA, 13 bp, Artificial Sequence
  Oligonucleotide for detection of SNP TSC0017502
atagttcgtttgg

SEQ ID NO: 66774 - DNA, 13 bp, Artificial Sequence
  Oligonucleotide for detection of SNP TSC0017502
ccaaacgaactat

SEQ ID NO: 66775 - DNA, 13 bp, Artificial Sequence
  Oligonucleotide for detection of SNP TSC0017502
atagttcgttcgg

SEQ ID NO: 66776 - DNA, 13 bp, Artificial Sequence
  Oligonucleotide for detection of SNP TSC0017502
ccgaacgaactat

SEQ ID NO: 66777 - DNA, 13 bp, Artificial Sequence
  Oligonucleotide for detection of SNP TSC0017503
gatgagtggtatt

SEQ ID NO: 66778 - DNA, 13 bp, Artificial Sequence
  Oligonucleotide for detection of SNP TSC0017503
aataccactcatc

SEQ ID NO: 66779 - DNA, 13 bp, Artificial Sequence
  Oligonucleotide for detection of SNP TSC0017503
gatgagcggtatt

SEQ ID NO: 66780 - DNA, 13 bp, Artificial Sequence
  Oligonucleotide for detection of SNP TSC0017503
aataccgctcatc

SEQ ID NO: 66781 - DNA, 13 bp, Artificial Sequence
  Oligonucleotide for detection of SNP TSC0017503
aatgttgtttaty

SEQ ID NO: 66782 - DNA, 13 bp, Artificial Sequence
  Oligonucleotide for detection of SNP TSC0017503
rataaacaacatt

SEQ ID NO: 66783 - DNA, 13 bp, Artificial Sequence
  Oligonucleotide for detection of SNP TSC0017503
aatgttatttaty

SEQ ID NO: 66784 - DNA, 13 bp, Artificial Sequence
  Oligonucleotide for detection of SNP TSC0017503
rataaataacatt

SEQ ID NO: 66785 - DNA, 13 bp, Artificial Sequence
  Oligonucleotide for detection of SNP TSC0017503
aatgtcgtttaty

SEQ ID NO: 66786 - DNA, 13 bp, Artificial Sequence
  Oligonucleotide for detection of SNP TSC0017503
rataaacgacatt

SEQ ID NO: 66787 - DNA, 13 bp, Artificial Sequence
  Oligonucleotide for detection of SNP TSC0017504
attaggttgggay

SEQ ID NO: 66788 - DNA, 13 bp, Artificial Sequence
  Oligonucleotide for detection of SNP TSC0017504
rtcccaacctaat

SEQ ID NO: 66789 - DNA, 13 bp, Artificial Sequence
  Oligonucleotide for detection of SNP TSC0017504
attagggtgggay

SEQ ID NO: 66790 - DNA, 13 bp, Artificial Sequence
  Oligonucleotide for detection of SNP TSC0017504
rtcccaccctaat

SEQ ID NO: 66791 - DNA, 13 bp, Artificial Sequence
  Oligonucleotide for detection of SNP TSC0017504
gttttagtttgat

SEQ ID NO: 66792 - DNA, 13 bp, Artificial Sequence
  Oligonucleotide for detection of SNP TSC0017504
atcaaactaaaac

SEQ ID NO: 66793 - DNA, 13 bp, Artificial Sequence
  Oligonucleotide for detection of SNP TSC0017504
gttttattttgat

SEQ ID NO: 66794 - DNA, 13 bp, Artificial Sequence
  Oligonucleotide for detection of SNP TSC0017504
atcaaaataaaac

SEQ ID NO: 66795 - DNA, 13 bp, Artificial Sequence
  Oligonucleotide for detection of SNP TSC0017505
taaatatggagat

SEQ ID NO: 66796 - DNA, 13 bp, Artificial Sequence
  Oligonucleotide for detection of SNP TSC0017505
atctccatattta

SEQ ID NO: 66797 - DNA, 13 bp, Artificial Sequence
  Oligonucleotide for detection of SNP TSC0017505
taaatacggagat

SEQ ID NO: 66798 - DNA, 13 bp, Artificial Sequence
  Oligonucleotide for detection of SNP TSC0017505
atctccgtattta

SEQ ID NO: 66799 - DNA, 13 bp, Artificial Sequence
  Oligonucleotide for detection of SNP TSC0017506
tttattggttaat

SEQ ID NO: 66800 - DNA, 13 bp, Artificial Sequence
  Oligonucleotide for detection of SNP TSC0017506
attaaccaataaa

SEQ ID NO: 66801 - DNA, 13 bp, Artificial Sequence
  Oligonucleotide for detection of SNP TSC0017506
tttattagttaat

SEQ ID NO: 66802 - DNA, 13 bp, Artificial Sequence
  Oligonucleotide for detection of SNP TSC0017506
attaactaataaa

SEQ ID NO: 66803 - DNA, 13 bp, Artificial Sequence
  Oligonucleotide for detection of SNP TSC0017508
tttaataaatggg

SEQ ID NO: 66804 - DNA, 13 bp, Artificial Sequence
  Oligonucleotide for detection of SNP TSC0017508
cccatttattaaa

SEQ ID NO: 66805 - DNA, 13 bp, Artificial Sequence
  Oligonucleotide for detection of SNP TSC0017508
tttaatgaatggg

SEQ ID NO: 66806 - DNA, 13 bp, Artificial Sequence
  Oligonucleotide for detection of SNP TSC0017508
cccattcattaaa

SEQ ID NO: 66807 - DNA, 13 bp, Artificial Sequence
  Oligonucleotide for detection of SNP TSC0017508
tttaacgaatggg

SEQ ID NO: 66808 - DNA, 13 bp, Artificial Sequence
  Oligonucleotide for detection of SNP TSC0017508
cccattcgttaaa

SEQ ID NO: 66809 - DNA, 13 bp, Artificial Sequence
  Oligonucleotide for detection of SNP TSC0017508
tttatttgttaag

SEQ ID NO: 66810 - DNA, 13 bp, Artificial Sequence
  Oligonucleotide for detection of SNP TSC0017508
cttaacaaataaa

SEQ ID NO: 66811 - DNA, 13 bp, Artificial Sequence
  Oligonucleotide for detection of SNP TSC0017508
tttattcgttaag

SEQ ID NO: 66812 - DNA, 13 bp, Artificial Sequence
  Oligonucleotide for detection of SNP TSC0017508
cttaacgaataaa

SEQ ID NO: 66813 - DNA, 13 bp, Artificial Sequence
  Oligonucleotide for detection of SNP TSC0017509
gtggtttgtggtt

SEQ ID NO: 66814 - DNA, 13 bp, Artificial Sequence
  Oligonucleotide for detection of SNP TSC0017509
aaccacaaaccac

SEQ ID NO: 66815 - DNA, 13 bp, Artificial Sequence
  Oligonucleotide for detection of SNP TSC0017509
gtggttcgtggtt

SEQ ID NO: 66816 - DNA, 13 bp, Artificial Sequence
  Oligonucleotide for detection of SNP TSC0017509
aaccacgaaccac

SEQ ID NO: 66817 - DNA, 13 bp, Artificial Sequence
  Oligonucleotide for detection of SNP TSC0017509
agttatgaattay

SEQ ID NO: 66818 - DNA, 13 bp, Artificial Sequence
  Oligonucleotide for detection of SNP TSC0017509
rtaattcataact

SEQ ID NO: 66819 - DNA, 13 bp, Artificial Sequence
  Oligonucleotide for detection of SNP TSC0017509
agttataaattay

SEQ ID NO: 66820 - DNA, 13 bp, Artificial Sequence
  Oligonucleotide for detection of SNP TSC0017509
rtaatttataact

SEQ ID NO: 66821 - DNA, 13 bp, Artificial Sequence
  Oligonucleotide for detection of SNP TSC0017509
agttacgaattay

SEQ ID NO: 66822 - DNA, 13 bp, Artificial Sequence
  Oligonucleotide for detection of SNP TSC0017509
rtaattcgtaact

SEQ ID NO: 66823 - DNA, 13 bp, Artificial Sequence
  Oligonucleotide for detection of SNP TSC0017511
tatggggttttay

SEQ ID NO: 66824 - DNA, 13 bp, Artificial Sequence
  Oligonucleotide for detection of SNP TSC0017511
rtaaaaccccata

SEQ ID NO: 66825 - DNA, 13 bp, Artificial Sequence
  Oligonucleotide for detection of SNP TSC0017511
tatgggtttttay

SEQ ID NO: 66826 - DNA, 13 bp, Artificial Sequence
  Oligonucleotide for detection of SNP TSC0017511
rtaaaaacccata

SEQ ID NO: 66827 - DNA, 13 bp, Artificial Sequence
  Oligonucleotide for detection of SNP TSC0017511
tacggggttttay

SEQ ID NO: 66828 - DNA, 13 bp, Artificial Sequence
  Oligonucleotide for detection of SNP TSC0017511
rtaaaaccccgta

SEQ ID NO: 66829 - DNA, 13 bp, Artificial Sequence
  Oligonucleotide for detection of SNP TSC0017511
tacgggtttttay

SEQ ID NO: 66830 - DNA, 13 bp, Artificial Sequence
  Oligonucleotide for detection of SNP TSC0017511
rtaaaaacccgta

SEQ ID NO: 66831 - DNA, 13 bp, Artificial Sequence
  Oligonucleotide for detection of SNP TSC0017511
gtgagattttgta

SEQ ID NO: 66832 - DNA, 13 bp, Artificial Sequence
  Oligonucleotide for detection of SNP TSC0017511
tacaaaatctcac

SEQ ID NO: 66833 - DNA, 13 bp, Artificial Sequence
  Oligonucleotide for detection of SNP TSC0017511
gtgagaatttgta

SEQ ID NO: 66834 - DNA, 13 bp, Artificial Sequence
  Oligonucleotide for detection of SNP TSC0017511
tacaaattctcac

SEQ ID NO: 66835 - DNA, 13 bp, Artificial Sequence
  Oligonucleotide for detection of SNP TSC0017511
gtgagatttcgta

SEQ ID NO: 66836 - DNA, 13 bp, Artificial Sequence
  Oligonucleotide for detection of SNP TSC0017511
tacgaaatctcac

SEQ ID NO: 66837 - DNA, 13 bp, Artificial Sequence
  Oligonucleotide for detection of SNP TSC0017511
gtgagaattcgta

SEQ ID NO: 66838 - DNA, 13 bp, Artificial Sequence
  Oligonucleotide for detection of SNP TSC0017511
tacgaattctcac

SEQ ID NO: 66839 - DNA, 13 bp, Artificial Sequence
  Oligonucleotide for detection of SNP TSC0017512
aatttttgtttty

SEQ ID NO: 66840 - DNA, 13 bp, Artificial Sequence
  Oligonucleotide for detection of SNP TSC0017512
raaaacaaaaatt

SEQ ID NO: 66841 - DNA, 13 bp, Artificial Sequence
  Oligonucleotide for detection of SNP TSC0017512
aattttcgtttty

SEQ ID NO: 66842 - DNA, 13 bp, Artificial Sequence
  Oligonucleotide for detection of SNP TSC0017512
raaaacgaaaatt

SEQ ID NO: 66843 - DNA, 13 bp, Artificial Sequence
  Oligonucleotide for detection of SNP TSC0017512
ggaggcggaggtt

SEQ ID NO: 66844 - DNA, 13 bp, Artificial Sequence
  Oligonucleotide for detection of SNP TSC0017512
aacctccgcctcc

SEQ ID NO: 66845 - DNA, 13 bp, Artificial Sequence
  Oligonucleotide for detection of SNP TSC0017515
tttttatgaattt

SEQ ID NO: 66846 - DNA, 13 bp, Artificial Sequence
  Oligonucleotide for detection of SNP TSC0017515
aaattcataaaaa

SEQ ID NO: 66847 - DNA, 13 bp, Artificial Sequence
  Oligonucleotide for detection of SNP TSC0017515
tttttacgaattt

SEQ ID NO: 66848 - DNA, 13 bp, Artificial Sequence
  Oligonucleotide for detection of SNP TSC0017515
aaattcgtaaaaa

SEQ ID NO: 66849 - DNA, 13 bp, Artificial Sequence
  Oligonucleotide for detection of SNP TSC0017515
agatttgtgaaga

SEQ ID NO: 66850 - DNA, 13 bp, Artificial Sequence
  Oligonucleotide for detection of SNP TSC0017515
tcttcacaaatct

SEQ ID NO: 66851 - DNA, 13 bp, Artificial Sequence
  Oligonucleotide for detection of SNP TSC0017515
agatttatgaaga

SEQ ID NO: 66852 - DNA, 13 bp, Artificial Sequence
  Oligonucleotide for detection of SNP TSC0017515
tcttcataaatct

SEQ ID NO: 66853 - DNA, 13 bp, Artificial Sequence
  Oligonucleotide for detection of SNP TSC0017515
agattcgtgaaga

SEQ ID NO: 66854 - DNA, 13 bp, Artificial Sequence
  Oligonucleotide for detection of SNP TSC0017515
tcttcacgaatct

SEQ ID NO: 66855 - DNA, 13 bp, Artificial Sequence
  Oligonucleotide for detection of SNP TSC0017517
gttgtgaaaatag

SEQ ID NO: 66856 - DNA, 13 bp, Artificial Sequence
  Oligonucleotide for detection of SNP TSC0017517
ctattttcacaac

SEQ ID NO: 66857 - DNA, 13 bp, Artificial Sequence
  Oligonucleotide for detection of SNP TSC0017517
gttgtggaaatag

SEQ ID NO: 66858 - DNA, 13 bp, Artificial Sequence
  Oligonucleotide for detection of SNP TSC0017517
ctatttccacaac

SEQ ID NO: 66859 - DNA, 13 bp, Artificial Sequence
  Oligonucleotide for detection of SNP TSC0017519
tataaggggagty

SEQ ID NO: 66860 - DNA, 13 bp, Artificial Sequence
  Oligonucleotide for detection of SNP TSC0017519
ractccccttata

SEQ ID NO: 66861 - DNA, 13 bp, Artificial Sequence
  Oligonucleotide for detection of SNP TSC0017519
tataagaggagty

SEQ ID NO: 66862 - DNA, 13 bp, Artificial Sequence
  Oligonucleotide for detection of SNP TSC0017519
ractcctcttata

SEQ ID NO: 66863 - DNA, 13 bp, Artificial Sequence
  Oligonucleotide for detection of SNP TSC0017521
ataatagagattt

SEQ ID NO: 66864 - DNA, 13 bp, Artificial Sequence
  Oligonucleotide for detection of SNP TSC0017521
aaatctctattat

SEQ ID NO: 66865 - DNA, 13 bp, Artificial Sequence
  Oligonucleotide for detection of SNP TSC0017521
ataataaagattt

SEQ ID NO: 66866 - DNA, 13 bp, Artificial Sequence
  Oligonucleotide for detection of SNP TSC0017521
aaatctttattat

SEQ ID NO: 66867 - DNA, 13 bp, Artificial Sequence
  Oligonucleotide for detection of SNP TSC0017522
atatattgagtay

SEQ ID NO: 66868 - DNA, 13 bp, Artificial Sequence
  Oligonucleotide for detection of SNP TSC0017522
rtactcaatatat

SEQ ID NO: 66869 - DNA, 13 bp, Artificial Sequence
  Oligonucleotide for detection of SNP TSC0017522
atatatcgagtay

SEQ ID NO: 66870 - DNA, 13 bp, Artificial Sequence
  Oligonucleotide for detection of SNP TSC0017522
rtactcgatatat

SEQ ID NO: 66871 - DNA, 13 bp, Artificial Sequence
  Oligonucleotide for detection of SNP TSC0017522
gtatttggtgtgt

SEQ ID NO: 66872 - DNA, 13 bp, Artificial Sequence
  Oligonucleotide for detection of SNP TSC0017522
acacaccaaatac

SEQ ID NO: 66873 - DNA, 13 bp, Artificial Sequence
  Oligonucleotide for detection of SNP TSC0017522
gtatttagtgtgt

SEQ ID NO: 66874 - DNA, 13 bp, Artificial Sequence
  Oligonucleotide for detection of SNP TSC0017522
acacactaaatac

SEQ ID NO: 66875 - DNA, 13 bp, Artificial Sequence
  Oligonucleotide for detection of SNP TSC0017522
gtattcggtgtgt

SEQ ID NO: 66876 - DNA, 13 bp, Artificial Sequence
  Oligonucleotide for detection of SNP TSC0017522
acacaccgaatac

SEQ ID NO: 66877 - DNA, 13 bp, Artificial Sequence
  Oligonucleotide for detection of SNP TSC0017523
ttttttattgggg

SEQ ID NO: 66878 - DNA, 13 bp, Artificial Sequence
  Oligonucleotide for detection of SNP TSC0017523
ccccaataaaaaa

SEQ ID NO: 66879 - DNA, 13 bp, Artificial Sequence
  Oligonucleotide for detection of SNP TSC0017523
ttttttgttgggg

SEQ ID NO: 66880 - DNA, 13 bp, Artificial Sequence
  Oligonucleotide for detection of SNP TSC0017523
ccccaacaaaaaa

SEQ ID NO: 66881 - DNA, 13 bp, Artificial Sequence
  Oligonucleotide for detection of SNP TSC0017523
tttttcgttgggg

SEQ ID NO: 66882 - DNA, 13 bp, Artificial Sequence
  Oligonucleotide for detection of SNP TSC0017523
ccccaacgaaaaa

SEQ ID NO: 66883 - DNA, 13 bp, Artificial Sequence
  Oligonucleotide for detection of SNP TSC0017523
ttttagtggagag

SEQ ID NO: 66884 - DNA, 13 bp, Artificial Sequence
  Oligonucleotide for detection of SNP TSC0017523
ctctccactaaaa

SEQ ID NO: 66885 - DNA, 13 bp, Artificial Sequence
  Oligonucleotide for detection of SNP TSC0017523
ttttagcggagag

SEQ ID NO: 66886 - DNA, 13 bp, Artificial Sequence
  Oligonucleotide for detection of SNP TSC0017523
ctctccgctaaaa

SEQ ID NO: 66887 - DNA, 13 bp, Artificial Sequence
  Oligonucleotide for detection of SNP TSC0017525
aggttgaaggtag

SEQ ID NO: 66888 - DNA, 13 bp, Artificial Sequence
  Oligonucleotide for detection of SNP TSC0017525
ctaccttcaacct

SEQ ID NO: 66889 - DNA, 13 bp, Artificial Sequence
  Oligonucleotide for detection of SNP TSC0017525
aggttggaggtag

SEQ ID NO: 66890 - DNA, 13 bp, Artificial Sequence
  Oligonucleotide for detection of SNP TSC0017525
ctacctccaacct

SEQ ID NO: 66891 - DNA, 13 bp, Artificial Sequence
  Oligonucleotide for detection of SNP TSC0017526
gttaagagattat

SEQ ID NO: 66892 - DNA, 13 bp, Artificial Sequence
  Oligonucleotide for detection of SNP TSC0017526
ataatctcttaac

SEQ ID NO: 66893 - DNA, 13 bp, Artificial Sequence
  Oligonucleotide for detection of SNP TSC0017526
gttaagggattat

SEQ ID NO: 66894 - DNA, 13 bp, Artificial Sequence
  Oligonucleotide for detection of SNP TSC0017526
ataatcccttaac

SEQ ID NO: 66895 - DNA, 13 bp, Artificial Sequence
  Oligonucleotide for detection of SNP TSC0017527
ttattgcgtttag

SEQ ID NO: 66896 - DNA, 13 bp, Artificial Sequence
  Oligonucleotide for detection of SNP TSC0017527
ctaaacgcaataa

SEQ ID NO: 66897 - DNA, 13 bp, Artificial Sequence
  Oligonucleotide for detection of SNP TSC0017527
ttatcgcgtttag

SEQ ID NO: 66898 - DNA, 13 bp, Artificial Sequence
  Oligonucleotide for detection of SNP TSC0017527
ctaaacgcgataa

SEQ ID NO: 66899 - DNA, 13 bp, Artificial Sequence
  Oligonucleotide for detection of SNP TSC0017533
gatttgataaatg

SEQ ID NO: 66900 - DNA, 13 bp, Artificial Sequence
  Oligonucleotide for detection of SNP TSC0017533
catttatcaaatc

SEQ ID NO: 66901 - DNA, 13 bp, Artificial Sequence
  Oligonucleotide for detection of SNP TSC0017533
gatttggtaaatg

SEQ ID NO: 66902 - DNA, 13 bp, Artificial Sequence
  Oligonucleotide for detection of SNP TSC0017533
catttaccaaatc

SEQ ID NO: 66903 - DNA, 13 bp, Artificial Sequence
  Oligonucleotide for detection of SNP TSC0017534
tttattggttaaa

SEQ ID NO: 66904 - DNA, 13 bp, Artificial Sequence
  Oligonucleotide for detection of SNP TSC0017534
tttaaccaataaa

SEQ ID NO: 66905 - DNA, 13 bp, Artificial Sequence
  Oligonucleotide for detection of SNP TSC0017534
tttatttgttaaa

SEQ ID NO: 66906 - DNA, 13 bp, Artificial Sequence
  Oligonucleotide for detection of SNP TSC0017534
tttaacaaataaa

SEQ ID NO: 66907 - DNA, 13 bp, Artificial Sequence
  Oligonucleotide for detection of SNP TSC0017534
tttgattagtgga

SEQ ID NO: 66908 - DNA, 13 bp, Artificial Sequence
  Oligonucleotide for detection of SNP TSC0017534
tccactaatcaaa

SEQ ID NO: 66909 - DNA, 13 bp, Artificial Sequence
  Oligonucleotide for detection of SNP TSC0017534
tttgataagtgga

SEQ ID NO: 66910 - DNA, 13 bp, Artificial Sequence
  Oligonucleotide for detection of SNP TSC0017534
tccacttatcaaa

SEQ ID NO: 66911 - DNA, 13 bp, Artificial Sequence
  Oligonucleotide for detection of SNP TSC0017536
ttttttatgatgy

SEQ ID NO: 66912 - DNA, 13 bp, Artificial Sequence
  Oligonucleotide for detection of SNP TSC0017536
rcatcataaaaaa

SEQ ID NO: 66913 - DNA, 13 bp, Artificial Sequence
  Oligonucleotide for detection of SNP TSC0017536
ttttttgtgatgy

SEQ ID NO: 66914 - DNA, 13 bp, Artificial Sequence
  Oligonucleotide for detection of SNP TSC0017536
rcatcacaaaaaa

SEQ ID NO: 66915 - DNA, 13 bp, Artificial Sequence
  Oligonucleotide for detection of SNP TSC0017537
ttttgggaaaatt

SEQ ID NO: 66916 - DNA, 13 bp, Artificial Sequence
  Oligonucleotide for detection of SNP TSC0017537
aattttcccaaaa

SEQ ID NO: 66917 - DNA, 13 bp, Artificial Sequence
  Oligonucleotide for detection of SNP TSC0017537
ttttggaaaaatt

SEQ ID NO: 66918 - DNA, 13 bp, Artificial Sequence
  Oligonucleotide for detection of SNP TSC0017537
aatttttccaaaa

SEQ ID NO: 66919 - DNA, 13 bp, Artificial Sequence
  Oligonucleotide for detection of SNP TSC0017538
agatggggtttta

SEQ ID NO: 66920 - DNA, 13 bp, Artificial Sequence
  Oligonucleotide for detection of SNP TSC0017538
taaaaccccatct

SEQ ID NO: 66921 - DNA, 13 bp, Artificial Sequence
  Oligonucleotide for detection of SNP TSC0017539
gattatatgatty

SEQ ID NO: 66922 - DNA, 13 bp, Artificial Sequence
  Oligonucleotide for detection of SNP TSC0017539
raatcatataatc

SEQ ID NO: 66923 - DNA, 13 bp, Artificial Sequence
  Oligonucleotide for detection of SNP TSC0017539
gattatttgatty

SEQ ID NO: 66924 - DNA, 13 bp, Artificial Sequence
  Oligonucleotide for detection of SNP TSC0017539
raatcaaataatc

SEQ ID NO: 66925 - DNA, 13 bp, Artificial Sequence
  Oligonucleotide for detection of SNP TSC0017539
gagttatgtgaty

SEQ ID NO: 66926 - DNA, 13 bp, Artificial Sequence
  Oligonucleotide for detection of SNP TSC0017539
ratcacataactc

SEQ ID NO: 66927 - DNA, 13 bp, Artificial Sequence
  Oligonucleotide for detection of SNP TSC0017539
gagttaagtgaty

SEQ ID NO: 66928 - DNA, 13 bp, Artificial Sequence
  Oligonucleotide for detection of SNP TSC0017539
ratcacttaactc

SEQ ID NO: 66929 - DNA, 13 bp, Artificial Sequence
  Oligonucleotide for detection of SNP TSC0017540
taattttgttaag

SEQ ID NO: 66930 - DNA, 13 bp, Artificial Sequence
  Oligonucleotide for detection of SNP TSC0017540
cttaacaaaatta

SEQ ID NO: 66931 - DNA, 13 bp, Artificial Sequence
  Oligonucleotide for detection of SNP TSC0017540
taatttggttaag

SEQ ID NO: 66932 - DNA, 13 bp, Artificial Sequence
  Oligonucleotide for detection of SNP TSC0017540
cttaaccaaatta

SEQ ID NO: 66933 - DNA, 13 bp, Artificial Sequence
  Oligonucleotide for detection of SNP TSC0017540
taatttcgttaag

SEQ ID NO: 66934 - DNA, 13 bp, Artificial Sequence
  Oligonucleotide for detection of SNP TSC0017540
cttaacgaaatta

SEQ ID NO: 66935 - DNA, 13 bp, Artificial Sequence
  Oligonucleotide for detection of SNP TSC0017540
tttggtgagattg

SEQ ID NO: 66936 - DNA, 13 bp, Artificial Sequence
  Oligonucleotide for detection of SNP TSC0017540
caatctcaccaaa

SEQ ID NO: 66937 - DNA, 13 bp, Artificial Sequence
  Oligonucleotide for detection of SNP TSC0017540
tttggttagattg

SEQ ID NO: 66938 - DNA, 13 bp, Artificial Sequence
  Oligonucleotide for detection of SNP TSC0017540
caatctaaccaaa

SEQ ID NO: 66939 - DNA, 13 bp, Artificial Sequence
  Oligonucleotide for detection of SNP TSC0017540
tttggcgagattg

SEQ ID NO: 66940 - DNA, 13 bp, Artificial Sequence
  Oligonucleotide for detection of SNP TSC0017540
caatctcgccaaa

SEQ ID NO: 66941 - DNA, 13 bp, Artificial Sequence
  Oligonucleotide for detection of SNP TSC0017541
aagagtattattg

SEQ ID NO: 66942 - DNA, 13 bp, Artificial Sequence
  Oligonucleotide for detection of SNP TSC0017541
caataatactctt

SEQ ID NO: 66943 - DNA, 13 bp, Artificial Sequence
  Oligonucleotide for detection of SNP TSC0017541
aagagtgttattg

SEQ ID NO: 66944 - DNA, 13 bp, Artificial Sequence
  Oligonucleotide for detection of SNP TSC0017541
caataacactctt

SEQ ID NO: 66945 - DNA, 13 bp, Artificial Sequence
  Oligonucleotide for detection of SNP TSC0017541
aagagcgttattg

SEQ ID NO: 66946 - DNA, 13 bp, Artificial Sequence
  Oligonucleotide for detection of SNP TSC0017541
caataacgctctt

SEQ ID NO: 66947 - DNA, 13 bp, Artificial Sequence
  Oligonucleotide for detection of SNP TSC0017541
tagtggtgttttt

SEQ ID NO: 66948 - DNA, 13 bp, Artificial Sequence
  Oligonucleotide for detection of SNP TSC0017541
aaaaacaccacta

SEQ ID NO: 66949 - DNA, 13 bp, Artificial Sequence
  Oligonucleotide for detection of SNP TSC0017541
tagtggcgttttt

SEQ ID NO: 66950 - DNA, 13 bp, Artificial Sequence
  Oligonucleotide for detection of SNP TSC0017541
aaaaacgccacta

SEQ ID NO: 66951 - DNA, 13 bp, Artificial Sequence
  Oligonucleotide for detection of SNP TSC0017542
ggaaaaagggttg

SEQ ID NO: 66952 - DNA, 13 bp, Artificial Sequence
  Oligonucleotide for detection of SNP TSC0017542
caaccctttttcc

SEQ ID NO: 66953 - DNA, 13 bp, Artificial Sequence
  Oligonucleotide for detection of SNP TSC0017542
ggaaaatgggttg

SEQ ID NO: 66954 - DNA, 13 bp, Artificial Sequence
  Oligonucleotide for detection of SNP TSC0017542
caacccattttcc

SEQ ID NO: 66955 - DNA, 13 bp, Artificial Sequence
  Oligonucleotide for detection of SNP TSC0017542
ggaaaacgggttg

SEQ ID NO: 66956 - DNA, 13 bp, Artificial Sequence
  Oligonucleotide for detection of SNP TSC0017542
caacccgttttcc

SEQ ID NO: 66957 - DNA, 13 bp, Artificial Sequence
  Oligonucleotide for detection of SNP TSC0017542
tagttttttttty

SEQ ID NO: 66958 - DNA, 13 bp, Artificial Sequence
  Oligonucleotide for detection of SNP TSC0017542
raaaaaaaaacta

SEQ ID NO: 66959 - DNA, 13 bp, Artificial Sequence
  Oligonucleotide for detection of SNP TSC0017543
agggttgtgagag

SEQ ID NO: 66960 - DNA, 13 bp, Artificial Sequence
  Oligonucleotide for detection of SNP TSC0017543
ctctcacaaccct

SEQ ID NO: 66961 - DNA, 13 bp, Artificial Sequence
  Oligonucleotide for detection of SNP TSC0017543
agggttttgagag

SEQ ID NO: 66962 - DNA, 13 bp, Artificial Sequence
  Oligonucleotide for detection of SNP TSC0017543
ctctcaaaaccct

SEQ ID NO: 66963 - DNA, 13 bp, Artificial Sequence
  Oligonucleotide for detection of SNP TSC0017543
tttttatagtttt

SEQ ID NO: 66964 - DNA, 13 bp, Artificial Sequence
  Oligonucleotide for detection of SNP TSC0017543
aaaactataaaaa

SEQ ID NO: 66965 - DNA, 13 bp, Artificial Sequence
  Oligonucleotide for detection of SNP TSC0017543
tttttaaagtttt

SEQ ID NO: 66966 - DNA, 13 bp, Artificial Sequence
  Oligonucleotide for detection of SNP TSC0017543
aaaactttaaaaa

SEQ ID NO: 66967 - DNA, 13 bp, Artificial Sequence
  Oligonucleotide for detection of SNP TSC0017544
ggggttgggaaag

SEQ ID NO: 66968 - DNA, 13 bp, Artificial Sequence
  Oligonucleotide for detection of SNP TSC0017544
ctttcccaacccc

SEQ ID NO: 66969 - DNA, 13 bp, Artificial Sequence
  Oligonucleotide for detection of SNP TSC0017544
ggggtttggaaag

SEQ ID NO: 66970 - DNA, 13 bp, Artificial Sequence
  Oligonucleotide for detection of SNP TSC0017544
ctttccaaacccc

SEQ ID NO: 66971 - DNA, 13 bp, Artificial Sequence
  Oligonucleotide for detection of SNP TSC0017544
ggggtcgggaaag

SEQ ID NO: 66972 - DNA, 13 bp, Artificial Sequence
  Oligonucleotide for detection of SNP TSC0017544
ctttcccgacccc

SEQ ID NO: 66973 - DNA, 13 bp, Artificial Sequence
  Oligonucleotide for detection of SNP TSC0017545
ttaaagggaggta

SEQ ID NO: 66974 - DNA, 13 bp, Artificial Sequence
  Oligonucleotide for detection of SNP TSC0017545
tacctccctttaa

SEQ ID NO: 66975 - DNA, 13 bp, Artificial Sequence
  Oligonucleotide for detection of SNP TSC0017545
ttaaagtgaggta

SEQ ID NO: 66976 - DNA, 13 bp, Artificial Sequence
  Oligonucleotide for detection of SNP TSC0017545
tacctcactttaa

SEQ ID NO: 66977 - DNA, 13 bp, Artificial Sequence
  Oligonucleotide for detection of SNP TSC0017545
tgtttttttttag

SEQ ID NO: 66978 - DNA, 13 bp, Artificial Sequence
  Oligonucleotide for detection of SNP TSC0017545
ctaaaaaaaaaca

SEQ ID NO: 66979 - DNA, 13 bp, Artificial Sequence
  Oligonucleotide for detection of SNP TSC0017549
gttttgatttagg

SEQ ID NO: 66980 - DNA, 13 bp, Artificial Sequence
  Oligonucleotide for detection of SNP TSC0017549
cctaaatcaaaac

SEQ ID NO: 66981 - DNA, 13 bp, Artificial Sequence
  Oligonucleotide for detection of SNP TSC0017549
gttttgttttagg

SEQ ID NO: 66982 - DNA, 13 bp, Artificial Sequence
  Oligonucleotide for detection of SNP TSC0017549
cctaaaacaaaac

SEQ ID NO: 66983 - DNA, 13 bp, Artificial Sequence
  Oligonucleotide for detection of SNP TSC0017549
tttgagttagggy

SEQ ID NO: 66984 - DNA, 13 bp, Artificial Sequence
  Oligonucleotide for detection of SNP TSC0017549
rccctaactcaaa

SEQ ID NO: 66985 - DNA, 13 bp, Artificial Sequence
  Oligonucleotide for detection of SNP TSC0017549
tttgaggtagggy

SEQ ID NO: 66986 - DNA, 13 bp, Artificial Sequence
  Oligonucleotide for detection of SNP TSC0017549
rccctacctcaaa

SEQ ID NO: 66987 - DNA, 13 bp, Artificial Sequence
  Oligonucleotide for detection of SNP TSC0017550
aaggaagatagta

SEQ ID NO: 66988 - DNA, 13 bp, Artificial Sequence
  Oligonucleotide for detection of SNP TSC0017550
tactatcttcctt

SEQ ID NO: 66989 - DNA, 13 bp, Artificial Sequence
  Oligonucleotide for detection of SNP TSC0017550
aaggaaaatagta

SEQ ID NO: 66990 - DNA, 13 bp, Artificial Sequence
  Oligonucleotide for detection of SNP TSC0017550
tactattttcctt

SEQ ID NO: 66991 - DNA, 13 bp, Artificial Sequence
  Oligonucleotide for detection of SNP TSC0017551
tttttatagatta

SEQ ID NO: 66992 - DNA, 13 bp, Artificial Sequence
  Oligonucleotide for detection of SNP TSC0017551
taatctataaaaa

SEQ ID NO: 66993 - DNA, 13 bp, Artificial Sequence
  Oligonucleotide for detection of SNP TSC0017551
tttttagagatta

SEQ ID NO: 66994 - DNA, 13 bp, Artificial Sequence
  Oligonucleotide for detection of SNP TSC0017551
taatctctaaaaa

SEQ ID NO: 66995 - DNA, 13 bp, Artificial Sequence
  Oligonucleotide for detection of SNP TSC0017551
tagtttgtaagga

SEQ ID NO: 66996 - DNA, 13 bp, Artificial Sequence
  Oligonucleotide for detection of SNP TSC0017551
tccttacaaacta

SEQ ID NO: 66997 - DNA, 13 bp, Artificial Sequence
  Oligonucleotide for detection of SNP TSC0017551
tagtttttaagga

SEQ ID NO: 66998 - DNA, 13 bp, Artificial Sequence
  Oligonucleotide for detection of SNP TSC0017551
tccttaaaaacta

SEQ ID NO: 66999 - DNA, 13 bp, Artificial Sequence
  Oligonucleotide for detection of SNP TSC0017552
tttatagtttaat

SEQ ID NO: 67000 - DNA, 13 bp, Artificial Sequence
  Oligonucleotide for detection of SNP TSC0017552
attaaactataaa

SEQ ID NO: 67001 - DNA, 13 bp, Artificial Sequence
  Oligonucleotide for detection of SNP TSC0017552
tttatattttaat

SEQ ID NO: 67002 - DNA, 13 bp, Artificial Sequence
  Oligonucleotide for detection of SNP TSC0017552
attaaaatataaa

SEQ ID NO: 67003 - DNA, 13 bp, Artificial Sequence
  Oligonucleotide for detection of SNP TSC0017552
attaggttatgga

SEQ ID NO: 67004 - DNA, 13 bp, Artificial Sequence
  Oligonucleotide for detection of SNP TSC0017552
tccataacctaat

SEQ ID NO: 67005 - DNA, 13 bp, Artificial Sequence
  Oligonucleotide for detection of SNP TSC0017552
attaggatatgga

SEQ ID NO: 67006 - DNA, 13 bp, Artificial Sequence
  Oligonucleotide for detection of SNP TSC0017552
tccatatcctaat

SEQ ID NO: 67007 - DNA, 13 bp, Artificial Sequence
  Oligonucleotide for detection of SNP TSC0017553
tgatttttgttty

SEQ ID NO: 67008 - DNA, 13 bp, Artificial Sequence
  Oligonucleotide for detection of SNP TSC0017553
raaacaaaaatca

SEQ ID NO: 67009 - DNA, 13 bp, Artificial Sequence
  Oligonucleotide for detection of SNP TSC0017553
tgatttgtgttty

SEQ ID NO: 67010 - DNA, 13 bp, Artificial Sequence
  Oligonucleotide for detection of SNP TSC0017553
raaacacaaatca

SEQ ID NO: 67011 - DNA, 13 bp, Artificial Sequence
  Oligonucleotide for detection of SNP TSC0017553
ggggtagaggtta

SEQ ID NO: 67012 - DNA, 13 bp, Artificial Sequence
  Oligonucleotide for detection of SNP TSC0017553
taacctctacccc

SEQ ID NO: 67013 - DNA, 13 bp, Artificial Sequence
  Oligonucleotide for detection of SNP TSC0017553
ggggtataggtta

SEQ ID NO: 67014 - DNA, 13 bp, Artificial Sequence
  Oligonucleotide for detection of SNP TSC0017553
taacctatacccc

SEQ ID NO: 67015 - DNA, 13 bp, Artificial Sequence
  Oligonucleotide for detection of SNP TSC0017554
taagtatgttttt

SEQ ID NO: 67016 - DNA, 13 bp, Artificial Sequence
  Oligonucleotide for detection of SNP TSC0017554
aaaaacatactta

SEQ ID NO: 67017 - DNA, 13 bp, Artificial Sequence
  Oligonucleotide for detection of SNP TSC0017554
taagtacgttttt

SEQ ID NO: 67018 - DNA, 13 bp, Artificial Sequence
  Oligonucleotide for detection of SNP TSC0017554
aaaaacgtactta

SEQ ID NO: 67019 - DNA, 13 bp, Artificial Sequence
  Oligonucleotide for detection of SNP TSC0017554
aagagtgtgtttg

SEQ ID NO: 67020 - DNA, 13 bp, Artificial Sequence
  Oligonucleotide for detection of SNP TSC0017554
caaacacactctt

SEQ ID NO: 67021 - DNA, 13 bp, Artificial Sequence
  Oligonucleotide for detection of SNP TSC0017554
aagagtatgtttg

SEQ ID NO: 67022 - DNA, 13 bp, Artificial Sequence
  Oligonucleotide for detection of SNP TSC0017554
caaacatactctt

SEQ ID NO: 67023 - DNA, 13 bp, Artificial Sequence
  Oligonucleotide for detection of SNP TSC0017554
aagagcgtgtttg

SEQ ID NO: 67024 - DNA, 13 bp, Artificial Sequence
  Oligonucleotide for detection of SNP TSC0017554
caaacacgctctt

SEQ ID NO: 67025 - DNA, 13 bp, Artificial Sequence
  Oligonucleotide for detection of SNP TSC0017555
tatttgtattgag

SEQ ID NO: 67026 - DNA, 13 bp, Artificial Sequence
  Oligonucleotide for detection of SNP TSC0017555
ctcaatacaaata

SEQ ID NO: 67027 - DNA, 13 bp, Artificial Sequence
  Oligonucleotide for detection of SNP TSC0017555
tatttggattgag

SEQ ID NO: 67028 - DNA, 13 bp, Artificial Sequence
  Oligonucleotide for detection of SNP TSC0017555
ctcaatccaaata

SEQ ID NO: 67029 - DNA, 13 bp, Artificial Sequence
  Oligonucleotide for detection of SNP TSC0017555
tattcgtattgag

SEQ ID NO: 67030 - DNA, 13 bp, Artificial Sequence
  Oligonucleotide for detection of SNP TSC0017555
ctcaatacgaata

SEQ ID NO: 67031 - DNA, 13 bp, Artificial Sequence
  Oligonucleotide for detection of SNP TSC0017555
tattcggattgag

SEQ ID NO: 67032 - DNA, 13 bp, Artificial Sequence
  Oligonucleotide for detection of SNP TSC0017555
ctcaatccgaata

SEQ ID NO: 67033 - DNA, 13 bp, Artificial Sequence
  Oligonucleotide for detection of SNP TSC0017555
tttaatgtggatg

SEQ ID NO: 67034 - DNA, 13 bp, Artificial Sequence
  Oligonucleotide for detection of SNP TSC0017555
catccacattaaa

SEQ ID NO: 67035 - DNA, 13 bp, Artificial Sequence
  Oligonucleotide for detection of SNP TSC0017555
tttaatttggatg

SEQ ID NO: 67036 - DNA, 13 bp, Artificial Sequence
  Oligonucleotide for detection of SNP TSC0017555
catccaaattaaa

SEQ ID NO: 67037 - DNA, 13 bp, Artificial Sequence
  Oligonucleotide for detection of SNP TSC0017555
tttaatgcggatg

SEQ ID NO: 67038 - DNA, 13 bp, Artificial Sequence
  Oligonucleotide for detection of SNP TSC0017555
catccgcattaaa

SEQ ID NO: 67039 - DNA, 13 bp, Artificial Sequence
  Oligonucleotide for detection of SNP TSC0017555
tttaattcggatg

SEQ ID NO: 67040 - DNA, 13 bp, Artificial Sequence
  Oligonucleotide for detection of SNP TSC0017555
catccgaattaaa

SEQ ID NO: 67041 - DNA, 13 bp, Artificial Sequence
  Oligonucleotide for detection of SNP TSC0017559
tattatgatttat

SEQ ID NO: 67042 - DNA, 13 bp, Artificial Sequence
  Oligonucleotide for detection of SNP TSC0017559
ataaatcataata

SEQ ID NO: 67043 - DNA, 13 bp, Artificial Sequence
  Oligonucleotide for detection of SNP TSC0017559
tattattatttat

SEQ ID NO: 67044 - DNA, 13 bp, Artificial Sequence
  Oligonucleotide for detection of SNP TSC0017559
ataaataataata

SEQ ID NO: 67045 - DNA, 13 bp, Artificial Sequence
  Oligonucleotide for detection of SNP TSC0017559
atggattatagta

SEQ ID NO: 67046 - DNA, 13 bp, Artificial Sequence
  Oligonucleotide for detection of SNP TSC0017559
tactataatccat

SEQ ID NO: 67047 - DNA, 13 bp, Artificial Sequence
  Oligonucleotide for detection of SNP TSC0017559
atggataatagta

SEQ ID NO: 67048 - DNA, 13 bp, Artificial Sequence
  Oligonucleotide for detection of SNP TSC0017559
tactattatccat

SEQ ID NO: 67049 - DNA, 13 bp, Artificial Sequence
  Oligonucleotide for detection of SNP TSC0017563
atttaggggggty

SEQ ID NO: 67050 - DNA, 13 bp, Artificial Sequence
  Oligonucleotide for detection of SNP TSC0017563
racccccctaaat

SEQ ID NO: 67051 - DNA, 13 bp, Artificial Sequence
  Oligonucleotide for detection of SNP TSC0017563
atttagtggggty

SEQ ID NO: 67052 - DNA, 13 bp, Artificial Sequence
  Oligonucleotide for detection of SNP TSC0017563
raccccactaaat

SEQ ID NO: 67053 - DNA, 13 bp, Artificial Sequence
  Oligonucleotide for detection of SNP TSC0017563
ggtttttttaagt

SEQ ID NO: 67054 - DNA, 13 bp, Artificial Sequence
  Oligonucleotide for detection of SNP TSC0017563
acttaaaaaaacc

SEQ ID NO: 67055 - DNA, 13 bp, Artificial Sequence
  Oligonucleotide for detection of SNP TSC0017563
ggttttattaagt

SEQ ID NO: 67056 - DNA, 13 bp, Artificial Sequence
  Oligonucleotide for detection of SNP TSC0017563
acttaataaaacc

SEQ ID NO: 67057 - DNA, 13 bp, Artificial Sequence
  Oligonucleotide for detection of SNP TSC0017564
tagtgttttgtgt

SEQ ID NO: 67058 - DNA, 13 bp, Artificial Sequence
  Oligonucleotide for detection of SNP TSC0017564
acacaaaacacta

SEQ ID NO: 67059 - DNA, 13 bp, Artificial Sequence
  Oligonucleotide for detection of SNP TSC0017564
tagtgtgttgtgt

SEQ ID NO: 67060 - DNA, 13 bp, Artificial Sequence
  Oligonucleotide for detection of SNP TSC0017564
acacaacacacta

SEQ ID NO: 67061 - DNA, 13 bp, Artificial Sequence
  Oligonucleotide for detection of SNP TSC0017564
tagtgcgttgtgt

SEQ ID NO: 67062 - DNA, 13 bp, Artificial Sequence
  Oligonucleotide for detection of SNP TSC0017564
acacaacgcacta

SEQ ID NO: 67063 - DNA, 13 bp, Artificial Sequence
  Oligonucleotide for detection of SNP TSC0017564
atatagggtatta

SEQ ID NO: 67064 - DNA, 13 bp, Artificial Sequence
  Oligonucleotide for detection of SNP TSC0017564
taataccctatat

SEQ ID NO: 67065 - DNA, 13 bp, Artificial Sequence
  Oligonucleotide for detection of SNP TSC0017564
atatagtgtatta

SEQ ID NO: 67066 - DNA, 13 bp, Artificial Sequence
  Oligonucleotide for detection of SNP TSC0017564
taatacactatat

SEQ ID NO: 67067 - DNA, 13 bp, Artificial Sequence
  Oligonucleotide for detection of SNP TSC0017564
atatagcgtatta

SEQ ID NO: 67068 - DNA, 13 bp, Artificial Sequence
  Oligonucleotide for detection of SNP TSC0017564
taatacgctatat

SEQ ID NO: 67069 - DNA, 13 bp, Artificial Sequence
  Oligonucleotide for detection of SNP TSC0017565
ggttgaatttttt

SEQ ID NO: 67070 - DNA, 13 bp, Artificial Sequence
  Oligonucleotide for detection of SNP TSC0017565
aaaaaattcaacc

SEQ ID NO: 67071 - DNA, 13 bp, Artificial Sequence
  Oligonucleotide for detection of SNP TSC0017565
ggttgattttttt

SEQ ID NO: 67072 - DNA, 13 bp, Artificial Sequence
  Oligonucleotide for detection of SNP TSC0017565
aaaaaaatcaacc

SEQ ID NO: 67073 - DNA, 13 bp, Artificial Sequence
  Oligonucleotide for detection of SNP TSC0017565
agaaaatttaaty

SEQ ID NO: 67074 - DNA, 13 bp, Artificial Sequence
  Oligonucleotide for detection of SNP TSC0017565
rattaaattttct

SEQ ID NO: 67075 - DNA, 13 bp, Artificial Sequence
  Oligonucleotide for detection of SNP TSC0017565
agaaaaattaaty

SEQ ID NO: 67076 - DNA, 13 bp, Artificial Sequence
  Oligonucleotide for detection of SNP TSC0017565
rattaatttttct

SEQ ID NO: 67077 - DNA, 13 bp, Artificial Sequence
  Oligonucleotide for detection of SNP TSC0017568
tattttatttaga

SEQ ID NO: 67078 - DNA, 13 bp, Artificial Sequence
  Oligonucleotide for detection of SNP TSC0017568
tctaaataaaata

SEQ ID NO: 67079 - DNA, 13 bp, Artificial Sequence
  Oligonucleotide for detection of SNP TSC0017568
tattttgtttaga

SEQ ID NO: 67080 - DNA, 13 bp, Artificial Sequence
  Oligonucleotide for detection of SNP TSC0017568
tctaaacaaaata

SEQ ID NO: 67081 - DNA, 13 bp, Artificial Sequence
  Oligonucleotide for detection of SNP TSC0017569
tagaatatgtata

SEQ ID NO: 67082 - DNA, 13 bp, Artificial Sequence
  Oligonucleotide for detection of SNP TSC0017569
tatacatattcta

SEQ ID NO: 67083 - DNA, 13 bp, Artificial Sequence
  Oligonucleotide for detection of SNP TSC0017569
tagaatttgtata

SEQ ID NO: 67084 - DNA, 13 bp, Artificial Sequence
  Oligonucleotide for detection of SNP TSC0017569
tatacaaattcta

SEQ ID NO: 67085 - DNA, 13 bp, Artificial Sequence
  Oligonucleotide for detection of SNP TSC0017569
tatatagattttg

SEQ ID NO: 67086 - DNA, 13 bp, Artificial Sequence
  Oligonucleotide for detection of SNP TSC0017569
caaaatctatata

SEQ ID NO: 67087 - DNA, 13 bp, Artificial Sequence
  Oligonucleotide for detection of SNP TSC0017572
agtttggaattta

SEQ ID NO: 67088 - DNA, 13 bp, Artificial Sequence
  Oligonucleotide for detection of SNP TSC0017572
taaattccaaact

SEQ ID NO: 67089 - DNA, 13 bp, Artificial Sequence
  Oligonucleotide for detection of SNP TSC0017572
agtttgaaattta

SEQ ID NO: 67090 - DNA, 13 bp, Artificial Sequence
  Oligonucleotide for detection of SNP TSC0017572
taaatttcaaact

SEQ ID NO: 67091 - DNA, 13 bp, Artificial Sequence
  Oligonucleotide for detection of SNP TSC0017573
tgtattattaggg

SEQ ID NO: 67092 - DNA, 13 bp, Artificial Sequence
  Oligonucleotide for detection of SNP TSC0017573
ccctaataataca

SEQ ID NO: 67093 - DNA, 13 bp, Artificial Sequence
  Oligonucleotide for detection of SNP TSC0017573
tgtattgttaggg

SEQ ID NO: 67094 - DNA, 13 bp, Artificial Sequence
  Oligonucleotide for detection of SNP TSC0017573
ccctaacaataca

SEQ ID NO: 67095 - DNA, 13 bp, Artificial Sequence
  Oligonucleotide for detection of SNP TSC0017573
tgtatcgttaggg

SEQ ID NO: 67096 - DNA, 13 bp, Artificial Sequence
  Oligonucleotide for detection of SNP TSC0017573
ccctaacgataca

SEQ ID NO: 67097 - DNA, 13 bp, Artificial Sequence
  Oligonucleotide for detection of SNP TSC0017573
ttttggtgatata

SEQ ID NO: 67098 - DNA, 13 bp, Artificial Sequence
  Oligonucleotide for detection of SNP TSC0017573
tatatcaccaaaa

SEQ ID NO: 67099 - DNA, 13 bp, Artificial Sequence
  Oligonucleotide for detection of SNP TSC0017573
ttttggcgatata

SEQ ID NO: 67100 - DNA, 13 bp, Artificial Sequence
  Oligonucleotide for detection of SNP TSC0017573
tatatcgccaaaa

SEQ ID NO: 67101 - DNA, 13 bp, Artificial Sequence
  Oligonucleotide for detection of SNP TSC0017574
ttatgaggtttat

SEQ ID NO: 67102 - DNA, 13 bp, Artificial Sequence
  Oligonucleotide for detection of SNP TSC0017574
ataaacctcataa

SEQ ID NO: 67103 - DNA, 13 bp, Artificial Sequence
  Oligonucleotide for detection of SNP TSC0017574
ttatgaagtttat

SEQ ID NO: 67104 - DNA, 13 bp, Artificial Sequence
  Oligonucleotide for detection of SNP TSC0017574
ataaacttcataa

SEQ ID NO: 67105 - DNA, 13 bp, Artificial Sequence
  Oligonucleotide for detection of SNP TSC0017576
aaatgaatttttt

SEQ ID NO: 67106 - DNA, 13 bp, Artificial Sequence
  Oligonucleotide for detection of SNP TSC0017576
aaaaaattcattt

SEQ ID NO: 67107 - DNA, 13 bp, Artificial Sequence
  Oligonucleotide for detection of SNP TSC0017577
attatttataatt

SEQ ID NO: 67108 - DNA, 13 bp, Artificial Sequence
  Oligonucleotide for detection of SNP TSC0017577
aattataaataat

SEQ ID NO: 67109 - DNA, 13 bp, Artificial Sequence
  Oligonucleotide for detection of SNP TSC0017577
attattgataatt

SEQ ID NO: 67110 - DNA, 13 bp, Artificial Sequence
  Oligonucleotide for detection of SNP TSC0017577
aattatcaataat

SEQ ID NO: 67111 - DNA, 13 bp, Artificial Sequence
  Oligonucleotide for detection of SNP TSC0017577
agttgtgagtggt

SEQ ID NO: 67112 - DNA, 13 bp, Artificial Sequence
  Oligonucleotide for detection of SNP TSC0017577
accactcacaact

SEQ ID NO: 67113 - DNA, 13 bp, Artificial Sequence
  Oligonucleotide for detection of SNP TSC0017577
agttgttagtggt

SEQ ID NO: 67114 - DNA, 13 bp, Artificial Sequence
  Oligonucleotide for detection of SNP TSC0017577
accactaacaact

SEQ ID NO: 67115 - DNA, 13 bp, Artificial Sequence
  Oligonucleotide for detection of SNP TSC0017578
tttttagttttaa

SEQ ID NO: 67116 - DNA, 13 bp, Artificial Sequence
  Oligonucleotide for detection of SNP TSC0017578
ttaaaactaaaaa

SEQ ID NO: 67117 - DNA, 13 bp, Artificial Sequence
  Oligonucleotide for detection of SNP TSC0017584
tgatattttatag

SEQ ID NO: 67118 - DNA, 13 bp, Artificial Sequence
  Oligonucleotide for detection of SNP TSC0017584
ctataaaatatca

SEQ ID NO: 67119 - DNA, 13 bp, Artificial Sequence
  Oligonucleotide for detection of SNP TSC0017584
tgatatgttatag

SEQ ID NO: 67120 - DNA, 13 bp, Artificial Sequence
  Oligonucleotide for detection of SNP TSC0017584
ctataacatatca

SEQ ID NO: 67121 - DNA, 13 bp, Artificial Sequence
  Oligonucleotide for detection of SNP TSC0017584
tgatacgttatag

SEQ ID NO: 67122 - DNA, 13 bp, Artificial Sequence
  Oligonucleotide for detection of SNP TSC0017584
ctataacgtatca

SEQ ID NO: 67123 - DNA, 13 bp, Artificial Sequence
  Oligonucleotide for detection of SNP TSC0017584
ttgtgaggtatta

SEQ ID NO: 67124 - DNA, 13 bp, Artificial Sequence
  Oligonucleotide for detection of SNP TSC0017584
taatacctcacaa

SEQ ID NO: 67125 - DNA, 13 bp, Artificial Sequence
  Oligonucleotide for detection of SNP TSC0017584
ttgtgatgtatta

SEQ ID NO: 67126 - DNA, 13 bp, Artificial Sequence
  Oligonucleotide for detection of SNP TSC0017584
taatacatcacaa

SEQ ID NO: 67127 - DNA, 13 bp, Artificial Sequence
  Oligonucleotide for detection of SNP TSC0017584
ttgtgacgtatta

SEQ ID NO: 67128 - DNA, 13 bp, Artificial Sequence
  Oligonucleotide for detection of SNP TSC0017584
taatacgtcacaa

SEQ ID NO: 67129 - DNA, 13 bp, Artificial Sequence
  Oligonucleotide for detection of SNP TSC0017586
ttaaatggagatt

SEQ ID NO: 67130 - DNA, 13 bp, Artificial Sequence
  Oligonucleotide for detection of SNP TSC0017586
aatctccatttaa

SEQ ID NO: 67131 - DNA, 13 bp, Artificial Sequence
  Oligonucleotide for detection of SNP TSC0017586
ttaaatagagatt

SEQ ID NO: 67132 - DNA, 13 bp, Artificial Sequence
  Oligonucleotide for detection of SNP TSC0017586
aatctctatttaa

SEQ ID NO: 67133 - DNA, 13 bp, Artificial Sequence
  Oligonucleotide for detection of SNP TSC0017588
gtgattttttgtt

SEQ ID NO: 67134 - DNA, 13 bp, Artificial Sequence
  Oligonucleotide for detection of SNP TSC0017588
aacaaaaaatcac

SEQ ID NO: 67135 - DNA, 13 bp, Artificial Sequence
  Oligonucleotide for detection of SNP TSC0017588
gtgattgtttgtt

SEQ ID NO: 67136 - DNA, 13 bp, Artificial Sequence
  Oligonucleotide for detection of SNP TSC0017588
aacaaacaatcac

SEQ ID NO: 67137 - DNA, 13 bp, Artificial Sequence
  Oligonucleotide for detection of SNP TSC0017588
agtaaggagttay

SEQ ID NO: 67138 - DNA, 13 bp, Artificial Sequence
  Oligonucleotide for detection of SNP TSC0017588
rtaactccttact

SEQ ID NO: 67139 - DNA, 13 bp, Artificial Sequence
  Oligonucleotide for detection of SNP TSC0017588
agtaagtagttay

SEQ ID NO: 67140 - DNA, 13 bp, Artificial Sequence
  Oligonucleotide for detection of SNP TSC0017588
rtaactacttact

SEQ ID NO: 67141 - DNA, 13 bp, Artificial Sequence
  Oligonucleotide for detection of SNP TSC0017589
taataaatttttt

SEQ ID NO: 67142 - DNA, 13 bp, Artificial Sequence
  Oligonucleotide for detection of SNP TSC0017589
aaaaaatttatta

SEQ ID NO: 67143 - DNA, 13 bp, Artificial Sequence
  Oligonucleotide for detection of SNP TSC0017589
taataattttttt

SEQ ID NO: 67144 - DNA, 13 bp, Artificial Sequence
  Oligonucleotide for detection of SNP TSC0017589
aaaaaaattatta

SEQ ID NO: 67145 - DNA, 13 bp, Artificial Sequence
  Oligonucleotide for detection of SNP TSC0017589
agaaggtttattg

SEQ ID NO: 67146 - DNA, 13 bp, Artificial Sequence
  Oligonucleotide for detection of SNP TSC0017589
caataaaccttct

SEQ ID NO: 67147 - DNA, 13 bp, Artificial Sequence
  Oligonucleotide for detection of SNP TSC0017589
agaaggattattg

SEQ ID NO: 67148 - DNA, 13 bp, Artificial Sequence
  Oligonucleotide for detection of SNP TSC0017589
caataatccttct

SEQ ID NO: 67149 - DNA, 13 bp, Artificial Sequence
  Oligonucleotide for detection of SNP TSC0017590
gttattatgtttg

SEQ ID NO: 67150 - DNA, 13 bp, Artificial Sequence
  Oligonucleotide for detection of SNP TSC0017590
caaacataataac

SEQ ID NO: 67151 - DNA, 13 bp, Artificial Sequence
  Oligonucleotide for detection of SNP TSC0017590
gttattgtgtttg

SEQ ID NO: 67152 - DNA, 13 bp, Artificial Sequence
  Oligonucleotide for detection of SNP TSC0017590
caaacacaataac

SEQ ID NO: 67153 - DNA, 13 bp, Artificial Sequence
  Oligonucleotide for detection of SNP TSC0017590
gttatcgtgtttg

SEQ ID NO: 67154 - DNA, 13 bp, Artificial Sequence
  Oligonucleotide for detection of SNP TSC0017590
caaacacgataac

SEQ ID NO: 67155 - DNA, 13 bp, Artificial Sequence
  Oligonucleotide for detection of SNP TSC0017590
taggtatggtggy

SEQ ID NO: 67156 - DNA, 13 bp, Artificial Sequence
  Oligonucleotide for detection of SNP TSC0017590
rccaccataccta

SEQ ID NO: 67157 - DNA, 13 bp, Artificial Sequence
  Oligonucleotide for detection of SNP TSC0017590
taggtacggtggy

SEQ ID NO: 67158 - DNA, 13 bp, Artificial Sequence
  Oligonucleotide for detection of SNP TSC0017590
rccaccgtaccta

SEQ ID NO: 67159 - DNA, 13 bp, Artificial Sequence
  Oligonucleotide for detection of SNP TSC0017591
atgtttgagttaa

SEQ ID NO: 67160 - DNA, 13 bp, Artificial Sequence
  Oligonucleotide for detection of SNP TSC0017591
ttaactcaaacat

SEQ ID NO: 67161 - DNA, 13 bp, Artificial Sequence
  Oligonucleotide for detection of SNP TSC0017591
atgttttagttaa

SEQ ID NO: 67162 - DNA, 13 bp, Artificial Sequence
  Oligonucleotide for detection of SNP TSC0017591
ttaactaaaacat

SEQ ID NO: 67163 - DNA, 13 bp, Artificial Sequence
  Oligonucleotide for detection of SNP TSC0017591
ttaatttaaatat

SEQ ID NO: 67164 - DNA, 13 bp, Artificial Sequence
  Oligonucleotide for detection of SNP TSC0017591
atatttaaattaa

SEQ ID NO: 67165 - DNA, 13 bp, Artificial Sequence
  Oligonucleotide for detection of SNP TSC0017591
ttaattaaaatat

SEQ ID NO: 67166 - DNA, 13 bp, Artificial Sequence
  Oligonucleotide for detection of SNP TSC0017591
atattttaattaa

SEQ ID NO: 67167 - DNA, 13 bp, Artificial Sequence
  Oligonucleotide for detection of SNP TSC0017592
aggattgtttgag

SEQ ID NO: 67168 - DNA, 13 bp, Artificial Sequence
  Oligonucleotide for detection of SNP TSC0017592
ctcaaacaatcct

SEQ ID NO: 67169 - DNA, 13 bp, Artificial Sequence
  Oligonucleotide for detection of SNP TSC0017592
aggattatttgag

SEQ ID NO: 67170 - DNA, 13 bp, Artificial Sequence
  Oligonucleotide for detection of SNP TSC0017592
ctcaaataatcct

SEQ ID NO: 67171 - DNA, 13 bp, Artificial Sequence
  Oligonucleotide for detection of SNP TSC0017592
aggatcgtttgag

SEQ ID NO: 67172 - DNA, 13 bp, Artificial Sequence
  Oligonucleotide for detection of SNP TSC0017592
ctcaaacgatcct

SEQ ID NO: 67173 - DNA, 13 bp, Artificial Sequence
  Oligonucleotide for detection of SNP TSC0017593
atggtagagaaay

SEQ ID NO: 67174 - DNA, 13 bp, Artificial Sequence
  Oligonucleotide for detection of SNP TSC0017593
rtttctctaccat

SEQ ID NO: 67175 - DNA, 13 bp, Artificial Sequence
  Oligonucleotide for detection of SNP TSC0017593
atggtatagaaay

SEQ ID NO: 67176 - DNA, 13 bp, Artificial Sequence
  Oligonucleotide for detection of SNP TSC0017593
rtttctataccat

SEQ ID NO: 67177 - DNA, 13 bp, Artificial Sequence
  Oligonucleotide for detection of SNP TSC0017593
gtttttttgttat

SEQ ID NO: 67178 - DNA, 13 bp, Artificial Sequence
  Oligonucleotide for detection of SNP TSC0017593
ataacaaaaaaac

SEQ ID NO: 67179 - DNA, 13 bp, Artificial Sequence
  Oligonucleotide for detection of SNP TSC0017593
gtttttatgttat

SEQ ID NO: 67180 - DNA, 13 bp, Artificial Sequence
  Oligonucleotide for detection of SNP TSC0017593
ataacataaaaac

SEQ ID NO: 67181 - DNA, 13 bp, Artificial Sequence
  Oligonucleotide for detection of SNP TSC0017597
aaatgtatttggg

SEQ ID NO: 67182 - DNA, 13 bp, Artificial Sequence
  Oligonucleotide for detection of SNP TSC0017597
cccaaatacattt

SEQ ID NO: 67183 - DNA, 13 bp, Artificial Sequence
  Oligonucleotide for detection of SNP TSC0017597
aaatgtgtttggg

SEQ ID NO: 67184 - DNA, 13 bp, Artificial Sequence
  Oligonucleotide for detection of SNP TSC0017597
cccaaacacattt

SEQ ID NO: 67185 - DNA, 13 bp, Artificial Sequence
  Oligonucleotide for detection of SNP TSC0017597
aaacgtatttggg

SEQ ID NO: 67186 - DNA, 13 bp, Artificial Sequence
  Oligonucleotide for detection of SNP TSC0017597
cccaaatacgttt

SEQ ID NO: 67187 - DNA, 13 bp, Artificial Sequence
  Oligonucleotide for detection of SNP TSC0017597
aaacgtgtttggg

SEQ ID NO: 67188 - DNA, 13 bp, Artificial Sequence
  Oligonucleotide for detection of SNP TSC0017597
cccaaacacgttt

SEQ ID NO: 67189 - DNA, 13 bp, Artificial Sequence
  Oligonucleotide for detection of SNP TSC0017597
aaatgtattcggg

SEQ ID NO: 67190 - DNA, 13 bp, Artificial Sequence
  Oligonucleotide for detection of SNP TSC0017597
cccgaatacattt

SEQ ID NO: 67191 - DNA, 13 bp, Artificial Sequence
  Oligonucleotide for detection of SNP TSC0017597
aaatgcgtttggg

SEQ ID NO: 67192 - DNA, 13 bp, Artificial Sequence
  Oligonucleotide for detection of SNP TSC0017597
cccaaacgcattt

SEQ ID NO: 67193 - DNA, 13 bp, Artificial Sequence
  Oligonucleotide for detection of SNP TSC0017597
aaacgtattcggg

SEQ ID NO: 67194 - DNA, 13 bp, Artificial Sequence
  Oligonucleotide for detection of SNP TSC0017597
cccgaatacgttt

SEQ ID NO: 67195 - DNA, 13 bp, Artificial Sequence
  Oligonucleotide for detection of SNP TSC0017597
aaatgtgttcggg

SEQ ID NO: 67196 - DNA, 13 bp, Artificial Sequence
  Oligonucleotide for detection of SNP TSC0017597
cccgaacacattt

SEQ ID NO: 67197 - DNA, 13 bp, Artificial Sequence
  Oligonucleotide for detection of SNP TSC0017597
aaacgcgtttggg

SEQ ID NO: 67198 - DNA, 13 bp, Artificial Sequence
  Oligonucleotide for detection of SNP TSC0017597
cccaaacgcgttt

SEQ ID NO: 67199 - DNA, 13 bp, Artificial Sequence
  Oligonucleotide for detection of SNP TSC0017597
aaacgtgttcggg

SEQ ID NO: 67200 - DNA, 13 bp, Artificial Sequence
  Oligonucleotide for detection of SNP TSC0017597
cccgaacacgttt

SEQ ID NO: 67201 - DNA, 13 bp, Artificial Sequence
  Oligonucleotide for detection of SNP TSC0017597
aaatgcgttcggg

SEQ ID NO: 67202 - DNA, 13 bp, Artificial Sequence
  Oligonucleotide for detection of SNP TSC0017597
cccgaacgcattt

SEQ ID NO: 67203 - DNA, 13 bp, Artificial Sequence
  Oligonucleotide for detection of SNP TSC0017597
aaacgcgttcggg

SEQ ID NO: 67204 - DNA, 13 bp, Artificial Sequence
  Oligonucleotide for detection of SNP TSC0017597
cccgaacgcgttt

SEQ ID NO: 67205 - DNA, 13 bp, Artificial Sequence
  Oligonucleotide for detection of SNP TSC0017597
tttgggtgtgttt

SEQ ID NO: 67206 - DNA, 13 bp, Artificial Sequence
  Oligonucleotide for detection of SNP TSC0017597
aaacacacccaaa

SEQ ID NO: 67207 - DNA, 13 bp, Artificial Sequence
  Oligonucleotide for detection of SNP TSC0017597
ttcgggtgtgttt

SEQ ID NO: 67208 - DNA, 13 bp, Artificial Sequence
  Oligonucleotide for detection of SNP TSC0017597
aaacacacccgaa

SEQ ID NO: 67209 - DNA, 13 bp, Artificial Sequence
  Oligonucleotide for detection of SNP TSC0017597
tttgggtgcgttt

SEQ ID NO: 67210 - DNA, 13 bp, Artificial Sequence
  Oligonucleotide for detection of SNP TSC0017597
aaacgcacccaaa

SEQ ID NO: 67211 - DNA, 13 bp, Artificial Sequence
  Oligonucleotide for detection of SNP TSC0017597
tttgggcgtgttt

SEQ ID NO: 67212 - DNA, 13 bp, Artificial Sequence
  Oligonucleotide for detection of SNP TSC0017597
aaacacgcccaaa

SEQ ID NO: 67213 - DNA, 13 bp, Artificial Sequence
  Oligonucleotide for detection of SNP TSC0017597
ttcgggtgcgttt

SEQ ID NO: 67214 - DNA, 13 bp, Artificial Sequence
  Oligonucleotide for detection of SNP TSC0017597
aaacgcacccgaa

SEQ ID NO: 67215 - DNA, 13 bp, Artificial Sequence
  Oligonucleotide for detection of SNP TSC0017597
ttcgggcgtgttt

SEQ ID NO: 67216 - DNA, 13 bp, Artificial Sequence
  Oligonucleotide for detection of SNP TSC0017597
aaacacgcccgaa

SEQ ID NO: 67217 - DNA, 13 bp, Artificial Sequence
  Oligonucleotide for detection of SNP TSC0017597
tttgggcgcgttt

SEQ ID NO: 67218 - DNA, 13 bp, Artificial Sequence
  Oligonucleotide for detection of SNP TSC0017597
aaacgcgcccaaa

SEQ ID NO: 67219 - DNA, 13 bp, Artificial Sequence
  Oligonucleotide for detection of SNP TSC0017597
ttcgggcgcgttt

SEQ ID NO: 67220 - DNA, 13 bp, Artificial Sequence
  Oligonucleotide for detection of SNP TSC0017597
aaacgcgcccgaa

SEQ ID NO: 67221 - DNA, 13 bp, Artificial Sequence
  Oligonucleotide for detection of SNP TSC0017598
gattgtatggtag

SEQ ID NO: 67222 - DNA, 13 bp, Artificial Sequence
  Oligonucleotide for detection of SNP TSC0017598
ctaccatacaatc

SEQ ID NO: 67223 - DNA, 13 bp, Artificial Sequence
  Oligonucleotide for detection of SNP TSC0017598
gattgtgtggtag

SEQ ID NO: 67224 - DNA, 13 bp, Artificial Sequence
  Oligonucleotide for detection of SNP TSC0017598
ctaccacacaatc

SEQ ID NO: 67225 - DNA, 13 bp, Artificial Sequence
  Oligonucleotide for detection of SNP TSC0017599
aagagatgatgaa

SEQ ID NO: 67226 - DNA, 13 bp, Artificial Sequence
  Oligonucleotide for detection of SNP TSC0017599
ttcatcatctctt

SEQ ID NO: 67227 - DNA, 13 bp, Artificial Sequence
  Oligonucleotide for detection of SNP TSC0017599
aagagacgatgaa

SEQ ID NO: 67228 - DNA, 13 bp, Artificial Sequence
  Oligonucleotide for detection of SNP TSC0017599
ttcatcgtctctt

SEQ ID NO: 67229 - DNA, 13 bp, Artificial Sequence
  Oligonucleotide for detection of SNP TSC0017600
gatgttgtgtatg

SEQ ID NO: 67230 - DNA, 13 bp, Artificial Sequence
  Oligonucleotide for detection of SNP TSC0017600
catacacaacatc

SEQ ID NO: 67231 - DNA, 13 bp, Artificial Sequence
  Oligonucleotide for detection of SNP TSC0017600
gatgttatgtatg

SEQ ID NO: 67232 - DNA, 13 bp, Artificial Sequence
  Oligonucleotide for detection of SNP TSC0017600
catacataacatc

SEQ ID NO: 67233 - DNA, 13 bp, Artificial Sequence
  Oligonucleotide for detection of SNP TSC0017600
gatgttgtgtacg

SEQ ID NO: 67234 - DNA, 13 bp, Artificial Sequence
  Oligonucleotide for detection of SNP TSC0017600
cgtacacaacatc

SEQ ID NO: 67235 - DNA, 13 bp, Artificial Sequence
  Oligonucleotide for detection of SNP TSC0017600
gatgttatgtacg

SEQ ID NO: 67236 - DNA, 13 bp, Artificial Sequence
  Oligonucleotide for detection of SNP TSC0017600
cgtacataacatc

SEQ ID NO: 67237 - DNA, 13 bp, Artificial Sequence
  Oligonucleotide for detection of SNP TSC0017601
aaggggatagaat

SEQ ID NO: 67238 - DNA, 13 bp, Artificial Sequence
  Oligonucleotide for detection of SNP TSC0017601
attctatcccctt

SEQ ID NO: 67239 - DNA, 13 bp, Artificial Sequence
  Oligonucleotide for detection of SNP TSC0017601
aagggggtagaat

SEQ ID NO: 67240 - DNA, 13 bp, Artificial Sequence
  Oligonucleotide for detection of SNP TSC0017601
attctaccccctt

SEQ ID NO: 67241 - DNA, 13 bp, Artificial Sequence
  Oligonucleotide for detection of SNP TSC0017604
gggagggttgtat

SEQ ID NO: 67242 - DNA, 13 bp, Artificial Sequence
  Oligonucleotide for detection of SNP TSC0017604
atacaaccctccc

SEQ ID NO: 67243 - DNA, 13 bp, Artificial Sequence
  Oligonucleotide for detection of SNP TSC0017604
gggaggattgtat

SEQ ID NO: 67244 - DNA, 13 bp, Artificial Sequence
  Oligonucleotide for detection of SNP TSC0017604
atacaatcctccc

SEQ ID NO: 67245 - DNA, 13 bp, Artificial Sequence
  Oligonucleotide for detection of SNP TSC0017605
agtttagttaaga

SEQ ID NO: 67246 - DNA, 13 bp, Artificial Sequence
  Oligonucleotide for detection of SNP TSC0017605
tcttaactaaact

SEQ ID NO: 67247 - DNA, 13 bp, Artificial Sequence
  Oligonucleotide for detection of SNP TSC0017605
agtttaattaaga

SEQ ID NO: 67248 - DNA, 13 bp, Artificial Sequence
  Oligonucleotide for detection of SNP TSC0017605
tcttaattaaact

SEQ ID NO: 67249 - DNA, 13 bp, Artificial Sequence
  Oligonucleotide for detection of SNP TSC0017606
ggttttaggagag

SEQ ID NO: 67250 - DNA, 13 bp, Artificial Sequence
  Oligonucleotide for detection of SNP TSC0017606
ctctcctaaaacc

SEQ ID NO: 67251 - DNA, 13 bp, Artificial Sequence
  Oligonucleotide for detection of SNP TSC0017606
ggttttgggagag

SEQ ID NO: 67252 - DNA, 13 bp, Artificial Sequence
  Oligonucleotide for detection of SNP TSC0017606
ctctcccaaaacc

SEQ ID NO: 67253 - DNA, 13 bp, Artificial Sequence
  Oligonucleotide for detection of SNP TSC0017606
ggtttcgggagag

SEQ ID NO: 67254 - DNA, 13 bp, Artificial Sequence
  Oligonucleotide for detection of SNP TSC0017606
ctctcccgaaacc

SEQ ID NO: 67255 - DNA, 13 bp, Artificial Sequence
  Oligonucleotide for detection of SNP TSC0017608
gttgttaaggtty

SEQ ID NO: 67256 - DNA, 13 bp, Artificial Sequence
  Oligonucleotide for detection of SNP TSC0017608
raaccttaacaac

SEQ ID NO: 67257 - DNA, 13 bp, Artificial Sequence
  Oligonucleotide for detection of SNP TSC0017608
gttgttgaggtty

SEQ ID NO: 67258 - DNA, 13 bp, Artificial Sequence
  Oligonucleotide for detection of SNP TSC0017608
raacctcaacaac

SEQ ID NO: 67259 - DNA, 13 bp, Artificial Sequence
  Oligonucleotide for detection of SNP TSC0017608
gttgtcgaggtty

SEQ ID NO: 67260 - DNA, 13 bp, Artificial Sequence
  Oligonucleotide for detection of SNP TSC0017608
raacctcgacaac

SEQ ID NO: 67261 - DNA, 13 bp, Artificial Sequence
  Oligonucleotide for detection of SNP TSC0017608
ggattttgataay

SEQ ID NO: 67262 - DNA, 13 bp, Artificial Sequence
  Oligonucleotide for detection of SNP TSC0017608
rttatcaaaatcc

SEQ ID NO: 67263 - DNA, 13 bp, Artificial Sequence
  Oligonucleotide for detection of SNP TSC0017608
ggatttcgataay

SEQ ID NO: 67264 - DNA, 13 bp, Artificial Sequence
  Oligonucleotide for detection of SNP TSC0017608
rttatcgaaatcc

SEQ ID NO: 67265 - DNA, 13 bp, Artificial Sequence
  Oligonucleotide for detection of SNP TSC0017609
ttttgagtggttg

SEQ ID NO: 67266 - DNA, 13 bp, Artificial Sequence
  Oligonucleotide for detection of SNP TSC0017609
caaccactcaaaa

SEQ ID NO: 67267 - DNA, 13 bp, Artificial Sequence
  Oligonucleotide for detection of SNP TSC0017609
ttttgaatggttg

SEQ ID NO: 67268 - DNA, 13 bp, Artificial Sequence
  Oligonucleotide for detection of SNP TSC0017609
caaccattcaaaa

SEQ ID NO: 67269 - DNA, 13 bp, Artificial Sequence
  Oligonucleotide for detection of SNP TSC0017609
tttcgagtggttg

SEQ ID NO: 67270 - DNA, 13 bp, Artificial Sequence
  Oligonucleotide for detection of SNP TSC0017609
caaccactcgaaa

SEQ ID NO: 67271 - DNA, 13 bp, Artificial Sequence
  Oligonucleotide for detection of SNP TSC0017609
tttcgaatggttg

SEQ ID NO: 67272 - DNA, 13 bp, Artificial Sequence
  Oligonucleotide for detection of SNP TSC0017609
caaccattcgaaa

SEQ ID NO: 67273 - DNA, 13 bp, Artificial Sequence
  Oligonucleotide for detection of SNP TSC0017609
ttttgagcggttg

SEQ ID NO: 67274 - DNA, 13 bp, Artificial Sequence
  Oligonucleotide for detection of SNP TSC0017609
caaccgctcaaaa

SEQ ID NO: 67275 - DNA, 13 bp, Artificial Sequence
  Oligonucleotide for detection of SNP TSC0017609
ttttgaacggttg

SEQ ID NO: 67276 - DNA, 13 bp, Artificial Sequence
  Oligonucleotide for detection of SNP TSC0017609
caaccgttcaaaa

SEQ ID NO: 67277 - DNA, 13 bp, Artificial Sequence
  Oligonucleotide for detection of SNP TSC0017609
tttcgagcggttg

SEQ ID NO: 67278 - DNA, 13 bp, Artificial Sequence
  Oligonucleotide for detection of SNP TSC0017609
caaccgctcgaaa

SEQ ID NO: 67279 - DNA, 13 bp, Artificial Sequence
  Oligonucleotide for detection of SNP TSC0017609
tttcgaacggttg

SEQ ID NO: 67280 - DNA, 13 bp, Artificial Sequence
  Oligonucleotide for detection of SNP TSC0017609
caaccgttcgaaa

SEQ ID NO: 67281 - DNA, 13 bp, Artificial Sequence
  Oligonucleotide for detection of SNP TSC0017610
tataaggtgggat

SEQ ID NO: 67282 - DNA, 13 bp, Artificial Sequence
  Oligonucleotide for detection of SNP TSC0017610
atcccaccttata

SEQ ID NO: 67283 - DNA, 13 bp, Artificial Sequence
  Oligonucleotide for detection of SNP TSC0017610
tataagatgggat

SEQ ID NO: 67284 - DNA, 13 bp, Artificial Sequence
  Oligonucleotide for detection of SNP TSC0017610
atcccatcttata

SEQ ID NO: 67285 - DNA, 13 bp, Artificial Sequence
  Oligonucleotide for detection of SNP TSC0017611
atttaagatataa

SEQ ID NO: 67286 - DNA, 13 bp, Artificial Sequence
  Oligonucleotide for detection of SNP TSC0017611
ttatatcttaaat

SEQ ID NO: 67287 - DNA, 13 bp, Artificial Sequence
  Oligonucleotide for detection of SNP TSC0017611
atttaaaatataa

SEQ ID NO: 67288 - DNA, 13 bp, Artificial Sequence
  Oligonucleotide for detection of SNP TSC0017611
ttatattttaaat

SEQ ID NO: 67289 - DNA, 13 bp, Artificial Sequence
  Oligonucleotide for detection of SNP TSC0017612
tagtttatgttta

SEQ ID NO: 67290 - DNA, 13 bp, Artificial Sequence
  Oligonucleotide for detection of SNP TSC0017612
taaacataaacta

SEQ ID NO: 67291 - DNA, 13 bp, Artificial Sequence
  Oligonucleotide for detection of SNP TSC0017612
tagtttttgttta

SEQ ID NO: 67292 - DNA, 13 bp, Artificial Sequence
  Oligonucleotide for detection of SNP TSC0017612
taaacaaaaacta

SEQ ID NO: 67293 - DNA, 13 bp, Artificial Sequence
  Oligonucleotide for detection of SNP TSC0017612
taggtatgggttg

SEQ ID NO: 67294 - DNA, 13 bp, Artificial Sequence
  Oligonucleotide for detection of SNP TSC0017612
caacccataccta

SEQ ID NO: 67295 - DNA, 13 bp, Artificial Sequence
  Oligonucleotide for detection of SNP TSC0017612
taggtaagggttg

SEQ ID NO: 67296 - DNA, 13 bp, Artificial Sequence
  Oligonucleotide for detection of SNP TSC0017612
caacccttaccta

SEQ ID NO: 67297 - DNA, 13 bp, Artificial Sequence
  Oligonucleotide for detection of SNP TSC0017613
atgttgtgttttg

SEQ ID NO: 67298 - DNA, 13 bp, Artificial Sequence
  Oligonucleotide for detection of SNP TSC0017613
caaaacacaacat

SEQ ID NO: 67299 - DNA, 13 bp, Artificial Sequence
  Oligonucleotide for detection of SNP TSC0017613
atgttgggttttg

SEQ ID NO: 67300 - DNA, 13 bp, Artificial Sequence
  Oligonucleotide for detection of SNP TSC0017613
caaaacccaacat

SEQ ID NO: 67301 - DNA, 13 bp, Artificial Sequence
  Oligonucleotide for detection of SNP TSC0017613
acgttgtgttttg

SEQ ID NO: 67302 - DNA, 13 bp, Artificial Sequence
  Oligonucleotide for detection of SNP TSC0017613
caaaacacaacgt

SEQ ID NO: 67303 - DNA, 13 bp, Artificial Sequence
  Oligonucleotide for detection of SNP TSC0017613
acgttgggttttg

SEQ ID NO: 67304 - DNA, 13 bp, Artificial Sequence
  Oligonucleotide for detection of SNP TSC0017613
caaaacccaacgt

SEQ ID NO: 67305 - DNA, 13 bp, Artificial Sequence
  Oligonucleotide for detection of SNP TSC0017613
atgtcgtgttttg

SEQ ID NO: 67306 - DNA, 13 bp, Artificial Sequence
  Oligonucleotide for detection of SNP TSC0017613
caaaacacgacat

SEQ ID NO: 67307 - DNA, 13 bp, Artificial Sequence
  Oligonucleotide for detection of SNP TSC0017613
atgtcgggttttg

SEQ ID NO: 67308 - DNA, 13 bp, Artificial Sequence
  Oligonucleotide for detection of SNP TSC0017613
caaaacccgacat

SEQ ID NO: 67309 - DNA, 13 bp, Artificial Sequence
  Oligonucleotide for detection of SNP TSC0017613
atgttgcgttttg

SEQ ID NO: 67310 - DNA, 13 bp, Artificial Sequence
  Oligonucleotide for detection of SNP TSC0017613
caaaacgcaacat

SEQ ID NO: 67311 - DNA, 13 bp, Artificial Sequence
  Oligonucleotide for detection of SNP TSC0017613
atgttgggtttcg

SEQ ID NO: 67312 - DNA, 13 bp, Artificial Sequence
  Oligonucleotide for detection of SNP TSC0017613
cgaaacccaacat

SEQ ID NO: 67313 - DNA, 13 bp, Artificial Sequence
  Oligonucleotide for detection of SNP TSC0017613
atgttgtgtttcg

SEQ ID NO: 67314 - DNA, 13 bp, Artificial Sequence
  Oligonucleotide for detection of SNP TSC0017613
cgaaacacaacat

SEQ ID NO: 67315 - DNA, 13 bp, Artificial Sequence
  Oligonucleotide for detection of SNP TSC0017613
acgtcgggttttg

SEQ ID NO: 67316 - DNA, 13 bp, Artificial Sequence
  Oligonucleotide for detection of SNP TSC0017613
caaaacccgacgt

SEQ ID NO: 67317 - DNA, 13 bp, Artificial Sequence
  Oligonucleotide for detection of SNP TSC0017613
acgtcgtgttttg

SEQ ID NO: 67318 - DNA, 13 bp, Artificial Sequence
  Oligonucleotide for detection of SNP TSC0017613
caaaacacgacgt

SEQ ID NO: 67319 - DNA, 13 bp, Artificial Sequence
  Oligonucleotide for detection of SNP TSC0017613
acgttgggtttcg

SEQ ID NO: 67320 - DNA, 13 bp, Artificial Sequence
  Oligonucleotide for detection of SNP TSC0017613
cgaaacccaacgt

SEQ ID NO: 67321 - DNA, 13 bp, Artificial Sequence
  Oligonucleotide for detection of SNP TSC0017613
acgttgcgttttg

SEQ ID NO: 67322 - DNA, 13 bp, Artificial Sequence
  Oligonucleotide for detection of SNP TSC0017613
caaaacgcaacgt

SEQ ID NO: 67323 - DNA, 13 bp, Artificial Sequence
  Oligonucleotide for detection of SNP TSC0017613
atgtcgggtttcg

SEQ ID NO: 67324 - DNA, 13 bp, Artificial Sequence
  Oligonucleotide for detection of SNP TSC0017613
cgaaacccgacat

SEQ ID NO: 67325 - DNA, 13 bp, Artificial Sequence
  Oligonucleotide for detection of SNP TSC0017613
acgttgtgtttcg

SEQ ID NO: 67326 - DNA, 13 bp, Artificial Sequence
  Oligonucleotide for detection of SNP TSC0017613
cgaaacacaacgt

SEQ ID NO: 67327 - DNA, 13 bp, Artificial Sequence
  Oligonucleotide for detection of SNP TSC0017613
acgtcgggtttcg

SEQ ID NO: 67328 - DNA, 13 bp, Artificial Sequence
  Oligonucleotide for detection of SNP TSC0017613
cgaaacccgacgt

SEQ ID NO: 67329 - DNA, 13 bp, Artificial Sequence
  Oligonucleotide for detection of SNP TSC0017613
atgtcgcgttttg

SEQ ID NO: 67330 - DNA, 13 bp, Artificial Sequence
  Oligonucleotide for detection of SNP TSC0017613
caaaacgcgacat

SEQ ID NO: 67331 - DNA, 13 bp, Artificial Sequence
  Oligonucleotide for detection of SNP TSC0017613
atgtcgtgtttcg

SEQ ID NO: 67332 - DNA, 13 bp, Artificial Sequence
  Oligonucleotide for detection of SNP TSC0017613
cgaaacacgacat

SEQ ID NO: 67333 - DNA, 13 bp, Artificial Sequence
  Oligonucleotide for detection of SNP TSC0017613
atgttgcgtttcg

SEQ ID NO: 67334 - DNA, 13 bp, Artificial Sequence
  Oligonucleotide for detection of SNP TSC0017613
cgaaacgcaacat

SEQ ID NO: 67335 - DNA, 13 bp, Artificial Sequence
  Oligonucleotide for detection of SNP TSC0017613
acgtcgcgttttg

SEQ ID NO: 67336 - DNA, 13 bp, Artificial Sequence
  Oligonucleotide for detection of SNP TSC0017613
caaaacgcgacgt

SEQ ID NO: 67337 - DNA, 13 bp, Artificial Sequence
  Oligonucleotide for detection of SNP TSC0017613
acgtcgtgtttcg

SEQ ID NO: 67338 - DNA, 13 bp, Artificial Sequence
  Oligonucleotide for detection of SNP TSC0017613
cgaaacacgacgt

SEQ ID NO: 67339 - DNA, 13 bp, Artificial Sequence
  Oligonucleotide for detection of SNP TSC0017613
acgttgcgtttcg

SEQ ID NO: 67340 - DNA, 13 bp, Artificial Sequence
  Oligonucleotide for detection of SNP TSC0017613
cgaaacgcaacgt

SEQ ID NO: 67341 - DNA, 13 bp, Artificial Sequence
  Oligonucleotide for detection of SNP TSC0017613
atgtcgcgtttcg

SEQ ID NO: 67342 - DNA, 13 bp, Artificial Sequence
  Oligonucleotide for detection of SNP TSC0017613
cgaaacgcgacat

SEQ ID NO: 67343 - DNA, 13 bp, Artificial Sequence
  Oligonucleotide for detection of SNP TSC0017613
acgtcgcgtttcg

SEQ ID NO: 67344 - DNA, 13 bp, Artificial Sequence
  Oligonucleotide for detection of SNP TSC0017613
cgaaacgcgacgt

SEQ ID NO: 67345 - DNA, 13 bp, Artificial Sequence
  Oligonucleotide for detection of SNP TSC0017613
tggagtgtggtgt

SEQ ID NO: 67346 - DNA, 13 bp, Artificial Sequence
  Oligonucleotide for detection of SNP TSC0017613
acaccacactcca

SEQ ID NO: 67347 - DNA, 13 bp, Artificial Sequence
  Oligonucleotide for detection of SNP TSC0017613
tggagtttggtgt

SEQ ID NO: 67348 - DNA, 13 bp, Artificial Sequence
  Oligonucleotide for detection of SNP TSC0017613
acaccaaactcca

SEQ ID NO: 67349 - DNA, 13 bp, Artificial Sequence
  Oligonucleotide for detection of SNP TSC0017613
cggagtgtggtgt

SEQ ID NO: 67350 - DNA, 13 bp, Artificial Sequence
  Oligonucleotide for detection of SNP TSC0017613
acaccacactccg

SEQ ID NO: 67351 - DNA, 13 bp, Artificial Sequence
  Oligonucleotide for detection of SNP TSC0017613
cggagtttggtgt

SEQ ID NO: 67352 - DNA, 13 bp, Artificial Sequence
  Oligonucleotide for detection of SNP TSC0017613
acaccaaactccg

SEQ ID NO: 67353 - DNA, 13 bp, Artificial Sequence
  Oligonucleotide for detection of SNP TSC0017613
tggagcgtggtgt

SEQ ID NO: 67354 - DNA, 13 bp, Artificial Sequence
  Oligonucleotide for detection of SNP TSC0017613
acaccacgctcca

SEQ ID NO: 67355 - DNA, 13 bp, Artificial Sequence
  Oligonucleotide for detection of SNP TSC0017613
tggagttcggtgt

SEQ ID NO: 67356 - DNA, 13 bp, Artificial Sequence
  Oligonucleotide for detection of SNP TSC0017613
acaccgaactcca

SEQ ID NO: 67357 - DNA, 13 bp, Artificial Sequence
  Oligonucleotide for detection of SNP TSC0017613
tggagtgcggtgt

SEQ ID NO: 67358 - DNA, 13 bp, Artificial Sequence
  Oligonucleotide for detection of SNP TSC0017613
acaccgcactcca

SEQ ID NO: 67359 - DNA, 13 bp, Artificial Sequence
  Oligonucleotide for detection of SNP TSC0017613
tggagtttggcgt

SEQ ID NO: 67360 - DNA, 13 bp, Artificial Sequence
  Oligonucleotide for detection of SNP TSC0017613
acgccaaactcca

SEQ ID NO: 67361 - DNA, 13 bp, Artificial Sequence
  Oligonucleotide for detection of SNP TSC0017613
tggagtgtggcgt

SEQ ID NO: 67362 - DNA, 13 bp, Artificial Sequence
  Oligonucleotide for detection of SNP TSC0017613
acgccacactcca

SEQ ID NO: 67363 - DNA, 13 bp, Artificial Sequence
  Oligonucleotide for detection of SNP TSC0017613
cggagttcggtgt

SEQ ID NO: 67364 - DNA, 13 bp, Artificial Sequence
  Oligonucleotide for detection of SNP TSC0017613
acaccgaactccg

SEQ ID NO: 67365 - DNA, 13 bp, Artificial Sequence
  Oligonucleotide for detection of SNP TSC0017613
cggagcgtggtgt

SEQ ID NO: 67366 - DNA, 13 bp, Artificial Sequence
  Oligonucleotide for detection of SNP TSC0017613
acaccacgctccg

SEQ ID NO: 67367 - DNA, 13 bp, Artificial Sequence
  Oligonucleotide for detection of SNP TSC0017613
cggagtttggcgt

SEQ ID NO: 67368 - DNA, 13 bp, Artificial Sequence
  Oligonucleotide for detection of SNP TSC0017613
acgccaaactccg

SEQ ID NO: 67369 - DNA, 13 bp, Artificial Sequence
  Oligonucleotide for detection of SNP TSC0017613
cggagtgcggtgt

SEQ ID NO: 67370 - DNA, 13 bp, Artificial Sequence
  Oligonucleotide for detection of SNP TSC0017613
acaccgcactccg

SEQ ID NO: 67371 - DNA, 13 bp, Artificial Sequence
  Oligonucleotide for detection of SNP TSC0017613
tggagttcggcgt

SEQ ID NO: 67372 - DNA, 13 bp, Artificial Sequence
  Oligonucleotide for detection of SNP TSC0017613
acgccgaactcca

SEQ ID NO: 67373 - DNA, 13 bp, Artificial Sequence
  Oligonucleotide for detection of SNP TSC0017613
cggagtgtggcgt

SEQ ID NO: 67374 - DNA, 13 bp, Artificial Sequence
  Oligonucleotide for detection of SNP TSC0017613
acgccacactccg

SEQ ID NO: 67375 - DNA, 13 bp, Artificial Sequence
  Oligonucleotide for detection of SNP TSC0017613
cggagttcggcgt

SEQ ID NO: 67376 - DNA, 13 bp, Artificial Sequence
  Oligonucleotide for detection of SNP TSC0017613
acgccgaactccg

SEQ ID NO: 67377 - DNA, 13 bp, Artificial Sequence
  Oligonucleotide for detection of SNP TSC0017613
tggagcgcggtgt

SEQ ID NO: 67378 - DNA, 13 bp, Artificial Sequence
  Oligonucleotide for detection of SNP TSC0017613
acaccgcgctcca

SEQ ID NO: 67379 - DNA, 13 bp, Artificial Sequence
  Oligonucleotide for detection of SNP TSC0017613
tggagcgtggcgt

SEQ ID NO: 67380 - DNA, 13 bp, Artificial Sequence
  Oligonucleotide for detection of SNP TSC0017613
acgccacgctcca

SEQ ID NO: 67381 - DNA, 13 bp, Artificial Sequence
  Oligonucleotide for detection of SNP TSC0017613
tggagtgcggcgt

SEQ ID NO: 67382 - DNA, 13 bp, Artificial Sequence
  Oligonucleotide for detection of SNP TSC0017613
acgccgcactcca

SEQ ID NO: 67383 - DNA, 13 bp, Artificial Sequence
  Oligonucleotide for detection of SNP TSC0017613
cggagcgcggtgt

SEQ ID NO: 67384 - DNA, 13 bp, Artificial Sequence
  Oligonucleotide for detection of SNP TSC0017613
acaccgcgctccg

SEQ ID NO: 67385 - DNA, 13 bp, Artificial Sequence
  Oligonucleotide for detection of SNP TSC0017613
cggagcgtggcgt

SEQ ID NO: 67386 - DNA, 13 bp, Artificial Sequence
  Oligonucleotide for detection of SNP TSC0017613
acgccacgctccg

SEQ ID NO: 67387 - DNA, 13 bp, Artificial Sequence
  Oligonucleotide for detection of SNP TSC0017613
cggagtgcggcgt

SEQ ID NO: 67388 - DNA, 13 bp, Artificial Sequence
  Oligonucleotide for detection of SNP TSC0017613
acgccgcactccg

SEQ ID NO: 67389 - DNA, 13 bp, Artificial Sequence
  Oligonucleotide for detection of SNP TSC0017613
tggagcgcggcgt

SEQ ID NO: 67390 - DNA, 13 bp, Artificial Sequence
  Oligonucleotide for detection of SNP TSC0017613
acgccgcgctcca

SEQ ID NO: 67391 - DNA, 13 bp, Artificial Sequence
  Oligonucleotide for detection of SNP TSC0017613
cggagcgcggcgt

SEQ ID NO: 67392 - DNA, 13 bp, Artificial Sequence
  Oligonucleotide for detection of SNP TSC0017613
acgccgcgctccg

SEQ ID NO: 67393 - DNA, 13 bp, Artificial Sequence
  Oligonucleotide for detection of SNP TSC0017614
ggtgggggtgggg

SEQ ID NO: 67394 - DNA, 13 bp, Artificial Sequence
  Oligonucleotide for detection of SNP TSC0017614
ccccacccccacc

SEQ ID NO: 67395 - DNA, 13 bp, Artificial Sequence
  Oligonucleotide for detection of SNP TSC0017614
ggtgggtgtgggg

SEQ ID NO: 67396 - DNA, 13 bp, Artificial Sequence
  Oligonucleotide for detection of SNP TSC0017614
ccccacacccacc

SEQ ID NO: 67397 - DNA, 13 bp, Artificial Sequence
  Oligonucleotide for detection of SNP TSC0017615
gattgagttatgg

SEQ ID NO: 67398 - DNA, 13 bp, Artificial Sequence
  Oligonucleotide for detection of SNP TSC0017615
ccataactcaatc

SEQ ID NO: 67399 - DNA, 13 bp, Artificial Sequence
  Oligonucleotide for detection of SNP TSC0017615
gattgaattatgg

SEQ ID NO: 67400 - DNA, 13 bp, Artificial Sequence
  Oligonucleotide for detection of SNP TSC0017615
ccataattcaatc

SEQ ID NO: 67401 - DNA, 13 bp, Artificial Sequence
  Oligonucleotide for detection of SNP TSC0017615
gatcgagttatgg

SEQ ID NO: 67402 - DNA, 13 bp, Artificial Sequence
  Oligonucleotide for detection of SNP TSC0017615
ccataactcgatc

SEQ ID NO: 67403 - DNA, 13 bp, Artificial Sequence
  Oligonucleotide for detection of SNP TSC0017615
gatcgaattatgg

SEQ ID NO: 67404 - DNA, 13 bp, Artificial Sequence
  Oligonucleotide for detection of SNP TSC0017615
ccataattcgatc

SEQ ID NO: 67405 - DNA, 13 bp, Artificial Sequence
  Oligonucleotide for detection of SNP TSC0017615
gattgagttacgg

SEQ ID NO: 67406 - DNA, 13 bp, Artificial Sequence
  Oligonucleotide for detection of SNP TSC0017615
ccgtaactcaatc

SEQ ID NO: 67407 - DNA, 13 bp, Artificial Sequence
  Oligonucleotide for detection of SNP TSC0017615
gattgaattacgg

SEQ ID NO: 67408 - DNA, 13 bp, Artificial Sequence
  Oligonucleotide for detection of SNP TSC0017615
ccgtaattcaatc

SEQ ID NO: 67409 - DNA, 13 bp, Artificial Sequence
  Oligonucleotide for detection of SNP TSC0017615
gatcgagttacgg

SEQ ID NO: 67410 - DNA, 13 bp, Artificial Sequence
  Oligonucleotide for detection of SNP TSC0017615
ccgtaactcgatc

SEQ ID NO: 67411 - DNA, 13 bp, Artificial Sequence
  Oligonucleotide for detection of SNP TSC0017615
gatcgaattacgg

SEQ ID NO: 67412 - DNA, 13 bp, Artificial Sequence
  Oligonucleotide for detection of SNP TSC0017615
ccgtaattcgatc

SEQ ID NO: 67413 - DNA, 13 bp, Artificial Sequence
  Oligonucleotide for detection of SNP TSC0017619
ttgttggtttttt

SEQ ID NO: 67414 - DNA, 13 bp, Artificial Sequence
  Oligonucleotide for detection of SNP TSC0017619
aaaaaaccaacaa

SEQ ID NO: 67415 - DNA, 13 bp, Artificial Sequence
  Oligonucleotide for detection of SNP TSC0017619
ttgttgttttttt

SEQ ID NO: 67416 - DNA, 13 bp, Artificial Sequence
  Oligonucleotide for detection of SNP TSC0017619
aaaaaaacaacaa

SEQ ID NO: 67417 - DNA, 13 bp, Artificial Sequence
  Oligonucleotide for detection of SNP TSC0017619
aaaaaattagtaa

SEQ ID NO: 67418 - DNA, 13 bp, Artificial Sequence
  Oligonucleotide for detection of SNP TSC0017619
ttactaatttttt

SEQ ID NO: 67419 - DNA, 13 bp, Artificial Sequence
  Oligonucleotide for detection of SNP TSC0017619
aaaaaaatagtaa

SEQ ID NO: 67420 - DNA, 13 bp, Artificial Sequence
  Oligonucleotide for detection of SNP TSC0017619
ttactattttttt

SEQ ID NO: 67421 - DNA, 13 bp, Artificial Sequence
  Oligonucleotide for detection of SNP TSC0017620
atttggggaggtg

SEQ ID NO: 67422 - DNA, 13 bp, Artificial Sequence
  Oligonucleotide for detection of SNP TSC0017620
cacctccccaaat

SEQ ID NO: 67423 - DNA, 13 bp, Artificial Sequence
  Oligonucleotide for detection of SNP TSC0017620
atttggagaggtg

SEQ ID NO: 67424 - DNA, 13 bp, Artificial Sequence
  Oligonucleotide for detection of SNP TSC0017620
cacctctccaaat

SEQ ID NO: 67425 - DNA, 13 bp, Artificial Sequence
  Oligonucleotide for detection of SNP TSC0017620
attcggggaggtg

SEQ ID NO: 67426 - DNA, 13 bp, Artificial Sequence
  Oligonucleotide for detection of SNP TSC0017620
cacctccccgaat

SEQ ID NO: 67427 - DNA, 13 bp, Artificial Sequence
  Oligonucleotide for detection of SNP TSC0017620
attcggagaggtg

SEQ ID NO: 67428 - DNA, 13 bp, Artificial Sequence
  Oligonucleotide for detection of SNP TSC0017620
cacctctccgaat

SEQ ID NO: 67429 - DNA, 13 bp, Artificial Sequence
  Oligonucleotide for detection of SNP TSC0017621
agaggttggaaga

SEQ ID NO: 67430 - DNA, 13 bp, Artificial Sequence
  Oligonucleotide for detection of SNP TSC0017621
tcttccaacctct

SEQ ID NO: 67431 - DNA, 13 bp, Artificial Sequence
  Oligonucleotide for detection of SNP TSC0017621
agaggtcggaaga

SEQ ID NO: 67432 - DNA, 13 bp, Artificial Sequence
  Oligonucleotide for detection of SNP TSC0017621
tcttccgacctct

SEQ ID NO: 67433 - DNA, 13 bp, Artificial Sequence
  Oligonucleotide for detection of SNP TSC0017622
agaataatatatg

SEQ ID NO: 67434 - DNA, 13 bp, Artificial Sequence
  Oligonucleotide for detection of SNP TSC0017622
catatattattct

SEQ ID NO: 67435 - DNA, 13 bp, Artificial Sequence
  Oligonucleotide for detection of SNP TSC0017622
agaatattatatg

SEQ ID NO: 67436 - DNA, 13 bp, Artificial Sequence
  Oligonucleotide for detection of SNP TSC0017622
catataatattct

SEQ ID NO: 67437 - DNA, 13 bp, Artificial Sequence
  Oligonucleotide for detection of SNP TSC0017622
tatgtgttgtttt

SEQ ID NO: 67438 - DNA, 13 bp, Artificial Sequence
  Oligonucleotide for detection of SNP TSC0017622
aaaacaacacata

SEQ ID NO: 67439 - DNA, 13 bp, Artificial Sequence
  Oligonucleotide for detection of SNP TSC0017623
aaataatgaaaat

SEQ ID NO: 67440 - DNA, 13 bp, Artificial Sequence
  Oligonucleotide for detection of SNP TSC0017623
attttcattattt

SEQ ID NO: 67441 - DNA, 13 bp, Artificial Sequence
  Oligonucleotide for detection of SNP TSC0017623
aaataacgaaaat

SEQ ID NO: 67442 - DNA, 13 bp, Artificial Sequence
  Oligonucleotide for detection of SNP TSC0017623
attttcgttattt

SEQ ID NO: 67443 - DNA, 13 bp, Artificial Sequence
  Oligonucleotide for detection of SNP TSC0017623
atttttattgttt

SEQ ID NO: 67444 - DNA, 13 bp, Artificial Sequence
  Oligonucleotide for detection of SNP TSC0017623
aaacaataaaaat

SEQ ID NO: 67445 - DNA, 13 bp, Artificial Sequence
  Oligonucleotide for detection of SNP TSC0017623
attttcgttgttt

SEQ ID NO: 67446 - DNA, 13 bp, Artificial Sequence
  Oligonucleotide for detection of SNP TSC0017623
aaacaacgaaaat

SEQ ID NO: 67447 - DNA, 13 bp, Artificial Sequence
  Oligonucleotide for detection of SNP TSC0017624
tggttttgtattt

SEQ ID NO: 67448 - DNA, 13 bp, Artificial Sequence
  Oligonucleotide for detection of SNP TSC0017624
aaatacaaaacca

SEQ ID NO: 67449 - DNA, 13 bp, Artificial Sequence
  Oligonucleotide for detection of SNP TSC0017624
tggtttcgtattt

SEQ ID NO: 67450 - DNA, 13 bp, Artificial Sequence
  Oligonucleotide for detection of SNP TSC0017624
aaatacgaaacca

SEQ ID NO: 67451 - DNA, 13 bp, Artificial Sequence
  Oligonucleotide for detection of SNP TSC0017624
aaatatgggatta

SEQ ID NO: 67452 - DNA, 13 bp, Artificial Sequence
  Oligonucleotide for detection of SNP TSC0017624
taatcccatattt

SEQ ID NO: 67453 - DNA, 13 bp, Artificial Sequence
  Oligonucleotide for detection of SNP TSC0017624
aaatataggatta

SEQ ID NO: 67454 - DNA, 13 bp, Artificial Sequence
  Oligonucleotide for detection of SNP TSC0017624
taatcctatattt

SEQ ID NO: 67455 - DNA, 13 bp, Artificial Sequence
  Oligonucleotide for detection of SNP TSC0017624
aaatacgggatta

SEQ ID NO: 67456 - DNA, 13 bp, Artificial Sequence
  Oligonucleotide for detection of SNP TSC0017624
taatcccgtattt

SEQ ID NO: 67457 - DNA, 13 bp, Artificial Sequence
  Oligonucleotide for detection of SNP TSC0017625
atttttatggagy

SEQ ID NO: 67458 - DNA, 13 bp, Artificial Sequence
  Oligonucleotide for detection of SNP TSC0017625
rctccataaaaat

SEQ ID NO: 67459 - DNA, 13 bp, Artificial Sequence
  Oligonucleotide for detection of SNP TSC0017625
atttttttggagy

SEQ ID NO: 67460 - DNA, 13 bp, Artificial Sequence
  Oligonucleotide for detection of SNP TSC0017625
rctccaaaaaaat

SEQ ID NO: 67461 - DNA, 13 bp, Artificial Sequence
  Oligonucleotide for detection of SNP TSC0017625
gttttatgaggat

SEQ ID NO: 67462 - DNA, 13 bp, Artificial Sequence
  Oligonucleotide for detection of SNP TSC0017625
atcctcataaaac

SEQ ID NO: 67463 - DNA, 13 bp, Artificial Sequence
  Oligonucleotide for detection of SNP TSC0017625
gttttaagaggat

SEQ ID NO: 67464 - DNA, 13 bp, Artificial Sequence
  Oligonucleotide for detection of SNP TSC0017625
atcctcttaaaac

SEQ ID NO: 67465 - DNA, 13 bp, Artificial Sequence
  Oligonucleotide for detection of SNP TSC0017626
tttttaatggttt

SEQ ID NO: 67466 - DNA, 13 bp, Artificial Sequence
  Oligonucleotide for detection of SNP TSC0017626
aaaccattaaaaa

SEQ ID NO: 67467 - DNA, 13 bp, Artificial Sequence
  Oligonucleotide for detection of SNP TSC0017627
agtatggtgagta

SEQ ID NO: 67468 - DNA, 13 bp, Artificial Sequence
  Oligonucleotide for detection of SNP TSC0017627
tactcaccatact

SEQ ID NO: 67469 - DNA, 13 bp, Artificial Sequence
  Oligonucleotide for detection of SNP TSC0017627
agtatgatgagta

SEQ ID NO: 67470 - DNA, 13 bp, Artificial Sequence
  Oligonucleotide for detection of SNP TSC0017627
tactcatcatact

SEQ ID NO: 67471 - DNA, 13 bp, Artificial Sequence
  Oligonucleotide for detection of SNP TSC0017627
agtatggcgagta

SEQ ID NO: 67472 - DNA, 13 bp, Artificial Sequence
  Oligonucleotide for detection of SNP TSC0017627
tactcgccatact

SEQ ID NO: 67473 - DNA, 13 bp, Artificial Sequence
  Oligonucleotide for detection of SNP TSC0017627
agtatgacgagta

SEQ ID NO: 67474 - DNA, 13 bp, Artificial Sequence
  Oligonucleotide for detection of SNP TSC0017627
tactcgtcatact

SEQ ID NO: 67475 - DNA, 13 bp, Artificial Sequence
  Oligonucleotide for detection of SNP TSC0017629
ttgattaagtaat

SEQ ID NO: 67476 - DNA, 13 bp, Artificial Sequence
  Oligonucleotide for detection of SNP TSC0017629
attacttaatcaa

SEQ ID NO: 67477 - DNA, 13 bp, Artificial Sequence
  Oligonucleotide for detection of SNP TSC0017629
ttgatttagtaat

SEQ ID NO: 67478 - DNA, 13 bp, Artificial Sequence
  Oligonucleotide for detection of SNP TSC0017629
attactaaatcaa

SEQ ID NO: 67479 - DNA, 13 bp, Artificial Sequence
  Oligonucleotide for detection of SNP TSC0017629
attgtttggttag

SEQ ID NO: 67480 - DNA, 13 bp, Artificial Sequence
  Oligonucleotide for detection of SNP TSC0017629
ctaaccaaacaat

SEQ ID NO: 67481 - DNA, 13 bp, Artificial Sequence
  Oligonucleotide for detection of SNP TSC0017629
attgttaggttag

SEQ ID NO: 67482 - DNA, 13 bp, Artificial Sequence
  Oligonucleotide for detection of SNP TSC0017629
ctaacctaacaat

SEQ ID NO: 67483 - DNA, 13 bp, Artificial Sequence
  Oligonucleotide for detection of SNP TSC0017631
aatatagatatay

SEQ ID NO: 67484 - DNA, 13 bp, Artificial Sequence
  Oligonucleotide for detection of SNP TSC0017631
rtatatctatatt

SEQ ID NO: 67485 - DNA, 13 bp, Artificial Sequence
  Oligonucleotide for detection of SNP TSC0017631
aatatatatatay

SEQ ID NO: 67486 - DNA, 13 bp, Artificial Sequence
  Oligonucleotide for detection of SNP TSC0017631
rtatatatatatt

SEQ ID NO: 67487 - DNA, 13 bp, Artificial Sequence
  Oligonucleotide for detection of SNP TSC0017631
gtatatttgtgtt

SEQ ID NO: 67488 - DNA, 13 bp, Artificial Sequence
  Oligonucleotide for detection of SNP TSC0017631
aacacaaatatac

SEQ ID NO: 67489 - DNA, 13 bp, Artificial Sequence
  Oligonucleotide for detection of SNP TSC0017631
gtatatatgtgtt

SEQ ID NO: 67490 - DNA, 13 bp, Artificial Sequence
  Oligonucleotide for detection of SNP TSC0017631
aacacatatatac

SEQ ID NO: 67491 - DNA, 13 bp, Artificial Sequence
  Oligonucleotide for detection of SNP TSC0017632
tgtattgtagata

SEQ ID NO: 67492 - DNA, 13 bp, Artificial Sequence
  Oligonucleotide for detection of SNP TSC0017632
tatctacaataca

SEQ ID NO: 67493 - DNA, 13 bp, Artificial Sequence
  Oligonucleotide for detection of SNP TSC0017632
tgtattatagata

SEQ ID NO: 67494 - DNA, 13 bp, Artificial Sequence
  Oligonucleotide for detection of SNP TSC0017632
tatctataataca

SEQ ID NO: 67495 - DNA, 13 bp, Artificial Sequence
  Oligonucleotide for detection of SNP TSC0017635
ttattaaattttt

SEQ ID NO: 67496 - DNA, 13 bp, Artificial Sequence
  Oligonucleotide for detection of SNP TSC0017635
aaaaatttaataa

SEQ ID NO: 67497 - DNA, 13 bp, Artificial Sequence
  Oligonucleotide for detection of SNP TSC0017635
ttattagattttt

SEQ ID NO: 67498 - DNA, 13 bp, Artificial Sequence
  Oligonucleotide for detection of SNP TSC0017635
aaaaatctaataa

SEQ ID NO: 67499 - DNA, 13 bp, Artificial Sequence
  Oligonucleotide for detection of SNP TSC0017636
tttttgaaatatt

SEQ ID NO: 67500 - DNA, 13 bp, Artificial Sequence
  Oligonucleotide for detection of SNP TSC0017636
aatatttcaaaaa

SEQ ID NO: 67501 - DNA, 13 bp, Artificial Sequence
  Oligonucleotide for detection of SNP TSC0017636
tttttggaatatt

SEQ ID NO: 67502 - DNA, 13 bp, Artificial Sequence
  Oligonucleotide for detection of SNP TSC0017636
aatattccaaaaa

SEQ ID NO: 67503 - DNA, 13 bp, Artificial Sequence
  Oligonucleotide for detection of SNP TSC0017638
tttgatgttgtta

SEQ ID NO: 67504 - DNA, 13 bp, Artificial Sequence
  Oligonucleotide for detection of SNP TSC0017638
taacaacatcaaa

SEQ ID NO: 67505 - DNA, 13 bp, Artificial Sequence
  Oligonucleotide for detection of SNP TSC0017638
tttgattttgtta

SEQ ID NO: 67506 - DNA, 13 bp, Artificial Sequence
  Oligonucleotide for detection of SNP TSC0017638
taacaaaatcaaa

SEQ ID NO: 67507 - DNA, 13 bp, Artificial Sequence
  Oligonucleotide for detection of SNP TSC0017638
tagtagtattagg

SEQ ID NO: 67508 - DNA, 13 bp, Artificial Sequence
  Oligonucleotide for detection of SNP TSC0017638
cctaatactacta

SEQ ID NO: 67509 - DNA, 13 bp, Artificial Sequence
  Oligonucleotide for detection of SNP TSC0017638
tagtagaattagg

SEQ ID NO: 67510 - DNA, 13 bp, Artificial Sequence
  Oligonucleotide for detection of SNP TSC0017638
cctaattctacta

SEQ ID NO: 67511 - DNA, 13 bp, Artificial Sequence
  Oligonucleotide for detection of SNP TSC0017639
tttagtttaatty

SEQ ID NO: 67512 - DNA, 13 bp, Artificial Sequence
  Oligonucleotide for detection of SNP TSC0017639
raattaaactaaa

SEQ ID NO: 67513 - DNA, 13 bp, Artificial Sequence
  Oligonucleotide for detection of SNP TSC0017639
tttagtgtaatty

SEQ ID NO: 67514 - DNA, 13 bp, Artificial Sequence
  Oligonucleotide for detection of SNP TSC0017639
raattacactaaa

SEQ ID NO: 67515 - DNA, 13 bp, Artificial Sequence
  Oligonucleotide for detection of SNP TSC0017639
tttagcgtaatty

SEQ ID NO: 67516 - DNA, 13 bp, Artificial Sequence
  Oligonucleotide for detection of SNP TSC0017639
raattacgctaaa

SEQ ID NO: 67517 - DNA, 13 bp, Artificial Sequence
  Oligonucleotide for detection of SNP TSC0017639
gagttgggttgaa

SEQ ID NO: 67518 - DNA, 13 bp, Artificial Sequence
  Oligonucleotide for detection of SNP TSC0017639
ttcaacccaactc

SEQ ID NO: 67519 - DNA, 13 bp, Artificial Sequence
  Oligonucleotide for detection of SNP TSC0017639
gagttgtgttgaa

SEQ ID NO: 67520 - DNA, 13 bp, Artificial Sequence
  Oligonucleotide for detection of SNP TSC0017639
ttcaacacaactc

SEQ ID NO: 67521 - DNA, 13 bp, Artificial Sequence
  Oligonucleotide for detection of SNP TSC0017639
gagttgcgttgaa

SEQ ID NO: 67522 - DNA, 13 bp, Artificial Sequence
  Oligonucleotide for detection of SNP TSC0017639
ttcaacgcaactc

SEQ ID NO: 67523 - DNA, 13 bp, Artificial Sequence
  Oligonucleotide for detection of SNP TSC0017640
gttttagttttta

SEQ ID NO: 67524 - DNA, 13 bp, Artificial Sequence
  Oligonucleotide for detection of SNP TSC0017640
taaaaactaaaac

SEQ ID NO: 67525 - DNA, 13 bp, Artificial Sequence
  Oligonucleotide for detection of SNP TSC0017640
gttttaattttta

SEQ ID NO: 67526 - DNA, 13 bp, Artificial Sequence
  Oligonucleotide for detection of SNP TSC0017640
taaaaattaaaac

SEQ ID NO: 67527 - DNA, 13 bp, Artificial Sequence
  Oligonucleotide for detection of SNP TSC0017641
gtggtatgatttt

SEQ ID NO: 67528 - DNA, 13 bp, Artificial Sequence
  Oligonucleotide for detection of SNP TSC0017641
aaaatcataccac

SEQ ID NO: 67529 - DNA, 13 bp, Artificial Sequence
  Oligonucleotide for detection of SNP TSC0017641
gtggtacgatttt

SEQ ID NO: 67530 - DNA, 13 bp, Artificial Sequence
  Oligonucleotide for detection of SNP TSC0017641
aaaatcgtaccac

SEQ ID NO: 67531 - DNA, 13 bp, Artificial Sequence
  Oligonucleotide for detection of SNP TSC0017644
tatatgaagtggg

SEQ ID NO: 67532 - DNA, 13 bp, Artificial Sequence
  Oligonucleotide for detection of SNP TSC0017644
cccacttcatata

SEQ ID NO: 67533 - DNA, 13 bp, Artificial Sequence
  Oligonucleotide for detection of SNP TSC0017644
tatatggagtggg

SEQ ID NO: 67534 - DNA, 13 bp, Artificial Sequence
  Oligonucleotide for detection of SNP TSC0017644
cccactccatata

SEQ ID NO: 67535 - DNA, 13 bp, Artificial Sequence
  Oligonucleotide for detection of SNP TSC0017645
gggatggaggtga

SEQ ID NO: 67536 - DNA, 13 bp, Artificial Sequence
  Oligonucleotide for detection of SNP TSC0017645
tcacctccatccc

SEQ ID NO: 67537 - DNA, 13 bp, Artificial Sequence
  Oligonucleotide for detection of SNP TSC0017645
gggatgaaggtga

SEQ ID NO: 67538 - DNA, 13 bp, Artificial Sequence
  Oligonucleotide for detection of SNP TSC0017645
tcaccttcatccc

SEQ ID NO: 67539 - DNA, 13 bp, Artificial Sequence
  Oligonucleotide for detection of SNP TSC0017645
gggatggaggcga

SEQ ID NO: 67540 - DNA, 13 bp, Artificial Sequence
  Oligonucleotide for detection of SNP TSC0017645
tcgcctccatccc

SEQ ID NO: 67541 - DNA, 13 bp, Artificial Sequence
  Oligonucleotide for detection of SNP TSC0017645
gggatgaaggcga

SEQ ID NO: 67542 - DNA, 13 bp, Artificial Sequence
  Oligonucleotide for detection of SNP TSC0017645
tcgccttcatccc

SEQ ID NO: 67543 - DNA, 13 bp, Artificial Sequence
  Oligonucleotide for detection of SNP TSC0017647
gggtttgtgaggg

SEQ ID NO: 67544 - DNA, 13 bp, Artificial Sequence
  Oligonucleotide for detection of SNP TSC0017647
ccctcacaaaccc

SEQ ID NO: 67545 - DNA, 13 bp, Artificial Sequence
  Oligonucleotide for detection of SNP TSC0017647
gggtttttgaggg

SEQ ID NO: 67546 - DNA, 13 bp, Artificial Sequence
  Oligonucleotide for detection of SNP TSC0017647
ccctcaaaaaccc

SEQ ID NO: 67547 - DNA, 13 bp, Artificial Sequence
  Oligonucleotide for detection of SNP TSC0017647
tttttatagatty

SEQ ID NO: 67548 - DNA, 13 bp, Artificial Sequence
  Oligonucleotide for detection of SNP TSC0017647
raatctataaaaa

SEQ ID NO: 67549 - DNA, 13 bp, Artificial Sequence
  Oligonucleotide for detection of SNP TSC0017647
tttttaaagatty

SEQ ID NO: 67550 - DNA, 13 bp, Artificial Sequence
  Oligonucleotide for detection of SNP TSC0017647
raatctttaaaaa

SEQ ID NO: 67551 - DNA, 13 bp, Artificial Sequence
  Oligonucleotide for detection of SNP TSC0017648
ggtatatgttttg

SEQ ID NO: 67552 - DNA, 13 bp, Artificial Sequence
  Oligonucleotide for detection of SNP TSC0017648
caaaacatatacc

SEQ ID NO: 67553 - DNA, 13 bp, Artificial Sequence
  Oligonucleotide for detection of SNP TSC0017648
ggtataggttttg

SEQ ID NO: 67554 - DNA, 13 bp, Artificial Sequence
  Oligonucleotide for detection of SNP TSC0017648
caaaacctatacc

SEQ ID NO: 67555 - DNA, 13 bp, Artificial Sequence
  Oligonucleotide for detection of SNP TSC0017648
ggtatacgttttg

SEQ ID NO: 67556 - DNA, 13 bp, Artificial Sequence
  Oligonucleotide for detection of SNP TSC0017648
caaaacgtatacc

SEQ ID NO: 67557 - DNA, 13 bp, Artificial Sequence
  Oligonucleotide for detection of SNP TSC0017648
tagaatgtgtgty

SEQ ID NO: 67558 - DNA, 13 bp, Artificial Sequence
  Oligonucleotide for detection of SNP TSC0017648
racacacattcta

SEQ ID NO: 67559 - DNA, 13 bp, Artificial Sequence
  Oligonucleotide for detection of SNP TSC0017648
tagaatttgtgty

SEQ ID NO: 67560 - DNA, 13 bp, Artificial Sequence
  Oligonucleotide for detection of SNP TSC0017648
racacaaattcta

SEQ ID NO: 67561 - DNA, 13 bp, Artificial Sequence
  Oligonucleotide for detection of SNP TSC0017648
tagaacgtgtgty

SEQ ID NO: 67562 - DNA, 13 bp, Artificial Sequence
  Oligonucleotide for detection of SNP TSC0017648
racacacgttcta

SEQ ID NO: 67563 - DNA, 13 bp, Artificial Sequence
  Oligonucleotide for detection of SNP TSC0017649
taggtttggtatg

SEQ ID NO: 67564 - DNA, 13 bp, Artificial Sequence
  Oligonucleotide for detection of SNP TSC0017649
cataccaaaccta

SEQ ID NO: 67565 - DNA, 13 bp, Artificial Sequence
  Oligonucleotide for detection of SNP TSC0017649
taggttcggtatg

SEQ ID NO: 67566 - DNA, 13 bp, Artificial Sequence
  Oligonucleotide for detection of SNP TSC0017649
cataccgaaccta

SEQ ID NO: 67567 - DNA, 13 bp, Artificial Sequence
  Oligonucleotide for detection of SNP TSC0017649
tatgttgaatttg

SEQ ID NO: 67568 - DNA, 13 bp, Artificial Sequence
  Oligonucleotide for detection of SNP TSC0017649
caaattcaacata

SEQ ID NO: 67569 - DNA, 13 bp, Artificial Sequence
  Oligonucleotide for detection of SNP TSC0017649
tatgttaaatttg

SEQ ID NO: 67570 - DNA, 13 bp, Artificial Sequence
  Oligonucleotide for detection of SNP TSC0017649
caaatttaacata

SEQ ID NO: 67571 - DNA, 13 bp, Artificial Sequence
  Oligonucleotide for detection of SNP TSC0017649
tatgtcgaatttg

SEQ ID NO: 67572 - DNA, 13 bp, Artificial Sequence
  Oligonucleotide for detection of SNP TSC0017649
caaattcgacata

SEQ ID NO: 67573 - DNA, 13 bp, Artificial Sequence
  Oligonucleotide for detection of SNP TSC0017652
tagatgaagtgay

SEQ ID NO: 67574 - DNA, 13 bp, Artificial Sequence
  Oligonucleotide for detection of SNP TSC0017652
rtcacttcatcta

SEQ ID NO: 67575 - DNA, 13 bp, Artificial Sequence
  Oligonucleotide for detection of SNP TSC0017652
tagatggagtgay

SEQ ID NO: 67576 - DNA, 13 bp, Artificial Sequence
  Oligonucleotide for detection of SNP TSC0017652
rtcactccatcta

SEQ ID NO: 67577 - DNA, 13 bp, Artificial Sequence
  Oligonucleotide for detection of SNP TSC0017654
gggatatgtaagy

SEQ ID NO: 67578 - DNA, 13 bp, Artificial Sequence
  Oligonucleotide for detection of SNP TSC0017654
rcttacatatccc

SEQ ID NO: 67579 - DNA, 13 bp, Artificial Sequence
  Oligonucleotide for detection of SNP TSC0017654
gggatacgtaagy

SEQ ID NO: 67580 - DNA, 13 bp, Artificial Sequence
  Oligonucleotide for detection of SNP TSC0017654
rcttacgtatccc

SEQ ID NO: 67581 - DNA, 13 bp, Artificial Sequence
  Oligonucleotide for detection of SNP TSC0017654
gtttatgtgttty

SEQ ID NO: 67582 - DNA, 13 bp, Artificial Sequence
  Oligonucleotide for detection of SNP TSC0017654
raaacacataaac

SEQ ID NO: 67583 - DNA, 13 bp, Artificial Sequence
  Oligonucleotide for detection of SNP TSC0017654
gtttatatgttty

SEQ ID NO: 67584 - DNA, 13 bp, Artificial Sequence
  Oligonucleotide for detection of SNP TSC0017654
raaacatataaac

SEQ ID NO: 67585 - DNA, 13 bp, Artificial Sequence
  Oligonucleotide for detection of SNP TSC0017654
gtttacgtgttty

SEQ ID NO: 67586 - DNA, 13 bp, Artificial Sequence
  Oligonucleotide for detection of SNP TSC0017654
raaacacgtaaac

SEQ ID NO: 67587 - DNA, 13 bp, Artificial Sequence
  Oligonucleotide for detection of SNP TSC0017655
ttgaattatgtgt

SEQ ID NO: 67588 - DNA, 13 bp, Artificial Sequence
  Oligonucleotide for detection of SNP TSC0017655
acacataattcaa

SEQ ID NO: 67589 - DNA, 13 bp, Artificial Sequence
  Oligonucleotide for detection of SNP TSC0017655
ttgaatgatgtgt

SEQ ID NO: 67590 - DNA, 13 bp, Artificial Sequence
  Oligonucleotide for detection of SNP TSC0017655
acacatcattcaa

SEQ ID NO: 67591 - DNA, 13 bp, Artificial Sequence
  Oligonucleotide for detection of SNP TSC0017656
agatggtaagatt

SEQ ID NO: 67592 - DNA, 13 bp, Artificial Sequence
  Oligonucleotide for detection of SNP TSC0017656
aatcttaccatct

SEQ ID NO: 67593 - DNA, 13 bp, Artificial Sequence
  Oligonucleotide for detection of SNP TSC0017656
agatgggaagatt

SEQ ID NO: 67594 - DNA, 13 bp, Artificial Sequence
  Oligonucleotide for detection of SNP TSC0017656
aatcttcccatct

SEQ ID NO: 67595 - DNA, 13 bp, Artificial Sequence
  Oligonucleotide for detection of SNP TSC0017656
agttttgttattt

SEQ ID NO: 67596 - DNA, 13 bp, Artificial Sequence
  Oligonucleotide for detection of SNP TSC0017656
aaataacaaaact

SEQ ID NO: 67597 - DNA, 13 bp, Artificial Sequence
  Oligonucleotide for detection of SNP TSC0017656
agtttttttattt

SEQ ID NO: 67598 - DNA, 13 bp, Artificial Sequence
  Oligonucleotide for detection of SNP TSC0017656
aaataaaaaaact

SEQ ID NO: 67599 - DNA, 13 bp, Artificial Sequence
  Oligonucleotide for detection of SNP TSC0017657
gaaagaaagtgty

SEQ ID NO: 67600 - DNA, 13 bp, Artificial Sequence
  Oligonucleotide for detection of SNP TSC0017657
racactttctttc

SEQ ID NO: 67601 - DNA, 13 bp, Artificial Sequence
  Oligonucleotide for detection of SNP TSC0017657
gaaagagagtgty

SEQ ID NO: 67602 - DNA, 13 bp, Artificial Sequence
  Oligonucleotide for detection of SNP TSC0017657
racactctctttc

SEQ ID NO: 67603 - DNA, 13 bp, Artificial Sequence
  Oligonucleotide for detection of SNP TSC0017658
tagttatgggata

SEQ ID NO: 67604 - DNA, 13 bp, Artificial Sequence
  Oligonucleotide for detection of SNP TSC0017658
tatcccataacta

SEQ ID NO: 67605 - DNA, 13 bp, Artificial Sequence
  Oligonucleotide for detection of SNP TSC0017658
tagttacgggata

SEQ ID NO: 67606 - DNA, 13 bp, Artificial Sequence
  Oligonucleotide for detection of SNP TSC0017658
tatcccgtaacta

SEQ ID NO: 67607 - DNA, 13 bp, Artificial Sequence
  Oligonucleotide for detection of SNP TSC0017658
tgttttgtggttg

SEQ ID NO: 67608 - DNA, 13 bp, Artificial Sequence
  Oligonucleotide for detection of SNP TSC0017658
caaccacaaaaca

SEQ ID NO: 67609 - DNA, 13 bp, Artificial Sequence
  Oligonucleotide for detection of SNP TSC0017658
tgttttatggttg

SEQ ID NO: 67610 - DNA, 13 bp, Artificial Sequence
  Oligonucleotide for detection of SNP TSC0017658
caaccataaaaca

SEQ ID NO: 67611 - DNA, 13 bp, Artificial Sequence
  Oligonucleotide for detection of SNP TSC0017658
tgtttcgtggttg

SEQ ID NO: 67612 - DNA, 13 bp, Artificial Sequence
  Oligonucleotide for detection of SNP TSC0017658
caaccacgaaaca

SEQ ID NO: 67613 - DNA, 13 bp, Artificial Sequence
  Oligonucleotide for detection of SNP TSC0017661
ttggtagtgaagy

SEQ ID NO: 67614 - DNA, 13 bp, Artificial Sequence
  Oligonucleotide for detection of SNP TSC0017661
rcttcactaccaa

SEQ ID NO: 67615 - DNA, 13 bp, Artificial Sequence
  Oligonucleotide for detection of SNP TSC0017661
ttggtaatgaagy

SEQ ID NO: 67616 - DNA, 13 bp, Artificial Sequence
  Oligonucleotide for detection of SNP TSC0017661
rcttcattaccaa

SEQ ID NO: 67617 - DNA, 13 bp, Artificial Sequence
  Oligonucleotide for detection of SNP TSC0017663
tttattgtagtty

SEQ ID NO: 67618 - DNA, 13 bp, Artificial Sequence
  Oligonucleotide for detection of SNP TSC0017663
raactacaataaa

SEQ ID NO: 67619 - DNA, 13 bp, Artificial Sequence
  Oligonucleotide for detection of SNP TSC0017663
tttattatagtty

SEQ ID NO: 67620 - DNA, 13 bp, Artificial Sequence
  Oligonucleotide for detection of SNP TSC0017663
raactataataaa

SEQ ID NO: 67621 - DNA, 13 bp, Artificial Sequence
  Oligonucleotide for detection of SNP TSC0017664
ggttgtagtgggt

SEQ ID NO: 67622 - DNA, 13 bp, Artificial Sequence
  Oligonucleotide for detection of SNP TSC0017664
acccactacaacc

SEQ ID NO: 67623 - DNA, 13 bp, Artificial Sequence
  Oligonucleotide for detection of SNP TSC0017664
ggttgtggtgggt

SEQ ID NO: 67624 - DNA, 13 bp, Artificial Sequence
  Oligonucleotide for detection of SNP TSC0017664
acccaccacaacc

SEQ ID NO: 67625 - DNA, 13 bp, Artificial Sequence
  Oligonucleotide for detection of SNP TSC0017664
ggttgcggtgggt

SEQ ID NO: 67626 - DNA, 13 bp, Artificial Sequence
  Oligonucleotide for detection of SNP TSC0017664
acccaccgcaacc

SEQ ID NO: 67627 - DNA, 13 bp, Artificial Sequence
  Oligonucleotide for detection of SNP TSC0017664
atttattgtagty

SEQ ID NO: 67628 - DNA, 13 bp, Artificial Sequence
  Oligonucleotide for detection of SNP TSC0017664
ractacaataaat

SEQ ID NO: 67629 - DNA, 13 bp, Artificial Sequence
  Oligonucleotide for detection of SNP TSC0017664
atttatcgtagty

SEQ ID NO: 67630 - DNA, 13 bp, Artificial Sequence
  Oligonucleotide for detection of SNP TSC0017664
ractacgataaat

SEQ ID NO: 67631 - DNA, 13 bp, Artificial Sequence
  Oligonucleotide for detection of SNP TSC0017668
tttttttgaaaaa

SEQ ID NO: 67632 - DNA, 13 bp, Artificial Sequence
  Oligonucleotide for detection of SNP TSC0017668
tttttcaaaaaaa

SEQ ID NO: 67633 - DNA, 13 bp, Artificial Sequence
  Oligonucleotide for detection of SNP TSC0017668
ttttttcgaaaaa

SEQ ID NO: 67634 - DNA, 13 bp, Artificial Sequence
  Oligonucleotide for detection of SNP TSC0017668
tttttcgaaaaaa

SEQ ID NO: 67635 - DNA, 13 bp, Artificial Sequence
  Oligonucleotide for detection of SNP TSC0017668
ttttttggggagg

SEQ ID NO: 67636 - DNA, 13 bp, Artificial Sequence
  Oligonucleotide for detection of SNP TSC0017668
cctccccaaaaaa

SEQ ID NO: 67637 - DNA, 13 bp, Artificial Sequence
  Oligonucleotide for detection of SNP TSC0017668
ttttttagggagg

SEQ ID NO: 67638 - DNA, 13 bp, Artificial Sequence
  Oligonucleotide for detection of SNP TSC0017668
cctccctaaaaaa

SEQ ID NO: 67639 - DNA, 13 bp, Artificial Sequence
  Oligonucleotide for detection of SNP TSC0017668
tttttcggggagg

SEQ ID NO: 67640 - DNA, 13 bp, Artificial Sequence
  Oligonucleotide for detection of SNP TSC0017668
cctccccgaaaaa

SEQ ID NO: 67641 - DNA, 13 bp, Artificial Sequence
  Oligonucleotide for detection of SNP TSC0017669
aaaaatattttgy

SEQ ID NO: 67642 - DNA, 13 bp, Artificial Sequence
  Oligonucleotide for detection of SNP TSC0017669
rcaaaatattttt

SEQ ID NO: 67643 - DNA, 13 bp, Artificial Sequence
  Oligonucleotide for detection of SNP TSC0017669
aaaaattttttgy

SEQ ID NO: 67644 - DNA, 13 bp, Artificial Sequence
  Oligonucleotide for detection of SNP TSC0017669
rcaaaaaattttt

SEQ ID NO: 67645 - DNA, 13 bp, Artificial Sequence
  Oligonucleotide for detection of SNP TSC0017669
gtaaaatattttt

SEQ ID NO: 67646 - DNA, 13 bp, Artificial Sequence
  Oligonucleotide for detection of SNP TSC0017669
aaaaatattttac

SEQ ID NO: 67647 - DNA, 13 bp, Artificial Sequence
  Oligonucleotide for detection of SNP TSC0017669
gtaaaagattttt

SEQ ID NO: 67648 - DNA, 13 bp, Artificial Sequence
  Oligonucleotide for detection of SNP TSC0017669
aaaaatcttttac

SEQ ID NO: 67649 - DNA, 13 bp, Artificial Sequence
  Oligonucleotide for detection of SNP TSC0017670
ataataaggtttt

SEQ ID NO: 67650 - DNA, 13 bp, Artificial Sequence
  Oligonucleotide for detection of SNP TSC0017670
aaaaccttattat

SEQ ID NO: 67651 - DNA, 13 bp, Artificial Sequence
  Oligonucleotide for detection of SNP TSC0017670
ataatagggtttt

SEQ ID NO: 67652 - DNA, 13 bp, Artificial Sequence
  Oligonucleotide for detection of SNP TSC0017670
aaaaccctattat

SEQ ID NO: 67653 - DNA, 13 bp, Artificial Sequence
  Oligonucleotide for detection of SNP TSC0017675
gtagtttgttttg

SEQ ID NO: 67654 - DNA, 13 bp, Artificial Sequence
  Oligonucleotide for detection of SNP TSC0017675
caaaacaaactac

SEQ ID NO: 67655 - DNA, 13 bp, Artificial Sequence
  Oligonucleotide for detection of SNP TSC0017675
gtagttggttttg

SEQ ID NO: 67656 - DNA, 13 bp, Artificial Sequence
  Oligonucleotide for detection of SNP TSC0017675
caaaaccaactac

SEQ ID NO: 67657 - DNA, 13 bp, Artificial Sequence
  Oligonucleotide for detection of SNP TSC0017675
gtagttcgttttg

SEQ ID NO: 67658 - DNA, 13 bp, Artificial Sequence
  Oligonucleotide for detection of SNP TSC0017675
caaaacgaactac

SEQ ID NO: 67659 - DNA, 13 bp, Artificial Sequence
  Oligonucleotide for detection of SNP TSC0017675
gtagtcggttttg

SEQ ID NO: 67660 - DNA, 13 bp, Artificial Sequence
  Oligonucleotide for detection of SNP TSC0017675
caaaaccgactac

SEQ ID NO: 67661 - DNA, 13 bp, Artificial Sequence
  Oligonucleotide for detection of SNP TSC0017675
tagagtgggttgy

SEQ ID NO: 67662 - DNA, 13 bp, Artificial Sequence
  Oligonucleotide for detection of SNP TSC0017675
rcaacccactcta

SEQ ID NO: 67663 - DNA, 13 bp, Artificial Sequence
  Oligonucleotide for detection of SNP TSC0017675
tagagttggttgy

SEQ ID NO: 67664 - DNA, 13 bp, Artificial Sequence
  Oligonucleotide for detection of SNP TSC0017675
rcaaccaactcta

SEQ ID NO: 67665 - DNA, 13 bp, Artificial Sequence
  Oligonucleotide for detection of SNP TSC0017675
tagagcgggttgy

SEQ ID NO: 67666 - DNA, 13 bp, Artificial Sequence
  Oligonucleotide for detection of SNP TSC0017675
rcaacccgctcta

SEQ ID NO: 67667 - DNA, 13 bp, Artificial Sequence
  Oligonucleotide for detection of SNP TSC0017675
tagagtcggttgy

SEQ ID NO: 67668 - DNA, 13 bp, Artificial Sequence
  Oligonucleotide for detection of SNP TSC0017675
rcaaccgactcta

SEQ ID NO: 67669 - DNA, 13 bp, Artificial Sequence
  Oligonucleotide for detection of SNP TSC0017676
tagtatgatggta

SEQ ID NO: 67670 - DNA, 13 bp, Artificial Sequence
  Oligonucleotide for detection of SNP TSC0017676
taccatcatacta

SEQ ID NO: 67671 - DNA, 13 bp, Artificial Sequence
  Oligonucleotide for detection of SNP TSC0017676
tagtataatggta

SEQ ID NO: 67672 - DNA, 13 bp, Artificial Sequence
  Oligonucleotide for detection of SNP TSC0017676
taccattatacta

SEQ ID NO: 67673 - DNA, 13 bp, Artificial Sequence
  Oligonucleotide for detection of SNP TSC0017676
tagtatgacggta

SEQ ID NO: 67674 - DNA, 13 bp, Artificial Sequence
  Oligonucleotide for detection of SNP TSC0017676
taccgtcatacta

SEQ ID NO: 67675 - DNA, 13 bp, Artificial Sequence
  Oligonucleotide for detection of SNP TSC0017676
tagtataacggta

SEQ ID NO: 67676 - DNA, 13 bp, Artificial Sequence
  Oligonucleotide for detection of SNP TSC0017676
taccgttatacta

SEQ ID NO: 67677 - DNA, 13 bp, Artificial Sequence
  Oligonucleotide for detection of SNP TSC0017677
aggaaagtgttga

SEQ ID NO: 67678 - DNA, 13 bp, Artificial Sequence
  Oligonucleotide for detection of SNP TSC0017677
tcaacactttcct

SEQ ID NO: 67679 - DNA, 13 bp, Artificial Sequence
  Oligonucleotide for detection of SNP TSC0017677
aggaaattgttga

SEQ ID NO: 67680 - DNA, 13 bp, Artificial Sequence
  Oligonucleotide for detection of SNP TSC0017677
tcaacaatttcct

SEQ ID NO: 67681 - DNA, 13 bp, Artificial Sequence
  Oligonucleotide for detection of SNP TSC0017678
aggttatggatag

SEQ ID NO: 67682 - DNA, 13 bp, Artificial Sequence
  Oligonucleotide for detection of SNP TSC0017678
ctatccataacct

SEQ ID NO: 67683 - DNA, 13 bp, Artificial Sequence
  Oligonucleotide for detection of SNP TSC0017678
aggttagggatag

SEQ ID NO: 67684 - DNA, 13 bp, Artificial Sequence
  Oligonucleotide for detection of SNP TSC0017678
ctatccctaacct

SEQ ID NO: 67685 - DNA, 13 bp, Artificial Sequence
  Oligonucleotide for detection of SNP TSC0017678
aggttacggatag

SEQ ID NO: 67686 - DNA, 13 bp, Artificial Sequence
  Oligonucleotide for detection of SNP TSC0017678
ctatccgtaacct

SEQ ID NO: 67687 - DNA, 13 bp, Artificial Sequence
  Oligonucleotide for detection of SNP TSC0017678
ttgtttgtgattt

SEQ ID NO: 67688 - DNA, 13 bp, Artificial Sequence
  Oligonucleotide for detection of SNP TSC0017678
aaatcacaaacaa

SEQ ID NO: 67689 - DNA, 13 bp, Artificial Sequence
  Oligonucleotide for detection of SNP TSC0017678
ttgtttttgattt

SEQ ID NO: 67690 - DNA, 13 bp, Artificial Sequence
  Oligonucleotide for detection of SNP TSC0017678
aaatcaaaaacaa

SEQ ID NO: 67691 - DNA, 13 bp, Artificial Sequence
  Oligonucleotide for detection of SNP TSC0017678
ttgttcgtgattt

SEQ ID NO: 67692 - DNA, 13 bp, Artificial Sequence
  Oligonucleotide for detection of SNP TSC0017678
aaatcacgaacaa

SEQ ID NO: 67693 - DNA, 13 bp, Artificial Sequence
  Oligonucleotide for detection of SNP TSC0017679
attggtagggttg

SEQ ID NO: 67694 - DNA, 13 bp, Artificial Sequence
  Oligonucleotide for detection of SNP TSC0017679
caaccctaccaat

SEQ ID NO: 67695 - DNA, 13 bp, Artificial Sequence
  Oligonucleotide for detection of SNP TSC0017679
attggttgggttg

SEQ ID NO: 67696 - DNA, 13 bp, Artificial Sequence
  Oligonucleotide for detection of SNP TSC0017679
caacccaaccaat

SEQ ID NO: 67697 - DNA, 13 bp, Artificial Sequence
  Oligonucleotide for detection of SNP TSC0017679
taattttattaat

SEQ ID NO: 67698 - DNA, 13 bp, Artificial Sequence
  Oligonucleotide for detection of SNP TSC0017679
attaataaaatta

SEQ ID NO: 67699 - DNA, 13 bp, Artificial Sequence
  Oligonucleotide for detection of SNP TSC0017679
taatttaattaat

SEQ ID NO: 67700 - DNA, 13 bp, Artificial Sequence
  Oligonucleotide for detection of SNP TSC0017679
attaattaaatta

SEQ ID NO: 67701 - DNA, 13 bp, Artificial Sequence
  Oligonucleotide for detection of SNP TSC0017680
agtatatgggggy

SEQ ID NO: 67702 - DNA, 13 bp, Artificial Sequence
  Oligonucleotide for detection of SNP TSC0017680
rcccccatatact

SEQ ID NO: 67703 - DNA, 13 bp, Artificial Sequence
  Oligonucleotide for detection of SNP TSC0017680
agtatacgggggy

SEQ ID NO: 67704 - DNA, 13 bp, Artificial Sequence
  Oligonucleotide for detection of SNP TSC0017680
rcccccgtatact

SEQ ID NO: 67705 - DNA, 13 bp, Artificial Sequence
  Oligonucleotide for detection of SNP TSC0017680
gtttttgtgtgtt

SEQ ID NO: 67706 - DNA, 13 bp, Artificial Sequence
  Oligonucleotide for detection of SNP TSC0017680
aacacacaaaaac

SEQ ID NO: 67707 - DNA, 13 bp, Artificial Sequence
  Oligonucleotide for detection of SNP TSC0017680
gtttttatgtgtt

SEQ ID NO: 67708 - DNA, 13 bp, Artificial Sequence
  Oligonucleotide for detection of SNP TSC0017680
aacacataaaaac

SEQ ID NO: 67709 - DNA, 13 bp, Artificial Sequence
  Oligonucleotide for detection of SNP TSC0017680
gttttcgtgtgtt

SEQ ID NO: 67710 - DNA, 13 bp, Artificial Sequence
  Oligonucleotide for detection of SNP TSC0017680
aacacacgaaaac

SEQ ID NO: 67711 - DNA, 13 bp, Artificial Sequence
  Oligonucleotide for detection of SNP TSC0017683
tatataggaaagy

SEQ ID NO: 67712 - DNA, 13 bp, Artificial Sequence
  Oligonucleotide for detection of SNP TSC0017683
rctttcctatata

SEQ ID NO: 67713 - DNA, 13 bp, Artificial Sequence
  Oligonucleotide for detection of SNP TSC0017683
tatataagaaagy

SEQ ID NO: 67714 - DNA, 13 bp, Artificial Sequence
  Oligonucleotide for detection of SNP TSC0017683
rctttcttatata

SEQ ID NO: 67715 - DNA, 13 bp, Artificial Sequence
  Oligonucleotide for detection of SNP TSC0017686
agaagggtaggty

SEQ ID NO: 67716 - DNA, 13 bp, Artificial Sequence
  Oligonucleotide for detection of SNP TSC0017686
racctacccttct

SEQ ID NO: 67717 - DNA, 13 bp, Artificial Sequence
  Oligonucleotide for detection of SNP TSC0017686
agaaggataggty

SEQ ID NO: 67718 - DNA, 13 bp, Artificial Sequence
  Oligonucleotide for detection of SNP TSC0017686
racctatccttct

SEQ ID NO: 67719 - DNA, 13 bp, Artificial Sequence
  Oligonucleotide for detection of SNP TSC0017687
gtagaaaataagg

SEQ ID NO: 67720 - DNA, 13 bp, Artificial Sequence
  Oligonucleotide for detection of SNP TSC0017687
ccttattttctac

SEQ ID NO: 67721 - DNA, 13 bp, Artificial Sequence
  Oligonucleotide for detection of SNP TSC0017687
gtagaagataagg

SEQ ID NO: 67722 - DNA, 13 bp, Artificial Sequence
  Oligonucleotide for detection of SNP TSC0017687
ccttatcttctac

SEQ ID NO: 67723 - DNA, 13 bp, Artificial Sequence
  Oligonucleotide for detection of SNP TSC0017689
gaatatatggatt

SEQ ID NO: 67724 - DNA, 13 bp, Artificial Sequence
  Oligonucleotide for detection of SNP TSC0017689
aatccatatattc

SEQ ID NO: 67725 - DNA, 13 bp, Artificial Sequence
  Oligonucleotide for detection of SNP TSC0017689
gaatatgtggatt

SEQ ID NO: 67726 - DNA, 13 bp, Artificial Sequence
  Oligonucleotide for detection of SNP TSC0017689
aatccacatattc

SEQ ID NO: 67727 - DNA, 13 bp, Artificial Sequence
  Oligonucleotide for detection of SNP TSC0017689
gaatacgtggatt

SEQ ID NO: 67728 - DNA, 13 bp, Artificial Sequence
  Oligonucleotide for detection of SNP TSC0017689
aatccacgtattc

SEQ ID NO: 67729 - DNA, 13 bp, Artificial Sequence
  Oligonucleotide for detection of SNP TSC0017689
agtttatgtgtty

SEQ ID NO: 67730 - DNA, 13 bp, Artificial Sequence
  Oligonucleotide for detection of SNP TSC0017689
raacacataaact

SEQ ID NO: 67731 - DNA, 13 bp, Artificial Sequence
  Oligonucleotide for detection of SNP TSC0017689
agtttacgtgtty

SEQ ID NO: 67732 - DNA, 13 bp, Artificial Sequence
  Oligonucleotide for detection of SNP TSC0017689
raacacgtaaact

SEQ ID NO: 67733 - DNA, 13 bp, Artificial Sequence
  Oligonucleotide for detection of SNP TSC0017690
tgaaaggtatttt

SEQ ID NO: 67734 - DNA, 13 bp, Artificial Sequence
  Oligonucleotide for detection of SNP TSC0017690
aaaatacctttca

SEQ ID NO: 67735 - DNA, 13 bp, Artificial Sequence
  Oligonucleotide for detection of SNP TSC0017690
tgaaagttatttt

SEQ ID NO: 67736 - DNA, 13 bp, Artificial Sequence
  Oligonucleotide for detection of SNP TSC0017690
aaaataactttca

SEQ ID NO: 67737 - DNA, 13 bp, Artificial Sequence
  Oligonucleotide for detection of SNP TSC0017690
agagtatttttta

SEQ ID NO: 67738 - DNA, 13 bp, Artificial Sequence
  Oligonucleotide for detection of SNP TSC0017690
taaaaaatactct

SEQ ID NO: 67739 - DNA, 13 bp, Artificial Sequence
  Oligonucleotide for detection of SNP TSC0017690
agagtaattttta

SEQ ID NO: 67740 - DNA, 13 bp, Artificial Sequence
  Oligonucleotide for detection of SNP TSC0017690
taaaaattactct

SEQ ID NO: 67741 - DNA, 13 bp, Artificial Sequence
  Oligonucleotide for detection of SNP TSC0017692
tttattagtagta

SEQ ID NO: 67742 - DNA, 13 bp, Artificial Sequence
  Oligonucleotide for detection of SNP TSC0017692
tactactaataaa

SEQ ID NO: 67743 - DNA, 13 bp, Artificial Sequence
  Oligonucleotide for detection of SNP TSC0017692
tttattggtagta

SEQ ID NO: 67744 - DNA, 13 bp, Artificial Sequence
  Oligonucleotide for detection of SNP TSC0017692
tactaccaataaa

SEQ ID NO: 67745 - DNA, 13 bp, Artificial Sequence
  Oligonucleotide for detection of SNP TSC0017692
tttatcggtagta

SEQ ID NO: 67746 - DNA, 13 bp, Artificial Sequence
  Oligonucleotide for detection of SNP TSC0017692
tactaccgataaa

SEQ ID NO: 67747 - DNA, 13 bp, Artificial Sequence
  Oligonucleotide for detection of SNP TSC0017692
tgttattggtagg

SEQ ID NO: 67748 - DNA, 13 bp, Artificial Sequence
  Oligonucleotide for detection of SNP TSC0017692
cctaccaataaca

SEQ ID NO: 67749 - DNA, 13 bp, Artificial Sequence
  Oligonucleotide for detection of SNP TSC0017692
tgttatcggtagg

SEQ ID NO: 67750 - DNA, 13 bp, Artificial Sequence
  Oligonucleotide for detection of SNP TSC0017692
cctaccgataaca

SEQ ID NO: 67751 - DNA, 13 bp, Artificial Sequence
  Oligonucleotide for detection of SNP TSC0017693
aggttggtgtgta

SEQ ID NO: 67752 - DNA, 13 bp, Artificial Sequence
  Oligonucleotide for detection of SNP TSC0017693
tacacaccaacct

SEQ ID NO: 67753 - DNA, 13 bp, Artificial Sequence
  Oligonucleotide for detection of SNP TSC0017693
aggttgatgtgta

SEQ ID NO: 67754 - DNA, 13 bp, Artificial Sequence
  Oligonucleotide for detection of SNP TSC0017693
tacacatcaacct

SEQ ID NO: 67755 - DNA, 13 bp, Artificial Sequence
  Oligonucleotide for detection of SNP TSC0017694
attattatggggg

SEQ ID NO: 67756 - DNA, 13 bp, Artificial Sequence
  Oligonucleotide for detection of SNP TSC0017694
cccccataataat

SEQ ID NO: 67757 - DNA, 13 bp, Artificial Sequence
  Oligonucleotide for detection of SNP TSC0017694
attattttggggg

SEQ ID NO: 67758 - DNA, 13 bp, Artificial Sequence
  Oligonucleotide for detection of SNP TSC0017694
cccccaaaataat

SEQ ID NO: 67759 - DNA, 13 bp, Artificial Sequence
  Oligonucleotide for detection of SNP TSC0017694
tttttatggtgat

SEQ ID NO: 67760 - DNA, 13 bp, Artificial Sequence
  Oligonucleotide for detection of SNP TSC0017694
atcaccataaaaa

SEQ ID NO: 67761 - DNA, 13 bp, Artificial Sequence
  Oligonucleotide for detection of SNP TSC0017694
tttttaaggtgat

SEQ ID NO: 67762 - DNA, 13 bp, Artificial Sequence
  Oligonucleotide for detection of SNP TSC0017694
atcaccttaaaaa

SEQ ID NO: 67763 - DNA, 13 bp, Artificial Sequence
  Oligonucleotide for detection of SNP TSC0017697
tttttattaggty

SEQ ID NO: 67764 - DNA, 13 bp, Artificial Sequence
  Oligonucleotide for detection of SNP TSC0017697
racctaataaaaa

SEQ ID NO: 67765 - DNA, 13 bp, Artificial Sequence
  Oligonucleotide for detection of SNP TSC0017697
tttttagtaggty

SEQ ID NO: 67766 - DNA, 13 bp, Artificial Sequence
  Oligonucleotide for detection of SNP TSC0017697
racctactaaaaa

SEQ ID NO: 67767 - DNA, 13 bp, Artificial Sequence
  Oligonucleotide for detection of SNP TSC0017697
gatttagtgaggg

SEQ ID NO: 67768 - DNA, 13 bp, Artificial Sequence
  Oligonucleotide for detection of SNP TSC0017697
ccctcactaaatc

SEQ ID NO: 67769 - DNA, 13 bp, Artificial Sequence
  Oligonucleotide for detection of SNP TSC0017697
gatttattgaggg

SEQ ID NO: 67770 - DNA, 13 bp, Artificial Sequence
  Oligonucleotide for detection of SNP TSC0017697
ccctcaataaatc

SEQ ID NO: 67771 - DNA, 13 bp, Artificial Sequence
  Oligonucleotide for detection of SNP TSC0017698
agttatatataat

SEQ ID NO: 67772 - DNA, 13 bp, Artificial Sequence
  Oligonucleotide for detection of SNP TSC0017698
attatatataact

SEQ ID NO: 67773 - DNA, 13 bp, Artificial Sequence
  Oligonucleotide for detection of SNP TSC0017698
agttatgtataat

SEQ ID NO: 67774 - DNA, 13 bp, Artificial Sequence
  Oligonucleotide for detection of SNP TSC0017698
attatacataact

SEQ ID NO: 67775 - DNA, 13 bp, Artificial Sequence
  Oligonucleotide for detection of SNP TSC0017699
gttttaatatgtt

SEQ ID NO: 67776 - DNA, 13 bp, Artificial Sequence
  Oligonucleotide for detection of SNP TSC0017699
aacatattaaaac

SEQ ID NO: 67777 - DNA, 13 bp, Artificial Sequence
  Oligonucleotide for detection of SNP TSC0017699
gttttattatgtt

SEQ ID NO: 67778 - DNA, 13 bp, Artificial Sequence
  Oligonucleotide for detection of SNP TSC0017699
aacataataaaac

SEQ ID NO: 67779 - DNA, 13 bp, Artificial Sequence
  Oligonucleotide for detection of SNP TSC0017699
aatatgttgaaay

SEQ ID NO: 67780 - DNA, 13 bp, Artificial Sequence
  Oligonucleotide for detection of SNP TSC0017699
rtttcaacatatt

SEQ ID NO: 67781 - DNA, 13 bp, Artificial Sequence
  Oligonucleotide for detection of SNP TSC0017699
aatatggtgaaay

SEQ ID NO: 67782 - DNA, 13 bp, Artificial Sequence
  Oligonucleotide for detection of SNP TSC0017699
rtttcaccatatt

SEQ ID NO: 67783 - DNA, 13 bp, Artificial Sequence
  Oligonucleotide for detection of SNP TSC0017700
tagtttattaaag

SEQ ID NO: 67784 - DNA, 13 bp, Artificial Sequence
  Oligonucleotide for detection of SNP TSC0017700
ctttaataaacta

SEQ ID NO: 67785 - DNA, 13 bp, Artificial Sequence
  Oligonucleotide for detection of SNP TSC0017700
ttttggtaggttg

SEQ ID NO: 67786 - DNA, 13 bp, Artificial Sequence
  Oligonucleotide for detection of SNP TSC0017700
caacctaccaaaa

SEQ ID NO: 67787 - DNA, 13 bp, Artificial Sequence
  Oligonucleotide for detection of SNP TSC0017701
tgttgttttttay

SEQ ID NO: 67788 - DNA, 13 bp, Artificial Sequence
  Oligonucleotide for detection of SNP TSC0017701
rtaaaaaacaaca

SEQ ID NO: 67789 - DNA, 13 bp, Artificial Sequence
  Oligonucleotide for detection of SNP TSC0017701
tgttgtgttttay

SEQ ID NO: 67790 - DNA, 13 bp, Artificial Sequence
  Oligonucleotide for detection of SNP TSC0017701
rtaaaacacaaca

SEQ ID NO: 67791 - DNA, 13 bp, Artificial Sequence
  Oligonucleotide for detection of SNP TSC0017701
tgttgcgttttay

SEQ ID NO: 67792 - DNA, 13 bp, Artificial Sequence
  Oligonucleotide for detection of SNP TSC0017701
rtaaaacgcaaca

SEQ ID NO: 67793 - DNA, 13 bp, Artificial Sequence
  Oligonucleotide for detection of SNP TSC0017701
gtaaaaggtaata

SEQ ID NO: 67794 - DNA, 13 bp, Artificial Sequence
  Oligonucleotide for detection of SNP TSC0017701
tattaccttttac

SEQ ID NO: 67795 - DNA, 13 bp, Artificial Sequence
  Oligonucleotide for detection of SNP TSC0017701
gtaaaatgtaata

SEQ ID NO: 67796 - DNA, 13 bp, Artificial Sequence
  Oligonucleotide for detection of SNP TSC0017701
tattacattttac

SEQ ID NO: 67797 - DNA, 13 bp, Artificial Sequence
  Oligonucleotide for detection of SNP TSC0017701
gtaaaacgtaata

SEQ ID NO: 67798 - DNA, 13 bp, Artificial Sequence
  Oligonucleotide for detection of SNP TSC0017701
tattacgttttac

SEQ ID NO: 67799 - DNA, 13 bp, Artificial Sequence
  Oligonucleotide for detection of SNP TSC0017702
aaaaaagaaggga

SEQ ID NO: 67800 - DNA, 13 bp, Artificial Sequence
  Oligonucleotide for detection of SNP TSC0017702
tcccttctttttt

SEQ ID NO: 67801 - DNA, 13 bp, Artificial Sequence
  Oligonucleotide for detection of SNP TSC0017702
aaaaaataaggga

SEQ ID NO: 67802 - DNA, 13 bp, Artificial Sequence
  Oligonucleotide for detection of SNP TSC0017702
tcccttatttttt

SEQ ID NO: 67803 - DNA, 13 bp, Artificial Sequence
  Oligonucleotide for detection of SNP TSC0017703
ttaggaaaagtat

SEQ ID NO: 67804 - DNA, 13 bp, Artificial Sequence
  Oligonucleotide for detection of SNP TSC0017703
atacttttcctaa

SEQ ID NO: 67805 - DNA, 13 bp, Artificial Sequence
  Oligonucleotide for detection of SNP TSC0017703
ttaggagaagtat

SEQ ID NO: 67806 - DNA, 13 bp, Artificial Sequence
  Oligonucleotide for detection of SNP TSC0017703
atacttctcctaa

SEQ ID NO: 67807 - DNA, 13 bp, Artificial Sequence
  Oligonucleotide for detection of SNP TSC0017704
ataatagagttta

SEQ ID NO: 67808 - DNA, 13 bp, Artificial Sequence
  Oligonucleotide for detection of SNP TSC0017704
taaactctattat

SEQ ID NO: 67809 - DNA, 13 bp, Artificial Sequence
  Oligonucleotide for detection of SNP TSC0017704
ataataaagttta

SEQ ID NO: 67810 - DNA, 13 bp, Artificial Sequence
  Oligonucleotide for detection of SNP TSC0017704
taaactttattat

SEQ ID NO: 67811 - DNA, 13 bp, Artificial Sequence
  Oligonucleotide for detection of SNP TSC0017705
gagattaattttg

SEQ ID NO: 67812 - DNA, 13 bp, Artificial Sequence
  Oligonucleotide for detection of SNP TSC0017705
caaaattaatctc

SEQ ID NO: 67813 - DNA, 13 bp, Artificial Sequence
  Oligonucleotide for detection of SNP TSC0017705
gagattgattttg

SEQ ID NO: 67814 - DNA, 13 bp, Artificial Sequence
  Oligonucleotide for detection of SNP TSC0017705
caaaatcaatctc

SEQ ID NO: 67815 - DNA, 13 bp, Artificial Sequence
  Oligonucleotide for detection of SNP TSC0017705
gagatcgattttg

SEQ ID NO: 67816 - DNA, 13 bp, Artificial Sequence
  Oligonucleotide for detection of SNP TSC0017705
caaaatcgatctc

SEQ ID NO: 67817 - DNA, 13 bp, Artificial Sequence
  Oligonucleotide for detection of SNP TSC0017705
tagagttgattty

SEQ ID NO: 67818 - DNA, 13 bp, Artificial Sequence
  Oligonucleotide for detection of SNP TSC0017705
raaatcaactcta

SEQ ID NO: 67819 - DNA, 13 bp, Artificial Sequence
  Oligonucleotide for detection of SNP TSC0017705
tagagtcgattty

SEQ ID NO: 67820 - DNA, 13 bp, Artificial Sequence
  Oligonucleotide for detection of SNP TSC0017705
raaatcgactcta

SEQ ID NO: 67821 - DNA, 13 bp, Artificial Sequence
  Oligonucleotide for detection of SNP TSC0017706
gtttagtggttta

SEQ ID NO: 67822 - DNA, 13 bp, Artificial Sequence
  Oligonucleotide for detection of SNP TSC0017706
taaaccactaaac

SEQ ID NO: 67823 - DNA, 13 bp, Artificial Sequence
  Oligonucleotide for detection of SNP TSC0017706
gtttagcggttta

SEQ ID NO: 67824 - DNA, 13 bp, Artificial Sequence
  Oligonucleotide for detection of SNP TSC0017706
taaaccgctaaac

SEQ ID NO: 67825 - DNA, 13 bp, Artificial Sequence
  Oligonucleotide for detection of SNP TSC0017706
tgaattgttaagy

SEQ ID NO: 67826 - DNA, 13 bp, Artificial Sequence
  Oligonucleotide for detection of SNP TSC0017706
rcttaacaattca

SEQ ID NO: 67827 - DNA, 13 bp, Artificial Sequence
  Oligonucleotide for detection of SNP TSC0017706
tgaattattaagy

SEQ ID NO: 67828 - DNA, 13 bp, Artificial Sequence
  Oligonucleotide for detection of SNP TSC0017706
rcttaataattca

SEQ ID NO: 67829 - DNA, 13 bp, Artificial Sequence
  Oligonucleotide for detection of SNP TSC0017706
tgaatcgttaagy

SEQ ID NO: 67830 - DNA, 13 bp, Artificial Sequence
  Oligonucleotide for detection of SNP TSC0017706
rcttaacgattca

SEQ ID NO: 67831 - DNA, 13 bp, Artificial Sequence
  Oligonucleotide for detection of SNP TSC0017707
tttagtatagatg

SEQ ID NO: 67832 - DNA, 13 bp, Artificial Sequence
  Oligonucleotide for detection of SNP TSC0017707
catctatactaaa

SEQ ID NO: 67833 - DNA, 13 bp, Artificial Sequence
  Oligonucleotide for detection of SNP TSC0017707
tttagtgtagatg

SEQ ID NO: 67834 - DNA, 13 bp, Artificial Sequence
  Oligonucleotide for detection of SNP TSC0017707
catctacactaaa

SEQ ID NO: 67835 - DNA, 13 bp, Artificial Sequence
  Oligonucleotide for detection of SNP TSC0017707
tttagcgtagatg

SEQ ID NO: 67836 - DNA, 13 bp, Artificial Sequence
  Oligonucleotide for detection of SNP TSC0017707
catctacgctaaa

SEQ ID NO: 67837 - DNA, 13 bp, Artificial Sequence
  Oligonucleotide for detection of SNP TSC0017707
tatttgtgttgga

SEQ ID NO: 67838 - DNA, 13 bp, Artificial Sequence
  Oligonucleotide for detection of SNP TSC0017707
tccaacacaaata

SEQ ID NO: 67839 - DNA, 13 bp, Artificial Sequence
  Oligonucleotide for detection of SNP TSC0017707
tatttgcgttgga

SEQ ID NO: 67840 - DNA, 13 bp, Artificial Sequence
  Oligonucleotide for detection of SNP TSC0017707
tccaacgcaaata

SEQ ID NO: 67841 - DNA, 13 bp, Artificial Sequence
  Oligonucleotide for detection of SNP TSC0017713
atataaagtttty

SEQ ID NO: 67842 - DNA, 13 bp, Artificial Sequence
  Oligonucleotide for detection of SNP TSC0017713
raaaactttatat

SEQ ID NO: 67843 - DNA, 13 bp, Artificial Sequence
  Oligonucleotide for detection of SNP TSC0017713
atataaggtttty

SEQ ID NO: 67844 - DNA, 13 bp, Artificial Sequence
  Oligonucleotide for detection of SNP TSC0017713
raaaaccttatat

SEQ ID NO: 67845 - DNA, 13 bp, Artificial Sequence
  Oligonucleotide for detection of SNP TSC0017714
tgttgttgttgat

SEQ ID NO: 67846 - DNA, 13 bp, Artificial Sequence
  Oligonucleotide for detection of SNP TSC0017714
atcaacaacaaca

SEQ ID NO: 67847 - DNA, 13 bp, Artificial Sequence
  Oligonucleotide for detection of SNP TSC0017714
tgttgtcgttgat

SEQ ID NO: 67848 - DNA, 13 bp, Artificial Sequence
  Oligonucleotide for detection of SNP TSC0017714
atcaacgacaaca

SEQ ID NO: 67849 - DNA, 13 bp, Artificial Sequence
  Oligonucleotide for detection of SNP TSC0017714
attagtgatagta

SEQ ID NO: 67850 - DNA, 13 bp, Artificial Sequence
  Oligonucleotide for detection of SNP TSC0017714
tactatcactaat

SEQ ID NO: 67851 - DNA, 13 bp, Artificial Sequence
  Oligonucleotide for detection of SNP TSC0017714
attagtaatagta

SEQ ID NO: 67852 - DNA, 13 bp, Artificial Sequence
  Oligonucleotide for detection of SNP TSC0017714
tactattactaat

SEQ ID NO: 67853 - DNA, 13 bp, Artificial Sequence
  Oligonucleotide for detection of SNP TSC0017714
attagcgatagta

SEQ ID NO: 67854 - DNA, 13 bp, Artificial Sequence
  Oligonucleotide for detection of SNP TSC0017714
tactatcgctaat

SEQ ID NO: 67855 - DNA, 13 bp, Artificial Sequence
  Oligonucleotide for detection of SNP TSC0017715
taaattaatttga

SEQ ID NO: 67856 - DNA, 13 bp, Artificial Sequence
  Oligonucleotide for detection of SNP TSC0017715
tcaaattaattta

SEQ ID NO: 67857 - DNA, 13 bp, Artificial Sequence
  Oligonucleotide for detection of SNP TSC0017715
taaattgatttga

SEQ ID NO: 67858 - DNA, 13 bp, Artificial Sequence
  Oligonucleotide for detection of SNP TSC0017715
tcaaatcaattta

SEQ ID NO: 67859 - DNA, 13 bp, Artificial Sequence
  Oligonucleotide for detection of SNP TSC0017718
taggatatataat

SEQ ID NO: 67860 - DNA, 13 bp, Artificial Sequence
  Oligonucleotide for detection of SNP TSC0017718
attatatatccta

SEQ ID NO: 67861 - DNA, 13 bp, Artificial Sequence
  Oligonucleotide for detection of SNP TSC0017718
taggatgtataat

SEQ ID NO: 67862 - DNA, 13 bp, Artificial Sequence
  Oligonucleotide for detection of SNP TSC0017718
attatacatccta

SEQ ID NO: 67863 - DNA, 13 bp, Artificial Sequence
  Oligonucleotide for detection of SNP TSC0017719
gaaattaattgta

SEQ ID NO: 67864 - DNA, 13 bp, Artificial Sequence
  Oligonucleotide for detection of SNP TSC0017719
tacaattaatttc

SEQ ID NO: 67865 - DNA, 13 bp, Artificial Sequence
  Oligonucleotide for detection of SNP TSC0017719
gaaatttattgta

SEQ ID NO: 67866 - DNA, 13 bp, Artificial Sequence
  Oligonucleotide for detection of SNP TSC0017719
tacaataaatttc

SEQ ID NO: 67867 - DNA, 13 bp, Artificial Sequence
  Oligonucleotide for detection of SNP TSC0017719
tgtagttgattty

SEQ ID NO: 67868 - DNA, 13 bp, Artificial Sequence
  Oligonucleotide for detection of SNP TSC0017719
raaatcaactaca

SEQ ID NO: 67869 - DNA, 13 bp, Artificial Sequence
  Oligonucleotide for detection of SNP TSC0017719
tgtagtggattty

SEQ ID NO: 67870 - DNA, 13 bp, Artificial Sequence
  Oligonucleotide for detection of SNP TSC0017719
raaatccactaca

SEQ ID NO: 67871 - DNA, 13 bp, Artificial Sequence
  Oligonucleotide for detection of SNP TSC0017721
tgttttgtttttg

SEQ ID NO: 67872 - DNA, 13 bp, Artificial Sequence
  Oligonucleotide for detection of SNP TSC0017721
caaaaacaaaaca

SEQ ID NO: 67873 - DNA, 13 bp, Artificial Sequence
  Oligonucleotide for detection of SNP TSC0017721
tagggggaagata

SEQ ID NO: 67874 - DNA, 13 bp, Artificial Sequence
  Oligonucleotide for detection of SNP TSC0017721
tatcttcccccta

SEQ ID NO: 67875 - DNA, 13 bp, Artificial Sequence
  Oligonucleotide for detection of SNP TSC0017721
taggggtaagata

SEQ ID NO: 67876 - DNA, 13 bp, Artificial Sequence
  Oligonucleotide for detection of SNP TSC0017721
tatcttaccccta

SEQ ID NO: 67877 - DNA, 13 bp, Artificial Sequence
  Oligonucleotide for detection of SNP TSC0017722
gaagttagaatgg

SEQ ID NO: 67878 - DNA, 13 bp, Artificial Sequence
  Oligonucleotide for detection of SNP TSC0017722
ccattctaacttc

SEQ ID NO: 67879 - DNA, 13 bp, Artificial Sequence
  Oligonucleotide for detection of SNP TSC0017722
gaagttggaatgg

SEQ ID NO: 67880 - DNA, 13 bp, Artificial Sequence
  Oligonucleotide for detection of SNP TSC0017722
ccattccaacttc

SEQ ID NO: 67881 - DNA, 13 bp, Artificial Sequence
  Oligonucleotide for detection of SNP TSC0017722
gaagtcggaatgg

SEQ ID NO: 67882 - DNA, 13 bp, Artificial Sequence
  Oligonucleotide for detection of SNP TSC0017722
ccattccgacttc

SEQ ID NO: 67883 - DNA, 13 bp, Artificial Sequence
  Oligonucleotide for detection of SNP TSC0017722
ttattttgattty

SEQ ID NO: 67884 - DNA, 13 bp, Artificial Sequence
  Oligonucleotide for detection of SNP TSC0017722
raaatcaaaataa

SEQ ID NO: 67885 - DNA, 13 bp, Artificial Sequence
  Oligonucleotide for detection of SNP TSC0017722
ttatttcgattty

SEQ ID NO: 67886 - DNA, 13 bp, Artificial Sequence
  Oligonucleotide for detection of SNP TSC0017722
raaatcgaaataa

SEQ ID NO: 67887 - DNA, 13 bp, Artificial Sequence
  Oligonucleotide for detection of SNP TSC0017723
tatataattttty

SEQ ID NO: 67888 - DNA, 13 bp, Artificial Sequence
  Oligonucleotide for detection of SNP TSC0017723
raaaaattatata

SEQ ID NO: 67889 - DNA, 13 bp, Artificial Sequence
  Oligonucleotide for detection of SNP TSC0017723
tatatagttttty

SEQ ID NO: 67890 - DNA, 13 bp, Artificial Sequence
  Oligonucleotide for detection of SNP TSC0017723
raaaaactatata

SEQ ID NO: 67891 - DNA, 13 bp, Artificial Sequence
  Oligonucleotide for detection of SNP TSC0017724
aggggatggtaag

SEQ ID NO: 67892 - DNA, 13 bp, Artificial Sequence
  Oligonucleotide for detection of SNP TSC0017724
cttaccatcccct

SEQ ID NO: 67893 - DNA, 13 bp, Artificial Sequence
  Oligonucleotide for detection of SNP TSC0017724
aggggacggtaag

SEQ ID NO: 67894 - DNA, 13 bp, Artificial Sequence
  Oligonucleotide for detection of SNP TSC0017724
cttaccgtcccct

SEQ ID NO: 67895 - DNA, 13 bp, Artificial Sequence
  Oligonucleotide for detection of SNP TSC0017726
ggtaaggaatata

SEQ ID NO: 67896 - DNA, 13 bp, Artificial Sequence
  Oligonucleotide for detection of SNP TSC0017726
tatattccttacc

SEQ ID NO: 67897 - DNA, 13 bp, Artificial Sequence
  Oligonucleotide for detection of SNP TSC0017726
ggtaagaaatata

SEQ ID NO: 67898 - DNA, 13 bp, Artificial Sequence
  Oligonucleotide for detection of SNP TSC0017726
tatatttcttacc

SEQ ID NO: 67899 - DNA, 13 bp, Artificial Sequence
  Oligonucleotide for detection of SNP TSC0017727
gttttagtttata

SEQ ID NO: 67900 - DNA, 13 bp, Artificial Sequence
  Oligonucleotide for detection of SNP TSC0017727
tataaactaaaac

SEQ ID NO: 67901 - DNA, 13 bp, Artificial Sequence
  Oligonucleotide for detection of SNP TSC0017727
gttttaatttata

SEQ ID NO: 67902 - DNA, 13 bp, Artificial Sequence
  Oligonucleotide for detection of SNP TSC0017727
tataaattaaaac

SEQ ID NO: 67903 - DNA, 13 bp, Artificial Sequence
  Oligonucleotide for detection of SNP TSC0017728
ttaaaagatatty

SEQ ID NO: 67904 - DNA, 13 bp, Artificial Sequence
  Oligonucleotide for detection of SNP TSC0017728
raatatcttttaa

SEQ ID NO: 67905 - DNA, 13 bp, Artificial Sequence
  Oligonucleotide for detection of SNP TSC0017728
ttaaaaaatatty

SEQ ID NO: 67906 - DNA, 13 bp, Artificial Sequence
  Oligonucleotide for detection of SNP TSC0017728
raatattttttaa

SEQ ID NO: 67907 - DNA, 13 bp, Artificial Sequence
  Oligonucleotide for detection of SNP TSC0017735
aaattgggttttt

SEQ ID NO: 67908 - DNA, 13 bp, Artificial Sequence
  Oligonucleotide for detection of SNP TSC0017735
aaaaacccaattt

SEQ ID NO: 67909 - DNA, 13 bp, Artificial Sequence
  Oligonucleotide for detection of SNP TSC0017735
aaattgtgttttt

SEQ ID NO: 67910 - DNA, 13 bp, Artificial Sequence
  Oligonucleotide for detection of SNP TSC0017735
aaaaacacaattt

SEQ ID NO: 67911 - DNA, 13 bp, Artificial Sequence
  Oligonucleotide for detection of SNP TSC0017735
aaaaatttaattt

SEQ ID NO: 67912 - DNA, 13 bp, Artificial Sequence
  Oligonucleotide for detection of SNP TSC0017735
aaattaaattttt

SEQ ID NO: 67913 - DNA, 13 bp, Artificial Sequence
  Oligonucleotide for detection of SNP TSC0017735
aaaaatataattt

SEQ ID NO: 67914 - DNA, 13 bp, Artificial Sequence
  Oligonucleotide for detection of SNP TSC0017735
aaattatattttt

SEQ ID NO: 67915 - DNA, 13 bp, Artificial Sequence
  Oligonucleotide for detection of SNP TSC0017736
tttaaaggaaata

SEQ ID NO: 67916 - DNA, 13 bp, Artificial Sequence
  Oligonucleotide for detection of SNP TSC0017736
tatttcctttaaa

SEQ ID NO: 67917 - DNA, 13 bp, Artificial Sequence
  Oligonucleotide for detection of SNP TSC0017736
tttaaaagaaata

SEQ ID NO: 67918 - DNA, 13 bp, Artificial Sequence
  Oligonucleotide for detection of SNP TSC0017736
tatttcttttaaa

SEQ ID NO: 67919 - DNA, 13 bp, Artificial Sequence
  Oligonucleotide for detection of SNP TSC0017737
attataatgtaga

SEQ ID NO: 67920 - DNA, 13 bp, Artificial Sequence
  Oligonucleotide for detection of SNP TSC0017737
tctacattataat

SEQ ID NO: 67921 - DNA, 13 bp, Artificial Sequence
  Oligonucleotide for detection of SNP TSC0017737
attatagtgtaga

SEQ ID NO: 67922 - DNA, 13 bp, Artificial Sequence
  Oligonucleotide for detection of SNP TSC0017737
tctacactataat

SEQ ID NO: 67923 - DNA, 13 bp, Artificial Sequence
  Oligonucleotide for detection of SNP TSC0017738
atgttggggttty

SEQ ID NO: 67924 - DNA, 13 bp, Artificial Sequence
  Oligonucleotide for detection of SNP TSC0017738
raaaccccaacat

SEQ ID NO: 67925 - DNA, 13 bp, Artificial Sequence
  Oligonucleotide for detection of SNP TSC0017738
atgttgtggttty

SEQ ID NO: 67926 - DNA, 13 bp, Artificial Sequence
  Oligonucleotide for detection of SNP TSC0017738
raaaccacaacat

SEQ ID NO: 67927 - DNA, 13 bp, Artificial Sequence
  Oligonucleotide for detection of SNP TSC0017738
gaaattttaatat

SEQ ID NO: 67928 - DNA, 13 bp, Artificial Sequence
  Oligonucleotide for detection of SNP TSC0017738
atattaaaatttc

SEQ ID NO: 67929 - DNA, 13 bp, Artificial Sequence
  Oligonucleotide for detection of SNP TSC0017738
gaaattataatat

SEQ ID NO: 67930 - DNA, 13 bp, Artificial Sequence
  Oligonucleotide for detection of SNP TSC0017738
atattataatttc

SEQ ID NO: 67931 - DNA, 13 bp, Artificial Sequence
  Oligonucleotide for detection of SNP TSC0017743
tatttgaaaaaaa

SEQ ID NO: 67932 - DNA, 13 bp, Artificial Sequence
  Oligonucleotide for detection of SNP TSC0017743
tttttttcaaata

SEQ ID NO: 67933 - DNA, 13 bp, Artificial Sequence
  Oligonucleotide for detection of SNP TSC0017743
tatttgtaaaaaa

SEQ ID NO: 67934 - DNA, 13 bp, Artificial Sequence
  Oligonucleotide for detection of SNP TSC0017743
ttttttacaaata

SEQ ID NO: 67935 - DNA, 13 bp, Artificial Sequence
  Oligonucleotide for detection of SNP TSC0017743
ttttttttaggtg

SEQ ID NO: 67936 - DNA, 13 bp, Artificial Sequence
  Oligonucleotide for detection of SNP TSC0017743
cacctaaaaaaaa

SEQ ID NO: 67937 - DNA, 13 bp, Artificial Sequence
  Oligonucleotide for detection of SNP TSC0017743
ttttttataggtg

SEQ ID NO: 67938 - DNA, 13 bp, Artificial Sequence
  Oligonucleotide for detection of SNP TSC0017743
cacctataaaaaa

SEQ ID NO: 67939 - DNA, 13 bp, Artificial Sequence
  Oligonucleotide for detection of SNP TSC0017745
atttttttttttg

SEQ ID NO: 67940 - DNA, 13 bp, Artificial Sequence
  Oligonucleotide for detection of SNP TSC0017745
caaaaaaaaaaat

SEQ ID NO: 67941 - DNA, 13 bp, Artificial Sequence
  Oligonucleotide for detection of SNP TSC0017745
atttttgtttttg

SEQ ID NO: 67942 - DNA, 13 bp, Artificial Sequence
  Oligonucleotide for detection of SNP TSC0017745
caaaaacaaaaat

SEQ ID NO: 67943 - DNA, 13 bp, Artificial Sequence
  Oligonucleotide for detection of SNP TSC0017745
taagaagagaagt

SEQ ID NO: 67944 - DNA, 13 bp, Artificial Sequence
  Oligonucleotide for detection of SNP TSC0017745
acttctcttctta

SEQ ID NO: 67945 - DNA, 13 bp, Artificial Sequence
  Oligonucleotide for detection of SNP TSC0017745
taagaatagaagt

SEQ ID NO: 67946 - DNA, 13 bp, Artificial Sequence
  Oligonucleotide for detection of SNP TSC0017745
acttctattctta

SEQ ID NO: 67947 - DNA, 13 bp, Artificial Sequence
  Oligonucleotide for detection of SNP TSC0017746
aagaattaagtta

SEQ ID NO: 67948 - DNA, 13 bp, Artificial Sequence
  Oligonucleotide for detection of SNP TSC0017746
taacttaattctt

SEQ ID NO: 67949 - DNA, 13 bp, Artificial Sequence
  Oligonucleotide for detection of SNP TSC0017746
aagaatgaagtta

SEQ ID NO: 67950 - DNA, 13 bp, Artificial Sequence
  Oligonucleotide for detection of SNP TSC0017746
taacttcattctt

SEQ ID NO: 67951 - DNA, 13 bp, Artificial Sequence
  Oligonucleotide for detection of SNP TSC0017746
aagaacgaagtta

SEQ ID NO: 67952 - DNA, 13 bp, Artificial Sequence
  Oligonucleotide for detection of SNP TSC0017746
taacttcgttctt

SEQ ID NO: 67953 - DNA, 13 bp, Artificial Sequence
  Oligonucleotide for detection of SNP TSC0017746
tgatttggttttt

SEQ ID NO: 67954 - DNA, 13 bp, Artificial Sequence
  Oligonucleotide for detection of SNP TSC0017746
aaaaaccaaatca

SEQ ID NO: 67955 - DNA, 13 bp, Artificial Sequence
  Oligonucleotide for detection of SNP TSC0017746
tgattttgttttt

SEQ ID NO: 67956 - DNA, 13 bp, Artificial Sequence
  Oligonucleotide for detection of SNP TSC0017746
aaaaacaaaatca

SEQ ID NO: 67957 - DNA, 13 bp, Artificial Sequence
  Oligonucleotide for detection of SNP TSC0017746
tgatttcgttttt

SEQ ID NO: 67958 - DNA, 13 bp, Artificial Sequence
  Oligonucleotide for detection of SNP TSC0017746
aaaaacgaaatca

SEQ ID NO: 67959 - DNA, 13 bp, Artificial Sequence
  Oligonucleotide for detection of SNP TSC0017747
tgataaatgttay

SEQ ID NO: 67960 - DNA, 13 bp, Artificial Sequence
  Oligonucleotide for detection of SNP TSC0017747
rtaacatttatca

SEQ ID NO: 67961 - DNA, 13 bp, Artificial Sequence
  Oligonucleotide for detection of SNP TSC0017747
tgataagtgttay

SEQ ID NO: 67962 - DNA, 13 bp, Artificial Sequence
  Oligonucleotide for detection of SNP TSC0017747
rtaacacttatca

SEQ ID NO: 67963 - DNA, 13 bp, Artificial Sequence
  Oligonucleotide for detection of SNP TSC0017748
atgtttataatty

SEQ ID NO: 67964 - DNA, 13 bp, Artificial Sequence
  Oligonucleotide for detection of SNP TSC0017748
raattataaacat

SEQ ID NO: 67965 - DNA, 13 bp, Artificial Sequence
  Oligonucleotide for detection of SNP TSC0017748
atgtttgtaatty

SEQ ID NO: 67966 - DNA, 13 bp, Artificial Sequence
  Oligonucleotide for detection of SNP TSC0017748
raattacaaacat

SEQ ID NO: 67967 - DNA, 13 bp, Artificial Sequence
  Oligonucleotide for detection of SNP TSC0017748
acgtttataatty

SEQ ID NO: 67968 - DNA, 13 bp, Artificial Sequence
  Oligonucleotide for detection of SNP TSC0017748
raattataaacgt

SEQ ID NO: 67969 - DNA, 13 bp, Artificial Sequence
  Oligonucleotide for detection of SNP TSC0017748
acgtttgtaatty

SEQ ID NO: 67970 - DNA, 13 bp, Artificial Sequence
  Oligonucleotide for detection of SNP TSC0017748
raattacaaacgt

SEQ ID NO: 67971 - DNA, 13 bp, Artificial Sequence
  Oligonucleotide for detection of SNP TSC0017748
atgttcgtaatty

SEQ ID NO: 67972 - DNA, 13 bp, Artificial Sequence
  Oligonucleotide for detection of SNP TSC0017748
raattacgaacat

SEQ ID NO: 67973 - DNA, 13 bp, Artificial Sequence
  Oligonucleotide for detection of SNP TSC0017748
acgttcgtaatty

SEQ ID NO: 67974 - DNA, 13 bp, Artificial Sequence
  Oligonucleotide for detection of SNP TSC0017748
raattacgaacgt

SEQ ID NO: 67975 - DNA, 13 bp, Artificial Sequence
  Oligonucleotide for detection of SNP TSC0017748
ggattatgaatgt

SEQ ID NO: 67976 - DNA, 13 bp, Artificial Sequence
  Oligonucleotide for detection of SNP TSC0017748
acattcataatcc

SEQ ID NO: 67977 - DNA, 13 bp, Artificial Sequence
  Oligonucleotide for detection of SNP TSC0017748
ggattatgaacgt

SEQ ID NO: 67978 - DNA, 13 bp, Artificial Sequence
  Oligonucleotide for detection of SNP TSC0017748
acgttcataatcc

SEQ ID NO: 67979 - DNA, 13 bp, Artificial Sequence
  Oligonucleotide for detection of SNP TSC0017748
ggattacgaatgt

SEQ ID NO: 67980 - DNA, 13 bp, Artificial Sequence
  Oligonucleotide for detection of SNP TSC0017748
acattcgtaatcc

SEQ ID NO: 67981 - DNA, 13 bp, Artificial Sequence
  Oligonucleotide for detection of SNP TSC0017748
ggattacgaacgt

SEQ ID NO: 67982 - DNA, 13 bp, Artificial Sequence
  Oligonucleotide for detection of SNP TSC0017748
acgttcgtaatcc

SEQ ID NO: 67983 - DNA, 13 bp, Artificial Sequence
  Oligonucleotide for detection of SNP TSC0017749
gagtttaaagtag

SEQ ID NO: 67984 - DNA, 13 bp, Artificial Sequence
  Oligonucleotide for detection of SNP TSC0017749
ctactttaaactc

SEQ ID NO: 67985 - DNA, 13 bp, Artificial Sequence
  Oligonucleotide for detection of SNP TSC0017749
gagtttgaagtag

SEQ ID NO: 67986 - DNA, 13 bp, Artificial Sequence
  Oligonucleotide for detection of SNP TSC0017749
ctacttcaaactc

SEQ ID NO: 67987 - DNA, 13 bp, Artificial Sequence
  Oligonucleotide for detection of SNP TSC0017749
gagttcgaagtag

SEQ ID NO: 67988 - DNA, 13 bp, Artificial Sequence
  Oligonucleotide for detection of SNP TSC0017749
ctacttcgaactc

SEQ ID NO: 67989 - DNA, 13 bp, Artificial Sequence
  Oligonucleotide for detection of SNP TSC0017750
gaatgtattttta

SEQ ID NO: 67990 - DNA, 13 bp, Artificial Sequence
  Oligonucleotide for detection of SNP TSC0017750
taaaaatacattc

SEQ ID NO: 67991 - DNA, 13 bp, Artificial Sequence
  Oligonucleotide for detection of SNP TSC0017750
gaatgtgttttta

SEQ ID NO: 67992 - DNA, 13 bp, Artificial Sequence
  Oligonucleotide for detection of SNP TSC0017750
taaaaacacattc

SEQ ID NO: 67993 - DNA, 13 bp, Artificial Sequence
  Oligonucleotide for detection of SNP TSC0017750
gaatgcgttttta

SEQ ID NO: 67994 - DNA, 13 bp, Artificial Sequence
  Oligonucleotide for detection of SNP TSC0017750
taaaaacgcattc

SEQ ID NO: 67995 - DNA, 13 bp, Artificial Sequence
  Oligonucleotide for detection of SNP TSC0017750
taaagatgtatty

SEQ ID NO: 67996 - DNA, 13 bp, Artificial Sequence
  Oligonucleotide for detection of SNP TSC0017750
raatacatcttta

SEQ ID NO: 67997 - DNA, 13 bp, Artificial Sequence
  Oligonucleotide for detection of SNP TSC0017750
taaagacgtatty

SEQ ID NO: 67998 - DNA, 13 bp, Artificial Sequence
  Oligonucleotide for detection of SNP TSC0017750
raatacgtcttta

SEQ ID NO: 67999 - DNA, 13 bp, Artificial Sequence
  Oligonucleotide for detection of SNP TSC0017751
gaagtaaaaagty

SEQ ID NO: 68000 - DNA, 13 bp, Artificial Sequence
  Oligonucleotide for detection of SNP TSC0017751
ractttttacttc

SEQ ID NO: 68001 - DNA, 13 bp, Artificial Sequence
  Oligonucleotide for detection of SNP TSC0017751
gaagtagaaagty

SEQ ID NO: 68002 - DNA, 13 bp, Artificial Sequence
  Oligonucleotide for detection of SNP TSC0017751
ractttctacttc

SEQ ID NO: 68003 - DNA, 13 bp, Artificial Sequence
  Oligonucleotide for detection of SNP TSC0017753
tgagttgtgtttt

SEQ ID NO: 68004 - DNA, 13 bp, Artificial Sequence
  Oligonucleotide for detection of SNP TSC0017753
aaaacacaactca

SEQ ID NO: 68005 - DNA, 13 bp, Artificial Sequence
  Oligonucleotide for detection of SNP TSC0017753
tgagttatgtttt

SEQ ID NO: 68006 - DNA, 13 bp, Artificial Sequence
  Oligonucleotide for detection of SNP TSC0017753
aaaacataactca

SEQ ID NO: 68007 - DNA, 13 bp, Artificial Sequence
  Oligonucleotide for detection of SNP TSC0017753
tgagttgcgtttt

SEQ ID NO: 68008 - DNA, 13 bp, Artificial Sequence
  Oligonucleotide for detection of SNP TSC0017753
aaaacgcaactca

SEQ ID NO: 68009 - DNA, 13 bp, Artificial Sequence
  Oligonucleotide for detection of SNP TSC0017753
tgagttacgtttt

SEQ ID NO: 68010 - DNA, 13 bp, Artificial Sequence
  Oligonucleotide for detection of SNP TSC0017753
aaaacgtaactca

SEQ ID NO: 68011 - DNA, 13 bp, Artificial Sequence
  Oligonucleotide for detection of SNP TSC0017754
ggtgaaatataty

SEQ ID NO: 68012 - DNA, 13 bp, Artificial Sequence
  Oligonucleotide for detection of SNP TSC0017754
ratatatttcacc

SEQ ID NO: 68013 - DNA, 13 bp, Artificial Sequence
  Oligonucleotide for detection of SNP TSC0017754
ggtgaattataty

SEQ ID NO: 68014 - DNA, 13 bp, Artificial Sequence
  Oligonucleotide for detection of SNP TSC0017754
ratataattcacc

SEQ ID NO: 68015 - DNA, 13 bp, Artificial Sequence
  Oligonucleotide for detection of SNP TSC0017754
ggtgtattttaty

SEQ ID NO: 68016 - DNA, 13 bp, Artificial Sequence
  Oligonucleotide for detection of SNP TSC0017754
rataaaatacacc

SEQ ID NO: 68017 - DNA, 13 bp, Artificial Sequence
  Oligonucleotide for detection of SNP TSC0017754
ggtgtaatttaty

SEQ ID NO: 68018 - DNA, 13 bp, Artificial Sequence
  Oligonucleotide for detection of SNP TSC0017754
rataaattacacc

SEQ ID NO: 68019 - DNA, 13 bp, Artificial Sequence
  Oligonucleotide for detection of SNP TSC0017756
agatatttttgaa

SEQ ID NO: 68020 - DNA, 13 bp, Artificial Sequence
  Oligonucleotide for detection of SNP TSC0017756
ttcaaaaatatct

SEQ ID NO: 68021 - DNA, 13 bp, Artificial Sequence
  Oligonucleotide for detection of SNP TSC0017756
agatatgtttgaa

SEQ ID NO: 68022 - DNA, 13 bp, Artificial Sequence
  Oligonucleotide for detection of SNP TSC0017756
ttcaaacatatct

SEQ ID NO: 68023 - DNA, 13 bp, Artificial Sequence
  Oligonucleotide for detection of SNP TSC0017756
agatacgtttgaa

SEQ ID NO: 68024 - DNA, 13 bp, Artificial Sequence
  Oligonucleotide for detection of SNP TSC0017756
ttcaaacgtatct

SEQ ID NO: 68025 - DNA, 13 bp, Artificial Sequence
  Oligonucleotide for detection of SNP TSC0017756
tttaaaggtattt

SEQ ID NO: 68026 - DNA, 13 bp, Artificial Sequence
  Oligonucleotide for detection of SNP TSC0017756
aaatacctttaaa

SEQ ID NO: 68027 - DNA, 13 bp, Artificial Sequence
  Oligonucleotide for detection of SNP TSC0017756
tttaaatgtattt

SEQ ID NO: 68028 - DNA, 13 bp, Artificial Sequence
  Oligonucleotide for detection of SNP TSC0017756
aaatacatttaaa

SEQ ID NO: 68029 - DNA, 13 bp, Artificial Sequence
  Oligonucleotide for detection of SNP TSC0017756
tttaaacgtattt

SEQ ID NO: 68030 - DNA, 13 bp, Artificial Sequence
  Oligonucleotide for detection of SNP TSC0017756
aaatacgtttaaa

SEQ ID NO: 68031 - DNA, 13 bp, Artificial Sequence
  Oligonucleotide for detection of SNP TSC0017757
tgtggagggagag

SEQ ID NO: 68032 - DNA, 13 bp, Artificial Sequence
  Oligonucleotide for detection of SNP TSC0017757
ctctccctccaca

SEQ ID NO: 68033 - DNA, 13 bp, Artificial Sequence
  Oligonucleotide for detection of SNP TSC0017757
tgtggaaggagag

SEQ ID NO: 68034 - DNA, 13 bp, Artificial Sequence
  Oligonucleotide for detection of SNP TSC0017757
ctctccttccaca

SEQ ID NO: 68035 - DNA, 13 bp, Artificial Sequence
  Oligonucleotide for detection of SNP TSC0017761
aagggatagtttg

SEQ ID NO: 68036 - DNA, 13 bp, Artificial Sequence
  Oligonucleotide for detection of SNP TSC0017761
caaactatccctt

SEQ ID NO: 68037 - DNA, 13 bp, Artificial Sequence
  Oligonucleotide for detection of SNP TSC0017761
aagggagagtttg

SEQ ID NO: 68038 - DNA, 13 bp, Artificial Sequence
  Oligonucleotide for detection of SNP TSC0017761
caaactctccctt

SEQ ID NO: 68039 - DNA, 13 bp, Artificial Sequence
  Oligonucleotide for detection of SNP TSC0017761
tagattttttttt

SEQ ID NO: 68040 - DNA, 13 bp, Artificial Sequence
  Oligonucleotide for detection of SNP TSC0017761
aaaaaaaaatcta

SEQ ID NO: 68041 - DNA, 13 bp, Artificial Sequence
  Oligonucleotide for detection of SNP TSC0017767
aaaaaatgtagaa

SEQ ID NO: 68042 - DNA, 13 bp, Artificial Sequence
  Oligonucleotide for detection of SNP TSC0017767
ttctacatttttt

SEQ ID NO: 68043 - DNA, 13 bp, Artificial Sequence
  Oligonucleotide for detection of SNP TSC0017767
aaaaaacgtagaa

SEQ ID NO: 68044 - DNA, 13 bp, Artificial Sequence
  Oligonucleotide for detection of SNP TSC0017767
ttctacgtttttt

SEQ ID NO: 68045 - DNA, 13 bp, Artificial Sequence
  Oligonucleotide for detection of SNP TSC0017769
ttatatgtagaaa

SEQ ID NO: 68046 - DNA, 13 bp, Artificial Sequence
  Oligonucleotide for detection of SNP TSC0017769
tttctacatataa

SEQ ID NO: 68047 - DNA, 13 bp, Artificial Sequence
  Oligonucleotide for detection of SNP TSC0017769
ttatatatagaaa

SEQ ID NO: 68048 - DNA, 13 bp, Artificial Sequence
  Oligonucleotide for detection of SNP TSC0017769
tttctatatataa

SEQ ID NO: 68049 - DNA, 13 bp, Artificial Sequence
  Oligonucleotide for detection of SNP TSC0017772
tatagggaataty

SEQ ID NO: 68050 - DNA, 13 bp, Artificial Sequence
  Oligonucleotide for detection of SNP TSC0017772
ratattccctata

SEQ ID NO: 68051 - DNA, 13 bp, Artificial Sequence
  Oligonucleotide for detection of SNP TSC0017772
tataggaaataty

SEQ ID NO: 68052 - DNA, 13 bp, Artificial Sequence
  Oligonucleotide for detection of SNP TSC0017772
ratatttcctata

SEQ ID NO: 68053 - DNA, 13 bp, Artificial Sequence
  Oligonucleotide for detection of SNP TSC0017776
tttttgaggggty

SEQ ID NO: 68054 - DNA, 13 bp, Artificial Sequence
  Oligonucleotide for detection of SNP TSC0017776
racccctcaaaaa

SEQ ID NO: 68055 - DNA, 13 bp, Artificial Sequence
  Oligonucleotide for detection of SNP TSC0017776
tttttggggggty

SEQ ID NO: 68056 - DNA, 13 bp, Artificial Sequence
  Oligonucleotide for detection of SNP TSC0017776
raccccccaaaaa

SEQ ID NO: 68057 - DNA, 13 bp, Artificial Sequence
  Oligonucleotide for detection of SNP TSC0017776
ttttcgaggggty

SEQ ID NO: 68058 - DNA, 13 bp, Artificial Sequence
  Oligonucleotide for detection of SNP TSC0017776
racccctcgaaaa

SEQ ID NO: 68059 - DNA, 13 bp, Artificial Sequence
  Oligonucleotide for detection of SNP TSC0017776
ttttcggggggty

SEQ ID NO: 68060 - DNA, 13 bp, Artificial Sequence
  Oligonucleotide for detection of SNP TSC0017776
raccccccgaaaa

SEQ ID NO: 68061 - DNA, 13 bp, Artificial Sequence
  Oligonucleotide for detection of SNP TSC0017778
gagtttgggagtt

SEQ ID NO: 68062 - DNA, 13 bp, Artificial Sequence
  Oligonucleotide for detection of SNP TSC0017778
aactcccaaactc

SEQ ID NO: 68063 - DNA, 13 bp, Artificial Sequence
  Oligonucleotide for detection of SNP TSC0017778
gagtttaggagtt

SEQ ID NO: 68064 - DNA, 13 bp, Artificial Sequence
  Oligonucleotide for detection of SNP TSC0017778
aactcctaaactc

SEQ ID NO: 68065 - DNA, 13 bp, Artificial Sequence
  Oligonucleotide for detection of SNP TSC0017779
aatgtttgataat

SEQ ID NO: 68066 - DNA, 13 bp, Artificial Sequence
  Oligonucleotide for detection of SNP TSC0017779
attatcaaacatt

SEQ ID NO: 68067 - DNA, 13 bp, Artificial Sequence
  Oligonucleotide for detection of SNP TSC0017779
aacgtttgataat

SEQ ID NO: 68068 - DNA, 13 bp, Artificial Sequence
  Oligonucleotide for detection of SNP TSC0017779
attatcaaacgtt

SEQ ID NO: 68069 - DNA, 13 bp, Artificial Sequence
  Oligonucleotide for detection of SNP TSC0017779
aatgttcgataat

SEQ ID NO: 68070 - DNA, 13 bp, Artificial Sequence
  Oligonucleotide for detection of SNP TSC0017779
attatcgaacatt

SEQ ID NO: 68071 - DNA, 13 bp, Artificial Sequence
  Oligonucleotide for detection of SNP TSC0017779
aacgttcgataat

SEQ ID NO: 68072 - DNA, 13 bp, Artificial Sequence
  Oligonucleotide for detection of SNP TSC0017779
attatcgaacgtt

SEQ ID NO: 68073 - DNA, 13 bp, Artificial Sequence
  Oligonucleotide for detection of SNP TSC0017779
attgttgaatgtt

SEQ ID NO: 68074 - DNA, 13 bp, Artificial Sequence
  Oligonucleotide for detection of SNP TSC0017779
aacattcaacaat

SEQ ID NO: 68075 - DNA, 13 bp, Artificial Sequence
  Oligonucleotide for detection of SNP TSC0017779
attgttaaatgtt

SEQ ID NO: 68076 - DNA, 13 bp, Artificial Sequence
  Oligonucleotide for detection of SNP TSC0017779
aacatttaacaat

SEQ ID NO: 68077 - DNA, 13 bp, Artificial Sequence
  Oligonucleotide for detection of SNP TSC0017779
attgtcgaatgtt

SEQ ID NO: 68078 - DNA, 13 bp, Artificial Sequence
  Oligonucleotide for detection of SNP TSC0017779
aacattcgacaat

SEQ ID NO: 68079 - DNA, 13 bp, Artificial Sequence
  Oligonucleotide for detection of SNP TSC0017779
attgttaaacgtt

SEQ ID NO: 68080 - DNA, 13 bp, Artificial Sequence
  Oligonucleotide for detection of SNP TSC0017779
aacgtttaacaat

SEQ ID NO: 68081 - DNA, 13 bp, Artificial Sequence
  Oligonucleotide for detection of SNP TSC0017779
attgttgaacgtt

SEQ ID NO: 68082 - DNA, 13 bp, Artificial Sequence
  Oligonucleotide for detection of SNP TSC0017779
aacgttcaacaat

SEQ ID NO: 68083 - DNA, 13 bp, Artificial Sequence
  Oligonucleotide for detection of SNP TSC0017779
attgtcgaacgtt

SEQ ID NO: 68084 - DNA, 13 bp, Artificial Sequence
  Oligonucleotide for detection of SNP TSC0017779
aacgttcgacaat

SEQ ID NO: 68085 - DNA, 13 bp, Artificial Sequence
  Oligonucleotide for detection of SNP TSC0017780
aaaaaggtttagg

SEQ ID NO: 68086 - DNA, 13 bp, Artificial Sequence
  Oligonucleotide for detection of SNP TSC0017780
cctaaaccttttt

SEQ ID NO: 68087 - DNA, 13 bp, Artificial Sequence
  Oligonucleotide for detection of SNP TSC0017780
aaaaagttttagg

SEQ ID NO: 68088 - DNA, 13 bp, Artificial Sequence
  Oligonucleotide for detection of SNP TSC0017780
cctaaaacttttt

SEQ ID NO: 68089 - DNA, 13 bp, Artificial Sequence
  Oligonucleotide for detection of SNP TSC0017781
ggtggaatttttg

SEQ ID NO: 68090 - DNA, 13 bp, Artificial Sequence
  Oligonucleotide for detection of SNP TSC0017781
caaaaattccacc

SEQ ID NO: 68091 - DNA, 13 bp, Artificial Sequence
  Oligonucleotide for detection of SNP TSC0017781
ggtggagtttttg

SEQ ID NO: 68092 - DNA, 13 bp, Artificial Sequence
  Oligonucleotide for detection of SNP TSC0017781
caaaaactccacc

SEQ ID NO: 68093 - DNA, 13 bp, Artificial Sequence
  Oligonucleotide for detection of SNP TSC0017782
atttatatgtagg

SEQ ID NO: 68094 - DNA, 13 bp, Artificial Sequence
  Oligonucleotide for detection of SNP TSC0017782
cctacatataaat

SEQ ID NO: 68095 - DNA, 13 bp, Artificial Sequence
  Oligonucleotide for detection of SNP TSC0017782
atttatgtgtagg

SEQ ID NO: 68096 - DNA, 13 bp, Artificial Sequence
  Oligonucleotide for detection of SNP TSC0017782
cctacacataaat

SEQ ID NO: 68097 - DNA, 13 bp, Artificial Sequence
  Oligonucleotide for detection of SNP TSC0017783
tatattgatatat

SEQ ID NO: 68098 - DNA, 13 bp, Artificial Sequence
  Oligonucleotide for detection of SNP TSC0017783
atatatcaatata

SEQ ID NO: 68099 - DNA, 13 bp, Artificial Sequence
  Oligonucleotide for detection of SNP TSC0017783
atatgtgaatgta

SEQ ID NO: 68100 - DNA, 13 bp, Artificial Sequence
  Oligonucleotide for detection of SNP TSC0017783
tacattcacatat

SEQ ID NO: 68101 - DNA, 13 bp, Artificial Sequence
  Oligonucleotide for detection of SNP TSC0017783
atatgttaatgta

SEQ ID NO: 68102 - DNA, 13 bp, Artificial Sequence
  Oligonucleotide for detection of SNP TSC0017783
tacattaacatat

SEQ ID NO: 68103 - DNA, 13 bp, Artificial Sequence
  Oligonucleotide for detection of SNP TSC0017784
gtaggtagtatty

SEQ ID NO: 68104 - DNA, 13 bp, Artificial Sequence
  Oligonucleotide for detection of SNP TSC0017784
raatactacctac

SEQ ID NO: 68105 - DNA, 13 bp, Artificial Sequence
  Oligonucleotide for detection of SNP TSC0017784
gtaggtggtatty

SEQ ID NO: 68106 - DNA, 13 bp, Artificial Sequence
  Oligonucleotide for detection of SNP TSC0017784
raataccacctac

SEQ ID NO: 68107 - DNA, 13 bp, Artificial Sequence
  Oligonucleotide for detection of SNP TSC0017784
gtaggcggtatty

SEQ ID NO: 68108 - DNA, 13 bp, Artificial Sequence
  Oligonucleotide for detection of SNP TSC0017784
raataccgcctac

SEQ ID NO: 68109 - DNA, 13 bp, Artificial Sequence
  Oligonucleotide for detection of SNP TSC0017784
gagtgttgtttgy

SEQ ID NO: 68110 - DNA, 13 bp, Artificial Sequence
  Oligonucleotide for detection of SNP TSC0017784
rcaaacaacactc

SEQ ID NO: 68111 - DNA, 13 bp, Artificial Sequence
  Oligonucleotide for detection of SNP TSC0017784
gagtgtcgtttgy

SEQ ID NO: 68112 - DNA, 13 bp, Artificial Sequence
  Oligonucleotide for detection of SNP TSC0017784
rcaaacgacactc

SEQ ID NO: 68113 - DNA, 13 bp, Artificial Sequence
  Oligonucleotide for detection of SNP TSC0017785
ggaaatattttta

SEQ ID NO: 68114 - DNA, 13 bp, Artificial Sequence
  Oligonucleotide for detection of SNP TSC0017785
taaaaatatttcc

SEQ ID NO: 68115 - DNA, 13 bp, Artificial Sequence
  Oligonucleotide for detection of SNP TSC0017785
ggaaatgttttta

SEQ ID NO: 68116 - DNA, 13 bp, Artificial Sequence
  Oligonucleotide for detection of SNP TSC0017785
taaaaacatttcc

SEQ ID NO: 68117 - DNA, 13 bp, Artificial Sequence
  Oligonucleotide for detection of SNP TSC0017786
tgttttttaaatg

SEQ ID NO: 68118 - DNA, 13 bp, Artificial Sequence
  Oligonucleotide for detection of SNP TSC0017786
catttaaaaaaca

SEQ ID NO: 68119 - DNA, 13 bp, Artificial Sequence
  Oligonucleotide for detection of SNP TSC0017786
tgttttgtaaatg

SEQ ID NO: 68120 - DNA, 13 bp, Artificial Sequence
  Oligonucleotide for detection of SNP TSC0017786
catttacaaaaca

SEQ ID NO: 68121 - DNA, 13 bp, Artificial Sequence
  Oligonucleotide for detection of SNP TSC0017786
tgtttcgtaaatg

SEQ ID NO: 68122 - DNA, 13 bp, Artificial Sequence
  Oligonucleotide for detection of SNP TSC0017786
catttacgaaaca

SEQ ID NO: 68123 - DNA, 13 bp, Artificial Sequence
  Oligonucleotide for detection of SNP TSC0017786
tatttggggggta

SEQ ID NO: 68124 - DNA, 13 bp, Artificial Sequence
  Oligonucleotide for detection of SNP TSC0017786
taccccccaaata

SEQ ID NO: 68125 - DNA, 13 bp, Artificial Sequence
  Oligonucleotide for detection of SNP TSC0017786
tatttgtggggta

SEQ ID NO: 68126 - DNA, 13 bp, Artificial Sequence
  Oligonucleotide for detection of SNP TSC0017786
taccccacaaata

SEQ ID NO: 68127 - DNA, 13 bp, Artificial Sequence
  Oligonucleotide for detection of SNP TSC0017786
tatttgcggggta

SEQ ID NO: 68128 - DNA, 13 bp, Artificial Sequence
  Oligonucleotide for detection of SNP TSC0017786
taccccgcaaata

SEQ ID NO: 68129 - DNA, 13 bp, Artificial Sequence
  Oligonucleotide for detection of SNP TSC0017787
attttgaggaaga

SEQ ID NO: 68130 - DNA, 13 bp, Artificial Sequence
  Oligonucleotide for detection of SNP TSC0017787
tcttcctcaaaat

SEQ ID NO: 68131 - DNA, 13 bp, Artificial Sequence
  Oligonucleotide for detection of SNP TSC0017787
attttggggaaga

SEQ ID NO: 68132 - DNA, 13 bp, Artificial Sequence
  Oligonucleotide for detection of SNP TSC0017787
tcttccccaaaat

SEQ ID NO: 68133 - DNA, 13 bp, Artificial Sequence
  Oligonucleotide for detection of SNP TSC0017788
tgtttttgtagta

SEQ ID NO: 68134 - DNA, 13 bp, Artificial Sequence
  Oligonucleotide for detection of SNP TSC0017788
tactacaaaaaca

SEQ ID NO: 68135 - DNA, 13 bp, Artificial Sequence
  Oligonucleotide for detection of SNP TSC0017788
tgttttggtagta

SEQ ID NO: 68136 - DNA, 13 bp, Artificial Sequence
  Oligonucleotide for detection of SNP TSC0017788
tactaccaaaaca

SEQ ID NO: 68137 - DNA, 13 bp, Artificial Sequence
  Oligonucleotide for detection of SNP TSC0017788
tgttttcgtagta

SEQ ID NO: 68138 - DNA, 13 bp, Artificial Sequence
  Oligonucleotide for detection of SNP TSC0017788
tactacgaaaaca

SEQ ID NO: 68139 - DNA, 13 bp, Artificial Sequence
  Oligonucleotide for detection of SNP TSC0017788
tgtttcggtagta

SEQ ID NO: 68140 - DNA, 13 bp, Artificial Sequence
  Oligonucleotide for detection of SNP TSC0017788
tactaccgaaaca

SEQ ID NO: 68141 - DNA, 13 bp, Artificial Sequence
  Oligonucleotide for detection of SNP TSC0017788
tgttatgggagta

SEQ ID NO: 68142 - DNA, 13 bp, Artificial Sequence
  Oligonucleotide for detection of SNP TSC0017788
tactcccataaca

SEQ ID NO: 68143 - DNA, 13 bp, Artificial Sequence
  Oligonucleotide for detection of SNP TSC0017788
tgttattggagta

SEQ ID NO: 68144 - DNA, 13 bp, Artificial Sequence
  Oligonucleotide for detection of SNP TSC0017788
tactccaataaca

SEQ ID NO: 68145 - DNA, 13 bp, Artificial Sequence
  Oligonucleotide for detection of SNP TSC0017788
tgttacgggagta

SEQ ID NO: 68146 - DNA, 13 bp, Artificial Sequence
  Oligonucleotide for detection of SNP TSC0017788
tactcccgtaaca

SEQ ID NO: 68147 - DNA, 13 bp, Artificial Sequence
  Oligonucleotide for detection of SNP TSC0017788
tgttatcggagta

SEQ ID NO: 68148 - DNA, 13 bp, Artificial Sequence
  Oligonucleotide for detection of SNP TSC0017788
tactccgataaca

SEQ ID NO: 68149 - DNA, 13 bp, Artificial Sequence
  Oligonucleotide for detection of SNP TSC0017791
tattagggttttg

SEQ ID NO: 68150 - DNA, 13 bp, Artificial Sequence
  Oligonucleotide for detection of SNP TSC0017791
caaaaccctaata

SEQ ID NO: 68151 - DNA, 13 bp, Artificial Sequence
  Oligonucleotide for detection of SNP TSC0017791
tattagagttttg

SEQ ID NO: 68152 - DNA, 13 bp, Artificial Sequence
  Oligonucleotide for detection of SNP TSC0017791
caaaactctaata

SEQ ID NO: 68153 - DNA, 13 bp, Artificial Sequence
  Oligonucleotide for detection of SNP TSC0017792
gggagtgtattaa

SEQ ID NO: 68154 - DNA, 13 bp, Artificial Sequence
  Oligonucleotide for detection of SNP TSC0017792
ttaatacactccc

SEQ ID NO: 68155 - DNA, 13 bp, Artificial Sequence
  Oligonucleotide for detection of SNP TSC0017792
gggagtatattaa

SEQ ID NO: 68156 - DNA, 13 bp, Artificial Sequence
  Oligonucleotide for detection of SNP TSC0017792
ttaatatactccc

SEQ ID NO: 68157 - DNA, 13 bp, Artificial Sequence
  Oligonucleotide for detection of SNP TSC0017793
tttgtatgatttt

SEQ ID NO: 68158 - DNA, 13 bp, Artificial Sequence
  Oligonucleotide for detection of SNP TSC0017793
aaaatcatacaaa

SEQ ID NO: 68159 - DNA, 13 bp, Artificial Sequence
  Oligonucleotide for detection of SNP TSC0017793
ttcgtatgatttt

SEQ ID NO: 68160 - DNA, 13 bp, Artificial Sequence
  Oligonucleotide for detection of SNP TSC0017793
aaaatcatacgaa

SEQ ID NO: 68161 - DNA, 13 bp, Artificial Sequence
  Oligonucleotide for detection of SNP TSC0017793
tttgtacgatttt

SEQ ID NO: 68162 - DNA, 13 bp, Artificial Sequence
  Oligonucleotide for detection of SNP TSC0017793
aaaatcgtacaaa

SEQ ID NO: 68163 - DNA, 13 bp, Artificial Sequence
  Oligonucleotide for detection of SNP TSC0017793
ttcgtacgatttt

SEQ ID NO: 68164 - DNA, 13 bp, Artificial Sequence
  Oligonucleotide for detection of SNP TSC0017793
aaaatcgtacgaa

SEQ ID NO: 68165 - DNA, 13 bp, Artificial Sequence
  Oligonucleotide for detection of SNP TSC0017793
agggttgtgtgag

SEQ ID NO: 68166 - DNA, 13 bp, Artificial Sequence
  Oligonucleotide for detection of SNP TSC0017793
ctcacacaaccct

SEQ ID NO: 68167 - DNA, 13 bp, Artificial Sequence
  Oligonucleotide for detection of SNP TSC0017793
agggttatgtgag

SEQ ID NO: 68168 - DNA, 13 bp, Artificial Sequence
  Oligonucleotide for detection of SNP TSC0017793
ctcacataaccct

SEQ ID NO: 68169 - DNA, 13 bp, Artificial Sequence
  Oligonucleotide for detection of SNP TSC0017793
agggtcgtgtgag

SEQ ID NO: 68170 - DNA, 13 bp, Artificial Sequence
  Oligonucleotide for detection of SNP TSC0017793
ctcacacgaccct

SEQ ID NO: 68171 - DNA, 13 bp, Artificial Sequence
  Oligonucleotide for detection of SNP TSC0017793
agggttatgcgag

SEQ ID NO: 68172 - DNA, 13 bp, Artificial Sequence
  Oligonucleotide for detection of SNP TSC0017793
ctcgcataaccct

SEQ ID NO: 68173 - DNA, 13 bp, Artificial Sequence
  Oligonucleotide for detection of SNP TSC0017793
agggttgtgcgag

SEQ ID NO: 68174 - DNA, 13 bp, Artificial Sequence
  Oligonucleotide for detection of SNP TSC0017793
ctcgcacaaccct

SEQ ID NO: 68175 - DNA, 13 bp, Artificial Sequence
  Oligonucleotide for detection of SNP TSC0017793
agggtcgtgcgag

SEQ ID NO: 68176 - DNA, 13 bp, Artificial Sequence
  Oligonucleotide for detection of SNP TSC0017793
ctcgcacgaccct

SEQ ID NO: 68177 - DNA, 13 bp, Artificial Sequence
  Oligonucleotide for detection of SNP TSC0017794
ttatgtgagggaa

SEQ ID NO: 68178 - DNA, 13 bp, Artificial Sequence
  Oligonucleotide for detection of SNP TSC0017794
ttccctcacataa

SEQ ID NO: 68179 - DNA, 13 bp, Artificial Sequence
  Oligonucleotide for detection of SNP TSC0017794
ttatgtaagggaa

SEQ ID NO: 68180 - DNA, 13 bp, Artificial Sequence
  Oligonucleotide for detection of SNP TSC0017794
ttcccttacataa

SEQ ID NO: 68181 - DNA, 13 bp, Artificial Sequence
  Oligonucleotide for detection of SNP TSC0017795
agagaaattgtga

SEQ ID NO: 68182 - DNA, 13 bp, Artificial Sequence
  Oligonucleotide for detection of SNP TSC0017795
tcacaatttctct

SEQ ID NO: 68183 - DNA, 13 bp, Artificial Sequence
  Oligonucleotide for detection of SNP TSC0017795
agagaatttgtga

SEQ ID NO: 68184 - DNA, 13 bp, Artificial Sequence
  Oligonucleotide for detection of SNP TSC0017795
tcacaaattctct

SEQ ID NO: 68185 - DNA, 13 bp, Artificial Sequence
  Oligonucleotide for detection of SNP TSC0017795
ttatagttttttt

SEQ ID NO: 68186 - DNA, 13 bp, Artificial Sequence
  Oligonucleotide for detection of SNP TSC0017795
aaaaaaactataa

SEQ ID NO: 68187 - DNA, 13 bp, Artificial Sequence
  Oligonucleotide for detection of SNP TSC0017795
ttatagatttttt

SEQ ID NO: 68188 - DNA, 13 bp, Artificial Sequence
  Oligonucleotide for detection of SNP TSC0017795
aaaaaatctataa

SEQ ID NO: 68189 - DNA, 13 bp, Artificial Sequence
  Oligonucleotide for detection of SNP TSC0017799
tagaattggagga

SEQ ID NO: 68190 - DNA, 13 bp, Artificial Sequence
  Oligonucleotide for detection of SNP TSC0017799
tcctccaattcta

SEQ ID NO: 68191 - DNA, 13 bp, Artificial Sequence
  Oligonucleotide for detection of SNP TSC0017799
tagaatcggagga

SEQ ID NO: 68192 - DNA, 13 bp, Artificial Sequence
  Oligonucleotide for detection of SNP TSC0017799
tcctccgattcta

SEQ ID NO: 68193 - DNA, 13 bp, Artificial Sequence
  Oligonucleotide for detection of SNP TSC0017799
ttttttagttttg

SEQ ID NO: 68194 - DNA, 13 bp, Artificial Sequence
  Oligonucleotide for detection of SNP TSC0017799
caaaactaaaaaa

SEQ ID NO: 68195 - DNA, 13 bp, Artificial Sequence
  Oligonucleotide for detection of SNP TSC0017799
tttttcggttttg

SEQ ID NO: 68196 - DNA, 13 bp, Artificial Sequence
  Oligonucleotide for detection of SNP TSC0017799
caaaaccgaaaaa

SEQ ID NO: 68197 - DNA, 13 bp, Artificial Sequence
  Oligonucleotide for detection of SNP TSC0017800
gatagatagatga

SEQ ID NO: 68198 - DNA, 13 bp, Artificial Sequence
  Oligonucleotide for detection of SNP TSC0017800
tcatctatctatc

SEQ ID NO: 68199 - DNA, 13 bp, Artificial Sequence
  Oligonucleotide for detection of SNP TSC0017800
gatagagagatga

SEQ ID NO: 68200 - DNA, 13 bp, Artificial Sequence
  Oligonucleotide for detection of SNP TSC0017800
tcatctctctatc

SEQ ID NO: 68201 - DNA, 13 bp, Artificial Sequence
  Oligonucleotide for detection of SNP TSC0017800
gatagatagacga

SEQ ID NO: 68202 - DNA, 13 bp, Artificial Sequence
  Oligonucleotide for detection of SNP TSC0017800
tcgtctatctatc

SEQ ID NO: 68203 - DNA, 13 bp, Artificial Sequence
  Oligonucleotide for detection of SNP TSC0017800
gatagagagacga

SEQ ID NO: 68204 - DNA, 13 bp, Artificial Sequence
  Oligonucleotide for detection of SNP TSC0017800
tcgtctctctatc

SEQ ID NO: 68205 - DNA, 13 bp, Artificial Sequence
  Oligonucleotide for detection of SNP TSC0017800
ttgtttttttgty

SEQ ID NO: 68206 - DNA, 13 bp, Artificial Sequence
  Oligonucleotide for detection of SNP TSC0017800
racaaaaaaacaa

SEQ ID NO: 68207 - DNA, 13 bp, Artificial Sequence
  Oligonucleotide for detection of SNP TSC0017800
tcgtttgtttgty

SEQ ID NO: 68208 - DNA, 13 bp, Artificial Sequence
  Oligonucleotide for detection of SNP TSC0017800
racaaacaaacga

SEQ ID NO: 68209 - DNA, 13 bp, Artificial Sequence
  Oligonucleotide for detection of SNP TSC0017800
tcgtttttttgty

SEQ ID NO: 68210 - DNA, 13 bp, Artificial Sequence
  Oligonucleotide for detection of SNP TSC0017800
racaaaaaaacga

SEQ ID NO: 68211 - DNA, 13 bp, Artificial Sequence
  Oligonucleotide for detection of SNP TSC0017802
ttatttggtggtt

SEQ ID NO: 68212 - DNA, 13 bp, Artificial Sequence
  Oligonucleotide for detection of SNP TSC0017802
aaccaccaaataa

SEQ ID NO: 68213 - DNA, 13 bp, Artificial Sequence
  Oligonucleotide for detection of SNP TSC0017802
ttatttagtggtt

SEQ ID NO: 68214 - DNA, 13 bp, Artificial Sequence
  Oligonucleotide for detection of SNP TSC0017802
aaccactaaataa

SEQ ID NO: 68215 - DNA, 13 bp, Artificial Sequence
  Oligonucleotide for detection of SNP TSC0017803
aatgtataggaaa

SEQ ID NO: 68216 - DNA, 13 bp, Artificial Sequence
  Oligonucleotide for detection of SNP TSC0017803
tttcctatacatt

SEQ ID NO: 68217 - DNA, 13 bp, Artificial Sequence
  Oligonucleotide for detection of SNP TSC0017803
aatgtagaggaaa

SEQ ID NO: 68218 - DNA, 13 bp, Artificial Sequence
  Oligonucleotide for detection of SNP TSC0017803
tttcctctacatt

SEQ ID NO: 68219 - DNA, 13 bp, Artificial Sequence
  Oligonucleotide for detection of SNP TSC0017803
aacgtataggaaa

SEQ ID NO: 68220 - DNA, 13 bp, Artificial Sequence
  Oligonucleotide for detection of SNP TSC0017803
tttcctatacgtt

SEQ ID NO: 68221 - DNA, 13 bp, Artificial Sequence
  Oligonucleotide for detection of SNP TSC0017803
aacgtagaggaaa

SEQ ID NO: 68222 - DNA, 13 bp, Artificial Sequence
  Oligonucleotide for detection of SNP TSC0017803
tttcctctacgtt

SEQ ID NO: 68223 - DNA, 13 bp, Artificial Sequence
  Oligonucleotide for detection of SNP TSC0017803
ttttttgtatgtt

SEQ ID NO: 68224 - DNA, 13 bp, Artificial Sequence
  Oligonucleotide for detection of SNP TSC0017803
aacatacaaaaaa

SEQ ID NO: 68225 - DNA, 13 bp, Artificial Sequence
  Oligonucleotide for detection of SNP TSC0017803
ttttttttatgtt

SEQ ID NO: 68226 - DNA, 13 bp, Artificial Sequence
  Oligonucleotide for detection of SNP TSC0017803
aacataaaaaaaa

SEQ ID NO: 68227 - DNA, 13 bp, Artificial Sequence
  Oligonucleotide for detection of SNP TSC0017803
ttttttgtacgtt

SEQ ID NO: 68228 - DNA, 13 bp, Artificial Sequence
  Oligonucleotide for detection of SNP TSC0017803
aacgtacaaaaaa

SEQ ID NO: 68229 - DNA, 13 bp, Artificial Sequence
  Oligonucleotide for detection of SNP TSC0017803
ttttttttacgtt

SEQ ID NO: 68230 - DNA, 13 bp, Artificial Sequence
  Oligonucleotide for detection of SNP TSC0017803
aacgtaaaaaaaa

SEQ ID NO: 68231 - DNA, 13 bp, Artificial Sequence
  Oligonucleotide for detection of SNP TSC0017804
attatgattgtgt

SEQ ID NO: 68232 - DNA, 13 bp, Artificial Sequence
  Oligonucleotide for detection of SNP TSC0017804
acacaatcataat

SEQ ID NO: 68233 - DNA, 13 bp, Artificial Sequence
  Oligonucleotide for detection of SNP TSC0017804
attatgtttgtgt

SEQ ID NO: 68234 - DNA, 13 bp, Artificial Sequence
  Oligonucleotide for detection of SNP TSC0017804
acacaaacataat

SEQ ID NO: 68235 - DNA, 13 bp, Artificial Sequence
  Oligonucleotide for detection of SNP TSC0017804
atatagttatagt

SEQ ID NO: 68236 - DNA, 13 bp, Artificial Sequence
  Oligonucleotide for detection of SNP TSC0017804
actataactatat

SEQ ID NO: 68237 - DNA, 13 bp, Artificial Sequence
  Oligonucleotide for detection of SNP TSC0017804
atataggtatagt

SEQ ID NO: 68238 - DNA, 13 bp, Artificial Sequence
  Oligonucleotide for detection of SNP TSC0017804
actatacctatat

SEQ ID NO: 68239 - DNA, 13 bp, Artificial Sequence
  Oligonucleotide for detection of SNP TSC0017806
agtaggaggtttg

SEQ ID NO: 68240 - DNA, 13 bp, Artificial Sequence
  Oligonucleotide for detection of SNP TSC0017806
caaacctcctact

SEQ ID NO: 68241 - DNA, 13 bp, Artificial Sequence
  Oligonucleotide for detection of SNP TSC0017806
agtaggtggtttg

SEQ ID NO: 68242 - DNA, 13 bp, Artificial Sequence
  Oligonucleotide for detection of SNP TSC0017806
caaaccacctact

SEQ ID NO: 68243 - DNA, 13 bp, Artificial Sequence
  Oligonucleotide for detection of SNP TSC0017806
agtaggcggtttg

SEQ ID NO: 68244 - DNA, 13 bp, Artificial Sequence
  Oligonucleotide for detection of SNP TSC0017806
caaaccgcctact

SEQ ID NO: 68245 - DNA, 13 bp, Artificial Sequence
  Oligonucleotide for detection of SNP TSC0017806
taggttttttgtt

SEQ ID NO: 68246 - DNA, 13 bp, Artificial Sequence
  Oligonucleotide for detection of SNP TSC0017806
aacaaaaaaccta

SEQ ID NO: 68247 - DNA, 13 bp, Artificial Sequence
  Oligonucleotide for detection of SNP TSC0017806
taggttgtttgtt

SEQ ID NO: 68248 - DNA, 13 bp, Artificial Sequence
  Oligonucleotide for detection of SNP TSC0017806
aacaaacaaccta

SEQ ID NO: 68249 - DNA, 13 bp, Artificial Sequence
  Oligonucleotide for detection of SNP TSC0017806
taggtcgtttgtt

SEQ ID NO: 68250 - DNA, 13 bp, Artificial Sequence
  Oligonucleotide for detection of SNP TSC0017806
aacaaacgaccta

SEQ ID NO: 68251 - DNA, 13 bp, Artificial Sequence
  Oligonucleotide for detection of SNP TSC0017807
taggagtgtatay

SEQ ID NO: 68252 - DNA, 13 bp, Artificial Sequence
  Oligonucleotide for detection of SNP TSC0017807
rtatacactccta

SEQ ID NO: 68253 - DNA, 13 bp, Artificial Sequence
  Oligonucleotide for detection of SNP TSC0017807
taggagcgtatay

SEQ ID NO: 68254 - DNA, 13 bp, Artificial Sequence
  Oligonucleotide for detection of SNP TSC0017807
rtatacgctccta

SEQ ID NO: 68255 - DNA, 13 bp, Artificial Sequence
  Oligonucleotide for detection of SNP TSC0017807
gtatatgttttta

SEQ ID NO: 68256 - DNA, 13 bp, Artificial Sequence
  Oligonucleotide for detection of SNP TSC0017807
taaaaacatatac

SEQ ID NO: 68257 - DNA, 13 bp, Artificial Sequence
  Oligonucleotide for detection of SNP TSC0017807
gtatatattttta

SEQ ID NO: 68258 - DNA, 13 bp, Artificial Sequence
  Oligonucleotide for detection of SNP TSC0017807
taaaaatatatac

SEQ ID NO: 68259 - DNA, 13 bp, Artificial Sequence
  Oligonucleotide for detection of SNP TSC0017807
gtatacgttttta

SEQ ID NO: 68260 - DNA, 13 bp, Artificial Sequence
  Oligonucleotide for detection of SNP TSC0017807
taaaaacgtatac

SEQ ID NO: 68261 - DNA, 13 bp, Artificial Sequence
  Oligonucleotide for detection of SNP TSC0017808
tatttaaaggaag

SEQ ID NO: 68262 - DNA, 13 bp, Artificial Sequence
  Oligonucleotide for detection of SNP TSC0017808
cttcctttaaata

SEQ ID NO: 68263 - DNA, 13 bp, Artificial Sequence
  Oligonucleotide for detection of SNP TSC0017808
tatttataggaag

SEQ ID NO: 68264 - DNA, 13 bp, Artificial Sequence
  Oligonucleotide for detection of SNP TSC0017808
cttcctataaata

SEQ ID NO: 68265 - DNA, 13 bp, Artificial Sequence
  Oligonucleotide for detection of SNP TSC0017808
ttttttttaaatg

SEQ ID NO: 68266 - DNA, 13 bp, Artificial Sequence
  Oligonucleotide for detection of SNP TSC0017808
catttaaaaaaaa

SEQ ID NO: 68267 - DNA, 13 bp, Artificial Sequence
  Oligonucleotide for detection of SNP TSC0017808
ttttttgtaaatg

SEQ ID NO: 68268 - DNA, 13 bp, Artificial Sequence
  Oligonucleotide for detection of SNP TSC0017808
catttacaaaaaa

SEQ ID NO: 68269 - DNA, 13 bp, Artificial Sequence
  Oligonucleotide for detection of SNP TSC0017810
gttagagggtaty

SEQ ID NO: 68270 - DNA, 13 bp, Artificial Sequence
  Oligonucleotide for detection of SNP TSC0017810
rataccctctaac

SEQ ID NO: 68271 - DNA, 13 bp, Artificial Sequence
  Oligonucleotide for detection of SNP TSC0017810
gttagaaggtaty

SEQ ID NO: 68272 - DNA, 13 bp, Artificial Sequence
  Oligonucleotide for detection of SNP TSC0017810
rataccttctaac

SEQ ID NO: 68273 - DNA, 13 bp, Artificial Sequence
  Oligonucleotide for detection of SNP TSC0017811
ttttattttatty

SEQ ID NO: 68274 - DNA, 13 bp, Artificial Sequence
  Oligonucleotide for detection of SNP TSC0017811
raataaaataaaa

SEQ ID NO: 68275 - DNA, 13 bp, Artificial Sequence
  Oligonucleotide for detection of SNP TSC0017811
gggtggtgtggga

SEQ ID NO: 68276 - DNA, 13 bp, Artificial Sequence
  Oligonucleotide for detection of SNP TSC0017811
tcccacaccaccc

SEQ ID NO: 68277 - DNA, 13 bp, Artificial Sequence
  Oligonucleotide for detection of SNP TSC0017811
gggtggggtggga

SEQ ID NO: 68278 - DNA, 13 bp, Artificial Sequence
  Oligonucleotide for detection of SNP TSC0017811
tcccaccccaccc

SEQ ID NO: 68279 - DNA, 13 bp, Artificial Sequence
  Oligonucleotide for detection of SNP TSC0017813
gtaggagaaatgy

SEQ ID NO: 68280 - DNA, 13 bp, Artificial Sequence
  Oligonucleotide for detection of SNP TSC0017813
rcatttctcctac

SEQ ID NO: 68281 - DNA, 13 bp, Artificial Sequence
  Oligonucleotide for detection of SNP TSC0017813
gtaggaaaaatgy

SEQ ID NO: 68282 - DNA, 13 bp, Artificial Sequence
  Oligonucleotide for detection of SNP TSC0017813
rcatttttcctac

SEQ ID NO: 68283 - DNA, 13 bp, Artificial Sequence
  Oligonucleotide for detection of SNP TSC0017813
gtaggagaaacgy

SEQ ID NO: 68284 - DNA, 13 bp, Artificial Sequence
  Oligonucleotide for detection of SNP TSC0017813
rcgtttctcctac

SEQ ID NO: 68285 - DNA, 13 bp, Artificial Sequence
  Oligonucleotide for detection of SNP TSC0017813
gtaggaaaaacgy

SEQ ID NO: 68286 - DNA, 13 bp, Artificial Sequence
  Oligonucleotide for detection of SNP TSC0017813
rcgtttttcctac

SEQ ID NO: 68287 - DNA, 13 bp, Artificial Sequence
  Oligonucleotide for detection of SNP TSC0017818
tatggttgtttty

SEQ ID NO: 68288 - DNA, 13 bp, Artificial Sequence
  Oligonucleotide for detection of SNP TSC0017818
raaaacaaccata

SEQ ID NO: 68289 - DNA, 13 bp, Artificial Sequence
  Oligonucleotide for detection of SNP TSC0017818
tatggtcgtttty

SEQ ID NO: 68290 - DNA, 13 bp, Artificial Sequence
  Oligonucleotide for detection of SNP TSC0017818
raaaacgaccata

SEQ ID NO: 68291 - DNA, 13 bp, Artificial Sequence
  Oligonucleotide for detection of SNP TSC0017818
gagggtggttatg

SEQ ID NO: 68292 - DNA, 13 bp, Artificial Sequence
  Oligonucleotide for detection of SNP TSC0017818
cataaccaccctc

SEQ ID NO: 68293 - DNA, 13 bp, Artificial Sequence
  Oligonucleotide for detection of SNP TSC0017818
gagggtagttatg

SEQ ID NO: 68294 - DNA, 13 bp, Artificial Sequence
  Oligonucleotide for detection of SNP TSC0017818
cataactaccctc

SEQ ID NO: 68295 - DNA, 13 bp, Artificial Sequence
  Oligonucleotide for detection of SNP TSC0017818
gagggcggttatg

SEQ ID NO: 68296 - DNA, 13 bp, Artificial Sequence
  Oligonucleotide for detection of SNP TSC0017818
cataaccgccctc

SEQ ID NO: 68297 - DNA, 13 bp, Artificial Sequence
  Oligonucleotide for detection of SNP TSC0017819
ttggaagtgtaga

SEQ ID NO: 68298 - DNA, 13 bp, Artificial Sequence
  Oligonucleotide for detection of SNP TSC0017819
tctacacttccaa

SEQ ID NO: 68299 - DNA, 13 bp, Artificial Sequence
  Oligonucleotide for detection of SNP TSC0017819
ttggaattgtaga

SEQ ID NO: 68300 - DNA, 13 bp, Artificial Sequence
  Oligonucleotide for detection of SNP TSC0017819
tctacaattccaa

SEQ ID NO: 68301 - DNA, 13 bp, Artificial Sequence
  Oligonucleotide for detection of SNP TSC0017819
tttatatttttag

SEQ ID NO: 68302 - DNA, 13 bp, Artificial Sequence
  Oligonucleotide for detection of SNP TSC0017819
ctaaaaatataaa

SEQ ID NO: 68303 - DNA, 13 bp, Artificial Sequence
  Oligonucleotide for detection of SNP TSC0017819
tttataattttag

SEQ ID NO: 68304 - DNA, 13 bp, Artificial Sequence
  Oligonucleotide for detection of SNP TSC0017819
ctaaaattataaa

SEQ ID NO: 68305 - DNA, 13 bp, Artificial Sequence
  Oligonucleotide for detection of SNP TSC0017820
ttgttagatagtt

SEQ ID NO: 68306 - DNA, 13 bp, Artificial Sequence
  Oligonucleotide for detection of SNP TSC0017820
aactatctaacaa

SEQ ID NO: 68307 - DNA, 13 bp, Artificial Sequence
  Oligonucleotide for detection of SNP TSC0017820
ttgttatatagtt

SEQ ID NO: 68308 - DNA, 13 bp, Artificial Sequence
  Oligonucleotide for detection of SNP TSC0017820
aactatataacaa

SEQ ID NO: 68309 - DNA, 13 bp, Artificial Sequence
  Oligonucleotide for detection of SNP TSC0017820
tcgttagatagtt

SEQ ID NO: 68310 - DNA, 13 bp, Artificial Sequence
  Oligonucleotide for detection of SNP TSC0017820
aactatctaacga

SEQ ID NO: 68311 - DNA, 13 bp, Artificial Sequence
  Oligonucleotide for detection of SNP TSC0017820
tcgttatatagtt

SEQ ID NO: 68312 - DNA, 13 bp, Artificial Sequence
  Oligonucleotide for detection of SNP TSC0017820
aactatataacga

SEQ ID NO: 68313 - DNA, 13 bp, Artificial Sequence
  Oligonucleotide for detection of SNP TSC0017820
agttatttgatgg

SEQ ID NO: 68314 - DNA, 13 bp, Artificial Sequence
  Oligonucleotide for detection of SNP TSC0017820
ccatcaaataact

SEQ ID NO: 68315 - DNA, 13 bp, Artificial Sequence
  Oligonucleotide for detection of SNP TSC0017820
agttatatgatgg

SEQ ID NO: 68316 - DNA, 13 bp, Artificial Sequence
  Oligonucleotide for detection of SNP TSC0017820
ccatcatataact

SEQ ID NO: 68317 - DNA, 13 bp, Artificial Sequence
  Oligonucleotide for detection of SNP TSC0017820
agttatttgacgg

SEQ ID NO: 68318 - DNA, 13 bp, Artificial Sequence
  Oligonucleotide for detection of SNP TSC0017820
ccgtcaaataact

SEQ ID NO: 68319 - DNA, 13 bp, Artificial Sequence
  Oligonucleotide for detection of SNP TSC0017820
agttatatgacgg

SEQ ID NO: 68320 - DNA, 13 bp, Artificial Sequence
  Oligonucleotide for detection of SNP TSC0017820
ccgtcatataact

SEQ ID NO: 68321 - DNA, 13 bp, Artificial Sequence
  Oligonucleotide for detection of SNP TSC0017821
tttatggttatga

SEQ ID NO: 68322 - DNA, 13 bp, Artificial Sequence
  Oligonucleotide for detection of SNP TSC0017821
tcataaccataaa

SEQ ID NO: 68323 - DNA, 13 bp, Artificial Sequence
  Oligonucleotide for detection of SNP TSC0017821
tttatgattatga

SEQ ID NO: 68324 - DNA, 13 bp, Artificial Sequence
  Oligonucleotide for detection of SNP TSC0017821
tcataatcataaa

SEQ ID NO: 68325 - DNA, 13 bp, Artificial Sequence
  Oligonucleotide for detection of SNP TSC0017822
ggatgaaaagaat

SEQ ID NO: 68326 - DNA, 13 bp, Artificial Sequence
  Oligonucleotide for detection of SNP TSC0017822
attcttttcatcc

SEQ ID NO: 68327 - DNA, 13 bp, Artificial Sequence
  Oligonucleotide for detection of SNP TSC0017822
ggatgagaagaat

SEQ ID NO: 68328 - DNA, 13 bp, Artificial Sequence
  Oligonucleotide for detection of SNP TSC0017822
attcttctcatcc

SEQ ID NO: 68329 - DNA, 13 bp, Artificial Sequence
  Oligonucleotide for detection of SNP TSC0017823
tgtttaaatgtag

SEQ ID NO: 68330 - DNA, 13 bp, Artificial Sequence
  Oligonucleotide for detection of SNP TSC0017823
ctacatttaaaca

SEQ ID NO: 68331 - DNA, 13 bp, Artificial Sequence
  Oligonucleotide for detection of SNP TSC0017823
tgtttagatgtag

SEQ ID NO: 68332 - DNA, 13 bp, Artificial Sequence
  Oligonucleotide for detection of SNP TSC0017823
ctacatctaaaca

SEQ ID NO: 68333 - DNA, 13 bp, Artificial Sequence
  Oligonucleotide for detection of SNP TSC0017824
atttgaaaataty

SEQ ID NO: 68334 - DNA, 13 bp, Artificial Sequence
  Oligonucleotide for detection of SNP TSC0017824
ratattttcaaat

SEQ ID NO: 68335 - DNA, 13 bp, Artificial Sequence
  Oligonucleotide for detection of SNP TSC0017824
atttgagaataty

SEQ ID NO: 68336 - DNA, 13 bp, Artificial Sequence
  Oligonucleotide for detection of SNP TSC0017824
ratattctcaaat

SEQ ID NO: 68337 - DNA, 13 bp, Artificial Sequence
  Oligonucleotide for detection of SNP TSC0017825
tattgtaatgtaa

SEQ ID NO: 68338 - DNA, 13 bp, Artificial Sequence
  Oligonucleotide for detection of SNP TSC0017825
ttacattacaata

SEQ ID NO: 68339 - DNA, 13 bp, Artificial Sequence
  Oligonucleotide for detection of SNP TSC0017825
tattgtgatgtaa

SEQ ID NO: 68340 - DNA, 13 bp, Artificial Sequence
  Oligonucleotide for detection of SNP TSC0017825
ttacatcacaata

SEQ ID NO: 68341 - DNA, 13 bp, Artificial Sequence
  Oligonucleotide for detection of SNP TSC0017825
tattgcgatgtaa

SEQ ID NO: 68342 - DNA, 13 bp, Artificial Sequence
  Oligonucleotide for detection of SNP TSC0017825
ttacatcgcaata

SEQ ID NO: 68343 - DNA, 13 bp, Artificial Sequence
  Oligonucleotide for detection of SNP TSC0017825
ttgtattgtagtg

SEQ ID NO: 68344 - DNA, 13 bp, Artificial Sequence
  Oligonucleotide for detection of SNP TSC0017825
cactacaatacaa

SEQ ID NO: 68345 - DNA, 13 bp, Artificial Sequence
  Oligonucleotide for detection of SNP TSC0017825
ttgtatcgtagtg

SEQ ID NO: 68346 - DNA, 13 bp, Artificial Sequence
  Oligonucleotide for detection of SNP TSC0017825
cactacgatacaa

SEQ ID NO: 68347 - DNA, 13 bp, Artificial Sequence
  Oligonucleotide for detection of SNP TSC0017826
atggaagagaagt

SEQ ID NO: 68348 - DNA, 13 bp, Artificial Sequence
  Oligonucleotide for detection of SNP TSC0017826
acttctcttccat

SEQ ID NO: 68349 - DNA, 13 bp, Artificial Sequence
  Oligonucleotide for detection of SNP TSC0017826
atggaaaagaagt

SEQ ID NO: 68350 - DNA, 13 bp, Artificial Sequence
  Oligonucleotide for detection of SNP TSC0017826
acttcttttccat

SEQ ID NO: 68351 - DNA, 13 bp, Artificial Sequence
  Oligonucleotide for detection of SNP TSC0017828
gagttatgtgttt

SEQ ID NO: 68352 - DNA, 13 bp, Artificial Sequence
  Oligonucleotide for detection of SNP TSC0017828
aaacacataactc

SEQ ID NO: 68353 - DNA, 13 bp, Artificial Sequence
  Oligonucleotide for detection of SNP TSC0017828
gagttacgtgttt

SEQ ID NO: 68354 - DNA, 13 bp, Artificial Sequence
  Oligonucleotide for detection of SNP TSC0017828
aaacacgtaactc

SEQ ID NO: 68355 - DNA, 13 bp, Artificial Sequence
  Oligonucleotide for detection of SNP TSC0017828
gagttatgcgttt

SEQ ID NO: 68356 - DNA, 13 bp, Artificial Sequence
  Oligonucleotide for detection of SNP TSC0017828
aaacgcataactc

SEQ ID NO: 68357 - DNA, 13 bp, Artificial Sequence
  Oligonucleotide for detection of SNP TSC0017828
gagttacgcgttt

SEQ ID NO: 68358 - DNA, 13 bp, Artificial Sequence
  Oligonucleotide for detection of SNP TSC0017828
aaacgcgtaactc

SEQ ID NO: 68359 - DNA, 13 bp, Artificial Sequence
  Oligonucleotide for detection of SNP TSC0017828
aggtgtgtggtty

SEQ ID NO: 68360 - DNA, 13 bp, Artificial Sequence
  Oligonucleotide for detection of SNP TSC0017828
raaccacacacct

SEQ ID NO: 68361 - DNA, 13 bp, Artificial Sequence
  Oligonucleotide for detection of SNP TSC0017828
aggtgtatggtty

SEQ ID NO: 68362 - DNA, 13 bp, Artificial Sequence
  Oligonucleotide for detection of SNP TSC0017828
raaccatacacct

SEQ ID NO: 68363 - DNA, 13 bp, Artificial Sequence
  Oligonucleotide for detection of SNP TSC0017828
aggcgtgtggtty

SEQ ID NO: 68364 - DNA, 13 bp, Artificial Sequence
  Oligonucleotide for detection of SNP TSC0017828
raaccacacgcct

SEQ ID NO: 68365 - DNA, 13 bp, Artificial Sequence
  Oligonucleotide for detection of SNP TSC0017828
aggcgtatggtty

SEQ ID NO: 68366 - DNA, 13 bp, Artificial Sequence
  Oligonucleotide for detection of SNP TSC0017828
raaccatacgcct

SEQ ID NO: 68367 - DNA, 13 bp, Artificial Sequence
  Oligonucleotide for detection of SNP TSC0017828
aggtgcgtggtty

SEQ ID NO: 68368 - DNA, 13 bp, Artificial Sequence
  Oligonucleotide for detection of SNP TSC0017828
raaccacgcacct

SEQ ID NO: 68369 - DNA, 13 bp, Artificial Sequence
  Oligonucleotide for detection of SNP TSC0017828
aggcgcgtggtty

SEQ ID NO: 68370 - DNA, 13 bp, Artificial Sequence
  Oligonucleotide for detection of SNP TSC0017828
raaccacgcgcct

SEQ ID NO: 68371 - DNA, 13 bp, Artificial Sequence
  Oligonucleotide for detection of SNP TSC0017829
aaaaaatgaaaag

SEQ ID NO: 68372 - DNA, 13 bp, Artificial Sequence
  Oligonucleotide for detection of SNP TSC0017829
cttttcatttttt

SEQ ID NO: 68373 - DNA, 13 bp, Artificial Sequence
  Oligonucleotide for detection of SNP TSC0017829
aaaaaaagaaaag

SEQ ID NO: 68374 - DNA, 13 bp, Artificial Sequence
  Oligonucleotide for detection of SNP TSC0017829
cttttcttttttt

SEQ ID NO: 68375 - DNA, 13 bp, Artificial Sequence
  Oligonucleotide for detection of SNP TSC0017829
aaaaaacgaaaag

SEQ ID NO: 68376 - DNA, 13 bp, Artificial Sequence
  Oligonucleotide for detection of SNP TSC0017829
cttttcgtttttt

SEQ ID NO: 68377 - DNA, 13 bp, Artificial Sequence
  Oligonucleotide for detection of SNP TSC0017833
gaaaaatgtgtay

SEQ ID NO: 68378 - DNA, 13 bp, Artificial Sequence
  Oligonucleotide for detection of SNP TSC0017833
rtacacatttttc

SEQ ID NO: 68379 - DNA, 13 bp, Artificial Sequence
  Oligonucleotide for detection of SNP TSC0017833
gaaaaacgtgtay

SEQ ID NO: 68380 - DNA, 13 bp, Artificial Sequence
  Oligonucleotide for detection of SNP TSC0017833
rtacacgtttttc

SEQ ID NO: 68381 - DNA, 13 bp, Artificial Sequence
  Oligonucleotide for detection of SNP TSC0017833
gtgtatgttttty

SEQ ID NO: 68382 - DNA, 13 bp, Artificial Sequence
  Oligonucleotide for detection of SNP TSC0017833
raaaaacatacac

SEQ ID NO: 68383 - DNA, 13 bp, Artificial Sequence
  Oligonucleotide for detection of SNP TSC0017833
gtgtatattttty

SEQ ID NO: 68384 - DNA, 13 bp, Artificial Sequence
  Oligonucleotide for detection of SNP TSC0017833
raaaaatatacac

SEQ ID NO: 68385 - DNA, 13 bp, Artificial Sequence
  Oligonucleotide for detection of SNP TSC0017833
gtgtacgttttty

SEQ ID NO: 68386 - DNA, 13 bp, Artificial Sequence
  Oligonucleotide for detection of SNP TSC0017833
raaaaacgtacac

SEQ ID NO: 68387 - DNA, 13 bp, Artificial Sequence
  Oligonucleotide for detection of SNP TSC0017834
aatatgttaaaay

SEQ ID NO: 68388 - DNA, 13 bp, Artificial Sequence
  Oligonucleotide for detection of SNP TSC0017834
rttttaacatatt

SEQ ID NO: 68389 - DNA, 13 bp, Artificial Sequence
  Oligonucleotide for detection of SNP TSC0017834
aatatggtaaaay

SEQ ID NO: 68390 - DNA, 13 bp, Artificial Sequence
  Oligonucleotide for detection of SNP TSC0017834
rttttaccatatt

SEQ ID NO: 68391 - DNA, 13 bp, Artificial Sequence
  Oligonucleotide for detection of SNP TSC0017835
tatggtatatata

SEQ ID NO: 68392 - DNA, 13 bp, Artificial Sequence
  Oligonucleotide for detection of SNP TSC0017835
tatatataccata

SEQ ID NO: 68393 - DNA, 13 bp, Artificial Sequence
  Oligonucleotide for detection of SNP TSC0017835
tatggtgtatata

SEQ ID NO: 68394 - DNA, 13 bp, Artificial Sequence
  Oligonucleotide for detection of SNP TSC0017835
tatatacaccata

SEQ ID NO: 68395 - DNA, 13 bp, Artificial Sequence
  Oligonucleotide for detection of SNP TSC0017835
tatggcgtatata

SEQ ID NO: 68396 - DNA, 13 bp, Artificial Sequence
  Oligonucleotide for detection of SNP TSC0017835
tatatacgccata

SEQ ID NO: 68397 - DNA, 13 bp, Artificial Sequence
  Oligonucleotide for detection of SNP TSC0017835
tgtgtgcgttatg

SEQ ID NO: 68398 - DNA, 13 bp, Artificial Sequence
  Oligonucleotide for detection of SNP TSC0017835
cataacgcacaca

SEQ ID NO: 68399 - DNA, 13 bp, Artificial Sequence
  Oligonucleotide for detection of SNP TSC0017836
aggaattgttggt

SEQ ID NO: 68400 - DNA, 13 bp, Artificial Sequence
  Oligonucleotide for detection of SNP TSC0017836
accaacaattcct

SEQ ID NO: 68401 - DNA, 13 bp, Artificial Sequence
  Oligonucleotide for detection of SNP TSC0017836
aggaatcgttggt

SEQ ID NO: 68402 - DNA, 13 bp, Artificial Sequence
  Oligonucleotide for detection of SNP TSC0017836
accaacgattcct

SEQ ID NO: 68403 - DNA, 13 bp, Artificial Sequence
  Oligonucleotide for detection of SNP TSC0017836
attaatggttttt

SEQ ID NO: 68404 - DNA, 13 bp, Artificial Sequence
  Oligonucleotide for detection of SNP TSC0017836
aaaaaccattaat

SEQ ID NO: 68405 - DNA, 13 bp, Artificial Sequence
  Oligonucleotide for detection of SNP TSC0017836
attaatagttttt

SEQ ID NO: 68406 - DNA, 13 bp, Artificial Sequence
  Oligonucleotide for detection of SNP TSC0017836
aaaaactattaat

SEQ ID NO: 68407 - DNA, 13 bp, Artificial Sequence
  Oligonucleotide for detection of SNP TSC0017836
attaacggttttt

SEQ ID NO: 68408 - DNA, 13 bp, Artificial Sequence
  Oligonucleotide for detection of SNP TSC0017836
aaaaaccgttaat

SEQ ID NO: 68409 - DNA, 13 bp, Artificial Sequence
  Oligonucleotide for detection of SNP TSC0017837
ttttttttgggag

SEQ ID NO: 68410 - DNA, 13 bp, Artificial Sequence
  Oligonucleotide for detection of SNP TSC0017837
ctcccaaaaaaaa

SEQ ID NO: 68411 - DNA, 13 bp, Artificial Sequence
  Oligonucleotide for detection of SNP TSC0017837
ttttttgtgggag

SEQ ID NO: 68412 - DNA, 13 bp, Artificial Sequence
  Oligonucleotide for detection of SNP TSC0017837
ctcccacaaaaaa

SEQ ID NO: 68413 - DNA, 13 bp, Artificial Sequence
  Oligonucleotide for detection of SNP TSC0017837
tttttagaaggaa

SEQ ID NO: 68414 - DNA, 13 bp, Artificial Sequence
  Oligonucleotide for detection of SNP TSC0017837
ttccttctaaaaa

SEQ ID NO: 68415 - DNA, 13 bp, Artificial Sequence
  Oligonucleotide for detection of SNP TSC0017837
tttttataaggaa

SEQ ID NO: 68416 - DNA, 13 bp, Artificial Sequence
  Oligonucleotide for detection of SNP TSC0017837
ttccttataaaaa

SEQ ID NO: 68417 - DNA, 13 bp, Artificial Sequence
  Oligonucleotide for detection of SNP TSC0017838
aagtttgttttty

SEQ ID NO: 68418 - DNA, 13 bp, Artificial Sequence
  Oligonucleotide for detection of SNP TSC0017838
raaaaacaaactt

SEQ ID NO: 68419 - DNA, 13 bp, Artificial Sequence
  Oligonucleotide for detection of SNP TSC0017838
aagtttattttty

SEQ ID NO: 68420 - DNA, 13 bp, Artificial Sequence
  Oligonucleotide for detection of SNP TSC0017838
raaaaataaactt

SEQ ID NO: 68421 - DNA, 13 bp, Artificial Sequence
  Oligonucleotide for detection of SNP TSC0017839
tgagttagtagga

SEQ ID NO: 68422 - DNA, 13 bp, Artificial Sequence
  Oligonucleotide for detection of SNP TSC0017839
tcctactaactca

SEQ ID NO: 68423 - DNA, 13 bp, Artificial Sequence
  Oligonucleotide for detection of SNP TSC0017839
tgagtttgtagga

SEQ ID NO: 68424 - DNA, 13 bp, Artificial Sequence
  Oligonucleotide for detection of SNP TSC0017839
tcctacaaactca

SEQ ID NO: 68425 - DNA, 13 bp, Artificial Sequence
  Oligonucleotide for detection of SNP TSC0017839
ttttattggttta

SEQ ID NO: 68426 - DNA, 13 bp, Artificial Sequence
  Oligonucleotide for detection of SNP TSC0017839
taaaccaataaaa

SEQ ID NO: 68427 - DNA, 13 bp, Artificial Sequence
  Oligonucleotide for detection of SNP TSC0017839
ttttataggttta

SEQ ID NO: 68428 - DNA, 13 bp, Artificial Sequence
  Oligonucleotide for detection of SNP TSC0017839
taaacctataaaa

SEQ ID NO: 68429 - DNA, 13 bp, Artificial Sequence
  Oligonucleotide for detection of SNP TSC0017845
aatttgaggggta

SEQ ID NO: 68430 - DNA, 13 bp, Artificial Sequence
  Oligonucleotide for detection of SNP TSC0017845
tacccctcaaatt

SEQ ID NO: 68431 - DNA, 13 bp, Artificial Sequence
  Oligonucleotide for detection of SNP TSC0017845
aatttgtggggta

SEQ ID NO: 68432 - DNA, 13 bp, Artificial Sequence
  Oligonucleotide for detection of SNP TSC0017845
taccccacaaatt

SEQ ID NO: 68433 - DNA, 13 bp, Artificial Sequence
  Oligonucleotide for detection of SNP TSC0017845
aatttgcggggta

SEQ ID NO: 68434 - DNA, 13 bp, Artificial Sequence
  Oligonucleotide for detection of SNP TSC0017845
taccccgcaaatt

SEQ ID NO: 68435 - DNA, 13 bp, Artificial Sequence
  Oligonucleotide for detection of SNP TSC0017845
tgttttttaaatt

SEQ ID NO: 68436 - DNA, 13 bp, Artificial Sequence
  Oligonucleotide for detection of SNP TSC0017845
aatttaaaaaaca

SEQ ID NO: 68437 - DNA, 13 bp, Artificial Sequence
  Oligonucleotide for detection of SNP TSC0017845
tgttttgtaaatt

SEQ ID NO: 68438 - DNA, 13 bp, Artificial Sequence
  Oligonucleotide for detection of SNP TSC0017845
aatttacaaaaca

SEQ ID NO: 68439 - DNA, 13 bp, Artificial Sequence
  Oligonucleotide for detection of SNP TSC0017845
tgtttcgtaaatt

SEQ ID NO: 68440 - DNA, 13 bp, Artificial Sequence
  Oligonucleotide for detection of SNP TSC0017845
aatttacgaaaca

SEQ ID NO: 68441 - DNA, 13 bp, Artificial Sequence
  Oligonucleotide for detection of SNP TSC0017846
ggggtaataatty

SEQ ID NO: 68442 - DNA, 13 bp, Artificial Sequence
  Oligonucleotide for detection of SNP TSC0017846
raattattacccc

SEQ ID NO: 68443 - DNA, 13 bp, Artificial Sequence
  Oligonucleotide for detection of SNP TSC0017846
ggggtattaatty

SEQ ID NO: 68444 - DNA, 13 bp, Artificial Sequence
  Oligonucleotide for detection of SNP TSC0017846
raattaatacccc

SEQ ID NO: 68445 - DNA, 13 bp, Artificial Sequence
  Oligonucleotide for detection of SNP TSC0017846
gaattgttgttty

SEQ ID NO: 68446 - DNA, 13 bp, Artificial Sequence
  Oligonucleotide for detection of SNP TSC0017846
raaacaacaattc

SEQ ID NO: 68447 - DNA, 13 bp, Artificial Sequence
  Oligonucleotide for detection of SNP TSC0017846
gaattgatgttty

SEQ ID NO: 68448 - DNA, 13 bp, Artificial Sequence
  Oligonucleotide for detection of SNP TSC0017846
raaacatcaattc

SEQ ID NO: 68449 - DNA, 13 bp, Artificial Sequence
  Oligonucleotide for detection of SNP TSC0017847
gttttggtaatat

SEQ ID NO: 68450 - DNA, 13 bp, Artificial Sequence
  Oligonucleotide for detection of SNP TSC0017847
atattaccaaaac

SEQ ID NO: 68451 - DNA, 13 bp, Artificial Sequence
  Oligonucleotide for detection of SNP TSC0017847
gttttgataatat

SEQ ID NO: 68452 - DNA, 13 bp, Artificial Sequence
  Oligonucleotide for detection of SNP TSC0017847
atattatcaaaac

SEQ ID NO: 68453 - DNA, 13 bp, Artificial Sequence
  Oligonucleotide for detection of SNP TSC0017851
gtgtgttttgagy

SEQ ID NO: 68454 - DNA, 13 bp, Artificial Sequence
  Oligonucleotide for detection of SNP TSC0017851
rctcaaaacacac

SEQ ID NO: 68455 - DNA, 13 bp, Artificial Sequence
  Oligonucleotide for detection of SNP TSC0017851
gtgtgtgttgagy

SEQ ID NO: 68456 - DNA, 13 bp, Artificial Sequence
  Oligonucleotide for detection of SNP TSC0017851
rctcaacacacac

SEQ ID NO: 68457 - DNA, 13 bp, Artificial Sequence
  Oligonucleotide for detection of SNP TSC0017851
gtgtgtttcgagy

SEQ ID NO: 68458 - DNA, 13 bp, Artificial Sequence
  Oligonucleotide for detection of SNP TSC0017851
rctcgaaacacac

SEQ ID NO: 68459 - DNA, 13 bp, Artificial Sequence
  Oligonucleotide for detection of SNP TSC0017851
gtgtgcgttgagy

SEQ ID NO: 68460 - DNA, 13 bp, Artificial Sequence
  Oligonucleotide for detection of SNP TSC0017851
rctcaacgcacac

SEQ ID NO: 68461 - DNA, 13 bp, Artificial Sequence
  Oligonucleotide for detection of SNP TSC0017851
gtgtgtgtcgagy

SEQ ID NO: 68462 - DNA, 13 bp, Artificial Sequence
  Oligonucleotide for detection of SNP TSC0017851
rctcgacacacac

SEQ ID NO: 68463 - DNA, 13 bp, Artificial Sequence
  Oligonucleotide for detection of SNP TSC0017851
gtgtgcgtcgagy

SEQ ID NO: 68464 - DNA, 13 bp, Artificial Sequence
  Oligonucleotide for detection of SNP TSC0017851
rctcgacgcacac

SEQ ID NO: 68465 - DNA, 13 bp, Artificial Sequence
  Oligonucleotide for detection of SNP TSC0017851
gtttggggtatay

SEQ ID NO: 68466 - DNA, 13 bp, Artificial Sequence
  Oligonucleotide for detection of SNP TSC0017851
rtataccccaaac

SEQ ID NO: 68467 - DNA, 13 bp, Artificial Sequence
  Oligonucleotide for detection of SNP TSC0017851
gtttggtgtatay

SEQ ID NO: 68468 - DNA, 13 bp, Artificial Sequence
  Oligonucleotide for detection of SNP TSC0017851
rtatacaccaaac

SEQ ID NO: 68469 - DNA, 13 bp, Artificial Sequence
  Oligonucleotide for detection of SNP TSC0017851
gttcggggtatay

SEQ ID NO: 68470 - DNA, 13 bp, Artificial Sequence
  Oligonucleotide for detection of SNP TSC0017851
rtataccccgaac

SEQ ID NO: 68471 - DNA, 13 bp, Artificial Sequence
  Oligonucleotide for detection of SNP TSC0017851
gttcggtgtatay

SEQ ID NO: 68472 - DNA, 13 bp, Artificial Sequence
  Oligonucleotide for detection of SNP TSC0017851
rtatacaccgaac

SEQ ID NO: 68473 - DNA, 13 bp, Artificial Sequence
  Oligonucleotide for detection of SNP TSC0017851
gtttggcgtatay

SEQ ID NO: 68474 - DNA, 13 bp, Artificial Sequence
  Oligonucleotide for detection of SNP TSC0017851
rtatacgccaaac

SEQ ID NO: 68475 - DNA, 13 bp, Artificial Sequence
  Oligonucleotide for detection of SNP TSC0017851
gttcggcgtatay

SEQ ID NO: 68476 - DNA, 13 bp, Artificial Sequence
  Oligonucleotide for detection of SNP TSC0017851
rtatacgccgaac

SEQ ID NO: 68477 - DNA, 13 bp, Artificial Sequence
  Oligonucleotide for detection of SNP TSC0017853
atatttgtataty

SEQ ID NO: 68478 - DNA, 13 bp, Artificial Sequence
  Oligonucleotide for detection of SNP TSC0017853
ratatacaaatat

SEQ ID NO: 68479 - DNA, 13 bp, Artificial Sequence
  Oligonucleotide for detection of SNP TSC0017858
ttttattaattaa

SEQ ID NO: 68480 - DNA, 13 bp, Artificial Sequence
  Oligonucleotide for detection of SNP TSC0017858
ttaattaataaaa

SEQ ID NO: 68481 - DNA, 13 bp, Artificial Sequence
  Oligonucleotide for detection of SNP TSC0017858
ttttatgaattaa

SEQ ID NO: 68482 - DNA, 13 bp, Artificial Sequence
  Oligonucleotide for detection of SNP TSC0017858
ttaattcataaaa

SEQ ID NO: 68483 - DNA, 13 bp, Artificial Sequence
  Oligonucleotide for detection of SNP TSC0017858
ttggttgatggga

SEQ ID NO: 68484 - DNA, 13 bp, Artificial Sequence
  Oligonucleotide for detection of SNP TSC0017858
tcccatcaaccaa

SEQ ID NO: 68485 - DNA, 13 bp, Artificial Sequence
  Oligonucleotide for detection of SNP TSC0017858
ttggtttatggga

SEQ ID NO: 68486 - DNA, 13 bp, Artificial Sequence
  Oligonucleotide for detection of SNP TSC0017858
tcccataaaccaa

SEQ ID NO: 68487 - DNA, 13 bp, Artificial Sequence
  Oligonucleotide for detection of SNP TSC0017859
atttgtatattty

SEQ ID NO: 68488 - DNA, 13 bp, Artificial Sequence
  Oligonucleotide for detection of SNP TSC0017859
raaatatacaaat

SEQ ID NO: 68489 - DNA, 13 bp, Artificial Sequence
  Oligonucleotide for detection of SNP TSC0017859
atttgtgtattty

SEQ ID NO: 68490 - DNA, 13 bp, Artificial Sequence
  Oligonucleotide for detection of SNP TSC0017859
raaatacacaaat

SEQ ID NO: 68491 - DNA, 13 bp, Artificial Sequence
  Oligonucleotide for detection of SNP TSC0017859
atttgcgtattty

SEQ ID NO: 68492 - DNA, 13 bp, Artificial Sequence
  Oligonucleotide for detection of SNP TSC0017859
raaatacgcaaat

SEQ ID NO: 68493 - DNA, 13 bp, Artificial Sequence
  Oligonucleotide for detection of SNP TSC0017859
gaggtatgtaggt

SEQ ID NO: 68494 - DNA, 13 bp, Artificial Sequence
  Oligonucleotide for detection of SNP TSC0017859
acctacatacctc

SEQ ID NO: 68495 - DNA, 13 bp, Artificial Sequence
  Oligonucleotide for detection of SNP TSC0017859
gaggtacgtaggt

SEQ ID NO: 68496 - DNA, 13 bp, Artificial Sequence
  Oligonucleotide for detection of SNP TSC0017859
acctacgtacctc

SEQ ID NO: 68497 - DNA, 13 bp, Artificial Sequence
  Oligonucleotide for detection of SNP TSC0017860
attttatgggatg

SEQ ID NO: 68498 - DNA, 13 bp, Artificial Sequence
  Oligonucleotide for detection of SNP TSC0017860
catcccataaaat

SEQ ID NO: 68499 - DNA, 13 bp, Artificial Sequence
  Oligonucleotide for detection of SNP TSC0017860
attttacgggatg

SEQ ID NO: 68500 - DNA, 13 bp, Artificial Sequence
  Oligonucleotide for detection of SNP TSC0017860
catcccgtaaaat

SEQ ID NO: 68501 - DNA, 13 bp, Artificial Sequence
  Oligonucleotide for detection of SNP TSC0017860
tattttgtggagt

SEQ ID NO: 68502 - DNA, 13 bp, Artificial Sequence
  Oligonucleotide for detection of SNP TSC0017860
actccacaaaata

SEQ ID NO: 68503 - DNA, 13 bp, Artificial Sequence
  Oligonucleotide for detection of SNP TSC0017860
tattttatggagt

SEQ ID NO: 68504 - DNA, 13 bp, Artificial Sequence
  Oligonucleotide for detection of SNP TSC0017860
actccataaaata

SEQ ID NO: 68505 - DNA, 13 bp, Artificial Sequence
  Oligonucleotide for detection of SNP TSC0017860
tatttcgtggagt

SEQ ID NO: 68506 - DNA, 13 bp, Artificial Sequence
  Oligonucleotide for detection of SNP TSC0017860
actccacgaaata

SEQ ID NO: 68507 - DNA, 13 bp, Artificial Sequence
  Oligonucleotide for detection of SNP TSC0017862
atgttaaagtgta

SEQ ID NO: 68508 - DNA, 13 bp, Artificial Sequence
  Oligonucleotide for detection of SNP TSC0017862
tacactttaacat

SEQ ID NO: 68509 - DNA, 13 bp, Artificial Sequence
  Oligonucleotide for detection of SNP TSC0017862
atgttagagtgta

SEQ ID NO: 68510 - DNA, 13 bp, Artificial Sequence
  Oligonucleotide for detection of SNP TSC0017862
tacactctaacat

SEQ ID NO: 68511 - DNA, 13 bp, Artificial Sequence
  Oligonucleotide for detection of SNP TSC0017863
gaaaaagaggggt

SEQ ID NO: 68512 - DNA, 13 bp, Artificial Sequence
  Oligonucleotide for detection of SNP TSC0017863
acccctctttttc

SEQ ID NO: 68513 - DNA, 13 bp, Artificial Sequence
  Oligonucleotide for detection of SNP TSC0017863
gaaaaaaaggggt

SEQ ID NO: 68514 - DNA, 13 bp, Artificial Sequence
  Oligonucleotide for detection of SNP TSC0017863
acccctttttttc

SEQ ID NO: 68515 - DNA, 13 bp, Artificial Sequence
  Oligonucleotide for detection of SNP TSC0017864
agggaggaaaaag

SEQ ID NO: 68516 - DNA, 13 bp, Artificial Sequence
  Oligonucleotide for detection of SNP TSC0017864
ctttttcctccct

SEQ ID NO: 68517 - DNA, 13 bp, Artificial Sequence
  Oligonucleotide for detection of SNP TSC0017864
agggagaaaaaag

SEQ ID NO: 68518 - DNA, 13 bp, Artificial Sequence
  Oligonucleotide for detection of SNP TSC0017864
cttttttctccct

SEQ ID NO: 68519 - DNA, 13 bp, Artificial Sequence
  Oligonucleotide for detection of SNP TSC0017865
ttattagggaata

SEQ ID NO: 68520 - DNA, 13 bp, Artificial Sequence
  Oligonucleotide for detection of SNP TSC0017865
tattccctaataa

SEQ ID NO: 68521 - DNA, 13 bp, Artificial Sequence
  Oligonucleotide for detection of SNP TSC0017865
ttattatggaata

SEQ ID NO: 68522 - DNA, 13 bp, Artificial Sequence
  Oligonucleotide for detection of SNP TSC0017865
tattccataataa

SEQ ID NO: 68523 - DNA, 13 bp, Artificial Sequence
  Oligonucleotide for detection of SNP TSC0017865
tattttttggtgg

SEQ ID NO: 68524 - DNA, 13 bp, Artificial Sequence
  Oligonucleotide for detection of SNP TSC0017865
ccaccaaaaaata

SEQ ID NO: 68525 - DNA, 13 bp, Artificial Sequence
  Oligonucleotide for detection of SNP TSC0017865
tattttatggtgg

SEQ ID NO: 68526 - DNA, 13 bp, Artificial Sequence
  Oligonucleotide for detection of SNP TSC0017865
ccaccataaaata

SEQ ID NO: 68527 - DNA, 13 bp, Artificial Sequence
  Oligonucleotide for detection of SNP TSC0017866
attaaggggattt

SEQ ID NO: 68528 - DNA, 13 bp, Artificial Sequence
  Oligonucleotide for detection of SNP TSC0017866
aaatccccttaat

SEQ ID NO: 68529 - DNA, 13 bp, Artificial Sequence
  Oligonucleotide for detection of SNP TSC0017866
attaagtggattt

SEQ ID NO: 68530 - DNA, 13 bp, Artificial Sequence
  Oligonucleotide for detection of SNP TSC0017866
aaatccacttaat

SEQ ID NO: 68531 - DNA, 13 bp, Artificial Sequence
  Oligonucleotide for detection of SNP TSC0017866
agatttttttaat

SEQ ID NO: 68532 - DNA, 13 bp, Artificial Sequence
  Oligonucleotide for detection of SNP TSC0017866
attaaaaaaatct

SEQ ID NO: 68533 - DNA, 13 bp, Artificial Sequence
  Oligonucleotide for detection of SNP TSC0017866
agatttatttaat

SEQ ID NO: 68534 - DNA, 13 bp, Artificial Sequence
  Oligonucleotide for detection of SNP TSC0017866
attaaataaatct

SEQ ID NO: 68535 - DNA, 13 bp, Artificial Sequence
  Oligonucleotide for detection of SNP TSC0017867
atgaatggaatat

SEQ ID NO: 68536 - DNA, 13 bp, Artificial Sequence
  Oligonucleotide for detection of SNP TSC0017867
atattccattcat

SEQ ID NO: 68537 - DNA, 13 bp, Artificial Sequence
  Oligonucleotide for detection of SNP TSC0017867
atgaatagaatat

SEQ ID NO: 68538 - DNA, 13 bp, Artificial Sequence
  Oligonucleotide for detection of SNP TSC0017867
atattctattcat

SEQ ID NO: 68539 - DNA, 13 bp, Artificial Sequence
  Oligonucleotide for detection of SNP TSC0017868
agattgtgttatt

SEQ ID NO: 68540 - DNA, 13 bp, Artificial Sequence
  Oligonucleotide for detection of SNP TSC0017868
aataacacaatct

SEQ ID NO: 68541 - DNA, 13 bp, Artificial Sequence
  Oligonucleotide for detection of SNP TSC0017868
agattgcgttatt

SEQ ID NO: 68542 - DNA, 13 bp, Artificial Sequence
  Oligonucleotide for detection of SNP TSC0017868
aataacgcaatct

SEQ ID NO: 68543 - DNA, 13 bp, Artificial Sequence
  Oligonucleotide for detection of SNP TSC0017868
agtggtgtaattt

SEQ ID NO: 68544 - DNA, 13 bp, Artificial Sequence
  Oligonucleotide for detection of SNP TSC0017868
aaattacaccact

SEQ ID NO: 68545 - DNA, 13 bp, Artificial Sequence
  Oligonucleotide for detection of SNP TSC0017868
agtggtataattt

SEQ ID NO: 68546 - DNA, 13 bp, Artificial Sequence
  Oligonucleotide for detection of SNP TSC0017868
aaattataccact

SEQ ID NO: 68547 - DNA, 13 bp, Artificial Sequence
  Oligonucleotide for detection of SNP TSC0017868
agtggcgtaattt

SEQ ID NO: 68548 - DNA, 13 bp, Artificial Sequence
  Oligonucleotide for detection of SNP TSC0017868
aaattacgccact

SEQ ID NO: 68549 - DNA, 13 bp, Artificial Sequence
  Oligonucleotide for detection of SNP TSC0017870
tggaaaattagta

SEQ ID NO: 68550 - DNA, 13 bp, Artificial Sequence
  Oligonucleotide for detection of SNP TSC0017870
tactaattttcca

SEQ ID NO: 68551 - DNA, 13 bp, Artificial Sequence
  Oligonucleotide for detection of SNP TSC0017870
tggaaagttagta

SEQ ID NO: 68552 - DNA, 13 bp, Artificial Sequence
  Oligonucleotide for detection of SNP TSC0017870
tactaactttcca

SEQ ID NO: 68553 - DNA, 13 bp, Artificial Sequence
  Oligonucleotide for detection of SNP TSC0017872
attgttgtttttt

SEQ ID NO: 68554 - DNA, 13 bp, Artificial Sequence
  Oligonucleotide for detection of SNP TSC0017872
aaaaaacaacaat

SEQ ID NO: 68555 - DNA, 13 bp, Artificial Sequence
  Oligonucleotide for detection of SNP TSC0017872
attgttatttttt

SEQ ID NO: 68556 - DNA, 13 bp, Artificial Sequence
  Oligonucleotide for detection of SNP TSC0017872
aaaaaataacaat

SEQ ID NO: 68557 - DNA, 13 bp, Artificial Sequence
  Oligonucleotide for detection of SNP TSC0017873
tgatgggggaagg

SEQ ID NO: 68558 - DNA, 13 bp, Artificial Sequence
  Oligonucleotide for detection of SNP TSC0017873
ccttcccccatca

SEQ ID NO: 68559 - DNA, 13 bp, Artificial Sequence
  Oligonucleotide for detection of SNP TSC0017873
tgatggtggaagg

SEQ ID NO: 68560 - DNA, 13 bp, Artificial Sequence
  Oligonucleotide for detection of SNP TSC0017873
ccttccaccatca

SEQ ID NO: 68561 - DNA, 13 bp, Artificial Sequence
  Oligonucleotide for detection of SNP TSC0017873
tgacgggggaagg

SEQ ID NO: 68562 - DNA, 13 bp, Artificial Sequence
  Oligonucleotide for detection of SNP TSC0017873
ccttcccccgtca

SEQ ID NO: 68563 - DNA, 13 bp, Artificial Sequence
  Oligonucleotide for detection of SNP TSC0017873
tgacggtggaagg

SEQ ID NO: 68564 - DNA, 13 bp, Artificial Sequence
  Oligonucleotide for detection of SNP TSC0017873
ccttccaccgtca

SEQ ID NO: 68565 - DNA, 13 bp, Artificial Sequence
  Oligonucleotide for detection of SNP TSC0017873
ttttttttcgtta

SEQ ID NO: 68566 - DNA, 13 bp, Artificial Sequence
  Oligonucleotide for detection of SNP TSC0017873
taacgaaaaaaaa

SEQ ID NO: 68567 - DNA, 13 bp, Artificial Sequence
  Oligonucleotide for detection of SNP TSC0017873
ttttttatcgtta

SEQ ID NO: 68568 - DNA, 13 bp, Artificial Sequence
  Oligonucleotide for detection of SNP TSC0017873
taacgataaaaaa

SEQ ID NO: 68569 - DNA, 13 bp, Artificial Sequence
  Oligonucleotide for detection of SNP TSC0017877
taatttgaattgy

SEQ ID NO: 68570 - DNA, 13 bp, Artificial Sequence
  Oligonucleotide for detection of SNP TSC0017877
rcaattcaaatta

SEQ ID NO: 68571 - DNA, 13 bp, Artificial Sequence
  Oligonucleotide for detection of SNP TSC0017877
taatttaaattgy

SEQ ID NO: 68572 - DNA, 13 bp, Artificial Sequence
  Oligonucleotide for detection of SNP TSC0017877
rcaatttaaatta

SEQ ID NO: 68573 - DNA, 13 bp, Artificial Sequence
  Oligonucleotide for detection of SNP TSC0017878
gagggtaatatat

SEQ ID NO: 68574 - DNA, 13 bp, Artificial Sequence
  Oligonucleotide for detection of SNP TSC0017878
atatattaccctc

SEQ ID NO: 68575 - DNA, 13 bp, Artificial Sequence
  Oligonucleotide for detection of SNP TSC0017878
gagggtgatatat

SEQ ID NO: 68576 - DNA, 13 bp, Artificial Sequence
  Oligonucleotide for detection of SNP TSC0017878
atatatcaccctc

SEQ ID NO: 68577 - DNA, 13 bp, Artificial Sequence
  Oligonucleotide for detection of SNP TSC0017878
gagggcgatatat

SEQ ID NO: 68578 - DNA, 13 bp, Artificial Sequence
  Oligonucleotide for detection of SNP TSC0017878
atatatcgccctc

SEQ ID NO: 68579 - DNA, 13 bp, Artificial Sequence
  Oligonucleotide for detection of SNP TSC0017878
atatatcgtttty

SEQ ID NO: 68580 - DNA, 13 bp, Artificial Sequence
  Oligonucleotide for detection of SNP TSC0017878
raaaacgatatat

SEQ ID NO: 68581 - DNA, 13 bp, Artificial Sequence
  Oligonucleotide for detection of SNP TSC0017880
tttagtgaggtaa

SEQ ID NO: 68582 - DNA, 13 bp, Artificial Sequence
  Oligonucleotide for detection of SNP TSC0017880
ttacctcactaaa

SEQ ID NO: 68583 - DNA, 13 bp, Artificial Sequence
  Oligonucleotide for detection of SNP TSC0017880
tttagtaaggtaa

SEQ ID NO: 68584 - DNA, 13 bp, Artificial Sequence
  Oligonucleotide for detection of SNP TSC0017880
ttaccttactaaa

SEQ ID NO: 68585 - DNA, 13 bp, Artificial Sequence
  Oligonucleotide for detection of SNP TSC0017882
gttggtggttttt

SEQ ID NO: 68586 - DNA, 13 bp, Artificial Sequence
  Oligonucleotide for detection of SNP TSC0017882
aaaaaccaccaac

SEQ ID NO: 68587 - DNA, 13 bp, Artificial Sequence
  Oligonucleotide for detection of SNP TSC0017882
gttggttgttttt

SEQ ID NO: 68588 - DNA, 13 bp, Artificial Sequence
  Oligonucleotide for detection of SNP TSC0017882
aaaaacaaccaac

SEQ ID NO: 68589 - DNA, 13 bp, Artificial Sequence
  Oligonucleotide for detection of SNP TSC0017882
aaggattattagy

SEQ ID NO: 68590 - DNA, 13 bp, Artificial Sequence
  Oligonucleotide for detection of SNP TSC0017882
rctaataatcctt

SEQ ID NO: 68591 - DNA, 13 bp, Artificial Sequence
  Oligonucleotide for detection of SNP TSC0017882
aaggataattagy

SEQ ID NO: 68592 - DNA, 13 bp, Artificial Sequence
  Oligonucleotide for detection of SNP TSC0017882
rctaattatcctt

SEQ ID NO: 68593 - DNA, 13 bp, Artificial Sequence
  Oligonucleotide for detection of SNP TSC0017885
atttttagaattt

SEQ ID NO: 68594 - DNA, 13 bp, Artificial Sequence
  Oligonucleotide for detection of SNP TSC0017885
aaattctaaaaat

SEQ ID NO: 68595 - DNA, 13 bp, Artificial Sequence
  Oligonucleotide for detection of SNP TSC0017885
atttttggaattt

SEQ ID NO: 68596 - DNA, 13 bp, Artificial Sequence
  Oligonucleotide for detection of SNP TSC0017885
aaattccaaaaat

SEQ ID NO: 68597 - DNA, 13 bp, Artificial Sequence
  Oligonucleotide for detection of SNP TSC0017885
attttcggaattt

SEQ ID NO: 68598 - DNA, 13 bp, Artificial Sequence
  Oligonucleotide for detection of SNP TSC0017885
aaattccgaaaat

SEQ ID NO: 68599 - DNA, 13 bp, Artificial Sequence
  Oligonucleotide for detection of SNP TSC0017885
aggttttggaagt

SEQ ID NO: 68600 - DNA, 13 bp, Artificial Sequence
  Oligonucleotide for detection of SNP TSC0017885
acttccaaaacct

SEQ ID NO: 68601 - DNA, 13 bp, Artificial Sequence
  Oligonucleotide for detection of SNP TSC0017885
aggtttcggaagt

SEQ ID NO: 68602 - DNA, 13 bp, Artificial Sequence
  Oligonucleotide for detection of SNP TSC0017885
acttccgaaacct

SEQ ID NO: 68603 - DNA, 13 bp, Artificial Sequence
  Oligonucleotide for detection of SNP TSC0017886
ttgtgtgtaggta

SEQ ID NO: 68604 - DNA, 13 bp, Artificial Sequence
  Oligonucleotide for detection of SNP TSC0017886
tacctacacacaa

SEQ ID NO: 68605 - DNA, 13 bp, Artificial Sequence
  Oligonucleotide for detection of SNP TSC0017886
ttgtgtttaggta

SEQ ID NO: 68606 - DNA, 13 bp, Artificial Sequence
  Oligonucleotide for detection of SNP TSC0017886
tacctaaacacaa

SEQ ID NO: 68607 - DNA, 13 bp, Artificial Sequence
  Oligonucleotide for detection of SNP TSC0017886
tgtttgtatatag

SEQ ID NO: 68608 - DNA, 13 bp, Artificial Sequence
  Oligonucleotide for detection of SNP TSC0017886
ctatatacaaaca

SEQ ID NO: 68609 - DNA, 13 bp, Artificial Sequence
  Oligonucleotide for detection of SNP TSC0017886
tgtttgaatatag

SEQ ID NO: 68610 - DNA, 13 bp, Artificial Sequence
  Oligonucleotide for detection of SNP TSC0017886
ctatattcaaaca

SEQ ID NO: 68611 - DNA, 13 bp, Artificial Sequence
  Oligonucleotide for detection of SNP TSC0017887
ttgtttgtatata

SEQ ID NO: 68612 - DNA, 13 bp, Artificial Sequence
  Oligonucleotide for detection of SNP TSC0017887
tatatacaaacaa

SEQ ID NO: 68613 - DNA, 13 bp, Artificial Sequence
  Oligonucleotide for detection of SNP TSC0017887
ttgtttatatata

SEQ ID NO: 68614 - DNA, 13 bp, Artificial Sequence
  Oligonucleotide for detection of SNP TSC0017887
tatatataaacaa

SEQ ID NO: 68615 - DNA, 13 bp, Artificial Sequence
  Oligonucleotide for detection of SNP TSC0017889
ttggttattggty

SEQ ID NO: 68616 - DNA, 13 bp, Artificial Sequence
  Oligonucleotide for detection of SNP TSC0017889
raccaataaccaa

SEQ ID NO: 68617 - DNA, 13 bp, Artificial Sequence
  Oligonucleotide for detection of SNP TSC0017889
ttggttgttggty

SEQ ID NO: 68618 - DNA, 13 bp, Artificial Sequence
  Oligonucleotide for detection of SNP TSC0017889
raccaacaaccaa

SEQ ID NO: 68619 - DNA, 13 bp, Artificial Sequence
  Oligonucleotide for detection of SNP TSC0017889
ttggtcgttggty

SEQ ID NO: 68620 - DNA, 13 bp, Artificial Sequence
  Oligonucleotide for detection of SNP TSC0017889
raccaacgaccaa

SEQ ID NO: 68621 - DNA, 13 bp, Artificial Sequence
  Oligonucleotide for detection of SNP TSC0017889
ggttagtggttag

SEQ ID NO: 68622 - DNA, 13 bp, Artificial Sequence
  Oligonucleotide for detection of SNP TSC0017889
ctaaccactaacc

SEQ ID NO: 68623 - DNA, 13 bp, Artificial Sequence
  Oligonucleotide for detection of SNP TSC0017889
ggttagcggttag

SEQ ID NO: 68624 - DNA, 13 bp, Artificial Sequence
  Oligonucleotide for detection of SNP TSC0017889
ctaaccgctaacc

SEQ ID NO: 68625 - DNA, 13 bp, Artificial Sequence
  Oligonucleotide for detection of SNP TSC0017892
aatttgagaggta

SEQ ID NO: 68626 - DNA, 13 bp, Artificial Sequence
  Oligonucleotide for detection of SNP TSC0017892
tacctctcaaatt

SEQ ID NO: 68627 - DNA, 13 bp, Artificial Sequence
  Oligonucleotide for detection of SNP TSC0017892
aatttgggaggta

SEQ ID NO: 68628 - DNA, 13 bp, Artificial Sequence
  Oligonucleotide for detection of SNP TSC0017892
tacctcccaaatt

SEQ ID NO: 68629 - DNA, 13 bp, Artificial Sequence
  Oligonucleotide for detection of SNP TSC0017895
aggaatgtaatta

SEQ ID NO: 68630 - DNA, 13 bp, Artificial Sequence
  Oligonucleotide for detection of SNP TSC0017895
taattacattcct

SEQ ID NO: 68631 - DNA, 13 bp, Artificial Sequence
  Oligonucleotide for detection of SNP TSC0017895
aggaatataatta

SEQ ID NO: 68632 - DNA, 13 bp, Artificial Sequence
  Oligonucleotide for detection of SNP TSC0017895
taattatattcct

SEQ ID NO: 68633 - DNA, 13 bp, Artificial Sequence
  Oligonucleotide for detection of SNP TSC0017895
aggaacgtaatta

SEQ ID NO: 68634 - DNA, 13 bp, Artificial Sequence
  Oligonucleotide for detection of SNP TSC0017895
taattacgttcct

SEQ ID NO: 68635 - DNA, 13 bp, Artificial Sequence
  Oligonucleotide for detection of SNP TSC0017896
atatttattttat

SEQ ID NO: 68636 - DNA, 13 bp, Artificial Sequence
  Oligonucleotide for detection of SNP TSC0017896
ataaaataaatat

SEQ ID NO: 68637 - DNA, 13 bp, Artificial Sequence
  Oligonucleotide for detection of SNP TSC0017896
atatttgttttat

SEQ ID NO: 68638 - DNA, 13 bp, Artificial Sequence
  Oligonucleotide for detection of SNP TSC0017896
ataaaacaaatat

SEQ ID NO: 68639 - DNA, 13 bp, Artificial Sequence
  Oligonucleotide for detection of SNP TSC0017896
atattcgttttat

SEQ ID NO: 68640 - DNA, 13 bp, Artificial Sequence
  Oligonucleotide for detection of SNP TSC0017896
ataaaacgaatat

SEQ ID NO: 68641 - DNA, 13 bp, Artificial Sequence
  Oligonucleotide for detection of SNP TSC0017896
atgaaatgagtat

SEQ ID NO: 68642 - DNA, 13 bp, Artificial Sequence
  Oligonucleotide for detection of SNP TSC0017896
atactcatttcat

SEQ ID NO: 68643 - DNA, 13 bp, Artificial Sequence
  Oligonucleotide for detection of SNP TSC0017896
atgaaacgagtat

SEQ ID NO: 68644 - DNA, 13 bp, Artificial Sequence
  Oligonucleotide for detection of SNP TSC0017896
atactcgtttcat

SEQ ID NO: 68645 - DNA, 13 bp, Artificial Sequence
  Oligonucleotide for detection of SNP TSC0017897
tggaataatattt

SEQ ID NO: 68646 - DNA, 13 bp, Artificial Sequence
  Oligonucleotide for detection of SNP TSC0017897
aaatattattcca

SEQ ID NO: 68647 - DNA, 13 bp, Artificial Sequence
  Oligonucleotide for detection of SNP TSC0017897
tggaatgatattt

SEQ ID NO: 68648 - DNA, 13 bp, Artificial Sequence
  Oligonucleotide for detection of SNP TSC0017897
aaatatcattcca

SEQ ID NO: 68649 - DNA, 13 bp, Artificial Sequence
  Oligonucleotide for detection of SNP TSC0017898
attaatatattat

SEQ ID NO: 68650 - DNA, 13 bp, Artificial Sequence
  Oligonucleotide for detection of SNP TSC0017898
ataatatattaat

SEQ ID NO: 68651 - DNA, 13 bp, Artificial Sequence
  Oligonucleotide for detection of SNP TSC0017898
attaatgtattat

SEQ ID NO: 68652 - DNA, 13 bp, Artificial Sequence
  Oligonucleotide for detection of SNP TSC0017898
ataatacattaat

SEQ ID NO: 68653 - DNA, 13 bp, Artificial Sequence
  Oligonucleotide for detection of SNP TSC0017898
attaacgtattat

SEQ ID NO: 68654 - DNA, 13 bp, Artificial Sequence
  Oligonucleotide for detection of SNP TSC0017898
ataatacgttaat

SEQ ID NO: 68655 - DNA, 13 bp, Artificial Sequence
  Oligonucleotide for detection of SNP TSC0017898
atgatatgttaat

SEQ ID NO: 68656 - DNA, 13 bp, Artificial Sequence
  Oligonucleotide for detection of SNP TSC0017898
attaacatatcat

SEQ ID NO: 68657 - DNA, 13 bp, Artificial Sequence
  Oligonucleotide for detection of SNP TSC0017898
atgatacgttaat

SEQ ID NO: 68658 - DNA, 13 bp, Artificial Sequence
  Oligonucleotide for detection of SNP TSC0017898
attaacgtatcat

SEQ ID NO: 68659 - DNA, 13 bp, Artificial Sequence
  Oligonucleotide for detection of SNP TSC0017899
taaaaaggtaaaa

SEQ ID NO: 68660 - DNA, 13 bp, Artificial Sequence
  Oligonucleotide for detection of SNP TSC0017899
ttttaccttttta

SEQ ID NO: 68661 - DNA, 13 bp, Artificial Sequence
  Oligonucleotide for detection of SNP TSC0017899
taaaaaagtaaaa

SEQ ID NO: 68662 - DNA, 13 bp, Artificial Sequence
  Oligonucleotide for detection of SNP TSC0017899
ttttactttttta

SEQ ID NO: 68663 - DNA, 13 bp, Artificial Sequence
  Oligonucleotide for detection of SNP TSC0017901
tttttaaaagtag

SEQ ID NO: 68664 - DNA, 13 bp, Artificial Sequence
  Oligonucleotide for detection of SNP TSC0017901
ctacttttaaaaa

SEQ ID NO: 68665 - DNA, 13 bp, Artificial Sequence
  Oligonucleotide for detection of SNP TSC0017901
tttttataagtag

SEQ ID NO: 68666 - DNA, 13 bp, Artificial Sequence
  Oligonucleotide for detection of SNP TSC0017901
ctacttataaaaa

SEQ ID NO: 68667 - DNA, 13 bp, Artificial Sequence
  Oligonucleotide for detection of SNP TSC0017901
ttatttttaaaaa

SEQ ID NO: 68668 - DNA, 13 bp, Artificial Sequence
  Oligonucleotide for detection of SNP TSC0017901
tttttaaaaataa

SEQ ID NO: 68669 - DNA, 13 bp, Artificial Sequence
  Oligonucleotide for detection of SNP TSC0017902
attttatggattt

SEQ ID NO: 68670 - DNA, 13 bp, Artificial Sequence
  Oligonucleotide for detection of SNP TSC0017902
aaatccataaaat

SEQ ID NO: 68671 - DNA, 13 bp, Artificial Sequence
  Oligonucleotide for detection of SNP TSC0017902
attttacggattt

SEQ ID NO: 68672 - DNA, 13 bp, Artificial Sequence
  Oligonucleotide for detection of SNP TSC0017902
aaatccgtaaaat

SEQ ID NO: 68673 - DNA, 13 bp, Artificial Sequence
  Oligonucleotide for detection of SNP TSC0017902
agatttgtgagat

SEQ ID NO: 68674 - DNA, 13 bp, Artificial Sequence
  Oligonucleotide for detection of SNP TSC0017902
atctcacaaatct

SEQ ID NO: 68675 - DNA, 13 bp, Artificial Sequence
  Oligonucleotide for detection of SNP TSC0017902
agatttatgagat

SEQ ID NO: 68676 - DNA, 13 bp, Artificial Sequence
  Oligonucleotide for detection of SNP TSC0017902
atctcataaatct

SEQ ID NO: 68677 - DNA, 13 bp, Artificial Sequence
  Oligonucleotide for detection of SNP TSC0017902
agattcgtgagat

SEQ ID NO: 68678 - DNA, 13 bp, Artificial Sequence
  Oligonucleotide for detection of SNP TSC0017902
atctcacgaatct

SEQ ID NO: 68679 - DNA, 13 bp, Artificial Sequence
  Oligonucleotide for detection of SNP TSC0017903
gttttttaaattt

SEQ ID NO: 68680 - DNA, 13 bp, Artificial Sequence
  Oligonucleotide for detection of SNP TSC0017903
aaatttaaaaaac

SEQ ID NO: 68681 - DNA, 13 bp, Artificial Sequence
  Oligonucleotide for detection of SNP TSC0017903
aaattttaaaaay

SEQ ID NO: 68682 - DNA, 13 bp, Artificial Sequence
  Oligonucleotide for detection of SNP TSC0017903
rtttttaaaattt

SEQ ID NO: 68683 - DNA, 13 bp, Artificial Sequence
  Oligonucleotide for detection of SNP TSC0017903
aaatttaaaaaay

SEQ ID NO: 68684 - DNA, 13 bp, Artificial Sequence
  Oligonucleotide for detection of SNP TSC0017903
rttttttaaattt

SEQ ID NO: 68685 - DNA, 13 bp, Artificial Sequence
  Oligonucleotide for detection of SNP TSC0017904
tattagtgagata

SEQ ID NO: 68686 - DNA, 13 bp, Artificial Sequence
  Oligonucleotide for detection of SNP TSC0017904
tatctcactaata

SEQ ID NO: 68687 - DNA, 13 bp, Artificial Sequence
  Oligonucleotide for detection of SNP TSC0017904
tattagcgagata

SEQ ID NO: 68688 - DNA, 13 bp, Artificial Sequence
  Oligonucleotide for detection of SNP TSC0017904
tatctcgctaata

SEQ ID NO: 68689 - DNA, 13 bp, Artificial Sequence
  Oligonucleotide for detection of SNP TSC0017904
tgttttgttggta

SEQ ID NO: 68690 - DNA, 13 bp, Artificial Sequence
  Oligonucleotide for detection of SNP TSC0017904
taccaacaaaaca

SEQ ID NO: 68691 - DNA, 13 bp, Artificial Sequence
  Oligonucleotide for detection of SNP TSC0017904
tgttttattggta

SEQ ID NO: 68692 - DNA, 13 bp, Artificial Sequence
  Oligonucleotide for detection of SNP TSC0017904
taccaataaaaca

SEQ ID NO: 68693 - DNA, 13 bp, Artificial Sequence
  Oligonucleotide for detection of SNP TSC0017904
tgtttcgttggta

SEQ ID NO: 68694 - DNA, 13 bp, Artificial Sequence
  Oligonucleotide for detection of SNP TSC0017904
taccaacgaaaca

SEQ ID NO: 68695 - DNA, 13 bp, Artificial Sequence
  Oligonucleotide for detection of SNP TSC0017905
gtttgtatgtgtg

SEQ ID NO: 68696 - DNA, 13 bp, Artificial Sequence
  Oligonucleotide for detection of SNP TSC0017905
cacacatacaaac

SEQ ID NO: 68697 - DNA, 13 bp, Artificial Sequence
  Oligonucleotide for detection of SNP TSC0017905
gtttgtttgtgtg

SEQ ID NO: 68698 - DNA, 13 bp, Artificial Sequence
  Oligonucleotide for detection of SNP TSC0017905
cacacaaacaaac

SEQ ID NO: 68699 - DNA, 13 bp, Artificial Sequence
  Oligonucleotide for detection of SNP TSC0017905
gtttgtatgtgcg

SEQ ID NO: 68700 - DNA, 13 bp, Artificial Sequence
  Oligonucleotide for detection of SNP TSC0017905
cgcacatacaaac

SEQ ID NO: 68701 - DNA, 13 bp, Artificial Sequence
  Oligonucleotide for detection of SNP TSC0017905
gtttgtttgtgcg

SEQ ID NO: 68702 - DNA, 13 bp, Artificial Sequence
  Oligonucleotide for detection of SNP TSC0017905
cgcacaaacaaac

SEQ ID NO: 68703 - DNA, 13 bp, Artificial Sequence
  Oligonucleotide for detection of SNP TSC0017905
tgtatatataggy

SEQ ID NO: 68704 - DNA, 13 bp, Artificial Sequence
  Oligonucleotide for detection of SNP TSC0017905
rcctatatataca

SEQ ID NO: 68705 - DNA, 13 bp, Artificial Sequence
  Oligonucleotide for detection of SNP TSC0017905
tgtataaataggy

SEQ ID NO: 68706 - DNA, 13 bp, Artificial Sequence
  Oligonucleotide for detection of SNP TSC0017905
rcctatttataca

SEQ ID NO: 68707 - DNA, 13 bp, Artificial Sequence
  Oligonucleotide for detection of SNP TSC0017905
cgtatatataggy

SEQ ID NO: 68708 - DNA, 13 bp, Artificial Sequence
  Oligonucleotide for detection of SNP TSC0017905
rcctatatatacg

SEQ ID NO: 68709 - DNA, 13 bp, Artificial Sequence
  Oligonucleotide for detection of SNP TSC0017905
cgtataaataggy

SEQ ID NO: 68710 - DNA, 13 bp, Artificial Sequence
  Oligonucleotide for detection of SNP TSC0017905
rcctatttatacg

SEQ ID NO: 68711 - DNA, 13 bp, Artificial Sequence
  Oligonucleotide for detection of SNP TSC0017906
tttttatgaatty

SEQ ID NO: 68712 - DNA, 13 bp, Artificial Sequence
  Oligonucleotide for detection of SNP TSC0017906
raattcataaaaa

SEQ ID NO: 68713 - DNA, 13 bp, Artificial Sequence
  Oligonucleotide for detection of SNP TSC0017906
tttttacgaatty

SEQ ID NO: 68714 - DNA, 13 bp, Artificial Sequence
  Oligonucleotide for detection of SNP TSC0017906
raattcgtaaaaa

SEQ ID NO: 68715 - DNA, 13 bp, Artificial Sequence
  Oligonucleotide for detection of SNP TSC0017906
gagtttgtgggga

SEQ ID NO: 68716 - DNA, 13 bp, Artificial Sequence
  Oligonucleotide for detection of SNP TSC0017906
tccccacaaactc

SEQ ID NO: 68717 - DNA, 13 bp, Artificial Sequence
  Oligonucleotide for detection of SNP TSC0017906
gagtttatgggga

SEQ ID NO: 68718 - DNA, 13 bp, Artificial Sequence
  Oligonucleotide for detection of SNP TSC0017906
tccccataaactc

SEQ ID NO: 68719 - DNA, 13 bp, Artificial Sequence
  Oligonucleotide for detection of SNP TSC0017906
gagttcgtgggga

SEQ ID NO: 68720 - DNA, 13 bp, Artificial Sequence
  Oligonucleotide for detection of SNP TSC0017906
tccccacgaactc

SEQ ID NO: 68721 - DNA, 13 bp, Artificial Sequence
  Oligonucleotide for detection of SNP TSC0017907
atttgagtgttat

SEQ ID NO: 68722 - DNA, 13 bp, Artificial Sequence
  Oligonucleotide for detection of SNP TSC0017907
ataacactcaaat

SEQ ID NO: 68723 - DNA, 13 bp, Artificial Sequence
  Oligonucleotide for detection of SNP TSC0017907
atttgattgttat

SEQ ID NO: 68724 - DNA, 13 bp, Artificial Sequence
  Oligonucleotide for detection of SNP TSC0017907
ataacaatcaaat

SEQ ID NO: 68725 - DNA, 13 bp, Artificial Sequence
  Oligonucleotide for detection of SNP TSC0017907
atgatatttaaat

SEQ ID NO: 68726 - DNA, 13 bp, Artificial Sequence
  Oligonucleotide for detection of SNP TSC0017907
atttaaatatcat

SEQ ID NO: 68727 - DNA, 13 bp, Artificial Sequence
  Oligonucleotide for detection of SNP TSC0017907
atgataattaaat

SEQ ID NO: 68728 - DNA, 13 bp, Artificial Sequence
  Oligonucleotide for detection of SNP TSC0017907
atttaattatcat

SEQ ID NO: 68729 - DNA, 13 bp, Artificial Sequence
  Oligonucleotide for detection of SNP TSC0017908
tggtggttttatt

SEQ ID NO: 68730 - DNA, 13 bp, Artificial Sequence
  Oligonucleotide for detection of SNP TSC0017908
aataaaaccacca

SEQ ID NO: 68731 - DNA, 13 bp, Artificial Sequence
  Oligonucleotide for detection of SNP TSC0017908
tggtgggtttatt

SEQ ID NO: 68732 - DNA, 13 bp, Artificial Sequence
  Oligonucleotide for detection of SNP TSC0017908
aataaacccacca

SEQ ID NO: 68733 - DNA, 13 bp, Artificial Sequence
  Oligonucleotide for detection of SNP TSC0017908
agtggagttatta

SEQ ID NO: 68734 - DNA, 13 bp, Artificial Sequence
  Oligonucleotide for detection of SNP TSC0017908
taataactccact

SEQ ID NO: 68735 - DNA, 13 bp, Artificial Sequence
  Oligonucleotide for detection of SNP TSC0017908
agtggatttatta

SEQ ID NO: 68736 - DNA, 13 bp, Artificial Sequence
  Oligonucleotide for detection of SNP TSC0017908
taataaatccact

SEQ ID NO: 68737 - DNA, 13 bp, Artificial Sequence
  Oligonucleotide for detection of SNP TSC0017910
aaagaaaatttag

SEQ ID NO: 68738 - DNA, 13 bp, Artificial Sequence
  Oligonucleotide for detection of SNP TSC0017910
ctaaattttcttt

SEQ ID NO: 68739 - DNA, 13 bp, Artificial Sequence
  Oligonucleotide for detection of SNP TSC0017910
aaagaatatttag

SEQ ID NO: 68740 - DNA, 13 bp, Artificial Sequence
  Oligonucleotide for detection of SNP TSC0017910
ctaaatattcttt

SEQ ID NO: 68741 - DNA, 13 bp, Artificial Sequence
  Oligonucleotide for detection of SNP TSC0017910
ttgagtttttttt

SEQ ID NO: 68742 - DNA, 13 bp, Artificial Sequence
  Oligonucleotide for detection of SNP TSC0017910
aaaaaaaactcaa

SEQ ID NO: 68743 - DNA, 13 bp, Artificial Sequence
  Oligonucleotide for detection of SNP TSC0017910
ttgagtatttttt

SEQ ID NO: 68744 - DNA, 13 bp, Artificial Sequence
  Oligonucleotide for detection of SNP TSC0017910
aaaaaatactcaa

SEQ ID NO: 68745 - DNA, 13 bp, Artificial Sequence
  Oligonucleotide for detection of SNP TSC0017912
gataattgtttga

SEQ ID NO: 68746 - DNA, 13 bp, Artificial Sequence
  Oligonucleotide for detection of SNP TSC0017912
tcaaacaattatc

SEQ ID NO: 68747 - DNA, 13 bp, Artificial Sequence
  Oligonucleotide for detection of SNP TSC0017912
gataatcgtttga

SEQ ID NO: 68748 - DNA, 13 bp, Artificial Sequence
  Oligonucleotide for detection of SNP TSC0017912
tcaaacgattatc

SEQ ID NO: 68749 - DNA, 13 bp, Artificial Sequence
  Oligonucleotide for detection of SNP TSC0017912
ttaagtgattaty

SEQ ID NO: 68750 - DNA, 13 bp, Artificial Sequence
  Oligonucleotide for detection of SNP TSC0017912
rataatcacttaa

SEQ ID NO: 68751 - DNA, 13 bp, Artificial Sequence
  Oligonucleotide for detection of SNP TSC0017912
ttaagtaattaty

SEQ ID NO: 68752 - DNA, 13 bp, Artificial Sequence
  Oligonucleotide for detection of SNP TSC0017912
rataattacttaa

SEQ ID NO: 68753 - DNA, 13 bp, Artificial Sequence
  Oligonucleotide for detection of SNP TSC0017912
ttaagcgattaty

SEQ ID NO: 68754 - DNA, 13 bp, Artificial Sequence
  Oligonucleotide for detection of SNP TSC0017912
rataatcgcttaa

SEQ ID NO: 68755 - DNA, 13 bp, Artificial Sequence
  Oligonucleotide for detection of SNP TSC0017914
tatagtagttttg

SEQ ID NO: 68756 - DNA, 13 bp, Artificial Sequence
  Oligonucleotide for detection of SNP TSC0017914
caaaactactata

SEQ ID NO: 68757 - DNA, 13 bp, Artificial Sequence
  Oligonucleotide for detection of SNP TSC0017914
tatagtggttttg

SEQ ID NO: 68758 - DNA, 13 bp, Artificial Sequence
  Oligonucleotide for detection of SNP TSC0017914
caaaaccactata

SEQ ID NO: 68759 - DNA, 13 bp, Artificial Sequence
  Oligonucleotide for detection of SNP TSC0017914
tatagcggttttg

SEQ ID NO: 68760 - DNA, 13 bp, Artificial Sequence
  Oligonucleotide for detection of SNP TSC0017914
caaaaccgctata

SEQ ID NO: 68761 - DNA, 13 bp, Artificial Sequence
  Oligonucleotide for detection of SNP TSC0017914
tagagttgttgtg

SEQ ID NO: 68762 - DNA, 13 bp, Artificial Sequence
  Oligonucleotide for detection of SNP TSC0017914
cacaacaactcta

SEQ ID NO: 68763 - DNA, 13 bp, Artificial Sequence
  Oligonucleotide for detection of SNP TSC0017914
tagagtcgttgtg

SEQ ID NO: 68764 - DNA, 13 bp, Artificial Sequence
  Oligonucleotide for detection of SNP TSC0017914
cacaacgactcta

SEQ ID NO: 68765 - DNA, 13 bp, Artificial Sequence
  Oligonucleotide for detection of SNP TSC0017915
taagttattgtag

SEQ ID NO: 68766 - DNA, 13 bp, Artificial Sequence
  Oligonucleotide for detection of SNP TSC0017915
ctacaataactta

SEQ ID NO: 68767 - DNA, 13 bp, Artificial Sequence
  Oligonucleotide for detection of SNP TSC0017915
taagtttttgtag

SEQ ID NO: 68768 - DNA, 13 bp, Artificial Sequence
  Oligonucleotide for detection of SNP TSC0017915
ctacaaaaactta

SEQ ID NO: 68769 - DNA, 13 bp, Artificial Sequence
  Oligonucleotide for detection of SNP TSC0017915
ttgtagtaatttg

SEQ ID NO: 68770 - DNA, 13 bp, Artificial Sequence
  Oligonucleotide for detection of SNP TSC0017915
caaattactacaa

SEQ ID NO: 68771 - DNA, 13 bp, Artificial Sequence
  Oligonucleotide for detection of SNP TSC0017915
ttgtaggaatttg

SEQ ID NO: 68772 - DNA, 13 bp, Artificial Sequence
  Oligonucleotide for detection of SNP TSC0017915
caaattcctacaa

SEQ ID NO: 68773 - DNA, 13 bp, Artificial Sequence
  Oligonucleotide for detection of SNP TSC0017917
gttgtttagatay

SEQ ID NO: 68774 - DNA, 13 bp, Artificial Sequence
  Oligonucleotide for detection of SNP TSC0017917
rtatctaaacaac

SEQ ID NO: 68775 - DNA, 13 bp, Artificial Sequence
  Oligonucleotide for detection of SNP TSC0017917
gttgttgagatay

SEQ ID NO: 68776 - DNA, 13 bp, Artificial Sequence
  Oligonucleotide for detection of SNP TSC0017917
rtatctcaacaac

SEQ ID NO: 68777 - DNA, 13 bp, Artificial Sequence
  Oligonucleotide for detection of SNP TSC0017917
gtgtttgagtagy

SEQ ID NO: 68778 - DNA, 13 bp, Artificial Sequence
  Oligonucleotide for detection of SNP TSC0017917
rctactcaaacac

SEQ ID NO: 68779 - DNA, 13 bp, Artificial Sequence
  Oligonucleotide for detection of SNP TSC0017917
gtgttttagtagy

SEQ ID NO: 68780 - DNA, 13 bp, Artificial Sequence
  Oligonucleotide for detection of SNP TSC0017917
rctactaaaacac

SEQ ID NO: 68781 - DNA, 13 bp, Artificial Sequence
  Oligonucleotide for detection of SNP TSC0017918
tattaggatttga

SEQ ID NO: 68782 - DNA, 13 bp, Artificial Sequence
  Oligonucleotide for detection of SNP TSC0017918
tcaaatcctaata

SEQ ID NO: 68783 - DNA, 13 bp, Artificial Sequence
  Oligonucleotide for detection of SNP TSC0017918
tattagtatttga

SEQ ID NO: 68784 - DNA, 13 bp, Artificial Sequence
  Oligonucleotide for detection of SNP TSC0017918
tcaaatactaata

SEQ ID NO: 68785 - DNA, 13 bp, Artificial Sequence
  Oligonucleotide for detection of SNP TSC0017918
ttagattttaata

SEQ ID NO: 68786 - DNA, 13 bp, Artificial Sequence
  Oligonucleotide for detection of SNP TSC0017918
tattaaaatctaa

SEQ ID NO: 68787 - DNA, 13 bp, Artificial Sequence
  Oligonucleotide for detection of SNP TSC0017918
ttagatattaata

SEQ ID NO: 68788 - DNA, 13 bp, Artificial Sequence
  Oligonucleotide for detection of SNP TSC0017918
tattaatatctaa

SEQ ID NO: 68789 - DNA, 13 bp, Artificial Sequence
  Oligonucleotide for detection of SNP TSC0017919
aaaagatggttta

SEQ ID NO: 68790 - DNA, 13 bp, Artificial Sequence
  Oligonucleotide for detection of SNP TSC0017919
taaaccatctttt

SEQ ID NO: 68791 - DNA, 13 bp, Artificial Sequence
  Oligonucleotide for detection of SNP TSC0017919
aaaagacggttta

SEQ ID NO: 68792 - DNA, 13 bp, Artificial Sequence
  Oligonucleotide for detection of SNP TSC0017919
taaaccgtctttt

SEQ ID NO: 68793 - DNA, 13 bp, Artificial Sequence
  Oligonucleotide for detection of SNP TSC0017922
ttttaggtagaga

SEQ ID NO: 68794 - DNA, 13 bp, Artificial Sequence
  Oligonucleotide for detection of SNP TSC0017922
tctctacctaaaa

SEQ ID NO: 68795 - DNA, 13 bp, Artificial Sequence
  Oligonucleotide for detection of SNP TSC0017922
ttttagatagaga

SEQ ID NO: 68796 - DNA, 13 bp, Artificial Sequence
  Oligonucleotide for detection of SNP TSC0017922
tctctatctaaaa

SEQ ID NO: 68797 - DNA, 13 bp, Artificial Sequence
  Oligonucleotide for detection of SNP TSC0017923
tggttatgttttt

SEQ ID NO: 68798 - DNA, 13 bp, Artificial Sequence
  Oligonucleotide for detection of SNP TSC0017923
aaaaacataacca

SEQ ID NO: 68799 - DNA, 13 bp, Artificial Sequence
  Oligonucleotide for detection of SNP TSC0017923
cggttatgttttt

SEQ ID NO: 68800 - DNA, 13 bp, Artificial Sequence
  Oligonucleotide for detection of SNP TSC0017923
aaaaacataaccg

SEQ ID NO: 68801 - DNA, 13 bp, Artificial Sequence
  Oligonucleotide for detection of SNP TSC0017923
tggttacgttttt

SEQ ID NO: 68802 - DNA, 13 bp, Artificial Sequence
  Oligonucleotide for detection of SNP TSC0017923
aaaaacgtaacca

SEQ ID NO: 68803 - DNA, 13 bp, Artificial Sequence
  Oligonucleotide for detection of SNP TSC0017923
cggttacgttttt

SEQ ID NO: 68804 - DNA, 13 bp, Artificial Sequence
  Oligonucleotide for detection of SNP TSC0017923
aaaaacgtaaccg

SEQ ID NO: 68805 - DNA, 13 bp, Artificial Sequence
  Oligonucleotide for detection of SNP TSC0017923
agggatgtgattg

SEQ ID NO: 68806 - DNA, 13 bp, Artificial Sequence
  Oligonucleotide for detection of SNP TSC0017923
caatcacatccct

SEQ ID NO: 68807 - DNA, 13 bp, Artificial Sequence
  Oligonucleotide for detection of SNP TSC0017923
agggatatgattg

SEQ ID NO: 68808 - DNA, 13 bp, Artificial Sequence
  Oligonucleotide for detection of SNP TSC0017923
caatcatatccct

SEQ ID NO: 68809 - DNA, 13 bp, Artificial Sequence
  Oligonucleotide for detection of SNP TSC0017923
agggacgtgattg

SEQ ID NO: 68810 - DNA, 13 bp, Artificial Sequence
  Oligonucleotide for detection of SNP TSC0017923
caatcacgtccct

SEQ ID NO: 68811 - DNA, 13 bp, Artificial Sequence
  Oligonucleotide for detection of SNP TSC0017923
agggatatgatcg

SEQ ID NO: 68812 - DNA, 13 bp, Artificial Sequence
  Oligonucleotide for detection of SNP TSC0017923
cgatcatatccct

SEQ ID NO: 68813 - DNA, 13 bp, Artificial Sequence
  Oligonucleotide for detection of SNP TSC0017923
agggatgtgatcg

SEQ ID NO: 68814 - DNA, 13 bp, Artificial Sequence
  Oligonucleotide for detection of SNP TSC0017923
cgatcacatccct

SEQ ID NO: 68815 - DNA, 13 bp, Artificial Sequence
  Oligonucleotide for detection of SNP TSC0017923
agggacgtgatcg

SEQ ID NO: 68816 - DNA, 13 bp, Artificial Sequence
  Oligonucleotide for detection of SNP TSC0017923
cgatcacgtccct

SEQ ID NO: 68817 - DNA, 13 bp, Artificial Sequence
  Oligonucleotide for detection of SNP TSC0017926
tttgtggttggta

SEQ ID NO: 68818 - DNA, 13 bp, Artificial Sequence
  Oligonucleotide for detection of SNP TSC0017926
taccaaccacaaa

SEQ ID NO: 68819 - DNA, 13 bp, Artificial Sequence
  Oligonucleotide for detection of SNP TSC0017926
tttgtgattggta

SEQ ID NO: 68820 - DNA, 13 bp, Artificial Sequence
  Oligonucleotide for detection of SNP TSC0017926
taccaatcacaaa

SEQ ID NO: 68821 - DNA, 13 bp, Artificial Sequence
  Oligonucleotide for detection of SNP TSC0017927
tgttagattattt

SEQ ID NO: 68822 - DNA, 13 bp, Artificial Sequence
  Oligonucleotide for detection of SNP TSC0017927
aaataatctaaca

SEQ ID NO: 68823 - DNA, 13 bp, Artificial Sequence
  Oligonucleotide for detection of SNP TSC0017927
tgttagtttattt

SEQ ID NO: 68824 - DNA, 13 bp, Artificial Sequence
  Oligonucleotide for detection of SNP TSC0017927
aaataaactaaca

SEQ ID NO: 68825 - DNA, 13 bp, Artificial Sequence
  Oligonucleotide for detection of SNP TSC0017927
aggtgatttaata

SEQ ID NO: 68826 - DNA, 13 bp, Artificial Sequence
  Oligonucleotide for detection of SNP TSC0017927
tattaaatcacct

SEQ ID NO: 68827 - DNA, 13 bp, Artificial Sequence
  Oligonucleotide for detection of SNP TSC0017927
aggtgaattaata

SEQ ID NO: 68828 - DNA, 13 bp, Artificial Sequence
  Oligonucleotide for detection of SNP TSC0017927
tattaattcacct

SEQ ID NO: 68829 - DNA, 13 bp, Artificial Sequence
  Oligonucleotide for detection of SNP TSC0017928
tttgttggaaata

SEQ ID NO: 68830 - DNA, 13 bp, Artificial Sequence
  Oligonucleotide for detection of SNP TSC0017928
tatttccaacaaa

SEQ ID NO: 68831 - DNA, 13 bp, Artificial Sequence
  Oligonucleotide for detection of SNP TSC0017928
tttgtttgaaata

SEQ ID NO: 68832 - DNA, 13 bp, Artificial Sequence
  Oligonucleotide for detection of SNP TSC0017928
tatttcaaacaaa

SEQ ID NO: 68833 - DNA, 13 bp, Artificial Sequence
  Oligonucleotide for detection of SNP TSC0017928
tatttttagtagg

SEQ ID NO: 68834 - DNA, 13 bp, Artificial Sequence
  Oligonucleotide for detection of SNP TSC0017928
cctactaaaaata

SEQ ID NO: 68835 - DNA, 13 bp, Artificial Sequence
  Oligonucleotide for detection of SNP TSC0017929
tgggggtgggggt

SEQ ID NO: 68836 - DNA, 13 bp, Artificial Sequence
  Oligonucleotide for detection of SNP TSC0017929
acccccaccccca

SEQ ID NO: 68837 - DNA, 13 bp, Artificial Sequence
  Oligonucleotide for detection of SNP TSC0017929
tgggggcgggggt

SEQ ID NO: 68838 - DNA, 13 bp, Artificial Sequence
  Oligonucleotide for detection of SNP TSC0017929
acccccgccccca

SEQ ID NO: 68839 - DNA, 13 bp, Artificial Sequence
  Oligonucleotide for detection of SNP TSC0017930
ggttattttattg

SEQ ID NO: 68840 - DNA, 13 bp, Artificial Sequence
  Oligonucleotide for detection of SNP TSC0017930
caataaaataacc

SEQ ID NO: 68841 - DNA, 13 bp, Artificial Sequence
  Oligonucleotide for detection of SNP TSC0017930
ggttatgttattg

SEQ ID NO: 68842 - DNA, 13 bp, Artificial Sequence
  Oligonucleotide for detection of SNP TSC0017930
caataacataacc

SEQ ID NO: 68843 - DNA, 13 bp, Artificial Sequence
  Oligonucleotide for detection of SNP TSC0017930
ggttacgttattg

SEQ ID NO: 68844 - DNA, 13 bp, Artificial Sequence
  Oligonucleotide for detection of SNP TSC0017930
caataacgtaacc

SEQ ID NO: 68845 - DNA, 13 bp, Artificial Sequence
  Oligonucleotide for detection of SNP TSC0017930
tagtgaggtgaty

SEQ ID NO: 68846 - DNA, 13 bp, Artificial Sequence
  Oligonucleotide for detection of SNP TSC0017930
ratcacctcacta

SEQ ID NO: 68847 - DNA, 13 bp, Artificial Sequence
  Oligonucleotide for detection of SNP TSC0017930
tagtgatgtgaty

SEQ ID NO: 68848 - DNA, 13 bp, Artificial Sequence
  Oligonucleotide for detection of SNP TSC0017930
ratcacatcacta

SEQ ID NO: 68849 - DNA, 13 bp, Artificial Sequence
  Oligonucleotide for detection of SNP TSC0017930
tagtgacgtgaty

SEQ ID NO: 68850 - DNA, 13 bp, Artificial Sequence
  Oligonucleotide for detection of SNP TSC0017930
ratcacgtcacta

SEQ ID NO: 68851 - DNA, 13 bp, Artificial Sequence
  Oligonucleotide for detection of SNP TSC0017931
gttatttgtgtty

SEQ ID NO: 68852 - DNA, 13 bp, Artificial Sequence
  Oligonucleotide for detection of SNP TSC0017931
raacacaaataac

SEQ ID NO: 68853 - DNA, 13 bp, Artificial Sequence
  Oligonucleotide for detection of SNP TSC0017931
gttattcgtgtty

SEQ ID NO: 68854 - DNA, 13 bp, Artificial Sequence
  Oligonucleotide for detection of SNP TSC0017931
raacacgaataac

SEQ ID NO: 68855 - DNA, 13 bp, Artificial Sequence
  Oligonucleotide for detection of SNP TSC0017931
gggtatgggtggy

SEQ ID NO: 68856 - DNA, 13 bp, Artificial Sequence
  Oligonucleotide for detection of SNP TSC0017931
rccacccataccc

SEQ ID NO: 68857 - DNA, 13 bp, Artificial Sequence
  Oligonucleotide for detection of SNP TSC0017931
gggtataggtggy

SEQ ID NO: 68858 - DNA, 13 bp, Artificial Sequence
  Oligonucleotide for detection of SNP TSC0017931
rccacctataccc

SEQ ID NO: 68859 - DNA, 13 bp, Artificial Sequence
  Oligonucleotide for detection of SNP TSC0017931
gggtacgggtggy

SEQ ID NO: 68860 - DNA, 13 bp, Artificial Sequence
  Oligonucleotide for detection of SNP TSC0017931
rccacccgtaccc

SEQ ID NO: 68861 - DNA, 13 bp, Artificial Sequence
  Oligonucleotide for detection of SNP TSC0017934
agtatgtgataga

SEQ ID NO: 68862 - DNA, 13 bp, Artificial Sequence
  Oligonucleotide for detection of SNP TSC0017934
tctatcacatact

SEQ ID NO: 68863 - DNA, 13 bp, Artificial Sequence
  Oligonucleotide for detection of SNP TSC0017934
agtatgcgataga

SEQ ID NO: 68864 - DNA, 13 bp, Artificial Sequence
  Oligonucleotide for detection of SNP TSC0017934
tctatcgcatact

SEQ ID NO: 68865 - DNA, 13 bp, Artificial Sequence
  Oligonucleotide for detection of SNP TSC0017934
tttattgtatatt

SEQ ID NO: 68866 - DNA, 13 bp, Artificial Sequence
  Oligonucleotide for detection of SNP TSC0017934
aatatacaataaa

SEQ ID NO: 68867 - DNA, 13 bp, Artificial Sequence
  Oligonucleotide for detection of SNP TSC0017934
tttattatatatt

SEQ ID NO: 68868 - DNA, 13 bp, Artificial Sequence
  Oligonucleotide for detection of SNP TSC0017934
aatatataataaa

SEQ ID NO: 68869 - DNA, 13 bp, Artificial Sequence
  Oligonucleotide for detection of SNP TSC0017934
tttatcgtatatt

SEQ ID NO: 68870 - DNA, 13 bp, Artificial Sequence
  Oligonucleotide for detection of SNP TSC0017934
aatatacgataaa

SEQ ID NO: 68871 - DNA, 13 bp, Artificial Sequence
  Oligonucleotide for detection of SNP TSC0017937
gggtatagtgggg

SEQ ID NO: 68872 - DNA, 13 bp, Artificial Sequence
  Oligonucleotide for detection of SNP TSC0017937
ccccactataccc

SEQ ID NO: 68873 - DNA, 13 bp, Artificial Sequence
  Oligonucleotide for detection of SNP TSC0017937
gggtatggtgggg

SEQ ID NO: 68874 - DNA, 13 bp, Artificial Sequence
  Oligonucleotide for detection of SNP TSC0017937
ccccaccataccc

SEQ ID NO: 68875 - DNA, 13 bp, Artificial Sequence
  Oligonucleotide for detection of SNP TSC0017937
gggtacggtgggg

SEQ ID NO: 68876 - DNA, 13 bp, Artificial Sequence
  Oligonucleotide for detection of SNP TSC0017937
ccccaccgtaccc

SEQ ID NO: 68877 - DNA, 13 bp, Artificial Sequence
  Oligonucleotide for detection of SNP TSC0017937
ttttattgtatty

SEQ ID NO: 68878 - DNA, 13 bp, Artificial Sequence
  Oligonucleotide for detection of SNP TSC0017937
raatacaataaaa

SEQ ID NO: 68879 - DNA, 13 bp, Artificial Sequence
  Oligonucleotide for detection of SNP TSC0017937
ttttatcgtatty

SEQ ID NO: 68880 - DNA, 13 bp, Artificial Sequence
  Oligonucleotide for detection of SNP TSC0017937
raatacgataaaa

SEQ ID NO: 68881 - DNA, 13 bp, Artificial Sequence
  Oligonucleotide for detection of SNP TSC0017940
ttttttaaataaa

SEQ ID NO: 68882 - DNA, 13 bp, Artificial Sequence
  Oligonucleotide for detection of SNP TSC0017940
tttatttaaaaaa

SEQ ID NO: 68883 - DNA, 13 bp, Artificial Sequence
  Oligonucleotide for detection of SNP TSC0017940
tttttttaataaa

SEQ ID NO: 68884 - DNA, 13 bp, Artificial Sequence
  Oligonucleotide for detection of SNP TSC0017940
tttattaaaaaaa

SEQ ID NO: 68885 - DNA, 13 bp, Artificial Sequence
  Oligonucleotide for detection of SNP TSC0017940
tttatttaaaaag

SEQ ID NO: 68886 - DNA, 13 bp, Artificial Sequence
  Oligonucleotide for detection of SNP TSC0017940
ctttttaaataaa

SEQ ID NO: 68887 - DNA, 13 bp, Artificial Sequence
  Oligonucleotide for detection of SNP TSC0017940
tttattaaaaaag

SEQ ID NO: 68888 - DNA, 13 bp, Artificial Sequence
  Oligonucleotide for detection of SNP TSC0017940
cttttttaataaa

SEQ ID NO: 68889 - DNA, 13 bp, Artificial Sequence
  Oligonucleotide for detection of SNP TSC0017941
aagagatgattay

SEQ ID NO: 68890 - DNA, 13 bp, Artificial Sequence
  Oligonucleotide for detection of SNP TSC0017941
rtaatcatctctt

SEQ ID NO: 68891 - DNA, 13 bp, Artificial Sequence
  Oligonucleotide for detection of SNP TSC0017941
aagagacgattay

SEQ ID NO: 68892 - DNA, 13 bp, Artificial Sequence
  Oligonucleotide for detection of SNP TSC0017941
rtaatcgtctctt

SEQ ID NO: 68893 - DNA, 13 bp, Artificial Sequence
  Oligonucleotide for detection of SNP TSC0017941
gtaattgtttttt

SEQ ID NO: 68894 - DNA, 13 bp, Artificial Sequence
  Oligonucleotide for detection of SNP TSC0017941
aaaaaacaattac

SEQ ID NO: 68895 - DNA, 13 bp, Artificial Sequence
  Oligonucleotide for detection of SNP TSC0017941
gtaattatttttt

SEQ ID NO: 68896 - DNA, 13 bp, Artificial Sequence
  Oligonucleotide for detection of SNP TSC0017941
aaaaaataattac

SEQ ID NO: 68897 - DNA, 13 bp, Artificial Sequence
  Oligonucleotide for detection of SNP TSC0017941
gtaatcgtttttt

SEQ ID NO: 68898 - DNA, 13 bp, Artificial Sequence
  Oligonucleotide for detection of SNP TSC0017941
aaaaaacgattac

SEQ ID NO: 68899 - DNA, 13 bp, Artificial Sequence
  Oligonucleotide for detection of SNP TSC0017942
ggggtgtgagtgy

SEQ ID NO: 68900 - DNA, 13 bp, Artificial Sequence
  Oligonucleotide for detection of SNP TSC0017942
rcactcacacccc

SEQ ID NO: 68901 - DNA, 13 bp, Artificial Sequence
  Oligonucleotide for detection of SNP TSC0017942
ggggtgcgagtgy

SEQ ID NO: 68902 - DNA, 13 bp, Artificial Sequence
  Oligonucleotide for detection of SNP TSC0017942
rcactcgcacccc

SEQ ID NO: 68903 - DNA, 13 bp, Artificial Sequence
  Oligonucleotide for detection of SNP TSC0017942
gtatttgtattty

SEQ ID NO: 68904 - DNA, 13 bp, Artificial Sequence
  Oligonucleotide for detection of SNP TSC0017942
raaatacaaatac

SEQ ID NO: 68905 - DNA, 13 bp, Artificial Sequence
  Oligonucleotide for detection of SNP TSC0017942
gtatttatattty

SEQ ID NO: 68906 - DNA, 13 bp, Artificial Sequence
  Oligonucleotide for detection of SNP TSC0017942
raaatataaatac

SEQ ID NO: 68907 - DNA, 13 bp, Artificial Sequence
  Oligonucleotide for detection of SNP TSC0017942
gtattcgtattty

SEQ ID NO: 68908 - DNA, 13 bp, Artificial Sequence
  Oligonucleotide for detection of SNP TSC0017942
raaatacgaatac

SEQ ID NO: 68909 - DNA, 13 bp, Artificial Sequence
  Oligonucleotide for detection of SNP TSC0017946
ataggtatttgtg

SEQ ID NO: 68910 - DNA, 13 bp, Artificial Sequence
  Oligonucleotide for detection of SNP TSC0017946
cacaaatacctat

SEQ ID NO: 68911 - DNA, 13 bp, Artificial Sequence
  Oligonucleotide for detection of SNP TSC0017946
tataagtgtttgt

SEQ ID NO: 68912 - DNA, 13 bp, Artificial Sequence
  Oligonucleotide for detection of SNP TSC0017946
acaaacacttata

SEQ ID NO: 68913 - DNA, 13 bp, Artificial Sequence
  Oligonucleotide for detection of SNP TSC0017946
tataagggtttgt

SEQ ID NO: 68914 - DNA, 13 bp, Artificial Sequence
  Oligonucleotide for detection of SNP TSC0017946
acaaacccttata

SEQ ID NO: 68915 - DNA, 13 bp, Artificial Sequence
  Oligonucleotide for detection of SNP TSC0017947
atttgatgttttt

SEQ ID NO: 68916 - DNA, 13 bp, Artificial Sequence
  Oligonucleotide for detection of SNP TSC0017947
aaaaacatcaaat

SEQ ID NO: 68917 - DNA, 13 bp, Artificial Sequence
  Oligonucleotide for detection of SNP TSC0017947
atttgacgttttt

SEQ ID NO: 68918 - DNA, 13 bp, Artificial Sequence
  Oligonucleotide for detection of SNP TSC0017947
aaaaacgtcaaat

SEQ ID NO: 68919 - DNA, 13 bp, Artificial Sequence
  Oligonucleotide for detection of SNP TSC0017947
aagaatgttaaat

SEQ ID NO: 68920 - DNA, 13 bp, Artificial Sequence
  Oligonucleotide for detection of SNP TSC0017947
atttaacattctt

SEQ ID NO: 68921 - DNA, 13 bp, Artificial Sequence
  Oligonucleotide for detection of SNP TSC0017947
aagaatattaaat

SEQ ID NO: 68922 - DNA, 13 bp, Artificial Sequence
  Oligonucleotide for detection of SNP TSC0017947
atttaatattctt

SEQ ID NO: 68923 - DNA, 13 bp, Artificial Sequence
  Oligonucleotide for detection of SNP TSC0017947
aagaacgttaaat

SEQ ID NO: 68924 - DNA, 13 bp, Artificial Sequence
  Oligonucleotide for detection of SNP TSC0017947
atttaacgttctt

SEQ ID NO: 68925 - DNA, 13 bp, Artificial Sequence
  Oligonucleotide for detection of SNP TSC0017948
ttatataagaaaa

SEQ ID NO: 68926 - DNA, 13 bp, Artificial Sequence
  Oligonucleotide for detection of SNP TSC0017948
ttttcttatataa

SEQ ID NO: 68927 - DNA, 13 bp, Artificial Sequence
  Oligonucleotide for detection of SNP TSC0017948
ttatattagaaaa

SEQ ID NO: 68928 - DNA, 13 bp, Artificial Sequence
  Oligonucleotide for detection of SNP TSC0017948
ttttctaatataa

SEQ ID NO: 68929 - DNA, 13 bp, Artificial Sequence
  Oligonucleotide for detection of SNP TSC0017948
tttttttatataa

SEQ ID NO: 68930 - DNA, 13 bp, Artificial Sequence
  Oligonucleotide for detection of SNP TSC0017948
ttatataaaaaaa

SEQ ID NO: 68931 - DNA, 13 bp, Artificial Sequence
  Oligonucleotide for detection of SNP TSC0017948
ttttttaatataa

SEQ ID NO: 68932 - DNA, 13 bp, Artificial Sequence
  Oligonucleotide for detection of SNP TSC0017948
ttatattaaaaaa

SEQ ID NO: 68933 - DNA, 13 bp, Artificial Sequence
  Oligonucleotide for detection of SNP TSC0017954
gttttggggggtt

SEQ ID NO: 68934 - DNA, 13 bp, Artificial Sequence
  Oligonucleotide for detection of SNP TSC0017954
aaccccccaaaac

SEQ ID NO: 68935 - DNA, 13 bp, Artificial Sequence
  Oligonucleotide for detection of SNP TSC0017954
gttttgtggggtt

SEQ ID NO: 68936 - DNA, 13 bp, Artificial Sequence
  Oligonucleotide for detection of SNP TSC0017954
aaccccacaaaac

SEQ ID NO: 68937 - DNA, 13 bp, Artificial Sequence
  Oligonucleotide for detection of SNP TSC0017954
agttttttagggy

SEQ ID NO: 68938 - DNA, 13 bp, Artificial Sequence
  Oligonucleotide for detection of SNP TSC0017954
rccctaaaaaact

SEQ ID NO: 68939 - DNA, 13 bp, Artificial Sequence
  Oligonucleotide for detection of SNP TSC0017954
agttttatagggy

SEQ ID NO: 68940 - DNA, 13 bp, Artificial Sequence
  Oligonucleotide for detection of SNP TSC0017954
rccctataaaact

SEQ ID NO: 68941 - DNA, 13 bp, Artificial Sequence
  Oligonucleotide for detection of SNP TSC0017955
gggttggggtagg

SEQ ID NO: 68942 - DNA, 13 bp, Artificial Sequence
  Oligonucleotide for detection of SNP TSC0017955
cctaccccaaccc

SEQ ID NO: 68943 - DNA, 13 bp, Artificial Sequence
  Oligonucleotide for detection of SNP TSC0017955
gggttgaggtagg

SEQ ID NO: 68944 - DNA, 13 bp, Artificial Sequence
  Oligonucleotide for detection of SNP TSC0017955
cctacctcaaccc

SEQ ID NO: 68945 - DNA, 13 bp, Artificial Sequence
  Oligonucleotide for detection of SNP TSC0017956
tgatttgtgttta

SEQ ID NO: 68946 - DNA, 13 bp, Artificial Sequence
  Oligonucleotide for detection of SNP TSC0017956
taaacacaaatca

SEQ ID NO: 68947 - DNA, 13 bp, Artificial Sequence
  Oligonucleotide for detection of SNP TSC0017956
tgatttatgttta

SEQ ID NO: 68948 - DNA, 13 bp, Artificial Sequence
  Oligonucleotide for detection of SNP TSC0017956
taaacataaatca

SEQ ID NO: 68949 - DNA, 13 bp, Artificial Sequence
  Oligonucleotide for detection of SNP TSC0017957
aggtgtatatatt

SEQ ID NO: 68950 - DNA, 13 bp, Artificial Sequence
  Oligonucleotide for detection of SNP TSC0017957
aatatatacacct

SEQ ID NO: 68951 - DNA, 13 bp, Artificial Sequence
  Oligonucleotide for detection of SNP TSC0017957
aggtgtttatatt

SEQ ID NO: 68952 - DNA, 13 bp, Artificial Sequence
  Oligonucleotide for detection of SNP TSC0017957
aatataaacacct

SEQ ID NO: 68953 - DNA, 13 bp, Artificial Sequence
  Oligonucleotide for detection of SNP TSC0017957
agtatgtgtattt

SEQ ID NO: 68954 - DNA, 13 bp, Artificial Sequence
  Oligonucleotide for detection of SNP TSC0017957
aaatacacatact

SEQ ID NO: 68955 - DNA, 13 bp, Artificial Sequence
  Oligonucleotide for detection of SNP TSC0017957
agtatgggtattt

SEQ ID NO: 68956 - DNA, 13 bp, Artificial Sequence
  Oligonucleotide for detection of SNP TSC0017957
aaatacccatact

SEQ ID NO: 68957 - DNA, 13 bp, Artificial Sequence
  Oligonucleotide for detection of SNP TSC0017958
aggatttttttta

SEQ ID NO: 68958 - DNA, 13 bp, Artificial Sequence
  Oligonucleotide for detection of SNP TSC0017958
taaaaaaaatcct

SEQ ID NO: 68959 - DNA, 13 bp, Artificial Sequence
  Oligonucleotide for detection of SNP TSC0017958
aggattgttttta

SEQ ID NO: 68960 - DNA, 13 bp, Artificial Sequence
  Oligonucleotide for detection of SNP TSC0017958
taaaaacaatcct

SEQ ID NO: 68961 - DNA, 13 bp, Artificial Sequence
  Oligonucleotide for detection of SNP TSC0017958
aggatcgttttta

SEQ ID NO: 68962 - DNA, 13 bp, Artificial Sequence
  Oligonucleotide for detection of SNP TSC0017958
taaaaacgatcct

SEQ ID NO: 68963 - DNA, 13 bp, Artificial Sequence
  Oligonucleotide for detection of SNP TSC0017958
taaaagggatttt

SEQ ID NO: 68964 - DNA, 13 bp, Artificial Sequence
  Oligonucleotide for detection of SNP TSC0017958
aaaatccctttta

SEQ ID NO: 68965 - DNA, 13 bp, Artificial Sequence
  Oligonucleotide for detection of SNP TSC0017958
taaaagtgatttt

SEQ ID NO: 68966 - DNA, 13 bp, Artificial Sequence
  Oligonucleotide for detection of SNP TSC0017958
aaaatcactttta

SEQ ID NO: 68967 - DNA, 13 bp, Artificial Sequence
  Oligonucleotide for detection of SNP TSC0017958
taaaagcgatttt

SEQ ID NO: 68968 - DNA, 13 bp, Artificial Sequence
  Oligonucleotide for detection of SNP TSC0017958
aaaatcgctttta

SEQ ID NO: 68969 - DNA, 13 bp, Artificial Sequence
  Oligonucleotide for detection of SNP TSC0017960
aagtaggtttttg

SEQ ID NO: 68970 - DNA, 13 bp, Artificial Sequence
  Oligonucleotide for detection of SNP TSC0017960
caaaaacctactt

SEQ ID NO: 68971 - DNA, 13 bp, Artificial Sequence
  Oligonucleotide for detection of SNP TSC0017960
aagtagttttttg

SEQ ID NO: 68972 - DNA, 13 bp, Artificial Sequence
  Oligonucleotide for detection of SNP TSC0017960
caaaaaactactt

SEQ ID NO: 68973 - DNA, 13 bp, Artificial Sequence
  Oligonucleotide for detection of SNP TSC0017960
taggaatttgttt

SEQ ID NO: 68974 - DNA, 13 bp, Artificial Sequence
  Oligonucleotide for detection of SNP TSC0017960
aaacaaattccta

SEQ ID NO: 68975 - DNA, 13 bp, Artificial Sequence
  Oligonucleotide for detection of SNP TSC0017960
taggaaattgttt

SEQ ID NO: 68976 - DNA, 13 bp, Artificial Sequence
  Oligonucleotide for detection of SNP TSC0017960
aaacaatttccta

SEQ ID NO: 68977 - DNA, 13 bp, Artificial Sequence
  Oligonucleotide for detection of SNP TSC0017961
tggaggtgtatag

SEQ ID NO: 68978 - DNA, 13 bp, Artificial Sequence
  Oligonucleotide for detection of SNP TSC0017961
ctatacacctcca

SEQ ID NO: 68979 - DNA, 13 bp, Artificial Sequence
  Oligonucleotide for detection of SNP TSC0017961
tggaggcgtatag

SEQ ID NO: 68980 - DNA, 13 bp, Artificial Sequence
  Oligonucleotide for detection of SNP TSC0017961
ctatacgcctcca

SEQ ID NO: 68981 - DNA, 13 bp, Artificial Sequence
  Oligonucleotide for detection of SNP TSC0017961
ttgtgtgttttta

SEQ ID NO: 68982 - DNA, 13 bp, Artificial Sequence
  Oligonucleotide for detection of SNP TSC0017961
taaaaacacacaa

SEQ ID NO: 68983 - DNA, 13 bp, Artificial Sequence
  Oligonucleotide for detection of SNP TSC0017961
ttgtgtattttta

SEQ ID NO: 68984 - DNA, 13 bp, Artificial Sequence
  Oligonucleotide for detection of SNP TSC0017961
taaaaatacacaa

SEQ ID NO: 68985 - DNA, 13 bp, Artificial Sequence
  Oligonucleotide for detection of SNP TSC0017961
ttgtgcgttttta

SEQ ID NO: 68986 - DNA, 13 bp, Artificial Sequence
  Oligonucleotide for detection of SNP TSC0017961
taaaaacgcacaa

SEQ ID NO: 68987 - DNA, 13 bp, Artificial Sequence
  Oligonucleotide for detection of SNP TSC0017964
taaaaaaatttta

SEQ ID NO: 68988 - DNA, 13 bp, Artificial Sequence
  Oligonucleotide for detection of SNP TSC0017964
taaaattttttta

SEQ ID NO: 68989 - DNA, 13 bp, Artificial Sequence
  Oligonucleotide for detection of SNP TSC0017964
tgagattttttta

SEQ ID NO: 68990 - DNA, 13 bp, Artificial Sequence
  Oligonucleotide for detection of SNP TSC0017964
taaaaaaatctca

SEQ ID NO: 68991 - DNA, 13 bp, Artificial Sequence
  Oligonucleotide for detection of SNP TSC0017964
tgagatattttta

SEQ ID NO: 68992 - DNA, 13 bp, Artificial Sequence
  Oligonucleotide for detection of SNP TSC0017964
taaaaatatctca

SEQ ID NO: 68993 - DNA, 13 bp, Artificial Sequence
  Oligonucleotide for detection of SNP TSC0017966
aaattgggagatg

SEQ ID NO: 68994 - DNA, 13 bp, Artificial Sequence
  Oligonucleotide for detection of SNP TSC0017966
catctcccaattt

SEQ ID NO: 68995 - DNA, 13 bp, Artificial Sequence
  Oligonucleotide for detection of SNP TSC0017966
aaattgtgagatg

SEQ ID NO: 68996 - DNA, 13 bp, Artificial Sequence
  Oligonucleotide for detection of SNP TSC0017966
catctcacaattt

SEQ ID NO: 68997 - DNA, 13 bp, Artificial Sequence
  Oligonucleotide for detection of SNP TSC0017966
tattttatagttt

SEQ ID NO: 68998 - DNA, 13 bp, Artificial Sequence
  Oligonucleotide for detection of SNP TSC0017966
aaactataaaata

SEQ ID NO: 68999 - DNA, 13 bp, Artificial Sequence
  Oligonucleotide for detection of SNP TSC0017967
ggtggaattggag

SEQ ID NO: 69000 - DNA, 13 bp, Artificial Sequence
  Oligonucleotide for detection of SNP TSC0017967
ctccaattccacc

SEQ ID NO: 69001 - DNA, 13 bp, Artificial Sequence
  Oligonucleotide for detection of SNP TSC0017967
ggtggagttggag

SEQ ID NO: 69002 - DNA, 13 bp, Artificial Sequence
  Oligonucleotide for detection of SNP TSC0017967
ctccaactccacc

SEQ ID NO: 69003 - DNA, 13 bp, Artificial Sequence
  Oligonucleotide for detection of SNP TSC0017968
gttagtatgggty

SEQ ID NO: 69004 - DNA, 13 bp, Artificial Sequence
  Oligonucleotide for detection of SNP TSC0017968
racccatactaac

SEQ ID NO: 69005 - DNA, 13 bp, Artificial Sequence
  Oligonucleotide for detection of SNP TSC0017968
gttagtgtgggty

SEQ ID NO: 69006 - DNA, 13 bp, Artificial Sequence
  Oligonucleotide for detection of SNP TSC0017968
racccacactaac

SEQ ID NO: 69007 - DNA, 13 bp, Artificial Sequence
  Oligonucleotide for detection of SNP TSC0017968
gttagcgtgggty

SEQ ID NO: 69008 - DNA, 13 bp, Artificial Sequence
  Oligonucleotide for detection of SNP TSC0017968
racccacgctaac

SEQ ID NO: 69009 - DNA, 13 bp, Artificial Sequence
  Oligonucleotide for detection of SNP TSC0017968
ggtttatgttggy

SEQ ID NO: 69010 - DNA, 13 bp, Artificial Sequence
  Oligonucleotide for detection of SNP TSC0017968
rccaacataaacc

SEQ ID NO: 69011 - DNA, 13 bp, Artificial Sequence
  Oligonucleotide for detection of SNP TSC0017968
ggtttacgttggy

SEQ ID NO: 69012 - DNA, 13 bp, Artificial Sequence
  Oligonucleotide for detection of SNP TSC0017968
rccaacgtaaacc

SEQ ID NO: 69013 - DNA, 13 bp, Artificial Sequence
  Oligonucleotide for detection of SNP TSC0017970
tattttagtaaty

SEQ ID NO: 69014 - DNA, 13 bp, Artificial Sequence
  Oligonucleotide for detection of SNP TSC0017970
rattactaaaata

SEQ ID NO: 69015 - DNA, 13 bp, Artificial Sequence
  Oligonucleotide for detection of SNP TSC0017970
tatttttgtaaty

SEQ ID NO: 69016 - DNA, 13 bp, Artificial Sequence
  Oligonucleotide for detection of SNP TSC0017970
rattacaaaaata

SEQ ID NO: 69017 - DNA, 13 bp, Artificial Sequence
  Oligonucleotide for detection of SNP TSC0017970
ggttgttgagata

SEQ ID NO: 69018 - DNA, 13 bp, Artificial Sequence
  Oligonucleotide for detection of SNP TSC0017970
tatctcaacaacc

SEQ ID NO: 69019 - DNA, 13 bp, Artificial Sequence
  Oligonucleotide for detection of SNP TSC0017970
ggttgtagagata

SEQ ID NO: 69020 - DNA, 13 bp, Artificial Sequence
  Oligonucleotide for detection of SNP TSC0017970
tatctctacaacc

SEQ ID NO: 69021 - DNA, 13 bp, Artificial Sequence
  Oligonucleotide for detection of SNP TSC0017971
gtgttatggtaag

SEQ ID NO: 69022 - DNA, 13 bp, Artificial Sequence
  Oligonucleotide for detection of SNP TSC0017971
cttaccataacac

SEQ ID NO: 69023 - DNA, 13 bp, Artificial Sequence
  Oligonucleotide for detection of SNP TSC0017971
gcgttatggtaag

SEQ ID NO: 69024 - DNA, 13 bp, Artificial Sequence
  Oligonucleotide for detection of SNP TSC0017971
cttaccataacgc

SEQ ID NO: 69025 - DNA, 13 bp, Artificial Sequence
  Oligonucleotide for detection of SNP TSC0017971
gtgttacggtaag

SEQ ID NO: 69026 - DNA, 13 bp, Artificial Sequence
  Oligonucleotide for detection of SNP TSC0017971
cttaccgtaacac

SEQ ID NO: 69027 - DNA, 13 bp, Artificial Sequence
  Oligonucleotide for detection of SNP TSC0017971
gcgttacggtaag

SEQ ID NO: 69028 - DNA, 13 bp, Artificial Sequence
  Oligonucleotide for detection of SNP TSC0017971
cttaccgtaacgc

SEQ ID NO: 69029 - DNA, 13 bp, Artificial Sequence
  Oligonucleotide for detection of SNP TSC0017971
tttgttgtggtgy

SEQ ID NO: 69030 - DNA, 13 bp, Artificial Sequence
  Oligonucleotide for detection of SNP TSC0017971
rcaccacaacaaa

SEQ ID NO: 69031 - DNA, 13 bp, Artificial Sequence
  Oligonucleotide for detection of SNP TSC0017971
tttgttatggtgy

SEQ ID NO: 69032 - DNA, 13 bp, Artificial Sequence
  Oligonucleotide for detection of SNP TSC0017971
rcaccataacaaa

SEQ ID NO: 69033 - DNA, 13 bp, Artificial Sequence
  Oligonucleotide for detection of SNP TSC0017971
tttgtcgtggtgy

SEQ ID NO: 69034 - DNA, 13 bp, Artificial Sequence
  Oligonucleotide for detection of SNP TSC0017971
rcaccacgacaaa

SEQ ID NO: 69035 - DNA, 13 bp, Artificial Sequence
  Oligonucleotide for detection of SNP TSC0017971
tttgttatggcgy

SEQ ID NO: 69036 - DNA, 13 bp, Artificial Sequence
  Oligonucleotide for detection of SNP TSC0017971
rcgccataacaaa

SEQ ID NO: 69037 - DNA, 13 bp, Artificial Sequence
  Oligonucleotide for detection of SNP TSC0017971
tttgttgtggcgy

SEQ ID NO: 69038 - DNA, 13 bp, Artificial Sequence
  Oligonucleotide for detection of SNP TSC0017971
rcgccacaacaaa

SEQ ID NO: 69039 - DNA, 13 bp, Artificial Sequence
  Oligonucleotide for detection of SNP TSC0017971
tttgtcgtggcgy

SEQ ID NO: 69040 - DNA, 13 bp, Artificial Sequence
  Oligonucleotide for detection of SNP TSC0017971
rcgccacgacaaa

SEQ ID NO: 69041 - DNA, 13 bp, Artificial Sequence
  Oligonucleotide for detection of SNP TSC0017973
tttaataattaaa

SEQ ID NO: 69042 - DNA, 13 bp, Artificial Sequence
  Oligonucleotide for detection of SNP TSC0017973
tttaattattaaa

SEQ ID NO: 69043 - DNA, 13 bp, Artificial Sequence
  Oligonucleotide for detection of SNP TSC0017973
tttagttgttaga

SEQ ID NO: 69044 - DNA, 13 bp, Artificial Sequence
  Oligonucleotide for detection of SNP TSC0017973
tctaacaactaaa

SEQ ID NO: 69045 - DNA, 13 bp, Artificial Sequence
  Oligonucleotide for detection of SNP TSC0017973
tttagtagttaga

SEQ ID NO: 69046 - DNA, 13 bp, Artificial Sequence
  Oligonucleotide for detection of SNP TSC0017973
tctaactactaaa

SEQ ID NO: 69047 - DNA, 13 bp, Artificial Sequence
  Oligonucleotide for detection of SNP TSC0017974
tagatgaaaatgy

SEQ ID NO: 69048 - DNA, 13 bp, Artificial Sequence
  Oligonucleotide for detection of SNP TSC0017974
rcattttcatcta

SEQ ID NO: 69049 - DNA, 13 bp, Artificial Sequence
  Oligonucleotide for detection of SNP TSC0017974
tagatgtaaatgy

SEQ ID NO: 69050 - DNA, 13 bp, Artificial Sequence
  Oligonucleotide for detection of SNP TSC0017974
rcatttacatcta

SEQ ID NO: 69051 - DNA, 13 bp, Artificial Sequence
  Oligonucleotide for detection of SNP TSC0017974
gtatttttattta

SEQ ID NO: 69052 - DNA, 13 bp, Artificial Sequence
  Oligonucleotide for detection of SNP TSC0017974
taaataaaaatac

SEQ ID NO: 69053 - DNA, 13 bp, Artificial Sequence
  Oligonucleotide for detection of SNP TSC0017974
gtatttgtattta

SEQ ID NO: 69054 - DNA, 13 bp, Artificial Sequence
  Oligonucleotide for detection of SNP TSC0017974
taaatacaaatac

SEQ ID NO: 69055 - DNA, 13 bp, Artificial Sequence
  Oligonucleotide for detection of SNP TSC0017975
aaaaataaaattt

SEQ ID NO: 69056 - DNA, 13 bp, Artificial Sequence
  Oligonucleotide for detection of SNP TSC0017975
aaattttattttt

SEQ ID NO: 69057 - DNA, 13 bp, Artificial Sequence
  Oligonucleotide for detection of SNP TSC0017975
aaaaattaaattt

SEQ ID NO: 69058 - DNA, 13 bp, Artificial Sequence
  Oligonucleotide for detection of SNP TSC0017975
aaatttaattttt

SEQ ID NO: 69059 - DNA, 13 bp, Artificial Sequence
  Oligonucleotide for detection of SNP TSC0017976
atgattattagat

SEQ ID NO: 69060 - DNA, 13 bp, Artificial Sequence
  Oligonucleotide for detection of SNP TSC0017976
atctaataatcat

SEQ ID NO: 69061 - DNA, 13 bp, Artificial Sequence
  Oligonucleotide for detection of SNP TSC0017976
atgattgttagat

SEQ ID NO: 69062 - DNA, 13 bp, Artificial Sequence
  Oligonucleotide for detection of SNP TSC0017976
atctaacaatcat

SEQ ID NO: 69063 - DNA, 13 bp, Artificial Sequence
  Oligonucleotide for detection of SNP TSC0017976
atgatcgttagat

SEQ ID NO: 69064 - DNA, 13 bp, Artificial Sequence
  Oligonucleotide for detection of SNP TSC0017976
atctaacgatcat

SEQ ID NO: 69065 - DNA, 13 bp, Artificial Sequence
  Oligonucleotide for detection of SNP TSC0017976
atttaatgattat

SEQ ID NO: 69066 - DNA, 13 bp, Artificial Sequence
  Oligonucleotide for detection of SNP TSC0017976
ataatcattaaat

SEQ ID NO: 69067 - DNA, 13 bp, Artificial Sequence
  Oligonucleotide for detection of SNP TSC0017976
atttaacgattat

SEQ ID NO: 69068 - DNA, 13 bp, Artificial Sequence
  Oligonucleotide for detection of SNP TSC0017976
ataatcgttaaat

SEQ ID NO: 69069 - DNA, 13 bp, Artificial Sequence
  Oligonucleotide for detection of SNP TSC0017977
ttaaagggttggg

SEQ ID NO: 69070 - DNA, 13 bp, Artificial Sequence
  Oligonucleotide for detection of SNP TSC0017977
cccaaccctttaa

SEQ ID NO: 69071 - DNA, 13 bp, Artificial Sequence
  Oligonucleotide for detection of SNP TSC0017977
ttaaagtgttggg

SEQ ID NO: 69072 - DNA, 13 bp, Artificial Sequence
  Oligonucleotide for detection of SNP TSC0017977
cccaacactttaa

SEQ ID NO: 69073 - DNA, 13 bp, Artificial Sequence
  Oligonucleotide for detection of SNP TSC0017977
tttagttttttgg

SEQ ID NO: 69074 - DNA, 13 bp, Artificial Sequence
  Oligonucleotide for detection of SNP TSC0017977
ccaaaaaactaaa

SEQ ID NO: 69075 - DNA, 13 bp, Artificial Sequence
  Oligonucleotide for detection of SNP TSC0017980
ttttgagagtggy

SEQ ID NO: 69076 - DNA, 13 bp, Artificial Sequence
  Oligonucleotide for detection of SNP TSC0017980
rccactctcaaaa

SEQ ID NO: 69077 - DNA, 13 bp, Artificial Sequence
  Oligonucleotide for detection of SNP TSC0017980
ttttgaaagtggy

SEQ ID NO: 69078 - DNA, 13 bp, Artificial Sequence
  Oligonucleotide for detection of SNP TSC0017980
rccactttcaaaa

SEQ ID NO: 69079 - DNA, 13 bp, Artificial Sequence
  Oligonucleotide for detection of SNP TSC0017980
ttttgagagcggy

SEQ ID NO: 69080 - DNA, 13 bp, Artificial Sequence
  Oligonucleotide for detection of SNP TSC0017980
rccgctctcaaaa

SEQ ID NO: 69081 - DNA, 13 bp, Artificial Sequence
  Oligonucleotide for detection of SNP TSC0017980
ttttgaaagcggy

SEQ ID NO: 69082 - DNA, 13 bp, Artificial Sequence
  Oligonucleotide for detection of SNP TSC0017980
rccgctttcaaaa

SEQ ID NO: 69083 - DNA, 13 bp, Artificial Sequence
  Oligonucleotide for detection of SNP TSC0017981
ggtatagtttata

SEQ ID NO: 69084 - DNA, 13 bp, Artificial Sequence
  Oligonucleotide for detection of SNP TSC0017981
tataaactatacc

SEQ ID NO: 69085 - DNA, 13 bp, Artificial Sequence
  Oligonucleotide for detection of SNP TSC0017981
ggtataatttata

SEQ ID NO: 69086 - DNA, 13 bp, Artificial Sequence
  Oligonucleotide for detection of SNP TSC0017981
tataaattatacc

SEQ ID NO: 69087 - DNA, 13 bp, Artificial Sequence
  Oligonucleotide for detection of SNP TSC0017982
ttgttggtttaaa

SEQ ID NO: 69088 - DNA, 13 bp, Artificial Sequence
  Oligonucleotide for detection of SNP TSC0017982
tttaaaccaacaa

SEQ ID NO: 69089 - DNA, 13 bp, Artificial Sequence
  Oligonucleotide for detection of SNP TSC0017982
ttgttgttttaaa

SEQ ID NO: 69090 - DNA, 13 bp, Artificial Sequence
  Oligonucleotide for detection of SNP TSC0017982
tttaaaacaacaa

SEQ ID NO: 69091 - DNA, 13 bp, Artificial Sequence
  Oligonucleotide for detection of SNP TSC0017982
tttaaattagtaa

SEQ ID NO: 69092 - DNA, 13 bp, Artificial Sequence
  Oligonucleotide for detection of SNP TSC0017982
ttactaatttaaa

SEQ ID NO: 69093 - DNA, 13 bp, Artificial Sequence
  Oligonucleotide for detection of SNP TSC0017982
tttaaaatagtaa

SEQ ID NO: 69094 - DNA, 13 bp, Artificial Sequence
  Oligonucleotide for detection of SNP TSC0017982
ttactattttaaa

SEQ ID NO: 69095 - DNA, 13 bp, Artificial Sequence
  Oligonucleotide for detection of SNP TSC0017986
ttggaaatttagg

SEQ ID NO: 69096 - DNA, 13 bp, Artificial Sequence
  Oligonucleotide for detection of SNP TSC0017986
cctaaatttccaa

SEQ ID NO: 69097 - DNA, 13 bp, Artificial Sequence
  Oligonucleotide for detection of SNP TSC0017986
ttggaagtttagg

SEQ ID NO: 69098 - DNA, 13 bp, Artificial Sequence
  Oligonucleotide for detection of SNP TSC0017986
cctaaacttccaa

SEQ ID NO: 69099 - DNA, 13 bp, Artificial Sequence
  Oligonucleotide for detection of SNP TSC0017986
tcggaaatttagg

SEQ ID NO: 69100 - DNA, 13 bp, Artificial Sequence
  Oligonucleotide for detection of SNP TSC0017986
cctaaatttccga

SEQ ID NO: 69101 - DNA, 13 bp, Artificial Sequence
  Oligonucleotide for detection of SNP TSC0017986
tcggaagtttagg

SEQ ID NO: 69102 - DNA, 13 bp, Artificial Sequence
  Oligonucleotide for detection of SNP TSC0017986
cctaaacttccga

SEQ ID NO: 69103 - DNA, 13 bp, Artificial Sequence
  Oligonucleotide for detection of SNP TSC0017990
tttttttgaaatt

SEQ ID NO: 69104 - DNA, 13 bp, Artificial Sequence
  Oligonucleotide for detection of SNP TSC0017990
aatttcaaaaaaa

SEQ ID NO: 69105 - DNA, 13 bp, Artificial Sequence
  Oligonucleotide for detection of SNP TSC0017990
ttttttcgaaatt

SEQ ID NO: 69106 - DNA, 13 bp, Artificial Sequence
  Oligonucleotide for detection of SNP TSC0017990
aatttcgaaaaaa

SEQ ID NO: 69107 - DNA, 13 bp, Artificial Sequence
  Oligonucleotide for detection of SNP TSC0017990
aattttggaaaag

SEQ ID NO: 69108 - DNA, 13 bp, Artificial Sequence
  Oligonucleotide for detection of SNP TSC0017990
cttttccaaaatt

SEQ ID NO: 69109 - DNA, 13 bp, Artificial Sequence
  Oligonucleotide for detection of SNP TSC0017990
aattttagaaaag

SEQ ID NO: 69110 - DNA, 13 bp, Artificial Sequence
  Oligonucleotide for detection of SNP TSC0017990
cttttctaaaatt

SEQ ID NO: 69111 - DNA, 13 bp, Artificial Sequence
  Oligonucleotide for detection of SNP TSC0017990
aatttcggaaaag

SEQ ID NO: 69112 - DNA, 13 bp, Artificial Sequence
  Oligonucleotide for detection of SNP TSC0017990
cttttccgaaatt

SEQ ID NO: 69113 - DNA, 13 bp, Artificial Sequence
  Oligonucleotide for detection of SNP TSC0017993
taggtaagttaga

SEQ ID NO: 69114 - DNA, 13 bp, Artificial Sequence
  Oligonucleotide for detection of SNP TSC0017993
tctaacttaccta

SEQ ID NO: 69115 - DNA, 13 bp, Artificial Sequence
  Oligonucleotide for detection of SNP TSC0017993
taggtatgttaga

SEQ ID NO: 69116 - DNA, 13 bp, Artificial Sequence
  Oligonucleotide for detection of SNP TSC0017993
tctaacataccta

SEQ ID NO: 69117 - DNA, 13 bp, Artificial Sequence
  Oligonucleotide for detection of SNP TSC0017993
taggtacgttaga

SEQ ID NO: 69118 - DNA, 13 bp, Artificial Sequence
  Oligonucleotide for detection of SNP TSC0017993
tctaacgtaccta

SEQ ID NO: 69119 - DNA, 13 bp, Artificial Sequence
  Oligonucleotide for detection of SNP TSC0017993
tttaatttgtttg

SEQ ID NO: 69120 - DNA, 13 bp, Artificial Sequence
  Oligonucleotide for detection of SNP TSC0017993
caaacaaattaaa

SEQ ID NO: 69121 - DNA, 13 bp, Artificial Sequence
  Oligonucleotide for detection of SNP TSC0017993
tttaatgtgtttg

SEQ ID NO: 69122 - DNA, 13 bp, Artificial Sequence
  Oligonucleotide for detection of SNP TSC0017993
caaacacattaaa

SEQ ID NO: 69123 - DNA, 13 bp, Artificial Sequence
  Oligonucleotide for detection of SNP TSC0017993
tttaacgtgtttg

SEQ ID NO: 69124 - DNA, 13 bp, Artificial Sequence
  Oligonucleotide for detection of SNP TSC0017993
caaacacgttaaa

SEQ ID NO: 69125 - DNA, 13 bp, Artificial Sequence
  Oligonucleotide for detection of SNP TSC0017994
tattttaagtatg

SEQ ID NO: 69126 - DNA, 13 bp, Artificial Sequence
  Oligonucleotide for detection of SNP TSC0017994
catacttaaaata

SEQ ID NO: 69127 - DNA, 13 bp, Artificial Sequence
  Oligonucleotide for detection of SNP TSC0017994
tattttgagtatg

SEQ ID NO: 69128 - DNA, 13 bp, Artificial Sequence
  Oligonucleotide for detection of SNP TSC0017994
catactcaaaata

SEQ ID NO: 69129 - DNA, 13 bp, Artificial Sequence
  Oligonucleotide for detection of SNP TSC0017994
tattttaagtacg

SEQ ID NO: 69130 - DNA, 13 bp, Artificial Sequence
  Oligonucleotide for detection of SNP TSC0017994
cgtacttaaaata

SEQ ID NO: 69131 - DNA, 13 bp, Artificial Sequence
  Oligonucleotide for detection of SNP TSC0017994
tatttcgagtatg

SEQ ID NO: 69132 - DNA, 13 bp, Artificial Sequence
  Oligonucleotide for detection of SNP TSC0017994
catactcgaaata

SEQ ID NO: 69133 - DNA, 13 bp, Artificial Sequence
  Oligonucleotide for detection of SNP TSC0017994
tattttgagtacg

SEQ ID NO: 69134 - DNA, 13 bp, Artificial Sequence
  Oligonucleotide for detection of SNP TSC0017994
cgtactcaaaata

SEQ ID NO: 69135 - DNA, 13 bp, Artificial Sequence
  Oligonucleotide for detection of SNP TSC0017994
tatttcgagtacg

SEQ ID NO: 69136 - DNA, 13 bp, Artificial Sequence
  Oligonucleotide for detection of SNP TSC0017994
cgtactcgaaata

SEQ ID NO: 69137 - DNA, 13 bp, Artificial Sequence
  Oligonucleotide for detection of SNP TSC0017994
tgtatttggagtg

SEQ ID NO: 69138 - DNA, 13 bp, Artificial Sequence
  Oligonucleotide for detection of SNP TSC0017994
cactccaaataca

SEQ ID NO: 69139 - DNA, 13 bp, Artificial Sequence
  Oligonucleotide for detection of SNP TSC0017994
cgtatttggagtg

SEQ ID NO: 69140 - DNA, 13 bp, Artificial Sequence
  Oligonucleotide for detection of SNP TSC0017994
cactccaaatacg

SEQ ID NO: 69141 - DNA, 13 bp, Artificial Sequence
  Oligonucleotide for detection of SNP TSC0017994
tgtattcggagtg

SEQ ID NO: 69142 - DNA, 13 bp, Artificial Sequence
  Oligonucleotide for detection of SNP TSC0017994
cactccgaataca

SEQ ID NO: 69143 - DNA, 13 bp, Artificial Sequence
  Oligonucleotide for detection of SNP TSC0017994
cgtattcggagtg

SEQ ID NO: 69144 - DNA, 13 bp, Artificial Sequence
  Oligonucleotide for detection of SNP TSC0017994
cactccgaatacg

SEQ ID NO: 69145 - DNA, 13 bp, Artificial Sequence
  Oligonucleotide for detection of SNP TSC0017996
taggtgtgtggta

SEQ ID NO: 69146 - DNA, 13 bp, Artificial Sequence
  Oligonucleotide for detection of SNP TSC0017996
taccacacaccta

SEQ ID NO: 69147 - DNA, 13 bp, Artificial Sequence
  Oligonucleotide for detection of SNP TSC0017996
taggtgcgtggta

SEQ ID NO: 69148 - DNA, 13 bp, Artificial Sequence
  Oligonucleotide for detection of SNP TSC0017996
taccacgcaccta

SEQ ID NO: 69149 - DNA, 13 bp, Artificial Sequence
  Oligonucleotide for detection of SNP TSC0017996
tgttatgtatttg

SEQ ID NO: 69150 - DNA, 13 bp, Artificial Sequence
  Oligonucleotide for detection of SNP TSC0017996
caaatacataaca

SEQ ID NO: 69151 - DNA, 13 bp, Artificial Sequence
  Oligonucleotide for detection of SNP TSC0017996
tgttatatatttg

SEQ ID NO: 69152 - DNA, 13 bp, Artificial Sequence
  Oligonucleotide for detection of SNP TSC0017996
caaatatataaca

SEQ ID NO: 69153 - DNA, 13 bp, Artificial Sequence
  Oligonucleotide for detection of SNP TSC0017996
tgttacgtatttg

SEQ ID NO: 69154 - DNA, 13 bp, Artificial Sequence
  Oligonucleotide for detection of SNP TSC0017996
caaatacgtaaca

SEQ ID NO: 69155 - DNA, 13 bp, Artificial Sequence
  Oligonucleotide for detection of SNP TSC0018001
aggttttgaaata

SEQ ID NO: 69156 - DNA, 13 bp, Artificial Sequence
  Oligonucleotide for detection of SNP TSC0018001
tatttcaaaacct

SEQ ID NO: 69157 - DNA, 13 bp, Artificial Sequence
  Oligonucleotide for detection of SNP TSC0018001
aggtttcgaaata

SEQ ID NO: 69158 - DNA, 13 bp, Artificial Sequence
  Oligonucleotide for detection of SNP TSC0018001
tatttcgaaacct

SEQ ID NO: 69159 - DNA, 13 bp, Artificial Sequence
  Oligonucleotide for detection of SNP TSC0018001
tgttttgaaattt

SEQ ID NO: 69160 - DNA, 13 bp, Artificial Sequence
  Oligonucleotide for detection of SNP TSC0018001
aaatttcaaaaca

SEQ ID NO: 69161 - DNA, 13 bp, Artificial Sequence
  Oligonucleotide for detection of SNP TSC0018001
tgttttaaaattt

SEQ ID NO: 69162 - DNA, 13 bp, Artificial Sequence
  Oligonucleotide for detection of SNP TSC0018001
aaattttaaaaca

SEQ ID NO: 69163 - DNA, 13 bp, Artificial Sequence
  Oligonucleotide for detection of SNP TSC0018001
tgtttcgaaattt

SEQ ID NO: 69164 - DNA, 13 bp, Artificial Sequence
  Oligonucleotide for detection of SNP TSC0018001
aaatttcgaaaca

SEQ ID NO: 69165 - DNA, 13 bp, Artificial Sequence
  Oligonucleotide for detection of SNP TSC0018002
tagttgtgagggg

SEQ ID NO: 69166 - DNA, 13 bp, Artificial Sequence
  Oligonucleotide for detection of SNP TSC0018002
cccctcacaacta

SEQ ID NO: 69167 - DNA, 13 bp, Artificial Sequence
  Oligonucleotide for detection of SNP TSC0018002
tagttgcgagggg

SEQ ID NO: 69168 - DNA, 13 bp, Artificial Sequence
  Oligonucleotide for detection of SNP TSC0018002
cccctcgcaacta

SEQ ID NO: 69169 - DNA, 13 bp, Artificial Sequence
  Oligonucleotide for detection of SNP TSC0018002
ttttttgtagtta

SEQ ID NO: 69170 - DNA, 13 bp, Artificial Sequence
  Oligonucleotide for detection of SNP TSC0018002
taactacaaaaaa

SEQ ID NO: 69171 - DNA, 13 bp, Artificial Sequence
  Oligonucleotide for detection of SNP TSC0018002
ttttttatagtta

SEQ ID NO: 69172 - DNA, 13 bp, Artificial Sequence
  Oligonucleotide for detection of SNP TSC0018002
taactataaaaaa

SEQ ID NO: 69173 - DNA, 13 bp, Artificial Sequence
  Oligonucleotide for detection of SNP TSC0018002
tttttcgtagtta

SEQ ID NO: 69174 - DNA, 13 bp, Artificial Sequence
  Oligonucleotide for detection of SNP TSC0018002
taactacgaaaaa

SEQ ID NO: 69175 - DNA, 13 bp, Artificial Sequence
  Oligonucleotide for detection of SNP TSC0018003
gtttaaatattaa

SEQ ID NO: 69176 - DNA, 13 bp, Artificial Sequence
  Oligonucleotide for detection of SNP TSC0018003
ttaatatttaaac

SEQ ID NO: 69177 - DNA, 13 bp, Artificial Sequence
  Oligonucleotide for detection of SNP TSC0018003
gtttaattattaa

SEQ ID NO: 69178 - DNA, 13 bp, Artificial Sequence
  Oligonucleotide for detection of SNP TSC0018003
ttaataattaaac

SEQ ID NO: 69179 - DNA, 13 bp, Artificial Sequence
  Oligonucleotide for detection of SNP TSC0018003
ttagtgtttaaay

SEQ ID NO: 69180 - DNA, 13 bp, Artificial Sequence
  Oligonucleotide for detection of SNP TSC0018003
rtttaaacactaa

SEQ ID NO: 69181 - DNA, 13 bp, Artificial Sequence
  Oligonucleotide for detection of SNP TSC0018003
ttagtggttaaay

SEQ ID NO: 69182 - DNA, 13 bp, Artificial Sequence
  Oligonucleotide for detection of SNP TSC0018003
rtttaaccactaa

SEQ ID NO: 69183 - DNA, 13 bp, Artificial Sequence
  Oligonucleotide for detection of SNP TSC0018004
attataaattata

SEQ ID NO: 69184 - DNA, 13 bp, Artificial Sequence
  Oligonucleotide for detection of SNP TSC0018004
tataatttataat

SEQ ID NO: 69185 - DNA, 13 bp, Artificial Sequence
  Oligonucleotide for detection of SNP TSC0018004
attatatattata

SEQ ID NO: 69186 - DNA, 13 bp, Artificial Sequence
  Oligonucleotide for detection of SNP TSC0018004
tataatatataat

SEQ ID NO: 69187 - DNA, 13 bp, Artificial Sequence
  Oligonucleotide for detection of SNP TSC0018004
tgtaatttataat

SEQ ID NO: 69188 - DNA, 13 bp, Artificial Sequence
  Oligonucleotide for detection of SNP TSC0018004
attataaattaca

SEQ ID NO: 69189 - DNA, 13 bp, Artificial Sequence
  Oligonucleotide for detection of SNP TSC0018004
tgtaatgtataat

SEQ ID NO: 69190 - DNA, 13 bp, Artificial Sequence
  Oligonucleotide for detection of SNP TSC0018004
attatacattaca

SEQ ID NO: 69191 - DNA, 13 bp, Artificial Sequence
  Oligonucleotide for detection of SNP TSC0018005
tattttaatagag

SEQ ID NO: 69192 - DNA, 13 bp, Artificial Sequence
  Oligonucleotide for detection of SNP TSC0018005
ctctattaaaata

SEQ ID NO: 69193 - DNA, 13 bp, Artificial Sequence
  Oligonucleotide for detection of SNP TSC0018005
tatttttatagag

SEQ ID NO: 69194 - DNA, 13 bp, Artificial Sequence
  Oligonucleotide for detection of SNP TSC0018005
ctctataaaaata

SEQ ID NO: 69195 - DNA, 13 bp, Artificial Sequence
  Oligonucleotide for detection of SNP TSC0018005
ttttattagaata

SEQ ID NO: 69196 - DNA, 13 bp, Artificial Sequence
  Oligonucleotide for detection of SNP TSC0018005
tattctaataaaa

SEQ ID NO: 69197 - DNA, 13 bp, Artificial Sequence
  Oligonucleotide for detection of SNP TSC0018005
ttttatgagaata

SEQ ID NO: 69198 - DNA, 13 bp, Artificial Sequence
  Oligonucleotide for detection of SNP TSC0018005
tattctcataaaa

SEQ ID NO: 69199 - DNA, 13 bp, Artificial Sequence
  Oligonucleotide for detection of SNP TSC0018006
gggttgatttatt

SEQ ID NO: 69200 - DNA, 13 bp, Artificial Sequence
  Oligonucleotide for detection of SNP TSC0018006
aataaatcaaccc

SEQ ID NO: 69201 - DNA, 13 bp, Artificial Sequence
  Oligonucleotide for detection of SNP TSC0018006
gggttgttttatt

SEQ ID NO: 69202 - DNA, 13 bp, Artificial Sequence
  Oligonucleotide for detection of SNP TSC0018006
aataaaacaaccc

SEQ ID NO: 69203 - DNA, 13 bp, Artificial Sequence
  Oligonucleotide for detection of SNP TSC0018006
agtgggttagtty

SEQ ID NO: 69204 - DNA, 13 bp, Artificial Sequence
  Oligonucleotide for detection of SNP TSC0018006
raactaacccact

SEQ ID NO: 69205 - DNA, 13 bp, Artificial Sequence
  Oligonucleotide for detection of SNP TSC0018006
agtggggtagtty

SEQ ID NO: 69206 - DNA, 13 bp, Artificial Sequence
  Oligonucleotide for detection of SNP TSC0018006
raactaccccact

SEQ ID NO: 69207 - DNA, 13 bp, Artificial Sequence
  Oligonucleotide for detection of SNP TSC0018009
ttttgtgatttgy

SEQ ID NO: 69208 - DNA, 13 bp, Artificial Sequence
  Oligonucleotide for detection of SNP TSC0018009
rcaaatcacaaaa

SEQ ID NO: 69209 - DNA, 13 bp, Artificial Sequence
  Oligonucleotide for detection of SNP TSC0018009
ttttgtaatttgy

SEQ ID NO: 69210 - DNA, 13 bp, Artificial Sequence
  Oligonucleotide for detection of SNP TSC0018009
rcaaattacaaaa

SEQ ID NO: 69211 - DNA, 13 bp, Artificial Sequence
  Oligonucleotide for detection of SNP TSC0018009
ttttgtgattcgy

SEQ ID NO: 69212 - DNA, 13 bp, Artificial Sequence
  Oligonucleotide for detection of SNP TSC0018009
rcgaatcacaaaa

SEQ ID NO: 69213 - DNA, 13 bp, Artificial Sequence
  Oligonucleotide for detection of SNP TSC0018009
ttttgtaattcgy

SEQ ID NO: 69214 - DNA, 13 bp, Artificial Sequence
  Oligonucleotide for detection of SNP TSC0018009
rcgaattacaaaa

SEQ ID NO: 69215 - DNA, 13 bp, Artificial Sequence
  Oligonucleotide for detection of SNP TSC0018010
tgtttggtttatt

SEQ ID NO: 69216 - DNA, 13 bp, Artificial Sequence
  Oligonucleotide for detection of SNP TSC0018010
aataaaccaaaca

SEQ ID NO: 69217 - DNA, 13 bp, Artificial Sequence
  Oligonucleotide for detection of SNP TSC0018010
tgtttgatttatt

SEQ ID NO: 69218 - DNA, 13 bp, Artificial Sequence
  Oligonucleotide for detection of SNP TSC0018010
aataaatcaaaca

SEQ ID NO: 69219 - DNA, 13 bp, Artificial Sequence
  Oligonucleotide for detection of SNP TSC0018010
cgtttggtttatt

SEQ ID NO: 69220 - DNA, 13 bp, Artificial Sequence
  Oligonucleotide for detection of SNP TSC0018010
aataaaccaaacg

SEQ ID NO: 69221 - DNA, 13 bp, Artificial Sequence
  Oligonucleotide for detection of SNP TSC0018010
cgtttgatttatt

SEQ ID NO: 69222 - DNA, 13 bp, Artificial Sequence
  Oligonucleotide for detection of SNP TSC0018010
aataaatcaaacg

SEQ ID NO: 69223 - DNA, 13 bp, Artificial Sequence
  Oligonucleotide for detection of SNP TSC0018011
tgagttaggtgtg

SEQ ID NO: 69224 - DNA, 13 bp, Artificial Sequence
  Oligonucleotide for detection of SNP TSC0018011
cacacctaactca

SEQ ID NO: 69225 - DNA, 13 bp, Artificial Sequence
  Oligonucleotide for detection of SNP TSC0018011
tgagttgggtgtg

SEQ ID NO: 69226 - DNA, 13 bp, Artificial Sequence
  Oligonucleotide for detection of SNP TSC0018011
cacacccaactca

SEQ ID NO: 69227 - DNA, 13 bp, Artificial Sequence
  Oligonucleotide for detection of SNP TSC0018011
tgagttaggcgtg

SEQ ID NO: 69228 - DNA, 13 bp, Artificial Sequence
  Oligonucleotide for detection of SNP TSC0018011
cacgcctaactca

SEQ ID NO: 69229 - DNA, 13 bp, Artificial Sequence
  Oligonucleotide for detection of SNP TSC0018011
tgagtcgggtgtg

SEQ ID NO: 69230 - DNA, 13 bp, Artificial Sequence
  Oligonucleotide for detection of SNP TSC0018011
cacacccgactca

SEQ ID NO: 69231 - DNA, 13 bp, Artificial Sequence
  Oligonucleotide for detection of SNP TSC0018011
tgagttgggcgtg

SEQ ID NO: 69232 - DNA, 13 bp, Artificial Sequence
  Oligonucleotide for detection of SNP TSC0018011
cacgcccaactca

SEQ ID NO: 69233 - DNA, 13 bp, Artificial Sequence
  Oligonucleotide for detection of SNP TSC0018011
tgagtcgggcgtg

SEQ ID NO: 69234 - DNA, 13 bp, Artificial Sequence
  Oligonucleotide for detection of SNP TSC0018011
cacgcccgactca

SEQ ID NO: 69235 - DNA, 13 bp, Artificial Sequence
  Oligonucleotide for detection of SNP TSC0018011
tatgtttggttta

SEQ ID NO: 69236 - DNA, 13 bp, Artificial Sequence
  Oligonucleotide for detection of SNP TSC0018011
taaaccaaacata

SEQ ID NO: 69237 - DNA, 13 bp, Artificial Sequence
  Oligonucleotide for detection of SNP TSC0018011
tacgtttggttta

SEQ ID NO: 69238 - DNA, 13 bp, Artificial Sequence
  Oligonucleotide for detection of SNP TSC0018011
taaaccaaacgta

SEQ ID NO: 69239 - DNA, 13 bp, Artificial Sequence
  Oligonucleotide for detection of SNP TSC0018011
tatgttcggttta

SEQ ID NO: 69240 - DNA, 13 bp, Artificial Sequence
  Oligonucleotide for detection of SNP TSC0018011
taaaccgaacata

SEQ ID NO: 69241 - DNA, 13 bp, Artificial Sequence
  Oligonucleotide for detection of SNP TSC0018011
tacgttcggttta

SEQ ID NO: 69242 - DNA, 13 bp, Artificial Sequence
  Oligonucleotide for detection of SNP TSC0018011
taaaccgaacgta

SEQ ID NO: 69243 - DNA, 13 bp, Artificial Sequence
  Oligonucleotide for detection of SNP TSC0018014
ttttgatattggy

SEQ ID NO: 69244 - DNA, 13 bp, Artificial Sequence
  Oligonucleotide for detection of SNP TSC0018014
rccaatatcaaaa

SEQ ID NO: 69245 - DNA, 13 bp, Artificial Sequence
  Oligonucleotide for detection of SNP TSC0018014
ttttgagattggy

SEQ ID NO: 69246 - DNA, 13 bp, Artificial Sequence
  Oligonucleotide for detection of SNP TSC0018014
rccaatctcaaaa

SEQ ID NO: 69247 - DNA, 13 bp, Artificial Sequence
  Oligonucleotide for detection of SNP TSC0018014
gttaatgttagga

SEQ ID NO: 69248 - DNA, 13 bp, Artificial Sequence
  Oligonucleotide for detection of SNP TSC0018014
tcctaacattaac

SEQ ID NO: 69249 - DNA, 13 bp, Artificial Sequence
  Oligonucleotide for detection of SNP TSC0018014
gttaattttagga

SEQ ID NO: 69250 - DNA, 13 bp, Artificial Sequence
  Oligonucleotide for detection of SNP TSC0018014
tcctaaaattaac

SEQ ID NO: 69251 - DNA, 13 bp, Artificial Sequence
  Oligonucleotide for detection of SNP TSC0018015
tggggatttagay

SEQ ID NO: 69252 - DNA, 13 bp, Artificial Sequence
  Oligonucleotide for detection of SNP TSC0018015
rtctaaatcccca

SEQ ID NO: 69253 - DNA, 13 bp, Artificial Sequence
  Oligonucleotide for detection of SNP TSC0018015
tggggagttagay

SEQ ID NO: 69254 - DNA, 13 bp, Artificial Sequence
  Oligonucleotide for detection of SNP TSC0018015
rtctaactcccca

SEQ ID NO: 69255 - DNA, 13 bp, Artificial Sequence
  Oligonucleotide for detection of SNP TSC0018015
gtttgagttttta

SEQ ID NO: 69256 - DNA, 13 bp, Artificial Sequence
  Oligonucleotide for detection of SNP TSC0018015
taaaaactcaaac

SEQ ID NO: 69257 - DNA, 13 bp, Artificial Sequence
  Oligonucleotide for detection of SNP TSC0018015
gtttgatttttta

SEQ ID NO: 69258 - DNA, 13 bp, Artificial Sequence
  Oligonucleotide for detection of SNP TSC0018015
taaaaaatcaaac

SEQ ID NO: 69259 - DNA, 13 bp, Artificial Sequence
  Oligonucleotide for detection of SNP TSC0018016
tttatggggaata

SEQ ID NO: 69260 - DNA, 13 bp, Artificial Sequence
  Oligonucleotide for detection of SNP TSC0018016
tattccccataaa

SEQ ID NO: 69261 - DNA, 13 bp, Artificial Sequence
  Oligonucleotide for detection of SNP TSC0018016
tttatgtggaata

SEQ ID NO: 69262 - DNA, 13 bp, Artificial Sequence
  Oligonucleotide for detection of SNP TSC0018016
tattccacataaa

SEQ ID NO: 69263 - DNA, 13 bp, Artificial Sequence
  Oligonucleotide for detection of SNP TSC0018016
tattttttatgaa

SEQ ID NO: 69264 - DNA, 13 bp, Artificial Sequence
  Oligonucleotide for detection of SNP TSC0018016
ttcataaaaaata

SEQ ID NO: 69265 - DNA, 13 bp, Artificial Sequence
  Oligonucleotide for detection of SNP TSC0018016
tattttatatgaa

SEQ ID NO: 69266 - DNA, 13 bp, Artificial Sequence
  Oligonucleotide for detection of SNP TSC0018016
ttcatataaaata

SEQ ID NO: 69267 - DNA, 13 bp, Artificial Sequence
  Oligonucleotide for detection of SNP TSC0018020
tggagtattataa

SEQ ID NO: 69268 - DNA, 13 bp, Artificial Sequence
  Oligonucleotide for detection of SNP TSC0018020
ttataatactcca

SEQ ID NO: 69269 - DNA, 13 bp, Artificial Sequence
  Oligonucleotide for detection of SNP TSC0018020
tggagtgttataa

SEQ ID NO: 69270 - DNA, 13 bp, Artificial Sequence
  Oligonucleotide for detection of SNP TSC0018020
ttataacactcca

SEQ ID NO: 69271 - DNA, 13 bp, Artificial Sequence
  Oligonucleotide for detection of SNP TSC0018020
tggagcgttataa

SEQ ID NO: 69272 - DNA, 13 bp, Artificial Sequence
  Oligonucleotide for detection of SNP TSC0018020
ttataacgctcca

SEQ ID NO: 69273 - DNA, 13 bp, Artificial Sequence
  Oligonucleotide for detection of SNP TSC0018020
ttgtggtgtttta

SEQ ID NO: 69274 - DNA, 13 bp, Artificial Sequence
  Oligonucleotide for detection of SNP TSC0018020
taaaacaccacaa

SEQ ID NO: 69275 - DNA, 13 bp, Artificial Sequence
  Oligonucleotide for detection of SNP TSC0018020
ttgtggcgtttta

SEQ ID NO: 69276 - DNA, 13 bp, Artificial Sequence
  Oligonucleotide for detection of SNP TSC0018020
taaaacgccacaa

SEQ ID NO: 69277 - DNA, 13 bp, Artificial Sequence
  Oligonucleotide for detection of SNP TSC0018021
tgttttgtaaaty

SEQ ID NO: 69278 - DNA, 13 bp, Artificial Sequence
  Oligonucleotide for detection of SNP TSC0018021
ratttacaaaaca

SEQ ID NO: 69279 - DNA, 13 bp, Artificial Sequence
  Oligonucleotide for detection of SNP TSC0018021
tgttttataaaty

SEQ ID NO: 69280 - DNA, 13 bp, Artificial Sequence
  Oligonucleotide for detection of SNP TSC0018021
ratttataaaaca

SEQ ID NO: 69281 - DNA, 13 bp, Artificial Sequence
  Oligonucleotide for detection of SNP TSC0018022
atagtatgggaag

SEQ ID NO: 69282 - DNA, 13 bp, Artificial Sequence
  Oligonucleotide for detection of SNP TSC0018022
cttcccatactat

SEQ ID NO: 69283 - DNA, 13 bp, Artificial Sequence
  Oligonucleotide for detection of SNP TSC0018022
atagtacgggaag

SEQ ID NO: 69284 - DNA, 13 bp, Artificial Sequence
  Oligonucleotide for detection of SNP TSC0018022
cttcccgtactat

SEQ ID NO: 69285 - DNA, 13 bp, Artificial Sequence
  Oligonucleotide for detection of SNP TSC0018023
ttttgaataatga

SEQ ID NO: 69286 - DNA, 13 bp, Artificial Sequence
  Oligonucleotide for detection of SNP TSC0018023
tcattattcaaaa

SEQ ID NO: 69287 - DNA, 13 bp, Artificial Sequence
  Oligonucleotide for detection of SNP TSC0018023
ttttgagtaatga

SEQ ID NO: 69288 - DNA, 13 bp, Artificial Sequence
  Oligonucleotide for detection of SNP TSC0018023
tcattactcaaaa

SEQ ID NO: 69289 - DNA, 13 bp, Artificial Sequence
  Oligonucleotide for detection of SNP TSC0018024
ttattatatatty

SEQ ID NO: 69290 - DNA, 13 bp, Artificial Sequence
  Oligonucleotide for detection of SNP TSC0018024
raatatataataa

SEQ ID NO: 69291 - DNA, 13 bp, Artificial Sequence
  Oligonucleotide for detection of SNP TSC0018024
ttattagatatty

SEQ ID NO: 69292 - DNA, 13 bp, Artificial Sequence
  Oligonucleotide for detection of SNP TSC0018024
raatatctaataa

SEQ ID NO: 69293 - DNA, 13 bp, Artificial Sequence
  Oligonucleotide for detection of SNP TSC0018024
gaatgtgtggtga

SEQ ID NO: 69294 - DNA, 13 bp, Artificial Sequence
  Oligonucleotide for detection of SNP TSC0018024
tcaccacacattc

SEQ ID NO: 69295 - DNA, 13 bp, Artificial Sequence
  Oligonucleotide for detection of SNP TSC0018024
gaatgtttggtga

SEQ ID NO: 69296 - DNA, 13 bp, Artificial Sequence
  Oligonucleotide for detection of SNP TSC0018024
tcaccaaacattc

SEQ ID NO: 69297 - DNA, 13 bp, Artificial Sequence
  Oligonucleotide for detection of SNP TSC0018029
attttaagattty

SEQ ID NO: 69298 - DNA, 13 bp, Artificial Sequence
  Oligonucleotide for detection of SNP TSC0018029
raaatcttaaaat

SEQ ID NO: 69299 - DNA, 13 bp, Artificial Sequence
  Oligonucleotide for detection of SNP TSC0018029
attttatgattty

SEQ ID NO: 69300 - DNA, 13 bp, Artificial Sequence
  Oligonucleotide for detection of SNP TSC0018029
raaatcataaaat

SEQ ID NO: 69301 - DNA, 13 bp, Artificial Sequence
  Oligonucleotide for detection of SNP TSC0018029
ggaattttggggt

SEQ ID NO: 69302 - DNA, 13 bp, Artificial Sequence
  Oligonucleotide for detection of SNP TSC0018029
accccaaaattcc

SEQ ID NO: 69303 - DNA, 13 bp, Artificial Sequence
  Oligonucleotide for detection of SNP TSC0018029
ggaattatggggt

SEQ ID NO: 69304 - DNA, 13 bp, Artificial Sequence
  Oligonucleotide for detection of SNP TSC0018029
accccataattcc

SEQ ID NO: 69305 - DNA, 13 bp, Artificial Sequence
  Oligonucleotide for detection of SNP TSC0018031
aaaaaaagagaga

SEQ ID NO: 69306 - DNA, 13 bp, Artificial Sequence
  Oligonucleotide for detection of SNP TSC0018031
tctctcttttttt

SEQ ID NO: 69307 - DNA, 13 bp, Artificial Sequence
  Oligonucleotide for detection of SNP TSC0018031
aaaaaaggagaga

SEQ ID NO: 69308 - DNA, 13 bp, Artificial Sequence
  Oligonucleotide for detection of SNP TSC0018031
tctctcctttttt

SEQ ID NO: 69309 - DNA, 13 bp, Artificial Sequence
  Oligonucleotide for detection of SNP TSC0018032
tgtagttttatty

SEQ ID NO: 69310 - DNA, 13 bp, Artificial Sequence
  Oligonucleotide for detection of SNP TSC0018032
raataaaactaca

SEQ ID NO: 69311 - DNA, 13 bp, Artificial Sequence
  Oligonucleotide for detection of SNP TSC0018032
tgtagtgttatty

SEQ ID NO: 69312 - DNA, 13 bp, Artificial Sequence
  Oligonucleotide for detection of SNP TSC0018032
raataacactaca

SEQ ID NO: 69313 - DNA, 13 bp, Artificial Sequence
  Oligonucleotide for detection of SNP TSC0018032
cgtagttttatty

SEQ ID NO: 69314 - DNA, 13 bp, Artificial Sequence
  Oligonucleotide for detection of SNP TSC0018032
raataaaactacg

SEQ ID NO: 69315 - DNA, 13 bp, Artificial Sequence
  Oligonucleotide for detection of SNP TSC0018032
cgtagtgttatty

SEQ ID NO: 69316 - DNA, 13 bp, Artificial Sequence
  Oligonucleotide for detection of SNP TSC0018032
raataacactacg

SEQ ID NO: 69317 - DNA, 13 bp, Artificial Sequence
  Oligonucleotide for detection of SNP TSC0018032
gagtgagattatg

SEQ ID NO: 69318 - DNA, 13 bp, Artificial Sequence
  Oligonucleotide for detection of SNP TSC0018032
cataatctcactc

SEQ ID NO: 69319 - DNA, 13 bp, Artificial Sequence
  Oligonucleotide for detection of SNP TSC0018032
gagtgatattatg

SEQ ID NO: 69320 - DNA, 13 bp, Artificial Sequence
  Oligonucleotide for detection of SNP TSC0018032
cataatatcactc

SEQ ID NO: 69321 - DNA, 13 bp, Artificial Sequence
  Oligonucleotide for detection of SNP TSC0018032
gagtgagattacg

SEQ ID NO: 69322 - DNA, 13 bp, Artificial Sequence
  Oligonucleotide for detection of SNP TSC0018032
cgtaatctcactc

SEQ ID NO: 69323 - DNA, 13 bp, Artificial Sequence
  Oligonucleotide for detection of SNP TSC0018032
gagtgatattacg

SEQ ID NO: 69324 - DNA, 13 bp, Artificial Sequence
  Oligonucleotide for detection of SNP TSC0018032
cgtaatatcactc

SEQ ID NO: 69325 - DNA, 13 bp, Artificial Sequence
  Oligonucleotide for detection of SNP TSC0018033
aggttgtagtgag

SEQ ID NO: 69326 - DNA, 13 bp, Artificial Sequence
  Oligonucleotide for detection of SNP TSC0018033
ctcactacaacct

SEQ ID NO: 69327 - DNA, 13 bp, Artificial Sequence
  Oligonucleotide for detection of SNP TSC0018033
aggttgaagtgag

SEQ ID NO: 69328 - DNA, 13 bp, Artificial Sequence
  Oligonucleotide for detection of SNP TSC0018033
ctcacttcaacct

SEQ ID NO: 69329 - DNA, 13 bp, Artificial Sequence
  Oligonucleotide for detection of SNP TSC0018035
aattaggaaaata

SEQ ID NO: 69330 - DNA, 13 bp, Artificial Sequence
  Oligonucleotide for detection of SNP TSC0018035
tattttcctaatt

SEQ ID NO: 69331 - DNA, 13 bp, Artificial Sequence
  Oligonucleotide for detection of SNP TSC0018035
aattagtaaaata

SEQ ID NO: 69332 - DNA, 13 bp, Artificial Sequence
  Oligonucleotide for detection of SNP TSC0018035
tattttactaatt

SEQ ID NO: 69333 - DNA, 13 bp, Artificial Sequence
  Oligonucleotide for detection of SNP TSC0018035
tgtttttttaatt

SEQ ID NO: 69334 - DNA, 13 bp, Artificial Sequence
  Oligonucleotide for detection of SNP TSC0018035
aattaaaaaaaca

SEQ ID NO: 69335 - DNA, 13 bp, Artificial Sequence
  Oligonucleotide for detection of SNP TSC0018036
taagtgggaatat

SEQ ID NO: 69336 - DNA, 13 bp, Artificial Sequence
  Oligonucleotide for detection of SNP TSC0018036
atattcccactta

SEQ ID NO: 69337 - DNA, 13 bp, Artificial Sequence
  Oligonucleotide for detection of SNP TSC0018036
taagtgtgaatat

SEQ ID NO: 69338 - DNA, 13 bp, Artificial Sequence
  Oligonucleotide for detection of SNP TSC0018036
atattcacactta

SEQ ID NO: 69339 - DNA, 13 bp, Artificial Sequence
  Oligonucleotide for detection of SNP TSC0018036
taagcgggaatat

SEQ ID NO: 69340 - DNA, 13 bp, Artificial Sequence
  Oligonucleotide for detection of SNP TSC0018036
atattcccgctta

SEQ ID NO: 69341 - DNA, 13 bp, Artificial Sequence
  Oligonucleotide for detection of SNP TSC0018036
taagcgtgaatat

SEQ ID NO: 69342 - DNA, 13 bp, Artificial Sequence
  Oligonucleotide for detection of SNP TSC0018036
atattcacgctta

SEQ ID NO: 69343 - DNA, 13 bp, Artificial Sequence
  Oligonucleotide for detection of SNP TSC0018036
atatttttgttta

SEQ ID NO: 69344 - DNA, 13 bp, Artificial Sequence
  Oligonucleotide for detection of SNP TSC0018036
taaacaaaaatat

SEQ ID NO: 69345 - DNA, 13 bp, Artificial Sequence
  Oligonucleotide for detection of SNP TSC0018036
atattttcgttta

SEQ ID NO: 69346 - DNA, 13 bp, Artificial Sequence
  Oligonucleotide for detection of SNP TSC0018036
taaacgaaaatat

SEQ ID NO: 69347 - DNA, 13 bp, Artificial Sequence
  Oligonucleotide for detection of SNP TSC0018036
atatttacgttta

SEQ ID NO: 69348 - DNA, 13 bp, Artificial Sequence
  Oligonucleotide for detection of SNP TSC0018036
taaacgtaaatat

SEQ ID NO: 69349 - DNA, 13 bp, Artificial Sequence
  Oligonucleotide for detection of SNP TSC0018037
agtttaaatttty

SEQ ID NO: 69350 - DNA, 13 bp, Artificial Sequence
  Oligonucleotide for detection of SNP TSC0018037
raaaatttaaact

SEQ ID NO: 69351 - DNA, 13 bp, Artificial Sequence
  Oligonucleotide for detection of SNP TSC0018037
agtttagatttty

SEQ ID NO: 69352 - DNA, 13 bp, Artificial Sequence
  Oligonucleotide for detection of SNP TSC0018037
raaaatctaaact

SEQ ID NO: 69353 - DNA, 13 bp, Artificial Sequence
  Oligonucleotide for detection of SNP TSC0018038
ttatgaagtgttt

SEQ ID NO: 69354 - DNA, 13 bp, Artificial Sequence
  Oligonucleotide for detection of SNP TSC0018038
aaacacttcataa

SEQ ID NO: 69355 - DNA, 13 bp, Artificial Sequence
  Oligonucleotide for detection of SNP TSC0018038
ttatgaggtgttt

SEQ ID NO: 69356 - DNA, 13 bp, Artificial Sequence
  Oligonucleotide for detection of SNP TSC0018038
aaacacctcataa

SEQ ID NO: 69357 - DNA, 13 bp, Artificial Sequence
  Oligonucleotide for detection of SNP TSC0018041
attttaaaaaggg

SEQ ID NO: 69358 - DNA, 13 bp, Artificial Sequence
  Oligonucleotide for detection of SNP TSC0018041
ccctttttaaaat

SEQ ID NO: 69359 - DNA, 13 bp, Artificial Sequence
  Oligonucleotide for detection of SNP TSC0018041
attttagaaaggg

SEQ ID NO: 69360 - DNA, 13 bp, Artificial Sequence
  Oligonucleotide for detection of SNP TSC0018041
ccctttctaaaat

SEQ ID NO: 69361 - DNA, 13 bp, Artificial Sequence
  Oligonucleotide for detection of SNP TSC0018042
tttaaaaaggggy

SEQ ID NO: 69362 - DNA, 13 bp, Artificial Sequence
  Oligonucleotide for detection of SNP TSC0018042
rcccctttttaaa

SEQ ID NO: 69363 - DNA, 13 bp, Artificial Sequence
  Oligonucleotide for detection of SNP TSC0018042
tttaaagaggggy

SEQ ID NO: 69364 - DNA, 13 bp, Artificial Sequence
  Oligonucleotide for detection of SNP TSC0018042
rcccctctttaaa

SEQ ID NO: 69365 - DNA, 13 bp, Artificial Sequence
  Oligonucleotide for detection of SNP TSC0018043
agtttgggggttg

SEQ ID NO: 69366 - DNA, 13 bp, Artificial Sequence
  Oligonucleotide for detection of SNP TSC0018043
caacccccaaact

SEQ ID NO: 69367 - DNA, 13 bp, Artificial Sequence
  Oligonucleotide for detection of SNP TSC0018043
agtttgtgggttg

SEQ ID NO: 69368 - DNA, 13 bp, Artificial Sequence
  Oligonucleotide for detection of SNP TSC0018043
caacccacaaact

SEQ ID NO: 69369 - DNA, 13 bp, Artificial Sequence
  Oligonucleotide for detection of SNP TSC0018043
taatttttagatt

SEQ ID NO: 69370 - DNA, 13 bp, Artificial Sequence
  Oligonucleotide for detection of SNP TSC0018043
aatctaaaaatta

SEQ ID NO: 69371 - DNA, 13 bp, Artificial Sequence
  Oligonucleotide for detection of SNP TSC0018043
taatttatagatt

SEQ ID NO: 69372 - DNA, 13 bp, Artificial Sequence
  Oligonucleotide for detection of SNP TSC0018043
aatctataaatta

SEQ ID NO: 69373 - DNA, 13 bp, Artificial Sequence
  Oligonucleotide for detection of SNP TSC0018044
gaggtagaggttg

SEQ ID NO: 69374 - DNA, 13 bp, Artificial Sequence
  Oligonucleotide for detection of SNP TSC0018044
caacctctacctc

SEQ ID NO: 69375 - DNA, 13 bp, Artificial Sequence
  Oligonucleotide for detection of SNP TSC0018044
gaggtaaaggttg

SEQ ID NO: 69376 - DNA, 13 bp, Artificial Sequence
  Oligonucleotide for detection of SNP TSC0018044
caacctttacctc

SEQ ID NO: 69377 - DNA, 13 bp, Artificial Sequence
  Oligonucleotide for detection of SNP TSC0018045
atttaagaggtag

SEQ ID NO: 69378 - DNA, 13 bp, Artificial Sequence
  Oligonucleotide for detection of SNP TSC0018045
ctacctcttaaat

SEQ ID NO: 69379 - DNA, 13 bp, Artificial Sequence
  Oligonucleotide for detection of SNP TSC0018045
atttaaaaggtag

SEQ ID NO: 69380 - DNA, 13 bp, Artificial Sequence
  Oligonucleotide for detection of SNP TSC0018045
ctaccttttaaat

SEQ ID NO: 69381 - DNA, 13 bp, Artificial Sequence
  Oligonucleotide for detection of SNP TSC0018049
attaaggagttga

SEQ ID NO: 69382 - DNA, 13 bp, Artificial Sequence
  Oligonucleotide for detection of SNP TSC0018049
tcaactccttaat

SEQ ID NO: 69383 - DNA, 13 bp, Artificial Sequence
  Oligonucleotide for detection of SNP TSC0018049
attaagaagttga

SEQ ID NO: 69384 - DNA, 13 bp, Artificial Sequence
  Oligonucleotide for detection of SNP TSC0018049
tcaacttcttaat

SEQ ID NO: 69385 - DNA, 13 bp, Artificial Sequence
  Oligonucleotide for detection of SNP TSC0018050
gtgaagattatag

SEQ ID NO: 69386 - DNA, 13 bp, Artificial Sequence
  Oligonucleotide for detection of SNP TSC0018050
ctataatcttcac

SEQ ID NO: 69387 - DNA, 13 bp, Artificial Sequence
  Oligonucleotide for detection of SNP TSC0018050
gtgaagtttatag

SEQ ID NO: 69388 - DNA, 13 bp, Artificial Sequence
  Oligonucleotide for detection of SNP TSC0018050
ctataaacttcac

SEQ ID NO: 69389 - DNA, 13 bp, Artificial Sequence
  Oligonucleotide for detection of SNP TSC0018050
ttgtggtttttay

SEQ ID NO: 69390 - DNA, 13 bp, Artificial Sequence
  Oligonucleotide for detection of SNP TSC0018050
rtaaaaaccacaa

SEQ ID NO: 69391 - DNA, 13 bp, Artificial Sequence
  Oligonucleotide for detection of SNP TSC0018050
ttgtgggttttay

SEQ ID NO: 69392 - DNA, 13 bp, Artificial Sequence
  Oligonucleotide for detection of SNP TSC0018050
rtaaaacccacaa

SEQ ID NO: 69393 - DNA, 13 bp, Artificial Sequence
  Oligonucleotide for detection of SNP TSC0018051
gtaggtaggaaty

SEQ ID NO: 69394 - DNA, 13 bp, Artificial Sequence
  Oligonucleotide for detection of SNP TSC0018051
rattcctacctac

SEQ ID NO: 69395 - DNA, 13 bp, Artificial Sequence
  Oligonucleotide for detection of SNP TSC0018051
gtaggtgggaaty

SEQ ID NO: 69396 - DNA, 13 bp, Artificial Sequence
  Oligonucleotide for detection of SNP TSC0018051
rattcccacctac

SEQ ID NO: 69397 - DNA, 13 bp, Artificial Sequence
  Oligonucleotide for detection of SNP TSC0018051
gtaggcgggaaty

SEQ ID NO: 69398 - DNA, 13 bp, Artificial Sequence
  Oligonucleotide for detection of SNP TSC0018051
rattcccgcctac

SEQ ID NO: 69399 - DNA, 13 bp, Artificial Sequence
  Oligonucleotide for detection of SNP TSC0018051
gatttttgtttgy

SEQ ID NO: 69400 - DNA, 13 bp, Artificial Sequence
  Oligonucleotide for detection of SNP TSC0018051
rcaaacaaaaatc

SEQ ID NO: 69401 - DNA, 13 bp, Artificial Sequence
  Oligonucleotide for detection of SNP TSC0018051
gattttcgtttgy

SEQ ID NO: 69402 - DNA, 13 bp, Artificial Sequence
  Oligonucleotide for detection of SNP TSC0018051
rcaaacgaaaatc

SEQ ID NO: 69403 - DNA, 13 bp, Artificial Sequence
  Oligonucleotide for detection of SNP TSC0018055
gtagtggagatag

SEQ ID NO: 69404 - DNA, 13 bp, Artificial Sequence
  Oligonucleotide for detection of SNP TSC0018055
ctatctccactac

SEQ ID NO: 69405 - DNA, 13 bp, Artificial Sequence
  Oligonucleotide for detection of SNP TSC0018055
gtagtgaagatag

SEQ ID NO: 69406 - DNA, 13 bp, Artificial Sequence
  Oligonucleotide for detection of SNP TSC0018055
ctatcttcactac

SEQ ID NO: 69407 - DNA, 13 bp, Artificial Sequence
  Oligonucleotide for detection of SNP TSC0018056
taatagtggggta

SEQ ID NO: 69408 - DNA, 13 bp, Artificial Sequence
  Oligonucleotide for detection of SNP TSC0018056
taccccactatta

SEQ ID NO: 69409 - DNA, 13 bp, Artificial Sequence
  Oligonucleotide for detection of SNP TSC0018056
taataggggggta

SEQ ID NO: 69410 - DNA, 13 bp, Artificial Sequence
  Oligonucleotide for detection of SNP TSC0018056
tacccccctatta

SEQ ID NO: 69411 - DNA, 13 bp, Artificial Sequence
  Oligonucleotide for detection of SNP TSC0018056
taatagcggggta

SEQ ID NO: 69412 - DNA, 13 bp, Artificial Sequence
  Oligonucleotide for detection of SNP TSC0018056
taccccgctatta

SEQ ID NO: 69413 - DNA, 13 bp, Artificial Sequence
  Oligonucleotide for detection of SNP TSC0018056
tgttttgttgtta

SEQ ID NO: 69414 - DNA, 13 bp, Artificial Sequence
  Oligonucleotide for detection of SNP TSC0018056
taacaacaaaaca

SEQ ID NO: 69415 - DNA, 13 bp, Artificial Sequence
  Oligonucleotide for detection of SNP TSC0018056
tgtttttttgtta

SEQ ID NO: 69416 - DNA, 13 bp, Artificial Sequence
  Oligonucleotide for detection of SNP TSC0018056
taacaaaaaaaca

SEQ ID NO: 69417 - DNA, 13 bp, Artificial Sequence
  Oligonucleotide for detection of SNP TSC0018056
tgtttcgttgtta

SEQ ID NO: 69418 - DNA, 13 bp, Artificial Sequence
  Oligonucleotide for detection of SNP TSC0018056
taacaacgaaaca

SEQ ID NO: 69419 - DNA, 13 bp, Artificial Sequence
  Oligonucleotide for detection of SNP TSC0018057
tatttagttttat

SEQ ID NO: 69420 - DNA, 13 bp, Artificial Sequence
  Oligonucleotide for detection of SNP TSC0018057
ataaaactaaata

SEQ ID NO: 69421 - DNA, 13 bp, Artificial Sequence
  Oligonucleotide for detection of SNP TSC0018061
gttgttattgaat

SEQ ID NO: 69422 - DNA, 13 bp, Artificial Sequence
  Oligonucleotide for detection of SNP TSC0018061
attcaataacaac

SEQ ID NO: 69423 - DNA, 13 bp, Artificial Sequence
  Oligonucleotide for detection of SNP TSC0018061
gttgttgttgaat

SEQ ID NO: 69424 - DNA, 13 bp, Artificial Sequence
  Oligonucleotide for detection of SNP TSC0018061
attcaacaacaac

SEQ ID NO: 69425 - DNA, 13 bp, Artificial Sequence
  Oligonucleotide for detection of SNP TSC0018062
ttgataatgtttt

SEQ ID NO: 69426 - DNA, 13 bp, Artificial Sequence
  Oligonucleotide for detection of SNP TSC0018062
aaaacattatcaa

SEQ ID NO: 69427 - DNA, 13 bp, Artificial Sequence
  Oligonucleotide for detection of SNP TSC0018062
ttgatagtgtttt

SEQ ID NO: 69428 - DNA, 13 bp, Artificial Sequence
  Oligonucleotide for detection of SNP TSC0018062
aaaacactatcaa

SEQ ID NO: 69429 - DNA, 13 bp, Artificial Sequence
  Oligonucleotide for detection of SNP TSC0018069
taatagtgtataa

SEQ ID NO: 69430 - DNA, 13 bp, Artificial Sequence
  Oligonucleotide for detection of SNP TSC0018069
ttatacactatta

SEQ ID NO: 69431 - DNA, 13 bp, Artificial Sequence
  Oligonucleotide for detection of SNP TSC0018069
taatagggtataa

SEQ ID NO: 69432 - DNA, 13 bp, Artificial Sequence
  Oligonucleotide for detection of SNP TSC0018069
ttataccctatta

SEQ ID NO: 69433 - DNA, 13 bp, Artificial Sequence
  Oligonucleotide for detection of SNP TSC0018069
taatagcgtataa

SEQ ID NO: 69434 - DNA, 13 bp, Artificial Sequence
  Oligonucleotide for detection of SNP TSC0018069
ttatacgctatta

SEQ ID NO: 69435 - DNA, 13 bp, Artificial Sequence
  Oligonucleotide for detection of SNP TSC0018069
ttgtgtgttgttg

SEQ ID NO: 69436 - DNA, 13 bp, Artificial Sequence
  Oligonucleotide for detection of SNP TSC0018069
caacaacacacaa

SEQ ID NO: 69437 - DNA, 13 bp, Artificial Sequence
  Oligonucleotide for detection of SNP TSC0018069
ttgtgttttgttg

SEQ ID NO: 69438 - DNA, 13 bp, Artificial Sequence
  Oligonucleotide for detection of SNP TSC0018069
caacaaaacacaa

SEQ ID NO: 69439 - DNA, 13 bp, Artificial Sequence
  Oligonucleotide for detection of SNP TSC0018069
ttgtgcgttgttg

SEQ ID NO: 69440 - DNA, 13 bp, Artificial Sequence
  Oligonucleotide for detection of SNP TSC0018069
caacaacgcacaa

SEQ ID NO: 69441 - DNA, 13 bp, Artificial Sequence
  Oligonucleotide for detection of SNP TSC0018070
gaagatagagatg

SEQ ID NO: 69442 - DNA, 13 bp, Artificial Sequence
  Oligonucleotide for detection of SNP TSC0018070
catctctatcttc

SEQ ID NO: 69443 - DNA, 13 bp, Artificial Sequence
  Oligonucleotide for detection of SNP TSC0018070
gaagatggagatg

SEQ ID NO: 69444 - DNA, 13 bp, Artificial Sequence
  Oligonucleotide for detection of SNP TSC0018070
catctccatcttc

SEQ ID NO: 69445 - DNA, 13 bp, Artificial Sequence
  Oligonucleotide for detection of SNP TSC0018070
gaagacggagatg

SEQ ID NO: 69446 - DNA, 13 bp, Artificial Sequence
  Oligonucleotide for detection of SNP TSC0018070
catctccgtcttc

SEQ ID NO: 69447 - DNA, 13 bp, Artificial Sequence
  Oligonucleotide for detection of SNP TSC0018071
ttattatttaaaa

SEQ ID NO: 69448 - DNA, 13 bp, Artificial Sequence
  Oligonucleotide for detection of SNP TSC0018071
ttttaaataataa

SEQ ID NO: 69449 - DNA, 13 bp, Artificial Sequence
  Oligonucleotide for detection of SNP TSC0018071
ttattagttaaaa

SEQ ID NO: 69450 - DNA, 13 bp, Artificial Sequence
  Oligonucleotide for detection of SNP TSC0018071
ttttaactaataa

SEQ ID NO: 69451 - DNA, 13 bp, Artificial Sequence
  Oligonucleotide for detection of SNP TSC0018071
ttttaattaatag

SEQ ID NO: 69452 - DNA, 13 bp, Artificial Sequence
  Oligonucleotide for detection of SNP TSC0018071
ctattaattaaaa

SEQ ID NO: 69453 - DNA, 13 bp, Artificial Sequence
  Oligonucleotide for detection of SNP TSC0018073
ttatttgtgtttt

SEQ ID NO: 69454 - DNA, 13 bp, Artificial Sequence
  Oligonucleotide for detection of SNP TSC0018073
aaaacacaaataa

SEQ ID NO: 69455 - DNA, 13 bp, Artificial Sequence
  Oligonucleotide for detection of SNP TSC0018073
aagatagaaataa

SEQ ID NO: 69456 - DNA, 13 bp, Artificial Sequence
  Oligonucleotide for detection of SNP TSC0018073
ttatttctatctt

SEQ ID NO: 69457 - DNA, 13 bp, Artificial Sequence
  Oligonucleotide for detection of SNP TSC0018073
aagatataaataa

SEQ ID NO: 69458 - DNA, 13 bp, Artificial Sequence
  Oligonucleotide for detection of SNP TSC0018073
ttatttatatctt

SEQ ID NO: 69459 - DNA, 13 bp, Artificial Sequence
  Oligonucleotide for detection of SNP TSC0018074
atgtataaaataa

SEQ ID NO: 69460 - DNA, 13 bp, Artificial Sequence
  Oligonucleotide for detection of SNP TSC0018074
ttattttatacat

SEQ ID NO: 69461 - DNA, 13 bp, Artificial Sequence
  Oligonucleotide for detection of SNP TSC0018074
atgtatgaaataa

SEQ ID NO: 69462 - DNA, 13 bp, Artificial Sequence
  Oligonucleotide for detection of SNP TSC0018074
ttatttcatacat

SEQ ID NO: 69463 - DNA, 13 bp, Artificial Sequence
  Oligonucleotide for detection of SNP TSC0018075
gtggttattatta

SEQ ID NO: 69464 - DNA, 13 bp, Artificial Sequence
  Oligonucleotide for detection of SNP TSC0018075
taataataaccac

SEQ ID NO: 69465 - DNA, 13 bp, Artificial Sequence
  Oligonucleotide for detection of SNP TSC0018075
gtggtttttatta

SEQ ID NO: 69466 - DNA, 13 bp, Artificial Sequence
  Oligonucleotide for detection of SNP TSC0018075
taataaaaaccac

SEQ ID NO: 69467 - DNA, 13 bp, Artificial Sequence
  Oligonucleotide for detection of SNP TSC0018075
tagtgataattay

SEQ ID NO: 69468 - DNA, 13 bp, Artificial Sequence
  Oligonucleotide for detection of SNP TSC0018075
rtaattatcacta

SEQ ID NO: 69469 - DNA, 13 bp, Artificial Sequence
  Oligonucleotide for detection of SNP TSC0018075
tagtgaaaattay

SEQ ID NO: 69470 - DNA, 13 bp, Artificial Sequence
  Oligonucleotide for detection of SNP TSC0018075
rtaattttcacta

SEQ ID NO: 69471 - DNA, 13 bp, Artificial Sequence
  Oligonucleotide for detection of SNP TSC0018079
gttaagatattay

SEQ ID NO: 69472 - DNA, 13 bp, Artificial Sequence
  Oligonucleotide for detection of SNP TSC0018079
rtaatatcttaac

SEQ ID NO: 69473 - DNA, 13 bp, Artificial Sequence
  Oligonucleotide for detection of SNP TSC0018079
gttaagttattay

SEQ ID NO: 69474 - DNA, 13 bp, Artificial Sequence
  Oligonucleotide for detection of SNP TSC0018079
rtaataacttaac

SEQ ID NO: 69475 - DNA, 13 bp, Artificial Sequence
  Oligonucleotide for detection of SNP TSC0018079
gtgatgttttaay

SEQ ID NO: 69476 - DNA, 13 bp, Artificial Sequence
  Oligonucleotide for detection of SNP TSC0018079
rttaaaacatcac

SEQ ID NO: 69477 - DNA, 13 bp, Artificial Sequence
  Oligonucleotide for detection of SNP TSC0018079
gtgatggtttaay

SEQ ID NO: 69478 - DNA, 13 bp, Artificial Sequence
  Oligonucleotide for detection of SNP TSC0018079
rttaaaccatcac

SEQ ID NO: 69479 - DNA, 13 bp, Artificial Sequence
  Oligonucleotide for detection of SNP TSC0018080
ttgtgggaaaaag

SEQ ID NO: 69480 - DNA, 13 bp, Artificial Sequence
  Oligonucleotide for detection of SNP TSC0018080
ctttttcccacaa

SEQ ID NO: 69481 - DNA, 13 bp, Artificial Sequence
  Oligonucleotide for detection of SNP TSC0018080
ttgtggaaaaaag

SEQ ID NO: 69482 - DNA, 13 bp, Artificial Sequence
  Oligonucleotide for detection of SNP TSC0018080
cttttttccacaa

SEQ ID NO: 69483 - DNA, 13 bp, Artificial Sequence
  Oligonucleotide for detection of SNP TSC0018080
tcgtgggaaaaag

SEQ ID NO: 69484 - DNA, 13 bp, Artificial Sequence
  Oligonucleotide for detection of SNP TSC0018080
ctttttcccacga

SEQ ID NO: 69485 - DNA, 13 bp, Artificial Sequence
  Oligonucleotide for detection of SNP TSC0018080
tcgtggaaaaaag

SEQ ID NO: 69486 - DNA, 13 bp, Artificial Sequence
  Oligonucleotide for detection of SNP TSC0018080
cttttttccacga

SEQ ID NO: 69487 - DNA, 13 bp, Artificial Sequence
  Oligonucleotide for detection of SNP TSC0018081
attttaagagttt

SEQ ID NO: 69488 - DNA, 13 bp, Artificial Sequence
  Oligonucleotide for detection of SNP TSC0018081
aaactcttaaaat

SEQ ID NO: 69489 - DNA, 13 bp, Artificial Sequence
  Oligonucleotide for detection of SNP TSC0018081
attttaggagttt

SEQ ID NO: 69490 - DNA, 13 bp, Artificial Sequence
  Oligonucleotide for detection of SNP TSC0018081
aaactcctaaaat

SEQ ID NO: 69491 - DNA, 13 bp, Artificial Sequence
  Oligonucleotide for detection of SNP TSC0018084
gttatgtgataaa

SEQ ID NO: 69492 - DNA, 13 bp, Artificial Sequence
  Oligonucleotide for detection of SNP TSC0018084
tttatcacataac

SEQ ID NO: 69493 - DNA, 13 bp, Artificial Sequence
  Oligonucleotide for detection of SNP TSC0018084
gttacgtgataaa

SEQ ID NO: 69494 - DNA, 13 bp, Artificial Sequence
  Oligonucleotide for detection of SNP TSC0018084
tttatcacgtaac

SEQ ID NO: 69495 - DNA, 13 bp, Artificial Sequence
  Oligonucleotide for detection of SNP TSC0018084
gttatgcgataaa

SEQ ID NO: 69496 - DNA, 13 bp, Artificial Sequence
  Oligonucleotide for detection of SNP TSC0018084
tttatcgcataac

SEQ ID NO: 69497 - DNA, 13 bp, Artificial Sequence
  Oligonucleotide for detection of SNP TSC0018084
gttacgcgataaa

SEQ ID NO: 69498 - DNA, 13 bp, Artificial Sequence
  Oligonucleotide for detection of SNP TSC0018084
tttatcgcgtaac

SEQ ID NO: 69499 - DNA, 13 bp, Artificial Sequence
  Oligonucleotide for detection of SNP TSC0018084
tttattgtgtgay

SEQ ID NO: 69500 - DNA, 13 bp, Artificial Sequence
  Oligonucleotide for detection of SNP TSC0018084
rtcacacaataaa

SEQ ID NO: 69501 - DNA, 13 bp, Artificial Sequence
  Oligonucleotide for detection of SNP TSC0018084
tttattatgtgay

SEQ ID NO: 69502 - DNA, 13 bp, Artificial Sequence
  Oligonucleotide for detection of SNP TSC0018084
rtcacataataaa

SEQ ID NO: 69503 - DNA, 13 bp, Artificial Sequence
  Oligonucleotide for detection of SNP TSC0018084
tttatcgtgtgay

SEQ ID NO: 69504 - DNA, 13 bp, Artificial Sequence
  Oligonucleotide for detection of SNP TSC0018084
rtcacacgataaa

SEQ ID NO: 69505 - DNA, 13 bp, Artificial Sequence
  Oligonucleotide for detection of SNP TSC0018084
tttattacgtgay

SEQ ID NO: 69506 - DNA, 13 bp, Artificial Sequence
  Oligonucleotide for detection of SNP TSC0018084
rtcacgtaataaa

SEQ ID NO: 69507 - DNA, 13 bp, Artificial Sequence
  Oligonucleotide for detection of SNP TSC0018084
tttattgcgtgay

SEQ ID NO: 69508 - DNA, 13 bp, Artificial Sequence
  Oligonucleotide for detection of SNP TSC0018084
rtcacgcaataaa

SEQ ID NO: 69509 - DNA, 13 bp, Artificial Sequence
  Oligonucleotide for detection of SNP TSC0018084
tttatcgcgtgay

SEQ ID NO: 69510 - DNA, 13 bp, Artificial Sequence
  Oligonucleotide for detection of SNP TSC0018084
rtcacgcgataaa

SEQ ID NO: 69511 - DNA, 13 bp, Artificial Sequence
  Oligonucleotide for detection of SNP TSC0018092
ttgagtaagttaa

SEQ ID NO: 69512 - DNA, 13 bp, Artificial Sequence
  Oligonucleotide for detection of SNP TSC0018092
ttaacttactcaa

SEQ ID NO: 69513 - DNA, 13 bp, Artificial Sequence
  Oligonucleotide for detection of SNP TSC0018092
ttgagtgagttaa

SEQ ID NO: 69514 - DNA, 13 bp, Artificial Sequence
  Oligonucleotide for detection of SNP TSC0018092
ttaactcactcaa

SEQ ID NO: 69515 - DNA, 13 bp, Artificial Sequence
  Oligonucleotide for detection of SNP TSC0018092
ttgagcgagttaa

SEQ ID NO: 69516 - DNA, 13 bp, Artificial Sequence
  Oligonucleotide for detection of SNP TSC0018092
ttaactcgctcaa

SEQ ID NO: 69517 - DNA, 13 bp, Artificial Sequence
  Oligonucleotide for detection of SNP TSC0018092
ttaatttgtttag

SEQ ID NO: 69518 - DNA, 13 bp, Artificial Sequence
  Oligonucleotide for detection of SNP TSC0018092
ctaaacaaattaa

SEQ ID NO: 69519 - DNA, 13 bp, Artificial Sequence
  Oligonucleotide for detection of SNP TSC0018092
ttaattcgtttag

SEQ ID NO: 69520 - DNA, 13 bp, Artificial Sequence
  Oligonucleotide for detection of SNP TSC0018092
ctaaacgaattaa

SEQ ID NO: 69521 - DNA, 13 bp, Artificial Sequence
  Oligonucleotide for detection of SNP TSC0018093
gtttttaaaaaaa

SEQ ID NO: 69522 - DNA, 13 bp, Artificial Sequence
  Oligonucleotide for detection of SNP TSC0018093
tttttttaaaaac

SEQ ID NO: 69523 - DNA, 13 bp, Artificial Sequence
  Oligonucleotide for detection of SNP TSC0018093
gttttttaaaaaa

SEQ ID NO: 69524 - DNA, 13 bp, Artificial Sequence
  Oligonucleotide for detection of SNP TSC0018093
ttttttaaaaaac

SEQ ID NO: 69525 - DNA, 13 bp, Artificial Sequence
  Oligonucleotide for detection of SNP TSC0018093
tttttttaaaagy

SEQ ID NO: 69526 - DNA, 13 bp, Artificial Sequence
  Oligonucleotide for detection of SNP TSC0018093
rcttttaaaaaaa

SEQ ID NO: 69527 - DNA, 13 bp, Artificial Sequence
  Oligonucleotide for detection of SNP TSC0018093
ttttttaaaaagy

SEQ ID NO: 69528 - DNA, 13 bp, Artificial Sequence
  Oligonucleotide for detection of SNP TSC0018093
rctttttaaaaaa

SEQ ID NO: 69529 - DNA, 13 bp, Artificial Sequence
  Oligonucleotide for detection of SNP TSC0018094
ggttgtattttta

SEQ ID NO: 69530 - DNA, 13 bp, Artificial Sequence
  Oligonucleotide for detection of SNP TSC0018094
taaaaatacaacc

SEQ ID NO: 69531 - DNA, 13 bp, Artificial Sequence
  Oligonucleotide for detection of SNP TSC0018094
ggttgtgttttta

SEQ ID NO: 69532 - DNA, 13 bp, Artificial Sequence
  Oligonucleotide for detection of SNP TSC0018094
taaaaacacaacc

SEQ ID NO: 69533 - DNA, 13 bp, Artificial Sequence
  Oligonucleotide for detection of SNP TSC0018094
ggttgcgttttta

SEQ ID NO: 69534 - DNA, 13 bp, Artificial Sequence
  Oligonucleotide for detection of SNP TSC0018094
taaaaacgcaacc

SEQ ID NO: 69535 - DNA, 13 bp, Artificial Sequence
  Oligonucleotide for detection of SNP TSC0018094
taaaaatgtaaty

SEQ ID NO: 69536 - DNA, 13 bp, Artificial Sequence
  Oligonucleotide for detection of SNP TSC0018094
rattacattttta

SEQ ID NO: 69537 - DNA, 13 bp, Artificial Sequence
  Oligonucleotide for detection of SNP TSC0018094
taaaaacgtaaty

SEQ ID NO: 69538 - DNA, 13 bp, Artificial Sequence
  Oligonucleotide for detection of SNP TSC0018094
rattacgttttta

SEQ ID NO: 69539 - DNA, 13 bp, Artificial Sequence
  Oligonucleotide for detection of SNP TSC0018095
attagatgtaggg

SEQ ID NO: 69540 - DNA, 13 bp, Artificial Sequence
  Oligonucleotide for detection of SNP TSC0018095
ccctacatctaat

SEQ ID NO: 69541 - DNA, 13 bp, Artificial Sequence
  Oligonucleotide for detection of SNP TSC0018095
attagacgtaggg

SEQ ID NO: 69542 - DNA, 13 bp, Artificial Sequence
  Oligonucleotide for detection of SNP TSC0018095
ccctacgtctaat

SEQ ID NO: 69543 - DNA, 13 bp, Artificial Sequence
  Oligonucleotide for detection of SNP TSC0018095
ttttatgtttggt

SEQ ID NO: 69544 - DNA, 13 bp, Artificial Sequence
  Oligonucleotide for detection of SNP TSC0018095
accaaacataaaa

SEQ ID NO: 69545 - DNA, 13 bp, Artificial Sequence
  Oligonucleotide for detection of SNP TSC0018095
ttttatatttggt

SEQ ID NO: 69546 - DNA, 13 bp, Artificial Sequence
  Oligonucleotide for detection of SNP TSC0018095
accaaatataaaa

SEQ ID NO: 69547 - DNA, 13 bp, Artificial Sequence
  Oligonucleotide for detection of SNP TSC0018095
ttttacgtttggt

SEQ ID NO: 69548 - DNA, 13 bp, Artificial Sequence
  Oligonucleotide for detection of SNP TSC0018095
accaaacgtaaaa

SEQ ID NO: 69549 - DNA, 13 bp, Artificial Sequence
  Oligonucleotide for detection of SNP TSC0018098
gagaataatttaa

SEQ ID NO: 69550 - DNA, 13 bp, Artificial Sequence
  Oligonucleotide for detection of SNP TSC0018098
ttaaattattctc

SEQ ID NO: 69551 - DNA, 13 bp, Artificial Sequence
  Oligonucleotide for detection of SNP TSC0018098
gagaattatttaa

SEQ ID NO: 69552 - DNA, 13 bp, Artificial Sequence
  Oligonucleotide for detection of SNP TSC0018098
ttaaataattctc

SEQ ID NO: 69553 - DNA, 13 bp, Artificial Sequence
  Oligonucleotide for detection of SNP TSC0018098
ttaggttatttty

SEQ ID NO: 69554 - DNA, 13 bp, Artificial Sequence
  Oligonucleotide for detection of SNP TSC0018098
raaaataacctaa

SEQ ID NO: 69555 - DNA, 13 bp, Artificial Sequence
  Oligonucleotide for detection of SNP TSC0018098
ttaggtgatttty

SEQ ID NO: 69556 - DNA, 13 bp, Artificial Sequence
  Oligonucleotide for detection of SNP TSC0018098
raaaatcacctaa

SEQ ID NO: 69557 - DNA, 13 bp, Artificial Sequence
  Oligonucleotide for detection of SNP TSC0018103
gtaataagagtga

SEQ ID NO: 69558 - DNA, 13 bp, Artificial Sequence
  Oligonucleotide for detection of SNP TSC0018103
tcactcttattac

SEQ ID NO: 69559 - DNA, 13 bp, Artificial Sequence
  Oligonucleotide for detection of SNP TSC0018103
gtaataggagtga

SEQ ID NO: 69560 - DNA, 13 bp, Artificial Sequence
  Oligonucleotide for detection of SNP TSC0018103
tcactcctattac

SEQ ID NO: 69561 - DNA, 13 bp, Artificial Sequence
  Oligonucleotide for detection of SNP TSC0018104
ggttagttattgg

SEQ ID NO: 69562 - DNA, 13 bp, Artificial Sequence
  Oligonucleotide for detection of SNP TSC0018104
ccaataactaacc

SEQ ID NO: 69563 - DNA, 13 bp, Artificial Sequence
  Oligonucleotide for detection of SNP TSC0018104
ggttaggtattgg

SEQ ID NO: 69564 - DNA, 13 bp, Artificial Sequence
  Oligonucleotide for detection of SNP TSC0018104
ccaatacctaacc

SEQ ID NO: 69565 - DNA, 13 bp, Artificial Sequence
  Oligonucleotide for detection of SNP TSC0018104
ggttagttatcgg

SEQ ID NO: 69566 - DNA, 13 bp, Artificial Sequence
  Oligonucleotide for detection of SNP TSC0018104
ccgataactaacc

SEQ ID NO: 69567 - DNA, 13 bp, Artificial Sequence
  Oligonucleotide for detection of SNP TSC0018104
ggttaggtatcgg

SEQ ID NO: 69568 - DNA, 13 bp, Artificial Sequence
  Oligonucleotide for detection of SNP TSC0018104
ccgatacctaacc

SEQ ID NO: 69569 - DNA, 13 bp, Artificial Sequence
  Oligonucleotide for detection of SNP TSC0018104
ttgatagttaaty

SEQ ID NO: 69570 - DNA, 13 bp, Artificial Sequence
  Oligonucleotide for detection of SNP TSC0018104
rattaactatcaa

SEQ ID NO: 69571 - DNA, 13 bp, Artificial Sequence
  Oligonucleotide for detection of SNP TSC0018104
ttgatatttaaty

SEQ ID NO: 69572 - DNA, 13 bp, Artificial Sequence
  Oligonucleotide for detection of SNP TSC0018104
rattaaatatcaa

SEQ ID NO: 69573 - DNA, 13 bp, Artificial Sequence
  Oligonucleotide for detection of SNP TSC0018104
tcgatagttaaty

SEQ ID NO: 69574 - DNA, 13 bp, Artificial Sequence
  Oligonucleotide for detection of SNP TSC0018104
rattaactatcga

SEQ ID NO: 69575 - DNA, 13 bp, Artificial Sequence
  Oligonucleotide for detection of SNP TSC0018104
tcgatatttaaty

SEQ ID NO: 69576 - DNA, 13 bp, Artificial Sequence
  Oligonucleotide for detection of SNP TSC0018104
rattaaatatcga

SEQ ID NO: 69577 - DNA, 13 bp, Artificial Sequence
  Oligonucleotide for detection of SNP TSC0018105
aggaagtgaaaat

SEQ ID NO: 69578 - DNA, 13 bp, Artificial Sequence
  Oligonucleotide for detection of SNP TSC0018105
attttcacttcct

SEQ ID NO: 69579 - DNA, 13 bp, Artificial Sequence
  Oligonucleotide for detection of SNP TSC0018105
aggaagcgaaaat

SEQ ID NO: 69580 - DNA, 13 bp, Artificial Sequence
  Oligonucleotide for detection of SNP TSC0018105
attttcgcttcct

SEQ ID NO: 69581 - DNA, 13 bp, Artificial Sequence
  Oligonucleotide for detection of SNP TSC0018108
ttttttatttaag

SEQ ID NO: 69582 - DNA, 13 bp, Artificial Sequence
  Oligonucleotide for detection of SNP TSC0018108
cttaaataaaaaa

SEQ ID NO: 69583 - DNA, 13 bp, Artificial Sequence
  Oligonucleotide for detection of SNP TSC0018108
tttgggtaaaggg

SEQ ID NO: 69584 - DNA, 13 bp, Artificial Sequence
  Oligonucleotide for detection of SNP TSC0018108
ccctttacccaaa

SEQ ID NO: 69585 - DNA, 13 bp, Artificial Sequence
  Oligonucleotide for detection of SNP TSC0018108
tttggggaaaggg

SEQ ID NO: 69586 - DNA, 13 bp, Artificial Sequence
  Oligonucleotide for detection of SNP TSC0018108
ccctttccccaaa

SEQ ID NO: 69587 - DNA, 13 bp, Artificial Sequence
  Oligonucleotide for detection of SNP TSC0018109
ttatatgtatgtt

SEQ ID NO: 69588 - DNA, 13 bp, Artificial Sequence
  Oligonucleotide for detection of SNP TSC0018109
aacatacatataa

SEQ ID NO: 69589 - DNA, 13 bp, Artificial Sequence
  Oligonucleotide for detection of SNP TSC0018109
ttatacgtatgtt

SEQ ID NO: 69590 - DNA, 13 bp, Artificial Sequence
  Oligonucleotide for detection of SNP TSC0018109
aacatacgtataa

SEQ ID NO: 69591 - DNA, 13 bp, Artificial Sequence
  Oligonucleotide for detection of SNP TSC0018109
agtataggtgtaa

SEQ ID NO: 69592 - DNA, 13 bp, Artificial Sequence
  Oligonucleotide for detection of SNP TSC0018109
ttacacctatact

SEQ ID NO: 69593 - DNA, 13 bp, Artificial Sequence
  Oligonucleotide for detection of SNP TSC0018109
agtatatgtgtaa

SEQ ID NO: 69594 - DNA, 13 bp, Artificial Sequence
  Oligonucleotide for detection of SNP TSC0018109
ttacacatatact

SEQ ID NO: 69595 - DNA, 13 bp, Artificial Sequence
  Oligonucleotide for detection of SNP TSC0018109
agtatacgtgtaa

SEQ ID NO: 69596 - DNA, 13 bp, Artificial Sequence
  Oligonucleotide for detection of SNP TSC0018109
ttacacgtatact

SEQ ID NO: 69597 - DNA, 13 bp, Artificial Sequence
  Oligonucleotide for detection of SNP TSC0018110
atttaggaattaa

SEQ ID NO: 69598 - DNA, 13 bp, Artificial Sequence
  Oligonucleotide for detection of SNP TSC0018110
ttaattcctaaat

SEQ ID NO: 69599 - DNA, 13 bp, Artificial Sequence
  Oligonucleotide for detection of SNP TSC0018110
atttagtaattaa

SEQ ID NO: 69600 - DNA, 13 bp, Artificial Sequence
  Oligonucleotide for detection of SNP TSC0018110
ttaattactaaat

SEQ ID NO: 69601 - DNA, 13 bp, Artificial Sequence
  Oligonucleotide for detection of SNP TSC0018110
ttaatttttggat

SEQ ID NO: 69602 - DNA, 13 bp, Artificial Sequence
  Oligonucleotide for detection of SNP TSC0018110
atccaaaaattaa

SEQ ID NO: 69603 - DNA, 13 bp, Artificial Sequence
  Oligonucleotide for detection of SNP TSC0018110
ttaattattggat

SEQ ID NO: 69604 - DNA, 13 bp, Artificial Sequence
  Oligonucleotide for detection of SNP TSC0018110
atccaataattaa

SEQ ID NO: 69605 - DNA, 13 bp, Artificial Sequence
  Oligonucleotide for detection of SNP TSC0018111
aatgatatttggg

SEQ ID NO: 69606 - DNA, 13 bp, Artificial Sequence
  Oligonucleotide for detection of SNP TSC0018111
cccaaatatcatt

SEQ ID NO: 69607 - DNA, 13 bp, Artificial Sequence
  Oligonucleotide for detection of SNP TSC0018111
aatgatgtttggg

SEQ ID NO: 69608 - DNA, 13 bp, Artificial Sequence
  Oligonucleotide for detection of SNP TSC0018111
cccaaacatcatt

SEQ ID NO: 69609 - DNA, 13 bp, Artificial Sequence
  Oligonucleotide for detection of SNP TSC0018111
aatgacgtttggg

SEQ ID NO: 69610 - DNA, 13 bp, Artificial Sequence
  Oligonucleotide for detection of SNP TSC0018111
cccaaacgtcatt

SEQ ID NO: 69611 - DNA, 13 bp, Artificial Sequence
  Oligonucleotide for detection of SNP TSC0018111
tttaagtgttatt

SEQ ID NO: 69612 - DNA, 13 bp, Artificial Sequence
  Oligonucleotide for detection of SNP TSC0018111
aataacacttaaa

SEQ ID NO: 69613 - DNA, 13 bp, Artificial Sequence
  Oligonucleotide for detection of SNP TSC0018111
tttaagcgttatt

SEQ ID NO: 69614 - DNA, 13 bp, Artificial Sequence
  Oligonucleotide for detection of SNP TSC0018111
aataacgcttaaa

SEQ ID NO: 69615 - DNA, 13 bp, Artificial Sequence
  Oligonucleotide for detection of SNP TSC0018112
ttaatagtaatty

SEQ ID NO: 69616 - DNA, 13 bp, Artificial Sequence
  Oligonucleotide for detection of SNP TSC0018112
raattactattaa

SEQ ID NO: 69617 - DNA, 13 bp, Artificial Sequence
  Oligonucleotide for detection of SNP TSC0018112
ttaataataatty

SEQ ID NO: 69618 - DNA, 13 bp, Artificial Sequence
  Oligonucleotide for detection of SNP TSC0018112
raattattattaa

SEQ ID NO: 69619 - DNA, 13 bp, Artificial Sequence
  Oligonucleotide for detection of SNP TSC0018114
ggagttgtggttt

SEQ ID NO: 69620 - DNA, 13 bp, Artificial Sequence
  Oligonucleotide for detection of SNP TSC0018114
aaaccacaactcc

SEQ ID NO: 69621 - DNA, 13 bp, Artificial Sequence
  Oligonucleotide for detection of SNP TSC0018114
ggagttttggttt

SEQ ID NO: 69622 - DNA, 13 bp, Artificial Sequence
  Oligonucleotide for detection of SNP TSC0018114
aaaccaaaactcc

SEQ ID NO: 69623 - DNA, 13 bp, Artificial Sequence
  Oligonucleotide for detection of SNP TSC0018114
ggagtcgtggttt

SEQ ID NO: 69624 - DNA, 13 bp, Artificial Sequence
  Oligonucleotide for detection of SNP TSC0018114
aaaccacgactcc

SEQ ID NO: 69625 - DNA, 13 bp, Artificial Sequence
  Oligonucleotide for detection of SNP TSC0018114
aaattatgattty

SEQ ID NO: 69626 - DNA, 13 bp, Artificial Sequence
  Oligonucleotide for detection of SNP TSC0018114
raaatcataattt

SEQ ID NO: 69627 - DNA, 13 bp, Artificial Sequence
  Oligonucleotide for detection of SNP TSC0018114
aaattaagattty

SEQ ID NO: 69628 - DNA, 13 bp, Artificial Sequence
  Oligonucleotide for detection of SNP TSC0018114
raaatcttaattt

SEQ ID NO: 69629 - DNA, 13 bp, Artificial Sequence
  Oligonucleotide for detection of SNP TSC0018114
aaattacgattty

SEQ ID NO: 69630 - DNA, 13 bp, Artificial Sequence
  Oligonucleotide for detection of SNP TSC0018114
raaatcgtaattt

SEQ ID NO: 69631 - DNA, 13 bp, Artificial Sequence
  Oligonucleotide for detection of SNP TSC0018115
ttaaaaaaaaatt

SEQ ID NO: 69632 - DNA, 13 bp, Artificial Sequence
  Oligonucleotide for detection of SNP TSC0018115
aatttttttttaa

SEQ ID NO: 69633 - DNA, 13 bp, Artificial Sequence
  Oligonucleotide for detection of SNP TSC0018115
ttaaaagaaaatt

SEQ ID NO: 69634 - DNA, 13 bp, Artificial Sequence
  Oligonucleotide for detection of SNP TSC0018115
aattttcttttaa

SEQ ID NO: 69635 - DNA, 13 bp, Artificial Sequence
  Oligonucleotide for detection of SNP TSC0018116
atttataagtttg

SEQ ID NO: 69636 - DNA, 13 bp, Artificial Sequence
  Oligonucleotide for detection of SNP TSC0018116
caaacttataaat

SEQ ID NO: 69637 - DNA, 13 bp, Artificial Sequence
  Oligonucleotide for detection of SNP TSC0018116
atttatgagtttg

SEQ ID NO: 69638 - DNA, 13 bp, Artificial Sequence
  Oligonucleotide for detection of SNP TSC0018116
caaactcataaat

SEQ ID NO: 69639 - DNA, 13 bp, Artificial Sequence
  Oligonucleotide for detection of SNP TSC0018116
atttacgagtttg

SEQ ID NO: 69640 - DNA, 13 bp, Artificial Sequence
  Oligonucleotide for detection of SNP TSC0018116
caaactcgtaaat

SEQ ID NO: 69641 - DNA, 13 bp, Artificial Sequence
  Oligonucleotide for detection of SNP TSC0018116
taaatttgtgaat

SEQ ID NO: 69642 - DNA, 13 bp, Artificial Sequence
  Oligonucleotide for detection of SNP TSC0018116
attcacaaattta

SEQ ID NO: 69643 - DNA, 13 bp, Artificial Sequence
  Oligonucleotide for detection of SNP TSC0018116
taaattcgtgaat

SEQ ID NO: 69644 - DNA, 13 bp, Artificial Sequence
  Oligonucleotide for detection of SNP TSC0018116
attcacgaattta

SEQ ID NO: 69645 - DNA, 13 bp, Artificial Sequence
  Oligonucleotide for detection of SNP TSC0018117
ttttaagttaaat

SEQ ID NO: 69646 - DNA, 13 bp, Artificial Sequence
  Oligonucleotide for detection of SNP TSC0018117
atttaacttaaaa

SEQ ID NO: 69647 - DNA, 13 bp, Artificial Sequence
  Oligonucleotide for detection of SNP TSC0018117
ttttaaattaaat

SEQ ID NO: 69648 - DNA, 13 bp, Artificial Sequence
  Oligonucleotide for detection of SNP TSC0018117
atttaatttaaaa

SEQ ID NO: 69649 - DNA, 13 bp, Artificial Sequence
  Oligonucleotide for detection of SNP TSC0018118
gtgaatgggaggt

SEQ ID NO: 69650 - DNA, 13 bp, Artificial Sequence
  Oligonucleotide for detection of SNP TSC0018118
acctcccattcac

SEQ ID NO: 69651 - DNA, 13 bp, Artificial Sequence
  Oligonucleotide for detection of SNP TSC0018118
gtgaataggaggt

SEQ ID NO: 69652 - DNA, 13 bp, Artificial Sequence
  Oligonucleotide for detection of SNP TSC0018118
acctcctattcac

SEQ ID NO: 69653 - DNA, 13 bp, Artificial Sequence
  Oligonucleotide for detection of SNP TSC0018121
taattagagttaa

SEQ ID NO: 69654 - DNA, 13 bp, Artificial Sequence
  Oligonucleotide for detection of SNP TSC0018121
ttaactctaatta

SEQ ID NO: 69655 - DNA, 13 bp, Artificial Sequence
  Oligonucleotide for detection of SNP TSC0018121
taattaaagttaa

SEQ ID NO: 69656 - DNA, 13 bp, Artificial Sequence
  Oligonucleotide for detection of SNP TSC0018121
ttaactttaatta

SEQ ID NO: 69657 - DNA, 13 bp, Artificial Sequence
  Oligonucleotide for detection of SNP TSC0018122
tagaaagaatgta

SEQ ID NO: 69658 - DNA, 13 bp, Artificial Sequence
  Oligonucleotide for detection of SNP TSC0018122
tacattctttcta

SEQ ID NO: 69659 - DNA, 13 bp, Artificial Sequence
  Oligonucleotide for detection of SNP TSC0018122
tagaaaaaatgta

SEQ ID NO: 69660 - DNA, 13 bp, Artificial Sequence
  Oligonucleotide for detection of SNP TSC0018122
tacattttttcta

SEQ ID NO: 69661 - DNA, 13 bp, Artificial Sequence
  Oligonucleotide for detection of SNP TSC0018124
tgggaagaggtag

SEQ ID NO: 69662 - DNA, 13 bp, Artificial Sequence
  Oligonucleotide for detection of SNP TSC0018124
ctacctcttccca

SEQ ID NO: 69663 - DNA, 13 bp, Artificial Sequence
  Oligonucleotide for detection of SNP TSC0018124
tgggaaaaggtag

SEQ ID NO: 69664 - DNA, 13 bp, Artificial Sequence
  Oligonucleotide for detection of SNP TSC0018124
ctaccttttccca

SEQ ID NO: 69665 - DNA, 13 bp, Artificial Sequence
  Oligonucleotide for detection of SNP TSC0018124
cgggaagaggtag

SEQ ID NO: 69666 - DNA, 13 bp, Artificial Sequence
  Oligonucleotide for detection of SNP TSC0018124
ctacctcttcccg

SEQ ID NO: 69667 - DNA, 13 bp, Artificial Sequence
  Oligonucleotide for detection of SNP TSC0018124
cgggaaaaggtag

SEQ ID NO: 69668 - DNA, 13 bp, Artificial Sequence
  Oligonucleotide for detection of SNP TSC0018124
ctaccttttcccg

SEQ ID NO: 69669 - DNA, 13 bp, Artificial Sequence
  Oligonucleotide for detection of SNP TSC0018125
ggttaaaagttag

SEQ ID NO: 69670 - DNA, 13 bp, Artificial Sequence
  Oligonucleotide for detection of SNP TSC0018125
ctaacttttaacc

SEQ ID NO: 69671 - DNA, 13 bp, Artificial Sequence
  Oligonucleotide for detection of SNP TSC0018125
ggttaagagttag

SEQ ID NO: 69672 - DNA, 13 bp, Artificial Sequence
  Oligonucleotide for detection of SNP TSC0018125
ctaactcttaacc

SEQ ID NO: 69673 - DNA, 13 bp, Artificial Sequence
  Oligonucleotide for detection of SNP TSC0018128
agtttagaagtgy

SEQ ID NO: 69674 - DNA, 13 bp, Artificial Sequence
  Oligonucleotide for detection of SNP TSC0018128
rcacttctaaact

SEQ ID NO: 69675 - DNA, 13 bp, Artificial Sequence
  Oligonucleotide for detection of SNP TSC0018128
agtttaaaagtgy

SEQ ID NO: 69676 - DNA, 13 bp, Artificial Sequence
  Oligonucleotide for detection of SNP TSC0018128
rcacttttaaact

SEQ ID NO: 69677 - DNA, 13 bp, Artificial Sequence
  Oligonucleotide for detection of SNP TSC0018129
gtattggtttata

SEQ ID NO: 69678 - DNA, 13 bp, Artificial Sequence
  Oligonucleotide for detection of SNP TSC0018129
tataaaccaatac

SEQ ID NO: 69679 - DNA, 13 bp, Artificial Sequence
  Oligonucleotide for detection of SNP TSC0018129
gtattgttttata

SEQ ID NO: 69680 - DNA, 13 bp, Artificial Sequence
  Oligonucleotide for detection of SNP TSC0018129
tataaaacaatac

SEQ ID NO: 69681 - DNA, 13 bp, Artificial Sequence
  Oligonucleotide for detection of SNP TSC0018129
tgtgagttaatay

SEQ ID NO: 69682 - DNA, 13 bp, Artificial Sequence
  Oligonucleotide for detection of SNP TSC0018129
rtattaactcaca

SEQ ID NO: 69683 - DNA, 13 bp, Artificial Sequence
  Oligonucleotide for detection of SNP TSC0018129
tgtgagataatay

SEQ ID NO: 69684 - DNA, 13 bp, Artificial Sequence
  Oligonucleotide for detection of SNP TSC0018129
rtattatctcaca

SEQ ID NO: 69685 - DNA, 13 bp, Artificial Sequence
  Oligonucleotide for detection of SNP TSC0018133
ttgggggtgggga

SEQ ID NO: 69686 - DNA, 13 bp, Artificial Sequence
  Oligonucleotide for detection of SNP TSC0018133
tccccacccccaa

SEQ ID NO: 69687 - DNA, 13 bp, Artificial Sequence
  Oligonucleotide for detection of SNP TSC0018133
ttggggatgggga

SEQ ID NO: 69688 - DNA, 13 bp, Artificial Sequence
  Oligonucleotide for detection of SNP TSC0018133
tccccatccccaa

SEQ ID NO: 69689 - DNA, 13 bp, Artificial Sequence
  Oligonucleotide for detection of SNP TSC0018133
ttgggggcgggga

SEQ ID NO: 69690 - DNA, 13 bp, Artificial Sequence
  Oligonucleotide for detection of SNP TSC0018133
tccccgcccccaa

SEQ ID NO: 69691 - DNA, 13 bp, Artificial Sequence
  Oligonucleotide for detection of SNP TSC0018133
ttggggacgggga

SEQ ID NO: 69692 - DNA, 13 bp, Artificial Sequence
  Oligonucleotide for detection of SNP TSC0018133
tccccgtccccaa

SEQ ID NO: 69693 - DNA, 13 bp, Artificial Sequence
  Oligonucleotide for detection of SNP TSC0018134
ttagggaattaat

SEQ ID NO: 69694 - DNA, 13 bp, Artificial Sequence
  Oligonucleotide for detection of SNP TSC0018134
attaattccctaa

SEQ ID NO: 69695 - DNA, 13 bp, Artificial Sequence
  Oligonucleotide for detection of SNP TSC0018134
ttaggggattaat

SEQ ID NO: 69696 - DNA, 13 bp, Artificial Sequence
  Oligonucleotide for detection of SNP TSC0018134
attaatcccctaa

SEQ ID NO: 69697 - DNA, 13 bp, Artificial Sequence
  Oligonucleotide for detection of SNP TSC0018142
tgattgggaaata

SEQ ID NO: 69698 - DNA, 13 bp, Artificial Sequence
  Oligonucleotide for detection of SNP TSC0018142
tatttcccaatca

SEQ ID NO: 69699 - DNA, 13 bp, Artificial Sequence
  Oligonucleotide for detection of SNP TSC0018142
tgattgtgaaata

SEQ ID NO: 69700 - DNA, 13 bp, Artificial Sequence
  Oligonucleotide for detection of SNP TSC0018142
tatttcacaatca

SEQ ID NO: 69701 - DNA, 13 bp, Artificial Sequence
  Oligonucleotide for detection of SNP TSC0018142
tgatcgggaaata

SEQ ID NO: 69702 - DNA, 13 bp, Artificial Sequence
  Oligonucleotide for detection of SNP TSC0018142
tatttcccgatca

SEQ ID NO: 69703 - DNA, 13 bp, Artificial Sequence
  Oligonucleotide for detection of SNP TSC0018142
tgatcgtgaaata

SEQ ID NO: 69704 - DNA, 13 bp, Artificial Sequence
  Oligonucleotide for detection of SNP TSC0018142
tatttcacgatca

SEQ ID NO: 69705 - DNA, 13 bp, Artificial Sequence
  Oligonucleotide for detection of SNP TSC0018142
tattttttgatta

SEQ ID NO: 69706 - DNA, 13 bp, Artificial Sequence
  Oligonucleotide for detection of SNP TSC0018142
taatcaaaaaata

SEQ ID NO: 69707 - DNA, 13 bp, Artificial Sequence
  Oligonucleotide for detection of SNP TSC0018142
tattttatgatta

SEQ ID NO: 69708 - DNA, 13 bp, Artificial Sequence
  Oligonucleotide for detection of SNP TSC0018142
taatcataaaata

SEQ ID NO: 69709 - DNA, 13 bp, Artificial Sequence
  Oligonucleotide for detection of SNP TSC0018142
tatttttcgatta

SEQ ID NO: 69710 - DNA, 13 bp, Artificial Sequence
  Oligonucleotide for detection of SNP TSC0018142
taatcgaaaaata

SEQ ID NO: 69711 - DNA, 13 bp, Artificial Sequence
  Oligonucleotide for detection of SNP TSC0018142
tattttacgatta

SEQ ID NO: 69712 - DNA, 13 bp, Artificial Sequence
  Oligonucleotide for detection of SNP TSC0018142
taatcgtaaaata

SEQ ID NO: 69713 - DNA, 13 bp, Artificial Sequence
  Oligonucleotide for detection of SNP TSC0018143
gaggagaaagaaa

SEQ ID NO: 69714 - DNA, 13 bp, Artificial Sequence
  Oligonucleotide for detection of SNP TSC0018143
tttctttctcctc

SEQ ID NO: 69715 - DNA, 13 bp, Artificial Sequence
  Oligonucleotide for detection of SNP TSC0018143
gaggaggaagaaa

SEQ ID NO: 69716 - DNA, 13 bp, Artificial Sequence
  Oligonucleotide for detection of SNP TSC0018143
tttcttcctcctc

SEQ ID NO: 69717 - DNA, 13 bp, Artificial Sequence
  Oligonucleotide for detection of SNP TSC0018151
atttaatggtttg

SEQ ID NO: 69718 - DNA, 13 bp, Artificial Sequence
  Oligonucleotide for detection of SNP TSC0018151
caaaccattaaat

SEQ ID NO: 69719 - DNA, 13 bp, Artificial Sequence
  Oligonucleotide for detection of SNP TSC0018151
atttaacggtttg

SEQ ID NO: 69720 - DNA, 13 bp, Artificial Sequence
  Oligonucleotide for detection of SNP TSC0018151
caaaccgttaaat

SEQ ID NO: 69721 - DNA, 13 bp, Artificial Sequence
  Oligonucleotide for detection of SNP TSC0018151
taaattgttagat

SEQ ID NO: 69722 - DNA, 13 bp, Artificial Sequence
  Oligonucleotide for detection of SNP TSC0018151
atctaacaattta

SEQ ID NO: 69723 - DNA, 13 bp, Artificial Sequence
  Oligonucleotide for detection of SNP TSC0018151
taaattattagat

SEQ ID NO: 69724 - DNA, 13 bp, Artificial Sequence
  Oligonucleotide for detection of SNP TSC0018151
atctaataattta

SEQ ID NO: 69725 - DNA, 13 bp, Artificial Sequence
  Oligonucleotide for detection of SNP TSC0018151
taaatcgttagat

SEQ ID NO: 69726 - DNA, 13 bp, Artificial Sequence
  Oligonucleotide for detection of SNP TSC0018151
atctaacgattta

SEQ ID NO: 69727 - DNA, 13 bp, Artificial Sequence
  Oligonucleotide for detection of SNP TSC0018158
ttttgtggtaagy

SEQ ID NO: 69728 - DNA, 13 bp, Artificial Sequence
  Oligonucleotide for detection of SNP TSC0018158
rcttaccacaaaa

SEQ ID NO: 69729 - DNA, 13 bp, Artificial Sequence
  Oligonucleotide for detection of SNP TSC0018158
ttttgtagtaagy

SEQ ID NO: 69730 - DNA, 13 bp, Artificial Sequence
  Oligonucleotide for detection of SNP TSC0018158
rcttactacaaaa

SEQ ID NO: 69731 - DNA, 13 bp, Artificial Sequence
  Oligonucleotide for detection of SNP TSC0018159
ttggtagtggttg

SEQ ID NO: 69732 - DNA, 13 bp, Artificial Sequence
  Oligonucleotide for detection of SNP TSC0018159
caaccactaccaa

SEQ ID NO: 69733 - DNA, 13 bp, Artificial Sequence
  Oligonucleotide for detection of SNP TSC0018159
ttggtaatggttg

SEQ ID NO: 69734 - DNA, 13 bp, Artificial Sequence
  Oligonucleotide for detection of SNP TSC0018159
caaccattaccaa

SEQ ID NO: 69735 - DNA, 13 bp, Artificial Sequence
  Oligonucleotide for detection of SNP TSC0018159
tcggtagtggttg

SEQ ID NO: 69736 - DNA, 13 bp, Artificial Sequence
  Oligonucleotide for detection of SNP TSC0018159
caaccactaccga

SEQ ID NO: 69737 - DNA, 13 bp, Artificial Sequence
  Oligonucleotide for detection of SNP TSC0018159
tcggtaatggttg

SEQ ID NO: 69738 - DNA, 13 bp, Artificial Sequence
  Oligonucleotide for detection of SNP TSC0018159
caaccattaccga

SEQ ID NO: 69739 - DNA, 13 bp, Artificial Sequence
  Oligonucleotide for detection of SNP TSC0018162
gttggaattgttg

SEQ ID NO: 69740 - DNA, 13 bp, Artificial Sequence
  Oligonucleotide for detection of SNP TSC0018162
caacaattccaac

SEQ ID NO: 69741 - DNA, 13 bp, Artificial Sequence
  Oligonucleotide for detection of SNP TSC0018162
gttggagttgttg

SEQ ID NO: 69742 - DNA, 13 bp, Artificial Sequence
  Oligonucleotide for detection of SNP TSC0018162
caacaactccaac

SEQ ID NO: 69743 - DNA, 13 bp, Artificial Sequence
  Oligonucleotide for detection of SNP TSC0018163
gattgaaatgggg

SEQ ID NO: 69744 - DNA, 13 bp, Artificial Sequence
  Oligonucleotide for detection of SNP TSC0018163
ccccatttcaatc

SEQ ID NO: 69745 - DNA, 13 bp, Artificial Sequence
  Oligonucleotide for detection of SNP TSC0018163
gattgagatgggg

SEQ ID NO: 69746 - DNA, 13 bp, Artificial Sequence
  Oligonucleotide for detection of SNP TSC0018163
ccccatctcaatc

SEQ ID NO: 69747 - DNA, 13 bp, Artificial Sequence
  Oligonucleotide for detection of SNP TSC0018168
gagaaggagagay

SEQ ID NO: 69748 - DNA, 13 bp, Artificial Sequence
  Oligonucleotide for detection of SNP TSC0018168
rtctctccttctc

SEQ ID NO: 69749 - DNA, 13 bp, Artificial Sequence
  Oligonucleotide for detection of SNP TSC0018168
gagaagaagagay

SEQ ID NO: 69750 - DNA, 13 bp, Artificial Sequence
  Oligonucleotide for detection of SNP TSC0018168
rtctcttcttctc

SEQ ID NO: 69751 - DNA, 13 bp, Artificial Sequence
  Oligonucleotide for detection of SNP TSC0018169
tatgaaatgttag

SEQ ID NO: 69752 - DNA, 13 bp, Artificial Sequence
  Oligonucleotide for detection of SNP TSC0018169
ctaacatttcata

SEQ ID NO: 69753 - DNA, 13 bp, Artificial Sequence
  Oligonucleotide for detection of SNP TSC0018169
tatgaagtgttag

SEQ ID NO: 69754 - DNA, 13 bp, Artificial Sequence
  Oligonucleotide for detection of SNP TSC0018169
ctaacacttcata

SEQ ID NO: 69755 - DNA, 13 bp, Artificial Sequence
  Oligonucleotide for detection of SNP TSC0018170
gttgggattagtg

SEQ ID NO: 69756 - DNA, 13 bp, Artificial Sequence
  Oligonucleotide for detection of SNP TSC0018170
cactaatcccaac

SEQ ID NO: 69757 - DNA, 13 bp, Artificial Sequence
  Oligonucleotide for detection of SNP TSC0018170
gttgggtttagtg

SEQ ID NO: 69758 - DNA, 13 bp, Artificial Sequence
  Oligonucleotide for detection of SNP TSC0018170
cactaaacccaac

SEQ ID NO: 69759 - DNA, 13 bp, Artificial Sequence
  Oligonucleotide for detection of SNP TSC0018170
gttggggttagtg

SEQ ID NO: 69760 - DNA, 13 bp, Artificial Sequence
  Oligonucleotide for detection of SNP TSC0018170
cactaaccccaac

SEQ ID NO: 69761 - DNA, 13 bp, Artificial Sequence
  Oligonucleotide for detection of SNP TSC0018170
tattggttttagy

SEQ ID NO: 69762 - DNA, 13 bp, Artificial Sequence
  Oligonucleotide for detection of SNP TSC0018170
rctaaaaccaata

SEQ ID NO: 69763 - DNA, 13 bp, Artificial Sequence
  Oligonucleotide for detection of SNP TSC0018170
tattgggtttagy

SEQ ID NO: 69764 - DNA, 13 bp, Artificial Sequence
  Oligonucleotide for detection of SNP TSC0018170
rctaaacccaata

SEQ ID NO: 69765 - DNA, 13 bp, Artificial Sequence
  Oligonucleotide for detection of SNP TSC0018171
tgaaatgtaattt

SEQ ID NO: 69766 - DNA, 13 bp, Artificial Sequence
  Oligonucleotide for detection of SNP TSC0018171
aaattacatttca

SEQ ID NO: 69767 - DNA, 13 bp, Artificial Sequence
  Oligonucleotide for detection of SNP TSC0018171
tgaaatataattt

SEQ ID NO: 69768 - DNA, 13 bp, Artificial Sequence
  Oligonucleotide for detection of SNP TSC0018171
aaattatatttca

SEQ ID NO: 69769 - DNA, 13 bp, Artificial Sequence
  Oligonucleotide for detection of SNP TSC0018171
cgaaatgtaattt

SEQ ID NO: 69770 - DNA, 13 bp, Artificial Sequence
  Oligonucleotide for detection of SNP TSC0018171
aaattacatttcg

SEQ ID NO: 69771 - DNA, 13 bp, Artificial Sequence
  Oligonucleotide for detection of SNP TSC0018171
cgaaatataattt

SEQ ID NO: 69772 - DNA, 13 bp, Artificial Sequence
  Oligonucleotide for detection of SNP TSC0018171
aaattatatttcg

SEQ ID NO: 69773 - DNA, 13 bp, Artificial Sequence
  Oligonucleotide for detection of SNP TSC0018172
gggagggtgttat

SEQ ID NO: 69774 - DNA, 13 bp, Artificial Sequence
  Oligonucleotide for detection of SNP TSC0018172
ataacaccctccc

SEQ ID NO: 69775 - DNA, 13 bp, Artificial Sequence
  Oligonucleotide for detection of SNP TSC0018172
gggaggatgttat

SEQ ID NO: 69776 - DNA, 13 bp, Artificial Sequence
  Oligonucleotide for detection of SNP TSC0018172
ataacatcctccc

SEQ ID NO: 69777 - DNA, 13 bp, Artificial Sequence
  Oligonucleotide for detection of SNP TSC0018173
ttattaaatagat

SEQ ID NO: 69778 - DNA, 13 bp, Artificial Sequence
  Oligonucleotide for detection of SNP TSC0018173
atctatttaataa

SEQ ID NO: 69779 - DNA, 13 bp, Artificial Sequence
  Oligonucleotide for detection of SNP TSC0018173
ttattatatagat

SEQ ID NO: 69780 - DNA, 13 bp, Artificial Sequence
  Oligonucleotide for detection of SNP TSC0018173
atctatataataa

SEQ ID NO: 69781 - DNA, 13 bp, Artificial Sequence
  Oligonucleotide for detection of SNP TSC0018173
atttgtttaatgg

SEQ ID NO: 69782 - DNA, 13 bp, Artificial Sequence
  Oligonucleotide for detection of SNP TSC0018173
ccattaaacaaat

SEQ ID NO: 69783 - DNA, 13 bp, Artificial Sequence
  Oligonucleotide for detection of SNP TSC0018173
atttgtataatgg

SEQ ID NO: 69784 - DNA, 13 bp, Artificial Sequence
  Oligonucleotide for detection of SNP TSC0018173
ccattatacaaat

SEQ ID NO: 69785 - DNA, 13 bp, Artificial Sequence
  Oligonucleotide for detection of SNP TSC0018174
aaaaatgttggtt

SEQ ID NO: 69786 - DNA, 13 bp, Artificial Sequence
  Oligonucleotide for detection of SNP TSC0018174
aaccaacattttt

SEQ ID NO: 69787 - DNA, 13 bp, Artificial Sequence
  Oligonucleotide for detection of SNP TSC0018174
aaaaattttggtt

SEQ ID NO: 69788 - DNA, 13 bp, Artificial Sequence
  Oligonucleotide for detection of SNP TSC0018174
aaccaaaattttt

SEQ ID NO: 69789 - DNA, 13 bp, Artificial Sequence
  Oligonucleotide for detection of SNP TSC0018174
aattagtattttt

SEQ ID NO: 69790 - DNA, 13 bp, Artificial Sequence
  Oligonucleotide for detection of SNP TSC0018174
aaaaatactaatt

SEQ ID NO: 69791 - DNA, 13 bp, Artificial Sequence
  Oligonucleotide for detection of SNP TSC0018174
aattagaattttt

SEQ ID NO: 69792 - DNA, 13 bp, Artificial Sequence
  Oligonucleotide for detection of SNP TSC0018174
aaaaattctaatt

SEQ ID NO: 69793 - DNA, 13 bp, Artificial Sequence
  Oligonucleotide for detection of SNP TSC0018175
ggtttgagtgatt

SEQ ID NO: 69794 - DNA, 13 bp, Artificial Sequence
  Oligonucleotide for detection of SNP TSC0018175
aatcactcaaacc

SEQ ID NO: 69795 - DNA, 13 bp, Artificial Sequence
  Oligonucleotide for detection of SNP TSC0018175
ggtttgtgtgatt

SEQ ID NO: 69796 - DNA, 13 bp, Artificial Sequence
  Oligonucleotide for detection of SNP TSC0018175
aatcacacaaacc

SEQ ID NO: 69797 - DNA, 13 bp, Artificial Sequence
  Oligonucleotide for detection of SNP TSC0018175
ggtttgcgtgatt

SEQ ID NO: 69798 - DNA, 13 bp, Artificial Sequence
  Oligonucleotide for detection of SNP TSC0018175
aatcacgcaaacc

SEQ ID NO: 69799 - DNA, 13 bp, Artificial Sequence
  Oligonucleotide for detection of SNP TSC0018175
aattatttaaaty

SEQ ID NO: 69800 - DNA, 13 bp, Artificial Sequence
  Oligonucleotide for detection of SNP TSC0018175
ratttaaataatt

SEQ ID NO: 69801 - DNA, 13 bp, Artificial Sequence
  Oligonucleotide for detection of SNP TSC0018175
aattatgtaaaty

SEQ ID NO: 69802 - DNA, 13 bp, Artificial Sequence
  Oligonucleotide for detection of SNP TSC0018175
ratttacataatt

SEQ ID NO: 69803 - DNA, 13 bp, Artificial Sequence
  Oligonucleotide for detection of SNP TSC0018175
aattacgtaaaty

SEQ ID NO: 69804 - DNA, 13 bp, Artificial Sequence
  Oligonucleotide for detection of SNP TSC0018175
ratttacgtaatt

SEQ ID NO: 69805 - DNA, 13 bp, Artificial Sequence
  Oligonucleotide for detection of SNP TSC0018176
gggttgtgtttta

SEQ ID NO: 69806 - DNA, 13 bp, Artificial Sequence
  Oligonucleotide for detection of SNP TSC0018176
taaaacacaaccc

SEQ ID NO: 69807 - DNA, 13 bp, Artificial Sequence
  Oligonucleotide for detection of SNP TSC0018176
gggttgggtttta

SEQ ID NO: 69808 - DNA, 13 bp, Artificial Sequence
  Oligonucleotide for detection of SNP TSC0018176
taaaacccaaccc

SEQ ID NO: 69809 - DNA, 13 bp, Artificial Sequence
  Oligonucleotide for detection of SNP TSC0018176
gggttgcgtttta

SEQ ID NO: 69810 - DNA, 13 bp, Artificial Sequence
  Oligonucleotide for detection of SNP TSC0018176
taaaacgcaaccc

SEQ ID NO: 69811 - DNA, 13 bp, Artificial Sequence
  Oligonucleotide for detection of SNP TSC0018176
taagatgtagtty

SEQ ID NO: 69812 - DNA, 13 bp, Artificial Sequence
  Oligonucleotide for detection of SNP TSC0018176
raactacatctta

SEQ ID NO: 69813 - DNA, 13 bp, Artificial Sequence
  Oligonucleotide for detection of SNP TSC0018176
taagatttagtty

SEQ ID NO: 69814 - DNA, 13 bp, Artificial Sequence
  Oligonucleotide for detection of SNP TSC0018176
raactaaatctta

SEQ ID NO: 69815 - DNA, 13 bp, Artificial Sequence
  Oligonucleotide for detection of SNP TSC0018176
taagacgtagtty

SEQ ID NO: 69816 - DNA, 13 bp, Artificial Sequence
  Oligonucleotide for detection of SNP TSC0018176
raactacgtctta

SEQ ID NO: 69817 - DNA, 13 bp, Artificial Sequence
  Oligonucleotide for detection of SNP TSC0018178
aagtaaatgtggg

SEQ ID NO: 69818 - DNA, 13 bp, Artificial Sequence
  Oligonucleotide for detection of SNP TSC0018178
cccacatttactt

SEQ ID NO: 69819 - DNA, 13 bp, Artificial Sequence
  Oligonucleotide for detection of SNP TSC0018178
aagtaagtgtggg

SEQ ID NO: 69820 - DNA, 13 bp, Artificial Sequence
  Oligonucleotide for detection of SNP TSC0018178
cccacacttactt

SEQ ID NO: 69821 - DNA, 13 bp, Artificial Sequence
  Oligonucleotide for detection of SNP TSC0018179
aatgtaaggatta

SEQ ID NO: 69822 - DNA, 13 bp, Artificial Sequence
  Oligonucleotide for detection of SNP TSC0018179
taatccttacatt

SEQ ID NO: 69823 - DNA, 13 bp, Artificial Sequence
  Oligonucleotide for detection of SNP TSC0018179
aatgtatggatta

SEQ ID NO: 69824 - DNA, 13 bp, Artificial Sequence
  Oligonucleotide for detection of SNP TSC0018179
taatccatacatt

SEQ ID NO: 69825 - DNA, 13 bp, Artificial Sequence
  Oligonucleotide for detection of SNP TSC0018179
taatttttgtatt

SEQ ID NO: 69826 - DNA, 13 bp, Artificial Sequence
  Oligonucleotide for detection of SNP TSC0018179
aatacaaaaatta

SEQ ID NO: 69827 - DNA, 13 bp, Artificial Sequence
  Oligonucleotide for detection of SNP TSC0018179
taatttatgtatt

SEQ ID NO: 69828 - DNA, 13 bp, Artificial Sequence
  Oligonucleotide for detection of SNP TSC0018179
aatacataaatta

SEQ ID NO: 69829 - DNA, 13 bp, Artificial Sequence
  Oligonucleotide for detection of SNP TSC0018180
tttatgattatta

SEQ ID NO: 69830 - DNA, 13 bp, Artificial Sequence
  Oligonucleotide for detection of SNP TSC0018180
taataatcataaa

SEQ ID NO: 69831 - DNA, 13 bp, Artificial Sequence
  Oligonucleotide for detection of SNP TSC0018180
tttatgtttatta

SEQ ID NO: 69832 - DNA, 13 bp, Artificial Sequence
  Oligonucleotide for detection of SNP TSC0018180
taataaacataaa

SEQ ID NO: 69833 - DNA, 13 bp, Artificial Sequence
  Oligonucleotide for detection of SNP TSC0018180
tggtagttatagg

SEQ ID NO: 69834 - DNA, 13 bp, Artificial Sequence
  Oligonucleotide for detection of SNP TSC0018180
cctataactacca

SEQ ID NO: 69835 - DNA, 13 bp, Artificial Sequence
  Oligonucleotide for detection of SNP TSC0018180
tggtagatatagg

SEQ ID NO: 69836 - DNA, 13 bp, Artificial Sequence
  Oligonucleotide for detection of SNP TSC0018180
cctatatctacca

SEQ ID NO: 69837 - DNA, 13 bp, Artificial Sequence
  Oligonucleotide for detection of SNP TSC0018181
attttgtttttgt

SEQ ID NO: 69838 - DNA, 13 bp, Artificial Sequence
  Oligonucleotide for detection of SNP TSC0018181
acaaaaacaaaat

SEQ ID NO: 69839 - DNA, 13 bp, Artificial Sequence
  Oligonucleotide for detection of SNP TSC0018181
attttggttttgt

SEQ ID NO: 69840 - DNA, 13 bp, Artificial Sequence
  Oligonucleotide for detection of SNP TSC0018181
acaaaaccaaaat

SEQ ID NO: 69841 - DNA, 13 bp, Artificial Sequence
  Oligonucleotide for detection of SNP TSC0018181
ataaaagtaagat

SEQ ID NO: 69842 - DNA, 13 bp, Artificial Sequence
  Oligonucleotide for detection of SNP TSC0018181
atcttacttttat

SEQ ID NO: 69843 - DNA, 13 bp, Artificial Sequence
  Oligonucleotide for detection of SNP TSC0018181
ataaaattaagat

SEQ ID NO: 69844 - DNA, 13 bp, Artificial Sequence
  Oligonucleotide for detection of SNP TSC0018181
atcttaattttat

SEQ ID NO: 69845 - DNA, 13 bp, Artificial Sequence
  Oligonucleotide for detection of SNP TSC0018182
gtttttattttgg

SEQ ID NO: 69846 - DNA, 13 bp, Artificial Sequence
  Oligonucleotide for detection of SNP TSC0018182
ccaaaataaaaac

SEQ ID NO: 69847 - DNA, 13 bp, Artificial Sequence
  Oligonucleotide for detection of SNP TSC0018182
gtttttatttcgg

SEQ ID NO: 69848 - DNA, 13 bp, Artificial Sequence
  Oligonucleotide for detection of SNP TSC0018182
ccgaaataaaaac

SEQ ID NO: 69849 - DNA, 13 bp, Artificial Sequence
  Oligonucleotide for detection of SNP TSC0018182
gtttttttttcgg

SEQ ID NO: 69850 - DNA, 13 bp, Artificial Sequence
  Oligonucleotide for detection of SNP TSC0018182
ccgaaaaaaaaac

SEQ ID NO: 69851 - DNA, 13 bp, Artificial Sequence
  Oligonucleotide for detection of SNP TSC0018182
ttggaatggaggy

SEQ ID NO: 69852 - DNA, 13 bp, Artificial Sequence
  Oligonucleotide for detection of SNP TSC0018182
rcctccattccaa

SEQ ID NO: 69853 - DNA, 13 bp, Artificial Sequence
  Oligonucleotide for detection of SNP TSC0018182
ttggaagggaggy

SEQ ID NO: 69854 - DNA, 13 bp, Artificial Sequence
  Oligonucleotide for detection of SNP TSC0018182
rcctcccttccaa

SEQ ID NO: 69855 - DNA, 13 bp, Artificial Sequence
  Oligonucleotide for detection of SNP TSC0018182
tcggaatggaggy

SEQ ID NO: 69856 - DNA, 13 bp, Artificial Sequence
  Oligonucleotide for detection of SNP TSC0018182
rcctccattccga

SEQ ID NO: 69857 - DNA, 13 bp, Artificial Sequence
  Oligonucleotide for detection of SNP TSC0018182
tcggaagggaggy

SEQ ID NO: 69858 - DNA, 13 bp, Artificial Sequence
  Oligonucleotide for detection of SNP TSC0018182
rcctcccttccga

SEQ ID NO: 69859 - DNA, 13 bp, Artificial Sequence
  Oligonucleotide for detection of SNP TSC0018185
gatggtattatgt

SEQ ID NO: 69860 - DNA, 13 bp, Artificial Sequence
  Oligonucleotide for detection of SNP TSC0018185
acataataccatc

SEQ ID NO: 69861 - DNA, 13 bp, Artificial Sequence
  Oligonucleotide for detection of SNP TSC0018185
gatggtgttatgt

SEQ ID NO: 69862 - DNA, 13 bp, Artificial Sequence
  Oligonucleotide for detection of SNP TSC0018185
acataacaccatc

SEQ ID NO: 69863 - DNA, 13 bp, Artificial Sequence
  Oligonucleotide for detection of SNP TSC0018185
gatggcgttatgt

SEQ ID NO: 69864 - DNA, 13 bp, Artificial Sequence
  Oligonucleotide for detection of SNP TSC0018185
acataacgccatc

SEQ ID NO: 69865 - DNA, 13 bp, Artificial Sequence
  Oligonucleotide for detection of SNP TSC0018185
atatggtgttaty

SEQ ID NO: 69866 - DNA, 13 bp, Artificial Sequence
  Oligonucleotide for detection of SNP TSC0018185
rataacaccatat

SEQ ID NO: 69867 - DNA, 13 bp, Artificial Sequence
  Oligonucleotide for detection of SNP TSC0018185
atatggcgttaty

SEQ ID NO: 69868 - DNA, 13 bp, Artificial Sequence
  Oligonucleotide for detection of SNP TSC0018185
rataacgccatat

SEQ ID NO: 69869 - DNA, 13 bp, Artificial Sequence
  Oligonucleotide for detection of SNP TSC0018186
attggggataaat

SEQ ID NO: 69870 - DNA, 13 bp, Artificial Sequence
  Oligonucleotide for detection of SNP TSC0018186
atttatccccaat

SEQ ID NO: 69871 - DNA, 13 bp, Artificial Sequence
  Oligonucleotide for detection of SNP TSC0018186
attgggaataaat

SEQ ID NO: 69872 - DNA, 13 bp, Artificial Sequence
  Oligonucleotide for detection of SNP TSC0018186
atttattcccaat

SEQ ID NO: 69873 - DNA, 13 bp, Artificial Sequence
  Oligonucleotide for detection of SNP TSC0018187
agttgttaatttt

SEQ ID NO: 69874 - DNA, 13 bp, Artificial Sequence
  Oligonucleotide for detection of SNP TSC0018187
aaaattaacaact

SEQ ID NO: 69875 - DNA, 13 bp, Artificial Sequence
  Oligonucleotide for detection of SNP TSC0018187
agttgtgaatttt

SEQ ID NO: 69876 - DNA, 13 bp, Artificial Sequence
  Oligonucleotide for detection of SNP TSC0018187
aaaattcacaact

SEQ ID NO: 69877 - DNA, 13 bp, Artificial Sequence
  Oligonucleotide for detection of SNP TSC0018187
agttgcgaatttt

SEQ ID NO: 69878 - DNA, 13 bp, Artificial Sequence
  Oligonucleotide for detection of SNP TSC0018187
aaaattcgcaact

SEQ ID NO: 69879 - DNA, 13 bp, Artificial Sequence
  Oligonucleotide for detection of SNP TSC0018187
agaattggtaatt

SEQ ID NO: 69880 - DNA, 13 bp, Artificial Sequence
  Oligonucleotide for detection of SNP TSC0018187
aattaccaattct

SEQ ID NO: 69881 - DNA, 13 bp, Artificial Sequence
  Oligonucleotide for detection of SNP TSC0018187
agaatttgtaatt

SEQ ID NO: 69882 - DNA, 13 bp, Artificial Sequence
  Oligonucleotide for detection of SNP TSC0018187
aattacaaattct

SEQ ID NO: 69883 - DNA, 13 bp, Artificial Sequence
  Oligonucleotide for detection of SNP TSC0018187
agaattcgtaatt

SEQ ID NO: 69884 - DNA, 13 bp, Artificial Sequence
  Oligonucleotide for detection of SNP TSC0018187
aattacgaattct

SEQ ID NO: 69885 - DNA, 13 bp, Artificial Sequence
  Oligonucleotide for detection of SNP TSC0018188
gtaagtaatgaaa

SEQ ID NO: 69886 - DNA, 13 bp, Artificial Sequence
  Oligonucleotide for detection of SNP TSC0018188
tttcattacttac

SEQ ID NO: 69887 - DNA, 13 bp, Artificial Sequence
  Oligonucleotide for detection of SNP TSC0018188
gtaagttatgaaa

SEQ ID NO: 69888 - DNA, 13 bp, Artificial Sequence
  Oligonucleotide for detection of SNP TSC0018188
tttcataacttac

SEQ ID NO: 69889 - DNA, 13 bp, Artificial Sequence
  Oligonucleotide for detection of SNP TSC0018188
ttttattatttay

SEQ ID NO: 69890 - DNA, 13 bp, Artificial Sequence
  Oligonucleotide for detection of SNP TSC0018188
rtaaataataaaa

SEQ ID NO: 69891 - DNA, 13 bp, Artificial Sequence
  Oligonucleotide for detection of SNP TSC0018188
ttttataatttay

SEQ ID NO: 69892 - DNA, 13 bp, Artificial Sequence
  Oligonucleotide for detection of SNP TSC0018188
rtaaattataaaa

SEQ ID NO: 69893 - DNA, 13 bp, Artificial Sequence
  Oligonucleotide for detection of SNP TSC0018189
taagtaatgaaaa

SEQ ID NO: 69894 - DNA, 13 bp, Artificial Sequence
  Oligonucleotide for detection of SNP TSC0018189
ttttcattactta

SEQ ID NO: 69895 - DNA, 13 bp, Artificial Sequence
  Oligonucleotide for detection of SNP TSC0018189
taagtagtgaaaa

SEQ ID NO: 69896 - DNA, 13 bp, Artificial Sequence
  Oligonucleotide for detection of SNP TSC0018189
ttttcactactta

SEQ ID NO: 69897 - DNA, 13 bp, Artificial Sequence
  Oligonucleotide for detection of SNP TSC0018191
gagattatattgy

SEQ ID NO: 69898 - DNA, 13 bp, Artificial Sequence
  Oligonucleotide for detection of SNP TSC0018191
rcaatataatctc

SEQ ID NO: 69899 - DNA, 13 bp, Artificial Sequence
  Oligonucleotide for detection of SNP TSC0018191
gagattgtattgy

SEQ ID NO: 69900 - DNA, 13 bp, Artificial Sequence
  Oligonucleotide for detection of SNP TSC0018191
rcaatacaatctc

SEQ ID NO: 69901 - DNA, 13 bp, Artificial Sequence
  Oligonucleotide for detection of SNP TSC0018191
gagattatatcgy

SEQ ID NO: 69902 - DNA, 13 bp, Artificial Sequence
  Oligonucleotide for detection of SNP TSC0018191
rcgatataatctc

SEQ ID NO: 69903 - DNA, 13 bp, Artificial Sequence
  Oligonucleotide for detection of SNP TSC0018191
gagatcgtattgy

SEQ ID NO: 69904 - DNA, 13 bp, Artificial Sequence
  Oligonucleotide for detection of SNP TSC0018191
rcaatacgatctc

SEQ ID NO: 69905 - DNA, 13 bp, Artificial Sequence
  Oligonucleotide for detection of SNP TSC0018191
gagattgtatcgy

SEQ ID NO: 69906 - DNA, 13 bp, Artificial Sequence
  Oligonucleotide for detection of SNP TSC0018191
rcgatacaatctc

SEQ ID NO: 69907 - DNA, 13 bp, Artificial Sequence
  Oligonucleotide for detection of SNP TSC0018191
gagatcgtatcgy

SEQ ID NO: 69908 - DNA, 13 bp, Artificial Sequence
  Oligonucleotide for detection of SNP TSC0018191
rcgatacgatctc

SEQ ID NO: 69909 - DNA, 13 bp, Artificial Sequence
  Oligonucleotide for detection of SNP TSC0018191
gcggtgtgattty

SEQ ID NO: 69910 - DNA, 13 bp, Artificial Sequence
  Oligonucleotide for detection of SNP TSC0018191
raaatcacaccgc

SEQ ID NO: 69911 - DNA, 13 bp, Artificial Sequence
  Oligonucleotide for detection of SNP TSC0018191
gcggtgcgattty

SEQ ID NO: 69912 - DNA, 13 bp, Artificial Sequence
  Oligonucleotide for detection of SNP TSC0018191
raaatcgcaccgc

SEQ ID NO: 69913 - DNA, 13 bp, Artificial Sequence
  Oligonucleotide for detection of SNP TSC0018192
tagaaatgtatgt

SEQ ID NO: 69914 - DNA, 13 bp, Artificial Sequence
  Oligonucleotide for detection of SNP TSC0018192
acatacatttcta

SEQ ID NO: 69915 - DNA, 13 bp, Artificial Sequence
  Oligonucleotide for detection of SNP TSC0018192
tagaaacgtatgt

SEQ ID NO: 69916 - DNA, 13 bp, Artificial Sequence
  Oligonucleotide for detection of SNP TSC0018192
acatacgtttcta

SEQ ID NO: 69917 - DNA, 13 bp, Artificial Sequence
  Oligonucleotide for detection of SNP TSC0018192
tagaaatgtacgt

SEQ ID NO: 69918 - DNA, 13 bp, Artificial Sequence
  Oligonucleotide for detection of SNP TSC0018192
acgtacatttcta

SEQ ID NO: 69919 - DNA, 13 bp, Artificial Sequence
  Oligonucleotide for detection of SNP TSC0018192
tagaaacgtacgt

SEQ ID NO: 69920 - DNA, 13 bp, Artificial Sequence
  Oligonucleotide for detection of SNP TSC0018192
acgtacgtttcta

SEQ ID NO: 69921 - DNA, 13 bp, Artificial Sequence
  Oligonucleotide for detection of SNP TSC0018192
atgtatgttttta

SEQ ID NO: 69922 - DNA, 13 bp, Artificial Sequence
  Oligonucleotide for detection of SNP TSC0018192
taaaaacatacat

SEQ ID NO: 69923 - DNA, 13 bp, Artificial Sequence
  Oligonucleotide for detection of SNP TSC0018192
atgtatattttta

SEQ ID NO: 69924 - DNA, 13 bp, Artificial Sequence
  Oligonucleotide for detection of SNP TSC0018192
taaaaatatacat

SEQ ID NO: 69925 - DNA, 13 bp, Artificial Sequence
  Oligonucleotide for detection of SNP TSC0018192
acgtatgttttta

SEQ ID NO: 69926 - DNA, 13 bp, Artificial Sequence
  Oligonucleotide for detection of SNP TSC0018192
taaaaacatacgt

SEQ ID NO: 69927 - DNA, 13 bp, Artificial Sequence
  Oligonucleotide for detection of SNP TSC0018192
acgtatattttta

SEQ ID NO: 69928 - DNA, 13 bp, Artificial Sequence
  Oligonucleotide for detection of SNP TSC0018192
taaaaatatacgt

SEQ ID NO: 69929 - DNA, 13 bp, Artificial Sequence
  Oligonucleotide for detection of SNP TSC0018192
atgtacgttttta

SEQ ID NO: 69930 - DNA, 13 bp, Artificial Sequence
  Oligonucleotide for detection of SNP TSC0018192
taaaaacgtacat

SEQ ID NO: 69931 - DNA, 13 bp, Artificial Sequence
  Oligonucleotide for detection of SNP TSC0018192
acgtacgttttta

SEQ ID NO: 69932 - DNA, 13 bp, Artificial Sequence
  Oligonucleotide for detection of SNP TSC0018192
taaaaacgtacgt

SEQ ID NO: 69933 - DNA, 13 bp, Artificial Sequence
  Oligonucleotide for detection of SNP TSC0018193
aatttggaataty

SEQ ID NO: 69934 - DNA, 13 bp, Artificial Sequence
  Oligonucleotide for detection of SNP TSC0018193
ratattccaaatt

SEQ ID NO: 69935 - DNA, 13 bp, Artificial Sequence
  Oligonucleotide for detection of SNP TSC0018193
aatttgaaataty

SEQ ID NO: 69936 - DNA, 13 bp, Artificial Sequence
  Oligonucleotide for detection of SNP TSC0018193
ratatttcaaatt

SEQ ID NO: 69937 - DNA, 13 bp, Artificial Sequence
  Oligonucleotide for detection of SNP TSC0018194
ggtttaggtgatt

SEQ ID NO: 69938 - DNA, 13 bp, Artificial Sequence
  Oligonucleotide for detection of SNP TSC0018194
aatcacctaaacc

SEQ ID NO: 69939 - DNA, 13 bp, Artificial Sequence
  Oligonucleotide for detection of SNP TSC0018194
ggtttaagtgatt

SEQ ID NO: 69940 - DNA, 13 bp, Artificial Sequence
  Oligonucleotide for detection of SNP TSC0018194
aatcacttaaacc

SEQ ID NO: 69941 - DNA, 13 bp, Artificial Sequence
  Oligonucleotide for detection of SNP TSC0018195
aggtattggggat

SEQ ID NO: 69942 - DNA, 13 bp, Artificial Sequence
  Oligonucleotide for detection of SNP TSC0018195
atccccaatacct

SEQ ID NO: 69943 - DNA, 13 bp, Artificial Sequence
  Oligonucleotide for detection of SNP TSC0018195
aggtatcggggat

SEQ ID NO: 69944 - DNA, 13 bp, Artificial Sequence
  Oligonucleotide for detection of SNP TSC0018195
atccccgatacct

SEQ ID NO: 69945 - DNA, 13 bp, Artificial Sequence
  Oligonucleotide for detection of SNP TSC0018195
atttttggtgttt

SEQ ID NO: 69946 - DNA, 13 bp, Artificial Sequence
  Oligonucleotide for detection of SNP TSC0018195
aaacaccaaaaat

SEQ ID NO: 69947 - DNA, 13 bp, Artificial Sequence
  Oligonucleotide for detection of SNP TSC0018195
atttttagtgttt

SEQ ID NO: 69948 - DNA, 13 bp, Artificial Sequence
  Oligonucleotide for detection of SNP TSC0018195
aaacactaaaaat

SEQ ID NO: 69949 - DNA, 13 bp, Artificial Sequence
  Oligonucleotide for detection of SNP TSC0018195
attttcggtgttt

SEQ ID NO: 69950 - DNA, 13 bp, Artificial Sequence
  Oligonucleotide for detection of SNP TSC0018195
aaacaccgaaaat

SEQ ID NO: 69951 - DNA, 13 bp, Artificial Sequence
  Oligonucleotide for detection of SNP TSC0018196
tttttagtaaata

SEQ ID NO: 69952 - DNA, 13 bp, Artificial Sequence
  Oligonucleotide for detection of SNP TSC0018196
tatttactaaaaa

SEQ ID NO: 69953 - DNA, 13 bp, Artificial Sequence
  Oligonucleotide for detection of SNP TSC0018196
tttttaataaata

SEQ ID NO: 69954 - DNA, 13 bp, Artificial Sequence
  Oligonucleotide for detection of SNP TSC0018196
tatttattaaaaa

SEQ ID NO: 69955 - DNA, 13 bp, Artificial Sequence
  Oligonucleotide for detection of SNP TSC0018204
atatggtgaaaty

SEQ ID NO: 69956 - DNA, 13 bp, Artificial Sequence
  Oligonucleotide for detection of SNP TSC0018204
ratttcaccatat

SEQ ID NO: 69957 - DNA, 13 bp, Artificial Sequence
  Oligonucleotide for detection of SNP TSC0018204
atatggcgaaaty

SEQ ID NO: 69958 - DNA, 13 bp, Artificial Sequence
  Oligonucleotide for detection of SNP TSC0018204
ratttcgccatat

SEQ ID NO: 69959 - DNA, 13 bp, Artificial Sequence
  Oligonucleotide for detection of SNP TSC0018204
ggttttgttatgt

SEQ ID NO: 69960 - DNA, 13 bp, Artificial Sequence
  Oligonucleotide for detection of SNP TSC0018204
acataacaaaacc

SEQ ID NO: 69961 - DNA, 13 bp, Artificial Sequence
  Oligonucleotide for detection of SNP TSC0018204
ggttttattatgt

SEQ ID NO: 69962 - DNA, 13 bp, Artificial Sequence
  Oligonucleotide for detection of SNP TSC0018204
acataataaaacc

SEQ ID NO: 69963 - DNA, 13 bp, Artificial Sequence
  Oligonucleotide for detection of SNP TSC0018204
ggtttcgttatgt

SEQ ID NO: 69964 - DNA, 13 bp, Artificial Sequence
  Oligonucleotide for detection of SNP TSC0018204
acataacgaaacc

SEQ ID NO: 69965 - DNA, 13 bp, Artificial Sequence
  Oligonucleotide for detection of SNP TSC0018205
gtttatggttggg

SEQ ID NO: 69966 - DNA, 13 bp, Artificial Sequence
  Oligonucleotide for detection of SNP TSC0018205
cccaaccataaac

SEQ ID NO: 69967 - DNA, 13 bp, Artificial Sequence
  Oligonucleotide for detection of SNP TSC0018205
gtttattgttggg

SEQ ID NO: 69968 - DNA, 13 bp, Artificial Sequence
  Oligonucleotide for detection of SNP TSC0018205
cccaacaataaac

SEQ ID NO: 69969 - DNA, 13 bp, Artificial Sequence
  Oligonucleotide for detection of SNP TSC0018205
gtttacggttggg

SEQ ID NO: 69970 - DNA, 13 bp, Artificial Sequence
  Oligonucleotide for detection of SNP TSC0018205
cccaaccgtaaac

SEQ ID NO: 69971 - DNA, 13 bp, Artificial Sequence
  Oligonucleotide for detection of SNP TSC0018205
tttaattgtgggy

SEQ ID NO: 69972 - DNA, 13 bp, Artificial Sequence
  Oligonucleotide for detection of SNP TSC0018205
rcccacaattaaa

SEQ ID NO: 69973 - DNA, 13 bp, Artificial Sequence
  Oligonucleotide for detection of SNP TSC0018205
tttaatagtgggy

SEQ ID NO: 69974 - DNA, 13 bp, Artificial Sequence
  Oligonucleotide for detection of SNP TSC0018205
rcccactattaaa

SEQ ID NO: 69975 - DNA, 13 bp, Artificial Sequence
  Oligonucleotide for detection of SNP TSC0018205
tttaatcgtgggy

SEQ ID NO: 69976 - DNA, 13 bp, Artificial Sequence
  Oligonucleotide for detection of SNP TSC0018205
rcccacgattaaa

SEQ ID NO: 69977 - DNA, 13 bp, Artificial Sequence
  Oligonucleotide for detection of SNP TSC0018209
ttttgggatggag

SEQ ID NO: 69978 - DNA, 13 bp, Artificial Sequence
  Oligonucleotide for detection of SNP TSC0018209
ctccatcccaaaa

SEQ ID NO: 69979 - DNA, 13 bp, Artificial Sequence
  Oligonucleotide for detection of SNP TSC0018209
ttttggaatggag

SEQ ID NO: 69980 - DNA, 13 bp, Artificial Sequence
  Oligonucleotide for detection of SNP TSC0018209
ctccattccaaaa

SEQ ID NO: 69981 - DNA, 13 bp, Artificial Sequence
  Oligonucleotide for detection of SNP TSC0018210
tagattattgtta

SEQ ID NO: 69982 - DNA, 13 bp, Artificial Sequence
  Oligonucleotide for detection of SNP TSC0018210
taacaataatcta

SEQ ID NO: 69983 - DNA, 13 bp, Artificial Sequence
  Oligonucleotide for detection of SNP TSC0018210
tagatttttgtta

SEQ ID NO: 69984 - DNA, 13 bp, Artificial Sequence
  Oligonucleotide for detection of SNP TSC0018210
taacaaaaatcta

SEQ ID NO: 69985 - DNA, 13 bp, Artificial Sequence
  Oligonucleotide for detection of SNP TSC0018210
tgatagtggtttg

SEQ ID NO: 69986 - DNA, 13 bp, Artificial Sequence
  Oligonucleotide for detection of SNP TSC0018210
caaaccactatca

SEQ ID NO: 69987 - DNA, 13 bp, Artificial Sequence
  Oligonucleotide for detection of SNP TSC0018210
tgatagaggtttg

SEQ ID NO: 69988 - DNA, 13 bp, Artificial Sequence
  Oligonucleotide for detection of SNP TSC0018210
caaacctctatca

SEQ ID NO: 69989 - DNA, 13 bp, Artificial Sequence
  Oligonucleotide for detection of SNP TSC0018214
gttttagtttttt

SEQ ID NO: 69990 - DNA, 13 bp, Artificial Sequence
  Oligonucleotide for detection of SNP TSC0018214
aaaaaactaaaac

SEQ ID NO: 69991 - DNA, 13 bp, Artificial Sequence
  Oligonucleotide for detection of SNP TSC0018215
ttaaatattttaa

SEQ ID NO: 69992 - DNA, 13 bp, Artificial Sequence
  Oligonucleotide for detection of SNP TSC0018215
ttaaaatatttaa

SEQ ID NO: 69993 - DNA, 13 bp, Artificial Sequence
  Oligonucleotide for detection of SNP TSC0018215
ttaaattttttaa

SEQ ID NO: 69994 - DNA, 13 bp, Artificial Sequence
  Oligonucleotide for detection of SNP TSC0018215
ttaaaaaatttaa

SEQ ID NO: 69995 - DNA, 13 bp, Artificial Sequence
  Oligonucleotide for detection of SNP TSC0018215
ttaaagtatttag

SEQ ID NO: 69996 - DNA, 13 bp, Artificial Sequence
  Oligonucleotide for detection of SNP TSC0018215
ctaaatactttaa

SEQ ID NO: 69997 - DNA, 13 bp, Artificial Sequence
  Oligonucleotide for detection of SNP TSC0018215
ttaaagaatttag

SEQ ID NO: 69998 - DNA, 13 bp, Artificial Sequence
  Oligonucleotide for detection of SNP TSC0018215
ctaaattctttaa

SEQ ID NO: 69999 - DNA, 13 bp, Artificial Sequence
  Oligonucleotide for detection of SNP TSC0018218
tttagggttaagg

SEQ ID NO: 70000 - DNA, 13 bp, Artificial Sequence
  Oligonucleotide for detection of SNP TSC0018218
ccttaaccctaaa

SEQ ID NO: 70001 - DNA, 13 bp, Artificial Sequence
  Oligonucleotide for detection of SNP TSC0018218
tttaggtttaagg

SEQ ID NO: 70002 - DNA, 13 bp, Artificial Sequence
  Oligonucleotide for detection of SNP TSC0018218
ccttaaacctaaa

SEQ ID NO: 70003 - DNA, 13 bp, Artificial Sequence
  Oligonucleotide for detection of SNP TSC0018218
ttttaattttgaa

SEQ ID NO: 70004 - DNA, 13 bp, Artificial Sequence
  Oligonucleotide for detection of SNP TSC0018218
ttcaaaattaaaa

SEQ ID NO: 70005 - DNA, 13 bp, Artificial Sequence
  Oligonucleotide for detection of SNP TSC0018218
ttttaaatttgaa

SEQ ID NO: 70006 - DNA, 13 bp, Artificial Sequence
  Oligonucleotide for detection of SNP TSC0018218
ttcaaatttaaaa

SEQ ID NO: 70007 - DNA, 13 bp, Artificial Sequence
  Oligonucleotide for detection of SNP TSC0018219
ttggagatttgta

SEQ ID NO: 70008 - DNA, 13 bp, Artificial Sequence
  Oligonucleotide for detection of SNP TSC0018219
tacaaatctccaa

SEQ ID NO: 70009 - DNA, 13 bp, Artificial Sequence
  Oligonucleotide for detection of SNP TSC0018219
ttggaggtttgta

SEQ ID NO: 70010 - DNA, 13 bp, Artificial Sequence
  Oligonucleotide for detection of SNP TSC0018219
tacaaacctccaa

SEQ ID NO: 70011 - DNA, 13 bp, Artificial Sequence
  Oligonucleotide for detection of SNP TSC0018220
ggtgggggttatg

SEQ ID NO: 70012 - DNA, 13 bp, Artificial Sequence
  Oligonucleotide for detection of SNP TSC0018220
cataacccccacc

SEQ ID NO: 70013 - DNA, 13 bp, Artificial Sequence
  Oligonucleotide for detection of SNP TSC0018220
ggtgggagttatg

SEQ ID NO: 70014 - DNA, 13 bp, Artificial Sequence
  Oligonucleotide for detection of SNP TSC0018220
cataactcccacc

SEQ ID NO: 70015 - DNA, 13 bp, Artificial Sequence
  Oligonucleotide for detection of SNP TSC0018222
aataaaattggaa

SEQ ID NO: 70016 - DNA, 13 bp, Artificial Sequence
  Oligonucleotide for detection of SNP TSC0018222
ttccaattttatt

SEQ ID NO: 70017 - DNA, 13 bp, Artificial Sequence
  Oligonucleotide for detection of SNP TSC0018222
aataaatttggaa

SEQ ID NO: 70018 - DNA, 13 bp, Artificial Sequence
  Oligonucleotide for detection of SNP TSC0018222
ttccaaatttatt

SEQ ID NO: 70019 - DNA, 13 bp, Artificial Sequence
  Oligonucleotide for detection of SNP TSC0018222
ttttaattttatt

SEQ ID NO: 70020 - DNA, 13 bp, Artificial Sequence
  Oligonucleotide for detection of SNP TSC0018222
aataaaattaaaa

SEQ ID NO: 70021 - DNA, 13 bp, Artificial Sequence
  Oligonucleotide for detection of SNP TSC0018222
ttttaaatttatt

SEQ ID NO: 70022 - DNA, 13 bp, Artificial Sequence
  Oligonucleotide for detection of SNP TSC0018222
aataaatttaaaa

SEQ ID NO: 70023 - DNA, 13 bp, Artificial Sequence
  Oligonucleotide for detection of SNP TSC0018223
tttttatgattag

SEQ ID NO: 70024 - DNA, 13 bp, Artificial Sequence
  Oligonucleotide for detection of SNP TSC0018223
ctaatcataaaaa

SEQ ID NO: 70025 - DNA, 13 bp, Artificial Sequence
  Oligonucleotide for detection of SNP TSC0018223
tttttacgattag

SEQ ID NO: 70026 - DNA, 13 bp, Artificial Sequence
  Oligonucleotide for detection of SNP TSC0018223
ctaatcgtaaaaa

SEQ ID NO: 70027 - DNA, 13 bp, Artificial Sequence
  Oligonucleotide for detection of SNP TSC0018223
ttaattgtggaaa

SEQ ID NO: 70028 - DNA, 13 bp, Artificial Sequence
  Oligonucleotide for detection of SNP TSC0018223
tttccacaattaa

SEQ ID NO: 70029 - DNA, 13 bp, Artificial Sequence
  Oligonucleotide for detection of SNP TSC0018223
ttaattatggaaa

SEQ ID NO: 70030 - DNA, 13 bp, Artificial Sequence
  Oligonucleotide for detection of SNP TSC0018223
tttccataattaa

SEQ ID NO: 70031 - DNA, 13 bp, Artificial Sequence
  Oligonucleotide for detection of SNP TSC0018223
ttaatcgtggaaa

SEQ ID NO: 70032 - DNA, 13 bp, Artificial Sequence
  Oligonucleotide for detection of SNP TSC0018223
tttccacgattaa

SEQ ID NO: 70033 - DNA, 13 bp, Artificial Sequence
  Oligonucleotide for detection of SNP TSC0018225
atttagggggaaa

SEQ ID NO: 70034 - DNA, 13 bp, Artificial Sequence
  Oligonucleotide for detection of SNP TSC0018225
tttccccctaaat

SEQ ID NO: 70035 - DNA, 13 bp, Artificial Sequence
  Oligonucleotide for detection of SNP TSC0018225
atttagtgggaaa

SEQ ID NO: 70036 - DNA, 13 bp, Artificial Sequence
  Oligonucleotide for detection of SNP TSC0018225
tttcccactaaat

SEQ ID NO: 70037 - DNA, 13 bp, Artificial Sequence
  Oligonucleotide for detection of SNP TSC0018225
tttttttttgaat

SEQ ID NO: 70038 - DNA, 13 bp, Artificial Sequence
  Oligonucleotide for detection of SNP TSC0018225
attcaaaaaaaaa

SEQ ID NO: 70039 - DNA, 13 bp, Artificial Sequence
  Oligonucleotide for detection of SNP TSC0018225
ttttttattgaat

SEQ ID NO: 70040 - DNA, 13 bp, Artificial Sequence
  Oligonucleotide for detection of SNP TSC0018225
attcaataaaaaa

SEQ ID NO: 70041 - DNA, 13 bp, Artificial Sequence
  Oligonucleotide for detection of SNP TSC0018226
aaataggtttggy

SEQ ID NO: 70042 - DNA, 13 bp, Artificial Sequence
  Oligonucleotide for detection of SNP TSC0018226
rccaaacctattt

SEQ ID NO: 70043 - DNA, 13 bp, Artificial Sequence
  Oligonucleotide for detection of SNP TSC0018226
aaatagttttggy

SEQ ID NO: 70044 - DNA, 13 bp, Artificial Sequence
  Oligonucleotide for detection of SNP TSC0018226
rccaaaactattt

SEQ ID NO: 70045 - DNA, 13 bp, Artificial Sequence
  Oligonucleotide for detection of SNP TSC0018226
gttaggtttattt

SEQ ID NO: 70046 - DNA, 13 bp, Artificial Sequence
  Oligonucleotide for detection of SNP TSC0018226
aaataaacctaac

SEQ ID NO: 70047 - DNA, 13 bp, Artificial Sequence
  Oligonucleotide for detection of SNP TSC0018226
gttaggattattt

SEQ ID NO: 70048 - DNA, 13 bp, Artificial Sequence
  Oligonucleotide for detection of SNP TSC0018226
aaataatcctaac

SEQ ID NO: 70049 - DNA, 13 bp, Artificial Sequence
  Oligonucleotide for detection of SNP TSC0018231
aggttgttgtgta

SEQ ID NO: 70050 - DNA, 13 bp, Artificial Sequence
  Oligonucleotide for detection of SNP TSC0018231
tacacaacaacct

SEQ ID NO: 70051 - DNA, 13 bp, Artificial Sequence
  Oligonucleotide for detection of SNP TSC0018231
tgtatattagttt

SEQ ID NO: 70052 - DNA, 13 bp, Artificial Sequence
  Oligonucleotide for detection of SNP TSC0018231
aaactaatataca

SEQ ID NO: 70053 - DNA, 13 bp, Artificial Sequence
  Oligonucleotide for detection of SNP TSC0018231
tgtatagtagttt

SEQ ID NO: 70054 - DNA, 13 bp, Artificial Sequence
  Oligonucleotide for detection of SNP TSC0018231
aaactactataca

SEQ ID NO: 70055 - DNA, 13 bp, Artificial Sequence
  Oligonucleotide for detection of SNP TSC0018232
tattagaagagag

SEQ ID NO: 70056 - DNA, 13 bp, Artificial Sequence
  Oligonucleotide for detection of SNP TSC0018232
ctctcttctaata

SEQ ID NO: 70057 - DNA, 13 bp, Artificial Sequence
  Oligonucleotide for detection of SNP TSC0018232
tattaggagagag

SEQ ID NO: 70058 - DNA, 13 bp, Artificial Sequence
  Oligonucleotide for detection of SNP TSC0018232
ctctctcctaata

SEQ ID NO: 70059 - DNA, 13 bp, Artificial Sequence
  Oligonucleotide for detection of SNP TSC0018234
gaattttgatgtt

SEQ ID NO: 70060 - DNA, 13 bp, Artificial Sequence
  Oligonucleotide for detection of SNP TSC0018234
aacatcaaaattc

SEQ ID NO: 70061 - DNA, 13 bp, Artificial Sequence
  Oligonucleotide for detection of SNP TSC0018234
gaatttggatgtt

SEQ ID NO: 70062 - DNA, 13 bp, Artificial Sequence
  Oligonucleotide for detection of SNP TSC0018234
aacatccaaattc

SEQ ID NO: 70063 - DNA, 13 bp, Artificial Sequence
  Oligonucleotide for detection of SNP TSC0018234
gaatttcgatgtt

SEQ ID NO: 70064 - DNA, 13 bp, Artificial Sequence
  Oligonucleotide for detection of SNP TSC0018234
aacatcgaaattc

SEQ ID NO: 70065 - DNA, 13 bp, Artificial Sequence
  Oligonucleotide for detection of SNP TSC0018234
gaattcggatgtt

SEQ ID NO: 70066 - DNA, 13 bp, Artificial Sequence
  Oligonucleotide for detection of SNP TSC0018234
aacatccgaattc

SEQ ID NO: 70067 - DNA, 13 bp, Artificial Sequence
  Oligonucleotide for detection of SNP TSC0018234
aatattgggatty

SEQ ID NO: 70068 - DNA, 13 bp, Artificial Sequence
  Oligonucleotide for detection of SNP TSC0018234
raatcccaatatt

SEQ ID NO: 70069 - DNA, 13 bp, Artificial Sequence
  Oligonucleotide for detection of SNP TSC0018234
aatatttggatty

SEQ ID NO: 70070 - DNA, 13 bp, Artificial Sequence
  Oligonucleotide for detection of SNP TSC0018234
raatccaaatatt

SEQ ID NO: 70071 - DNA, 13 bp, Artificial Sequence
  Oligonucleotide for detection of SNP TSC0018234
aatatcgggatty

SEQ ID NO: 70072 - DNA, 13 bp, Artificial Sequence
  Oligonucleotide for detection of SNP TSC0018234
raatcccgatatt

SEQ ID NO: 70073 - DNA, 13 bp, Artificial Sequence
  Oligonucleotide for detection of SNP TSC0018234
aatattcggatty

SEQ ID NO: 70074 - DNA, 13 bp, Artificial Sequence
  Oligonucleotide for detection of SNP TSC0018234
raatccgaatatt

SEQ ID NO: 70075 - DNA, 13 bp, Artificial Sequence
  Oligonucleotide for detection of SNP TSC0018235
ttttgttggggty

SEQ ID NO: 70076 - DNA, 13 bp, Artificial Sequence
  Oligonucleotide for detection of SNP TSC0018235
raccccaacaaaa

SEQ ID NO: 70077 - DNA, 13 bp, Artificial Sequence
  Oligonucleotide for detection of SNP TSC0018235
ttttgtgggggty

SEQ ID NO: 70078 - DNA, 13 bp, Artificial Sequence
  Oligonucleotide for detection of SNP TSC0018235
racccccacaaaa

SEQ ID NO: 70079 - DNA, 13 bp, Artificial Sequence
  Oligonucleotide for detection of SNP TSC0018235
ttttgtcggggty

SEQ ID NO: 70080 - DNA, 13 bp, Artificial Sequence
  Oligonucleotide for detection of SNP TSC0018235
raccccgacaaaa

SEQ ID NO: 70081 - DNA, 13 bp, Artificial Sequence
  Oligonucleotide for detection of SNP TSC0018235
gattttgatagga

SEQ ID NO: 70082 - DNA, 13 bp, Artificial Sequence
  Oligonucleotide for detection of SNP TSC0018235
tcctatcaaaatc

SEQ ID NO: 70083 - DNA, 13 bp, Artificial Sequence
  Oligonucleotide for detection of SNP TSC0018235
gatttttatagga

SEQ ID NO: 70084 - DNA, 13 bp, Artificial Sequence
  Oligonucleotide for detection of SNP TSC0018235
tcctataaaaatc

SEQ ID NO: 70085 - DNA, 13 bp, Artificial Sequence
  Oligonucleotide for detection of SNP TSC0018235
gatttcgatagga

SEQ ID NO: 70086 - DNA, 13 bp, Artificial Sequence
  Oligonucleotide for detection of SNP TSC0018235
tcctatcgaaatc

SEQ ID NO: 70087 - DNA, 13 bp, Artificial Sequence
  Oligonucleotide for detection of SNP TSC0018236
tttttagaattat

SEQ ID NO: 70088 - DNA, 13 bp, Artificial Sequence
  Oligonucleotide for detection of SNP TSC0018236
ataattctaaaaa

SEQ ID NO: 70089 - DNA, 13 bp, Artificial Sequence
  Oligonucleotide for detection of SNP TSC0018237
taaagtattatta

SEQ ID NO: 70090 - DNA, 13 bp, Artificial Sequence
  Oligonucleotide for detection of SNP TSC0018237
taataatacttta

SEQ ID NO: 70091 - DNA, 13 bp, Artificial Sequence
  Oligonucleotide for detection of SNP TSC0018237
taaagtgttatta

SEQ ID NO: 70092 - DNA, 13 bp, Artificial Sequence
  Oligonucleotide for detection of SNP TSC0018237
taataacacttta

SEQ ID NO: 70093 - DNA, 13 bp, Artificial Sequence
  Oligonucleotide for detection of SNP TSC0018237
taaagcgttatta

SEQ ID NO: 70094 - DNA, 13 bp, Artificial Sequence
  Oligonucleotide for detection of SNP TSC0018237
taataacgcttta

SEQ ID NO: 70095 - DNA, 13 bp, Artificial Sequence
  Oligonucleotide for detection of SNP TSC0018237
tgatgatgttttg

SEQ ID NO: 70096 - DNA, 13 bp, Artificial Sequence
  Oligonucleotide for detection of SNP TSC0018237
caaaacatcatca

SEQ ID NO: 70097 - DNA, 13 bp, Artificial Sequence
  Oligonucleotide for detection of SNP TSC0018237
tgatgacgttttg

SEQ ID NO: 70098 - DNA, 13 bp, Artificial Sequence
  Oligonucleotide for detection of SNP TSC0018237
caaaacgtcatca

SEQ ID NO: 70099 - DNA, 13 bp, Artificial Sequence
  Oligonucleotide for detection of SNP TSC0018238
atataagataaay

SEQ ID NO: 70100 - DNA, 13 bp, Artificial Sequence
  Oligonucleotide for detection of SNP TSC0018238
rtttatcttatat

SEQ ID NO: 70101 - DNA, 13 bp, Artificial Sequence
  Oligonucleotide for detection of SNP TSC0018238
atataaaataaay

SEQ ID NO: 70102 - DNA, 13 bp, Artificial Sequence
  Oligonucleotide for detection of SNP TSC0018238
rtttattttatat

SEQ ID NO: 70103 - DNA, 13 bp, Artificial Sequence
  Oligonucleotide for detection of SNP TSC0018240
ttttaatgaatgg

SEQ ID NO: 70104 - DNA, 13 bp, Artificial Sequence
  Oligonucleotide for detection of SNP TSC0018240
ccattcattaaaa

SEQ ID NO: 70105 - DNA, 13 bp, Artificial Sequence
  Oligonucleotide for detection of SNP TSC0018240
ttttaacgaatgg

SEQ ID NO: 70106 - DNA, 13 bp, Artificial Sequence
  Oligonucleotide for detection of SNP TSC0018240
ccattcgttaaaa

SEQ ID NO: 70107 - DNA, 13 bp, Artificial Sequence
  Oligonucleotide for detection of SNP TSC0018240
ttatttgttaggg

SEQ ID NO: 70108 - DNA, 13 bp, Artificial Sequence
  Oligonucleotide for detection of SNP TSC0018240
ccctaacaaataa

SEQ ID NO: 70109 - DNA, 13 bp, Artificial Sequence
  Oligonucleotide for detection of SNP TSC0018240
ttatttattaggg

SEQ ID NO: 70110 - DNA, 13 bp, Artificial Sequence
  Oligonucleotide for detection of SNP TSC0018240
ccctaataaataa

SEQ ID NO: 70111 - DNA, 13 bp, Artificial Sequence
  Oligonucleotide for detection of SNP TSC0018240
ttattcgttaggg

SEQ ID NO: 70112 - DNA, 13 bp, Artificial Sequence
  Oligonucleotide for detection of SNP TSC0018240
ccctaacgaataa

SEQ ID NO: 70113 - DNA, 13 bp, Artificial Sequence
  Oligonucleotide for detection of SNP TSC0018241
gaagggattgtgt

SEQ ID NO: 70114 - DNA, 13 bp, Artificial Sequence
  Oligonucleotide for detection of SNP TSC0018241
acacaatcccttc

SEQ ID NO: 70115 - DNA, 13 bp, Artificial Sequence
  Oligonucleotide for detection of SNP TSC0018241
gaaggggttgtgt

SEQ ID NO: 70116 - DNA, 13 bp, Artificial Sequence
  Oligonucleotide for detection of SNP TSC0018241
acacaaccccttc

SEQ ID NO: 70117 - DNA, 13 bp, Artificial Sequence
  Oligonucleotide for detection of SNP TSC0018241
gaagggatcgtgt

SEQ ID NO: 70118 - DNA, 13 bp, Artificial Sequence
  Oligonucleotide for detection of SNP TSC0018241
acacgatcccttc

SEQ ID NO: 70119 - DNA, 13 bp, Artificial Sequence
  Oligonucleotide for detection of SNP TSC0018241
gaaggggtcgtgt

SEQ ID NO: 70120 - DNA, 13 bp, Artificial Sequence
  Oligonucleotide for detection of SNP TSC0018241
acacgaccccttc

SEQ ID NO: 70121 - DNA, 13 bp, Artificial Sequence
  Oligonucleotide for detection of SNP TSC0018241
gaagggattgcgt

SEQ ID NO: 70122 - DNA, 13 bp, Artificial Sequence
  Oligonucleotide for detection of SNP TSC0018241
acgcaatcccttc

SEQ ID NO: 70123 - DNA, 13 bp, Artificial Sequence
  Oligonucleotide for detection of SNP TSC0018241
gaaggggttgcgt

SEQ ID NO: 70124 - DNA, 13 bp, Artificial Sequence
  Oligonucleotide for detection of SNP TSC0018241
acgcaaccccttc

SEQ ID NO: 70125 - DNA, 13 bp, Artificial Sequence
  Oligonucleotide for detection of SNP TSC0018241
gaagggatcgcgt

SEQ ID NO: 70126 - DNA, 13 bp, Artificial Sequence
  Oligonucleotide for detection of SNP TSC0018241
acgcgatcccttc

SEQ ID NO: 70127 - DNA, 13 bp, Artificial Sequence
  Oligonucleotide for detection of SNP TSC0018241
gaaggggtcgcgt

SEQ ID NO: 70128 - DNA, 13 bp, Artificial Sequence
  Oligonucleotide for detection of SNP TSC0018241
acgcgaccccttc

SEQ ID NO: 70129 - DNA, 13 bp, Artificial Sequence
  Oligonucleotide for detection of SNP TSC0018242
tttgtggatagty

SEQ ID NO: 70130 - DNA, 13 bp, Artificial Sequence
  Oligonucleotide for detection of SNP TSC0018242
ractatccacaaa

SEQ ID NO: 70131 - DNA, 13 bp, Artificial Sequence
  Oligonucleotide for detection of SNP TSC0018242
tttgtgtatagty

SEQ ID NO: 70132 - DNA, 13 bp, Artificial Sequence
  Oligonucleotide for detection of SNP TSC0018242
ractatacacaaa

SEQ ID NO: 70133 - DNA, 13 bp, Artificial Sequence
  Oligonucleotide for detection of SNP TSC0018242
gattgtttataga

SEQ ID NO: 70134 - DNA, 13 bp, Artificial Sequence
  Oligonucleotide for detection of SNP TSC0018242
tctataaacaatc

SEQ ID NO: 70135 - DNA, 13 bp, Artificial Sequence
  Oligonucleotide for detection of SNP TSC0018242
gattgtatataga

SEQ ID NO: 70136 - DNA, 13 bp, Artificial Sequence
  Oligonucleotide for detection of SNP TSC0018242
tctatatacaatc

SEQ ID NO: 70137 - DNA, 13 bp, Artificial Sequence
  Oligonucleotide for detection of SNP TSC0018243
agttattgatttg

SEQ ID NO: 70138 - DNA, 13 bp, Artificial Sequence
  Oligonucleotide for detection of SNP TSC0018243
caaatcaataact

SEQ ID NO: 70139 - DNA, 13 bp, Artificial Sequence
  Oligonucleotide for detection of SNP TSC0018243
agttatcgatttg

SEQ ID NO: 70140 - DNA, 13 bp, Artificial Sequence
  Oligonucleotide for detection of SNP TSC0018243
caaatcgataact

SEQ ID NO: 70141 - DNA, 13 bp, Artificial Sequence
  Oligonucleotide for detection of SNP TSC0018243
taggttggtggtt

SEQ ID NO: 70142 - DNA, 13 bp, Artificial Sequence
  Oligonucleotide for detection of SNP TSC0018243
aaccaccaaccta

SEQ ID NO: 70143 - DNA, 13 bp, Artificial Sequence
  Oligonucleotide for detection of SNP TSC0018243
taggttagtggtt

SEQ ID NO: 70144 - DNA, 13 bp, Artificial Sequence
  Oligonucleotide for detection of SNP TSC0018243
aaccactaaccta

SEQ ID NO: 70145 - DNA, 13 bp, Artificial Sequence
  Oligonucleotide for detection of SNP TSC0018243
taggtcggtggtt

SEQ ID NO: 70146 - DNA, 13 bp, Artificial Sequence
  Oligonucleotide for detection of SNP TSC0018243
aaccaccgaccta

SEQ ID NO: 70147 - DNA, 13 bp, Artificial Sequence
  Oligonucleotide for detection of SNP TSC0018244
aggggagttgtgt

SEQ ID NO: 70148 - DNA, 13 bp, Artificial Sequence
  Oligonucleotide for detection of SNP TSC0018244
acacaactcccct

SEQ ID NO: 70149 - DNA, 13 bp, Artificial Sequence
  Oligonucleotide for detection of SNP TSC0018244
aggggaattgtgt

SEQ ID NO: 70150 - DNA, 13 bp, Artificial Sequence
  Oligonucleotide for detection of SNP TSC0018244
acacaattcccct

SEQ ID NO: 70151 - DNA, 13 bp, Artificial Sequence
  Oligonucleotide for detection of SNP TSC0018244
aggggagtcgtgt

SEQ ID NO: 70152 - DNA, 13 bp, Artificial Sequence
  Oligonucleotide for detection of SNP TSC0018244
acacgactcccct

SEQ ID NO: 70153 - DNA, 13 bp, Artificial Sequence
  Oligonucleotide for detection of SNP TSC0018244
aggggaatcgtgt

SEQ ID NO: 70154 - DNA, 13 bp, Artificial Sequence
  Oligonucleotide for detection of SNP TSC0018244
acacgattcccct

SEQ ID NO: 70155 - DNA, 13 bp, Artificial Sequence
  Oligonucleotide for detection of SNP TSC0018245
tttatatgttgta

SEQ ID NO: 70156 - DNA, 13 bp, Artificial Sequence
  Oligonucleotide for detection of SNP TSC0018245
tacaacatataaa

SEQ ID NO: 70157 - DNA, 13 bp, Artificial Sequence
  Oligonucleotide for detection of SNP TSC0018245
tttatacgttgta

SEQ ID NO: 70158 - DNA, 13 bp, Artificial Sequence
  Oligonucleotide for detection of SNP TSC0018245
tacaacgtataaa

SEQ ID NO: 70159 - DNA, 13 bp, Artificial Sequence
  Oligonucleotide for detection of SNP TSC0018245
tttatatgtcgta

SEQ ID NO: 70160 - DNA, 13 bp, Artificial Sequence
  Oligonucleotide for detection of SNP TSC0018245
tacgacatataaa

SEQ ID NO: 70161 - DNA, 13 bp, Artificial Sequence
  Oligonucleotide for detection of SNP TSC0018245
tttatacgtcgta

SEQ ID NO: 70162 - DNA, 13 bp, Artificial Sequence
  Oligonucleotide for detection of SNP TSC0018245
tacgacgtataaa

SEQ ID NO: 70163 - DNA, 13 bp, Artificial Sequence
  Oligonucleotide for detection of SNP TSC0018245
tatggtgtgtgaa

SEQ ID NO: 70164 - DNA, 13 bp, Artificial Sequence
  Oligonucleotide for detection of SNP TSC0018245
ttcacacaccata

SEQ ID NO: 70165 - DNA, 13 bp, Artificial Sequence
  Oligonucleotide for detection of SNP TSC0018245
tatggtatgtgaa

SEQ ID NO: 70166 - DNA, 13 bp, Artificial Sequence
  Oligonucleotide for detection of SNP TSC0018245
ttcacataccata

SEQ ID NO: 70167 - DNA, 13 bp, Artificial Sequence
  Oligonucleotide for detection of SNP TSC0018245
tacggtgtgtgaa

SEQ ID NO: 70168 - DNA, 13 bp, Artificial Sequence
  Oligonucleotide for detection of SNP TSC0018245
ttcacacaccgta

SEQ ID NO: 70169 - DNA, 13 bp, Artificial Sequence
  Oligonucleotide for detection of SNP TSC0018245
tacggtatgtgaa

SEQ ID NO: 70170 - DNA, 13 bp, Artificial Sequence
  Oligonucleotide for detection of SNP TSC0018245
ttcacataccgta

SEQ ID NO: 70171 - DNA, 13 bp, Artificial Sequence
  Oligonucleotide for detection of SNP TSC0018245
tatggcgtgtgaa

SEQ ID NO: 70172 - DNA, 13 bp, Artificial Sequence
  Oligonucleotide for detection of SNP TSC0018245
ttcacacgccata

SEQ ID NO: 70173 - DNA, 13 bp, Artificial Sequence
  Oligonucleotide for detection of SNP TSC0018245
tacggcgtgtgaa

SEQ ID NO: 70174 - DNA, 13 bp, Artificial Sequence
  Oligonucleotide for detection of SNP TSC0018245
ttcacacgccgta

SEQ ID NO: 70175 - DNA, 13 bp, Artificial Sequence
  Oligonucleotide for detection of SNP TSC0018246
tgagtaataagaa

SEQ ID NO: 70176 - DNA, 13 bp, Artificial Sequence
  Oligonucleotide for detection of SNP TSC0018246
ttcttattactca

SEQ ID NO: 70177 - DNA, 13 bp, Artificial Sequence
  Oligonucleotide for detection of SNP TSC0018246
tgagtagtaagaa

SEQ ID NO: 70178 - DNA, 13 bp, Artificial Sequence
  Oligonucleotide for detection of SNP TSC0018246
ttcttactactca

SEQ ID NO: 70179 - DNA, 13 bp, Artificial Sequence
  Oligonucleotide for detection of SNP TSC0018247
tgtgtagagaatt

SEQ ID NO: 70180 - DNA, 13 bp, Artificial Sequence
  Oligonucleotide for detection of SNP TSC0018247
aattctctacaca

SEQ ID NO: 70181 - DNA, 13 bp, Artificial Sequence
  Oligonucleotide for detection of SNP TSC0018247
tgtgtaaagaatt

SEQ ID NO: 70182 - DNA, 13 bp, Artificial Sequence
  Oligonucleotide for detection of SNP TSC0018247
aattctttacaca

SEQ ID NO: 70183 - DNA, 13 bp, Artificial Sequence
  Oligonucleotide for detection of SNP TSC0018248
tttttagttaata

SEQ ID NO: 70184 - DNA, 13 bp, Artificial Sequence
  Oligonucleotide for detection of SNP TSC0018248
tattaactaaaaa

SEQ ID NO: 70185 - DNA, 13 bp, Artificial Sequence
  Oligonucleotide for detection of SNP TSC0018248
tttttaattaata

SEQ ID NO: 70186 - DNA, 13 bp, Artificial Sequence
  Oligonucleotide for detection of SNP TSC0018248
tattaattaaaaa

SEQ ID NO: 70187 - DNA, 13 bp, Artificial Sequence
  Oligonucleotide for detection of SNP TSC0018249
aaaagtaatattt

SEQ ID NO: 70188 - DNA, 13 bp, Artificial Sequence
  Oligonucleotide for detection of SNP TSC0018249
aaatattactttt

SEQ ID NO: 70189 - DNA, 13 bp, Artificial Sequence
  Oligonucleotide for detection of SNP TSC0018249
aaaagttatattt

SEQ ID NO: 70190 - DNA, 13 bp, Artificial Sequence
  Oligonucleotide for detection of SNP TSC0018249
aaatataactttt

SEQ ID NO: 70191 - DNA, 13 bp, Artificial Sequence
  Oligonucleotide for detection of SNP TSC0018249
agatattattttt

SEQ ID NO: 70192 - DNA, 13 bp, Artificial Sequence
  Oligonucleotide for detection of SNP TSC0018249
aaaaataatatct

SEQ ID NO: 70193 - DNA, 13 bp, Artificial Sequence
  Oligonucleotide for detection of SNP TSC0018249
agatatgattttt

SEQ ID NO: 70194 - DNA, 13 bp, Artificial Sequence
  Oligonucleotide for detection of SNP TSC0018249
aaaaatcatatct

SEQ ID NO: 70195 - DNA, 13 bp, Artificial Sequence
  Oligonucleotide for detection of SNP TSC0018250
gaaatgtgagtag

SEQ ID NO: 70196 - DNA, 13 bp, Artificial Sequence
  Oligonucleotide for detection of SNP TSC0018250
ctactcacatttc

SEQ ID NO: 70197 - DNA, 13 bp, Artificial Sequence
  Oligonucleotide for detection of SNP TSC0018250
gaaatgcgagtag

SEQ ID NO: 70198 - DNA, 13 bp, Artificial Sequence
  Oligonucleotide for detection of SNP TSC0018250
ctactcgcatttc

SEQ ID NO: 70199 - DNA, 13 bp, Artificial Sequence
  Oligonucleotide for detection of SNP TSC0018251
tatattaaaaatt

SEQ ID NO: 70200 - DNA, 13 bp, Artificial Sequence
  Oligonucleotide for detection of SNP TSC0018251
aatttttaatata

SEQ ID NO: 70201 - DNA, 13 bp, Artificial Sequence
  Oligonucleotide for detection of SNP TSC0018251
tatattgaaaatt

SEQ ID NO: 70202 - DNA, 13 bp, Artificial Sequence
  Oligonucleotide for detection of SNP TSC0018251
aattttcaatata

SEQ ID NO: 70203 - DNA, 13 bp, Artificial Sequence
  Oligonucleotide for detection of SNP TSC0018251
tatatcgaaaatt

SEQ ID NO: 70204 - DNA, 13 bp, Artificial Sequence
  Oligonucleotide for detection of SNP TSC0018251
aattttcgatata

SEQ ID NO: 70205 - DNA, 13 bp, Artificial Sequence
  Oligonucleotide for detection of SNP TSC0018251
aatttttggtatg

SEQ ID NO: 70206 - DNA, 13 bp, Artificial Sequence
  Oligonucleotide for detection of SNP TSC0018251
cataccaaaaatt

SEQ ID NO: 70207 - DNA, 13 bp, Artificial Sequence
  Oligonucleotide for detection of SNP TSC0018251
aattttcggtatg

SEQ ID NO: 70208 - DNA, 13 bp, Artificial Sequence
  Oligonucleotide for detection of SNP TSC0018251
cataccgaaaatt

SEQ ID NO: 70209 - DNA, 13 bp, Artificial Sequence
  Oligonucleotide for detection of SNP TSC0018252
atggatgatatgt

SEQ ID NO: 70210 - DNA, 13 bp, Artificial Sequence
  Oligonucleotide for detection of SNP TSC0018252
acatatcatccat

SEQ ID NO: 70211 - DNA, 13 bp, Artificial Sequence
  Oligonucleotide for detection of SNP TSC0018252
atggataatatgt

SEQ ID NO: 70212 - DNA, 13 bp, Artificial Sequence
  Oligonucleotide for detection of SNP TSC0018252
acatattatccat

SEQ ID NO: 70213 - DNA, 13 bp, Artificial Sequence
  Oligonucleotide for detection of SNP TSC0018255
tagaggtggaggg

SEQ ID NO: 70214 - DNA, 13 bp, Artificial Sequence
  Oligonucleotide for detection of SNP TSC0018255
ccctccacctcta

SEQ ID NO: 70215 - DNA, 13 bp, Artificial Sequence
  Oligonucleotide for detection of SNP TSC0018255
tagaggcggaggg

SEQ ID NO: 70216 - DNA, 13 bp, Artificial Sequence
  Oligonucleotide for detection of SNP TSC0018255
ccctccgcctcta

SEQ ID NO: 70217 - DNA, 13 bp, Artificial Sequence
  Oligonucleotide for detection of SNP TSC0018258
taggtgtgtatty

SEQ ID NO: 70218 - DNA, 13 bp, Artificial Sequence
  Oligonucleotide for detection of SNP TSC0018258
raatacacaccta

SEQ ID NO: 70219 - DNA, 13 bp, Artificial Sequence
  Oligonucleotide for detection of SNP TSC0018258
taggtgcgtatty

SEQ ID NO: 70220 - DNA, 13 bp, Artificial Sequence
  Oligonucleotide for detection of SNP TSC0018258
raatacgcaccta

SEQ ID NO: 70221 - DNA, 13 bp, Artificial Sequence
  Oligonucleotide for detection of SNP TSC0018258
gaatatgtatttg

SEQ ID NO: 70222 - DNA, 13 bp, Artificial Sequence
  Oligonucleotide for detection of SNP TSC0018258
caaatacatattc

SEQ ID NO: 70223 - DNA, 13 bp, Artificial Sequence
  Oligonucleotide for detection of SNP TSC0018258
gaatatatatttg

SEQ ID NO: 70224 - DNA, 13 bp, Artificial Sequence
  Oligonucleotide for detection of SNP TSC0018258
caaatatatattc

SEQ ID NO: 70225 - DNA, 13 bp, Artificial Sequence
  Oligonucleotide for detection of SNP TSC0018258
gaatacgtatttg

SEQ ID NO: 70226 - DNA, 13 bp, Artificial Sequence
  Oligonucleotide for detection of SNP TSC0018258
caaatacgtattc

SEQ ID NO: 70227 - DNA, 13 bp, Artificial Sequence
  Oligonucleotide for detection of SNP TSC0018259
atgggttgaagtt

SEQ ID NO: 70228 - DNA, 13 bp, Artificial Sequence
  Oligonucleotide for detection of SNP TSC0018259
aacttcaacccat

SEQ ID NO: 70229 - DNA, 13 bp, Artificial Sequence
  Oligonucleotide for detection of SNP TSC0018259
atgggtcgaagtt

SEQ ID NO: 70230 - DNA, 13 bp, Artificial Sequence
  Oligonucleotide for detection of SNP TSC0018259
aacttcgacccat

SEQ ID NO: 70231 - DNA, 13 bp, Artificial Sequence
  Oligonucleotide for detection of SNP TSC0018259
agttttggtttat

SEQ ID NO: 70232 - DNA, 13 bp, Artificial Sequence
  Oligonucleotide for detection of SNP TSC0018259
ataaaccaaaact

SEQ ID NO: 70233 - DNA, 13 bp, Artificial Sequence
  Oligonucleotide for detection of SNP TSC0018259
agttttagtttat

SEQ ID NO: 70234 - DNA, 13 bp, Artificial Sequence
  Oligonucleotide for detection of SNP TSC0018259
ataaactaaaact

SEQ ID NO: 70235 - DNA, 13 bp, Artificial Sequence
  Oligonucleotide for detection of SNP TSC0018259
agtttcggtttat

SEQ ID NO: 70236 - DNA, 13 bp, Artificial Sequence
  Oligonucleotide for detection of SNP TSC0018259
ataaaccgaaact

SEQ ID NO: 70237 - DNA, 13 bp, Artificial Sequence
  Oligonucleotide for detection of SNP TSC0018260
gaagtttttggtt

SEQ ID NO: 70238 - DNA, 13 bp, Artificial Sequence
  Oligonucleotide for detection of SNP TSC0018260
aaccaaaaacttc

SEQ ID NO: 70239 - DNA, 13 bp, Artificial Sequence
  Oligonucleotide for detection of SNP TSC0018260
gaagttgttggtt

SEQ ID NO: 70240 - DNA, 13 bp, Artificial Sequence
  Oligonucleotide for detection of SNP TSC0018260
aaccaacaacttc

SEQ ID NO: 70241 - DNA, 13 bp, Artificial Sequence
  Oligonucleotide for detection of SNP TSC0018260
gaagttttcggtt

SEQ ID NO: 70242 - DNA, 13 bp, Artificial Sequence
  Oligonucleotide for detection of SNP TSC0018260
aaccgaaaacttc

SEQ ID NO: 70243 - DNA, 13 bp, Artificial Sequence
  Oligonucleotide for detection of SNP TSC0018260
gaagttgtcggtt

SEQ ID NO: 70244 - DNA, 13 bp, Artificial Sequence
  Oligonucleotide for detection of SNP TSC0018260
aaccgacaacttc

SEQ ID NO: 70245 - DNA, 13 bp, Artificial Sequence
  Oligonucleotide for detection of SNP TSC0018260
agttgggagttty

SEQ ID NO: 70246 - DNA, 13 bp, Artificial Sequence
  Oligonucleotide for detection of SNP TSC0018260
raaactcccaact

SEQ ID NO: 70247 - DNA, 13 bp, Artificial Sequence
  Oligonucleotide for detection of SNP TSC0018260
agttggtagttty

SEQ ID NO: 70248 - DNA, 13 bp, Artificial Sequence
  Oligonucleotide for detection of SNP TSC0018260
raaactaccaact

SEQ ID NO: 70249 - DNA, 13 bp, Artificial Sequence
  Oligonucleotide for detection of SNP TSC0018260
agtcgggagttty

SEQ ID NO: 70250 - DNA, 13 bp, Artificial Sequence
  Oligonucleotide for detection of SNP TSC0018260
raaactcccgact

SEQ ID NO: 70251 - DNA, 13 bp, Artificial Sequence
  Oligonucleotide for detection of SNP TSC0018260
agtcggtagttty

SEQ ID NO: 70252 - DNA, 13 bp, Artificial Sequence
  Oligonucleotide for detection of SNP TSC0018260
raaactaccgact

SEQ ID NO: 70253 - DNA, 13 bp, Artificial Sequence
  Oligonucleotide for detection of SNP TSC0018261
gatagggtattgg

SEQ ID NO: 70254 - DNA, 13 bp, Artificial Sequence
  Oligonucleotide for detection of SNP TSC0018261
ccaataccctatc

SEQ ID NO: 70255 - DNA, 13 bp, Artificial Sequence
  Oligonucleotide for detection of SNP TSC0018261
gataggttattgg

SEQ ID NO: 70256 - DNA, 13 bp, Artificial Sequence
  Oligonucleotide for detection of SNP TSC0018261
ccaataacctatc

SEQ ID NO: 70257 - DNA, 13 bp, Artificial Sequence
  Oligonucleotide for detection of SNP TSC0018261
ttagtgttttgty

SEQ ID NO: 70258 - DNA, 13 bp, Artificial Sequence
  Oligonucleotide for detection of SNP TSC0018261
racaaaacactaa

SEQ ID NO: 70259 - DNA, 13 bp, Artificial Sequence
  Oligonucleotide for detection of SNP TSC0018261
ttagtgatttgty

SEQ ID NO: 70260 - DNA, 13 bp, Artificial Sequence
  Oligonucleotide for detection of SNP TSC0018261
racaaatcactaa

SEQ ID NO: 70261 - DNA, 13 bp, Artificial Sequence
  Oligonucleotide for detection of SNP TSC0018262
gtggggggagggt

SEQ ID NO: 70262 - DNA, 13 bp, Artificial Sequence
  Oligonucleotide for detection of SNP TSC0018262
accctccccccac

SEQ ID NO: 70263 - DNA, 13 bp, Artificial Sequence
  Oligonucleotide for detection of SNP TSC0018262
gtggggagagggt

SEQ ID NO: 70264 - DNA, 13 bp, Artificial Sequence
  Oligonucleotide for detection of SNP TSC0018262
accctctccccac

SEQ ID NO: 70265 - DNA, 13 bp, Artificial Sequence
  Oligonucleotide for detection of SNP TSC0018263
gtttaaatatatg

SEQ ID NO: 70266 - DNA, 13 bp, Artificial Sequence
  Oligonucleotide for detection of SNP TSC0018263
catatatttaaac

SEQ ID NO: 70267 - DNA, 13 bp, Artificial Sequence
  Oligonucleotide for detection of SNP TSC0018263
gtttaagtatatg

SEQ ID NO: 70268 - DNA, 13 bp, Artificial Sequence
  Oligonucleotide for detection of SNP TSC0018263
catatacttaaac

SEQ ID NO: 70269 - DNA, 13 bp, Artificial Sequence
  Oligonucleotide for detection of SNP TSC0018267
ttgtttaaattty

SEQ ID NO: 70270 - DNA, 13 bp, Artificial Sequence
  Oligonucleotide for detection of SNP TSC0018267
raaatttaaacaa

SEQ ID NO: 70271 - DNA, 13 bp, Artificial Sequence
  Oligonucleotide for detection of SNP TSC0018267
ttgttttaattty

SEQ ID NO: 70272 - DNA, 13 bp, Artificial Sequence
  Oligonucleotide for detection of SNP TSC0018267
raaattaaaacaa

SEQ ID NO: 70273 - DNA, 13 bp, Artificial Sequence
  Oligonucleotide for detection of SNP TSC0018267
gagatttaggtag

SEQ ID NO: 70274 - DNA, 13 bp, Artificial Sequence
  Oligonucleotide for detection of SNP TSC0018267
ctacctaaatctc

SEQ ID NO: 70275 - DNA, 13 bp, Artificial Sequence
  Oligonucleotide for detection of SNP TSC0018267
gagattgaggtag

SEQ ID NO: 70276 - DNA, 13 bp, Artificial Sequence
  Oligonucleotide for detection of SNP TSC0018267
ctacctcaatctc

SEQ ID NO: 70277 - DNA, 13 bp, Artificial Sequence
  Oligonucleotide for detection of SNP TSC0018269
aattagggaatgt

SEQ ID NO: 70278 - DNA, 13 bp, Artificial Sequence
  Oligonucleotide for detection of SNP TSC0018269
acattccctaatt

SEQ ID NO: 70279 - DNA, 13 bp, Artificial Sequence
  Oligonucleotide for detection of SNP TSC0018269
aattagtgaatgt

SEQ ID NO: 70280 - DNA, 13 bp, Artificial Sequence
  Oligonucleotide for detection of SNP TSC0018269
acattcactaatt

SEQ ID NO: 70281 - DNA, 13 bp, Artificial Sequence
  Oligonucleotide for detection of SNP TSC0018269
atattttttggtt

SEQ ID NO: 70282 - DNA, 13 bp, Artificial Sequence
  Oligonucleotide for detection of SNP TSC0018269
aaccaaaaaatat

SEQ ID NO: 70283 - DNA, 13 bp, Artificial Sequence
  Oligonucleotide for detection of SNP TSC0018269
atatttattggtt

SEQ ID NO: 70284 - DNA, 13 bp, Artificial Sequence
  Oligonucleotide for detection of SNP TSC0018269
aaccaataaatat

SEQ ID NO: 70285 - DNA, 13 bp, Artificial Sequence
  Oligonucleotide for detection of SNP TSC0018270
tttttagatgtgt

SEQ ID NO: 70286 - DNA, 13 bp, Artificial Sequence
  Oligonucleotide for detection of SNP TSC0018270
acacatctaaaaa

SEQ ID NO: 70287 - DNA, 13 bp, Artificial Sequence
  Oligonucleotide for detection of SNP TSC0018270
tttttaaatgtgt

SEQ ID NO: 70288 - DNA, 13 bp, Artificial Sequence
  Oligonucleotide for detection of SNP TSC0018270
acacatttaaaaa

SEQ ID NO: 70289 - DNA, 13 bp, Artificial Sequence
  Oligonucleotide for detection of SNP TSC0018272
tttttgggtgagg

SEQ ID NO: 70290 - DNA, 13 bp, Artificial Sequence
  Oligonucleotide for detection of SNP TSC0018272
cctcacccaaaaa

SEQ ID NO: 70291 - DNA, 13 bp, Artificial Sequence
  Oligonucleotide for detection of SNP TSC0018272
tttttgtgtgagg

SEQ ID NO: 70292 - DNA, 13 bp, Artificial Sequence
  Oligonucleotide for detection of SNP TSC0018272
cctcacacaaaaa

SEQ ID NO: 70293 - DNA, 13 bp, Artificial Sequence
  Oligonucleotide for detection of SNP TSC0018272
ttttatttaagga

SEQ ID NO: 70294 - DNA, 13 bp, Artificial Sequence
  Oligonucleotide for detection of SNP TSC0018272
tccttaaataaaa

SEQ ID NO: 70295 - DNA, 13 bp, Artificial Sequence
  Oligonucleotide for detection of SNP TSC0018272
ttttatataagga

SEQ ID NO: 70296 - DNA, 13 bp, Artificial Sequence
  Oligonucleotide for detection of SNP TSC0018272
tccttatataaaa

SEQ ID NO: 70297 - DNA, 13 bp, Artificial Sequence
  Oligonucleotide for detection of SNP TSC0018273
atagatattttay

SEQ ID NO: 70298 - DNA, 13 bp, Artificial Sequence
  Oligonucleotide for detection of SNP TSC0018273
rtaaaatatctat

SEQ ID NO: 70299 - DNA, 13 bp, Artificial Sequence
  Oligonucleotide for detection of SNP TSC0018273
atagatgttttay

SEQ ID NO: 70300 - DNA, 13 bp, Artificial Sequence
  Oligonucleotide for detection of SNP TSC0018273
rtaaaacatctat

SEQ ID NO: 70301 - DNA, 13 bp, Artificial Sequence
  Oligonucleotide for detection of SNP TSC0018274
tattggggtatta

SEQ ID NO: 70302 - DNA, 13 bp, Artificial Sequence
  Oligonucleotide for detection of SNP TSC0018274
taataccccaata

SEQ ID NO: 70303 - DNA, 13 bp, Artificial Sequence
  Oligonucleotide for detection of SNP TSC0018274
tattggtgtatta

SEQ ID NO: 70304 - DNA, 13 bp, Artificial Sequence
  Oligonucleotide for detection of SNP TSC0018274
taatacaccaata

SEQ ID NO: 70305 - DNA, 13 bp, Artificial Sequence
  Oligonucleotide for detection of SNP TSC0018274
tggtgttttagta

SEQ ID NO: 70306 - DNA, 13 bp, Artificial Sequence
  Oligonucleotide for detection of SNP TSC0018274
tactaaaacacca

SEQ ID NO: 70307 - DNA, 13 bp, Artificial Sequence
  Oligonucleotide for detection of SNP TSC0018274
tggtgtattagta

SEQ ID NO: 70308 - DNA, 13 bp, Artificial Sequence
  Oligonucleotide for detection of SNP TSC0018274
tactaatacacca

SEQ ID NO: 70309 - DNA, 13 bp, Artificial Sequence
  Oligonucleotide for detection of SNP TSC0018278
aggtttgttgtgg

SEQ ID NO: 70310 - DNA, 13 bp, Artificial Sequence
  Oligonucleotide for detection of SNP TSC0018278
ccacaacaaacct

SEQ ID NO: 70311 - DNA, 13 bp, Artificial Sequence
  Oligonucleotide for detection of SNP TSC0018278
aggtttattgtgg

SEQ ID NO: 70312 - DNA, 13 bp, Artificial Sequence
  Oligonucleotide for detection of SNP TSC0018278
ccacaataaacct

SEQ ID NO: 70313 - DNA, 13 bp, Artificial Sequence
  Oligonucleotide for detection of SNP TSC0018278
aggtttgtcgtgg

SEQ ID NO: 70314 - DNA, 13 bp, Artificial Sequence
  Oligonucleotide for detection of SNP TSC0018278
ccacgacaaacct

SEQ ID NO: 70315 - DNA, 13 bp, Artificial Sequence
  Oligonucleotide for detection of SNP TSC0018278
aggtttatcgtgg

SEQ ID NO: 70316 - DNA, 13 bp, Artificial Sequence
  Oligonucleotide for detection of SNP TSC0018278
ccacgataaacct

SEQ ID NO: 70317 - DNA, 13 bp, Artificial Sequence
  Oligonucleotide for detection of SNP TSC0018278
aggtttgttgcgg

SEQ ID NO: 70318 - DNA, 13 bp, Artificial Sequence
  Oligonucleotide for detection of SNP TSC0018278
ccgcaacaaacct

SEQ ID NO: 70319 - DNA, 13 bp, Artificial Sequence
  Oligonucleotide for detection of SNP TSC0018278
aggtttattgcgg

SEQ ID NO: 70320 - DNA, 13 bp, Artificial Sequence
  Oligonucleotide for detection of SNP TSC0018278
ccgcaataaacct

SEQ ID NO: 70321 - DNA, 13 bp, Artificial Sequence
  Oligonucleotide for detection of SNP TSC0018278
aggtttgtcgcgg

SEQ ID NO: 70322 - DNA, 13 bp, Artificial Sequence
  Oligonucleotide for detection of SNP TSC0018278
ccgcgacaaacct

SEQ ID NO: 70323 - DNA, 13 bp, Artificial Sequence
  Oligonucleotide for detection of SNP TSC0018278
aggtttatcgcgg

SEQ ID NO: 70324 - DNA, 13 bp, Artificial Sequence
  Oligonucleotide for detection of SNP TSC0018278
ccgcgataaacct

SEQ ID NO: 70325 - DNA, 13 bp, Artificial Sequence
  Oligonucleotide for detection of SNP TSC0018280
ataaaagtaataa

SEQ ID NO: 70326 - DNA, 13 bp, Artificial Sequence
  Oligonucleotide for detection of SNP TSC0018280
ttattacttttat

SEQ ID NO: 70327 - DNA, 13 bp, Artificial Sequence
  Oligonucleotide for detection of SNP TSC0018285
gtttttattgatt

SEQ ID NO: 70328 - DNA, 13 bp, Artificial Sequence
  Oligonucleotide for detection of SNP TSC0018285
aatcaataaaaac

SEQ ID NO: 70329 - DNA, 13 bp, Artificial Sequence
  Oligonucleotide for detection of SNP TSC0018285
gttttttttgatt

SEQ ID NO: 70330 - DNA, 13 bp, Artificial Sequence
  Oligonucleotide for detection of SNP TSC0018285
aatcaaaaaaaac

SEQ ID NO: 70331 - DNA, 13 bp, Artificial Sequence
  Oligonucleotide for detection of SNP TSC0018285
aattaatgaaggy

SEQ ID NO: 70332 - DNA, 13 bp, Artificial Sequence
  Oligonucleotide for detection of SNP TSC0018285
rccttcattaatt

SEQ ID NO: 70333 - DNA, 13 bp, Artificial Sequence
  Oligonucleotide for detection of SNP TSC0018285
aattaaagaaggy

SEQ ID NO: 70334 - DNA, 13 bp, Artificial Sequence
  Oligonucleotide for detection of SNP TSC0018285
rccttctttaatt

SEQ ID NO: 70335 - DNA, 13 bp, Artificial Sequence
  Oligonucleotide for detection of SNP TSC0018286
tgttgaagtgttt

SEQ ID NO: 70336 - DNA, 13 bp, Artificial Sequence
  Oligonucleotide for detection of SNP TSC0018286
aaacacttcaaca

SEQ ID NO: 70337 - DNA, 13 bp, Artificial Sequence
  Oligonucleotide for detection of SNP TSC0018286
tgttgatgtgttt

SEQ ID NO: 70338 - DNA, 13 bp, Artificial Sequence
  Oligonucleotide for detection of SNP TSC0018286
aaacacatcaaca

SEQ ID NO: 70339 - DNA, 13 bp, Artificial Sequence
  Oligonucleotide for detection of SNP TSC0018286
cgttgaagtgttt

SEQ ID NO: 70340 - DNA, 13 bp, Artificial Sequence
  Oligonucleotide for detection of SNP TSC0018286
aaacacttcaacg

SEQ ID NO: 70341 - DNA, 13 bp, Artificial Sequence
  Oligonucleotide for detection of SNP TSC0018286
cgttgatgtgttt

SEQ ID NO: 70342 - DNA, 13 bp, Artificial Sequence
  Oligonucleotide for detection of SNP TSC0018286
aaacacatcaacg

SEQ ID NO: 70343 - DNA, 13 bp, Artificial Sequence
  Oligonucleotide for detection of SNP TSC0018286
tgttgaagcgttt

SEQ ID NO: 70344 - DNA, 13 bp, Artificial Sequence
  Oligonucleotide for detection of SNP TSC0018286
aaacgcttcaaca

SEQ ID NO: 70345 - DNA, 13 bp, Artificial Sequence
  Oligonucleotide for detection of SNP TSC0018286
tgttgatgcgttt

SEQ ID NO: 70346 - DNA, 13 bp, Artificial Sequence
  Oligonucleotide for detection of SNP TSC0018286
aaacgcatcaaca

SEQ ID NO: 70347 - DNA, 13 bp, Artificial Sequence
  Oligonucleotide for detection of SNP TSC0018286
cgttgaagcgttt

SEQ ID NO: 70348 - DNA, 13 bp, Artificial Sequence
  Oligonucleotide for detection of SNP TSC0018286
aaacgcttcaacg

SEQ ID NO: 70349 - DNA, 13 bp, Artificial Sequence
  Oligonucleotide for detection of SNP TSC0018286
cgttgatgcgttt

SEQ ID NO: 70350 - DNA, 13 bp, Artificial Sequence
  Oligonucleotide for detection of SNP TSC0018286
aaacgcatcaacg

SEQ ID NO: 70351 - DNA, 13 bp, Artificial Sequence
  Oligonucleotide for detection of SNP TSC0018286
aaatgttttaatg

SEQ ID NO: 70352 - DNA, 13 bp, Artificial Sequence
  Oligonucleotide for detection of SNP TSC0018286
cattaaaacattt

SEQ ID NO: 70353 - DNA, 13 bp, Artificial Sequence
  Oligonucleotide for detection of SNP TSC0018286
aaatgtattaatg

SEQ ID NO: 70354 - DNA, 13 bp, Artificial Sequence
  Oligonucleotide for detection of SNP TSC0018286
cattaatacattt

SEQ ID NO: 70355 - DNA, 13 bp, Artificial Sequence
  Oligonucleotide for detection of SNP TSC0018286
aaacgttttaatg

SEQ ID NO: 70356 - DNA, 13 bp, Artificial Sequence
  Oligonucleotide for detection of SNP TSC0018286
cattaaaacgttt

SEQ ID NO: 70357 - DNA, 13 bp, Artificial Sequence
  Oligonucleotide for detection of SNP TSC0018286
aaacgtattaatg

SEQ ID NO: 70358 - DNA, 13 bp, Artificial Sequence
  Oligonucleotide for detection of SNP TSC0018286
cattaatacgttt

SEQ ID NO: 70359 - DNA, 13 bp, Artificial Sequence
  Oligonucleotide for detection of SNP TSC0018286
aaatgttttaacg

SEQ ID NO: 70360 - DNA, 13 bp, Artificial Sequence
  Oligonucleotide for detection of SNP TSC0018286
cgttaaaacattt

SEQ ID NO: 70361 - DNA, 13 bp, Artificial Sequence
  Oligonucleotide for detection of SNP TSC0018286
aaatgtattaacg

SEQ ID NO: 70362 - DNA, 13 bp, Artificial Sequence
  Oligonucleotide for detection of SNP TSC0018286
cgttaatacattt

SEQ ID NO: 70363 - DNA, 13 bp, Artificial Sequence
  Oligonucleotide for detection of SNP TSC0018286
aaacgttttaacg

SEQ ID NO: 70364 - DNA, 13 bp, Artificial Sequence
  Oligonucleotide for detection of SNP TSC0018286
cgttaaaacgttt

SEQ ID NO: 70365 - DNA, 13 bp, Artificial Sequence
  Oligonucleotide for detection of SNP TSC0018286
aaacgtattaacg

SEQ ID NO: 70366 - DNA, 13 bp, Artificial Sequence
  Oligonucleotide for detection of SNP TSC0018286
cgttaatacgttt

SEQ ID NO: 70367 - DNA, 13 bp, Artificial Sequence
  Oligonucleotide for detection of SNP TSC0018290
agggaagagttgg

SEQ ID NO: 70368 - DNA, 13 bp, Artificial Sequence
  Oligonucleotide for detection of SNP TSC0018290
ccaactcttccct

SEQ ID NO: 70369 - DNA, 13 bp, Artificial Sequence
  Oligonucleotide for detection of SNP TSC0018290
agggaaaagttgg

SEQ ID NO: 70370 - DNA, 13 bp, Artificial Sequence
  Oligonucleotide for detection of SNP TSC0018290
ccaacttttccct

SEQ ID NO: 70371 - DNA, 13 bp, Artificial Sequence
  Oligonucleotide for detection of SNP TSC0018290
agggaagagtcgg

SEQ ID NO: 70372 - DNA, 13 bp, Artificial Sequence
  Oligonucleotide for detection of SNP TSC0018290
ccgactcttccct

SEQ ID NO: 70373 - DNA, 13 bp, Artificial Sequence
  Oligonucleotide for detection of SNP TSC0018290
agggaaaagtcgg

SEQ ID NO: 70374 - DNA, 13 bp, Artificial Sequence
  Oligonucleotide for detection of SNP TSC0018290
ccgacttttccct

SEQ ID NO: 70375 - DNA, 13 bp, Artificial Sequence
  Oligonucleotide for detection of SNP TSC0018291
ggagtgagatatg

SEQ ID NO: 70376 - DNA, 13 bp, Artificial Sequence
  Oligonucleotide for detection of SNP TSC0018291
catatctcactcc

SEQ ID NO: 70377 - DNA, 13 bp, Artificial Sequence
  Oligonucleotide for detection of SNP TSC0018291
ggagtgggatatg

SEQ ID NO: 70378 - DNA, 13 bp, Artificial Sequence
  Oligonucleotide for detection of SNP TSC0018291
catatcccactcc

SEQ ID NO: 70379 - DNA, 13 bp, Artificial Sequence
  Oligonucleotide for detection of SNP TSC0018291
ggagtgagatacg

SEQ ID NO: 70380 - DNA, 13 bp, Artificial Sequence
  Oligonucleotide for detection of SNP TSC0018291
cgtatctcactcc

SEQ ID NO: 70381 - DNA, 13 bp, Artificial Sequence
  Oligonucleotide for detection of SNP TSC0018291
ggagtgggatacg

SEQ ID NO: 70382 - DNA, 13 bp, Artificial Sequence
  Oligonucleotide for detection of SNP TSC0018291
cgtatcccactcc

SEQ ID NO: 70383 - DNA, 13 bp, Artificial Sequence
  Oligonucleotide for detection of SNP TSC0018292
ttggaatttagtt

SEQ ID NO: 70384 - DNA, 13 bp, Artificial Sequence
  Oligonucleotide for detection of SNP TSC0018292
aactaaattccaa

SEQ ID NO: 70385 - DNA, 13 bp, Artificial Sequence
  Oligonucleotide for detection of SNP TSC0018292
ttggaagttagtt

SEQ ID NO: 70386 - DNA, 13 bp, Artificial Sequence
  Oligonucleotide for detection of SNP TSC0018292
aactaacttccaa

SEQ ID NO: 70387 - DNA, 13 bp, Artificial Sequence
  Oligonucleotide for detection of SNP TSC0018292
agttgagttttag

SEQ ID NO: 70388 - DNA, 13 bp, Artificial Sequence
  Oligonucleotide for detection of SNP TSC0018292
ctaaaactcaact

SEQ ID NO: 70389 - DNA, 13 bp, Artificial Sequence
  Oligonucleotide for detection of SNP TSC0018292
agttgatttttag

SEQ ID NO: 70390 - DNA, 13 bp, Artificial Sequence
  Oligonucleotide for detection of SNP TSC0018292
ctaaaaatcaact

SEQ ID NO: 70391 - DNA, 13 bp, Artificial Sequence
  Oligonucleotide for detection of SNP TSC0018295
taagtgtagatay

SEQ ID NO: 70392 - DNA, 13 bp, Artificial Sequence
  Oligonucleotide for detection of SNP TSC0018295
rtatctacactta

SEQ ID NO: 70393 - DNA, 13 bp, Artificial Sequence
  Oligonucleotide for detection of SNP TSC0018295
taagtggagatay

SEQ ID NO: 70394 - DNA, 13 bp, Artificial Sequence
  Oligonucleotide for detection of SNP TSC0018295
rtatctccactta

SEQ ID NO: 70395 - DNA, 13 bp, Artificial Sequence
  Oligonucleotide for detection of SNP TSC0018295
gtgtttgtatttg

SEQ ID NO: 70396 - DNA, 13 bp, Artificial Sequence
  Oligonucleotide for detection of SNP TSC0018295
caaatacaaacac

SEQ ID NO: 70397 - DNA, 13 bp, Artificial Sequence
  Oligonucleotide for detection of SNP TSC0018295
gtgtttttatttg

SEQ ID NO: 70398 - DNA, 13 bp, Artificial Sequence
  Oligonucleotide for detection of SNP TSC0018295
caaataaaaacac

SEQ ID NO: 70399 - DNA, 13 bp, Artificial Sequence
  Oligonucleotide for detection of SNP TSC0018296
ttataggaagtat

SEQ ID NO: 70400 - DNA, 13 bp, Artificial Sequence
  Oligonucleotide for detection of SNP TSC0018296
atacttcctataa

SEQ ID NO: 70401 - DNA, 13 bp, Artificial Sequence
  Oligonucleotide for detection of SNP TSC0018296
ttatagtaagtat

SEQ ID NO: 70402 - DNA, 13 bp, Artificial Sequence
  Oligonucleotide for detection of SNP TSC0018296
atacttactataa

SEQ ID NO: 70403 - DNA, 13 bp, Artificial Sequence
  Oligonucleotide for detection of SNP TSC0018296
atattttttgtga

SEQ ID NO: 70404 - DNA, 13 bp, Artificial Sequence
  Oligonucleotide for detection of SNP TSC0018296
tcacaaaaaatat

SEQ ID NO: 70405 - DNA, 13 bp, Artificial Sequence
  Oligonucleotide for detection of SNP TSC0018296
atatttattgtga

SEQ ID NO: 70406 - DNA, 13 bp, Artificial Sequence
  Oligonucleotide for detection of SNP TSC0018296
tcacaataaatat

SEQ ID NO: 70407 - DNA, 13 bp, Artificial Sequence
  Oligonucleotide for detection of SNP TSC0018297
taattgggtaatt

SEQ ID NO: 70408 - DNA, 13 bp, Artificial Sequence
  Oligonucleotide for detection of SNP TSC0018297
aattacccaatta

SEQ ID NO: 70409 - DNA, 13 bp, Artificial Sequence
  Oligonucleotide for detection of SNP TSC0018297
taattgtgtaatt

SEQ ID NO: 70410 - DNA, 13 bp, Artificial Sequence
  Oligonucleotide for detection of SNP TSC0018297
aattacacaatta

SEQ ID NO: 70411 - DNA, 13 bp, Artificial Sequence
  Oligonucleotide for detection of SNP TSC0018297
aattgtttaattg

SEQ ID NO: 70412 - DNA, 13 bp, Artificial Sequence
  Oligonucleotide for detection of SNP TSC0018297
caattaaacaatt

SEQ ID NO: 70413 - DNA, 13 bp, Artificial Sequence
  Oligonucleotide for detection of SNP TSC0018297
aattgtataattg

SEQ ID NO: 70414 - DNA, 13 bp, Artificial Sequence
  Oligonucleotide for detection of SNP TSC0018297
caattatacaatt

SEQ ID NO: 70415 - DNA, 13 bp, Artificial Sequence
  Oligonucleotide for detection of SNP TSC0018298
attttagaaaaag

SEQ ID NO: 70416 - DNA, 13 bp, Artificial Sequence
  Oligonucleotide for detection of SNP TSC0018298
ctttttctaaaat

SEQ ID NO: 70417 - DNA, 13 bp, Artificial Sequence
  Oligonucleotide for detection of SNP TSC0018298
attttaaaaaaag

SEQ ID NO: 70418 - DNA, 13 bp, Artificial Sequence
  Oligonucleotide for detection of SNP TSC0018298
ctttttttaaaat

SEQ ID NO: 70419 - DNA, 13 bp, Artificial Sequence
  Oligonucleotide for detection of SNP TSC0018299
tttgttgggtatg

SEQ ID NO: 70420 - DNA, 13 bp, Artificial Sequence
  Oligonucleotide for detection of SNP TSC0018299
catacccaacaaa

SEQ ID NO: 70421 - DNA, 13 bp, Artificial Sequence
  Oligonucleotide for detection of SNP TSC0018299
tttgtttggtatg

SEQ ID NO: 70422 - DNA, 13 bp, Artificial Sequence
  Oligonucleotide for detection of SNP TSC0018299
cataccaaacaaa

SEQ ID NO: 70423 - DNA, 13 bp, Artificial Sequence
  Oligonucleotide for detection of SNP TSC0018299
tatgtttagtaag

SEQ ID NO: 70424 - DNA, 13 bp, Artificial Sequence
  Oligonucleotide for detection of SNP TSC0018299
cttactaaacata

SEQ ID NO: 70425 - DNA, 13 bp, Artificial Sequence
  Oligonucleotide for detection of SNP TSC0018299
tatgttaagtaag

SEQ ID NO: 70426 - DNA, 13 bp, Artificial Sequence
  Oligonucleotide for detection of SNP TSC0018299
cttacttaacata

SEQ ID NO: 70427 - DNA, 13 bp, Artificial Sequence
  Oligonucleotide for detection of SNP TSC0018300
gatagtatatatt

SEQ ID NO: 70428 - DNA, 13 bp, Artificial Sequence
  Oligonucleotide for detection of SNP TSC0018300
aatatatactatc

SEQ ID NO: 70429 - DNA, 13 bp, Artificial Sequence
  Oligonucleotide for detection of SNP TSC0018300
gatagtgtatatt

SEQ ID NO: 70430 - DNA, 13 bp, Artificial Sequence
  Oligonucleotide for detection of SNP TSC0018300
aatatacactatc

SEQ ID NO: 70431 - DNA, 13 bp, Artificial Sequence
  Oligonucleotide for detection of SNP TSC0018300
gatagcgtatatt

SEQ ID NO: 70432 - DNA, 13 bp, Artificial Sequence
  Oligonucleotide for detection of SNP TSC0018300
aatatacgctatc

SEQ ID NO: 70433 - DNA, 13 bp, Artificial Sequence
  Oligonucleotide for detection of SNP TSC0018300
aatatatgttgty

SEQ ID NO: 70434 - DNA, 13 bp, Artificial Sequence
  Oligonucleotide for detection of SNP TSC0018300
racaacatatatt

SEQ ID NO: 70435 - DNA, 13 bp, Artificial Sequence
  Oligonucleotide for detection of SNP TSC0018300
aatatacgttgty

SEQ ID NO: 70436 - DNA, 13 bp, Artificial Sequence
  Oligonucleotide for detection of SNP TSC0018300
racaacgtatatt

SEQ ID NO: 70437 - DNA, 13 bp, Artificial Sequence
  Oligonucleotide for detection of SNP TSC0018301
tagggggagaggy

SEQ ID NO: 70438 - DNA, 13 bp, Artificial Sequence
  Oligonucleotide for detection of SNP TSC0018301
rcctctcccccta

SEQ ID NO: 70439 - DNA, 13 bp, Artificial Sequence
  Oligonucleotide for detection of SNP TSC0018301
taggggaagaggy

SEQ ID NO: 70440 - DNA, 13 bp, Artificial Sequence
  Oligonucleotide for detection of SNP TSC0018301
rcctcttccccta

SEQ ID NO: 70441 - DNA, 13 bp, Artificial Sequence
  Oligonucleotide for detection of SNP TSC0018303
aattatattgttg

SEQ ID NO: 70442 - DNA, 13 bp, Artificial Sequence
  Oligonucleotide for detection of SNP TSC0018303
caacaatataatt

SEQ ID NO: 70443 - DNA, 13 bp, Artificial Sequence
  Oligonucleotide for detection of SNP TSC0018303
aattatgttgttg

SEQ ID NO: 70444 - DNA, 13 bp, Artificial Sequence
  Oligonucleotide for detection of SNP TSC0018303
caacaacataatt

SEQ ID NO: 70445 - DNA, 13 bp, Artificial Sequence
  Oligonucleotide for detection of SNP TSC0018303
aattacgttgttg

SEQ ID NO: 70446 - DNA, 13 bp, Artificial Sequence
  Oligonucleotide for detection of SNP TSC0018303
caacaacgtaatt

SEQ ID NO: 70447 - DNA, 13 bp, Artificial Sequence
  Oligonucleotide for detection of SNP TSC0018303
taatagtgtaatt

SEQ ID NO: 70448 - DNA, 13 bp, Artificial Sequence
  Oligonucleotide for detection of SNP TSC0018303
aattacactatta

SEQ ID NO: 70449 - DNA, 13 bp, Artificial Sequence
  Oligonucleotide for detection of SNP TSC0018303
taatagcgtaatt

SEQ ID NO: 70450 - DNA, 13 bp, Artificial Sequence
  Oligonucleotide for detection of SNP TSC0018303
aattacgctatta

SEQ ID NO: 70451 - DNA, 13 bp, Artificial Sequence
  Oligonucleotide for detection of SNP TSC0018306
gtagaaaagtttt

SEQ ID NO: 70452 - DNA, 13 bp, Artificial Sequence
  Oligonucleotide for detection of SNP TSC0018306
aaaacttttctac

SEQ ID NO: 70453 - DNA, 13 bp, Artificial Sequence
  Oligonucleotide for detection of SNP TSC0018306
gtagaatagtttt

SEQ ID NO: 70454 - DNA, 13 bp, Artificial Sequence
  Oligonucleotide for detection of SNP TSC0018306
aaaactattctac

SEQ ID NO: 70455 - DNA, 13 bp, Artificial Sequence
  Oligonucleotide for detection of SNP TSC0018306
aggatttttttgy

SEQ ID NO: 70456 - DNA, 13 bp, Artificial Sequence
  Oligonucleotide for detection of SNP TSC0018306
rcaaaaaaatcct

SEQ ID NO: 70457 - DNA, 13 bp, Artificial Sequence
  Oligonucleotide for detection of SNP TSC0018306
aggattgttttgy

SEQ ID NO: 70458 - DNA, 13 bp, Artificial Sequence
  Oligonucleotide for detection of SNP TSC0018306
rcaaaacaatcct

SEQ ID NO: 70459 - DNA, 13 bp, Artificial Sequence
  Oligonucleotide for detection of SNP TSC0018307
tggttttgggagy

SEQ ID NO: 70460 - DNA, 13 bp, Artificial Sequence
  Oligonucleotide for detection of SNP TSC0018307
rctcccaaaacca

SEQ ID NO: 70461 - DNA, 13 bp, Artificial Sequence
  Oligonucleotide for detection of SNP TSC0018307
tggtttcgggagy

SEQ ID NO: 70462 - DNA, 13 bp, Artificial Sequence
  Oligonucleotide for detection of SNP TSC0018307
rctcccgaaacca

SEQ ID NO: 70463 - DNA, 13 bp, Artificial Sequence
  Oligonucleotide for detection of SNP TSC0018307
gtttttgaggtta

SEQ ID NO: 70464 - DNA, 13 bp, Artificial Sequence
  Oligonucleotide for detection of SNP TSC0018307
taacctcaaaaac

SEQ ID NO: 70465 - DNA, 13 bp, Artificial Sequence
  Oligonucleotide for detection of SNP TSC0018307
gtttttaaggtta

SEQ ID NO: 70466 - DNA, 13 bp, Artificial Sequence
  Oligonucleotide for detection of SNP TSC0018307
taaccttaaaaac

SEQ ID NO: 70467 - DNA, 13 bp, Artificial Sequence
  Oligonucleotide for detection of SNP TSC0018307
gttttcgaggtta

SEQ ID NO: 70468 - DNA, 13 bp, Artificial Sequence
  Oligonucleotide for detection of SNP TSC0018307
taacctcgaaaac

SEQ ID NO: 70469 - DNA, 13 bp, Artificial Sequence
  Oligonucleotide for detection of SNP TSC0018308
ggattttgggtay

SEQ ID NO: 70470 - DNA, 13 bp, Artificial Sequence
  Oligonucleotide for detection of SNP TSC0018308
rtacccaaaatcc

SEQ ID NO: 70471 - DNA, 13 bp, Artificial Sequence
  Oligonucleotide for detection of SNP TSC0018308
ggatttcgggtay

SEQ ID NO: 70472 - DNA, 13 bp, Artificial Sequence
  Oligonucleotide for detection of SNP TSC0018308
rtacccgaaatcc

SEQ ID NO: 70473 - DNA, 13 bp, Artificial Sequence
  Oligonucleotide for detection of SNP TSC0018308
gtatttggggtty

SEQ ID NO: 70474 - DNA, 13 bp, Artificial Sequence
  Oligonucleotide for detection of SNP TSC0018308
raaccccaaatac

SEQ ID NO: 70475 - DNA, 13 bp, Artificial Sequence
  Oligonucleotide for detection of SNP TSC0018308
gtatttagggtty

SEQ ID NO: 70476 - DNA, 13 bp, Artificial Sequence
  Oligonucleotide for detection of SNP TSC0018308
raaccctaaatac

SEQ ID NO: 70477 - DNA, 13 bp, Artificial Sequence
  Oligonucleotide for detection of SNP TSC0018308
gtattcggggtty

SEQ ID NO: 70478 - DNA, 13 bp, Artificial Sequence
  Oligonucleotide for detection of SNP TSC0018308
raaccccgaatac

SEQ ID NO: 70479 - DNA, 13 bp, Artificial Sequence
  Oligonucleotide for detection of SNP TSC0018309
taataagaggata

SEQ ID NO: 70480 - DNA, 13 bp, Artificial Sequence
  Oligonucleotide for detection of SNP TSC0018309
tatcctcttatta

SEQ ID NO: 70481 - DNA, 13 bp, Artificial Sequence
  Oligonucleotide for detection of SNP TSC0018309
taataaaaggata

SEQ ID NO: 70482 - DNA, 13 bp, Artificial Sequence
  Oligonucleotide for detection of SNP TSC0018309
tatccttttatta

SEQ ID NO: 70483 - DNA, 13 bp, Artificial Sequence
  Oligonucleotide for detection of SNP TSC0018310
ttaatagaggtag

SEQ ID NO: 70484 - DNA, 13 bp, Artificial Sequence
  Oligonucleotide for detection of SNP TSC0018310
ctacctctattaa

SEQ ID NO: 70485 - DNA, 13 bp, Artificial Sequence
  Oligonucleotide for detection of SNP TSC0018310
ttaataaaggtag

SEQ ID NO: 70486 - DNA, 13 bp, Artificial Sequence
  Oligonucleotide for detection of SNP TSC0018310
ctacctttattaa

SEQ ID NO: 70487 - DNA, 13 bp, Artificial Sequence
  Oligonucleotide for detection of SNP TSC0018311
taaaaagtattgy

SEQ ID NO: 70488 - DNA, 13 bp, Artificial Sequence
  Oligonucleotide for detection of SNP TSC0018311
rcaatacttttta

SEQ ID NO: 70489 - DNA, 13 bp, Artificial Sequence
  Oligonucleotide for detection of SNP TSC0018311
taaaaaatattgy

SEQ ID NO: 70490 - DNA, 13 bp, Artificial Sequence
  Oligonucleotide for detection of SNP TSC0018311
rcaatatttttta

SEQ ID NO: 70491 - DNA, 13 bp, Artificial Sequence
  Oligonucleotide for detection of SNP TSC0018312
atatgggaatttt

SEQ ID NO: 70492 - DNA, 13 bp, Artificial Sequence
  Oligonucleotide for detection of SNP TSC0018312
aaaattcccatat

SEQ ID NO: 70493 - DNA, 13 bp, Artificial Sequence
  Oligonucleotide for detection of SNP TSC0018312
atatggaaatttt

SEQ ID NO: 70494 - DNA, 13 bp, Artificial Sequence
  Oligonucleotide for detection of SNP TSC0018312
aaaatttccatat

SEQ ID NO: 70495 - DNA, 13 bp, Artificial Sequence
  Oligonucleotide for detection of SNP TSC0018313
ggttttgttaaga

SEQ ID NO: 70496 - DNA, 13 bp, Artificial Sequence
  Oligonucleotide for detection of SNP TSC0018313
tcttaacaaaacc

SEQ ID NO: 70497 - DNA, 13 bp, Artificial Sequence
  Oligonucleotide for detection of SNP TSC0018313
ggttttattaaga

SEQ ID NO: 70498 - DNA, 13 bp, Artificial Sequence
  Oligonucleotide for detection of SNP TSC0018313
tcttaataaaacc

SEQ ID NO: 70499 - DNA, 13 bp, Artificial Sequence
  Oligonucleotide for detection of SNP TSC0018314
taggtagtggtaa

SEQ ID NO: 70500 - DNA, 13 bp, Artificial Sequence
  Oligonucleotide for detection of SNP TSC0018314
ttaccactaccta

SEQ ID NO: 70501 - DNA, 13 bp, Artificial Sequence
  Oligonucleotide for detection of SNP TSC0018314
taggtaatggtaa

SEQ ID NO: 70502 - DNA, 13 bp, Artificial Sequence
  Oligonucleotide for detection of SNP TSC0018314
ttaccattaccta

SEQ ID NO: 70503 - DNA, 13 bp, Artificial Sequence
  Oligonucleotide for detection of SNP TSC0018319
gatttatgtttaa

SEQ ID NO: 70504 - DNA, 13 bp, Artificial Sequence
  Oligonucleotide for detection of SNP TSC0018319
ttaaacataaatc

SEQ ID NO: 70505 - DNA, 13 bp, Artificial Sequence
  Oligonucleotide for detection of SNP TSC0018319
gatttacgtttaa

SEQ ID NO: 70506 - DNA, 13 bp, Artificial Sequence
  Oligonucleotide for detection of SNP TSC0018319
ttaaacgtaaatc

SEQ ID NO: 70507 - DNA, 13 bp, Artificial Sequence
  Oligonucleotide for detection of SNP TSC0018319
ttggatgtgaaty

SEQ ID NO: 70508 - DNA, 13 bp, Artificial Sequence
  Oligonucleotide for detection of SNP TSC0018319
rattcacatccaa

SEQ ID NO: 70509 - DNA, 13 bp, Artificial Sequence
  Oligonucleotide for detection of SNP TSC0018319
ttggatatgaaty

SEQ ID NO: 70510 - DNA, 13 bp, Artificial Sequence
  Oligonucleotide for detection of SNP TSC0018319
rattcatatccaa

SEQ ID NO: 70511 - DNA, 13 bp, Artificial Sequence
  Oligonucleotide for detection of SNP TSC0018319
ttggacgtgaaty

SEQ ID NO: 70512 - DNA, 13 bp, Artificial Sequence
  Oligonucleotide for detection of SNP TSC0018319
rattcacgtccaa

SEQ ID NO: 70513 - DNA, 13 bp, Artificial Sequence
  Oligonucleotide for detection of SNP TSC0018320
aagatgtggtagg

SEQ ID NO: 70514 - DNA, 13 bp, Artificial Sequence
  Oligonucleotide for detection of SNP TSC0018320
cctaccacatctt

SEQ ID NO: 70515 - DNA, 13 bp, Artificial Sequence
  Oligonucleotide for detection of SNP TSC0018320
aagatggggtagg

SEQ ID NO: 70516 - DNA, 13 bp, Artificial Sequence
  Oligonucleotide for detection of SNP TSC0018320
cctaccccatctt

SEQ ID NO: 70517 - DNA, 13 bp, Artificial Sequence
  Oligonucleotide for detection of SNP TSC0018320
aagacgtggtagg

SEQ ID NO: 70518 - DNA, 13 bp, Artificial Sequence
  Oligonucleotide for detection of SNP TSC0018320
cctaccacgtctt

SEQ ID NO: 70519 - DNA, 13 bp, Artificial Sequence
  Oligonucleotide for detection of SNP TSC0018320
aagacggggtagg

SEQ ID NO: 70520 - DNA, 13 bp, Artificial Sequence
  Oligonucleotide for detection of SNP TSC0018320
cctaccccgtctt

SEQ ID NO: 70521 - DNA, 13 bp, Artificial Sequence
  Oligonucleotide for detection of SNP TSC0018320
aagatgcggtagg

SEQ ID NO: 70522 - DNA, 13 bp, Artificial Sequence
  Oligonucleotide for detection of SNP TSC0018320
cctaccgcatctt

SEQ ID NO: 70523 - DNA, 13 bp, Artificial Sequence
  Oligonucleotide for detection of SNP TSC0018320
aagacgcggtagg

SEQ ID NO: 70524 - DNA, 13 bp, Artificial Sequence
  Oligonucleotide for detection of SNP TSC0018320
cctaccgcgtctt

SEQ ID NO: 70525 - DNA, 13 bp, Artificial Sequence
  Oligonucleotide for detection of SNP TSC0018320
tttgttgtgtttt

SEQ ID NO: 70526 - DNA, 13 bp, Artificial Sequence
  Oligonucleotide for detection of SNP TSC0018320
aaaacacaacaaa

SEQ ID NO: 70527 - DNA, 13 bp, Artificial Sequence
  Oligonucleotide for detection of SNP TSC0018320
tttgttttgtttt

SEQ ID NO: 70528 - DNA, 13 bp, Artificial Sequence
  Oligonucleotide for detection of SNP TSC0018320
aaaacaaaacaaa

SEQ ID NO: 70529 - DNA, 13 bp, Artificial Sequence
  Oligonucleotide for detection of SNP TSC0018320
tttgtcgtgtttt

SEQ ID NO: 70530 - DNA, 13 bp, Artificial Sequence
  Oligonucleotide for detection of SNP TSC0018320
aaaacacgacaaa

SEQ ID NO: 70531 - DNA, 13 bp, Artificial Sequence
  Oligonucleotide for detection of SNP TSC0018320
tttgtttcgtttt

SEQ ID NO: 70532 - DNA, 13 bp, Artificial Sequence
  Oligonucleotide for detection of SNP TSC0018320
aaaacgaaacaaa

SEQ ID NO: 70533 - DNA, 13 bp, Artificial Sequence
  Oligonucleotide for detection of SNP TSC0018320
tttgttgcgtttt

SEQ ID NO: 70534 - DNA, 13 bp, Artificial Sequence
  Oligonucleotide for detection of SNP TSC0018320
aaaacgcaacaaa

SEQ ID NO: 70535 - DNA, 13 bp, Artificial Sequence
  Oligonucleotide for detection of SNP TSC0018320
tttgtcgcgtttt

SEQ ID NO: 70536 - DNA, 13 bp, Artificial Sequence
  Oligonucleotide for detection of SNP TSC0018320
aaaacgcgacaaa

SEQ ID NO: 70537 - DNA, 13 bp, Artificial Sequence
  Oligonucleotide for detection of SNP TSC0018321
atgataataattt

SEQ ID NO: 70538 - DNA, 13 bp, Artificial Sequence
  Oligonucleotide for detection of SNP TSC0018321
aaattattatcat

SEQ ID NO: 70539 - DNA, 13 bp, Artificial Sequence
  Oligonucleotide for detection of SNP TSC0018321
atgatagtaattt

SEQ ID NO: 70540 - DNA, 13 bp, Artificial Sequence
  Oligonucleotide for detection of SNP TSC0018321
aaattactatcat

SEQ ID NO: 70541 - DNA, 13 bp, Artificial Sequence
  Oligonucleotide for detection of SNP TSC0018322
gaatatgggtttt

SEQ ID NO: 70542 - DNA, 13 bp, Artificial Sequence
  Oligonucleotide for detection of SNP TSC0018322
aaaacccatattc

SEQ ID NO: 70543 - DNA, 13 bp, Artificial Sequence
  Oligonucleotide for detection of SNP TSC0018322
gaatataggtttt

SEQ ID NO: 70544 - DNA, 13 bp, Artificial Sequence
  Oligonucleotide for detection of SNP TSC0018322
aaaacctatattc

SEQ ID NO: 70545 - DNA, 13 bp, Artificial Sequence
  Oligonucleotide for detection of SNP TSC0018323
gagggttggtgty

SEQ ID NO: 70546 - DNA, 13 bp, Artificial Sequence
  Oligonucleotide for detection of SNP TSC0018323
racaccaaccctc

SEQ ID NO: 70547 - DNA, 13 bp, Artificial Sequence
  Oligonucleotide for detection of SNP TSC0018323
gagggtcggtgty

SEQ ID NO: 70548 - DNA, 13 bp, Artificial Sequence
  Oligonucleotide for detection of SNP TSC0018323
racaccgaccctc

SEQ ID NO: 70549 - DNA, 13 bp, Artificial Sequence
  Oligonucleotide for detection of SNP TSC0018323
gatattgatttty

SEQ ID NO: 70550 - DNA, 13 bp, Artificial Sequence
  Oligonucleotide for detection of SNP TSC0018323
raaaatcaatatc

SEQ ID NO: 70551 - DNA, 13 bp, Artificial Sequence
  Oligonucleotide for detection of SNP TSC0018323
gatattaatttty

SEQ ID NO: 70552 - DNA, 13 bp, Artificial Sequence
  Oligonucleotide for detection of SNP TSC0018323
raaaattaatatc

SEQ ID NO: 70553 - DNA, 13 bp, Artificial Sequence
  Oligonucleotide for detection of SNP TSC0018323
gatatcgatttty

SEQ ID NO: 70554 - DNA, 13 bp, Artificial Sequence
  Oligonucleotide for detection of SNP TSC0018323
raaaatcgatatc

SEQ ID NO: 70555 - DNA, 13 bp, Artificial Sequence
  Oligonucleotide for detection of SNP TSC0018328
tattatattatgy

SEQ ID NO: 70556 - DNA, 13 bp, Artificial Sequence
  Oligonucleotide for detection of SNP TSC0018328
rcataatataata

SEQ ID NO: 70557 - DNA, 13 bp, Artificial Sequence
  Oligonucleotide for detection of SNP TSC0018328
tattatgttatgy

SEQ ID NO: 70558 - DNA, 13 bp, Artificial Sequence
  Oligonucleotide for detection of SNP TSC0018328
rcataacataata

SEQ ID NO: 70559 - DNA, 13 bp, Artificial Sequence
  Oligonucleotide for detection of SNP TSC0018328
tattacgttatgy

SEQ ID NO: 70560 - DNA, 13 bp, Artificial Sequence
  Oligonucleotide for detection of SNP TSC0018328
rcataacgtaata

SEQ ID NO: 70561 - DNA, 13 bp, Artificial Sequence
  Oligonucleotide for detection of SNP TSC0018328
gtatggtgtggta

SEQ ID NO: 70562 - DNA, 13 bp, Artificial Sequence
  Oligonucleotide for detection of SNP TSC0018328
taccacaccatac

SEQ ID NO: 70563 - DNA, 13 bp, Artificial Sequence
  Oligonucleotide for detection of SNP TSC0018328
gtatggcgtggta

SEQ ID NO: 70564 - DNA, 13 bp, Artificial Sequence
  Oligonucleotide for detection of SNP TSC0018328
taccacgccatac

SEQ ID NO: 70565 - DNA, 13 bp, Artificial Sequence
  Oligonucleotide for detection of SNP TSC0018329
tttaaggttttta

SEQ ID NO: 70566 - DNA, 13 bp, Artificial Sequence
  Oligonucleotide for detection of SNP TSC0018329
taaaaaccttaaa

SEQ ID NO: 70567 - DNA, 13 bp, Artificial Sequence
  Oligonucleotide for detection of SNP TSC0018329
tggggagtttaga

SEQ ID NO: 70568 - DNA, 13 bp, Artificial Sequence
  Oligonucleotide for detection of SNP TSC0018329
tctaaactcccca

SEQ ID NO: 70569 - DNA, 13 bp, Artificial Sequence
  Oligonucleotide for detection of SNP TSC0018329
tggggattttaga

SEQ ID NO: 70570 - DNA, 13 bp, Artificial Sequence
  Oligonucleotide for detection of SNP TSC0018329
tctaaaatcccca

SEQ ID NO: 70571 - DNA, 13 bp, Artificial Sequence
  Oligonucleotide for detection of SNP TSC0018331
aggtttggggtgt

SEQ ID NO: 70572 - DNA, 13 bp, Artificial Sequence
  Oligonucleotide for detection of SNP TSC0018331
acaccccaaacct

SEQ ID NO: 70573 - DNA, 13 bp, Artificial Sequence
  Oligonucleotide for detection of SNP TSC0018331
aggtttagggtgt

SEQ ID NO: 70574 - DNA, 13 bp, Artificial Sequence
  Oligonucleotide for detection of SNP TSC0018331
acaccctaaacct

SEQ ID NO: 70575 - DNA, 13 bp, Artificial Sequence
  Oligonucleotide for detection of SNP TSC0018332
ttgggtgtattgt

SEQ ID NO: 70576 - DNA, 13 bp, Artificial Sequence
  Oligonucleotide for detection of SNP TSC0018332
acaatacacccaa

SEQ ID NO: 70577 - DNA, 13 bp, Artificial Sequence
  Oligonucleotide for detection of SNP TSC0018332
ttgggtatattgt

SEQ ID NO: 70578 - DNA, 13 bp, Artificial Sequence
  Oligonucleotide for detection of SNP TSC0018332
acaatatacccaa

SEQ ID NO: 70579 - DNA, 13 bp, Artificial Sequence
  Oligonucleotide for detection of SNP TSC0018333
aattgaggaaagg

SEQ ID NO: 70580 - DNA, 13 bp, Artificial Sequence
  Oligonucleotide for detection of SNP TSC0018333
cctttcctcaatt

SEQ ID NO: 70581 - DNA, 13 bp, Artificial Sequence
  Oligonucleotide for detection of SNP TSC0018333
aattgaagaaagg

SEQ ID NO: 70582 - DNA, 13 bp, Artificial Sequence
  Oligonucleotide for detection of SNP TSC0018333
cctttcttcaatt

SEQ ID NO: 70583 - DNA, 13 bp, Artificial Sequence
  Oligonucleotide for detection of SNP TSC0018334
taagaaatatagy

SEQ ID NO: 70584 - DNA, 13 bp, Artificial Sequence
  Oligonucleotide for detection of SNP TSC0018334
rctatatttctta

SEQ ID NO: 70585 - DNA, 13 bp, Artificial Sequence
  Oligonucleotide for detection of SNP TSC0018334
taagaagtatagy

SEQ ID NO: 70586 - DNA, 13 bp, Artificial Sequence
  Oligonucleotide for detection of SNP TSC0018334
rctatacttctta

SEQ ID NO: 70587 - DNA, 13 bp, Artificial Sequence
  Oligonucleotide for detection of SNP TSC0018338
tttgttagaatga

SEQ ID NO: 70588 - DNA, 13 bp, Artificial Sequence
  Oligonucleotide for detection of SNP TSC0018338
tcattctaacaaa

SEQ ID NO: 70589 - DNA, 13 bp, Artificial Sequence
  Oligonucleotide for detection of SNP TSC0018338
tttgttggaatga

SEQ ID NO: 70590 - DNA, 13 bp, Artificial Sequence
  Oligonucleotide for detection of SNP TSC0018338
tcattccaacaaa

SEQ ID NO: 70591 - DNA, 13 bp, Artificial Sequence
  Oligonucleotide for detection of SNP TSC0018338
tttgtcggaatga

SEQ ID NO: 70592 - DNA, 13 bp, Artificial Sequence
  Oligonucleotide for detection of SNP TSC0018338
tcattccgacaaa

SEQ ID NO: 70593 - DNA, 13 bp, Artificial Sequence
  Oligonucleotide for detection of SNP TSC0018338
ttattttggtaaa

SEQ ID NO: 70594 - DNA, 13 bp, Artificial Sequence
  Oligonucleotide for detection of SNP TSC0018338
tttaccaaaataa

SEQ ID NO: 70595 - DNA, 13 bp, Artificial Sequence
  Oligonucleotide for detection of SNP TSC0018338
ttatttcggtaaa

SEQ ID NO: 70596 - DNA, 13 bp, Artificial Sequence
  Oligonucleotide for detection of SNP TSC0018338
tttaccgaaataa

SEQ ID NO: 70597 - DNA, 13 bp, Artificial Sequence
  Oligonucleotide for detection of SNP TSC0018339
aaattttttattt

SEQ ID NO: 70598 - DNA, 13 bp, Artificial Sequence
  Oligonucleotide for detection of SNP TSC0018339
aaataaaaaattt

SEQ ID NO: 70599 - DNA, 13 bp, Artificial Sequence
  Oligonucleotide for detection of SNP TSC0018339
agataatagattt

SEQ ID NO: 70600 - DNA, 13 bp, Artificial Sequence
  Oligonucleotide for detection of SNP TSC0018339
aaatctattatct

SEQ ID NO: 70601 - DNA, 13 bp, Artificial Sequence
  Oligonucleotide for detection of SNP TSC0018339
agataaaagattt

SEQ ID NO: 70602 - DNA, 13 bp, Artificial Sequence
  Oligonucleotide for detection of SNP TSC0018339
aaatcttttatct

SEQ ID NO: 70603 - DNA, 13 bp, Artificial Sequence
  Oligonucleotide for detection of SNP TSC0018340
ttttttaattatt

SEQ ID NO: 70604 - DNA, 13 bp, Artificial Sequence
  Oligonucleotide for detection of SNP TSC0018340
aataattaaaaaa

SEQ ID NO: 70605 - DNA, 13 bp, Artificial Sequence
  Oligonucleotide for detection of SNP TSC0018340
tttttttattatt

SEQ ID NO: 70606 - DNA, 13 bp, Artificial Sequence
  Oligonucleotide for detection of SNP TSC0018340
aataataaaaaaa

SEQ ID NO: 70607 - DNA, 13 bp, Artificial Sequence
  Oligonucleotide for detection of SNP TSC0018340
aataattgagggg

SEQ ID NO: 70608 - DNA, 13 bp, Artificial Sequence
  Oligonucleotide for detection of SNP TSC0018340
cccctcaattatt

SEQ ID NO: 70609 - DNA, 13 bp, Artificial Sequence
  Oligonucleotide for detection of SNP TSC0018340
aataatagagggg

SEQ ID NO: 70610 - DNA, 13 bp, Artificial Sequence
  Oligonucleotide for detection of SNP TSC0018340
cccctctattatt

SEQ ID NO: 70611 - DNA, 13 bp, Artificial Sequence
  Oligonucleotide for detection of SNP TSC0018343
atttatagaggtt

SEQ ID NO: 70612 - DNA, 13 bp, Artificial Sequence
  Oligonucleotide for detection of SNP TSC0018343
aacctctataaat

SEQ ID NO: 70613 - DNA, 13 bp, Artificial Sequence
  Oligonucleotide for detection of SNP TSC0018343
atttatggaggtt

SEQ ID NO: 70614 - DNA, 13 bp, Artificial Sequence
  Oligonucleotide for detection of SNP TSC0018343
aacctccataaat

SEQ ID NO: 70615 - DNA, 13 bp, Artificial Sequence
  Oligonucleotide for detection of SNP TSC0018343
atttacggaggtt

SEQ ID NO: 70616 - DNA, 13 bp, Artificial Sequence
  Oligonucleotide for detection of SNP TSC0018343
aacctccgtaaat

SEQ ID NO: 70617 - DNA, 13 bp, Artificial Sequence
  Oligonucleotide for detection of SNP TSC0018343
aatttttgtaagt

SEQ ID NO: 70618 - DNA, 13 bp, Artificial Sequence
  Oligonucleotide for detection of SNP TSC0018343
acttacaaaaatt

SEQ ID NO: 70619 - DNA, 13 bp, Artificial Sequence
  Oligonucleotide for detection of SNP TSC0018343
aattttcgtaagt

SEQ ID NO: 70620 - DNA, 13 bp, Artificial Sequence
  Oligonucleotide for detection of SNP TSC0018343
acttacgaaaatt

SEQ ID NO: 70621 - DNA, 13 bp, Artificial Sequence
  Oligonucleotide for detection of SNP TSC0018345
tttaggattaagy

SEQ ID NO: 70622 - DNA, 13 bp, Artificial Sequence
  Oligonucleotide for detection of SNP TSC0018345
rcttaatcctaaa

SEQ ID NO: 70623 - DNA, 13 bp, Artificial Sequence
  Oligonucleotide for detection of SNP TSC0018345
tttagggttaagy

SEQ ID NO: 70624 - DNA, 13 bp, Artificial Sequence
  Oligonucleotide for detection of SNP TSC0018345
rcttaaccctaaa

SEQ ID NO: 70625 - DNA, 13 bp, Artificial Sequence
  Oligonucleotide for detection of SNP TSC0018346
ttgtataggtatg

SEQ ID NO: 70626 - DNA, 13 bp, Artificial Sequence
  Oligonucleotide for detection of SNP TSC0018346
catacctatacaa

SEQ ID NO: 70627 - DNA, 13 bp, Artificial Sequence
  Oligonucleotide for detection of SNP TSC0018346
ttgtatgggtatg

SEQ ID NO: 70628 - DNA, 13 bp, Artificial Sequence
  Oligonucleotide for detection of SNP TSC0018346
catacccatacaa

SEQ ID NO: 70629 - DNA, 13 bp, Artificial Sequence
  Oligonucleotide for detection of SNP TSC0018346
ttgtataggtacg

SEQ ID NO: 70630 - DNA, 13 bp, Artificial Sequence
  Oligonucleotide for detection of SNP TSC0018346
cgtacctatacaa

SEQ ID NO: 70631 - DNA, 13 bp, Artificial Sequence
  Oligonucleotide for detection of SNP TSC0018346
ttgtacgggtatg

SEQ ID NO: 70632 - DNA, 13 bp, Artificial Sequence
  Oligonucleotide for detection of SNP TSC0018346
catacccgtacaa

SEQ ID NO: 70633 - DNA, 13 bp, Artificial Sequence
  Oligonucleotide for detection of SNP TSC0018346
ttgtatgggtacg

SEQ ID NO: 70634 - DNA, 13 bp, Artificial Sequence
  Oligonucleotide for detection of SNP TSC0018346
cgtacccatacaa

SEQ ID NO: 70635 - DNA, 13 bp, Artificial Sequence
  Oligonucleotide for detection of SNP TSC0018346
ttgtacgggtacg

SEQ ID NO: 70636 - DNA, 13 bp, Artificial Sequence
  Oligonucleotide for detection of SNP TSC0018346
cgtacccgtacaa

SEQ ID NO: 70637 - DNA, 13 bp, Artificial Sequence
  Oligonucleotide for detection of SNP TSC0018346
tgtgtttgtgtag

SEQ ID NO: 70638 - DNA, 13 bp, Artificial Sequence
  Oligonucleotide for detection of SNP TSC0018346
ctacacaaacaca

SEQ ID NO: 70639 - DNA, 13 bp, Artificial Sequence
  Oligonucleotide for detection of SNP TSC0018346
cgtgtttgtgtag

SEQ ID NO: 70640 - DNA, 13 bp, Artificial Sequence
  Oligonucleotide for detection of SNP TSC0018346
ctacacaaacacg

SEQ ID NO: 70641 - DNA, 13 bp, Artificial Sequence
  Oligonucleotide for detection of SNP TSC0018346
tgtgttcgtgtag

SEQ ID NO: 70642 - DNA, 13 bp, Artificial Sequence
  Oligonucleotide for detection of SNP TSC0018346
ctacacgaacaca

SEQ ID NO: 70643 - DNA, 13 bp, Artificial Sequence
  Oligonucleotide for detection of SNP TSC0018346
cgtgttcgtgtag

SEQ ID NO: 70644 - DNA, 13 bp, Artificial Sequence
  Oligonucleotide for detection of SNP TSC0018346
ctacacgaacacg

SEQ ID NO: 70645 - DNA, 13 bp, Artificial Sequence
  Oligonucleotide for detection of SNP TSC0018347
gtaaggtgaggaa

SEQ ID NO: 70646 - DNA, 13 bp, Artificial Sequence
  Oligonucleotide for detection of SNP TSC0018347
ttcctcaccttac

SEQ ID NO: 70647 - DNA, 13 bp, Artificial Sequence
  Oligonucleotide for detection of SNP TSC0018347
gtaaggggaggaa

SEQ ID NO: 70648 - DNA, 13 bp, Artificial Sequence
  Oligonucleotide for detection of SNP TSC0018347
ttcctccccttac

SEQ ID NO: 70649 - DNA, 13 bp, Artificial Sequence
  Oligonucleotide for detection of SNP TSC0018347
gtaaggcgaggaa

SEQ ID NO: 70650 - DNA, 13 bp, Artificial Sequence
  Oligonucleotide for detection of SNP TSC0018347
ttcctcgccttac

SEQ ID NO: 70651 - DNA, 13 bp, Artificial Sequence
  Oligonucleotide for detection of SNP TSC0018348
gtatgtattttty

SEQ ID NO: 70652 - DNA, 13 bp, Artificial Sequence
  Oligonucleotide for detection of SNP TSC0018348
raaaaatacatac

SEQ ID NO: 70653 - DNA, 13 bp, Artificial Sequence
  Oligonucleotide for detection of SNP TSC0018348
gtatgtgttttty

SEQ ID NO: 70654 - DNA, 13 bp, Artificial Sequence
  Oligonucleotide for detection of SNP TSC0018348
raaaaacacatac

SEQ ID NO: 70655 - DNA, 13 bp, Artificial Sequence
  Oligonucleotide for detection of SNP TSC0018348
gtacgtattttty

SEQ ID NO: 70656 - DNA, 13 bp, Artificial Sequence
  Oligonucleotide for detection of SNP TSC0018348
raaaaatacgtac

SEQ ID NO: 70657 - DNA, 13 bp, Artificial Sequence
  Oligonucleotide for detection of SNP TSC0018348
gtacgtgttttty

SEQ ID NO: 70658 - DNA, 13 bp, Artificial Sequence
  Oligonucleotide for detection of SNP TSC0018348
raaaaacacgtac

SEQ ID NO: 70659 - DNA, 13 bp, Artificial Sequence
  Oligonucleotide for detection of SNP TSC0018348
gtatgcgttttty

SEQ ID NO: 70660 - DNA, 13 bp, Artificial Sequence
  Oligonucleotide for detection of SNP TSC0018348
raaaaacgcatac

SEQ ID NO: 70661 - DNA, 13 bp, Artificial Sequence
  Oligonucleotide for detection of SNP TSC0018348
gtacgcgttttty

SEQ ID NO: 70662 - DNA, 13 bp, Artificial Sequence
  Oligonucleotide for detection of SNP TSC0018348
raaaaacgcgtac

SEQ ID NO: 70663 - DNA, 13 bp, Artificial Sequence
  Oligonucleotide for detection of SNP TSC0018348
ggagggtgtgtgy

SEQ ID NO: 70664 - DNA, 13 bp, Artificial Sequence
  Oligonucleotide for detection of SNP TSC0018348
rcacacaccctcc

SEQ ID NO: 70665 - DNA, 13 bp, Artificial Sequence
  Oligonucleotide for detection of SNP TSC0018348
ggagggtgcgtgy

SEQ ID NO: 70666 - DNA, 13 bp, Artificial Sequence
  Oligonucleotide for detection of SNP TSC0018348
rcacgcaccctcc

SEQ ID NO: 70667 - DNA, 13 bp, Artificial Sequence
  Oligonucleotide for detection of SNP TSC0018348
ggagggcgtgtgy

SEQ ID NO: 70668 - DNA, 13 bp, Artificial Sequence
  Oligonucleotide for detection of SNP TSC0018348
rcacacgccctcc

SEQ ID NO: 70669 - DNA, 13 bp, Artificial Sequence
  Oligonucleotide for detection of SNP TSC0018348
ggagggcgcgtgy

SEQ ID NO: 70670 - DNA, 13 bp, Artificial Sequence
  Oligonucleotide for detection of SNP TSC0018348
rcacgcgccctcc

SEQ ID NO: 70671 - DNA, 13 bp, Artificial Sequence
  Oligonucleotide for detection of SNP TSC0018349
attttatgttttt

SEQ ID NO: 70672 - DNA, 13 bp, Artificial Sequence
  Oligonucleotide for detection of SNP TSC0018349
aaaaacataaaat

SEQ ID NO: 70673 - DNA, 13 bp, Artificial Sequence
  Oligonucleotide for detection of SNP TSC0018349
attttacgttttt

SEQ ID NO: 70674 - DNA, 13 bp, Artificial Sequence
  Oligonucleotide for detection of SNP TSC0018349
aaaaacgtaaaat

SEQ ID NO: 70675 - DNA, 13 bp, Artificial Sequence
  Oligonucleotide for detection of SNP TSC0018349
agaaatgtggagt

SEQ ID NO: 70676 - DNA, 13 bp, Artificial Sequence
  Oligonucleotide for detection of SNP TSC0018349
actccacatttct

SEQ ID NO: 70677 - DNA, 13 bp, Artificial Sequence
  Oligonucleotide for detection of SNP TSC0018349
agaaatatggagt

SEQ ID NO: 70678 - DNA, 13 bp, Artificial Sequence
  Oligonucleotide for detection of SNP TSC0018349
actccatatttct

SEQ ID NO: 70679 - DNA, 13 bp, Artificial Sequence
  Oligonucleotide for detection of SNP TSC0018349
agaaacgtggagt

SEQ ID NO: 70680 - DNA, 13 bp, Artificial Sequence
  Oligonucleotide for detection of SNP TSC0018349
actccacgtttct

SEQ ID NO: 70681 - DNA, 13 bp, Artificial Sequence
  Oligonucleotide for detection of SNP TSC0018353
agggtatgtgaga

SEQ ID NO: 70682 - DNA, 13 bp, Artificial Sequence
  Oligonucleotide for detection of SNP TSC0018353
tctcacataccct

SEQ ID NO: 70683 - DNA, 13 bp, Artificial Sequence
  Oligonucleotide for detection of SNP TSC0018353
agggtacgtgaga

SEQ ID NO: 70684 - DNA, 13 bp, Artificial Sequence
  Oligonucleotide for detection of SNP TSC0018353
tctcacgtaccct

SEQ ID NO: 70685 - DNA, 13 bp, Artificial Sequence
  Oligonucleotide for detection of SNP TSC0018354
gttgggatataaa

SEQ ID NO: 70686 - DNA, 13 bp, Artificial Sequence
  Oligonucleotide for detection of SNP TSC0018354
tttatatcccaac

SEQ ID NO: 70687 - DNA, 13 bp, Artificial Sequence
  Oligonucleotide for detection of SNP TSC0018354
gttgggttataaa

SEQ ID NO: 70688 - DNA, 13 bp, Artificial Sequence
  Oligonucleotide for detection of SNP TSC0018354
tttataacccaac

SEQ ID NO: 70689 - DNA, 13 bp, Artificial Sequence
  Oligonucleotide for detection of SNP TSC0018354
tttatgttttagy

SEQ ID NO: 70690 - DNA, 13 bp, Artificial Sequence
  Oligonucleotide for detection of SNP TSC0018354
rctaaaacataaa

SEQ ID NO: 70691 - DNA, 13 bp, Artificial Sequence
  Oligonucleotide for detection of SNP TSC0018354
tttatgatttagy

SEQ ID NO: 70692 - DNA, 13 bp, Artificial Sequence
  Oligonucleotide for detection of SNP TSC0018354
rctaaatcataaa

SEQ ID NO: 70693 - DNA, 13 bp, Artificial Sequence
  Oligonucleotide for detection of SNP TSC0018355
aaataagtgtttt

SEQ ID NO: 70694 - DNA, 13 bp, Artificial Sequence
  Oligonucleotide for detection of SNP TSC0018355
aaaacacttattt

SEQ ID NO: 70695 - DNA, 13 bp, Artificial Sequence
  Oligonucleotide for detection of SNP TSC0018355
aaataaatgtttt

SEQ ID NO: 70696 - DNA, 13 bp, Artificial Sequence
  Oligonucleotide for detection of SNP TSC0018355
aaaacatttattt

SEQ ID NO: 70697 - DNA, 13 bp, Artificial Sequence
  Oligonucleotide for detection of SNP TSC0018355
aaataagcgtttt

SEQ ID NO: 70698 - DNA, 13 bp, Artificial Sequence
  Oligonucleotide for detection of SNP TSC0018355
aaaacgcttattt

SEQ ID NO: 70699 - DNA, 13 bp, Artificial Sequence
  Oligonucleotide for detection of SNP TSC0018355
aaataaacgtttt

SEQ ID NO: 70700 - DNA, 13 bp, Artificial Sequence
  Oligonucleotide for detection of SNP TSC0018355
aaaacgtttattt

SEQ ID NO: 70701 - DNA, 13 bp, Artificial Sequence
  Oligonucleotide for detection of SNP TSC0018357
ttgtttaagttta

SEQ ID NO: 70702 - DNA, 13 bp, Artificial Sequence
  Oligonucleotide for detection of SNP TSC0018357
taaacttaaacaa

SEQ ID NO: 70703 - DNA, 13 bp, Artificial Sequence
  Oligonucleotide for detection of SNP TSC0018357
ttgtttgagttta

SEQ ID NO: 70704 - DNA, 13 bp, Artificial Sequence
  Oligonucleotide for detection of SNP TSC0018357
taaactcaaacaa

SEQ ID NO: 70705 - DNA, 13 bp, Artificial Sequence
  Oligonucleotide for detection of SNP TSC0018357
ttgttcgagttta

SEQ ID NO: 70706 - DNA, 13 bp, Artificial Sequence
  Oligonucleotide for detection of SNP TSC0018357
taaactcgaacaa

SEQ ID NO: 70707 - DNA, 13 bp, Artificial Sequence
  Oligonucleotide for detection of SNP TSC0018357
taagtttgggtag

SEQ ID NO: 70708 - DNA, 13 bp, Artificial Sequence
  Oligonucleotide for detection of SNP TSC0018357
ctacccaaactta

SEQ ID NO: 70709 - DNA, 13 bp, Artificial Sequence
  Oligonucleotide for detection of SNP TSC0018357
taagttcgggtag

SEQ ID NO: 70710 - DNA, 13 bp, Artificial Sequence
  Oligonucleotide for detection of SNP TSC0018357
ctacccgaactta

SEQ ID NO: 70711 - DNA, 13 bp, Artificial Sequence
  Oligonucleotide for detection of SNP TSC0018359
tggttggttggga

SEQ ID NO: 70712 - DNA, 13 bp, Artificial Sequence
  Oligonucleotide for detection of SNP TSC0018359
tcccaaccaacca

SEQ ID NO: 70713 - DNA, 13 bp, Artificial Sequence
  Oligonucleotide for detection of SNP TSC0018359
tggttgtttggga

SEQ ID NO: 70714 - DNA, 13 bp, Artificial Sequence
  Oligonucleotide for detection of SNP TSC0018359
tcccaaacaacca

SEQ ID NO: 70715 - DNA, 13 bp, Artificial Sequence
  Oligonucleotide for detection of SNP TSC0018359
ttttagttagtta

SEQ ID NO: 70716 - DNA, 13 bp, Artificial Sequence
  Oligonucleotide for detection of SNP TSC0018359
taactaactaaaa

SEQ ID NO: 70717 - DNA, 13 bp, Artificial Sequence
  Oligonucleotide for detection of SNP TSC0018359
ttttagatagtta

SEQ ID NO: 70718 - DNA, 13 bp, Artificial Sequence
  Oligonucleotide for detection of SNP TSC0018359
taactatctaaaa

SEQ ID NO: 70719 - DNA, 13 bp, Artificial Sequence
  Oligonucleotide for detection of SNP TSC0018360
taggttaaatgay

SEQ ID NO: 70720 - DNA, 13 bp, Artificial Sequence
  Oligonucleotide for detection of SNP TSC0018360
rtcatttaaccta

SEQ ID NO: 70721 - DNA, 13 bp, Artificial Sequence
  Oligonucleotide for detection of SNP TSC0018360
taggttgaatgay

SEQ ID NO: 70722 - DNA, 13 bp, Artificial Sequence
  Oligonucleotide for detection of SNP TSC0018360
rtcattcaaccta

SEQ ID NO: 70723 - DNA, 13 bp, Artificial Sequence
  Oligonucleotide for detection of SNP TSC0018360
taggtcgaatgay

SEQ ID NO: 70724 - DNA, 13 bp, Artificial Sequence
  Oligonucleotide for detection of SNP TSC0018360
rtcattcgaccta

SEQ ID NO: 70725 - DNA, 13 bp, Artificial Sequence
  Oligonucleotide for detection of SNP TSC0018360
gttatttggtttg

SEQ ID NO: 70726 - DNA, 13 bp, Artificial Sequence
  Oligonucleotide for detection of SNP TSC0018360
caaaccaaataac

SEQ ID NO: 70727 - DNA, 13 bp, Artificial Sequence
  Oligonucleotide for detection of SNP TSC0018360
gttattcggtttg

SEQ ID NO: 70728 - DNA, 13 bp, Artificial Sequence
  Oligonucleotide for detection of SNP TSC0018360
caaaccgaataac

SEQ ID NO: 70729 - DNA, 13 bp, Artificial Sequence
  Oligonucleotide for detection of SNP TSC0018361
ttttattggaggg

SEQ ID NO: 70730 - DNA, 13 bp, Artificial Sequence
  Oligonucleotide for detection of SNP TSC0018361
ccctccaataaaa

SEQ ID NO: 70731 - DNA, 13 bp, Artificial Sequence
  Oligonucleotide for detection of SNP TSC0018361
ttttatcggaggg

SEQ ID NO: 70732 - DNA, 13 bp, Artificial Sequence
  Oligonucleotide for detection of SNP TSC0018361
ccctccgataaaa

SEQ ID NO: 70733 - DNA, 13 bp, Artificial Sequence
  Oligonucleotide for detection of SNP TSC0018361
ttttttagtggaa

SEQ ID NO: 70734 - DNA, 13 bp, Artificial Sequence
  Oligonucleotide for detection of SNP TSC0018361
ttccactaaaaaa

SEQ ID NO: 70735 - DNA, 13 bp, Artificial Sequence
  Oligonucleotide for detection of SNP TSC0018362
gatagtgggtgta

SEQ ID NO: 70736 - DNA, 13 bp, Artificial Sequence
  Oligonucleotide for detection of SNP TSC0018362
tacacccactatc

SEQ ID NO: 70737 - DNA, 13 bp, Artificial Sequence
  Oligonucleotide for detection of SNP TSC0018362
gatagttggtgta

SEQ ID NO: 70738 - DNA, 13 bp, Artificial Sequence
  Oligonucleotide for detection of SNP TSC0018362
tacaccaactatc

SEQ ID NO: 70739 - DNA, 13 bp, Artificial Sequence
  Oligonucleotide for detection of SNP TSC0018362
tgtatttattgty

SEQ ID NO: 70740 - DNA, 13 bp, Artificial Sequence
  Oligonucleotide for detection of SNP TSC0018362
racaataaataca

SEQ ID NO: 70741 - DNA, 13 bp, Artificial Sequence
  Oligonucleotide for detection of SNP TSC0018362
tgtattaattgty

SEQ ID NO: 70742 - DNA, 13 bp, Artificial Sequence
  Oligonucleotide for detection of SNP TSC0018362
racaattaataca

SEQ ID NO: 70743 - DNA, 13 bp, Artificial Sequence
  Oligonucleotide for detection of SNP TSC0018363
tttggtaggttty

SEQ ID NO: 70744 - DNA, 13 bp, Artificial Sequence
  Oligonucleotide for detection of SNP TSC0018363
raaacctaccaaa

SEQ ID NO: 70745 - DNA, 13 bp, Artificial Sequence
  Oligonucleotide for detection of SNP TSC0018363
tttggtgggttty

SEQ ID NO: 70746 - DNA, 13 bp, Artificial Sequence
  Oligonucleotide for detection of SNP TSC0018363
raaacccaccaaa

SEQ ID NO: 70747 - DNA, 13 bp, Artificial Sequence
  Oligonucleotide for detection of SNP TSC0018363
tttggcgggttty

SEQ ID NO: 70748 - DNA, 13 bp, Artificial Sequence
  Oligonucleotide for detection of SNP TSC0018363
raaacccgccaaa

SEQ ID NO: 70749 - DNA, 13 bp, Artificial Sequence
  Oligonucleotide for detection of SNP TSC0018363
gggatttgttaag

SEQ ID NO: 70750 - DNA, 13 bp, Artificial Sequence
  Oligonucleotide for detection of SNP TSC0018363
cttaacaaatccc

SEQ ID NO: 70751 - DNA, 13 bp, Artificial Sequence
  Oligonucleotide for detection of SNP TSC0018363
gggattcgttaag

SEQ ID NO: 70752 - DNA, 13 bp, Artificial Sequence
  Oligonucleotide for detection of SNP TSC0018363
cttaacgaatccc

SEQ ID NO: 70753 - DNA, 13 bp, Artificial Sequence
  Oligonucleotide for detection of SNP TSC0018364
attagtattttty

SEQ ID NO: 70754 - DNA, 13 bp, Artificial Sequence
  Oligonucleotide for detection of SNP TSC0018364
raaaaatactaat

SEQ ID NO: 70755 - DNA, 13 bp, Artificial Sequence
  Oligonucleotide for detection of SNP TSC0018364
attagtgttttty

SEQ ID NO: 70756 - DNA, 13 bp, Artificial Sequence
  Oligonucleotide for detection of SNP TSC0018364
raaaaacactaat

SEQ ID NO: 70757 - DNA, 13 bp, Artificial Sequence
  Oligonucleotide for detection of SNP TSC0018364
attagcgttttty

SEQ ID NO: 70758 - DNA, 13 bp, Artificial Sequence
  Oligonucleotide for detection of SNP TSC0018364
raaaaacgctaat

SEQ ID NO: 70759 - DNA, 13 bp, Artificial Sequence
  Oligonucleotide for detection of SNP TSC0018364
gagggatgttgat

SEQ ID NO: 70760 - DNA, 13 bp, Artificial Sequence
  Oligonucleotide for detection of SNP TSC0018364
atcaacatccctc

SEQ ID NO: 70761 - DNA, 13 bp, Artificial Sequence
  Oligonucleotide for detection of SNP TSC0018364
gagggacgttgat

SEQ ID NO: 70762 - DNA, 13 bp, Artificial Sequence
  Oligonucleotide for detection of SNP TSC0018364
atcaacgtccctc

SEQ ID NO: 70763 - DNA, 13 bp, Artificial Sequence
  Oligonucleotide for detection of SNP TSC0018365
taaagaataagag

SEQ ID NO: 70764 - DNA, 13 bp, Artificial Sequence
  Oligonucleotide for detection of SNP TSC0018365
ctcttattcttta

SEQ ID NO: 70765 - DNA, 13 bp, Artificial Sequence
  Oligonucleotide for detection of SNP TSC0018365
taaagagtaagag

SEQ ID NO: 70766 - DNA, 13 bp, Artificial Sequence
  Oligonucleotide for detection of SNP TSC0018365
ctcttactcttta

SEQ ID NO: 70767 - DNA, 13 bp, Artificial Sequence
  Oligonucleotide for detection of SNP TSC0018368
attaggtgtattt

SEQ ID NO: 70768 - DNA, 13 bp, Artificial Sequence
  Oligonucleotide for detection of SNP TSC0018368
aaatacacctaat

SEQ ID NO: 70769 - DNA, 13 bp, Artificial Sequence
  Oligonucleotide for detection of SNP TSC0018368
attaggcgtattt

SEQ ID NO: 70770 - DNA, 13 bp, Artificial Sequence
  Oligonucleotide for detection of SNP TSC0018368
aaatacgcctaat

SEQ ID NO: 70771 - DNA, 13 bp, Artificial Sequence
  Oligonucleotide for detection of SNP TSC0018368
agatatgtttagt

SEQ ID NO: 70772 - DNA, 13 bp, Artificial Sequence
  Oligonucleotide for detection of SNP TSC0018368
actaaacatatct

SEQ ID NO: 70773 - DNA, 13 bp, Artificial Sequence
  Oligonucleotide for detection of SNP TSC0018368
agatatatttagt

SEQ ID NO: 70774 - DNA, 13 bp, Artificial Sequence
  Oligonucleotide for detection of SNP TSC0018368
actaaatatatct

SEQ ID NO: 70775 - DNA, 13 bp, Artificial Sequence
  Oligonucleotide for detection of SNP TSC0018368
agatacgtttagt

SEQ ID NO: 70776 - DNA, 13 bp, Artificial Sequence
  Oligonucleotide for detection of SNP TSC0018368
actaaacgtatct

SEQ ID NO: 70777 - DNA, 13 bp, Artificial Sequence
  Oligonucleotide for detection of SNP TSC0018372
atttaattattgt

SEQ ID NO: 70778 - DNA, 13 bp, Artificial Sequence
  Oligonucleotide for detection of SNP TSC0018372
acaataattaaat

SEQ ID NO: 70779 - DNA, 13 bp, Artificial Sequence
  Oligonucleotide for detection of SNP TSC0018372
atttaagtattgt

SEQ ID NO: 70780 - DNA, 13 bp, Artificial Sequence
  Oligonucleotide for detection of SNP TSC0018372
acaatacttaaat

SEQ ID NO: 70781 - DNA, 13 bp, Artificial Sequence
  Oligonucleotide for detection of SNP TSC0018372
atagtggttgagt

SEQ ID NO: 70782 - DNA, 13 bp, Artificial Sequence
  Oligonucleotide for detection of SNP TSC0018372
actcaaccactat

SEQ ID NO: 70783 - DNA, 13 bp, Artificial Sequence
  Oligonucleotide for detection of SNP TSC0018372
atagtgtttgagt

SEQ ID NO: 70784 - DNA, 13 bp, Artificial Sequence
  Oligonucleotide for detection of SNP TSC0018372
actcaaacactat

SEQ ID NO: 70785 - DNA, 13 bp, Artificial Sequence
  Oligonucleotide for detection of SNP TSC0018378
gtatggaaaaagy

SEQ ID NO: 70786 - DNA, 13 bp, Artificial Sequence
  Oligonucleotide for detection of SNP TSC0018378
rctttttccatac

SEQ ID NO: 70787 - DNA, 13 bp, Artificial Sequence
  Oligonucleotide for detection of SNP TSC0018378
gtatgggaaaagy

SEQ ID NO: 70788 - DNA, 13 bp, Artificial Sequence
  Oligonucleotide for detection of SNP TSC0018378
rcttttcccatac

SEQ ID NO: 70789 - DNA, 13 bp, Artificial Sequence
  Oligonucleotide for detection of SNP TSC0018381
agtttaatgggga

SEQ ID NO: 70790 - DNA, 13 bp, Artificial Sequence
  Oligonucleotide for detection of SNP TSC0018381
tccccattaaact

SEQ ID NO: 70791 - DNA, 13 bp, Artificial Sequence
  Oligonucleotide for detection of SNP TSC0018381
agtttattgggga

SEQ ID NO: 70792 - DNA, 13 bp, Artificial Sequence
  Oligonucleotide for detection of SNP TSC0018381
tccccaataaact

SEQ ID NO: 70793 - DNA, 13 bp, Artificial Sequence
  Oligonucleotide for detection of SNP TSC0018381
tttttattgagtt

SEQ ID NO: 70794 - DNA, 13 bp, Artificial Sequence
  Oligonucleotide for detection of SNP TSC0018381
aactcaataaaaa

SEQ ID NO: 70795 - DNA, 13 bp, Artificial Sequence
  Oligonucleotide for detection of SNP TSC0018381
tttttagtgagtt

SEQ ID NO: 70796 - DNA, 13 bp, Artificial Sequence
  Oligonucleotide for detection of SNP TSC0018381
aactcactaaaaa

SEQ ID NO: 70797 - DNA, 13 bp, Artificial Sequence
  Oligonucleotide for detection of SNP TSC0018382
agaggatgagagg

SEQ ID NO: 70798 - DNA, 13 bp, Artificial Sequence
  Oligonucleotide for detection of SNP TSC0018382
cctctcatcctct

SEQ ID NO: 70799 - DNA, 13 bp, Artificial Sequence
  Oligonucleotide for detection of SNP TSC0018382
agaggacgagagg

SEQ ID NO: 70800 - DNA, 13 bp, Artificial Sequence
  Oligonucleotide for detection of SNP TSC0018382
cctctcgtcctct

SEQ ID NO: 70801 - DNA, 13 bp, Artificial Sequence
  Oligonucleotide for detection of SNP TSC0018383
gtgaggattataa

SEQ ID NO: 70802 - DNA, 13 bp, Artificial Sequence
  Oligonucleotide for detection of SNP TSC0018383
ttataatcctcac

SEQ ID NO: 70803 - DNA, 13 bp, Artificial Sequence
  Oligonucleotide for detection of SNP TSC0018383
gtgaggtttataa

SEQ ID NO: 70804 - DNA, 13 bp, Artificial Sequence
  Oligonucleotide for detection of SNP TSC0018383
ttataaacctcac

SEQ ID NO: 70805 - DNA, 13 bp, Artificial Sequence
  Oligonucleotide for detection of SNP TSC0018383
ttataatttttay

SEQ ID NO: 70806 - DNA, 13 bp, Artificial Sequence
  Oligonucleotide for detection of SNP TSC0018383
rtaaaaattataa

SEQ ID NO: 70807 - DNA, 13 bp, Artificial Sequence
  Oligonucleotide for detection of SNP TSC0018383
ttataaattttay

SEQ ID NO: 70808 - DNA, 13 bp, Artificial Sequence
  Oligonucleotide for detection of SNP TSC0018383
rtaaaatttataa

SEQ ID NO: 70809 - DNA, 13 bp, Artificial Sequence
  Oligonucleotide for detection of SNP TSC0018384
ggagttgatatty

SEQ ID NO: 70810 - DNA, 13 bp, Artificial Sequence
  Oligonucleotide for detection of SNP TSC0018384
raatatcaactcc

SEQ ID NO: 70811 - DNA, 13 bp, Artificial Sequence
  Oligonucleotide for detection of SNP TSC0018384
ggagtttatatty

SEQ ID NO: 70812 - DNA, 13 bp, Artificial Sequence
  Oligonucleotide for detection of SNP TSC0018384
raatataaactcc

SEQ ID NO: 70813 - DNA, 13 bp, Artificial Sequence
  Oligonucleotide for detection of SNP TSC0018384
gaatgttagttty

SEQ ID NO: 70814 - DNA, 13 bp, Artificial Sequence
  Oligonucleotide for detection of SNP TSC0018384
raaactaacattc

SEQ ID NO: 70815 - DNA, 13 bp, Artificial Sequence
  Oligonucleotide for detection of SNP TSC0018384
gaatgtaagttty

SEQ ID NO: 70816 - DNA, 13 bp, Artificial Sequence
  Oligonucleotide for detection of SNP TSC0018384
raaacttacattc

SEQ ID NO: 70817 - DNA, 13 bp, Artificial Sequence
  Oligonucleotide for detection of SNP TSC0018385
tatgtttggttga

SEQ ID NO: 70818 - DNA, 13 bp, Artificial Sequence
  Oligonucleotide for detection of SNP TSC0018385
tcaaccaaacata

SEQ ID NO: 70819 - DNA, 13 bp, Artificial Sequence
  Oligonucleotide for detection of SNP TSC0018385
tatgttcggttga

SEQ ID NO: 70820 - DNA, 13 bp, Artificial Sequence
  Oligonucleotide for detection of SNP TSC0018385
tcaaccgaacata

SEQ ID NO: 70821 - DNA, 13 bp, Artificial Sequence
  Oligonucleotide for detection of SNP TSC0018386
ggaggtagaggtg

SEQ ID NO: 70822 - DNA, 13 bp, Artificial Sequence
  Oligonucleotide for detection of SNP TSC0018386
cacctctacctcc

SEQ ID NO: 70823 - DNA, 13 bp, Artificial Sequence
  Oligonucleotide for detection of SNP TSC0018386
tatttcggtttty

SEQ ID NO: 70824 - DNA, 13 bp, Artificial Sequence
  Oligonucleotide for detection of SNP TSC0018386
raaaaccgaaata

SEQ ID NO: 70825 - DNA, 13 bp, Artificial Sequence
  Oligonucleotide for detection of SNP TSC0018388
gattttattttay

SEQ ID NO: 70826 - DNA, 13 bp, Artificial Sequence
  Oligonucleotide for detection of SNP TSC0018388
rtaaaataaaatc

SEQ ID NO: 70827 - DNA, 13 bp, Artificial Sequence
  Oligonucleotide for detection of SNP TSC0018388
gattttgttttay

SEQ ID NO: 70828 - DNA, 13 bp, Artificial Sequence
  Oligonucleotide for detection of SNP TSC0018388
rtaaaacaaaatc

SEQ ID NO: 70829 - DNA, 13 bp, Artificial Sequence
  Oligonucleotide for detection of SNP TSC0018388
gatttcgttttay

SEQ ID NO: 70830 - DNA, 13 bp, Artificial Sequence
  Oligonucleotide for detection of SNP TSC0018388
rtaaaacgaaatc

SEQ ID NO: 70831 - DNA, 13 bp, Artificial Sequence
  Oligonucleotide for detection of SNP TSC0018388
gtaaaatgaggty

SEQ ID NO: 70832 - DNA, 13 bp, Artificial Sequence
  Oligonucleotide for detection of SNP TSC0018388
racctcattttac

SEQ ID NO: 70833 - DNA, 13 bp, Artificial Sequence
  Oligonucleotide for detection of SNP TSC0018388
gtaaaacgaggty

SEQ ID NO: 70834 - DNA, 13 bp, Artificial Sequence
  Oligonucleotide for detection of SNP TSC0018388
racctcgttttac

SEQ ID NO: 70835 - DNA, 13 bp, Artificial Sequence
  Oligonucleotide for detection of SNP TSC0018389
atgtttaattttg

SEQ ID NO: 70836 - DNA, 13 bp, Artificial Sequence
  Oligonucleotide for detection of SNP TSC0018389
caaaattaaacat

SEQ ID NO: 70837 - DNA, 13 bp, Artificial Sequence
  Oligonucleotide for detection of SNP TSC0018389
atgtttgattttg

SEQ ID NO: 70838 - DNA, 13 bp, Artificial Sequence
  Oligonucleotide for detection of SNP TSC0018389
caaaatcaaacat

SEQ ID NO: 70839 - DNA, 13 bp, Artificial Sequence
  Oligonucleotide for detection of SNP TSC0018390
ttatttttattag

SEQ ID NO: 70840 - DNA, 13 bp, Artificial Sequence
  Oligonucleotide for detection of SNP TSC0018390
ctaataaaaataa

SEQ ID NO: 70841 - DNA, 13 bp, Artificial Sequence
  Oligonucleotide for detection of SNP TSC0018390
ttgatgggggtaa

SEQ ID NO: 70842 - DNA, 13 bp, Artificial Sequence
  Oligonucleotide for detection of SNP TSC0018390
ttacccccatcaa

SEQ ID NO: 70843 - DNA, 13 bp, Artificial Sequence
  Oligonucleotide for detection of SNP TSC0018390
ttgatgtgggtaa

SEQ ID NO: 70844 - DNA, 13 bp, Artificial Sequence
  Oligonucleotide for detection of SNP TSC0018390
ttacccacatcaa

SEQ ID NO: 70845 - DNA, 13 bp, Artificial Sequence
  Oligonucleotide for detection of SNP TSC0018390
ttgatgcgggtaa

SEQ ID NO: 70846 - DNA, 13 bp, Artificial Sequence
  Oligonucleotide for detection of SNP TSC0018390
ttacccgcatcaa

SEQ ID NO: 70847 - DNA, 13 bp, Artificial Sequence
  Oligonucleotide for detection of SNP TSC0018391
aggagtatttgga

SEQ ID NO: 70848 - DNA, 13 bp, Artificial Sequence
  Oligonucleotide for detection of SNP TSC0018391
tccaaatactcct

SEQ ID NO: 70849 - DNA, 13 bp, Artificial Sequence
  Oligonucleotide for detection of SNP TSC0018392
ttatatgtaagta

SEQ ID NO: 70850 - DNA, 13 bp, Artificial Sequence
  Oligonucleotide for detection of SNP TSC0018392
tacttacatataa

SEQ ID NO: 70851 - DNA, 13 bp, Artificial Sequence
  Oligonucleotide for detection of SNP TSC0018392
ttatatataagta

SEQ ID NO: 70852 - DNA, 13 bp, Artificial Sequence
  Oligonucleotide for detection of SNP TSC0018392
tacttatatataa

SEQ ID NO: 70853 - DNA, 13 bp, Artificial Sequence
  Oligonucleotide for detection of SNP TSC0018396
agggggtgggaga

SEQ ID NO: 70854 - DNA, 13 bp, Artificial Sequence
  Oligonucleotide for detection of SNP TSC0018396
tctcccaccccct

SEQ ID NO: 70855 - DNA, 13 bp, Artificial Sequence
  Oligonucleotide for detection of SNP TSC0018396
agggggcgggaga

SEQ ID NO: 70856 - DNA, 13 bp, Artificial Sequence
  Oligonucleotide for detection of SNP TSC0018396
tctcccgccccct

SEQ ID NO: 70857 - DNA, 13 bp, Artificial Sequence
  Oligonucleotide for detection of SNP TSC0018397
ttaggggttaggg

SEQ ID NO: 70858 - DNA, 13 bp, Artificial Sequence
  Oligonucleotide for detection of SNP TSC0018397
ccctaacccctaa

SEQ ID NO: 70859 - DNA, 13 bp, Artificial Sequence
  Oligonucleotide for detection of SNP TSC0018397
ttagggtttaggg

SEQ ID NO: 70860 - DNA, 13 bp, Artificial Sequence
  Oligonucleotide for detection of SNP TSC0018397
ccctaaaccctaa

SEQ ID NO: 70861 - DNA, 13 bp, Artificial Sequence
  Oligonucleotide for detection of SNP TSC0018397
ttttaatttttag

SEQ ID NO: 70862 - DNA, 13 bp, Artificial Sequence
  Oligonucleotide for detection of SNP TSC0018397
ctaaaaattaaaa

SEQ ID NO: 70863 - DNA, 13 bp, Artificial Sequence
  Oligonucleotide for detection of SNP TSC0018397
ttttaaattttag

SEQ ID NO: 70864 - DNA, 13 bp, Artificial Sequence
  Oligonucleotide for detection of SNP TSC0018397
ctaaaatttaaaa

SEQ ID NO: 70865 - DNA, 13 bp, Artificial Sequence
  Oligonucleotide for detection of SNP TSC0018398
agggttatggtgt

SEQ ID NO: 70866 - DNA, 13 bp, Artificial Sequence
  Oligonucleotide for detection of SNP TSC0018398
acaccataaccct

SEQ ID NO: 70867 - DNA, 13 bp, Artificial Sequence
  Oligonucleotide for detection of SNP TSC0018398
agggttgtggtgt

SEQ ID NO: 70868 - DNA, 13 bp, Artificial Sequence
  Oligonucleotide for detection of SNP TSC0018398
acaccacaaccct

SEQ ID NO: 70869 - DNA, 13 bp, Artificial Sequence
  Oligonucleotide for detection of SNP TSC0018399
gtgtgtattaata

SEQ ID NO: 70870 - DNA, 13 bp, Artificial Sequence
  Oligonucleotide for detection of SNP TSC0018399
tattaatacacac

SEQ ID NO: 70871 - DNA, 13 bp, Artificial Sequence
  Oligonucleotide for detection of SNP TSC0018399
gtgtgtgttaata

SEQ ID NO: 70872 - DNA, 13 bp, Artificial Sequence
  Oligonucleotide for detection of SNP TSC0018399
tattaacacacac

SEQ ID NO: 70873 - DNA, 13 bp, Artificial Sequence
  Oligonucleotide for detection of SNP TSC0018400
ttggggaatatta

SEQ ID NO: 70874 - DNA, 13 bp, Artificial Sequence
  Oligonucleotide for detection of SNP TSC0018400
taatattccccaa

SEQ ID NO: 70875 - DNA, 13 bp, Artificial Sequence
  Oligonucleotide for detection of SNP TSC0018400
ttgggggatatta

SEQ ID NO: 70876 - DNA, 13 bp, Artificial Sequence
  Oligonucleotide for detection of SNP TSC0018400
taatatcccccaa

SEQ ID NO: 70877 - DNA, 13 bp, Artificial Sequence
  Oligonucleotide for detection of SNP TSC0018401
tttttggtttttg

SEQ ID NO: 70878 - DNA, 13 bp, Artificial Sequence
  Oligonucleotide for detection of SNP TSC0018401
caaaaaccaaaaa

SEQ ID NO: 70879 - DNA, 13 bp, Artificial Sequence
  Oligonucleotide for detection of SNP TSC0018402
ttttggtgggaat

SEQ ID NO: 70880 - DNA, 13 bp, Artificial Sequence
  Oligonucleotide for detection of SNP TSC0018402
attcccaccaaaa

SEQ ID NO: 70881 - DNA, 13 bp, Artificial Sequence
  Oligonucleotide for detection of SNP TSC0018402
ttttggcgggaat

SEQ ID NO: 70882 - DNA, 13 bp, Artificial Sequence
  Oligonucleotide for detection of SNP TSC0018402
attcccgccaaaa

SEQ ID NO: 70883 - DNA, 13 bp, Artificial Sequence
  Oligonucleotide for detection of SNP TSC0018402
atttttgttaaaa

SEQ ID NO: 70884 - DNA, 13 bp, Artificial Sequence
  Oligonucleotide for detection of SNP TSC0018402
ttttaacaaaaat

SEQ ID NO: 70885 - DNA, 13 bp, Artificial Sequence
  Oligonucleotide for detection of SNP TSC0018402
atttttattaaaa

SEQ ID NO: 70886 - DNA, 13 bp, Artificial Sequence
  Oligonucleotide for detection of SNP TSC0018402
ttttaataaaaat

SEQ ID NO: 70887 - DNA, 13 bp, Artificial Sequence
  Oligonucleotide for detection of SNP TSC0018402
attttcgttaaaa

SEQ ID NO: 70888 - DNA, 13 bp, Artificial Sequence
  Oligonucleotide for detection of SNP TSC0018402
ttttaacgaaaat

SEQ ID NO: 70889 - DNA, 13 bp, Artificial Sequence
  Oligonucleotide for detection of SNP TSC0018403
tttgttagtgtty

SEQ ID NO: 70890 - DNA, 13 bp, Artificial Sequence
  Oligonucleotide for detection of SNP TSC0018403
raacactaacaaa

SEQ ID NO: 70891 - DNA, 13 bp, Artificial Sequence
  Oligonucleotide for detection of SNP TSC0018403
tttgttggtgtty

SEQ ID NO: 70892 - DNA, 13 bp, Artificial Sequence
  Oligonucleotide for detection of SNP TSC0018403
raacaccaacaaa

SEQ ID NO: 70893 - DNA, 13 bp, Artificial Sequence
  Oligonucleotide for detection of SNP TSC0018403
ttcgttagtgtty

SEQ ID NO: 70894 - DNA, 13 bp, Artificial Sequence
  Oligonucleotide for detection of SNP TSC0018403
raacactaacgaa

SEQ ID NO: 70895 - DNA, 13 bp, Artificial Sequence
  Oligonucleotide for detection of SNP TSC0018403
ttcgttggtgtty

SEQ ID NO: 70896 - DNA, 13 bp, Artificial Sequence
  Oligonucleotide for detection of SNP TSC0018403
raacaccaacgaa

SEQ ID NO: 70897 - DNA, 13 bp, Artificial Sequence
  Oligonucleotide for detection of SNP TSC0018403
tttgttagcgtty

SEQ ID NO: 70898 - DNA, 13 bp, Artificial Sequence
  Oligonucleotide for detection of SNP TSC0018403
raacgctaacaaa

SEQ ID NO: 70899 - DNA, 13 bp, Artificial Sequence
  Oligonucleotide for detection of SNP TSC0018403
tttgtcggtgtty

SEQ ID NO: 70900 - DNA, 13 bp, Artificial Sequence
  Oligonucleotide for detection of SNP TSC0018403
raacaccgacaaa

SEQ ID NO: 70901 - DNA, 13 bp, Artificial Sequence
  Oligonucleotide for detection of SNP TSC0018403
ttcgttagcgtty

SEQ ID NO: 70902 - DNA, 13 bp, Artificial Sequence
  Oligonucleotide for detection of SNP TSC0018403
raacgctaacgaa

SEQ ID NO: 70903 - DNA, 13 bp, Artificial Sequence
  Oligonucleotide for detection of SNP TSC0018403
tttgttggcgtty

SEQ ID NO: 70904 - DNA, 13 bp, Artificial Sequence
  Oligonucleotide for detection of SNP TSC0018403
raacgccaacaaa

SEQ ID NO: 70905 - DNA, 13 bp, Artificial Sequence
  Oligonucleotide for detection of SNP TSC0018403
ttcgtcggtgtty

SEQ ID NO: 70906 - DNA, 13 bp, Artificial Sequence
  Oligonucleotide for detection of SNP TSC0018403
raacaccgacgaa

SEQ ID NO: 70907 - DNA, 13 bp, Artificial Sequence
  Oligonucleotide for detection of SNP TSC0018403
ttcgttggcgtty

SEQ ID NO: 70908 - DNA, 13 bp, Artificial Sequence
  Oligonucleotide for detection of SNP TSC0018403
raacgccaacgaa

SEQ ID NO: 70909 - DNA, 13 bp, Artificial Sequence
  Oligonucleotide for detection of SNP TSC0018403
tttgtcggcgtty

SEQ ID NO: 70910 - DNA, 13 bp, Artificial Sequence
  Oligonucleotide for detection of SNP TSC0018403
raacgccgacaaa

SEQ ID NO: 70911 - DNA, 13 bp, Artificial Sequence
  Oligonucleotide for detection of SNP TSC0018403
ttcgtcggcgtty

SEQ ID NO: 70912 - DNA, 13 bp, Artificial Sequence
  Oligonucleotide for detection of SNP TSC0018403
raacgccgacgaa

SEQ ID NO: 70913 - DNA, 13 bp, Artificial Sequence
  Oligonucleotide for detection of SNP TSC0018403
ggatgttggtggg

SEQ ID NO: 70914 - DNA, 13 bp, Artificial Sequence
  Oligonucleotide for detection of SNP TSC0018403
cccaccaacatcc

SEQ ID NO: 70915 - DNA, 13 bp, Artificial Sequence
  Oligonucleotide for detection of SNP TSC0018403
ggacgttggtggg

SEQ ID NO: 70916 - DNA, 13 bp, Artificial Sequence
  Oligonucleotide for detection of SNP TSC0018403
cccaccaacgtcc

SEQ ID NO: 70917 - DNA, 13 bp, Artificial Sequence
  Oligonucleotide for detection of SNP TSC0018403
ggatgttggcggg

SEQ ID NO: 70918 - DNA, 13 bp, Artificial Sequence
  Oligonucleotide for detection of SNP TSC0018403
cccgccaacatcc

SEQ ID NO: 70919 - DNA, 13 bp, Artificial Sequence
  Oligonucleotide for detection of SNP TSC0018403
ggatgtcggtggg

SEQ ID NO: 70920 - DNA, 13 bp, Artificial Sequence
  Oligonucleotide for detection of SNP TSC0018403
cccaccgacatcc

SEQ ID NO: 70921 - DNA, 13 bp, Artificial Sequence
  Oligonucleotide for detection of SNP TSC0018403
ggacgttggcggg

SEQ ID NO: 70922 - DNA, 13 bp, Artificial Sequence
  Oligonucleotide for detection of SNP TSC0018403
cccgccaacgtcc

SEQ ID NO: 70923 - DNA, 13 bp, Artificial Sequence
  Oligonucleotide for detection of SNP TSC0018403
ggacgtcggtggg

SEQ ID NO: 70924 - DNA, 13 bp, Artificial Sequence
  Oligonucleotide for detection of SNP TSC0018403
cccaccgacgtcc

SEQ ID NO: 70925 - DNA, 13 bp, Artificial Sequence
  Oligonucleotide for detection of SNP TSC0018403
ggatgtcggcggg

SEQ ID NO: 70926 - DNA, 13 bp, Artificial Sequence
  Oligonucleotide for detection of SNP TSC0018403
cccgccgacatcc

SEQ ID NO: 70927 - DNA, 13 bp, Artificial Sequence
  Oligonucleotide for detection of SNP TSC0018403
ggacgtcggcggg

SEQ ID NO: 70928 - DNA, 13 bp, Artificial Sequence
  Oligonucleotide for detection of SNP TSC0018403
cccgccgacgtcc

SEQ ID NO: 70929 - DNA, 13 bp, Artificial Sequence
  Oligonucleotide for detection of SNP TSC0018404
agttaaataggag

SEQ ID NO: 70930 - DNA, 13 bp, Artificial Sequence
  Oligonucleotide for detection of SNP TSC0018404
ctcctatttaact

SEQ ID NO: 70931 - DNA, 13 bp, Artificial Sequence
  Oligonucleotide for detection of SNP TSC0018404
agttaattaggag

SEQ ID NO: 70932 - DNA, 13 bp, Artificial Sequence
  Oligonucleotide for detection of SNP TSC0018404
ctcctaattaact

SEQ ID NO: 70933 - DNA, 13 bp, Artificial Sequence
  Oligonucleotide for detection of SNP TSC0018405
ataattgtaggaa

SEQ ID NO: 70934 - DNA, 13 bp, Artificial Sequence
  Oligonucleotide for detection of SNP TSC0018405
ttcctacaattat

SEQ ID NO: 70935 - DNA, 13 bp, Artificial Sequence
  Oligonucleotide for detection of SNP TSC0018405
ataattataggaa

SEQ ID NO: 70936 - DNA, 13 bp, Artificial Sequence
  Oligonucleotide for detection of SNP TSC0018405
ttcctataattat

SEQ ID NO: 70937 - DNA, 13 bp, Artificial Sequence
  Oligonucleotide for detection of SNP TSC0018406
aatgttttttttt

SEQ ID NO: 70938 - DNA, 13 bp, Artificial Sequence
  Oligonucleotide for detection of SNP TSC0018406
aaaaaaaaacatt

SEQ ID NO: 70939 - DNA, 13 bp, Artificial Sequence
  Oligonucleotide for detection of SNP TSC0018406
agagggtggtatt

SEQ ID NO: 70940 - DNA, 13 bp, Artificial Sequence
  Oligonucleotide for detection of SNP TSC0018406
aataccaccctct

SEQ ID NO: 70941 - DNA, 13 bp, Artificial Sequence
  Oligonucleotide for detection of SNP TSC0018406
agagggaggtatt

SEQ ID NO: 70942 - DNA, 13 bp, Artificial Sequence
  Oligonucleotide for detection of SNP TSC0018406
aatacctccctct

SEQ ID NO: 70943 - DNA, 13 bp, Artificial Sequence
  Oligonucleotide for detection of SNP TSC0018406
agagggcggtatt

SEQ ID NO: 70944 - DNA, 13 bp, Artificial Sequence
  Oligonucleotide for detection of SNP TSC0018406
aataccgccctct

SEQ ID NO: 70945 - DNA, 13 bp, Artificial Sequence
  Oligonucleotide for detection of SNP TSC0018408
aatattaagtata

SEQ ID NO: 70946 - DNA, 13 bp, Artificial Sequence
  Oligonucleotide for detection of SNP TSC0018408
tatacttaatatt

SEQ ID NO: 70947 - DNA, 13 bp, Artificial Sequence
  Oligonucleotide for detection of SNP TSC0018408
aatatttagtata

SEQ ID NO: 70948 - DNA, 13 bp, Artificial Sequence
  Oligonucleotide for detection of SNP TSC0018408
tatactaaatatt

SEQ ID NO: 70949 - DNA, 13 bp, Artificial Sequence
  Oligonucleotide for detection of SNP TSC0018408
tgtgtttgatatt

SEQ ID NO: 70950 - DNA, 13 bp, Artificial Sequence
  Oligonucleotide for detection of SNP TSC0018408
aatatcaaacaca

SEQ ID NO: 70951 - DNA, 13 bp, Artificial Sequence
  Oligonucleotide for detection of SNP TSC0018408
tgtgttagatatt

SEQ ID NO: 70952 - DNA, 13 bp, Artificial Sequence
  Oligonucleotide for detection of SNP TSC0018408
aatatctaacaca

SEQ ID NO: 70953 - DNA, 13 bp, Artificial Sequence
  Oligonucleotide for detection of SNP TSC0018409
gtttttaggaaat

SEQ ID NO: 70954 - DNA, 13 bp, Artificial Sequence
  Oligonucleotide for detection of SNP TSC0018409
atttcctaaaaac

SEQ ID NO: 70955 - DNA, 13 bp, Artificial Sequence
  Oligonucleotide for detection of SNP TSC0018409
gtttttgggaaat

SEQ ID NO: 70956 - DNA, 13 bp, Artificial Sequence
  Oligonucleotide for detection of SNP TSC0018409
atttcccaaaaac

SEQ ID NO: 70957 - DNA, 13 bp, Artificial Sequence
  Oligonucleotide for detection of SNP TSC0018409
gttttcgggaaat

SEQ ID NO: 70958 - DNA, 13 bp, Artificial Sequence
  Oligonucleotide for detection of SNP TSC0018409
atttcccgaaaac

SEQ ID NO: 70959 - DNA, 13 bp, Artificial Sequence
  Oligonucleotide for detection of SNP TSC0018409
attttttggaggy

SEQ ID NO: 70960 - DNA, 13 bp, Artificial Sequence
  Oligonucleotide for detection of SNP TSC0018409
rcctccaaaaaat

SEQ ID NO: 70961 - DNA, 13 bp, Artificial Sequence
  Oligonucleotide for detection of SNP TSC0018409
atttttcggaggy

SEQ ID NO: 70962 - DNA, 13 bp, Artificial Sequence
  Oligonucleotide for detection of SNP TSC0018409
rcctccgaaaaat

SEQ ID NO: 70963 - DNA, 13 bp, Artificial Sequence
  Oligonucleotide for detection of SNP TSC0018411
tttttttgggtga

SEQ ID NO: 70964 - DNA, 13 bp, Artificial Sequence
  Oligonucleotide for detection of SNP TSC0018411
tcacccaaaaaaa

SEQ ID NO: 70965 - DNA, 13 bp, Artificial Sequence
  Oligonucleotide for detection of SNP TSC0018411
ttttttcgggtga

SEQ ID NO: 70966 - DNA, 13 bp, Artificial Sequence
  Oligonucleotide for detection of SNP TSC0018411
tcacccgaaaaaa

SEQ ID NO: 70967 - DNA, 13 bp, Artificial Sequence
  Oligonucleotide for detection of SNP TSC0018411
tttttttgggcga

SEQ ID NO: 70968 - DNA, 13 bp, Artificial Sequence
  Oligonucleotide for detection of SNP TSC0018411
tcgcccaaaaaaa

SEQ ID NO: 70969 - DNA, 13 bp, Artificial Sequence
  Oligonucleotide for detection of SNP TSC0018411
ttttttcgggcga

SEQ ID NO: 70970 - DNA, 13 bp, Artificial Sequence
  Oligonucleotide for detection of SNP TSC0018411
tcgcccgaaaaaa

SEQ ID NO: 70971 - DNA, 13 bp, Artificial Sequence
  Oligonucleotide for detection of SNP TSC0018411
ttgttcgagggaa

SEQ ID NO: 70972 - DNA, 13 bp, Artificial Sequence
  Oligonucleotide for detection of SNP TSC0018411
ttccctcgaacaa

SEQ ID NO: 70973 - DNA, 13 bp, Artificial Sequence
  Oligonucleotide for detection of SNP TSC0018411
tcgttcgagggaa

SEQ ID NO: 70974 - DNA, 13 bp, Artificial Sequence
  Oligonucleotide for detection of SNP TSC0018411
ttccctcgaacga

SEQ ID NO: 70975 - DNA, 13 bp, Artificial Sequence
  Oligonucleotide for detection of SNP TSC0018412
tttgatgtgggta

SEQ ID NO: 70976 - DNA, 13 bp, Artificial Sequence
  Oligonucleotide for detection of SNP TSC0018412
tacccacatcaaa

SEQ ID NO: 70977 - DNA, 13 bp, Artificial Sequence
  Oligonucleotide for detection of SNP TSC0018412
tttgatttgggta

SEQ ID NO: 70978 - DNA, 13 bp, Artificial Sequence
  Oligonucleotide for detection of SNP TSC0018412
tacccaaatcaaa

SEQ ID NO: 70979 - DNA, 13 bp, Artificial Sequence
  Oligonucleotide for detection of SNP TSC0018412
tttgacgtgggta

SEQ ID NO: 70980 - DNA, 13 bp, Artificial Sequence
  Oligonucleotide for detection of SNP TSC0018412
tacccacgtcaaa

SEQ ID NO: 70981 - DNA, 13 bp, Artificial Sequence
  Oligonucleotide for detection of SNP TSC0018412
tgtttatgttaaa

SEQ ID NO: 70982 - DNA, 13 bp, Artificial Sequence
  Oligonucleotide for detection of SNP TSC0018412
tttaacataaaca

SEQ ID NO: 70983 - DNA, 13 bp, Artificial Sequence
  Oligonucleotide for detection of SNP TSC0018412
tgtttaagttaaa

SEQ ID NO: 70984 - DNA, 13 bp, Artificial Sequence
  Oligonucleotide for detection of SNP TSC0018412
tttaacttaaaca

SEQ ID NO: 70985 - DNA, 13 bp, Artificial Sequence
  Oligonucleotide for detection of SNP TSC0018412
tgtttacgttaaa

SEQ ID NO: 70986 - DNA, 13 bp, Artificial Sequence
  Oligonucleotide for detection of SNP TSC0018412
tttaacgtaaaca

SEQ ID NO: 70987 - DNA, 13 bp, Artificial Sequence
  Oligonucleotide for detection of SNP TSC0018413
aggaatatggata

SEQ ID NO: 70988 - DNA, 13 bp, Artificial Sequence
  Oligonucleotide for detection of SNP TSC0018413
tatccatattcct

SEQ ID NO: 70989 - DNA, 13 bp, Artificial Sequence
  Oligonucleotide for detection of SNP TSC0018413
aggaatgtggata

SEQ ID NO: 70990 - DNA, 13 bp, Artificial Sequence
  Oligonucleotide for detection of SNP TSC0018413
tatccacattcct

SEQ ID NO: 70991 - DNA, 13 bp, Artificial Sequence
  Oligonucleotide for detection of SNP TSC0018413
aggaacgtggata

SEQ ID NO: 70992 - DNA, 13 bp, Artificial Sequence
  Oligonucleotide for detection of SNP TSC0018413
tatccacgttcct

SEQ ID NO: 70993 - DNA, 13 bp, Artificial Sequence
  Oligonucleotide for detection of SNP TSC0018413
tatttatgttttt

SEQ ID NO: 70994 - DNA, 13 bp, Artificial Sequence
  Oligonucleotide for detection of SNP TSC0018413
aaaaacataaata

SEQ ID NO: 70995 - DNA, 13 bp, Artificial Sequence
  Oligonucleotide for detection of SNP TSC0018413
tatttacgttttt

SEQ ID NO: 70996 - DNA, 13 bp, Artificial Sequence
  Oligonucleotide for detection of SNP TSC0018413
aaaaacgtaaata

SEQ ID NO: 70997 - DNA, 13 bp, Artificial Sequence
  Oligonucleotide for detection of SNP TSC0018414
atttaaatttgag

SEQ ID NO: 70998 - DNA, 13 bp, Artificial Sequence
  Oligonucleotide for detection of SNP TSC0018414
ctcaaatttaaat

SEQ ID NO: 70999 - DNA, 13 bp, Artificial Sequence
  Oligonucleotide for detection of SNP TSC0018414
atttaagtttgag

SEQ ID NO: 71000 - DNA, 13 bp, Artificial Sequence
  Oligonucleotide for detection of SNP TSC0018414
ctcaaacttaaat

SEQ ID NO: 71001 - DNA, 13 bp, Artificial Sequence
  Oligonucleotide for detection of SNP TSC0018415
gaattagttatat

SEQ ID NO: 71002 - DNA, 13 bp, Artificial Sequence
  Oligonucleotide for detection of SNP TSC0018415
atataactaattc

SEQ ID NO: 71003 - DNA, 13 bp, Artificial Sequence
  Oligonucleotide for detection of SNP TSC0018415
gaattaattatat

SEQ ID NO: 71004 - DNA, 13 bp, Artificial Sequence
  Oligonucleotide for detection of SNP TSC0018415
atataattaattc

SEQ ID NO: 71005 - DNA, 13 bp, Artificial Sequence
  Oligonucleotide for detection of SNP TSC0018416
taggtttgtttgt

SEQ ID NO: 71006 - DNA, 13 bp, Artificial Sequence
  Oligonucleotide for detection of SNP TSC0018416
acaaacaaaccta

SEQ ID NO: 71007 - DNA, 13 bp, Artificial Sequence
  Oligonucleotide for detection of SNP TSC0018416
taggttcgtttgt

SEQ ID NO: 71008 - DNA, 13 bp, Artificial Sequence
  Oligonucleotide for detection of SNP TSC0018416
acaaacgaaccta

SEQ ID NO: 71009 - DNA, 13 bp, Artificial Sequence
  Oligonucleotide for detection of SNP TSC0018416
ataaatgagtttg

SEQ ID NO: 71010 - DNA, 13 bp, Artificial Sequence
  Oligonucleotide for detection of SNP TSC0018416
caaactcatttat

SEQ ID NO: 71011 - DNA, 13 bp, Artificial Sequence
  Oligonucleotide for detection of SNP TSC0018416
ataaataagtttg

SEQ ID NO: 71012 - DNA, 13 bp, Artificial Sequence
  Oligonucleotide for detection of SNP TSC0018416
caaacttatttat

SEQ ID NO: 71013 - DNA, 13 bp, Artificial Sequence
  Oligonucleotide for detection of SNP TSC0018416
ataaacgagtttg

SEQ ID NO: 71014 - DNA, 13 bp, Artificial Sequence
  Oligonucleotide for detection of SNP TSC0018416
caaactcgtttat

SEQ ID NO: 71015 - DNA, 13 bp, Artificial Sequence
  Oligonucleotide for detection of SNP TSC0018417
ttatagatattaa

SEQ ID NO: 71016 - DNA, 13 bp, Artificial Sequence
  Oligonucleotide for detection of SNP TSC0018417
ttaatatctataa

SEQ ID NO: 71017 - DNA, 13 bp, Artificial Sequence
  Oligonucleotide for detection of SNP TSC0018417
ttataggtattaa

SEQ ID NO: 71018 - DNA, 13 bp, Artificial Sequence
  Oligonucleotide for detection of SNP TSC0018417
ttaatacctataa

SEQ ID NO: 71019 - DNA, 13 bp, Artificial Sequence
  Oligonucleotide for detection of SNP TSC0018418
aattgagagaaat

SEQ ID NO: 71020 - DNA, 13 bp, Artificial Sequence
  Oligonucleotide for detection of SNP TSC0018418
atttctctcaatt

SEQ ID NO: 71021 - DNA, 13 bp, Artificial Sequence
  Oligonucleotide for detection of SNP TSC0018418
aattgatagaaat

SEQ ID NO: 71022 - DNA, 13 bp, Artificial Sequence
  Oligonucleotide for detection of SNP TSC0018418
atttctatcaatt

SEQ ID NO: 71023 - DNA, 13 bp, Artificial Sequence
  Oligonucleotide for detection of SNP TSC0018418
attttttttagtt

SEQ ID NO: 71024 - DNA, 13 bp, Artificial Sequence
  Oligonucleotide for detection of SNP TSC0018418
aactaaaaaaaat

SEQ ID NO: 71025 - DNA, 13 bp, Artificial Sequence
  Oligonucleotide for detection of SNP TSC0018418
atttttattagtt

SEQ ID NO: 71026 - DNA, 13 bp, Artificial Sequence
  Oligonucleotide for detection of SNP TSC0018418
aactaataaaaat

SEQ ID NO: 71027 - DNA, 13 bp, Artificial Sequence
  Oligonucleotide for detection of SNP TSC0018420
aaggttgtagtga

SEQ ID NO: 71028 - DNA, 13 bp, Artificial Sequence
  Oligonucleotide for detection of SNP TSC0018420
tcactacaacctt

SEQ ID NO: 71029 - DNA, 13 bp, Artificial Sequence
  Oligonucleotide for detection of SNP TSC0018420
aaggttttagtga

SEQ ID NO: 71030 - DNA, 13 bp, Artificial Sequence
  Oligonucleotide for detection of SNP TSC0018420
tcactaaaacctt

SEQ ID NO: 71031 - DNA, 13 bp, Artificial Sequence
  Oligonucleotide for detection of SNP TSC0018420
ttattgtaatttt

SEQ ID NO: 71032 - DNA, 13 bp, Artificial Sequence
  Oligonucleotide for detection of SNP TSC0018420
aaaattacaataa

SEQ ID NO: 71033 - DNA, 13 bp, Artificial Sequence
  Oligonucleotide for detection of SNP TSC0018420
ttattgaaatttt

SEQ ID NO: 71034 - DNA, 13 bp, Artificial Sequence
  Oligonucleotide for detection of SNP TSC0018420
aaaatttcaataa

SEQ ID NO: 71035 - DNA, 13 bp, Artificial Sequence
  Oligonucleotide for detection of SNP TSC0018425
taatagtgtgaga

SEQ ID NO: 71036 - DNA, 13 bp, Artificial Sequence
  Oligonucleotide for detection of SNP TSC0018425
tctcacactatta

SEQ ID NO: 71037 - DNA, 13 bp, Artificial Sequence
  Oligonucleotide for detection of SNP TSC0018425
taatagcgtgaga

SEQ ID NO: 71038 - DNA, 13 bp, Artificial Sequence
  Oligonucleotide for detection of SNP TSC0018425
tctcacgctatta

SEQ ID NO: 71039 - DNA, 13 bp, Artificial Sequence
  Oligonucleotide for detection of SNP TSC0018426
tgttagattgtgt

SEQ ID NO: 71040 - DNA, 13 bp, Artificial Sequence
  Oligonucleotide for detection of SNP TSC0018426
acacaatctaaca

SEQ ID NO: 71041 - DNA, 13 bp, Artificial Sequence
  Oligonucleotide for detection of SNP TSC0018426
tgttaggttgtgt

SEQ ID NO: 71042 - DNA, 13 bp, Artificial Sequence
  Oligonucleotide for detection of SNP TSC0018426
acacaacctaaca

SEQ ID NO: 71043 - DNA, 13 bp, Artificial Sequence
  Oligonucleotide for detection of SNP TSC0018427
tgagagtgggggt

SEQ ID NO: 71044 - DNA, 13 bp, Artificial Sequence
  Oligonucleotide for detection of SNP TSC0018427
acccccactctca

SEQ ID NO: 71045 - DNA, 13 bp, Artificial Sequence
  Oligonucleotide for detection of SNP TSC0018427
tgagagggggggt

SEQ ID NO: 71046 - DNA, 13 bp, Artificial Sequence
  Oligonucleotide for detection of SNP TSC0018427
accccccctctca

SEQ ID NO: 71047 - DNA, 13 bp, Artificial Sequence
  Oligonucleotide for detection of SNP TSC0018427
tgagagcgggggt

SEQ ID NO: 71048 - DNA, 13 bp, Artificial Sequence
  Oligonucleotide for detection of SNP TSC0018427
acccccgctctca

SEQ ID NO: 71049 - DNA, 13 bp, Artificial Sequence
  Oligonucleotide for detection of SNP TSC0018428
tgtgagatgaaga

SEQ ID NO: 71050 - DNA, 13 bp, Artificial Sequence
  Oligonucleotide for detection of SNP TSC0018428
tcttcatctcaca

SEQ ID NO: 71051 - DNA, 13 bp, Artificial Sequence
  Oligonucleotide for detection of SNP TSC0018428
tgtgagttgaaga

SEQ ID NO: 71052 - DNA, 13 bp, Artificial Sequence
  Oligonucleotide for detection of SNP TSC0018428
tcttcaactcaca

SEQ ID NO: 71053 - DNA, 13 bp, Artificial Sequence
  Oligonucleotide for detection of SNP TSC0018428
tttttaatttata

SEQ ID NO: 71054 - DNA, 13 bp, Artificial Sequence
  Oligonucleotide for detection of SNP TSC0018428
tataaattaaaaa

SEQ ID NO: 71055 - DNA, 13 bp, Artificial Sequence
  Oligonucleotide for detection of SNP TSC0018429
ttgtttatgagty

SEQ ID NO: 71056 - DNA, 13 bp, Artificial Sequence
  Oligonucleotide for detection of SNP TSC0018429
ractcataaacaa

SEQ ID NO: 71057 - DNA, 13 bp, Artificial Sequence
  Oligonucleotide for detection of SNP TSC0018429
ttgtttgtgagty

SEQ ID NO: 71058 - DNA, 13 bp, Artificial Sequence
  Oligonucleotide for detection of SNP TSC0018429
ractcacaaacaa

SEQ ID NO: 71059 - DNA, 13 bp, Artificial Sequence
  Oligonucleotide for detection of SNP TSC0018429
ttgttcgtgagty

SEQ ID NO: 71060 - DNA, 13 bp, Artificial Sequence
  Oligonucleotide for detection of SNP TSC0018429
ractcacgaacaa

SEQ ID NO: 71061 - DNA, 13 bp, Artificial Sequence
  Oligonucleotide for detection of SNP TSC0018429
ggtttatgggtag

SEQ ID NO: 71062 - DNA, 13 bp, Artificial Sequence
  Oligonucleotide for detection of SNP TSC0018429
ctacccataaacc

SEQ ID NO: 71063 - DNA, 13 bp, Artificial Sequence
  Oligonucleotide for detection of SNP TSC0018429
ggtttacgggtag

SEQ ID NO: 71064 - DNA, 13 bp, Artificial Sequence
  Oligonucleotide for detection of SNP TSC0018429
ctacccgtaaacc

SEQ ID NO: 71065 - DNA, 13 bp, Artificial Sequence
  Oligonucleotide for detection of SNP TSC0018430
aggggggggattt

SEQ ID NO: 71066 - DNA, 13 bp, Artificial Sequence
  Oligonucleotide for detection of SNP TSC0018430
aaatcccccccct

SEQ ID NO: 71067 - DNA, 13 bp, Artificial Sequence
  Oligonucleotide for detection of SNP TSC0018430
agggggaggattt

SEQ ID NO: 71068 - DNA, 13 bp, Artificial Sequence
  Oligonucleotide for detection of SNP TSC0018430
aaatcctccccct

SEQ ID NO: 71069 - DNA, 13 bp, Artificial Sequence
  Oligonucleotide for detection of SNP TSC0018431
taagatattttty

SEQ ID NO: 71070 - DNA, 13 bp, Artificial Sequence
  Oligonucleotide for detection of SNP TSC0018431
raaaaatatctta

SEQ ID NO: 71071 - DNA, 13 bp, Artificial Sequence
  Oligonucleotide for detection of SNP TSC0018431
taagattttttty

SEQ ID NO: 71072 - DNA, 13 bp, Artificial Sequence
  Oligonucleotide for detection of SNP TSC0018431
raaaaaaatctta

SEQ ID NO: 71073 - DNA, 13 bp, Artificial Sequence
  Oligonucleotide for detection of SNP TSC0018431
gaaaggtgttttg

SEQ ID NO: 71074 - DNA, 13 bp, Artificial Sequence
  Oligonucleotide for detection of SNP TSC0018431
caaaacacctttc

SEQ ID NO: 71075 - DNA, 13 bp, Artificial Sequence
  Oligonucleotide for detection of SNP TSC0018431
gaaaggggttttg

SEQ ID NO: 71076 - DNA, 13 bp, Artificial Sequence
  Oligonucleotide for detection of SNP TSC0018431
caaaacccctttc

SEQ ID NO: 71077 - DNA, 13 bp, Artificial Sequence
  Oligonucleotide for detection of SNP TSC0018432
ttaagaataggga

SEQ ID NO: 71078 - DNA, 13 bp, Artificial Sequence
  Oligonucleotide for detection of SNP TSC0018432
tccctattcttaa

SEQ ID NO: 71079 - DNA, 13 bp, Artificial Sequence
  Oligonucleotide for detection of SNP TSC0018432
ttaagattaggga

SEQ ID NO: 71080 - DNA, 13 bp, Artificial Sequence
  Oligonucleotide for detection of SNP TSC0018432
tccctaatcttaa

SEQ ID NO: 71081 - DNA, 13 bp, Artificial Sequence
  Oligonucleotide for detection of SNP TSC0018432
tttttgtttttag

SEQ ID NO: 71082 - DNA, 13 bp, Artificial Sequence
  Oligonucleotide for detection of SNP TSC0018432
ctaaaaacaaaaa

SEQ ID NO: 71083 - DNA, 13 bp, Artificial Sequence
  Oligonucleotide for detection of SNP TSC0018433
gagtaaatgttat

SEQ ID NO: 71084 - DNA, 13 bp, Artificial Sequence
  Oligonucleotide for detection of SNP TSC0018433
ataacatttactc

SEQ ID NO: 71085 - DNA, 13 bp, Artificial Sequence
  Oligonucleotide for detection of SNP TSC0018433
gagtaagtgttat

SEQ ID NO: 71086 - DNA, 13 bp, Artificial Sequence
  Oligonucleotide for detection of SNP TSC0018433
ataacacttactc

SEQ ID NO: 71087 - DNA, 13 bp, Artificial Sequence
  Oligonucleotide for detection of SNP TSC0018434
agttaagtgattt

SEQ ID NO: 71088 - DNA, 13 bp, Artificial Sequence
  Oligonucleotide for detection of SNP TSC0018434
aaatcacttaact

SEQ ID NO: 71089 - DNA, 13 bp, Artificial Sequence
  Oligonucleotide for detection of SNP TSC0018434
agttaaatgattt

SEQ ID NO: 71090 - DNA, 13 bp, Artificial Sequence
  Oligonucleotide for detection of SNP TSC0018434
aaatcatttaact

SEQ ID NO: 71091 - DNA, 13 bp, Artificial Sequence
  Oligonucleotide for detection of SNP TSC0018437
agtaggggtgttg

SEQ ID NO: 71092 - DNA, 13 bp, Artificial Sequence
  Oligonucleotide for detection of SNP TSC0018437
caacacccctact

SEQ ID NO: 71093 - DNA, 13 bp, Artificial Sequence
  Oligonucleotide for detection of SNP TSC0018437
agtaggagtgttg

SEQ ID NO: 71094 - DNA, 13 bp, Artificial Sequence
  Oligonucleotide for detection of SNP TSC0018437
caacactcctact

SEQ ID NO: 71095 - DNA, 13 bp, Artificial Sequence
  Oligonucleotide for detection of SNP TSC0018437
agtaggggcgttg

SEQ ID NO: 71096 - DNA, 13 bp, Artificial Sequence
  Oligonucleotide for detection of SNP TSC0018437
caacgcccctact

SEQ ID NO: 71097 - DNA, 13 bp, Artificial Sequence
  Oligonucleotide for detection of SNP TSC0018437
agtaggagcgttg

SEQ ID NO: 71098 - DNA, 13 bp, Artificial Sequence
  Oligonucleotide for detection of SNP TSC0018437
caacgctcctact

SEQ ID NO: 71099 - DNA, 13 bp, Artificial Sequence
  Oligonucleotide for detection of SNP TSC0018437
agtaggggtgtcg

SEQ ID NO: 71100 - DNA, 13 bp, Artificial Sequence
  Oligonucleotide for detection of SNP TSC0018437
cgacacccctact

SEQ ID NO: 71101 - DNA, 13 bp, Artificial Sequence
  Oligonucleotide for detection of SNP TSC0018437
agtaggagtgtcg

SEQ ID NO: 71102 - DNA, 13 bp, Artificial Sequence
  Oligonucleotide for detection of SNP TSC0018437
cgacactcctact

SEQ ID NO: 71103 - DNA, 13 bp, Artificial Sequence
  Oligonucleotide for detection of SNP TSC0018437
agtaggggcgtcg

SEQ ID NO: 71104 - DNA, 13 bp, Artificial Sequence
  Oligonucleotide for detection of SNP TSC0018437
cgacgcccctact

SEQ ID NO: 71105 - DNA, 13 bp, Artificial Sequence
  Oligonucleotide for detection of SNP TSC0018437
agtaggagcgtcg

SEQ ID NO: 71106 - DNA, 13 bp, Artificial Sequence
  Oligonucleotide for detection of SNP TSC0018437
cgacgctcctact

SEQ ID NO: 71107 - DNA, 13 bp, Artificial Sequence
  Oligonucleotide for detection of SNP TSC0018438
aaattgattttty

SEQ ID NO: 71108 - DNA, 13 bp, Artificial Sequence
  Oligonucleotide for detection of SNP TSC0018438
raaaaatcaattt

SEQ ID NO: 71109 - DNA, 13 bp, Artificial Sequence
  Oligonucleotide for detection of SNP TSC0018438
aaattgtttttty

SEQ ID NO: 71110 - DNA, 13 bp, Artificial Sequence
  Oligonucleotide for detection of SNP TSC0018438
raaaaaacaattt

SEQ ID NO: 71111 - DNA, 13 bp, Artificial Sequence
  Oligonucleotide for detection of SNP TSC0018438
gagaagttaattt

SEQ ID NO: 71112 - DNA, 13 bp, Artificial Sequence
  Oligonucleotide for detection of SNP TSC0018438
aaattaacttctc

SEQ ID NO: 71113 - DNA, 13 bp, Artificial Sequence
  Oligonucleotide for detection of SNP TSC0018438
gagaaggtaattt

SEQ ID NO: 71114 - DNA, 13 bp, Artificial Sequence
  Oligonucleotide for detection of SNP TSC0018438
aaattaccttctc

SEQ ID NO: 71115 - DNA, 13 bp, Artificial Sequence
  Oligonucleotide for detection of SNP TSC0018440
atagagtggtaga

SEQ ID NO: 71116 - DNA, 13 bp, Artificial Sequence
  Oligonucleotide for detection of SNP TSC0018440
tctaccactctat

SEQ ID NO: 71117 - DNA, 13 bp, Artificial Sequence
  Oligonucleotide for detection of SNP TSC0018440
atagagcggtaga

SEQ ID NO: 71118 - DNA, 13 bp, Artificial Sequence
  Oligonucleotide for detection of SNP TSC0018440
tctaccgctctat

SEQ ID NO: 71119 - DNA, 13 bp, Artificial Sequence
  Oligonucleotide for detection of SNP TSC0018440
tttattgttttgt

SEQ ID NO: 71120 - DNA, 13 bp, Artificial Sequence
  Oligonucleotide for detection of SNP TSC0018440
acaaaacaataaa

SEQ ID NO: 71121 - DNA, 13 bp, Artificial Sequence
  Oligonucleotide for detection of SNP TSC0018440
tttattattttgt

SEQ ID NO: 71122 - DNA, 13 bp, Artificial Sequence
  Oligonucleotide for detection of SNP TSC0018440
acaaaataataaa

SEQ ID NO: 71123 - DNA, 13 bp, Artificial Sequence
  Oligonucleotide for detection of SNP TSC0018440
tttatcgttttgt

SEQ ID NO: 71124 - DNA, 13 bp, Artificial Sequence
  Oligonucleotide for detection of SNP TSC0018440
acaaaacgataaa

SEQ ID NO: 71125 - DNA, 13 bp, Artificial Sequence
  Oligonucleotide for detection of SNP TSC0018441
tgatttaattttg

SEQ ID NO: 71126 - DNA, 13 bp, Artificial Sequence
  Oligonucleotide for detection of SNP TSC0018441
caaaattaaatca

SEQ ID NO: 71127 - DNA, 13 bp, Artificial Sequence
  Oligonucleotide for detection of SNP TSC0018441
tgatttgattttg

SEQ ID NO: 71128 - DNA, 13 bp, Artificial Sequence
  Oligonucleotide for detection of SNP TSC0018441
caaaatcaaatca

SEQ ID NO: 71129 - DNA, 13 bp, Artificial Sequence
  Oligonucleotide for detection of SNP TSC0018441
cgatttaattttg

SEQ ID NO: 71130 - DNA, 13 bp, Artificial Sequence
  Oligonucleotide for detection of SNP TSC0018441
caaaattaaatcg

SEQ ID NO: 71131 - DNA, 13 bp, Artificial Sequence
  Oligonucleotide for detection of SNP TSC0018441
cgatttgattttg

SEQ ID NO: 71132 - DNA, 13 bp, Artificial Sequence
  Oligonucleotide for detection of SNP TSC0018441
caaaatcaaatcg

SEQ ID NO: 71133 - DNA, 13 bp, Artificial Sequence
  Oligonucleotide for detection of SNP TSC0018441
tgatttaatttcg

SEQ ID NO: 71134 - DNA, 13 bp, Artificial Sequence
  Oligonucleotide for detection of SNP TSC0018441
cgaaattaaatca

SEQ ID NO: 71135 - DNA, 13 bp, Artificial Sequence
  Oligonucleotide for detection of SNP TSC0018441
tgatttgatttcg

SEQ ID NO: 71136 - DNA, 13 bp, Artificial Sequence
  Oligonucleotide for detection of SNP TSC0018441
cgaaatcaaatca

SEQ ID NO: 71137 - DNA, 13 bp, Artificial Sequence
  Oligonucleotide for detection of SNP TSC0018441
cgatttaatttcg

SEQ ID NO: 71138 - DNA, 13 bp, Artificial Sequence
  Oligonucleotide for detection of SNP TSC0018441
cgaaattaaatcg

SEQ ID NO: 71139 - DNA, 13 bp, Artificial Sequence
  Oligonucleotide for detection of SNP TSC0018441
cgatttgatttcg

SEQ ID NO: 71140 - DNA, 13 bp, Artificial Sequence
  Oligonucleotide for detection of SNP TSC0018441
cgaaatcaaatcg

SEQ ID NO: 71141 - DNA, 13 bp, Artificial Sequence
  Oligonucleotide for detection of SNP TSC0018442
tataaaatgtttg

SEQ ID NO: 71142 - DNA, 13 bp, Artificial Sequence
  Oligonucleotide for detection of SNP TSC0018442
caaacattttata

SEQ ID NO: 71143 - DNA, 13 bp, Artificial Sequence
  Oligonucleotide for detection of SNP TSC0018442
tataaagtgtttg

SEQ ID NO: 71144 - DNA, 13 bp, Artificial Sequence
  Oligonucleotide for detection of SNP TSC0018442
caaacactttata

SEQ ID NO: 71145 - DNA, 13 bp, Artificial Sequence
  Oligonucleotide for detection of SNP TSC0018443
ttttttaaaatgg

SEQ ID NO: 71146 - DNA, 13 bp, Artificial Sequence
  Oligonucleotide for detection of SNP TSC0018443
ccattttaaaaaa

SEQ ID NO: 71147 - DNA, 13 bp, Artificial Sequence
  Oligonucleotide for detection of SNP TSC0018444
aatggagattagy

SEQ ID NO: 71148 - DNA, 13 bp, Artificial Sequence
  Oligonucleotide for detection of SNP TSC0018444
rctaatctccatt

SEQ ID NO: 71149 - DNA, 13 bp, Artificial Sequence
  Oligonucleotide for detection of SNP TSC0018444
aatggaaattagy

SEQ ID NO: 71150 - DNA, 13 bp, Artificial Sequence
  Oligonucleotide for detection of SNP TSC0018444
rctaatttccatt

SEQ ID NO: 71151 - DNA, 13 bp, Artificial Sequence
  Oligonucleotide for detection of SNP TSC0018445
agtaaggtttttt

SEQ ID NO: 71152 - DNA, 13 bp, Artificial Sequence
  Oligonucleotide for detection of SNP TSC0018445
aaaaaaccttact

SEQ ID NO: 71153 - DNA, 13 bp, Artificial Sequence
  Oligonucleotide for detection of SNP TSC0018445
agtaagttttttt

SEQ ID NO: 71154 - DNA, 13 bp, Artificial Sequence
  Oligonucleotide for detection of SNP TSC0018445
aaaaaaacttact

SEQ ID NO: 71155 - DNA, 13 bp, Artificial Sequence
  Oligonucleotide for detection of SNP TSC0018445
aagagattttatt

SEQ ID NO: 71156 - DNA, 13 bp, Artificial Sequence
  Oligonucleotide for detection of SNP TSC0018445
aataaaatctctt

SEQ ID NO: 71157 - DNA, 13 bp, Artificial Sequence
  Oligonucleotide for detection of SNP TSC0018445
aagagaatttatt

SEQ ID NO: 71158 - DNA, 13 bp, Artificial Sequence
  Oligonucleotide for detection of SNP TSC0018445
aataaattctctt

SEQ ID NO: 71159 - DNA, 13 bp, Artificial Sequence
  Oligonucleotide for detection of SNP TSC0018448
gggggttgtgggg

SEQ ID NO: 71160 - DNA, 13 bp, Artificial Sequence
  Oligonucleotide for detection of SNP TSC0018448
ccccacaaccccc

SEQ ID NO: 71161 - DNA, 13 bp, Artificial Sequence
  Oligonucleotide for detection of SNP TSC0018448
gggggtcgtgggg

SEQ ID NO: 71162 - DNA, 13 bp, Artificial Sequence
  Oligonucleotide for detection of SNP TSC0018448
ccccacgaccccc

SEQ ID NO: 71163 - DNA, 13 bp, Artificial Sequence
  Oligonucleotide for detection of SNP TSC0018448
ttttatggtttty

SEQ ID NO: 71164 - DNA, 13 bp, Artificial Sequence
  Oligonucleotide for detection of SNP TSC0018448
raaaaccataaaa

SEQ ID NO: 71165 - DNA, 13 bp, Artificial Sequence
  Oligonucleotide for detection of SNP TSC0018448
ttttatagtttty

SEQ ID NO: 71166 - DNA, 13 bp, Artificial Sequence
  Oligonucleotide for detection of SNP TSC0018448
raaaactataaaa

SEQ ID NO: 71167 - DNA, 13 bp, Artificial Sequence
  Oligonucleotide for detection of SNP TSC0018448
ttttacggtttty

SEQ ID NO: 71168 - DNA, 13 bp, Artificial Sequence
  Oligonucleotide for detection of SNP TSC0018448
raaaaccgtaaaa

SEQ ID NO: 71169 - DNA, 13 bp, Artificial Sequence
  Oligonucleotide for detection of SNP TSC0018451
tgttattgtatty

SEQ ID NO: 71170 - DNA, 13 bp, Artificial Sequence
  Oligonucleotide for detection of SNP TSC0018451
raatacaataaca

SEQ ID NO: 71171 - DNA, 13 bp, Artificial Sequence
  Oligonucleotide for detection of SNP TSC0018451
cgttattgtatty

SEQ ID NO: 71172 - DNA, 13 bp, Artificial Sequence
  Oligonucleotide for detection of SNP TSC0018451
raatacaataacg

SEQ ID NO: 71173 - DNA, 13 bp, Artificial Sequence
  Oligonucleotide for detection of SNP TSC0018451
tgttatcgtatty

SEQ ID NO: 71174 - DNA, 13 bp, Artificial Sequence
  Oligonucleotide for detection of SNP TSC0018451
raatacgataaca

SEQ ID NO: 71175 - DNA, 13 bp, Artificial Sequence
  Oligonucleotide for detection of SNP TSC0018451
cgttatcgtatty

SEQ ID NO: 71176 - DNA, 13 bp, Artificial Sequence
  Oligonucleotide for detection of SNP TSC0018451
raatacgataacg

SEQ ID NO: 71177 - DNA, 13 bp, Artificial Sequence
  Oligonucleotide for detection of SNP TSC0018451
gggtgtggtggtg

SEQ ID NO: 71178 - DNA, 13 bp, Artificial Sequence
  Oligonucleotide for detection of SNP TSC0018451
caccaccacaccc

SEQ ID NO: 71179 - DNA, 13 bp, Artificial Sequence
  Oligonucleotide for detection of SNP TSC0018451
gggtgtagtggtg

SEQ ID NO: 71180 - DNA, 13 bp, Artificial Sequence
  Oligonucleotide for detection of SNP TSC0018451
caccactacaccc

SEQ ID NO: 71181 - DNA, 13 bp, Artificial Sequence
  Oligonucleotide for detection of SNP TSC0018451
gggtgcggtggtg

SEQ ID NO: 71182 - DNA, 13 bp, Artificial Sequence
  Oligonucleotide for detection of SNP TSC0018451
caccaccgcaccc

SEQ ID NO: 71183 - DNA, 13 bp, Artificial Sequence
  Oligonucleotide for detection of SNP TSC0018451
gggtgtagtggcg

SEQ ID NO: 71184 - DNA, 13 bp, Artificial Sequence
  Oligonucleotide for detection of SNP TSC0018451
cgccactacaccc

SEQ ID NO: 71185 - DNA, 13 bp, Artificial Sequence
  Oligonucleotide for detection of SNP TSC0018451
gggtgtggtggcg

SEQ ID NO: 71186 - DNA, 13 bp, Artificial Sequence
  Oligonucleotide for detection of SNP TSC0018451
cgccaccacaccc

SEQ ID NO: 71187 - DNA, 13 bp, Artificial Sequence
  Oligonucleotide for detection of SNP TSC0018451
gggtgcggtggcg

SEQ ID NO: 71188 - DNA, 13 bp, Artificial Sequence
  Oligonucleotide for detection of SNP TSC0018451
cgccaccgcaccc

SEQ ID NO: 71189 - DNA, 13 bp, Artificial Sequence
  Oligonucleotide for detection of SNP TSC0018452
agagtaagattgt

SEQ ID NO: 71190 - DNA, 13 bp, Artificial Sequence
  Oligonucleotide for detection of SNP TSC0018452
acaatcttactct

SEQ ID NO: 71191 - DNA, 13 bp, Artificial Sequence
  Oligonucleotide for detection of SNP TSC0018452
agagtatgattgt

SEQ ID NO: 71192 - DNA, 13 bp, Artificial Sequence
  Oligonucleotide for detection of SNP TSC0018452
acaatcatactct

SEQ ID NO: 71193 - DNA, 13 bp, Artificial Sequence
  Oligonucleotide for detection of SNP TSC0018452
agagtacgattgt

SEQ ID NO: 71194 - DNA, 13 bp, Artificial Sequence
  Oligonucleotide for detection of SNP TSC0018452
acaatcgtactct

SEQ ID NO: 71195 - DNA, 13 bp, Artificial Sequence
  Oligonucleotide for detection of SNP TSC0018452
atagttttgtttt

SEQ ID NO: 71196 - DNA, 13 bp, Artificial Sequence
  Oligonucleotide for detection of SNP TSC0018452
aaaacaaaactat

SEQ ID NO: 71197 - DNA, 13 bp, Artificial Sequence
  Oligonucleotide for detection of SNP TSC0018452
atagttgtgtttt

SEQ ID NO: 71198 - DNA, 13 bp, Artificial Sequence
  Oligonucleotide for detection of SNP TSC0018452
aaaacacaactat

SEQ ID NO: 71199 - DNA, 13 bp, Artificial Sequence
  Oligonucleotide for detection of SNP TSC0018452
atagtcgtgtttt

SEQ ID NO: 71200 - DNA, 13 bp, Artificial Sequence
  Oligonucleotide for detection of SNP TSC0018452
aaaacacgactat

SEQ ID NO: 71201 - DNA, 13 bp, Artificial Sequence
  Oligonucleotide for detection of SNP TSC0018453
taagattgtgtta

SEQ ID NO: 71202 - DNA, 13 bp, Artificial Sequence
  Oligonucleotide for detection of SNP TSC0018453
taacacaatctta

SEQ ID NO: 71203 - DNA, 13 bp, Artificial Sequence
  Oligonucleotide for detection of SNP TSC0018453
taagatcgtgtta

SEQ ID NO: 71204 - DNA, 13 bp, Artificial Sequence
  Oligonucleotide for detection of SNP TSC0018453
taacacgatctta

SEQ ID NO: 71205 - DNA, 13 bp, Artificial Sequence
  Oligonucleotide for detection of SNP TSC0018453
taagattgcgtta

SEQ ID NO: 71206 - DNA, 13 bp, Artificial Sequence
  Oligonucleotide for detection of SNP TSC0018453
taacgcaatctta

SEQ ID NO: 71207 - DNA, 13 bp, Artificial Sequence
  Oligonucleotide for detection of SNP TSC0018453
taagatcgcgtta

SEQ ID NO: 71208 - DNA, 13 bp, Artificial Sequence
  Oligonucleotide for detection of SNP TSC0018453
taacgcgatctta

SEQ ID NO: 71209 - DNA, 13 bp, Artificial Sequence
  Oligonucleotide for detection of SNP TSC0018453
tggcgtgattttg

SEQ ID NO: 71210 - DNA, 13 bp, Artificial Sequence
  Oligonucleotide for detection of SNP TSC0018453
caaaatcacgcca

SEQ ID NO: 71211 - DNA, 13 bp, Artificial Sequence
  Oligonucleotide for detection of SNP TSC0018453
tggcgtaattttg

SEQ ID NO: 71212 - DNA, 13 bp, Artificial Sequence
  Oligonucleotide for detection of SNP TSC0018453
caaaattacgcca

SEQ ID NO: 71213 - DNA, 13 bp, Artificial Sequence
  Oligonucleotide for detection of SNP TSC0018453
tggcgcgattttg

SEQ ID NO: 71214 - DNA, 13 bp, Artificial Sequence
  Oligonucleotide for detection of SNP TSC0018453
caaaatcgcgcca

SEQ ID NO: 71215 - DNA, 13 bp, Artificial Sequence
  Oligonucleotide for detection of SNP TSC0018454
taatatgttttay

SEQ ID NO: 71216 - DNA, 13 bp, Artificial Sequence
  Oligonucleotide for detection of SNP TSC0018454
rtaaaacatatta

SEQ ID NO: 71217 - DNA, 13 bp, Artificial Sequence
  Oligonucleotide for detection of SNP TSC0018454
taatatattttay

SEQ ID NO: 71218 - DNA, 13 bp, Artificial Sequence
  Oligonucleotide for detection of SNP TSC0018454
rtaaaatatatta

SEQ ID NO: 71219 - DNA, 13 bp, Artificial Sequence
  Oligonucleotide for detection of SNP TSC0018455
ttttgagatttty

SEQ ID NO: 71220 - DNA, 13 bp, Artificial Sequence
  Oligonucleotide for detection of SNP TSC0018455
raaaatctcaaaa

SEQ ID NO: 71221 - DNA, 13 bp, Artificial Sequence
  Oligonucleotide for detection of SNP TSC0018455
ttttgaaatttty

SEQ ID NO: 71222 - DNA, 13 bp, Artificial Sequence
  Oligonucleotide for detection of SNP TSC0018455
raaaatttcaaaa

SEQ ID NO: 71223 - DNA, 13 bp, Artificial Sequence
  Oligonucleotide for detection of SNP TSC0018456
tatttatggaatt

SEQ ID NO: 71224 - DNA, 13 bp, Artificial Sequence
  Oligonucleotide for detection of SNP TSC0018456
aattccataaata

SEQ ID NO: 71225 - DNA, 13 bp, Artificial Sequence
  Oligonucleotide for detection of SNP TSC0018456
tatttacggaatt

SEQ ID NO: 71226 - DNA, 13 bp, Artificial Sequence
  Oligonucleotide for detection of SNP TSC0018456
aattccgtaaata

SEQ ID NO: 71227 - DNA, 13 bp, Artificial Sequence
  Oligonucleotide for detection of SNP TSC0018456
agttttgtagatg

SEQ ID NO: 71228 - DNA, 13 bp, Artificial Sequence
  Oligonucleotide for detection of SNP TSC0018456
catctacaaaact

SEQ ID NO: 71229 - DNA, 13 bp, Artificial Sequence
  Oligonucleotide for detection of SNP TSC0018456
agttttatagatg

SEQ ID NO: 71230 - DNA, 13 bp, Artificial Sequence
  Oligonucleotide for detection of SNP TSC0018456
catctataaaact

SEQ ID NO: 71231 - DNA, 13 bp, Artificial Sequence
  Oligonucleotide for detection of SNP TSC0018456
agtttcgtagatg

SEQ ID NO: 71232 - DNA, 13 bp, Artificial Sequence
  Oligonucleotide for detection of SNP TSC0018456
catctacgaaact

SEQ ID NO: 71233 - DNA, 13 bp, Artificial Sequence
  Oligonucleotide for detection of SNP TSC0018458
gtggttaataata

SEQ ID NO: 71234 - DNA, 13 bp, Artificial Sequence
  Oligonucleotide for detection of SNP TSC0018458
tattattaaccac

SEQ ID NO: 71235 - DNA, 13 bp, Artificial Sequence
  Oligonucleotide for detection of SNP TSC0018458
gtggtttataata

SEQ ID NO: 71236 - DNA, 13 bp, Artificial Sequence
  Oligonucleotide for detection of SNP TSC0018458
tattataaaccac

SEQ ID NO: 71237 - DNA, 13 bp, Artificial Sequence
  Oligonucleotide for detection of SNP TSC0018458
tattattaattay

SEQ ID NO: 71238 - DNA, 13 bp, Artificial Sequence
  Oligonucleotide for detection of SNP TSC0018458
rtaattaataata

SEQ ID NO: 71239 - DNA, 13 bp, Artificial Sequence
  Oligonucleotide for detection of SNP TSC0018458
tattataaattay

SEQ ID NO: 71240 - DNA, 13 bp, Artificial Sequence
  Oligonucleotide for detection of SNP TSC0018458
rtaatttataata

SEQ ID NO: 71241 - DNA, 13 bp, Artificial Sequence
  Oligonucleotide for detection of SNP TSC0018461
tttaggatgaggg

SEQ ID NO: 71242 - DNA, 13 bp, Artificial Sequence
  Oligonucleotide for detection of SNP TSC0018461
ccctcatcctaaa

SEQ ID NO: 71243 - DNA, 13 bp, Artificial Sequence
  Oligonucleotide for detection of SNP TSC0018461
tttagggtgaggg

SEQ ID NO: 71244 - DNA, 13 bp, Artificial Sequence
  Oligonucleotide for detection of SNP TSC0018461
ccctcaccctaaa

SEQ ID NO: 71245 - DNA, 13 bp, Artificial Sequence
  Oligonucleotide for detection of SNP TSC0018461
tttaggacgaggg

SEQ ID NO: 71246 - DNA, 13 bp, Artificial Sequence
  Oligonucleotide for detection of SNP TSC0018461
ccctcgtcctaaa

SEQ ID NO: 71247 - DNA, 13 bp, Artificial Sequence
  Oligonucleotide for detection of SNP TSC0018461
tttagggcgaggg

SEQ ID NO: 71248 - DNA, 13 bp, Artificial Sequence
  Oligonucleotide for detection of SNP TSC0018461
ccctcgccctaaa

SEQ ID NO: 71249 - DNA, 13 bp, Artificial Sequence
  Oligonucleotide for detection of SNP TSC0018462
tttatttattttt

SEQ ID NO: 71250 - DNA, 13 bp, Artificial Sequence
  Oligonucleotide for detection of SNP TSC0018462
aaaaataaataaa

SEQ ID NO: 71251 - DNA, 13 bp, Artificial Sequence
  Oligonucleotide for detection of SNP TSC0018462
agagattaatgga

SEQ ID NO: 71252 - DNA, 13 bp, Artificial Sequence
  Oligonucleotide for detection of SNP TSC0018462
tccattaatctct

SEQ ID NO: 71253 - DNA, 13 bp, Artificial Sequence
  Oligonucleotide for detection of SNP TSC0018462
agagataaatgga

SEQ ID NO: 71254 - DNA, 13 bp, Artificial Sequence
  Oligonucleotide for detection of SNP TSC0018462
tccatttatctct

SEQ ID NO: 71255 - DNA, 13 bp, Artificial Sequence
  Oligonucleotide for detection of SNP TSC0018463
tttaggattatty

SEQ ID NO: 71256 - DNA, 13 bp, Artificial Sequence
  Oligonucleotide for detection of SNP TSC0018463
raataatcctaaa

SEQ ID NO: 71257 - DNA, 13 bp, Artificial Sequence
  Oligonucleotide for detection of SNP TSC0018463
tttaggtttatty

SEQ ID NO: 71258 - DNA, 13 bp, Artificial Sequence
  Oligonucleotide for detection of SNP TSC0018463
raataaacctaaa

SEQ ID NO: 71259 - DNA, 13 bp, Artificial Sequence
  Oligonucleotide for detection of SNP TSC0018463
gagtggttttggg

SEQ ID NO: 71260 - DNA, 13 bp, Artificial Sequence
  Oligonucleotide for detection of SNP TSC0018463
cccaaaaccactc

SEQ ID NO: 71261 - DNA, 13 bp, Artificial Sequence
  Oligonucleotide for detection of SNP TSC0018463
gagtggatttggg

SEQ ID NO: 71262 - DNA, 13 bp, Artificial Sequence
  Oligonucleotide for detection of SNP TSC0018463
cccaaatccactc

SEQ ID NO: 71263 - DNA, 13 bp, Artificial Sequence
  Oligonucleotide for detection of SNP TSC0018464
attagaggaggga

SEQ ID NO: 71264 - DNA, 13 bp, Artificial Sequence
  Oligonucleotide for detection of SNP TSC0018464
tccctcctctaat

SEQ ID NO: 71265 - DNA, 13 bp, Artificial Sequence
  Oligonucleotide for detection of SNP TSC0018464
attagaagaggga

SEQ ID NO: 71266 - DNA, 13 bp, Artificial Sequence
  Oligonucleotide for detection of SNP TSC0018464
tccctcttctaat

SEQ ID NO: 71267 - DNA, 13 bp, Artificial Sequence
  Oligonucleotide for detection of SNP TSC0018467
gaatataatttaa

SEQ ID NO: 71268 - DNA, 13 bp, Artificial Sequence
  Oligonucleotide for detection of SNP TSC0018467
ttaaattatattc

SEQ ID NO: 71269 - DNA, 13 bp, Artificial Sequence
  Oligonucleotide for detection of SNP TSC0018467
gaatatgatttaa

SEQ ID NO: 71270 - DNA, 13 bp, Artificial Sequence
  Oligonucleotide for detection of SNP TSC0018467
ttaaatcatattc

SEQ ID NO: 71271 - DNA, 13 bp, Artificial Sequence
  Oligonucleotide for detection of SNP TSC0018468
gagataatatttt

SEQ ID NO: 71272 - DNA, 13 bp, Artificial Sequence
  Oligonucleotide for detection of SNP TSC0018468
aaaatattatctc

SEQ ID NO: 71273 - DNA, 13 bp, Artificial Sequence
  Oligonucleotide for detection of SNP TSC0018468
gagatattatttt

SEQ ID NO: 71274 - DNA, 13 bp, Artificial Sequence
  Oligonucleotide for detection of SNP TSC0018468
aaaataatatctc

SEQ ID NO: 71275 - DNA, 13 bp, Artificial Sequence
  Oligonucleotide for detection of SNP TSC0018468
aaaatattgttty

SEQ ID NO: 71276 - DNA, 13 bp, Artificial Sequence
  Oligonucleotide for detection of SNP TSC0018468
raaacaatatttt

SEQ ID NO: 71277 - DNA, 13 bp, Artificial Sequence
  Oligonucleotide for detection of SNP TSC0018468
aaaatagtgttty

SEQ ID NO: 71278 - DNA, 13 bp, Artificial Sequence
  Oligonucleotide for detection of SNP TSC0018468
raaacactatttt

SEQ ID NO: 71279 - DNA, 13 bp, Artificial Sequence
  Oligonucleotide for detection of SNP TSC0018469
gaaggtgggagtg

SEQ ID NO: 71280 - DNA, 13 bp, Artificial Sequence
  Oligonucleotide for detection of SNP TSC0018469
cactcccaccttc

SEQ ID NO: 71281 - DNA, 13 bp, Artificial Sequence
  Oligonucleotide for detection of SNP TSC0018469
gaaggtaggagtg

SEQ ID NO: 71282 - DNA, 13 bp, Artificial Sequence
  Oligonucleotide for detection of SNP TSC0018469
cactcctaccttc

SEQ ID NO: 71283 - DNA, 13 bp, Artificial Sequence
  Oligonucleotide for detection of SNP TSC0018469
gaaggcgggagtg

SEQ ID NO: 71284 - DNA, 13 bp, Artificial Sequence
  Oligonucleotide for detection of SNP TSC0018469
cactcccgccttc

SEQ ID NO: 71285 - DNA, 13 bp, Artificial Sequence
  Oligonucleotide for detection of SNP TSC0018470
ggaggtagtattg

SEQ ID NO: 71286 - DNA, 13 bp, Artificial Sequence
  Oligonucleotide for detection of SNP TSC0018470
caatactacctcc

SEQ ID NO: 71287 - DNA, 13 bp, Artificial Sequence
  Oligonucleotide for detection of SNP TSC0018470
ggaggtggtattg

SEQ ID NO: 71288 - DNA, 13 bp, Artificial Sequence
  Oligonucleotide for detection of SNP TSC0018470
caataccacctcc

SEQ ID NO: 71289 - DNA, 13 bp, Artificial Sequence
  Oligonucleotide for detection of SNP TSC0018470
ggaggtagtatcg

SEQ ID NO: 71290 - DNA, 13 bp, Artificial Sequence
  Oligonucleotide for detection of SNP TSC0018470
cgatactacctcc

SEQ ID NO: 71291 - DNA, 13 bp, Artificial Sequence
  Oligonucleotide for detection of SNP TSC0018470
ggaggcggtattg

SEQ ID NO: 71292 - DNA, 13 bp, Artificial Sequence
  Oligonucleotide for detection of SNP TSC0018470
caataccgcctcc

SEQ ID NO: 71293 - DNA, 13 bp, Artificial Sequence
  Oligonucleotide for detection of SNP TSC0018470
ggaggtggtatcg

SEQ ID NO: 71294 - DNA, 13 bp, Artificial Sequence
  Oligonucleotide for detection of SNP TSC0018470
cgataccacctcc

SEQ ID NO: 71295 - DNA, 13 bp, Artificial Sequence
  Oligonucleotide for detection of SNP TSC0018470
ggaggcggtatcg

SEQ ID NO: 71296 - DNA, 13 bp, Artificial Sequence
  Oligonucleotide for detection of SNP TSC0018470
cgataccgcctcc

SEQ ID NO: 71297 - DNA, 13 bp, Artificial Sequence
  Oligonucleotide for detection of SNP TSC0018470
tggtgttgtttty

SEQ ID NO: 71298 - DNA, 13 bp, Artificial Sequence
  Oligonucleotide for detection of SNP TSC0018470
raaaacaacacca

SEQ ID NO: 71299 - DNA, 13 bp, Artificial Sequence
  Oligonucleotide for detection of SNP TSC0018470
cggtgttgtttty

SEQ ID NO: 71300 - DNA, 13 bp, Artificial Sequence
  Oligonucleotide for detection of SNP TSC0018470
raaaacaacaccg

SEQ ID NO: 71301 - DNA, 13 bp, Artificial Sequence
  Oligonucleotide for detection of SNP TSC0018470
tggtgtcgtttty

SEQ ID NO: 71302 - DNA, 13 bp, Artificial Sequence
  Oligonucleotide for detection of SNP TSC0018470
raaaacgacacca

SEQ ID NO: 71303 - DNA, 13 bp, Artificial Sequence
  Oligonucleotide for detection of SNP TSC0018470
cggtgtcgtttty

SEQ ID NO: 71304 - DNA, 13 bp, Artificial Sequence
  Oligonucleotide for detection of SNP TSC0018470
raaaacgacaccg

SEQ ID NO: 71305 - DNA, 13 bp, Artificial Sequence
  Oligonucleotide for detection of SNP TSC0018471
ttaggagattgag

SEQ ID NO: 71306 - DNA, 13 bp, Artificial Sequence
  Oligonucleotide for detection of SNP TSC0018471
ctcaatctcctaa

SEQ ID NO: 71307 - DNA, 13 bp, Artificial Sequence
  Oligonucleotide for detection of SNP TSC0018471
ttaggaaattgag

SEQ ID NO: 71308 - DNA, 13 bp, Artificial Sequence
  Oligonucleotide for detection of SNP TSC0018471
ctcaatttcctaa

SEQ ID NO: 71309 - DNA, 13 bp, Artificial Sequence
  Oligonucleotide for detection of SNP TSC0018471
ttaggagatcgag

SEQ ID NO: 71310 - DNA, 13 bp, Artificial Sequence
  Oligonucleotide for detection of SNP TSC0018471
ctcgatctcctaa

SEQ ID NO: 71311 - DNA, 13 bp, Artificial Sequence
  Oligonucleotide for detection of SNP TSC0018471
ttaggaaatcgag

SEQ ID NO: 71312 - DNA, 13 bp, Artificial Sequence
  Oligonucleotide for detection of SNP TSC0018471
ctcgatttcctaa

SEQ ID NO: 71313 - DNA, 13 bp, Artificial Sequence
  Oligonucleotide for detection of SNP TSC0018472
gtggggaggggty

SEQ ID NO: 71314 - DNA, 13 bp, Artificial Sequence
  Oligonucleotide for detection of SNP TSC0018472
racccctccccac

SEQ ID NO: 71315 - DNA, 13 bp, Artificial Sequence
  Oligonucleotide for detection of SNP TSC0018472
gtgggggggggty

SEQ ID NO: 71316 - DNA, 13 bp, Artificial Sequence
  Oligonucleotide for detection of SNP TSC0018472
racccccccccac

SEQ ID NO: 71317 - DNA, 13 bp, Artificial Sequence
  Oligonucleotide for detection of SNP TSC0018473
gtgagttgtgttg

SEQ ID NO: 71318 - DNA, 13 bp, Artificial Sequence
  Oligonucleotide for detection of SNP TSC0018473
caacacaactcac

SEQ ID NO: 71319 - DNA, 13 bp, Artificial Sequence
  Oligonucleotide for detection of SNP TSC0018473
gtgagtcgtgttg

SEQ ID NO: 71320 - DNA, 13 bp, Artificial Sequence
  Oligonucleotide for detection of SNP TSC0018473
caacacgactcac

SEQ ID NO: 71321 - DNA, 13 bp, Artificial Sequence
  Oligonucleotide for detection of SNP TSC0018474
tttgtatggttag

SEQ ID NO: 71322 - DNA, 13 bp, Artificial Sequence
  Oligonucleotide for detection of SNP TSC0018474
ctaaccatacaaa

SEQ ID NO: 71323 - DNA, 13 bp, Artificial Sequence
  Oligonucleotide for detection of SNP TSC0018474
tttgtagggttag

SEQ ID NO: 71324 - DNA, 13 bp, Artificial Sequence
  Oligonucleotide for detection of SNP TSC0018474
ctaaccctacaaa

SEQ ID NO: 71325 - DNA, 13 bp, Artificial Sequence
  Oligonucleotide for detection of SNP TSC0018474
tttgtacggttag

SEQ ID NO: 71326 - DNA, 13 bp, Artificial Sequence
  Oligonucleotide for detection of SNP TSC0018474
ctaaccgtacaaa

SEQ ID NO: 71327 - DNA, 13 bp, Artificial Sequence
  Oligonucleotide for detection of SNP TSC0018474
ttggttgtataaa

SEQ ID NO: 71328 - DNA, 13 bp, Artificial Sequence
  Oligonucleotide for detection of SNP TSC0018474
tttatacaaccaa

SEQ ID NO: 71329 - DNA, 13 bp, Artificial Sequence
  Oligonucleotide for detection of SNP TSC0018474
ttggttttataaa

SEQ ID NO: 71330 - DNA, 13 bp, Artificial Sequence
  Oligonucleotide for detection of SNP TSC0018474
tttataaaaccaa

SEQ ID NO: 71331 - DNA, 13 bp, Artificial Sequence
  Oligonucleotide for detection of SNP TSC0018474
ttggtcgtataaa

SEQ ID NO: 71332 - DNA, 13 bp, Artificial Sequence
  Oligonucleotide for detection of SNP TSC0018474
tttatacgaccaa

SEQ ID NO: 71333 - DNA, 13 bp, Artificial Sequence
  Oligonucleotide for detection of SNP TSC0018475
gagatttgtttta

SEQ ID NO: 71334 - DNA, 13 bp, Artificial Sequence
  Oligonucleotide for detection of SNP TSC0018475
taaaacaaatctc

SEQ ID NO: 71335 - DNA, 13 bp, Artificial Sequence
  Oligonucleotide for detection of SNP TSC0018475
gagattcgtttta

SEQ ID NO: 71336 - DNA, 13 bp, Artificial Sequence
  Oligonucleotide for detection of SNP TSC0018475
taaaacgaatctc

SEQ ID NO: 71337 - DNA, 13 bp, Artificial Sequence
  Oligonucleotide for detection of SNP TSC0018475
tgaaatgggttty

SEQ ID NO: 71338 - DNA, 13 bp, Artificial Sequence
  Oligonucleotide for detection of SNP TSC0018475
raaacccatttca

SEQ ID NO: 71339 - DNA, 13 bp, Artificial Sequence
  Oligonucleotide for detection of SNP TSC0018475
tgaaataggttty

SEQ ID NO: 71340 - DNA, 13 bp, Artificial Sequence
  Oligonucleotide for detection of SNP TSC0018475
raaacctatttca

SEQ ID NO: 71341 - DNA, 13 bp, Artificial Sequence
  Oligonucleotide for detection of SNP TSC0018475
tgaaacgggttty

SEQ ID NO: 71342 - DNA, 13 bp, Artificial Sequence
  Oligonucleotide for detection of SNP TSC0018475
raaacccgtttca

SEQ ID NO: 71343 - DNA, 13 bp, Artificial Sequence
  Oligonucleotide for detection of SNP TSC0018481
gggtagggttagg

SEQ ID NO: 71344 - DNA, 13 bp, Artificial Sequence
  Oligonucleotide for detection of SNP TSC0018481
cctaaccctaccc

SEQ ID NO: 71345 - DNA, 13 bp, Artificial Sequence
  Oligonucleotide for detection of SNP TSC0018481
gggtagagttagg

SEQ ID NO: 71346 - DNA, 13 bp, Artificial Sequence
  Oligonucleotide for detection of SNP TSC0018481
cctaactctaccc

SEQ ID NO: 71347 - DNA, 13 bp, Artificial Sequence
  Oligonucleotide for detection of SNP TSC0018482
tatagaattatta

SEQ ID NO: 71348 - DNA, 13 bp, Artificial Sequence
  Oligonucleotide for detection of SNP TSC0018482
taataattctata

SEQ ID NO: 71349 - DNA, 13 bp, Artificial Sequence
  Oligonucleotide for detection of SNP TSC0018482
tatagagttatta

SEQ ID NO: 71350 - DNA, 13 bp, Artificial Sequence
  Oligonucleotide for detection of SNP TSC0018482
taataactctata

SEQ ID NO: 71351 - DNA, 13 bp, Artificial Sequence
  Oligonucleotide for detection of SNP TSC0018484
tgttattgtgttt

SEQ ID NO: 71352 - DNA, 13 bp, Artificial Sequence
  Oligonucleotide for detection of SNP TSC0018484
aaacacaataaca

SEQ ID NO: 71353 - DNA, 13 bp, Artificial Sequence
  Oligonucleotide for detection of SNP TSC0018484
tgttatcgtgttt

SEQ ID NO: 71354 - DNA, 13 bp, Artificial Sequence
  Oligonucleotide for detection of SNP TSC0018484
aaacacgataaca

SEQ ID NO: 71355 - DNA, 13 bp, Artificial Sequence
  Oligonucleotide for detection of SNP TSC0018484
aggtatggtggta

SEQ ID NO: 71356 - DNA, 13 bp, Artificial Sequence
  Oligonucleotide for detection of SNP TSC0018484
taccaccatacct

SEQ ID NO: 71357 - DNA, 13 bp, Artificial Sequence
  Oligonucleotide for detection of SNP TSC0018484
aggtatagtggta

SEQ ID NO: 71358 - DNA, 13 bp, Artificial Sequence
  Oligonucleotide for detection of SNP TSC0018484
taccactatacct

SEQ ID NO: 71359 - DNA, 13 bp, Artificial Sequence
  Oligonucleotide for detection of SNP TSC0018484
aggtacggtggta

SEQ ID NO: 71360 - DNA, 13 bp, Artificial Sequence
  Oligonucleotide for detection of SNP TSC0018484
taccaccgtacct

SEQ ID NO: 71361 - DNA, 13 bp, Artificial Sequence
  Oligonucleotide for detection of SNP TSC0018487
tatagagagagag

SEQ ID NO: 71362 - DNA, 13 bp, Artificial Sequence
  Oligonucleotide for detection of SNP TSC0018487
ctctctctctata

SEQ ID NO: 71363 - DNA, 13 bp, Artificial Sequence
  Oligonucleotide for detection of SNP TSC0018487
tatagatagagag

SEQ ID NO: 71364 - DNA, 13 bp, Artificial Sequence
  Oligonucleotide for detection of SNP TSC0018487
ctctctatctata

SEQ ID NO: 71365 - DNA, 13 bp, Artificial Sequence
  Oligonucleotide for detection of SNP TSC0018488
ttgtagtgttgty

SEQ ID NO: 71366 - DNA, 13 bp, Artificial Sequence
  Oligonucleotide for detection of SNP TSC0018488
racaacactacaa

SEQ ID NO: 71367 - DNA, 13 bp, Artificial Sequence
  Oligonucleotide for detection of SNP TSC0018488
ttgtagcgttgty

SEQ ID NO: 71368 - DNA, 13 bp, Artificial Sequence
  Oligonucleotide for detection of SNP TSC0018488
racaacgctacaa

SEQ ID NO: 71369 - DNA, 13 bp, Artificial Sequence
  Oligonucleotide for detection of SNP TSC0018488
ggtaatgttgtaa

SEQ ID NO: 71370 - DNA, 13 bp, Artificial Sequence
  Oligonucleotide for detection of SNP TSC0018488
ttacaacattacc

SEQ ID NO: 71371 - DNA, 13 bp, Artificial Sequence
  Oligonucleotide for detection of SNP TSC0018488
ggtaatattgtaa

SEQ ID NO: 71372 - DNA, 13 bp, Artificial Sequence
  Oligonucleotide for detection of SNP TSC0018488
ttacaatattacc

SEQ ID NO: 71373 - DNA, 13 bp, Artificial Sequence
  Oligonucleotide for detection of SNP TSC0018488
ggtaacgttgtaa

SEQ ID NO: 71374 - DNA, 13 bp, Artificial Sequence
  Oligonucleotide for detection of SNP TSC0018488
ttacaacgttacc

SEQ ID NO: 71375 - DNA, 13 bp, Artificial Sequence
  Oligonucleotide for detection of SNP TSC0018492
ttatagaagttty

SEQ ID NO: 71376 - DNA, 13 bp, Artificial Sequence
  Oligonucleotide for detection of SNP TSC0018492
raaacttctataa

SEQ ID NO: 71377 - DNA, 13 bp, Artificial Sequence
  Oligonucleotide for detection of SNP TSC0018492
ttatagtagttty

SEQ ID NO: 71378 - DNA, 13 bp, Artificial Sequence
  Oligonucleotide for detection of SNP TSC0018492
raaactactataa

SEQ ID NO: 71379 - DNA, 13 bp, Artificial Sequence
  Oligonucleotide for detection of SNP TSC0018492
gaagtttttgtgg

SEQ ID NO: 71380 - DNA, 13 bp, Artificial Sequence
  Oligonucleotide for detection of SNP TSC0018492
ccacaaaaacttc

SEQ ID NO: 71381 - DNA, 13 bp, Artificial Sequence
  Oligonucleotide for detection of SNP TSC0018492
gaagttgttgtgg

SEQ ID NO: 71382 - DNA, 13 bp, Artificial Sequence
  Oligonucleotide for detection of SNP TSC0018492
ccacaacaacttc

SEQ ID NO: 71383 - DNA, 13 bp, Artificial Sequence
  Oligonucleotide for detection of SNP TSC0018493
tttgttatattgy

SEQ ID NO: 71384 - DNA, 13 bp, Artificial Sequence
  Oligonucleotide for detection of SNP TSC0018493
rcaatataacaaa

SEQ ID NO: 71385 - DNA, 13 bp, Artificial Sequence
  Oligonucleotide for detection of SNP TSC0018493
tttgttttattgy

SEQ ID NO: 71386 - DNA, 13 bp, Artificial Sequence
  Oligonucleotide for detection of SNP TSC0018493
rcaataaaacaaa

SEQ ID NO: 71387 - DNA, 13 bp, Artificial Sequence
  Oligonucleotide for detection of SNP TSC0018493
gtagtgtggtagg

SEQ ID NO: 71388 - DNA, 13 bp, Artificial Sequence
  Oligonucleotide for detection of SNP TSC0018493
cctaccacactac

SEQ ID NO: 71389 - DNA, 13 bp, Artificial Sequence
  Oligonucleotide for detection of SNP TSC0018493
gtagtggggtagg

SEQ ID NO: 71390 - DNA, 13 bp, Artificial Sequence
  Oligonucleotide for detection of SNP TSC0018493
cctaccccactac

SEQ ID NO: 71391 - DNA, 13 bp, Artificial Sequence
  Oligonucleotide for detection of SNP TSC0018495
atataaaaaaaat

SEQ ID NO: 71392 - DNA, 13 bp, Artificial Sequence
  Oligonucleotide for detection of SNP TSC0018495
attttttttatat

SEQ ID NO: 71393 - DNA, 13 bp, Artificial Sequence
  Oligonucleotide for detection of SNP TSC0018495
atataagaaaaat

SEQ ID NO: 71394 - DNA, 13 bp, Artificial Sequence
  Oligonucleotide for detection of SNP TSC0018495
atttttcttatat

SEQ ID NO: 71395 - DNA, 13 bp, Artificial Sequence
  Oligonucleotide for detection of SNP TSC0018496
aagttttgtggtg

SEQ ID NO: 71396 - DNA, 13 bp, Artificial Sequence
  Oligonucleotide for detection of SNP TSC0018496
caccacaaaactt

SEQ ID NO: 71397 - DNA, 13 bp, Artificial Sequence
  Oligonucleotide for detection of SNP TSC0018496
aagtttcgtggtg

SEQ ID NO: 71398 - DNA, 13 bp, Artificial Sequence
  Oligonucleotide for detection of SNP TSC0018496
caccacgaaactt

SEQ ID NO: 71399 - DNA, 13 bp, Artificial Sequence
  Oligonucleotide for detection of SNP TSC0018496
aagttttgtggcg

SEQ ID NO: 71400 - DNA, 13 bp, Artificial Sequence
  Oligonucleotide for detection of SNP TSC0018496
cgccacaaaactt

SEQ ID NO: 71401 - DNA, 13 bp, Artificial Sequence
  Oligonucleotide for detection of SNP TSC0018496
aagtttcgtggcg

SEQ ID NO: 71402 - DNA, 13 bp, Artificial Sequence
  Oligonucleotide for detection of SNP TSC0018496
cgccacgaaactt

SEQ ID NO: 71403 - DNA, 13 bp, Artificial Sequence
  Oligonucleotide for detection of SNP TSC0018496
tgttatggagttt

SEQ ID NO: 71404 - DNA, 13 bp, Artificial Sequence
  Oligonucleotide for detection of SNP TSC0018496
aaactccataaca

SEQ ID NO: 71405 - DNA, 13 bp, Artificial Sequence
  Oligonucleotide for detection of SNP TSC0018496
tgttatagagttt

SEQ ID NO: 71406 - DNA, 13 bp, Artificial Sequence
  Oligonucleotide for detection of SNP TSC0018496
aaactctataaca

SEQ ID NO: 71407 - DNA, 13 bp, Artificial Sequence
  Oligonucleotide for detection of SNP TSC0018496
cgttatggagttt

SEQ ID NO: 71408 - DNA, 13 bp, Artificial Sequence
  Oligonucleotide for detection of SNP TSC0018496
aaactccataacg

SEQ ID NO: 71409 - DNA, 13 bp, Artificial Sequence
  Oligonucleotide for detection of SNP TSC0018496
cgttatagagttt

SEQ ID NO: 71410 - DNA, 13 bp, Artificial Sequence
  Oligonucleotide for detection of SNP TSC0018496
aaactctataacg

SEQ ID NO: 71411 - DNA, 13 bp, Artificial Sequence
  Oligonucleotide for detection of SNP TSC0018496
tgttacggagttt

SEQ ID NO: 71412 - DNA, 13 bp, Artificial Sequence
  Oligonucleotide for detection of SNP TSC0018496
aaactccgtaaca

SEQ ID NO: 71413 - DNA, 13 bp, Artificial Sequence
  Oligonucleotide for detection of SNP TSC0018496
cgttacggagttt

SEQ ID NO: 71414 - DNA, 13 bp, Artificial Sequence
  Oligonucleotide for detection of SNP TSC0018496
aaactccgtaacg

SEQ ID NO: 71415 - DNA, 13 bp, Artificial Sequence
  Oligonucleotide for detection of SNP TSC0018497
tttttagatagta

SEQ ID NO: 71416 - DNA, 13 bp, Artificial Sequence
  Oligonucleotide for detection of SNP TSC0018497
tactatctaaaaa

SEQ ID NO: 71417 - DNA, 13 bp, Artificial Sequence
  Oligonucleotide for detection of SNP TSC0018497
tttttaaatagta

SEQ ID NO: 71418 - DNA, 13 bp, Artificial Sequence
  Oligonucleotide for detection of SNP TSC0018497
tactatttaaaaa

SEQ ID NO: 71419 - DNA, 13 bp, Artificial Sequence
  Oligonucleotide for detection of SNP TSC0018498
tggtttggattty

SEQ ID NO: 71420 - DNA, 13 bp, Artificial Sequence
  Oligonucleotide for detection of SNP TSC0018498
raaatccaaacca

SEQ ID NO: 71421 - DNA, 13 bp, Artificial Sequence
  Oligonucleotide for detection of SNP TSC0018498
gagatttagatta

SEQ ID NO: 71422 - DNA, 13 bp, Artificial Sequence
  Oligonucleotide for detection of SNP TSC0018498
taatctaaatctc

SEQ ID NO: 71423 - DNA, 13 bp, Artificial Sequence
  Oligonucleotide for detection of SNP TSC0018499
gttataggtagaa

SEQ ID NO: 71424 - DNA, 13 bp, Artificial Sequence
  Oligonucleotide for detection of SNP TSC0018499
ttctacctataac

SEQ ID NO: 71425 - DNA, 13 bp, Artificial Sequence
  Oligonucleotide for detection of SNP TSC0018499
gttatatgtagaa

SEQ ID NO: 71426 - DNA, 13 bp, Artificial Sequence
  Oligonucleotide for detection of SNP TSC0018499
ttctacatataac

SEQ ID NO: 71427 - DNA, 13 bp, Artificial Sequence
  Oligonucleotide for detection of SNP TSC0018499
ttttatttatagy

SEQ ID NO: 71428 - DNA, 13 bp, Artificial Sequence
  Oligonucleotide for detection of SNP TSC0018499
rctataaataaaa

SEQ ID NO: 71429 - DNA, 13 bp, Artificial Sequence
  Oligonucleotide for detection of SNP TSC0018499
ttttatatatagy

SEQ ID NO: 71430 - DNA, 13 bp, Artificial Sequence
  Oligonucleotide for detection of SNP TSC0018499
rctatatataaaa

SEQ ID NO: 71431 - DNA, 13 bp, Artificial Sequence
  Oligonucleotide for detection of SNP TSC0018500
aaagggaaaattt

SEQ ID NO: 71432 - DNA, 13 bp, Artificial Sequence
  Oligonucleotide for detection of SNP TSC0018500
aaattttcccttt

SEQ ID NO: 71433 - DNA, 13 bp, Artificial Sequence
  Oligonucleotide for detection of SNP TSC0018500
aaaggggaaattt

SEQ ID NO: 71434 - DNA, 13 bp, Artificial Sequence
  Oligonucleotide for detection of SNP TSC0018500
aaatttccccttt

SEQ ID NO: 71435 - DNA, 13 bp, Artificial Sequence
  Oligonucleotide for detection of SNP TSC0018501
ttaagttgggttt

SEQ ID NO: 71436 - DNA, 13 bp, Artificial Sequence
  Oligonucleotide for detection of SNP TSC0018501
aaacccaacttaa

SEQ ID NO: 71437 - DNA, 13 bp, Artificial Sequence
  Oligonucleotide for detection of SNP TSC0018501
ttaagtggggttt

SEQ ID NO: 71438 - DNA, 13 bp, Artificial Sequence
  Oligonucleotide for detection of SNP TSC0018501
aaaccccacttaa

SEQ ID NO: 71439 - DNA, 13 bp, Artificial Sequence
  Oligonucleotide for detection of SNP TSC0018501
ttaagtcgggttt

SEQ ID NO: 71440 - DNA, 13 bp, Artificial Sequence
  Oligonucleotide for detection of SNP TSC0018501
aaacccgacttaa

SEQ ID NO: 71441 - DNA, 13 bp, Artificial Sequence
  Oligonucleotide for detection of SNP TSC0018501
aagtttgatttga

SEQ ID NO: 71442 - DNA, 13 bp, Artificial Sequence
  Oligonucleotide for detection of SNP TSC0018501
tcaaatcaaactt

SEQ ID NO: 71443 - DNA, 13 bp, Artificial Sequence
  Oligonucleotide for detection of SNP TSC0018501
aagttttatttga

SEQ ID NO: 71444 - DNA, 13 bp, Artificial Sequence
  Oligonucleotide for detection of SNP TSC0018501
tcaaataaaactt

SEQ ID NO: 71445 - DNA, 13 bp, Artificial Sequence
  Oligonucleotide for detection of SNP TSC0018501
aagttcgatttga

SEQ ID NO: 71446 - DNA, 13 bp, Artificial Sequence
  Oligonucleotide for detection of SNP TSC0018501
tcaaatcgaactt

SEQ ID NO: 71447 - DNA, 13 bp, Artificial Sequence
  Oligonucleotide for detection of SNP TSC0018502
tttagatgttttg

SEQ ID NO: 71448 - DNA, 13 bp, Artificial Sequence
  Oligonucleotide for detection of SNP TSC0018502
caaaacatctaaa

SEQ ID NO: 71449 - DNA, 13 bp, Artificial Sequence
  Oligonucleotide for detection of SNP TSC0018502
tttagacgttttg

SEQ ID NO: 71450 - DNA, 13 bp, Artificial Sequence
  Oligonucleotide for detection of SNP TSC0018502
caaaacgtctaaa

SEQ ID NO: 71451 - DNA, 13 bp, Artificial Sequence
  Oligonucleotide for detection of SNP TSC0018502
taagatgtttgag

SEQ ID NO: 71452 - DNA, 13 bp, Artificial Sequence
  Oligonucleotide for detection of SNP TSC0018502
ctcaaacatctta

SEQ ID NO: 71453 - DNA, 13 bp, Artificial Sequence
  Oligonucleotide for detection of SNP TSC0018502
taagatatttgag

SEQ ID NO: 71454 - DNA, 13 bp, Artificial Sequence
  Oligonucleotide for detection of SNP TSC0018502
ctcaaatatctta

SEQ ID NO: 71455 - DNA, 13 bp, Artificial Sequence
  Oligonucleotide for detection of SNP TSC0018502
taagacgtttgag

SEQ ID NO: 71456 - DNA, 13 bp, Artificial Sequence
  Oligonucleotide for detection of SNP TSC0018502
ctcaaacgtctta

SEQ ID NO: 71457 - DNA, 13 bp, Artificial Sequence
  Oligonucleotide for detection of SNP TSC0018503
ttagttaggatay

SEQ ID NO: 71458 - DNA, 13 bp, Artificial Sequence
  Oligonucleotide for detection of SNP TSC0018503
rtatcctaactaa

SEQ ID NO: 71459 - DNA, 13 bp, Artificial Sequence
  Oligonucleotide for detection of SNP TSC0018503
ttagttgggatay

SEQ ID NO: 71460 - DNA, 13 bp, Artificial Sequence
  Oligonucleotide for detection of SNP TSC0018503
rtatcccaactaa

SEQ ID NO: 71461 - DNA, 13 bp, Artificial Sequence
  Oligonucleotide for detection of SNP TSC0018503
ttagtcgggatay

SEQ ID NO: 71462 - DNA, 13 bp, Artificial Sequence
  Oligonucleotide for detection of SNP TSC0018503
rtatcccgactaa

SEQ ID NO: 71463 - DNA, 13 bp, Artificial Sequence
  Oligonucleotide for detection of SNP TSC0018503
gtgttttggttga

SEQ ID NO: 71464 - DNA, 13 bp, Artificial Sequence
  Oligonucleotide for detection of SNP TSC0018503
tcaaccaaaacac

SEQ ID NO: 71465 - DNA, 13 bp, Artificial Sequence
  Oligonucleotide for detection of SNP TSC0018503
gtgtttcggttga

SEQ ID NO: 71466 - DNA, 13 bp, Artificial Sequence
  Oligonucleotide for detection of SNP TSC0018503
tcaaccgaaacac

SEQ ID NO: 71467 - DNA, 13 bp, Artificial Sequence
  Oligonucleotide for detection of SNP TSC0018507
tagagggtgttaa

SEQ ID NO: 71468 - DNA, 13 bp, Artificial Sequence
  Oligonucleotide for detection of SNP TSC0018507
ttaacaccctcta

SEQ ID NO: 71469 - DNA, 13 bp, Artificial Sequence
  Oligonucleotide for detection of SNP TSC0018507
tagaggatgttaa

SEQ ID NO: 71470 - DNA, 13 bp, Artificial Sequence
  Oligonucleotide for detection of SNP TSC0018507
ttaacatcctcta

SEQ ID NO: 71471 - DNA, 13 bp, Artificial Sequence
  Oligonucleotide for detection of SNP TSC0018508
aggtgtatattay

SEQ ID NO: 71472 - DNA, 13 bp, Artificial Sequence
  Oligonucleotide for detection of SNP TSC0018508
rtaatatacacct

SEQ ID NO: 71473 - DNA, 13 bp, Artificial Sequence
  Oligonucleotide for detection of SNP TSC0018508
aggtgtgtattay

SEQ ID NO: 71474 - DNA, 13 bp, Artificial Sequence
  Oligonucleotide for detection of SNP TSC0018508
rtaatacacacct

SEQ ID NO: 71475 - DNA, 13 bp, Artificial Sequence
  Oligonucleotide for detection of SNP TSC0018508
aggcgtatattay

SEQ ID NO: 71476 - DNA, 13 bp, Artificial Sequence
  Oligonucleotide for detection of SNP TSC0018508
rtaatatacgcct

SEQ ID NO: 71477 - DNA, 13 bp, Artificial Sequence
  Oligonucleotide for detection of SNP TSC0018508
aggcgtgtattay

SEQ ID NO: 71478 - DNA, 13 bp, Artificial Sequence
  Oligonucleotide for detection of SNP TSC0018508
rtaatacacgcct

SEQ ID NO: 71479 - DNA, 13 bp, Artificial Sequence
  Oligonucleotide for detection of SNP TSC0018508
aggtgcgtattay

SEQ ID NO: 71480 - DNA, 13 bp, Artificial Sequence
  Oligonucleotide for detection of SNP TSC0018508
rtaatacgcacct

SEQ ID NO: 71481 - DNA, 13 bp, Artificial Sequence
  Oligonucleotide for detection of SNP TSC0018508
aggcgcgtattay

SEQ ID NO: 71482 - DNA, 13 bp, Artificial Sequence
  Oligonucleotide for detection of SNP TSC0018508
rtaatacgcgcct

SEQ ID NO: 71483 - DNA, 13 bp, Artificial Sequence
  Oligonucleotide for detection of SNP TSC0018508
gtaatgtgtgttt

SEQ ID NO: 71484 - DNA, 13 bp, Artificial Sequence
  Oligonucleotide for detection of SNP TSC0018508
aaacacacattac

SEQ ID NO: 71485 - DNA, 13 bp, Artificial Sequence
  Oligonucleotide for detection of SNP TSC0018508
gtaatgtgcgttt

SEQ ID NO: 71486 - DNA, 13 bp, Artificial Sequence
  Oligonucleotide for detection of SNP TSC0018508
aaacgcacattac

SEQ ID NO: 71487 - DNA, 13 bp, Artificial Sequence
  Oligonucleotide for detection of SNP TSC0018508
gtaatgcgtgttt

SEQ ID NO: 71488 - DNA, 13 bp, Artificial Sequence
  Oligonucleotide for detection of SNP TSC0018508
aaacacgcattac

SEQ ID NO: 71489 - DNA, 13 bp, Artificial Sequence
  Oligonucleotide for detection of SNP TSC0018508
gtaatgcgcgttt

SEQ ID NO: 71490 - DNA, 13 bp, Artificial Sequence
  Oligonucleotide for detection of SNP TSC0018508
aaacgcgcattac

SEQ ID NO: 71491 - DNA, 13 bp, Artificial Sequence
  Oligonucleotide for detection of SNP TSC0018509
agaataagtttag

SEQ ID NO: 71492 - DNA, 13 bp, Artificial Sequence
  Oligonucleotide for detection of SNP TSC0018509
ctaaacttattct

SEQ ID NO: 71493 - DNA, 13 bp, Artificial Sequence
  Oligonucleotide for detection of SNP TSC0018509
agaataggtttag

SEQ ID NO: 71494 - DNA, 13 bp, Artificial Sequence
  Oligonucleotide for detection of SNP TSC0018509
ctaaacctattct

SEQ ID NO: 71495 - DNA, 13 bp, Artificial Sequence
  Oligonucleotide for detection of SNP TSC0018510
ggttttattttay

SEQ ID NO: 71496 - DNA, 13 bp, Artificial Sequence
  Oligonucleotide for detection of SNP TSC0018510
rtaaaataaaacc

SEQ ID NO: 71497 - DNA, 13 bp, Artificial Sequence
  Oligonucleotide for detection of SNP TSC0018510
ggtttttttttay

SEQ ID NO: 71498 - DNA, 13 bp, Artificial Sequence
  Oligonucleotide for detection of SNP TSC0018510
rtaaaaaaaaacc

SEQ ID NO: 71499 - DNA, 13 bp, Artificial Sequence
  Oligonucleotide for detection of SNP TSC0018510
gtgggatgaagty

SEQ ID NO: 71500 - DNA, 13 bp, Artificial Sequence
  Oligonucleotide for detection of SNP TSC0018510
racttcatcccac

SEQ ID NO: 71501 - DNA, 13 bp, Artificial Sequence
  Oligonucleotide for detection of SNP TSC0018510
gtgggaggaagty

SEQ ID NO: 71502 - DNA, 13 bp, Artificial Sequence
  Oligonucleotide for detection of SNP TSC0018510
racttcctcccac

SEQ ID NO: 71503 - DNA, 13 bp, Artificial Sequence
  Oligonucleotide for detection of SNP TSC0018511
tttagagtatatt

SEQ ID NO: 71504 - DNA, 13 bp, Artificial Sequence
  Oligonucleotide for detection of SNP TSC0018511
aatatactctaaa

SEQ ID NO: 71505 - DNA, 13 bp, Artificial Sequence
  Oligonucleotide for detection of SNP TSC0018511
tttagaatatatt

SEQ ID NO: 71506 - DNA, 13 bp, Artificial Sequence
  Oligonucleotide for detection of SNP TSC0018511
aatatattctaaa

SEQ ID NO: 71507 - DNA, 13 bp, Artificial Sequence
  Oligonucleotide for detection of SNP TSC0018512
gtatgaggaagtg

SEQ ID NO: 71508 - DNA, 13 bp, Artificial Sequence
  Oligonucleotide for detection of SNP TSC0018512
cacttcctcatac

SEQ ID NO: 71509 - DNA, 13 bp, Artificial Sequence
  Oligonucleotide for detection of SNP TSC0018512
gtatgaagaagtg

SEQ ID NO: 71510 - DNA, 13 bp, Artificial Sequence
  Oligonucleotide for detection of SNP TSC0018512
cacttcttcatac

SEQ ID NO: 71511 - DNA, 13 bp, Artificial Sequence
  Oligonucleotide for detection of SNP TSC0018513
aatgtaggtggty

SEQ ID NO: 71512 - DNA, 13 bp, Artificial Sequence
  Oligonucleotide for detection of SNP TSC0018513
raccacctacatt

SEQ ID NO: 71513 - DNA, 13 bp, Artificial Sequence
  Oligonucleotide for detection of SNP TSC0018513
aatgtaagtggty

SEQ ID NO: 71514 - DNA, 13 bp, Artificial Sequence
  Oligonucleotide for detection of SNP TSC0018513
raccacttacatt

SEQ ID NO: 71515 - DNA, 13 bp, Artificial Sequence
  Oligonucleotide for detection of SNP TSC0018514
ttggttatattty

SEQ ID NO: 71516 - DNA, 13 bp, Artificial Sequence
  Oligonucleotide for detection of SNP TSC0018514
raaatataaccaa

SEQ ID NO: 71517 - DNA, 13 bp, Artificial Sequence
  Oligonucleotide for detection of SNP TSC0018514
ttggttgtattty

SEQ ID NO: 71518 - DNA, 13 bp, Artificial Sequence
  Oligonucleotide for detection of SNP TSC0018514
raaatacaaccaa

SEQ ID NO: 71519 - DNA, 13 bp, Artificial Sequence
  Oligonucleotide for detection of SNP TSC0018515
agaataaatgttt

SEQ ID NO: 71520 - DNA, 13 bp, Artificial Sequence
  Oligonucleotide for detection of SNP TSC0018515
aaacatttattct

SEQ ID NO: 71521 - DNA, 13 bp, Artificial Sequence
  Oligonucleotide for detection of SNP TSC0018515
agaatagatgttt

SEQ ID NO: 71522 - DNA, 13 bp, Artificial Sequence
  Oligonucleotide for detection of SNP TSC0018515
aaacatctattct

SEQ ID NO: 71523 - DNA, 13 bp, Artificial Sequence
  Oligonucleotide for detection of SNP TSC0018517
gtttttatgtgaa

SEQ ID NO: 71524 - DNA, 13 bp, Artificial Sequence
  Oligonucleotide for detection of SNP TSC0018517
ttcacataaaaac

SEQ ID NO: 71525 - DNA, 13 bp, Artificial Sequence
  Oligonucleotide for detection of SNP TSC0018517
gtttttgtgtgaa

SEQ ID NO: 71526 - DNA, 13 bp, Artificial Sequence
  Oligonucleotide for detection of SNP TSC0018517
ttcacacaaaaac

SEQ ID NO: 71527 - DNA, 13 bp, Artificial Sequence
  Oligonucleotide for detection of SNP TSC0018517
gttttcgtgtgaa

SEQ ID NO: 71528 - DNA, 13 bp, Artificial Sequence
  Oligonucleotide for detection of SNP TSC0018517
ttcacacgaaaac

SEQ ID NO: 71529 - DNA, 13 bp, Artificial Sequence
  Oligonucleotide for detection of SNP TSC0018517
tttatatgaaaay

SEQ ID NO: 71530 - DNA, 13 bp, Artificial Sequence
  Oligonucleotide for detection of SNP TSC0018517
rttttcatataaa

SEQ ID NO: 71531 - DNA, 13 bp, Artificial Sequence
  Oligonucleotide for detection of SNP TSC0018517
tttatacgaaaay

SEQ ID NO: 71532 - DNA, 13 bp, Artificial Sequence
  Oligonucleotide for detection of SNP TSC0018517
rttttcgtataaa

SEQ ID NO: 71533 - DNA, 13 bp, Artificial Sequence
  Oligonucleotide for detection of SNP TSC0018518
ttattagttaatg

SEQ ID NO: 71534 - DNA, 13 bp, Artificial Sequence
  Oligonucleotide for detection of SNP TSC0018518
cattaactaataa

SEQ ID NO: 71535 - DNA, 13 bp, Artificial Sequence
  Oligonucleotide for detection of SNP TSC0018518
ttattaattaatg

SEQ ID NO: 71536 - DNA, 13 bp, Artificial Sequence
  Oligonucleotide for detection of SNP TSC0018518
cattaattaataa

SEQ ID NO: 71537 - DNA, 13 bp, Artificial Sequence
  Oligonucleotide for detection of SNP TSC0018519
ttttttagtttag

SEQ ID NO: 71538 - DNA, 13 bp, Artificial Sequence
  Oligonucleotide for detection of SNP TSC0018519
ctaaactaaaaaa

SEQ ID NO: 71539 - DNA, 13 bp, Artificial Sequence
  Oligonucleotide for detection of SNP TSC0018519
ttgaattgggaaa

SEQ ID NO: 71540 - DNA, 13 bp, Artificial Sequence
  Oligonucleotide for detection of SNP TSC0018519
tttcccaattcaa

SEQ ID NO: 71541 - DNA, 13 bp, Artificial Sequence
  Oligonucleotide for detection of SNP TSC0018519
ttgaatagggaaa

SEQ ID NO: 71542 - DNA, 13 bp, Artificial Sequence
  Oligonucleotide for detection of SNP TSC0018519
tttccctattcaa

SEQ ID NO: 71543 - DNA, 13 bp, Artificial Sequence
  Oligonucleotide for detection of SNP TSC0018520
gagatatagtttt

SEQ ID NO: 71544 - DNA, 13 bp, Artificial Sequence
  Oligonucleotide for detection of SNP TSC0018520
aaaactatatctc

SEQ ID NO: 71545 - DNA, 13 bp, Artificial Sequence
  Oligonucleotide for detection of SNP TSC0018520
gagatagagtttt

SEQ ID NO: 71546 - DNA, 13 bp, Artificial Sequence
  Oligonucleotide for detection of SNP TSC0018520
aaaactctatctc

SEQ ID NO: 71547 - DNA, 13 bp, Artificial Sequence
  Oligonucleotide for detection of SNP TSC0018520
aagattgtgttty

SEQ ID NO: 71548 - DNA, 13 bp, Artificial Sequence
  Oligonucleotide for detection of SNP TSC0018520
raaacacaatctt

SEQ ID NO: 71549 - DNA, 13 bp, Artificial Sequence
  Oligonucleotide for detection of SNP TSC0018520
aagattttgttty

SEQ ID NO: 71550 - DNA, 13 bp, Artificial Sequence
  Oligonucleotide for detection of SNP TSC0018520
raaacaaaatctt

SEQ ID NO: 71551 - DNA, 13 bp, Artificial Sequence
  Oligonucleotide for detection of SNP TSC0018521
gtttgtgttgtgy

SEQ ID NO: 71552 - DNA, 13 bp, Artificial Sequence
  Oligonucleotide for detection of SNP TSC0018521
rcacaacacaaac

SEQ ID NO: 71553 - DNA, 13 bp, Artificial Sequence
  Oligonucleotide for detection of SNP TSC0018521
gtttgtattgtgy

SEQ ID NO: 71554 - DNA, 13 bp, Artificial Sequence
  Oligonucleotide for detection of SNP TSC0018521
rcacaatacaaac

SEQ ID NO: 71555 - DNA, 13 bp, Artificial Sequence
  Oligonucleotide for detection of SNP TSC0018521
gtttgtgttgcgy

SEQ ID NO: 71556 - DNA, 13 bp, Artificial Sequence
  Oligonucleotide for detection of SNP TSC0018521
rcgcaacacaaac

SEQ ID NO: 71557 - DNA, 13 bp, Artificial Sequence
  Oligonucleotide for detection of SNP TSC0018521
gtttgtattgcgy

SEQ ID NO: 71558 - DNA, 13 bp, Artificial Sequence
  Oligonucleotide for detection of SNP TSC0018521
rcgcaatacaaac

SEQ ID NO: 71559 - DNA, 13 bp, Artificial Sequence
  Oligonucleotide for detection of SNP TSC0018522
ttttttttggtay

SEQ ID NO: 71560 - DNA, 13 bp, Artificial Sequence
  Oligonucleotide for detection of SNP TSC0018522
rtaccaaaaaaaa

SEQ ID NO: 71561 - DNA, 13 bp, Artificial Sequence
  Oligonucleotide for detection of SNP TSC0018522
ttttttgtggtay

SEQ ID NO: 71562 - DNA, 13 bp, Artificial Sequence
  Oligonucleotide for detection of SNP TSC0018522
rtaccacaaaaaa

SEQ ID NO: 71563 - DNA, 13 bp, Artificial Sequence
  Oligonucleotide for detection of SNP TSC0018522
tttttttcggtay

SEQ ID NO: 71564 - DNA, 13 bp, Artificial Sequence
  Oligonucleotide for detection of SNP TSC0018522
rtaccgaaaaaaa

SEQ ID NO: 71565 - DNA, 13 bp, Artificial Sequence
  Oligonucleotide for detection of SNP TSC0018522
tttttcgtggtay

SEQ ID NO: 71566 - DNA, 13 bp, Artificial Sequence
  Oligonucleotide for detection of SNP TSC0018522
rtaccacgaaaaa

SEQ ID NO: 71567 - DNA, 13 bp, Artificial Sequence
  Oligonucleotide for detection of SNP TSC0018522
ttttttgcggtay

SEQ ID NO: 71568 - DNA, 13 bp, Artificial Sequence
  Oligonucleotide for detection of SNP TSC0018522
rtaccgcaaaaaa

SEQ ID NO: 71569 - DNA, 13 bp, Artificial Sequence
  Oligonucleotide for detection of SNP TSC0018522
tttttcgcggtay

SEQ ID NO: 71570 - DNA, 13 bp, Artificial Sequence
  Oligonucleotide for detection of SNP TSC0018522
rtaccgcgaaaaa

SEQ ID NO: 71571 - DNA, 13 bp, Artificial Sequence
  Oligonucleotide for detection of SNP TSC0018522
gtgttgggaaaag

SEQ ID NO: 71572 - DNA, 13 bp, Artificial Sequence
  Oligonucleotide for detection of SNP TSC0018522
cttttcccaacac

SEQ ID NO: 71573 - DNA, 13 bp, Artificial Sequence
  Oligonucleotide for detection of SNP TSC0018522
gtgttgtgaaaag

SEQ ID NO: 71574 - DNA, 13 bp, Artificial Sequence
  Oligonucleotide for detection of SNP TSC0018522
cttttcacaacac

SEQ ID NO: 71575 - DNA, 13 bp, Artificial Sequence
  Oligonucleotide for detection of SNP TSC0018522
gtgtcgggaaaag

SEQ ID NO: 71576 - DNA, 13 bp, Artificial Sequence
  Oligonucleotide for detection of SNP TSC0018522
cttttcccgacac

SEQ ID NO: 71577 - DNA, 13 bp, Artificial Sequence
  Oligonucleotide for detection of SNP TSC0018522
gtgtcgtgaaaag

SEQ ID NO: 71578 - DNA, 13 bp, Artificial Sequence
  Oligonucleotide for detection of SNP TSC0018522
cttttcacgacac

SEQ ID NO: 71579 - DNA, 13 bp, Artificial Sequence
  Oligonucleotide for detection of SNP TSC0018522
gtgttgcgaaaag

SEQ ID NO: 71580 - DNA, 13 bp, Artificial Sequence
  Oligonucleotide for detection of SNP TSC0018522
cttttcgcaacac

SEQ ID NO: 71581 - DNA, 13 bp, Artificial Sequence
  Oligonucleotide for detection of SNP TSC0018522
gtgtcgcgaaaag

SEQ ID NO: 71582 - DNA, 13 bp, Artificial Sequence
  Oligonucleotide for detection of SNP TSC0018522
cttttcgcgacac

SEQ ID NO: 71583 - DNA, 13 bp, Artificial Sequence
  Oligonucleotide for detection of SNP TSC0018523
aattgagggtata

SEQ ID NO: 71584 - DNA, 13 bp, Artificial Sequence
  Oligonucleotide for detection of SNP TSC0018523
tataccctcaatt

SEQ ID NO: 71585 - DNA, 13 bp, Artificial Sequence
  Oligonucleotide for detection of SNP TSC0018523
aattgaaggtata

SEQ ID NO: 71586 - DNA, 13 bp, Artificial Sequence
  Oligonucleotide for detection of SNP TSC0018523
tataccttcaatt

SEQ ID NO: 71587 - DNA, 13 bp, Artificial Sequence
  Oligonucleotide for detection of SNP TSC0018523
aatcgagggtata

SEQ ID NO: 71588 - DNA, 13 bp, Artificial Sequence
  Oligonucleotide for detection of SNP TSC0018523
tataccctcgatt

SEQ ID NO: 71589 - DNA, 13 bp, Artificial Sequence
  Oligonucleotide for detection of SNP TSC0018523
aatcgaaggtata

SEQ ID NO: 71590 - DNA, 13 bp, Artificial Sequence
  Oligonucleotide for detection of SNP TSC0018523
tataccttcgatt

SEQ ID NO: 71591 - DNA, 13 bp, Artificial Sequence
  Oligonucleotide for detection of SNP TSC0018524
ttttgggttattt

SEQ ID NO: 71592 - DNA, 13 bp, Artificial Sequence
  Oligonucleotide for detection of SNP TSC0018524
aaataacccaaaa

SEQ ID NO: 71593 - DNA, 13 bp, Artificial Sequence
  Oligonucleotide for detection of SNP TSC0018524
ttttggattattt

SEQ ID NO: 71594 - DNA, 13 bp, Artificial Sequence
  Oligonucleotide for detection of SNP TSC0018524
aaataatccaaaa

SEQ ID NO: 71595 - DNA, 13 bp, Artificial Sequence
  Oligonucleotide for detection of SNP TSC0018524
tttcgggttattt

SEQ ID NO: 71596 - DNA, 13 bp, Artificial Sequence
  Oligonucleotide for detection of SNP TSC0018524
aaataacccgaaa

SEQ ID NO: 71597 - DNA, 13 bp, Artificial Sequence
  Oligonucleotide for detection of SNP TSC0018524
tttcggattattt

SEQ ID NO: 71598 - DNA, 13 bp, Artificial Sequence
  Oligonucleotide for detection of SNP TSC0018524
aaataatccgaaa

SEQ ID NO: 71599 - DNA, 13 bp, Artificial Sequence
  Oligonucleotide for detection of SNP TSC0018530
taagtttatttgy

SEQ ID NO: 71600 - DNA, 13 bp, Artificial Sequence
  Oligonucleotide for detection of SNP TSC0018530
rcaaataaactta

SEQ ID NO: 71601 - DNA, 13 bp, Artificial Sequence
  Oligonucleotide for detection of SNP TSC0018530
taagttgatttgy

SEQ ID NO: 71602 - DNA, 13 bp, Artificial Sequence
  Oligonucleotide for detection of SNP TSC0018530
rcaaatcaactta

SEQ ID NO: 71603 - DNA, 13 bp, Artificial Sequence
  Oligonucleotide for detection of SNP TSC0018530
gtaaatgaatttg

SEQ ID NO: 71604 - DNA, 13 bp, Artificial Sequence
  Oligonucleotide for detection of SNP TSC0018530
caaattcatttac

SEQ ID NO: 71605 - DNA, 13 bp, Artificial Sequence
  Oligonucleotide for detection of SNP TSC0018530
gtaaattaatttg

SEQ ID NO: 71606 - DNA, 13 bp, Artificial Sequence
  Oligonucleotide for detection of SNP TSC0018530
caaattaatttac

SEQ ID NO: 71607 - DNA, 13 bp, Artificial Sequence
  Oligonucleotide for detection of SNP TSC0018531
tatttagtgataa

SEQ ID NO: 71608 - DNA, 13 bp, Artificial Sequence
  Oligonucleotide for detection of SNP TSC0018531
ttatcactaaata

SEQ ID NO: 71609 - DNA, 13 bp, Artificial Sequence
  Oligonucleotide for detection of SNP TSC0018531
tatttaatgataa

SEQ ID NO: 71610 - DNA, 13 bp, Artificial Sequence
  Oligonucleotide for detection of SNP TSC0018531
ttatcattaaata

SEQ ID NO: 71611 - DNA, 13 bp, Artificial Sequence
  Oligonucleotide for detection of SNP TSC0018532
ttattggttaaay

SEQ ID NO: 71612 - DNA, 13 bp, Artificial Sequence
  Oligonucleotide for detection of SNP TSC0018532
rtttaaccaataa

SEQ ID NO: 71613 - DNA, 13 bp, Artificial Sequence
  Oligonucleotide for detection of SNP TSC0018532
ttattgtttaaay

SEQ ID NO: 71614 - DNA, 13 bp, Artificial Sequence
  Oligonucleotide for detection of SNP TSC0018532
rtttaaacaataa

SEQ ID NO: 71615 - DNA, 13 bp, Artificial Sequence
  Oligonucleotide for detection of SNP TSC0018532
gtttggttagtaa

SEQ ID NO: 71616 - DNA, 13 bp, Artificial Sequence
  Oligonucleotide for detection of SNP TSC0018532
ttactaaccaaac

SEQ ID NO: 71617 - DNA, 13 bp, Artificial Sequence
  Oligonucleotide for detection of SNP TSC0018532
gtttggatagtaa

SEQ ID NO: 71618 - DNA, 13 bp, Artificial Sequence
  Oligonucleotide for detection of SNP TSC0018532
ttactatccaaac

SEQ ID NO: 71619 - DNA, 13 bp, Artificial Sequence
  Oligonucleotide for detection of SNP TSC0018533
gtatgtatatata

SEQ ID NO: 71620 - DNA, 13 bp, Artificial Sequence
  Oligonucleotide for detection of SNP TSC0018533
tatatatacatac

SEQ ID NO: 71621 - DNA, 13 bp, Artificial Sequence
  Oligonucleotide for detection of SNP TSC0018533
gtatgtttatata

SEQ ID NO: 71622 - DNA, 13 bp, Artificial Sequence
  Oligonucleotide for detection of SNP TSC0018533
tatataaacatac

SEQ ID NO: 71623 - DNA, 13 bp, Artificial Sequence
  Oligonucleotide for detection of SNP TSC0018533
tgtatgtgtatay

SEQ ID NO: 71624 - DNA, 13 bp, Artificial Sequence
  Oligonucleotide for detection of SNP TSC0018533
rtatacacataca

SEQ ID NO: 71625 - DNA, 13 bp, Artificial Sequence
  Oligonucleotide for detection of SNP TSC0018533
tgtatgggtatay

SEQ ID NO: 71626 - DNA, 13 bp, Artificial Sequence
  Oligonucleotide for detection of SNP TSC0018533
rtatacccataca

SEQ ID NO: 71627 - DNA, 13 bp, Artificial Sequence
  Oligonucleotide for detection of SNP TSC0018534
gagtagggagtag

SEQ ID NO: 71628 - DNA, 13 bp, Artificial Sequence
  Oligonucleotide for detection of SNP TSC0018534
ctactccctactc

SEQ ID NO: 71629 - DNA, 13 bp, Artificial Sequence
  Oligonucleotide for detection of SNP TSC0018534
gagtagagagtag

SEQ ID NO: 71630 - DNA, 13 bp, Artificial Sequence
  Oligonucleotide for detection of SNP TSC0018534
ctactctctactc

SEQ ID NO: 71631 - DNA, 13 bp, Artificial Sequence
  Oligonucleotide for detection of SNP TSC0018535
ttattggttttay

SEQ ID NO: 71632 - DNA, 13 bp, Artificial Sequence
  Oligonucleotide for detection of SNP TSC0018535
rtaaaaccaataa

SEQ ID NO: 71633 - DNA, 13 bp, Artificial Sequence
  Oligonucleotide for detection of SNP TSC0018535
ttattgattttay

SEQ ID NO: 71634 - DNA, 13 bp, Artificial Sequence
  Oligonucleotide for detection of SNP TSC0018535
rtaaaatcaataa

SEQ ID NO: 71635 - DNA, 13 bp, Artificial Sequence
  Oligonucleotide for detection of SNP TSC0018536
ttaataaaaataa

SEQ ID NO: 71636 - DNA, 13 bp, Artificial Sequence
  Oligonucleotide for detection of SNP TSC0018536
ttatttttattaa

SEQ ID NO: 71637 - DNA, 13 bp, Artificial Sequence
  Oligonucleotide for detection of SNP TSC0018536
ttaatagaaataa

SEQ ID NO: 71638 - DNA, 13 bp, Artificial Sequence
  Oligonucleotide for detection of SNP TSC0018536
ttatttctattaa

SEQ ID NO: 71639 - DNA, 13 bp, Artificial Sequence
  Oligonucleotide for detection of SNP TSC0018537
tgtttagtattgy

SEQ ID NO: 71640 - DNA, 13 bp, Artificial Sequence
  Oligonucleotide for detection of SNP TSC0018537
rcaatactaaaca

SEQ ID NO: 71641 - DNA, 13 bp, Artificial Sequence
  Oligonucleotide for detection of SNP TSC0018537
tgtttaatattgy

SEQ ID NO: 71642 - DNA, 13 bp, Artificial Sequence
  Oligonucleotide for detection of SNP TSC0018537
rcaatattaaaca

SEQ ID NO: 71643 - DNA, 13 bp, Artificial Sequence
  Oligonucleotide for detection of SNP TSC0018538
aatattgtaataa

SEQ ID NO: 71644 - DNA, 13 bp, Artificial Sequence
  Oligonucleotide for detection of SNP TSC0018538
ttattacaatatt

SEQ ID NO: 71645 - DNA, 13 bp, Artificial Sequence
  Oligonucleotide for detection of SNP TSC0018538
aatattataataa

SEQ ID NO: 71646 - DNA, 13 bp, Artificial Sequence
  Oligonucleotide for detection of SNP TSC0018538
ttattataatatt

SEQ ID NO: 71647 - DNA, 13 bp, Artificial Sequence
  Oligonucleotide for detection of SNP TSC0018539
tggttggtaaagt

SEQ ID NO: 71648 - DNA, 13 bp, Artificial Sequence
  Oligonucleotide for detection of SNP TSC0018539
actttaccaacca

SEQ ID NO: 71649 - DNA, 13 bp, Artificial Sequence
  Oligonucleotide for detection of SNP TSC0018539
tggttgttaaagt

SEQ ID NO: 71650 - DNA, 13 bp, Artificial Sequence
  Oligonucleotide for detection of SNP TSC0018539
actttaacaacca

SEQ ID NO: 71651 - DNA, 13 bp, Artificial Sequence
  Oligonucleotide for detection of SNP TSC0018540
tttttaatatttg

SEQ ID NO: 71652 - DNA, 13 bp, Artificial Sequence
  Oligonucleotide for detection of SNP TSC0018540
caaatattaaaaa

SEQ ID NO: 71653 - DNA, 13 bp, Artificial Sequence
  Oligonucleotide for detection of SNP TSC0018540
tttttagtatttg

SEQ ID NO: 71654 - DNA, 13 bp, Artificial Sequence
  Oligonucleotide for detection of SNP TSC0018540
caaatactaaaaa

SEQ ID NO: 71655 - DNA, 13 bp, Artificial Sequence
  Oligonucleotide for detection of SNP TSC0018541
tagaatatttgtg

SEQ ID NO: 71656 - DNA, 13 bp, Artificial Sequence
  Oligonucleotide for detection of SNP TSC0018541
cacaaatattcta

SEQ ID NO: 71657 - DNA, 13 bp, Artificial Sequence
  Oligonucleotide for detection of SNP TSC0018541
tagaatgtttgtg

SEQ ID NO: 71658 - DNA, 13 bp, Artificial Sequence
  Oligonucleotide for detection of SNP TSC0018541
cacaaacattcta

SEQ ID NO: 71659 - DNA, 13 bp, Artificial Sequence
  Oligonucleotide for detection of SNP TSC0018541
tagaacgtttgtg

SEQ ID NO: 71660 - DNA, 13 bp, Artificial Sequence
  Oligonucleotide for detection of SNP TSC0018541
cacaaacgttcta

SEQ ID NO: 71661 - DNA, 13 bp, Artificial Sequence
  Oligonucleotide for detection of SNP TSC0018541
tataagtgttttg

SEQ ID NO: 71662 - DNA, 13 bp, Artificial Sequence
  Oligonucleotide for detection of SNP TSC0018541
caaaacacttata

SEQ ID NO: 71663 - DNA, 13 bp, Artificial Sequence
  Oligonucleotide for detection of SNP TSC0018541
tataagcgttttg

SEQ ID NO: 71664 - DNA, 13 bp, Artificial Sequence
  Oligonucleotide for detection of SNP TSC0018541
caaaacgcttata

SEQ ID NO: 71665 - DNA, 13 bp, Artificial Sequence
  Oligonucleotide for detection of SNP TSC0018542
atagaagttaaag

SEQ ID NO: 71666 - DNA, 13 bp, Artificial Sequence
  Oligonucleotide for detection of SNP TSC0018542
ctttaacttctat

SEQ ID NO: 71667 - DNA, 13 bp, Artificial Sequence
  Oligonucleotide for detection of SNP TSC0018542
atagaaattaaag

SEQ ID NO: 71668 - DNA, 13 bp, Artificial Sequence
  Oligonucleotide for detection of SNP TSC0018542
ctttaatttctat

SEQ ID NO: 71669 - DNA, 13 bp, Artificial Sequence
  Oligonucleotide for detection of SNP TSC0018543
ttttagaatgatt

SEQ ID NO: 71670 - DNA, 13 bp, Artificial Sequence
  Oligonucleotide for detection of SNP TSC0018543
aatcattctaaaa

SEQ ID NO: 71671 - DNA, 13 bp, Artificial Sequence
  Oligonucleotide for detection of SNP TSC0018543
ttttaggatgatt

SEQ ID NO: 71672 - DNA, 13 bp, Artificial Sequence
  Oligonucleotide for detection of SNP TSC0018543
aatcatcctaaaa

SEQ ID NO: 71673 - DNA, 13 bp, Artificial Sequence
  Oligonucleotide for detection of SNP TSC0018544
gtggtttgtttty

SEQ ID NO: 71674 - DNA, 13 bp, Artificial Sequence
  Oligonucleotide for detection of SNP TSC0018544
raaaacaaaccac

SEQ ID NO: 71675 - DNA, 13 bp, Artificial Sequence
  Oligonucleotide for detection of SNP TSC0018544
gtggttggtttty

SEQ ID NO: 71676 - DNA, 13 bp, Artificial Sequence
  Oligonucleotide for detection of SNP TSC0018544
raaaaccaaccac

SEQ ID NO: 71677 - DNA, 13 bp, Artificial Sequence
  Oligonucleotide for detection of SNP TSC0018544
gtggttcgtttty

SEQ ID NO: 71678 - DNA, 13 bp, Artificial Sequence
  Oligonucleotide for detection of SNP TSC0018544
raaaacgaaccac

SEQ ID NO: 71679 - DNA, 13 bp, Artificial Sequence
  Oligonucleotide for detection of SNP TSC0018544
gtggtcggtttty

SEQ ID NO: 71680 - DNA, 13 bp, Artificial Sequence
  Oligonucleotide for detection of SNP TSC0018544
raaaaccgaccac

SEQ ID NO: 71681 - DNA, 13 bp, Artificial Sequence
  Oligonucleotide for detection of SNP TSC0018544
gagagtggattay

SEQ ID NO: 71682 - DNA, 13 bp, Artificial Sequence
  Oligonucleotide for detection of SNP TSC0018544
rtaatccactctc

SEQ ID NO: 71683 - DNA, 13 bp, Artificial Sequence
  Oligonucleotide for detection of SNP TSC0018544
gagagttgattay

SEQ ID NO: 71684 - DNA, 13 bp, Artificial Sequence
  Oligonucleotide for detection of SNP TSC0018544
rtaatcaactctc

SEQ ID NO: 71685 - DNA, 13 bp, Artificial Sequence
  Oligonucleotide for detection of SNP TSC0018544
gagagcggattay

SEQ ID NO: 71686 - DNA, 13 bp, Artificial Sequence
  Oligonucleotide for detection of SNP TSC0018544
rtaatccgctctc

SEQ ID NO: 71687 - DNA, 13 bp, Artificial Sequence
  Oligonucleotide for detection of SNP TSC0018544
gagagtcgattay

SEQ ID NO: 71688 - DNA, 13 bp, Artificial Sequence
  Oligonucleotide for detection of SNP TSC0018544
rtaatcgactctc

SEQ ID NO: 71689 - DNA, 13 bp, Artificial Sequence
  Oligonucleotide for detection of SNP TSC0018547
ggtttaaaaaggt

SEQ ID NO: 71690 - DNA, 13 bp, Artificial Sequence
  Oligonucleotide for detection of SNP TSC0018547
acctttttaaacc

SEQ ID NO: 71691 - DNA, 13 bp, Artificial Sequence
  Oligonucleotide for detection of SNP TSC0018547
ggtttagaaaggt

SEQ ID NO: 71692 - DNA, 13 bp, Artificial Sequence
  Oligonucleotide for detection of SNP TSC0018547
acctttctaaacc

SEQ ID NO: 71693 - DNA, 13 bp, Artificial Sequence
  Oligonucleotide for detection of SNP TSC0018548
ttttaggtagagg

SEQ ID NO: 71694 - DNA, 13 bp, Artificial Sequence
  Oligonucleotide for detection of SNP TSC0018548
cctctacctaaaa

SEQ ID NO: 71695 - DNA, 13 bp, Artificial Sequence
  Oligonucleotide for detection of SNP TSC0018548
ttttagatagagg

SEQ ID NO: 71696 - DNA, 13 bp, Artificial Sequence
  Oligonucleotide for detection of SNP TSC0018548
cctctatctaaaa

SEQ ID NO: 71697 - DNA, 13 bp, Artificial Sequence
  Oligonucleotide for detection of SNP TSC0018549
atttattgtatty

SEQ ID NO: 71698 - DNA, 13 bp, Artificial Sequence
  Oligonucleotide for detection of SNP TSC0018549
raatacaataaat

SEQ ID NO: 71699 - DNA, 13 bp, Artificial Sequence
  Oligonucleotide for detection of SNP TSC0018549
atttatcgtatty

SEQ ID NO: 71700 - DNA, 13 bp, Artificial Sequence
  Oligonucleotide for detection of SNP TSC0018549
raatacgataaat

SEQ ID NO: 71701 - DNA, 13 bp, Artificial Sequence
  Oligonucleotide for detection of SNP TSC0018549
gaatatggtgagt

SEQ ID NO: 71702 - DNA, 13 bp, Artificial Sequence
  Oligonucleotide for detection of SNP TSC0018549
actcaccatattc

SEQ ID NO: 71703 - DNA, 13 bp, Artificial Sequence
  Oligonucleotide for detection of SNP TSC0018549
gaatatagtgagt

SEQ ID NO: 71704 - DNA, 13 bp, Artificial Sequence
  Oligonucleotide for detection of SNP TSC0018549
actcactatattc

SEQ ID NO: 71705 - DNA, 13 bp, Artificial Sequence
  Oligonucleotide for detection of SNP TSC0018549
gaatacggtgagt

SEQ ID NO: 71706 - DNA, 13 bp, Artificial Sequence
  Oligonucleotide for detection of SNP TSC0018549
actcaccgtattc

SEQ ID NO: 71707 - DNA, 13 bp, Artificial Sequence
  Oligonucleotide for detection of SNP TSC0018552
ttagattgtattt

SEQ ID NO: 71708 - DNA, 13 bp, Artificial Sequence
  Oligonucleotide for detection of SNP TSC0018552
aaatacaatctaa

SEQ ID NO: 71709 - DNA, 13 bp, Artificial Sequence
  Oligonucleotide for detection of SNP TSC0018552
ttagatcgtattt

SEQ ID NO: 71710 - DNA, 13 bp, Artificial Sequence
  Oligonucleotide for detection of SNP TSC0018552
aaatacgatctaa

SEQ ID NO: 71711 - DNA, 13 bp, Artificial Sequence
  Oligonucleotide for detection of SNP TSC0018552
agatgtgatttgg

SEQ ID NO: 71712 - DNA, 13 bp, Artificial Sequence
  Oligonucleotide for detection of SNP TSC0018552
ccaaatcacatct

SEQ ID NO: 71713 - DNA, 13 bp, Artificial Sequence
  Oligonucleotide for detection of SNP TSC0018552
agatgtaatttgg

SEQ ID NO: 71714 - DNA, 13 bp, Artificial Sequence
  Oligonucleotide for detection of SNP TSC0018552
ccaaattacatct

SEQ ID NO: 71715 - DNA, 13 bp, Artificial Sequence
  Oligonucleotide for detection of SNP TSC0018552
agatgcgatttgg

SEQ ID NO: 71716 - DNA, 13 bp, Artificial Sequence
  Oligonucleotide for detection of SNP TSC0018552
ccaaatcgcatct

SEQ ID NO: 71717 - DNA, 13 bp, Artificial Sequence
  Oligonucleotide for detection of SNP TSC0018553
gtttttgattaaa

SEQ ID NO: 71718 - DNA, 13 bp, Artificial Sequence
  Oligonucleotide for detection of SNP TSC0018553
tttaatcaaaaac

SEQ ID NO: 71719 - DNA, 13 bp, Artificial Sequence
  Oligonucleotide for detection of SNP TSC0018553
gtttttaattaaa

SEQ ID NO: 71720 - DNA, 13 bp, Artificial Sequence
  Oligonucleotide for detection of SNP TSC0018553
tttaattaaaaac

SEQ ID NO: 71721 - DNA, 13 bp, Artificial Sequence
  Oligonucleotide for detection of SNP TSC0018554
tatgtagaataag

SEQ ID NO: 71722 - DNA, 13 bp, Artificial Sequence
  Oligonucleotide for detection of SNP TSC0018554
cttattctacata

SEQ ID NO: 71723 - DNA, 13 bp, Artificial Sequence
  Oligonucleotide for detection of SNP TSC0018554
tatgtaaaataag

SEQ ID NO: 71724 - DNA, 13 bp, Artificial Sequence
  Oligonucleotide for detection of SNP TSC0018554
cttattttacata

SEQ ID NO: 71725 - DNA, 13 bp, Artificial Sequence
  Oligonucleotide for detection of SNP TSC0018556
tgaggtaggtata

SEQ ID NO: 71726 - DNA, 13 bp, Artificial Sequence
  Oligonucleotide for detection of SNP TSC0018556
tatacctacctca

SEQ ID NO: 71727 - DNA, 13 bp, Artificial Sequence
  Oligonucleotide for detection of SNP TSC0018556
tgaggtgggtata

SEQ ID NO: 71728 - DNA, 13 bp, Artificial Sequence
  Oligonucleotide for detection of SNP TSC0018556
tatacccacctca

SEQ ID NO: 71729 - DNA, 13 bp, Artificial Sequence
  Oligonucleotide for detection of SNP TSC0018556
cgaggtaggtata

SEQ ID NO: 71730 - DNA, 13 bp, Artificial Sequence
  Oligonucleotide for detection of SNP TSC0018556
tatacctacctcg

SEQ ID NO: 71731 - DNA, 13 bp, Artificial Sequence
  Oligonucleotide for detection of SNP TSC0018556
cgaggtgggtata

SEQ ID NO: 71732 - DNA, 13 bp, Artificial Sequence
  Oligonucleotide for detection of SNP TSC0018556
tatacccacctcg

SEQ ID NO: 71733 - DNA, 13 bp, Artificial Sequence
  Oligonucleotide for detection of SNP TSC0018556
tgaggcgggtata

SEQ ID NO: 71734 - DNA, 13 bp, Artificial Sequence
  Oligonucleotide for detection of SNP TSC0018556
tatacccgcctca

SEQ ID NO: 71735 - DNA, 13 bp, Artificial Sequence
  Oligonucleotide for detection of SNP TSC0018556
cgaggcgggtata

SEQ ID NO: 71736 - DNA, 13 bp, Artificial Sequence
  Oligonucleotide for detection of SNP TSC0018556
tatacccgcctcg

SEQ ID NO: 71737 - DNA, 13 bp, Artificial Sequence
  Oligonucleotide for detection of SNP TSC0018556
tatgtttgttttg

SEQ ID NO: 71738 - DNA, 13 bp, Artificial Sequence
  Oligonucleotide for detection of SNP TSC0018556
caaaacaaacata

SEQ ID NO: 71739 - DNA, 13 bp, Artificial Sequence
  Oligonucleotide for detection of SNP TSC0018556
tatgtttgtttcg

SEQ ID NO: 71740 - DNA, 13 bp, Artificial Sequence
  Oligonucleotide for detection of SNP TSC0018556
cgaaacaaacata

SEQ ID NO: 71741 - DNA, 13 bp, Artificial Sequence
  Oligonucleotide for detection of SNP TSC0018556
tatgttcgttttg

SEQ ID NO: 71742 - DNA, 13 bp, Artificial Sequence
  Oligonucleotide for detection of SNP TSC0018556
caaaacgaacata

SEQ ID NO: 71743 - DNA, 13 bp, Artificial Sequence
  Oligonucleotide for detection of SNP TSC0018556
tatgttcgtttcg

SEQ ID NO: 71744 - DNA, 13 bp, Artificial Sequence
  Oligonucleotide for detection of SNP TSC0018556
cgaaacgaacata

SEQ ID NO: 71745 - DNA, 13 bp, Artificial Sequence
  Oligonucleotide for detection of SNP TSC0018557
tatgttgtttagg

SEQ ID NO: 71746 - DNA, 13 bp, Artificial Sequence
  Oligonucleotide for detection of SNP TSC0018557
cctaaacaacata

SEQ ID NO: 71747 - DNA, 13 bp, Artificial Sequence
  Oligonucleotide for detection of SNP TSC0018557
tatgttatttagg

SEQ ID NO: 71748 - DNA, 13 bp, Artificial Sequence
  Oligonucleotide for detection of SNP TSC0018557
cctaaataacata

SEQ ID NO: 71749 - DNA, 13 bp, Artificial Sequence
  Oligonucleotide for detection of SNP TSC0018558
tgtaaagaaattt

SEQ ID NO: 71750 - DNA, 13 bp, Artificial Sequence
  Oligonucleotide for detection of SNP TSC0018558
aaatttctttaca

SEQ ID NO: 71751 - DNA, 13 bp, Artificial Sequence
  Oligonucleotide for detection of SNP TSC0018558
tgtaaaaaaattt

SEQ ID NO: 71752 - DNA, 13 bp, Artificial Sequence
  Oligonucleotide for detection of SNP TSC0018558
aaatttttttaca

SEQ ID NO: 71753 - DNA, 13 bp, Artificial Sequence
  Oligonucleotide for detection of SNP TSC0018559
tataagggtggag

SEQ ID NO: 71754 - DNA, 13 bp, Artificial Sequence
  Oligonucleotide for detection of SNP TSC0018559
ctccacccttata

SEQ ID NO: 71755 - DNA, 13 bp, Artificial Sequence
  Oligonucleotide for detection of SNP TSC0018559
tataagtgtggag

SEQ ID NO: 71756 - DNA, 13 bp, Artificial Sequence
  Oligonucleotide for detection of SNP TSC0018559
ctccacacttata

SEQ ID NO: 71757 - DNA, 13 bp, Artificial Sequence
  Oligonucleotide for detection of SNP TSC0018560
aaaatttgtatta

SEQ ID NO: 71758 - DNA, 13 bp, Artificial Sequence
  Oligonucleotide for detection of SNP TSC0018560
taatacaaatttt

SEQ ID NO: 71759 - DNA, 13 bp, Artificial Sequence
  Oligonucleotide for detection of SNP TSC0018560
aaaattcgtatta

SEQ ID NO: 71760 - DNA, 13 bp, Artificial Sequence
  Oligonucleotide for detection of SNP TSC0018560
taatacgaatttt

SEQ ID NO: 71761 - DNA, 13 bp, Artificial Sequence
  Oligonucleotide for detection of SNP TSC0018560
taatatgaatttt

SEQ ID NO: 71762 - DNA, 13 bp, Artificial Sequence
  Oligonucleotide for detection of SNP TSC0018560
aaaattcatatta

SEQ ID NO: 71763 - DNA, 13 bp, Artificial Sequence
  Oligonucleotide for detection of SNP TSC0018560
taatataaatttt

SEQ ID NO: 71764 - DNA, 13 bp, Artificial Sequence
  Oligonucleotide for detection of SNP TSC0018560
aaaatttatatta

SEQ ID NO: 71765 - DNA, 13 bp, Artificial Sequence
  Oligonucleotide for detection of SNP TSC0018562
tgttagaaatata

SEQ ID NO: 71766 - DNA, 13 bp, Artificial Sequence
  Oligonucleotide for detection of SNP TSC0018562
tatatttctaaca

SEQ ID NO: 71767 - DNA, 13 bp, Artificial Sequence
  Oligonucleotide for detection of SNP TSC0018562
tgttaggaatata

SEQ ID NO: 71768 - DNA, 13 bp, Artificial Sequence
  Oligonucleotide for detection of SNP TSC0018562
tatattcctaaca

SEQ ID NO: 71769 - DNA, 13 bp, Artificial Sequence
  Oligonucleotide for detection of SNP TSC0018564
ttgttaatagata

SEQ ID NO: 71770 - DNA, 13 bp, Artificial Sequence
  Oligonucleotide for detection of SNP TSC0018564
tatctattaacaa

SEQ ID NO: 71771 - DNA, 13 bp, Artificial Sequence
  Oligonucleotide for detection of SNP TSC0018564
ttgttattagata

SEQ ID NO: 71772 - DNA, 13 bp, Artificial Sequence
  Oligonucleotide for detection of SNP TSC0018564
tatctaataacaa

SEQ ID NO: 71773 - DNA, 13 bp, Artificial Sequence
  Oligonucleotide for detection of SNP TSC0018564
tatttattgataa

SEQ ID NO: 71774 - DNA, 13 bp, Artificial Sequence
  Oligonucleotide for detection of SNP TSC0018564
ttatcaataaata

SEQ ID NO: 71775 - DNA, 13 bp, Artificial Sequence
  Oligonucleotide for detection of SNP TSC0018565
aaataatgttata

SEQ ID NO: 71776 - DNA, 13 bp, Artificial Sequence
  Oligonucleotide for detection of SNP TSC0018565
tataacattattt

SEQ ID NO: 71777 - DNA, 13 bp, Artificial Sequence
  Oligonucleotide for detection of SNP TSC0018565
aaataacgttata

SEQ ID NO: 71778 - DNA, 13 bp, Artificial Sequence
  Oligonucleotide for detection of SNP TSC0018565
tataacgttattt

SEQ ID NO: 71779 - DNA, 13 bp, Artificial Sequence
  Oligonucleotide for detection of SNP TSC0018565
tgtagtgttgttt

SEQ ID NO: 71780 - DNA, 13 bp, Artificial Sequence
  Oligonucleotide for detection of SNP TSC0018565
aaacaacactaca

SEQ ID NO: 71781 - DNA, 13 bp, Artificial Sequence
  Oligonucleotide for detection of SNP TSC0018565
tgtagtattgttt

SEQ ID NO: 71782 - DNA, 13 bp, Artificial Sequence
  Oligonucleotide for detection of SNP TSC0018565
aaacaatactaca

SEQ ID NO: 71783 - DNA, 13 bp, Artificial Sequence
  Oligonucleotide for detection of SNP TSC0018565
tgtagcgttgttt

SEQ ID NO: 71784 - DNA, 13 bp, Artificial Sequence
  Oligonucleotide for detection of SNP TSC0018565
aaacaacgctaca

SEQ ID NO: 71785 - DNA, 13 bp, Artificial Sequence
  Oligonucleotide for detection of SNP TSC0018566
ttttggattttty

SEQ ID NO: 71786 - DNA, 13 bp, Artificial Sequence
  Oligonucleotide for detection of SNP TSC0018566
raaaaatccaaaa

SEQ ID NO: 71787 - DNA, 13 bp, Artificial Sequence
  Oligonucleotide for detection of SNP TSC0018566
ttttgggttttty

SEQ ID NO: 71788 - DNA, 13 bp, Artificial Sequence
  Oligonucleotide for detection of SNP TSC0018566
raaaaacccaaaa

SEQ ID NO: 71789 - DNA, 13 bp, Artificial Sequence
  Oligonucleotide for detection of SNP TSC0018566
tttcggattttty

SEQ ID NO: 71790 - DNA, 13 bp, Artificial Sequence
  Oligonucleotide for detection of SNP TSC0018566
raaaaatccgaaa

SEQ ID NO: 71791 - DNA, 13 bp, Artificial Sequence
  Oligonucleotide for detection of SNP TSC0018566
tttcgggttttty

SEQ ID NO: 71792 - DNA, 13 bp, Artificial Sequence
  Oligonucleotide for detection of SNP TSC0018566
raaaaacccgaaa

SEQ ID NO: 71793 - DNA, 13 bp, Artificial Sequence
  Oligonucleotide for detection of SNP TSC0018570
ttttttatgaaty

SEQ ID NO: 71794 - DNA, 13 bp, Artificial Sequence
  Oligonucleotide for detection of SNP TSC0018570
rattcataaaaaa

SEQ ID NO: 71795 - DNA, 13 bp, Artificial Sequence
  Oligonucleotide for detection of SNP TSC0018570
ttttttgtgaaty

SEQ ID NO: 71796 - DNA, 13 bp, Artificial Sequence
  Oligonucleotide for detection of SNP TSC0018570
rattcacaaaaaa

SEQ ID NO: 71797 - DNA, 13 bp, Artificial Sequence
  Oligonucleotide for detection of SNP TSC0018570
tttttcgtgaaty

SEQ ID NO: 71798 - DNA, 13 bp, Artificial Sequence
  Oligonucleotide for detection of SNP TSC0018570
rattcacgaaaaa

SEQ ID NO: 71799 - DNA, 13 bp, Artificial Sequence
  Oligonucleotide for detection of SNP TSC0018570
ggtttatgggaga

SEQ ID NO: 71800 - DNA, 13 bp, Artificial Sequence
  Oligonucleotide for detection of SNP TSC0018570
tctcccataaacc

SEQ ID NO: 71801 - DNA, 13 bp, Artificial Sequence
  Oligonucleotide for detection of SNP TSC0018570
ggtttacgggaga

SEQ ID NO: 71802 - DNA, 13 bp, Artificial Sequence
  Oligonucleotide for detection of SNP TSC0018570
tctcccgtaaacc

SEQ ID NO: 71803 - DNA, 13 bp, Artificial Sequence
  Oligonucleotide for detection of SNP TSC0018571
ttgtatttagatg

SEQ ID NO: 71804 - DNA, 13 bp, Artificial Sequence
  Oligonucleotide for detection of SNP TSC0018571
catctaaatacaa

SEQ ID NO: 71805 - DNA, 13 bp, Artificial Sequence
  Oligonucleotide for detection of SNP TSC0018571
ttgtatgtagatg

SEQ ID NO: 71806 - DNA, 13 bp, Artificial Sequence
  Oligonucleotide for detection of SNP TSC0018571
catctacatacaa

SEQ ID NO: 71807 - DNA, 13 bp, Artificial Sequence
  Oligonucleotide for detection of SNP TSC0018571
ttgtatttagacg

SEQ ID NO: 71808 - DNA, 13 bp, Artificial Sequence
  Oligonucleotide for detection of SNP TSC0018571
cgtctaaatacaa

SEQ ID NO: 71809 - DNA, 13 bp, Artificial Sequence
  Oligonucleotide for detection of SNP TSC0018571
ttgtatgtagacg

SEQ ID NO: 71810 - DNA, 13 bp, Artificial Sequence
  Oligonucleotide for detection of SNP TSC0018571
cgtctacatacaa

SEQ ID NO: 71811 - DNA, 13 bp, Artificial Sequence
  Oligonucleotide for detection of SNP TSC0018571
tgtttggatatag

SEQ ID NO: 71812 - DNA, 13 bp, Artificial Sequence
  Oligonucleotide for detection of SNP TSC0018571
ctatatccaaaca

SEQ ID NO: 71813 - DNA, 13 bp, Artificial Sequence
  Oligonucleotide for detection of SNP TSC0018571
cgtttggatatag

SEQ ID NO: 71814 - DNA, 13 bp, Artificial Sequence
  Oligonucleotide for detection of SNP TSC0018571
ctatatccaaacg

SEQ ID NO: 71815 - DNA, 13 bp, Artificial Sequence
  Oligonucleotide for detection of SNP TSC0018571
cgtttgtatatag

SEQ ID NO: 71816 - DNA, 13 bp, Artificial Sequence
  Oligonucleotide for detection of SNP TSC0018571
ctatatacaaacg

SEQ ID NO: 71817 - DNA, 13 bp, Artificial Sequence
  Oligonucleotide for detection of SNP TSC0018572
tttagatgggtty

SEQ ID NO: 71818 - DNA, 13 bp, Artificial Sequence
  Oligonucleotide for detection of SNP TSC0018572
raacccatctaaa

SEQ ID NO: 71819 - DNA, 13 bp, Artificial Sequence
  Oligonucleotide for detection of SNP TSC0018572
tttagacgggtty

SEQ ID NO: 71820 - DNA, 13 bp, Artificial Sequence
  Oligonucleotide for detection of SNP TSC0018572
raacccgtctaaa

SEQ ID NO: 71821 - DNA, 13 bp, Artificial Sequence
  Oligonucleotide for detection of SNP TSC0018572
gaatttgtttgga

SEQ ID NO: 71822 - DNA, 13 bp, Artificial Sequence
  Oligonucleotide for detection of SNP TSC0018572
tccaaacaaattc

SEQ ID NO: 71823 - DNA, 13 bp, Artificial Sequence
  Oligonucleotide for detection of SNP TSC0018572
gaatttatttgga

SEQ ID NO: 71824 - DNA, 13 bp, Artificial Sequence
  Oligonucleotide for detection of SNP TSC0018572
tccaaataaattc

SEQ ID NO: 71825 - DNA, 13 bp, Artificial Sequence
  Oligonucleotide for detection of SNP TSC0018572
gaattcgtttgga

SEQ ID NO: 71826 - DNA, 13 bp, Artificial Sequence
  Oligonucleotide for detection of SNP TSC0018572
tccaaacgaattc

SEQ ID NO: 71827 - DNA, 13 bp, Artificial Sequence
  Oligonucleotide for detection of SNP TSC0018574
ggtttttgttttt

SEQ ID NO: 71828 - DNA, 13 bp, Artificial Sequence
  Oligonucleotide for detection of SNP TSC0018574
aaaaacaaaaacc

SEQ ID NO: 71829 - DNA, 13 bp, Artificial Sequence
  Oligonucleotide for detection of SNP TSC0018574
ggttttggttttt

SEQ ID NO: 71830 - DNA, 13 bp, Artificial Sequence
  Oligonucleotide for detection of SNP TSC0018574
aaaaaccaaaacc

SEQ ID NO: 71831 - DNA, 13 bp, Artificial Sequence
  Oligonucleotide for detection of SNP TSC0018574
ggttttcgttttt

SEQ ID NO: 71832 - DNA, 13 bp, Artificial Sequence
  Oligonucleotide for detection of SNP TSC0018574
aaaaacgaaaacc

SEQ ID NO: 71833 - DNA, 13 bp, Artificial Sequence
  Oligonucleotide for detection of SNP TSC0018574
agagatgagaaty

SEQ ID NO: 71834 - DNA, 13 bp, Artificial Sequence
  Oligonucleotide for detection of SNP TSC0018574
rattctcatctct

SEQ ID NO: 71835 - DNA, 13 bp, Artificial Sequence
  Oligonucleotide for detection of SNP TSC0018574
agagattagaaty

SEQ ID NO: 71836 - DNA, 13 bp, Artificial Sequence
  Oligonucleotide for detection of SNP TSC0018574
rattctaatctct

SEQ ID NO: 71837 - DNA, 13 bp, Artificial Sequence
  Oligonucleotide for detection of SNP TSC0018574
agagacgagaaty

SEQ ID NO: 71838 - DNA, 13 bp, Artificial Sequence
  Oligonucleotide for detection of SNP TSC0018574
rattctcgtctct

SEQ ID NO: 71839 - DNA, 13 bp, Artificial Sequence
  Oligonucleotide for detection of SNP TSC0018576
aagggtttgatty

SEQ ID NO: 71840 - DNA, 13 bp, Artificial Sequence
  Oligonucleotide for detection of SNP TSC0018576
raatcaaaccctt

SEQ ID NO: 71841 - DNA, 13 bp, Artificial Sequence
  Oligonucleotide for detection of SNP TSC0018576
aagggtgtgatty

SEQ ID NO: 71842 - DNA, 13 bp, Artificial Sequence
  Oligonucleotide for detection of SNP TSC0018576
raatcacaccctt

SEQ ID NO: 71843 - DNA, 13 bp, Artificial Sequence
  Oligonucleotide for detection of SNP TSC0018576
gagttagattttt

SEQ ID NO: 71844 - DNA, 13 bp, Artificial Sequence
  Oligonucleotide for detection of SNP TSC0018576
aaaaatctaactc

SEQ ID NO: 71845 - DNA, 13 bp, Artificial Sequence
  Oligonucleotide for detection of SNP TSC0018576
gagttatattttt

SEQ ID NO: 71846 - DNA, 13 bp, Artificial Sequence
  Oligonucleotide for detection of SNP TSC0018576
aaaaatataactc

SEQ ID NO: 71847 - DNA, 13 bp, Artificial Sequence
  Oligonucleotide for detection of SNP TSC0018580
taggatatgtgag

SEQ ID NO: 71848 - DNA, 13 bp, Artificial Sequence
  Oligonucleotide for detection of SNP TSC0018580
ctcacatatccta

SEQ ID NO: 71849 - DNA, 13 bp, Artificial Sequence
  Oligonucleotide for detection of SNP TSC0018580
taggatgtgtgag

SEQ ID NO: 71850 - DNA, 13 bp, Artificial Sequence
  Oligonucleotide for detection of SNP TSC0018580
ctcacacatccta

SEQ ID NO: 71851 - DNA, 13 bp, Artificial Sequence
  Oligonucleotide for detection of SNP TSC0018580
taggatatgcgag

SEQ ID NO: 71852 - DNA, 13 bp, Artificial Sequence
  Oligonucleotide for detection of SNP TSC0018580
ctcgcatatccta

SEQ ID NO: 71853 - DNA, 13 bp, Artificial Sequence
  Oligonucleotide for detection of SNP TSC0018580
taggacgtgtgag

SEQ ID NO: 71854 - DNA, 13 bp, Artificial Sequence
  Oligonucleotide for detection of SNP TSC0018580
ctcacacgtccta

SEQ ID NO: 71855 - DNA, 13 bp, Artificial Sequence
  Oligonucleotide for detection of SNP TSC0018580
taggatgtgcgag

SEQ ID NO: 71856 - DNA, 13 bp, Artificial Sequence
  Oligonucleotide for detection of SNP TSC0018580
ctcgcacatccta

SEQ ID NO: 71857 - DNA, 13 bp, Artificial Sequence
  Oligonucleotide for detection of SNP TSC0018580
taggacgtgcgag

SEQ ID NO: 71858 - DNA, 13 bp, Artificial Sequence
  Oligonucleotide for detection of SNP TSC0018580
ctcgcacgtccta

SEQ ID NO: 71859 - DNA, 13 bp, Artificial Sequence
  Oligonucleotide for detection of SNP TSC0018580
tttgtatgttttg

SEQ ID NO: 71860 - DNA, 13 bp, Artificial Sequence
  Oligonucleotide for detection of SNP TSC0018580
caaaacatacaaa

SEQ ID NO: 71861 - DNA, 13 bp, Artificial Sequence
  Oligonucleotide for detection of SNP TSC0018580
ttcgtatgttttg

SEQ ID NO: 71862 - DNA, 13 bp, Artificial Sequence
  Oligonucleotide for detection of SNP TSC0018580
caaaacatacgaa

SEQ ID NO: 71863 - DNA, 13 bp, Artificial Sequence
  Oligonucleotide for detection of SNP TSC0018580
tttgtacgttttg

SEQ ID NO: 71864 - DNA, 13 bp, Artificial Sequence
  Oligonucleotide for detection of SNP TSC0018580
caaaacgtacaaa

SEQ ID NO: 71865 - DNA, 13 bp, Artificial Sequence
  Oligonucleotide for detection of SNP TSC0018580
ttcgtacgttttg

SEQ ID NO: 71866 - DNA, 13 bp, Artificial Sequence
  Oligonucleotide for detection of SNP TSC0018580
caaaacgtacgaa

SEQ ID NO: 71867 - DNA, 13 bp, Artificial Sequence
  Oligonucleotide for detection of SNP TSC0018584
tagttttgaaagg

SEQ ID NO: 71868 - DNA, 13 bp, Artificial Sequence
  Oligonucleotide for detection of SNP TSC0018584
cctttcaaaacta

SEQ ID NO: 71869 - DNA, 13 bp, Artificial Sequence
  Oligonucleotide for detection of SNP TSC0018584
tagtttcgaaagg

SEQ ID NO: 71870 - DNA, 13 bp, Artificial Sequence
  Oligonucleotide for detection of SNP TSC0018584
cctttcgaaacta

SEQ ID NO: 71871 - DNA, 13 bp, Artificial Sequence
  Oligonucleotide for detection of SNP TSC0018584
ttttttgggattg

SEQ ID NO: 71872 - DNA, 13 bp, Artificial Sequence
  Oligonucleotide for detection of SNP TSC0018584
caatcccaaaaaa

SEQ ID NO: 71873 - DNA, 13 bp, Artificial Sequence
  Oligonucleotide for detection of SNP TSC0018584
ttttttaggattg

SEQ ID NO: 71874 - DNA, 13 bp, Artificial Sequence
  Oligonucleotide for detection of SNP TSC0018584
caatcctaaaaaa

SEQ ID NO: 71875 - DNA, 13 bp, Artificial Sequence
  Oligonucleotide for detection of SNP TSC0018584
tttttcgggattg

SEQ ID NO: 71876 - DNA, 13 bp, Artificial Sequence
  Oligonucleotide for detection of SNP TSC0018584
caatcccgaaaaa

SEQ ID NO: 71877 - DNA, 13 bp, Artificial Sequence
  Oligonucleotide for detection of SNP TSC0018589
gagttaaagtagy

SEQ ID NO: 71878 - DNA, 13 bp, Artificial Sequence
  Oligonucleotide for detection of SNP TSC0018589
rctactttaactc

SEQ ID NO: 71879 - DNA, 13 bp, Artificial Sequence
  Oligonucleotide for detection of SNP TSC0018589
gagttagagtagy

SEQ ID NO: 71880 - DNA, 13 bp, Artificial Sequence
  Oligonucleotide for detection of SNP TSC0018589
rctactctaactc

SEQ ID NO: 71881 - DNA, 13 bp, Artificial Sequence
  Oligonucleotide for detection of SNP TSC0018590
agtaatagtatta

SEQ ID NO: 71882 - DNA, 13 bp, Artificial Sequence
  Oligonucleotide for detection of SNP TSC0018590
taatactattact

SEQ ID NO: 71883 - DNA, 13 bp, Artificial Sequence
  Oligonucleotide for detection of SNP TSC0018590
agtaattgtatta

SEQ ID NO: 71884 - DNA, 13 bp, Artificial Sequence
  Oligonucleotide for detection of SNP TSC0018590
taatacaattact

SEQ ID NO: 71885 - DNA, 13 bp, Artificial Sequence
  Oligonucleotide for detection of SNP TSC0018590
tgatattgttatt

SEQ ID NO: 71886 - DNA, 13 bp, Artificial Sequence
  Oligonucleotide for detection of SNP TSC0018590
aataacaatatca

SEQ ID NO: 71887 - DNA, 13 bp, Artificial Sequence
  Oligonucleotide for detection of SNP TSC0018590
tgatatagttatt

SEQ ID NO: 71888 - DNA, 13 bp, Artificial Sequence
  Oligonucleotide for detection of SNP TSC0018590
aataactatatca

SEQ ID NO: 71889 - DNA, 13 bp, Artificial Sequence
  Oligonucleotide for detection of SNP TSC0018591
ggtgtgagttgtg

SEQ ID NO: 71890 - DNA, 13 bp, Artificial Sequence
  Oligonucleotide for detection of SNP TSC0018591
cacaactcacacc

SEQ ID NO: 71891 - DNA, 13 bp, Artificial Sequence
  Oligonucleotide for detection of SNP TSC0018591
ggtgtgggttgtg

SEQ ID NO: 71892 - DNA, 13 bp, Artificial Sequence
  Oligonucleotide for detection of SNP TSC0018591
cacaacccacacc

SEQ ID NO: 71893 - DNA, 13 bp, Artificial Sequence
  Oligonucleotide for detection of SNP TSC0018591
ggtgcgagttgtg

SEQ ID NO: 71894 - DNA, 13 bp, Artificial Sequence
  Oligonucleotide for detection of SNP TSC0018591
cacaactcgcacc

SEQ ID NO: 71895 - DNA, 13 bp, Artificial Sequence
  Oligonucleotide for detection of SNP TSC0018591
ggtgcgggttgtg

SEQ ID NO: 71896 - DNA, 13 bp, Artificial Sequence
  Oligonucleotide for detection of SNP TSC0018591
cacaacccgcacc

SEQ ID NO: 71897 - DNA, 13 bp, Artificial Sequence
  Oligonucleotide for detection of SNP TSC0018592
gtgatttgtgtgt

SEQ ID NO: 71898 - DNA, 13 bp, Artificial Sequence
  Oligonucleotide for detection of SNP TSC0018592
acacacaaatcac

SEQ ID NO: 71899 - DNA, 13 bp, Artificial Sequence
  Oligonucleotide for detection of SNP TSC0018592
gtgattcgtgtgt

SEQ ID NO: 71900 - DNA, 13 bp, Artificial Sequence
  Oligonucleotide for detection of SNP TSC0018592
acacacgaatcac

SEQ ID NO: 71901 - DNA, 13 bp, Artificial Sequence
  Oligonucleotide for detection of SNP TSC0018592
atatatgaattay

SEQ ID NO: 71902 - DNA, 13 bp, Artificial Sequence
  Oligonucleotide for detection of SNP TSC0018592
rtaattcatatat

SEQ ID NO: 71903 - DNA, 13 bp, Artificial Sequence
  Oligonucleotide for detection of SNP TSC0018592
atatataaattay

SEQ ID NO: 71904 - DNA, 13 bp, Artificial Sequence
  Oligonucleotide for detection of SNP TSC0018592
rtaatttatatat

SEQ ID NO: 71905 - DNA, 13 bp, Artificial Sequence
  Oligonucleotide for detection of SNP TSC0018592
atatacgaattay

SEQ ID NO: 71906 - DNA, 13 bp, Artificial Sequence
  Oligonucleotide for detection of SNP TSC0018592
rtaattcgtatat

SEQ ID NO: 71907 - DNA, 13 bp, Artificial Sequence
  Oligonucleotide for detection of SNP TSC0018594
tttttggtataty

SEQ ID NO: 71908 - DNA, 13 bp, Artificial Sequence
  Oligonucleotide for detection of SNP TSC0018594
ratataccaaaaa

SEQ ID NO: 71909 - DNA, 13 bp, Artificial Sequence
  Oligonucleotide for detection of SNP TSC0018594
tttttgatataty

SEQ ID NO: 71910 - DNA, 13 bp, Artificial Sequence
  Oligonucleotide for detection of SNP TSC0018594
ratatatcaaaaa

SEQ ID NO: 71911 - DNA, 13 bp, Artificial Sequence
  Oligonucleotide for detection of SNP TSC0018594
ttttcggtataty

SEQ ID NO: 71912 - DNA, 13 bp, Artificial Sequence
  Oligonucleotide for detection of SNP TSC0018594
ratataccgaaaa

SEQ ID NO: 71913 - DNA, 13 bp, Artificial Sequence
  Oligonucleotide for detection of SNP TSC0018594
ttttcgatataty

SEQ ID NO: 71914 - DNA, 13 bp, Artificial Sequence
  Oligonucleotide for detection of SNP TSC0018594
ratatatcgaaaa

SEQ ID NO: 71915 - DNA, 13 bp, Artificial Sequence
  Oligonucleotide for detection of SNP TSC0018595
ttgtgtaagaaat

SEQ ID NO: 71916 - DNA, 13 bp, Artificial Sequence
  Oligonucleotide for detection of SNP TSC0018595
atttcttacacaa

SEQ ID NO: 71917 - DNA, 13 bp, Artificial Sequence
  Oligonucleotide for detection of SNP TSC0018595
ttgtgtgagaaat

SEQ ID NO: 71918 - DNA, 13 bp, Artificial Sequence
  Oligonucleotide for detection of SNP TSC0018595
atttctcacacaa

SEQ ID NO: 71919 - DNA, 13 bp, Artificial Sequence
  Oligonucleotide for detection of SNP TSC0018596
gtggtttagttty

SEQ ID NO: 71920 - DNA, 13 bp, Artificial Sequence
  Oligonucleotide for detection of SNP TSC0018596
raaactaaaccac

SEQ ID NO: 71921 - DNA, 13 bp, Artificial Sequence
  Oligonucleotide for detection of SNP TSC0018596
gtggttgagttty

SEQ ID NO: 71922 - DNA, 13 bp, Artificial Sequence
  Oligonucleotide for detection of SNP TSC0018596
raaactcaaccac

SEQ ID NO: 71923 - DNA, 13 bp, Artificial Sequence
  Oligonucleotide for detection of SNP TSC0018596
gcggtttagttty

SEQ ID NO: 71924 - DNA, 13 bp, Artificial Sequence
  Oligonucleotide for detection of SNP TSC0018596
raaactaaaccgc

SEQ ID NO: 71925 - DNA, 13 bp, Artificial Sequence
  Oligonucleotide for detection of SNP TSC0018596
gcggttgagttty

SEQ ID NO: 71926 - DNA, 13 bp, Artificial Sequence
  Oligonucleotide for detection of SNP TSC0018596
raaactcaaccgc

SEQ ID NO: 71927 - DNA, 13 bp, Artificial Sequence
  Oligonucleotide for detection of SNP TSC0018596
gggattgagttgy

SEQ ID NO: 71928 - DNA, 13 bp, Artificial Sequence
  Oligonucleotide for detection of SNP TSC0018596
rcaactcaatccc

SEQ ID NO: 71929 - DNA, 13 bp, Artificial Sequence
  Oligonucleotide for detection of SNP TSC0018596
gggatttagttgy

SEQ ID NO: 71930 - DNA, 13 bp, Artificial Sequence
  Oligonucleotide for detection of SNP TSC0018596
rcaactaaatccc

SEQ ID NO: 71931 - DNA, 13 bp, Artificial Sequence
  Oligonucleotide for detection of SNP TSC0018596
gggattgagtcgy

SEQ ID NO: 71932 - DNA, 13 bp, Artificial Sequence
  Oligonucleotide for detection of SNP TSC0018596
rcgactcaatccc

SEQ ID NO: 71933 - DNA, 13 bp, Artificial Sequence
  Oligonucleotide for detection of SNP TSC0018596
gggatttagtcgy

SEQ ID NO: 71934 - DNA, 13 bp, Artificial Sequence
  Oligonucleotide for detection of SNP TSC0018596
rcgactaaatccc

SEQ ID NO: 71935 - DNA, 13 bp, Artificial Sequence
  Oligonucleotide for detection of SNP TSC0018597
ttttaggtgttay

SEQ ID NO: 71936 - DNA, 13 bp, Artificial Sequence
  Oligonucleotide for detection of SNP TSC0018597
rtaacacctaaaa

SEQ ID NO: 71937 - DNA, 13 bp, Artificial Sequence
  Oligonucleotide for detection of SNP TSC0018597
ttttagatgttay

SEQ ID NO: 71938 - DNA, 13 bp, Artificial Sequence
  Oligonucleotide for detection of SNP TSC0018597
rtaacatctaaaa

SEQ ID NO: 71939 - DNA, 13 bp, Artificial Sequence
  Oligonucleotide for detection of SNP TSC0018598
gaaatttgggtay

SEQ ID NO: 71940 - DNA, 13 bp, Artificial Sequence
  Oligonucleotide for detection of SNP TSC0018598
rtacccaaatttc

SEQ ID NO: 71941 - DNA, 13 bp, Artificial Sequence
  Oligonucleotide for detection of SNP TSC0018598
gaaattcgggtay

SEQ ID NO: 71942 - DNA, 13 bp, Artificial Sequence
  Oligonucleotide for detection of SNP TSC0018598
rtacccgaatttc

SEQ ID NO: 71943 - DNA, 13 bp, Artificial Sequence
  Oligonucleotide for detection of SNP TSC0018598
gtgtttgaattty

SEQ ID NO: 71944 - DNA, 13 bp, Artificial Sequence
  Oligonucleotide for detection of SNP TSC0018598
raaattcaaacac

SEQ ID NO: 71945 - DNA, 13 bp, Artificial Sequence
  Oligonucleotide for detection of SNP TSC0018598
gtgtttaaattty

SEQ ID NO: 71946 - DNA, 13 bp, Artificial Sequence
  Oligonucleotide for detection of SNP TSC0018598
raaatttaaacac

SEQ ID NO: 71947 - DNA, 13 bp, Artificial Sequence
  Oligonucleotide for detection of SNP TSC0018598
gtgttcgaattty

SEQ ID NO: 71948 - DNA, 13 bp, Artificial Sequence
  Oligonucleotide for detection of SNP TSC0018598
raaattcgaacac

SEQ ID NO: 71949 - DNA, 13 bp, Artificial Sequence
  Oligonucleotide for detection of SNP TSC0018604
ttgttatgtaagt

SEQ ID NO: 71950 - DNA, 13 bp, Artificial Sequence
  Oligonucleotide for detection of SNP TSC0018604
acttacataacaa

SEQ ID NO: 71951 - DNA, 13 bp, Artificial Sequence
  Oligonucleotide for detection of SNP TSC0018604
ttgttacgtaagt

SEQ ID NO: 71952 - DNA, 13 bp, Artificial Sequence
  Oligonucleotide for detection of SNP TSC0018604
acttacgtaacaa

SEQ ID NO: 71953 - DNA, 13 bp, Artificial Sequence
  Oligonucleotide for detection of SNP TSC0018604
atttgtgtggtag

SEQ ID NO: 71954 - DNA, 13 bp, Artificial Sequence
  Oligonucleotide for detection of SNP TSC0018604
ctaccacacaaat

SEQ ID NO: 71955 - DNA, 13 bp, Artificial Sequence
  Oligonucleotide for detection of SNP TSC0018604
atttgtatggtag

SEQ ID NO: 71956 - DNA, 13 bp, Artificial Sequence
  Oligonucleotide for detection of SNP TSC0018604
ctaccatacaaat

SEQ ID NO: 71957 - DNA, 13 bp, Artificial Sequence
  Oligonucleotide for detection of SNP TSC0018604
atttgcgtggtag

SEQ ID NO: 71958 - DNA, 13 bp, Artificial Sequence
  Oligonucleotide for detection of SNP TSC0018604
ctaccacgcaaat

SEQ ID NO: 71959 - DNA, 13 bp, Artificial Sequence
  Oligonucleotide for detection of SNP TSC0018605
gttttaagtgtga

SEQ ID NO: 71960 - DNA, 13 bp, Artificial Sequence
  Oligonucleotide for detection of SNP TSC0018605
tcacacttaaaac

SEQ ID NO: 71961 - DNA, 13 bp, Artificial Sequence
  Oligonucleotide for detection of SNP TSC0018605
gttttatgtgtga

SEQ ID NO: 71962 - DNA, 13 bp, Artificial Sequence
  Oligonucleotide for detection of SNP TSC0018605
tcacacataaaac

SEQ ID NO: 71963 - DNA, 13 bp, Artificial Sequence
  Oligonucleotide for detection of SNP TSC0018605
gttttaagcgtga

SEQ ID NO: 71964 - DNA, 13 bp, Artificial Sequence
  Oligonucleotide for detection of SNP TSC0018605
tcacgcttaaaac

SEQ ID NO: 71965 - DNA, 13 bp, Artificial Sequence
  Oligonucleotide for detection of SNP TSC0018605
gttttatgcgtga

SEQ ID NO: 71966 - DNA, 13 bp, Artificial Sequence
  Oligonucleotide for detection of SNP TSC0018605
tcacgcataaaac

SEQ ID NO: 71967 - DNA, 13 bp, Artificial Sequence
  Oligonucleotide for detection of SNP TSC0018605
ttatgtttgagay

SEQ ID NO: 71968 - DNA, 13 bp, Artificial Sequence
  Oligonucleotide for detection of SNP TSC0018605
rtctcaaacataa

SEQ ID NO: 71969 - DNA, 13 bp, Artificial Sequence
  Oligonucleotide for detection of SNP TSC0018605
ttatgtatgagay

SEQ ID NO: 71970 - DNA, 13 bp, Artificial Sequence
  Oligonucleotide for detection of SNP TSC0018605
rtctcatacataa

SEQ ID NO: 71971 - DNA, 13 bp, Artificial Sequence
  Oligonucleotide for detection of SNP TSC0018605
ttacgtttgagay

SEQ ID NO: 71972 - DNA, 13 bp, Artificial Sequence
  Oligonucleotide for detection of SNP TSC0018605
rtctcaaacgtaa

SEQ ID NO: 71973 - DNA, 13 bp, Artificial Sequence
  Oligonucleotide for detection of SNP TSC0018605
ttacgtatgagay

SEQ ID NO: 71974 - DNA, 13 bp, Artificial Sequence
  Oligonucleotide for detection of SNP TSC0018605
rtctcatacgtaa

SEQ ID NO: 71975 - DNA, 13 bp, Artificial Sequence
  Oligonucleotide for detection of SNP TSC0018606
gtggaatggttat

SEQ ID NO: 71976 - DNA, 13 bp, Artificial Sequence
  Oligonucleotide for detection of SNP TSC0018606
ataaccattccac

SEQ ID NO: 71977 - DNA, 13 bp, Artificial Sequence
  Oligonucleotide for detection of SNP TSC0018606
gtggaacggttat

SEQ ID NO: 71978 - DNA, 13 bp, Artificial Sequence
  Oligonucleotide for detection of SNP TSC0018606
ataaccgttccac

SEQ ID NO: 71979 - DNA, 13 bp, Artificial Sequence
  Oligonucleotide for detection of SNP TSC0018606
ataattgttttay

SEQ ID NO: 71980 - DNA, 13 bp, Artificial Sequence
  Oligonucleotide for detection of SNP TSC0018606
rtaaaacaattat

SEQ ID NO: 71981 - DNA, 13 bp, Artificial Sequence
  Oligonucleotide for detection of SNP TSC0018606
ataattattttay

SEQ ID NO: 71982 - DNA, 13 bp, Artificial Sequence
  Oligonucleotide for detection of SNP TSC0018606
rtaaaataattat

SEQ ID NO: 71983 - DNA, 13 bp, Artificial Sequence
  Oligonucleotide for detection of SNP TSC0018606
ataatcgttttay

SEQ ID NO: 71984 - DNA, 13 bp, Artificial Sequence
  Oligonucleotide for detection of SNP TSC0018606
rtaaaacgattat

SEQ ID NO: 71985 - DNA, 13 bp, Artificial Sequence
  Oligonucleotide for detection of SNP TSC0018607
tttattagagatg

SEQ ID NO: 71986 - DNA, 13 bp, Artificial Sequence
  Oligonucleotide for detection of SNP TSC0018607
catctctaataaa

SEQ ID NO: 71987 - DNA, 13 bp, Artificial Sequence
  Oligonucleotide for detection of SNP TSC0018607
tttattggagatg

SEQ ID NO: 71988 - DNA, 13 bp, Artificial Sequence
  Oligonucleotide for detection of SNP TSC0018607
catctccaataaa

SEQ ID NO: 71989 - DNA, 13 bp, Artificial Sequence
  Oligonucleotide for detection of SNP TSC0018608
ttaagttgtttay

SEQ ID NO: 71990 - DNA, 13 bp, Artificial Sequence
  Oligonucleotide for detection of SNP TSC0018608
rtaaacaacttaa

SEQ ID NO: 71991 - DNA, 13 bp, Artificial Sequence
  Oligonucleotide for detection of SNP TSC0018608
ttaagtcgtttay

SEQ ID NO: 71992 - DNA, 13 bp, Artificial Sequence
  Oligonucleotide for detection of SNP TSC0018608
rtaaacgacttaa

SEQ ID NO: 71993 - DNA, 13 bp, Artificial Sequence
  Oligonucleotide for detection of SNP TSC0018608
gtggatgatttgg

SEQ ID NO: 71994 - DNA, 13 bp, Artificial Sequence
  Oligonucleotide for detection of SNP TSC0018608
ccaaatcatccac

SEQ ID NO: 71995 - DNA, 13 bp, Artificial Sequence
  Oligonucleotide for detection of SNP TSC0018608
gtggataatttgg

SEQ ID NO: 71996 - DNA, 13 bp, Artificial Sequence
  Oligonucleotide for detection of SNP TSC0018608
ccaaattatccac

SEQ ID NO: 71997 - DNA, 13 bp, Artificial Sequence
  Oligonucleotide for detection of SNP TSC0018608
gtggacgatttgg

SEQ ID NO: 71998 - DNA, 13 bp, Artificial Sequence
  Oligonucleotide for detection of SNP TSC0018608
ccaaatcgtccac

SEQ ID NO: 71999 - DNA, 13 bp, Artificial Sequence
  Oligonucleotide for detection of SNP TSC0018611
ttgtgttgagagg

SEQ ID NO: 72000 - DNA, 13 bp, Artificial Sequence
  Oligonucleotide for detection of SNP TSC0018611
cctctcaacacaa

SEQ ID NO: 72001 - DNA, 13 bp, Artificial Sequence
  Oligonucleotide for detection of SNP TSC0018611
ttgtgtcgagagg

SEQ ID NO: 72002 - DNA, 13 bp, Artificial Sequence
  Oligonucleotide for detection of SNP TSC0018611
cctctcgacacaa

SEQ ID NO: 72003 - DNA, 13 bp, Artificial Sequence
  Oligonucleotide for detection of SNP TSC0018611
ttttttagtatag

SEQ ID NO: 72004 - DNA, 13 bp, Artificial Sequence
  Oligonucleotide for detection of SNP TSC0018611
ctatactaaaaaa

SEQ ID NO: 72005 - DNA, 13 bp, Artificial Sequence
  Oligonucleotide for detection of SNP TSC0018611
tttttcggtatag

SEQ ID NO: 72006 - DNA, 13 bp, Artificial Sequence
  Oligonucleotide for detection of SNP TSC0018611
ctataccgaaaaa

SEQ ID NO: 72007 - DNA, 13 bp, Artificial Sequence
  Oligonucleotide for detection of SNP TSC0018613
gaagaattgtgat

SEQ ID NO: 72008 - DNA, 13 bp, Artificial Sequence
  Oligonucleotide for detection of SNP TSC0018613
atcacaattcttc

SEQ ID NO: 72009 - DNA, 13 bp, Artificial Sequence
  Oligonucleotide for detection of SNP TSC0018613
gaagaagtgtgat

SEQ ID NO: 72010 - DNA, 13 bp, Artificial Sequence
  Oligonucleotide for detection of SNP TSC0018613
atcacacttcttc

SEQ ID NO: 72011 - DNA, 13 bp, Artificial Sequence
  Oligonucleotide for detection of SNP TSC0018613
attatagttttty

SEQ ID NO: 72012 - DNA, 13 bp, Artificial Sequence
  Oligonucleotide for detection of SNP TSC0018613
raaaaactataat

SEQ ID NO: 72013 - DNA, 13 bp, Artificial Sequence
  Oligonucleotide for detection of SNP TSC0018613
attatatttttty

SEQ ID NO: 72014 - DNA, 13 bp, Artificial Sequence
  Oligonucleotide for detection of SNP TSC0018613
raaaaaatataat

SEQ ID NO: 72015 - DNA, 13 bp, Artificial Sequence
  Oligonucleotide for detection of SNP TSC0018615
aagaaaatttaag

SEQ ID NO: 72016 - DNA, 13 bp, Artificial Sequence
  Oligonucleotide for detection of SNP TSC0018615
cttaaattttctt

SEQ ID NO: 72017 - DNA, 13 bp, Artificial Sequence
  Oligonucleotide for detection of SNP TSC0018615
aagaaattttaag

SEQ ID NO: 72018 - DNA, 13 bp, Artificial Sequence
  Oligonucleotide for detection of SNP TSC0018615
cttaaaatttctt

SEQ ID NO: 72019 - DNA, 13 bp, Artificial Sequence
  Oligonucleotide for detection of SNP TSC0018615
tttaggttttttt

SEQ ID NO: 72020 - DNA, 13 bp, Artificial Sequence
  Oligonucleotide for detection of SNP TSC0018615
aaaaaaacctaaa

SEQ ID NO: 72021 - DNA, 13 bp, Artificial Sequence
  Oligonucleotide for detection of SNP TSC0018616
gatttagattaaa

SEQ ID NO: 72022 - DNA, 13 bp, Artificial Sequence
  Oligonucleotide for detection of SNP TSC0018616
tttaatctaaatc

SEQ ID NO: 72023 - DNA, 13 bp, Artificial Sequence
  Oligonucleotide for detection of SNP TSC0018616
gatttatattaaa

SEQ ID NO: 72024 - DNA, 13 bp, Artificial Sequence
  Oligonucleotide for detection of SNP TSC0018616
tttaatataaatc

SEQ ID NO: 72025 - DNA, 13 bp, Artificial Sequence
  Oligonucleotide for detection of SNP TSC0018616
tttggtttaggty

SEQ ID NO: 72026 - DNA, 13 bp, Artificial Sequence
  Oligonucleotide for detection of SNP TSC0018616
racctaaaccaaa

SEQ ID NO: 72027 - DNA, 13 bp, Artificial Sequence
  Oligonucleotide for detection of SNP TSC0018616
tttggtataggty

SEQ ID NO: 72028 - DNA, 13 bp, Artificial Sequence
  Oligonucleotide for detection of SNP TSC0018616
racctataccaaa

SEQ ID NO: 72029 - DNA, 13 bp, Artificial Sequence
  Oligonucleotide for detection of SNP TSC0018617
ggtaatattttgt

SEQ ID NO: 72030 - DNA, 13 bp, Artificial Sequence
  Oligonucleotide for detection of SNP TSC0018617
acaaaatattacc

SEQ ID NO: 72031 - DNA, 13 bp, Artificial Sequence
  Oligonucleotide for detection of SNP TSC0018617
ggtaattttttgt

SEQ ID NO: 72032 - DNA, 13 bp, Artificial Sequence
  Oligonucleotide for detection of SNP TSC0018617
acaaaaaattacc

SEQ ID NO: 72033 - DNA, 13 bp, Artificial Sequence
  Oligonucleotide for detection of SNP TSC0018617
ataggatgttgty

SEQ ID NO: 72034 - DNA, 13 bp, Artificial Sequence
  Oligonucleotide for detection of SNP TSC0018617
racaacatcctat

SEQ ID NO: 72035 - DNA, 13 bp, Artificial Sequence
  Oligonucleotide for detection of SNP TSC0018617
ataggaagttgty

SEQ ID NO: 72036 - DNA, 13 bp, Artificial Sequence
  Oligonucleotide for detection of SNP TSC0018617
racaacttcctat

SEQ ID NO: 72037 - DNA, 13 bp, Artificial Sequence
  Oligonucleotide for detection of SNP TSC0018618
ggttatatgtttg

SEQ ID NO: 72038 - DNA, 13 bp, Artificial Sequence
  Oligonucleotide for detection of SNP TSC0018618
caaacatataacc

SEQ ID NO: 72039 - DNA, 13 bp, Artificial Sequence
  Oligonucleotide for detection of SNP TSC0018618
ggttatgtgtttg

SEQ ID NO: 72040 - DNA, 13 bp, Artificial Sequence
  Oligonucleotide for detection of SNP TSC0018618
caaacacataacc

SEQ ID NO: 72041 - DNA, 13 bp, Artificial Sequence
  Oligonucleotide for detection of SNP TSC0018618
ggttacgtgtttg

SEQ ID NO: 72042 - DNA, 13 bp, Artificial Sequence
  Oligonucleotide for detection of SNP TSC0018618
caaacacgtaacc

SEQ ID NO: 72043 - DNA, 13 bp, Artificial Sequence
  Oligonucleotide for detection of SNP TSC0018618
taggtatgtggty

SEQ ID NO: 72044 - DNA, 13 bp, Artificial Sequence
  Oligonucleotide for detection of SNP TSC0018618
raccacataccta

SEQ ID NO: 72045 - DNA, 13 bp, Artificial Sequence
  Oligonucleotide for detection of SNP TSC0018618
taggtacgtggty

SEQ ID NO: 72046 - DNA, 13 bp, Artificial Sequence
  Oligonucleotide for detection of SNP TSC0018618
raccacgtaccta

SEQ ID NO: 72047 - DNA, 13 bp, Artificial Sequence
  Oligonucleotide for detection of SNP TSC0018619
aagtggggtagta

SEQ ID NO: 72048 - DNA, 13 bp, Artificial Sequence
  Oligonucleotide for detection of SNP TSC0018619
tactaccccactt

SEQ ID NO: 72049 - DNA, 13 bp, Artificial Sequence
  Oligonucleotide for detection of SNP TSC0018619
aagtggagtagta

SEQ ID NO: 72050 - DNA, 13 bp, Artificial Sequence
  Oligonucleotide for detection of SNP TSC0018619
tactactccactt

SEQ ID NO: 72051 - DNA, 13 bp, Artificial Sequence
  Oligonucleotide for detection of SNP TSC0018620
tagtaagtataty

SEQ ID NO: 72052 - DNA, 13 bp, Artificial Sequence
  Oligonucleotide for detection of SNP TSC0018620
ratatacttacta

SEQ ID NO: 72053 - DNA, 13 bp, Artificial Sequence
  Oligonucleotide for detection of SNP TSC0018620
tagtaaatataty

SEQ ID NO: 72054 - DNA, 13 bp, Artificial Sequence
  Oligonucleotide for detection of SNP TSC0018620
ratatatttacta

SEQ ID NO: 72055 - DNA, 13 bp, Artificial Sequence
  Oligonucleotide for detection of SNP TSC0018625
aaggagatatttt

SEQ ID NO: 72056 - DNA, 13 bp, Artificial Sequence
  Oligonucleotide for detection of SNP TSC0018625
aaaatatctcctt

SEQ ID NO: 72057 - DNA, 13 bp, Artificial Sequence
  Oligonucleotide for detection of SNP TSC0018625
aaggaggtatttt

SEQ ID NO: 72058 - DNA, 13 bp, Artificial Sequence
  Oligonucleotide for detection of SNP TSC0018625
aaaatacctcctt

SEQ ID NO: 72059 - DNA, 13 bp, Artificial Sequence
  Oligonucleotide for detection of SNP TSC0018626
tgttttttattty

SEQ ID NO: 72060 - DNA, 13 bp, Artificial Sequence
  Oligonucleotide for detection of SNP TSC0018626
raaataaaaaaca

SEQ ID NO: 72061 - DNA, 13 bp, Artificial Sequence
  Oligonucleotide for detection of SNP TSC0018626
ggggtgtgaggta

SEQ ID NO: 72062 - DNA, 13 bp, Artificial Sequence
  Oligonucleotide for detection of SNP TSC0018626
tacctcacacccc

SEQ ID NO: 72063 - DNA, 13 bp, Artificial Sequence
  Oligonucleotide for detection of SNP TSC0018626
ggggtgggaggta

SEQ ID NO: 72064 - DNA, 13 bp, Artificial Sequence
  Oligonucleotide for detection of SNP TSC0018626
tacctcccacccc

SEQ ID NO: 72065 - DNA, 13 bp, Artificial Sequence
  Oligonucleotide for detection of SNP TSC0018627
tatttaagatttg

SEQ ID NO: 72066 - DNA, 13 bp, Artificial Sequence
  Oligonucleotide for detection of SNP TSC0018627
caaatcttaaata

SEQ ID NO: 72067 - DNA, 13 bp, Artificial Sequence
  Oligonucleotide for detection of SNP TSC0018627
tatttaggatttg

SEQ ID NO: 72068 - DNA, 13 bp, Artificial Sequence
  Oligonucleotide for detection of SNP TSC0018627
caaatcctaaata

SEQ ID NO: 72069 - DNA, 13 bp, Artificial Sequence
  Oligonucleotide for detection of SNP TSC0018627
tatttaagattcg

SEQ ID NO: 72070 - DNA, 13 bp, Artificial Sequence
  Oligonucleotide for detection of SNP TSC0018627
cgaatcttaaata

SEQ ID NO: 72071 - DNA, 13 bp, Artificial Sequence
  Oligonucleotide for detection of SNP TSC0018627
tatttaggattcg

SEQ ID NO: 72072 - DNA, 13 bp, Artificial Sequence
  Oligonucleotide for detection of SNP TSC0018627
cgaatcctaaata

SEQ ID NO: 72073 - DNA, 13 bp, Artificial Sequence
  Oligonucleotide for detection of SNP TSC0018628
gtaagatagtaaa

SEQ ID NO: 72074 - DNA, 13 bp, Artificial Sequence
  Oligonucleotide for detection of SNP TSC0018628
tttactatcttac

SEQ ID NO: 72075 - DNA, 13 bp, Artificial Sequence
  Oligonucleotide for detection of SNP TSC0018628
gtaagagagtaaa

SEQ ID NO: 72076 - DNA, 13 bp, Artificial Sequence
  Oligonucleotide for detection of SNP TSC0018628
tttactctcttac

SEQ ID NO: 72077 - DNA, 13 bp, Artificial Sequence
  Oligonucleotide for detection of SNP TSC0018629
ttagaagttattt

SEQ ID NO: 72078 - DNA, 13 bp, Artificial Sequence
  Oligonucleotide for detection of SNP TSC0018629
aaataacttctaa

SEQ ID NO: 72079 - DNA, 13 bp, Artificial Sequence
  Oligonucleotide for detection of SNP TSC0018632
ataatagtaggta

SEQ ID NO: 72080 - DNA, 13 bp, Artificial Sequence
  Oligonucleotide for detection of SNP TSC0018632
tacctactattat

SEQ ID NO: 72081 - DNA, 13 bp, Artificial Sequence
  Oligonucleotide for detection of SNP TSC0018632
ataatattaggta

SEQ ID NO: 72082 - DNA, 13 bp, Artificial Sequence
  Oligonucleotide for detection of SNP TSC0018632
tacctaatattat

SEQ ID NO: 72083 - DNA, 13 bp, Artificial Sequence
  Oligonucleotide for detection of SNP TSC0018632
tgtttattattgt

SEQ ID NO: 72084 - DNA, 13 bp, Artificial Sequence
  Oligonucleotide for detection of SNP TSC0018632
acaataataaaca

SEQ ID NO: 72085 - DNA, 13 bp, Artificial Sequence
  Oligonucleotide for detection of SNP TSC0018632
tgtttaatattgt

SEQ ID NO: 72086 - DNA, 13 bp, Artificial Sequence
  Oligonucleotide for detection of SNP TSC0018632
acaatattaaaca

SEQ ID NO: 72087 - DNA, 13 bp, Artificial Sequence
  Oligonucleotide for detection of SNP TSC0018633
attagtattgggt

SEQ ID NO: 72088 - DNA, 13 bp, Artificial Sequence
  Oligonucleotide for detection of SNP TSC0018633
acccaatactaat

SEQ ID NO: 72089 - DNA, 13 bp, Artificial Sequence
  Oligonucleotide for detection of SNP TSC0018633
attagttttgggt

SEQ ID NO: 72090 - DNA, 13 bp, Artificial Sequence
  Oligonucleotide for detection of SNP TSC0018633
acccaaaactaat

SEQ ID NO: 72091 - DNA, 13 bp, Artificial Sequence
  Oligonucleotide for detection of SNP TSC0018633
atttagtgttggt

SEQ ID NO: 72092 - DNA, 13 bp, Artificial Sequence
  Oligonucleotide for detection of SNP TSC0018633
accaacactaaat

SEQ ID NO: 72093 - DNA, 13 bp, Artificial Sequence
  Oligonucleotide for detection of SNP TSC0018633
atttagagttggt

SEQ ID NO: 72094 - DNA, 13 bp, Artificial Sequence
  Oligonucleotide for detection of SNP TSC0018633
accaactctaaat

SEQ ID NO: 72095 - DNA, 13 bp, Artificial Sequence
  Oligonucleotide for detection of SNP TSC0018634
agggtgataggat

SEQ ID NO: 72096 - DNA, 13 bp, Artificial Sequence
  Oligonucleotide for detection of SNP TSC0018634
atcctatcaccct

SEQ ID NO: 72097 - DNA, 13 bp, Artificial Sequence
  Oligonucleotide for detection of SNP TSC0018634
agggtggtaggat

SEQ ID NO: 72098 - DNA, 13 bp, Artificial Sequence
  Oligonucleotide for detection of SNP TSC0018634
atcctaccaccct

SEQ ID NO: 72099 - DNA, 13 bp, Artificial Sequence
  Oligonucleotide for detection of SNP TSC0018634
agggcgataggat

SEQ ID NO: 72100 - DNA, 13 bp, Artificial Sequence
  Oligonucleotide for detection of SNP TSC0018634
atcctatcgccct

SEQ ID NO: 72101 - DNA, 13 bp, Artificial Sequence
  Oligonucleotide for detection of SNP TSC0018634
agggcggtaggat

SEQ ID NO: 72102 - DNA, 13 bp, Artificial Sequence
  Oligonucleotide for detection of SNP TSC0018634
atcctaccgccct

SEQ ID NO: 72103 - DNA, 13 bp, Artificial Sequence
  Oligonucleotide for detection of SNP TSC0018635
tggttgtgtttay

SEQ ID NO: 72104 - DNA, 13 bp, Artificial Sequence
  Oligonucleotide for detection of SNP TSC0018635
rtaaacacaacca

SEQ ID NO: 72105 - DNA, 13 bp, Artificial Sequence
  Oligonucleotide for detection of SNP TSC0018635
cggttgtgtttay

SEQ ID NO: 72106 - DNA, 13 bp, Artificial Sequence
  Oligonucleotide for detection of SNP TSC0018635
rtaaacacaaccg

SEQ ID NO: 72107 - DNA, 13 bp, Artificial Sequence
  Oligonucleotide for detection of SNP TSC0018635
tggttgcgtttay

SEQ ID NO: 72108 - DNA, 13 bp, Artificial Sequence
  Oligonucleotide for detection of SNP TSC0018635
rtaaacgcaacca

SEQ ID NO: 72109 - DNA, 13 bp, Artificial Sequence
  Oligonucleotide for detection of SNP TSC0018635
cggttgcgtttay

SEQ ID NO: 72110 - DNA, 13 bp, Artificial Sequence
  Oligonucleotide for detection of SNP TSC0018635
rtaaacgcaaccg

SEQ ID NO: 72111 - DNA, 13 bp, Artificial Sequence
  Oligonucleotide for detection of SNP TSC0018635
gtggatgtagttg

SEQ ID NO: 72112 - DNA, 13 bp, Artificial Sequence
  Oligonucleotide for detection of SNP TSC0018635
caactacatccac

SEQ ID NO: 72113 - DNA, 13 bp, Artificial Sequence
  Oligonucleotide for detection of SNP TSC0018635
gtggatatagttg

SEQ ID NO: 72114 - DNA, 13 bp, Artificial Sequence
  Oligonucleotide for detection of SNP TSC0018635
caactatatccac

SEQ ID NO: 72115 - DNA, 13 bp, Artificial Sequence
  Oligonucleotide for detection of SNP TSC0018635
gtggacgtagttg

SEQ ID NO: 72116 - DNA, 13 bp, Artificial Sequence
  Oligonucleotide for detection of SNP TSC0018635
caactacgtccac

SEQ ID NO: 72117 - DNA, 13 bp, Artificial Sequence
  Oligonucleotide for detection of SNP TSC0018635
gtggatatagtcg

SEQ ID NO: 72118 - DNA, 13 bp, Artificial Sequence
  Oligonucleotide for detection of SNP TSC0018635
cgactatatccac

SEQ ID NO: 72119 - DNA, 13 bp, Artificial Sequence
  Oligonucleotide for detection of SNP TSC0018635
gtggatgtagtcg

SEQ ID NO: 72120 - DNA, 13 bp, Artificial Sequence
  Oligonucleotide for detection of SNP TSC0018635
cgactacatccac

SEQ ID NO: 72121 - DNA, 13 bp, Artificial Sequence
  Oligonucleotide for detection of SNP TSC0018635
gtggacgtagtcg

SEQ ID NO: 72122 - DNA, 13 bp, Artificial Sequence
  Oligonucleotide for detection of SNP TSC0018635
cgactacgtccac

SEQ ID NO: 72123 - DNA, 13 bp, Artificial Sequence
  Oligonucleotide for detection of SNP TSC0018638
atgggtatatatt

SEQ ID NO: 72124 - DNA, 13 bp, Artificial Sequence
  Oligonucleotide for detection of SNP TSC0018638
aatatatacccat

SEQ ID NO: 72125 - DNA, 13 bp, Artificial Sequence
  Oligonucleotide for detection of SNP TSC0018638
atgggtgtatatt

SEQ ID NO: 72126 - DNA, 13 bp, Artificial Sequence
  Oligonucleotide for detection of SNP TSC0018638
aatatacacccat

SEQ ID NO: 72127 - DNA, 13 bp, Artificial Sequence
  Oligonucleotide for detection of SNP TSC0018638
atgggcgtatatt

SEQ ID NO: 72128 - DNA, 13 bp, Artificial Sequence
  Oligonucleotide for detection of SNP TSC0018638
aatatacgcccat

SEQ ID NO: 72129 - DNA, 13 bp, Artificial Sequence
  Oligonucleotide for detection of SNP TSC0018638
aatgtatgtttat

SEQ ID NO: 72130 - DNA, 13 bp, Artificial Sequence
  Oligonucleotide for detection of SNP TSC0018638
ataaacatacatt

SEQ ID NO: 72131 - DNA, 13 bp, Artificial Sequence
  Oligonucleotide for detection of SNP TSC0018638
aatgtacgtttat

SEQ ID NO: 72132 - DNA, 13 bp, Artificial Sequence
  Oligonucleotide for detection of SNP TSC0018638
ataaacgtacatt

SEQ ID NO: 72133 - DNA, 13 bp, Artificial Sequence
  Oligonucleotide for detection of SNP TSC0018642
gagggtgggattg

SEQ ID NO: 72134 - DNA, 13 bp, Artificial Sequence
  Oligonucleotide for detection of SNP TSC0018642
caatcccaccctc

SEQ ID NO: 72135 - DNA, 13 bp, Artificial Sequence
  Oligonucleotide for detection of SNP TSC0018642
gagggtaggattg

SEQ ID NO: 72136 - DNA, 13 bp, Artificial Sequence
  Oligonucleotide for detection of SNP TSC0018642
caatcctaccctc

SEQ ID NO: 72137 - DNA, 13 bp, Artificial Sequence
  Oligonucleotide for detection of SNP TSC0018643
ttatatattagtt

SEQ ID NO: 72138 - DNA, 13 bp, Artificial Sequence
  Oligonucleotide for detection of SNP TSC0018643
aactaatatataa

SEQ ID NO: 72139 - DNA, 13 bp, Artificial Sequence
  Oligonucleotide for detection of SNP TSC0018643
ttatattttagtt

SEQ ID NO: 72140 - DNA, 13 bp, Artificial Sequence
  Oligonucleotide for detection of SNP TSC0018643
aactaaaatataa

SEQ ID NO: 72141 - DNA, 13 bp, Artificial Sequence
  Oligonucleotide for detection of SNP TSC0018643
agttggtgtgtgg

SEQ ID NO: 72142 - DNA, 13 bp, Artificial Sequence
  Oligonucleotide for detection of SNP TSC0018643
ccacacaccaact

SEQ ID NO: 72143 - DNA, 13 bp, Artificial Sequence
  Oligonucleotide for detection of SNP TSC0018643
agttggagtgtgg

SEQ ID NO: 72144 - DNA, 13 bp, Artificial Sequence
  Oligonucleotide for detection of SNP TSC0018643
ccacactccaact

SEQ ID NO: 72145 - DNA, 13 bp, Artificial Sequence
  Oligonucleotide for detection of SNP TSC0018644
gtaggggagttgg

SEQ ID NO: 72146 - DNA, 13 bp, Artificial Sequence
  Oligonucleotide for detection of SNP TSC0018644
ccaactcccctac

SEQ ID NO: 72147 - DNA, 13 bp, Artificial Sequence
  Oligonucleotide for detection of SNP TSC0018644
gtagggaagttgg

SEQ ID NO: 72148 - DNA, 13 bp, Artificial Sequence
  Oligonucleotide for detection of SNP TSC0018644
ccaacttccctac

SEQ ID NO: 72149 - DNA, 13 bp, Artificial Sequence
  Oligonucleotide for detection of SNP TSC0018645
agaggagggatty

SEQ ID NO: 72150 - DNA, 13 bp, Artificial Sequence
  Oligonucleotide for detection of SNP TSC0018645
raatccctcctct

SEQ ID NO: 72151 - DNA, 13 bp, Artificial Sequence
  Oligonucleotide for detection of SNP TSC0018645
gaatttttttttt

SEQ ID NO: 72152 - DNA, 13 bp, Artificial Sequence
  Oligonucleotide for detection of SNP TSC0018645
aaaaaaaaaattc

SEQ ID NO: 72153 - DNA, 13 bp, Artificial Sequence
  Oligonucleotide for detection of SNP TSC0018646
gtagagattttga

SEQ ID NO: 72154 - DNA, 13 bp, Artificial Sequence
  Oligonucleotide for detection of SNP TSC0018646
tcaaaatctctac

SEQ ID NO: 72155 - DNA, 13 bp, Artificial Sequence
  Oligonucleotide for detection of SNP TSC0018646
gtagagtttttga

SEQ ID NO: 72156 - DNA, 13 bp, Artificial Sequence
  Oligonucleotide for detection of SNP TSC0018646
tcaaaaactctac

SEQ ID NO: 72157 - DNA, 13 bp, Artificial Sequence
  Oligonucleotide for detection of SNP TSC0018646
ttaagatttttgy

SEQ ID NO: 72158 - DNA, 13 bp, Artificial Sequence
  Oligonucleotide for detection of SNP TSC0018646
rcaaaaatcttaa

SEQ ID NO: 72159 - DNA, 13 bp, Artificial Sequence
  Oligonucleotide for detection of SNP TSC0018646
ttaagaattttgy

SEQ ID NO: 72160 - DNA, 13 bp, Artificial Sequence
  Oligonucleotide for detection of SNP TSC0018646
rcaaaattcttaa

SEQ ID NO: 72161 - DNA, 13 bp, Artificial Sequence
  Oligonucleotide for detection of SNP TSC0018647
gtttgagggagga

SEQ ID NO: 72162 - DNA, 13 bp, Artificial Sequence
  Oligonucleotide for detection of SNP TSC0018647
tcctccctcaaac

SEQ ID NO: 72163 - DNA, 13 bp, Artificial Sequence
  Oligonucleotide for detection of SNP TSC0018647
gtttgatggagga

SEQ ID NO: 72164 - DNA, 13 bp, Artificial Sequence
  Oligonucleotide for detection of SNP TSC0018647
tcctccatcaaac

SEQ ID NO: 72165 - DNA, 13 bp, Artificial Sequence
  Oligonucleotide for detection of SNP TSC0018647
tttttttttagay

SEQ ID NO: 72166 - DNA, 13 bp, Artificial Sequence
  Oligonucleotide for detection of SNP TSC0018647
rtctaaaaaaaaa

SEQ ID NO: 72167 - DNA, 13 bp, Artificial Sequence
  Oligonucleotide for detection of SNP TSC0018647
ttttttattagay

SEQ ID NO: 72168 - DNA, 13 bp, Artificial Sequence
  Oligonucleotide for detection of SNP TSC0018647
rtctaataaaaaa

SEQ ID NO: 72169 - DNA, 13 bp, Artificial Sequence
  Oligonucleotide for detection of SNP TSC0018648
attttaatgtagt

SEQ ID NO: 72170 - DNA, 13 bp, Artificial Sequence
  Oligonucleotide for detection of SNP TSC0018648
actacattaaaat

SEQ ID NO: 72171 - DNA, 13 bp, Artificial Sequence
  Oligonucleotide for detection of SNP TSC0018648
attttagtgtagt

SEQ ID NO: 72172 - DNA, 13 bp, Artificial Sequence
  Oligonucleotide for detection of SNP TSC0018648
actacactaaaat

SEQ ID NO: 72173 - DNA, 13 bp, Artificial Sequence
  Oligonucleotide for detection of SNP TSC0018649
gttttagtgaggg

SEQ ID NO: 72174 - DNA, 13 bp, Artificial Sequence
  Oligonucleotide for detection of SNP TSC0018649
ccctcactaaaac

SEQ ID NO: 72175 - DNA, 13 bp, Artificial Sequence
  Oligonucleotide for detection of SNP TSC0018649
gttttaatgaggg

SEQ ID NO: 72176 - DNA, 13 bp, Artificial Sequence
  Oligonucleotide for detection of SNP TSC0018649
ccctcattaaaac

SEQ ID NO: 72177 - DNA, 13 bp, Artificial Sequence
  Oligonucleotide for detection of SNP TSC0018650
gagagatagagaa

SEQ ID NO: 72178 - DNA, 13 bp, Artificial Sequence
  Oligonucleotide for detection of SNP TSC0018650
ttctctatctctc

SEQ ID NO: 72179 - DNA, 13 bp, Artificial Sequence
  Oligonucleotide for detection of SNP TSC0018652
tataataggtttt

SEQ ID NO: 72180 - DNA, 13 bp, Artificial Sequence
  Oligonucleotide for detection of SNP TSC0018652
aaaacctattata

SEQ ID NO: 72181 - DNA, 13 bp, Artificial Sequence
  Oligonucleotide for detection of SNP TSC0018652
tataatgggtttt

SEQ ID NO: 72182 - DNA, 13 bp, Artificial Sequence
  Oligonucleotide for detection of SNP TSC0018652
aaaacccattata

SEQ ID NO: 72183 - DNA, 13 bp, Artificial Sequence
  Oligonucleotide for detection of SNP TSC0018652
tataacgggtttt

SEQ ID NO: 72184 - DNA, 13 bp, Artificial Sequence
  Oligonucleotide for detection of SNP TSC0018652
aaaacccgttata

SEQ ID NO: 72185 - DNA, 13 bp, Artificial Sequence
  Oligonucleotide for detection of SNP TSC0018652
aaaatttgttgtg

SEQ ID NO: 72186 - DNA, 13 bp, Artificial Sequence
  Oligonucleotide for detection of SNP TSC0018652
cacaacaaatttt

SEQ ID NO: 72187 - DNA, 13 bp, Artificial Sequence
  Oligonucleotide for detection of SNP TSC0018652
aaaattcgttgtg

SEQ ID NO: 72188 - DNA, 13 bp, Artificial Sequence
  Oligonucleotide for detection of SNP TSC0018652
cacaacgaatttt

SEQ ID NO: 72189 - DNA, 13 bp, Artificial Sequence
  Oligonucleotide for detection of SNP TSC0018653
taggaggatagat

SEQ ID NO: 72190 - DNA, 13 bp, Artificial Sequence
  Oligonucleotide for detection of SNP TSC0018653
atctatcctccta

SEQ ID NO: 72191 - DNA, 13 bp, Artificial Sequence
  Oligonucleotide for detection of SNP TSC0018653
taggagaatagat

SEQ ID NO: 72192 - DNA, 13 bp, Artificial Sequence
  Oligonucleotide for detection of SNP TSC0018653
atctattctccta

SEQ ID NO: 72193 - DNA, 13 bp, Artificial Sequence
  Oligonucleotide for detection of SNP TSC0018655
aggaggaagttta

SEQ ID NO: 72194 - DNA, 13 bp, Artificial Sequence
  Oligonucleotide for detection of SNP TSC0018655
taaacttcctcct

SEQ ID NO: 72195 - DNA, 13 bp, Artificial Sequence
  Oligonucleotide for detection of SNP TSC0018655
aggaggtagttta

SEQ ID NO: 72196 - DNA, 13 bp, Artificial Sequence
  Oligonucleotide for detection of SNP TSC0018655
taaactacctcct

SEQ ID NO: 72197 - DNA, 13 bp, Artificial Sequence
  Oligonucleotide for detection of SNP TSC0018655
taagttttttttt

SEQ ID NO: 72198 - DNA, 13 bp, Artificial Sequence
  Oligonucleotide for detection of SNP TSC0018655
aaaaaaaaactta

SEQ ID NO: 72199 - DNA, 13 bp, Artificial Sequence
  Oligonucleotide for detection of SNP TSC0018655
taagttgtttttt

SEQ ID NO: 72200 - DNA, 13 bp, Artificial Sequence
  Oligonucleotide for detection of SNP TSC0018655
aaaaaacaactta

SEQ ID NO: 72201 - DNA, 13 bp, Artificial Sequence
  Oligonucleotide for detection of SNP TSC0018656
gtagaggtggagg

SEQ ID NO: 72202 - DNA, 13 bp, Artificial Sequence
  Oligonucleotide for detection of SNP TSC0018656
cctccacctctac

SEQ ID NO: 72203 - DNA, 13 bp, Artificial Sequence
  Oligonucleotide for detection of SNP TSC0018656
gtagagatggagg

SEQ ID NO: 72204 - DNA, 13 bp, Artificial Sequence
  Oligonucleotide for detection of SNP TSC0018656
cctccatctctac

SEQ ID NO: 72205 - DNA, 13 bp, Artificial Sequence
  Oligonucleotide for detection of SNP TSC0018657
ttaagtatagggg

SEQ ID NO: 72206 - DNA, 13 bp, Artificial Sequence
  Oligonucleotide for detection of SNP TSC0018657
cccctatacttaa

SEQ ID NO: 72207 - DNA, 13 bp, Artificial Sequence
  Oligonucleotide for detection of SNP TSC0018657
ttaagtttagggg

SEQ ID NO: 72208 - DNA, 13 bp, Artificial Sequence
  Oligonucleotide for detection of SNP TSC0018657
cccctaaacttaa

SEQ ID NO: 72209 - DNA, 13 bp, Artificial Sequence
  Oligonucleotide for detection of SNP TSC0018657
tttttgtatttgg

SEQ ID NO: 72210 - DNA, 13 bp, Artificial Sequence
  Oligonucleotide for detection of SNP TSC0018657
ccaaatacaaaaa

SEQ ID NO: 72211 - DNA, 13 bp, Artificial Sequence
  Oligonucleotide for detection of SNP TSC0018657
tttttgaatttgg

SEQ ID NO: 72212 - DNA, 13 bp, Artificial Sequence
  Oligonucleotide for detection of SNP TSC0018657
ccaaattcaaaaa

SEQ ID NO: 72213 - DNA, 13 bp, Artificial Sequence
  Oligonucleotide for detection of SNP TSC0018658
ttagtttgtttta

SEQ ID NO: 72214 - DNA, 13 bp, Artificial Sequence
  Oligonucleotide for detection of SNP TSC0018658
taaaacaaactaa

SEQ ID NO: 72215 - DNA, 13 bp, Artificial Sequence
  Oligonucleotide for detection of SNP TSC0018658
ttagttcgtttta

SEQ ID NO: 72216 - DNA, 13 bp, Artificial Sequence
  Oligonucleotide for detection of SNP TSC0018658
taaaacgaactaa

SEQ ID NO: 72217 - DNA, 13 bp, Artificial Sequence
  Oligonucleotide for detection of SNP TSC0018658
tgggattaattga

SEQ ID NO: 72218 - DNA, 13 bp, Artificial Sequence
  Oligonucleotide for detection of SNP TSC0018658
tcaattaatccca

SEQ ID NO: 72219 - DNA, 13 bp, Artificial Sequence
  Oligonucleotide for detection of SNP TSC0018658
tgggatgaattga

SEQ ID NO: 72220 - DNA, 13 bp, Artificial Sequence
  Oligonucleotide for detection of SNP TSC0018658
tcaattcatccca

SEQ ID NO: 72221 - DNA, 13 bp, Artificial Sequence
  Oligonucleotide for detection of SNP TSC0018658
tgggacgaattga

SEQ ID NO: 72222 - DNA, 13 bp, Artificial Sequence
  Oligonucleotide for detection of SNP TSC0018658
tcaattcgtccca

SEQ ID NO: 72223 - DNA, 13 bp, Artificial Sequence
  Oligonucleotide for detection of SNP TSC0018659
atttgtatgggat

SEQ ID NO: 72224 - DNA, 13 bp, Artificial Sequence
  Oligonucleotide for detection of SNP TSC0018659
atcccatacaaat

SEQ ID NO: 72225 - DNA, 13 bp, Artificial Sequence
  Oligonucleotide for detection of SNP TSC0018659
atttgtgtgggat

SEQ ID NO: 72226 - DNA, 13 bp, Artificial Sequence
  Oligonucleotide for detection of SNP TSC0018659
atcccacacaaat

SEQ ID NO: 72227 - DNA, 13 bp, Artificial Sequence
  Oligonucleotide for detection of SNP TSC0018659
atttgcgtgggat

SEQ ID NO: 72228 - DNA, 13 bp, Artificial Sequence
  Oligonucleotide for detection of SNP TSC0018659
atcccacgcaaat

SEQ ID NO: 72229 - DNA, 13 bp, Artificial Sequence
  Oligonucleotide for detection of SNP TSC0018659
attttatgtaggt

SEQ ID NO: 72230 - DNA, 13 bp, Artificial Sequence
  Oligonucleotide for detection of SNP TSC0018659
acctacataaaat

SEQ ID NO: 72231 - DNA, 13 bp, Artificial Sequence
  Oligonucleotide for detection of SNP TSC0018659
attttacgtaggt

SEQ ID NO: 72232 - DNA, 13 bp, Artificial Sequence
  Oligonucleotide for detection of SNP TSC0018659
acctacgtaaaat

SEQ ID NO: 72233 - DNA, 13 bp, Artificial Sequence
  Oligonucleotide for detection of SNP TSC0018660
tgggatatttgtg

SEQ ID NO: 72234 - DNA, 13 bp, Artificial Sequence
  Oligonucleotide for detection of SNP TSC0018660
cacaaatatccca

SEQ ID NO: 72235 - DNA, 13 bp, Artificial Sequence
  Oligonucleotide for detection of SNP TSC0018660
tgggatgtttgtg

SEQ ID NO: 72236 - DNA, 13 bp, Artificial Sequence
  Oligonucleotide for detection of SNP TSC0018660
cacaaacatccca

SEQ ID NO: 72237 - DNA, 13 bp, Artificial Sequence
  Oligonucleotide for detection of SNP TSC0018661
tatataaaaaaag

SEQ ID NO: 72238 - DNA, 13 bp, Artificial Sequence
  Oligonucleotide for detection of SNP TSC0018661
ctttttttatata

SEQ ID NO: 72239 - DNA, 13 bp, Artificial Sequence
  Oligonucleotide for detection of SNP TSC0018661
tatatataaaaag

SEQ ID NO: 72240 - DNA, 13 bp, Artificial Sequence
  Oligonucleotide for detection of SNP TSC0018661
ctttttatatata

SEQ ID NO: 72241 - DNA, 13 bp, Artificial Sequence
  Oligonucleotide for detection of SNP TSC0018662
aaaatatgaatty

SEQ ID NO: 72242 - DNA, 13 bp, Artificial Sequence
  Oligonucleotide for detection of SNP TSC0018662
raattcatatttt

SEQ ID NO: 72243 - DNA, 13 bp, Artificial Sequence
  Oligonucleotide for detection of SNP TSC0018662
aaaatacgaatty

SEQ ID NO: 72244 - DNA, 13 bp, Artificial Sequence
  Oligonucleotide for detection of SNP TSC0018662
raattcgtatttt

SEQ ID NO: 72245 - DNA, 13 bp, Artificial Sequence
  Oligonucleotide for detection of SNP TSC0018662
gaatttgtgtttt

SEQ ID NO: 72246 - DNA, 13 bp, Artificial Sequence
  Oligonucleotide for detection of SNP TSC0018662
aaaacacaaattc

SEQ ID NO: 72247 - DNA, 13 bp, Artificial Sequence
  Oligonucleotide for detection of SNP TSC0018662
gaatttatgtttt

SEQ ID NO: 72248 - DNA, 13 bp, Artificial Sequence
  Oligonucleotide for detection of SNP TSC0018662
aaaacataaattc

SEQ ID NO: 72249 - DNA, 13 bp, Artificial Sequence
  Oligonucleotide for detection of SNP TSC0018662
gaattcgtgtttt

SEQ ID NO: 72250 - DNA, 13 bp, Artificial Sequence
  Oligonucleotide for detection of SNP TSC0018662
aaaacacgaattc

SEQ ID NO: 72251 - DNA, 13 bp, Artificial Sequence
  Oligonucleotide for detection of SNP TSC0018663
gagttagttagaa

SEQ ID NO: 72252 - DNA, 13 bp, Artificial Sequence
  Oligonucleotide for detection of SNP TSC0018663
ttctaactaactc

SEQ ID NO: 72253 - DNA, 13 bp, Artificial Sequence
  Oligonucleotide for detection of SNP TSC0018663
gagttaattagaa

SEQ ID NO: 72254 - DNA, 13 bp, Artificial Sequence
  Oligonucleotide for detection of SNP TSC0018663
ttctaattaactc

SEQ ID NO: 72255 - DNA, 13 bp, Artificial Sequence
  Oligonucleotide for detection of SNP TSC0018664
tgtttttgtggtt

SEQ ID NO: 72256 - DNA, 13 bp, Artificial Sequence
  Oligonucleotide for detection of SNP TSC0018664
aaccacaaaaaca

SEQ ID NO: 72257 - DNA, 13 bp, Artificial Sequence
  Oligonucleotide for detection of SNP TSC0018664
tgttttcgtggtt

SEQ ID NO: 72258 - DNA, 13 bp, Artificial Sequence
  Oligonucleotide for detection of SNP TSC0018664
aaccacgaaaaca

SEQ ID NO: 72259 - DNA, 13 bp, Artificial Sequence
  Oligonucleotide for detection of SNP TSC0018664
agttatgaagata

SEQ ID NO: 72260 - DNA, 13 bp, Artificial Sequence
  Oligonucleotide for detection of SNP TSC0018664
tatcttcataact

SEQ ID NO: 72261 - DNA, 13 bp, Artificial Sequence
  Oligonucleotide for detection of SNP TSC0018664
agttataaagata

SEQ ID NO: 72262 - DNA, 13 bp, Artificial Sequence
  Oligonucleotide for detection of SNP TSC0018664
tatctttataact

SEQ ID NO: 72263 - DNA, 13 bp, Artificial Sequence
  Oligonucleotide for detection of SNP TSC0018664
agttacgaagata

SEQ ID NO: 72264 - DNA, 13 bp, Artificial Sequence
  Oligonucleotide for detection of SNP TSC0018664
tatcttcgtaact

SEQ ID NO: 72265 - DNA, 13 bp, Artificial Sequence
  Oligonucleotide for detection of SNP TSC0018665
agttttttttggg

SEQ ID NO: 72266 - DNA, 13 bp, Artificial Sequence
  Oligonucleotide for detection of SNP TSC0018665
cccaaaaaaaact

SEQ ID NO: 72267 - DNA, 13 bp, Artificial Sequence
  Oligonucleotide for detection of SNP TSC0018665
agttttgtttggg

SEQ ID NO: 72268 - DNA, 13 bp, Artificial Sequence
  Oligonucleotide for detection of SNP TSC0018665
cccaaacaaaact

SEQ ID NO: 72269 - DNA, 13 bp, Artificial Sequence
  Oligonucleotide for detection of SNP TSC0018665
tttaaagagggtt

SEQ ID NO: 72270 - DNA, 13 bp, Artificial Sequence
  Oligonucleotide for detection of SNP TSC0018665
aaccctctttaaa

SEQ ID NO: 72271 - DNA, 13 bp, Artificial Sequence
  Oligonucleotide for detection of SNP TSC0018665
tttaaatagggtt

SEQ ID NO: 72272 - DNA, 13 bp, Artificial Sequence
  Oligonucleotide for detection of SNP TSC0018665
aaccctatttaaa

SEQ ID NO: 72273 - DNA, 13 bp, Artificial Sequence
  Oligonucleotide for detection of SNP TSC0018668
gataatattattt

SEQ ID NO: 72274 - DNA, 13 bp, Artificial Sequence
  Oligonucleotide for detection of SNP TSC0018668
aaataatattatc

SEQ ID NO: 72275 - DNA, 13 bp, Artificial Sequence
  Oligonucleotide for detection of SNP TSC0018668
gataatgttattt

SEQ ID NO: 72276 - DNA, 13 bp, Artificial Sequence
  Oligonucleotide for detection of SNP TSC0018668
aaataacattatc

SEQ ID NO: 72277 - DNA, 13 bp, Artificial Sequence
  Oligonucleotide for detection of SNP TSC0018669
tttttagagtaat

SEQ ID NO: 72278 - DNA, 13 bp, Artificial Sequence
  Oligonucleotide for detection of SNP TSC0018669
attactctaaaaa

SEQ ID NO: 72279 - DNA, 13 bp, Artificial Sequence
  Oligonucleotide for detection of SNP TSC0018669
tttttatagtaat

SEQ ID NO: 72280 - DNA, 13 bp, Artificial Sequence
  Oligonucleotide for detection of SNP TSC0018669
attactataaaaa

SEQ ID NO: 72281 - DNA, 13 bp, Artificial Sequence
  Oligonucleotide for detection of SNP TSC0018670
ggaagtaaggtay

SEQ ID NO: 72282 - DNA, 13 bp, Artificial Sequence
  Oligonucleotide for detection of SNP TSC0018670
rtaccttacttcc

SEQ ID NO: 72283 - DNA, 13 bp, Artificial Sequence
  Oligonucleotide for detection of SNP TSC0018670
ggaagtgaggtay

SEQ ID NO: 72284 - DNA, 13 bp, Artificial Sequence
  Oligonucleotide for detection of SNP TSC0018670
rtacctcacttcc

SEQ ID NO: 72285 - DNA, 13 bp, Artificial Sequence
  Oligonucleotide for detection of SNP TSC0018670
ggaagcgaggtay

SEQ ID NO: 72286 - DNA, 13 bp, Artificial Sequence
  Oligonucleotide for detection of SNP TSC0018670
rtacctcgcttcc

SEQ ID NO: 72287 - DNA, 13 bp, Artificial Sequence
  Oligonucleotide for detection of SNP TSC0018670
gtgttttgtttty

SEQ ID NO: 72288 - DNA, 13 bp, Artificial Sequence
  Oligonucleotide for detection of SNP TSC0018670
raaaacaaaacac

SEQ ID NO: 72289 - DNA, 13 bp, Artificial Sequence
  Oligonucleotide for detection of SNP TSC0018670
gtgtttcgtttty

SEQ ID NO: 72290 - DNA, 13 bp, Artificial Sequence
  Oligonucleotide for detection of SNP TSC0018670
raaaacgaaacac

SEQ ID NO: 72291 - DNA, 13 bp, Artificial Sequence
  Oligonucleotide for detection of SNP TSC0018671
ggttatgttagaa

SEQ ID NO: 72292 - DNA, 13 bp, Artificial Sequence
  Oligonucleotide for detection of SNP TSC0018671
ttctaacataacc

SEQ ID NO: 72293 - DNA, 13 bp, Artificial Sequence
  Oligonucleotide for detection of SNP TSC0018671
ggttattttagaa

SEQ ID NO: 72294 - DNA, 13 bp, Artificial Sequence
  Oligonucleotide for detection of SNP TSC0018671
ttctaaaataacc

SEQ ID NO: 72295 - DNA, 13 bp, Artificial Sequence
  Oligonucleotide for detection of SNP TSC0018671
ggttacgttagaa

SEQ ID NO: 72296 - DNA, 13 bp, Artificial Sequence
  Oligonucleotide for detection of SNP TSC0018671
ttctaacgtaacc

SEQ ID NO: 72297 - DNA, 13 bp, Artificial Sequence
  Oligonucleotide for detection of SNP TSC0018671
ttttggtgtagty

SEQ ID NO: 72298 - DNA, 13 bp, Artificial Sequence
  Oligonucleotide for detection of SNP TSC0018671
ractacaccaaaa

SEQ ID NO: 72299 - DNA, 13 bp, Artificial Sequence
  Oligonucleotide for detection of SNP TSC0018671
ttttggagtagty

SEQ ID NO: 72300 - DNA, 13 bp, Artificial Sequence
  Oligonucleotide for detection of SNP TSC0018671
ractactccaaaa

SEQ ID NO: 72301 - DNA, 13 bp, Artificial Sequence
  Oligonucleotide for detection of SNP TSC0018671
ttttggcgtagty

SEQ ID NO: 72302 - DNA, 13 bp, Artificial Sequence
  Oligonucleotide for detection of SNP TSC0018671
ractacgccaaaa

SEQ ID NO: 72303 - DNA, 13 bp, Artificial Sequence
  Oligonucleotide for detection of SNP TSC0018674
ttgttggtggggt

SEQ ID NO: 72304 - DNA, 13 bp, Artificial Sequence
  Oligonucleotide for detection of SNP TSC0018674
accccaccaacaa

SEQ ID NO: 72305 - DNA, 13 bp, Artificial Sequence
  Oligonucleotide for detection of SNP TSC0018674
ttgttgatggggt

SEQ ID NO: 72306 - DNA, 13 bp, Artificial Sequence
  Oligonucleotide for detection of SNP TSC0018674
accccatcaacaa

SEQ ID NO: 72307 - DNA, 13 bp, Artificial Sequence
  Oligonucleotide for detection of SNP TSC0018676
tgttgtattttay

SEQ ID NO: 72308 - DNA, 13 bp, Artificial Sequence
  Oligonucleotide for detection of SNP TSC0018676
rtaaaatacaaca

SEQ ID NO: 72309 - DNA, 13 bp, Artificial Sequence
  Oligonucleotide for detection of SNP TSC0018677
tttattatgtttt

SEQ ID NO: 72310 - DNA, 13 bp, Artificial Sequence
  Oligonucleotide for detection of SNP TSC0018677
aaaacataataaa

SEQ ID NO: 72311 - DNA, 13 bp, Artificial Sequence
  Oligonucleotide for detection of SNP TSC0018678
gttgaaggttggy

SEQ ID NO: 72312 - DNA, 13 bp, Artificial Sequence
  Oligonucleotide for detection of SNP TSC0018678
rccaaccttcaac

SEQ ID NO: 72313 - DNA, 13 bp, Artificial Sequence
  Oligonucleotide for detection of SNP TSC0018678
gttgaaagttggy

SEQ ID NO: 72314 - DNA, 13 bp, Artificial Sequence
  Oligonucleotide for detection of SNP TSC0018678
rccaactttcaac

SEQ ID NO: 72315 - DNA, 13 bp, Artificial Sequence
  Oligonucleotide for detection of SNP TSC0018681
gggattagtaaat

SEQ ID NO: 72316 - DNA, 13 bp, Artificial Sequence
  Oligonucleotide for detection of SNP TSC0018681
atttactaatccc

SEQ ID NO: 72317 - DNA, 13 bp, Artificial Sequence
  Oligonucleotide for detection of SNP TSC0018681
gggattggtaaat

SEQ ID NO: 72318 - DNA, 13 bp, Artificial Sequence
  Oligonucleotide for detection of SNP TSC0018681
atttaccaatccc

SEQ ID NO: 72319 - DNA, 13 bp, Artificial Sequence
  Oligonucleotide for detection of SNP TSC0018682
attttaagaattg

SEQ ID NO: 72320 - DNA, 13 bp, Artificial Sequence
  Oligonucleotide for detection of SNP TSC0018682
caattcttaaaat

SEQ ID NO: 72321 - DNA, 13 bp, Artificial Sequence
  Oligonucleotide for detection of SNP TSC0018682
attttatgaattg

SEQ ID NO: 72322 - DNA, 13 bp, Artificial Sequence
  Oligonucleotide for detection of SNP TSC0018682
caattcataaaat

SEQ ID NO: 72323 - DNA, 13 bp, Artificial Sequence
  Oligonucleotide for detection of SNP TSC0018682
tagtttttggagt

SEQ ID NO: 72324 - DNA, 13 bp, Artificial Sequence
  Oligonucleotide for detection of SNP TSC0018682
actccaaaaacta

SEQ ID NO: 72325 - DNA, 13 bp, Artificial Sequence
  Oligonucleotide for detection of SNP TSC0018682
tagtttatggagt

SEQ ID NO: 72326 - DNA, 13 bp, Artificial Sequence
  Oligonucleotide for detection of SNP TSC0018682
actccataaacta

SEQ ID NO: 72327 - DNA, 13 bp, Artificial Sequence
  Oligonucleotide for detection of SNP TSC0018683
gtgtgggaatatg

SEQ ID NO: 72328 - DNA, 13 bp, Artificial Sequence
  Oligonucleotide for detection of SNP TSC0018683
catattcccacac

SEQ ID NO: 72329 - DNA, 13 bp, Artificial Sequence
  Oligonucleotide for detection of SNP TSC0018683
gtgtggtaatatg

SEQ ID NO: 72330 - DNA, 13 bp, Artificial Sequence
  Oligonucleotide for detection of SNP TSC0018683
catattaccacac

SEQ ID NO: 72331 - DNA, 13 bp, Artificial Sequence
  Oligonucleotide for detection of SNP TSC0018683
tatgtttttatay

SEQ ID NO: 72332 - DNA, 13 bp, Artificial Sequence
  Oligonucleotide for detection of SNP TSC0018683
rtataaaaacata

SEQ ID NO: 72333 - DNA, 13 bp, Artificial Sequence
  Oligonucleotide for detection of SNP TSC0018684
aattaggaaatay

SEQ ID NO: 72334 - DNA, 13 bp, Artificial Sequence
  Oligonucleotide for detection of SNP TSC0018684
rtatttcctaatt

SEQ ID NO: 72335 - DNA, 13 bp, Artificial Sequence
  Oligonucleotide for detection of SNP TSC0018684
aattagaaaatay

SEQ ID NO: 72336 - DNA, 13 bp, Artificial Sequence
  Oligonucleotide for detection of SNP TSC0018684
rtattttctaatt

SEQ ID NO: 72337 - DNA, 13 bp, Artificial Sequence
  Oligonucleotide for detection of SNP TSC0018685
ggtttatgtaatg

SEQ ID NO: 72338 - DNA, 13 bp, Artificial Sequence
  Oligonucleotide for detection of SNP TSC0018685
cattacataaacc

SEQ ID NO: 72339 - DNA, 13 bp, Artificial Sequence
  Oligonucleotide for detection of SNP TSC0018685
ggtttaggtaatg

SEQ ID NO: 72340 - DNA, 13 bp, Artificial Sequence
  Oligonucleotide for detection of SNP TSC0018685
cattacctaaacc

SEQ ID NO: 72341 - DNA, 13 bp, Artificial Sequence
  Oligonucleotide for detection of SNP TSC0018685
ggtttacgtaatg

SEQ ID NO: 72342 - DNA, 13 bp, Artificial Sequence
  Oligonucleotide for detection of SNP TSC0018685
cattacgtaaacc

SEQ ID NO: 72343 - DNA, 13 bp, Artificial Sequence
  Oligonucleotide for detection of SNP TSC0018685
tattatgtggaty

SEQ ID NO: 72344 - DNA, 13 bp, Artificial Sequence
  Oligonucleotide for detection of SNP TSC0018685
ratccacataata

SEQ ID NO: 72345 - DNA, 13 bp, Artificial Sequence
  Oligonucleotide for detection of SNP TSC0018685
tattatttggaty

SEQ ID NO: 72346 - DNA, 13 bp, Artificial Sequence
  Oligonucleotide for detection of SNP TSC0018685
ratccaaataata

SEQ ID NO: 72347 - DNA, 13 bp, Artificial Sequence
  Oligonucleotide for detection of SNP TSC0018685
tattacgtggaty

SEQ ID NO: 72348 - DNA, 13 bp, Artificial Sequence
  Oligonucleotide for detection of SNP TSC0018685
ratccacgtaata

SEQ ID NO: 72349 - DNA, 13 bp, Artificial Sequence
  Oligonucleotide for detection of SNP TSC0018686
ttttttaaggtty

SEQ ID NO: 72350 - DNA, 13 bp, Artificial Sequence
  Oligonucleotide for detection of SNP TSC0018686
raaccttaaaaaa

SEQ ID NO: 72351 - DNA, 13 bp, Artificial Sequence
  Oligonucleotide for detection of SNP TSC0018686
ttttttgaggtty

SEQ ID NO: 72352 - DNA, 13 bp, Artificial Sequence
  Oligonucleotide for detection of SNP TSC0018686
raacctcaaaaaa

SEQ ID NO: 72353 - DNA, 13 bp, Artificial Sequence
  Oligonucleotide for detection of SNP TSC0018689
ttgaagagggtgg

SEQ ID NO: 72354 - DNA, 13 bp, Artificial Sequence
  Oligonucleotide for detection of SNP TSC0018689
ccaccctcttcaa

SEQ ID NO: 72355 - DNA, 13 bp, Artificial Sequence
  Oligonucleotide for detection of SNP TSC0018689
ttgaagggggtgg

SEQ ID NO: 72356 - DNA, 13 bp, Artificial Sequence
  Oligonucleotide for detection of SNP TSC0018689
ccacccccttcaa

SEQ ID NO: 72357 - DNA, 13 bp, Artificial Sequence
  Oligonucleotide for detection of SNP TSC0018689
ttgaagagggcgg

SEQ ID NO: 72358 - DNA, 13 bp, Artificial Sequence
  Oligonucleotide for detection of SNP TSC0018689
ccgccctcttcaa

SEQ ID NO: 72359 - DNA, 13 bp, Artificial Sequence
  Oligonucleotide for detection of SNP TSC0018689
ttgaagggggcgg

SEQ ID NO: 72360 - DNA, 13 bp, Artificial Sequence
  Oligonucleotide for detection of SNP TSC0018689
ccgcccccttcaa

SEQ ID NO: 72361 - DNA, 13 bp, Artificial Sequence
  Oligonucleotide for detection of SNP TSC0018690
tggttaagtgtga

SEQ ID NO: 72362 - DNA, 13 bp, Artificial Sequence
  Oligonucleotide for detection of SNP TSC0018690
tcacacttaacca

SEQ ID NO: 72363 - DNA, 13 bp, Artificial Sequence
  Oligonucleotide for detection of SNP TSC0018690
tggttaggtgtga

SEQ ID NO: 72364 - DNA, 13 bp, Artificial Sequence
  Oligonucleotide for detection of SNP TSC0018690
tcacacctaacca

SEQ ID NO: 72365 - DNA, 13 bp, Artificial Sequence
  Oligonucleotide for detection of SNP TSC0018690
tggttaagcgtga

SEQ ID NO: 72366 - DNA, 13 bp, Artificial Sequence
  Oligonucleotide for detection of SNP TSC0018690
tcacgcttaacca

SEQ ID NO: 72367 - DNA, 13 bp, Artificial Sequence
  Oligonucleotide for detection of SNP TSC0018690
tggttaggcgtga

SEQ ID NO: 72368 - DNA, 13 bp, Artificial Sequence
  Oligonucleotide for detection of SNP TSC0018690
tcacgcctaacca

SEQ ID NO: 72369 - DNA, 13 bp, Artificial Sequence
  Oligonucleotide for detection of SNP TSC0018692
atgggggtttaty

SEQ ID NO: 72370 - DNA, 13 bp, Artificial Sequence
  Oligonucleotide for detection of SNP TSC0018692
rataaacccccat

SEQ ID NO: 72371 - DNA, 13 bp, Artificial Sequence
  Oligonucleotide for detection of SNP TSC0018692
atggggatttaty

SEQ ID NO: 72372 - DNA, 13 bp, Artificial Sequence
  Oligonucleotide for detection of SNP TSC0018692
rataaatccccat

SEQ ID NO: 72373 - DNA, 13 bp, Artificial Sequence
  Oligonucleotide for detection of SNP TSC0018693
gtaataatagagg

SEQ ID NO: 72374 - DNA, 13 bp, Artificial Sequence
  Oligonucleotide for detection of SNP TSC0018693
cctctattattac

SEQ ID NO: 72375 - DNA, 13 bp, Artificial Sequence
  Oligonucleotide for detection of SNP TSC0018693
gtaatagtagagg

SEQ ID NO: 72376 - DNA, 13 bp, Artificial Sequence
  Oligonucleotide for detection of SNP TSC0018693
cctctactattac

SEQ ID NO: 72377 - DNA, 13 bp, Artificial Sequence
  Oligonucleotide for detection of SNP TSC0018694
tgttttgttgtty

SEQ ID NO: 72378 - DNA, 13 bp, Artificial Sequence
  Oligonucleotide for detection of SNP TSC0018694
raacaacaaaaca

SEQ ID NO: 72379 - DNA, 13 bp, Artificial Sequence
  Oligonucleotide for detection of SNP TSC0018694
tgttttattgtty

SEQ ID NO: 72380 - DNA, 13 bp, Artificial Sequence
  Oligonucleotide for detection of SNP TSC0018694
raacaataaaaca

SEQ ID NO: 72381 - DNA, 13 bp, Artificial Sequence
  Oligonucleotide for detection of SNP TSC0018695
tttattgtggatg

SEQ ID NO: 72382 - DNA, 13 bp, Artificial Sequence
  Oligonucleotide for detection of SNP TSC0018695
catccacaataaa

SEQ ID NO: 72383 - DNA, 13 bp, Artificial Sequence
  Oligonucleotide for detection of SNP TSC0018695
tttattatggatg

SEQ ID NO: 72384 - DNA, 13 bp, Artificial Sequence
  Oligonucleotide for detection of SNP TSC0018695
catccataataaa

SEQ ID NO: 72385 - DNA, 13 bp, Artificial Sequence
  Oligonucleotide for detection of SNP TSC0018696
ggaggtagttttg

SEQ ID NO: 72386 - DNA, 13 bp, Artificial Sequence
  Oligonucleotide for detection of SNP TSC0018696
caaaactacctcc

SEQ ID NO: 72387 - DNA, 13 bp, Artificial Sequence
  Oligonucleotide for detection of SNP TSC0018696
ggaggtggttttg

SEQ ID NO: 72388 - DNA, 13 bp, Artificial Sequence
  Oligonucleotide for detection of SNP TSC0018696
caaaaccacctcc

SEQ ID NO: 72389 - DNA, 13 bp, Artificial Sequence
  Oligonucleotide for detection of SNP TSC0018696
ggaggcggttttg

SEQ ID NO: 72390 - DNA, 13 bp, Artificial Sequence
  Oligonucleotide for detection of SNP TSC0018696
caaaaccgcctcc

SEQ ID NO: 72391 - DNA, 13 bp, Artificial Sequence
  Oligonucleotide for detection of SNP TSC0018696
tagaattgtttty

SEQ ID NO: 72392 - DNA, 13 bp, Artificial Sequence
  Oligonucleotide for detection of SNP TSC0018696
raaaacaattcta

SEQ ID NO: 72393 - DNA, 13 bp, Artificial Sequence
  Oligonucleotide for detection of SNP TSC0018696
tagaatcgtttty

SEQ ID NO: 72394 - DNA, 13 bp, Artificial Sequence
  Oligonucleotide for detection of SNP TSC0018696
raaaacgattcta

SEQ ID NO: 72395 - DNA, 13 bp, Artificial Sequence
  Oligonucleotide for detection of SNP TSC0018702
gaggtgggggaga

SEQ ID NO: 72396 - DNA, 13 bp, Artificial Sequence
  Oligonucleotide for detection of SNP TSC0018702
tctcccccacctc

SEQ ID NO: 72397 - DNA, 13 bp, Artificial Sequence
  Oligonucleotide for detection of SNP TSC0018702
gaggtgagggaga

SEQ ID NO: 72398 - DNA, 13 bp, Artificial Sequence
  Oligonucleotide for detection of SNP TSC0018702
tctccctcacctc

SEQ ID NO: 72399 - DNA, 13 bp, Artificial Sequence
  Oligonucleotide for detection of SNP TSC0018703
tgtagatgattgg

SEQ ID NO: 72400 - DNA, 13 bp, Artificial Sequence
  Oligonucleotide for detection of SNP TSC0018703
ccaatcatctaca

SEQ ID NO: 72401 - DNA, 13 bp, Artificial Sequence
  Oligonucleotide for detection of SNP TSC0018703
tgtagacgattgg

SEQ ID NO: 72402 - DNA, 13 bp, Artificial Sequence
  Oligonucleotide for detection of SNP TSC0018703
ccaatcgtctaca

SEQ ID NO: 72403 - DNA, 13 bp, Artificial Sequence
  Oligonucleotide for detection of SNP TSC0018703
ttaattgtttgta

SEQ ID NO: 72404 - DNA, 13 bp, Artificial Sequence
  Oligonucleotide for detection of SNP TSC0018703
tacaaacaattaa

SEQ ID NO: 72405 - DNA, 13 bp, Artificial Sequence
  Oligonucleotide for detection of SNP TSC0018703
ttaattatttgta

SEQ ID NO: 72406 - DNA, 13 bp, Artificial Sequence
  Oligonucleotide for detection of SNP TSC0018703
tacaaataattaa

SEQ ID NO: 72407 - DNA, 13 bp, Artificial Sequence
  Oligonucleotide for detection of SNP TSC0018703
ttaatcgtttgta

SEQ ID NO: 72408 - DNA, 13 bp, Artificial Sequence
  Oligonucleotide for detection of SNP TSC0018703
tacaaacgattaa

SEQ ID NO: 72409 - DNA, 13 bp, Artificial Sequence
  Oligonucleotide for detection of SNP TSC0018704
gaaaggtatttta

SEQ ID NO: 72410 - DNA, 13 bp, Artificial Sequence
  Oligonucleotide for detection of SNP TSC0018704
taaaatacctttc

SEQ ID NO: 72411 - DNA, 13 bp, Artificial Sequence
  Oligonucleotide for detection of SNP TSC0018704
gaaagggatttta

SEQ ID NO: 72412 - DNA, 13 bp, Artificial Sequence
  Oligonucleotide for detection of SNP TSC0018704
taaaatccctttc

SEQ ID NO: 72413 - DNA, 13 bp, Artificial Sequence
  Oligonucleotide for detection of SNP TSC0018704
tggggtgttttty

SEQ ID NO: 72414 - DNA, 13 bp, Artificial Sequence
  Oligonucleotide for detection of SNP TSC0018704
raaaaacacccca

SEQ ID NO: 72415 - DNA, 13 bp, Artificial Sequence
  Oligonucleotide for detection of SNP TSC0018704
tggggttttttty

SEQ ID NO: 72416 - DNA, 13 bp, Artificial Sequence
  Oligonucleotide for detection of SNP TSC0018704
raaaaaaacccca

SEQ ID NO: 72417 - DNA, 13 bp, Artificial Sequence
  Oligonucleotide for detection of SNP TSC0018705
aggagggaggggg

SEQ ID NO: 72418 - DNA, 13 bp, Artificial Sequence
  Oligonucleotide for detection of SNP TSC0018705
ccccctccctcct

SEQ ID NO: 72419 - DNA, 13 bp, Artificial Sequence
  Oligonucleotide for detection of SNP TSC0018705
aggaggaaggggg

SEQ ID NO: 72420 - DNA, 13 bp, Artificial Sequence
  Oligonucleotide for detection of SNP TSC0018705
cccccttcctcct

SEQ ID NO: 72421 - DNA, 13 bp, Artificial Sequence
  Oligonucleotide for detection of SNP TSC0018709
tgaaatggttttt

SEQ ID NO: 72422 - DNA, 13 bp, Artificial Sequence
  Oligonucleotide for detection of SNP TSC0018709
aaaaaccatttca

SEQ ID NO: 72423 - DNA, 13 bp, Artificial Sequence
  Oligonucleotide for detection of SNP TSC0018709
tgaaatagttttt

SEQ ID NO: 72424 - DNA, 13 bp, Artificial Sequence
  Oligonucleotide for detection of SNP TSC0018709
aaaaactatttca

SEQ ID NO: 72425 - DNA, 13 bp, Artificial Sequence
  Oligonucleotide for detection of SNP TSC0018712
aaatggtgattta

SEQ ID NO: 72426 - DNA, 13 bp, Artificial Sequence
  Oligonucleotide for detection of SNP TSC0018712
taaatcaccattt

SEQ ID NO: 72427 - DNA, 13 bp, Artificial Sequence
  Oligonucleotide for detection of SNP TSC0018712
aaatggcgattta

SEQ ID NO: 72428 - DNA, 13 bp, Artificial Sequence
  Oligonucleotide for detection of SNP TSC0018712
taaatcgccattt

SEQ ID NO: 72429 - DNA, 13 bp, Artificial Sequence
  Oligonucleotide for detection of SNP TSC0018713
atttgagagatga

SEQ ID NO: 72430 - DNA, 13 bp, Artificial Sequence
  Oligonucleotide for detection of SNP TSC0018713
tcatctctcaaat

SEQ ID NO: 72431 - DNA, 13 bp, Artificial Sequence
  Oligonucleotide for detection of SNP TSC0018713
atttgaaagatga

SEQ ID NO: 72432 - DNA, 13 bp, Artificial Sequence
  Oligonucleotide for detection of SNP TSC0018713
tcatctttcaaat

SEQ ID NO: 72433 - DNA, 13 bp, Artificial Sequence
  Oligonucleotide for detection of SNP TSC0018714
gttggtggaaaaa

SEQ ID NO: 72434 - DNA, 13 bp, Artificial Sequence
  Oligonucleotide for detection of SNP TSC0018714
tttttccaccaac

SEQ ID NO: 72435 - DNA, 13 bp, Artificial Sequence
  Oligonucleotide for detection of SNP TSC0018714
gttggtagaaaaa

SEQ ID NO: 72436 - DNA, 13 bp, Artificial Sequence
  Oligonucleotide for detection of SNP TSC0018714
tttttctaccaac

SEQ ID NO: 72437 - DNA, 13 bp, Artificial Sequence
  Oligonucleotide for detection of SNP TSC0018715
aaatgtgtaaaay

SEQ ID NO: 72438 - DNA, 13 bp, Artificial Sequence
  Oligonucleotide for detection of SNP TSC0018715
rttttacacattt

SEQ ID NO: 72439 - DNA, 13 bp, Artificial Sequence
  Oligonucleotide for detection of SNP TSC0018715
aaatgtataaaay

SEQ ID NO: 72440 - DNA, 13 bp, Artificial Sequence
  Oligonucleotide for detection of SNP TSC0018715
rttttatacattt

SEQ ID NO: 72441 - DNA, 13 bp, Artificial Sequence
  Oligonucleotide for detection of SNP TSC0018717
aaatatattagay

SEQ ID NO: 72442 - DNA, 13 bp, Artificial Sequence
  Oligonucleotide for detection of SNP TSC0018717
rtctaatatattt

SEQ ID NO: 72443 - DNA, 13 bp, Artificial Sequence
  Oligonucleotide for detection of SNP TSC0018717
aaatatgttagay

SEQ ID NO: 72444 - DNA, 13 bp, Artificial Sequence
  Oligonucleotide for detection of SNP TSC0018717
rtctaacatattt

SEQ ID NO: 72445 - DNA, 13 bp, Artificial Sequence
  Oligonucleotide for detection of SNP TSC0018717
aaatacgttagay

SEQ ID NO: 72446 - DNA, 13 bp, Artificial Sequence
  Oligonucleotide for detection of SNP TSC0018717
rtctaacgtattt

SEQ ID NO: 72447 - DNA, 13 bp, Artificial Sequence
  Oligonucleotide for detection of SNP TSC0018717
gtttggtgtattt

SEQ ID NO: 72448 - DNA, 13 bp, Artificial Sequence
  Oligonucleotide for detection of SNP TSC0018717
aaatacaccaaac

SEQ ID NO: 72449 - DNA, 13 bp, Artificial Sequence
  Oligonucleotide for detection of SNP TSC0018717
gtttggcgtattt

SEQ ID NO: 72450 - DNA, 13 bp, Artificial Sequence
  Oligonucleotide for detection of SNP TSC0018717
aaatacgccaaac

SEQ ID NO: 72451 - DNA, 13 bp, Artificial Sequence
  Oligonucleotide for detection of SNP TSC0018718
tttatgtaattty

SEQ ID NO: 72452 - DNA, 13 bp, Artificial Sequence
  Oligonucleotide for detection of SNP TSC0018718
raaattacataaa

SEQ ID NO: 72453 - DNA, 13 bp, Artificial Sequence
  Oligonucleotide for detection of SNP TSC0018718
tttatggaattty

SEQ ID NO: 72454 - DNA, 13 bp, Artificial Sequence
  Oligonucleotide for detection of SNP TSC0018718
raaattccataaa

SEQ ID NO: 72455 - DNA, 13 bp, Artificial Sequence
  Oligonucleotide for detection of SNP TSC0018718
gaaattgtataaa

SEQ ID NO: 72456 - DNA, 13 bp, Artificial Sequence
  Oligonucleotide for detection of SNP TSC0018718
tttatacaatttc

SEQ ID NO: 72457 - DNA, 13 bp, Artificial Sequence
  Oligonucleotide for detection of SNP TSC0018718
gaaattttataaa

SEQ ID NO: 72458 - DNA, 13 bp, Artificial Sequence
  Oligonucleotide for detection of SNP TSC0018718
tttataaaatttc

SEQ ID NO: 72459 - DNA, 13 bp, Artificial Sequence
  Oligonucleotide for detection of SNP TSC0018719
gatattgttttag

SEQ ID NO: 72460 - DNA, 13 bp, Artificial Sequence
  Oligonucleotide for detection of SNP TSC0018719
ctaaaacaatatc

SEQ ID NO: 72461 - DNA, 13 bp, Artificial Sequence
  Oligonucleotide for detection of SNP TSC0018719
gatattattttag

SEQ ID NO: 72462 - DNA, 13 bp, Artificial Sequence
  Oligonucleotide for detection of SNP TSC0018719
ctaaaataatatc

SEQ ID NO: 72463 - DNA, 13 bp, Artificial Sequence
  Oligonucleotide for detection of SNP TSC0018720
ggaaatatataga

SEQ ID NO: 72464 - DNA, 13 bp, Artificial Sequence
  Oligonucleotide for detection of SNP TSC0018720
tctatatatttcc

SEQ ID NO: 72465 - DNA, 13 bp, Artificial Sequence
  Oligonucleotide for detection of SNP TSC0018720
ggaaatttataga

SEQ ID NO: 72466 - DNA, 13 bp, Artificial Sequence
  Oligonucleotide for detection of SNP TSC0018720
tctataaatttcc

SEQ ID NO: 72467 - DNA, 13 bp, Artificial Sequence
  Oligonucleotide for detection of SNP TSC0018720
tttgtaagtttty

SEQ ID NO: 72468 - DNA, 13 bp, Artificial Sequence
  Oligonucleotide for detection of SNP TSC0018720
raaaacttacaaa

SEQ ID NO: 72469 - DNA, 13 bp, Artificial Sequence
  Oligonucleotide for detection of SNP TSC0018721
atttgtaattttt

SEQ ID NO: 72470 - DNA, 13 bp, Artificial Sequence
  Oligonucleotide for detection of SNP TSC0018721
aaaaattacaaat

SEQ ID NO: 72471 - DNA, 13 bp, Artificial Sequence
  Oligonucleotide for detection of SNP TSC0018721
atttgtgattttt

SEQ ID NO: 72472 - DNA, 13 bp, Artificial Sequence
  Oligonucleotide for detection of SNP TSC0018721
aaaaatcacaaat

SEQ ID NO: 72473 - DNA, 13 bp, Artificial Sequence
  Oligonucleotide for detection of SNP TSC0018722
gggtgaaaagatg

SEQ ID NO: 72474 - DNA, 13 bp, Artificial Sequence
  Oligonucleotide for detection of SNP TSC0018722
catcttttcaccc

SEQ ID NO: 72475 - DNA, 13 bp, Artificial Sequence
  Oligonucleotide for detection of SNP TSC0018722
gggtgagaagatg

SEQ ID NO: 72476 - DNA, 13 bp, Artificial Sequence
  Oligonucleotide for detection of SNP TSC0018722
catcttctcaccc

SEQ ID NO: 72477 - DNA, 13 bp, Artificial Sequence
  Oligonucleotide for detection of SNP TSC0018723
ttgtggggttgga

SEQ ID NO: 72478 - DNA, 13 bp, Artificial Sequence
  Oligonucleotide for detection of SNP TSC0018723
tccaaccccacaa

SEQ ID NO: 72479 - DNA, 13 bp, Artificial Sequence
  Oligonucleotide for detection of SNP TSC0018723
ttgtggagttgga

SEQ ID NO: 72480 - DNA, 13 bp, Artificial Sequence
  Oligonucleotide for detection of SNP TSC0018723
tccaactccacaa

SEQ ID NO: 72481 - DNA, 13 bp, Artificial Sequence
  Oligonucleotide for detection of SNP TSC0018724
agattggttaatt

SEQ ID NO: 72482 - DNA, 13 bp, Artificial Sequence
  Oligonucleotide for detection of SNP TSC0018724
aattaaccaatct

SEQ ID NO: 72483 - DNA, 13 bp, Artificial Sequence
  Oligonucleotide for detection of SNP TSC0018724
agattgattaatt

SEQ ID NO: 72484 - DNA, 13 bp, Artificial Sequence
  Oligonucleotide for detection of SNP TSC0018724
aattaatcaatct

SEQ ID NO: 72485 - DNA, 13 bp, Artificial Sequence
  Oligonucleotide for detection of SNP TSC0018725
gttgtagtattty

SEQ ID NO: 72486 - DNA, 13 bp, Artificial Sequence
  Oligonucleotide for detection of SNP TSC0018725
raaatactacaac

SEQ ID NO: 72487 - DNA, 13 bp, Artificial Sequence
  Oligonucleotide for detection of SNP TSC0018725
gttgtattattty

SEQ ID NO: 72488 - DNA, 13 bp, Artificial Sequence
  Oligonucleotide for detection of SNP TSC0018725
raaataatacaac

SEQ ID NO: 72489 - DNA, 13 bp, Artificial Sequence
  Oligonucleotide for detection of SNP TSC0018725
ggagtgttgtagy

SEQ ID NO: 72490 - DNA, 13 bp, Artificial Sequence
  Oligonucleotide for detection of SNP TSC0018725
rctacaacactcc

SEQ ID NO: 72491 - DNA, 13 bp, Artificial Sequence
  Oligonucleotide for detection of SNP TSC0018725
ggagtgatgtagy

SEQ ID NO: 72492 - DNA, 13 bp, Artificial Sequence
  Oligonucleotide for detection of SNP TSC0018725
rctacatcactcc

SEQ ID NO: 72493 - DNA, 13 bp, Artificial Sequence
  Oligonucleotide for detection of SNP TSC0018726
ggaattataggat

SEQ ID NO: 72494 - DNA, 13 bp, Artificial Sequence
  Oligonucleotide for detection of SNP TSC0018726
atcctataattcc

SEQ ID NO: 72495 - DNA, 13 bp, Artificial Sequence
  Oligonucleotide for detection of SNP TSC0018726
ggaattgtaggat

SEQ ID NO: 72496 - DNA, 13 bp, Artificial Sequence
  Oligonucleotide for detection of SNP TSC0018726
atcctacaattcc

SEQ ID NO: 72497 - DNA, 13 bp, Artificial Sequence
  Oligonucleotide for detection of SNP TSC0018726
ggaatcgtaggat

SEQ ID NO: 72498 - DNA, 13 bp, Artificial Sequence
  Oligonucleotide for detection of SNP TSC0018726
atcctacgattcc

SEQ ID NO: 72499 - DNA, 13 bp, Artificial Sequence
  Oligonucleotide for detection of SNP TSC0018726
attttacggttty

SEQ ID NO: 72500 - DNA, 13 bp, Artificial Sequence
  Oligonucleotide for detection of SNP TSC0018726
raaaccgtaaaat

SEQ ID NO: 72501 - DNA, 13 bp, Artificial Sequence
  Oligonucleotide for detection of SNP TSC0018727
taaattaaggtay

SEQ ID NO: 72502 - DNA, 13 bp, Artificial Sequence
  Oligonucleotide for detection of SNP TSC0018727
rtaccttaattta

SEQ ID NO: 72503 - DNA, 13 bp, Artificial Sequence
  Oligonucleotide for detection of SNP TSC0018727
taaattgaggtay

SEQ ID NO: 72504 - DNA, 13 bp, Artificial Sequence
  Oligonucleotide for detection of SNP TSC0018727
rtacctcaattta

SEQ ID NO: 72505 - DNA, 13 bp, Artificial Sequence
  Oligonucleotide for detection of SNP TSC0018735
ttattggtattat

SEQ ID NO: 72506 - DNA, 13 bp, Artificial Sequence
  Oligonucleotide for detection of SNP TSC0018735
ataataccaataa

SEQ ID NO: 72507 - DNA, 13 bp, Artificial Sequence
  Oligonucleotide for detection of SNP TSC0018735
ttattgttattat

SEQ ID NO: 72508 - DNA, 13 bp, Artificial Sequence
  Oligonucleotide for detection of SNP TSC0018735
ataataacaataa

SEQ ID NO: 72509 - DNA, 13 bp, Artificial Sequence
  Oligonucleotide for detection of SNP TSC0018735
ataatattaataa

SEQ ID NO: 72510 - DNA, 13 bp, Artificial Sequence
  Oligonucleotide for detection of SNP TSC0018735
ttattaatattat

SEQ ID NO: 72511 - DNA, 13 bp, Artificial Sequence
  Oligonucleotide for detection of SNP TSC0018735
ataataataataa

SEQ ID NO: 72512 - DNA, 13 bp, Artificial Sequence
  Oligonucleotide for detection of SNP TSC0018735
ttattattattat

SEQ ID NO: 72513 - DNA, 13 bp, Artificial Sequence
  Oligonucleotide for detection of SNP TSC0018736
tgttgggttttta

SEQ ID NO: 72514 - DNA, 13 bp, Artificial Sequence
  Oligonucleotide for detection of SNP TSC0018736
taaaaacccaaca

SEQ ID NO: 72515 - DNA, 13 bp, Artificial Sequence
  Oligonucleotide for detection of SNP TSC0018736
tgttggtttttta

SEQ ID NO: 72516 - DNA, 13 bp, Artificial Sequence
  Oligonucleotide for detection of SNP TSC0018736
taaaaaaccaaca

SEQ ID NO: 72517 - DNA, 13 bp, Artificial Sequence
  Oligonucleotide for detection of SNP TSC0018736
tgtcgggttttta

SEQ ID NO: 72518 - DNA, 13 bp, Artificial Sequence
  Oligonucleotide for detection of SNP TSC0018736
taaaaacccgaca

SEQ ID NO: 72519 - DNA, 13 bp, Artificial Sequence
  Oligonucleotide for detection of SNP TSC0018736
tgtcggtttttta

SEQ ID NO: 72520 - DNA, 13 bp, Artificial Sequence
  Oligonucleotide for detection of SNP TSC0018736
taaaaaaccgaca

SEQ ID NO: 72521 - DNA, 13 bp, Artificial Sequence
  Oligonucleotide for detection of SNP TSC0018736
taaaaatttgata

SEQ ID NO: 72522 - DNA, 13 bp, Artificial Sequence
  Oligonucleotide for detection of SNP TSC0018736
tatcaaattttta

SEQ ID NO: 72523 - DNA, 13 bp, Artificial Sequence
  Oligonucleotide for detection of SNP TSC0018736
taaaaaattgata

SEQ ID NO: 72524 - DNA, 13 bp, Artificial Sequence
  Oligonucleotide for detection of SNP TSC0018736
tatcaatttttta

SEQ ID NO: 72525 - DNA, 13 bp, Artificial Sequence
  Oligonucleotide for detection of SNP TSC0018736
taaaaattcgata

SEQ ID NO: 72526 - DNA, 13 bp, Artificial Sequence
  Oligonucleotide for detection of SNP TSC0018736
tatcgaattttta

SEQ ID NO: 72527 - DNA, 13 bp, Artificial Sequence
  Oligonucleotide for detection of SNP TSC0018736
taaaaaatcgata

SEQ ID NO: 72528 - DNA, 13 bp, Artificial Sequence
  Oligonucleotide for detection of SNP TSC0018736
tatcgatttttta

SEQ ID NO: 72529 - DNA, 13 bp, Artificial Sequence
  Oligonucleotide for detection of SNP TSC0018737
tgtatagtataaa

SEQ ID NO: 72530 - DNA, 13 bp, Artificial Sequence
  Oligonucleotide for detection of SNP TSC0018737
tttatactataca

SEQ ID NO: 72531 - DNA, 13 bp, Artificial Sequence
  Oligonucleotide for detection of SNP TSC0018737
tgtataatataaa

SEQ ID NO: 72532 - DNA, 13 bp, Artificial Sequence
  Oligonucleotide for detection of SNP TSC0018737
tttatattataca

SEQ ID NO: 72533 - DNA, 13 bp, Artificial Sequence
  Oligonucleotide for detection of SNP TSC0018738
tttaaaattttgg

SEQ ID NO: 72534 - DNA, 13 bp, Artificial Sequence
  Oligonucleotide for detection of SNP TSC0018738
ccaaaattttaaa

SEQ ID NO: 72535 - DNA, 13 bp, Artificial Sequence
  Oligonucleotide for detection of SNP TSC0018738
tttaaagttttgg

SEQ ID NO: 72536 - DNA, 13 bp, Artificial Sequence
  Oligonucleotide for detection of SNP TSC0018738
ccaaaactttaaa

SEQ ID NO: 72537 - DNA, 13 bp, Artificial Sequence
  Oligonucleotide for detection of SNP TSC0018740
ttaggtgttgggy

SEQ ID NO: 72538 - DNA, 13 bp, Artificial Sequence
  Oligonucleotide for detection of SNP TSC0018740
rcccaacacctaa

SEQ ID NO: 72539 - DNA, 13 bp, Artificial Sequence
  Oligonucleotide for detection of SNP TSC0018740
ttaggtattgggy

SEQ ID NO: 72540 - DNA, 13 bp, Artificial Sequence
  Oligonucleotide for detection of SNP TSC0018740
rcccaatacctaa

SEQ ID NO: 72541 - DNA, 13 bp, Artificial Sequence
  Oligonucleotide for detection of SNP TSC0018741
ataaaagatgttt

SEQ ID NO: 72542 - DNA, 13 bp, Artificial Sequence
  Oligonucleotide for detection of SNP TSC0018741
aaacatcttttat

SEQ ID NO: 72543 - DNA, 13 bp, Artificial Sequence
  Oligonucleotide for detection of SNP TSC0018741
ataaaaaatgttt

SEQ ID NO: 72544 - DNA, 13 bp, Artificial Sequence
  Oligonucleotide for detection of SNP TSC0018741
aaacattttttat

SEQ ID NO: 72545 - DNA, 13 bp, Artificial Sequence
  Oligonucleotide for detection of SNP TSC0018741
ataaaagacgttt

SEQ ID NO: 72546 - DNA, 13 bp, Artificial Sequence
  Oligonucleotide for detection of SNP TSC0018741
aaacgtcttttat

SEQ ID NO: 72547 - DNA, 13 bp, Artificial Sequence
  Oligonucleotide for detection of SNP TSC0018741
ataaaaaacgttt

SEQ ID NO: 72548 - DNA, 13 bp, Artificial Sequence
  Oligonucleotide for detection of SNP TSC0018741
aaacgttttttat

SEQ ID NO: 72549 - DNA, 13 bp, Artificial Sequence
  Oligonucleotide for detection of SNP TSC0018743
ttttaagtatttt

SEQ ID NO: 72550 - DNA, 13 bp, Artificial Sequence
  Oligonucleotide for detection of SNP TSC0018743
aaaatacttaaaa

SEQ ID NO: 72551 - DNA, 13 bp, Artificial Sequence
  Oligonucleotide for detection of SNP TSC0018744
agggaggaagtag

SEQ ID NO: 72552 - DNA, 13 bp, Artificial Sequence
  Oligonucleotide for detection of SNP TSC0018744
ctacttcctccct

SEQ ID NO: 72553 - DNA, 13 bp, Artificial Sequence
  Oligonucleotide for detection of SNP TSC0018744
agggagaaagtag

SEQ ID NO: 72554 - DNA, 13 bp, Artificial Sequence
  Oligonucleotide for detection of SNP TSC0018744
ctactttctccct

SEQ ID NO: 72555 - DNA, 13 bp, Artificial Sequence
  Oligonucleotide for detection of SNP TSC0018745
gagggaggaagta

SEQ ID NO: 72556 - DNA, 13 bp, Artificial Sequence
  Oligonucleotide for detection of SNP TSC0018745
tacttcctccctc

SEQ ID NO: 72557 - DNA, 13 bp, Artificial Sequence
  Oligonucleotide for detection of SNP TSC0018745
gagggaagaagta

SEQ ID NO: 72558 - DNA, 13 bp, Artificial Sequence
  Oligonucleotide for detection of SNP TSC0018745
tacttcttccctc

SEQ ID NO: 72559 - DNA, 13 bp, Artificial Sequence
  Oligonucleotide for detection of SNP TSC0018746
agaaagtgaagty

SEQ ID NO: 72560 - DNA, 13 bp, Artificial Sequence
  Oligonucleotide for detection of SNP TSC0018746
racttcactttct

SEQ ID NO: 72561 - DNA, 13 bp, Artificial Sequence
  Oligonucleotide for detection of SNP TSC0018746
agaaagcgaagty

SEQ ID NO: 72562 - DNA, 13 bp, Artificial Sequence
  Oligonucleotide for detection of SNP TSC0018746
racttcgctttct

SEQ ID NO: 72563 - DNA, 13 bp, Artificial Sequence
  Oligonucleotide for detection of SNP TSC0018746
ggtttcgtttttt

SEQ ID NO: 72564 - DNA, 13 bp, Artificial Sequence
  Oligonucleotide for detection of SNP TSC0018746
aaaaaacgaaacc

SEQ ID NO: 72565 - DNA, 13 bp, Artificial Sequence
  Oligonucleotide for detection of SNP TSC0018747
gaagttatgtggy

SEQ ID NO: 72566 - DNA, 13 bp, Artificial Sequence
  Oligonucleotide for detection of SNP TSC0018747
rccacataacttc

SEQ ID NO: 72567 - DNA, 13 bp, Artificial Sequence
  Oligonucleotide for detection of SNP TSC0018747
gaagttgtgtggy

SEQ ID NO: 72568 - DNA, 13 bp, Artificial Sequence
  Oligonucleotide for detection of SNP TSC0018747
rccacacaacttc

SEQ ID NO: 72569 - DNA, 13 bp, Artificial Sequence
  Oligonucleotide for detection of SNP TSC0018749
ttgagtattttty

SEQ ID NO: 72570 - DNA, 13 bp, Artificial Sequence
  Oligonucleotide for detection of SNP TSC0018749
raaaaatactcaa

SEQ ID NO: 72571 - DNA, 13 bp, Artificial Sequence
  Oligonucleotide for detection of SNP TSC0018749
gggggatgtttaa

SEQ ID NO: 72572 - DNA, 13 bp, Artificial Sequence
  Oligonucleotide for detection of SNP TSC0018749
ttaaacatccccc

SEQ ID NO: 72573 - DNA, 13 bp, Artificial Sequence
  Oligonucleotide for detection of SNP TSC0018749
gggggaggtttaa

SEQ ID NO: 72574 - DNA, 13 bp, Artificial Sequence
  Oligonucleotide for detection of SNP TSC0018749
ttaaacctccccc

SEQ ID NO: 72575 - DNA, 13 bp, Artificial Sequence
  Oligonucleotide for detection of SNP TSC0018750
tttattgagtaga

SEQ ID NO: 72576 - DNA, 13 bp, Artificial Sequence
  Oligonucleotide for detection of SNP TSC0018750
tctactcaataaa

SEQ ID NO: 72577 - DNA, 13 bp, Artificial Sequence
  Oligonucleotide for detection of SNP TSC0018750
tttattaagtaga

SEQ ID NO: 72578 - DNA, 13 bp, Artificial Sequence
  Oligonucleotide for detection of SNP TSC0018750
tctacttaataaa

SEQ ID NO: 72579 - DNA, 13 bp, Artificial Sequence
  Oligonucleotide for detection of SNP TSC0018751
ttattttgttaat

SEQ ID NO: 72580 - DNA, 13 bp, Artificial Sequence
  Oligonucleotide for detection of SNP TSC0018751
attaacaaaataa

SEQ ID NO: 72581 - DNA, 13 bp, Artificial Sequence
  Oligonucleotide for detection of SNP TSC0018751
ttatttcgttaat

SEQ ID NO: 72582 - DNA, 13 bp, Artificial Sequence
  Oligonucleotide for detection of SNP TSC0018751
attaacgaaataa

SEQ ID NO: 72583 - DNA, 13 bp, Artificial Sequence
  Oligonucleotide for detection of SNP TSC0018751
attagtgaggtgg

SEQ ID NO: 72584 - DNA, 13 bp, Artificial Sequence
  Oligonucleotide for detection of SNP TSC0018751
ccacctcactaat

SEQ ID NO: 72585 - DNA, 13 bp, Artificial Sequence
  Oligonucleotide for detection of SNP TSC0018751
attagtaaggtgg

SEQ ID NO: 72586 - DNA, 13 bp, Artificial Sequence
  Oligonucleotide for detection of SNP TSC0018751
ccaccttactaat

SEQ ID NO: 72587 - DNA, 13 bp, Artificial Sequence
  Oligonucleotide for detection of SNP TSC0018751
attagcgaggtgg

SEQ ID NO: 72588 - DNA, 13 bp, Artificial Sequence
  Oligonucleotide for detection of SNP TSC0018751
ccacctcgctaat

SEQ ID NO: 72589 - DNA, 13 bp, Artificial Sequence
  Oligonucleotide for detection of SNP TSC0018752
tatttaatatagg

SEQ ID NO: 72590 - DNA, 13 bp, Artificial Sequence
  Oligonucleotide for detection of SNP TSC0018752
cctatattaaata

SEQ ID NO: 72591 - DNA, 13 bp, Artificial Sequence
  Oligonucleotide for detection of SNP TSC0018752
tatttattatagg

SEQ ID NO: 72592 - DNA, 13 bp, Artificial Sequence
  Oligonucleotide for detection of SNP TSC0018752
cctataataaata

SEQ ID NO: 72593 - DNA, 13 bp, Artificial Sequence
  Oligonucleotide for detection of SNP TSC0018752
tttatgttgagtg

SEQ ID NO: 72594 - DNA, 13 bp, Artificial Sequence
  Oligonucleotide for detection of SNP TSC0018752
cactcaacataaa

SEQ ID NO: 72595 - DNA, 13 bp, Artificial Sequence
  Oligonucleotide for detection of SNP TSC0018752
tttatgatgagtg

SEQ ID NO: 72596 - DNA, 13 bp, Artificial Sequence
  Oligonucleotide for detection of SNP TSC0018752
cactcatcataaa

SEQ ID NO: 72597 - DNA, 13 bp, Artificial Sequence
  Oligonucleotide for detection of SNP TSC0018753
gatataaggataa

SEQ ID NO: 72598 - DNA, 13 bp, Artificial Sequence
  Oligonucleotide for detection of SNP TSC0018753
ttatccttatatc

SEQ ID NO: 72599 - DNA, 13 bp, Artificial Sequence
  Oligonucleotide for detection of SNP TSC0018753
gatatagggataa

SEQ ID NO: 72600 - DNA, 13 bp, Artificial Sequence
  Oligonucleotide for detection of SNP TSC0018753
ttatccctatatc

SEQ ID NO: 72601 - DNA, 13 bp, Artificial Sequence
  Oligonucleotide for detection of SNP TSC0018756
ttggttagtattt

SEQ ID NO: 72602 - DNA, 13 bp, Artificial Sequence
  Oligonucleotide for detection of SNP TSC0018756
aaatactaaccaa

SEQ ID NO: 72603 - DNA, 13 bp, Artificial Sequence
  Oligonucleotide for detection of SNP TSC0018756
ttggttggtattt

SEQ ID NO: 72604 - DNA, 13 bp, Artificial Sequence
  Oligonucleotide for detection of SNP TSC0018756
aaataccaaccaa

SEQ ID NO: 72605 - DNA, 13 bp, Artificial Sequence
  Oligonucleotide for detection of SNP TSC0018756
ttggtcggtattt

SEQ ID NO: 72606 - DNA, 13 bp, Artificial Sequence
  Oligonucleotide for detection of SNP TSC0018756
aaataccgaccaa

SEQ ID NO: 72607 - DNA, 13 bp, Artificial Sequence
  Oligonucleotide for detection of SNP TSC0018756
aggtgttgattaa

SEQ ID NO: 72608 - DNA, 13 bp, Artificial Sequence
  Oligonucleotide for detection of SNP TSC0018756
ttaatcaacacct

SEQ ID NO: 72609 - DNA, 13 bp, Artificial Sequence
  Oligonucleotide for detection of SNP TSC0018756
aggtgtcgattaa

SEQ ID NO: 72610 - DNA, 13 bp, Artificial Sequence
  Oligonucleotide for detection of SNP TSC0018756
ttaatcgacacct

SEQ ID NO: 72611 - DNA, 13 bp, Artificial Sequence
  Oligonucleotide for detection of SNP TSC0018757
agattttgtaggg

SEQ ID NO: 72612 - DNA, 13 bp, Artificial Sequence
  Oligonucleotide for detection of SNP TSC0018757
ccctacaaaatct

SEQ ID NO: 72613 - DNA, 13 bp, Artificial Sequence
  Oligonucleotide for detection of SNP TSC0018757
agatttcgtaggg

SEQ ID NO: 72614 - DNA, 13 bp, Artificial Sequence
  Oligonucleotide for detection of SNP TSC0018757
ccctacgaaatct

SEQ ID NO: 72615 - DNA, 13 bp, Artificial Sequence
  Oligonucleotide for detection of SNP TSC0018757
ttttataaggttt

SEQ ID NO: 72616 - DNA, 13 bp, Artificial Sequence
  Oligonucleotide for detection of SNP TSC0018757
aaaccttataaaa

SEQ ID NO: 72617 - DNA, 13 bp, Artificial Sequence
  Oligonucleotide for detection of SNP TSC0018757
ttttacgaggttt

SEQ ID NO: 72618 - DNA, 13 bp, Artificial Sequence
  Oligonucleotide for detection of SNP TSC0018757
aaacctcgtaaaa

SEQ ID NO: 72619 - DNA, 13 bp, Artificial Sequence
  Oligonucleotide for detection of SNP TSC0018758
tagttatggatga

SEQ ID NO: 72620 - DNA, 13 bp, Artificial Sequence
  Oligonucleotide for detection of SNP TSC0018758
tcatccataacta

SEQ ID NO: 72621 - DNA, 13 bp, Artificial Sequence
  Oligonucleotide for detection of SNP TSC0018758
tagttacggatga

SEQ ID NO: 72622 - DNA, 13 bp, Artificial Sequence
  Oligonucleotide for detection of SNP TSC0018758
tcatccgtaacta

SEQ ID NO: 72623 - DNA, 13 bp, Artificial Sequence
  Oligonucleotide for detection of SNP TSC0018758
ttatttgtagtta

SEQ ID NO: 72624 - DNA, 13 bp, Artificial Sequence
  Oligonucleotide for detection of SNP TSC0018758
taactacaaataa

SEQ ID NO: 72625 - DNA, 13 bp, Artificial Sequence
  Oligonucleotide for detection of SNP TSC0018758
ttatttatagtta

SEQ ID NO: 72626 - DNA, 13 bp, Artificial Sequence
  Oligonucleotide for detection of SNP TSC0018758
taactataaataa

SEQ ID NO: 72627 - DNA, 13 bp, Artificial Sequence
  Oligonucleotide for detection of SNP TSC0018758
ttattcgtagtta

SEQ ID NO: 72628 - DNA, 13 bp, Artificial Sequence
  Oligonucleotide for detection of SNP TSC0018758
taactacgaataa

SEQ ID NO: 72629 - DNA, 13 bp, Artificial Sequence
  Oligonucleotide for detection of SNP TSC0018766
ttgagggtgttgt

SEQ ID NO: 72630 - DNA, 13 bp, Artificial Sequence
  Oligonucleotide for detection of SNP TSC0018766
acaacaccctcaa

SEQ ID NO: 72631 - DNA, 13 bp, Artificial Sequence
  Oligonucleotide for detection of SNP TSC0018766
ttgaggatgttgt

SEQ ID NO: 72632 - DNA, 13 bp, Artificial Sequence
  Oligonucleotide for detection of SNP TSC0018766
acaacatcctcaa

SEQ ID NO: 72633 - DNA, 13 bp, Artificial Sequence
  Oligonucleotide for detection of SNP TSC0018768
ggtttgtgggttg

SEQ ID NO: 72634 - DNA, 13 bp, Artificial Sequence
  Oligonucleotide for detection of SNP TSC0018768
caacccacaaacc

SEQ ID NO: 72635 - DNA, 13 bp, Artificial Sequence
  Oligonucleotide for detection of SNP TSC0018768
ggtttgcgggttg

SEQ ID NO: 72636 - DNA, 13 bp, Artificial Sequence
  Oligonucleotide for detection of SNP TSC0018768
caacccgcaaacc

SEQ ID NO: 72637 - DNA, 13 bp, Artificial Sequence
  Oligonucleotide for detection of SNP TSC0018768
tagtttgtaggty

SEQ ID NO: 72638 - DNA, 13 bp, Artificial Sequence
  Oligonucleotide for detection of SNP TSC0018768
racctacaaacta

SEQ ID NO: 72639 - DNA, 13 bp, Artificial Sequence
  Oligonucleotide for detection of SNP TSC0018768
tagtttataggty

SEQ ID NO: 72640 - DNA, 13 bp, Artificial Sequence
  Oligonucleotide for detection of SNP TSC0018768
racctataaacta

SEQ ID NO: 72641 - DNA, 13 bp, Artificial Sequence
  Oligonucleotide for detection of SNP TSC0018768
tagttcgtaggty

SEQ ID NO: 72642 - DNA, 13 bp, Artificial Sequence
  Oligonucleotide for detection of SNP TSC0018768
racctacgaacta

SEQ ID NO: 72643 - DNA, 13 bp, Artificial Sequence
  Oligonucleotide for detection of SNP TSC0018771
gttttggtggtag

SEQ ID NO: 72644 - DNA, 13 bp, Artificial Sequence
  Oligonucleotide for detection of SNP TSC0018771
ctaccaccaaaac

SEQ ID NO: 72645 - DNA, 13 bp, Artificial Sequence
  Oligonucleotide for detection of SNP TSC0018771
gttttgatggtag

SEQ ID NO: 72646 - DNA, 13 bp, Artificial Sequence
  Oligonucleotide for detection of SNP TSC0018771
ctaccatcaaaac

SEQ ID NO: 72647 - DNA, 13 bp, Artificial Sequence
  Oligonucleotide for detection of SNP TSC0018772
ggttattgatatg

SEQ ID NO: 72648 - DNA, 13 bp, Artificial Sequence
  Oligonucleotide for detection of SNP TSC0018772
catatcaataacc

SEQ ID NO: 72649 - DNA, 13 bp, Artificial Sequence
  Oligonucleotide for detection of SNP TSC0018772
ggttatcgatatg

SEQ ID NO: 72650 - DNA, 13 bp, Artificial Sequence
  Oligonucleotide for detection of SNP TSC0018772
catatcgataacc

SEQ ID NO: 72651 - DNA, 13 bp, Artificial Sequence
  Oligonucleotide for detection of SNP TSC0018772
tatgttgatagty

SEQ ID NO: 72652 - DNA, 13 bp, Artificial Sequence
  Oligonucleotide for detection of SNP TSC0018772
ractatcaacata

SEQ ID NO: 72653 - DNA, 13 bp, Artificial Sequence
  Oligonucleotide for detection of SNP TSC0018772
tatgttaatagty

SEQ ID NO: 72654 - DNA, 13 bp, Artificial Sequence
  Oligonucleotide for detection of SNP TSC0018772
ractattaacata

SEQ ID NO: 72655 - DNA, 13 bp, Artificial Sequence
  Oligonucleotide for detection of SNP TSC0018772
tatgtcgatagty

SEQ ID NO: 72656 - DNA, 13 bp, Artificial Sequence
  Oligonucleotide for detection of SNP TSC0018772
ractatcgacata

SEQ ID NO: 72657 - DNA, 13 bp, Artificial Sequence
  Oligonucleotide for detection of SNP TSC0018773
atgttggggatgy

SEQ ID NO: 72658 - DNA, 13 bp, Artificial Sequence
  Oligonucleotide for detection of SNP TSC0018773
rcatccccaacat

SEQ ID NO: 72659 - DNA, 13 bp, Artificial Sequence
  Oligonucleotide for detection of SNP TSC0018773
atgttgaggatgy

SEQ ID NO: 72660 - DNA, 13 bp, Artificial Sequence
  Oligonucleotide for detection of SNP TSC0018773
rcatcctcaacat

SEQ ID NO: 72661 - DNA, 13 bp, Artificial Sequence
  Oligonucleotide for detection of SNP TSC0018773
atgtcggggatgy

SEQ ID NO: 72662 - DNA, 13 bp, Artificial Sequence
  Oligonucleotide for detection of SNP TSC0018773
rcatccccgacat

SEQ ID NO: 72663 - DNA, 13 bp, Artificial Sequence
  Oligonucleotide for detection of SNP TSC0018773
atgtcgaggatgy

SEQ ID NO: 72664 - DNA, 13 bp, Artificial Sequence
  Oligonucleotide for detection of SNP TSC0018773
rcatcctcgacat

SEQ ID NO: 72665 - DNA, 13 bp, Artificial Sequence
  Oligonucleotide for detection of SNP TSC0018775
tttttggggtttg

SEQ ID NO: 72666 - DNA, 13 bp, Artificial Sequence
  Oligonucleotide for detection of SNP TSC0018775
caaaccccaaaaa

SEQ ID NO: 72667 - DNA, 13 bp, Artificial Sequence
  Oligonucleotide for detection of SNP TSC0018775
tttttgtggtttg

SEQ ID NO: 72668 - DNA, 13 bp, Artificial Sequence
  Oligonucleotide for detection of SNP TSC0018775
caaaccacaaaaa

SEQ ID NO: 72669 - DNA, 13 bp, Artificial Sequence
  Oligonucleotide for detection of SNP TSC0018775
taagttttaggga

SEQ ID NO: 72670 - DNA, 13 bp, Artificial Sequence
  Oligonucleotide for detection of SNP TSC0018775
tccctaaaactta

SEQ ID NO: 72671 - DNA, 13 bp, Artificial Sequence
  Oligonucleotide for detection of SNP TSC0018775
taagttataggga

SEQ ID NO: 72672 - DNA, 13 bp, Artificial Sequence
  Oligonucleotide for detection of SNP TSC0018775
tccctataactta

SEQ ID NO: 72673 - DNA, 13 bp, Artificial Sequence
  Oligonucleotide for detection of SNP TSC0018777
gggttaaagtggg

SEQ ID NO: 72674 - DNA, 13 bp, Artificial Sequence
  Oligonucleotide for detection of SNP TSC0018777
cccactttaaccc

SEQ ID NO: 72675 - DNA, 13 bp, Artificial Sequence
  Oligonucleotide for detection of SNP TSC0018777
gggttagagtggg

SEQ ID NO: 72676 - DNA, 13 bp, Artificial Sequence
  Oligonucleotide for detection of SNP TSC0018777
cccactctaaccc

SEQ ID NO: 72677 - DNA, 13 bp, Artificial Sequence
  Oligonucleotide for detection of SNP TSC0018778
gagtataatagag

SEQ ID NO: 72678 - DNA, 13 bp, Artificial Sequence
  Oligonucleotide for detection of SNP TSC0018778
ctctattatactc

SEQ ID NO: 72679 - DNA, 13 bp, Artificial Sequence
  Oligonucleotide for detection of SNP TSC0018778
gagtattatagag

SEQ ID NO: 72680 - DNA, 13 bp, Artificial Sequence
  Oligonucleotide for detection of SNP TSC0018778
ctctataatactc

SEQ ID NO: 72681 - DNA, 13 bp, Artificial Sequence
  Oligonucleotide for detection of SNP TSC0018778
ttttgttgtatty

SEQ ID NO: 72682 - DNA, 13 bp, Artificial Sequence
  Oligonucleotide for detection of SNP TSC0018778
raatacaacaaaa

SEQ ID NO: 72683 - DNA, 13 bp, Artificial Sequence
  Oligonucleotide for detection of SNP TSC0018778
ttttgtagtatty

SEQ ID NO: 72684 - DNA, 13 bp, Artificial Sequence
  Oligonucleotide for detection of SNP TSC0018778
raatactacaaaa

SEQ ID NO: 72685 - DNA, 13 bp, Artificial Sequence
  Oligonucleotide for detection of SNP TSC0018779
attgatatattta

SEQ ID NO: 72686 - DNA, 13 bp, Artificial Sequence
  Oligonucleotide for detection of SNP TSC0018779
taaatatatcaat

SEQ ID NO: 72687 - DNA, 13 bp, Artificial Sequence
  Oligonucleotide for detection of SNP TSC0018779
attgatgtattta

SEQ ID NO: 72688 - DNA, 13 bp, Artificial Sequence
  Oligonucleotide for detection of SNP TSC0018779
taaatacatcaat

SEQ ID NO: 72689 - DNA, 13 bp, Artificial Sequence
  Oligonucleotide for detection of SNP TSC0018779
attgacgtattta

SEQ ID NO: 72690 - DNA, 13 bp, Artificial Sequence
  Oligonucleotide for detection of SNP TSC0018779
taaatacgtcaat

SEQ ID NO: 72691 - DNA, 13 bp, Artificial Sequence
  Oligonucleotide for detection of SNP TSC0018779
tgagtatgttagt

SEQ ID NO: 72692 - DNA, 13 bp, Artificial Sequence
  Oligonucleotide for detection of SNP TSC0018779
actaacatactca

SEQ ID NO: 72693 - DNA, 13 bp, Artificial Sequence
  Oligonucleotide for detection of SNP TSC0018779
tgagtacgttagt

SEQ ID NO: 72694 - DNA, 13 bp, Artificial Sequence
  Oligonucleotide for detection of SNP TSC0018779
actaacgtactca

SEQ ID NO: 72695 - DNA, 13 bp, Artificial Sequence
  Oligonucleotide for detection of SNP TSC0018780
ttatagggaataa

SEQ ID NO: 72696 - DNA, 13 bp, Artificial Sequence
  Oligonucleotide for detection of SNP TSC0018780
ttattccctataa

SEQ ID NO: 72697 - DNA, 13 bp, Artificial Sequence
  Oligonucleotide for detection of SNP TSC0018780
ttatagtgaataa

SEQ ID NO: 72698 - DNA, 13 bp, Artificial Sequence
  Oligonucleotide for detection of SNP TSC0018780
ttattcactataa

SEQ ID NO: 72699 - DNA, 13 bp, Artificial Sequence
  Oligonucleotide for detection of SNP TSC0018780
ttgttttttgtaa

SEQ ID NO: 72700 - DNA, 13 bp, Artificial Sequence
  Oligonucleotide for detection of SNP TSC0018780
ttacaaaaaacaa

SEQ ID NO: 72701 - DNA, 13 bp, Artificial Sequence
  Oligonucleotide for detection of SNP TSC0018780
ttgtttattgtaa

SEQ ID NO: 72702 - DNA, 13 bp, Artificial Sequence
  Oligonucleotide for detection of SNP TSC0018780
ttacaataaacaa

SEQ ID NO: 72703 - DNA, 13 bp, Artificial Sequence
  Oligonucleotide for detection of SNP TSC0018781
tttgtaagaaata

SEQ ID NO: 72704 - DNA, 13 bp, Artificial Sequence
  Oligonucleotide for detection of SNP TSC0018781
tatttcttacaaa

SEQ ID NO: 72705 - DNA, 13 bp, Artificial Sequence
  Oligonucleotide for detection of SNP TSC0018781
tttgtaggaaata

SEQ ID NO: 72706 - DNA, 13 bp, Artificial Sequence
  Oligonucleotide for detection of SNP TSC0018781
tatttcctacaaa

SEQ ID NO: 72707 - DNA, 13 bp, Artificial Sequence
  Oligonucleotide for detection of SNP TSC0018781
ttcgtaagaaata

SEQ ID NO: 72708 - DNA, 13 bp, Artificial Sequence
  Oligonucleotide for detection of SNP TSC0018781
tatttcttacgaa

SEQ ID NO: 72709 - DNA, 13 bp, Artificial Sequence
  Oligonucleotide for detection of SNP TSC0018781
ttcgtaggaaata

SEQ ID NO: 72710 - DNA, 13 bp, Artificial Sequence
  Oligonucleotide for detection of SNP TSC0018781
tatttcctacgaa

SEQ ID NO: 72711 - DNA, 13 bp, Artificial Sequence
  Oligonucleotide for detection of SNP TSC0018786
gggtgttgagtty

SEQ ID NO: 72712 - DNA, 13 bp, Artificial Sequence
  Oligonucleotide for detection of SNP TSC0018786
raactcaacaccc

SEQ ID NO: 72713 - DNA, 13 bp, Artificial Sequence
  Oligonucleotide for detection of SNP TSC0018786
gggtgtcgagtty

SEQ ID NO: 72714 - DNA, 13 bp, Artificial Sequence
  Oligonucleotide for detection of SNP TSC0018786
raactcgacaccc

SEQ ID NO: 72715 - DNA, 13 bp, Artificial Sequence
  Oligonucleotide for detection of SNP TSC0018786
gagtttggtatty

SEQ ID NO: 72716 - DNA, 13 bp, Artificial Sequence
  Oligonucleotide for detection of SNP TSC0018786
raataccaaactc

SEQ ID NO: 72717 - DNA, 13 bp, Artificial Sequence
  Oligonucleotide for detection of SNP TSC0018786
gagtttagtatty

SEQ ID NO: 72718 - DNA, 13 bp, Artificial Sequence
  Oligonucleotide for detection of SNP TSC0018786
raatactaaactc

SEQ ID NO: 72719 - DNA, 13 bp, Artificial Sequence
  Oligonucleotide for detection of SNP TSC0018786
gagttcggtatty

SEQ ID NO: 72720 - DNA, 13 bp, Artificial Sequence
  Oligonucleotide for detection of SNP TSC0018786
raataccgaactc

SEQ ID NO: 72721 - DNA, 13 bp, Artificial Sequence
  Oligonucleotide for detection of SNP TSC0018787
ataatggtgatag

SEQ ID NO: 72722 - DNA, 13 bp, Artificial Sequence
  Oligonucleotide for detection of SNP TSC0018787
ctatcaccattat

SEQ ID NO: 72723 - DNA, 13 bp, Artificial Sequence
  Oligonucleotide for detection of SNP TSC0018787
ataatgatgatag

SEQ ID NO: 72724 - DNA, 13 bp, Artificial Sequence
  Oligonucleotide for detection of SNP TSC0018787
ctatcatcattat

SEQ ID NO: 72725 - DNA, 13 bp, Artificial Sequence
  Oligonucleotide for detection of SNP TSC0018788
tttttgggtaagt

SEQ ID NO: 72726 - DNA, 13 bp, Artificial Sequence
  Oligonucleotide for detection of SNP TSC0018788
acttacccaaaaa

SEQ ID NO: 72727 - DNA, 13 bp, Artificial Sequence
  Oligonucleotide for detection of SNP TSC0018788
tttttgagtaagt

SEQ ID NO: 72728 - DNA, 13 bp, Artificial Sequence
  Oligonucleotide for detection of SNP TSC0018788
acttactcaaaaa

SEQ ID NO: 72729 - DNA, 13 bp, Artificial Sequence
  Oligonucleotide for detection of SNP TSC0018788
ttttcgggtaagt

SEQ ID NO: 72730 - DNA, 13 bp, Artificial Sequence
  Oligonucleotide for detection of SNP TSC0018788
acttacccgaaaa

SEQ ID NO: 72731 - DNA, 13 bp, Artificial Sequence
  Oligonucleotide for detection of SNP TSC0018788
ttttcgagtaagt

SEQ ID NO: 72732 - DNA, 13 bp, Artificial Sequence
  Oligonucleotide for detection of SNP TSC0018788
acttactcgaaaa

SEQ ID NO: 72733 - DNA, 13 bp, Artificial Sequence
  Oligonucleotide for detection of SNP TSC0018789
ttggtgggattgt

SEQ ID NO: 72734 - DNA, 13 bp, Artificial Sequence
  Oligonucleotide for detection of SNP TSC0018789
acaatcccaccaa

SEQ ID NO: 72735 - DNA, 13 bp, Artificial Sequence
  Oligonucleotide for detection of SNP TSC0018789
ttggtgagattgt

SEQ ID NO: 72736 - DNA, 13 bp, Artificial Sequence
  Oligonucleotide for detection of SNP TSC0018789
acaatctcaccaa

SEQ ID NO: 72737 - DNA, 13 bp, Artificial Sequence
  Oligonucleotide for detection of SNP TSC0018790
agatatgtagtta

SEQ ID NO: 72738 - DNA, 13 bp, Artificial Sequence
  Oligonucleotide for detection of SNP TSC0018790
taactacatatct

SEQ ID NO: 72739 - DNA, 13 bp, Artificial Sequence
  Oligonucleotide for detection of SNP TSC0018790
agatatatagtta

SEQ ID NO: 72740 - DNA, 13 bp, Artificial Sequence
  Oligonucleotide for detection of SNP TSC0018790
taactatatatct

SEQ ID NO: 72741 - DNA, 13 bp, Artificial Sequence
  Oligonucleotide for detection of SNP TSC0018791
attttatgtttta

SEQ ID NO: 72742 - DNA, 13 bp, Artificial Sequence
  Oligonucleotide for detection of SNP TSC0018791
taaaacataaaat

SEQ ID NO: 72743 - DNA, 13 bp, Artificial Sequence
  Oligonucleotide for detection of SNP TSC0018791
attttacgtttta

SEQ ID NO: 72744 - DNA, 13 bp, Artificial Sequence
  Oligonucleotide for detection of SNP TSC0018791
taaaacgtaaaat

SEQ ID NO: 72745 - DNA, 13 bp, Artificial Sequence
  Oligonucleotide for detection of SNP TSC0018791
tgagatgtagaat

SEQ ID NO: 72746 - DNA, 13 bp, Artificial Sequence
  Oligonucleotide for detection of SNP TSC0018791
attctacatctca

SEQ ID NO: 72747 - DNA, 13 bp, Artificial Sequence
  Oligonucleotide for detection of SNP TSC0018791
tgagatatagaat

SEQ ID NO: 72748 - DNA, 13 bp, Artificial Sequence
  Oligonucleotide for detection of SNP TSC0018791
attctatatctca

SEQ ID NO: 72749 - DNA, 13 bp, Artificial Sequence
  Oligonucleotide for detection of SNP TSC0018791
tgagacgtagaat

SEQ ID NO: 72750 - DNA, 13 bp, Artificial Sequence
  Oligonucleotide for detection of SNP TSC0018791
attctacgtctca

SEQ ID NO: 72751 - DNA, 13 bp, Artificial Sequence
  Oligonucleotide for detection of SNP TSC0018792
ttggtgggagttt

SEQ ID NO: 72752 - DNA, 13 bp, Artificial Sequence
  Oligonucleotide for detection of SNP TSC0018792
aaactcccaccaa

SEQ ID NO: 72753 - DNA, 13 bp, Artificial Sequence
  Oligonucleotide for detection of SNP TSC0018792
ttggtgagagttt

SEQ ID NO: 72754 - DNA, 13 bp, Artificial Sequence
  Oligonucleotide for detection of SNP TSC0018792
aaactctcaccaa

SEQ ID NO: 72755 - DNA, 13 bp, Artificial Sequence
  Oligonucleotide for detection of SNP TSC0018793
aagagggttatgy

SEQ ID NO: 72756 - DNA, 13 bp, Artificial Sequence
  Oligonucleotide for detection of SNP TSC0018793
rcataaccctctt

SEQ ID NO: 72757 - DNA, 13 bp, Artificial Sequence
  Oligonucleotide for detection of SNP TSC0018793
aagaggtttatgy

SEQ ID NO: 72758 - DNA, 13 bp, Artificial Sequence
  Oligonucleotide for detection of SNP TSC0018793
rcataaacctctt

SEQ ID NO: 72759 - DNA, 13 bp, Artificial Sequence
  Oligonucleotide for detection of SNP TSC0018793
gtatgattttttt

SEQ ID NO: 72760 - DNA, 13 bp, Artificial Sequence
  Oligonucleotide for detection of SNP TSC0018793
aaaaaaatcatac

SEQ ID NO: 72761 - DNA, 13 bp, Artificial Sequence
  Oligonucleotide for detection of SNP TSC0018793
gtatgaatttttt

SEQ ID NO: 72762 - DNA, 13 bp, Artificial Sequence
  Oligonucleotide for detection of SNP TSC0018793
aaaaaattcatac

SEQ ID NO: 72763 - DNA, 13 bp, Artificial Sequence
  Oligonucleotide for detection of SNP TSC0018794
atatatggattgt

SEQ ID NO: 72764 - DNA, 13 bp, Artificial Sequence
  Oligonucleotide for detection of SNP TSC0018794
acaatccatatat

SEQ ID NO: 72765 - DNA, 13 bp, Artificial Sequence
  Oligonucleotide for detection of SNP TSC0018794
atatattgattgt

SEQ ID NO: 72766 - DNA, 13 bp, Artificial Sequence
  Oligonucleotide for detection of SNP TSC0018794
acaatcaatatat

SEQ ID NO: 72767 - DNA, 13 bp, Artificial Sequence
  Oligonucleotide for detection of SNP TSC0018794
atagtttatgtat

SEQ ID NO: 72768 - DNA, 13 bp, Artificial Sequence
  Oligonucleotide for detection of SNP TSC0018794
atacataaactat

SEQ ID NO: 72769 - DNA, 13 bp, Artificial Sequence
  Oligonucleotide for detection of SNP TSC0018794
atagttaatgtat

SEQ ID NO: 72770 - DNA, 13 bp, Artificial Sequence
  Oligonucleotide for detection of SNP TSC0018794
atacattaactat

SEQ ID NO: 72771 - DNA, 13 bp, Artificial Sequence
  Oligonucleotide for detection of SNP TSC0018796
gagggaggagggt

SEQ ID NO: 72772 - DNA, 13 bp, Artificial Sequence
  Oligonucleotide for detection of SNP TSC0018796
accctcctccctc

SEQ ID NO: 72773 - DNA, 13 bp, Artificial Sequence
  Oligonucleotide for detection of SNP TSC0018796
gagggaagagggt

SEQ ID NO: 72774 - DNA, 13 bp, Artificial Sequence
  Oligonucleotide for detection of SNP TSC0018796
accctcttccctc

SEQ ID NO: 72775 - DNA, 13 bp, Artificial Sequence
  Oligonucleotide for detection of SNP TSC0018797
ttttttttattga

SEQ ID NO: 72776 - DNA, 13 bp, Artificial Sequence
  Oligonucleotide for detection of SNP TSC0018797
tcaataaaaaaaa

SEQ ID NO: 72777 - DNA, 13 bp, Artificial Sequence
  Oligonucleotide for detection of SNP TSC0018797
ttttttgtattga

SEQ ID NO: 72778 - DNA, 13 bp, Artificial Sequence
  Oligonucleotide for detection of SNP TSC0018797
tcaatacaaaaaa

SEQ ID NO: 72779 - DNA, 13 bp, Artificial Sequence
  Oligonucleotide for detection of SNP TSC0018797
ttaatagaggagg

SEQ ID NO: 72780 - DNA, 13 bp, Artificial Sequence
  Oligonucleotide for detection of SNP TSC0018797
cctcctctattaa

SEQ ID NO: 72781 - DNA, 13 bp, Artificial Sequence
  Oligonucleotide for detection of SNP TSC0018797
ttaatataggagg

SEQ ID NO: 72782 - DNA, 13 bp, Artificial Sequence
  Oligonucleotide for detection of SNP TSC0018797
cctcctatattaa

SEQ ID NO: 72783 - DNA, 13 bp, Artificial Sequence
  Oligonucleotide for detection of SNP TSC0018798
attttaaatgtty

SEQ ID NO: 72784 - DNA, 13 bp, Artificial Sequence
  Oligonucleotide for detection of SNP TSC0018798
raacatttaaaat

SEQ ID NO: 72785 - DNA, 13 bp, Artificial Sequence
  Oligonucleotide for detection of SNP TSC0018798
attttatatgtty

SEQ ID NO: 72786 - DNA, 13 bp, Artificial Sequence
  Oligonucleotide for detection of SNP TSC0018798
raacatataaaat

SEQ ID NO: 72787 - DNA, 13 bp, Artificial Sequence
  Oligonucleotide for detection of SNP TSC0018798
gggtatttggggt

SEQ ID NO: 72788 - DNA, 13 bp, Artificial Sequence
  Oligonucleotide for detection of SNP TSC0018798
accccaaataccc

SEQ ID NO: 72789 - DNA, 13 bp, Artificial Sequence
  Oligonucleotide for detection of SNP TSC0018798
gggtatgtggggt

SEQ ID NO: 72790 - DNA, 13 bp, Artificial Sequence
  Oligonucleotide for detection of SNP TSC0018798
accccacataccc

SEQ ID NO: 72791 - DNA, 13 bp, Artificial Sequence
  Oligonucleotide for detection of SNP TSC0018799
ggtttttgtatty

SEQ ID NO: 72792 - DNA, 13 bp, Artificial Sequence
  Oligonucleotide for detection of SNP TSC0018799
raatacaaaaacc

SEQ ID NO: 72793 - DNA, 13 bp, Artificial Sequence
  Oligonucleotide for detection of SNP TSC0018799
ggttttcgtatty

SEQ ID NO: 72794 - DNA, 13 bp, Artificial Sequence
  Oligonucleotide for detection of SNP TSC0018799
raatacgaaaacc

SEQ ID NO: 72795 - DNA, 13 bp, Artificial Sequence
  Oligonucleotide for detection of SNP TSC0018799
gggtgtggaggty

SEQ ID NO: 72796 - DNA, 13 bp, Artificial Sequence
  Oligonucleotide for detection of SNP TSC0018799
racctccacaccc

SEQ ID NO: 72797 - DNA, 13 bp, Artificial Sequence
  Oligonucleotide for detection of SNP TSC0018799
gggtgtagaggty

SEQ ID NO: 72798 - DNA, 13 bp, Artificial Sequence
  Oligonucleotide for detection of SNP TSC0018799
racctctacaccc

SEQ ID NO: 72799 - DNA, 13 bp, Artificial Sequence
  Oligonucleotide for detection of SNP TSC0018799
gggtgcggaggty

SEQ ID NO: 72800 - DNA, 13 bp, Artificial Sequence
  Oligonucleotide for detection of SNP TSC0018799
racctccgcaccc

SEQ ID NO: 72801 - DNA, 13 bp, Artificial Sequence
  Oligonucleotide for detection of SNP TSC0018803
tttgagagttgtg

SEQ ID NO: 72802 - DNA, 13 bp, Artificial Sequence
  Oligonucleotide for detection of SNP TSC0018803
cacaactctcaaa

SEQ ID NO: 72803 - DNA, 13 bp, Artificial Sequence
  Oligonucleotide for detection of SNP TSC0018803
tttgagggttgtg

SEQ ID NO: 72804 - DNA, 13 bp, Artificial Sequence
  Oligonucleotide for detection of SNP TSC0018803
cacaaccctcaaa

SEQ ID NO: 72805 - DNA, 13 bp, Artificial Sequence
  Oligonucleotide for detection of SNP TSC0018804
tagtggatttagg

SEQ ID NO: 72806 - DNA, 13 bp, Artificial Sequence
  Oligonucleotide for detection of SNP TSC0018804
cctaaatccacta

SEQ ID NO: 72807 - DNA, 13 bp, Artificial Sequence
  Oligonucleotide for detection of SNP TSC0018804
tagtgggtttagg

SEQ ID NO: 72808 - DNA, 13 bp, Artificial Sequence
  Oligonucleotide for detection of SNP TSC0018804
cctaaacccacta

SEQ ID NO: 72809 - DNA, 13 bp, Artificial Sequence
  Oligonucleotide for detection of SNP TSC0018807
tttttgtaatttt

SEQ ID NO: 72810 - DNA, 13 bp, Artificial Sequence
  Oligonucleotide for detection of SNP TSC0018807
aaaattacaaaaa

SEQ ID NO: 72811 - DNA, 13 bp, Artificial Sequence
  Oligonucleotide for detection of SNP TSC0018807
tttttggaatttt

SEQ ID NO: 72812 - DNA, 13 bp, Artificial Sequence
  Oligonucleotide for detection of SNP TSC0018807
aaaattccaaaaa

SEQ ID NO: 72813 - DNA, 13 bp, Artificial Sequence
  Oligonucleotide for detection of SNP TSC0018807
aaagttgtaggag

SEQ ID NO: 72814 - DNA, 13 bp, Artificial Sequence
  Oligonucleotide for detection of SNP TSC0018807
ctcctacaacttt

SEQ ID NO: 72815 - DNA, 13 bp, Artificial Sequence
  Oligonucleotide for detection of SNP TSC0018807
aaagttttaggag

SEQ ID NO: 72816 - DNA, 13 bp, Artificial Sequence
  Oligonucleotide for detection of SNP TSC0018807
ctcctaaaacttt

SEQ ID NO: 72817 - DNA, 13 bp, Artificial Sequence
  Oligonucleotide for detection of SNP TSC0018808
tgttgagtatttg

SEQ ID NO: 72818 - DNA, 13 bp, Artificial Sequence
  Oligonucleotide for detection of SNP TSC0018808
caaatactcaaca

SEQ ID NO: 72819 - DNA, 13 bp, Artificial Sequence
  Oligonucleotide for detection of SNP TSC0018808
tgttgaatatttg

SEQ ID NO: 72820 - DNA, 13 bp, Artificial Sequence
  Oligonucleotide for detection of SNP TSC0018808
caaatattcaaca

SEQ ID NO: 72821 - DNA, 13 bp, Artificial Sequence
  Oligonucleotide for detection of SNP TSC0018808
tgttgagtattcg

SEQ ID NO: 72822 - DNA, 13 bp, Artificial Sequence
  Oligonucleotide for detection of SNP TSC0018808
cgaatactcaaca

SEQ ID NO: 72823 - DNA, 13 bp, Artificial Sequence
  Oligonucleotide for detection of SNP TSC0018808
tgttgaatattcg

SEQ ID NO: 72824 - DNA, 13 bp, Artificial Sequence
  Oligonucleotide for detection of SNP TSC0018808
cgaatattcaaca

SEQ ID NO: 72825 - DNA, 13 bp, Artificial Sequence
  Oligonucleotide for detection of SNP TSC0018809
agtaaatgggtaa

SEQ ID NO: 72826 - DNA, 13 bp, Artificial Sequence
  Oligonucleotide for detection of SNP TSC0018809
ttacccatttact

SEQ ID NO: 72827 - DNA, 13 bp, Artificial Sequence
  Oligonucleotide for detection of SNP TSC0018809
agtaaacgggtaa

SEQ ID NO: 72828 - DNA, 13 bp, Artificial Sequence
  Oligonucleotide for detection of SNP TSC0018809
ttacccgtttact

SEQ ID NO: 72829 - DNA, 13 bp, Artificial Sequence
  Oligonucleotide for detection of SNP TSC0018809
ttgtttgtttgtt

SEQ ID NO: 72830 - DNA, 13 bp, Artificial Sequence
  Oligonucleotide for detection of SNP TSC0018809
aacaaacaaacaa

SEQ ID NO: 72831 - DNA, 13 bp, Artificial Sequence
  Oligonucleotide for detection of SNP TSC0018809
ttgtttatttgtt

SEQ ID NO: 72832 - DNA, 13 bp, Artificial Sequence
  Oligonucleotide for detection of SNP TSC0018809
aacaaataaacaa

SEQ ID NO: 72833 - DNA, 13 bp, Artificial Sequence
  Oligonucleotide for detection of SNP TSC0018809
ttgttcgtttgtt

SEQ ID NO: 72834 - DNA, 13 bp, Artificial Sequence
  Oligonucleotide for detection of SNP TSC0018809
aacaaacgaacaa

SEQ ID NO: 72835 - DNA, 13 bp, Artificial Sequence
  Oligonucleotide for detection of SNP TSC0018810
ttaaaaatagtty

SEQ ID NO: 72836 - DNA, 13 bp, Artificial Sequence
  Oligonucleotide for detection of SNP TSC0018810
raactatttttaa

SEQ ID NO: 72837 - DNA, 13 bp, Artificial Sequence
  Oligonucleotide for detection of SNP TSC0018810
ttaaaattagtty

SEQ ID NO: 72838 - DNA, 13 bp, Artificial Sequence
  Oligonucleotide for detection of SNP TSC0018810
raactaattttaa

SEQ ID NO: 72839 - DNA, 13 bp, Artificial Sequence
  Oligonucleotide for detection of SNP TSC0018810
gaattgtttttgg

SEQ ID NO: 72840 - DNA, 13 bp, Artificial Sequence
  Oligonucleotide for detection of SNP TSC0018810
ccaaaaacaattc

SEQ ID NO: 72841 - DNA, 13 bp, Artificial Sequence
  Oligonucleotide for detection of SNP TSC0018810
gaattggttttgg

SEQ ID NO: 72842 - DNA, 13 bp, Artificial Sequence
  Oligonucleotide for detection of SNP TSC0018810
ccaaaaccaattc

SEQ ID NO: 72843 - DNA, 13 bp, Artificial Sequence
  Oligonucleotide for detection of SNP TSC0018811
agtaaaaaagaag

SEQ ID NO: 72844 - DNA, 13 bp, Artificial Sequence
  Oligonucleotide for detection of SNP TSC0018811
cttcttttttact

SEQ ID NO: 72845 - DNA, 13 bp, Artificial Sequence
  Oligonucleotide for detection of SNP TSC0018811
agtaaagaagaag

SEQ ID NO: 72846 - DNA, 13 bp, Artificial Sequence
  Oligonucleotide for detection of SNP TSC0018811
cttcttctttact

SEQ ID NO: 72847 - DNA, 13 bp, Artificial Sequence
  Oligonucleotide for detection of SNP TSC0018812
tatatagtggtaa

SEQ ID NO: 72848 - DNA, 13 bp, Artificial Sequence
  Oligonucleotide for detection of SNP TSC0018812
ttaccactatata

SEQ ID NO: 72849 - DNA, 13 bp, Artificial Sequence
  Oligonucleotide for detection of SNP TSC0018812
tatataatggtaa

SEQ ID NO: 72850 - DNA, 13 bp, Artificial Sequence
  Oligonucleotide for detection of SNP TSC0018812
ttaccattatata

SEQ ID NO: 72851 - DNA, 13 bp, Artificial Sequence
  Oligonucleotide for detection of SNP TSC0018813
agaggtttaataa

SEQ ID NO: 72852 - DNA, 13 bp, Artificial Sequence
  Oligonucleotide for detection of SNP TSC0018813
ttattaaacctct

SEQ ID NO: 72853 - DNA, 13 bp, Artificial Sequence
  Oligonucleotide for detection of SNP TSC0018813
agaggtgtaataa

SEQ ID NO: 72854 - DNA, 13 bp, Artificial Sequence
  Oligonucleotide for detection of SNP TSC0018813
ttattacacctct

SEQ ID NO: 72855 - DNA, 13 bp, Artificial Sequence
  Oligonucleotide for detection of SNP TSC0018813
agaggcgtaataa

SEQ ID NO: 72856 - DNA, 13 bp, Artificial Sequence
  Oligonucleotide for detection of SNP TSC0018813
ttattacgcctct

SEQ ID NO: 72857 - DNA, 13 bp, Artificial Sequence
  Oligonucleotide for detection of SNP TSC0018813
ttgttaggttttt

SEQ ID NO: 72858 - DNA, 13 bp, Artificial Sequence
  Oligonucleotide for detection of SNP TSC0018813
aaaaacctaacaa

SEQ ID NO: 72859 - DNA, 13 bp, Artificial Sequence
  Oligonucleotide for detection of SNP TSC0018814
tataaagtgttag

SEQ ID NO: 72860 - DNA, 13 bp, Artificial Sequence
  Oligonucleotide for detection of SNP TSC0018814
ctaacactttata

SEQ ID NO: 72861 - DNA, 13 bp, Artificial Sequence
  Oligonucleotide for detection of SNP TSC0018814
tataaaatgttag

SEQ ID NO: 72862 - DNA, 13 bp, Artificial Sequence
  Oligonucleotide for detection of SNP TSC0018814
ctaacattttata

SEQ ID NO: 72863 - DNA, 13 bp, Artificial Sequence
  Oligonucleotide for detection of SNP TSC0018815
tttagatggagty

SEQ ID NO: 72864 - DNA, 13 bp, Artificial Sequence
  Oligonucleotide for detection of SNP TSC0018815
ractccatctaaa

SEQ ID NO: 72865 - DNA, 13 bp, Artificial Sequence
  Oligonucleotide for detection of SNP TSC0018815
tttagacggagty

SEQ ID NO: 72866 - DNA, 13 bp, Artificial Sequence
  Oligonucleotide for detection of SNP TSC0018815
ractccgtctaaa

SEQ ID NO: 72867 - DNA, 13 bp, Artificial Sequence
  Oligonucleotide for detection of SNP TSC0018815
ggttttgtttggg

SEQ ID NO: 72868 - DNA, 13 bp, Artificial Sequence
  Oligonucleotide for detection of SNP TSC0018815
cccaaacaaaacc

SEQ ID NO: 72869 - DNA, 13 bp, Artificial Sequence
  Oligonucleotide for detection of SNP TSC0018815
ggttttatttggg

SEQ ID NO: 72870 - DNA, 13 bp, Artificial Sequence
  Oligonucleotide for detection of SNP TSC0018815
cccaaataaaacc

SEQ ID NO: 72871 - DNA, 13 bp, Artificial Sequence
  Oligonucleotide for detection of SNP TSC0018815
ggtttcgtttggg

SEQ ID NO: 72872 - DNA, 13 bp, Artificial Sequence
  Oligonucleotide for detection of SNP TSC0018815
cccaaacgaaacc

SEQ ID NO: 72873 - DNA, 13 bp, Artificial Sequence
  Oligonucleotide for detection of SNP TSC0018816
aatgtaaggttty

SEQ ID NO: 72874 - DNA, 13 bp, Artificial Sequence
  Oligonucleotide for detection of SNP TSC0018816
raaaccttacatt

SEQ ID NO: 72875 - DNA, 13 bp, Artificial Sequence
  Oligonucleotide for detection of SNP TSC0018816
aatgtagggttty

SEQ ID NO: 72876 - DNA, 13 bp, Artificial Sequence
  Oligonucleotide for detection of SNP TSC0018816
raaaccctacatt

SEQ ID NO: 72877 - DNA, 13 bp, Artificial Sequence
  Oligonucleotide for detection of SNP TSC0018818
ttgagtttaggga

SEQ ID NO: 72878 - DNA, 13 bp, Artificial Sequence
  Oligonucleotide for detection of SNP TSC0018818
tccctaaactcaa

SEQ ID NO: 72879 - DNA, 13 bp, Artificial Sequence
  Oligonucleotide for detection of SNP TSC0018818
ttgagtgtaggga

SEQ ID NO: 72880 - DNA, 13 bp, Artificial Sequence
  Oligonucleotide for detection of SNP TSC0018818
tccctacactcaa

SEQ ID NO: 72881 - DNA, 13 bp, Artificial Sequence
  Oligonucleotide for detection of SNP TSC0018818
tcgagtttaggga

SEQ ID NO: 72882 - DNA, 13 bp, Artificial Sequence
  Oligonucleotide for detection of SNP TSC0018818
tccctaaactcga

SEQ ID NO: 72883 - DNA, 13 bp, Artificial Sequence
  Oligonucleotide for detection of SNP TSC0018818
tcgagtgtaggga

SEQ ID NO: 72884 - DNA, 13 bp, Artificial Sequence
  Oligonucleotide for detection of SNP TSC0018818
tccctacactcga

SEQ ID NO: 72885 - DNA, 13 bp, Artificial Sequence
  Oligonucleotide for detection of SNP TSC0018818
tttttggatttga

SEQ ID NO: 72886 - DNA, 13 bp, Artificial Sequence
  Oligonucleotide for detection of SNP TSC0018818
tcaaatccaaaaa

SEQ ID NO: 72887 - DNA, 13 bp, Artificial Sequence
  Oligonucleotide for detection of SNP TSC0018818
tttttgtatttga

SEQ ID NO: 72888 - DNA, 13 bp, Artificial Sequence
  Oligonucleotide for detection of SNP TSC0018818
tcaaatacaaaaa

SEQ ID NO: 72889 - DNA, 13 bp, Artificial Sequence
  Oligonucleotide for detection of SNP TSC0018818
tttttggattcga

SEQ ID NO: 72890 - DNA, 13 bp, Artificial Sequence
  Oligonucleotide for detection of SNP TSC0018818
tcgaatccaaaaa

SEQ ID NO: 72891 - DNA, 13 bp, Artificial Sequence
  Oligonucleotide for detection of SNP TSC0018818
tttttgtattcga

SEQ ID NO: 72892 - DNA, 13 bp, Artificial Sequence
  Oligonucleotide for detection of SNP TSC0018818
tcgaatacaaaaa

SEQ ID NO: 72893 - DNA, 13 bp, Artificial Sequence
  Oligonucleotide for detection of SNP TSC0018819
tagaaaattttgg

SEQ ID NO: 72894 - DNA, 13 bp, Artificial Sequence
  Oligonucleotide for detection of SNP TSC0018819
ccaaaattttcta

SEQ ID NO: 72895 - DNA, 13 bp, Artificial Sequence
  Oligonucleotide for detection of SNP TSC0018819
tagaaatttttgg

SEQ ID NO: 72896 - DNA, 13 bp, Artificial Sequence
  Oligonucleotide for detection of SNP TSC0018819
ccaaaaatttcta

SEQ ID NO: 72897 - DNA, 13 bp, Artificial Sequence
  Oligonucleotide for detection of SNP TSC0018819
ttagaattttttg

SEQ ID NO: 72898 - DNA, 13 bp, Artificial Sequence
  Oligonucleotide for detection of SNP TSC0018819
caaaaaattctaa

SEQ ID NO: 72899 - DNA, 13 bp, Artificial Sequence
  Oligonucleotide for detection of SNP TSC0018819
ttagaaatttttg

SEQ ID NO: 72900 - DNA, 13 bp, Artificial Sequence
  Oligonucleotide for detection of SNP TSC0018819
caaaaatttctaa

SEQ ID NO: 72901 - DNA, 13 bp, Artificial Sequence
  Oligonucleotide for detection of SNP TSC0018820
gttaaaaaagaaa

SEQ ID NO: 72902 - DNA, 13 bp, Artificial Sequence
  Oligonucleotide for detection of SNP TSC0018820
tttcttttttaac

SEQ ID NO: 72903 - DNA, 13 bp, Artificial Sequence
  Oligonucleotide for detection of SNP TSC0018820
gttaaagaagaaa

SEQ ID NO: 72904 - DNA, 13 bp, Artificial Sequence
  Oligonucleotide for detection of SNP TSC0018820
tttcttctttaac

SEQ ID NO: 72905 - DNA, 13 bp, Artificial Sequence
  Oligonucleotide for detection of SNP TSC0018821
tttgtaattttag

SEQ ID NO: 72906 - DNA, 13 bp, Artificial Sequence
  Oligonucleotide for detection of SNP TSC0018821
ctaaaattacaaa

SEQ ID NO: 72907 - DNA, 13 bp, Artificial Sequence
  Oligonucleotide for detection of SNP TSC0018821
tttgtatttttag

SEQ ID NO: 72908 - DNA, 13 bp, Artificial Sequence
  Oligonucleotide for detection of SNP TSC0018821
ctaaaaatacaaa

SEQ ID NO: 72909 - DNA, 13 bp, Artificial Sequence
  Oligonucleotide for detection of SNP TSC0018821
ttggggttgtaaa

SEQ ID NO: 72910 - DNA, 13 bp, Artificial Sequence
  Oligonucleotide for detection of SNP TSC0018821
tttacaaccccaa

SEQ ID NO: 72911 - DNA, 13 bp, Artificial Sequence
  Oligonucleotide for detection of SNP TSC0018821
ttgggggtgtaaa

SEQ ID NO: 72912 - DNA, 13 bp, Artificial Sequence
  Oligonucleotide for detection of SNP TSC0018821
tttacacccccaa

SEQ ID NO: 72913 - DNA, 13 bp, Artificial Sequence
  Oligonucleotide for detection of SNP TSC0018822
ttttaggaaagty

SEQ ID NO: 72914 - DNA, 13 bp, Artificial Sequence
  Oligonucleotide for detection of SNP TSC0018822
ractttcctaaaa

SEQ ID NO: 72915 - DNA, 13 bp, Artificial Sequence
  Oligonucleotide for detection of SNP TSC0018822
ttttagaaaagty

SEQ ID NO: 72916 - DNA, 13 bp, Artificial Sequence
  Oligonucleotide for detection of SNP TSC0018822
racttttctaaaa

SEQ ID NO: 72917 - DNA, 13 bp, Artificial Sequence
  Oligonucleotide for detection of SNP TSC0018823
tgttgtatttgty

SEQ ID NO: 72918 - DNA, 13 bp, Artificial Sequence
  Oligonucleotide for detection of SNP TSC0018823
racaaatacaaca

SEQ ID NO: 72919 - DNA, 13 bp, Artificial Sequence
  Oligonucleotide for detection of SNP TSC0018823
tgttgtgtttgty

SEQ ID NO: 72920 - DNA, 13 bp, Artificial Sequence
  Oligonucleotide for detection of SNP TSC0018823
racaaacacaaca

SEQ ID NO: 72921 - DNA, 13 bp, Artificial Sequence
  Oligonucleotide for detection of SNP TSC0018823
cgttgtatttgty

SEQ ID NO: 72922 - DNA, 13 bp, Artificial Sequence
  Oligonucleotide for detection of SNP TSC0018823
racaaatacaacg

SEQ ID NO: 72923 - DNA, 13 bp, Artificial Sequence
  Oligonucleotide for detection of SNP TSC0018823
cgttgtgtttgty

SEQ ID NO: 72924 - DNA, 13 bp, Artificial Sequence
  Oligonucleotide for detection of SNP TSC0018823
racaaacacaacg

SEQ ID NO: 72925 - DNA, 13 bp, Artificial Sequence
  Oligonucleotide for detection of SNP TSC0018823
tgttgcgtttgty

SEQ ID NO: 72926 - DNA, 13 bp, Artificial Sequence
  Oligonucleotide for detection of SNP TSC0018823
racaaacgcaaca

SEQ ID NO: 72927 - DNA, 13 bp, Artificial Sequence
  Oligonucleotide for detection of SNP TSC0018823
cgttgcgtttgty

SEQ ID NO: 72928 - DNA, 13 bp, Artificial Sequence
  Oligonucleotide for detection of SNP TSC0018823
racaaacgcaacg

SEQ ID NO: 72929 - DNA, 13 bp, Artificial Sequence
  Oligonucleotide for detection of SNP TSC0018823
ggtaggtgtaatg

SEQ ID NO: 72930 - DNA, 13 bp, Artificial Sequence
  Oligonucleotide for detection of SNP TSC0018823
cattacacctacc

SEQ ID NO: 72931 - DNA, 13 bp, Artificial Sequence
  Oligonucleotide for detection of SNP TSC0018823
ggtaggtgtaacg

SEQ ID NO: 72932 - DNA, 13 bp, Artificial Sequence
  Oligonucleotide for detection of SNP TSC0018823
cgttacacctacc

SEQ ID NO: 72933 - DNA, 13 bp, Artificial Sequence
  Oligonucleotide for detection of SNP TSC0018823
ggtaggcgtaatg

SEQ ID NO: 72934 - DNA, 13 bp, Artificial Sequence
  Oligonucleotide for detection of SNP TSC0018823
cattacgcctacc

SEQ ID NO: 72935 - DNA, 13 bp, Artificial Sequence
  Oligonucleotide for detection of SNP TSC0018823
ggtaggcgtaacg

SEQ ID NO: 72936 - DNA, 13 bp, Artificial Sequence
  Oligonucleotide for detection of SNP TSC0018823
cgttacgcctacc

SEQ ID NO: 72937 - DNA, 13 bp, Artificial Sequence
  Oligonucleotide for detection of SNP TSC0018824
ttgtgaatgtggg

SEQ ID NO: 72938 - DNA, 13 bp, Artificial Sequence
  Oligonucleotide for detection of SNP TSC0018824
cccacattcacaa

SEQ ID NO: 72939 - DNA, 13 bp, Artificial Sequence
  Oligonucleotide for detection of SNP TSC0018824
ttgtgattgtggg

SEQ ID NO: 72940 - DNA, 13 bp, Artificial Sequence
  Oligonucleotide for detection of SNP TSC0018824
cccacaatcacaa

SEQ ID NO: 72941 - DNA, 13 bp, Artificial Sequence
  Oligonucleotide for detection of SNP TSC0018824
ttgtgaacgtggg

SEQ ID NO: 72942 - DNA, 13 bp, Artificial Sequence
  Oligonucleotide for detection of SNP TSC0018824
cccacgttcacaa

SEQ ID NO: 72943 - DNA, 13 bp, Artificial Sequence
  Oligonucleotide for detection of SNP TSC0018824
ttgtgatcgtggg

SEQ ID NO: 72944 - DNA, 13 bp, Artificial Sequence
  Oligonucleotide for detection of SNP TSC0018824
cccacgatcacaa

SEQ ID NO: 72945 - DNA, 13 bp, Artificial Sequence
  Oligonucleotide for detection of SNP TSC0018824
tttatgtttatag

SEQ ID NO: 72946 - DNA, 13 bp, Artificial Sequence
  Oligonucleotide for detection of SNP TSC0018824
ctataaacataaa

SEQ ID NO: 72947 - DNA, 13 bp, Artificial Sequence
  Oligonucleotide for detection of SNP TSC0018824
tttatggttatag

SEQ ID NO: 72948 - DNA, 13 bp, Artificial Sequence
  Oligonucleotide for detection of SNP TSC0018824
ctataaccataaa

SEQ ID NO: 72949 - DNA, 13 bp, Artificial Sequence
  Oligonucleotide for detection of SNP TSC0018824
tttacgtttatag

SEQ ID NO: 72950 - DNA, 13 bp, Artificial Sequence
  Oligonucleotide for detection of SNP TSC0018824
ctataaacgtaaa

SEQ ID NO: 72951 - DNA, 13 bp, Artificial Sequence
  Oligonucleotide for detection of SNP TSC0018824
tttacggttatag

SEQ ID NO: 72952 - DNA, 13 bp, Artificial Sequence
  Oligonucleotide for detection of SNP TSC0018824
ctataaccgtaaa

SEQ ID NO: 72953 - DNA, 13 bp, Artificial Sequence
  Oligonucleotide for detection of SNP TSC0018825
aaatttaatttta

SEQ ID NO: 72954 - DNA, 13 bp, Artificial Sequence
  Oligonucleotide for detection of SNP TSC0018825
taaaattaaattt

SEQ ID NO: 72955 - DNA, 13 bp, Artificial Sequence
  Oligonucleotide for detection of SNP TSC0018825
aaatttgatttta

SEQ ID NO: 72956 - DNA, 13 bp, Artificial Sequence
  Oligonucleotide for detection of SNP TSC0018825
taaaatcaaattt

SEQ ID NO: 72957 - DNA, 13 bp, Artificial Sequence
  Oligonucleotide for detection of SNP TSC0018825
aaattcgatttta

SEQ ID NO: 72958 - DNA, 13 bp, Artificial Sequence
  Oligonucleotide for detection of SNP TSC0018825
taaaatcgaattt

SEQ ID NO: 72959 - DNA, 13 bp, Artificial Sequence
  Oligonucleotide for detection of SNP TSC0018825
tgagattgaattt

SEQ ID NO: 72960 - DNA, 13 bp, Artificial Sequence
  Oligonucleotide for detection of SNP TSC0018825
aaattcaatctca

SEQ ID NO: 72961 - DNA, 13 bp, Artificial Sequence
  Oligonucleotide for detection of SNP TSC0018825
tgagatcgaattt

SEQ ID NO: 72962 - DNA, 13 bp, Artificial Sequence
  Oligonucleotide for detection of SNP TSC0018825
aaattcgatctca

SEQ ID NO: 72963 - DNA, 13 bp, Artificial Sequence
  Oligonucleotide for detection of SNP TSC0018826
tgtgggattgtta

SEQ ID NO: 72964 - DNA, 13 bp, Artificial Sequence
  Oligonucleotide for detection of SNP TSC0018826
taacaatcccaca

SEQ ID NO: 72965 - DNA, 13 bp, Artificial Sequence
  Oligonucleotide for detection of SNP TSC0018826
tgtggggttgtta

SEQ ID NO: 72966 - DNA, 13 bp, Artificial Sequence
  Oligonucleotide for detection of SNP TSC0018826
taacaaccccaca

SEQ ID NO: 72967 - DNA, 13 bp, Artificial Sequence
  Oligonucleotide for detection of SNP TSC0018827
agataagggagty

SEQ ID NO: 72968 - DNA, 13 bp, Artificial Sequence
  Oligonucleotide for detection of SNP TSC0018827
ractcccttatct

SEQ ID NO: 72969 - DNA, 13 bp, Artificial Sequence
  Oligonucleotide for detection of SNP TSC0018827
agataaaggagty

SEQ ID NO: 72970 - DNA, 13 bp, Artificial Sequence
  Oligonucleotide for detection of SNP TSC0018827
ractcctttatct

SEQ ID NO: 72971 - DNA, 13 bp, Artificial Sequence
  Oligonucleotide for detection of SNP TSC0018828
gagaggagaaagg

SEQ ID NO: 72972 - DNA, 13 bp, Artificial Sequence
  Oligonucleotide for detection of SNP TSC0018828
cctttctcctctc

SEQ ID NO: 72973 - DNA, 13 bp, Artificial Sequence
  Oligonucleotide for detection of SNP TSC0018828
gagaggggaaagg

SEQ ID NO: 72974 - DNA, 13 bp, Artificial Sequence
  Oligonucleotide for detection of SNP TSC0018828
cctttcccctctc

SEQ ID NO: 72975 - DNA, 13 bp, Artificial Sequence
  Oligonucleotide for detection of SNP TSC0018829
agtaaatgtgata

SEQ ID NO: 72976 - DNA, 13 bp, Artificial Sequence
  Oligonucleotide for detection of SNP TSC0018829
tatcacatttact

SEQ ID NO: 72977 - DNA, 13 bp, Artificial Sequence
  Oligonucleotide for detection of SNP TSC0018829
agtaaacgtgata

SEQ ID NO: 72978 - DNA, 13 bp, Artificial Sequence
  Oligonucleotide for detection of SNP TSC0018829
tatcacgtttact

SEQ ID NO: 72979 - DNA, 13 bp, Artificial Sequence
  Oligonucleotide for detection of SNP TSC0018829
tattatgtttgtt

SEQ ID NO: 72980 - DNA, 13 bp, Artificial Sequence
  Oligonucleotide for detection of SNP TSC0018829
aacaaacataata

SEQ ID NO: 72981 - DNA, 13 bp, Artificial Sequence
  Oligonucleotide for detection of SNP TSC0018829
tattatatttgtt

SEQ ID NO: 72982 - DNA, 13 bp, Artificial Sequence
  Oligonucleotide for detection of SNP TSC0018829
aacaaatataata

SEQ ID NO: 72983 - DNA, 13 bp, Artificial Sequence
  Oligonucleotide for detection of SNP TSC0018829
tattacgtttgtt

SEQ ID NO: 72984 - DNA, 13 bp, Artificial Sequence
  Oligonucleotide for detection of SNP TSC0018829
aacaaacgtaata

SEQ ID NO: 72985 - DNA, 13 bp, Artificial Sequence
  Oligonucleotide for detection of SNP TSC0018830
aatattatttgty

SEQ ID NO: 72986 - DNA, 13 bp, Artificial Sequence
  Oligonucleotide for detection of SNP TSC0018830
racaaataatatt

SEQ ID NO: 72987 - DNA, 13 bp, Artificial Sequence
  Oligonucleotide for detection of SNP TSC0018830
aatattgtttgty

SEQ ID NO: 72988 - DNA, 13 bp, Artificial Sequence
  Oligonucleotide for detection of SNP TSC0018830
racaaacaatatt

SEQ ID NO: 72989 - DNA, 13 bp, Artificial Sequence
  Oligonucleotide for detection of SNP TSC0018830
aatatcgtttgty

SEQ ID NO: 72990 - DNA, 13 bp, Artificial Sequence
  Oligonucleotide for detection of SNP TSC0018830
racaaacgatatt

SEQ ID NO: 72991 - DNA, 13 bp, Artificial Sequence
  Oligonucleotide for detection of SNP TSC0018830
ggtaggtggtatt

SEQ ID NO: 72992 - DNA, 13 bp, Artificial Sequence
  Oligonucleotide for detection of SNP TSC0018830
aataccacctacc

SEQ ID NO: 72993 - DNA, 13 bp, Artificial Sequence
  Oligonucleotide for detection of SNP TSC0018830
ggtaggcggtatt

SEQ ID NO: 72994 - DNA, 13 bp, Artificial Sequence
  Oligonucleotide for detection of SNP TSC0018830
aataccgcctacc

SEQ ID NO: 72995 - DNA, 13 bp, Artificial Sequence
  Oligonucleotide for detection of SNP TSC0018831
aatatattgaaga

SEQ ID NO: 72996 - DNA, 13 bp, Artificial Sequence
  Oligonucleotide for detection of SNP TSC0018831
tcttcaatatatt

SEQ ID NO: 72997 - DNA, 13 bp, Artificial Sequence
  Oligonucleotide for detection of SNP TSC0018831
aatatagtgaaga

SEQ ID NO: 72998 - DNA, 13 bp, Artificial Sequence
  Oligonucleotide for detection of SNP TSC0018831
tcttcactatatt

SEQ ID NO: 72999 - DNA, 13 bp, Artificial Sequence
  Oligonucleotide for detection of SNP TSC0018831
tttttagtatatt

SEQ ID NO: 73000 - DNA, 13 bp, Artificial Sequence
  Oligonucleotide for detection of SNP TSC0018831
aatatactaaaaa

SEQ ID NO: 73001 - DNA, 13 bp, Artificial Sequence
  Oligonucleotide for detection of SNP TSC0018831
tttttattatatt

SEQ ID NO: 73002 - DNA, 13 bp, Artificial Sequence
  Oligonucleotide for detection of SNP TSC0018831
aatataataaaaa

SEQ ID NO: 73003 - DNA, 13 bp, Artificial Sequence
  Oligonucleotide for detection of SNP TSC0018832
atttgtaaaagat

SEQ ID NO: 73004 - DNA, 13 bp, Artificial Sequence
  Oligonucleotide for detection of SNP TSC0018832
atcttttacaaat

SEQ ID NO: 73005 - DNA, 13 bp, Artificial Sequence
  Oligonucleotide for detection of SNP TSC0018832
atttgtgaaagat

SEQ ID NO: 73006 - DNA, 13 bp, Artificial Sequence
  Oligonucleotide for detection of SNP TSC0018832
atctttcacaaat

SEQ ID NO: 73007 - DNA, 13 bp, Artificial Sequence
  Oligonucleotide for detection of SNP TSC0018833
atatttagtttaa

SEQ ID NO: 73008 - DNA, 13 bp, Artificial Sequence
  Oligonucleotide for detection of SNP TSC0018833
ttaaactaaatat

SEQ ID NO: 73009 - DNA, 13 bp, Artificial Sequence
  Oligonucleotide for detection of SNP TSC0018833
atatttggtttaa

SEQ ID NO: 73010 - DNA, 13 bp, Artificial Sequence
  Oligonucleotide for detection of SNP TSC0018833
ttaaaccaaatat

SEQ ID NO: 73011 - DNA, 13 bp, Artificial Sequence
  Oligonucleotide for detection of SNP TSC0018833
atattcggtttaa

SEQ ID NO: 73012 - DNA, 13 bp, Artificial Sequence
  Oligonucleotide for detection of SNP TSC0018833
ttaaaccgaatat

SEQ ID NO: 73013 - DNA, 13 bp, Artificial Sequence
  Oligonucleotide for detection of SNP TSC0018833
ttgagttgaatgt

SEQ ID NO: 73014 - DNA, 13 bp, Artificial Sequence
  Oligonucleotide for detection of SNP TSC0018833
acattcaactcaa

SEQ ID NO: 73015 - DNA, 13 bp, Artificial Sequence
  Oligonucleotide for detection of SNP TSC0018833
ttgagtcgaatgt

SEQ ID NO: 73016 - DNA, 13 bp, Artificial Sequence
  Oligonucleotide for detection of SNP TSC0018833
acattcgactcaa

SEQ ID NO: 73017 - DNA, 13 bp, Artificial Sequence
  Oligonucleotide for detection of SNP TSC0018836
tttattaaataag

SEQ ID NO: 73018 - DNA, 13 bp, Artificial Sequence
  Oligonucleotide for detection of SNP TSC0018836
cttatttaataaa

SEQ ID NO: 73019 - DNA, 13 bp, Artificial Sequence
  Oligonucleotide for detection of SNP TSC0018836
tttattgaataag

SEQ ID NO: 73020 - DNA, 13 bp, Artificial Sequence
  Oligonucleotide for detection of SNP TSC0018836
cttattcaataaa

SEQ ID NO: 73021 - DNA, 13 bp, Artificial Sequence
  Oligonucleotide for detection of SNP TSC0018836
tttatcgaataag

SEQ ID NO: 73022 - DNA, 13 bp, Artificial Sequence
  Oligonucleotide for detection of SNP TSC0018836
cttattcgataaa

SEQ ID NO: 73023 - DNA, 13 bp, Artificial Sequence
  Oligonucleotide for detection of SNP TSC0018836
tttatttggtaaa

SEQ ID NO: 73024 - DNA, 13 bp, Artificial Sequence
  Oligonucleotide for detection of SNP TSC0018836
tttaccaaataaa

SEQ ID NO: 73025 - DNA, 13 bp, Artificial Sequence
  Oligonucleotide for detection of SNP TSC0018836
tttattcggtaaa

SEQ ID NO: 73026 - DNA, 13 bp, Artificial Sequence
  Oligonucleotide for detection of SNP TSC0018836
tttaccgaataaa

SEQ ID NO: 73027 - DNA, 13 bp, Artificial Sequence
  Oligonucleotide for detection of SNP TSC0018837
gaaaattgttaty

SEQ ID NO: 73028 - DNA, 13 bp, Artificial Sequence
  Oligonucleotide for detection of SNP TSC0018837
rataacaattttc

SEQ ID NO: 73029 - DNA, 13 bp, Artificial Sequence
  Oligonucleotide for detection of SNP TSC0018837
gaaaatcgttaty

SEQ ID NO: 73030 - DNA, 13 bp, Artificial Sequence
  Oligonucleotide for detection of SNP TSC0018837
rataacgattttc

SEQ ID NO: 73031 - DNA, 13 bp, Artificial Sequence
  Oligonucleotide for detection of SNP TSC0018837
gataatggtttty

SEQ ID NO: 73032 - DNA, 13 bp, Artificial Sequence
  Oligonucleotide for detection of SNP TSC0018837
raaaaccattatc

SEQ ID NO: 73033 - DNA, 13 bp, Artificial Sequence
  Oligonucleotide for detection of SNP TSC0018837
gataatagtttty

SEQ ID NO: 73034 - DNA, 13 bp, Artificial Sequence
  Oligonucleotide for detection of SNP TSC0018837
raaaactattatc

SEQ ID NO: 73035 - DNA, 13 bp, Artificial Sequence
  Oligonucleotide for detection of SNP TSC0018837
gataacggtttty

SEQ ID NO: 73036 - DNA, 13 bp, Artificial Sequence
  Oligonucleotide for detection of SNP TSC0018837
raaaaccgttatc

SEQ ID NO: 73037 - DNA, 13 bp, Artificial Sequence
  Oligonucleotide for detection of SNP TSC0018842
agttgggttttty

SEQ ID NO: 73038 - DNA, 13 bp, Artificial Sequence
  Oligonucleotide for detection of SNP TSC0018842
raaaaacccaact

SEQ ID NO: 73039 - DNA, 13 bp, Artificial Sequence
  Oligonucleotide for detection of SNP TSC0018842
agttggattttty

SEQ ID NO: 73040 - DNA, 13 bp, Artificial Sequence
  Oligonucleotide for detection of SNP TSC0018842
raaaaatccaact

SEQ ID NO: 73041 - DNA, 13 bp, Artificial Sequence
  Oligonucleotide for detection of SNP TSC0018844
atgtgtatataat

SEQ ID NO: 73042 - DNA, 13 bp, Artificial Sequence
  Oligonucleotide for detection of SNP TSC0018844
attatatacacat

SEQ ID NO: 73043 - DNA, 13 bp, Artificial Sequence
  Oligonucleotide for detection of SNP TSC0018844
atgtgtgtataat

SEQ ID NO: 73044 - DNA, 13 bp, Artificial Sequence
  Oligonucleotide for detection of SNP TSC0018844
attatacacacat

SEQ ID NO: 73045 - DNA, 13 bp, Artificial Sequence
  Oligonucleotide for detection of SNP TSC0018844
atgtgcgtataat

SEQ ID NO: 73046 - DNA, 13 bp, Artificial Sequence
  Oligonucleotide for detection of SNP TSC0018844
attatacgcacat

SEQ ID NO: 73047 - DNA, 13 bp, Artificial Sequence
  Oligonucleotide for detection of SNP TSC0018844
attatgtgtatat

SEQ ID NO: 73048 - DNA, 13 bp, Artificial Sequence
  Oligonucleotide for detection of SNP TSC0018844
atatacacataat

SEQ ID NO: 73049 - DNA, 13 bp, Artificial Sequence
  Oligonucleotide for detection of SNP TSC0018844
attatgcgtatat

SEQ ID NO: 73050 - DNA, 13 bp, Artificial Sequence
  Oligonucleotide for detection of SNP TSC0018844
atatacgcataat

SEQ ID NO: 73051 - DNA, 13 bp, Artificial Sequence
  Oligonucleotide for detection of SNP TSC0018845
gttttgatagtta

SEQ ID NO: 73052 - DNA, 13 bp, Artificial Sequence
  Oligonucleotide for detection of SNP TSC0018845
taactatcaaaac

SEQ ID NO: 73053 - DNA, 13 bp, Artificial Sequence
  Oligonucleotide for detection of SNP TSC0018845
gttttgttagtta

SEQ ID NO: 73054 - DNA, 13 bp, Artificial Sequence
  Oligonucleotide for detection of SNP TSC0018845
taactaacaaaac

SEQ ID NO: 73055 - DNA, 13 bp, Artificial Sequence
  Oligonucleotide for detection of SNP TSC0018845
tggttattagaay

SEQ ID NO: 73056 - DNA, 13 bp, Artificial Sequence
  Oligonucleotide for detection of SNP TSC0018845
rttctaataacca

SEQ ID NO: 73057 - DNA, 13 bp, Artificial Sequence
  Oligonucleotide for detection of SNP TSC0018845
tggttaatagaay

SEQ ID NO: 73058 - DNA, 13 bp, Artificial Sequence
  Oligonucleotide for detection of SNP TSC0018845
rttctattaacca

SEQ ID NO: 73059 - DNA, 13 bp, Artificial Sequence
  Oligonucleotide for detection of SNP TSC0018846
taaatttggattg

SEQ ID NO: 73060 - DNA, 13 bp, Artificial Sequence
  Oligonucleotide for detection of SNP TSC0018846
caatccaaattta

SEQ ID NO: 73061 - DNA, 13 bp, Artificial Sequence
  Oligonucleotide for detection of SNP TSC0018846
taaattgggattg

SEQ ID NO: 73062 - DNA, 13 bp, Artificial Sequence
  Oligonucleotide for detection of SNP TSC0018846
caatcccaattta

SEQ ID NO: 73063 - DNA, 13 bp, Artificial Sequence
  Oligonucleotide for detection of SNP TSC0018846
taaattcggattg

SEQ ID NO: 73064 - DNA, 13 bp, Artificial Sequence
  Oligonucleotide for detection of SNP TSC0018846
caatccgaattta

SEQ ID NO: 73065 - DNA, 13 bp, Artificial Sequence
  Oligonucleotide for detection of SNP TSC0018846
taatttgaatttg

SEQ ID NO: 73066 - DNA, 13 bp, Artificial Sequence
  Oligonucleotide for detection of SNP TSC0018846
caaattcaaatta

SEQ ID NO: 73067 - DNA, 13 bp, Artificial Sequence
  Oligonucleotide for detection of SNP TSC0018846
taattttaatttg

SEQ ID NO: 73068 - DNA, 13 bp, Artificial Sequence
  Oligonucleotide for detection of SNP TSC0018846
caaattaaaatta

SEQ ID NO: 73069 - DNA, 13 bp, Artificial Sequence
  Oligonucleotide for detection of SNP TSC0018846
taattcgaatttg

SEQ ID NO: 73070 - DNA, 13 bp, Artificial Sequence
  Oligonucleotide for detection of SNP TSC0018846
caaattcgaatta

SEQ ID NO: 73071 - DNA, 13 bp, Artificial Sequence
  Oligonucleotide for detection of SNP TSC0018848
agttattaattta

SEQ ID NO: 73072 - DNA, 13 bp, Artificial Sequence
  Oligonucleotide for detection of SNP TSC0018848
taaattaataact

SEQ ID NO: 73073 - DNA, 13 bp, Artificial Sequence
  Oligonucleotide for detection of SNP TSC0018848
tggatttatgatt

SEQ ID NO: 73074 - DNA, 13 bp, Artificial Sequence
  Oligonucleotide for detection of SNP TSC0018848
aatcataaatcca

SEQ ID NO: 73075 - DNA, 13 bp, Artificial Sequence
  Oligonucleotide for detection of SNP TSC0018848
tggattgatgatt

SEQ ID NO: 73076 - DNA, 13 bp, Artificial Sequence
  Oligonucleotide for detection of SNP TSC0018848
aatcatcaatcca

SEQ ID NO: 73077 - DNA, 13 bp, Artificial Sequence
  Oligonucleotide for detection of SNP TSC0018849
aatttaaaattaa

SEQ ID NO: 73078 - DNA, 13 bp, Artificial Sequence
  Oligonucleotide for detection of SNP TSC0018849
ttaattttaaatt

SEQ ID NO: 73079 - DNA, 13 bp, Artificial Sequence
  Oligonucleotide for detection of SNP TSC0018849
aatttagaattaa

SEQ ID NO: 73080 - DNA, 13 bp, Artificial Sequence
  Oligonucleotide for detection of SNP TSC0018849
ttaattctaaatt

SEQ ID NO: 73081 - DNA, 13 bp, Artificial Sequence
  Oligonucleotide for detection of SNP TSC0018850
gatataaaagtta

SEQ ID NO: 73082 - DNA, 13 bp, Artificial Sequence
  Oligonucleotide for detection of SNP TSC0018850
taacttttatatc

SEQ ID NO: 73083 - DNA, 13 bp, Artificial Sequence
  Oligonucleotide for detection of SNP TSC0018850
gatatataagtta

SEQ ID NO: 73084 - DNA, 13 bp, Artificial Sequence
  Oligonucleotide for detection of SNP TSC0018850
taacttatatatc

SEQ ID NO: 73085 - DNA, 13 bp, Artificial Sequence
  Oligonucleotide for detection of SNP TSC0018850
tgatttttgtgty

SEQ ID NO: 73086 - DNA, 13 bp, Artificial Sequence
  Oligonucleotide for detection of SNP TSC0018850
racacaaaaatca

SEQ ID NO: 73087 - DNA, 13 bp, Artificial Sequence
  Oligonucleotide for detection of SNP TSC0018850
tgatttgtgtgty

SEQ ID NO: 73088 - DNA, 13 bp, Artificial Sequence
  Oligonucleotide for detection of SNP TSC0018850
racacacaaatca

SEQ ID NO: 73089 - DNA, 13 bp, Artificial Sequence
  Oligonucleotide for detection of SNP TSC0018851
tttttgtgttttg

SEQ ID NO: 73090 - DNA, 13 bp, Artificial Sequence
  Oligonucleotide for detection of SNP TSC0018851
caaaacacaaaaa

SEQ ID NO: 73091 - DNA, 13 bp, Artificial Sequence
  Oligonucleotide for detection of SNP TSC0018851
ttttcgtgttttg

SEQ ID NO: 73092 - DNA, 13 bp, Artificial Sequence
  Oligonucleotide for detection of SNP TSC0018851
caaaacacgaaaa

SEQ ID NO: 73093 - DNA, 13 bp, Artificial Sequence
  Oligonucleotide for detection of SNP TSC0018851
tttttgcgttttg

SEQ ID NO: 73094 - DNA, 13 bp, Artificial Sequence
  Oligonucleotide for detection of SNP TSC0018851
caaaacgcaaaaa

SEQ ID NO: 73095 - DNA, 13 bp, Artificial Sequence
  Oligonucleotide for detection of SNP TSC0018851
tttttgtgtttcg

SEQ ID NO: 73096 - DNA, 13 bp, Artificial Sequence
  Oligonucleotide for detection of SNP TSC0018851
cgaaacacaaaaa

SEQ ID NO: 73097 - DNA, 13 bp, Artificial Sequence
  Oligonucleotide for detection of SNP TSC0018851
ttttcgtgtttcg

SEQ ID NO: 73098 - DNA, 13 bp, Artificial Sequence
  Oligonucleotide for detection of SNP TSC0018851
cgaaacacgaaaa

SEQ ID NO: 73099 - DNA, 13 bp, Artificial Sequence
  Oligonucleotide for detection of SNP TSC0018851
ttttcgcgttttg

SEQ ID NO: 73100 - DNA, 13 bp, Artificial Sequence
  Oligonucleotide for detection of SNP TSC0018851
caaaacgcgaaaa

SEQ ID NO: 73101 - DNA, 13 bp, Artificial Sequence
  Oligonucleotide for detection of SNP TSC0018851
tttttgcgtttcg

SEQ ID NO: 73102 - DNA, 13 bp, Artificial Sequence
  Oligonucleotide for detection of SNP TSC0018851
cgaaacgcaaaaa

SEQ ID NO: 73103 - DNA, 13 bp, Artificial Sequence
  Oligonucleotide for detection of SNP TSC0018851
ttttcgcgtttcg

SEQ ID NO: 73104 - DNA, 13 bp, Artificial Sequence
  Oligonucleotide for detection of SNP TSC0018851
cgaaacgcgaaaa

SEQ ID NO: 73105 - DNA, 13 bp, Artificial Sequence
  Oligonucleotide for detection of SNP TSC0018851
tgggatgtggggg

SEQ ID NO: 73106 - DNA, 13 bp, Artificial Sequence
  Oligonucleotide for detection of SNP TSC0018851
cccccacatccca

SEQ ID NO: 73107 - DNA, 13 bp, Artificial Sequence
  Oligonucleotide for detection of SNP TSC0018851
tgggatatggggg

SEQ ID NO: 73108 - DNA, 13 bp, Artificial Sequence
  Oligonucleotide for detection of SNP TSC0018851
cccccatatccca

SEQ ID NO: 73109 - DNA, 13 bp, Artificial Sequence
  Oligonucleotide for detection of SNP TSC0018851
cgggatgtggggg

SEQ ID NO: 73110 - DNA, 13 bp, Artificial Sequence
  Oligonucleotide for detection of SNP TSC0018851
cccccacatcccg

SEQ ID NO: 73111 - DNA, 13 bp, Artificial Sequence
  Oligonucleotide for detection of SNP TSC0018851
cgggatatggggg

SEQ ID NO: 73112 - DNA, 13 bp, Artificial Sequence
  Oligonucleotide for detection of SNP TSC0018851
cccccatatcccg

SEQ ID NO: 73113 - DNA, 13 bp, Artificial Sequence
  Oligonucleotide for detection of SNP TSC0018851
tgggacgtggggg

SEQ ID NO: 73114 - DNA, 13 bp, Artificial Sequence
  Oligonucleotide for detection of SNP TSC0018851
cccccacgtccca

SEQ ID NO: 73115 - DNA, 13 bp, Artificial Sequence
  Oligonucleotide for detection of SNP TSC0018851
tgggatacggggg

SEQ ID NO: 73116 - DNA, 13 bp, Artificial Sequence
  Oligonucleotide for detection of SNP TSC0018851
cccccgtatccca

SEQ ID NO: 73117 - DNA, 13 bp, Artificial Sequence
  Oligonucleotide for detection of SNP TSC0018851
tgggatgcggggg

SEQ ID NO: 73118 - DNA, 13 bp, Artificial Sequence
  Oligonucleotide for detection of SNP TSC0018851
cccccgcatccca

SEQ ID NO: 73119 - DNA, 13 bp, Artificial Sequence
  Oligonucleotide for detection of SNP TSC0018851
cgggatacggggg

SEQ ID NO: 73120 - DNA, 13 bp, Artificial Sequence
  Oligonucleotide for detection of SNP TSC0018851
cccccgtatcccg

SEQ ID NO: 73121 - DNA, 13 bp, Artificial Sequence
  Oligonucleotide for detection of SNP TSC0018851
cgggacgtggggg

SEQ ID NO: 73122 - DNA, 13 bp, Artificial Sequence
  Oligonucleotide for detection of SNP TSC0018851
cccccacgtcccg

SEQ ID NO: 73123 - DNA, 13 bp, Artificial Sequence
  Oligonucleotide for detection of SNP TSC0018851
cgggatgcggggg

SEQ ID NO: 73124 - DNA, 13 bp, Artificial Sequence
  Oligonucleotide for detection of SNP TSC0018851
cccccgcatcccg

SEQ ID NO: 73125 - DNA, 13 bp, Artificial Sequence
  Oligonucleotide for detection of SNP TSC0018851
tgggacgcggggg

SEQ ID NO: 73126 - DNA, 13 bp, Artificial Sequence
  Oligonucleotide for detection of SNP TSC0018851
cccccgcgtccca

SEQ ID NO: 73127 - DNA, 13 bp, Artificial Sequence
  Oligonucleotide for detection of SNP TSC0018851
cgggacgcggggg

SEQ ID NO: 73128 - DNA, 13 bp, Artificial Sequence
  Oligonucleotide for detection of SNP TSC0018851
cccccgcgtcccg

SEQ ID NO: 73129 - DNA, 13 bp, Artificial Sequence
  Oligonucleotide for detection of SNP TSC0018852
tttgttgtatgtt

SEQ ID NO: 73130 - DNA, 13 bp, Artificial Sequence
  Oligonucleotide for detection of SNP TSC0018852
aacatacaacaaa

SEQ ID NO: 73131 - DNA, 13 bp, Artificial Sequence
  Oligonucleotide for detection of SNP TSC0018852
tttgttttatgtt

SEQ ID NO: 73132 - DNA, 13 bp, Artificial Sequence
  Oligonucleotide for detection of SNP TSC0018852
aacataaaacaaa

SEQ ID NO: 73133 - DNA, 13 bp, Artificial Sequence
  Oligonucleotide for detection of SNP TSC0018852
ttcgttgtatgtt

SEQ ID NO: 73134 - DNA, 13 bp, Artificial Sequence
  Oligonucleotide for detection of SNP TSC0018852
aacatacaacgaa

SEQ ID NO: 73135 - DNA, 13 bp, Artificial Sequence
  Oligonucleotide for detection of SNP TSC0018852
ttcgttttatgtt

SEQ ID NO: 73136 - DNA, 13 bp, Artificial Sequence
  Oligonucleotide for detection of SNP TSC0018852
aacataaaacgaa

SEQ ID NO: 73137 - DNA, 13 bp, Artificial Sequence
  Oligonucleotide for detection of SNP TSC0018852
tttgttgtacgtt

SEQ ID NO: 73138 - DNA, 13 bp, Artificial Sequence
  Oligonucleotide for detection of SNP TSC0018852
aacgtacaacaaa

SEQ ID NO: 73139 - DNA, 13 bp, Artificial Sequence
  Oligonucleotide for detection of SNP TSC0018852
tttgttttacgtt

SEQ ID NO: 73140 - DNA, 13 bp, Artificial Sequence
  Oligonucleotide for detection of SNP TSC0018852
aacgtaaaacaaa

SEQ ID NO: 73141 - DNA, 13 bp, Artificial Sequence
  Oligonucleotide for detection of SNP TSC0018852
ttcgttgtacgtt

SEQ ID NO: 73142 - DNA, 13 bp, Artificial Sequence
  Oligonucleotide for detection of SNP TSC0018852
aacgtacaacgaa

SEQ ID NO: 73143 - DNA, 13 bp, Artificial Sequence
  Oligonucleotide for detection of SNP TSC0018852
ttcgttttacgtt

SEQ ID NO: 73144 - DNA, 13 bp, Artificial Sequence
  Oligonucleotide for detection of SNP TSC0018852
aacgtaaaacgaa

SEQ ID NO: 73145 - DNA, 13 bp, Artificial Sequence
  Oligonucleotide for detection of SNP TSC0018852
agtgtgtagtggg

SEQ ID NO: 73146 - DNA, 13 bp, Artificial Sequence
  Oligonucleotide for detection of SNP TSC0018852
cccactacacact

SEQ ID NO: 73147 - DNA, 13 bp, Artificial Sequence
  Oligonucleotide for detection of SNP TSC0018852
agtgtgaagtggg

SEQ ID NO: 73148 - DNA, 13 bp, Artificial Sequence
  Oligonucleotide for detection of SNP TSC0018852
cccacttcacact

SEQ ID NO: 73149 - DNA, 13 bp, Artificial Sequence
  Oligonucleotide for detection of SNP TSC0018852
agcgtgtagtggg

SEQ ID NO: 73150 - DNA, 13 bp, Artificial Sequence
  Oligonucleotide for detection of SNP TSC0018852
cccactacacgct

SEQ ID NO: 73151 - DNA, 13 bp, Artificial Sequence
  Oligonucleotide for detection of SNP TSC0018852
agcgtgaagtggg

SEQ ID NO: 73152 - DNA, 13 bp, Artificial Sequence
  Oligonucleotide for detection of SNP TSC0018852
cccacttcacgct

SEQ ID NO: 73153 - DNA, 13 bp, Artificial Sequence
  Oligonucleotide for detection of SNP TSC0018852
agtgtgtagcggg

SEQ ID NO: 73154 - DNA, 13 bp, Artificial Sequence
  Oligonucleotide for detection of SNP TSC0018852
cccgctacacact

SEQ ID NO: 73155 - DNA, 13 bp, Artificial Sequence
  Oligonucleotide for detection of SNP TSC0018852
agtgtgaagcggg

SEQ ID NO: 73156 - DNA, 13 bp, Artificial Sequence
  Oligonucleotide for detection of SNP TSC0018852
cccgcttcacact

SEQ ID NO: 73157 - DNA, 13 bp, Artificial Sequence
  Oligonucleotide for detection of SNP TSC0018852
agcgtgtagcggg

SEQ ID NO: 73158 - DNA, 13 bp, Artificial Sequence
  Oligonucleotide for detection of SNP TSC0018852
cccgctacacgct

SEQ ID NO: 73159 - DNA, 13 bp, Artificial Sequence
  Oligonucleotide for detection of SNP TSC0018852
agcgtgaagcggg

SEQ ID NO: 73160 - DNA, 13 bp, Artificial Sequence
  Oligonucleotide for detection of SNP TSC0018852
cccgcttcacgct

SEQ ID NO: 73161 - DNA, 13 bp, Artificial Sequence
  Oligonucleotide for detection of SNP TSC0018853
tgttgtattatty

SEQ ID NO: 73162 - DNA, 13 bp, Artificial Sequence
  Oligonucleotide for detection of SNP TSC0018853
raataatacaaca

SEQ ID NO: 73163 - DNA, 13 bp, Artificial Sequence
  Oligonucleotide for detection of SNP TSC0018853
tgttgtgttatty

SEQ ID NO: 73164 - DNA, 13 bp, Artificial Sequence
  Oligonucleotide for detection of SNP TSC0018853
raataacacaaca

SEQ ID NO: 73165 - DNA, 13 bp, Artificial Sequence
  Oligonucleotide for detection of SNP TSC0018860
aatttgtttttgy

SEQ ID NO: 73166 - DNA, 13 bp, Artificial Sequence
  Oligonucleotide for detection of SNP TSC0018860
rcaaaaacaaatt

SEQ ID NO: 73167 - DNA, 13 bp, Artificial Sequence
  Oligonucleotide for detection of SNP TSC0018860
aatttggttttgy

SEQ ID NO: 73168 - DNA, 13 bp, Artificial Sequence
  Oligonucleotide for detection of SNP TSC0018860
rcaaaaccaaatt

SEQ ID NO: 73169 - DNA, 13 bp, Artificial Sequence
  Oligonucleotide for detection of SNP TSC0018860
gtaggggtaggtt

SEQ ID NO: 73170 - DNA, 13 bp, Artificial Sequence
  Oligonucleotide for detection of SNP TSC0018860
aacctacccctac

SEQ ID NO: 73171 - DNA, 13 bp, Artificial Sequence
  Oligonucleotide for detection of SNP TSC0018860
gtagggttaggtt

SEQ ID NO: 73172 - DNA, 13 bp, Artificial Sequence
  Oligonucleotide for detection of SNP TSC0018860
aacctaaccctac

SEQ ID NO: 73173 - DNA, 13 bp, Artificial Sequence
  Oligonucleotide for detection of SNP TSC0018861
gagaaatggaatt

SEQ ID NO: 73174 - DNA, 13 bp, Artificial Sequence
  Oligonucleotide for detection of SNP TSC0018861
aattccatttctc

SEQ ID NO: 73175 - DNA, 13 bp, Artificial Sequence
  Oligonucleotide for detection of SNP TSC0018861
gagaaacggaatt

SEQ ID NO: 73176 - DNA, 13 bp, Artificial Sequence
  Oligonucleotide for detection of SNP TSC0018861
aattccgtttctc

SEQ ID NO: 73177 - DNA, 13 bp, Artificial Sequence
  Oligonucleotide for detection of SNP TSC0018861
aattttattttty

SEQ ID NO: 73178 - DNA, 13 bp, Artificial Sequence
  Oligonucleotide for detection of SNP TSC0018861
raaaaataaaatt

SEQ ID NO: 73179 - DNA, 13 bp, Artificial Sequence
  Oligonucleotide for detection of SNP TSC0018861
aatttcgttttty

SEQ ID NO: 73180 - DNA, 13 bp, Artificial Sequence
  Oligonucleotide for detection of SNP TSC0018861
raaaaacgaaatt

SEQ ID NO: 73181 - DNA, 13 bp, Artificial Sequence
  Oligonucleotide for detection of SNP TSC0018862
taattatttttgy

SEQ ID NO: 73182 - DNA, 13 bp, Artificial Sequence
  Oligonucleotide for detection of SNP TSC0018862
rcaaaaataatta

SEQ ID NO: 73183 - DNA, 13 bp, Artificial Sequence
  Oligonucleotide for detection of SNP TSC0018862
taattagttttgy

SEQ ID NO: 73184 - DNA, 13 bp, Artificial Sequence
  Oligonucleotide for detection of SNP TSC0018862
rcaaaactaatta

SEQ ID NO: 73185 - DNA, 13 bp, Artificial Sequence
  Oligonucleotide for detection of SNP TSC0018862
gtaggggtggtta

SEQ ID NO: 73186 - DNA, 13 bp, Artificial Sequence
  Oligonucleotide for detection of SNP TSC0018862
taaccacccctac

SEQ ID NO: 73187 - DNA, 13 bp, Artificial Sequence
  Oligonucleotide for detection of SNP TSC0018862
gtagggttggtta

SEQ ID NO: 73188 - DNA, 13 bp, Artificial Sequence
  Oligonucleotide for detection of SNP TSC0018862
taaccaaccctac

SEQ ID NO: 73189 - DNA, 13 bp, Artificial Sequence
  Oligonucleotide for detection of SNP TSC0018863
taagataatttgg

SEQ ID NO: 73190 - DNA, 13 bp, Artificial Sequence
  Oligonucleotide for detection of SNP TSC0018863
ccaaattatctta

SEQ ID NO: 73191 - DNA, 13 bp, Artificial Sequence
  Oligonucleotide for detection of SNP TSC0018863
taagattatttgg

SEQ ID NO: 73192 - DNA, 13 bp, Artificial Sequence
  Oligonucleotide for detection of SNP TSC0018863
ccaaataatctta

SEQ ID NO: 73193 - DNA, 13 bp, Artificial Sequence
  Oligonucleotide for detection of SNP TSC0018863
ttagattgtttta

SEQ ID NO: 73194 - DNA, 13 bp, Artificial Sequence
  Oligonucleotide for detection of SNP TSC0018863
taaaacaatctaa

SEQ ID NO: 73195 - DNA, 13 bp, Artificial Sequence
  Oligonucleotide for detection of SNP TSC0018863
ttagatagtttta

SEQ ID NO: 73196 - DNA, 13 bp, Artificial Sequence
  Oligonucleotide for detection of SNP TSC0018863
taaaactatctaa

SEQ ID NO: 73197 - DNA, 13 bp, Artificial Sequence
  Oligonucleotide for detection of SNP TSC0018868
tagatagtttttt

SEQ ID NO: 73198 - DNA, 13 bp, Artificial Sequence
  Oligonucleotide for detection of SNP TSC0018868
aaaaaactatcta

SEQ ID NO: 73199 - DNA, 13 bp, Artificial Sequence
  Oligonucleotide for detection of SNP TSC0018868
tagataatttttt

SEQ ID NO: 73200 - DNA, 13 bp, Artificial Sequence
  Oligonucleotide for detection of SNP TSC0018868
aaaaaattatcta

SEQ ID NO: 73201 - DNA, 13 bp, Artificial Sequence
  Oligonucleotide for detection of SNP TSC0018869
attaaggttttga

SEQ ID NO: 73202 - DNA, 13 bp, Artificial Sequence
  Oligonucleotide for detection of SNP TSC0018869
tcaaaaccttaat

SEQ ID NO: 73203 - DNA, 13 bp, Artificial Sequence
  Oligonucleotide for detection of SNP TSC0018869
attaagtttttga

SEQ ID NO: 73204 - DNA, 13 bp, Artificial Sequence
  Oligonucleotide for detection of SNP TSC0018869
tcaaaaacttaat

SEQ ID NO: 73205 - DNA, 13 bp, Artificial Sequence
  Oligonucleotide for detection of SNP TSC0018869
ttagggttttggt

SEQ ID NO: 73206 - DNA, 13 bp, Artificial Sequence
  Oligonucleotide for detection of SNP TSC0018869
accaaaaccctaa

SEQ ID NO: 73207 - DNA, 13 bp, Artificial Sequence
  Oligonucleotide for detection of SNP TSC0018869
ttagggatttggt

SEQ ID NO: 73208 - DNA, 13 bp, Artificial Sequence
  Oligonucleotide for detection of SNP TSC0018869
accaaatccctaa

SEQ ID NO: 73209 - DNA, 13 bp, Artificial Sequence
  Oligonucleotide for detection of SNP TSC0018872
ttaaatgagtgat

SEQ ID NO: 73210 - DNA, 13 bp, Artificial Sequence
  Oligonucleotide for detection of SNP TSC0018872
atcactcatttaa

SEQ ID NO: 73211 - DNA, 13 bp, Artificial Sequence
  Oligonucleotide for detection of SNP TSC0018872
ttaaataagtgat

SEQ ID NO: 73212 - DNA, 13 bp, Artificial Sequence
  Oligonucleotide for detection of SNP TSC0018872
atcacttatttaa

SEQ ID NO: 73213 - DNA, 13 bp, Artificial Sequence
  Oligonucleotide for detection of SNP TSC0018873
tttggtaatttgy

SEQ ID NO: 73214 - DNA, 13 bp, Artificial Sequence
  Oligonucleotide for detection of SNP TSC0018873
rcaaattaccaaa

SEQ ID NO: 73215 - DNA, 13 bp, Artificial Sequence
  Oligonucleotide for detection of SNP TSC0018873
tttggtgatttgy

SEQ ID NO: 73216 - DNA, 13 bp, Artificial Sequence
  Oligonucleotide for detection of SNP TSC0018873
rcaaatcaccaaa

SEQ ID NO: 73217 - DNA, 13 bp, Artificial Sequence
  Oligonucleotide for detection of SNP TSC0018873
tttggcgatttgy

SEQ ID NO: 73218 - DNA, 13 bp, Artificial Sequence
  Oligonucleotide for detection of SNP TSC0018873
rcaaatcgccaaa

SEQ ID NO: 73219 - DNA, 13 bp, Artificial Sequence
  Oligonucleotide for detection of SNP TSC0018873
gtaggttgttagg

SEQ ID NO: 73220 - DNA, 13 bp, Artificial Sequence
  Oligonucleotide for detection of SNP TSC0018873
cctaacaacctac

SEQ ID NO: 73221 - DNA, 13 bp, Artificial Sequence
  Oligonucleotide for detection of SNP TSC0018873
gtaggtcgttagg

SEQ ID NO: 73222 - DNA, 13 bp, Artificial Sequence
  Oligonucleotide for detection of SNP TSC0018873
cctaacgacctac

SEQ ID NO: 73223 - DNA, 13 bp, Artificial Sequence
  Oligonucleotide for detection of SNP TSC0018874
aatttgtggttty

SEQ ID NO: 73224 - DNA, 13 bp, Artificial Sequence
  Oligonucleotide for detection of SNP TSC0018874
raaaccacaaatt

SEQ ID NO: 73225 - DNA, 13 bp, Artificial Sequence
  Oligonucleotide for detection of SNP TSC0018874
aatttggggttty

SEQ ID NO: 73226 - DNA, 13 bp, Artificial Sequence
  Oligonucleotide for detection of SNP TSC0018874
raaaccccaaatt

SEQ ID NO: 73227 - DNA, 13 bp, Artificial Sequence
  Oligonucleotide for detection of SNP TSC0018874
aatttgcggttty

SEQ ID NO: 73228 - DNA, 13 bp, Artificial Sequence
  Oligonucleotide for detection of SNP TSC0018874
raaaccgcaaatt

SEQ ID NO: 73229 - DNA, 13 bp, Artificial Sequence
  Oligonucleotide for detection of SNP TSC0018874
ggagttgtaggtt

SEQ ID NO: 73230 - DNA, 13 bp, Artificial Sequence
  Oligonucleotide for detection of SNP TSC0018874
aacctacaactcc

SEQ ID NO: 73231 - DNA, 13 bp, Artificial Sequence
  Oligonucleotide for detection of SNP TSC0018874
ggagttttaggtt

SEQ ID NO: 73232 - DNA, 13 bp, Artificial Sequence
  Oligonucleotide for detection of SNP TSC0018874
aacctaaaactcc

SEQ ID NO: 73233 - DNA, 13 bp, Artificial Sequence
  Oligonucleotide for detection of SNP TSC0018874
ggagtcgtaggtt

SEQ ID NO: 73234 - DNA, 13 bp, Artificial Sequence
  Oligonucleotide for detection of SNP TSC0018874
aacctacgactcc

SEQ ID NO: 73235 - DNA, 13 bp, Artificial Sequence
  Oligonucleotide for detection of SNP TSC0018875
ttttagttttaty

SEQ ID NO: 73236 - DNA, 13 bp, Artificial Sequence
  Oligonucleotide for detection of SNP TSC0018875
rataaaactaaaa

SEQ ID NO: 73237 - DNA, 13 bp, Artificial Sequence
  Oligonucleotide for detection of SNP TSC0018875
ttttaggtttaty

SEQ ID NO: 73238 - DNA, 13 bp, Artificial Sequence
  Oligonucleotide for detection of SNP TSC0018875
rataaacctaaaa

SEQ ID NO: 73239 - DNA, 13 bp, Artificial Sequence
  Oligonucleotide for detection of SNP TSC0018875
ggtggggttggag

SEQ ID NO: 73240 - DNA, 13 bp, Artificial Sequence
  Oligonucleotide for detection of SNP TSC0018875
ctccaaccccacc

SEQ ID NO: 73241 - DNA, 13 bp, Artificial Sequence
  Oligonucleotide for detection of SNP TSC0018875
ggtgggtttggag

SEQ ID NO: 73242 - DNA, 13 bp, Artificial Sequence
  Oligonucleotide for detection of SNP TSC0018875
ctccaaacccacc

SEQ ID NO: 73243 - DNA, 13 bp, Artificial Sequence
  Oligonucleotide for detection of SNP TSC0018876
gtgtgagtaaggy

SEQ ID NO: 73244 - DNA, 13 bp, Artificial Sequence
  Oligonucleotide for detection of SNP TSC0018876
rccttactcacac

SEQ ID NO: 73245 - DNA, 13 bp, Artificial Sequence
  Oligonucleotide for detection of SNP TSC0018876
gtgtgaataaggy

SEQ ID NO: 73246 - DNA, 13 bp, Artificial Sequence
  Oligonucleotide for detection of SNP TSC0018876
rccttattcacac

SEQ ID NO: 73247 - DNA, 13 bp, Artificial Sequence
  Oligonucleotide for detection of SNP TSC0018877
gtatgggtggagt

SEQ ID NO: 73248 - DNA, 13 bp, Artificial Sequence
  Oligonucleotide for detection of SNP TSC0018877
actccacccatac

SEQ ID NO: 73249 - DNA, 13 bp, Artificial Sequence
  Oligonucleotide for detection of SNP TSC0018877
gtatggatggagt

SEQ ID NO: 73250 - DNA, 13 bp, Artificial Sequence
  Oligonucleotide for detection of SNP TSC0018877
actccatccatac

SEQ ID NO: 73251 - DNA, 13 bp, Artificial Sequence
  Oligonucleotide for detection of SNP TSC0018877
gtacgggtggagt

SEQ ID NO: 73252 - DNA, 13 bp, Artificial Sequence
  Oligonucleotide for detection of SNP TSC0018877
actccacccgtac

SEQ ID NO: 73253 - DNA, 13 bp, Artificial Sequence
  Oligonucleotide for detection of SNP TSC0018877
gtacggatggagt

SEQ ID NO: 73254 - DNA, 13 bp, Artificial Sequence
  Oligonucleotide for detection of SNP TSC0018877
actccatccgtac

SEQ ID NO: 73255 - DNA, 13 bp, Artificial Sequence
  Oligonucleotide for detection of SNP TSC0018878
tttatttgtgtta

SEQ ID NO: 73256 - DNA, 13 bp, Artificial Sequence
  Oligonucleotide for detection of SNP TSC0018878
taacacaaataaa

SEQ ID NO: 73257 - DNA, 13 bp, Artificial Sequence
  Oligonucleotide for detection of SNP TSC0018878
tttattcgtgtta

SEQ ID NO: 73258 - DNA, 13 bp, Artificial Sequence
  Oligonucleotide for detection of SNP TSC0018878
taacacgaataaa

SEQ ID NO: 73259 - DNA, 13 bp, Artificial Sequence
  Oligonucleotide for detection of SNP TSC0018878
tagtatgggtgga

SEQ ID NO: 73260 - DNA, 13 bp, Artificial Sequence
  Oligonucleotide for detection of SNP TSC0018878
tccacccatacta

SEQ ID NO: 73261 - DNA, 13 bp, Artificial Sequence
  Oligonucleotide for detection of SNP TSC0018878
tagtataggtgga

SEQ ID NO: 73262 - DNA, 13 bp, Artificial Sequence
  Oligonucleotide for detection of SNP TSC0018878
tccacctatacta

SEQ ID NO: 73263 - DNA, 13 bp, Artificial Sequence
  Oligonucleotide for detection of SNP TSC0018878
tagtacgggtgga

SEQ ID NO: 73264 - DNA, 13 bp, Artificial Sequence
  Oligonucleotide for detection of SNP TSC0018878
tccacccgtacta

SEQ ID NO: 73265 - DNA, 13 bp, Artificial Sequence
  Oligonucleotide for detection of SNP TSC0018879
gaaaaaagaaata

SEQ ID NO: 73266 - DNA, 13 bp, Artificial Sequence
  Oligonucleotide for detection of SNP TSC0018879
tatttcttttttc

SEQ ID NO: 73267 - DNA, 13 bp, Artificial Sequence
  Oligonucleotide for detection of SNP TSC0018879
gaaaaaggaaata

SEQ ID NO: 73268 - DNA, 13 bp, Artificial Sequence
  Oligonucleotide for detection of SNP TSC0018879
tatttcctttttc

SEQ ID NO: 73269 - DNA, 13 bp, Artificial Sequence
  Oligonucleotide for detection of SNP TSC0018880
ggtggtaggggtg

SEQ ID NO: 73270 - DNA, 13 bp, Artificial Sequence
  Oligonucleotide for detection of SNP TSC0018880
cacccctaccacc

SEQ ID NO: 73271 - DNA, 13 bp, Artificial Sequence
  Oligonucleotide for detection of SNP TSC0018880
ggtggtgggggtg

SEQ ID NO: 73272 - DNA, 13 bp, Artificial Sequence
  Oligonucleotide for detection of SNP TSC0018880
cacccccaccacc

SEQ ID NO: 73273 - DNA, 13 bp, Artificial Sequence
  Oligonucleotide for detection of SNP TSC0018880
ggcggtaggggtg

SEQ ID NO: 73274 - DNA, 13 bp, Artificial Sequence
  Oligonucleotide for detection of SNP TSC0018880
cacccctaccgcc

SEQ ID NO: 73275 - DNA, 13 bp, Artificial Sequence
  Oligonucleotide for detection of SNP TSC0018880
ggcggtgggggtg

SEQ ID NO: 73276 - DNA, 13 bp, Artificial Sequence
  Oligonucleotide for detection of SNP TSC0018880
cacccccaccgcc

SEQ ID NO: 73277 - DNA, 13 bp, Artificial Sequence
  Oligonucleotide for detection of SNP TSC0018880
ggtggcgggggtg

SEQ ID NO: 73278 - DNA, 13 bp, Artificial Sequence
  Oligonucleotide for detection of SNP TSC0018880
cacccccgccacc

SEQ ID NO: 73279 - DNA, 13 bp, Artificial Sequence
  Oligonucleotide for detection of SNP TSC0018880
ggcggcgggggtg

SEQ ID NO: 73280 - DNA, 13 bp, Artificial Sequence
  Oligonucleotide for detection of SNP TSC0018880
cacccccgccgcc

SEQ ID NO: 73281 - DNA, 13 bp, Artificial Sequence
  Oligonucleotide for detection of SNP TSC0018880
tatttttgttgty

SEQ ID NO: 73282 - DNA, 13 bp, Artificial Sequence
  Oligonucleotide for detection of SNP TSC0018880
racaacaaaaata

SEQ ID NO: 73283 - DNA, 13 bp, Artificial Sequence
  Oligonucleotide for detection of SNP TSC0018880
tatttttgtcgty

SEQ ID NO: 73284 - DNA, 13 bp, Artificial Sequence
  Oligonucleotide for detection of SNP TSC0018880
racgacaaaaata

SEQ ID NO: 73285 - DNA, 13 bp, Artificial Sequence
  Oligonucleotide for detection of SNP TSC0018880
tattttcgttgty

SEQ ID NO: 73286 - DNA, 13 bp, Artificial Sequence
  Oligonucleotide for detection of SNP TSC0018880
racaacgaaaata

SEQ ID NO: 73287 - DNA, 13 bp, Artificial Sequence
  Oligonucleotide for detection of SNP TSC0018880
tattttcgtcgty

SEQ ID NO: 73288 - DNA, 13 bp, Artificial Sequence
  Oligonucleotide for detection of SNP TSC0018880
racgacgaaaata

SEQ ID NO: 73289 - DNA, 13 bp, Artificial Sequence
  Oligonucleotide for detection of SNP TSC0018881
ttaaagggttagg

SEQ ID NO: 73290 - DNA, 13 bp, Artificial Sequence
  Oligonucleotide for detection of SNP TSC0018881
cctaaccctttaa

SEQ ID NO: 73291 - DNA, 13 bp, Artificial Sequence
  Oligonucleotide for detection of SNP TSC0018881
tttagttttttga

SEQ ID NO: 73292 - DNA, 13 bp, Artificial Sequence
  Oligonucleotide for detection of SNP TSC0018881
tcaaaaaactaaa

SEQ ID NO: 73293 - DNA, 13 bp, Artificial Sequence
  Oligonucleotide for detection of SNP TSC0018881
tttagtattttga

SEQ ID NO: 73294 - DNA, 13 bp, Artificial Sequence
  Oligonucleotide for detection of SNP TSC0018881
tcaaaatactaaa

SEQ ID NO: 73295 - DNA, 13 bp, Artificial Sequence
  Oligonucleotide for detection of SNP TSC0018882
tttatttggttay

SEQ ID NO: 73296 - DNA, 13 bp, Artificial Sequence
  Oligonucleotide for detection of SNP TSC0018882
rtaaccaaataaa

SEQ ID NO: 73297 - DNA, 13 bp, Artificial Sequence
  Oligonucleotide for detection of SNP TSC0018882
tttattcggttay

SEQ ID NO: 73298 - DNA, 13 bp, Artificial Sequence
  Oligonucleotide for detection of SNP TSC0018882
rtaaccgaataaa

SEQ ID NO: 73299 - DNA, 13 bp, Artificial Sequence
  Oligonucleotide for detection of SNP TSC0018882
gtagttggatggg

SEQ ID NO: 73300 - DNA, 13 bp, Artificial Sequence
  Oligonucleotide for detection of SNP TSC0018882
cccatccaactac

SEQ ID NO: 73301 - DNA, 13 bp, Artificial Sequence
  Oligonucleotide for detection of SNP TSC0018882
gtagttagatggg

SEQ ID NO: 73302 - DNA, 13 bp, Artificial Sequence
  Oligonucleotide for detection of SNP TSC0018882
cccatctaactac

SEQ ID NO: 73303 - DNA, 13 bp, Artificial Sequence
  Oligonucleotide for detection of SNP TSC0018882
gtagtcggatggg

SEQ ID NO: 73304 - DNA, 13 bp, Artificial Sequence
  Oligonucleotide for detection of SNP TSC0018882
cccatccgactac

SEQ ID NO: 73305 - DNA, 13 bp, Artificial Sequence
  Oligonucleotide for detection of SNP TSC0018883
agaaaaagggata

SEQ ID NO: 73306 - DNA, 13 bp, Artificial Sequence
  Oligonucleotide for detection of SNP TSC0018883
tatccctttttct

SEQ ID NO: 73307 - DNA, 13 bp, Artificial Sequence
  Oligonucleotide for detection of SNP TSC0018883
agaaaaggggata

SEQ ID NO: 73308 - DNA, 13 bp, Artificial Sequence
  Oligonucleotide for detection of SNP TSC0018883
tatccccttttct

SEQ ID NO: 73309 - DNA, 13 bp, Artificial Sequence
  Oligonucleotide for detection of SNP TSC0018884
aaagggatagtga

SEQ ID NO: 73310 - DNA, 13 bp, Artificial Sequence
  Oligonucleotide for detection of SNP TSC0018884
tcactatcccttt

SEQ ID NO: 73311 - DNA, 13 bp, Artificial Sequence
  Oligonucleotide for detection of SNP TSC0018884
aaaggggtagtga

SEQ ID NO: 73312 - DNA, 13 bp, Artificial Sequence
  Oligonucleotide for detection of SNP TSC0018884
tcactaccccttt

SEQ ID NO: 73313 - DNA, 13 bp, Artificial Sequence
  Oligonucleotide for detection of SNP TSC0018885
ttttaaatttgtg

SEQ ID NO: 73314 - DNA, 13 bp, Artificial Sequence
  Oligonucleotide for detection of SNP TSC0018885
cacaaatttaaaa

SEQ ID NO: 73315 - DNA, 13 bp, Artificial Sequence
  Oligonucleotide for detection of SNP TSC0018885
ttttaagtttgtg

SEQ ID NO: 73316 - DNA, 13 bp, Artificial Sequence
  Oligonucleotide for detection of SNP TSC0018885
cacaaacttaaaa

SEQ ID NO: 73317 - DNA, 13 bp, Artificial Sequence
  Oligonucleotide for detection of SNP TSC0018886
tatatttttggty

SEQ ID NO: 73318 - DNA, 13 bp, Artificial Sequence
  Oligonucleotide for detection of SNP TSC0018886
raccaaaaatata

SEQ ID NO: 73319 - DNA, 13 bp, Artificial Sequence
  Oligonucleotide for detection of SNP TSC0018886
tatattgttggty

SEQ ID NO: 73320 - DNA, 13 bp, Artificial Sequence
  Oligonucleotide for detection of SNP TSC0018886
raccaacaatata

SEQ ID NO: 73321 - DNA, 13 bp, Artificial Sequence
  Oligonucleotide for detection of SNP TSC0018886
ggttaagagtgta

SEQ ID NO: 73322 - DNA, 13 bp, Artificial Sequence
  Oligonucleotide for detection of SNP TSC0018886
tacactcttaacc

SEQ ID NO: 73323 - DNA, 13 bp, Artificial Sequence
  Oligonucleotide for detection of SNP TSC0018886
ggttaatagtgta

SEQ ID NO: 73324 - DNA, 13 bp, Artificial Sequence
  Oligonucleotide for detection of SNP TSC0018886
tacactattaacc

SEQ ID NO: 73325 - DNA, 13 bp, Artificial Sequence
  Oligonucleotide for detection of SNP TSC0018887
agttagggggagy

SEQ ID NO: 73326 - DNA, 13 bp, Artificial Sequence
  Oligonucleotide for detection of SNP TSC0018887
rctccccctaact

SEQ ID NO: 73327 - DNA, 13 bp, Artificial Sequence
  Oligonucleotide for detection of SNP TSC0018887
agttagagggagy

SEQ ID NO: 73328 - DNA, 13 bp, Artificial Sequence
  Oligonucleotide for detection of SNP TSC0018887
rctccctctaact

SEQ ID NO: 73329 - DNA, 13 bp, Artificial Sequence
  Oligonucleotide for detection of SNP TSC0018888
aaagtttgtattt

SEQ ID NO: 73330 - DNA, 13 bp, Artificial Sequence
  Oligonucleotide for detection of SNP TSC0018888
aaatacaaacttt

SEQ ID NO: 73331 - DNA, 13 bp, Artificial Sequence
  Oligonucleotide for detection of SNP TSC0018888
aaagttcgtattt

SEQ ID NO: 73332 - DNA, 13 bp, Artificial Sequence
  Oligonucleotide for detection of SNP TSC0018888
aaatacgaacttt

SEQ ID NO: 73333 - DNA, 13 bp, Artificial Sequence
  Oligonucleotide for detection of SNP TSC0018888
aggtgtgggtttt

SEQ ID NO: 73334 - DNA, 13 bp, Artificial Sequence
  Oligonucleotide for detection of SNP TSC0018888
aaaacccacacct

SEQ ID NO: 73335 - DNA, 13 bp, Artificial Sequence
  Oligonucleotide for detection of SNP TSC0018888
aggtgtaggtttt

SEQ ID NO: 73336 - DNA, 13 bp, Artificial Sequence
  Oligonucleotide for detection of SNP TSC0018888
aaaacctacacct

SEQ ID NO: 73337 - DNA, 13 bp, Artificial Sequence
  Oligonucleotide for detection of SNP TSC0018888
aggtgcgggtttt

SEQ ID NO: 73338 - DNA, 13 bp, Artificial Sequence
  Oligonucleotide for detection of SNP TSC0018888
aaaacccgcacct

SEQ ID NO: 73339 - DNA, 13 bp, Artificial Sequence
  Oligonucleotide for detection of SNP TSC0018889
tgtgtaggattgt

SEQ ID NO: 73340 - DNA, 13 bp, Artificial Sequence
  Oligonucleotide for detection of SNP TSC0018889
acaatcctacaca

SEQ ID NO: 73341 - DNA, 13 bp, Artificial Sequence
  Oligonucleotide for detection of SNP TSC0018889
tgtgtaagattgt

SEQ ID NO: 73342 - DNA, 13 bp, Artificial Sequence
  Oligonucleotide for detection of SNP TSC0018889
acaatcttacaca

SEQ ID NO: 73343 - DNA, 13 bp, Artificial Sequence
  Oligonucleotide for detection of SNP TSC0018890
gtatgagttaaaa

SEQ ID NO: 73344 - DNA, 13 bp, Artificial Sequence
  Oligonucleotide for detection of SNP TSC0018890
ttttaactcatac

SEQ ID NO: 73345 - DNA, 13 bp, Artificial Sequence
  Oligonucleotide for detection of SNP TSC0018890
gtatgaattaaaa

SEQ ID NO: 73346 - DNA, 13 bp, Artificial Sequence
  Oligonucleotide for detection of SNP TSC0018890
ttttaattcatac

SEQ ID NO: 73347 - DNA, 13 bp, Artificial Sequence
  Oligonucleotide for detection of SNP TSC0018893
ttttatattaagt

SEQ ID NO: 73348 - DNA, 13 bp, Artificial Sequence
  Oligonucleotide for detection of SNP TSC0018893
acttaatataaaa

SEQ ID NO: 73349 - DNA, 13 bp, Artificial Sequence
  Oligonucleotide for detection of SNP TSC0018893
ttttatgttaagt

SEQ ID NO: 73350 - DNA, 13 bp, Artificial Sequence
  Oligonucleotide for detection of SNP TSC0018893
acttaacataaaa

SEQ ID NO: 73351 - DNA, 13 bp, Artificial Sequence
  Oligonucleotide for detection of SNP TSC0018895
aggtagttttttt

SEQ ID NO: 73352 - DNA, 13 bp, Artificial Sequence
  Oligonucleotide for detection of SNP TSC0018895
aaaaaaactacct

SEQ ID NO: 73353 - DNA, 13 bp, Artificial Sequence
  Oligonucleotide for detection of SNP TSC0018895
aggtaggtttttt

SEQ ID NO: 73354 - DNA, 13 bp, Artificial Sequence
  Oligonucleotide for detection of SNP TSC0018895
aaaaaacctacct

SEQ ID NO: 73355 - DNA, 13 bp, Artificial Sequence
  Oligonucleotide for detection of SNP TSC0018895
aagaaggttgttt

SEQ ID NO: 73356 - DNA, 13 bp, Artificial Sequence
  Oligonucleotide for detection of SNP TSC0018895
aaacaaccttctt

SEQ ID NO: 73357 - DNA, 13 bp, Artificial Sequence
  Oligonucleotide for detection of SNP TSC0018895
aagaagtttgttt

SEQ ID NO: 73358 - DNA, 13 bp, Artificial Sequence
  Oligonucleotide for detection of SNP TSC0018895
aaacaaacttctt

SEQ ID NO: 73359 - DNA, 13 bp, Artificial Sequence
  Oligonucleotide for detection of SNP TSC0018896
ttgaaagtggagg

SEQ ID NO: 73360 - DNA, 13 bp, Artificial Sequence
  Oligonucleotide for detection of SNP TSC0018896
cctccactttcaa

SEQ ID NO: 73361 - DNA, 13 bp, Artificial Sequence
  Oligonucleotide for detection of SNP TSC0018896
ttgaaaatggagg

SEQ ID NO: 73362 - DNA, 13 bp, Artificial Sequence
  Oligonucleotide for detection of SNP TSC0018896
cctccattttcaa

SEQ ID NO: 73363 - DNA, 13 bp, Artificial Sequence
  Oligonucleotide for detection of SNP TSC0018899
tgattggagtttt

SEQ ID NO: 73364 - DNA, 13 bp, Artificial Sequence
  Oligonucleotide for detection of SNP TSC0018899
aaaactccaatca

SEQ ID NO: 73365 - DNA, 13 bp, Artificial Sequence
  Oligonucleotide for detection of SNP TSC0018899
tgattgaagtttt

SEQ ID NO: 73366 - DNA, 13 bp, Artificial Sequence
  Oligonucleotide for detection of SNP TSC0018899
aaaacttcaatca

SEQ ID NO: 73367 - DNA, 13 bp, Artificial Sequence
  Oligonucleotide for detection of SNP TSC0018900
ttgattgttgtay

SEQ ID NO: 73368 - DNA, 13 bp, Artificial Sequence
  Oligonucleotide for detection of SNP TSC0018900
rtacaacaatcaa

SEQ ID NO: 73369 - DNA, 13 bp, Artificial Sequence
  Oligonucleotide for detection of SNP TSC0018900
ttgatttttgtay

SEQ ID NO: 73370 - DNA, 13 bp, Artificial Sequence
  Oligonucleotide for detection of SNP TSC0018900
rtacaaaaatcaa

SEQ ID NO: 73371 - DNA, 13 bp, Artificial Sequence
  Oligonucleotide for detection of SNP TSC0018900
gtgtagtagttaa

SEQ ID NO: 73372 - DNA, 13 bp, Artificial Sequence
  Oligonucleotide for detection of SNP TSC0018900
ttaactactacac

SEQ ID NO: 73373 - DNA, 13 bp, Artificial Sequence
  Oligonucleotide for detection of SNP TSC0018900
gtgtagaagttaa

SEQ ID NO: 73374 - DNA, 13 bp, Artificial Sequence
  Oligonucleotide for detection of SNP TSC0018900
ttaacttctacac

SEQ ID NO: 73375 - DNA, 13 bp, Artificial Sequence
  Oligonucleotide for detection of SNP TSC0018903
taatgggatatta

SEQ ID NO: 73376 - DNA, 13 bp, Artificial Sequence
  Oligonucleotide for detection of SNP TSC0018903
taatatcccatta

SEQ ID NO: 73377 - DNA, 13 bp, Artificial Sequence
  Oligonucleotide for detection of SNP TSC0018903
taatggtatatta

SEQ ID NO: 73378 - DNA, 13 bp, Artificial Sequence
  Oligonucleotide for detection of SNP TSC0018903
taatataccatta

SEQ ID NO: 73379 - DNA, 13 bp, Artificial Sequence
  Oligonucleotide for detection of SNP TSC0018903
taatattttattg

SEQ ID NO: 73380 - DNA, 13 bp, Artificial Sequence
  Oligonucleotide for detection of SNP TSC0018903
caataaaatatta

SEQ ID NO: 73381 - DNA, 13 bp, Artificial Sequence
  Oligonucleotide for detection of SNP TSC0018903
taatatattattg

SEQ ID NO: 73382 - DNA, 13 bp, Artificial Sequence
  Oligonucleotide for detection of SNP TSC0018903
caataatatatta

SEQ ID NO: 73383 - DNA, 13 bp, Artificial Sequence
  Oligonucleotide for detection of SNP TSC0018904
ttgggtttgatga

SEQ ID NO: 73384 - DNA, 13 bp, Artificial Sequence
  Oligonucleotide for detection of SNP TSC0018904
tcatcaaacccaa

SEQ ID NO: 73385 - DNA, 13 bp, Artificial Sequence
  Oligonucleotide for detection of SNP TSC0018904
ttgggtatgatga

SEQ ID NO: 73386 - DNA, 13 bp, Artificial Sequence
  Oligonucleotide for detection of SNP TSC0018904
tcatcatacccaa

SEQ ID NO: 73387 - DNA, 13 bp, Artificial Sequence
  Oligonucleotide for detection of SNP TSC0018905
atgatttgggata

SEQ ID NO: 73388 - DNA, 13 bp, Artificial Sequence
  Oligonucleotide for detection of SNP TSC0018905
tatcccaaatcat

SEQ ID NO: 73389 - DNA, 13 bp, Artificial Sequence
  Oligonucleotide for detection of SNP TSC0018905
acgatttgggata

SEQ ID NO: 73390 - DNA, 13 bp, Artificial Sequence
  Oligonucleotide for detection of SNP TSC0018905
tatcccaaatcgt

SEQ ID NO: 73391 - DNA, 13 bp, Artificial Sequence
  Oligonucleotide for detection of SNP TSC0018905
atgattcgggata

SEQ ID NO: 73392 - DNA, 13 bp, Artificial Sequence
  Oligonucleotide for detection of SNP TSC0018905
tatcccgaatcat

SEQ ID NO: 73393 - DNA, 13 bp, Artificial Sequence
  Oligonucleotide for detection of SNP TSC0018905
acgattcgggata

SEQ ID NO: 73394 - DNA, 13 bp, Artificial Sequence
  Oligonucleotide for detection of SNP TSC0018905
tatcccgaatcgt

SEQ ID NO: 73395 - DNA, 13 bp, Artificial Sequence
  Oligonucleotide for detection of SNP TSC0018905
tgttttgggttgt

SEQ ID NO: 73396 - DNA, 13 bp, Artificial Sequence
  Oligonucleotide for detection of SNP TSC0018905
acaacccaaaaca

SEQ ID NO: 73397 - DNA, 13 bp, Artificial Sequence
  Oligonucleotide for detection of SNP TSC0018905
tgttttaggttgt

SEQ ID NO: 73398 - DNA, 13 bp, Artificial Sequence
  Oligonucleotide for detection of SNP TSC0018905
acaacctaaaaca

SEQ ID NO: 73399 - DNA, 13 bp, Artificial Sequence
  Oligonucleotide for detection of SNP TSC0018905
tgtttcgggttgt

SEQ ID NO: 73400 - DNA, 13 bp, Artificial Sequence
  Oligonucleotide for detection of SNP TSC0018905
acaacccgaaaca

SEQ ID NO: 73401 - DNA, 13 bp, Artificial Sequence
  Oligonucleotide for detection of SNP TSC0018905
tgttttaggtcgt

SEQ ID NO: 73402 - DNA, 13 bp, Artificial Sequence
  Oligonucleotide for detection of SNP TSC0018905
acgacctaaaaca

SEQ ID NO: 73403 - DNA, 13 bp, Artificial Sequence
  Oligonucleotide for detection of SNP TSC0018905
tgttttgggtcgt

SEQ ID NO: 73404 - DNA, 13 bp, Artificial Sequence
  Oligonucleotide for detection of SNP TSC0018905
acgacccaaaaca

SEQ ID NO: 73405 - DNA, 13 bp, Artificial Sequence
  Oligonucleotide for detection of SNP TSC0018905
tgtttcgggtcgt

SEQ ID NO: 73406 - DNA, 13 bp, Artificial Sequence
  Oligonucleotide for detection of SNP TSC0018905
acgacccgaaaca

SEQ ID NO: 73407 - DNA, 13 bp, Artificial Sequence
  Oligonucleotide for detection of SNP TSC0018906
ggggatatgatgy

SEQ ID NO: 73408 - DNA, 13 bp, Artificial Sequence
  Oligonucleotide for detection of SNP TSC0018906
rcatcatatcccc

SEQ ID NO: 73409 - DNA, 13 bp, Artificial Sequence
  Oligonucleotide for detection of SNP TSC0018906
ggggatgtgatgy

SEQ ID NO: 73410 - DNA, 13 bp, Artificial Sequence
  Oligonucleotide for detection of SNP TSC0018906
rcatcacatcccc

SEQ ID NO: 73411 - DNA, 13 bp, Artificial Sequence
  Oligonucleotide for detection of SNP TSC0018906
ggggacgtgatgy

SEQ ID NO: 73412 - DNA, 13 bp, Artificial Sequence
  Oligonucleotide for detection of SNP TSC0018906
rcatcacgtcccc

SEQ ID NO: 73413 - DNA, 13 bp, Artificial Sequence
  Oligonucleotide for detection of SNP TSC0018906
gtattatgtttty

SEQ ID NO: 73414 - DNA, 13 bp, Artificial Sequence
  Oligonucleotide for detection of SNP TSC0018906
raaaacataatac

SEQ ID NO: 73415 - DNA, 13 bp, Artificial Sequence
  Oligonucleotide for detection of SNP TSC0018906
gtattacgtttty

SEQ ID NO: 73416 - DNA, 13 bp, Artificial Sequence
  Oligonucleotide for detection of SNP TSC0018906
raaaacgtaatac

SEQ ID NO: 73417 - DNA, 13 bp, Artificial Sequence
  Oligonucleotide for detection of SNP TSC0018909
tggtttttttttt

SEQ ID NO: 73418 - DNA, 13 bp, Artificial Sequence
  Oligonucleotide for detection of SNP TSC0018909
aaaaaaaaaacca

SEQ ID NO: 73419 - DNA, 13 bp, Artificial Sequence
  Oligonucleotide for detection of SNP TSC0018910
agaaagagggtga

SEQ ID NO: 73420 - DNA, 13 bp, Artificial Sequence
  Oligonucleotide for detection of SNP TSC0018910
tcaccctctttct

SEQ ID NO: 73421 - DNA, 13 bp, Artificial Sequence
  Oligonucleotide for detection of SNP TSC0018910
agaaagggggtga

SEQ ID NO: 73422 - DNA, 13 bp, Artificial Sequence
  Oligonucleotide for detection of SNP TSC0018910
tcaccccctttct

SEQ ID NO: 73423 - DNA, 13 bp, Artificial Sequence
  Oligonucleotide for detection of SNP TSC0018913
gggttgggggaty

SEQ ID NO: 73424 - DNA, 13 bp, Artificial Sequence
  Oligonucleotide for detection of SNP TSC0018913
ratcccccaaccc

SEQ ID NO: 73425 - DNA, 13 bp, Artificial Sequence
  Oligonucleotide for detection of SNP TSC0018913
gggttgagggaty

SEQ ID NO: 73426 - DNA, 13 bp, Artificial Sequence
  Oligonucleotide for detection of SNP TSC0018913
ratccctcaaccc

SEQ ID NO: 73427 - DNA, 13 bp, Artificial Sequence
  Oligonucleotide for detection of SNP TSC0018914
aagttgtgggttg

SEQ ID NO: 73428 - DNA, 13 bp, Artificial Sequence
  Oligonucleotide for detection of SNP TSC0018914
caacccacaactt

SEQ ID NO: 73429 - DNA, 13 bp, Artificial Sequence
  Oligonucleotide for detection of SNP TSC0018914
aagttgcgggttg

SEQ ID NO: 73430 - DNA, 13 bp, Artificial Sequence
  Oligonucleotide for detection of SNP TSC0018914
caacccgcaactt

SEQ ID NO: 73431 - DNA, 13 bp, Artificial Sequence
  Oligonucleotide for detection of SNP TSC0018914
aagttgtgggtcg

SEQ ID NO: 73432 - DNA, 13 bp, Artificial Sequence
  Oligonucleotide for detection of SNP TSC0018914
cgacccacaactt

SEQ ID NO: 73433 - DNA, 13 bp, Artificial Sequence
  Oligonucleotide for detection of SNP TSC0018914
aagttgcgggtcg

SEQ ID NO: 73434 - DNA, 13 bp, Artificial Sequence
  Oligonucleotide for detection of SNP TSC0018914
cgacccgcaactt

SEQ ID NO: 73435 - DNA, 13 bp, Artificial Sequence
  Oligonucleotide for detection of SNP TSC0018914
tggtttatagttt

SEQ ID NO: 73436 - DNA, 13 bp, Artificial Sequence
  Oligonucleotide for detection of SNP TSC0018914
aaactataaacca

SEQ ID NO: 73437 - DNA, 13 bp, Artificial Sequence
  Oligonucleotide for detection of SNP TSC0018914
cggtttgtagttt

SEQ ID NO: 73438 - DNA, 13 bp, Artificial Sequence
  Oligonucleotide for detection of SNP TSC0018914
aaactacaaaccg

SEQ ID NO: 73439 - DNA, 13 bp, Artificial Sequence
  Oligonucleotide for detection of SNP TSC0018914
cggtttatagttt

SEQ ID NO: 73440 - DNA, 13 bp, Artificial Sequence
  Oligonucleotide for detection of SNP TSC0018914
aaactataaaccg

SEQ ID NO: 73441 - DNA, 13 bp, Artificial Sequence
  Oligonucleotide for detection of SNP TSC0018914
tggttcgtagttt

SEQ ID NO: 73442 - DNA, 13 bp, Artificial Sequence
  Oligonucleotide for detection of SNP TSC0018914
aaactacgaacca

SEQ ID NO: 73443 - DNA, 13 bp, Artificial Sequence
  Oligonucleotide for detection of SNP TSC0018914
cggttcgtagttt

SEQ ID NO: 73444 - DNA, 13 bp, Artificial Sequence
  Oligonucleotide for detection of SNP TSC0018914
aaactacgaaccg

SEQ ID NO: 73445 - DNA, 13 bp, Artificial Sequence
  Oligonucleotide for detection of SNP TSC0018915
ttagatatgagtt

SEQ ID NO: 73446 - DNA, 13 bp, Artificial Sequence
  Oligonucleotide for detection of SNP TSC0018915
aactcatatctaa

SEQ ID NO: 73447 - DNA, 13 bp, Artificial Sequence
  Oligonucleotide for detection of SNP TSC0018915
ttagatgtgagtt

SEQ ID NO: 73448 - DNA, 13 bp, Artificial Sequence
  Oligonucleotide for detection of SNP TSC0018915
aactcacatctaa

SEQ ID NO: 73449 - DNA, 13 bp, Artificial Sequence
  Oligonucleotide for detection of SNP TSC0018915
ttagacgtgagtt

SEQ ID NO: 73450 - DNA, 13 bp, Artificial Sequence
  Oligonucleotide for detection of SNP TSC0018915
aactcacgtctaa

SEQ ID NO: 73451 - DNA, 13 bp, Artificial Sequence
  Oligonucleotide for detection of SNP TSC0018915
agtttatgtttaa

SEQ ID NO: 73452 - DNA, 13 bp, Artificial Sequence
  Oligonucleotide for detection of SNP TSC0018915
ttaaacataaact

SEQ ID NO: 73453 - DNA, 13 bp, Artificial Sequence
  Oligonucleotide for detection of SNP TSC0018915
agtttacgtttaa

SEQ ID NO: 73454 - DNA, 13 bp, Artificial Sequence
  Oligonucleotide for detection of SNP TSC0018915
ttaaacgtaaact

SEQ ID NO: 73455 - DNA, 13 bp, Artificial Sequence
  Oligonucleotide for detection of SNP TSC0018916
ttaggtatttgag

SEQ ID NO: 73456 - DNA, 13 bp, Artificial Sequence
  Oligonucleotide for detection of SNP TSC0018916
ctcaaatacctaa

SEQ ID NO: 73457 - DNA, 13 bp, Artificial Sequence
  Oligonucleotide for detection of SNP TSC0018916
ttaggtgtttgag

SEQ ID NO: 73458 - DNA, 13 bp, Artificial Sequence
  Oligonucleotide for detection of SNP TSC0018916
ctcaaacacctaa

SEQ ID NO: 73459 - DNA, 13 bp, Artificial Sequence
  Oligonucleotide for detection of SNP TSC0018916
ttaggcgtttgag

SEQ ID NO: 73460 - DNA, 13 bp, Artificial Sequence
  Oligonucleotide for detection of SNP TSC0018916
ctcaaacgcctaa

SEQ ID NO: 73461 - DNA, 13 bp, Artificial Sequence
  Oligonucleotide for detection of SNP TSC0018916
tttaggtgtttga

SEQ ID NO: 73462 - DNA, 13 bp, Artificial Sequence
  Oligonucleotide for detection of SNP TSC0018916
tcaaacacctaaa

SEQ ID NO: 73463 - DNA, 13 bp, Artificial Sequence
  Oligonucleotide for detection of SNP TSC0018916
tttaggcgtttga

SEQ ID NO: 73464 - DNA, 13 bp, Artificial Sequence
  Oligonucleotide for detection of SNP TSC0018916
tcaaacgcctaaa

SEQ ID NO: 73465 - DNA, 13 bp, Artificial Sequence
  Oligonucleotide for detection of SNP TSC0018917
gagattatattay

SEQ ID NO: 73466 - DNA, 13 bp, Artificial Sequence
  Oligonucleotide for detection of SNP TSC0018917
rtaatataatctc

SEQ ID NO: 73467 - DNA, 13 bp, Artificial Sequence
  Oligonucleotide for detection of SNP TSC0018917
gagattgtattay

SEQ ID NO: 73468 - DNA, 13 bp, Artificial Sequence
  Oligonucleotide for detection of SNP TSC0018917
rtaatacaatctc

SEQ ID NO: 73469 - DNA, 13 bp, Artificial Sequence
  Oligonucleotide for detection of SNP TSC0018918
ttggatttaaaga

SEQ ID NO: 73470 - DNA, 13 bp, Artificial Sequence
  Oligonucleotide for detection of SNP TSC0018918
tctttaaatccaa

SEQ ID NO: 73471 - DNA, 13 bp, Artificial Sequence
  Oligonucleotide for detection of SNP TSC0018918
ttggatgtaaaga

SEQ ID NO: 73472 - DNA, 13 bp, Artificial Sequence
  Oligonucleotide for detection of SNP TSC0018918
tctttacatccaa

SEQ ID NO: 73473 - DNA, 13 bp, Artificial Sequence
  Oligonucleotide for detection of SNP TSC0018918
ttggacgtaaaga

SEQ ID NO: 73474 - DNA, 13 bp, Artificial Sequence
  Oligonucleotide for detection of SNP TSC0018918
tctttacgtccaa

SEQ ID NO: 73475 - DNA, 13 bp, Artificial Sequence
  Oligonucleotide for detection of SNP TSC0018918
tttttgggtttag

SEQ ID NO: 73476 - DNA, 13 bp, Artificial Sequence
  Oligonucleotide for detection of SNP TSC0018918
ctaaacccaaaaa

SEQ ID NO: 73477 - DNA, 13 bp, Artificial Sequence
  Oligonucleotide for detection of SNP TSC0018919
tttgggagaattt

SEQ ID NO: 73478 - DNA, 13 bp, Artificial Sequence
  Oligonucleotide for detection of SNP TSC0018919
aaattctcccaaa

SEQ ID NO: 73479 - DNA, 13 bp, Artificial Sequence
  Oligonucleotide for detection of SNP TSC0018919
tttgggggaattt

SEQ ID NO: 73480 - DNA, 13 bp, Artificial Sequence
  Oligonucleotide for detection of SNP TSC0018919
aaattcccccaaa

SEQ ID NO: 73481 - DNA, 13 bp, Artificial Sequence
  Oligonucleotide for detection of SNP TSC0018920
ttaaagagttttg

SEQ ID NO: 73482 - DNA, 13 bp, Artificial Sequence
  Oligonucleotide for detection of SNP TSC0018920
caaaactctttaa

SEQ ID NO: 73483 - DNA, 13 bp, Artificial Sequence
  Oligonucleotide for detection of SNP TSC0018920
ttaaagtgttttg

SEQ ID NO: 73484 - DNA, 13 bp, Artificial Sequence
  Oligonucleotide for detection of SNP TSC0018920
caaaacactttaa

SEQ ID NO: 73485 - DNA, 13 bp, Artificial Sequence
  Oligonucleotide for detection of SNP TSC0018920
tagaattttttga

SEQ ID NO: 73486 - DNA, 13 bp, Artificial Sequence
  Oligonucleotide for detection of SNP TSC0018920
tcaaaaaattcta

SEQ ID NO: 73487 - DNA, 13 bp, Artificial Sequence
  Oligonucleotide for detection of SNP TSC0018920
tagaatattttga

SEQ ID NO: 73488 - DNA, 13 bp, Artificial Sequence
  Oligonucleotide for detection of SNP TSC0018920
tcaaaatattcta

SEQ ID NO: 73489 - DNA, 13 bp, Artificial Sequence
  Oligonucleotide for detection of SNP TSC0018921
tgatggttttgta

SEQ ID NO: 73490 - DNA, 13 bp, Artificial Sequence
  Oligonucleotide for detection of SNP TSC0018921
tacaaaaccatca

SEQ ID NO: 73491 - DNA, 13 bp, Artificial Sequence
  Oligonucleotide for detection of SNP TSC0018921
tgatgggtttgta

SEQ ID NO: 73492 - DNA, 13 bp, Artificial Sequence
  Oligonucleotide for detection of SNP TSC0018921
tacaaacccatca

SEQ ID NO: 73493 - DNA, 13 bp, Artificial Sequence
  Oligonucleotide for detection of SNP TSC0018921
tgtaggtttatta

SEQ ID NO: 73494 - DNA, 13 bp, Artificial Sequence
  Oligonucleotide for detection of SNP TSC0018921
taataaacctaca

SEQ ID NO: 73495 - DNA, 13 bp, Artificial Sequence
  Oligonucleotide for detection of SNP TSC0018922
gttttgggtaaay

SEQ ID NO: 73496 - DNA, 13 bp, Artificial Sequence
  Oligonucleotide for detection of SNP TSC0018922
rtttacccaaaac

SEQ ID NO: 73497 - DNA, 13 bp, Artificial Sequence
  Oligonucleotide for detection of SNP TSC0018922
gttttgtgtaaay

SEQ ID NO: 73498 - DNA, 13 bp, Artificial Sequence
  Oligonucleotide for detection of SNP TSC0018922
rtttacacaaaac

SEQ ID NO: 73499 - DNA, 13 bp, Artificial Sequence
  Oligonucleotide for detection of SNP TSC0018922
gtttatttaaagy

SEQ ID NO: 73500 - DNA, 13 bp, Artificial Sequence
  Oligonucleotide for detection of SNP TSC0018922
rctttaaataaac

SEQ ID NO: 73501 - DNA, 13 bp, Artificial Sequence
  Oligonucleotide for detection of SNP TSC0018922
gtttatataaagy

SEQ ID NO: 73502 - DNA, 13 bp, Artificial Sequence
  Oligonucleotide for detection of SNP TSC0018922
rctttatataaac

SEQ ID NO: 73503 - DNA, 13 bp, Artificial Sequence
  Oligonucleotide for detection of SNP TSC0018923
aaagtagtggttt

SEQ ID NO: 73504 - DNA, 13 bp, Artificial Sequence
  Oligonucleotide for detection of SNP TSC0018923
aaaccactacttt

SEQ ID NO: 73505 - DNA, 13 bp, Artificial Sequence
  Oligonucleotide for detection of SNP TSC0018923
aaagtaatggttt

SEQ ID NO: 73506 - DNA, 13 bp, Artificial Sequence
  Oligonucleotide for detection of SNP TSC0018923
aaaccattacttt

SEQ ID NO: 73507 - DNA, 13 bp, Artificial Sequence
  Oligonucleotide for detection of SNP TSC0018924
gtttttattaaaa

SEQ ID NO: 73508 - DNA, 13 bp, Artificial Sequence
  Oligonucleotide for detection of SNP TSC0018924
ttttaataaaaac

SEQ ID NO: 73509 - DNA, 13 bp, Artificial Sequence
  Oligonucleotide for detection of SNP TSC0018924
gtttttgttaaaa

SEQ ID NO: 73510 - DNA, 13 bp, Artificial Sequence
  Oligonucleotide for detection of SNP TSC0018924
ttttaacaaaaac

SEQ ID NO: 73511 - DNA, 13 bp, Artificial Sequence
  Oligonucleotide for detection of SNP TSC0018925
tgtggtggtgggy

SEQ ID NO: 73512 - DNA, 13 bp, Artificial Sequence
  Oligonucleotide for detection of SNP TSC0018925
rcccaccaccaca

SEQ ID NO: 73513 - DNA, 13 bp, Artificial Sequence
  Oligonucleotide for detection of SNP TSC0018925
tgtggttgtgggy

SEQ ID NO: 73514 - DNA, 13 bp, Artificial Sequence
  Oligonucleotide for detection of SNP TSC0018925
rcccacaaccaca

SEQ ID NO: 73515 - DNA, 13 bp, Artificial Sequence
  Oligonucleotide for detection of SNP TSC0018925
gtttattattata

SEQ ID NO: 73516 - DNA, 13 bp, Artificial Sequence
  Oligonucleotide for detection of SNP TSC0018925
tataataataaac

SEQ ID NO: 73517 - DNA, 13 bp, Artificial Sequence
  Oligonucleotide for detection of SNP TSC0018925
gtttataattata

SEQ ID NO: 73518 - DNA, 13 bp, Artificial Sequence
  Oligonucleotide for detection of SNP TSC0018925
tataattataaac

SEQ ID NO: 73519 - DNA, 13 bp, Artificial Sequence
  Oligonucleotide for detection of SNP TSC0018934
attaggtagtata

SEQ ID NO: 73520 - DNA, 13 bp, Artificial Sequence
  Oligonucleotide for detection of SNP TSC0018934
tatactacctaat

SEQ ID NO: 73521 - DNA, 13 bp, Artificial Sequence
  Oligonucleotide for detection of SNP TSC0018934
attagggagtata

SEQ ID NO: 73522 - DNA, 13 bp, Artificial Sequence
  Oligonucleotide for detection of SNP TSC0018934
tatactccctaat

SEQ ID NO: 73523 - DNA, 13 bp, Artificial Sequence
  Oligonucleotide for detection of SNP TSC0018934
tgtattgtttggt

SEQ ID NO: 73524 - DNA, 13 bp, Artificial Sequence
  Oligonucleotide for detection of SNP TSC0018934
accaaacaataca

SEQ ID NO: 73525 - DNA, 13 bp, Artificial Sequence
  Oligonucleotide for detection of SNP TSC0018934
tgtattttttggt

SEQ ID NO: 73526 - DNA, 13 bp, Artificial Sequence
  Oligonucleotide for detection of SNP TSC0018934
accaaaaaataca

SEQ ID NO: 73527 - DNA, 13 bp, Artificial Sequence
  Oligonucleotide for detection of SNP TSC0018941
tgaagtttagggg

SEQ ID NO: 73528 - DNA, 13 bp, Artificial Sequence
  Oligonucleotide for detection of SNP TSC0018941
cccctaaacttca

SEQ ID NO: 73529 - DNA, 13 bp, Artificial Sequence
  Oligonucleotide for detection of SNP TSC0018941
tgaagtgtagggg

SEQ ID NO: 73530 - DNA, 13 bp, Artificial Sequence
  Oligonucleotide for detection of SNP TSC0018941
cccctacacttca

SEQ ID NO: 73531 - DNA, 13 bp, Artificial Sequence
  Oligonucleotide for detection of SNP TSC0018941
tttttagatttta

SEQ ID NO: 73532 - DNA, 13 bp, Artificial Sequence
  Oligonucleotide for detection of SNP TSC0018941
taaaatctaaaaa

SEQ ID NO: 73533 - DNA, 13 bp, Artificial Sequence
  Oligonucleotide for detection of SNP TSC0018941
tttttatatttta

SEQ ID NO: 73534 - DNA, 13 bp, Artificial Sequence
  Oligonucleotide for detection of SNP TSC0018941
taaaatataaaaa

SEQ ID NO: 73535 - DNA, 13 bp, Artificial Sequence
  Oligonucleotide for detection of SNP TSC0018942
gtatgagggattt

SEQ ID NO: 73536 - DNA, 13 bp, Artificial Sequence
  Oligonucleotide for detection of SNP TSC0018942
aaatccctcatac

SEQ ID NO: 73537 - DNA, 13 bp, Artificial Sequence
  Oligonucleotide for detection of SNP TSC0018942
gtatgatggattt

SEQ ID NO: 73538 - DNA, 13 bp, Artificial Sequence
  Oligonucleotide for detection of SNP TSC0018942
aaatccatcatac

SEQ ID NO: 73539 - DNA, 13 bp, Artificial Sequence
  Oligonucleotide for detection of SNP TSC0018942
agattttttatgy

SEQ ID NO: 73540 - DNA, 13 bp, Artificial Sequence
  Oligonucleotide for detection of SNP TSC0018942
rcataaaaaatct

SEQ ID NO: 73541 - DNA, 13 bp, Artificial Sequence
  Oligonucleotide for detection of SNP TSC0018942
agatttattatgy

SEQ ID NO: 73542 - DNA, 13 bp, Artificial Sequence
  Oligonucleotide for detection of SNP TSC0018942
rcataataaatct

SEQ ID NO: 73543 - DNA, 13 bp, Artificial Sequence
  Oligonucleotide for detection of SNP TSC0018943
tgttttattttgt

SEQ ID NO: 73544 - DNA, 13 bp, Artificial Sequence
  Oligonucleotide for detection of SNP TSC0018943
acaaaataaaaca

SEQ ID NO: 73545 - DNA, 13 bp, Artificial Sequence
  Oligonucleotide for detection of SNP TSC0018945
ttagggaaaatgg

SEQ ID NO: 73546 - DNA, 13 bp, Artificial Sequence
  Oligonucleotide for detection of SNP TSC0018945
ccattttccctaa

SEQ ID NO: 73547 - DNA, 13 bp, Artificial Sequence
  Oligonucleotide for detection of SNP TSC0018945
ttagggtaaatgg

SEQ ID NO: 73548 - DNA, 13 bp, Artificial Sequence
  Oligonucleotide for detection of SNP TSC0018945
ccatttaccctaa

SEQ ID NO: 73549 - DNA, 13 bp, Artificial Sequence
  Oligonucleotide for detection of SNP TSC0018945
ttattttttttgg

SEQ ID NO: 73550 - DNA, 13 bp, Artificial Sequence
  Oligonucleotide for detection of SNP TSC0018945
ccaaaaaaaataa

SEQ ID NO: 73551 - DNA, 13 bp, Artificial Sequence
  Oligonucleotide for detection of SNP TSC0018945
ttatttgttttgg

SEQ ID NO: 73552 - DNA, 13 bp, Artificial Sequence
  Oligonucleotide for detection of SNP TSC0018945
ccaaaacaaataa

SEQ ID NO: 73553 - DNA, 13 bp, Artificial Sequence
  Oligonucleotide for detection of SNP TSC0018946
taatagagaaaat

SEQ ID NO: 73554 - DNA, 13 bp, Artificial Sequence
  Oligonucleotide for detection of SNP TSC0018946
attttctctatta

SEQ ID NO: 73555 - DNA, 13 bp, Artificial Sequence
  Oligonucleotide for detection of SNP TSC0018946
taatagtgaaaat

SEQ ID NO: 73556 - DNA, 13 bp, Artificial Sequence
  Oligonucleotide for detection of SNP TSC0018946
attttcactatta

SEQ ID NO: 73557 - DNA, 13 bp, Artificial Sequence
  Oligonucleotide for detection of SNP TSC0018946
taatagcgaaaat

SEQ ID NO: 73558 - DNA, 13 bp, Artificial Sequence
  Oligonucleotide for detection of SNP TSC0018946
attttcgctatta

SEQ ID NO: 73559 - DNA, 13 bp, Artificial Sequence
  Oligonucleotide for detection of SNP TSC0018946
attttttttattg

SEQ ID NO: 73560 - DNA, 13 bp, Artificial Sequence
  Oligonucleotide for detection of SNP TSC0018946
caataaaaaaaat

SEQ ID NO: 73561 - DNA, 13 bp, Artificial Sequence
  Oligonucleotide for detection of SNP TSC0018946
attttcgttattg

SEQ ID NO: 73562 - DNA, 13 bp, Artificial Sequence
  Oligonucleotide for detection of SNP TSC0018946
caataacgaaaat

SEQ ID NO: 73563 - DNA, 13 bp, Artificial Sequence
  Oligonucleotide for detection of SNP TSC0018947
agaggaatttatt

SEQ ID NO: 73564 - DNA, 13 bp, Artificial Sequence
  Oligonucleotide for detection of SNP TSC0018947
aataaattcctct

SEQ ID NO: 73565 - DNA, 13 bp, Artificial Sequence
  Oligonucleotide for detection of SNP TSC0018947
agaggagtttatt

SEQ ID NO: 73566 - DNA, 13 bp, Artificial Sequence
  Oligonucleotide for detection of SNP TSC0018947
aataaactcctct

SEQ ID NO: 73567 - DNA, 13 bp, Artificial Sequence
  Oligonucleotide for detection of SNP TSC0018950
taattggtgaatg

SEQ ID NO: 73568 - DNA, 13 bp, Artificial Sequence
  Oligonucleotide for detection of SNP TSC0018950
cattcaccaatta

SEQ ID NO: 73569 - DNA, 13 bp, Artificial Sequence
  Oligonucleotide for detection of SNP TSC0018950
taattgttgaatg

SEQ ID NO: 73570 - DNA, 13 bp, Artificial Sequence
  Oligonucleotide for detection of SNP TSC0018950
cattcaacaatta

SEQ ID NO: 73571 - DNA, 13 bp, Artificial Sequence
  Oligonucleotide for detection of SNP TSC0018950
taatcggtgaatg

SEQ ID NO: 73572 - DNA, 13 bp, Artificial Sequence
  Oligonucleotide for detection of SNP TSC0018950
cattcaccgatta

SEQ ID NO: 73573 - DNA, 13 bp, Artificial Sequence
  Oligonucleotide for detection of SNP TSC0018950
taatcgttgaatg

SEQ ID NO: 73574 - DNA, 13 bp, Artificial Sequence
  Oligonucleotide for detection of SNP TSC0018950
cattcaacgatta

SEQ ID NO: 73575 - DNA, 13 bp, Artificial Sequence
  Oligonucleotide for detection of SNP TSC0018950
taattggcgaatg

SEQ ID NO: 73576 - DNA, 13 bp, Artificial Sequence
  Oligonucleotide for detection of SNP TSC0018950
cattcgccaatta

SEQ ID NO: 73577 - DNA, 13 bp, Artificial Sequence
  Oligonucleotide for detection of SNP TSC0018950
taattgtcgaatg

SEQ ID NO: 73578 - DNA, 13 bp, Artificial Sequence
  Oligonucleotide for detection of SNP TSC0018950
cattcgacaatta

SEQ ID NO: 73579 - DNA, 13 bp, Artificial Sequence
  Oligonucleotide for detection of SNP TSC0018950
taatcggcgaatg

SEQ ID NO: 73580 - DNA, 13 bp, Artificial Sequence
  Oligonucleotide for detection of SNP TSC0018950
cattcgccgatta

SEQ ID NO: 73581 - DNA, 13 bp, Artificial Sequence
  Oligonucleotide for detection of SNP TSC0018950
taatcgtcgaatg

SEQ ID NO: 73582 - DNA, 13 bp, Artificial Sequence
  Oligonucleotide for detection of SNP TSC0018950
cattcgacgatta

SEQ ID NO: 73583 - DNA, 13 bp, Artificial Sequence
  Oligonucleotide for detection of SNP TSC0018950
tatttgttgatta

SEQ ID NO: 73584 - DNA, 13 bp, Artificial Sequence
  Oligonucleotide for detection of SNP TSC0018950
taatcaacaaata

SEQ ID NO: 73585 - DNA, 13 bp, Artificial Sequence
  Oligonucleotide for detection of SNP TSC0018950
tatttgatgatta

SEQ ID NO: 73586 - DNA, 13 bp, Artificial Sequence
  Oligonucleotide for detection of SNP TSC0018950
taatcatcaaata

SEQ ID NO: 73587 - DNA, 13 bp, Artificial Sequence
  Oligonucleotide for detection of SNP TSC0018950
tattcgttgatta

SEQ ID NO: 73588 - DNA, 13 bp, Artificial Sequence
  Oligonucleotide for detection of SNP TSC0018950
taatcaacgaata

SEQ ID NO: 73589 - DNA, 13 bp, Artificial Sequence
  Oligonucleotide for detection of SNP TSC0018950
tattcgatgatta

SEQ ID NO: 73590 - DNA, 13 bp, Artificial Sequence
  Oligonucleotide for detection of SNP TSC0018950
taatcatcgaata

SEQ ID NO: 73591 - DNA, 13 bp, Artificial Sequence
  Oligonucleotide for detection of SNP TSC0018950
tatttgtcgatta

SEQ ID NO: 73592 - DNA, 13 bp, Artificial Sequence
  Oligonucleotide for detection of SNP TSC0018950
taatcgacaaata

SEQ ID NO: 73593 - DNA, 13 bp, Artificial Sequence
  Oligonucleotide for detection of SNP TSC0018950
tatttgacgatta

SEQ ID NO: 73594 - DNA, 13 bp, Artificial Sequence
  Oligonucleotide for detection of SNP TSC0018950
taatcgtcaaata

SEQ ID NO: 73595 - DNA, 13 bp, Artificial Sequence
  Oligonucleotide for detection of SNP TSC0018950
tattcgtcgatta

SEQ ID NO: 73596 - DNA, 13 bp, Artificial Sequence
  Oligonucleotide for detection of SNP TSC0018950
taatcgacgaata

SEQ ID NO: 73597 - DNA, 13 bp, Artificial Sequence
  Oligonucleotide for detection of SNP TSC0018950
tattcgacgatta

SEQ ID NO: 73598 - DNA, 13 bp, Artificial Sequence
  Oligonucleotide for detection of SNP TSC0018950
taatcgtcgaata

SEQ ID NO: 73599 - DNA, 13 bp, Artificial Sequence
  Oligonucleotide for detection of SNP TSC0018958
ataggttgatgtg

SEQ ID NO: 73600 - DNA, 13 bp, Artificial Sequence
  Oligonucleotide for detection of SNP TSC0018958
cacatcaacctat

SEQ ID NO: 73601 - DNA, 13 bp, Artificial Sequence
  Oligonucleotide for detection of SNP TSC0018958
ataggtcgatgtg

SEQ ID NO: 73602 - DNA, 13 bp, Artificial Sequence
  Oligonucleotide for detection of SNP TSC0018958
cacatcgacctat

SEQ ID NO: 73603 - DNA, 13 bp, Artificial Sequence
  Oligonucleotide for detection of SNP TSC0018958
tatattgatttgt

SEQ ID NO: 73604 - DNA, 13 bp, Artificial Sequence
  Oligonucleotide for detection of SNP TSC0018958
acaaatcaatata

SEQ ID NO: 73605 - DNA, 13 bp, Artificial Sequence
  Oligonucleotide for detection of SNP TSC0018958
tatattaatttgt

SEQ ID NO: 73606 - DNA, 13 bp, Artificial Sequence
  Oligonucleotide for detection of SNP TSC0018958
acaaattaatata

SEQ ID NO: 73607 - DNA, 13 bp, Artificial Sequence
  Oligonucleotide for detection of SNP TSC0018958
tatatcgatttgt

SEQ ID NO: 73608 - DNA, 13 bp, Artificial Sequence
  Oligonucleotide for detection of SNP TSC0018958
acaaatcgatata

SEQ ID NO: 73609 - DNA, 13 bp, Artificial Sequence
  Oligonucleotide for detection of SNP TSC0018959
tggtggtggagtt

SEQ ID NO: 73610 - DNA, 13 bp, Artificial Sequence
  Oligonucleotide for detection of SNP TSC0018959
aactccaccacca

SEQ ID NO: 73611 - DNA, 13 bp, Artificial Sequence
  Oligonucleotide for detection of SNP TSC0018959
tggtgggggagtt

SEQ ID NO: 73612 - DNA, 13 bp, Artificial Sequence
  Oligonucleotide for detection of SNP TSC0018959
aactcccccacca

SEQ ID NO: 73613 - DNA, 13 bp, Artificial Sequence
  Oligonucleotide for detection of SNP TSC0018959
cggtggtggagtt

SEQ ID NO: 73614 - DNA, 13 bp, Artificial Sequence
  Oligonucleotide for detection of SNP TSC0018959
aactccaccaccg

SEQ ID NO: 73615 - DNA, 13 bp, Artificial Sequence
  Oligonucleotide for detection of SNP TSC0018959
cggtgggggagtt

SEQ ID NO: 73616 - DNA, 13 bp, Artificial Sequence
  Oligonucleotide for detection of SNP TSC0018959
aactcccccaccg

SEQ ID NO: 73617 - DNA, 13 bp, Artificial Sequence
  Oligonucleotide for detection of SNP TSC0018959
tggtggcggagtt

SEQ ID NO: 73618 - DNA, 13 bp, Artificial Sequence
  Oligonucleotide for detection of SNP TSC0018959
aactccgccacca

SEQ ID NO: 73619 - DNA, 13 bp, Artificial Sequence
  Oligonucleotide for detection of SNP TSC0018959
cggtggcggagtt

SEQ ID NO: 73620 - DNA, 13 bp, Artificial Sequence
  Oligonucleotide for detection of SNP TSC0018959
aactccgccaccg

SEQ ID NO: 73621 - DNA, 13 bp, Artificial Sequence
  Oligonucleotide for detection of SNP TSC0018959
agttttgttattg

SEQ ID NO: 73622 - DNA, 13 bp, Artificial Sequence
  Oligonucleotide for detection of SNP TSC0018959
caataacaaaact

SEQ ID NO: 73623 - DNA, 13 bp, Artificial Sequence
  Oligonucleotide for detection of SNP TSC0018959
agtttttttattg

SEQ ID NO: 73624 - DNA, 13 bp, Artificial Sequence
  Oligonucleotide for detection of SNP TSC0018959
caataaaaaaact

SEQ ID NO: 73625 - DNA, 13 bp, Artificial Sequence
  Oligonucleotide for detection of SNP TSC0018959
agtttcgttattg

SEQ ID NO: 73626 - DNA, 13 bp, Artificial Sequence
  Oligonucleotide for detection of SNP TSC0018959
caataacgaaact

SEQ ID NO: 73627 - DNA, 13 bp, Artificial Sequence
  Oligonucleotide for detection of SNP TSC0018959
agtttttttatcg

SEQ ID NO: 73628 - DNA, 13 bp, Artificial Sequence
  Oligonucleotide for detection of SNP TSC0018959
cgataaaaaaact

SEQ ID NO: 73629 - DNA, 13 bp, Artificial Sequence
  Oligonucleotide for detection of SNP TSC0018959
agttttgttatcg

SEQ ID NO: 73630 - DNA, 13 bp, Artificial Sequence
  Oligonucleotide for detection of SNP TSC0018959
cgataacaaaact

SEQ ID NO: 73631 - DNA, 13 bp, Artificial Sequence
  Oligonucleotide for detection of SNP TSC0018959
agtttcgttatcg

SEQ ID NO: 73632 - DNA, 13 bp, Artificial Sequence
  Oligonucleotide for detection of SNP TSC0018959
cgataacgaaact

SEQ ID NO: 73633 - DNA, 13 bp, Artificial Sequence
  Oligonucleotide for detection of SNP TSC0018961
atttataggttty

SEQ ID NO: 73634 - DNA, 13 bp, Artificial Sequence
  Oligonucleotide for detection of SNP TSC0018961
raaacctataaat

SEQ ID NO: 73635 - DNA, 13 bp, Artificial Sequence
  Oligonucleotide for detection of SNP TSC0018961
atttatgggttty

SEQ ID NO: 73636 - DNA, 13 bp, Artificial Sequence
  Oligonucleotide for detection of SNP TSC0018961
raaacccataaat

SEQ ID NO: 73637 - DNA, 13 bp, Artificial Sequence
  Oligonucleotide for detection of SNP TSC0018962
taattttttatta

SEQ ID NO: 73638 - DNA, 13 bp, Artificial Sequence
  Oligonucleotide for detection of SNP TSC0018962
taataaaaaatta

SEQ ID NO: 73639 - DNA, 13 bp, Artificial Sequence
  Oligonucleotide for detection of SNP TSC0018962
taatttgttatta

SEQ ID NO: 73640 - DNA, 13 bp, Artificial Sequence
  Oligonucleotide for detection of SNP TSC0018962
taataacaaatta

SEQ ID NO: 73641 - DNA, 13 bp, Artificial Sequence
  Oligonucleotide for detection of SNP TSC0018962
tggtgagagatta

SEQ ID NO: 73642 - DNA, 13 bp, Artificial Sequence
  Oligonucleotide for detection of SNP TSC0018962
taatctctcacca

SEQ ID NO: 73643 - DNA, 13 bp, Artificial Sequence
  Oligonucleotide for detection of SNP TSC0018962
tggtgatagatta

SEQ ID NO: 73644 - DNA, 13 bp, Artificial Sequence
  Oligonucleotide for detection of SNP TSC0018962
taatctatcacca

SEQ ID NO: 73645 - DNA, 13 bp, Artificial Sequence
  Oligonucleotide for detection of SNP TSC0018963
ttttgatggtagy

SEQ ID NO: 73646 - DNA, 13 bp, Artificial Sequence
  Oligonucleotide for detection of SNP TSC0018963
rctaccatcaaaa

SEQ ID NO: 73647 - DNA, 13 bp, Artificial Sequence
  Oligonucleotide for detection of SNP TSC0018963
ttttgacggtagy

SEQ ID NO: 73648 - DNA, 13 bp, Artificial Sequence
  Oligonucleotide for detection of SNP TSC0018963
rctaccgtcaaaa

SEQ ID NO: 73649 - DNA, 13 bp, Artificial Sequence
  Oligonucleotide for detection of SNP TSC0018963
gttgttgttaggg

SEQ ID NO: 73650 - DNA, 13 bp, Artificial Sequence
  Oligonucleotide for detection of SNP TSC0018963
ccctaacaacaac

SEQ ID NO: 73651 - DNA, 13 bp, Artificial Sequence
  Oligonucleotide for detection of SNP TSC0018963
gttgttattaggg

SEQ ID NO: 73652 - DNA, 13 bp, Artificial Sequence
  Oligonucleotide for detection of SNP TSC0018963
ccctaataacaac

SEQ ID NO: 73653 - DNA, 13 bp, Artificial Sequence
  Oligonucleotide for detection of SNP TSC0018963
gttgtcgttaggg

SEQ ID NO: 73654 - DNA, 13 bp, Artificial Sequence
  Oligonucleotide for detection of SNP TSC0018963
ccctaacgacaac

SEQ ID NO: 73655 - DNA, 13 bp, Artificial Sequence
  Oligonucleotide for detection of SNP TSC0018971
atttaaaggaaty

SEQ ID NO: 73656 - DNA, 13 bp, Artificial Sequence
  Oligonucleotide for detection of SNP TSC0018971
rattcctttaaat

SEQ ID NO: 73657 - DNA, 13 bp, Artificial Sequence
  Oligonucleotide for detection of SNP TSC0018971
atttaagggaaty

SEQ ID NO: 73658 - DNA, 13 bp, Artificial Sequence
  Oligonucleotide for detection of SNP TSC0018971
rattcccttaaat

SEQ ID NO: 73659 - DNA, 13 bp, Artificial Sequence
  Oligonucleotide for detection of SNP TSC0018978
aatttaaaggaga

SEQ ID NO: 73660 - DNA, 13 bp, Artificial Sequence
  Oligonucleotide for detection of SNP TSC0018978
tctcctttaaatt

SEQ ID NO: 73661 - DNA, 13 bp, Artificial Sequence
  Oligonucleotide for detection of SNP TSC0018978
aatttagaggaga

SEQ ID NO: 73662 - DNA, 13 bp, Artificial Sequence
  Oligonucleotide for detection of SNP TSC0018978
tctcctctaaatt

SEQ ID NO: 73663 - DNA, 13 bp, Artificial Sequence
  Oligonucleotide for detection of SNP TSC0018979
tttgagattagga

SEQ ID NO: 73664 - DNA, 13 bp, Artificial Sequence
  Oligonucleotide for detection of SNP TSC0018979
tcctaatctcaaa

SEQ ID NO: 73665 - DNA, 13 bp, Artificial Sequence
  Oligonucleotide for detection of SNP TSC0018980
ggtattatggttg

SEQ ID NO: 73666 - DNA, 13 bp, Artificial Sequence
  Oligonucleotide for detection of SNP TSC0018980
caaccataatacc

SEQ ID NO: 73667 - DNA, 13 bp, Artificial Sequence
  Oligonucleotide for detection of SNP TSC0018980
ggtattgtggttg

SEQ ID NO: 73668 - DNA, 13 bp, Artificial Sequence
  Oligonucleotide for detection of SNP TSC0018980
caaccacaatacc

SEQ ID NO: 73669 - DNA, 13 bp, Artificial Sequence
  Oligonucleotide for detection of SNP TSC0018980
ggtatcgtggttg

SEQ ID NO: 73670 - DNA, 13 bp, Artificial Sequence
  Oligonucleotide for detection of SNP TSC0018980
caaccacgatacc

SEQ ID NO: 73671 - DNA, 13 bp, Artificial Sequence
  Oligonucleotide for detection of SNP TSC0018980
taattatggtgty

SEQ ID NO: 73672 - DNA, 13 bp, Artificial Sequence
  Oligonucleotide for detection of SNP TSC0018980
racaccataatta

SEQ ID NO: 73673 - DNA, 13 bp, Artificial Sequence
  Oligonucleotide for detection of SNP TSC0018980
taattacggtgty

SEQ ID NO: 73674 - DNA, 13 bp, Artificial Sequence
  Oligonucleotide for detection of SNP TSC0018980
racaccgtaatta

SEQ ID NO: 73675 - DNA, 13 bp, Artificial Sequence
  Oligonucleotide for detection of SNP TSC0018982
aattttagataaa

SEQ ID NO: 73676 - DNA, 13 bp, Artificial Sequence
  Oligonucleotide for detection of SNP TSC0018982
tttatctaaaatt

SEQ ID NO: 73677 - DNA, 13 bp, Artificial Sequence
  Oligonucleotide for detection of SNP TSC0018982
aattttggataaa

SEQ ID NO: 73678 - DNA, 13 bp, Artificial Sequence
  Oligonucleotide for detection of SNP TSC0018982
tttatccaaaatt

SEQ ID NO: 73679 - DNA, 13 bp, Artificial Sequence
  Oligonucleotide for detection of SNP TSC0018983
aatgtataatgtg

SEQ ID NO: 73680 - DNA, 13 bp, Artificial Sequence
  Oligonucleotide for detection of SNP TSC0018983
cacattatacatt

SEQ ID NO: 73681 - DNA, 13 bp, Artificial Sequence
  Oligonucleotide for detection of SNP TSC0018983
aatgtagaatgtg

SEQ ID NO: 73682 - DNA, 13 bp, Artificial Sequence
  Oligonucleotide for detection of SNP TSC0018983
cacattctacatt

SEQ ID NO: 73683 - DNA, 13 bp, Artificial Sequence
  Oligonucleotide for detection of SNP TSC0018983
aacgtataatgtg

SEQ ID NO: 73684 - DNA, 13 bp, Artificial Sequence
  Oligonucleotide for detection of SNP TSC0018983
cacattatacgtt

SEQ ID NO: 73685 - DNA, 13 bp, Artificial Sequence
  Oligonucleotide for detection of SNP TSC0018983
aacgtagaatgtg

SEQ ID NO: 73686 - DNA, 13 bp, Artificial Sequence
  Oligonucleotide for detection of SNP TSC0018983
cacattctacgtt

SEQ ID NO: 73687 - DNA, 13 bp, Artificial Sequence
  Oligonucleotide for detection of SNP TSC0018983
tatattgtatgtt

SEQ ID NO: 73688 - DNA, 13 bp, Artificial Sequence
  Oligonucleotide for detection of SNP TSC0018983
aacatacaatata

SEQ ID NO: 73689 - DNA, 13 bp, Artificial Sequence
  Oligonucleotide for detection of SNP TSC0018983
tatattttatgtt

SEQ ID NO: 73690 - DNA, 13 bp, Artificial Sequence
  Oligonucleotide for detection of SNP TSC0018983
aacataaaatata

SEQ ID NO: 73691 - DNA, 13 bp, Artificial Sequence
  Oligonucleotide for detection of SNP TSC0018983
tatattgtacgtt

SEQ ID NO: 73692 - DNA, 13 bp, Artificial Sequence
  Oligonucleotide for detection of SNP TSC0018983
aacgtacaatata

SEQ ID NO: 73693 - DNA, 13 bp, Artificial Sequence
  Oligonucleotide for detection of SNP TSC0018983
tatattttacgtt

SEQ ID NO: 73694 - DNA, 13 bp, Artificial Sequence
  Oligonucleotide for detection of SNP TSC0018983
aacgtaaaatata

SEQ ID NO: 73695 - DNA, 13 bp, Artificial Sequence
  Oligonucleotide for detection of SNP TSC0018984
aaggtgaagagat

SEQ ID NO: 73696 - DNA, 13 bp, Artificial Sequence
  Oligonucleotide for detection of SNP TSC0018984
atctcttcacctt

SEQ ID NO: 73697 - DNA, 13 bp, Artificial Sequence
  Oligonucleotide for detection of SNP TSC0018984
aaggtggagagat

SEQ ID NO: 73698 - DNA, 13 bp, Artificial Sequence
  Oligonucleotide for detection of SNP TSC0018984
atctctccacctt

SEQ ID NO: 73699 - DNA, 13 bp, Artificial Sequence
  Oligonucleotide for detection of SNP TSC0018985
ttatatgggggtg

SEQ ID NO: 73700 - DNA, 13 bp, Artificial Sequence
  Oligonucleotide for detection of SNP TSC0018985
cacccccatataa

SEQ ID NO: 73701 - DNA, 13 bp, Artificial Sequence
  Oligonucleotide for detection of SNP TSC0018985
ttatattggggtg

SEQ ID NO: 73702 - DNA, 13 bp, Artificial Sequence
  Oligonucleotide for detection of SNP TSC0018985
caccccaatataa

SEQ ID NO: 73703 - DNA, 13 bp, Artificial Sequence
  Oligonucleotide for detection of SNP TSC0018985
tatttttatgtgg

SEQ ID NO: 73704 - DNA, 13 bp, Artificial Sequence
  Oligonucleotide for detection of SNP TSC0018985
ccacataaaaata

SEQ ID NO: 73705 - DNA, 13 bp, Artificial Sequence
  Oligonucleotide for detection of SNP TSC0018985
tattttaatgtgg

SEQ ID NO: 73706 - DNA, 13 bp, Artificial Sequence
  Oligonucleotide for detection of SNP TSC0018985
ccacattaaaata

SEQ ID NO: 73707 - DNA, 13 bp, Artificial Sequence
  Oligonucleotide for detection of SNP TSC0018986
tgggttattatty

SEQ ID NO: 73708 - DNA, 13 bp, Artificial Sequence
  Oligonucleotide for detection of SNP TSC0018986
raataataaccca

SEQ ID NO: 73709 - DNA, 13 bp, Artificial Sequence
  Oligonucleotide for detection of SNP TSC0018986
tgggttgttatty

SEQ ID NO: 73710 - DNA, 13 bp, Artificial Sequence
  Oligonucleotide for detection of SNP TSC0018986
raataacaaccca

SEQ ID NO: 73711 - DNA, 13 bp, Artificial Sequence
  Oligonucleotide for detection of SNP TSC0018987
aaagtgtgtgtag

SEQ ID NO: 73712 - DNA, 13 bp, Artificial Sequence
  Oligonucleotide for detection of SNP TSC0018987
ctacacacacttt

SEQ ID NO: 73713 - DNA, 13 bp, Artificial Sequence
  Oligonucleotide for detection of SNP TSC0018987
aaagcgtgtgtag

SEQ ID NO: 73714 - DNA, 13 bp, Artificial Sequence
  Oligonucleotide for detection of SNP TSC0018987
ctacacacgcttt

SEQ ID NO: 73715 - DNA, 13 bp, Artificial Sequence
  Oligonucleotide for detection of SNP TSC0018987
aaagtgcgtgtag

SEQ ID NO: 73716 - DNA, 13 bp, Artificial Sequence
  Oligonucleotide for detection of SNP TSC0018987
ctacacgcacttt

SEQ ID NO: 73717 - DNA, 13 bp, Artificial Sequence
  Oligonucleotide for detection of SNP TSC0018987
aaagcgcgtgtag

SEQ ID NO: 73718 - DNA, 13 bp, Artificial Sequence
  Oligonucleotide for detection of SNP TSC0018987
ctacacgcgcttt

SEQ ID NO: 73719 - DNA, 13 bp, Artificial Sequence
  Oligonucleotide for detection of SNP TSC0018987
ttatatgtgtttt

SEQ ID NO: 73720 - DNA, 13 bp, Artificial Sequence
  Oligonucleotide for detection of SNP TSC0018987
aaaacacatataa

SEQ ID NO: 73721 - DNA, 13 bp, Artificial Sequence
  Oligonucleotide for detection of SNP TSC0018987
ttatatatgtttt

SEQ ID NO: 73722 - DNA, 13 bp, Artificial Sequence
  Oligonucleotide for detection of SNP TSC0018987
aaaacatatataa

SEQ ID NO: 73723 - DNA, 13 bp, Artificial Sequence
  Oligonucleotide for detection of SNP TSC0018987
ttatacgtgtttt

SEQ ID NO: 73724 - DNA, 13 bp, Artificial Sequence
  Oligonucleotide for detection of SNP TSC0018987
aaaacacgtataa

SEQ ID NO: 73725 - DNA, 13 bp, Artificial Sequence
  Oligonucleotide for detection of SNP TSC0018987
ttatatacgtttt

SEQ ID NO: 73726 - DNA, 13 bp, Artificial Sequence
  Oligonucleotide for detection of SNP TSC0018987
aaaacgtatataa

SEQ ID NO: 73727 - DNA, 13 bp, Artificial Sequence
  Oligonucleotide for detection of SNP TSC0018987
ttatatgcgtttt

SEQ ID NO: 73728 - DNA, 13 bp, Artificial Sequence
  Oligonucleotide for detection of SNP TSC0018987
aaaacgcatataa

SEQ ID NO: 73729 - DNA, 13 bp, Artificial Sequence
  Oligonucleotide for detection of SNP TSC0018987
ttatacgcgtttt

SEQ ID NO: 73730 - DNA, 13 bp, Artificial Sequence
  Oligonucleotide for detection of SNP TSC0018987
aaaacgcgtataa

SEQ ID NO: 73731 - DNA, 13 bp, Artificial Sequence
  Oligonucleotide for detection of SNP TSC0018988
ttattgggattgt

SEQ ID NO: 73732 - DNA, 13 bp, Artificial Sequence
  Oligonucleotide for detection of SNP TSC0018988
acaatcccaataa

SEQ ID NO: 73733 - DNA, 13 bp, Artificial Sequence
  Oligonucleotide for detection of SNP TSC0018988
ttattgtgattgt

SEQ ID NO: 73734 - DNA, 13 bp, Artificial Sequence
  Oligonucleotide for detection of SNP TSC0018988
acaatcacaataa

SEQ ID NO: 73735 - DNA, 13 bp, Artificial Sequence
  Oligonucleotide for detection of SNP TSC0018988
ataattttagtga

SEQ ID NO: 73736 - DNA, 13 bp, Artificial Sequence
  Oligonucleotide for detection of SNP TSC0018988
tcactaaaattat

SEQ ID NO: 73737 - DNA, 13 bp, Artificial Sequence
  Oligonucleotide for detection of SNP TSC0018988
ataattatagtga

SEQ ID NO: 73738 - DNA, 13 bp, Artificial Sequence
  Oligonucleotide for detection of SNP TSC0018988
tcactataattat

SEQ ID NO: 73739 - DNA, 13 bp, Artificial Sequence
  Oligonucleotide for detection of SNP TSC0018991
ttgtatgttttgt

SEQ ID NO: 73740 - DNA, 13 bp, Artificial Sequence
  Oligonucleotide for detection of SNP TSC0018991
acaaaacatacaa

SEQ ID NO: 73741 - DNA, 13 bp, Artificial Sequence
  Oligonucleotide for detection of SNP TSC0018991
tcgtatattttgt

SEQ ID NO: 73742 - DNA, 13 bp, Artificial Sequence
  Oligonucleotide for detection of SNP TSC0018991
acaaaatatacga

SEQ ID NO: 73743 - DNA, 13 bp, Artificial Sequence
  Oligonucleotide for detection of SNP TSC0018991
tcgtatgttttgt

SEQ ID NO: 73744 - DNA, 13 bp, Artificial Sequence
  Oligonucleotide for detection of SNP TSC0018991
acaaaacatacga

SEQ ID NO: 73745 - DNA, 13 bp, Artificial Sequence
  Oligonucleotide for detection of SNP TSC0018993
tgtagtgttgtaa

SEQ ID NO: 73746 - DNA, 13 bp, Artificial Sequence
  Oligonucleotide for detection of SNP TSC0018993
ttacaacactaca

SEQ ID NO: 73747 - DNA, 13 bp, Artificial Sequence
  Oligonucleotide for detection of SNP TSC0018993
tgtagtattgtaa

SEQ ID NO: 73748 - DNA, 13 bp, Artificial Sequence
  Oligonucleotide for detection of SNP TSC0018993
ttacaatactaca

SEQ ID NO: 73749 - DNA, 13 bp, Artificial Sequence
  Oligonucleotide for detection of SNP TSC0018995
tttatgatgtgtg

SEQ ID NO: 73750 - DNA, 13 bp, Artificial Sequence
  Oligonucleotide for detection of SNP TSC0018995
cacacatcataaa

SEQ ID NO: 73751 - DNA, 13 bp, Artificial Sequence
  Oligonucleotide for detection of SNP TSC0018995
tttatggtgtgtg

SEQ ID NO: 73752 - DNA, 13 bp, Artificial Sequence
  Oligonucleotide for detection of SNP TSC0018995
cacacaccataaa

SEQ ID NO: 73753 - DNA, 13 bp, Artificial Sequence
  Oligonucleotide for detection of SNP TSC0018996
aggattgttttty

SEQ ID NO: 73754 - DNA, 13 bp, Artificial Sequence
  Oligonucleotide for detection of SNP TSC0018996
raaaaacaatcct

SEQ ID NO: 73755 - DNA, 13 bp, Artificial Sequence
  Oligonucleotide for detection of SNP TSC0018996
aggatttttttty

SEQ ID NO: 73756 - DNA, 13 bp, Artificial Sequence
  Oligonucleotide for detection of SNP TSC0018996
raaaaaaaatcct

SEQ ID NO: 73757 - DNA, 13 bp, Artificial Sequence
  Oligonucleotide for detection of SNP TSC0018996
aggatcgttttty

SEQ ID NO: 73758 - DNA, 13 bp, Artificial Sequence
  Oligonucleotide for detection of SNP TSC0018996
raaaaacgatcct

SEQ ID NO: 73759 - DNA, 13 bp, Artificial Sequence
  Oligonucleotide for detection of SNP TSC0018996
gaggaatgatttt

SEQ ID NO: 73760 - DNA, 13 bp, Artificial Sequence
  Oligonucleotide for detection of SNP TSC0018996
aaaatcattcctc

SEQ ID NO: 73761 - DNA, 13 bp, Artificial Sequence
  Oligonucleotide for detection of SNP TSC0018996
gaggaaagatttt

SEQ ID NO: 73762 - DNA, 13 bp, Artificial Sequence
  Oligonucleotide for detection of SNP TSC0018996
aaaatctttcctc

SEQ ID NO: 73763 - DNA, 13 bp, Artificial Sequence
  Oligonucleotide for detection of SNP TSC0018996
gaggaacgatttt

SEQ ID NO: 73764 - DNA, 13 bp, Artificial Sequence
  Oligonucleotide for detection of SNP TSC0018996
aaaatcgttcctc

SEQ ID NO: 73765 - DNA, 13 bp, Artificial Sequence
  Oligonucleotide for detection of SNP TSC0018997
ttaaattgaaatt

SEQ ID NO: 73766 - DNA, 13 bp, Artificial Sequence
  Oligonucleotide for detection of SNP TSC0018997
aatttcaatttaa

SEQ ID NO: 73767 - DNA, 13 bp, Artificial Sequence
  Oligonucleotide for detection of SNP TSC0018997
ttaaatcgaaatt

SEQ ID NO: 73768 - DNA, 13 bp, Artificial Sequence
  Oligonucleotide for detection of SNP TSC0018997
aatttcgatttaa

SEQ ID NO: 73769 - DNA, 13 bp, Artificial Sequence
  Oligonucleotide for detection of SNP TSC0018997
aattttggtttaa

SEQ ID NO: 73770 - DNA, 13 bp, Artificial Sequence
  Oligonucleotide for detection of SNP TSC0018997
ttaaaccaaaatt

SEQ ID NO: 73771 - DNA, 13 bp, Artificial Sequence
  Oligonucleotide for detection of SNP TSC0018997
aattttagtttaa

SEQ ID NO: 73772 - DNA, 13 bp, Artificial Sequence
  Oligonucleotide for detection of SNP TSC0018997
ttaaactaaaatt

SEQ ID NO: 73773 - DNA, 13 bp, Artificial Sequence
  Oligonucleotide for detection of SNP TSC0018997
aatttcggtttaa

SEQ ID NO: 73774 - DNA, 13 bp, Artificial Sequence
  Oligonucleotide for detection of SNP TSC0018997
ttaaaccgaaatt

SEQ ID NO: 73775 - DNA, 13 bp, Artificial Sequence
  Oligonucleotide for detection of SNP TSC0019000
taaattgttgttt

SEQ ID NO: 73776 - DNA, 13 bp, Artificial Sequence
  Oligonucleotide for detection of SNP TSC0019000
aaacaacaattta

SEQ ID NO: 73777 - DNA, 13 bp, Artificial Sequence
  Oligonucleotide for detection of SNP TSC0019000
taaattattgttt

SEQ ID NO: 73778 - DNA, 13 bp, Artificial Sequence
  Oligonucleotide for detection of SNP TSC0019000
aaacaataattta

SEQ ID NO: 73779 - DNA, 13 bp, Artificial Sequence
  Oligonucleotide for detection of SNP TSC0019001
ataggatggtggy

SEQ ID NO: 73780 - DNA, 13 bp, Artificial Sequence
  Oligonucleotide for detection of SNP TSC0019001
rccaccatcctat

SEQ ID NO: 73781 - DNA, 13 bp, Artificial Sequence
  Oligonucleotide for detection of SNP TSC0019001
ataggacggtggy

SEQ ID NO: 73782 - DNA, 13 bp, Artificial Sequence
  Oligonucleotide for detection of SNP TSC0019001
rccaccgtcctat

SEQ ID NO: 73783 - DNA, 13 bp, Artificial Sequence
  Oligonucleotide for detection of SNP TSC0019001
gttattgttttgt

SEQ ID NO: 73784 - DNA, 13 bp, Artificial Sequence
  Oligonucleotide for detection of SNP TSC0019001
acaaaacaataac

SEQ ID NO: 73785 - DNA, 13 bp, Artificial Sequence
  Oligonucleotide for detection of SNP TSC0019001
gttattattttgt

SEQ ID NO: 73786 - DNA, 13 bp, Artificial Sequence
  Oligonucleotide for detection of SNP TSC0019001
acaaaataataac

SEQ ID NO: 73787 - DNA, 13 bp, Artificial Sequence
  Oligonucleotide for detection of SNP TSC0019001
gttatcgttttgt

SEQ ID NO: 73788 - DNA, 13 bp, Artificial Sequence
  Oligonucleotide for detection of SNP TSC0019001
acaaaacgataac

SEQ ID NO: 73789 - DNA, 13 bp, Artificial Sequence
  Oligonucleotide for detection of SNP TSC0019002
tggggaatttaaa

SEQ ID NO: 73790 - DNA, 13 bp, Artificial Sequence
  Oligonucleotide for detection of SNP TSC0019002
tttaaattcccca

SEQ ID NO: 73791 - DNA, 13 bp, Artificial Sequence
  Oligonucleotide for detection of SNP TSC0019002
tggggagtttaaa

SEQ ID NO: 73792 - DNA, 13 bp, Artificial Sequence
  Oligonucleotide for detection of SNP TSC0019002
tttaaactcccca

SEQ ID NO: 73793 - DNA, 13 bp, Artificial Sequence
  Oligonucleotide for detection of SNP TSC0019004
ttgtaaaaatttt

SEQ ID NO: 73794 - DNA, 13 bp, Artificial Sequence
  Oligonucleotide for detection of SNP TSC0019004
aaaatttttacaa

SEQ ID NO: 73795 - DNA, 13 bp, Artificial Sequence
  Oligonucleotide for detection of SNP TSC0019004
ttgtaataatttt

SEQ ID NO: 73796 - DNA, 13 bp, Artificial Sequence
  Oligonucleotide for detection of SNP TSC0019004
aaaattattacaa

SEQ ID NO: 73797 - DNA, 13 bp, Artificial Sequence
  Oligonucleotide for detection of SNP TSC0019004
agggtttttgtaa

SEQ ID NO: 73798 - DNA, 13 bp, Artificial Sequence
  Oligonucleotide for detection of SNP TSC0019004
ttacaaaaaccct

SEQ ID NO: 73799 - DNA, 13 bp, Artificial Sequence
  Oligonucleotide for detection of SNP TSC0019004
agggttgttgtaa

SEQ ID NO: 73800 - DNA, 13 bp, Artificial Sequence
  Oligonucleotide for detection of SNP TSC0019004
ttacaacaaccct

SEQ ID NO: 73801 - DNA, 13 bp, Artificial Sequence
  Oligonucleotide for detection of SNP TSC0019005
aaagtttttttta

SEQ ID NO: 73802 - DNA, 13 bp, Artificial Sequence
  Oligonucleotide for detection of SNP TSC0019005
taaaaaaaacttt

SEQ ID NO: 73803 - DNA, 13 bp, Artificial Sequence
  Oligonucleotide for detection of SNP TSC0019005
tggaagtaatttt

SEQ ID NO: 73804 - DNA, 13 bp, Artificial Sequence
  Oligonucleotide for detection of SNP TSC0019005
aaaattacttcca

SEQ ID NO: 73805 - DNA, 13 bp, Artificial Sequence
  Oligonucleotide for detection of SNP TSC0019005
tggaagaaatttt

SEQ ID NO: 73806 - DNA, 13 bp, Artificial Sequence
  Oligonucleotide for detection of SNP TSC0019005
aaaatttcttcca

SEQ ID NO: 73807 - DNA, 13 bp, Artificial Sequence
  Oligonucleotide for detection of SNP TSC0019008
ttttgaatttata

SEQ ID NO: 73808 - DNA, 13 bp, Artificial Sequence
  Oligonucleotide for detection of SNP TSC0019008
tataaattcaaaa

SEQ ID NO: 73809 - DNA, 13 bp, Artificial Sequence
  Oligonucleotide for detection of SNP TSC0019008
ttttgattttata

SEQ ID NO: 73810 - DNA, 13 bp, Artificial Sequence
  Oligonucleotide for detection of SNP TSC0019008
tataaaatcaaaa

SEQ ID NO: 73811 - DNA, 13 bp, Artificial Sequence
  Oligonucleotide for detection of SNP TSC0019008
tttcgaatttata

SEQ ID NO: 73812 - DNA, 13 bp, Artificial Sequence
  Oligonucleotide for detection of SNP TSC0019008
tataaattcgaaa

SEQ ID NO: 73813 - DNA, 13 bp, Artificial Sequence
  Oligonucleotide for detection of SNP TSC0019008
tttcgattttata

SEQ ID NO: 73814 - DNA, 13 bp, Artificial Sequence
  Oligonucleotide for detection of SNP TSC0019008
tataaaatcgaaa

SEQ ID NO: 73815 - DNA, 13 bp, Artificial Sequence
  Oligonucleotide for detection of SNP TSC0019008
tataagtttggaa

SEQ ID NO: 73816 - DNA, 13 bp, Artificial Sequence
  Oligonucleotide for detection of SNP TSC0019008
ttccaaacttata

SEQ ID NO: 73817 - DNA, 13 bp, Artificial Sequence
  Oligonucleotide for detection of SNP TSC0019008
tataagattggaa

SEQ ID NO: 73818 - DNA, 13 bp, Artificial Sequence
  Oligonucleotide for detection of SNP TSC0019008
ttccaatcttata

SEQ ID NO: 73819 - DNA, 13 bp, Artificial Sequence
  Oligonucleotide for detection of SNP TSC0019008
tataagttcggaa

SEQ ID NO: 73820 - DNA, 13 bp, Artificial Sequence
  Oligonucleotide for detection of SNP TSC0019008
ttccgaacttata

SEQ ID NO: 73821 - DNA, 13 bp, Artificial Sequence
  Oligonucleotide for detection of SNP TSC0019008
tataagatcggaa

SEQ ID NO: 73822 - DNA, 13 bp, Artificial Sequence
  Oligonucleotide for detection of SNP TSC0019008
ttccgatcttata

SEQ ID NO: 73823 - DNA, 13 bp, Artificial Sequence
  Oligonucleotide for detection of SNP TSC0019009
ttttttattggta

SEQ ID NO: 73824 - DNA, 13 bp, Artificial Sequence
  Oligonucleotide for detection of SNP TSC0019009
taccaataaaaaa

SEQ ID NO: 73825 - DNA, 13 bp, Artificial Sequence
  Oligonucleotide for detection of SNP TSC0019010
ttgggatgtttay

SEQ ID NO: 73826 - DNA, 13 bp, Artificial Sequence
  Oligonucleotide for detection of SNP TSC0019010
rtaaacatcccaa

SEQ ID NO: 73827 - DNA, 13 bp, Artificial Sequence
  Oligonucleotide for detection of SNP TSC0019010
ttgggacgtttay

SEQ ID NO: 73828 - DNA, 13 bp, Artificial Sequence
  Oligonucleotide for detection of SNP TSC0019010
rtaaacgtcccaa

SEQ ID NO: 73829 - DNA, 13 bp, Artificial Sequence
  Oligonucleotide for detection of SNP TSC0019010
gtaagtgttttag

SEQ ID NO: 73830 - DNA, 13 bp, Artificial Sequence
  Oligonucleotide for detection of SNP TSC0019010
ctaaaacacttac

SEQ ID NO: 73831 - DNA, 13 bp, Artificial Sequence
  Oligonucleotide for detection of SNP TSC0019010
gtaagtattttag

SEQ ID NO: 73832 - DNA, 13 bp, Artificial Sequence
  Oligonucleotide for detection of SNP TSC0019010
ctaaaatacttac

SEQ ID NO: 73833 - DNA, 13 bp, Artificial Sequence
  Oligonucleotide for detection of SNP TSC0019010
gtaagcgttttag

SEQ ID NO: 73834 - DNA, 13 bp, Artificial Sequence
  Oligonucleotide for detection of SNP TSC0019010
ctaaaacgcttac

SEQ ID NO: 73835 - DNA, 13 bp, Artificial Sequence
  Oligonucleotide for detection of SNP TSC0019011
gtttttgggataa

SEQ ID NO: 73836 - DNA, 13 bp, Artificial Sequence
  Oligonucleotide for detection of SNP TSC0019011
ttatcccaaaaac

SEQ ID NO: 73837 - DNA, 13 bp, Artificial Sequence
  Oligonucleotide for detection of SNP TSC0019011
gtttttaggataa

SEQ ID NO: 73838 - DNA, 13 bp, Artificial Sequence
  Oligonucleotide for detection of SNP TSC0019011
ttatcctaaaaac

SEQ ID NO: 73839 - DNA, 13 bp, Artificial Sequence
  Oligonucleotide for detection of SNP TSC0019012
aaaaatataattg

SEQ ID NO: 73840 - DNA, 13 bp, Artificial Sequence
  Oligonucleotide for detection of SNP TSC0019012
caattatattttt

SEQ ID NO: 73841 - DNA, 13 bp, Artificial Sequence
  Oligonucleotide for detection of SNP TSC0019013
tagaattggtaat

SEQ ID NO: 73842 - DNA, 13 bp, Artificial Sequence
  Oligonucleotide for detection of SNP TSC0019013
attaccaattcta

SEQ ID NO: 73843 - DNA, 13 bp, Artificial Sequence
  Oligonucleotide for detection of SNP TSC0019013
tagaatcggtaat

SEQ ID NO: 73844 - DNA, 13 bp, Artificial Sequence
  Oligonucleotide for detection of SNP TSC0019013
attaccgattcta

SEQ ID NO: 73845 - DNA, 13 bp, Artificial Sequence
  Oligonucleotide for detection of SNP TSC0019013
attattagtttta

SEQ ID NO: 73846 - DNA, 13 bp, Artificial Sequence
  Oligonucleotide for detection of SNP TSC0019013
taaaactaataat

SEQ ID NO: 73847 - DNA, 13 bp, Artificial Sequence
  Oligonucleotide for detection of SNP TSC0019013
attatcggtttta

SEQ ID NO: 73848 - DNA, 13 bp, Artificial Sequence
  Oligonucleotide for detection of SNP TSC0019013
taaaaccgataat

SEQ ID NO: 73849 - DNA, 13 bp, Artificial Sequence
  Oligonucleotide for detection of SNP TSC0019014
ttagtagtttggg

SEQ ID NO: 73850 - DNA, 13 bp, Artificial Sequence
  Oligonucleotide for detection of SNP TSC0019014
cccaaactactaa

SEQ ID NO: 73851 - DNA, 13 bp, Artificial Sequence
  Oligonucleotide for detection of SNP TSC0019015
gtggagagtgggy

SEQ ID NO: 73852 - DNA, 13 bp, Artificial Sequence
  Oligonucleotide for detection of SNP TSC0019015
rcccactctccac

SEQ ID NO: 73853 - DNA, 13 bp, Artificial Sequence
  Oligonucleotide for detection of SNP TSC0019015
gtggagggtgggy

SEQ ID NO: 73854 - DNA, 13 bp, Artificial Sequence
  Oligonucleotide for detection of SNP TSC0019015
rcccaccctccac

SEQ ID NO: 73855 - DNA, 13 bp, Artificial Sequence
  Oligonucleotide for detection of SNP TSC0019016
atagtttggatag

SEQ ID NO: 73856 - DNA, 13 bp, Artificial Sequence
  Oligonucleotide for detection of SNP TSC0019016
ctatccaaactat

SEQ ID NO: 73857 - DNA, 13 bp, Artificial Sequence
  Oligonucleotide for detection of SNP TSC0019016
atagttcggatag

SEQ ID NO: 73858 - DNA, 13 bp, Artificial Sequence
  Oligonucleotide for detection of SNP TSC0019016
ctatccgaactat

SEQ ID NO: 73859 - DNA, 13 bp, Artificial Sequence
  Oligonucleotide for detection of SNP TSC0019016
ttgtttgaattgt

SEQ ID NO: 73860 - DNA, 13 bp, Artificial Sequence
  Oligonucleotide for detection of SNP TSC0019016
acaattcaaacaa

SEQ ID NO: 73861 - DNA, 13 bp, Artificial Sequence
  Oligonucleotide for detection of SNP TSC0019016
ttgtttaaattgt

SEQ ID NO: 73862 - DNA, 13 bp, Artificial Sequence
  Oligonucleotide for detection of SNP TSC0019016
acaatttaaacaa

SEQ ID NO: 73863 - DNA, 13 bp, Artificial Sequence
  Oligonucleotide for detection of SNP TSC0019016
ttgttcgaattgt

SEQ ID NO: 73864 - DNA, 13 bp, Artificial Sequence
  Oligonucleotide for detection of SNP TSC0019016
acaattcgaacaa

SEQ ID NO: 73865 - DNA, 13 bp, Artificial Sequence
  Oligonucleotide for detection of SNP TSC0019017
gtgatagaattta

SEQ ID NO: 73866 - DNA, 13 bp, Artificial Sequence
  Oligonucleotide for detection of SNP TSC0019017
taaattctatcac

SEQ ID NO: 73867 - DNA, 13 bp, Artificial Sequence
  Oligonucleotide for detection of SNP TSC0019017
gtgataaaattta

SEQ ID NO: 73868 - DNA, 13 bp, Artificial Sequence
  Oligonucleotide for detection of SNP TSC0019017
taaattttatcac

SEQ ID NO: 73869 - DNA, 13 bp, Artificial Sequence
  Oligonucleotide for detection of SNP TSC0019017
gcgatagaattta

SEQ ID NO: 73870 - DNA, 13 bp, Artificial Sequence
  Oligonucleotide for detection of SNP TSC0019017
taaattctatcgc

SEQ ID NO: 73871 - DNA, 13 bp, Artificial Sequence
  Oligonucleotide for detection of SNP TSC0019017
gcgataaaattta

SEQ ID NO: 73872 - DNA, 13 bp, Artificial Sequence
  Oligonucleotide for detection of SNP TSC0019017
taaattttatcgc

SEQ ID NO: 73873 - DNA, 13 bp, Artificial Sequence
  Oligonucleotide for detection of SNP TSC0019018
tagtgttggtata

SEQ ID NO: 73874 - DNA, 13 bp, Artificial Sequence
  Oligonucleotide for detection of SNP TSC0019018
tataccaacacta

SEQ ID NO: 73875 - DNA, 13 bp, Artificial Sequence
  Oligonucleotide for detection of SNP TSC0019018
tagtgtcggtata

SEQ ID NO: 73876 - DNA, 13 bp, Artificial Sequence
  Oligonucleotide for detection of SNP TSC0019018
tataccgacacta

SEQ ID NO: 73877 - DNA, 13 bp, Artificial Sequence
  Oligonucleotide for detection of SNP TSC0019018
tgtgttgatattg

SEQ ID NO: 73878 - DNA, 13 bp, Artificial Sequence
  Oligonucleotide for detection of SNP TSC0019018
caatatcaacaca

SEQ ID NO: 73879 - DNA, 13 bp, Artificial Sequence
  Oligonucleotide for detection of SNP TSC0019018
tgtgttaatattg

SEQ ID NO: 73880 - DNA, 13 bp, Artificial Sequence
  Oligonucleotide for detection of SNP TSC0019018
caatattaacaca

SEQ ID NO: 73881 - DNA, 13 bp, Artificial Sequence
  Oligonucleotide for detection of SNP TSC0019018
tgtgtcgatattg

SEQ ID NO: 73882 - DNA, 13 bp, Artificial Sequence
  Oligonucleotide for detection of SNP TSC0019018
caatatcgacaca

SEQ ID NO: 73883 - DNA, 13 bp, Artificial Sequence
  Oligonucleotide for detection of SNP TSC0019019
attttagtgttgt

SEQ ID NO: 73884 - DNA, 13 bp, Artificial Sequence
  Oligonucleotide for detection of SNP TSC0019019
acaacactaaaat

SEQ ID NO: 73885 - DNA, 13 bp, Artificial Sequence
  Oligonucleotide for detection of SNP TSC0019019
attttaatgttgt

SEQ ID NO: 73886 - DNA, 13 bp, Artificial Sequence
  Oligonucleotide for detection of SNP TSC0019019
acaacattaaaat

SEQ ID NO: 73887 - DNA, 13 bp, Artificial Sequence
  Oligonucleotide for detection of SNP TSC0019020
tggagggttttag

SEQ ID NO: 73888 - DNA, 13 bp, Artificial Sequence
  Oligonucleotide for detection of SNP TSC0019020
ctaaaaccctcca

SEQ ID NO: 73889 - DNA, 13 bp, Artificial Sequence
  Oligonucleotide for detection of SNP TSC0019020
tggaggattttag

SEQ ID NO: 73890 - DNA, 13 bp, Artificial Sequence
  Oligonucleotide for detection of SNP TSC0019020
ctaaaatcctcca

SEQ ID NO: 73891 - DNA, 13 bp, Artificial Sequence
  Oligonucleotide for detection of SNP TSC0019021
tttttttttttgy

SEQ ID NO: 73892 - DNA, 13 bp, Artificial Sequence
  Oligonucleotide for detection of SNP TSC0019021
rcaaaaaaaaaaa

SEQ ID NO: 73893 - DNA, 13 bp, Artificial Sequence
  Oligonucleotide for detection of SNP TSC0019021
gtagggtagggga

SEQ ID NO: 73894 - DNA, 13 bp, Artificial Sequence
  Oligonucleotide for detection of SNP TSC0019021
tcccctaccctac

SEQ ID NO: 73895 - DNA, 13 bp, Artificial Sequence
  Oligonucleotide for detection of SNP TSC0019021
gtaggggagggga

SEQ ID NO: 73896 - DNA, 13 bp, Artificial Sequence
  Oligonucleotide for detection of SNP TSC0019021
tcccctcccctac

SEQ ID NO: 73897 - DNA, 13 bp, Artificial Sequence
  Oligonucleotide for detection of SNP TSC0019022
gaatgtagtgatg

SEQ ID NO: 73898 - DNA, 13 bp, Artificial Sequence
  Oligonucleotide for detection of SNP TSC0019022
catcactacattc

SEQ ID NO: 73899 - DNA, 13 bp, Artificial Sequence
  Oligonucleotide for detection of SNP TSC0019022
gaatgtggtgatg

SEQ ID NO: 73900 - DNA, 13 bp, Artificial Sequence
  Oligonucleotide for detection of SNP TSC0019022
catcaccacattc

SEQ ID NO: 73901 - DNA, 13 bp, Artificial Sequence
  Oligonucleotide for detection of SNP TSC0019023
aaagttagagagg

SEQ ID NO: 73902 - DNA, 13 bp, Artificial Sequence
  Oligonucleotide for detection of SNP TSC0019023
cctctctaacttt

SEQ ID NO: 73903 - DNA, 13 bp, Artificial Sequence
  Oligonucleotide for detection of SNP TSC0019023
aaagttggagagg

SEQ ID NO: 73904 - DNA, 13 bp, Artificial Sequence
  Oligonucleotide for detection of SNP TSC0019023
cctctccaacttt

SEQ ID NO: 73905 - DNA, 13 bp, Artificial Sequence
  Oligonucleotide for detection of SNP TSC0019023
aaagtcggagagg

SEQ ID NO: 73906 - DNA, 13 bp, Artificial Sequence
  Oligonucleotide for detection of SNP TSC0019023
cctctccgacttt

SEQ ID NO: 73907 - DNA, 13 bp, Artificial Sequence
  Oligonucleotide for detection of SNP TSC0019023
tttttttggtttt

SEQ ID NO: 73908 - DNA, 13 bp, Artificial Sequence
  Oligonucleotide for detection of SNP TSC0019023
aaaaccaaaaaaa

SEQ ID NO: 73909 - DNA, 13 bp, Artificial Sequence
  Oligonucleotide for detection of SNP TSC0019023
ttttttcggtttt

SEQ ID NO: 73910 - DNA, 13 bp, Artificial Sequence
  Oligonucleotide for detection of SNP TSC0019023
aaaaccgaaaaaa

SEQ ID NO: 73911 - DNA, 13 bp, Artificial Sequence
  Oligonucleotide for detection of SNP TSC0019024
gtgaatatagagg

SEQ ID NO: 73912 - DNA, 13 bp, Artificial Sequence
  Oligonucleotide for detection of SNP TSC0019024
cctctatattcac

SEQ ID NO: 73913 - DNA, 13 bp, Artificial Sequence
  Oligonucleotide for detection of SNP TSC0019024
gtgaatgtagagg

SEQ ID NO: 73914 - DNA, 13 bp, Artificial Sequence
  Oligonucleotide for detection of SNP TSC0019024
cctctacattcac

SEQ ID NO: 73915 - DNA, 13 bp, Artificial Sequence
  Oligonucleotide for detection of SNP TSC0019024
gcgaatatagagg

SEQ ID NO: 73916 - DNA, 13 bp, Artificial Sequence
  Oligonucleotide for detection of SNP TSC0019024
cctctatattcgc

SEQ ID NO: 73917 - DNA, 13 bp, Artificial Sequence
  Oligonucleotide for detection of SNP TSC0019024
gcgaatgtagagg

SEQ ID NO: 73918 - DNA, 13 bp, Artificial Sequence
  Oligonucleotide for detection of SNP TSC0019024
cctctacattcgc

SEQ ID NO: 73919 - DNA, 13 bp, Artificial Sequence
  Oligonucleotide for detection of SNP TSC0019025
ttttgatggagag

SEQ ID NO: 73920 - DNA, 13 bp, Artificial Sequence
  Oligonucleotide for detection of SNP TSC0019025
ctctccatcaaaa

SEQ ID NO: 73921 - DNA, 13 bp, Artificial Sequence
  Oligonucleotide for detection of SNP TSC0019025
ttttgagggagag

SEQ ID NO: 73922 - DNA, 13 bp, Artificial Sequence
  Oligonucleotide for detection of SNP TSC0019025
ctctccctcaaaa

SEQ ID NO: 73923 - DNA, 13 bp, Artificial Sequence
  Oligonucleotide for detection of SNP TSC0019025
ttttgacggagag

SEQ ID NO: 73924 - DNA, 13 bp, Artificial Sequence
  Oligonucleotide for detection of SNP TSC0019025
ctctccgtcaaaa

SEQ ID NO: 73925 - DNA, 13 bp, Artificial Sequence
  Oligonucleotide for detection of SNP TSC0019025
ttttttgttaaga

SEQ ID NO: 73926 - DNA, 13 bp, Artificial Sequence
  Oligonucleotide for detection of SNP TSC0019025
tcttaacaaaaaa

SEQ ID NO: 73927 - DNA, 13 bp, Artificial Sequence
  Oligonucleotide for detection of SNP TSC0019025
tttttcgttaaga

SEQ ID NO: 73928 - DNA, 13 bp, Artificial Sequence
  Oligonucleotide for detection of SNP TSC0019025
tcttaacgaaaaa

SEQ ID NO: 73929 - DNA, 13 bp, Artificial Sequence
  Oligonucleotide for detection of SNP TSC0019026
ggagttattaaag

SEQ ID NO: 73930 - DNA, 13 bp, Artificial Sequence
  Oligonucleotide for detection of SNP TSC0019026
ctttaataactcc

SEQ ID NO: 73931 - DNA, 13 bp, Artificial Sequence
  Oligonucleotide for detection of SNP TSC0019026
ggagttgttaaag

SEQ ID NO: 73932 - DNA, 13 bp, Artificial Sequence
  Oligonucleotide for detection of SNP TSC0019026
ctttaacaactcc

SEQ ID NO: 73933 - DNA, 13 bp, Artificial Sequence
  Oligonucleotide for detection of SNP TSC0019026
ggagtcgttaaag

SEQ ID NO: 73934 - DNA, 13 bp, Artificial Sequence
  Oligonucleotide for detection of SNP TSC0019026
ctttaacgactcc

SEQ ID NO: 73935 - DNA, 13 bp, Artificial Sequence
  Oligonucleotide for detection of SNP TSC0019026
ttttgatggttty

SEQ ID NO: 73936 - DNA, 13 bp, Artificial Sequence
  Oligonucleotide for detection of SNP TSC0019026
raaaccatcaaaa

SEQ ID NO: 73937 - DNA, 13 bp, Artificial Sequence
  Oligonucleotide for detection of SNP TSC0019026
ttttgacggttty

SEQ ID NO: 73938 - DNA, 13 bp, Artificial Sequence
  Oligonucleotide for detection of SNP TSC0019026
raaaccgtcaaaa

SEQ ID NO: 73939 - DNA, 13 bp, Artificial Sequence
  Oligonucleotide for detection of SNP TSC0019030
ggtggggataaag

SEQ ID NO: 73940 - DNA, 13 bp, Artificial Sequence
  Oligonucleotide for detection of SNP TSC0019030
ctttatccccacc

SEQ ID NO: 73941 - DNA, 13 bp, Artificial Sequence
  Oligonucleotide for detection of SNP TSC0019030
ggtgggaataaag

SEQ ID NO: 73942 - DNA, 13 bp, Artificial Sequence
  Oligonucleotide for detection of SNP TSC0019030
ctttattcccacc

SEQ ID NO: 73943 - DNA, 13 bp, Artificial Sequence
  Oligonucleotide for detection of SNP TSC0019031
atggggaagtgat

SEQ ID NO: 73944 - DNA, 13 bp, Artificial Sequence
  Oligonucleotide for detection of SNP TSC0019031
atcacttccccat

SEQ ID NO: 73945 - DNA, 13 bp, Artificial Sequence
  Oligonucleotide for detection of SNP TSC0019031
atggggtagtgat

SEQ ID NO: 73946 - DNA, 13 bp, Artificial Sequence
  Oligonucleotide for detection of SNP TSC0019031
atcactaccccat

SEQ ID NO: 73947 - DNA, 13 bp, Artificial Sequence
  Oligonucleotide for detection of SNP TSC0019031
attatttttttat

SEQ ID NO: 73948 - DNA, 13 bp, Artificial Sequence
  Oligonucleotide for detection of SNP TSC0019031
ataaaaaaataat

SEQ ID NO: 73949 - DNA, 13 bp, Artificial Sequence
  Oligonucleotide for detection of SNP TSC0019031
attattattttat

SEQ ID NO: 73950 - DNA, 13 bp, Artificial Sequence
  Oligonucleotide for detection of SNP TSC0019031
ataaaataataat

SEQ ID NO: 73951 - DNA, 13 bp, Artificial Sequence
  Oligonucleotide for detection of SNP TSC0019032
atgtatatttttt

SEQ ID NO: 73952 - DNA, 13 bp, Artificial Sequence
  Oligonucleotide for detection of SNP TSC0019032
aaaaaatatacat

SEQ ID NO: 73953 - DNA, 13 bp, Artificial Sequence
  Oligonucleotide for detection of SNP TSC0019032
atgtatgtttttt

SEQ ID NO: 73954 - DNA, 13 bp, Artificial Sequence
  Oligonucleotide for detection of SNP TSC0019032
aaaaaacatacat

SEQ ID NO: 73955 - DNA, 13 bp, Artificial Sequence
  Oligonucleotide for detection of SNP TSC0019032
atgtacgtttttt

SEQ ID NO: 73956 - DNA, 13 bp, Artificial Sequence
  Oligonucleotide for detection of SNP TSC0019032
aaaaaacgtacat

SEQ ID NO: 73957 - DNA, 13 bp, Artificial Sequence
  Oligonucleotide for detection of SNP TSC0019032
aaggaatgtatat

SEQ ID NO: 73958 - DNA, 13 bp, Artificial Sequence
  Oligonucleotide for detection of SNP TSC0019032
atatacattcctt

SEQ ID NO: 73959 - DNA, 13 bp, Artificial Sequence
  Oligonucleotide for detection of SNP TSC0019032
aaggaacgtatat

SEQ ID NO: 73960 - DNA, 13 bp, Artificial Sequence
  Oligonucleotide for detection of SNP TSC0019032
atatacgttcctt

SEQ ID NO: 73961 - DNA, 13 bp, Artificial Sequence
  Oligonucleotide for detection of SNP TSC0019034
agaggggtttgtg

SEQ ID NO: 73962 - DNA, 13 bp, Artificial Sequence
  Oligonucleotide for detection of SNP TSC0019034
cacaaacccctct

SEQ ID NO: 73963 - DNA, 13 bp, Artificial Sequence
  Oligonucleotide for detection of SNP TSC0019034
agagggatttgtg

SEQ ID NO: 73964 - DNA, 13 bp, Artificial Sequence
  Oligonucleotide for detection of SNP TSC0019034
cacaaatccctct

SEQ ID NO: 73965 - DNA, 13 bp, Artificial Sequence
  Oligonucleotide for detection of SNP TSC0019035
ttgtttaaagtty

SEQ ID NO: 73966 - DNA, 13 bp, Artificial Sequence
  Oligonucleotide for detection of SNP TSC0019035
raactttaaacaa

SEQ ID NO: 73967 - DNA, 13 bp, Artificial Sequence
  Oligonucleotide for detection of SNP TSC0019035
ttgtttgaagtty

SEQ ID NO: 73968 - DNA, 13 bp, Artificial Sequence
  Oligonucleotide for detection of SNP TSC0019035
raacttcaaacaa

SEQ ID NO: 73969 - DNA, 13 bp, Artificial Sequence
  Oligonucleotide for detection of SNP TSC0019035
ttgttcgaagtty

SEQ ID NO: 73970 - DNA, 13 bp, Artificial Sequence
  Oligonucleotide for detection of SNP TSC0019035
raacttcgaacaa

SEQ ID NO: 73971 - DNA, 13 bp, Artificial Sequence
  Oligonucleotide for detection of SNP TSC0019035
gagttttggataa

SEQ ID NO: 73972 - DNA, 13 bp, Artificial Sequence
  Oligonucleotide for detection of SNP TSC0019035
ttatccaaaactc

SEQ ID NO: 73973 - DNA, 13 bp, Artificial Sequence
  Oligonucleotide for detection of SNP TSC0019035
gagtttcggataa

SEQ ID NO: 73974 - DNA, 13 bp, Artificial Sequence
  Oligonucleotide for detection of SNP TSC0019035
ttatccgaaactc

SEQ ID NO: 73975 - DNA, 13 bp, Artificial Sequence
  Oligonucleotide for detection of SNP TSC0019036
attttttgattag

SEQ ID NO: 73976 - DNA, 13 bp, Artificial Sequence
  Oligonucleotide for detection of SNP TSC0019036
ctaatcaaaaaat

SEQ ID NO: 73977 - DNA, 13 bp, Artificial Sequence
  Oligonucleotide for detection of SNP TSC0019036
atttttcgattag

SEQ ID NO: 73978 - DNA, 13 bp, Artificial Sequence
  Oligonucleotide for detection of SNP TSC0019036
ctaatcgaaaaat

SEQ ID NO: 73979 - DNA, 13 bp, Artificial Sequence
  Oligonucleotide for detection of SNP TSC0019036
ttaattggagaat

SEQ ID NO: 73980 - DNA, 13 bp, Artificial Sequence
  Oligonucleotide for detection of SNP TSC0019036
attctccaattaa

SEQ ID NO: 73981 - DNA, 13 bp, Artificial Sequence
  Oligonucleotide for detection of SNP TSC0019036
ttaattagagaat

SEQ ID NO: 73982 - DNA, 13 bp, Artificial Sequence
  Oligonucleotide for detection of SNP TSC0019036
attctctaattaa

SEQ ID NO: 73983 - DNA, 13 bp, Artificial Sequence
  Oligonucleotide for detection of SNP TSC0019036
ttaatcggagaat

SEQ ID NO: 73984 - DNA, 13 bp, Artificial Sequence
  Oligonucleotide for detection of SNP TSC0019036
attctccgattaa

SEQ ID NO: 73985 - DNA, 13 bp, Artificial Sequence
  Oligonucleotide for detection of SNP TSC0019037
tagaaaggttgaa

SEQ ID NO: 73986 - DNA, 13 bp, Artificial Sequence
  Oligonucleotide for detection of SNP TSC0019037
ttcaacctttcta

SEQ ID NO: 73987 - DNA, 13 bp, Artificial Sequence
  Oligonucleotide for detection of SNP TSC0019037
tagaaaagttgaa

SEQ ID NO: 73988 - DNA, 13 bp, Artificial Sequence
  Oligonucleotide for detection of SNP TSC0019037
ttcaacttttcta

SEQ ID NO: 73989 - DNA, 13 bp, Artificial Sequence
  Oligonucleotide for detection of SNP TSC0019038
ttggttatgggtt

SEQ ID NO: 73990 - DNA, 13 bp, Artificial Sequence
  Oligonucleotide for detection of SNP TSC0019038
aacccataaccaa

SEQ ID NO: 73991 - DNA, 13 bp, Artificial Sequence
  Oligonucleotide for detection of SNP TSC0019038
ttggttgtgggtt

SEQ ID NO: 73992 - DNA, 13 bp, Artificial Sequence
  Oligonucleotide for detection of SNP TSC0019038
aacccacaaccaa

SEQ ID NO: 73993 - DNA, 13 bp, Artificial Sequence
  Oligonucleotide for detection of SNP TSC0019039
tattgtatttttg

SEQ ID NO: 73994 - DNA, 13 bp, Artificial Sequence
  Oligonucleotide for detection of SNP TSC0019039
caaaaatacaata

SEQ ID NO: 73995 - DNA, 13 bp, Artificial Sequence
  Oligonucleotide for detection of SNP TSC0019039
tattgtttttttg

SEQ ID NO: 73996 - DNA, 13 bp, Artificial Sequence
  Oligonucleotide for detection of SNP TSC0019039
caaaaaaacaata

SEQ ID NO: 73997 - DNA, 13 bp, Artificial Sequence
  Oligonucleotide for detection of SNP TSC0019039
tatcgtatttttg

SEQ ID NO: 73998 - DNA, 13 bp, Artificial Sequence
  Oligonucleotide for detection of SNP TSC0019039
caaaaatacgata

SEQ ID NO: 73999 - DNA, 13 bp, Artificial Sequence
  Oligonucleotide for detection of SNP TSC0019039
tatcgtttttttg

SEQ ID NO: 74000 - DNA, 13 bp, Artificial Sequence
  Oligonucleotide for detection of SNP TSC0019039
caaaaaaacgata

SEQ ID NO: 74001 - DNA, 13 bp, Artificial Sequence
  Oligonucleotide for detection of SNP TSC0019039
taagaatgtgatg

SEQ ID NO: 74002 - DNA, 13 bp, Artificial Sequence
  Oligonucleotide for detection of SNP TSC0019039
catcacattctta

SEQ ID NO: 74003 - DNA, 13 bp, Artificial Sequence
  Oligonucleotide for detection of SNP TSC0019039
taagaaggtgatg

SEQ ID NO: 74004 - DNA, 13 bp, Artificial Sequence
  Oligonucleotide for detection of SNP TSC0019039
catcaccttctta

SEQ ID NO: 74005 - DNA, 13 bp, Artificial Sequence
  Oligonucleotide for detection of SNP TSC0019039
taagaatgcgatg

SEQ ID NO: 74006 - DNA, 13 bp, Artificial Sequence
  Oligonucleotide for detection of SNP TSC0019039
catcgcattctta

SEQ ID NO: 74007 - DNA, 13 bp, Artificial Sequence
  Oligonucleotide for detection of SNP TSC0019039
taagaaggcgatg

SEQ ID NO: 74008 - DNA, 13 bp, Artificial Sequence
  Oligonucleotide for detection of SNP TSC0019039
catcgccttctta

SEQ ID NO: 74009 - DNA, 13 bp, Artificial Sequence
  Oligonucleotide for detection of SNP TSC0019040
tatatttagttaa

SEQ ID NO: 74010 - DNA, 13 bp, Artificial Sequence
  Oligonucleotide for detection of SNP TSC0019040
ttaactaaatata

SEQ ID NO: 74011 - DNA, 13 bp, Artificial Sequence
  Oligonucleotide for detection of SNP TSC0019040
tatattgagttaa

SEQ ID NO: 74012 - DNA, 13 bp, Artificial Sequence
  Oligonucleotide for detection of SNP TSC0019040
ttaactcaatata

SEQ ID NO: 74013 - DNA, 13 bp, Artificial Sequence
  Oligonucleotide for detection of SNP TSC0019040
tatatcgagttaa

SEQ ID NO: 74014 - DNA, 13 bp, Artificial Sequence
  Oligonucleotide for detection of SNP TSC0019040
ttaactcgatata

SEQ ID NO: 74015 - DNA, 13 bp, Artificial Sequence
  Oligonucleotide for detection of SNP TSC0019040
ttagtttggtgtg

SEQ ID NO: 74016 - DNA, 13 bp, Artificial Sequence
  Oligonucleotide for detection of SNP TSC0019040
cacaccaaactaa

SEQ ID NO: 74017 - DNA, 13 bp, Artificial Sequence
  Oligonucleotide for detection of SNP TSC0019040
ttagttcggtgtg

SEQ ID NO: 74018 - DNA, 13 bp, Artificial Sequence
  Oligonucleotide for detection of SNP TSC0019040
cacaccgaactaa

SEQ ID NO: 74019 - DNA, 13 bp, Artificial Sequence
  Oligonucleotide for detection of SNP TSC0019042
ggggggaggaggy

SEQ ID NO: 74020 - DNA, 13 bp, Artificial Sequence
  Oligonucleotide for detection of SNP TSC0019042
rcctcctcccccc

SEQ ID NO: 74021 - DNA, 13 bp, Artificial Sequence
  Oligonucleotide for detection of SNP TSC0019042
ggggggtggaggy

SEQ ID NO: 74022 - DNA, 13 bp, Artificial Sequence
  Oligonucleotide for detection of SNP TSC0019042
rcctccacccccc

SEQ ID NO: 74023 - DNA, 13 bp, Artificial Sequence
  Oligonucleotide for detection of SNP TSC0019042
ggggggcggaggy

SEQ ID NO: 74024 - DNA, 13 bp, Artificial Sequence
  Oligonucleotide for detection of SNP TSC0019042
rcctccgcccccc

SEQ ID NO: 74025 - DNA, 13 bp, Artificial Sequence
  Oligonucleotide for detection of SNP TSC0019045
tagtagaatttty

SEQ ID NO: 74026 - DNA, 13 bp, Artificial Sequence
  Oligonucleotide for detection of SNP TSC0019045
raaaattctacta

SEQ ID NO: 74027 - DNA, 13 bp, Artificial Sequence
  Oligonucleotide for detection of SNP TSC0019045
tagtaggatttty

SEQ ID NO: 74028 - DNA, 13 bp, Artificial Sequence
  Oligonucleotide for detection of SNP TSC0019045
raaaatcctacta

SEQ ID NO: 74029 - DNA, 13 bp, Artificial Sequence
  Oligonucleotide for detection of SNP TSC0019050
atatttgaatata

SEQ ID NO: 74030 - DNA, 13 bp, Artificial Sequence
  Oligonucleotide for detection of SNP TSC0019050
tatattcaaatat

SEQ ID NO: 74031 - DNA, 13 bp, Artificial Sequence
  Oligonucleotide for detection of SNP TSC0019050
atattttaatata

SEQ ID NO: 74032 - DNA, 13 bp, Artificial Sequence
  Oligonucleotide for detection of SNP TSC0019050
tatattaaaatat

SEQ ID NO: 74033 - DNA, 13 bp, Artificial Sequence
  Oligonucleotide for detection of SNP TSC0019050
tatatttaaatgt

SEQ ID NO: 74034 - DNA, 13 bp, Artificial Sequence
  Oligonucleotide for detection of SNP TSC0019050
acatttaaatata

SEQ ID NO: 74035 - DNA, 13 bp, Artificial Sequence
  Oligonucleotide for detection of SNP TSC0019050
tatattaaaatgt

SEQ ID NO: 74036 - DNA, 13 bp, Artificial Sequence
  Oligonucleotide for detection of SNP TSC0019050
acattttaatata

SEQ ID NO: 74037 - DNA, 13 bp, Artificial Sequence
  Oligonucleotide for detection of SNP TSC0019051
ttttttaataaag

SEQ ID NO: 74038 - DNA, 13 bp, Artificial Sequence
  Oligonucleotide for detection of SNP TSC0019051
ctttattaaaaaa

SEQ ID NO: 74039 - DNA, 13 bp, Artificial Sequence
  Oligonucleotide for detection of SNP TSC0019051
ttttttgataaag

SEQ ID NO: 74040 - DNA, 13 bp, Artificial Sequence
  Oligonucleotide for detection of SNP TSC0019051
ctttatcaaaaaa

SEQ ID NO: 74041 - DNA, 13 bp, Artificial Sequence
  Oligonucleotide for detection of SNP TSC0019052
aatagaaaaattt

SEQ ID NO: 74042 - DNA, 13 bp, Artificial Sequence
  Oligonucleotide for detection of SNP TSC0019052
aaatttttctatt

SEQ ID NO: 74043 - DNA, 13 bp, Artificial Sequence
  Oligonucleotide for detection of SNP TSC0019052
aatagataaattt

SEQ ID NO: 74044 - DNA, 13 bp, Artificial Sequence
  Oligonucleotide for detection of SNP TSC0019052
aaatttatctatt

SEQ ID NO: 74045 - DNA, 13 bp, Artificial Sequence
  Oligonucleotide for detection of SNP TSC0019052
aggtttttttgtt

SEQ ID NO: 74046 - DNA, 13 bp, Artificial Sequence
  Oligonucleotide for detection of SNP TSC0019052
aacaaaaaaacct

SEQ ID NO: 74047 - DNA, 13 bp, Artificial Sequence
  Oligonucleotide for detection of SNP TSC0019052
aggtttgtttgtt

SEQ ID NO: 74048 - DNA, 13 bp, Artificial Sequence
  Oligonucleotide for detection of SNP TSC0019052
aacaaacaaacct

SEQ ID NO: 74049 - DNA, 13 bp, Artificial Sequence
  Oligonucleotide for detection of SNP TSC0019053
ttgaaaatataaa

SEQ ID NO: 74050 - DNA, 13 bp, Artificial Sequence
  Oligonucleotide for detection of SNP TSC0019053
tttatattttcaa

SEQ ID NO: 74051 - DNA, 13 bp, Artificial Sequence
  Oligonucleotide for detection of SNP TSC0019053
ttgaaagtataaa

SEQ ID NO: 74052 - DNA, 13 bp, Artificial Sequence
  Oligonucleotide for detection of SNP TSC0019053
tttatactttcaa

SEQ ID NO: 74053 - DNA, 13 bp, Artificial Sequence
  Oligonucleotide for detection of SNP TSC0019053
tcgaaaatataaa

SEQ ID NO: 74054 - DNA, 13 bp, Artificial Sequence
  Oligonucleotide for detection of SNP TSC0019053
tttatattttcga

SEQ ID NO: 74055 - DNA, 13 bp, Artificial Sequence
  Oligonucleotide for detection of SNP TSC0019053
tcgaaagtataaa

SEQ ID NO: 74056 - DNA, 13 bp, Artificial Sequence
  Oligonucleotide for detection of SNP TSC0019053
tttatactttcga

SEQ ID NO: 74057 - DNA, 13 bp, Artificial Sequence
  Oligonucleotide for detection of SNP TSC0019054
gggaagttttttg

SEQ ID NO: 74058 - DNA, 13 bp, Artificial Sequence
  Oligonucleotide for detection of SNP TSC0019054
caaaaaacttccc

SEQ ID NO: 74059 - DNA, 13 bp, Artificial Sequence
  Oligonucleotide for detection of SNP TSC0019054
gggaaggtttttg

SEQ ID NO: 74060 - DNA, 13 bp, Artificial Sequence
  Oligonucleotide for detection of SNP TSC0019054
caaaaaccttccc

SEQ ID NO: 74061 - DNA, 13 bp, Artificial Sequence
  Oligonucleotide for detection of SNP TSC0019054
gggaagtttttcg

SEQ ID NO: 74062 - DNA, 13 bp, Artificial Sequence
  Oligonucleotide for detection of SNP TSC0019054
cgaaaaacttccc

SEQ ID NO: 74063 - DNA, 13 bp, Artificial Sequence
  Oligonucleotide for detection of SNP TSC0019054
gggaaggttttcg

SEQ ID NO: 74064 - DNA, 13 bp, Artificial Sequence
  Oligonucleotide for detection of SNP TSC0019054
cgaaaaccttccc

SEQ ID NO: 74065 - DNA, 13 bp, Artificial Sequence
  Oligonucleotide for detection of SNP TSC0019054
tgaggggttttty

SEQ ID NO: 74066 - DNA, 13 bp, Artificial Sequence
  Oligonucleotide for detection of SNP TSC0019054
raaaaacccctca

SEQ ID NO: 74067 - DNA, 13 bp, Artificial Sequence
  Oligonucleotide for detection of SNP TSC0019054
tgagggtttttty

SEQ ID NO: 74068 - DNA, 13 bp, Artificial Sequence
  Oligonucleotide for detection of SNP TSC0019054
raaaaaaccctca

SEQ ID NO: 74069 - DNA, 13 bp, Artificial Sequence
  Oligonucleotide for detection of SNP TSC0019054
cgaggggttttty

SEQ ID NO: 74070 - DNA, 13 bp, Artificial Sequence
  Oligonucleotide for detection of SNP TSC0019054
raaaaacccctcg

SEQ ID NO: 74071 - DNA, 13 bp, Artificial Sequence
  Oligonucleotide for detection of SNP TSC0019054
cgagggtttttty

SEQ ID NO: 74072 - DNA, 13 bp, Artificial Sequence
  Oligonucleotide for detection of SNP TSC0019054
raaaaaaccctcg

SEQ ID NO: 74073 - DNA, 13 bp, Artificial Sequence
  Oligonucleotide for detection of SNP TSC0019055
atttgtagagggt

SEQ ID NO: 74074 - DNA, 13 bp, Artificial Sequence
  Oligonucleotide for detection of SNP TSC0019055
accctctacaaat

SEQ ID NO: 74075 - DNA, 13 bp, Artificial Sequence
  Oligonucleotide for detection of SNP TSC0019055
atttgtggagggt

SEQ ID NO: 74076 - DNA, 13 bp, Artificial Sequence
  Oligonucleotide for detection of SNP TSC0019055
accctccacaaat

SEQ ID NO: 74077 - DNA, 13 bp, Artificial Sequence
  Oligonucleotide for detection of SNP TSC0019055
atttgcggagggt

SEQ ID NO: 74078 - DNA, 13 bp, Artificial Sequence
  Oligonucleotide for detection of SNP TSC0019055
accctccgcaaat

SEQ ID NO: 74079 - DNA, 13 bp, Artificial Sequence
  Oligonucleotide for detection of SNP TSC0019055
attttttgtaagt

SEQ ID NO: 74080 - DNA, 13 bp, Artificial Sequence
  Oligonucleotide for detection of SNP TSC0019055
acttacaaaaaat

SEQ ID NO: 74081 - DNA, 13 bp, Artificial Sequence
  Oligonucleotide for detection of SNP TSC0019055
atttttcgtaagt

SEQ ID NO: 74082 - DNA, 13 bp, Artificial Sequence
  Oligonucleotide for detection of SNP TSC0019055
acttacgaaaaat

SEQ ID NO: 74083 - DNA, 13 bp, Artificial Sequence
  Oligonucleotide for detection of SNP TSC0019056
tttttttattttg

SEQ ID NO: 74084 - DNA, 13 bp, Artificial Sequence
  Oligonucleotide for detection of SNP TSC0019056
caaaataaaaaaa

SEQ ID NO: 74085 - DNA, 13 bp, Artificial Sequence
  Oligonucleotide for detection of SNP TSC0019056
ttttttgattttg

SEQ ID NO: 74086 - DNA, 13 bp, Artificial Sequence
  Oligonucleotide for detection of SNP TSC0019056
caaaatcaaaaaa

SEQ ID NO: 74087 - DNA, 13 bp, Artificial Sequence
  Oligonucleotide for detection of SNP TSC0019056
tttttcgattttg

SEQ ID NO: 74088 - DNA, 13 bp, Artificial Sequence
  Oligonucleotide for detection of SNP TSC0019056
caaaatcgaaaaa

SEQ ID NO: 74089 - DNA, 13 bp, Artificial Sequence
  Oligonucleotide for detection of SNP TSC0019056
tagaatgggggga

SEQ ID NO: 74090 - DNA, 13 bp, Artificial Sequence
  Oligonucleotide for detection of SNP TSC0019056
tccccccattcta

SEQ ID NO: 74091 - DNA, 13 bp, Artificial Sequence
  Oligonucleotide for detection of SNP TSC0019056
tagaattggggga

SEQ ID NO: 74092 - DNA, 13 bp, Artificial Sequence
  Oligonucleotide for detection of SNP TSC0019056
tcccccaattcta

SEQ ID NO: 74093 - DNA, 13 bp, Artificial Sequence
  Oligonucleotide for detection of SNP TSC0019056
tagaatcggggga

SEQ ID NO: 74094 - DNA, 13 bp, Artificial Sequence
  Oligonucleotide for detection of SNP TSC0019056
tcccccgattcta

SEQ ID NO: 74095 - DNA, 13 bp, Artificial Sequence
  Oligonucleotide for detection of SNP TSC0019057
attataggtttga

SEQ ID NO: 74096 - DNA, 13 bp, Artificial Sequence
  Oligonucleotide for detection of SNP TSC0019057
tcaaacctataat

SEQ ID NO: 74097 - DNA, 13 bp, Artificial Sequence
  Oligonucleotide for detection of SNP TSC0019057
attatatgtttga

SEQ ID NO: 74098 - DNA, 13 bp, Artificial Sequence
  Oligonucleotide for detection of SNP TSC0019057
tcaaacatataat

SEQ ID NO: 74099 - DNA, 13 bp, Artificial Sequence
  Oligonucleotide for detection of SNP TSC0019057
ttaggtttgtaat

SEQ ID NO: 74100 - DNA, 13 bp, Artificial Sequence
  Oligonucleotide for detection of SNP TSC0019057
attacaaacctaa

SEQ ID NO: 74101 - DNA, 13 bp, Artificial Sequence
  Oligonucleotide for detection of SNP TSC0019057
ttaggtatgtaat

SEQ ID NO: 74102 - DNA, 13 bp, Artificial Sequence
  Oligonucleotide for detection of SNP TSC0019057
attacatacctaa

SEQ ID NO: 74103 - DNA, 13 bp, Artificial Sequence
  Oligonucleotide for detection of SNP TSC0019058
tatattaattgag

SEQ ID NO: 74104 - DNA, 13 bp, Artificial Sequence
  Oligonucleotide for detection of SNP TSC0019058
ctcaattaatata

SEQ ID NO: 74105 - DNA, 13 bp, Artificial Sequence
  Oligonucleotide for detection of SNP TSC0019058
tatatttattgag

SEQ ID NO: 74106 - DNA, 13 bp, Artificial Sequence
  Oligonucleotide for detection of SNP TSC0019058
ctcaataaatata

SEQ ID NO: 74107 - DNA, 13 bp, Artificial Sequence
  Oligonucleotide for detection of SNP TSC0019058
tttaattaatata

SEQ ID NO: 74108 - DNA, 13 bp, Artificial Sequence
  Oligonucleotide for detection of SNP TSC0019058
tatattaattaaa

SEQ ID NO: 74109 - DNA, 13 bp, Artificial Sequence
  Oligonucleotide for detection of SNP TSC0019058
tttaataaatata

SEQ ID NO: 74110 - DNA, 13 bp, Artificial Sequence
  Oligonucleotide for detection of SNP TSC0019058
tatatttattaaa

SEQ ID NO: 74111 - DNA, 13 bp, Artificial Sequence
  Oligonucleotide for detection of SNP TSC0019059
gttaatgtgtttt

SEQ ID NO: 74112 - DNA, 13 bp, Artificial Sequence
  Oligonucleotide for detection of SNP TSC0019059
aaaacacattaac

SEQ ID NO: 74113 - DNA, 13 bp, Artificial Sequence
  Oligonucleotide for detection of SNP TSC0019059
gttaatatgtttt

SEQ ID NO: 74114 - DNA, 13 bp, Artificial Sequence
  Oligonucleotide for detection of SNP TSC0019059
aaaacatattaac

SEQ ID NO: 74115 - DNA, 13 bp, Artificial Sequence
  Oligonucleotide for detection of SNP TSC0019060
agtggtatttatg

SEQ ID NO: 74116 - DNA, 13 bp, Artificial Sequence
  Oligonucleotide for detection of SNP TSC0019060
cataaataccact

SEQ ID NO: 74117 - DNA, 13 bp, Artificial Sequence
  Oligonucleotide for detection of SNP TSC0019060
agtggtgtttatg

SEQ ID NO: 74118 - DNA, 13 bp, Artificial Sequence
  Oligonucleotide for detection of SNP TSC0019060
cataaacaccact

SEQ ID NO: 74119 - DNA, 13 bp, Artificial Sequence
  Oligonucleotide for detection of SNP TSC0019060
agtggcgtttatg

SEQ ID NO: 74120 - DNA, 13 bp, Artificial Sequence
  Oligonucleotide for detection of SNP TSC0019060
cataaacgccact

SEQ ID NO: 74121 - DNA, 13 bp, Artificial Sequence
  Oligonucleotide for detection of SNP TSC0019060
tataagtgttatt

SEQ ID NO: 74122 - DNA, 13 bp, Artificial Sequence
  Oligonucleotide for detection of SNP TSC0019060
aataacacttata

SEQ ID NO: 74123 - DNA, 13 bp, Artificial Sequence
  Oligonucleotide for detection of SNP TSC0019060
tataagcgttatt

SEQ ID NO: 74124 - DNA, 13 bp, Artificial Sequence
  Oligonucleotide for detection of SNP TSC0019060
aataacgcttata

SEQ ID NO: 74125 - DNA, 13 bp, Artificial Sequence
  Oligonucleotide for detection of SNP TSC0019064
attgtaatatttt

SEQ ID NO: 74126 - DNA, 13 bp, Artificial Sequence
  Oligonucleotide for detection of SNP TSC0019064
aaaatattacaat

SEQ ID NO: 74127 - DNA, 13 bp, Artificial Sequence
  Oligonucleotide for detection of SNP TSC0019064
attgtagtatttt

SEQ ID NO: 74128 - DNA, 13 bp, Artificial Sequence
  Oligonucleotide for detection of SNP TSC0019064
aaaatactacaat

SEQ ID NO: 74129 - DNA, 13 bp, Artificial Sequence
  Oligonucleotide for detection of SNP TSC0019067
gattttattatgt

SEQ ID NO: 74130 - DNA, 13 bp, Artificial Sequence
  Oligonucleotide for detection of SNP TSC0019067
acataataaaatc

SEQ ID NO: 74131 - DNA, 13 bp, Artificial Sequence
  Oligonucleotide for detection of SNP TSC0019067
gattttgttatgt

SEQ ID NO: 74132 - DNA, 13 bp, Artificial Sequence
  Oligonucleotide for detection of SNP TSC0019067
acataacaaaatc

SEQ ID NO: 74133 - DNA, 13 bp, Artificial Sequence
  Oligonucleotide for detection of SNP TSC0019067
gatttcgttatgt

SEQ ID NO: 74134 - DNA, 13 bp, Artificial Sequence
  Oligonucleotide for detection of SNP TSC0019067
acataacgaaatc

SEQ ID NO: 74135 - DNA, 13 bp, Artificial Sequence
  Oligonucleotide for detection of SNP TSC0019067
atataatgagaty

SEQ ID NO: 74136 - DNA, 13 bp, Artificial Sequence
  Oligonucleotide for detection of SNP TSC0019067
ratctcattatat

SEQ ID NO: 74137 - DNA, 13 bp, Artificial Sequence
  Oligonucleotide for detection of SNP TSC0019067
atataacgagaty

SEQ ID NO: 74138 - DNA, 13 bp, Artificial Sequence
  Oligonucleotide for detection of SNP TSC0019067
ratctcgttatat

SEQ ID NO: 74139 - DNA, 13 bp, Artificial Sequence
  Oligonucleotide for detection of SNP TSC0019070
ttaatttttaaag

SEQ ID NO: 74140 - DNA, 13 bp, Artificial Sequence
  Oligonucleotide for detection of SNP TSC0019070
ctttaaaaattaa

SEQ ID NO: 74141 - DNA, 13 bp, Artificial Sequence
  Oligonucleotide for detection of SNP TSC0019070
ttaattgttaaag

SEQ ID NO: 74142 - DNA, 13 bp, Artificial Sequence
  Oligonucleotide for detection of SNP TSC0019070
ctttaacaattaa

SEQ ID NO: 74143 - DNA, 13 bp, Artificial Sequence
  Oligonucleotide for detection of SNP TSC0019071
gattgtggtggat

SEQ ID NO: 74144 - DNA, 13 bp, Artificial Sequence
  Oligonucleotide for detection of SNP TSC0019071
atccaccacaatc

SEQ ID NO: 74145 - DNA, 13 bp, Artificial Sequence
  Oligonucleotide for detection of SNP TSC0019071
gattgtagtggat

SEQ ID NO: 74146 - DNA, 13 bp, Artificial Sequence
  Oligonucleotide for detection of SNP TSC0019071
atccactacaatc

SEQ ID NO: 74147 - DNA, 13 bp, Artificial Sequence
  Oligonucleotide for detection of SNP TSC0019071
gattgcggtggat

SEQ ID NO: 74148 - DNA, 13 bp, Artificial Sequence
  Oligonucleotide for detection of SNP TSC0019071
atccaccgcaatc

SEQ ID NO: 74149 - DNA, 13 bp, Artificial Sequence
  Oligonucleotide for detection of SNP TSC0019072
tatgagaagaagy

SEQ ID NO: 74150 - DNA, 13 bp, Artificial Sequence
  Oligonucleotide for detection of SNP TSC0019072
rcttcttctcata

SEQ ID NO: 74151 - DNA, 13 bp, Artificial Sequence
  Oligonucleotide for detection of SNP TSC0019072
tatgaggagaagy

SEQ ID NO: 74152 - DNA, 13 bp, Artificial Sequence
  Oligonucleotide for detection of SNP TSC0019072
rcttctcctcata

SEQ ID NO: 74153 - DNA, 13 bp, Artificial Sequence
  Oligonucleotide for detection of SNP TSC0019073
tgggaatgtttay

SEQ ID NO: 74154 - DNA, 13 bp, Artificial Sequence
  Oligonucleotide for detection of SNP TSC0019073
rtaaacattccca

SEQ ID NO: 74155 - DNA, 13 bp, Artificial Sequence
  Oligonucleotide for detection of SNP TSC0019073
tgggaacgtttay

SEQ ID NO: 74156 - DNA, 13 bp, Artificial Sequence
  Oligonucleotide for detection of SNP TSC0019073
rtaaacgttccca

SEQ ID NO: 74157 - DNA, 13 bp, Artificial Sequence
  Oligonucleotide for detection of SNP TSC0019073
gtgggtgttttta

SEQ ID NO: 74158 - DNA, 13 bp, Artificial Sequence
  Oligonucleotide for detection of SNP TSC0019073
taaaaacacccac

SEQ ID NO: 74159 - DNA, 13 bp, Artificial Sequence
  Oligonucleotide for detection of SNP TSC0019073
gtgggtattttta

SEQ ID NO: 74160 - DNA, 13 bp, Artificial Sequence
  Oligonucleotide for detection of SNP TSC0019073
taaaaatacccac

SEQ ID NO: 74161 - DNA, 13 bp, Artificial Sequence
  Oligonucleotide for detection of SNP TSC0019073
gtgggcgttttta

SEQ ID NO: 74162 - DNA, 13 bp, Artificial Sequence
  Oligonucleotide for detection of SNP TSC0019073
taaaaacgcccac

SEQ ID NO: 74163 - DNA, 13 bp, Artificial Sequence
  Oligonucleotide for detection of SNP TSC0019074
gatattggaggta

SEQ ID NO: 74164 - DNA, 13 bp, Artificial Sequence
  Oligonucleotide for detection of SNP TSC0019074
tacctccaatatc

SEQ ID NO: 74165 - DNA, 13 bp, Artificial Sequence
  Oligonucleotide for detection of SNP TSC0019074
gatatttgaggta

SEQ ID NO: 74166 - DNA, 13 bp, Artificial Sequence
  Oligonucleotide for detection of SNP TSC0019074
tacctcaaatatc

SEQ ID NO: 74167 - DNA, 13 bp, Artificial Sequence
  Oligonucleotide for detection of SNP TSC0019074
tgtttttaatgty

SEQ ID NO: 74168 - DNA, 13 bp, Artificial Sequence
  Oligonucleotide for detection of SNP TSC0019074
racattaaaaaca

SEQ ID NO: 74169 - DNA, 13 bp, Artificial Sequence
  Oligonucleotide for detection of SNP TSC0019074
tgttttaaatgty

SEQ ID NO: 74170 - DNA, 13 bp, Artificial Sequence
  Oligonucleotide for detection of SNP TSC0019074
racatttaaaaca

SEQ ID NO: 74171 - DNA, 13 bp, Artificial Sequence
  Oligonucleotide for detection of SNP TSC0019075
tattgttgtaaga

SEQ ID NO: 74172 - DNA, 13 bp, Artificial Sequence
  Oligonucleotide for detection of SNP TSC0019075
tcttacaacaata

SEQ ID NO: 74173 - DNA, 13 bp, Artificial Sequence
  Oligonucleotide for detection of SNP TSC0019075
tatcgttgtaaga

SEQ ID NO: 74174 - DNA, 13 bp, Artificial Sequence
  Oligonucleotide for detection of SNP TSC0019075
tcttacaacgata

SEQ ID NO: 74175 - DNA, 13 bp, Artificial Sequence
  Oligonucleotide for detection of SNP TSC0019075
tattgtcgtaaga

SEQ ID NO: 74176 - DNA, 13 bp, Artificial Sequence
  Oligonucleotide for detection of SNP TSC0019075
tcttacgacaata

SEQ ID NO: 74177 - DNA, 13 bp, Artificial Sequence
  Oligonucleotide for detection of SNP TSC0019075
tatcgtcgtaaga

SEQ ID NO: 74178 - DNA, 13 bp, Artificial Sequence
  Oligonucleotide for detection of SNP TSC0019075
tcttacgacgata

SEQ ID NO: 74179 - DNA, 13 bp, Artificial Sequence
  Oligonucleotide for detection of SNP TSC0019075
ttttatgatggtg

SEQ ID NO: 74180 - DNA, 13 bp, Artificial Sequence
  Oligonucleotide for detection of SNP TSC0019075
caccatcataaaa

SEQ ID NO: 74181 - DNA, 13 bp, Artificial Sequence
  Oligonucleotide for detection of SNP TSC0019075
ttttataatggtg

SEQ ID NO: 74182 - DNA, 13 bp, Artificial Sequence
  Oligonucleotide for detection of SNP TSC0019075
caccattataaaa

SEQ ID NO: 74183 - DNA, 13 bp, Artificial Sequence
  Oligonucleotide for detection of SNP TSC0019075
ttttacgatggtg

SEQ ID NO: 74184 - DNA, 13 bp, Artificial Sequence
  Oligonucleotide for detection of SNP TSC0019075
caccatcgtaaaa

SEQ ID NO: 74185 - DNA, 13 bp, Artificial Sequence
  Oligonucleotide for detection of SNP TSC0019075
ttttataacggtg

SEQ ID NO: 74186 - DNA, 13 bp, Artificial Sequence
  Oligonucleotide for detection of SNP TSC0019075
caccgttataaaa

SEQ ID NO: 74187 - DNA, 13 bp, Artificial Sequence
  Oligonucleotide for detection of SNP TSC0019075
ttttatgacggtg

SEQ ID NO: 74188 - DNA, 13 bp, Artificial Sequence
  Oligonucleotide for detection of SNP TSC0019075
caccgtcataaaa

SEQ ID NO: 74189 - DNA, 13 bp, Artificial Sequence
  Oligonucleotide for detection of SNP TSC0019075
ttttacgacggtg

SEQ ID NO: 74190 - DNA, 13 bp, Artificial Sequence
  Oligonucleotide for detection of SNP TSC0019075
caccgtcgtaaaa

SEQ ID NO: 74191 - DNA, 13 bp, Artificial Sequence
  Oligonucleotide for detection of SNP TSC0019076
aaagatatttagg

SEQ ID NO: 74192 - DNA, 13 bp, Artificial Sequence
  Oligonucleotide for detection of SNP TSC0019076
cctaaatatcttt

SEQ ID NO: 74193 - DNA, 13 bp, Artificial Sequence
  Oligonucleotide for detection of SNP TSC0019076
aaagatttttagg

SEQ ID NO: 74194 - DNA, 13 bp, Artificial Sequence
  Oligonucleotide for detection of SNP TSC0019076
cctaaaaatcttt

SEQ ID NO: 74195 - DNA, 13 bp, Artificial Sequence
  Oligonucleotide for detection of SNP TSC0019076
tttgggtgttttt

SEQ ID NO: 74196 - DNA, 13 bp, Artificial Sequence
  Oligonucleotide for detection of SNP TSC0019076
aaaaacacccaaa

SEQ ID NO: 74197 - DNA, 13 bp, Artificial Sequence
  Oligonucleotide for detection of SNP TSC0019076
tttgggggttttt

SEQ ID NO: 74198 - DNA, 13 bp, Artificial Sequence
  Oligonucleotide for detection of SNP TSC0019076
aaaaacccccaaa

SEQ ID NO: 74199 - DNA, 13 bp, Artificial Sequence
  Oligonucleotide for detection of SNP TSC0019077
atggtagtaatgg

SEQ ID NO: 74200 - DNA, 13 bp, Artificial Sequence
  Oligonucleotide for detection of SNP TSC0019077
ccattactaccat

SEQ ID NO: 74201 - DNA, 13 bp, Artificial Sequence
  Oligonucleotide for detection of SNP TSC0019077
atggtaataatgg

SEQ ID NO: 74202 - DNA, 13 bp, Artificial Sequence
  Oligonucleotide for detection of SNP TSC0019077
ccattattaccat

SEQ ID NO: 74203 - DNA, 13 bp, Artificial Sequence
  Oligonucleotide for detection of SNP TSC0019080
tatgtaaatatag

SEQ ID NO: 74204 - DNA, 13 bp, Artificial Sequence
  Oligonucleotide for detection of SNP TSC0019080
ctatatttacata

SEQ ID NO: 74205 - DNA, 13 bp, Artificial Sequence
  Oligonucleotide for detection of SNP TSC0019080
tatgtatatatag

SEQ ID NO: 74206 - DNA, 13 bp, Artificial Sequence
  Oligonucleotide for detection of SNP TSC0019080
ctatatatacata

SEQ ID NO: 74207 - DNA, 13 bp, Artificial Sequence
  Oligonucleotide for detection of SNP TSC0019080
ttatatttatata

SEQ ID NO: 74208 - DNA, 13 bp, Artificial Sequence
  Oligonucleotide for detection of SNP TSC0019080
tatataaatataa

SEQ ID NO: 74209 - DNA, 13 bp, Artificial Sequence
  Oligonucleotide for detection of SNP TSC0019082
tagatttgggtta

SEQ ID NO: 74210 - DNA, 13 bp, Artificial Sequence
  Oligonucleotide for detection of SNP TSC0019082
taacccaaatcta

SEQ ID NO: 74211 - DNA, 13 bp, Artificial Sequence
  Oligonucleotide for detection of SNP TSC0019082
tagattcgggtta

SEQ ID NO: 74212 - DNA, 13 bp, Artificial Sequence
  Oligonucleotide for detection of SNP TSC0019082
taacccgaatcta

SEQ ID NO: 74213 - DNA, 13 bp, Artificial Sequence
  Oligonucleotide for detection of SNP TSC0019083
tagaaatgaatag

SEQ ID NO: 74214 - DNA, 13 bp, Artificial Sequence
  Oligonucleotide for detection of SNP TSC0019083
ctattcatttcta

SEQ ID NO: 74215 - DNA, 13 bp, Artificial Sequence
  Oligonucleotide for detection of SNP TSC0019083
tagaaacgaatag

SEQ ID NO: 74216 - DNA, 13 bp, Artificial Sequence
  Oligonucleotide for detection of SNP TSC0019083
ctattcgtttcta

SEQ ID NO: 74217 - DNA, 13 bp, Artificial Sequence
  Oligonucleotide for detection of SNP TSC0019083
ttgtttgtttttg

SEQ ID NO: 74218 - DNA, 13 bp, Artificial Sequence
  Oligonucleotide for detection of SNP TSC0019083
caaaaacaaacaa

SEQ ID NO: 74219 - DNA, 13 bp, Artificial Sequence
  Oligonucleotide for detection of SNP TSC0019083
ttgtttatttttg

SEQ ID NO: 74220 - DNA, 13 bp, Artificial Sequence
  Oligonucleotide for detection of SNP TSC0019083
caaaaataaacaa

SEQ ID NO: 74221 - DNA, 13 bp, Artificial Sequence
  Oligonucleotide for detection of SNP TSC0019083
ttgttcgtttttg

SEQ ID NO: 74222 - DNA, 13 bp, Artificial Sequence
  Oligonucleotide for detection of SNP TSC0019083
caaaaacgaacaa

SEQ ID NO: 74223 - DNA, 13 bp, Artificial Sequence
  Oligonucleotide for detection of SNP TSC0019085
tgttataaggatt

SEQ ID NO: 74224 - DNA, 13 bp, Artificial Sequence
  Oligonucleotide for detection of SNP TSC0019085
aatccttataaca

SEQ ID NO: 74225 - DNA, 13 bp, Artificial Sequence
  Oligonucleotide for detection of SNP TSC0019085
tgttatgaggatt

SEQ ID NO: 74226 - DNA, 13 bp, Artificial Sequence
  Oligonucleotide for detection of SNP TSC0019085
aatcctcataaca

SEQ ID NO: 74227 - DNA, 13 bp, Artificial Sequence
  Oligonucleotide for detection of SNP TSC0019086
ataatgggaggta

SEQ ID NO: 74228 - DNA, 13 bp, Artificial Sequence
  Oligonucleotide for detection of SNP TSC0019086
tacctcccattat

SEQ ID NO: 74229 - DNA, 13 bp, Artificial Sequence
  Oligonucleotide for detection of SNP TSC0019086
ataatgtgaggta

SEQ ID NO: 74230 - DNA, 13 bp, Artificial Sequence
  Oligonucleotide for detection of SNP TSC0019086
tacctcacattat

SEQ ID NO: 74231 - DNA, 13 bp, Artificial Sequence
  Oligonucleotide for detection of SNP TSC0019086
ataacgggaggta

SEQ ID NO: 74232 - DNA, 13 bp, Artificial Sequence
  Oligonucleotide for detection of SNP TSC0019086
tacctcccgttat

SEQ ID NO: 74233 - DNA, 13 bp, Artificial Sequence
  Oligonucleotide for detection of SNP TSC0019086
ataacgtgaggta

SEQ ID NO: 74234 - DNA, 13 bp, Artificial Sequence
  Oligonucleotide for detection of SNP TSC0019086
tacctcacgttat

SEQ ID NO: 74235 - DNA, 13 bp, Artificial Sequence
  Oligonucleotide for detection of SNP TSC0019086
tgttttttgttgt

SEQ ID NO: 74236 - DNA, 13 bp, Artificial Sequence
  Oligonucleotide for detection of SNP TSC0019086
acaacaaaaaaca

SEQ ID NO: 74237 - DNA, 13 bp, Artificial Sequence
  Oligonucleotide for detection of SNP TSC0019086
tgttttatgttgt

SEQ ID NO: 74238 - DNA, 13 bp, Artificial Sequence
  Oligonucleotide for detection of SNP TSC0019086
acaacataaaaca

SEQ ID NO: 74239 - DNA, 13 bp, Artificial Sequence
  Oligonucleotide for detection of SNP TSC0019086
tgtttttcgttgt

SEQ ID NO: 74240 - DNA, 13 bp, Artificial Sequence
  Oligonucleotide for detection of SNP TSC0019086
acaacgaaaaaca

SEQ ID NO: 74241 - DNA, 13 bp, Artificial Sequence
  Oligonucleotide for detection of SNP TSC0019086
tgttttacgttgt

SEQ ID NO: 74242 - DNA, 13 bp, Artificial Sequence
  Oligonucleotide for detection of SNP TSC0019086
acaacgtaaaaca

SEQ ID NO: 74243 - DNA, 13 bp, Artificial Sequence
  Oligonucleotide for detection of SNP TSC0019088
ggatagaaaggga

SEQ ID NO: 74244 - DNA, 13 bp, Artificial Sequence
  Oligonucleotide for detection of SNP TSC0019088
tccctttctatcc

SEQ ID NO: 74245 - DNA, 13 bp, Artificial Sequence
  Oligonucleotide for detection of SNP TSC0019088
ggataggaaggga

SEQ ID NO: 74246 - DNA, 13 bp, Artificial Sequence
  Oligonucleotide for detection of SNP TSC0019088
tcccttcctatcc

SEQ ID NO: 74247 - DNA, 13 bp, Artificial Sequence
  Oligonucleotide for detection of SNP TSC0019090
agtaaataggtgt

SEQ ID NO: 74248 - DNA, 13 bp, Artificial Sequence
  Oligonucleotide for detection of SNP TSC0019090
acacctatttact

SEQ ID NO: 74249 - DNA, 13 bp, Artificial Sequence
  Oligonucleotide for detection of SNP TSC0019090
agtaaagaggtgt

SEQ ID NO: 74250 - DNA, 13 bp, Artificial Sequence
  Oligonucleotide for detection of SNP TSC0019090
acacctctttact

SEQ ID NO: 74251 - DNA, 13 bp, Artificial Sequence
  Oligonucleotide for detection of SNP TSC0019090
atatttgtttgtt

SEQ ID NO: 74252 - DNA, 13 bp, Artificial Sequence
  Oligonucleotide for detection of SNP TSC0019090
aacaaacaaatat

SEQ ID NO: 74253 - DNA, 13 bp, Artificial Sequence
  Oligonucleotide for detection of SNP TSC0019090
atatttttttgtt

SEQ ID NO: 74254 - DNA, 13 bp, Artificial Sequence
  Oligonucleotide for detection of SNP TSC0019090
aacaaaaaaatat

SEQ ID NO: 74255 - DNA, 13 bp, Artificial Sequence
  Oligonucleotide for detection of SNP TSC0019094
tgtttttttttaa

SEQ ID NO: 74256 - DNA, 13 bp, Artificial Sequence
  Oligonucleotide for detection of SNP TSC0019094
ttaaaaaaaaaca

SEQ ID NO: 74257 - DNA, 13 bp, Artificial Sequence
  Oligonucleotide for detection of SNP TSC0019094
tgttttgttttaa

SEQ ID NO: 74258 - DNA, 13 bp, Artificial Sequence
  Oligonucleotide for detection of SNP TSC0019094
ttaaaacaaaaca

SEQ ID NO: 74259 - DNA, 13 bp, Artificial Sequence
  Oligonucleotide for detection of SNP TSC0019094
ttaaaagaaaata

SEQ ID NO: 74260 - DNA, 13 bp, Artificial Sequence
  Oligonucleotide for detection of SNP TSC0019094
tattttcttttaa

SEQ ID NO: 74261 - DNA, 13 bp, Artificial Sequence
  Oligonucleotide for detection of SNP TSC0019094
ttaaaataaaata

SEQ ID NO: 74262 - DNA, 13 bp, Artificial Sequence
  Oligonucleotide for detection of SNP TSC0019094
tattttattttaa

SEQ ID NO: 74263 - DNA, 13 bp, Artificial Sequence
  Oligonucleotide for detection of SNP TSC0019095
tggattatattgg

SEQ ID NO: 74264 - DNA, 13 bp, Artificial Sequence
  Oligonucleotide for detection of SNP TSC0019095
ccaatataatcca

SEQ ID NO: 74265 - DNA, 13 bp, Artificial Sequence
  Oligonucleotide for detection of SNP TSC0019095
tggattgtattgg

SEQ ID NO: 74266 - DNA, 13 bp, Artificial Sequence
  Oligonucleotide for detection of SNP TSC0019095
ccaatacaatcca

SEQ ID NO: 74267 - DNA, 13 bp, Artificial Sequence
  Oligonucleotide for detection of SNP TSC0019095
tggatcgtattgg

SEQ ID NO: 74268 - DNA, 13 bp, Artificial Sequence
  Oligonucleotide for detection of SNP TSC0019095
ccaatacgatcca

SEQ ID NO: 74269 - DNA, 13 bp, Artificial Sequence
  Oligonucleotide for detection of SNP TSC0019095
ttagtgtggttta

SEQ ID NO: 74270 - DNA, 13 bp, Artificial Sequence
  Oligonucleotide for detection of SNP TSC0019095
taaaccacactaa

SEQ ID NO: 74271 - DNA, 13 bp, Artificial Sequence
  Oligonucleotide for detection of SNP TSC0019095
ttagtgcggttta

SEQ ID NO: 74272 - DNA, 13 bp, Artificial Sequence
  Oligonucleotide for detection of SNP TSC0019095
taaaccgcactaa

SEQ ID NO: 74273 - DNA, 13 bp, Artificial Sequence
  Oligonucleotide for detection of SNP TSC0019097
tgttagatatgta

SEQ ID NO: 74274 - DNA, 13 bp, Artificial Sequence
  Oligonucleotide for detection of SNP TSC0019097
tacatatctaaca

SEQ ID NO: 74275 - DNA, 13 bp, Artificial Sequence
  Oligonucleotide for detection of SNP TSC0019097
tgttaggtatgta

SEQ ID NO: 74276 - DNA, 13 bp, Artificial Sequence
  Oligonucleotide for detection of SNP TSC0019097
tacatacctaaca

SEQ ID NO: 74277 - DNA, 13 bp, Artificial Sequence
  Oligonucleotide for detection of SNP TSC0019097
cgttagatatgta

SEQ ID NO: 74278 - DNA, 13 bp, Artificial Sequence
  Oligonucleotide for detection of SNP TSC0019097
tacatatctaacg

SEQ ID NO: 74279 - DNA, 13 bp, Artificial Sequence
  Oligonucleotide for detection of SNP TSC0019097
cgttaggtatgta

SEQ ID NO: 74280 - DNA, 13 bp, Artificial Sequence
  Oligonucleotide for detection of SNP TSC0019097
tacatacctaacg

SEQ ID NO: 74281 - DNA, 13 bp, Artificial Sequence
  Oligonucleotide for detection of SNP TSC0019098
agtttaggttttt

SEQ ID NO: 74282 - DNA, 13 bp, Artificial Sequence
  Oligonucleotide for detection of SNP TSC0019098
aaaaacctaaact

SEQ ID NO: 74283 - DNA, 13 bp, Artificial Sequence
  Oligonucleotide for detection of SNP TSC0019098
agtttaagttttt

SEQ ID NO: 74284 - DNA, 13 bp, Artificial Sequence
  Oligonucleotide for detection of SNP TSC0019098
aaaaacttaaact

SEQ ID NO: 74285 - DNA, 13 bp, Artificial Sequence
  Oligonucleotide for detection of SNP TSC0019099
ggagtttgtagtt

SEQ ID NO: 74286 - DNA, 13 bp, Artificial Sequence
  Oligonucleotide for detection of SNP TSC0019099
aactacaaactcc

SEQ ID NO: 74287 - DNA, 13 bp, Artificial Sequence
  Oligonucleotide for detection of SNP TSC0019099
ggagttcgtagtt

SEQ ID NO: 74288 - DNA, 13 bp, Artificial Sequence
  Oligonucleotide for detection of SNP TSC0019099
aactacgaactcc

SEQ ID NO: 74289 - DNA, 13 bp, Artificial Sequence
  Oligonucleotide for detection of SNP TSC0019099
aattatgaattty

SEQ ID NO: 74290 - DNA, 13 bp, Artificial Sequence
  Oligonucleotide for detection of SNP TSC0019099
raaattcataatt

SEQ ID NO: 74291 - DNA, 13 bp, Artificial Sequence
  Oligonucleotide for detection of SNP TSC0019099
aattataaattty

SEQ ID NO: 74292 - DNA, 13 bp, Artificial Sequence
  Oligonucleotide for detection of SNP TSC0019099
raaatttataatt

SEQ ID NO: 74293 - DNA, 13 bp, Artificial Sequence
  Oligonucleotide for detection of SNP TSC0019099
aattacgaattty

SEQ ID NO: 74294 - DNA, 13 bp, Artificial Sequence
  Oligonucleotide for detection of SNP TSC0019099
raaattcgtaatt

SEQ ID NO: 74295 - DNA, 13 bp, Artificial Sequence
  Oligonucleotide for detection of SNP TSC0019103
attagtgtattat

SEQ ID NO: 74296 - DNA, 13 bp, Artificial Sequence
  Oligonucleotide for detection of SNP TSC0019103
ataatacactaat

SEQ ID NO: 74297 - DNA, 13 bp, Artificial Sequence
  Oligonucleotide for detection of SNP TSC0019103
attagtatattat

SEQ ID NO: 74298 - DNA, 13 bp, Artificial Sequence
  Oligonucleotide for detection of SNP TSC0019103
ataatatactaat

SEQ ID NO: 74299 - DNA, 13 bp, Artificial Sequence
  Oligonucleotide for detection of SNP TSC0019104
ttatggaatttay

SEQ ID NO: 74300 - DNA, 13 bp, Artificial Sequence
  Oligonucleotide for detection of SNP TSC0019104
rtaaattccataa

SEQ ID NO: 74301 - DNA, 13 bp, Artificial Sequence
  Oligonucleotide for detection of SNP TSC0019104
ttatgggatttay

SEQ ID NO: 74302 - DNA, 13 bp, Artificial Sequence
  Oligonucleotide for detection of SNP TSC0019104
rtaaatcccataa

SEQ ID NO: 74303 - DNA, 13 bp, Artificial Sequence
  Oligonucleotide for detection of SNP TSC0019105
gtatatataataa

SEQ ID NO: 74304 - DNA, 13 bp, Artificial Sequence
  Oligonucleotide for detection of SNP TSC0019105
ttattatatatac

SEQ ID NO: 74305 - DNA, 13 bp, Artificial Sequence
  Oligonucleotide for detection of SNP TSC0019105
gtatatttaataa

SEQ ID NO: 74306 - DNA, 13 bp, Artificial Sequence
  Oligonucleotide for detection of SNP TSC0019105
ttattaaatatac

SEQ ID NO: 74307 - DNA, 13 bp, Artificial Sequence
  Oligonucleotide for detection of SNP TSC0019105
ttattgtatgtay

SEQ ID NO: 74308 - DNA, 13 bp, Artificial Sequence
  Oligonucleotide for detection of SNP TSC0019105
rtacatacaataa

SEQ ID NO: 74309 - DNA, 13 bp, Artificial Sequence
  Oligonucleotide for detection of SNP TSC0019105
ttattggatgtay

SEQ ID NO: 74310 - DNA, 13 bp, Artificial Sequence
  Oligonucleotide for detection of SNP TSC0019105
rtacatccaataa

SEQ ID NO: 74311 - DNA, 13 bp, Artificial Sequence
  Oligonucleotide for detection of SNP TSC0019105
ttattgaatgtay

SEQ ID NO: 74312 - DNA, 13 bp, Artificial Sequence
  Oligonucleotide for detection of SNP TSC0019105
rtacattcaataa

SEQ ID NO: 74313 - DNA, 13 bp, Artificial Sequence
  Oligonucleotide for detection of SNP TSC0019106
ttttatgagtttt

SEQ ID NO: 74314 - DNA, 13 bp, Artificial Sequence
  Oligonucleotide for detection of SNP TSC0019106
aaaactcataaaa

SEQ ID NO: 74315 - DNA, 13 bp, Artificial Sequence
  Oligonucleotide for detection of SNP TSC0019106
ttttataagtttt

SEQ ID NO: 74316 - DNA, 13 bp, Artificial Sequence
  Oligonucleotide for detection of SNP TSC0019106
aaaacttataaaa

SEQ ID NO: 74317 - DNA, 13 bp, Artificial Sequence
  Oligonucleotide for detection of SNP TSC0019107
tttttggaaggty

SEQ ID NO: 74318 - DNA, 13 bp, Artificial Sequence
  Oligonucleotide for detection of SNP TSC0019107
raccttccaaaaa

SEQ ID NO: 74319 - DNA, 13 bp, Artificial Sequence
  Oligonucleotide for detection of SNP TSC0019107
tttttgaaaggty

SEQ ID NO: 74320 - DNA, 13 bp, Artificial Sequence
  Oligonucleotide for detection of SNP TSC0019107
racctttcaaaaa

SEQ ID NO: 74321 - DNA, 13 bp, Artificial Sequence
  Oligonucleotide for detection of SNP TSC0019108
gttaatgaggtay

SEQ ID NO: 74322 - DNA, 13 bp, Artificial Sequence
  Oligonucleotide for detection of SNP TSC0019108
rtacctcattaac

SEQ ID NO: 74323 - DNA, 13 bp, Artificial Sequence
  Oligonucleotide for detection of SNP TSC0019108
gttaattaggtay

SEQ ID NO: 74324 - DNA, 13 bp, Artificial Sequence
  Oligonucleotide for detection of SNP TSC0019108
rtacctaattaac

SEQ ID NO: 74325 - DNA, 13 bp, Artificial Sequence
  Oligonucleotide for detection of SNP TSC0019108
gtgttttattagy

SEQ ID NO: 74326 - DNA, 13 bp, Artificial Sequence
  Oligonucleotide for detection of SNP TSC0019108
rctaataaaacac

SEQ ID NO: 74327 - DNA, 13 bp, Artificial Sequence
  Oligonucleotide for detection of SNP TSC0019108
gtgtttaattagy

SEQ ID NO: 74328 - DNA, 13 bp, Artificial Sequence
  Oligonucleotide for detection of SNP TSC0019108
rctaattaaacac

SEQ ID NO: 74329 - DNA, 13 bp, Artificial Sequence
  Oligonucleotide for detection of SNP TSC0019110
ataataaattaat

SEQ ID NO: 74330 - DNA, 13 bp, Artificial Sequence
  Oligonucleotide for detection of SNP TSC0019110
attaatttattat

SEQ ID NO: 74331 - DNA, 13 bp, Artificial Sequence
  Oligonucleotide for detection of SNP TSC0019111
ttggtgggtttat

SEQ ID NO: 74332 - DNA, 13 bp, Artificial Sequence
  Oligonucleotide for detection of SNP TSC0019111
ataaacccaccaa

SEQ ID NO: 74333 - DNA, 13 bp, Artificial Sequence
  Oligonucleotide for detection of SNP TSC0019111
ttggtgtgtttat

SEQ ID NO: 74334 - DNA, 13 bp, Artificial Sequence
  Oligonucleotide for detection of SNP TSC0019111
ataaacacaccaa

SEQ ID NO: 74335 - DNA, 13 bp, Artificial Sequence
  Oligonucleotide for detection of SNP TSC0019111
atgggtttattaa

SEQ ID NO: 74336 - DNA, 13 bp, Artificial Sequence
  Oligonucleotide for detection of SNP TSC0019111
ttaataaacccat

SEQ ID NO: 74337 - DNA, 13 bp, Artificial Sequence
  Oligonucleotide for detection of SNP TSC0019111
atgggtatattaa

SEQ ID NO: 74338 - DNA, 13 bp, Artificial Sequence
  Oligonucleotide for detection of SNP TSC0019111
ttaatatacccat

SEQ ID NO: 74339 - DNA, 13 bp, Artificial Sequence
  Oligonucleotide for detection of SNP TSC0019112
agattaagttatt

SEQ ID NO: 74340 - DNA, 13 bp, Artificial Sequence
  Oligonucleotide for detection of SNP TSC0019112
aataacttaatct

SEQ ID NO: 74341 - DNA, 13 bp, Artificial Sequence
  Oligonucleotide for detection of SNP TSC0019112
agattatgttatt

SEQ ID NO: 74342 - DNA, 13 bp, Artificial Sequence
  Oligonucleotide for detection of SNP TSC0019112
aataacataatct

SEQ ID NO: 74343 - DNA, 13 bp, Artificial Sequence
  Oligonucleotide for detection of SNP TSC0019112
agattacgttatt

SEQ ID NO: 74344 - DNA, 13 bp, Artificial Sequence
  Oligonucleotide for detection of SNP TSC0019112
aataacgtaatct

SEQ ID NO: 74345 - DNA, 13 bp, Artificial Sequence
  Oligonucleotide for detection of SNP TSC0019112
agtggtttgattt

SEQ ID NO: 74346 - DNA, 13 bp, Artificial Sequence
  Oligonucleotide for detection of SNP TSC0019112
aaatcaaaccact

SEQ ID NO: 74347 - DNA, 13 bp, Artificial Sequence
  Oligonucleotide for detection of SNP TSC0019112
agtggtgtgattt

SEQ ID NO: 74348 - DNA, 13 bp, Artificial Sequence
  Oligonucleotide for detection of SNP TSC0019112
aaatcacaccact

SEQ ID NO: 74349 - DNA, 13 bp, Artificial Sequence
  Oligonucleotide for detection of SNP TSC0019112
agtggcgtgattt

SEQ ID NO: 74350 - DNA, 13 bp, Artificial Sequence
  Oligonucleotide for detection of SNP TSC0019112
aaatcacgccact

SEQ ID NO: 74351 - DNA, 13 bp, Artificial Sequence
  Oligonucleotide for detection of SNP TSC0019113
aagagtgggtatg

SEQ ID NO: 74352 - DNA, 13 bp, Artificial Sequence
  Oligonucleotide for detection of SNP TSC0019113
catacccactctt

SEQ ID NO: 74353 - DNA, 13 bp, Artificial Sequence
  Oligonucleotide for detection of SNP TSC0019113
aagagtaggtatg

SEQ ID NO: 74354 - DNA, 13 bp, Artificial Sequence
  Oligonucleotide for detection of SNP TSC0019113
catacctactctt

SEQ ID NO: 74355 - DNA, 13 bp, Artificial Sequence
  Oligonucleotide for detection of SNP TSC0019114
ttagttgtttaag

SEQ ID NO: 74356 - DNA, 13 bp, Artificial Sequence
  Oligonucleotide for detection of SNP TSC0019114
cttaaacaactaa

SEQ ID NO: 74357 - DNA, 13 bp, Artificial Sequence
  Oligonucleotide for detection of SNP TSC0019114
ttagttatttaag

SEQ ID NO: 74358 - DNA, 13 bp, Artificial Sequence
  Oligonucleotide for detection of SNP TSC0019114
cttaaataactaa

SEQ ID NO: 74359 - DNA, 13 bp, Artificial Sequence
  Oligonucleotide for detection of SNP TSC0019115
tgagttattttag

SEQ ID NO: 74360 - DNA, 13 bp, Artificial Sequence
  Oligonucleotide for detection of SNP TSC0019115
ctaaaataactca

SEQ ID NO: 74361 - DNA, 13 bp, Artificial Sequence
  Oligonucleotide for detection of SNP TSC0019115
tgagtttttttag

SEQ ID NO: 74362 - DNA, 13 bp, Artificial Sequence
  Oligonucleotide for detection of SNP TSC0019115
ctaaaaaaactca

SEQ ID NO: 74363 - DNA, 13 bp, Artificial Sequence
  Oligonucleotide for detection of SNP TSC0019115
ttgaaataattta

SEQ ID NO: 74364 - DNA, 13 bp, Artificial Sequence
  Oligonucleotide for detection of SNP TSC0019115
taaattatttcaa

SEQ ID NO: 74365 - DNA, 13 bp, Artificial Sequence
  Oligonucleotide for detection of SNP TSC0019115
ttgaaagaattta

SEQ ID NO: 74366 - DNA, 13 bp, Artificial Sequence
  Oligonucleotide for detection of SNP TSC0019115
taaattctttcaa

SEQ ID NO: 74367 - DNA, 13 bp, Artificial Sequence
  Oligonucleotide for detection of SNP TSC0019116
taatttattgtaa

SEQ ID NO: 74368 - DNA, 13 bp, Artificial Sequence
  Oligonucleotide for detection of SNP TSC0019116
ttacaataaatta

SEQ ID NO: 74369 - DNA, 13 bp, Artificial Sequence
  Oligonucleotide for detection of SNP TSC0019116
taatttgttgtaa

SEQ ID NO: 74370 - DNA, 13 bp, Artificial Sequence
  Oligonucleotide for detection of SNP TSC0019116
ttacaacaaatta

SEQ ID NO: 74371 - DNA, 13 bp, Artificial Sequence
  Oligonucleotide for detection of SNP TSC0019116
taattcgttgtaa

SEQ ID NO: 74372 - DNA, 13 bp, Artificial Sequence
  Oligonucleotide for detection of SNP TSC0019116
ttacaacgaatta

SEQ ID NO: 74373 - DNA, 13 bp, Artificial Sequence
  Oligonucleotide for detection of SNP TSC0019117
ttttaaaataaat

SEQ ID NO: 74374 - DNA, 13 bp, Artificial Sequence
  Oligonucleotide for detection of SNP TSC0019117
atttattttaaaa

SEQ ID NO: 74375 - DNA, 13 bp, Artificial Sequence
  Oligonucleotide for detection of SNP TSC0019117
ttttaagataaat

SEQ ID NO: 74376 - DNA, 13 bp, Artificial Sequence
  Oligonucleotide for detection of SNP TSC0019117
atttatcttaaaa

SEQ ID NO: 74377 - DNA, 13 bp, Artificial Sequence
  Oligonucleotide for detection of SNP TSC0019118
aatttgttttaag

SEQ ID NO: 74378 - DNA, 13 bp, Artificial Sequence
  Oligonucleotide for detection of SNP TSC0019118
cttaaaacaaatt

SEQ ID NO: 74379 - DNA, 13 bp, Artificial Sequence
  Oligonucleotide for detection of SNP TSC0019118
aatttggtttaag

SEQ ID NO: 74380 - DNA, 13 bp, Artificial Sequence
  Oligonucleotide for detection of SNP TSC0019118
cttaaaccaaatt

SEQ ID NO: 74381 - DNA, 13 bp, Artificial Sequence
  Oligonucleotide for detection of SNP TSC0019118
tttaaagtaaatt

SEQ ID NO: 74382 - DNA, 13 bp, Artificial Sequence
  Oligonucleotide for detection of SNP TSC0019118
aatttactttaaa

SEQ ID NO: 74383 - DNA, 13 bp, Artificial Sequence
  Oligonucleotide for detection of SNP TSC0019118
tttaaattaaatt

SEQ ID NO: 74384 - DNA, 13 bp, Artificial Sequence
  Oligonucleotide for detection of SNP TSC0019118
aatttaatttaaa

SEQ ID NO: 74385 - DNA, 13 bp, Artificial Sequence
  Oligonucleotide for detection of SNP TSC0019119
ggggttttgagtt

SEQ ID NO: 74386 - DNA, 13 bp, Artificial Sequence
  Oligonucleotide for detection of SNP TSC0019119
aactcaaaacccc

SEQ ID NO: 74387 - DNA, 13 bp, Artificial Sequence
  Oligonucleotide for detection of SNP TSC0019119
ggggttgtgagtt

SEQ ID NO: 74388 - DNA, 13 bp, Artificial Sequence
  Oligonucleotide for detection of SNP TSC0019119
aactcacaacccc

SEQ ID NO: 74389 - DNA, 13 bp, Artificial Sequence
  Oligonucleotide for detection of SNP TSC0019119
ggggtcgtgagtt

SEQ ID NO: 74390 - DNA, 13 bp, Artificial Sequence
  Oligonucleotide for detection of SNP TSC0019119
aactcacgacccc

SEQ ID NO: 74391 - DNA, 13 bp, Artificial Sequence
  Oligonucleotide for detection of SNP TSC0019119
agtttaggattty

SEQ ID NO: 74392 - DNA, 13 bp, Artificial Sequence
  Oligonucleotide for detection of SNP TSC0019119
raaatcctaaact

SEQ ID NO: 74393 - DNA, 13 bp, Artificial Sequence
  Oligonucleotide for detection of SNP TSC0019119
agtttatgattty

SEQ ID NO: 74394 - DNA, 13 bp, Artificial Sequence
  Oligonucleotide for detection of SNP TSC0019119
raaatcataaact

SEQ ID NO: 74395 - DNA, 13 bp, Artificial Sequence
  Oligonucleotide for detection of SNP TSC0019119
agtttacgattty

SEQ ID NO: 74396 - DNA, 13 bp, Artificial Sequence
  Oligonucleotide for detection of SNP TSC0019119
raaatcgtaaact

SEQ ID NO: 74397 - DNA, 13 bp, Artificial Sequence
  Oligonucleotide for detection of SNP TSC0019120
ttattttttagtt

SEQ ID NO: 74398 - DNA, 13 bp, Artificial Sequence
  Oligonucleotide for detection of SNP TSC0019120
aactaaaaaataa

SEQ ID NO: 74399 - DNA, 13 bp, Artificial Sequence
  Oligonucleotide for detection of SNP TSC0019120
ttatttgttagtt

SEQ ID NO: 74400 - DNA, 13 bp, Artificial Sequence
  Oligonucleotide for detection of SNP TSC0019120
aactaacaaataa

SEQ ID NO: 74401 - DNA, 13 bp, Artificial Sequence
  Oligonucleotide for detection of SNP TSC0019120
agttgagaggtaa

SEQ ID NO: 74402 - DNA, 13 bp, Artificial Sequence
  Oligonucleotide for detection of SNP TSC0019120
ttacctctcaact

SEQ ID NO: 74403 - DNA, 13 bp, Artificial Sequence
  Oligonucleotide for detection of SNP TSC0019120
agttgataggtaa

SEQ ID NO: 74404 - DNA, 13 bp, Artificial Sequence
  Oligonucleotide for detection of SNP TSC0019120
ttacctatcaact

SEQ ID NO: 74405 - DNA, 13 bp, Artificial Sequence
  Oligonucleotide for detection of SNP TSC0019121
tagtttatggtgt

SEQ ID NO: 74406 - DNA, 13 bp, Artificial Sequence
  Oligonucleotide for detection of SNP TSC0019121
acaccataaacta

SEQ ID NO: 74407 - DNA, 13 bp, Artificial Sequence
  Oligonucleotide for detection of SNP TSC0019121
tagtttgtggtgt

SEQ ID NO: 74408 - DNA, 13 bp, Artificial Sequence
  Oligonucleotide for detection of SNP TSC0019121
acaccacaaacta

SEQ ID NO: 74409 - DNA, 13 bp, Artificial Sequence
  Oligonucleotide for detection of SNP TSC0019121
tagttcgtggtgt

SEQ ID NO: 74410 - DNA, 13 bp, Artificial Sequence
  Oligonucleotide for detection of SNP TSC0019121
acaccacgaacta

SEQ ID NO: 74411 - DNA, 13 bp, Artificial Sequence
  Oligonucleotide for detection of SNP TSC0019121
atattatgagttg

SEQ ID NO: 74412 - DNA, 13 bp, Artificial Sequence
  Oligonucleotide for detection of SNP TSC0019121
caactcataatat

SEQ ID NO: 74413 - DNA, 13 bp, Artificial Sequence
  Oligonucleotide for detection of SNP TSC0019121
atattacgagttg

SEQ ID NO: 74414 - DNA, 13 bp, Artificial Sequence
  Oligonucleotide for detection of SNP TSC0019121
caactcgtaatat

SEQ ID NO: 74415 - DNA, 13 bp, Artificial Sequence
  Oligonucleotide for detection of SNP TSC0019122
aaaatataagtty

SEQ ID NO: 74416 - DNA, 13 bp, Artificial Sequence
  Oligonucleotide for detection of SNP TSC0019122
raacttatatttt

SEQ ID NO: 74417 - DNA, 13 bp, Artificial Sequence
  Oligonucleotide for detection of SNP TSC0019122
aaaatagaagtty

SEQ ID NO: 74418 - DNA, 13 bp, Artificial Sequence
  Oligonucleotide for detection of SNP TSC0019122
raacttctatttt

SEQ ID NO: 74419 - DNA, 13 bp, Artificial Sequence
  Oligonucleotide for detection of SNP TSC0019122
gggtttgtgtttt

SEQ ID NO: 74420 - DNA, 13 bp, Artificial Sequence
  Oligonucleotide for detection of SNP TSC0019122
aaaacacaaaccc

SEQ ID NO: 74421 - DNA, 13 bp, Artificial Sequence
  Oligonucleotide for detection of SNP TSC0019122
gggtttttgtttt

SEQ ID NO: 74422 - DNA, 13 bp, Artificial Sequence
  Oligonucleotide for detection of SNP TSC0019122
aaaacaaaaaccc

SEQ ID NO: 74423 - DNA, 13 bp, Artificial Sequence
  Oligonucleotide for detection of SNP TSC0019123
ttaagtatatgat

SEQ ID NO: 74424 - DNA, 13 bp, Artificial Sequence
  Oligonucleotide for detection of SNP TSC0019123
atcatatacttaa

SEQ ID NO: 74425 - DNA, 13 bp, Artificial Sequence
  Oligonucleotide for detection of SNP TSC0019123
ttaagtgtatgat

SEQ ID NO: 74426 - DNA, 13 bp, Artificial Sequence
  Oligonucleotide for detection of SNP TSC0019123
atcatacacttaa

SEQ ID NO: 74427 - DNA, 13 bp, Artificial Sequence
  Oligonucleotide for detection of SNP TSC0019123
ttaagtatacgat

SEQ ID NO: 74428 - DNA, 13 bp, Artificial Sequence
  Oligonucleotide for detection of SNP TSC0019123
atcgtatacttaa

SEQ ID NO: 74429 - DNA, 13 bp, Artificial Sequence
  Oligonucleotide for detection of SNP TSC0019123
ttaagcgtatgat

SEQ ID NO: 74430 - DNA, 13 bp, Artificial Sequence
  Oligonucleotide for detection of SNP TSC0019123
atcatacgcttaa

SEQ ID NO: 74431 - DNA, 13 bp, Artificial Sequence
  Oligonucleotide for detection of SNP TSC0019123
ttaagtgtacgat

SEQ ID NO: 74432 - DNA, 13 bp, Artificial Sequence
  Oligonucleotide for detection of SNP TSC0019123
atcgtacacttaa

SEQ ID NO: 74433 - DNA, 13 bp, Artificial Sequence
  Oligonucleotide for detection of SNP TSC0019123
ttaagcgtacgat

SEQ ID NO: 74434 - DNA, 13 bp, Artificial Sequence
  Oligonucleotide for detection of SNP TSC0019123
atcgtacgcttaa

SEQ ID NO: 74435 - DNA, 13 bp, Artificial Sequence
  Oligonucleotide for detection of SNP TSC0019123
attgtatgtttaa

SEQ ID NO: 74436 - DNA, 13 bp, Artificial Sequence
  Oligonucleotide for detection of SNP TSC0019123
ttaaacatacaat

SEQ ID NO: 74437 - DNA, 13 bp, Artificial Sequence
  Oligonucleotide for detection of SNP TSC0019123
atcgtatgtttaa

SEQ ID NO: 74438 - DNA, 13 bp, Artificial Sequence
  Oligonucleotide for detection of SNP TSC0019123
ttaaacatacgat

SEQ ID NO: 74439 - DNA, 13 bp, Artificial Sequence
  Oligonucleotide for detection of SNP TSC0019123
attgtacgtttaa

SEQ ID NO: 74440 - DNA, 13 bp, Artificial Sequence
  Oligonucleotide for detection of SNP TSC0019123
ttaaacgtacaat

SEQ ID NO: 74441 - DNA, 13 bp, Artificial Sequence
  Oligonucleotide for detection of SNP TSC0019123
atcgtacgtttaa

SEQ ID NO: 74442 - DNA, 13 bp, Artificial Sequence
  Oligonucleotide for detection of SNP TSC0019123
ttaaacgtacgat

SEQ ID NO: 74443 - DNA, 13 bp, Artificial Sequence
  Oligonucleotide for detection of SNP TSC0019124
tatattgatagty

SEQ ID NO: 74444 - DNA, 13 bp, Artificial Sequence
  Oligonucleotide for detection of SNP TSC0019124
ractatcaatata

SEQ ID NO: 74445 - DNA, 13 bp, Artificial Sequence
  Oligonucleotide for detection of SNP TSC0019124
tatattaatagty

SEQ ID NO: 74446 - DNA, 13 bp, Artificial Sequence
  Oligonucleotide for detection of SNP TSC0019124
ractattaatata

SEQ ID NO: 74447 - DNA, 13 bp, Artificial Sequence
  Oligonucleotide for detection of SNP TSC0019125
aaggtaaaagagy

SEQ ID NO: 74448 - DNA, 13 bp, Artificial Sequence
  Oligonucleotide for detection of SNP TSC0019125
rctcttttacctt

SEQ ID NO: 74449 - DNA, 13 bp, Artificial Sequence
  Oligonucleotide for detection of SNP TSC0019125
aaggtagaagagy

SEQ ID NO: 74450 - DNA, 13 bp, Artificial Sequence
  Oligonucleotide for detection of SNP TSC0019125
rctcttctacctt

SEQ ID NO: 74451 - DNA, 13 bp, Artificial Sequence
  Oligonucleotide for detection of SNP TSC0019126
gaggggttttaga

SEQ ID NO: 74452 - DNA, 13 bp, Artificial Sequence
  Oligonucleotide for detection of SNP TSC0019126
tctaaaacccctc

SEQ ID NO: 74453 - DNA, 13 bp, Artificial Sequence
  Oligonucleotide for detection of SNP TSC0019126
gagggggtttaga

SEQ ID NO: 74454 - DNA, 13 bp, Artificial Sequence
  Oligonucleotide for detection of SNP TSC0019126
tctaaaccccctc

SEQ ID NO: 74455 - DNA, 13 bp, Artificial Sequence
  Oligonucleotide for detection of SNP TSC0019126
tttggggttttty

SEQ ID NO: 74456 - DNA, 13 bp, Artificial Sequence
  Oligonucleotide for detection of SNP TSC0019126
raaaaaccccaaa

SEQ ID NO: 74457 - DNA, 13 bp, Artificial Sequence
  Oligonucleotide for detection of SNP TSC0019126
tttgggtttttty

SEQ ID NO: 74458 - DNA, 13 bp, Artificial Sequence
  Oligonucleotide for detection of SNP TSC0019126
raaaaaacccaaa

SEQ ID NO: 74459 - DNA, 13 bp, Artificial Sequence
  Oligonucleotide for detection of SNP TSC0019127
gtgattatatgay

SEQ ID NO: 74460 - DNA, 13 bp, Artificial Sequence
  Oligonucleotide for detection of SNP TSC0019127
rtcatataatcac

SEQ ID NO: 74461 - DNA, 13 bp, Artificial Sequence
  Oligonucleotide for detection of SNP TSC0019127
gtgattgtatgay

SEQ ID NO: 74462 - DNA, 13 bp, Artificial Sequence
  Oligonucleotide for detection of SNP TSC0019127
rtcatacaatcac

SEQ ID NO: 74463 - DNA, 13 bp, Artificial Sequence
  Oligonucleotide for detection of SNP TSC0019133
attgaaatttata

SEQ ID NO: 74464 - DNA, 13 bp, Artificial Sequence
  Oligonucleotide for detection of SNP TSC0019133
tataaatttcaat

SEQ ID NO: 74465 - DNA, 13 bp, Artificial Sequence
  Oligonucleotide for detection of SNP TSC0019133
attgaattttata

SEQ ID NO: 74466 - DNA, 13 bp, Artificial Sequence
  Oligonucleotide for detection of SNP TSC0019133
tataaaattcaat

SEQ ID NO: 74467 - DNA, 13 bp, Artificial Sequence
  Oligonucleotide for detection of SNP TSC0019133
tgtggattttagt

SEQ ID NO: 74468 - DNA, 13 bp, Artificial Sequence
  Oligonucleotide for detection of SNP TSC0019133
actaaaatccaca

SEQ ID NO: 74469 - DNA, 13 bp, Artificial Sequence
  Oligonucleotide for detection of SNP TSC0019133
tgtggagtttagt

SEQ ID NO: 74470 - DNA, 13 bp, Artificial Sequence
  Oligonucleotide for detection of SNP TSC0019133
actaaactccaca

SEQ ID NO: 74471 - DNA, 13 bp, Artificial Sequence
  Oligonucleotide for detection of SNP TSC0019134
atatatattgtta

SEQ ID NO: 74472 - DNA, 13 bp, Artificial Sequence
  Oligonucleotide for detection of SNP TSC0019134
taacaatatatat

SEQ ID NO: 74473 - DNA, 13 bp, Artificial Sequence
  Oligonucleotide for detection of SNP TSC0019134
atatatgttgtta

SEQ ID NO: 74474 - DNA, 13 bp, Artificial Sequence
  Oligonucleotide for detection of SNP TSC0019134
taacaacatatat

SEQ ID NO: 74475 - DNA, 13 bp, Artificial Sequence
  Oligonucleotide for detection of SNP TSC0019134
atatacgttgtta

SEQ ID NO: 74476 - DNA, 13 bp, Artificial Sequence
  Oligonucleotide for detection of SNP TSC0019134
taacaacgtatat

SEQ ID NO: 74477 - DNA, 13 bp, Artificial Sequence
  Oligonucleotide for detection of SNP TSC0019134
tagtagtgtgtgt

SEQ ID NO: 74478 - DNA, 13 bp, Artificial Sequence
  Oligonucleotide for detection of SNP TSC0019134
acacacactacta

SEQ ID NO: 74479 - DNA, 13 bp, Artificial Sequence
  Oligonucleotide for detection of SNP TSC0019134
tagtagcgtgtgt

SEQ ID NO: 74480 - DNA, 13 bp, Artificial Sequence
  Oligonucleotide for detection of SNP TSC0019134
acacacgctacta

SEQ ID NO: 74481 - DNA, 13 bp, Artificial Sequence
  Oligonucleotide for detection of SNP TSC0019135
gaaaatatagaaa

SEQ ID NO: 74482 - DNA, 13 bp, Artificial Sequence
  Oligonucleotide for detection of SNP TSC0019135
tttctatattttc

SEQ ID NO: 74483 - DNA, 13 bp, Artificial Sequence
  Oligonucleotide for detection of SNP TSC0019135
gaaaatgtagaaa

SEQ ID NO: 74484 - DNA, 13 bp, Artificial Sequence
  Oligonucleotide for detection of SNP TSC0019135
tttctacattttc

SEQ ID NO: 74485 - DNA, 13 bp, Artificial Sequence
  Oligonucleotide for detection of SNP TSC0019135
gaaaacgtagaaa

SEQ ID NO: 74486 - DNA, 13 bp, Artificial Sequence
  Oligonucleotide for detection of SNP TSC0019135
tttctacgttttc

SEQ ID NO: 74487 - DNA, 13 bp, Artificial Sequence
  Oligonucleotide for detection of SNP TSC0019135
tttttgtgtttty

SEQ ID NO: 74488 - DNA, 13 bp, Artificial Sequence
  Oligonucleotide for detection of SNP TSC0019135
raaaacacaaaaa

SEQ ID NO: 74489 - DNA, 13 bp, Artificial Sequence
  Oligonucleotide for detection of SNP TSC0019135
tttttgcgtttty

SEQ ID NO: 74490 - DNA, 13 bp, Artificial Sequence
  Oligonucleotide for detection of SNP TSC0019135
raaaacgcaaaaa

SEQ ID NO: 74491 - DNA, 13 bp, Artificial Sequence
  Oligonucleotide for detection of SNP TSC0019136
tttaggaatgata

SEQ ID NO: 74492 - DNA, 13 bp, Artificial Sequence
  Oligonucleotide for detection of SNP TSC0019136
tatcattcctaaa

SEQ ID NO: 74493 - DNA, 13 bp, Artificial Sequence
  Oligonucleotide for detection of SNP TSC0019136
tttagggatgata

SEQ ID NO: 74494 - DNA, 13 bp, Artificial Sequence
  Oligonucleotide for detection of SNP TSC0019136
tatcatccctaaa

SEQ ID NO: 74495 - DNA, 13 bp, Artificial Sequence
  Oligonucleotide for detection of SNP TSC0019137
ttttttaggtgta

SEQ ID NO: 74496 - DNA, 13 bp, Artificial Sequence
  Oligonucleotide for detection of SNP TSC0019137
tacacctaaaaaa

SEQ ID NO: 74497 - DNA, 13 bp, Artificial Sequence
  Oligonucleotide for detection of SNP TSC0019137
ttttttgggtgta

SEQ ID NO: 74498 - DNA, 13 bp, Artificial Sequence
  Oligonucleotide for detection of SNP TSC0019137
tacacccaaaaaa

SEQ ID NO: 74499 - DNA, 13 bp, Artificial Sequence
  Oligonucleotide for detection of SNP TSC0019137
tttttcgggtgta

SEQ ID NO: 74500 - DNA, 13 bp, Artificial Sequence
  Oligonucleotide for detection of SNP TSC0019137
tacacccgaaaaa

SEQ ID NO: 74501 - DNA, 13 bp, Artificial Sequence
  Oligonucleotide for detection of SNP TSC0019137
tatatttgggaaa

SEQ ID NO: 74502 - DNA, 13 bp, Artificial Sequence
  Oligonucleotide for detection of SNP TSC0019137
tttcccaaatata

SEQ ID NO: 74503 - DNA, 13 bp, Artificial Sequence
  Oligonucleotide for detection of SNP TSC0019137
tatattcgggaaa

SEQ ID NO: 74504 - DNA, 13 bp, Artificial Sequence
  Oligonucleotide for detection of SNP TSC0019137
tttcccgaatata

SEQ ID NO: 74505 - DNA, 13 bp, Artificial Sequence
  Oligonucleotide for detection of SNP TSC0019138
atagatatatagg

SEQ ID NO: 74506 - DNA, 13 bp, Artificial Sequence
  Oligonucleotide for detection of SNP TSC0019138
cctatatatctat

SEQ ID NO: 74507 - DNA, 13 bp, Artificial Sequence
  Oligonucleotide for detection of SNP TSC0019138
atagatttatagg

SEQ ID NO: 74508 - DNA, 13 bp, Artificial Sequence
  Oligonucleotide for detection of SNP TSC0019138
cctataaatctat

SEQ ID NO: 74509 - DNA, 13 bp, Artificial Sequence
  Oligonucleotide for detection of SNP TSC0019138
tttgtgtgtttgt

SEQ ID NO: 74510 - DNA, 13 bp, Artificial Sequence
  Oligonucleotide for detection of SNP TSC0019138
acaaacacacaaa

SEQ ID NO: 74511 - DNA, 13 bp, Artificial Sequence
  Oligonucleotide for detection of SNP TSC0019138
tttgtgggtttgt

SEQ ID NO: 74512 - DNA, 13 bp, Artificial Sequence
  Oligonucleotide for detection of SNP TSC0019138
acaaacccacaaa

SEQ ID NO: 74513 - DNA, 13 bp, Artificial Sequence
  Oligonucleotide for detection of SNP TSC0019139
gtaagaaagaaat

SEQ ID NO: 74514 - DNA, 13 bp, Artificial Sequence
  Oligonucleotide for detection of SNP TSC0019139
atttctttcttac

SEQ ID NO: 74515 - DNA, 13 bp, Artificial Sequence
  Oligonucleotide for detection of SNP TSC0019139
gtaagagagaaat

SEQ ID NO: 74516 - DNA, 13 bp, Artificial Sequence
  Oligonucleotide for detection of SNP TSC0019139
atttctctcttac

SEQ ID NO: 74517 - DNA, 13 bp, Artificial Sequence
  Oligonucleotide for detection of SNP TSC0019140
gttaggtgtggag

SEQ ID NO: 74518 - DNA, 13 bp, Artificial Sequence
  Oligonucleotide for detection of SNP TSC0019140
ctccacacctaac

SEQ ID NO: 74519 - DNA, 13 bp, Artificial Sequence
  Oligonucleotide for detection of SNP TSC0019140
gttaggcgtggag

SEQ ID NO: 74520 - DNA, 13 bp, Artificial Sequence
  Oligonucleotide for detection of SNP TSC0019140
ctccacgcctaac

SEQ ID NO: 74521 - DNA, 13 bp, Artificial Sequence
  Oligonucleotide for detection of SNP TSC0019141
tttttagcgtgtt

SEQ ID NO: 74522 - DNA, 13 bp, Artificial Sequence
  Oligonucleotide for detection of SNP TSC0019141
aacacgctaaaaa

SEQ ID NO: 74523 - DNA, 13 bp, Artificial Sequence
  Oligonucleotide for detection of SNP TSC0019141
tttttaacgtgtt

SEQ ID NO: 74524 - DNA, 13 bp, Artificial Sequence
  Oligonucleotide for detection of SNP TSC0019141
aacacgttaaaaa

SEQ ID NO: 74525 - DNA, 13 bp, Artificial Sequence
  Oligonucleotide for detection of SNP TSC0019144
gggtagtggagga

SEQ ID NO: 74526 - DNA, 13 bp, Artificial Sequence
  Oligonucleotide for detection of SNP TSC0019144
tcctccactaccc

SEQ ID NO: 74527 - DNA, 13 bp, Artificial Sequence
  Oligonucleotide for detection of SNP TSC0019144
gggtagcggagga

SEQ ID NO: 74528 - DNA, 13 bp, Artificial Sequence
  Oligonucleotide for detection of SNP TSC0019144
tcctccgctaccc

SEQ ID NO: 74529 - DNA, 13 bp, Artificial Sequence
  Oligonucleotide for detection of SNP TSC0019145
taagttgttatag

SEQ ID NO: 74530 - DNA, 13 bp, Artificial Sequence
  Oligonucleotide for detection of SNP TSC0019145
ctataacaactta

SEQ ID NO: 74531 - DNA, 13 bp, Artificial Sequence
  Oligonucleotide for detection of SNP TSC0019145
taagttattatag

SEQ ID NO: 74532 - DNA, 13 bp, Artificial Sequence
  Oligonucleotide for detection of SNP TSC0019145
ctataataactta

SEQ ID NO: 74533 - DNA, 13 bp, Artificial Sequence
  Oligonucleotide for detection of SNP TSC0019146
tgaagggtaaaty

SEQ ID NO: 74534 - DNA, 13 bp, Artificial Sequence
  Oligonucleotide for detection of SNP TSC0019146
ratttacccttca

SEQ ID NO: 74535 - DNA, 13 bp, Artificial Sequence
  Oligonucleotide for detection of SNP TSC0019146
tgaaggttaaaty

SEQ ID NO: 74536 - DNA, 13 bp, Artificial Sequence
  Oligonucleotide for detection of SNP TSC0019146
ratttaaccttca

SEQ ID NO: 74537 - DNA, 13 bp, Artificial Sequence
  Oligonucleotide for detection of SNP TSC0019146
ggtttgtttttta

SEQ ID NO: 74538 - DNA, 13 bp, Artificial Sequence
  Oligonucleotide for detection of SNP TSC0019146
taaaaaacaaacc

SEQ ID NO: 74539 - DNA, 13 bp, Artificial Sequence
  Oligonucleotide for detection of SNP TSC0019146
ggtttgattttta

SEQ ID NO: 74540 - DNA, 13 bp, Artificial Sequence
  Oligonucleotide for detection of SNP TSC0019146
taaaaatcaaacc

SEQ ID NO: 74541 - DNA, 13 bp, Artificial Sequence
  Oligonucleotide for detection of SNP TSC0019147
tttaggtggttta

SEQ ID NO: 74542 - DNA, 13 bp, Artificial Sequence
  Oligonucleotide for detection of SNP TSC0019147
taaaccacctaaa

SEQ ID NO: 74543 - DNA, 13 bp, Artificial Sequence
  Oligonucleotide for detection of SNP TSC0019147
tttaggcggttta

SEQ ID NO: 74544 - DNA, 13 bp, Artificial Sequence
  Oligonucleotide for detection of SNP TSC0019147
taaaccgcctaaa

SEQ ID NO: 74545 - DNA, 13 bp, Artificial Sequence
  Oligonucleotide for detection of SNP TSC0019147
tggattgtttaag

SEQ ID NO: 74546 - DNA, 13 bp, Artificial Sequence
  Oligonucleotide for detection of SNP TSC0019147
cttaaacaatcca

SEQ ID NO: 74547 - DNA, 13 bp, Artificial Sequence
  Oligonucleotide for detection of SNP TSC0019147
tggattatttaag

SEQ ID NO: 74548 - DNA, 13 bp, Artificial Sequence
  Oligonucleotide for detection of SNP TSC0019147
cttaaataatcca

SEQ ID NO: 74549 - DNA, 13 bp, Artificial Sequence
  Oligonucleotide for detection of SNP TSC0019147
tggatcgtttaag

SEQ ID NO: 74550 - DNA, 13 bp, Artificial Sequence
  Oligonucleotide for detection of SNP TSC0019147
cttaaacgatcca

SEQ ID NO: 74551 - DNA, 13 bp, Artificial Sequence
  Oligonucleotide for detection of SNP TSC0019148
gaaaagagattty

SEQ ID NO: 74552 - DNA, 13 bp, Artificial Sequence
  Oligonucleotide for detection of SNP TSC0019148
raaatctcttttc

SEQ ID NO: 74553 - DNA, 13 bp, Artificial Sequence
  Oligonucleotide for detection of SNP TSC0019148
gaaaagggattty

SEQ ID NO: 74554 - DNA, 13 bp, Artificial Sequence
  Oligonucleotide for detection of SNP TSC0019148
raaatcccttttc

SEQ ID NO: 74555 - DNA, 13 bp, Artificial Sequence
  Oligonucleotide for detection of SNP TSC0019153
agggaaagaggag

SEQ ID NO: 74556 - DNA, 13 bp, Artificial Sequence
  Oligonucleotide for detection of SNP TSC0019153
ctcctctttccct

SEQ ID NO: 74557 - DNA, 13 bp, Artificial Sequence
  Oligonucleotide for detection of SNP TSC0019153
agggaaggaggag

SEQ ID NO: 74558 - DNA, 13 bp, Artificial Sequence
  Oligonucleotide for detection of SNP TSC0019153
ctcctccttccct

SEQ ID NO: 74559 - DNA, 13 bp, Artificial Sequence
  Oligonucleotide for detection of SNP TSC0019154
ttttatatggtay

SEQ ID NO: 74560 - DNA, 13 bp, Artificial Sequence
  Oligonucleotide for detection of SNP TSC0019154
rtaccatataaaa

SEQ ID NO: 74561 - DNA, 13 bp, Artificial Sequence
  Oligonucleotide for detection of SNP TSC0019154
ttttatgtggtay

SEQ ID NO: 74562 - DNA, 13 bp, Artificial Sequence
  Oligonucleotide for detection of SNP TSC0019154
rtaccacataaaa

SEQ ID NO: 74563 - DNA, 13 bp, Artificial Sequence
  Oligonucleotide for detection of SNP TSC0019154
ttttacgtggtay

SEQ ID NO: 74564 - DNA, 13 bp, Artificial Sequence
  Oligonucleotide for detection of SNP TSC0019154
rtaccacgtaaaa

SEQ ID NO: 74565 - DNA, 13 bp, Artificial Sequence
  Oligonucleotide for detection of SNP TSC0019154
gtattatgtgggg

SEQ ID NO: 74566 - DNA, 13 bp, Artificial Sequence
  Oligonucleotide for detection of SNP TSC0019154
ccccacataatac

SEQ ID NO: 74567 - DNA, 13 bp, Artificial Sequence
  Oligonucleotide for detection of SNP TSC0019154
gtattacgtgggg

SEQ ID NO: 74568 - DNA, 13 bp, Artificial Sequence
  Oligonucleotide for detection of SNP TSC0019154
ccccacgtaatac

SEQ ID NO: 74569 - DNA, 13 bp, Artificial Sequence
  Oligonucleotide for detection of SNP TSC0019155
gtgtgtttattay

SEQ ID NO: 74570 - DNA, 13 bp, Artificial Sequence
  Oligonucleotide for detection of SNP TSC0019155
rtaataaacacac

SEQ ID NO: 74571 - DNA, 13 bp, Artificial Sequence
  Oligonucleotide for detection of SNP TSC0019155
gtgtgtgtattay

SEQ ID NO: 74572 - DNA, 13 bp, Artificial Sequence
  Oligonucleotide for detection of SNP TSC0019155
rtaatacacacac

SEQ ID NO: 74573 - DNA, 13 bp, Artificial Sequence
  Oligonucleotide for detection of SNP TSC0019155
gtagtagatatay

SEQ ID NO: 74574 - DNA, 13 bp, Artificial Sequence
  Oligonucleotide for detection of SNP TSC0019155
rtatatctactac

SEQ ID NO: 74575 - DNA, 13 bp, Artificial Sequence
  Oligonucleotide for detection of SNP TSC0019155
gtagtatatatay

SEQ ID NO: 74576 - DNA, 13 bp, Artificial Sequence
  Oligonucleotide for detection of SNP TSC0019155
rtatatatactac

SEQ ID NO: 74577 - DNA, 13 bp, Artificial Sequence
  Oligonucleotide for detection of SNP TSC0019156
gtttgaattattt

SEQ ID NO: 74578 - DNA, 13 bp, Artificial Sequence
  Oligonucleotide for detection of SNP TSC0019156
aaataattcaaac

SEQ ID NO: 74579 - DNA, 13 bp, Artificial Sequence
  Oligonucleotide for detection of SNP TSC0019156
gtttgagttattt

SEQ ID NO: 74580 - DNA, 13 bp, Artificial Sequence
  Oligonucleotide for detection of SNP TSC0019156
aaataactcaaac

SEQ ID NO: 74581 - DNA, 13 bp, Artificial Sequence
  Oligonucleotide for detection of SNP TSC0019157
gatttataaatta

SEQ ID NO: 74582 - DNA, 13 bp, Artificial Sequence
  Oligonucleotide for detection of SNP TSC0019157
taatttataaatc

SEQ ID NO: 74583 - DNA, 13 bp, Artificial Sequence
  Oligonucleotide for detection of SNP TSC0019157
gatttagaaatta

SEQ ID NO: 74584 - DNA, 13 bp, Artificial Sequence
  Oligonucleotide for detection of SNP TSC0019157
taatttctaaatc

SEQ ID NO: 74585 - DNA, 13 bp, Artificial Sequence
  Oligonucleotide for detection of SNP TSC0019157
tgatttgtaggty

SEQ ID NO: 74586 - DNA, 13 bp, Artificial Sequence
  Oligonucleotide for detection of SNP TSC0019157
racctacaaatca

SEQ ID NO: 74587 - DNA, 13 bp, Artificial Sequence
  Oligonucleotide for detection of SNP TSC0019157
tgatttttaggty

SEQ ID NO: 74588 - DNA, 13 bp, Artificial Sequence
  Oligonucleotide for detection of SNP TSC0019157
racctaaaaatca

SEQ ID NO: 74589 - DNA, 13 bp, Artificial Sequence
  Oligonucleotide for detection of SNP TSC0019158
tttatgagattat

SEQ ID NO: 74590 - DNA, 13 bp, Artificial Sequence
  Oligonucleotide for detection of SNP TSC0019158
ataatctcataaa

SEQ ID NO: 74591 - DNA, 13 bp, Artificial Sequence
  Oligonucleotide for detection of SNP TSC0019158
tttatgtgattat

SEQ ID NO: 74592 - DNA, 13 bp, Artificial Sequence
  Oligonucleotide for detection of SNP TSC0019158
ataatcacataaa

SEQ ID NO: 74593 - DNA, 13 bp, Artificial Sequence
  Oligonucleotide for detection of SNP TSC0019158
atgattttatggg

SEQ ID NO: 74594 - DNA, 13 bp, Artificial Sequence
  Oligonucleotide for detection of SNP TSC0019158
cccataaaatcat

SEQ ID NO: 74595 - DNA, 13 bp, Artificial Sequence
  Oligonucleotide for detection of SNP TSC0019158
atgattatatggg

SEQ ID NO: 74596 - DNA, 13 bp, Artificial Sequence
  Oligonucleotide for detection of SNP TSC0019158
cccatataatcat

SEQ ID NO: 74597 - DNA, 13 bp, Artificial Sequence
  Oligonucleotide for detection of SNP TSC0019163
aggtttagtaaat

SEQ ID NO: 74598 - DNA, 13 bp, Artificial Sequence
  Oligonucleotide for detection of SNP TSC0019163
atttactaaacct

SEQ ID NO: 74599 - DNA, 13 bp, Artificial Sequence
  Oligonucleotide for detection of SNP TSC0019163
aggtttggtaaat

SEQ ID NO: 74600 - DNA, 13 bp, Artificial Sequence
  Oligonucleotide for detection of SNP TSC0019163
atttaccaaacct

SEQ ID NO: 74601 - DNA, 13 bp, Artificial Sequence
  Oligonucleotide for detection of SNP TSC0019163
aggttcggtaaat

SEQ ID NO: 74602 - DNA, 13 bp, Artificial Sequence
  Oligonucleotide for detection of SNP TSC0019163
atttaccgaacct

SEQ ID NO: 74603 - DNA, 13 bp, Artificial Sequence
  Oligonucleotide for detection of SNP TSC0019163
atttgttgagttt

SEQ ID NO: 74604 - DNA, 13 bp, Artificial Sequence
  Oligonucleotide for detection of SNP TSC0019163
aaactcaacaaat

SEQ ID NO: 74605 - DNA, 13 bp, Artificial Sequence
  Oligonucleotide for detection of SNP TSC0019163
atttgtcgagttt

SEQ ID NO: 74606 - DNA, 13 bp, Artificial Sequence
  Oligonucleotide for detection of SNP TSC0019163
aaactcgacaaat

SEQ ID NO: 74607 - DNA, 13 bp, Artificial Sequence
  Oligonucleotide for detection of SNP TSC0019174
ttagtaagaaaty

SEQ ID NO: 74608 - DNA, 13 bp, Artificial Sequence
  Oligonucleotide for detection of SNP TSC0019174
ratttcttactaa

SEQ ID NO: 74609 - DNA, 13 bp, Artificial Sequence
  Oligonucleotide for detection of SNP TSC0019174
ttagtaggaaaty

SEQ ID NO: 74610 - DNA, 13 bp, Artificial Sequence
  Oligonucleotide for detection of SNP TSC0019174
ratttcctactaa

SEQ ID NO: 74611 - DNA, 13 bp, Artificial Sequence
  Oligonucleotide for detection of SNP TSC0019175
gttgattgaggty

SEQ ID NO: 74612 - DNA, 13 bp, Artificial Sequence
  Oligonucleotide for detection of SNP TSC0019175
racctcaatcaac

SEQ ID NO: 74613 - DNA, 13 bp, Artificial Sequence
  Oligonucleotide for detection of SNP TSC0019175
gttgatcgaggty

SEQ ID NO: 74614 - DNA, 13 bp, Artificial Sequence
  Oligonucleotide for detection of SNP TSC0019175
racctcgatcaac

SEQ ID NO: 74615 - DNA, 13 bp, Artificial Sequence
  Oligonucleotide for detection of SNP TSC0019175
ggttttgattagy

SEQ ID NO: 74616 - DNA, 13 bp, Artificial Sequence
  Oligonucleotide for detection of SNP TSC0019175
rctaatcaaaacc

SEQ ID NO: 74617 - DNA, 13 bp, Artificial Sequence
  Oligonucleotide for detection of SNP TSC0019175
ggttttaattagy

SEQ ID NO: 74618 - DNA, 13 bp, Artificial Sequence
  Oligonucleotide for detection of SNP TSC0019175
rctaattaaaacc

SEQ ID NO: 74619 - DNA, 13 bp, Artificial Sequence
  Oligonucleotide for detection of SNP TSC0019175
ggtttcgattagy

SEQ ID NO: 74620 - DNA, 13 bp, Artificial Sequence
  Oligonucleotide for detection of SNP TSC0019175
rctaatcgaaacc

SEQ ID NO: 74621 - DNA, 13 bp, Artificial Sequence
  Oligonucleotide for detection of SNP TSC0019176
gtggtatataagg

SEQ ID NO: 74622 - DNA, 13 bp, Artificial Sequence
  Oligonucleotide for detection of SNP TSC0019176
ccttatataccac

SEQ ID NO: 74623 - DNA, 13 bp, Artificial Sequence
  Oligonucleotide for detection of SNP TSC0019176
gtggtagataagg

SEQ ID NO: 74624 - DNA, 13 bp, Artificial Sequence
  Oligonucleotide for detection of SNP TSC0019176
ccttatctaccac

SEQ ID NO: 74625 - DNA, 13 bp, Artificial Sequence
  Oligonucleotide for detection of SNP TSC0019176
gcggtatataagg

SEQ ID NO: 74626 - DNA, 13 bp, Artificial Sequence
  Oligonucleotide for detection of SNP TSC0019176
ccttatataccgc

SEQ ID NO: 74627 - DNA, 13 bp, Artificial Sequence
  Oligonucleotide for detection of SNP TSC0019176
gcggtagataagg

SEQ ID NO: 74628 - DNA, 13 bp, Artificial Sequence
  Oligonucleotide for detection of SNP TSC0019176
ccttatctaccgc

SEQ ID NO: 74629 - DNA, 13 bp, Artificial Sequence
  Oligonucleotide for detection of SNP TSC0019176
ttttgtgtgtcgy

SEQ ID NO: 74630 - DNA, 13 bp, Artificial Sequence
  Oligonucleotide for detection of SNP TSC0019176
rcgacacacaaaa

SEQ ID NO: 74631 - DNA, 13 bp, Artificial Sequence
  Oligonucleotide for detection of SNP TSC0019176
ttttgtttgtcgy

SEQ ID NO: 74632 - DNA, 13 bp, Artificial Sequence
  Oligonucleotide for detection of SNP TSC0019176
rcgacaaacaaaa

SEQ ID NO: 74633 - DNA, 13 bp, Artificial Sequence
  Oligonucleotide for detection of SNP TSC0019177
tagattataaaay

SEQ ID NO: 74634 - DNA, 13 bp, Artificial Sequence
  Oligonucleotide for detection of SNP TSC0019177
rttttataatcta

SEQ ID NO: 74635 - DNA, 13 bp, Artificial Sequence
  Oligonucleotide for detection of SNP TSC0019177
tagattttaaaay

SEQ ID NO: 74636 - DNA, 13 bp, Artificial Sequence
  Oligonucleotide for detection of SNP TSC0019177
rttttaaaatcta

SEQ ID NO: 74637 - DNA, 13 bp, Artificial Sequence
  Oligonucleotide for detection of SNP TSC0019177
gttttatagtttg

SEQ ID NO: 74638 - DNA, 13 bp, Artificial Sequence
  Oligonucleotide for detection of SNP TSC0019177
caaactataaaac

SEQ ID NO: 74639 - DNA, 13 bp, Artificial Sequence
  Oligonucleotide for detection of SNP TSC0019177
gttttagagtttg

SEQ ID NO: 74640 - DNA, 13 bp, Artificial Sequence
  Oligonucleotide for detection of SNP TSC0019177
caaactctaaaac

SEQ ID NO: 74641 - DNA, 13 bp, Artificial Sequence
  Oligonucleotide for detection of SNP TSC0019178
aaaaaagtttttt

SEQ ID NO: 74642 - DNA, 13 bp, Artificial Sequence
  Oligonucleotide for detection of SNP TSC0019178
aaaaaactttttt

SEQ ID NO: 74643 - DNA, 13 bp, Artificial Sequence
  Oligonucleotide for detection of SNP TSC0019179
tatgtgattttga

SEQ ID NO: 74644 - DNA, 13 bp, Artificial Sequence
  Oligonucleotide for detection of SNP TSC0019179
tcaaaatcacata

SEQ ID NO: 74645 - DNA, 13 bp, Artificial Sequence
  Oligonucleotide for detection of SNP TSC0019179
tatgtgtttttga

SEQ ID NO: 74646 - DNA, 13 bp, Artificial Sequence
  Oligonucleotide for detection of SNP TSC0019179
tcaaaaacacata

SEQ ID NO: 74647 - DNA, 13 bp, Artificial Sequence
  Oligonucleotide for detection of SNP TSC0019179
ttaaaattatatg

SEQ ID NO: 74648 - DNA, 13 bp, Artificial Sequence
  Oligonucleotide for detection of SNP TSC0019179
catataattttaa

SEQ ID NO: 74649 - DNA, 13 bp, Artificial Sequence
  Oligonucleotide for detection of SNP TSC0019179
ttaaaaatatatg

SEQ ID NO: 74650 - DNA, 13 bp, Artificial Sequence
  Oligonucleotide for detection of SNP TSC0019179
catatatttttaa

SEQ ID NO: 74651 - DNA, 13 bp, Artificial Sequence
  Oligonucleotide for detection of SNP TSC0019180
ttagggatagggy

SEQ ID NO: 74652 - DNA, 13 bp, Artificial Sequence
  Oligonucleotide for detection of SNP TSC0019180
rccctatccctaa

SEQ ID NO: 74653 - DNA, 13 bp, Artificial Sequence
  Oligonucleotide for detection of SNP TSC0019180
ttaggggtagggy

SEQ ID NO: 74654 - DNA, 13 bp, Artificial Sequence
  Oligonucleotide for detection of SNP TSC0019180
rccctacccctaa

SEQ ID NO: 74655 - DNA, 13 bp, Artificial Sequence
  Oligonucleotide for detection of SNP TSC0019181
aagtataatagaa

SEQ ID NO: 74656 - DNA, 13 bp, Artificial Sequence
  Oligonucleotide for detection of SNP TSC0019181
ttctattatactt

SEQ ID NO: 74657 - DNA, 13 bp, Artificial Sequence
  Oligonucleotide for detection of SNP TSC0019181
aagtattatagaa

SEQ ID NO: 74658 - DNA, 13 bp, Artificial Sequence
  Oligonucleotide for detection of SNP TSC0019181
ttctataatactt

SEQ ID NO: 74659 - DNA, 13 bp, Artificial Sequence
  Oligonucleotide for detection of SNP TSC0019181
ttttgttatgttt

SEQ ID NO: 74660 - DNA, 13 bp, Artificial Sequence
  Oligonucleotide for detection of SNP TSC0019181
aaacataacaaaa

SEQ ID NO: 74661 - DNA, 13 bp, Artificial Sequence
  Oligonucleotide for detection of SNP TSC0019181
ttttgtgatgttt

SEQ ID NO: 74662 - DNA, 13 bp, Artificial Sequence
  Oligonucleotide for detection of SNP TSC0019181
aaacatcacaaaa

SEQ ID NO: 74663 - DNA, 13 bp, Artificial Sequence
  Oligonucleotide for detection of SNP TSC0019182
tattgtgtttttt

SEQ ID NO: 74664 - DNA, 13 bp, Artificial Sequence
  Oligonucleotide for detection of SNP TSC0019182
aaaaaacacaata

SEQ ID NO: 74665 - DNA, 13 bp, Artificial Sequence
  Oligonucleotide for detection of SNP TSC0019182
tattgtatttttt

SEQ ID NO: 74666 - DNA, 13 bp, Artificial Sequence
  Oligonucleotide for detection of SNP TSC0019182
aaaaaatacaata

SEQ ID NO: 74667 - DNA, 13 bp, Artificial Sequence
  Oligonucleotide for detection of SNP TSC0019184
attgttatgtttg

SEQ ID NO: 74668 - DNA, 13 bp, Artificial Sequence
  Oligonucleotide for detection of SNP TSC0019184
caaacataacaat

SEQ ID NO: 74669 - DNA, 13 bp, Artificial Sequence
  Oligonucleotide for detection of SNP TSC0019184
attgttttgtttg

SEQ ID NO: 74670 - DNA, 13 bp, Artificial Sequence
  Oligonucleotide for detection of SNP TSC0019184
caaacaaaacaat

SEQ ID NO: 74671 - DNA, 13 bp, Artificial Sequence
  Oligonucleotide for detection of SNP TSC0019184
taggtatggtagt

SEQ ID NO: 74672 - DNA, 13 bp, Artificial Sequence
  Oligonucleotide for detection of SNP TSC0019184
actaccataccta

SEQ ID NO: 74673 - DNA, 13 bp, Artificial Sequence
  Oligonucleotide for detection of SNP TSC0019184
taggtagggtagt

SEQ ID NO: 74674 - DNA, 13 bp, Artificial Sequence
  Oligonucleotide for detection of SNP TSC0019184
actaccctaccta

SEQ ID NO: 74675 - DNA, 13 bp, Artificial Sequence
  Oligonucleotide for detection of SNP TSC0019187
tatattatttata

SEQ ID NO: 74676 - DNA, 13 bp, Artificial Sequence
  Oligonucleotide for detection of SNP TSC0019187
tataaataatata

SEQ ID NO: 74677 - DNA, 13 bp, Artificial Sequence
  Oligonucleotide for detection of SNP TSC0019187
tatattttttata

SEQ ID NO: 74678 - DNA, 13 bp, Artificial Sequence
  Oligonucleotide for detection of SNP TSC0019187
tataaaaaatata

SEQ ID NO: 74679 - DNA, 13 bp, Artificial Sequence
  Oligonucleotide for detection of SNP TSC0019187
tgtgggtaatgtg

SEQ ID NO: 74680 - DNA, 13 bp, Artificial Sequence
  Oligonucleotide for detection of SNP TSC0019187
cacattacccaca

SEQ ID NO: 74681 - DNA, 13 bp, Artificial Sequence
  Oligonucleotide for detection of SNP TSC0019187
tgtggggaatgtg

SEQ ID NO: 74682 - DNA, 13 bp, Artificial Sequence
  Oligonucleotide for detection of SNP TSC0019187
cacattccccaca

SEQ ID NO: 74683 - DNA, 13 bp, Artificial Sequence
  Oligonucleotide for detection of SNP TSC0019191
aggtttttataty

SEQ ID NO: 74684 - DNA, 13 bp, Artificial Sequence
  Oligonucleotide for detection of SNP TSC0019191
ratataaaaacct

SEQ ID NO: 74685 - DNA, 13 bp, Artificial Sequence
  Oligonucleotide for detection of SNP TSC0019191
aggtttgtataty

SEQ ID NO: 74686 - DNA, 13 bp, Artificial Sequence
  Oligonucleotide for detection of SNP TSC0019191
ratatacaaacct

SEQ ID NO: 74687 - DNA, 13 bp, Artificial Sequence
  Oligonucleotide for detection of SNP TSC0019191
ggtgtggaggttt

SEQ ID NO: 74688 - DNA, 13 bp, Artificial Sequence
  Oligonucleotide for detection of SNP TSC0019191
aaacctccacacc

SEQ ID NO: 74689 - DNA, 13 bp, Artificial Sequence
  Oligonucleotide for detection of SNP TSC0019191
ggtgtgtaggttt

SEQ ID NO: 74690 - DNA, 13 bp, Artificial Sequence
  Oligonucleotide for detection of SNP TSC0019191
aaacctacacacc

SEQ ID NO: 74691 - DNA, 13 bp, Artificial Sequence
  Oligonucleotide for detection of SNP TSC0019192
tgtttagaggggy

SEQ ID NO: 74692 - DNA, 13 bp, Artificial Sequence
  Oligonucleotide for detection of SNP TSC0019192
rcccctctaaaca

SEQ ID NO: 74693 - DNA, 13 bp, Artificial Sequence
  Oligonucleotide for detection of SNP TSC0019192
tgtttaaaggggy

SEQ ID NO: 74694 - DNA, 13 bp, Artificial Sequence
  Oligonucleotide for detection of SNP TSC0019192
rcccctttaaaca

SEQ ID NO: 74695 - DNA, 13 bp, Artificial Sequence
  Oligonucleotide for detection of SNP TSC0019194
atttttgtttatt

SEQ ID NO: 74696 - DNA, 13 bp, Artificial Sequence
  Oligonucleotide for detection of SNP TSC0019194
aataaacaaaaat

SEQ ID NO: 74697 - DNA, 13 bp, Artificial Sequence
  Oligonucleotide for detection of SNP TSC0019194
atttttttttatt

SEQ ID NO: 74698 - DNA, 13 bp, Artificial Sequence
  Oligonucleotide for detection of SNP TSC0019194
aataaaaaaaaat

SEQ ID NO: 74699 - DNA, 13 bp, Artificial Sequence
  Oligonucleotide for detection of SNP TSC0019194
attttcgtttatt

SEQ ID NO: 74700 - DNA, 13 bp, Artificial Sequence
  Oligonucleotide for detection of SNP TSC0019194
aataaacgaaaat

SEQ ID NO: 74701 - DNA, 13 bp, Artificial Sequence
  Oligonucleotide for detection of SNP TSC0019194
agtgggtggaggt

SEQ ID NO: 74702 - DNA, 13 bp, Artificial Sequence
  Oligonucleotide for detection of SNP TSC0019194
acctccacccact

SEQ ID NO: 74703 - DNA, 13 bp, Artificial Sequence
  Oligonucleotide for detection of SNP TSC0019194
agtgggaggaggt

SEQ ID NO: 74704 - DNA, 13 bp, Artificial Sequence
  Oligonucleotide for detection of SNP TSC0019194
acctcctcccact

SEQ ID NO: 74705 - DNA, 13 bp, Artificial Sequence
  Oligonucleotide for detection of SNP TSC0019194
agtgggcggaggt

SEQ ID NO: 74706 - DNA, 13 bp, Artificial Sequence
  Oligonucleotide for detection of SNP TSC0019194
acctccgcccact

SEQ ID NO: 74707 - DNA, 13 bp, Artificial Sequence
  Oligonucleotide for detection of SNP TSC0019195
gttttggggatgg

SEQ ID NO: 74708 - DNA, 13 bp, Artificial Sequence
  Oligonucleotide for detection of SNP TSC0019195
ccatccccaaaac

SEQ ID NO: 74709 - DNA, 13 bp, Artificial Sequence
  Oligonucleotide for detection of SNP TSC0019195
gttttgtggatgg

SEQ ID NO: 74710 - DNA, 13 bp, Artificial Sequence
  Oligonucleotide for detection of SNP TSC0019195
ccatccacaaaac

SEQ ID NO: 74711 - DNA, 13 bp, Artificial Sequence
  Oligonucleotide for detection of SNP TSC0019195
ttatttttagaay

SEQ ID NO: 74712 - DNA, 13 bp, Artificial Sequence
  Oligonucleotide for detection of SNP TSC0019195
rttctaaaaataa

SEQ ID NO: 74713 - DNA, 13 bp, Artificial Sequence
  Oligonucleotide for detection of SNP TSC0019195
ttatttatagaay

SEQ ID NO: 74714 - DNA, 13 bp, Artificial Sequence
  Oligonucleotide for detection of SNP TSC0019195
rttctataaataa

SEQ ID NO: 74715 - DNA, 13 bp, Artificial Sequence
  Oligonucleotide for detection of SNP TSC0019196
tgttatatgttat

SEQ ID NO: 74716 - DNA, 13 bp, Artificial Sequence
  Oligonucleotide for detection of SNP TSC0019196
ataacatataaca

SEQ ID NO: 74717 - DNA, 13 bp, Artificial Sequence
  Oligonucleotide for detection of SNP TSC0019196
tgttatgtgttat

SEQ ID NO: 74718 - DNA, 13 bp, Artificial Sequence
  Oligonucleotide for detection of SNP TSC0019196
ataacacataaca

SEQ ID NO: 74719 - DNA, 13 bp, Artificial Sequence
  Oligonucleotide for detection of SNP TSC0019196
tgttacgtgttat

SEQ ID NO: 74720 - DNA, 13 bp, Artificial Sequence
  Oligonucleotide for detection of SNP TSC0019196
ataacacgtaaca

SEQ ID NO: 74721 - DNA, 13 bp, Artificial Sequence
  Oligonucleotide for detection of SNP TSC0019196
ataatatgtggta

SEQ ID NO: 74722 - DNA, 13 bp, Artificial Sequence
  Oligonucleotide for detection of SNP TSC0019196
taccacatattat

SEQ ID NO: 74723 - DNA, 13 bp, Artificial Sequence
  Oligonucleotide for detection of SNP TSC0019196
ataatacgtggta

SEQ ID NO: 74724 - DNA, 13 bp, Artificial Sequence
  Oligonucleotide for detection of SNP TSC0019196
taccacgtattat

SEQ ID NO: 74725 - DNA, 13 bp, Artificial Sequence
  Oligonucleotide for detection of SNP TSC0019197
agtttatgagtag

SEQ ID NO: 74726 - DNA, 13 bp, Artificial Sequence
  Oligonucleotide for detection of SNP TSC0019197
ctactcataaact

SEQ ID NO: 74727 - DNA, 13 bp, Artificial Sequence
  Oligonucleotide for detection of SNP TSC0019197
agtttacgagtag

SEQ ID NO: 74728 - DNA, 13 bp, Artificial Sequence
  Oligonucleotide for detection of SNP TSC0019197
ctactcgtaaact

SEQ ID NO: 74729 - DNA, 13 bp, Artificial Sequence
  Oligonucleotide for detection of SNP TSC0019197
ttgtttgtgggtt

SEQ ID NO: 74730 - DNA, 13 bp, Artificial Sequence
  Oligonucleotide for detection of SNP TSC0019197
aacccacaaacaa

SEQ ID NO: 74731 - DNA, 13 bp, Artificial Sequence
  Oligonucleotide for detection of SNP TSC0019197
ttgtttatgggtt

SEQ ID NO: 74732 - DNA, 13 bp, Artificial Sequence
  Oligonucleotide for detection of SNP TSC0019197
aacccataaacaa

SEQ ID NO: 74733 - DNA, 13 bp, Artificial Sequence
  Oligonucleotide for detection of SNP TSC0019197
ttgttcgtgggtt

SEQ ID NO: 74734 - DNA, 13 bp, Artificial Sequence
  Oligonucleotide for detection of SNP TSC0019197
aacccacgaacaa

SEQ ID NO: 74735 - DNA, 13 bp, Artificial Sequence
  Oligonucleotide for detection of SNP TSC0019198
taatggtgttaty

SEQ ID NO: 74736 - DNA, 13 bp, Artificial Sequence
  Oligonucleotide for detection of SNP TSC0019198
rataacaccatta

SEQ ID NO: 74737 - DNA, 13 bp, Artificial Sequence
  Oligonucleotide for detection of SNP TSC0019198
taatggcgttaty

SEQ ID NO: 74738 - DNA, 13 bp, Artificial Sequence
  Oligonucleotide for detection of SNP TSC0019198
rataacgccatta

SEQ ID NO: 74739 - DNA, 13 bp, Artificial Sequence
  Oligonucleotide for detection of SNP TSC0019198
gatgatgttattg

SEQ ID NO: 74740 - DNA, 13 bp, Artificial Sequence
  Oligonucleotide for detection of SNP TSC0019198
caataacatcatc

SEQ ID NO: 74741 - DNA, 13 bp, Artificial Sequence
  Oligonucleotide for detection of SNP TSC0019198
gatgatattattg

SEQ ID NO: 74742 - DNA, 13 bp, Artificial Sequence
  Oligonucleotide for detection of SNP TSC0019198
caataatatcatc

SEQ ID NO: 74743 - DNA, 13 bp, Artificial Sequence
  Oligonucleotide for detection of SNP TSC0019198
gatgacgttattg

SEQ ID NO: 74744 - DNA, 13 bp, Artificial Sequence
  Oligonucleotide for detection of SNP TSC0019198
caataacgtcatc

SEQ ID NO: 74745 - DNA, 13 bp, Artificial Sequence
  Oligonucleotide for detection of SNP TSC0019199
ttatgtgggttag

SEQ ID NO: 74746 - DNA, 13 bp, Artificial Sequence
  Oligonucleotide for detection of SNP TSC0019199
ctaacccacataa

SEQ ID NO: 74747 - DNA, 13 bp, Artificial Sequence
  Oligonucleotide for detection of SNP TSC0019199
ttatgttggttag

SEQ ID NO: 74748 - DNA, 13 bp, Artificial Sequence
  Oligonucleotide for detection of SNP TSC0019199
ctaaccaacataa

SEQ ID NO: 74749 - DNA, 13 bp, Artificial Sequence
  Oligonucleotide for detection of SNP TSC0019199
ttggtttatatgg

SEQ ID NO: 74750 - DNA, 13 bp, Artificial Sequence
  Oligonucleotide for detection of SNP TSC0019199
ccatataaaccaa

SEQ ID NO: 74751 - DNA, 13 bp, Artificial Sequence
  Oligonucleotide for detection of SNP TSC0019199
ttggttaatatgg

SEQ ID NO: 74752 - DNA, 13 bp, Artificial Sequence
  Oligonucleotide for detection of SNP TSC0019199
ccatattaaccaa

SEQ ID NO: 74753 - DNA, 13 bp, Artificial Sequence
  Oligonucleotide for detection of SNP TSC0019200
taggttaaaaaay

SEQ ID NO: 74754 - DNA, 13 bp, Artificial Sequence
  Oligonucleotide for detection of SNP TSC0019200
rttttttaaccta

SEQ ID NO: 74755 - DNA, 13 bp, Artificial Sequence
  Oligonucleotide for detection of SNP TSC0019200
taggtttaaaaay

SEQ ID NO: 74756 - DNA, 13 bp, Artificial Sequence
  Oligonucleotide for detection of SNP TSC0019200
rtttttaaaccta

SEQ ID NO: 74757 - DNA, 13 bp, Artificial Sequence
  Oligonucleotide for detection of SNP TSC0019200
gttttttaattta

SEQ ID NO: 74758 - DNA, 13 bp, Artificial Sequence
  Oligonucleotide for detection of SNP TSC0019200
taaattaaaaaac

SEQ ID NO: 74759 - DNA, 13 bp, Artificial Sequence
  Oligonucleotide for detection of SNP TSC0019200
gtttttaaattta

SEQ ID NO: 74760 - DNA, 13 bp, Artificial Sequence
  Oligonucleotide for detection of SNP TSC0019200
taaatttaaaaac

SEQ ID NO: 74761 - DNA, 13 bp, Artificial Sequence
  Oligonucleotide for detection of SNP TSC0019201
gtagagaaagtag

SEQ ID NO: 74762 - DNA, 13 bp, Artificial Sequence
  Oligonucleotide for detection of SNP TSC0019201
ctactttctctac

SEQ ID NO: 74763 - DNA, 13 bp, Artificial Sequence
  Oligonucleotide for detection of SNP TSC0019201
gtagagtaagtag

SEQ ID NO: 74764 - DNA, 13 bp, Artificial Sequence
  Oligonucleotide for detection of SNP TSC0019201
ctacttactctac

SEQ ID NO: 74765 - DNA, 13 bp, Artificial Sequence
  Oligonucleotide for detection of SNP TSC0019203
agtatgggattag

SEQ ID NO: 74766 - DNA, 13 bp, Artificial Sequence
  Oligonucleotide for detection of SNP TSC0019203
ctaatcccatact

SEQ ID NO: 74767 - DNA, 13 bp, Artificial Sequence
  Oligonucleotide for detection of SNP TSC0019203
agtatgtgattag

SEQ ID NO: 74768 - DNA, 13 bp, Artificial Sequence
  Oligonucleotide for detection of SNP TSC0019203
ctaatcacatact

SEQ ID NO: 74769 - DNA, 13 bp, Artificial Sequence
  Oligonucleotide for detection of SNP TSC0019203
ttggttttatgtt

SEQ ID NO: 74770 - DNA, 13 bp, Artificial Sequence
  Oligonucleotide for detection of SNP TSC0019203
aacataaaaccaa

SEQ ID NO: 74771 - DNA, 13 bp, Artificial Sequence
  Oligonucleotide for detection of SNP TSC0019203
ttggttatatgtt

SEQ ID NO: 74772 - DNA, 13 bp, Artificial Sequence
  Oligonucleotide for detection of SNP TSC0019203
aacatataaccaa

SEQ ID NO: 74773 - DNA, 13 bp, Artificial Sequence
  Oligonucleotide for detection of SNP TSC0019205
gtgtggagtttaa

SEQ ID NO: 74774 - DNA, 13 bp, Artificial Sequence
  Oligonucleotide for detection of SNP TSC0019205
ttaaactccacac

SEQ ID NO: 74775 - DNA, 13 bp, Artificial Sequence
  Oligonucleotide for detection of SNP TSC0019205
gtgtggggtttaa

SEQ ID NO: 74776 - DNA, 13 bp, Artificial Sequence
  Oligonucleotide for detection of SNP TSC0019205
ttaaaccccacac

SEQ ID NO: 74777 - DNA, 13 bp, Artificial Sequence
  Oligonucleotide for detection of SNP TSC0019205
gtgcggagtttaa

SEQ ID NO: 74778 - DNA, 13 bp, Artificial Sequence
  Oligonucleotide for detection of SNP TSC0019205
ttaaactccgcac

SEQ ID NO: 74779 - DNA, 13 bp, Artificial Sequence
  Oligonucleotide for detection of SNP TSC0019205
gtgcggggtttaa

SEQ ID NO: 74780 - DNA, 13 bp, Artificial Sequence
  Oligonucleotide for detection of SNP TSC0019205
ttaaaccccgcac

SEQ ID NO: 74781 - DNA, 13 bp, Artificial Sequence
  Oligonucleotide for detection of SNP TSC0019206
tagaaggtttgag

SEQ ID NO: 74782 - DNA, 13 bp, Artificial Sequence
  Oligonucleotide for detection of SNP TSC0019206
ctcaaaccttcta

SEQ ID NO: 74783 - DNA, 13 bp, Artificial Sequence
  Oligonucleotide for detection of SNP TSC0019206
tagaagatttgag

SEQ ID NO: 74784 - DNA, 13 bp, Artificial Sequence
  Oligonucleotide for detection of SNP TSC0019206
ctcaaatcttcta

SEQ ID NO: 74785 - DNA, 13 bp, Artificial Sequence
  Oligonucleotide for detection of SNP TSC0019208
tttgtaagagata

SEQ ID NO: 74786 - DNA, 13 bp, Artificial Sequence
  Oligonucleotide for detection of SNP TSC0019208
tatctcttacaaa

SEQ ID NO: 74787 - DNA, 13 bp, Artificial Sequence
  Oligonucleotide for detection of SNP TSC0019208
tttgtaggagata

SEQ ID NO: 74788 - DNA, 13 bp, Artificial Sequence
  Oligonucleotide for detection of SNP TSC0019208
tatctcctacaaa

SEQ ID NO: 74789 - DNA, 13 bp, Artificial Sequence
  Oligonucleotide for detection of SNP TSC0019209
attaattgggatg

SEQ ID NO: 74790 - DNA, 13 bp, Artificial Sequence
  Oligonucleotide for detection of SNP TSC0019209
catcccaattaat

SEQ ID NO: 74791 - DNA, 13 bp, Artificial Sequence
  Oligonucleotide for detection of SNP TSC0019209
attaatcgggatg

SEQ ID NO: 74792 - DNA, 13 bp, Artificial Sequence
  Oligonucleotide for detection of SNP TSC0019209
catcccgattaat

SEQ ID NO: 74793 - DNA, 13 bp, Artificial Sequence
  Oligonucleotide for detection of SNP TSC0019209
tattttggttgat

SEQ ID NO: 74794 - DNA, 13 bp, Artificial Sequence
  Oligonucleotide for detection of SNP TSC0019209
atcaaccaaaata

SEQ ID NO: 74795 - DNA, 13 bp, Artificial Sequence
  Oligonucleotide for detection of SNP TSC0019209
tattttagttgat

SEQ ID NO: 74796 - DNA, 13 bp, Artificial Sequence
  Oligonucleotide for detection of SNP TSC0019209
atcaactaaaata

SEQ ID NO: 74797 - DNA, 13 bp, Artificial Sequence
  Oligonucleotide for detection of SNP TSC0019209
tatttcggttgat

SEQ ID NO: 74798 - DNA, 13 bp, Artificial Sequence
  Oligonucleotide for detection of SNP TSC0019209
atcaaccgaaata

SEQ ID NO: 74799 - DNA, 13 bp, Artificial Sequence
  Oligonucleotide for detection of SNP TSC0019215
ggtttatgtttat

SEQ ID NO: 74800 - DNA, 13 bp, Artificial Sequence
  Oligonucleotide for detection of SNP TSC0019215
ataaacataaacc

SEQ ID NO: 74801 - DNA, 13 bp, Artificial Sequence
  Oligonucleotide for detection of SNP TSC0019215
ggtttacgtttat

SEQ ID NO: 74802 - DNA, 13 bp, Artificial Sequence
  Oligonucleotide for detection of SNP TSC0019215
ataaacgtaaacc

SEQ ID NO: 74803 - DNA, 13 bp, Artificial Sequence
  Oligonucleotide for detection of SNP TSC0019217
tgtatgaattaay

SEQ ID NO: 74804 - DNA, 13 bp, Artificial Sequence
  Oligonucleotide for detection of SNP TSC0019217
rttaattcataca

SEQ ID NO: 74805 - DNA, 13 bp, Artificial Sequence
  Oligonucleotide for detection of SNP TSC0019217
tgtatgtattaay

SEQ ID NO: 74806 - DNA, 13 bp, Artificial Sequence
  Oligonucleotide for detection of SNP TSC0019217
rttaatacataca

SEQ ID NO: 74807 - DNA, 13 bp, Artificial Sequence
  Oligonucleotide for detection of SNP TSC0019217
gttaatttatata

SEQ ID NO: 74808 - DNA, 13 bp, Artificial Sequence
  Oligonucleotide for detection of SNP TSC0019217
tatataaattaac

SEQ ID NO: 74809 - DNA, 13 bp, Artificial Sequence
  Oligonucleotide for detection of SNP TSC0019217
gttaatgtatata

SEQ ID NO: 74810 - DNA, 13 bp, Artificial Sequence
  Oligonucleotide for detection of SNP TSC0019217
tatatacattaac

SEQ ID NO: 74811 - DNA, 13 bp, Artificial Sequence
  Oligonucleotide for detection of SNP TSC0019220
gggttttgggttg

SEQ ID NO: 74812 - DNA, 13 bp, Artificial Sequence
  Oligonucleotide for detection of SNP TSC0019220
caacccaaaaccc

SEQ ID NO: 74813 - DNA, 13 bp, Artificial Sequence
  Oligonucleotide for detection of SNP TSC0019220
gggtttcgggttg

SEQ ID NO: 74814 - DNA, 13 bp, Artificial Sequence
  Oligonucleotide for detection of SNP TSC0019220
caacccgaaaccc

SEQ ID NO: 74815 - DNA, 13 bp, Artificial Sequence
  Oligonucleotide for detection of SNP TSC0019220
taatttgagatty

SEQ ID NO: 74816 - DNA, 13 bp, Artificial Sequence
  Oligonucleotide for detection of SNP TSC0019220
raatctcaaatta

SEQ ID NO: 74817 - DNA, 13 bp, Artificial Sequence
  Oligonucleotide for detection of SNP TSC0019220
taatttaagatty

SEQ ID NO: 74818 - DNA, 13 bp, Artificial Sequence
  Oligonucleotide for detection of SNP TSC0019220
raatcttaaatta

SEQ ID NO: 74819 - DNA, 13 bp, Artificial Sequence
  Oligonucleotide for detection of SNP TSC0019220
taattcgagatty

SEQ ID NO: 74820 - DNA, 13 bp, Artificial Sequence
  Oligonucleotide for detection of SNP TSC0019220
raatctcgaatta

SEQ ID NO: 74821 - DNA, 13 bp, Artificial Sequence
  Oligonucleotide for detection of SNP TSC0019221
agataaatttgty

SEQ ID NO: 74822 - DNA, 13 bp, Artificial Sequence
  Oligonucleotide for detection of SNP TSC0019221
racaaatttatct

SEQ ID NO: 74823 - DNA, 13 bp, Artificial Sequence
  Oligonucleotide for detection of SNP TSC0019221
agataattttgty

SEQ ID NO: 74824 - DNA, 13 bp, Artificial Sequence
  Oligonucleotide for detection of SNP TSC0019221
racaaaattatct

SEQ ID NO: 74825 - DNA, 13 bp, Artificial Sequence
  Oligonucleotide for detection of SNP TSC0019221
agataaattcgty

SEQ ID NO: 74826 - DNA, 13 bp, Artificial Sequence
  Oligonucleotide for detection of SNP TSC0019221
racgaatttatct

SEQ ID NO: 74827 - DNA, 13 bp, Artificial Sequence
  Oligonucleotide for detection of SNP TSC0019221
agataatttcgty

SEQ ID NO: 74828 - DNA, 13 bp, Artificial Sequence
  Oligonucleotide for detection of SNP TSC0019221
racgaaattatct

SEQ ID NO: 74829 - DNA, 13 bp, Artificial Sequence
  Oligonucleotide for detection of SNP TSC0019221
gatggatttgttt

SEQ ID NO: 74830 - DNA, 13 bp, Artificial Sequence
  Oligonucleotide for detection of SNP TSC0019221
aaacaaatccatc

SEQ ID NO: 74831 - DNA, 13 bp, Artificial Sequence
  Oligonucleotide for detection of SNP TSC0019221
gatggaattgttt

SEQ ID NO: 74832 - DNA, 13 bp, Artificial Sequence
  Oligonucleotide for detection of SNP TSC0019221
aaacaattccatc

SEQ ID NO: 74833 - DNA, 13 bp, Artificial Sequence
  Oligonucleotide for detection of SNP TSC0019221
gacggatttgttt

SEQ ID NO: 74834 - DNA, 13 bp, Artificial Sequence
  Oligonucleotide for detection of SNP TSC0019221
aaacaaatccgtc

SEQ ID NO: 74835 - DNA, 13 bp, Artificial Sequence
  Oligonucleotide for detection of SNP TSC0019221
gacggaattgttt

SEQ ID NO: 74836 - DNA, 13 bp, Artificial Sequence
  Oligonucleotide for detection of SNP TSC0019221
aaacaattccgtc

SEQ ID NO: 74837 - DNA, 13 bp, Artificial Sequence
  Oligonucleotide for detection of SNP TSC0019223
gaatttagttggg

SEQ ID NO: 74838 - DNA, 13 bp, Artificial Sequence
  Oligonucleotide for detection of SNP TSC0019223
cccaactaaattc

SEQ ID NO: 74839 - DNA, 13 bp, Artificial Sequence
  Oligonucleotide for detection of SNP TSC0019223
gaatttggttggg

SEQ ID NO: 74840 - DNA, 13 bp, Artificial Sequence
  Oligonucleotide for detection of SNP TSC0019223
cccaaccaaattc

SEQ ID NO: 74841 - DNA, 13 bp, Artificial Sequence
  Oligonucleotide for detection of SNP TSC0019224
taattagtaagta

SEQ ID NO: 74842 - DNA, 13 bp, Artificial Sequence
  Oligonucleotide for detection of SNP TSC0019224
tacttactaatta

SEQ ID NO: 74843 - DNA, 13 bp, Artificial Sequence
  Oligonucleotide for detection of SNP TSC0019224
taattaataagta

SEQ ID NO: 74844 - DNA, 13 bp, Artificial Sequence
  Oligonucleotide for detection of SNP TSC0019224
tacttattaatta

SEQ ID NO: 74845 - DNA, 13 bp, Artificial Sequence
  Oligonucleotide for detection of SNP TSC0019226
agtgttgtttatg

SEQ ID NO: 74846 - DNA, 13 bp, Artificial Sequence
  Oligonucleotide for detection of SNP TSC0019226
cataaacaacact

SEQ ID NO: 74847 - DNA, 13 bp, Artificial Sequence
  Oligonucleotide for detection of SNP TSC0019226
agtgttttttatg

SEQ ID NO: 74848 - DNA, 13 bp, Artificial Sequence
  Oligonucleotide for detection of SNP TSC0019226
cataaaaaacact

SEQ ID NO: 74849 - DNA, 13 bp, Artificial Sequence
  Oligonucleotide for detection of SNP TSC0019226
agcgttgtttatg

SEQ ID NO: 74850 - DNA, 13 bp, Artificial Sequence
  Oligonucleotide for detection of SNP TSC0019226
cataaacaacgct

SEQ ID NO: 74851 - DNA, 13 bp, Artificial Sequence
  Oligonucleotide for detection of SNP TSC0019226
agcgttttttatg

SEQ ID NO: 74852 - DNA, 13 bp, Artificial Sequence
  Oligonucleotide for detection of SNP TSC0019226
cataaaaaacgct

SEQ ID NO: 74853 - DNA, 13 bp, Artificial Sequence
  Oligonucleotide for detection of SNP TSC0019226
agtgttgtttacg

SEQ ID NO: 74854 - DNA, 13 bp, Artificial Sequence
  Oligonucleotide for detection of SNP TSC0019226
cgtaaacaacact

SEQ ID NO: 74855 - DNA, 13 bp, Artificial Sequence
  Oligonucleotide for detection of SNP TSC0019226
agtgttttttacg

SEQ ID NO: 74856 - DNA, 13 bp, Artificial Sequence
  Oligonucleotide for detection of SNP TSC0019226
cgtaaaaaacact

SEQ ID NO: 74857 - DNA, 13 bp, Artificial Sequence
  Oligonucleotide for detection of SNP TSC0019226
agcgttgtttacg

SEQ ID NO: 74858 - DNA, 13 bp, Artificial Sequence
  Oligonucleotide for detection of SNP TSC0019226
cgtaaacaacgct

SEQ ID NO: 74859 - DNA, 13 bp, Artificial Sequence
  Oligonucleotide for detection of SNP TSC0019226
agcgttttttacg

SEQ ID NO: 74860 - DNA, 13 bp, Artificial Sequence
  Oligonucleotide for detection of SNP TSC0019226
cgtaaaaaacgct

SEQ ID NO: 74861 - DNA, 13 bp, Artificial Sequence
  Oligonucleotide for detection of SNP TSC0019226
tgtgggtaatgtt

SEQ ID NO: 74862 - DNA, 13 bp, Artificial Sequence
  Oligonucleotide for detection of SNP TSC0019226
aacattacccaca

SEQ ID NO: 74863 - DNA, 13 bp, Artificial Sequence
  Oligonucleotide for detection of SNP TSC0019226
tgtgggaaatgtt

SEQ ID NO: 74864 - DNA, 13 bp, Artificial Sequence
  Oligonucleotide for detection of SNP TSC0019226
aacatttcccaca

SEQ ID NO: 74865 - DNA, 13 bp, Artificial Sequence
  Oligonucleotide for detection of SNP TSC0019226
cgtgggtaatgtt

SEQ ID NO: 74866 - DNA, 13 bp, Artificial Sequence
  Oligonucleotide for detection of SNP TSC0019226
aacattacccacg

SEQ ID NO: 74867 - DNA, 13 bp, Artificial Sequence
  Oligonucleotide for detection of SNP TSC0019226
cgtgggaaatgtt

SEQ ID NO: 74868 - DNA, 13 bp, Artificial Sequence
  Oligonucleotide for detection of SNP TSC0019226
aacatttcccacg

SEQ ID NO: 74869 - DNA, 13 bp, Artificial Sequence
  Oligonucleotide for detection of SNP TSC0019226
tgtgggtaacgtt

SEQ ID NO: 74870 - DNA, 13 bp, Artificial Sequence
  Oligonucleotide for detection of SNP TSC0019226
aacgttacccaca

SEQ ID NO: 74871 - DNA, 13 bp, Artificial Sequence
  Oligonucleotide for detection of SNP TSC0019226
tgtgggaaacgtt

SEQ ID NO: 74872 - DNA, 13 bp, Artificial Sequence
  Oligonucleotide for detection of SNP TSC0019226
aacgtttcccaca

SEQ ID NO: 74873 - DNA, 13 bp, Artificial Sequence
  Oligonucleotide for detection of SNP TSC0019226
cgtgggtaacgtt

SEQ ID NO: 74874 - DNA, 13 bp, Artificial Sequence
  Oligonucleotide for detection of SNP TSC0019226
aacgttacccacg

SEQ ID NO: 74875 - DNA, 13 bp, Artificial Sequence
  Oligonucleotide for detection of SNP TSC0019226
cgtgggaaacgtt

SEQ ID NO: 74876 - DNA, 13 bp, Artificial Sequence
  Oligonucleotide for detection of SNP TSC0019226
aacgtttcccacg

SEQ ID NO: 74877 - DNA, 13 bp, Artificial Sequence
  Oligonucleotide for detection of SNP TSC0019227
ttagggattgtty

SEQ ID NO: 74878 - DNA, 13 bp, Artificial Sequence
  Oligonucleotide for detection of SNP TSC0019227
raacaatccctaa

SEQ ID NO: 74879 - DNA, 13 bp, Artificial Sequence
  Oligonucleotide for detection of SNP TSC0019227
ttagggtttgtty

SEQ ID NO: 74880 - DNA, 13 bp, Artificial Sequence
  Oligonucleotide for detection of SNP TSC0019227
raacaaaccctaa

SEQ ID NO: 74881 - DNA, 13 bp, Artificial Sequence
  Oligonucleotide for detection of SNP TSC0019227
gggtagtttttgg

SEQ ID NO: 74882 - DNA, 13 bp, Artificial Sequence
  Oligonucleotide for detection of SNP TSC0019227
ccaaaaactaccc

SEQ ID NO: 74883 - DNA, 13 bp, Artificial Sequence
  Oligonucleotide for detection of SNP TSC0019227
gggtagattttgg

SEQ ID NO: 74884 - DNA, 13 bp, Artificial Sequence
  Oligonucleotide for detection of SNP TSC0019227
ccaaaatctaccc

SEQ ID NO: 74885 - DNA, 13 bp, Artificial Sequence
  Oligonucleotide for detection of SNP TSC0019228
ttggaagagttta

SEQ ID NO: 74886 - DNA, 13 bp, Artificial Sequence
  Oligonucleotide for detection of SNP TSC0019228
taaactcttccaa

SEQ ID NO: 74887 - DNA, 13 bp, Artificial Sequence
  Oligonucleotide for detection of SNP TSC0019228
ttggaaaagttta

SEQ ID NO: 74888 - DNA, 13 bp, Artificial Sequence
  Oligonucleotide for detection of SNP TSC0019228
taaacttttccaa

SEQ ID NO: 74889 - DNA, 13 bp, Artificial Sequence
  Oligonucleotide for detection of SNP TSC0019229
attgttattgagg

SEQ ID NO: 74890 - DNA, 13 bp, Artificial Sequence
  Oligonucleotide for detection of SNP TSC0019229
cctcaataacaat

SEQ ID NO: 74891 - DNA, 13 bp, Artificial Sequence
  Oligonucleotide for detection of SNP TSC0019229
attgttgttgagg

SEQ ID NO: 74892 - DNA, 13 bp, Artificial Sequence
  Oligonucleotide for detection of SNP TSC0019229
cctcaacaacaat

SEQ ID NO: 74893 - DNA, 13 bp, Artificial Sequence
  Oligonucleotide for detection of SNP TSC0019229
attgtcgttgagg

SEQ ID NO: 74894 - DNA, 13 bp, Artificial Sequence
  Oligonucleotide for detection of SNP TSC0019229
cctcaacgacaat

SEQ ID NO: 74895 - DNA, 13 bp, Artificial Sequence
  Oligonucleotide for detection of SNP TSC0019229
ttttaatgatagt

SEQ ID NO: 74896 - DNA, 13 bp, Artificial Sequence
  Oligonucleotide for detection of SNP TSC0019229
actatcattaaaa

SEQ ID NO: 74897 - DNA, 13 bp, Artificial Sequence
  Oligonucleotide for detection of SNP TSC0019229
ttttaacgatagt

SEQ ID NO: 74898 - DNA, 13 bp, Artificial Sequence
  Oligonucleotide for detection of SNP TSC0019229
actatcgttaaaa

SEQ ID NO: 74899 - DNA, 13 bp, Artificial Sequence
  Oligonucleotide for detection of SNP TSC0019230
gagattgtttatt

SEQ ID NO: 74900 - DNA, 13 bp, Artificial Sequence
  Oligonucleotide for detection of SNP TSC0019230
aataaacaatctc

SEQ ID NO: 74901 - DNA, 13 bp, Artificial Sequence
  Oligonucleotide for detection of SNP TSC0019230
gagattatttatt

SEQ ID NO: 74902 - DNA, 13 bp, Artificial Sequence
  Oligonucleotide for detection of SNP TSC0019230
aataaataatctc

SEQ ID NO: 74903 - DNA, 13 bp, Artificial Sequence
  Oligonucleotide for detection of SNP TSC0019231
ggtttgtggggtg

SEQ ID NO: 74904 - DNA, 13 bp, Artificial Sequence
  Oligonucleotide for detection of SNP TSC0019231
caccccacaaacc

SEQ ID NO: 74905 - DNA, 13 bp, Artificial Sequence
  Oligonucleotide for detection of SNP TSC0019231
ggtttgcggggtg

SEQ ID NO: 74906 - DNA, 13 bp, Artificial Sequence
  Oligonucleotide for detection of SNP TSC0019231
caccccgcaaacc

SEQ ID NO: 74907 - DNA, 13 bp, Artificial Sequence
  Oligonucleotide for detection of SNP TSC0019231
tattttgtaggty

SEQ ID NO: 74908 - DNA, 13 bp, Artificial Sequence
  Oligonucleotide for detection of SNP TSC0019231
racctacaaaata

SEQ ID NO: 74909 - DNA, 13 bp, Artificial Sequence
  Oligonucleotide for detection of SNP TSC0019231
tattttataggty

SEQ ID NO: 74910 - DNA, 13 bp, Artificial Sequence
  Oligonucleotide for detection of SNP TSC0019231
racctataaaata

SEQ ID NO: 74911 - DNA, 13 bp, Artificial Sequence
  Oligonucleotide for detection of SNP TSC0019231
tatttcgtaggty

SEQ ID NO: 74912 - DNA, 13 bp, Artificial Sequence
  Oligonucleotide for detection of SNP TSC0019231
racctacgaaata

SEQ ID NO: 74913 - DNA, 13 bp, Artificial Sequence
  Oligonucleotide for detection of SNP TSC0019232
gagaggagtttay

SEQ ID NO: 74914 - DNA, 13 bp, Artificial Sequence
  Oligonucleotide for detection of SNP TSC0019232
rtaaactcctctc

SEQ ID NO: 74915 - DNA, 13 bp, Artificial Sequence
  Oligonucleotide for detection of SNP TSC0019232
gagaggggtttay

SEQ ID NO: 74916 - DNA, 13 bp, Artificial Sequence
  Oligonucleotide for detection of SNP TSC0019232
rtaaacccctctc

SEQ ID NO: 74917 - DNA, 13 bp, Artificial Sequence
  Oligonucleotide for detection of SNP TSC0019233
gttttgtgtatty

SEQ ID NO: 74918 - DNA, 13 bp, Artificial Sequence
  Oligonucleotide for detection of SNP TSC0019233
raatacacaaaac

SEQ ID NO: 74919 - DNA, 13 bp, Artificial Sequence
  Oligonucleotide for detection of SNP TSC0019233
gttttgcgtatty

SEQ ID NO: 74920 - DNA, 13 bp, Artificial Sequence
  Oligonucleotide for detection of SNP TSC0019233
raatacgcaaaac

SEQ ID NO: 74921 - DNA, 13 bp, Artificial Sequence
  Oligonucleotide for detection of SNP TSC0019233
gaatatgtagagy

SEQ ID NO: 74922 - DNA, 13 bp, Artificial Sequence
  Oligonucleotide for detection of SNP TSC0019233
rctctacatattc

SEQ ID NO: 74923 - DNA, 13 bp, Artificial Sequence
  Oligonucleotide for detection of SNP TSC0019233
gaatatatagagy

SEQ ID NO: 74924 - DNA, 13 bp, Artificial Sequence
  Oligonucleotide for detection of SNP TSC0019233
rctctatatattc

SEQ ID NO: 74925 - DNA, 13 bp, Artificial Sequence
  Oligonucleotide for detection of SNP TSC0019233
gaatacgtagagy

SEQ ID NO: 74926 - DNA, 13 bp, Artificial Sequence
  Oligonucleotide for detection of SNP TSC0019233
rctctacgtattc

SEQ ID NO: 74927 - DNA, 13 bp, Artificial Sequence
  Oligonucleotide for detection of SNP TSC0019234
gaattgtgtttay

SEQ ID NO: 74928 - DNA, 13 bp, Artificial Sequence
  Oligonucleotide for detection of SNP TSC0019234
rtaaacacaattc

SEQ ID NO: 74929 - DNA, 13 bp, Artificial Sequence
  Oligonucleotide for detection of SNP TSC0019234
gaattgcgtttay

SEQ ID NO: 74930 - DNA, 13 bp, Artificial Sequence
  Oligonucleotide for detection of SNP TSC0019234
rtaaacgcaattc

SEQ ID NO: 74931 - DNA, 13 bp, Artificial Sequence
  Oligonucleotide for detection of SNP TSC0019234
gtaaatgtaatty

SEQ ID NO: 74932 - DNA, 13 bp, Artificial Sequence
  Oligonucleotide for detection of SNP TSC0019234
raattacatttac

SEQ ID NO: 74933 - DNA, 13 bp, Artificial Sequence
  Oligonucleotide for detection of SNP TSC0019234
gtaaatataatty

SEQ ID NO: 74934 - DNA, 13 bp, Artificial Sequence
  Oligonucleotide for detection of SNP TSC0019234
raattatatttac

SEQ ID NO: 74935 - DNA, 13 bp, Artificial Sequence
  Oligonucleotide for detection of SNP TSC0019234
gtaaacgtaatty

SEQ ID NO: 74936 - DNA, 13 bp, Artificial Sequence
  Oligonucleotide for detection of SNP TSC0019234
raattacgtttac

SEQ ID NO: 74937 - DNA, 13 bp, Artificial Sequence
  Oligonucleotide for detection of SNP TSC0019235
aatgttattttty

SEQ ID NO: 74938 - DNA, 13 bp, Artificial Sequence
  Oligonucleotide for detection of SNP TSC0019235
raaaaataacatt

SEQ ID NO: 74939 - DNA, 13 bp, Artificial Sequence
  Oligonucleotide for detection of SNP TSC0019235
aatgttgttttty

SEQ ID NO: 74940 - DNA, 13 bp, Artificial Sequence
  Oligonucleotide for detection of SNP TSC0019235
raaaaacaacatt

SEQ ID NO: 74941 - DNA, 13 bp, Artificial Sequence
  Oligonucleotide for detection of SNP TSC0019235
aatgtcgttttty

SEQ ID NO: 74942 - DNA, 13 bp, Artificial Sequence
  Oligonucleotide for detection of SNP TSC0019235
raaaaacgacatt

SEQ ID NO: 74943 - DNA, 13 bp, Artificial Sequence
  Oligonucleotide for detection of SNP TSC0019235
gaagagtggtatt

SEQ ID NO: 74944 - DNA, 13 bp, Artificial Sequence
  Oligonucleotide for detection of SNP TSC0019235
aataccactcttc

SEQ ID NO: 74945 - DNA, 13 bp, Artificial Sequence
  Oligonucleotide for detection of SNP TSC0019235
gaagagcggtatt

SEQ ID NO: 74946 - DNA, 13 bp, Artificial Sequence
  Oligonucleotide for detection of SNP TSC0019235
aataccgctcttc

SEQ ID NO: 74947 - DNA, 13 bp, Artificial Sequence
  Oligonucleotide for detection of SNP TSC0019236
tgggaggtggttt

SEQ ID NO: 74948 - DNA, 13 bp, Artificial Sequence
  Oligonucleotide for detection of SNP TSC0019236
aaaccacctccca

SEQ ID NO: 74949 - DNA, 13 bp, Artificial Sequence
  Oligonucleotide for detection of SNP TSC0019236
tgggagatggttt

SEQ ID NO: 74950 - DNA, 13 bp, Artificial Sequence
  Oligonucleotide for detection of SNP TSC0019236
aaaccatctccca

SEQ ID NO: 74951 - DNA, 13 bp, Artificial Sequence
  Oligonucleotide for detection of SNP TSC0019236
tgggaggcggttt

SEQ ID NO: 74952 - DNA, 13 bp, Artificial Sequence
  Oligonucleotide for detection of SNP TSC0019236
aaaccgcctccca

SEQ ID NO: 74953 - DNA, 13 bp, Artificial Sequence
  Oligonucleotide for detection of SNP TSC0019236
tgggagacggttt

SEQ ID NO: 74954 - DNA, 13 bp, Artificial Sequence
  Oligonucleotide for detection of SNP TSC0019236
aaaccgtctccca

SEQ ID NO: 74955 - DNA, 13 bp, Artificial Sequence
  Oligonucleotide for detection of SNP TSC0019237
tttttttttagta

SEQ ID NO: 74956 - DNA, 13 bp, Artificial Sequence
  Oligonucleotide for detection of SNP TSC0019237
tactaaaaaaaaa

SEQ ID NO: 74957 - DNA, 13 bp, Artificial Sequence
  Oligonucleotide for detection of SNP TSC0019237
tgttggtaaggaa

SEQ ID NO: 74958 - DNA, 13 bp, Artificial Sequence
  Oligonucleotide for detection of SNP TSC0019237
ttccttaccaaca

SEQ ID NO: 74959 - DNA, 13 bp, Artificial Sequence
  Oligonucleotide for detection of SNP TSC0019237
tgttggaaaggaa

SEQ ID NO: 74960 - DNA, 13 bp, Artificial Sequence
  Oligonucleotide for detection of SNP TSC0019237
ttcctttccaaca

SEQ ID NO: 74961 - DNA, 13 bp, Artificial Sequence
  Oligonucleotide for detection of SNP TSC0019239
tttttttgttgty

SEQ ID NO: 74962 - DNA, 13 bp, Artificial Sequence
  Oligonucleotide for detection of SNP TSC0019239
racaacaaaaaaa

SEQ ID NO: 74963 - DNA, 13 bp, Artificial Sequence
  Oligonucleotide for detection of SNP TSC0019239
ttttttcgttgty

SEQ ID NO: 74964 - DNA, 13 bp, Artificial Sequence
  Oligonucleotide for detection of SNP TSC0019239
racaacgaaaaaa

SEQ ID NO: 74965 - DNA, 13 bp, Artificial Sequence
  Oligonucleotide for detection of SNP TSC0019239
ggtaatgagaggg

SEQ ID NO: 74966 - DNA, 13 bp, Artificial Sequence
  Oligonucleotide for detection of SNP TSC0019239
ccctctcattacc

SEQ ID NO: 74967 - DNA, 13 bp, Artificial Sequence
  Oligonucleotide for detection of SNP TSC0019239
ggtaataagaggg

SEQ ID NO: 74968 - DNA, 13 bp, Artificial Sequence
  Oligonucleotide for detection of SNP TSC0019239
ccctcttattacc

SEQ ID NO: 74969 - DNA, 13 bp, Artificial Sequence
  Oligonucleotide for detection of SNP TSC0019239
ggtaacgagaggg

SEQ ID NO: 74970 - DNA, 13 bp, Artificial Sequence
  Oligonucleotide for detection of SNP TSC0019239
ccctctcgttacc

SEQ ID NO: 74971 - DNA, 13 bp, Artificial Sequence
  Oligonucleotide for detection of SNP TSC0019242
tagttgatttatt

SEQ ID NO: 74972 - DNA, 13 bp, Artificial Sequence
  Oligonucleotide for detection of SNP TSC0019242
aataaatcaacta

SEQ ID NO: 74973 - DNA, 13 bp, Artificial Sequence
  Oligonucleotide for detection of SNP TSC0019242
tagttggtttatt

SEQ ID NO: 74974 - DNA, 13 bp, Artificial Sequence
  Oligonucleotide for detection of SNP TSC0019242
aataaaccaacta

SEQ ID NO: 74975 - DNA, 13 bp, Artificial Sequence
  Oligonucleotide for detection of SNP TSC0019242
tagtcgatttatt

SEQ ID NO: 74976 - DNA, 13 bp, Artificial Sequence
  Oligonucleotide for detection of SNP TSC0019242
aataaatcgacta

SEQ ID NO: 74977 - DNA, 13 bp, Artificial Sequence
  Oligonucleotide for detection of SNP TSC0019242
tagtcggtttatt

SEQ ID NO: 74978 - DNA, 13 bp, Artificial Sequence
  Oligonucleotide for detection of SNP TSC0019242
aataaaccgacta

SEQ ID NO: 74979 - DNA, 13 bp, Artificial Sequence
  Oligonucleotide for detection of SNP TSC0019243
attattgttttat

SEQ ID NO: 74980 - DNA, 13 bp, Artificial Sequence
  Oligonucleotide for detection of SNP TSC0019243
ataaaacaataat

SEQ ID NO: 74981 - DNA, 13 bp, Artificial Sequence
  Oligonucleotide for detection of SNP TSC0019243
attatcgttttat

SEQ ID NO: 74982 - DNA, 13 bp, Artificial Sequence
  Oligonucleotide for detection of SNP TSC0019243
ataaaacgataat

SEQ ID NO: 74983 - DNA, 13 bp, Artificial Sequence
  Oligonucleotide for detection of SNP TSC0019243
ataaagtggtggt

SEQ ID NO: 74984 - DNA, 13 bp, Artificial Sequence
  Oligonucleotide for detection of SNP TSC0019243
accaccactttat

SEQ ID NO: 74985 - DNA, 13 bp, Artificial Sequence
  Oligonucleotide for detection of SNP TSC0019243
ataaagcggtggt

SEQ ID NO: 74986 - DNA, 13 bp, Artificial Sequence
  Oligonucleotide for detection of SNP TSC0019243
accaccgctttat

SEQ ID NO: 74987 - DNA, 13 bp, Artificial Sequence
  Oligonucleotide for detection of SNP TSC0019244
tttatttgtttgg

SEQ ID NO: 74988 - DNA, 13 bp, Artificial Sequence
  Oligonucleotide for detection of SNP TSC0019244
ccaaacaaataaa

SEQ ID NO: 74989 - DNA, 13 bp, Artificial Sequence
  Oligonucleotide for detection of SNP TSC0019244
tttattcgtttgg

SEQ ID NO: 74990 - DNA, 13 bp, Artificial Sequence
  Oligonucleotide for detection of SNP TSC0019244
ccaaacgaataaa

SEQ ID NO: 74991 - DNA, 13 bp, Artificial Sequence
  Oligonucleotide for detection of SNP TSC0019244
ttaagtgggtgga

SEQ ID NO: 74992 - DNA, 13 bp, Artificial Sequence
  Oligonucleotide for detection of SNP TSC0019244
tccacccacttaa

SEQ ID NO: 74993 - DNA, 13 bp, Artificial Sequence
  Oligonucleotide for detection of SNP TSC0019244
ttaagtaggtgga

SEQ ID NO: 74994 - DNA, 13 bp, Artificial Sequence
  Oligonucleotide for detection of SNP TSC0019244
tccacctacttaa

SEQ ID NO: 74995 - DNA, 13 bp, Artificial Sequence
  Oligonucleotide for detection of SNP TSC0019244
ttaagcgggtgga

SEQ ID NO: 74996 - DNA, 13 bp, Artificial Sequence
  Oligonucleotide for detection of SNP TSC0019244
tccacccgcttaa

SEQ ID NO: 74997 - DNA, 13 bp, Artificial Sequence
  Oligonucleotide for detection of SNP TSC0019245
aaagggagatttt

SEQ ID NO: 74998 - DNA, 13 bp, Artificial Sequence
  Oligonucleotide for detection of SNP TSC0019245
aaaatctcccttt

SEQ ID NO: 74999 - DNA, 13 bp, Artificial Sequence
  Oligonucleotide for detection of SNP TSC0019245
aaagggggatttt

SEQ ID NO: 75000 - DNA, 13 bp, Artificial Sequence
  Oligonucleotide for detection of SNP TSC0019245
aaaatcccccttt

SEQ ID NO: 75001 - DNA, 13 bp, Artificial Sequence
  Oligonucleotide for detection of SNP TSC0019246
tgaggtgtagttt

SEQ ID NO: 75002 - DNA, 13 bp, Artificial Sequence
  Oligonucleotide for detection of SNP TSC0019246
aaactacacctca

SEQ ID NO: 75003 - DNA, 13 bp, Artificial Sequence
  Oligonucleotide for detection of SNP TSC0019246
tgaggtatagttt

SEQ ID NO: 75004 - DNA, 13 bp, Artificial Sequence
  Oligonucleotide for detection of SNP TSC0019246
aaactatacctca

SEQ ID NO: 75005 - DNA, 13 bp, Artificial Sequence
  Oligonucleotide for detection of SNP TSC0019247
gatgttagagttt

SEQ ID NO: 75006 - DNA, 13 bp, Artificial Sequence
  Oligonucleotide for detection of SNP TSC0019247
aaactctaacatc

SEQ ID NO: 75007 - DNA, 13 bp, Artificial Sequence
  Oligonucleotide for detection of SNP TSC0019247
gatgttggagttt

SEQ ID NO: 75008 - DNA, 13 bp, Artificial Sequence
  Oligonucleotide for detection of SNP TSC0019247
aaactccaacatc

SEQ ID NO: 75009 - DNA, 13 bp, Artificial Sequence
  Oligonucleotide for detection of SNP TSC0019248
ttagttatataga

SEQ ID NO: 75010 - DNA, 13 bp, Artificial Sequence
  Oligonucleotide for detection of SNP TSC0019248
tctatataactaa

SEQ ID NO: 75011 - DNA, 13 bp, Artificial Sequence
  Oligonucleotide for detection of SNP TSC0019248
ttagttttataga

SEQ ID NO: 75012 - DNA, 13 bp, Artificial Sequence
  Oligonucleotide for detection of SNP TSC0019248
tctataaaactaa

SEQ ID NO: 75013 - DNA, 13 bp, Artificial Sequence
  Oligonucleotide for detection of SNP TSC0019248
tttgtgtggttga

SEQ ID NO: 75014 - DNA, 13 bp, Artificial Sequence
  Oligonucleotide for detection of SNP TSC0019248
tcaaccacacaaa

SEQ ID NO: 75015 - DNA, 13 bp, Artificial Sequence
  Oligonucleotide for detection of SNP TSC0019248
tttgtggggttga

SEQ ID NO: 75016 - DNA, 13 bp, Artificial Sequence
  Oligonucleotide for detection of SNP TSC0019248
tcaaccccacaaa

SEQ ID NO: 75017 - DNA, 13 bp, Artificial Sequence
  Oligonucleotide for detection of SNP TSC0019249
atatggaggttty

SEQ ID NO: 75018 - DNA, 13 bp, Artificial Sequence
  Oligonucleotide for detection of SNP TSC0019249
raaacctccatat

SEQ ID NO: 75019 - DNA, 13 bp, Artificial Sequence
  Oligonucleotide for detection of SNP TSC0019249
atatgggggttty

SEQ ID NO: 75020 - DNA, 13 bp, Artificial Sequence
  Oligonucleotide for detection of SNP TSC0019249
raaacccccatat

SEQ ID NO: 75021 - DNA, 13 bp, Artificial Sequence
  Oligonucleotide for detection of SNP TSC0019250
aggagagttttta

SEQ ID NO: 75022 - DNA, 13 bp, Artificial Sequence
  Oligonucleotide for detection of SNP TSC0019250
taaaaactctcct

SEQ ID NO: 75023 - DNA, 13 bp, Artificial Sequence
  Oligonucleotide for detection of SNP TSC0019250
aggagaattttta

SEQ ID NO: 75024 - DNA, 13 bp, Artificial Sequence
  Oligonucleotide for detection of SNP TSC0019250
taaaaattctcct

SEQ ID NO: 75025 - DNA, 13 bp, Artificial Sequence
  Oligonucleotide for detection of SNP TSC0019251
ggaaaagaggaaa

SEQ ID NO: 75026 - DNA, 13 bp, Artificial Sequence
  Oligonucleotide for detection of SNP TSC0019251
tttcctcttttcc

SEQ ID NO: 75027 - DNA, 13 bp, Artificial Sequence
  Oligonucleotide for detection of SNP TSC0019251
ggaaaataggaaa

SEQ ID NO: 75028 - DNA, 13 bp, Artificial Sequence
  Oligonucleotide for detection of SNP TSC0019251
tttcctattttcc

SEQ ID NO: 75029 - DNA, 13 bp, Artificial Sequence
  Oligonucleotide for detection of SNP TSC0019252
ttgtgggtttggg

SEQ ID NO: 75030 - DNA, 13 bp, Artificial Sequence
  Oligonucleotide for detection of SNP TSC0019252
cccaaacccacaa

SEQ ID NO: 75031 - DNA, 13 bp, Artificial Sequence
  Oligonucleotide for detection of SNP TSC0019252
ttgtggatttggg

SEQ ID NO: 75032 - DNA, 13 bp, Artificial Sequence
  Oligonucleotide for detection of SNP TSC0019252
cccaaatccacaa

SEQ ID NO: 75033 - DNA, 13 bp, Artificial Sequence
  Oligonucleotide for detection of SNP TSC0019260
agtttaagagtag

SEQ ID NO: 75034 - DNA, 13 bp, Artificial Sequence
  Oligonucleotide for detection of SNP TSC0019260
ctactcttaaact

SEQ ID NO: 75035 - DNA, 13 bp, Artificial Sequence
  Oligonucleotide for detection of SNP TSC0019260
agtttaggagtag

SEQ ID NO: 75036 - DNA, 13 bp, Artificial Sequence
  Oligonucleotide for detection of SNP TSC0019260
ctactcctaaact

SEQ ID NO: 75037 - DNA, 13 bp, Artificial Sequence
  Oligonucleotide for detection of SNP TSC0019266
aggattggagagt

SEQ ID NO: 75038 - DNA, 13 bp, Artificial Sequence
  Oligonucleotide for detection of SNP TSC0019266
actctccaatcct

SEQ ID NO: 75039 - DNA, 13 bp, Artificial Sequence
  Oligonucleotide for detection of SNP TSC0019266
aggatttgagagt

SEQ ID NO: 75040 - DNA, 13 bp, Artificial Sequence
  Oligonucleotide for detection of SNP TSC0019266
actctcaaatcct

SEQ ID NO: 75041 - DNA, 13 bp, Artificial Sequence
  Oligonucleotide for detection of SNP TSC0019266
attttttaatttt

SEQ ID NO: 75042 - DNA, 13 bp, Artificial Sequence
  Oligonucleotide for detection of SNP TSC0019266
aaaattaaaaaat

SEQ ID NO: 75043 - DNA, 13 bp, Artificial Sequence
  Oligonucleotide for detection of SNP TSC0019267
tagaaagaaaaay

SEQ ID NO: 75044 - DNA, 13 bp, Artificial Sequence
  Oligonucleotide for detection of SNP TSC0019267
rtttttctttcta

SEQ ID NO: 75045 - DNA, 13 bp, Artificial Sequence
  Oligonucleotide for detection of SNP TSC0019267
tagaaaaaaaaay

SEQ ID NO: 75046 - DNA, 13 bp, Artificial Sequence
  Oligonucleotide for detection of SNP TSC0019267
rtttttttttcta

SEQ ID NO: 75047 - DNA, 13 bp, Artificial Sequence
  Oligonucleotide for detection of SNP TSC0019268
ttaataatgaggt

SEQ ID NO: 75048 - DNA, 13 bp, Artificial Sequence
  Oligonucleotide for detection of SNP TSC0019268
acctcattattaa

SEQ ID NO: 75049 - DNA, 13 bp, Artificial Sequence
  Oligonucleotide for detection of SNP TSC0019268
ttaatagtgaggt

SEQ ID NO: 75050 - DNA, 13 bp, Artificial Sequence
  Oligonucleotide for detection of SNP TSC0019268
acctcactattaa

SEQ ID NO: 75051 - DNA, 13 bp, Artificial Sequence
  Oligonucleotide for detection of SNP TSC0019269
gtgttggaagtat

SEQ ID NO: 75052 - DNA, 13 bp, Artificial Sequence
  Oligonucleotide for detection of SNP TSC0019269
atacttccaacac

SEQ ID NO: 75053 - DNA, 13 bp, Artificial Sequence
  Oligonucleotide for detection of SNP TSC0019269
gtgttgaaagtat

SEQ ID NO: 75054 - DNA, 13 bp, Artificial Sequence
  Oligonucleotide for detection of SNP TSC0019269
atactttcaacac

SEQ ID NO: 75055 - DNA, 13 bp, Artificial Sequence
  Oligonucleotide for detection of SNP TSC0019271
aattaatttttgg

SEQ ID NO: 75056 - DNA, 13 bp, Artificial Sequence
  Oligonucleotide for detection of SNP TSC0019271
ccaaaaattaatt

SEQ ID NO: 75057 - DNA, 13 bp, Artificial Sequence
  Oligonucleotide for detection of SNP TSC0019271
aattaagttttgg

SEQ ID NO: 75058 - DNA, 13 bp, Artificial Sequence
  Oligonucleotide for detection of SNP TSC0019271
ccaaaacttaatt

SEQ ID NO: 75059 - DNA, 13 bp, Artificial Sequence
  Oligonucleotide for detection of SNP TSC0019271
ttaaaagttaatt

SEQ ID NO: 75060 - DNA, 13 bp, Artificial Sequence
  Oligonucleotide for detection of SNP TSC0019271
aattaacttttaa

SEQ ID NO: 75061 - DNA, 13 bp, Artificial Sequence
  Oligonucleotide for detection of SNP TSC0019271
ttaaaatttaatt

SEQ ID NO: 75062 - DNA, 13 bp, Artificial Sequence
  Oligonucleotide for detection of SNP TSC0019271
aattaaattttaa

SEQ ID NO: 75063 - DNA, 13 bp, Artificial Sequence
  Oligonucleotide for detection of SNP TSC0019272
gtggttgttagga

SEQ ID NO: 75064 - DNA, 13 bp, Artificial Sequence
  Oligonucleotide for detection of SNP TSC0019272
tcctaacaaccac

SEQ ID NO: 75065 - DNA, 13 bp, Artificial Sequence
  Oligonucleotide for detection of SNP TSC0019272
gtggtttttagga

SEQ ID NO: 75066 - DNA, 13 bp, Artificial Sequence
  Oligonucleotide for detection of SNP TSC0019272
tcctaaaaaccac

SEQ ID NO: 75067 - DNA, 13 bp, Artificial Sequence
  Oligonucleotide for detection of SNP TSC0019272
ttttggtaattay

SEQ ID NO: 75068 - DNA, 13 bp, Artificial Sequence
  Oligonucleotide for detection of SNP TSC0019272
rtaattaccaaaa

SEQ ID NO: 75069 - DNA, 13 bp, Artificial Sequence
  Oligonucleotide for detection of SNP TSC0019272
ttttggaaattay

SEQ ID NO: 75070 - DNA, 13 bp, Artificial Sequence
  Oligonucleotide for detection of SNP TSC0019272
rtaatttccaaaa

SEQ ID NO: 75071 - DNA, 13 bp, Artificial Sequence
  Oligonucleotide for detection of SNP TSC0019274
gggtattgaatty

SEQ ID NO: 75072 - DNA, 13 bp, Artificial Sequence
  Oligonucleotide for detection of SNP TSC0019274
raattcaataccc

SEQ ID NO: 75073 - DNA, 13 bp, Artificial Sequence
  Oligonucleotide for detection of SNP TSC0019274
gggtatcgaatty

SEQ ID NO: 75074 - DNA, 13 bp, Artificial Sequence
  Oligonucleotide for detection of SNP TSC0019274
raattcgataccc

SEQ ID NO: 75075 - DNA, 13 bp, Artificial Sequence
  Oligonucleotide for detection of SNP TSC0019274
gaatttggtgtty

SEQ ID NO: 75076 - DNA, 13 bp, Artificial Sequence
  Oligonucleotide for detection of SNP TSC0019274
raacaccaaattc

SEQ ID NO: 75077 - DNA, 13 bp, Artificial Sequence
  Oligonucleotide for detection of SNP TSC0019274
gaatttagtgtty

SEQ ID NO: 75078 - DNA, 13 bp, Artificial Sequence
  Oligonucleotide for detection of SNP TSC0019274
raacactaaattc

SEQ ID NO: 75079 - DNA, 13 bp, Artificial Sequence
  Oligonucleotide for detection of SNP TSC0019274
gaattcggtgtty

SEQ ID NO: 75080 - DNA, 13 bp, Artificial Sequence
  Oligonucleotide for detection of SNP TSC0019274
raacaccgaattc

SEQ ID NO: 75081 - DNA, 13 bp, Artificial Sequence
  Oligonucleotide for detection of SNP TSC0019279
gttttaattgttg

SEQ ID NO: 75082 - DNA, 13 bp, Artificial Sequence
  Oligonucleotide for detection of SNP TSC0019279
caacaattaaaac

SEQ ID NO: 75083 - DNA, 13 bp, Artificial Sequence
  Oligonucleotide for detection of SNP TSC0019279
gttttagttgttg

SEQ ID NO: 75084 - DNA, 13 bp, Artificial Sequence
  Oligonucleotide for detection of SNP TSC0019279
caacaactaaaac

SEQ ID NO: 75085 - DNA, 13 bp, Artificial Sequence
  Oligonucleotide for detection of SNP TSC0019280
agtagtagtattt

SEQ ID NO: 75086 - DNA, 13 bp, Artificial Sequence
  Oligonucleotide for detection of SNP TSC0019280
aaatactactact

SEQ ID NO: 75087 - DNA, 13 bp, Artificial Sequence
  Oligonucleotide for detection of SNP TSC0019280
agtagttgtattt

SEQ ID NO: 75088 - DNA, 13 bp, Artificial Sequence
  Oligonucleotide for detection of SNP TSC0019280
aaatacaactact

SEQ ID NO: 75089 - DNA, 13 bp, Artificial Sequence
  Oligonucleotide for detection of SNP TSC0019280
agtagtcgtattt

SEQ ID NO: 75090 - DNA, 13 bp, Artificial Sequence
  Oligonucleotide for detection of SNP TSC0019280
aaatacgactact

SEQ ID NO: 75091 - DNA, 13 bp, Artificial Sequence
  Oligonucleotide for detection of SNP TSC0019280
aggtgttattatt

SEQ ID NO: 75092 - DNA, 13 bp, Artificial Sequence
  Oligonucleotide for detection of SNP TSC0019280
aataataacacct

SEQ ID NO: 75093 - DNA, 13 bp, Artificial Sequence
  Oligonucleotide for detection of SNP TSC0019280
aggtgtgattatt

SEQ ID NO: 75094 - DNA, 13 bp, Artificial Sequence
  Oligonucleotide for detection of SNP TSC0019280
aataatcacacct

SEQ ID NO: 75095 - DNA, 13 bp, Artificial Sequence
  Oligonucleotide for detection of SNP TSC0019280
aggtgcgattatt

SEQ ID NO: 75096 - DNA, 13 bp, Artificial Sequence
  Oligonucleotide for detection of SNP TSC0019280
aataatcgcacct

SEQ ID NO: 75097 - DNA, 13 bp, Artificial Sequence
  Oligonucleotide for detection of SNP TSC0019281
agtttagaattgt

SEQ ID NO: 75098 - DNA, 13 bp, Artificial Sequence
  Oligonucleotide for detection of SNP TSC0019281
acaattctaaact

SEQ ID NO: 75099 - DNA, 13 bp, Artificial Sequence
  Oligonucleotide for detection of SNP TSC0019281
agtttaaaattgt

SEQ ID NO: 75100 - DNA, 13 bp, Artificial Sequence
  Oligonucleotide for detection of SNP TSC0019281
acaattttaaact

SEQ ID NO: 75101 - DNA, 13 bp, Artificial Sequence
  Oligonucleotide for detection of SNP TSC0019282
tgtatttgttggg

SEQ ID NO: 75102 - DNA, 13 bp, Artificial Sequence
  Oligonucleotide for detection of SNP TSC0019282
cccaacaaataca

SEQ ID NO: 75103 - DNA, 13 bp, Artificial Sequence
  Oligonucleotide for detection of SNP TSC0019282
tgtattcgttggg

SEQ ID NO: 75104 - DNA, 13 bp, Artificial Sequence
  Oligonucleotide for detection of SNP TSC0019282
cccaacgaataca

SEQ ID NO: 75105 - DNA, 13 bp, Artificial Sequence
  Oligonucleotide for detection of SNP TSC0019282
tttagtgggtgta

SEQ ID NO: 75106 - DNA, 13 bp, Artificial Sequence
  Oligonucleotide for detection of SNP TSC0019282
tacacccactaaa

SEQ ID NO: 75107 - DNA, 13 bp, Artificial Sequence
  Oligonucleotide for detection of SNP TSC0019282
tttagtaggtgta

SEQ ID NO: 75108 - DNA, 13 bp, Artificial Sequence
  Oligonucleotide for detection of SNP TSC0019282
tacacctactaaa

SEQ ID NO: 75109 - DNA, 13 bp, Artificial Sequence
  Oligonucleotide for detection of SNP TSC0019282
tttagcgggtgta

SEQ ID NO: 75110 - DNA, 13 bp, Artificial Sequence
  Oligonucleotide for detection of SNP TSC0019282
tacacccgctaaa

SEQ ID NO: 75111 - DNA, 13 bp, Artificial Sequence
  Oligonucleotide for detection of SNP TSC0019283
ttagggtgtgtty

SEQ ID NO: 75112 - DNA, 13 bp, Artificial Sequence
  Oligonucleotide for detection of SNP TSC0019283
raacacaccctaa

SEQ ID NO: 75113 - DNA, 13 bp, Artificial Sequence
  Oligonucleotide for detection of SNP TSC0019283
ttagggggtgtty

SEQ ID NO: 75114 - DNA, 13 bp, Artificial Sequence
  Oligonucleotide for detection of SNP TSC0019283
raacaccccctaa

SEQ ID NO: 75115 - DNA, 13 bp, Artificial Sequence
  Oligonucleotide for detection of SNP TSC0019283
ttagggcgtgtty

SEQ ID NO: 75116 - DNA, 13 bp, Artificial Sequence
  Oligonucleotide for detection of SNP TSC0019283
raacacgccctaa

SEQ ID NO: 75117 - DNA, 13 bp, Artificial Sequence
  Oligonucleotide for detection of SNP TSC0019283
gggtatgttttgg

SEQ ID NO: 75118 - DNA, 13 bp, Artificial Sequence
  Oligonucleotide for detection of SNP TSC0019283
ccaaaacataccc

SEQ ID NO: 75119 - DNA, 13 bp, Artificial Sequence
  Oligonucleotide for detection of SNP TSC0019283
gggtattttttgg

SEQ ID NO: 75120 - DNA, 13 bp, Artificial Sequence
  Oligonucleotide for detection of SNP TSC0019283
ccaaaaaataccc

SEQ ID NO: 75121 - DNA, 13 bp, Artificial Sequence
  Oligonucleotide for detection of SNP TSC0019283
gggtacgttttgg

SEQ ID NO: 75122 - DNA, 13 bp, Artificial Sequence
  Oligonucleotide for detection of SNP TSC0019283
ccaaaacgtaccc

SEQ ID NO: 75123 - DNA, 13 bp, Artificial Sequence
  Oligonucleotide for detection of SNP TSC0019284
tttttgggatttt

SEQ ID NO: 75124 - DNA, 13 bp, Artificial Sequence
  Oligonucleotide for detection of SNP TSC0019284
aaaatcccaaaaa

SEQ ID NO: 75125 - DNA, 13 bp, Artificial Sequence
  Oligonucleotide for detection of SNP TSC0019284
tttttgtgatttt

SEQ ID NO: 75126 - DNA, 13 bp, Artificial Sequence
  Oligonucleotide for detection of SNP TSC0019284
aaaatcacaaaaa

SEQ ID NO: 75127 - DNA, 13 bp, Artificial Sequence
  Oligonucleotide for detection of SNP TSC0019284
agggttttaagga

SEQ ID NO: 75128 - DNA, 13 bp, Artificial Sequence
  Oligonucleotide for detection of SNP TSC0019284
tccttaaaaccct

SEQ ID NO: 75129 - DNA, 13 bp, Artificial Sequence
  Oligonucleotide for detection of SNP TSC0019284
agggttataagga

SEQ ID NO: 75130 - DNA, 13 bp, Artificial Sequence
  Oligonucleotide for detection of SNP TSC0019284
tccttataaccct

SEQ ID NO: 75131 - DNA, 13 bp, Artificial Sequence
  Oligonucleotide for detection of SNP TSC0019285
tttataatgggty

SEQ ID NO: 75132 - DNA, 13 bp, Artificial Sequence
  Oligonucleotide for detection of SNP TSC0019285
racccattataaa

SEQ ID NO: 75133 - DNA, 13 bp, Artificial Sequence
  Oligonucleotide for detection of SNP TSC0019285
tttatagtgggty

SEQ ID NO: 75134 - DNA, 13 bp, Artificial Sequence
  Oligonucleotide for detection of SNP TSC0019285
racccactataaa

SEQ ID NO: 75135 - DNA, 13 bp, Artificial Sequence
  Oligonucleotide for detection of SNP TSC0019286
ttaatttggttga

SEQ ID NO: 75136 - DNA, 13 bp, Artificial Sequence
  Oligonucleotide for detection of SNP TSC0019286
tcaaccaaattaa

SEQ ID NO: 75137 - DNA, 13 bp, Artificial Sequence
  Oligonucleotide for detection of SNP TSC0019286
ttaattcggttga

SEQ ID NO: 75138 - DNA, 13 bp, Artificial Sequence
  Oligonucleotide for detection of SNP TSC0019286
tcaaccgaattaa

SEQ ID NO: 75139 - DNA, 13 bp, Artificial Sequence
  Oligonucleotide for detection of SNP TSC0019286
ttaattgagttaa

SEQ ID NO: 75140 - DNA, 13 bp, Artificial Sequence
  Oligonucleotide for detection of SNP TSC0019286
ttaactcaattaa

SEQ ID NO: 75141 - DNA, 13 bp, Artificial Sequence
  Oligonucleotide for detection of SNP TSC0019286
ttaattaagttaa

SEQ ID NO: 75142 - DNA, 13 bp, Artificial Sequence
  Oligonucleotide for detection of SNP TSC0019286
ttaacttaattaa

SEQ ID NO: 75143 - DNA, 13 bp, Artificial Sequence
  Oligonucleotide for detection of SNP TSC0019286
ttaatcgagttaa

SEQ ID NO: 75144 - DNA, 13 bp, Artificial Sequence
  Oligonucleotide for detection of SNP TSC0019286
ttaactcgattaa

SEQ ID NO: 75145 - DNA, 13 bp, Artificial Sequence
  Oligonucleotide for detection of SNP TSC0019287
ttgagggtttagg

SEQ ID NO: 75146 - DNA, 13 bp, Artificial Sequence
  Oligonucleotide for detection of SNP TSC0019287
cctaaaccctcaa

SEQ ID NO: 75147 - DNA, 13 bp, Artificial Sequence
  Oligonucleotide for detection of SNP TSC0019287
ttgaggttttagg

SEQ ID NO: 75148 - DNA, 13 bp, Artificial Sequence
  Oligonucleotide for detection of SNP TSC0019287
cctaaaacctcaa

SEQ ID NO: 75149 - DNA, 13 bp, Artificial Sequence
  Oligonucleotide for detection of SNP TSC0019287
tcgagggtttagg

SEQ ID NO: 75150 - DNA, 13 bp, Artificial Sequence
  Oligonucleotide for detection of SNP TSC0019287
cctaaaccctcga

SEQ ID NO: 75151 - DNA, 13 bp, Artificial Sequence
  Oligonucleotide for detection of SNP TSC0019287
tcgaggttttagg

SEQ ID NO: 75152 - DNA, 13 bp, Artificial Sequence
  Oligonucleotide for detection of SNP TSC0019287
cctaaaacctcga

SEQ ID NO: 75153 - DNA, 13 bp, Artificial Sequence
  Oligonucleotide for detection of SNP TSC0019287
tttggatttttgg

SEQ ID NO: 75154 - DNA, 13 bp, Artificial Sequence
  Oligonucleotide for detection of SNP TSC0019287
ccaaaaatccaaa

SEQ ID NO: 75155 - DNA, 13 bp, Artificial Sequence
  Oligonucleotide for detection of SNP TSC0019287
tttggaattttgg

SEQ ID NO: 75156 - DNA, 13 bp, Artificial Sequence
  Oligonucleotide for detection of SNP TSC0019287
ccaaaattccaaa

SEQ ID NO: 75157 - DNA, 13 bp, Artificial Sequence
  Oligonucleotide for detection of SNP TSC0019287
tttggattttcgg

SEQ ID NO: 75158 - DNA, 13 bp, Artificial Sequence
  Oligonucleotide for detection of SNP TSC0019287
ccgaaaatccaaa

SEQ ID NO: 75159 - DNA, 13 bp, Artificial Sequence
  Oligonucleotide for detection of SNP TSC0019287
tttggaatttcgg

SEQ ID NO: 75160 - DNA, 13 bp, Artificial Sequence
  Oligonucleotide for detection of SNP TSC0019287
ccgaaattccaaa

SEQ ID NO: 75161 - DNA, 13 bp, Artificial Sequence
  Oligonucleotide for detection of SNP TSC0019289
taaaaaattatga

SEQ ID NO: 75162 - DNA, 13 bp, Artificial Sequence
  Oligonucleotide for detection of SNP TSC0019289
tcataatttttta

SEQ ID NO: 75163 - DNA, 13 bp, Artificial Sequence
  Oligonucleotide for detection of SNP TSC0019289
taaaaagttatga

SEQ ID NO: 75164 - DNA, 13 bp, Artificial Sequence
  Oligonucleotide for detection of SNP TSC0019289
tcataacttttta

SEQ ID NO: 75165 - DNA, 13 bp, Artificial Sequence
  Oligonucleotide for detection of SNP TSC0019290
ataattaaatgay

SEQ ID NO: 75166 - DNA, 13 bp, Artificial Sequence
  Oligonucleotide for detection of SNP TSC0019290
rtcatttaattat

SEQ ID NO: 75167 - DNA, 13 bp, Artificial Sequence
  Oligonucleotide for detection of SNP TSC0019290
ataatttaatgay

SEQ ID NO: 75168 - DNA, 13 bp, Artificial Sequence
  Oligonucleotide for detection of SNP TSC0019290
rtcattaaattat

SEQ ID NO: 75169 - DNA, 13 bp, Artificial Sequence
  Oligonucleotide for detection of SNP TSC0019290
gttatttggttat

SEQ ID NO: 75170 - DNA, 13 bp, Artificial Sequence
  Oligonucleotide for detection of SNP TSC0019290
ataaccaaataac

SEQ ID NO: 75171 - DNA, 13 bp, Artificial Sequence
  Oligonucleotide for detection of SNP TSC0019290
gttattgggttat

SEQ ID NO: 75172 - DNA, 13 bp, Artificial Sequence
  Oligonucleotide for detection of SNP TSC0019290
ataacccaataac

SEQ ID NO: 75173 - DNA, 13 bp, Artificial Sequence
  Oligonucleotide for detection of SNP TSC0019294
attagtgtttaga

SEQ ID NO: 75174 - DNA, 13 bp, Artificial Sequence
  Oligonucleotide for detection of SNP TSC0019294
tctaaacactaat

SEQ ID NO: 75175 - DNA, 13 bp, Artificial Sequence
  Oligonucleotide for detection of SNP TSC0019294
attagtatttaga

SEQ ID NO: 75176 - DNA, 13 bp, Artificial Sequence
  Oligonucleotide for detection of SNP TSC0019294
tctaaatactaat

SEQ ID NO: 75177 - DNA, 13 bp, Artificial Sequence
  Oligonucleotide for detection of SNP TSC0019298
tattgtgtgtggy

SEQ ID NO: 75178 - DNA, 13 bp, Artificial Sequence
  Oligonucleotide for detection of SNP TSC0019298
rccacacacaata

SEQ ID NO: 75179 - DNA, 13 bp, Artificial Sequence
  Oligonucleotide for detection of SNP TSC0019298
tattgtatgtggy

SEQ ID NO: 75180 - DNA, 13 bp, Artificial Sequence
  Oligonucleotide for detection of SNP TSC0019298
rccacatacaata

SEQ ID NO: 75181 - DNA, 13 bp, Artificial Sequence
  Oligonucleotide for detection of SNP TSC0019299
attttttggagtt

SEQ ID NO: 75182 - DNA, 13 bp, Artificial Sequence
  Oligonucleotide for detection of SNP TSC0019299
aactccaaaaaat

SEQ ID NO: 75183 - DNA, 13 bp, Artificial Sequence
  Oligonucleotide for detection of SNP TSC0019299
atttttcggagtt

SEQ ID NO: 75184 - DNA, 13 bp, Artificial Sequence
  Oligonucleotide for detection of SNP TSC0019299
aactccgaaaaat

SEQ ID NO: 75185 - DNA, 13 bp, Artificial Sequence
  Oligonucleotide for detection of SNP TSC0019299
aattttgagaaat

SEQ ID NO: 75186 - DNA, 13 bp, Artificial Sequence
  Oligonucleotide for detection of SNP TSC0019299
atttctcaaaatt

SEQ ID NO: 75187 - DNA, 13 bp, Artificial Sequence
  Oligonucleotide for detection of SNP TSC0019299
aattttaagaaat

SEQ ID NO: 75188 - DNA, 13 bp, Artificial Sequence
  Oligonucleotide for detection of SNP TSC0019299
atttcttaaaatt

SEQ ID NO: 75189 - DNA, 13 bp, Artificial Sequence
  Oligonucleotide for detection of SNP TSC0019299
aatttcgagaaat

SEQ ID NO: 75190 - DNA, 13 bp, Artificial Sequence
  Oligonucleotide for detection of SNP TSC0019299
atttctcgaaatt

SEQ ID NO: 75191 - DNA, 13 bp, Artificial Sequence
  Oligonucleotide for detection of SNP TSC0019300
taatattggtgaa

SEQ ID NO: 75192 - DNA, 13 bp, Artificial Sequence
  Oligonucleotide for detection of SNP TSC0019300
ttcaccaatatta

SEQ ID NO: 75193 - DNA, 13 bp, Artificial Sequence
  Oligonucleotide for detection of SNP TSC0019300
taatatcggtgaa

SEQ ID NO: 75194 - DNA, 13 bp, Artificial Sequence
  Oligonucleotide for detection of SNP TSC0019300
ttcaccgatatta

SEQ ID NO: 75195 - DNA, 13 bp, Artificial Sequence
  Oligonucleotide for detection of SNP TSC0019300
tttattgatgtta

SEQ ID NO: 75196 - DNA, 13 bp, Artificial Sequence
  Oligonucleotide for detection of SNP TSC0019300
taacatcaataaa

SEQ ID NO: 75197 - DNA, 13 bp, Artificial Sequence
  Oligonucleotide for detection of SNP TSC0019300
tttattaatgtta

SEQ ID NO: 75198 - DNA, 13 bp, Artificial Sequence
  Oligonucleotide for detection of SNP TSC0019300
taacattaataaa

SEQ ID NO: 75199 - DNA, 13 bp, Artificial Sequence
  Oligonucleotide for detection of SNP TSC0019300
tttatcgatgtta

SEQ ID NO: 75200 - DNA, 13 bp, Artificial Sequence
  Oligonucleotide for detection of SNP TSC0019300
taacatcgataaa

SEQ ID NO: 75201 - DNA, 13 bp, Artificial Sequence
  Oligonucleotide for detection of SNP TSC0019303
agggagtgggggt

SEQ ID NO: 75202 - DNA, 13 bp, Artificial Sequence
  Oligonucleotide for detection of SNP TSC0019303
acccccactccct

SEQ ID NO: 75203 - DNA, 13 bp, Artificial Sequence
  Oligonucleotide for detection of SNP TSC0019303
agggagcgggggt

SEQ ID NO: 75204 - DNA, 13 bp, Artificial Sequence
  Oligonucleotide for detection of SNP TSC0019303
acccccgctccct

SEQ ID NO: 75205 - DNA, 13 bp, Artificial Sequence
  Oligonucleotide for detection of SNP TSC0019304
ggagattgaggtt

SEQ ID NO: 75206 - DNA, 13 bp, Artificial Sequence
  Oligonucleotide for detection of SNP TSC0019304
aacctcaatctcc

SEQ ID NO: 75207 - DNA, 13 bp, Artificial Sequence
  Oligonucleotide for detection of SNP TSC0019304
ggagatcgaggtt

SEQ ID NO: 75208 - DNA, 13 bp, Artificial Sequence
  Oligonucleotide for detection of SNP TSC0019304
aacctcgatctcc

SEQ ID NO: 75209 - DNA, 13 bp, Artificial Sequence
  Oligonucleotide for detection of SNP TSC0019305
agggaagaaagta

SEQ ID NO: 75210 - DNA, 13 bp, Artificial Sequence
  Oligonucleotide for detection of SNP TSC0019305
tactttcttccct

SEQ ID NO: 75211 - DNA, 13 bp, Artificial Sequence
  Oligonucleotide for detection of SNP TSC0019305
agggaaaaaagta

SEQ ID NO: 75212 - DNA, 13 bp, Artificial Sequence
  Oligonucleotide for detection of SNP TSC0019305
tacttttttccct

SEQ ID NO: 75213 - DNA, 13 bp, Artificial Sequence
  Oligonucleotide for detection of SNP TSC0019306
tttgaaaaatagt

SEQ ID NO: 75214 - DNA, 13 bp, Artificial Sequence
  Oligonucleotide for detection of SNP TSC0019306
actatttttcaaa

SEQ ID NO: 75215 - DNA, 13 bp, Artificial Sequence
  Oligonucleotide for detection of SNP TSC0019306
tttgaataatagt

SEQ ID NO: 75216 - DNA, 13 bp, Artificial Sequence
  Oligonucleotide for detection of SNP TSC0019306
actattattcaaa

SEQ ID NO: 75217 - DNA, 13 bp, Artificial Sequence
  Oligonucleotide for detection of SNP TSC0019306
attgttttttagg

SEQ ID NO: 75218 - DNA, 13 bp, Artificial Sequence
  Oligonucleotide for detection of SNP TSC0019306
cctaaaaaacaat

SEQ ID NO: 75219 - DNA, 13 bp, Artificial Sequence
  Oligonucleotide for detection of SNP TSC0019306
attgttatttagg

SEQ ID NO: 75220 - DNA, 13 bp, Artificial Sequence
  Oligonucleotide for detection of SNP TSC0019306
cctaaataacaat

SEQ ID NO: 75221 - DNA, 13 bp, Artificial Sequence
  Oligonucleotide for detection of SNP TSC0019307
atttatgggaaag

SEQ ID NO: 75222 - DNA, 13 bp, Artificial Sequence
  Oligonucleotide for detection of SNP TSC0019307
ctttcccataaat

SEQ ID NO: 75223 - DNA, 13 bp, Artificial Sequence
  Oligonucleotide for detection of SNP TSC0019307
atttataggaaag

SEQ ID NO: 75224 - DNA, 13 bp, Artificial Sequence
  Oligonucleotide for detection of SNP TSC0019307
ctttcctataaat

SEQ ID NO: 75225 - DNA, 13 bp, Artificial Sequence
  Oligonucleotide for detection of SNP TSC0019311
gttataatatgag

SEQ ID NO: 75226 - DNA, 13 bp, Artificial Sequence
  Oligonucleotide for detection of SNP TSC0019311
ctcatattataac

SEQ ID NO: 75227 - DNA, 13 bp, Artificial Sequence
  Oligonucleotide for detection of SNP TSC0019311
gttatattatgag

SEQ ID NO: 75228 - DNA, 13 bp, Artificial Sequence
  Oligonucleotide for detection of SNP TSC0019311
ctcataatataac

SEQ ID NO: 75229 - DNA, 13 bp, Artificial Sequence
  Oligonucleotide for detection of SNP TSC0019311
tttatgttatgay

SEQ ID NO: 75230 - DNA, 13 bp, Artificial Sequence
  Oligonucleotide for detection of SNP TSC0019311
rtcataacataaa

SEQ ID NO: 75231 - DNA, 13 bp, Artificial Sequence
  Oligonucleotide for detection of SNP TSC0019311
tttatggtatgay

SEQ ID NO: 75232 - DNA, 13 bp, Artificial Sequence
  Oligonucleotide for detection of SNP TSC0019311
rtcataccataaa

SEQ ID NO: 75233 - DNA, 13 bp, Artificial Sequence
  Oligonucleotide for detection of SNP TSC0019315
tgtgttattttaa

SEQ ID NO: 75234 - DNA, 13 bp, Artificial Sequence
  Oligonucleotide for detection of SNP TSC0019315
ttaaaataacaca

SEQ ID NO: 75235 - DNA, 13 bp, Artificial Sequence
  Oligonucleotide for detection of SNP TSC0019315
tgtgttgttttaa

SEQ ID NO: 75236 - DNA, 13 bp, Artificial Sequence
  Oligonucleotide for detection of SNP TSC0019315
ttaaaacaacaca

SEQ ID NO: 75237 - DNA, 13 bp, Artificial Sequence
  Oligonucleotide for detection of SNP TSC0019315
tgtgtcgttttaa

SEQ ID NO: 75238 - DNA, 13 bp, Artificial Sequence
  Oligonucleotide for detection of SNP TSC0019315
ttaaaacgacaca

SEQ ID NO: 75239 - DNA, 13 bp, Artificial Sequence
  Oligonucleotide for detection of SNP TSC0019315
ttaagatggtata

SEQ ID NO: 75240 - DNA, 13 bp, Artificial Sequence
  Oligonucleotide for detection of SNP TSC0019315
tataccatcttaa

SEQ ID NO: 75241 - DNA, 13 bp, Artificial Sequence
  Oligonucleotide for detection of SNP TSC0019315
ttaagacggtata

SEQ ID NO: 75242 - DNA, 13 bp, Artificial Sequence
  Oligonucleotide for detection of SNP TSC0019315
tataccgtcttaa

SEQ ID NO: 75243 - DNA, 13 bp, Artificial Sequence
  Oligonucleotide for detection of SNP TSC0019317
ttgagtataagaa

SEQ ID NO: 75244 - DNA, 13 bp, Artificial Sequence
  Oligonucleotide for detection of SNP TSC0019317
ttcttatactcaa

SEQ ID NO: 75245 - DNA, 13 bp, Artificial Sequence
  Oligonucleotide for detection of SNP TSC0019317
ttgagtgtaagaa

SEQ ID NO: 75246 - DNA, 13 bp, Artificial Sequence
  Oligonucleotide for detection of SNP TSC0019317
ttcttacactcaa

SEQ ID NO: 75247 - DNA, 13 bp, Artificial Sequence
  Oligonucleotide for detection of SNP TSC0019318
ttatgggtttaty

SEQ ID NO: 75248 - DNA, 13 bp, Artificial Sequence
  Oligonucleotide for detection of SNP TSC0019318
rataaacccataa

SEQ ID NO: 75249 - DNA, 13 bp, Artificial Sequence
  Oligonucleotide for detection of SNP TSC0019318
ttatggttttaty

SEQ ID NO: 75250 - DNA, 13 bp, Artificial Sequence
  Oligonucleotide for detection of SNP TSC0019318
rataaaaccataa

SEQ ID NO: 75251 - DNA, 13 bp, Artificial Sequence
  Oligonucleotide for detection of SNP TSC0019318
ttacgggtttaty

SEQ ID NO: 75252 - DNA, 13 bp, Artificial Sequence
  Oligonucleotide for detection of SNP TSC0019318
rataaacccgtaa

SEQ ID NO: 75253 - DNA, 13 bp, Artificial Sequence
  Oligonucleotide for detection of SNP TSC0019318
ttacggttttaty

SEQ ID NO: 75254 - DNA, 13 bp, Artificial Sequence
  Oligonucleotide for detection of SNP TSC0019318
rataaaaccgtaa

SEQ ID NO: 75255 - DNA, 13 bp, Artificial Sequence
  Oligonucleotide for detection of SNP TSC0019318
gataaatttgtga

SEQ ID NO: 75256 - DNA, 13 bp, Artificial Sequence
  Oligonucleotide for detection of SNP TSC0019318
tcacaaatttatc

SEQ ID NO: 75257 - DNA, 13 bp, Artificial Sequence
  Oligonucleotide for detection of SNP TSC0019318
gataaaattgtga

SEQ ID NO: 75258 - DNA, 13 bp, Artificial Sequence
  Oligonucleotide for detection of SNP TSC0019318
tcacaattttatc

SEQ ID NO: 75259 - DNA, 13 bp, Artificial Sequence
  Oligonucleotide for detection of SNP TSC0019318
gataaattcgtga

SEQ ID NO: 75260 - DNA, 13 bp, Artificial Sequence
  Oligonucleotide for detection of SNP TSC0019318
tcacgaatttatc

SEQ ID NO: 75261 - DNA, 13 bp, Artificial Sequence
  Oligonucleotide for detection of SNP TSC0019318
gataaaatcgtga

SEQ ID NO: 75262 - DNA, 13 bp, Artificial Sequence
  Oligonucleotide for detection of SNP TSC0019318
tcacgattttatc

SEQ ID NO: 75263 - DNA, 13 bp, Artificial Sequence
  Oligonucleotide for detection of SNP TSC0019319
gagaattgttggt

SEQ ID NO: 75264 - DNA, 13 bp, Artificial Sequence
  Oligonucleotide for detection of SNP TSC0019319
accaacaattctc

SEQ ID NO: 75265 - DNA, 13 bp, Artificial Sequence
  Oligonucleotide for detection of SNP TSC0019319
gagaatcgttggt

SEQ ID NO: 75266 - DNA, 13 bp, Artificial Sequence
  Oligonucleotide for detection of SNP TSC0019319
accaacgattctc

SEQ ID NO: 75267 - DNA, 13 bp, Artificial Sequence
  Oligonucleotide for detection of SNP TSC0019319
attagtgatttty

SEQ ID NO: 75268 - DNA, 13 bp, Artificial Sequence
  Oligonucleotide for detection of SNP TSC0019319
raaaatcactaat

SEQ ID NO: 75269 - DNA, 13 bp, Artificial Sequence
  Oligonucleotide for detection of SNP TSC0019319
attagtaatttty

SEQ ID NO: 75270 - DNA, 13 bp, Artificial Sequence
  Oligonucleotide for detection of SNP TSC0019319
raaaattactaat

SEQ ID NO: 75271 - DNA, 13 bp, Artificial Sequence
  Oligonucleotide for detection of SNP TSC0019319
attagcgatttty

SEQ ID NO: 75272 - DNA, 13 bp, Artificial Sequence
  Oligonucleotide for detection of SNP TSC0019319
raaaatcgctaat

SEQ ID NO: 75273 - DNA, 13 bp, Artificial Sequence
  Oligonucleotide for detection of SNP TSC0019320
tttttagttggga

SEQ ID NO: 75274 - DNA, 13 bp, Artificial Sequence
  Oligonucleotide for detection of SNP TSC0019320
tcccaactaaaaa

SEQ ID NO: 75275 - DNA, 13 bp, Artificial Sequence
  Oligonucleotide for detection of SNP TSC0019320
tttttaattggga

SEQ ID NO: 75276 - DNA, 13 bp, Artificial Sequence
  Oligonucleotide for detection of SNP TSC0019320
tcccaattaaaaa

SEQ ID NO: 75277 - DNA, 13 bp, Artificial Sequence
  Oligonucleotide for detection of SNP TSC0019321
tgaattagaaaay

SEQ ID NO: 75278 - DNA, 13 bp, Artificial Sequence
  Oligonucleotide for detection of SNP TSC0019321
rttttctaattca

SEQ ID NO: 75279 - DNA, 13 bp, Artificial Sequence
  Oligonucleotide for detection of SNP TSC0019321
tgaattggaaaay

SEQ ID NO: 75280 - DNA, 13 bp, Artificial Sequence
  Oligonucleotide for detection of SNP TSC0019321
rttttccaattca

SEQ ID NO: 75281 - DNA, 13 bp, Artificial Sequence
  Oligonucleotide for detection of SNP TSC0019321
tgaatcggaaaay

SEQ ID NO: 75282 - DNA, 13 bp, Artificial Sequence
  Oligonucleotide for detection of SNP TSC0019321
rttttccgattca

SEQ ID NO: 75283 - DNA, 13 bp, Artificial Sequence
  Oligonucleotide for detection of SNP TSC0019321
gttttttgattta

SEQ ID NO: 75284 - DNA, 13 bp, Artificial Sequence
  Oligonucleotide for detection of SNP TSC0019321
taaatcaaaaaac

SEQ ID NO: 75285 - DNA, 13 bp, Artificial Sequence
  Oligonucleotide for detection of SNP TSC0019321
gtttttcgattta

SEQ ID NO: 75286 - DNA, 13 bp, Artificial Sequence
  Oligonucleotide for detection of SNP TSC0019321
taaatcgaaaaac

SEQ ID NO: 75287 - DNA, 13 bp, Artificial Sequence
  Oligonucleotide for detection of SNP TSC0019324
aaaggagataaag

SEQ ID NO: 75288 - DNA, 13 bp, Artificial Sequence
  Oligonucleotide for detection of SNP TSC0019324
ctttatctccttt

SEQ ID NO: 75289 - DNA, 13 bp, Artificial Sequence
  Oligonucleotide for detection of SNP TSC0019324
aaaggaaataaag

SEQ ID NO: 75290 - DNA, 13 bp, Artificial Sequence
  Oligonucleotide for detection of SNP TSC0019324
ctttatttccttt

SEQ ID NO: 75291 - DNA, 13 bp, Artificial Sequence
  Oligonucleotide for detection of SNP TSC0019325
ttttgatttttat

SEQ ID NO: 75292 - DNA, 13 bp, Artificial Sequence
  Oligonucleotide for detection of SNP TSC0019325
ataaaaatcaaaa

SEQ ID NO: 75293 - DNA, 13 bp, Artificial Sequence
  Oligonucleotide for detection of SNP TSC0019325
ttttgagttttat

SEQ ID NO: 75294 - DNA, 13 bp, Artificial Sequence
  Oligonucleotide for detection of SNP TSC0019325
ataaaactcaaaa

SEQ ID NO: 75295 - DNA, 13 bp, Artificial Sequence
  Oligonucleotide for detection of SNP TSC0019325
atgggggttagaa

SEQ ID NO: 75296 - DNA, 13 bp, Artificial Sequence
  Oligonucleotide for detection of SNP TSC0019325
ttctaacccccat

SEQ ID NO: 75297 - DNA, 13 bp, Artificial Sequence
  Oligonucleotide for detection of SNP TSC0019325
atggggtttagaa

SEQ ID NO: 75298 - DNA, 13 bp, Artificial Sequence
  Oligonucleotide for detection of SNP TSC0019325
ttctaaaccccat

SEQ ID NO: 75299 - DNA, 13 bp, Artificial Sequence
  Oligonucleotide for detection of SNP TSC0019326
gtttaggggagtt

SEQ ID NO: 75300 - DNA, 13 bp, Artificial Sequence
  Oligonucleotide for detection of SNP TSC0019326
aactcccctaaac

SEQ ID NO: 75301 - DNA, 13 bp, Artificial Sequence
  Oligonucleotide for detection of SNP TSC0019326
gtttagtggagtt

SEQ ID NO: 75302 - DNA, 13 bp, Artificial Sequence
  Oligonucleotide for detection of SNP TSC0019326
aactccactaaac

SEQ ID NO: 75303 - DNA, 13 bp, Artificial Sequence
  Oligonucleotide for detection of SNP TSC0019326
agtttttttgggy

SEQ ID NO: 75304 - DNA, 13 bp, Artificial Sequence
  Oligonucleotide for detection of SNP TSC0019326
rcccaaaaaaact

SEQ ID NO: 75305 - DNA, 13 bp, Artificial Sequence
  Oligonucleotide for detection of SNP TSC0019326
agttttattgggy

SEQ ID NO: 75306 - DNA, 13 bp, Artificial Sequence
  Oligonucleotide for detection of SNP TSC0019326
rcccaataaaact

SEQ ID NO: 75307 - DNA, 13 bp, Artificial Sequence
  Oligonucleotide for detection of SNP TSC0019327
tttggtattttga

SEQ ID NO: 75308 - DNA, 13 bp, Artificial Sequence
  Oligonucleotide for detection of SNP TSC0019327
tcaaaataccaaa

SEQ ID NO: 75309 - DNA, 13 bp, Artificial Sequence
  Oligonucleotide for detection of SNP TSC0019327
tttggtgttttga

SEQ ID NO: 75310 - DNA, 13 bp, Artificial Sequence
  Oligonucleotide for detection of SNP TSC0019327
tcaaaacaccaaa

SEQ ID NO: 75311 - DNA, 13 bp, Artificial Sequence
  Oligonucleotide for detection of SNP TSC0019327
tttggcgttttga

SEQ ID NO: 75312 - DNA, 13 bp, Artificial Sequence
  Oligonucleotide for detection of SNP TSC0019327
tcaaaacgccaaa

SEQ ID NO: 75313 - DNA, 13 bp, Artificial Sequence
  Oligonucleotide for detection of SNP TSC0019327
ttaaagtgttaag

SEQ ID NO: 75314 - DNA, 13 bp, Artificial Sequence
  Oligonucleotide for detection of SNP TSC0019327
cttaacactttaa

SEQ ID NO: 75315 - DNA, 13 bp, Artificial Sequence
  Oligonucleotide for detection of SNP TSC0019327
ttaaagcgttaag

SEQ ID NO: 75316 - DNA, 13 bp, Artificial Sequence
  Oligonucleotide for detection of SNP TSC0019327
cttaacgctttaa

SEQ ID NO: 75317 - DNA, 13 bp, Artificial Sequence
  Oligonucleotide for detection of SNP TSC0019329
ttttagatattta

SEQ ID NO: 75318 - DNA, 13 bp, Artificial Sequence
  Oligonucleotide for detection of SNP TSC0019329
taaatatctaaaa

SEQ ID NO: 75319 - DNA, 13 bp, Artificial Sequence
  Oligonucleotide for detection of SNP TSC0019330
ttttaaggtttat

SEQ ID NO: 75320 - DNA, 13 bp, Artificial Sequence
  Oligonucleotide for detection of SNP TSC0019330
ataaaccttaaaa

SEQ ID NO: 75321 - DNA, 13 bp, Artificial Sequence
  Oligonucleotide for detection of SNP TSC0019330
ttttaaagtttat

SEQ ID NO: 75322 - DNA, 13 bp, Artificial Sequence
  Oligonucleotide for detection of SNP TSC0019330
ataaactttaaaa

SEQ ID NO: 75323 - DNA, 13 bp, Artificial Sequence
  Oligonucleotide for detection of SNP TSC0019331
gtatatgatttta

SEQ ID NO: 75324 - DNA, 13 bp, Artificial Sequence
  Oligonucleotide for detection of SNP TSC0019331
taaaatcatatac

SEQ ID NO: 75325 - DNA, 13 bp, Artificial Sequence
  Oligonucleotide for detection of SNP TSC0019331
gtatataatttta

SEQ ID NO: 75326 - DNA, 13 bp, Artificial Sequence
  Oligonucleotide for detection of SNP TSC0019331
taaaattatatac

SEQ ID NO: 75327 - DNA, 13 bp, Artificial Sequence
  Oligonucleotide for detection of SNP TSC0019332
ttttgggttgtga

SEQ ID NO: 75328 - DNA, 13 bp, Artificial Sequence
  Oligonucleotide for detection of SNP TSC0019332
tcacaacccaaaa

SEQ ID NO: 75329 - DNA, 13 bp, Artificial Sequence
  Oligonucleotide for detection of SNP TSC0019332
ttttggattgtga

SEQ ID NO: 75330 - DNA, 13 bp, Artificial Sequence
  Oligonucleotide for detection of SNP TSC0019332
tcacaatccaaaa

SEQ ID NO: 75331 - DNA, 13 bp, Artificial Sequence
  Oligonucleotide for detection of SNP TSC0019332
tttcgggttgtga

SEQ ID NO: 75332 - DNA, 13 bp, Artificial Sequence
  Oligonucleotide for detection of SNP TSC0019332
tcacaacccgaaa

SEQ ID NO: 75333 - DNA, 13 bp, Artificial Sequence
  Oligonucleotide for detection of SNP TSC0019332
tttcggattgtga

SEQ ID NO: 75334 - DNA, 13 bp, Artificial Sequence
  Oligonucleotide for detection of SNP TSC0019332
tcacaatccgaaa

SEQ ID NO: 75335 - DNA, 13 bp, Artificial Sequence
  Oligonucleotide for detection of SNP TSC0019334
ttgttgtggtttt

SEQ ID NO: 75336 - DNA, 13 bp, Artificial Sequence
  Oligonucleotide for detection of SNP TSC0019334
aaaaccacaacaa

SEQ ID NO: 75337 - DNA, 13 bp, Artificial Sequence
  Oligonucleotide for detection of SNP TSC0019334
ttgttggggtttt

SEQ ID NO: 75338 - DNA, 13 bp, Artificial Sequence
  Oligonucleotide for detection of SNP TSC0019334
aaaaccccaacaa

SEQ ID NO: 75339 - DNA, 13 bp, Artificial Sequence
  Oligonucleotide for detection of SNP TSC0019334
tcgttgtggtttt

SEQ ID NO: 75340 - DNA, 13 bp, Artificial Sequence
  Oligonucleotide for detection of SNP TSC0019334
aaaaccacaacga

SEQ ID NO: 75341 - DNA, 13 bp, Artificial Sequence
  Oligonucleotide for detection of SNP TSC0019334
tcgttggggtttt

SEQ ID NO: 75342 - DNA, 13 bp, Artificial Sequence
  Oligonucleotide for detection of SNP TSC0019334
aaaaccccaacga

SEQ ID NO: 75343 - DNA, 13 bp, Artificial Sequence
  Oligonucleotide for detection of SNP TSC0019334
ttgttgcggtttt

SEQ ID NO: 75344 - DNA, 13 bp, Artificial Sequence
  Oligonucleotide for detection of SNP TSC0019334
aaaaccgcaacaa

SEQ ID NO: 75345 - DNA, 13 bp, Artificial Sequence
  Oligonucleotide for detection of SNP TSC0019334
tcgttgcggtttt

SEQ ID NO: 75346 - DNA, 13 bp, Artificial Sequence
  Oligonucleotide for detection of SNP TSC0019334
aaaaccgcaacga

SEQ ID NO: 75347 - DNA, 13 bp, Artificial Sequence
  Oligonucleotide for detection of SNP TSC0019334
agagttgtagtgg

SEQ ID NO: 75348 - DNA, 13 bp, Artificial Sequence
  Oligonucleotide for detection of SNP TSC0019334
ccactacaactct

SEQ ID NO: 75349 - DNA, 13 bp, Artificial Sequence
  Oligonucleotide for detection of SNP TSC0019334
agagttttagtgg

SEQ ID NO: 75350 - DNA, 13 bp, Artificial Sequence
  Oligonucleotide for detection of SNP TSC0019334
ccactaaaactct

SEQ ID NO: 75351 - DNA, 13 bp, Artificial Sequence
  Oligonucleotide for detection of SNP TSC0019334
agagtcgtagtgg

SEQ ID NO: 75352 - DNA, 13 bp, Artificial Sequence
  Oligonucleotide for detection of SNP TSC0019334
ccactacgactct

SEQ ID NO: 75353 - DNA, 13 bp, Artificial Sequence
  Oligonucleotide for detection of SNP TSC0019334
agagttttagcgg

SEQ ID NO: 75354 - DNA, 13 bp, Artificial Sequence
  Oligonucleotide for detection of SNP TSC0019334
ccgctaaaactct

SEQ ID NO: 75355 - DNA, 13 bp, Artificial Sequence
  Oligonucleotide for detection of SNP TSC0019334
agagttgtagcgg

SEQ ID NO: 75356 - DNA, 13 bp, Artificial Sequence
  Oligonucleotide for detection of SNP TSC0019334
ccgctacaactct

SEQ ID NO: 75357 - DNA, 13 bp, Artificial Sequence
  Oligonucleotide for detection of SNP TSC0019334
agagtcgtagcgg

SEQ ID NO: 75358 - DNA, 13 bp, Artificial Sequence
  Oligonucleotide for detection of SNP TSC0019334
ccgctacgactct

SEQ ID NO: 75359 - DNA, 13 bp, Artificial Sequence
  Oligonucleotide for detection of SNP TSC0019335
tttaatgtgtgtt

SEQ ID NO: 75360 - DNA, 13 bp, Artificial Sequence
  Oligonucleotide for detection of SNP TSC0019335
aacacacattaaa

SEQ ID NO: 75361 - DNA, 13 bp, Artificial Sequence
  Oligonucleotide for detection of SNP TSC0019335
tttaatatgtgtt

SEQ ID NO: 75362 - DNA, 13 bp, Artificial Sequence
  Oligonucleotide for detection of SNP TSC0019335
aacacatattaaa

SEQ ID NO: 75363 - DNA, 13 bp, Artificial Sequence
  Oligonucleotide for detection of SNP TSC0019336
ttattaataaaag

SEQ ID NO: 75364 - DNA, 13 bp, Artificial Sequence
  Oligonucleotide for detection of SNP TSC0019336
cttttattaataa

SEQ ID NO: 75365 - DNA, 13 bp, Artificial Sequence
  Oligonucleotide for detection of SNP TSC0019336
ttattagtaaaag

SEQ ID NO: 75366 - DNA, 13 bp, Artificial Sequence
  Oligonucleotide for detection of SNP TSC0019336
cttttactaataa

SEQ ID NO: 75367 - DNA, 13 bp, Artificial Sequence
  Oligonucleotide for detection of SNP TSC0019339
ggttgtaaatatt

SEQ ID NO: 75368 - DNA, 13 bp, Artificial Sequence
  Oligonucleotide for detection of SNP TSC0019339
aatatttacaacc

SEQ ID NO: 75369 - DNA, 13 bp, Artificial Sequence
  Oligonucleotide for detection of SNP TSC0019339
ggttgtgaatatt

SEQ ID NO: 75370 - DNA, 13 bp, Artificial Sequence
  Oligonucleotide for detection of SNP TSC0019339
aatattcacaacc

SEQ ID NO: 75371 - DNA, 13 bp, Artificial Sequence
  Oligonucleotide for detection of SNP TSC0019340
agataggaggttt

SEQ ID NO: 75372 - DNA, 13 bp, Artificial Sequence
  Oligonucleotide for detection of SNP TSC0019340
aaacctcctatct

SEQ ID NO: 75373 - DNA, 13 bp, Artificial Sequence
  Oligonucleotide for detection of SNP TSC0019340
agatagaaggttt

SEQ ID NO: 75374 - DNA, 13 bp, Artificial Sequence
  Oligonucleotide for detection of SNP TSC0019340
aaaccttctatct

SEQ ID NO: 75375 - DNA, 13 bp, Artificial Sequence
  Oligonucleotide for detection of SNP TSC0019341
tattgagaatagt

SEQ ID NO: 75376 - DNA, 13 bp, Artificial Sequence
  Oligonucleotide for detection of SNP TSC0019341
actattctcaata

SEQ ID NO: 75377 - DNA, 13 bp, Artificial Sequence
  Oligonucleotide for detection of SNP TSC0019341
tattgaaaatagt

SEQ ID NO: 75378 - DNA, 13 bp, Artificial Sequence
  Oligonucleotide for detection of SNP TSC0019341
actattttcaata

SEQ ID NO: 75379 - DNA, 13 bp, Artificial Sequence
  Oligonucleotide for detection of SNP TSC0019342
tatgtggtaggta

SEQ ID NO: 75380 - DNA, 13 bp, Artificial Sequence
  Oligonucleotide for detection of SNP TSC0019342
tacctaccacata

SEQ ID NO: 75381 - DNA, 13 bp, Artificial Sequence
  Oligonucleotide for detection of SNP TSC0019342
tatgtgataggta

SEQ ID NO: 75382 - DNA, 13 bp, Artificial Sequence
  Oligonucleotide for detection of SNP TSC0019342
tacctatcacata

SEQ ID NO: 75383 - DNA, 13 bp, Artificial Sequence
  Oligonucleotide for detection of SNP TSC0019345
tttgttaaggagy

SEQ ID NO: 75384 - DNA, 13 bp, Artificial Sequence
  Oligonucleotide for detection of SNP TSC0019345
rctccttaacaaa

SEQ ID NO: 75385 - DNA, 13 bp, Artificial Sequence
  Oligonucleotide for detection of SNP TSC0019345
tttgttgaggagy

SEQ ID NO: 75386 - DNA, 13 bp, Artificial Sequence
  Oligonucleotide for detection of SNP TSC0019345
rctcctcaacaaa

SEQ ID NO: 75387 - DNA, 13 bp, Artificial Sequence
  Oligonucleotide for detection of SNP TSC0019345
tttgtcgaggagy

SEQ ID NO: 75388 - DNA, 13 bp, Artificial Sequence
  Oligonucleotide for detection of SNP TSC0019345
rctcctcgacaaa

SEQ ID NO: 75389 - DNA, 13 bp, Artificial Sequence
  Oligonucleotide for detection of SNP TSC0019345
gttttttggtagg

SEQ ID NO: 75390 - DNA, 13 bp, Artificial Sequence
  Oligonucleotide for detection of SNP TSC0019345
cctaccaaaaaac

SEQ ID NO: 75391 - DNA, 13 bp, Artificial Sequence
  Oligonucleotide for detection of SNP TSC0019345
gtttttcggtagg

SEQ ID NO: 75392 - DNA, 13 bp, Artificial Sequence
  Oligonucleotide for detection of SNP TSC0019345
cctaccgaaaaac

SEQ ID NO: 75393 - DNA, 13 bp, Artificial Sequence
  Oligonucleotide for detection of SNP TSC0019346
ttttaggtgatay

SEQ ID NO: 75394 - DNA, 13 bp, Artificial Sequence
  Oligonucleotide for detection of SNP TSC0019346
rtatcacctaaaa

SEQ ID NO: 75395 - DNA, 13 bp, Artificial Sequence
  Oligonucleotide for detection of SNP TSC0019346
ttttagttgatay

SEQ ID NO: 75396 - DNA, 13 bp, Artificial Sequence
  Oligonucleotide for detection of SNP TSC0019346
rtatcaactaaaa

SEQ ID NO: 75397 - DNA, 13 bp, Artificial Sequence
  Oligonucleotide for detection of SNP TSC0019346
gtattatttgagg

SEQ ID NO: 75398 - DNA, 13 bp, Artificial Sequence
  Oligonucleotide for detection of SNP TSC0019346
cctcaaataatac

SEQ ID NO: 75399 - DNA, 13 bp, Artificial Sequence
  Oligonucleotide for detection of SNP TSC0019346
gtattaattgagg

SEQ ID NO: 75400 - DNA, 13 bp, Artificial Sequence
  Oligonucleotide for detection of SNP TSC0019346
cctcaattaatac

SEQ ID NO: 75401 - DNA, 13 bp, Artificial Sequence
  Oligonucleotide for detection of SNP TSC0019347
ggtaggggttttg

SEQ ID NO: 75402 - DNA, 13 bp, Artificial Sequence
  Oligonucleotide for detection of SNP TSC0019347
caaaacccctacc

SEQ ID NO: 75403 - DNA, 13 bp, Artificial Sequence
  Oligonucleotide for detection of SNP TSC0019347
ggtaggagttttg

SEQ ID NO: 75404 - DNA, 13 bp, Artificial Sequence
  Oligonucleotide for detection of SNP TSC0019347
caaaactcctacc

SEQ ID NO: 75405 - DNA, 13 bp, Artificial Sequence
  Oligonucleotide for detection of SNP TSC0019349
ttttgtagtaggg

SEQ ID NO: 75406 - DNA, 13 bp, Artificial Sequence
  Oligonucleotide for detection of SNP TSC0019349
ccctactacaaaa

SEQ ID NO: 75407 - DNA, 13 bp, Artificial Sequence
  Oligonucleotide for detection of SNP TSC0019349
ttttgttgtaggg

SEQ ID NO: 75408 - DNA, 13 bp, Artificial Sequence
  Oligonucleotide for detection of SNP TSC0019349
ccctacaacaaaa

SEQ ID NO: 75409 - DNA, 13 bp, Artificial Sequence
  Oligonucleotide for detection of SNP TSC0019349
ttttattgtagag

SEQ ID NO: 75410 - DNA, 13 bp, Artificial Sequence
  Oligonucleotide for detection of SNP TSC0019349
ctctacaataaaa

SEQ ID NO: 75411 - DNA, 13 bp, Artificial Sequence
  Oligonucleotide for detection of SNP TSC0019349
ttttatagtagag

SEQ ID NO: 75412 - DNA, 13 bp, Artificial Sequence
  Oligonucleotide for detection of SNP TSC0019349
ctctactataaaa

SEQ ID NO: 75413 - DNA, 13 bp, Artificial Sequence
  Oligonucleotide for detection of SNP TSC0019351
aatgtattggaat

SEQ ID NO: 75414 - DNA, 13 bp, Artificial Sequence
  Oligonucleotide for detection of SNP TSC0019351
attccaatacatt

SEQ ID NO: 75415 - DNA, 13 bp, Artificial Sequence
  Oligonucleotide for detection of SNP TSC0019351
aatgtagtggaat

SEQ ID NO: 75416 - DNA, 13 bp, Artificial Sequence
  Oligonucleotide for detection of SNP TSC0019351
attccactacatt

SEQ ID NO: 75417 - DNA, 13 bp, Artificial Sequence
  Oligonucleotide for detection of SNP TSC0019351
attttagtgtatt

SEQ ID NO: 75418 - DNA, 13 bp, Artificial Sequence
  Oligonucleotide for detection of SNP TSC0019351
aatacactaaaat

SEQ ID NO: 75419 - DNA, 13 bp, Artificial Sequence
  Oligonucleotide for detection of SNP TSC0019351
attttattgtatt

SEQ ID NO: 75420 - DNA, 13 bp, Artificial Sequence
  Oligonucleotide for detection of SNP TSC0019351
aatacaataaaat

SEQ ID NO: 75421 - DNA, 13 bp, Artificial Sequence
  Oligonucleotide for detection of SNP TSC0019352
tagtagatgttgy

SEQ ID NO: 75422 - DNA, 13 bp, Artificial Sequence
  Oligonucleotide for detection of SNP TSC0019352
rcaacatctacta

SEQ ID NO: 75423 - DNA, 13 bp, Artificial Sequence
  Oligonucleotide for detection of SNP TSC0019352
tagtaggtgttgy

SEQ ID NO: 75424 - DNA, 13 bp, Artificial Sequence
  Oligonucleotide for detection of SNP TSC0019352
rcaacacctacta

SEQ ID NO: 75425 - DNA, 13 bp, Artificial Sequence
  Oligonucleotide for detection of SNP TSC0019352
tagtagacgttgy

SEQ ID NO: 75426 - DNA, 13 bp, Artificial Sequence
  Oligonucleotide for detection of SNP TSC0019352
rcaacgtctacta

SEQ ID NO: 75427 - DNA, 13 bp, Artificial Sequence
  Oligonucleotide for detection of SNP TSC0019352
tagtaggcgttgy

SEQ ID NO: 75428 - DNA, 13 bp, Artificial Sequence
  Oligonucleotide for detection of SNP TSC0019352
rcaacgcctacta

SEQ ID NO: 75429 - DNA, 13 bp, Artificial Sequence
  Oligonucleotide for detection of SNP TSC0019353
atttgggaagaag

SEQ ID NO: 75430 - DNA, 13 bp, Artificial Sequence
  Oligonucleotide for detection of SNP TSC0019353
cttcttcccaaat

SEQ ID NO: 75431 - DNA, 13 bp, Artificial Sequence
  Oligonucleotide for detection of SNP TSC0019353
atttggaaagaag

SEQ ID NO: 75432 - DNA, 13 bp, Artificial Sequence
  Oligonucleotide for detection of SNP TSC0019353
cttctttccaaat

SEQ ID NO: 75433 - DNA, 13 bp, Artificial Sequence
  Oligonucleotide for detection of SNP TSC0019357
tttgtgagataat

SEQ ID NO: 75434 - DNA, 13 bp, Artificial Sequence
  Oligonucleotide for detection of SNP TSC0019357
attatctcacaaa

SEQ ID NO: 75435 - DNA, 13 bp, Artificial Sequence
  Oligonucleotide for detection of SNP TSC0019357
tttgtgggataat

SEQ ID NO: 75436 - DNA, 13 bp, Artificial Sequence
  Oligonucleotide for detection of SNP TSC0019357
attatcccacaaa

SEQ ID NO: 75437 - DNA, 13 bp, Artificial Sequence
  Oligonucleotide for detection of SNP TSC0019359
gatgtatgtatgy

SEQ ID NO: 75438 - DNA, 13 bp, Artificial Sequence
  Oligonucleotide for detection of SNP TSC0019359
rcatacatacatc

SEQ ID NO: 75439 - DNA, 13 bp, Artificial Sequence
  Oligonucleotide for detection of SNP TSC0019359
gatgtacgtatgy

SEQ ID NO: 75440 - DNA, 13 bp, Artificial Sequence
  Oligonucleotide for detection of SNP TSC0019359
rcatacgtacatc

SEQ ID NO: 75441 - DNA, 13 bp, Artificial Sequence
  Oligonucleotide for detection of SNP TSC0019359
gtatgtgtgtaty

SEQ ID NO: 75442 - DNA, 13 bp, Artificial Sequence
  Oligonucleotide for detection of SNP TSC0019359
ratacacacatac

SEQ ID NO: 75443 - DNA, 13 bp, Artificial Sequence
  Oligonucleotide for detection of SNP TSC0019359
gtatgtatgtaty

SEQ ID NO: 75444 - DNA, 13 bp, Artificial Sequence
  Oligonucleotide for detection of SNP TSC0019359
ratacatacatac

SEQ ID NO: 75445 - DNA, 13 bp, Artificial Sequence
  Oligonucleotide for detection of SNP TSC0019359
gtatgcgtgtaty

SEQ ID NO: 75446 - DNA, 13 bp, Artificial Sequence
  Oligonucleotide for detection of SNP TSC0019359
ratacacgcatac

SEQ ID NO: 75447 - DNA, 13 bp, Artificial Sequence
  Oligonucleotide for detection of SNP TSC0019360
atagggggaattt

SEQ ID NO: 75448 - DNA, 13 bp, Artificial Sequence
  Oligonucleotide for detection of SNP TSC0019360
aaattccccctat

SEQ ID NO: 75449 - DNA, 13 bp, Artificial Sequence
  Oligonucleotide for detection of SNP TSC0019360
atagggtgaattt

SEQ ID NO: 75450 - DNA, 13 bp, Artificial Sequence
  Oligonucleotide for detection of SNP TSC0019360
aaattcaccctat

SEQ ID NO: 75451 - DNA, 13 bp, Artificial Sequence
  Oligonucleotide for detection of SNP TSC0019360
agattttttttgt

SEQ ID NO: 75452 - DNA, 13 bp, Artificial Sequence
  Oligonucleotide for detection of SNP TSC0019360
acaaaaaaaatct

SEQ ID NO: 75453 - DNA, 13 bp, Artificial Sequence
  Oligonucleotide for detection of SNP TSC0019360
agatttattttgt

SEQ ID NO: 75454 - DNA, 13 bp, Artificial Sequence
  Oligonucleotide for detection of SNP TSC0019360
acaaaataaatct

SEQ ID NO: 75455 - DNA, 13 bp, Artificial Sequence
  Oligonucleotide for detection of SNP TSC0019361
gaatttatggtty

SEQ ID NO: 75456 - DNA, 13 bp, Artificial Sequence
  Oligonucleotide for detection of SNP TSC0019361
raaccataaattc

SEQ ID NO: 75457 - DNA, 13 bp, Artificial Sequence
  Oligonucleotide for detection of SNP TSC0019361
gaatttgtggtty

SEQ ID NO: 75458 - DNA, 13 bp, Artificial Sequence
  Oligonucleotide for detection of SNP TSC0019361
raaccacaaattc

SEQ ID NO: 75459 - DNA, 13 bp, Artificial Sequence
  Oligonucleotide for detection of SNP TSC0019362
tgtgtatgttttt

SEQ ID NO: 75460 - DNA, 13 bp, Artificial Sequence
  Oligonucleotide for detection of SNP TSC0019362
aaaaacatacaca

SEQ ID NO: 75461 - DNA, 13 bp, Artificial Sequence
  Oligonucleotide for detection of SNP TSC0019362
tgtgtacgttttt

SEQ ID NO: 75462 - DNA, 13 bp, Artificial Sequence
  Oligonucleotide for detection of SNP TSC0019362
aaaaacgtacaca

SEQ ID NO: 75463 - DNA, 13 bp, Artificial Sequence
  Oligonucleotide for detection of SNP TSC0019362
aagaatgtatata

SEQ ID NO: 75464 - DNA, 13 bp, Artificial Sequence
  Oligonucleotide for detection of SNP TSC0019362
tatatacattctt

SEQ ID NO: 75465 - DNA, 13 bp, Artificial Sequence
  Oligonucleotide for detection of SNP TSC0019362
aagaatatatata

SEQ ID NO: 75466 - DNA, 13 bp, Artificial Sequence
  Oligonucleotide for detection of SNP TSC0019362
tatatatattctt

SEQ ID NO: 75467 - DNA, 13 bp, Artificial Sequence
  Oligonucleotide for detection of SNP TSC0019362
aagaacgtatata

SEQ ID NO: 75468 - DNA, 13 bp, Artificial Sequence
  Oligonucleotide for detection of SNP TSC0019362
tatatacgttctt

SEQ ID NO: 75469 - DNA, 13 bp, Artificial Sequence
  Oligonucleotide for detection of SNP TSC0019363
atatgagtaagta

SEQ ID NO: 75470 - DNA, 13 bp, Artificial Sequence
  Oligonucleotide for detection of SNP TSC0019363
tacttactcatat

SEQ ID NO: 75471 - DNA, 13 bp, Artificial Sequence
  Oligonucleotide for detection of SNP TSC0019363
atatgattaagta

SEQ ID NO: 75472 - DNA, 13 bp, Artificial Sequence
  Oligonucleotide for detection of SNP TSC0019363
tacttaatcatat

SEQ ID NO: 75473 - DNA, 13 bp, Artificial Sequence
  Oligonucleotide for detection of SNP TSC0019363
tatttatttatat

SEQ ID NO: 75474 - DNA, 13 bp, Artificial Sequence
  Oligonucleotide for detection of SNP TSC0019363
atataaataaata

SEQ ID NO: 75475 - DNA, 13 bp, Artificial Sequence
  Oligonucleotide for detection of SNP TSC0019363
tatttaattatat

SEQ ID NO: 75476 - DNA, 13 bp, Artificial Sequence
  Oligonucleotide for detection of SNP TSC0019363
atataattaaata

SEQ ID NO: 75477 - DNA, 13 bp, Artificial Sequence
  Oligonucleotide for detection of SNP TSC0019364
agttttagtagga

SEQ ID NO: 75478 - DNA, 13 bp, Artificial Sequence
  Oligonucleotide for detection of SNP TSC0019364
tcctactaaaact

SEQ ID NO: 75479 - DNA, 13 bp, Artificial Sequence
  Oligonucleotide for detection of SNP TSC0019364
agttttggtagga

SEQ ID NO: 75480 - DNA, 13 bp, Artificial Sequence
  Oligonucleotide for detection of SNP TSC0019364
tcctaccaaaact

SEQ ID NO: 75481 - DNA, 13 bp, Artificial Sequence
  Oligonucleotide for detection of SNP TSC0019364
agtttcggtagga

SEQ ID NO: 75482 - DNA, 13 bp, Artificial Sequence
  Oligonucleotide for detection of SNP TSC0019364
tcctaccgaaact

SEQ ID NO: 75483 - DNA, 13 bp, Artificial Sequence
  Oligonucleotide for detection of SNP TSC0019364
ttttgttggaatt

SEQ ID NO: 75484 - DNA, 13 bp, Artificial Sequence
  Oligonucleotide for detection of SNP TSC0019364
aattccaacaaaa

SEQ ID NO: 75485 - DNA, 13 bp, Artificial Sequence
  Oligonucleotide for detection of SNP TSC0019364
ttttgtcggaatt

SEQ ID NO: 75486 - DNA, 13 bp, Artificial Sequence
  Oligonucleotide for detection of SNP TSC0019364
aattccgacaaaa

SEQ ID NO: 75487 - DNA, 13 bp, Artificial Sequence
  Oligonucleotide for detection of SNP TSC0019365
aatttgattggtt

SEQ ID NO: 75488 - DNA, 13 bp, Artificial Sequence
  Oligonucleotide for detection of SNP TSC0019365
aaccaatcaaatt

SEQ ID NO: 75489 - DNA, 13 bp, Artificial Sequence
  Oligonucleotide for detection of SNP TSC0019365
aatttggttggtt

SEQ ID NO: 75490 - DNA, 13 bp, Artificial Sequence
  Oligonucleotide for detection of SNP TSC0019365
aaccaaccaaatt

SEQ ID NO: 75491 - DNA, 13 bp, Artificial Sequence
  Oligonucleotide for detection of SNP TSC0019366
tattgggattttt

SEQ ID NO: 75492 - DNA, 13 bp, Artificial Sequence
  Oligonucleotide for detection of SNP TSC0019366
aaaaatcccaata

SEQ ID NO: 75493 - DNA, 13 bp, Artificial Sequence
  Oligonucleotide for detection of SNP TSC0019366
tattggaattttt

SEQ ID NO: 75494 - DNA, 13 bp, Artificial Sequence
  Oligonucleotide for detection of SNP TSC0019366
aaaaattccaata

SEQ ID NO: 75495 - DNA, 13 bp, Artificial Sequence
  Oligonucleotide for detection of SNP TSC0019366
tatcgggattttt

SEQ ID NO: 75496 - DNA, 13 bp, Artificial Sequence
  Oligonucleotide for detection of SNP TSC0019366
aaaaatcccgata

SEQ ID NO: 75497 - DNA, 13 bp, Artificial Sequence
  Oligonucleotide for detection of SNP TSC0019366
tatcggaattttt

SEQ ID NO: 75498 - DNA, 13 bp, Artificial Sequence
  Oligonucleotide for detection of SNP TSC0019366
aaaaattccgata

SEQ ID NO: 75499 - DNA, 13 bp, Artificial Sequence
  Oligonucleotide for detection of SNP TSC0019367
tgtgtgaatggat

SEQ ID NO: 75500 - DNA, 13 bp, Artificial Sequence
  Oligonucleotide for detection of SNP TSC0019367
atccattcacaca

SEQ ID NO: 75501 - DNA, 13 bp, Artificial Sequence
  Oligonucleotide for detection of SNP TSC0019367
tgtgtggatggat

SEQ ID NO: 75502 - DNA, 13 bp, Artificial Sequence
  Oligonucleotide for detection of SNP TSC0019367
atccatccacaca

SEQ ID NO: 75503 - DNA, 13 bp, Artificial Sequence
  Oligonucleotide for detection of SNP TSC0019367
tgtgcgaatggat

SEQ ID NO: 75504 - DNA, 13 bp, Artificial Sequence
  Oligonucleotide for detection of SNP TSC0019367
atccattcgcaca

SEQ ID NO: 75505 - DNA, 13 bp, Artificial Sequence
  Oligonucleotide for detection of SNP TSC0019367
tgtgcggatggat

SEQ ID NO: 75506 - DNA, 13 bp, Artificial Sequence
  Oligonucleotide for detection of SNP TSC0019367
atccatccgcaca

SEQ ID NO: 75507 - DNA, 13 bp, Artificial Sequence
  Oligonucleotide for detection of SNP TSC0019368
aaaaaaaagaatt

SEQ ID NO: 75508 - DNA, 13 bp, Artificial Sequence
  Oligonucleotide for detection of SNP TSC0019368
aattctttttttt

SEQ ID NO: 75509 - DNA, 13 bp, Artificial Sequence
  Oligonucleotide for detection of SNP TSC0019369
taaaaaaatttag

SEQ ID NO: 75510 - DNA, 13 bp, Artificial Sequence
  Oligonucleotide for detection of SNP TSC0019369
ctaaattttttta

SEQ ID NO: 75511 - DNA, 13 bp, Artificial Sequence
  Oligonucleotide for detection of SNP TSC0019369
taaaaatatttag

SEQ ID NO: 75512 - DNA, 13 bp, Artificial Sequence
  Oligonucleotide for detection of SNP TSC0019369
ctaaatattttta

SEQ ID NO: 75513 - DNA, 13 bp, Artificial Sequence
  Oligonucleotide for detection of SNP TSC0019369
ttagatttttttg

SEQ ID NO: 75514 - DNA, 13 bp, Artificial Sequence
  Oligonucleotide for detection of SNP TSC0019369
caaaaaaatctaa

SEQ ID NO: 75515 - DNA, 13 bp, Artificial Sequence
  Oligonucleotide for detection of SNP TSC0019369
ttagatgtttttg

SEQ ID NO: 75516 - DNA, 13 bp, Artificial Sequence
  Oligonucleotide for detection of SNP TSC0019369
caaaaacatctaa

SEQ ID NO: 75517 - DNA, 13 bp, Artificial Sequence
  Oligonucleotide for detection of SNP TSC0019373
attgtgttttgtg

SEQ ID NO: 75518 - DNA, 13 bp, Artificial Sequence
  Oligonucleotide for detection of SNP TSC0019373
cacaaaacacaat

SEQ ID NO: 75519 - DNA, 13 bp, Artificial Sequence
  Oligonucleotide for detection of SNP TSC0019373
attgtggtttgtg

SEQ ID NO: 75520 - DNA, 13 bp, Artificial Sequence
  Oligonucleotide for detection of SNP TSC0019373
cacaaaccacaat

SEQ ID NO: 75521 - DNA, 13 bp, Artificial Sequence
  Oligonucleotide for detection of SNP TSC0019373
attgcgttttgtg

SEQ ID NO: 75522 - DNA, 13 bp, Artificial Sequence
  Oligonucleotide for detection of SNP TSC0019373
cacaaaacgcaat

SEQ ID NO: 75523 - DNA, 13 bp, Artificial Sequence
  Oligonucleotide for detection of SNP TSC0019373
attgcggtttgtg

SEQ ID NO: 75524 - DNA, 13 bp, Artificial Sequence
  Oligonucleotide for detection of SNP TSC0019373
cacaaaccgcaat

SEQ ID NO: 75525 - DNA, 13 bp, Artificial Sequence
  Oligonucleotide for detection of SNP TSC0019373
attgtgttttgcg

SEQ ID NO: 75526 - DNA, 13 bp, Artificial Sequence
  Oligonucleotide for detection of SNP TSC0019373
cgcaaaacacaat

SEQ ID NO: 75527 - DNA, 13 bp, Artificial Sequence
  Oligonucleotide for detection of SNP TSC0019373
attgtggtttgcg

SEQ ID NO: 75528 - DNA, 13 bp, Artificial Sequence
  Oligonucleotide for detection of SNP TSC0019373
cgcaaaccacaat

SEQ ID NO: 75529 - DNA, 13 bp, Artificial Sequence
  Oligonucleotide for detection of SNP TSC0019373
attgcgttttgcg

SEQ ID NO: 75530 - DNA, 13 bp, Artificial Sequence
  Oligonucleotide for detection of SNP TSC0019373
cgcaaaacgcaat

SEQ ID NO: 75531 - DNA, 13 bp, Artificial Sequence
  Oligonucleotide for detection of SNP TSC0019373
attgcggtttgcg

SEQ ID NO: 75532 - DNA, 13 bp, Artificial Sequence
  Oligonucleotide for detection of SNP TSC0019373
cgcaaaccgcaat

SEQ ID NO: 75533 - DNA, 13 bp, Artificial Sequence
  Oligonucleotide for detection of SNP TSC0019373
tgtaaagtgtagt

SEQ ID NO: 75534 - DNA, 13 bp, Artificial Sequence
  Oligonucleotide for detection of SNP TSC0019373
actacactttaca

SEQ ID NO: 75535 - DNA, 13 bp, Artificial Sequence
  Oligonucleotide for detection of SNP TSC0019373
tgtaaattgtagt

SEQ ID NO: 75536 - DNA, 13 bp, Artificial Sequence
  Oligonucleotide for detection of SNP TSC0019373
actacaatttaca

SEQ ID NO: 75537 - DNA, 13 bp, Artificial Sequence
  Oligonucleotide for detection of SNP TSC0019373
cgtaaagtgtagt

SEQ ID NO: 75538 - DNA, 13 bp, Artificial Sequence
  Oligonucleotide for detection of SNP TSC0019373
actacactttacg

SEQ ID NO: 75539 - DNA, 13 bp, Artificial Sequence
  Oligonucleotide for detection of SNP TSC0019373
cgtaaattgtagt

SEQ ID NO: 75540 - DNA, 13 bp, Artificial Sequence
  Oligonucleotide for detection of SNP TSC0019373
actacaatttacg

SEQ ID NO: 75541 - DNA, 13 bp, Artificial Sequence
  Oligonucleotide for detection of SNP TSC0019373
tgtaaagcgtagt

SEQ ID NO: 75542 - DNA, 13 bp, Artificial Sequence
  Oligonucleotide for detection of SNP TSC0019373
actacgctttaca

SEQ ID NO: 75543 - DNA, 13 bp, Artificial Sequence
  Oligonucleotide for detection of SNP TSC0019373
tgtaaatcgtagt

SEQ ID NO: 75544 - DNA, 13 bp, Artificial Sequence
  Oligonucleotide for detection of SNP TSC0019373
actacgatttaca

SEQ ID NO: 75545 - DNA, 13 bp, Artificial Sequence
  Oligonucleotide for detection of SNP TSC0019373
cgtaaagcgtagt

SEQ ID NO: 75546 - DNA, 13 bp, Artificial Sequence
  Oligonucleotide for detection of SNP TSC0019373
actacgctttacg

SEQ ID NO: 75547 - DNA, 13 bp, Artificial Sequence
  Oligonucleotide for detection of SNP TSC0019373
cgtaaatcgtagt

SEQ ID NO: 75548 - DNA, 13 bp, Artificial Sequence
  Oligonucleotide for detection of SNP TSC0019373
actacgatttacg

SEQ ID NO: 75549 - DNA, 13 bp, Artificial Sequence
  Oligonucleotide for detection of SNP TSC0019377
gtggtttagggat

SEQ ID NO: 75550 - DNA, 13 bp, Artificial Sequence
  Oligonucleotide for detection of SNP TSC0019377
atccctaaaccac

SEQ ID NO: 75551 - DNA, 13 bp, Artificial Sequence
  Oligonucleotide for detection of SNP TSC0019377
gtggttgagggat

SEQ ID NO: 75552 - DNA, 13 bp, Artificial Sequence
  Oligonucleotide for detection of SNP TSC0019377
atccctcaaccac

SEQ ID NO: 75553 - DNA, 13 bp, Artificial Sequence
  Oligonucleotide for detection of SNP TSC0019377
gtggtcgagggat

SEQ ID NO: 75554 - DNA, 13 bp, Artificial Sequence
  Oligonucleotide for detection of SNP TSC0019377
atccctcgaccac

SEQ ID NO: 75555 - DNA, 13 bp, Artificial Sequence
  Oligonucleotide for detection of SNP TSC0019377
atttttgggttay

SEQ ID NO: 75556 - DNA, 13 bp, Artificial Sequence
  Oligonucleotide for detection of SNP TSC0019377
rtaacccaaaaat

SEQ ID NO: 75557 - DNA, 13 bp, Artificial Sequence
  Oligonucleotide for detection of SNP TSC0019377
attttttggttay

SEQ ID NO: 75558 - DNA, 13 bp, Artificial Sequence
  Oligonucleotide for detection of SNP TSC0019377
rtaaccaaaaaat

SEQ ID NO: 75559 - DNA, 13 bp, Artificial Sequence
  Oligonucleotide for detection of SNP TSC0019377
atttttcggttay

SEQ ID NO: 75560 - DNA, 13 bp, Artificial Sequence
  Oligonucleotide for detection of SNP TSC0019377
rtaaccgaaaaat

SEQ ID NO: 75561 - DNA, 13 bp, Artificial Sequence
  Oligonucleotide for detection of SNP TSC0019378
ttatttgatttgg

SEQ ID NO: 75562 - DNA, 13 bp, Artificial Sequence
  Oligonucleotide for detection of SNP TSC0019378
ccaaatcaaataa

SEQ ID NO: 75563 - DNA, 13 bp, Artificial Sequence
  Oligonucleotide for detection of SNP TSC0019378
ttatttaatttgg

SEQ ID NO: 75564 - DNA, 13 bp, Artificial Sequence
  Oligonucleotide for detection of SNP TSC0019378
ccaaattaaataa

SEQ ID NO: 75565 - DNA, 13 bp, Artificial Sequence
  Oligonucleotide for detection of SNP TSC0019379
ggaattgtttggg

SEQ ID NO: 75566 - DNA, 13 bp, Artificial Sequence
  Oligonucleotide for detection of SNP TSC0019379
cccaaacaattcc

SEQ ID NO: 75567 - DNA, 13 bp, Artificial Sequence
  Oligonucleotide for detection of SNP TSC0019379
ggaattttttggg

SEQ ID NO: 75568 - DNA, 13 bp, Artificial Sequence
  Oligonucleotide for detection of SNP TSC0019379
cccaaaaaattcc

SEQ ID NO: 75569 - DNA, 13 bp, Artificial Sequence
  Oligonucleotide for detection of SNP TSC0019379
tttaggtaattty

SEQ ID NO: 75570 - DNA, 13 bp, Artificial Sequence
  Oligonucleotide for detection of SNP TSC0019379
raaattacctaaa

SEQ ID NO: 75571 - DNA, 13 bp, Artificial Sequence
  Oligonucleotide for detection of SNP TSC0019379
tttaggaaattty

SEQ ID NO: 75572 - DNA, 13 bp, Artificial Sequence
  Oligonucleotide for detection of SNP TSC0019379
raaatttcctaaa

SEQ ID NO: 75573 - DNA, 13 bp, Artificial Sequence
  Oligonucleotide for detection of SNP TSC0019380
ggaatttgggagy

SEQ ID NO: 75574 - DNA, 13 bp, Artificial Sequence
  Oligonucleotide for detection of SNP TSC0019380
rctcccaaattcc

SEQ ID NO: 75575 - DNA, 13 bp, Artificial Sequence
  Oligonucleotide for detection of SNP TSC0019380
ggaattcgggagy

SEQ ID NO: 75576 - DNA, 13 bp, Artificial Sequence
  Oligonucleotide for detection of SNP TSC0019380
rctcccgaattcc

SEQ ID NO: 75577 - DNA, 13 bp, Artificial Sequence
  Oligonucleotide for detection of SNP TSC0019380
gtttttgaattty

SEQ ID NO: 75578 - DNA, 13 bp, Artificial Sequence
  Oligonucleotide for detection of SNP TSC0019380
raaattcaaaaac

SEQ ID NO: 75579 - DNA, 13 bp, Artificial Sequence
  Oligonucleotide for detection of SNP TSC0019380
gtttttaaattty

SEQ ID NO: 75580 - DNA, 13 bp, Artificial Sequence
  Oligonucleotide for detection of SNP TSC0019380
raaatttaaaaac

SEQ ID NO: 75581 - DNA, 13 bp, Artificial Sequence
  Oligonucleotide for detection of SNP TSC0019380
gttttcgaattty

SEQ ID NO: 75582 - DNA, 13 bp, Artificial Sequence
  Oligonucleotide for detection of SNP TSC0019380
raaattcgaaaac

SEQ ID NO: 75583 - DNA, 13 bp, Artificial Sequence
  Oligonucleotide for detection of SNP TSC0019381
attaggtttgtty

SEQ ID NO: 75584 - DNA, 13 bp, Artificial Sequence
  Oligonucleotide for detection of SNP TSC0019381
raacaaacctaat

SEQ ID NO: 75585 - DNA, 13 bp, Artificial Sequence
  Oligonucleotide for detection of SNP TSC0019381
attagggttgtty

SEQ ID NO: 75586 - DNA, 13 bp, Artificial Sequence
  Oligonucleotide for detection of SNP TSC0019381
raacaaccctaat

SEQ ID NO: 75587 - DNA, 13 bp, Artificial Sequence
  Oligonucleotide for detection of SNP TSC0019381
attaggttcgtty

SEQ ID NO: 75588 - DNA, 13 bp, Artificial Sequence
  Oligonucleotide for detection of SNP TSC0019381
raacgaacctaat

SEQ ID NO: 75589 - DNA, 13 bp, Artificial Sequence
  Oligonucleotide for detection of SNP TSC0019381
attagggtcgtty

SEQ ID NO: 75590 - DNA, 13 bp, Artificial Sequence
  Oligonucleotide for detection of SNP TSC0019381
raacgaccctaat

SEQ ID NO: 75591 - DNA, 13 bp, Artificial Sequence
  Oligonucleotide for detection of SNP TSC0019381
gggtgggtttggt

SEQ ID NO: 75592 - DNA, 13 bp, Artificial Sequence
  Oligonucleotide for detection of SNP TSC0019381
accaaacccaccc

SEQ ID NO: 75593 - DNA, 13 bp, Artificial Sequence
  Oligonucleotide for detection of SNP TSC0019381
gggtggttttggt

SEQ ID NO: 75594 - DNA, 13 bp, Artificial Sequence
  Oligonucleotide for detection of SNP TSC0019381
accaaaaccaccc

SEQ ID NO: 75595 - DNA, 13 bp, Artificial Sequence
  Oligonucleotide for detection of SNP TSC0019381
gggcgggtttggt

SEQ ID NO: 75596 - DNA, 13 bp, Artificial Sequence
  Oligonucleotide for detection of SNP TSC0019381
accaaacccgccc

SEQ ID NO: 75597 - DNA, 13 bp, Artificial Sequence
  Oligonucleotide for detection of SNP TSC0019381
gggcggttttggt

SEQ ID NO: 75598 - DNA, 13 bp, Artificial Sequence
  Oligonucleotide for detection of SNP TSC0019381
accaaaaccgccc

SEQ ID NO: 75599 - DNA, 13 bp, Artificial Sequence
  Oligonucleotide for detection of SNP TSC0019382
gggtagttttttg

SEQ ID NO: 75600 - DNA, 13 bp, Artificial Sequence
  Oligonucleotide for detection of SNP TSC0019382
caaaaaactaccc

SEQ ID NO: 75601 - DNA, 13 bp, Artificial Sequence
  Oligonucleotide for detection of SNP TSC0019382
gggtaggtttttg

SEQ ID NO: 75602 - DNA, 13 bp, Artificial Sequence
  Oligonucleotide for detection of SNP TSC0019382
caaaaacctaccc

SEQ ID NO: 75603 - DNA, 13 bp, Artificial Sequence
  Oligonucleotide for detection of SNP TSC0019382
gggtagtttttcg

SEQ ID NO: 75604 - DNA, 13 bp, Artificial Sequence
  Oligonucleotide for detection of SNP TSC0019382
cgaaaaactaccc

SEQ ID NO: 75605 - DNA, 13 bp, Artificial Sequence
  Oligonucleotide for detection of SNP TSC0019382
gggtaggttttcg

SEQ ID NO: 75606 - DNA, 13 bp, Artificial Sequence
  Oligonucleotide for detection of SNP TSC0019382
cgaaaacctaccc

SEQ ID NO: 75607 - DNA, 13 bp, Artificial Sequence
  Oligonucleotide for detection of SNP TSC0019382
tggagatttgtty

SEQ ID NO: 75608 - DNA, 13 bp, Artificial Sequence
  Oligonucleotide for detection of SNP TSC0019382
raacaaatctcca

SEQ ID NO: 75609 - DNA, 13 bp, Artificial Sequence
  Oligonucleotide for detection of SNP TSC0019382
cggagagttgtty

SEQ ID NO: 75610 - DNA, 13 bp, Artificial Sequence
  Oligonucleotide for detection of SNP TSC0019382
raacaactctccg

SEQ ID NO: 75611 - DNA, 13 bp, Artificial Sequence
  Oligonucleotide for detection of SNP TSC0019382
cggagatttgtty

SEQ ID NO: 75612 - DNA, 13 bp, Artificial Sequence
  Oligonucleotide for detection of SNP TSC0019382
raacaaatctccg

SEQ ID NO: 75613 - DNA, 13 bp, Artificial Sequence
  Oligonucleotide for detection of SNP TSC0019384
ataataaatttta

SEQ ID NO: 75614 - DNA, 13 bp, Artificial Sequence
  Oligonucleotide for detection of SNP TSC0019384
taaaatttattat

SEQ ID NO: 75615 - DNA, 13 bp, Artificial Sequence
  Oligonucleotide for detection of SNP TSC0019384
ataatatatttta

SEQ ID NO: 75616 - DNA, 13 bp, Artificial Sequence
  Oligonucleotide for detection of SNP TSC0019384
taaaatatattat

SEQ ID NO: 75617 - DNA, 13 bp, Artificial Sequence
  Oligonucleotide for detection of SNP TSC0019384
taaaatgtattat

SEQ ID NO: 75618 - DNA, 13 bp, Artificial Sequence
  Oligonucleotide for detection of SNP TSC0019384
ataatacatttta

SEQ ID NO: 75619 - DNA, 13 bp, Artificial Sequence
  Oligonucleotide for detection of SNP TSC0019385
ttaattaataaay

SEQ ID NO: 75620 - DNA, 13 bp, Artificial Sequence
  Oligonucleotide for detection of SNP TSC0019385
rtttattaattaa

SEQ ID NO: 75621 - DNA, 13 bp, Artificial Sequence
  Oligonucleotide for detection of SNP TSC0019385
ttaattgataaay

SEQ ID NO: 75622 - DNA, 13 bp, Artificial Sequence
  Oligonucleotide for detection of SNP TSC0019385
rtttatcaattaa

SEQ ID NO: 75623 - DNA, 13 bp, Artificial Sequence
  Oligonucleotide for detection of SNP TSC0019385
ttaatcgataaay

SEQ ID NO: 75624 - DNA, 13 bp, Artificial Sequence
  Oligonucleotide for detection of SNP TSC0019385
rtttatcgattaa

SEQ ID NO: 75625 - DNA, 13 bp, Artificial Sequence
  Oligonucleotide for detection of SNP TSC0019385
gtttgttggttaa

SEQ ID NO: 75626 - DNA, 13 bp, Artificial Sequence
  Oligonucleotide for detection of SNP TSC0019385
ttaaccaacaaac

SEQ ID NO: 75627 - DNA, 13 bp, Artificial Sequence
  Oligonucleotide for detection of SNP TSC0019385
gtttgtcggttaa

SEQ ID NO: 75628 - DNA, 13 bp, Artificial Sequence
  Oligonucleotide for detection of SNP TSC0019385
ttaaccgacaaac

SEQ ID NO: 75629 - DNA, 13 bp, Artificial Sequence
  Oligonucleotide for detection of SNP TSC0019386
aaatataaggtga

SEQ ID NO: 75630 - DNA, 13 bp, Artificial Sequence
  Oligonucleotide for detection of SNP TSC0019386
tcaccttatattt

SEQ ID NO: 75631 - DNA, 13 bp, Artificial Sequence
  Oligonucleotide for detection of SNP TSC0019386
aaatatgaggtga

SEQ ID NO: 75632 - DNA, 13 bp, Artificial Sequence
  Oligonucleotide for detection of SNP TSC0019386
tcacctcatattt

SEQ ID NO: 75633 - DNA, 13 bp, Artificial Sequence
  Oligonucleotide for detection of SNP TSC0019386
aaatacgaggtga

SEQ ID NO: 75634 - DNA, 13 bp, Artificial Sequence
  Oligonucleotide for detection of SNP TSC0019386
tcacctcgtattt

SEQ ID NO: 75635 - DNA, 13 bp, Artificial Sequence
  Oligonucleotide for detection of SNP TSC0019386
ttattttgtattt

SEQ ID NO: 75636 - DNA, 13 bp, Artificial Sequence
  Oligonucleotide for detection of SNP TSC0019386
aaatacaaaataa

SEQ ID NO: 75637 - DNA, 13 bp, Artificial Sequence
  Oligonucleotide for detection of SNP TSC0019386
ttatttcgtattt

SEQ ID NO: 75638 - DNA, 13 bp, Artificial Sequence
  Oligonucleotide for detection of SNP TSC0019386
aaatacgaaataa

SEQ ID NO: 75639 - DNA, 13 bp, Artificial Sequence
  Oligonucleotide for detection of SNP TSC0019387
aaagtagttatgy

SEQ ID NO: 75640 - DNA, 13 bp, Artificial Sequence
  Oligonucleotide for detection of SNP TSC0019387
rcataactacttt

SEQ ID NO: 75641 - DNA, 13 bp, Artificial Sequence
  Oligonucleotide for detection of SNP TSC0019387
aaagtaattatgy

SEQ ID NO: 75642 - DNA, 13 bp, Artificial Sequence
  Oligonucleotide for detection of SNP TSC0019387
rcataattacttt

SEQ ID NO: 75643 - DNA, 13 bp, Artificial Sequence
  Oligonucleotide for detection of SNP TSC0019390
ttattttggaaat

SEQ ID NO: 75644 - DNA, 13 bp, Artificial Sequence
  Oligonucleotide for detection of SNP TSC0019390
atttccaaaataa

SEQ ID NO: 75645 - DNA, 13 bp, Artificial Sequence
  Oligonucleotide for detection of SNP TSC0019390
ttatttgggaaat

SEQ ID NO: 75646 - DNA, 13 bp, Artificial Sequence
  Oligonucleotide for detection of SNP TSC0019390
atttcccaaataa

SEQ ID NO: 75647 - DNA, 13 bp, Artificial Sequence
  Oligonucleotide for detection of SNP TSC0019390
ttatttcggaaat

SEQ ID NO: 75648 - DNA, 13 bp, Artificial Sequence
  Oligonucleotide for detection of SNP TSC0019390
atttccgaaataa

SEQ ID NO: 75649 - DNA, 13 bp, Artificial Sequence
  Oligonucleotide for detection of SNP TSC0019390
atttttgaagtag

SEQ ID NO: 75650 - DNA, 13 bp, Artificial Sequence
  Oligonucleotide for detection of SNP TSC0019390
ctacttcaaaaat

SEQ ID NO: 75651 - DNA, 13 bp, Artificial Sequence
  Oligonucleotide for detection of SNP TSC0019390
attttttaagtag

SEQ ID NO: 75652 - DNA, 13 bp, Artificial Sequence
  Oligonucleotide for detection of SNP TSC0019390
ctacttaaaaaat

SEQ ID NO: 75653 - DNA, 13 bp, Artificial Sequence
  Oligonucleotide for detection of SNP TSC0019390
attttcgaagtag

SEQ ID NO: 75654 - DNA, 13 bp, Artificial Sequence
  Oligonucleotide for detection of SNP TSC0019390
ctacttcgaaaat

SEQ ID NO: 75655 - DNA, 13 bp, Artificial Sequence
  Oligonucleotide for detection of SNP TSC0019391
ttgtagggtttgg

SEQ ID NO: 75656 - DNA, 13 bp, Artificial Sequence
  Oligonucleotide for detection of SNP TSC0019391
ccaaaccctacaa

SEQ ID NO: 75657 - DNA, 13 bp, Artificial Sequence
  Oligonucleotide for detection of SNP TSC0019391
ttgtagagtttgg

SEQ ID NO: 75658 - DNA, 13 bp, Artificial Sequence
  Oligonucleotide for detection of SNP TSC0019391
ccaaactctacaa

SEQ ID NO: 75659 - DNA, 13 bp, Artificial Sequence
  Oligonucleotide for detection of SNP TSC0019392
ttattagtattat

SEQ ID NO: 75660 - DNA, 13 bp, Artificial Sequence
  Oligonucleotide for detection of SNP TSC0019392
ataatactaataa

SEQ ID NO: 75661 - DNA, 13 bp, Artificial Sequence
  Oligonucleotide for detection of SNP TSC0019392
atgatagtagtaa

SEQ ID NO: 75662 - DNA, 13 bp, Artificial Sequence
  Oligonucleotide for detection of SNP TSC0019392
ttactactatcat

SEQ ID NO: 75663 - DNA, 13 bp, Artificial Sequence
  Oligonucleotide for detection of SNP TSC0019392
atgatattagtaa

SEQ ID NO: 75664 - DNA, 13 bp, Artificial Sequence
  Oligonucleotide for detection of SNP TSC0019392
ttactaatatcat

SEQ ID NO: 75665 - DNA, 13 bp, Artificial Sequence
  Oligonucleotide for detection of SNP TSC0019393
ttaatgagtagag

SEQ ID NO: 75666 - DNA, 13 bp, Artificial Sequence
  Oligonucleotide for detection of SNP TSC0019393
ctctactcattaa

SEQ ID NO: 75667 - DNA, 13 bp, Artificial Sequence
  Oligonucleotide for detection of SNP TSC0019393
ttaatgtgtagag

SEQ ID NO: 75668 - DNA, 13 bp, Artificial Sequence
  Oligonucleotide for detection of SNP TSC0019393
ctctacacattaa

SEQ ID NO: 75669 - DNA, 13 bp, Artificial Sequence
  Oligonucleotide for detection of SNP TSC0019393
ttaatgcgtagag

SEQ ID NO: 75670 - DNA, 13 bp, Artificial Sequence
  Oligonucleotide for detection of SNP TSC0019393
ctctacgcattaa

SEQ ID NO: 75671 - DNA, 13 bp, Artificial Sequence
  Oligonucleotide for detection of SNP TSC0019393
ttttgtttattga

SEQ ID NO: 75672 - DNA, 13 bp, Artificial Sequence
  Oligonucleotide for detection of SNP TSC0019393
tcaataaacaaaa

SEQ ID NO: 75673 - DNA, 13 bp, Artificial Sequence
  Oligonucleotide for detection of SNP TSC0019393
ttttgtgtattga

SEQ ID NO: 75674 - DNA, 13 bp, Artificial Sequence
  Oligonucleotide for detection of SNP TSC0019393
tcaatacacaaaa

SEQ ID NO: 75675 - DNA, 13 bp, Artificial Sequence
  Oligonucleotide for detection of SNP TSC0019393
ttttgcgtattga

SEQ ID NO: 75676 - DNA, 13 bp, Artificial Sequence
  Oligonucleotide for detection of SNP TSC0019393
tcaatacgcaaaa

SEQ ID NO: 75677 - DNA, 13 bp, Artificial Sequence
  Oligonucleotide for detection of SNP TSC0019401
tggagaagatgga

SEQ ID NO: 75678 - DNA, 13 bp, Artificial Sequence
  Oligonucleotide for detection of SNP TSC0019401
tccatcttctcca

SEQ ID NO: 75679 - DNA, 13 bp, Artificial Sequence
  Oligonucleotide for detection of SNP TSC0019401
tggagaggatgga

SEQ ID NO: 75680 - DNA, 13 bp, Artificial Sequence
  Oligonucleotide for detection of SNP TSC0019401
tccatcctctcca

SEQ ID NO: 75681 - DNA, 13 bp, Artificial Sequence
  Oligonucleotide for detection of SNP TSC0019402
ttttgtattttay

SEQ ID NO: 75682 - DNA, 13 bp, Artificial Sequence
  Oligonucleotide for detection of SNP TSC0019402
rtaaaatacaaaa

SEQ ID NO: 75683 - DNA, 13 bp, Artificial Sequence
  Oligonucleotide for detection of SNP TSC0019402
ttttgttttttay

SEQ ID NO: 75684 - DNA, 13 bp, Artificial Sequence
  Oligonucleotide for detection of SNP TSC0019402
rtaaaaaacaaaa

SEQ ID NO: 75685 - DNA, 13 bp, Artificial Sequence
  Oligonucleotide for detection of SNP TSC0019402
gtgggatgtagaa

SEQ ID NO: 75686 - DNA, 13 bp, Artificial Sequence
  Oligonucleotide for detection of SNP TSC0019402
ttctacatcccac

SEQ ID NO: 75687 - DNA, 13 bp, Artificial Sequence
  Oligonucleotide for detection of SNP TSC0019402
gtgggaggtagaa

SEQ ID NO: 75688 - DNA, 13 bp, Artificial Sequence
  Oligonucleotide for detection of SNP TSC0019402
ttctacctcccac

SEQ ID NO: 75689 - DNA, 13 bp, Artificial Sequence
  Oligonucleotide for detection of SNP TSC0019403
gataggtggttty

SEQ ID NO: 75690 - DNA, 13 bp, Artificial Sequence
  Oligonucleotide for detection of SNP TSC0019403
raaaccacctatc

SEQ ID NO: 75691 - DNA, 13 bp, Artificial Sequence
  Oligonucleotide for detection of SNP TSC0019403
gataggcggttty

SEQ ID NO: 75692 - DNA, 13 bp, Artificial Sequence
  Oligonucleotide for detection of SNP TSC0019403
raaaccgcctatc

SEQ ID NO: 75693 - DNA, 13 bp, Artificial Sequence
  Oligonucleotide for detection of SNP TSC0019404
aatggaaaaaatt

SEQ ID NO: 75694 - DNA, 13 bp, Artificial Sequence
  Oligonucleotide for detection of SNP TSC0019404
aattttttccatt

SEQ ID NO: 75695 - DNA, 13 bp, Artificial Sequence
  Oligonucleotide for detection of SNP TSC0019404
aatggagaaaatt

SEQ ID NO: 75696 - DNA, 13 bp, Artificial Sequence
  Oligonucleotide for detection of SNP TSC0019404
aattttctccatt

SEQ ID NO: 75697 - DNA, 13 bp, Artificial Sequence
  Oligonucleotide for detection of SNP TSC0019405
tggagtgagtata

SEQ ID NO: 75698 - DNA, 13 bp, Artificial Sequence
  Oligonucleotide for detection of SNP TSC0019405
tatactcactcca

SEQ ID NO: 75699 - DNA, 13 bp, Artificial Sequence
  Oligonucleotide for detection of SNP TSC0019405
tggagttagtata

SEQ ID NO: 75700 - DNA, 13 bp, Artificial Sequence
  Oligonucleotide for detection of SNP TSC0019405
tatactaactcca

SEQ ID NO: 75701 - DNA, 13 bp, Artificial Sequence
  Oligonucleotide for detection of SNP TSC0019405
tgtgtttatttta

SEQ ID NO: 75702 - DNA, 13 bp, Artificial Sequence
  Oligonucleotide for detection of SNP TSC0019405
taaaataaacaca

SEQ ID NO: 75703 - DNA, 13 bp, Artificial Sequence
  Oligonucleotide for detection of SNP TSC0019405
tgtgttaatttta

SEQ ID NO: 75704 - DNA, 13 bp, Artificial Sequence
  Oligonucleotide for detection of SNP TSC0019405
taaaattaacaca

SEQ ID NO: 75705 - DNA, 13 bp, Artificial Sequence
  Oligonucleotide for detection of SNP TSC0019406
tttatgtttttta

SEQ ID NO: 75706 - DNA, 13 bp, Artificial Sequence
  Oligonucleotide for detection of SNP TSC0019406
taaaaaacataaa

SEQ ID NO: 75707 - DNA, 13 bp, Artificial Sequence
  Oligonucleotide for detection of SNP TSC0019406
tttatggttttta

SEQ ID NO: 75708 - DNA, 13 bp, Artificial Sequence
  Oligonucleotide for detection of SNP TSC0019406
taaaaaccataaa

SEQ ID NO: 75709 - DNA, 13 bp, Artificial Sequence
  Oligonucleotide for detection of SNP TSC0019406
taaaaggtatagg

SEQ ID NO: 75710 - DNA, 13 bp, Artificial Sequence
  Oligonucleotide for detection of SNP TSC0019406
cctatacctttta

SEQ ID NO: 75711 - DNA, 13 bp, Artificial Sequence
  Oligonucleotide for detection of SNP TSC0019406
taaaagttatagg

SEQ ID NO: 75712 - DNA, 13 bp, Artificial Sequence
  Oligonucleotide for detection of SNP TSC0019406
cctataactttta

SEQ ID NO: 75713 - DNA, 13 bp, Artificial Sequence
  Oligonucleotide for detection of SNP TSC0019407
ttgtttgtgtggy

SEQ ID NO: 75714 - DNA, 13 bp, Artificial Sequence
  Oligonucleotide for detection of SNP TSC0019407
rccacacaaacaa

SEQ ID NO: 75715 - DNA, 13 bp, Artificial Sequence
  Oligonucleotide for detection of SNP TSC0019407
ttgtttttgtggy

SEQ ID NO: 75716 - DNA, 13 bp, Artificial Sequence
  Oligonucleotide for detection of SNP TSC0019407
rccacaaaaacaa

SEQ ID NO: 75717 - DNA, 13 bp, Artificial Sequence
  Oligonucleotide for detection of SNP TSC0019407
gttatatagatag

SEQ ID NO: 75718 - DNA, 13 bp, Artificial Sequence
  Oligonucleotide for detection of SNP TSC0019407
ctatctatataac

SEQ ID NO: 75719 - DNA, 13 bp, Artificial Sequence
  Oligonucleotide for detection of SNP TSC0019407
gttataaagatag

SEQ ID NO: 75720 - DNA, 13 bp, Artificial Sequence
  Oligonucleotide for detection of SNP TSC0019407
ctatctttataac

SEQ ID NO: 75721 - DNA, 13 bp, Artificial Sequence
  Oligonucleotide for detection of SNP TSC0019410
gaatagatagaaa

SEQ ID NO: 75722 - DNA, 13 bp, Artificial Sequence
  Oligonucleotide for detection of SNP TSC0019410
tttctatctattc

SEQ ID NO: 75723 - DNA, 13 bp, Artificial Sequence
  Oligonucleotide for detection of SNP TSC0019410
gaataggtagaaa

SEQ ID NO: 75724 - DNA, 13 bp, Artificial Sequence
  Oligonucleotide for detection of SNP TSC0019410
tttctacctattc

SEQ ID NO: 75725 - DNA, 13 bp, Artificial Sequence
  Oligonucleotide for detection of SNP TSC0019411
gatttaaatagga

SEQ ID NO: 75726 - DNA, 13 bp, Artificial Sequence
  Oligonucleotide for detection of SNP TSC0019411
tcctatttaaatc

SEQ ID NO: 75727 - DNA, 13 bp, Artificial Sequence
  Oligonucleotide for detection of SNP TSC0019411
gatttagatagga

SEQ ID NO: 75728 - DNA, 13 bp, Artificial Sequence
  Oligonucleotide for detection of SNP TSC0019411
tcctatctaaatc

SEQ ID NO: 75729 - DNA, 13 bp, Artificial Sequence
  Oligonucleotide for detection of SNP TSC0019412
ttttaggataaga

SEQ ID NO: 75730 - DNA, 13 bp, Artificial Sequence
  Oligonucleotide for detection of SNP TSC0019412
tcttatcctaaaa

SEQ ID NO: 75731 - DNA, 13 bp, Artificial Sequence
  Oligonucleotide for detection of SNP TSC0019414
tgtggagtttggt

SEQ ID NO: 75732 - DNA, 13 bp, Artificial Sequence
  Oligonucleotide for detection of SNP TSC0019414
accaaactccaca

SEQ ID NO: 75733 - DNA, 13 bp, Artificial Sequence
  Oligonucleotide for detection of SNP TSC0019414
tgtggaatttggt

SEQ ID NO: 75734 - DNA, 13 bp, Artificial Sequence
  Oligonucleotide for detection of SNP TSC0019414
accaaattccaca

SEQ ID NO: 75735 - DNA, 13 bp, Artificial Sequence
  Oligonucleotide for detection of SNP TSC0019415
tagggtttggatt

SEQ ID NO: 75736 - DNA, 13 bp, Artificial Sequence
  Oligonucleotide for detection of SNP TSC0019415
aatccaaacccta

SEQ ID NO: 75737 - DNA, 13 bp, Artificial Sequence
  Oligonucleotide for detection of SNP TSC0019415
tagggtatggatt

SEQ ID NO: 75738 - DNA, 13 bp, Artificial Sequence
  Oligonucleotide for detection of SNP TSC0019415
aatccatacccta

SEQ ID NO: 75739 - DNA, 13 bp, Artificial Sequence
  Oligonucleotide for detection of SNP TSC0019419
taggttagagtgy

SEQ ID NO: 75740 - DNA, 13 bp, Artificial Sequence
  Oligonucleotide for detection of SNP TSC0019419
rcactctaaccta

SEQ ID NO: 75741 - DNA, 13 bp, Artificial Sequence
  Oligonucleotide for detection of SNP TSC0019422
tatatggtaagaa

SEQ ID NO: 75742 - DNA, 13 bp, Artificial Sequence
  Oligonucleotide for detection of SNP TSC0019422
ttcttaccatata

SEQ ID NO: 75743 - DNA, 13 bp, Artificial Sequence
  Oligonucleotide for detection of SNP TSC0019422
tatatgataagaa

SEQ ID NO: 75744 - DNA, 13 bp, Artificial Sequence
  Oligonucleotide for detection of SNP TSC0019422
ttcttatcatata

SEQ ID NO: 75745 - DNA, 13 bp, Artificial Sequence
  Oligonucleotide for detection of SNP TSC0019423
atggatagtgtgt

SEQ ID NO: 75746 - DNA, 13 bp, Artificial Sequence
  Oligonucleotide for detection of SNP TSC0019423
acacactatccat

SEQ ID NO: 75747 - DNA, 13 bp, Artificial Sequence
  Oligonucleotide for detection of SNP TSC0019423
atggatggtgtgt

SEQ ID NO: 75748 - DNA, 13 bp, Artificial Sequence
  Oligonucleotide for detection of SNP TSC0019423
acacaccatccat

SEQ ID NO: 75749 - DNA, 13 bp, Artificial Sequence
  Oligonucleotide for detection of SNP TSC0019424
tgattttggttty

SEQ ID NO: 75750 - DNA, 13 bp, Artificial Sequence
  Oligonucleotide for detection of SNP TSC0019424
raaaccaaaatca

SEQ ID NO: 75751 - DNA, 13 bp, Artificial Sequence
  Oligonucleotide for detection of SNP TSC0019424
tgatttcggttty

SEQ ID NO: 75752 - DNA, 13 bp, Artificial Sequence
  Oligonucleotide for detection of SNP TSC0019424
raaaccgaaatca

SEQ ID NO: 75753 - DNA, 13 bp, Artificial Sequence
  Oligonucleotide for detection of SNP TSC0019424
ggagttgaggtta

SEQ ID NO: 75754 - DNA, 13 bp, Artificial Sequence
  Oligonucleotide for detection of SNP TSC0019424
taacctcaactcc

SEQ ID NO: 75755 - DNA, 13 bp, Artificial Sequence
  Oligonucleotide for detection of SNP TSC0019424
ggagttaaggtta

SEQ ID NO: 75756 - DNA, 13 bp, Artificial Sequence
  Oligonucleotide for detection of SNP TSC0019424
taaccttaactcc

SEQ ID NO: 75757 - DNA, 13 bp, Artificial Sequence
  Oligonucleotide for detection of SNP TSC0019424
ggagtcgaggtta

SEQ ID NO: 75758 - DNA, 13 bp, Artificial Sequence
  Oligonucleotide for detection of SNP TSC0019424
taacctcgactcc

SEQ ID NO: 75759 - DNA, 13 bp, Artificial Sequence
  Oligonucleotide for detection of SNP TSC0019425
tgaggtagtaatg

SEQ ID NO: 75760 - DNA, 13 bp, Artificial Sequence
  Oligonucleotide for detection of SNP TSC0019425
cattactacctca

SEQ ID NO: 75761 - DNA, 13 bp, Artificial Sequence
  Oligonucleotide for detection of SNP TSC0019425
tgaggtggtaatg

SEQ ID NO: 75762 - DNA, 13 bp, Artificial Sequence
  Oligonucleotide for detection of SNP TSC0019425
cattaccacctca

SEQ ID NO: 75763 - DNA, 13 bp, Artificial Sequence
  Oligonucleotide for detection of SNP TSC0019425
tgaggtagtaacg

SEQ ID NO: 75764 - DNA, 13 bp, Artificial Sequence
  Oligonucleotide for detection of SNP TSC0019425
cgttactacctca

SEQ ID NO: 75765 - DNA, 13 bp, Artificial Sequence
  Oligonucleotide for detection of SNP TSC0019425
tgaggcggtaatg

SEQ ID NO: 75766 - DNA, 13 bp, Artificial Sequence
  Oligonucleotide for detection of SNP TSC0019425
cattaccgcctca

SEQ ID NO: 75767 - DNA, 13 bp, Artificial Sequence
  Oligonucleotide for detection of SNP TSC0019425
tgaggtggtaacg

SEQ ID NO: 75768 - DNA, 13 bp, Artificial Sequence
  Oligonucleotide for detection of SNP TSC0019425
cgttaccacctca

SEQ ID NO: 75769 - DNA, 13 bp, Artificial Sequence
  Oligonucleotide for detection of SNP TSC0019425
tgaggcggtaacg

SEQ ID NO: 75770 - DNA, 13 bp, Artificial Sequence
  Oligonucleotide for detection of SNP TSC0019425
cgttaccgcctca

SEQ ID NO: 75771 - DNA, 13 bp, Artificial Sequence
  Oligonucleotide for detection of SNP TSC0019425
tgttgttgtttta

SEQ ID NO: 75772 - DNA, 13 bp, Artificial Sequence
  Oligonucleotide for detection of SNP TSC0019425
taaaacaacaaca

SEQ ID NO: 75773 - DNA, 13 bp, Artificial Sequence
  Oligonucleotide for detection of SNP TSC0019425
cgttgttgtttta

SEQ ID NO: 75774 - DNA, 13 bp, Artificial Sequence
  Oligonucleotide for detection of SNP TSC0019425
taaaacaacaacg

SEQ ID NO: 75775 - DNA, 13 bp, Artificial Sequence
  Oligonucleotide for detection of SNP TSC0019425
tgttgtcgtttta

SEQ ID NO: 75776 - DNA, 13 bp, Artificial Sequence
  Oligonucleotide for detection of SNP TSC0019425
taaaacgacaaca

SEQ ID NO: 75777 - DNA, 13 bp, Artificial Sequence
  Oligonucleotide for detection of SNP TSC0019425
cgttgtcgtttta

SEQ ID NO: 75778 - DNA, 13 bp, Artificial Sequence
  Oligonucleotide for detection of SNP TSC0019425
taaaacgacaacg

SEQ ID NO: 75779 - DNA, 13 bp, Artificial Sequence
  Oligonucleotide for detection of SNP TSC0019426
ttttgaattggtt

SEQ ID NO: 75780 - DNA, 13 bp, Artificial Sequence
  Oligonucleotide for detection of SNP TSC0019426
aaccaattcaaaa

SEQ ID NO: 75781 - DNA, 13 bp, Artificial Sequence
  Oligonucleotide for detection of SNP TSC0019426
ttttgatttggtt

SEQ ID NO: 75782 - DNA, 13 bp, Artificial Sequence
  Oligonucleotide for detection of SNP TSC0019426
aaccaaatcaaaa

SEQ ID NO: 75783 - DNA, 13 bp, Artificial Sequence
  Oligonucleotide for detection of SNP TSC0019426
agttagtttaaga

SEQ ID NO: 75784 - DNA, 13 bp, Artificial Sequence
  Oligonucleotide for detection of SNP TSC0019426
tcttaaactaact

SEQ ID NO: 75785 - DNA, 13 bp, Artificial Sequence
  Oligonucleotide for detection of SNP TSC0019426
agttagattaaga

SEQ ID NO: 75786 - DNA, 13 bp, Artificial Sequence
  Oligonucleotide for detection of SNP TSC0019426
tcttaatctaact

SEQ ID NO: 75787 - DNA, 13 bp, Artificial Sequence
  Oligonucleotide for detection of SNP TSC0019428
tgtgggtgagggg

SEQ ID NO: 75788 - DNA, 13 bp, Artificial Sequence
  Oligonucleotide for detection of SNP TSC0019428
cccctcacccaca

SEQ ID NO: 75789 - DNA, 13 bp, Artificial Sequence
  Oligonucleotide for detection of SNP TSC0019428
tgtgggcgagggg

SEQ ID NO: 75790 - DNA, 13 bp, Artificial Sequence
  Oligonucleotide for detection of SNP TSC0019428
cccctcgcccaca

SEQ ID NO: 75791 - DNA, 13 bp, Artificial Sequence
  Oligonucleotide for detection of SNP TSC0019428
tttttcgtttata

SEQ ID NO: 75792 - DNA, 13 bp, Artificial Sequence
  Oligonucleotide for detection of SNP TSC0019428
tataaacgaaaaa

SEQ ID NO: 75793 - DNA, 13 bp, Artificial Sequence
  Oligonucleotide for detection of SNP TSC0019429
agaaaatggttat

SEQ ID NO: 75794 - DNA, 13 bp, Artificial Sequence
  Oligonucleotide for detection of SNP TSC0019429
ataaccattttct

SEQ ID NO: 75795 - DNA, 13 bp, Artificial Sequence
  Oligonucleotide for detection of SNP TSC0019429
agaaaacggttat

SEQ ID NO: 75796 - DNA, 13 bp, Artificial Sequence
  Oligonucleotide for detection of SNP TSC0019429
ataaccgttttct

SEQ ID NO: 75797 - DNA, 13 bp, Artificial Sequence
  Oligonucleotide for detection of SNP TSC0019429
atagttgtttttt

SEQ ID NO: 75798 - DNA, 13 bp, Artificial Sequence
  Oligonucleotide for detection of SNP TSC0019429
aaaaaacaactat

SEQ ID NO: 75799 - DNA, 13 bp, Artificial Sequence
  Oligonucleotide for detection of SNP TSC0019429
atagttatttttt

SEQ ID NO: 75800 - DNA, 13 bp, Artificial Sequence
  Oligonucleotide for detection of SNP TSC0019429
aaaaaataactat

SEQ ID NO: 75801 - DNA, 13 bp, Artificial Sequence
  Oligonucleotide for detection of SNP TSC0019429
atagtcgtttttt

SEQ ID NO: 75802 - DNA, 13 bp, Artificial Sequence
  Oligonucleotide for detection of SNP TSC0019429
aaaaaacgactat

SEQ ID NO: 75803 - DNA, 13 bp, Artificial Sequence
  Oligonucleotide for detection of SNP TSC0019430
gatttagatttag

SEQ ID NO: 75804 - DNA, 13 bp, Artificial Sequence
  Oligonucleotide for detection of SNP TSC0019430
ctaaatctaaatc

SEQ ID NO: 75805 - DNA, 13 bp, Artificial Sequence
  Oligonucleotide for detection of SNP TSC0019430
gatttatatttag

SEQ ID NO: 75806 - DNA, 13 bp, Artificial Sequence
  Oligonucleotide for detection of SNP TSC0019430
ctaaatataaatc

SEQ ID NO: 75807 - DNA, 13 bp, Artificial Sequence
  Oligonucleotide for detection of SNP TSC0019430
ttagatttaagty

SEQ ID NO: 75808 - DNA, 13 bp, Artificial Sequence
  Oligonucleotide for detection of SNP TSC0019430
racttaaatctaa

SEQ ID NO: 75809 - DNA, 13 bp, Artificial Sequence
  Oligonucleotide for detection of SNP TSC0019430
ttagatataagty

SEQ ID NO: 75810 - DNA, 13 bp, Artificial Sequence
  Oligonucleotide for detection of SNP TSC0019430
racttatatctaa

SEQ ID NO: 75811 - DNA, 13 bp, Artificial Sequence
  Oligonucleotide for detection of SNP TSC0019431
tatagaattatat

SEQ ID NO: 75812 - DNA, 13 bp, Artificial Sequence
  Oligonucleotide for detection of SNP TSC0019431
atataattctata

SEQ ID NO: 75813 - DNA, 13 bp, Artificial Sequence
  Oligonucleotide for detection of SNP TSC0019431
tatagagttatat

SEQ ID NO: 75814 - DNA, 13 bp, Artificial Sequence
  Oligonucleotide for detection of SNP TSC0019431
atataactctata

SEQ ID NO: 75815 - DNA, 13 bp, Artificial Sequence
  Oligonucleotide for detection of SNP TSC0019432
atattttggagty

SEQ ID NO: 75816 - DNA, 13 bp, Artificial Sequence
  Oligonucleotide for detection of SNP TSC0019432
ractccaaaatat

SEQ ID NO: 75817 - DNA, 13 bp, Artificial Sequence
  Oligonucleotide for detection of SNP TSC0019432
gatttttaaatgt

SEQ ID NO: 75818 - DNA, 13 bp, Artificial Sequence
  Oligonucleotide for detection of SNP TSC0019432
acatttaaaaatc

SEQ ID NO: 75819 - DNA, 13 bp, Artificial Sequence
  Oligonucleotide for detection of SNP TSC0019432
gattttaaaatgt

SEQ ID NO: 75820 - DNA, 13 bp, Artificial Sequence
  Oligonucleotide for detection of SNP TSC0019432
acattttaaaatc

SEQ ID NO: 75821 - DNA, 13 bp, Artificial Sequence
  Oligonucleotide for detection of SNP TSC0019433
tttttttttgaty

SEQ ID NO: 75822 - DNA, 13 bp, Artificial Sequence
  Oligonucleotide for detection of SNP TSC0019433
ratcaaaaaaaaa

SEQ ID NO: 75823 - DNA, 13 bp, Artificial Sequence
  Oligonucleotide for detection of SNP TSC0019433
ttttttgttgaty

SEQ ID NO: 75824 - DNA, 13 bp, Artificial Sequence
  Oligonucleotide for detection of SNP TSC0019433
ratcaacaaaaaa

SEQ ID NO: 75825 - DNA, 13 bp, Artificial Sequence
  Oligonucleotide for detection of SNP TSC0019433
gattaggaggaga

SEQ ID NO: 75826 - DNA, 13 bp, Artificial Sequence
  Oligonucleotide for detection of SNP TSC0019433
tctcctcctaatc

SEQ ID NO: 75827 - DNA, 13 bp, Artificial Sequence
  Oligonucleotide for detection of SNP TSC0019433
gattagtaggaga

SEQ ID NO: 75828 - DNA, 13 bp, Artificial Sequence
  Oligonucleotide for detection of SNP TSC0019433
tctcctactaatc

SEQ ID NO: 75829 - DNA, 13 bp, Artificial Sequence
  Oligonucleotide for detection of SNP TSC0019434
gatttttggagga

SEQ ID NO: 75830 - DNA, 13 bp, Artificial Sequence
  Oligonucleotide for detection of SNP TSC0019434
tcctccaaaaatc

SEQ ID NO: 75831 - DNA, 13 bp, Artificial Sequence
  Oligonucleotide for detection of SNP TSC0019434
gattttcggagga

SEQ ID NO: 75832 - DNA, 13 bp, Artificial Sequence
  Oligonucleotide for detection of SNP TSC0019434
tcctccgaaaatc

SEQ ID NO: 75833 - DNA, 13 bp, Artificial Sequence
  Oligonucleotide for detection of SNP TSC0019434
ttttttggggaty

SEQ ID NO: 75834 - DNA, 13 bp, Artificial Sequence
  Oligonucleotide for detection of SNP TSC0019434
ratccccaaaaaa

SEQ ID NO: 75835 - DNA, 13 bp, Artificial Sequence
  Oligonucleotide for detection of SNP TSC0019434
ttttttagggaty

SEQ ID NO: 75836 - DNA, 13 bp, Artificial Sequence
  Oligonucleotide for detection of SNP TSC0019434
ratccctaaaaaa

SEQ ID NO: 75837 - DNA, 13 bp, Artificial Sequence
  Oligonucleotide for detection of SNP TSC0019434
tttttcggggaty

SEQ ID NO: 75838 - DNA, 13 bp, Artificial Sequence
  Oligonucleotide for detection of SNP TSC0019434
ratccccgaaaaa

SEQ ID NO: 75839 - DNA, 13 bp, Artificial Sequence
  Oligonucleotide for detection of SNP TSC0019435
gaagattgataty

SEQ ID NO: 75840 - DNA, 13 bp, Artificial Sequence
  Oligonucleotide for detection of SNP TSC0019435
ratatcaatcttc

SEQ ID NO: 75841 - DNA, 13 bp, Artificial Sequence
  Oligonucleotide for detection of SNP TSC0019435
gaagatcgataty

SEQ ID NO: 75842 - DNA, 13 bp, Artificial Sequence
  Oligonucleotide for detection of SNP TSC0019435
ratatcgatcttc

SEQ ID NO: 75843 - DNA, 13 bp, Artificial Sequence
  Oligonucleotide for detection of SNP TSC0019435
gatgttggtttty

SEQ ID NO: 75844 - DNA, 13 bp, Artificial Sequence
  Oligonucleotide for detection of SNP TSC0019435
raaaaccaacatc

SEQ ID NO: 75845 - DNA, 13 bp, Artificial Sequence
  Oligonucleotide for detection of SNP TSC0019435
gatgttagtttty

SEQ ID NO: 75846 - DNA, 13 bp, Artificial Sequence
  Oligonucleotide for detection of SNP TSC0019435
raaaactaacatc

SEQ ID NO: 75847 - DNA, 13 bp, Artificial Sequence
  Oligonucleotide for detection of SNP TSC0019435
gatgtcggtttty

SEQ ID NO: 75848 - DNA, 13 bp, Artificial Sequence
  Oligonucleotide for detection of SNP TSC0019435
raaaaccgacatc

SEQ ID NO: 75849 - DNA, 13 bp, Artificial Sequence
  Oligonucleotide for detection of SNP TSC0019436
ggatttttggagg

SEQ ID NO: 75850 - DNA, 13 bp, Artificial Sequence
  Oligonucleotide for detection of SNP TSC0019436
cctccaaaaatcc

SEQ ID NO: 75851 - DNA, 13 bp, Artificial Sequence
  Oligonucleotide for detection of SNP TSC0019436
ggatttgtggagg

SEQ ID NO: 75852 - DNA, 13 bp, Artificial Sequence
  Oligonucleotide for detection of SNP TSC0019436
cctccacaaatcc

SEQ ID NO: 75853 - DNA, 13 bp, Artificial Sequence
  Oligonucleotide for detection of SNP TSC0019436
tttttagaaatty

SEQ ID NO: 75854 - DNA, 13 bp, Artificial Sequence
  Oligonucleotide for detection of SNP TSC0019436
raatttctaaaaa

SEQ ID NO: 75855 - DNA, 13 bp, Artificial Sequence
  Oligonucleotide for detection of SNP TSC0019436
tttttataaatty

SEQ ID NO: 75856 - DNA, 13 bp, Artificial Sequence
  Oligonucleotide for detection of SNP TSC0019436
raatttataaaaa

SEQ ID NO: 75857 - DNA, 13 bp, Artificial Sequence
  Oligonucleotide for detection of SNP TSC0019437
agtttaaggtaat

SEQ ID NO: 75858 - DNA, 13 bp, Artificial Sequence
  Oligonucleotide for detection of SNP TSC0019437
attaccttaaact

SEQ ID NO: 75859 - DNA, 13 bp, Artificial Sequence
  Oligonucleotide for detection of SNP TSC0019437
agtttagggtaat

SEQ ID NO: 75860 - DNA, 13 bp, Artificial Sequence
  Oligonucleotide for detection of SNP TSC0019437
attaccctaaact

SEQ ID NO: 75861 - DNA, 13 bp, Artificial Sequence
  Oligonucleotide for detection of SNP TSC0019438
ttatttggtagta

SEQ ID NO: 75862 - DNA, 13 bp, Artificial Sequence
  Oligonucleotide for detection of SNP TSC0019438
tactaccaaataa

SEQ ID NO: 75863 - DNA, 13 bp, Artificial Sequence
  Oligonucleotide for detection of SNP TSC0019438
ttatttagtagta

SEQ ID NO: 75864 - DNA, 13 bp, Artificial Sequence
  Oligonucleotide for detection of SNP TSC0019438
tactactaaataa

SEQ ID NO: 75865 - DNA, 13 bp, Artificial Sequence
  Oligonucleotide for detection of SNP TSC0019439
ttattggataggy

SEQ ID NO: 75866 - DNA, 13 bp, Artificial Sequence
  Oligonucleotide for detection of SNP TSC0019439
rcctatccaataa

SEQ ID NO: 75867 - DNA, 13 bp, Artificial Sequence
  Oligonucleotide for detection of SNP TSC0019439
ttattgtataggy

SEQ ID NO: 75868 - DNA, 13 bp, Artificial Sequence
  Oligonucleotide for detection of SNP TSC0019439
rcctatacaataa

SEQ ID NO: 75869 - DNA, 13 bp, Artificial Sequence
  Oligonucleotide for detection of SNP TSC0019439
gtttatttaataa

SEQ ID NO: 75870 - DNA, 13 bp, Artificial Sequence
  Oligonucleotide for detection of SNP TSC0019439
ttattaaataaac

SEQ ID NO: 75871 - DNA, 13 bp, Artificial Sequence
  Oligonucleotide for detection of SNP TSC0019439
gtttatataataa

SEQ ID NO: 75872 - DNA, 13 bp, Artificial Sequence
  Oligonucleotide for detection of SNP TSC0019439
ttattatataaac

SEQ ID NO: 75873 - DNA, 13 bp, Artificial Sequence
  Oligonucleotide for detection of SNP TSC0019443
gggttaaaggttg

SEQ ID NO: 75874 - DNA, 13 bp, Artificial Sequence
  Oligonucleotide for detection of SNP TSC0019443
caacctttaaccc

SEQ ID NO: 75875 - DNA, 13 bp, Artificial Sequence
  Oligonucleotide for detection of SNP TSC0019443
gggttagaggttg

SEQ ID NO: 75876 - DNA, 13 bp, Artificial Sequence
  Oligonucleotide for detection of SNP TSC0019443
caacctctaaccc

SEQ ID NO: 75877 - DNA, 13 bp, Artificial Sequence
  Oligonucleotide for detection of SNP TSC0019443
gggttaaaggtcg

SEQ ID NO: 75878 - DNA, 13 bp, Artificial Sequence
  Oligonucleotide for detection of SNP TSC0019443
cgacctttaaccc

SEQ ID NO: 75879 - DNA, 13 bp, Artificial Sequence
  Oligonucleotide for detection of SNP TSC0019443
gggttagaggtcg

SEQ ID NO: 75880 - DNA, 13 bp, Artificial Sequence
  Oligonucleotide for detection of SNP TSC0019443
cgacctctaaccc

SEQ ID NO: 75881 - DNA, 13 bp, Artificial Sequence
  Oligonucleotide for detection of SNP TSC0019444
attgattattagt

SEQ ID NO: 75882 - DNA, 13 bp, Artificial Sequence
  Oligonucleotide for detection of SNP TSC0019444
actaataatcaat

SEQ ID NO: 75883 - DNA, 13 bp, Artificial Sequence
  Oligonucleotide for detection of SNP TSC0019444
attgatgattagt

SEQ ID NO: 75884 - DNA, 13 bp, Artificial Sequence
  Oligonucleotide for detection of SNP TSC0019444
actaatcatcaat

SEQ ID NO: 75885 - DNA, 13 bp, Artificial Sequence
  Oligonucleotide for detection of SNP TSC0019445
ttgtttgtgtgta

SEQ ID NO: 75886 - DNA, 13 bp, Artificial Sequence
  Oligonucleotide for detection of SNP TSC0019445
tacacacaaacaa

SEQ ID NO: 75887 - DNA, 13 bp, Artificial Sequence
  Oligonucleotide for detection of SNP TSC0019445
ttgtttatgtgta

SEQ ID NO: 75888 - DNA, 13 bp, Artificial Sequence
  Oligonucleotide for detection of SNP TSC0019445
tacacataaacaa

SEQ ID NO: 75889 - DNA, 13 bp, Artificial Sequence
  Oligonucleotide for detection of SNP TSC0019446
atggatagataga

SEQ ID NO: 75890 - DNA, 13 bp, Artificial Sequence
  Oligonucleotide for detection of SNP TSC0019446
tctatctatccat

SEQ ID NO: 75891 - DNA, 13 bp, Artificial Sequence
  Oligonucleotide for detection of SNP TSC0019446
atggatggataga

SEQ ID NO: 75892 - DNA, 13 bp, Artificial Sequence
  Oligonucleotide for detection of SNP TSC0019446
tctatccatccat

SEQ ID NO: 75893 - DNA, 13 bp, Artificial Sequence
  Oligonucleotide for detection of SNP TSC0019447
atagatagataga

SEQ ID NO: 75894 - DNA, 13 bp, Artificial Sequence
  Oligonucleotide for detection of SNP TSC0019447
tctatctatctat

SEQ ID NO: 75895 - DNA, 13 bp, Artificial Sequence
  Oligonucleotide for detection of SNP TSC0019447
atagatggataga

SEQ ID NO: 75896 - DNA, 13 bp, Artificial Sequence
  Oligonucleotide for detection of SNP TSC0019447
tctatccatctat

SEQ ID NO: 75897 - DNA, 13 bp, Artificial Sequence
  Oligonucleotide for detection of SNP TSC0019448
taaaataaagtta

SEQ ID NO: 75898 - DNA, 13 bp, Artificial Sequence
  Oligonucleotide for detection of SNP TSC0019448
taactttatttta

SEQ ID NO: 75899 - DNA, 13 bp, Artificial Sequence
  Oligonucleotide for detection of SNP TSC0019448
taaaatgaagtta

SEQ ID NO: 75900 - DNA, 13 bp, Artificial Sequence
  Oligonucleotide for detection of SNP TSC0019448
taacttcatttta

SEQ ID NO: 75901 - DNA, 13 bp, Artificial Sequence
  Oligonucleotide for detection of SNP TSC0019448
taaaacgaagtta

SEQ ID NO: 75902 - DNA, 13 bp, Artificial Sequence
  Oligonucleotide for detection of SNP TSC0019448
taacttcgtttta

SEQ ID NO: 75903 - DNA, 13 bp, Artificial Sequence
  Oligonucleotide for detection of SNP TSC0019449
tgttaagttagta

SEQ ID NO: 75904 - DNA, 13 bp, Artificial Sequence
  Oligonucleotide for detection of SNP TSC0019449
tactaacttaaca

SEQ ID NO: 75905 - DNA, 13 bp, Artificial Sequence
  Oligonucleotide for detection of SNP TSC0019449
tgttaaattagta

SEQ ID NO: 75906 - DNA, 13 bp, Artificial Sequence
  Oligonucleotide for detection of SNP TSC0019449
tactaatttaaca

SEQ ID NO: 75907 - DNA, 13 bp, Artificial Sequence
  Oligonucleotide for detection of SNP TSC0019452
agattggttgagg

SEQ ID NO: 75908 - DNA, 13 bp, Artificial Sequence
  Oligonucleotide for detection of SNP TSC0019452
cctcaaccaatct

SEQ ID NO: 75909 - DNA, 13 bp, Artificial Sequence
  Oligonucleotide for detection of SNP TSC0019452
agattgtttgagg

SEQ ID NO: 75910 - DNA, 13 bp, Artificial Sequence
  Oligonucleotide for detection of SNP TSC0019452
cctcaaacaatct

SEQ ID NO: 75911 - DNA, 13 bp, Artificial Sequence
  Oligonucleotide for detection of SNP TSC0019452
ttttaattaattt

SEQ ID NO: 75912 - DNA, 13 bp, Artificial Sequence
  Oligonucleotide for detection of SNP TSC0019452
aaattaattaaaa

SEQ ID NO: 75913 - DNA, 13 bp, Artificial Sequence
  Oligonucleotide for detection of SNP TSC0019452
ttttaaataattt

SEQ ID NO: 75914 - DNA, 13 bp, Artificial Sequence
  Oligonucleotide for detection of SNP TSC0019452
aaattatttaaaa

SEQ ID NO: 75915 - DNA, 13 bp, Artificial Sequence
  Oligonucleotide for detection of SNP TSC0019453
gaggtatggggta

SEQ ID NO: 75916 - DNA, 13 bp, Artificial Sequence
  Oligonucleotide for detection of SNP TSC0019453
taccccatacctc

SEQ ID NO: 75917 - DNA, 13 bp, Artificial Sequence
  Oligonucleotide for detection of SNP TSC0019453
gaggtacggggta

SEQ ID NO: 75918 - DNA, 13 bp, Artificial Sequence
  Oligonucleotide for detection of SNP TSC0019453
taccccgtacctc

SEQ ID NO: 75919 - DNA, 13 bp, Artificial Sequence
  Oligonucleotide for detection of SNP TSC0019454
aaatgggttgatt

SEQ ID NO: 75920 - DNA, 13 bp, Artificial Sequence
  Oligonucleotide for detection of SNP TSC0019454
aatcaacccattt

SEQ ID NO: 75921 - DNA, 13 bp, Artificial Sequence
  Oligonucleotide for detection of SNP TSC0019454
aaatggattgatt

SEQ ID NO: 75922 - DNA, 13 bp, Artificial Sequence
  Oligonucleotide for detection of SNP TSC0019454
aatcaatccattt

SEQ ID NO: 75923 - DNA, 13 bp, Artificial Sequence
  Oligonucleotide for detection of SNP TSC0019455
ttagtaagtagty

SEQ ID NO: 75924 - DNA, 13 bp, Artificial Sequence
  Oligonucleotide for detection of SNP TSC0019455
ractacttactaa

SEQ ID NO: 75925 - DNA, 13 bp, Artificial Sequence
  Oligonucleotide for detection of SNP TSC0019455
ttagtatgtagty

SEQ ID NO: 75926 - DNA, 13 bp, Artificial Sequence
  Oligonucleotide for detection of SNP TSC0019455
ractacatactaa

SEQ ID NO: 75927 - DNA, 13 bp, Artificial Sequence
  Oligonucleotide for detection of SNP TSC0019455
ttagtacgtagty

SEQ ID NO: 75928 - DNA, 13 bp, Artificial Sequence
  Oligonucleotide for detection of SNP TSC0019455
ractacgtactaa

SEQ ID NO: 75929 - DNA, 13 bp, Artificial Sequence
  Oligonucleotide for detection of SNP TSC0019455
ggttgtttgttaa

SEQ ID NO: 75930 - DNA, 13 bp, Artificial Sequence
  Oligonucleotide for detection of SNP TSC0019455
ttaacaaacaacc

SEQ ID NO: 75931 - DNA, 13 bp, Artificial Sequence
  Oligonucleotide for detection of SNP TSC0019455
ggttgtgtgttaa

SEQ ID NO: 75932 - DNA, 13 bp, Artificial Sequence
  Oligonucleotide for detection of SNP TSC0019455
ttaacacacaacc

SEQ ID NO: 75933 - DNA, 13 bp, Artificial Sequence
  Oligonucleotide for detection of SNP TSC0019455
ggttgcgtgttaa

SEQ ID NO: 75934 - DNA, 13 bp, Artificial Sequence
  Oligonucleotide for detection of SNP TSC0019455
ttaacacgcaacc

SEQ ID NO: 75935 - DNA, 13 bp, Artificial Sequence
  Oligonucleotide for detection of SNP TSC0019456
aatgtatggttty

SEQ ID NO: 75936 - DNA, 13 bp, Artificial Sequence
  Oligonucleotide for detection of SNP TSC0019456
raaaccatacatt

SEQ ID NO: 75937 - DNA, 13 bp, Artificial Sequence
  Oligonucleotide for detection of SNP TSC0019456
aatgtacggttty

SEQ ID NO: 75938 - DNA, 13 bp, Artificial Sequence
  Oligonucleotide for detection of SNP TSC0019456
raaaccgtacatt

SEQ ID NO: 75939 - DNA, 13 bp, Artificial Sequence
  Oligonucleotide for detection of SNP TSC0019456
gaagttgtatatt

SEQ ID NO: 75940 - DNA, 13 bp, Artificial Sequence
  Oligonucleotide for detection of SNP TSC0019456
aatatacaacttc

SEQ ID NO: 75941 - DNA, 13 bp, Artificial Sequence
  Oligonucleotide for detection of SNP TSC0019456
gaagttatatatt

SEQ ID NO: 75942 - DNA, 13 bp, Artificial Sequence
  Oligonucleotide for detection of SNP TSC0019456
aatatataacttc

SEQ ID NO: 75943 - DNA, 13 bp, Artificial Sequence
  Oligonucleotide for detection of SNP TSC0019456
gaagtcgtatatt

SEQ ID NO: 75944 - DNA, 13 bp, Artificial Sequence
  Oligonucleotide for detection of SNP TSC0019456
aatatacgacttc

SEQ ID NO: 75945 - DNA, 13 bp, Artificial Sequence
  Oligonucleotide for detection of SNP TSC0019457
ttttgaattgagy

SEQ ID NO: 75946 - DNA, 13 bp, Artificial Sequence
  Oligonucleotide for detection of SNP TSC0019457
rctcaattcaaaa

SEQ ID NO: 75947 - DNA, 13 bp, Artificial Sequence
  Oligonucleotide for detection of SNP TSC0019457
ttttgatttgagy

SEQ ID NO: 75948 - DNA, 13 bp, Artificial Sequence
  Oligonucleotide for detection of SNP TSC0019457
rctcaaatcaaaa

SEQ ID NO: 75949 - DNA, 13 bp, Artificial Sequence
  Oligonucleotide for detection of SNP TSC0019457
gtttagtttaggg

SEQ ID NO: 75950 - DNA, 13 bp, Artificial Sequence
  Oligonucleotide for detection of SNP TSC0019457
ccctaaactaaac

SEQ ID NO: 75951 - DNA, 13 bp, Artificial Sequence
  Oligonucleotide for detection of SNP TSC0019457
gtttaggttaggg

SEQ ID NO: 75952 - DNA, 13 bp, Artificial Sequence
  Oligonucleotide for detection of SNP TSC0019457
ccctaacctaaac

SEQ ID NO: 75953 - DNA, 13 bp, Artificial Sequence
  Oligonucleotide for detection of SNP TSC0019458
tttgagatttttt

SEQ ID NO: 75954 - DNA, 13 bp, Artificial Sequence
  Oligonucleotide for detection of SNP TSC0019458
aaaaaatctcaaa

SEQ ID NO: 75955 - DNA, 13 bp, Artificial Sequence
  Oligonucleotide for detection of SNP TSC0019458
tttgagttttttt

SEQ ID NO: 75956 - DNA, 13 bp, Artificial Sequence
  Oligonucleotide for detection of SNP TSC0019458
aaaaaaactcaaa

SEQ ID NO: 75957 - DNA, 13 bp, Artificial Sequence
  Oligonucleotide for detection of SNP TSC0019458
ttcgagatttttt

SEQ ID NO: 75958 - DNA, 13 bp, Artificial Sequence
  Oligonucleotide for detection of SNP TSC0019458
aaaaaatctcgaa

SEQ ID NO: 75959 - DNA, 13 bp, Artificial Sequence
  Oligonucleotide for detection of SNP TSC0019458
ttcgagttttttt

SEQ ID NO: 75960 - DNA, 13 bp, Artificial Sequence
  Oligonucleotide for detection of SNP TSC0019458
aaaaaaactcgaa

SEQ ID NO: 75961 - DNA, 13 bp, Artificial Sequence
  Oligonucleotide for detection of SNP TSC0019458
aaaggattttggg

SEQ ID NO: 75962 - DNA, 13 bp, Artificial Sequence
  Oligonucleotide for detection of SNP TSC0019458
cccaaaatccttt

SEQ ID NO: 75963 - DNA, 13 bp, Artificial Sequence
  Oligonucleotide for detection of SNP TSC0019458
aaaggaatttggg

SEQ ID NO: 75964 - DNA, 13 bp, Artificial Sequence
  Oligonucleotide for detection of SNP TSC0019458
cccaaattccttt

SEQ ID NO: 75965 - DNA, 13 bp, Artificial Sequence
  Oligonucleotide for detection of SNP TSC0019458
aaaggatttcggg

SEQ ID NO: 75966 - DNA, 13 bp, Artificial Sequence
  Oligonucleotide for detection of SNP TSC0019458
cccgaaatccttt

SEQ ID NO: 75967 - DNA, 13 bp, Artificial Sequence
  Oligonucleotide for detection of SNP TSC0019458
aaaggaattcggg

SEQ ID NO: 75968 - DNA, 13 bp, Artificial Sequence
  Oligonucleotide for detection of SNP TSC0019458
cccgaattccttt

SEQ ID NO: 75969 - DNA, 13 bp, Artificial Sequence
  Oligonucleotide for detection of SNP TSC0019459
atgtttatataat

SEQ ID NO: 75970 - DNA, 13 bp, Artificial Sequence
  Oligonucleotide for detection of SNP TSC0019459
attatataaacat

SEQ ID NO: 75971 - DNA, 13 bp, Artificial Sequence
  Oligonucleotide for detection of SNP TSC0019459
atgtttttataat

SEQ ID NO: 75972 - DNA, 13 bp, Artificial Sequence
  Oligonucleotide for detection of SNP TSC0019459
attataaaaacat

SEQ ID NO: 75973 - DNA, 13 bp, Artificial Sequence
  Oligonucleotide for detection of SNP TSC0019459
attatgtgggtat

SEQ ID NO: 75974 - DNA, 13 bp, Artificial Sequence
  Oligonucleotide for detection of SNP TSC0019459
atacccacataat

SEQ ID NO: 75975 - DNA, 13 bp, Artificial Sequence
  Oligonucleotide for detection of SNP TSC0019459
attatgggggtat

SEQ ID NO: 75976 - DNA, 13 bp, Artificial Sequence
  Oligonucleotide for detection of SNP TSC0019459
atacccccataat

SEQ ID NO: 75977 - DNA, 13 bp, Artificial Sequence
  Oligonucleotide for detection of SNP TSC0019460
tttaattggtaty

SEQ ID NO: 75978 - DNA, 13 bp, Artificial Sequence
  Oligonucleotide for detection of SNP TSC0019460
rataccaattaaa

SEQ ID NO: 75979 - DNA, 13 bp, Artificial Sequence
  Oligonucleotide for detection of SNP TSC0019460
tttaatgggtaty

SEQ ID NO: 75980 - DNA, 13 bp, Artificial Sequence
  Oligonucleotide for detection of SNP TSC0019460
ratacccattaaa

SEQ ID NO: 75981 - DNA, 13 bp, Artificial Sequence
  Oligonucleotide for detection of SNP TSC0019460
tttaatcggtaty

SEQ ID NO: 75982 - DNA, 13 bp, Artificial Sequence
  Oligonucleotide for detection of SNP TSC0019460
rataccgattaaa

SEQ ID NO: 75983 - DNA, 13 bp, Artificial Sequence
  Oligonucleotide for detection of SNP TSC0019460
tttaacgggtaty

SEQ ID NO: 75984 - DNA, 13 bp, Artificial Sequence
  Oligonucleotide for detection of SNP TSC0019460
ratacccgttaaa

SEQ ID NO: 75985 - DNA, 13 bp, Artificial Sequence
  Oligonucleotide for detection of SNP TSC0019460
gatgttggttaga

SEQ ID NO: 75986 - DNA, 13 bp, Artificial Sequence
  Oligonucleotide for detection of SNP TSC0019460
tctaaccaacatc

SEQ ID NO: 75987 - DNA, 13 bp, Artificial Sequence
  Oligonucleotide for detection of SNP TSC0019460
gatgtttgttaga

SEQ ID NO: 75988 - DNA, 13 bp, Artificial Sequence
  Oligonucleotide for detection of SNP TSC0019460
tctaacaaacatc

SEQ ID NO: 75989 - DNA, 13 bp, Artificial Sequence
  Oligonucleotide for detection of SNP TSC0019460
gatgtcggttaga

SEQ ID NO: 75990 - DNA, 13 bp, Artificial Sequence
  Oligonucleotide for detection of SNP TSC0019460
tctaaccgacatc

SEQ ID NO: 75991 - DNA, 13 bp, Artificial Sequence
  Oligonucleotide for detection of SNP TSC0019460
gatgttcgttaga

SEQ ID NO: 75992 - DNA, 13 bp, Artificial Sequence
  Oligonucleotide for detection of SNP TSC0019460
tctaacgaacatc

SEQ ID NO: 75993 - DNA, 13 bp, Artificial Sequence
  Oligonucleotide for detection of SNP TSC0019461
agtataaatgtgt

SEQ ID NO: 75994 - DNA, 13 bp, Artificial Sequence
  Oligonucleotide for detection of SNP TSC0019461
acacatttatact

SEQ ID NO: 75995 - DNA, 13 bp, Artificial Sequence
  Oligonucleotide for detection of SNP TSC0019461
agtatatatgtgt

SEQ ID NO: 75996 - DNA, 13 bp, Artificial Sequence
  Oligonucleotide for detection of SNP TSC0019461
acacatatatact

SEQ ID NO: 75997 - DNA, 13 bp, Artificial Sequence
  Oligonucleotide for detection of SNP TSC0019461
agtataaacgtgt

SEQ ID NO: 75998 - DNA, 13 bp, Artificial Sequence
  Oligonucleotide for detection of SNP TSC0019461
acacgtttatact

SEQ ID NO: 75999 - DNA, 13 bp, Artificial Sequence
  Oligonucleotide for detection of SNP TSC0019461
agtatatacgtgt

SEQ ID NO: 76000 - DNA, 13 bp, Artificial Sequence
  Oligonucleotide for detection of SNP TSC0019461
acacgtatatact

SEQ ID NO: 76001 - DNA, 13 bp, Artificial Sequence
  Oligonucleotide for detection of SNP TSC0019461
atatgtttgtatt

SEQ ID NO: 76002 - DNA, 13 bp, Artificial Sequence
  Oligonucleotide for detection of SNP TSC0019461
aatacaaacatat

SEQ ID NO: 76003 - DNA, 13 bp, Artificial Sequence
  Oligonucleotide for detection of SNP TSC0019461
atatgtgtgtatt

SEQ ID NO: 76004 - DNA, 13 bp, Artificial Sequence
  Oligonucleotide for detection of SNP TSC0019461
aatacacacatat

SEQ ID NO: 76005 - DNA, 13 bp, Artificial Sequence
  Oligonucleotide for detection of SNP TSC0019461
atacgtttgtatt

SEQ ID NO: 76006 - DNA, 13 bp, Artificial Sequence
  Oligonucleotide for detection of SNP TSC0019461
aatacaaacgtat

SEQ ID NO: 76007 - DNA, 13 bp, Artificial Sequence
  Oligonucleotide for detection of SNP TSC0019461
atacgtgtgtatt

SEQ ID NO: 76008 - DNA, 13 bp, Artificial Sequence
  Oligonucleotide for detection of SNP TSC0019461
aatacacacgtat

SEQ ID NO: 76009 - DNA, 13 bp, Artificial Sequence
  Oligonucleotide for detection of SNP TSC0019462
tagggtagggaay

SEQ ID NO: 76010 - DNA, 13 bp, Artificial Sequence
  Oligonucleotide for detection of SNP TSC0019462
rttccctacccta

SEQ ID NO: 76011 - DNA, 13 bp, Artificial Sequence
  Oligonucleotide for detection of SNP TSC0019462
tagggttgggaay

SEQ ID NO: 76012 - DNA, 13 bp, Artificial Sequence
  Oligonucleotide for detection of SNP TSC0019462
rttcccaacccta

SEQ ID NO: 76013 - DNA, 13 bp, Artificial Sequence
  Oligonucleotide for detection of SNP TSC0019462
tagggtcgggaay

SEQ ID NO: 76014 - DNA, 13 bp, Artificial Sequence
  Oligonucleotide for detection of SNP TSC0019462
rttcccgacccta

SEQ ID NO: 76015 - DNA, 13 bp, Artificial Sequence
  Oligonucleotide for detection of SNP TSC0019462
gttttttgttttg

SEQ ID NO: 76016 - DNA, 13 bp, Artificial Sequence
  Oligonucleotide for detection of SNP TSC0019462
caaaacaaaaaac

SEQ ID NO: 76017 - DNA, 13 bp, Artificial Sequence
  Oligonucleotide for detection of SNP TSC0019466
atagagagatagt

SEQ ID NO: 76018 - DNA, 13 bp, Artificial Sequence
  Oligonucleotide for detection of SNP TSC0019466
actatctctctat

SEQ ID NO: 76019 - DNA, 13 bp, Artificial Sequence
  Oligonucleotide for detection of SNP TSC0019466
atagagggatagt

SEQ ID NO: 76020 - DNA, 13 bp, Artificial Sequence
  Oligonucleotide for detection of SNP TSC0019466
actatccctctat

SEQ ID NO: 76021 - DNA, 13 bp, Artificial Sequence
  Oligonucleotide for detection of SNP TSC0019467
ttgagtattattt

SEQ ID NO: 76022 - DNA, 13 bp, Artificial Sequence
  Oligonucleotide for detection of SNP TSC0019467
aaataatactcaa

SEQ ID NO: 76023 - DNA, 13 bp, Artificial Sequence
  Oligonucleotide for detection of SNP TSC0019467
ttgagtgttattt

SEQ ID NO: 76024 - DNA, 13 bp, Artificial Sequence
  Oligonucleotide for detection of SNP TSC0019467
aaataacactcaa

SEQ ID NO: 76025 - DNA, 13 bp, Artificial Sequence
  Oligonucleotide for detection of SNP TSC0019467
ttgagcgttattt

SEQ ID NO: 76026 - DNA, 13 bp, Artificial Sequence
  Oligonucleotide for detection of SNP TSC0019467
aaataacgctcaa

SEQ ID NO: 76027 - DNA, 13 bp, Artificial Sequence
  Oligonucleotide for detection of SNP TSC0019467
aaataatgtttag

SEQ ID NO: 76028 - DNA, 13 bp, Artificial Sequence
  Oligonucleotide for detection of SNP TSC0019467
ctaaacattattt

SEQ ID NO: 76029 - DNA, 13 bp, Artificial Sequence
  Oligonucleotide for detection of SNP TSC0019467
aaataacgtttag

SEQ ID NO: 76030 - DNA, 13 bp, Artificial Sequence
  Oligonucleotide for detection of SNP TSC0019467
ctaaacgttattt

SEQ ID NO: 76031 - DNA, 13 bp, Artificial Sequence
  Oligonucleotide for detection of SNP TSC0019469
atatttgttatat

SEQ ID NO: 76032 - DNA, 13 bp, Artificial Sequence
  Oligonucleotide for detection of SNP TSC0019469
atataacaaatat

SEQ ID NO: 76033 - DNA, 13 bp, Artificial Sequence
  Oligonucleotide for detection of SNP TSC0019469
atatttattatat

SEQ ID NO: 76034 - DNA, 13 bp, Artificial Sequence
  Oligonucleotide for detection of SNP TSC0019469
atataataaatat

SEQ ID NO: 76035 - DNA, 13 bp, Artificial Sequence
  Oligonucleotide for detection of SNP TSC0019473
gaaagataaagag

SEQ ID NO: 76036 - DNA, 13 bp, Artificial Sequence
  Oligonucleotide for detection of SNP TSC0019473
ctctttatctttc

SEQ ID NO: 76037 - DNA, 13 bp, Artificial Sequence
  Oligonucleotide for detection of SNP TSC0019473
gaaagaaaaagag

SEQ ID NO: 76038 - DNA, 13 bp, Artificial Sequence
  Oligonucleotide for detection of SNP TSC0019473
ctctttttctttc

SEQ ID NO: 76039 - DNA, 13 bp, Artificial Sequence
  Oligonucleotide for detection of SNP TSC0019474
aattataagttaa

SEQ ID NO: 76040 - DNA, 13 bp, Artificial Sequence
  Oligonucleotide for detection of SNP TSC0019474
ttaacttataatt

SEQ ID NO: 76041 - DNA, 13 bp, Artificial Sequence
  Oligonucleotide for detection of SNP TSC0019474
aattatgagttaa

SEQ ID NO: 76042 - DNA, 13 bp, Artificial Sequence
  Oligonucleotide for detection of SNP TSC0019474
ttaactcataatt

SEQ ID NO: 76043 - DNA, 13 bp, Artificial Sequence
  Oligonucleotide for detection of SNP TSC0019475
taatatttatgta

SEQ ID NO: 76044 - DNA, 13 bp, Artificial Sequence
  Oligonucleotide for detection of SNP TSC0019475
tacataaatatta

SEQ ID NO: 76045 - DNA, 13 bp, Artificial Sequence
  Oligonucleotide for detection of SNP TSC0019475
tatatatgtatta

SEQ ID NO: 76046 - DNA, 13 bp, Artificial Sequence
  Oligonucleotide for detection of SNP TSC0019475
taatacatatata

SEQ ID NO: 76047 - DNA, 13 bp, Artificial Sequence
  Oligonucleotide for detection of SNP TSC0019475
tatataggtatta

SEQ ID NO: 76048 - DNA, 13 bp, Artificial Sequence
  Oligonucleotide for detection of SNP TSC0019475
taatacctatata

SEQ ID NO: 76049 - DNA, 13 bp, Artificial Sequence
  Oligonucleotide for detection of SNP TSC0019476
ggggatggattta

SEQ ID NO: 76050 - DNA, 13 bp, Artificial Sequence
  Oligonucleotide for detection of SNP TSC0019476
taaatccatcccc

SEQ ID NO: 76051 - DNA, 13 bp, Artificial Sequence
  Oligonucleotide for detection of SNP TSC0019476
ggggatagattta

SEQ ID NO: 76052 - DNA, 13 bp, Artificial Sequence
  Oligonucleotide for detection of SNP TSC0019476
taaatctatcccc

SEQ ID NO: 76053 - DNA, 13 bp, Artificial Sequence
  Oligonucleotide for detection of SNP TSC0019476
ggggacggattta

SEQ ID NO: 76054 - DNA, 13 bp, Artificial Sequence
  Oligonucleotide for detection of SNP TSC0019476
taaatccgtcccc

SEQ ID NO: 76055 - DNA, 13 bp, Artificial Sequence
  Oligonucleotide for detection of SNP TSC0019477
gggtttttttttt

SEQ ID NO: 76056 - DNA, 13 bp, Artificial Sequence
  Oligonucleotide for detection of SNP TSC0019477
aaaaaaaaaaccc

SEQ ID NO: 76057 - DNA, 13 bp, Artificial Sequence
  Oligonucleotide for detection of SNP TSC0019477
gggttcgtttttt

SEQ ID NO: 76058 - DNA, 13 bp, Artificial Sequence
  Oligonucleotide for detection of SNP TSC0019477
aaaaaacgaaccc

SEQ ID NO: 76059 - DNA, 13 bp, Artificial Sequence
  Oligonucleotide for detection of SNP TSC0019477
aggggatggatty

SEQ ID NO: 76060 - DNA, 13 bp, Artificial Sequence
  Oligonucleotide for detection of SNP TSC0019477
raatccatcccct

SEQ ID NO: 76061 - DNA, 13 bp, Artificial Sequence
  Oligonucleotide for detection of SNP TSC0019477
aggggaaggatty

SEQ ID NO: 76062 - DNA, 13 bp, Artificial Sequence
  Oligonucleotide for detection of SNP TSC0019477
raatccttcccct

SEQ ID NO: 76063 - DNA, 13 bp, Artificial Sequence
  Oligonucleotide for detection of SNP TSC0019477
aggggacggatty

SEQ ID NO: 76064 - DNA, 13 bp, Artificial Sequence
  Oligonucleotide for detection of SNP TSC0019477
raatccgtcccct

SEQ ID NO: 76065 - DNA, 13 bp, Artificial Sequence
  Oligonucleotide for detection of SNP TSC0019478
tgggtttgataty

SEQ ID NO: 76066 - DNA, 13 bp, Artificial Sequence
  Oligonucleotide for detection of SNP TSC0019478
ratatcaaaccca

SEQ ID NO: 76067 - DNA, 13 bp, Artificial Sequence
  Oligonucleotide for detection of SNP TSC0019478
tgggttcgataty

SEQ ID NO: 76068 - DNA, 13 bp, Artificial Sequence
  Oligonucleotide for detection of SNP TSC0019478
ratatcgaaccca

SEQ ID NO: 76069 - DNA, 13 bp, Artificial Sequence
  Oligonucleotide for detection of SNP TSC0019478
ggtgttgggttta

SEQ ID NO: 76070 - DNA, 13 bp, Artificial Sequence
  Oligonucleotide for detection of SNP TSC0019478
taaacccaacacc

SEQ ID NO: 76071 - DNA, 13 bp, Artificial Sequence
  Oligonucleotide for detection of SNP TSC0019478
ggtgttaggttta

SEQ ID NO: 76072 - DNA, 13 bp, Artificial Sequence
  Oligonucleotide for detection of SNP TSC0019478
taaacctaacacc

SEQ ID NO: 76073 - DNA, 13 bp, Artificial Sequence
  Oligonucleotide for detection of SNP TSC0019478
ggtgtcgggttta

SEQ ID NO: 76074 - DNA, 13 bp, Artificial Sequence
  Oligonucleotide for detection of SNP TSC0019478
taaacccgacacc

SEQ ID NO: 76075 - DNA, 13 bp, Artificial Sequence
  Oligonucleotide for detection of SNP TSC0019479
ttatagtgattty

SEQ ID NO: 76076 - DNA, 13 bp, Artificial Sequence
  Oligonucleotide for detection of SNP TSC0019479
raaatcactataa

SEQ ID NO: 76077 - DNA, 13 bp, Artificial Sequence
  Oligonucleotide for detection of SNP TSC0019479
ttatagcgattty

SEQ ID NO: 76078 - DNA, 13 bp, Artificial Sequence
  Oligonucleotide for detection of SNP TSC0019479
raaatcgctataa

SEQ ID NO: 76079 - DNA, 13 bp, Artificial Sequence
  Oligonucleotide for detection of SNP TSC0019479
gaggttgttatag

SEQ ID NO: 76080 - DNA, 13 bp, Artificial Sequence
  Oligonucleotide for detection of SNP TSC0019479
ctataacaacctc

SEQ ID NO: 76081 - DNA, 13 bp, Artificial Sequence
  Oligonucleotide for detection of SNP TSC0019479
gaggttattatag

SEQ ID NO: 76082 - DNA, 13 bp, Artificial Sequence
  Oligonucleotide for detection of SNP TSC0019479
ctataataacctc

SEQ ID NO: 76083 - DNA, 13 bp, Artificial Sequence
  Oligonucleotide for detection of SNP TSC0019479
gaggtcgttatag

SEQ ID NO: 76084 - DNA, 13 bp, Artificial Sequence
  Oligonucleotide for detection of SNP TSC0019479
ctataacgacctc

SEQ ID NO: 76085 - DNA, 13 bp, Artificial Sequence
  Oligonucleotide for detection of SNP TSC0019482
aatagtatgatty

SEQ ID NO: 76086 - DNA, 13 bp, Artificial Sequence
  Oligonucleotide for detection of SNP TSC0019482
raatcatactatt

SEQ ID NO: 76087 - DNA, 13 bp, Artificial Sequence
  Oligonucleotide for detection of SNP TSC0019482
aatagtgtgatty

SEQ ID NO: 76088 - DNA, 13 bp, Artificial Sequence
  Oligonucleotide for detection of SNP TSC0019482
raatcacactatt

SEQ ID NO: 76089 - DNA, 13 bp, Artificial Sequence
  Oligonucleotide for detection of SNP TSC0019483
ttattttaaatgy

SEQ ID NO: 76090 - DNA, 13 bp, Artificial Sequence
  Oligonucleotide for detection of SNP TSC0019483
rcatttaaaataa

SEQ ID NO: 76091 - DNA, 13 bp, Artificial Sequence
  Oligonucleotide for detection of SNP TSC0019483
ttatttgaaatgy

SEQ ID NO: 76092 - DNA, 13 bp, Artificial Sequence
  Oligonucleotide for detection of SNP TSC0019483
rcatttcaaataa

SEQ ID NO: 76093 - DNA, 13 bp, Artificial Sequence
  Oligonucleotide for detection of SNP TSC0019483
ttattcgaaatgy

SEQ ID NO: 76094 - DNA, 13 bp, Artificial Sequence
  Oligonucleotide for detection of SNP TSC0019483
rcatttcgaataa

SEQ ID NO: 76095 - DNA, 13 bp, Artificial Sequence
  Oligonucleotide for detection of SNP TSC0019483
gtatttggggtgg

SEQ ID NO: 76096 - DNA, 13 bp, Artificial Sequence
  Oligonucleotide for detection of SNP TSC0019483
ccaccccaaatac

SEQ ID NO: 76097 - DNA, 13 bp, Artificial Sequence
  Oligonucleotide for detection of SNP TSC0019483
gtattttgggtgg

SEQ ID NO: 76098 - DNA, 13 bp, Artificial Sequence
  Oligonucleotide for detection of SNP TSC0019483
ccacccaaaatac

SEQ ID NO: 76099 - DNA, 13 bp, Artificial Sequence
  Oligonucleotide for detection of SNP TSC0019483
gtatttcgggtgg

SEQ ID NO: 76100 - DNA, 13 bp, Artificial Sequence
  Oligonucleotide for detection of SNP TSC0019483
ccacccgaaatac

SEQ ID NO: 76101 - DNA, 13 bp, Artificial Sequence
  Oligonucleotide for detection of SNP TSC0019484
gatttgatatttt

SEQ ID NO: 76102 - DNA, 13 bp, Artificial Sequence
  Oligonucleotide for detection of SNP TSC0019484
aaaatatcaaatc

SEQ ID NO: 76103 - DNA, 13 bp, Artificial Sequence
  Oligonucleotide for detection of SNP TSC0019484
gatttggtatttt

SEQ ID NO: 76104 - DNA, 13 bp, Artificial Sequence
  Oligonucleotide for detection of SNP TSC0019484
aaaataccaaatc

SEQ ID NO: 76105 - DNA, 13 bp, Artificial Sequence
  Oligonucleotide for detection of SNP TSC0019485
tagttggatatat

SEQ ID NO: 76106 - DNA, 13 bp, Artificial Sequence
  Oligonucleotide for detection of SNP TSC0019485
atatatccaacta

SEQ ID NO: 76107 - DNA, 13 bp, Artificial Sequence
  Oligonucleotide for detection of SNP TSC0019485
tagttgaatatat

SEQ ID NO: 76108 - DNA, 13 bp, Artificial Sequence
  Oligonucleotide for detection of SNP TSC0019485
atatattcaacta

SEQ ID NO: 76109 - DNA, 13 bp, Artificial Sequence
  Oligonucleotide for detection of SNP TSC0019486
ttttttgaatttt

SEQ ID NO: 76110 - DNA, 13 bp, Artificial Sequence
  Oligonucleotide for detection of SNP TSC0019486
aaaattcaaaaaa

SEQ ID NO: 76111 - DNA, 13 bp, Artificial Sequence
  Oligonucleotide for detection of SNP TSC0019487
tataaagtataga

SEQ ID NO: 76112 - DNA, 13 bp, Artificial Sequence
  Oligonucleotide for detection of SNP TSC0019487
tctatactttata

SEQ ID NO: 76113 - DNA, 13 bp, Artificial Sequence
  Oligonucleotide for detection of SNP TSC0019487
tataaaatataga

SEQ ID NO: 76114 - DNA, 13 bp, Artificial Sequence
  Oligonucleotide for detection of SNP TSC0019487
tctatattttata

SEQ ID NO: 76115 - DNA, 13 bp, Artificial Sequence
  Oligonucleotide for detection of SNP TSC0019490
aaggggaattgga

SEQ ID NO: 76116 - DNA, 13 bp, Artificial Sequence
  Oligonucleotide for detection of SNP TSC0019490
tccaattcccctt

SEQ ID NO: 76117 - DNA, 13 bp, Artificial Sequence
  Oligonucleotide for detection of SNP TSC0019490
aaggggtattgga

SEQ ID NO: 76118 - DNA, 13 bp, Artificial Sequence
  Oligonucleotide for detection of SNP TSC0019490
tccaatacccctt

SEQ ID NO: 76119 - DNA, 13 bp, Artificial Sequence
  Oligonucleotide for detection of SNP TSC0019491
aatgggatagtaa

SEQ ID NO: 76120 - DNA, 13 bp, Artificial Sequence
  Oligonucleotide for detection of SNP TSC0019491
ttactatcccatt

SEQ ID NO: 76121 - DNA, 13 bp, Artificial Sequence
  Oligonucleotide for detection of SNP TSC0019491
aatggggtagtaa

SEQ ID NO: 76122 - DNA, 13 bp, Artificial Sequence
  Oligonucleotide for detection of SNP TSC0019491
ttactaccccatt

SEQ ID NO: 76123 - DNA, 13 bp, Artificial Sequence
  Oligonucleotide for detection of SNP TSC0019492
taagtggggtgag

SEQ ID NO: 76124 - DNA, 13 bp, Artificial Sequence
  Oligonucleotide for detection of SNP TSC0019492
ctcaccccactta

SEQ ID NO: 76125 - DNA, 13 bp, Artificial Sequence
  Oligonucleotide for detection of SNP TSC0019492
taagtgaggtgag

SEQ ID NO: 76126 - DNA, 13 bp, Artificial Sequence
  Oligonucleotide for detection of SNP TSC0019492
ctcacctcactta

SEQ ID NO: 76127 - DNA, 13 bp, Artificial Sequence
  Oligonucleotide for detection of SNP TSC0019493
ttatttgatttag

SEQ ID NO: 76128 - DNA, 13 bp, Artificial Sequence
  Oligonucleotide for detection of SNP TSC0019493
ctaaatcaaataa

SEQ ID NO: 76129 - DNA, 13 bp, Artificial Sequence
  Oligonucleotide for detection of SNP TSC0019493
ttattcgatttag

SEQ ID NO: 76130 - DNA, 13 bp, Artificial Sequence
  Oligonucleotide for detection of SNP TSC0019493
ctaaatcgaataa

SEQ ID NO: 76131 - DNA, 13 bp, Artificial Sequence
  Oligonucleotide for detection of SNP TSC0019493
ttaagtggggtga

SEQ ID NO: 76132 - DNA, 13 bp, Artificial Sequence
  Oligonucleotide for detection of SNP TSC0019493
tcaccccacttaa

SEQ ID NO: 76133 - DNA, 13 bp, Artificial Sequence
  Oligonucleotide for detection of SNP TSC0019493
ttaagttgggtga

SEQ ID NO: 76134 - DNA, 13 bp, Artificial Sequence
  Oligonucleotide for detection of SNP TSC0019493
tcacccaacttaa

SEQ ID NO: 76135 - DNA, 13 bp, Artificial Sequence
  Oligonucleotide for detection of SNP TSC0019493
ttaagtcgggtga

SEQ ID NO: 76136 - DNA, 13 bp, Artificial Sequence
  Oligonucleotide for detection of SNP TSC0019493
tcacccgacttaa

SEQ ID NO: 76137 - DNA, 13 bp, Artificial Sequence
  Oligonucleotide for detection of SNP TSC0019494
attgttgttttty

SEQ ID NO: 76138 - DNA, 13 bp, Artificial Sequence
  Oligonucleotide for detection of SNP TSC0019494
raaaaacaacaat

SEQ ID NO: 76139 - DNA, 13 bp, Artificial Sequence
  Oligonucleotide for detection of SNP TSC0019494
attgttattttty

SEQ ID NO: 76140 - DNA, 13 bp, Artificial Sequence
  Oligonucleotide for detection of SNP TSC0019494
raaaaataacaat

SEQ ID NO: 76141 - DNA, 13 bp, Artificial Sequence
  Oligonucleotide for detection of SNP TSC0019495
tttttgtgtgtay

SEQ ID NO: 76142 - DNA, 13 bp, Artificial Sequence
  Oligonucleotide for detection of SNP TSC0019495
rtacacacaaaaa

SEQ ID NO: 76143 - DNA, 13 bp, Artificial Sequence
  Oligonucleotide for detection of SNP TSC0019495
tttttgcgtgtay

SEQ ID NO: 76144 - DNA, 13 bp, Artificial Sequence
  Oligonucleotide for detection of SNP TSC0019495
rtacacgcaaaaa

SEQ ID NO: 76145 - DNA, 13 bp, Artificial Sequence
  Oligonucleotide for detection of SNP TSC0019495
tttttgtgcgtay

SEQ ID NO: 76146 - DNA, 13 bp, Artificial Sequence
  Oligonucleotide for detection of SNP TSC0019495
rtacgcacaaaaa

SEQ ID NO: 76147 - DNA, 13 bp, Artificial Sequence
  Oligonucleotide for detection of SNP TSC0019495
tttttgcgcgtay

SEQ ID NO: 76148 - DNA, 13 bp, Artificial Sequence
  Oligonucleotide for detection of SNP TSC0019495
rtacgcgcaaaaa

SEQ ID NO: 76149 - DNA, 13 bp, Artificial Sequence
  Oligonucleotide for detection of SNP TSC0019495
gtgtgtgtaaagg

SEQ ID NO: 76150 - DNA, 13 bp, Artificial Sequence
  Oligonucleotide for detection of SNP TSC0019495
cctttacacacac

SEQ ID NO: 76151 - DNA, 13 bp, Artificial Sequence
  Oligonucleotide for detection of SNP TSC0019495
gtgtgtataaagg

SEQ ID NO: 76152 - DNA, 13 bp, Artificial Sequence
  Oligonucleotide for detection of SNP TSC0019495
cctttatacacac

SEQ ID NO: 76153 - DNA, 13 bp, Artificial Sequence
  Oligonucleotide for detection of SNP TSC0019495
gtgcgtgtaaagg

SEQ ID NO: 76154 - DNA, 13 bp, Artificial Sequence
  Oligonucleotide for detection of SNP TSC0019495
cctttacacgcac

SEQ ID NO: 76155 - DNA, 13 bp, Artificial Sequence
  Oligonucleotide for detection of SNP TSC0019495
gtgcgtataaagg

SEQ ID NO: 76156 - DNA, 13 bp, Artificial Sequence
  Oligonucleotide for detection of SNP TSC0019495
cctttatacgcac

SEQ ID NO: 76157 - DNA, 13 bp, Artificial Sequence
  Oligonucleotide for detection of SNP TSC0019495
gtgtgcgtaaagg

SEQ ID NO: 76158 - DNA, 13 bp, Artificial Sequence
  Oligonucleotide for detection of SNP TSC0019495
cctttacgcacac

SEQ ID NO: 76159 - DNA, 13 bp, Artificial Sequence
  Oligonucleotide for detection of SNP TSC0019495
gtgcgcgtaaagg

SEQ ID NO: 76160 - DNA, 13 bp, Artificial Sequence
  Oligonucleotide for detection of SNP TSC0019495
cctttacgcgcac

SEQ ID NO: 76161 - DNA, 13 bp, Artificial Sequence
  Oligonucleotide for detection of SNP TSC0019497
tattattgttagg

SEQ ID NO: 76162 - DNA, 13 bp, Artificial Sequence
  Oligonucleotide for detection of SNP TSC0019497
cctaacaataata

SEQ ID NO: 76163 - DNA, 13 bp, Artificial Sequence
  Oligonucleotide for detection of SNP TSC0019497
tattatcgttagg

SEQ ID NO: 76164 - DNA, 13 bp, Artificial Sequence
  Oligonucleotide for detection of SNP TSC0019497
cctaacgataata

SEQ ID NO: 76165 - DNA, 13 bp, Artificial Sequence
  Oligonucleotide for detection of SNP TSC0019497
tttggtgatggtg

SEQ ID NO: 76166 - DNA, 13 bp, Artificial Sequence
  Oligonucleotide for detection of SNP TSC0019497
caccatcaccaaa

SEQ ID NO: 76167 - DNA, 13 bp, Artificial Sequence
  Oligonucleotide for detection of SNP TSC0019497
tttggtaatggtg

SEQ ID NO: 76168 - DNA, 13 bp, Artificial Sequence
  Oligonucleotide for detection of SNP TSC0019497
caccattaccaaa

SEQ ID NO: 76169 - DNA, 13 bp, Artificial Sequence
  Oligonucleotide for detection of SNP TSC0019497
tttggcgatggtg

SEQ ID NO: 76170 - DNA, 13 bp, Artificial Sequence
  Oligonucleotide for detection of SNP TSC0019497
caccatcgccaaa

SEQ ID NO: 76171 - DNA, 13 bp, Artificial Sequence
  Oligonucleotide for detection of SNP TSC0019503
ataaattgttata

SEQ ID NO: 76172 - DNA, 13 bp, Artificial Sequence
  Oligonucleotide for detection of SNP TSC0019503
tataacaatttat

SEQ ID NO: 76173 - DNA, 13 bp, Artificial Sequence
  Oligonucleotide for detection of SNP TSC0019503
ataaatcgttata

SEQ ID NO: 76174 - DNA, 13 bp, Artificial Sequence
  Oligonucleotide for detection of SNP TSC0019503
tataacgatttat

SEQ ID NO: 76175 - DNA, 13 bp, Artificial Sequence
  Oligonucleotide for detection of SNP TSC0019503
tgtagtggtttat

SEQ ID NO: 76176 - DNA, 13 bp, Artificial Sequence
  Oligonucleotide for detection of SNP TSC0019503
ataaaccactaca

SEQ ID NO: 76177 - DNA, 13 bp, Artificial Sequence
  Oligonucleotide for detection of SNP TSC0019503
tgtagtagtttat

SEQ ID NO: 76178 - DNA, 13 bp, Artificial Sequence
  Oligonucleotide for detection of SNP TSC0019503
ataaactactaca

SEQ ID NO: 76179 - DNA, 13 bp, Artificial Sequence
  Oligonucleotide for detection of SNP TSC0019503
tgtagcggtttat

SEQ ID NO: 76180 - DNA, 13 bp, Artificial Sequence
  Oligonucleotide for detection of SNP TSC0019503
ataaaccgctaca

SEQ ID NO: 76181 - DNA, 13 bp, Artificial Sequence
  Oligonucleotide for detection of SNP TSC0019504
atataaagaaaay

SEQ ID NO: 76182 - DNA, 13 bp, Artificial Sequence
  Oligonucleotide for detection of SNP TSC0019504
rttttctttatat

SEQ ID NO: 76183 - DNA, 13 bp, Artificial Sequence
  Oligonucleotide for detection of SNP TSC0019504
atataaggaaaay

SEQ ID NO: 76184 - DNA, 13 bp, Artificial Sequence
  Oligonucleotide for detection of SNP TSC0019504
rttttccttatat

SEQ ID NO: 76185 - DNA, 13 bp, Artificial Sequence
  Oligonucleotide for detection of SNP TSC0019505
tagttatgttgga

SEQ ID NO: 76186 - DNA, 13 bp, Artificial Sequence
  Oligonucleotide for detection of SNP TSC0019505
tccaacataacta

SEQ ID NO: 76187 - DNA, 13 bp, Artificial Sequence
  Oligonucleotide for detection of SNP TSC0019505
tagttacgttgga

SEQ ID NO: 76188 - DNA, 13 bp, Artificial Sequence
  Oligonucleotide for detection of SNP TSC0019505
tccaacgtaacta

SEQ ID NO: 76189 - DNA, 13 bp, Artificial Sequence
  Oligonucleotide for detection of SNP TSC0019505
tttagtgtaattg

SEQ ID NO: 76190 - DNA, 13 bp, Artificial Sequence
  Oligonucleotide for detection of SNP TSC0019505
caattacactaaa

SEQ ID NO: 76191 - DNA, 13 bp, Artificial Sequence
  Oligonucleotide for detection of SNP TSC0019505
tttagtataattg

SEQ ID NO: 76192 - DNA, 13 bp, Artificial Sequence
  Oligonucleotide for detection of SNP TSC0019505
caattatactaaa

SEQ ID NO: 76193 - DNA, 13 bp, Artificial Sequence
  Oligonucleotide for detection of SNP TSC0019505
tttagcgtaattg

SEQ ID NO: 76194 - DNA, 13 bp, Artificial Sequence
  Oligonucleotide for detection of SNP TSC0019505
caattacgctaaa

SEQ ID NO: 76195 - DNA, 13 bp, Artificial Sequence
  Oligonucleotide for detection of SNP TSC0019507
aaggaaattgtaa

SEQ ID NO: 76196 - DNA, 13 bp, Artificial Sequence
  Oligonucleotide for detection of SNP TSC0019507
ttacaatttcctt

SEQ ID NO: 76197 - DNA, 13 bp, Artificial Sequence
  Oligonucleotide for detection of SNP TSC0019507
aaggaatttgtaa

SEQ ID NO: 76198 - DNA, 13 bp, Artificial Sequence
  Oligonucleotide for detection of SNP TSC0019507
ttacaaattcctt

SEQ ID NO: 76199 - DNA, 13 bp, Artificial Sequence
  Oligonucleotide for detection of SNP TSC0019507
ttgtagttttttt

SEQ ID NO: 76200 - DNA, 13 bp, Artificial Sequence
  Oligonucleotide for detection of SNP TSC0019507
aaaaaaactacaa

SEQ ID NO: 76201 - DNA, 13 bp, Artificial Sequence
  Oligonucleotide for detection of SNP TSC0019508
attttaatattgy

SEQ ID NO: 76202 - DNA, 13 bp, Artificial Sequence
  Oligonucleotide for detection of SNP TSC0019508
rcaatattaaaat

SEQ ID NO: 76203 - DNA, 13 bp, Artificial Sequence
  Oligonucleotide for detection of SNP TSC0019508
attttattattgy

SEQ ID NO: 76204 - DNA, 13 bp, Artificial Sequence
  Oligonucleotide for detection of SNP TSC0019508
rcaataataaaat

SEQ ID NO: 76205 - DNA, 13 bp, Artificial Sequence
  Oligonucleotide for detection of SNP TSC0019508
gtagtgttgagat

SEQ ID NO: 76206 - DNA, 13 bp, Artificial Sequence
  Oligonucleotide for detection of SNP TSC0019508
atctcaacactac

SEQ ID NO: 76207 - DNA, 13 bp, Artificial Sequence
  Oligonucleotide for detection of SNP TSC0019508
gtagtgatgagat

SEQ ID NO: 76208 - DNA, 13 bp, Artificial Sequence
  Oligonucleotide for detection of SNP TSC0019508
atctcatcactac

SEQ ID NO: 76209 - DNA, 13 bp, Artificial Sequence
  Oligonucleotide for detection of SNP TSC0019510
atttgtatatgtt

SEQ ID NO: 76210 - DNA, 13 bp, Artificial Sequence
  Oligonucleotide for detection of SNP TSC0019510
aacatatacaaat

SEQ ID NO: 76211 - DNA, 13 bp, Artificial Sequence
  Oligonucleotide for detection of SNP TSC0019510
atttgtgtatgtt

SEQ ID NO: 76212 - DNA, 13 bp, Artificial Sequence
  Oligonucleotide for detection of SNP TSC0019510
aacatacacaaat

SEQ ID NO: 76213 - DNA, 13 bp, Artificial Sequence
  Oligonucleotide for detection of SNP TSC0019510
atttgcgtatgtt

SEQ ID NO: 76214 - DNA, 13 bp, Artificial Sequence
  Oligonucleotide for detection of SNP TSC0019510
aacatacgcaaat

SEQ ID NO: 76215 - DNA, 13 bp, Artificial Sequence
  Oligonucleotide for detection of SNP TSC0019510
agtatgtgtaagt

SEQ ID NO: 76216 - DNA, 13 bp, Artificial Sequence
  Oligonucleotide for detection of SNP TSC0019510
acttacacatact

SEQ ID NO: 76217 - DNA, 13 bp, Artificial Sequence
  Oligonucleotide for detection of SNP TSC0019510
agtatgcgtaagt

SEQ ID NO: 76218 - DNA, 13 bp, Artificial Sequence
  Oligonucleotide for detection of SNP TSC0019510
acttacgcatact

SEQ ID NO: 76219 - DNA, 13 bp, Artificial Sequence
  Oligonucleotide for detection of SNP TSC0019511
ttttggttaattt

SEQ ID NO: 76220 - DNA, 13 bp, Artificial Sequence
  Oligonucleotide for detection of SNP TSC0019511
aaattaaccaaaa

SEQ ID NO: 76221 - DNA, 13 bp, Artificial Sequence
  Oligonucleotide for detection of SNP TSC0019511
aaattggttagaa

SEQ ID NO: 76222 - DNA, 13 bp, Artificial Sequence
  Oligonucleotide for detection of SNP TSC0019511
ttctaaccaattt

SEQ ID NO: 76223 - DNA, 13 bp, Artificial Sequence
  Oligonucleotide for detection of SNP TSC0019511
aaattgtttagaa

SEQ ID NO: 76224 - DNA, 13 bp, Artificial Sequence
  Oligonucleotide for detection of SNP TSC0019511
ttctaaacaattt

SEQ ID NO: 76225 - DNA, 13 bp, Artificial Sequence
  Oligonucleotide for detection of SNP TSC0019512
aatgttcgtgtty

SEQ ID NO: 76226 - DNA, 13 bp, Artificial Sequence
  Oligonucleotide for detection of SNP TSC0019512
raacacgaacatt

SEQ ID NO: 76227 - DNA, 13 bp, Artificial Sequence
  Oligonucleotide for detection of SNP TSC0019512
ggatatgaatatt

SEQ ID NO: 76228 - DNA, 13 bp, Artificial Sequence
  Oligonucleotide for detection of SNP TSC0019512
aatattcatatcc

SEQ ID NO: 76229 - DNA, 13 bp, Artificial Sequence
  Oligonucleotide for detection of SNP TSC0019512
ggatataaatatt

SEQ ID NO: 76230 - DNA, 13 bp, Artificial Sequence
  Oligonucleotide for detection of SNP TSC0019512
aatatttatatcc

SEQ ID NO: 76231 - DNA, 13 bp, Artificial Sequence
  Oligonucleotide for detection of SNP TSC0019512
ggatacgaatatt

SEQ ID NO: 76232 - DNA, 13 bp, Artificial Sequence
  Oligonucleotide for detection of SNP TSC0019512
aatattcgtatcc

SEQ ID NO: 76233 - DNA, 13 bp, Artificial Sequence
  Oligonucleotide for detection of SNP TSC0019513
tagatttggaaty

SEQ ID NO: 76234 - DNA, 13 bp, Artificial Sequence
  Oligonucleotide for detection of SNP TSC0019513
rattccaaatcta

SEQ ID NO: 76235 - DNA, 13 bp, Artificial Sequence
  Oligonucleotide for detection of SNP TSC0019513
tagattcggaaty

SEQ ID NO: 76236 - DNA, 13 bp, Artificial Sequence
  Oligonucleotide for detection of SNP TSC0019513
rattccgaatcta

SEQ ID NO: 76237 - DNA, 13 bp, Artificial Sequence
  Oligonucleotide for detection of SNP TSC0019513
gattttgagtttg

SEQ ID NO: 76238 - DNA, 13 bp, Artificial Sequence
  Oligonucleotide for detection of SNP TSC0019513
caaactcaaaatc

SEQ ID NO: 76239 - DNA, 13 bp, Artificial Sequence
  Oligonucleotide for detection of SNP TSC0019513
gattttaagtttg

SEQ ID NO: 76240 - DNA, 13 bp, Artificial Sequence
  Oligonucleotide for detection of SNP TSC0019513
caaacttaaaatc

SEQ ID NO: 76241 - DNA, 13 bp, Artificial Sequence
  Oligonucleotide for detection of SNP TSC0019513
gatttcgagtttg

SEQ ID NO: 76242 - DNA, 13 bp, Artificial Sequence
  Oligonucleotide for detection of SNP TSC0019513
caaactcgaaatc

SEQ ID NO: 76243 - DNA, 13 bp, Artificial Sequence
  Oligonucleotide for detection of SNP TSC0019514
ggtagttgtgagy

SEQ ID NO: 76244 - DNA, 13 bp, Artificial Sequence
  Oligonucleotide for detection of SNP TSC0019514
rctcacaactacc

SEQ ID NO: 76245 - DNA, 13 bp, Artificial Sequence
  Oligonucleotide for detection of SNP TSC0019514
ggtagtcgtgagy

SEQ ID NO: 76246 - DNA, 13 bp, Artificial Sequence
  Oligonucleotide for detection of SNP TSC0019514
rctcacgactacc

SEQ ID NO: 76247 - DNA, 13 bp, Artificial Sequence
  Oligonucleotide for detection of SNP TSC0019514
gtttatgattgty

SEQ ID NO: 76248 - DNA, 13 bp, Artificial Sequence
  Oligonucleotide for detection of SNP TSC0019514
racaatcataaac

SEQ ID NO: 76249 - DNA, 13 bp, Artificial Sequence
  Oligonucleotide for detection of SNP TSC0019514
gtttataattgty

SEQ ID NO: 76250 - DNA, 13 bp, Artificial Sequence
  Oligonucleotide for detection of SNP TSC0019514
racaattataaac

SEQ ID NO: 76251 - DNA, 13 bp, Artificial Sequence
  Oligonucleotide for detection of SNP TSC0019514
gtttacgattgty

SEQ ID NO: 76252 - DNA, 13 bp, Artificial Sequence
  Oligonucleotide for detection of SNP TSC0019514
racaatcgtaaac

SEQ ID NO: 76253 - DNA, 13 bp, Artificial Sequence
  Oligonucleotide for detection of SNP TSC0019515
gtagagatggggt

SEQ ID NO: 76254 - DNA, 13 bp, Artificial Sequence
  Oligonucleotide for detection of SNP TSC0019515
accccatctctac

SEQ ID NO: 76255 - DNA, 13 bp, Artificial Sequence
  Oligonucleotide for detection of SNP TSC0019515
gtagagttggggt

SEQ ID NO: 76256 - DNA, 13 bp, Artificial Sequence
  Oligonucleotide for detection of SNP TSC0019515
accccaactctac

SEQ ID NO: 76257 - DNA, 13 bp, Artificial Sequence
  Oligonucleotide for detection of SNP TSC0019515
attttatttttay

SEQ ID NO: 76258 - DNA, 13 bp, Artificial Sequence
  Oligonucleotide for detection of SNP TSC0019515
rtaaaaataaaat

SEQ ID NO: 76259 - DNA, 13 bp, Artificial Sequence
  Oligonucleotide for detection of SNP TSC0019516
ggtgggtaggttt

SEQ ID NO: 76260 - DNA, 13 bp, Artificial Sequence
  Oligonucleotide for detection of SNP TSC0019516
aaacctacccacc

SEQ ID NO: 76261 - DNA, 13 bp, Artificial Sequence
  Oligonucleotide for detection of SNP TSC0019516
ggtggggaggttt

SEQ ID NO: 76262 - DNA, 13 bp, Artificial Sequence
  Oligonucleotide for detection of SNP TSC0019516
aaacctccccacc

SEQ ID NO: 76263 - DNA, 13 bp, Artificial Sequence
  Oligonucleotide for detection of SNP TSC0019516
ggcgggtaggttt

SEQ ID NO: 76264 - DNA, 13 bp, Artificial Sequence
  Oligonucleotide for detection of SNP TSC0019516
aaacctacccgcc

SEQ ID NO: 76265 - DNA, 13 bp, Artificial Sequence
  Oligonucleotide for detection of SNP TSC0019516
ggcggggaggttt

SEQ ID NO: 76266 - DNA, 13 bp, Artificial Sequence
  Oligonucleotide for detection of SNP TSC0019516
aaacctccccgcc

SEQ ID NO: 76267 - DNA, 13 bp, Artificial Sequence
  Oligonucleotide for detection of SNP TSC0019516
agatttttttgty

SEQ ID NO: 76268 - DNA, 13 bp, Artificial Sequence
  Oligonucleotide for detection of SNP TSC0019516
racaaaaaaatct

SEQ ID NO: 76269 - DNA, 13 bp, Artificial Sequence
  Oligonucleotide for detection of SNP TSC0019516
agattttttcgty

SEQ ID NO: 76270 - DNA, 13 bp, Artificial Sequence
  Oligonucleotide for detection of SNP TSC0019516
racgaaaaaatct

SEQ ID NO: 76271 - DNA, 13 bp, Artificial Sequence
  Oligonucleotide for detection of SNP TSC0019517
agtgtatggaaat

SEQ ID NO: 76272 - DNA, 13 bp, Artificial Sequence
  Oligonucleotide for detection of SNP TSC0019517
atttccatacact

SEQ ID NO: 76273 - DNA, 13 bp, Artificial Sequence
  Oligonucleotide for detection of SNP TSC0019517
agtgtacggaaat

SEQ ID NO: 76274 - DNA, 13 bp, Artificial Sequence
  Oligonucleotide for detection of SNP TSC0019517
atttccgtacact

SEQ ID NO: 76275 - DNA, 13 bp, Artificial Sequence
  Oligonucleotide for detection of SNP TSC0019517
atttttgtatatt

SEQ ID NO: 76276 - DNA, 13 bp, Artificial Sequence
  Oligonucleotide for detection of SNP TSC0019517
aatatacaaaaat

SEQ ID NO: 76277 - DNA, 13 bp, Artificial Sequence
  Oligonucleotide for detection of SNP TSC0019517
atttttatatatt

SEQ ID NO: 76278 - DNA, 13 bp, Artificial Sequence
  Oligonucleotide for detection of SNP TSC0019517
aatatataaaaat

SEQ ID NO: 76279 - DNA, 13 bp, Artificial Sequence
  Oligonucleotide for detection of SNP TSC0019517
attttcgtatatt

SEQ ID NO: 76280 - DNA, 13 bp, Artificial Sequence
  Oligonucleotide for detection of SNP TSC0019517
aatatacgaaaat

SEQ ID NO: 76281 - DNA, 13 bp, Artificial Sequence
  Oligonucleotide for detection of SNP TSC0019518
taatgtgttattt

SEQ ID NO: 76282 - DNA, 13 bp, Artificial Sequence
  Oligonucleotide for detection of SNP TSC0019518
aaataacacatta

SEQ ID NO: 76283 - DNA, 13 bp, Artificial Sequence
  Oligonucleotide for detection of SNP TSC0019518
taatgtattattt

SEQ ID NO: 76284 - DNA, 13 bp, Artificial Sequence
  Oligonucleotide for detection of SNP TSC0019518
aaataatacatta

SEQ ID NO: 76285 - DNA, 13 bp, Artificial Sequence
  Oligonucleotide for detection of SNP TSC0019519
ggttatagggata

SEQ ID NO: 76286 - DNA, 13 bp, Artificial Sequence
  Oligonucleotide for detection of SNP TSC0019519
tatccctataacc

SEQ ID NO: 76287 - DNA, 13 bp, Artificial Sequence
  Oligonucleotide for detection of SNP TSC0019519
ggttatggggata

SEQ ID NO: 76288 - DNA, 13 bp, Artificial Sequence
  Oligonucleotide for detection of SNP TSC0019519
tatccccataacc

SEQ ID NO: 76289 - DNA, 13 bp, Artificial Sequence
  Oligonucleotide for detection of SNP TSC0019520
atagggataaatg

SEQ ID NO: 76290 - DNA, 13 bp, Artificial Sequence
  Oligonucleotide for detection of SNP TSC0019520
catttatccctat

SEQ ID NO: 76291 - DNA, 13 bp, Artificial Sequence
  Oligonucleotide for detection of SNP TSC0019520
atagggttaaatg

SEQ ID NO: 76292 - DNA, 13 bp, Artificial Sequence
  Oligonucleotide for detection of SNP TSC0019520
catttaaccctat

SEQ ID NO: 76293 - DNA, 13 bp, Artificial Sequence
  Oligonucleotide for detection of SNP TSC0019521
ttagatgaataaa

SEQ ID NO: 76294 - DNA, 13 bp, Artificial Sequence
  Oligonucleotide for detection of SNP TSC0019521
tttattcatctaa

SEQ ID NO: 76295 - DNA, 13 bp, Artificial Sequence
  Oligonucleotide for detection of SNP TSC0019521
ttagattaataaa

SEQ ID NO: 76296 - DNA, 13 bp, Artificial Sequence
  Oligonucleotide for detection of SNP TSC0019521
tttattaatctaa

SEQ ID NO: 76297 - DNA, 13 bp, Artificial Sequence
  Oligonucleotide for detection of SNP TSC0019521
tttatttatttgg

SEQ ID NO: 76298 - DNA, 13 bp, Artificial Sequence
  Oligonucleotide for detection of SNP TSC0019521
ccaaataaataaa

SEQ ID NO: 76299 - DNA, 13 bp, Artificial Sequence
  Oligonucleotide for detection of SNP TSC0019521
tttattaatttgg

SEQ ID NO: 76300 - DNA, 13 bp, Artificial Sequence
  Oligonucleotide for detection of SNP TSC0019521
ccaaattaataaa

SEQ ID NO: 76301 - DNA, 13 bp, Artificial Sequence
  Oligonucleotide for detection of SNP TSC0019522
cgttttcgtttty

SEQ ID NO: 76302 - DNA, 13 bp, Artificial Sequence
  Oligonucleotide for detection of SNP TSC0019522
raaaacgaaaacg

SEQ ID NO: 76303 - DNA, 13 bp, Artificial Sequence
  Oligonucleotide for detection of SNP TSC0019522
gaaaatgaaaatg

SEQ ID NO: 76304 - DNA, 13 bp, Artificial Sequence
  Oligonucleotide for detection of SNP TSC0019522
cattttcattttc

SEQ ID NO: 76305 - DNA, 13 bp, Artificial Sequence
  Oligonucleotide for detection of SNP TSC0019522
gaaaataaaaatg

SEQ ID NO: 76306 - DNA, 13 bp, Artificial Sequence
  Oligonucleotide for detection of SNP TSC0019522
catttttattttc

SEQ ID NO: 76307 - DNA, 13 bp, Artificial Sequence
  Oligonucleotide for detection of SNP TSC0019522
gaaaacgaaaatg

SEQ ID NO: 76308 - DNA, 13 bp, Artificial Sequence
  Oligonucleotide for detection of SNP TSC0019522
cattttcgttttc

SEQ ID NO: 76309 - DNA, 13 bp, Artificial Sequence
  Oligonucleotide for detection of SNP TSC0019522
gaaaataaaaacg

SEQ ID NO: 76310 - DNA, 13 bp, Artificial Sequence
  Oligonucleotide for detection of SNP TSC0019522
cgtttttattttc

SEQ ID NO: 76311 - DNA, 13 bp, Artificial Sequence
  Oligonucleotide for detection of SNP TSC0019522
gaaaatgaaaacg

SEQ ID NO: 76312 - DNA, 13 bp, Artificial Sequence
  Oligonucleotide for detection of SNP TSC0019522
cgttttcattttc

SEQ ID NO: 76313 - DNA, 13 bp, Artificial Sequence
  Oligonucleotide for detection of SNP TSC0019522
gaaaacgaaaacg

SEQ ID NO: 76314 - DNA, 13 bp, Artificial Sequence
  Oligonucleotide for detection of SNP TSC0019522
cgttttcgttttc

SEQ ID NO: 76315 - DNA, 13 bp, Artificial Sequence
  Oligonucleotide for detection of SNP TSC0019523
tattagatggtag

SEQ ID NO: 76316 - DNA, 13 bp, Artificial Sequence
  Oligonucleotide for detection of SNP TSC0019523
ctaccatctaata

SEQ ID NO: 76317 - DNA, 13 bp, Artificial Sequence
  Oligonucleotide for detection of SNP TSC0019523
tattaggtggtag

SEQ ID NO: 76318 - DNA, 13 bp, Artificial Sequence
  Oligonucleotide for detection of SNP TSC0019523
ctaccacctaata

SEQ ID NO: 76319 - DNA, 13 bp, Artificial Sequence
  Oligonucleotide for detection of SNP TSC0019530
taaggagttgagg

SEQ ID NO: 76320 - DNA, 13 bp, Artificial Sequence
  Oligonucleotide for detection of SNP TSC0019530
cctcaactcctta

SEQ ID NO: 76321 - DNA, 13 bp, Artificial Sequence
  Oligonucleotide for detection of SNP TSC0019530
taaggaattgagg

SEQ ID NO: 76322 - DNA, 13 bp, Artificial Sequence
  Oligonucleotide for detection of SNP TSC0019530
cctcaattcctta

SEQ ID NO: 76323 - DNA, 13 bp, Artificial Sequence
  Oligonucleotide for detection of SNP TSC0019531
aggagaagttaag

SEQ ID NO: 76324 - DNA, 13 bp, Artificial Sequence
  Oligonucleotide for detection of SNP TSC0019531
cttaacttctcct

SEQ ID NO: 76325 - DNA, 13 bp, Artificial Sequence
  Oligonucleotide for detection of SNP TSC0019531
aggagatgttaag

SEQ ID NO: 76326 - DNA, 13 bp, Artificial Sequence
  Oligonucleotide for detection of SNP TSC0019531
cttaacatctcct

SEQ ID NO: 76327 - DNA, 13 bp, Artificial Sequence
  Oligonucleotide for detection of SNP TSC0019531
aggagacgttaag

SEQ ID NO: 76328 - DNA, 13 bp, Artificial Sequence
  Oligonucleotide for detection of SNP TSC0019531
cttaacgtctcct

SEQ ID NO: 76329 - DNA, 13 bp, Artificial Sequence
  Oligonucleotide for detection of SNP TSC0019531
tttaatttttttt

SEQ ID NO: 76330 - DNA, 13 bp, Artificial Sequence
  Oligonucleotide for detection of SNP TSC0019531
aaaaaaaattaaa

SEQ ID NO: 76331 - DNA, 13 bp, Artificial Sequence
  Oligonucleotide for detection of SNP TSC0019531
tttaatgtttttt

SEQ ID NO: 76332 - DNA, 13 bp, Artificial Sequence
  Oligonucleotide for detection of SNP TSC0019531
aaaaaacattaaa

SEQ ID NO: 76333 - DNA, 13 bp, Artificial Sequence
  Oligonucleotide for detection of SNP TSC0019531
tttaacgtttttt

SEQ ID NO: 76334 - DNA, 13 bp, Artificial Sequence
  Oligonucleotide for detection of SNP TSC0019531
aaaaaacgttaaa

SEQ ID NO: 76335 - DNA, 13 bp, Artificial Sequence
  Oligonucleotide for detection of SNP TSC0019532
gtgtaatgtatty

SEQ ID NO: 76336 - DNA, 13 bp, Artificial Sequence
  Oligonucleotide for detection of SNP TSC0019532
raatacattacac

SEQ ID NO: 76337 - DNA, 13 bp, Artificial Sequence
  Oligonucleotide for detection of SNP TSC0019532
gtgtaacgtatty

SEQ ID NO: 76338 - DNA, 13 bp, Artificial Sequence
  Oligonucleotide for detection of SNP TSC0019532
raatacgttacac

SEQ ID NO: 76339 - DNA, 13 bp, Artificial Sequence
  Oligonucleotide for detection of SNP TSC0019532
ggatgtgttgtay

SEQ ID NO: 76340 - DNA, 13 bp, Artificial Sequence
  Oligonucleotide for detection of SNP TSC0019532
rtacaacacatcc

SEQ ID NO: 76341 - DNA, 13 bp, Artificial Sequence
  Oligonucleotide for detection of SNP TSC0019532
ggatgtattgtay

SEQ ID NO: 76342 - DNA, 13 bp, Artificial Sequence
  Oligonucleotide for detection of SNP TSC0019532
rtacaatacatcc

SEQ ID NO: 76343 - DNA, 13 bp, Artificial Sequence
  Oligonucleotide for detection of SNP TSC0019532
ggatgcgttgtay

SEQ ID NO: 76344 - DNA, 13 bp, Artificial Sequence
  Oligonucleotide for detection of SNP TSC0019532
rtacaacgcatcc

SEQ ID NO: 76345 - DNA, 13 bp, Artificial Sequence
  Oligonucleotide for detection of SNP TSC0019533
ggttttaattttg

SEQ ID NO: 76346 - DNA, 13 bp, Artificial Sequence
  Oligonucleotide for detection of SNP TSC0019533
caaaattaaaacc

SEQ ID NO: 76347 - DNA, 13 bp, Artificial Sequence
  Oligonucleotide for detection of SNP TSC0019533
ggttttgattttg

SEQ ID NO: 76348 - DNA, 13 bp, Artificial Sequence
  Oligonucleotide for detection of SNP TSC0019533
caaaatcaaaacc

SEQ ID NO: 76349 - DNA, 13 bp, Artificial Sequence
  Oligonucleotide for detection of SNP TSC0019533
ggtttcgattttg

SEQ ID NO: 76350 - DNA, 13 bp, Artificial Sequence
  Oligonucleotide for detection of SNP TSC0019533
caaaatcgaaacc

SEQ ID NO: 76351 - DNA, 13 bp, Artificial Sequence
  Oligonucleotide for detection of SNP TSC0019533
tagggttggggty

SEQ ID NO: 76352 - DNA, 13 bp, Artificial Sequence
  Oligonucleotide for detection of SNP TSC0019533
raccccaacccta

SEQ ID NO: 76353 - DNA, 13 bp, Artificial Sequence
  Oligonucleotide for detection of SNP TSC0019533
tagggtcggggty

SEQ ID NO: 76354 - DNA, 13 bp, Artificial Sequence
  Oligonucleotide for detection of SNP TSC0019533
raccccgacccta

SEQ ID NO: 76355 - DNA, 13 bp, Artificial Sequence
  Oligonucleotide for detection of SNP TSC0019534
ggttggatggtaa

SEQ ID NO: 76356 - DNA, 13 bp, Artificial Sequence
  Oligonucleotide for detection of SNP TSC0019534
ttaccatccaacc

SEQ ID NO: 76357 - DNA, 13 bp, Artificial Sequence
  Oligonucleotide for detection of SNP TSC0019534
ggttggttggtaa

SEQ ID NO: 76358 - DNA, 13 bp, Artificial Sequence
  Oligonucleotide for detection of SNP TSC0019534
ttaccaaccaacc

SEQ ID NO: 76359 - DNA, 13 bp, Artificial Sequence
  Oligonucleotide for detection of SNP TSC0019534
ttgttatttagty

SEQ ID NO: 76360 - DNA, 13 bp, Artificial Sequence
  Oligonucleotide for detection of SNP TSC0019534
ractaaataacaa

SEQ ID NO: 76361 - DNA, 13 bp, Artificial Sequence
  Oligonucleotide for detection of SNP TSC0019534
ttgttagttagty

SEQ ID NO: 76362 - DNA, 13 bp, Artificial Sequence
  Oligonucleotide for detection of SNP TSC0019534
ractaactaacaa

SEQ ID NO: 76363 - DNA, 13 bp, Artificial Sequence
  Oligonucleotide for detection of SNP TSC0019536
tttggtatttttt

SEQ ID NO: 76364 - DNA, 13 bp, Artificial Sequence
  Oligonucleotide for detection of SNP TSC0019536
aaaaaataccaaa

SEQ ID NO: 76365 - DNA, 13 bp, Artificial Sequence
  Oligonucleotide for detection of SNP TSC0019536
ttcggtatttttt

SEQ ID NO: 76366 - DNA, 13 bp, Artificial Sequence
  Oligonucleotide for detection of SNP TSC0019536
aaaaaataccgaa

SEQ ID NO: 76367 - DNA, 13 bp, Artificial Sequence
  Oligonucleotide for detection of SNP TSC0019536
ttcggtttttttt

SEQ ID NO: 76368 - DNA, 13 bp, Artificial Sequence
  Oligonucleotide for detection of SNP TSC0019536
aaaaaaaaccgaa

SEQ ID NO: 76369 - DNA, 13 bp, Artificial Sequence
  Oligonucleotide for detection of SNP TSC0019536
agggaatgttgag

SEQ ID NO: 76370 - DNA, 13 bp, Artificial Sequence
  Oligonucleotide for detection of SNP TSC0019536
ctcaacattccct

SEQ ID NO: 76371 - DNA, 13 bp, Artificial Sequence
  Oligonucleotide for detection of SNP TSC0019536
agggaaagttgag

SEQ ID NO: 76372 - DNA, 13 bp, Artificial Sequence
  Oligonucleotide for detection of SNP TSC0019536
ctcaactttccct

SEQ ID NO: 76373 - DNA, 13 bp, Artificial Sequence
  Oligonucleotide for detection of SNP TSC0019536
agggaatgtcgag

SEQ ID NO: 76374 - DNA, 13 bp, Artificial Sequence
  Oligonucleotide for detection of SNP TSC0019536
ctcgacattccct

SEQ ID NO: 76375 - DNA, 13 bp, Artificial Sequence
  Oligonucleotide for detection of SNP TSC0019536
agggaaagtcgag

SEQ ID NO: 76376 - DNA, 13 bp, Artificial Sequence
  Oligonucleotide for detection of SNP TSC0019536
ctcgactttccct

SEQ ID NO: 76377 - DNA, 13 bp, Artificial Sequence
  Oligonucleotide for detection of SNP TSC0019537
tatttgtgggggt

SEQ ID NO: 76378 - DNA, 13 bp, Artificial Sequence
  Oligonucleotide for detection of SNP TSC0019537
acccccacaaata

SEQ ID NO: 76379 - DNA, 13 bp, Artificial Sequence
  Oligonucleotide for detection of SNP TSC0019537
tatttgggggggt

SEQ ID NO: 76380 - DNA, 13 bp, Artificial Sequence
  Oligonucleotide for detection of SNP TSC0019537
acccccccaaata

SEQ ID NO: 76381 - DNA, 13 bp, Artificial Sequence
  Oligonucleotide for detection of SNP TSC0019537
tatttgcgggggt

SEQ ID NO: 76382 - DNA, 13 bp, Artificial Sequence
  Oligonucleotide for detection of SNP TSC0019537
acccccgcaaata

SEQ ID NO: 76383 - DNA, 13 bp, Artificial Sequence
  Oligonucleotide for detection of SNP TSC0019537
atttttgtaaatg

SEQ ID NO: 76384 - DNA, 13 bp, Artificial Sequence
  Oligonucleotide for detection of SNP TSC0019537
catttacaaaaat

SEQ ID NO: 76385 - DNA, 13 bp, Artificial Sequence
  Oligonucleotide for detection of SNP TSC0019537
attttcgtaaatg

SEQ ID NO: 76386 - DNA, 13 bp, Artificial Sequence
  Oligonucleotide for detection of SNP TSC0019537
catttacgaaaat

SEQ ID NO: 76387 - DNA, 13 bp, Artificial Sequence
  Oligonucleotide for detection of SNP TSC0019538
gtggttatgttgg

SEQ ID NO: 76388 - DNA, 13 bp, Artificial Sequence
  Oligonucleotide for detection of SNP TSC0019538
ccaacataaccac

SEQ ID NO: 76389 - DNA, 13 bp, Artificial Sequence
  Oligonucleotide for detection of SNP TSC0019538
gtggttttgttgg

SEQ ID NO: 76390 - DNA, 13 bp, Artificial Sequence
  Oligonucleotide for detection of SNP TSC0019538
ccaacaaaaccac

SEQ ID NO: 76391 - DNA, 13 bp, Artificial Sequence
  Oligonucleotide for detection of SNP TSC0019538
ttagtatggttay

SEQ ID NO: 76392 - DNA, 13 bp, Artificial Sequence
  Oligonucleotide for detection of SNP TSC0019538
rtaaccatactaa

SEQ ID NO: 76393 - DNA, 13 bp, Artificial Sequence
  Oligonucleotide for detection of SNP TSC0019538
ttagtagggttay

SEQ ID NO: 76394 - DNA, 13 bp, Artificial Sequence
  Oligonucleotide for detection of SNP TSC0019538
rtaaccctactaa

SEQ ID NO: 76395 - DNA, 13 bp, Artificial Sequence
  Oligonucleotide for detection of SNP TSC0019540
aggaatatggaaa

SEQ ID NO: 76396 - DNA, 13 bp, Artificial Sequence
  Oligonucleotide for detection of SNP TSC0019540
tttccatattcct

SEQ ID NO: 76397 - DNA, 13 bp, Artificial Sequence
  Oligonucleotide for detection of SNP TSC0019540
aggaatgtggaaa

SEQ ID NO: 76398 - DNA, 13 bp, Artificial Sequence
  Oligonucleotide for detection of SNP TSC0019540
tttccacattcct

SEQ ID NO: 76399 - DNA, 13 bp, Artificial Sequence
  Oligonucleotide for detection of SNP TSC0019541
agtttaggtttgg

SEQ ID NO: 76400 - DNA, 13 bp, Artificial Sequence
  Oligonucleotide for detection of SNP TSC0019541
ccaaacctaaact

SEQ ID NO: 76401 - DNA, 13 bp, Artificial Sequence
  Oligonucleotide for detection of SNP TSC0019541
agtttatgtttgg

SEQ ID NO: 76402 - DNA, 13 bp, Artificial Sequence
  Oligonucleotide for detection of SNP TSC0019541
ccaaacataaact

SEQ ID NO: 76403 - DNA, 13 bp, Artificial Sequence
  Oligonucleotide for detection of SNP TSC0019541
ttaagtttgggtt

SEQ ID NO: 76404 - DNA, 13 bp, Artificial Sequence
  Oligonucleotide for detection of SNP TSC0019541
aacccaaacttaa

SEQ ID NO: 76405 - DNA, 13 bp, Artificial Sequence
  Oligonucleotide for detection of SNP TSC0019541
ttaagtatgggtt

SEQ ID NO: 76406 - DNA, 13 bp, Artificial Sequence
  Oligonucleotide for detection of SNP TSC0019541
aacccatacttaa

SEQ ID NO: 76407 - DNA, 13 bp, Artificial Sequence
  Oligonucleotide for detection of SNP TSC0019542
attgttagtgttg

SEQ ID NO: 76408 - DNA, 13 bp, Artificial Sequence
  Oligonucleotide for detection of SNP TSC0019542
caacactaacaat

SEQ ID NO: 76409 - DNA, 13 bp, Artificial Sequence
  Oligonucleotide for detection of SNP TSC0019542
attgttggtgttg

SEQ ID NO: 76410 - DNA, 13 bp, Artificial Sequence
  Oligonucleotide for detection of SNP TSC0019542
caacaccaacaat

SEQ ID NO: 76411 - DNA, 13 bp, Artificial Sequence
  Oligonucleotide for detection of SNP TSC0019542
attgtcggtgttg

SEQ ID NO: 76412 - DNA, 13 bp, Artificial Sequence
  Oligonucleotide for detection of SNP TSC0019542
caacaccgacaat

SEQ ID NO: 76413 - DNA, 13 bp, Artificial Sequence
  Oligonucleotide for detection of SNP TSC0019542
tagtattggtagt

SEQ ID NO: 76414 - DNA, 13 bp, Artificial Sequence
  Oligonucleotide for detection of SNP TSC0019542
actaccaatacta

SEQ ID NO: 76415 - DNA, 13 bp, Artificial Sequence
  Oligonucleotide for detection of SNP TSC0019542
tagtatcggtagt

SEQ ID NO: 76416 - DNA, 13 bp, Artificial Sequence
  Oligonucleotide for detection of SNP TSC0019542
actaccgatacta

SEQ ID NO: 76417 - DNA, 13 bp, Artificial Sequence
  Oligonucleotide for detection of SNP TSC0019543
ttggttatttaaa

SEQ ID NO: 76418 - DNA, 13 bp, Artificial Sequence
  Oligonucleotide for detection of SNP TSC0019543
tttaaataaccaa

SEQ ID NO: 76419 - DNA, 13 bp, Artificial Sequence
  Oligonucleotide for detection of SNP TSC0019543
ttggttttttaaa

SEQ ID NO: 76420 - DNA, 13 bp, Artificial Sequence
  Oligonucleotide for detection of SNP TSC0019543
tttaaaaaaccaa

SEQ ID NO: 76421 - DNA, 13 bp, Artificial Sequence
  Oligonucleotide for detection of SNP TSC0019543
tttaaatggttaa

SEQ ID NO: 76422 - DNA, 13 bp, Artificial Sequence
  Oligonucleotide for detection of SNP TSC0019543
ttaaccatttaaa

SEQ ID NO: 76423 - DNA, 13 bp, Artificial Sequence
  Oligonucleotide for detection of SNP TSC0019543
tttaaaaggttaa

SEQ ID NO: 76424 - DNA, 13 bp, Artificial Sequence
  Oligonucleotide for detection of SNP TSC0019543
ttaaccttttaaa

SEQ ID NO: 76425 - DNA, 13 bp, Artificial Sequence
  Oligonucleotide for detection of SNP TSC0019544
tttattattagat

SEQ ID NO: 76426 - DNA, 13 bp, Artificial Sequence
  Oligonucleotide for detection of SNP TSC0019544
atctaataataaa

SEQ ID NO: 76427 - DNA, 13 bp, Artificial Sequence
  Oligonucleotide for detection of SNP TSC0019544
tttatttttagat

SEQ ID NO: 76428 - DNA, 13 bp, Artificial Sequence
  Oligonucleotide for detection of SNP TSC0019544
atctaaaaataaa

SEQ ID NO: 76429 - DNA, 13 bp, Artificial Sequence
  Oligonucleotide for detection of SNP TSC0019544
atttgataatgga

SEQ ID NO: 76430 - DNA, 13 bp, Artificial Sequence
  Oligonucleotide for detection of SNP TSC0019544
tccattatcaaat

SEQ ID NO: 76431 - DNA, 13 bp, Artificial Sequence
  Oligonucleotide for detection of SNP TSC0019544
atttgagaatgga

SEQ ID NO: 76432 - DNA, 13 bp, Artificial Sequence
  Oligonucleotide for detection of SNP TSC0019544
tccattctcaaat

SEQ ID NO: 76433 - DNA, 13 bp, Artificial Sequence
  Oligonucleotide for detection of SNP TSC0019545
ggaattatgttty

SEQ ID NO: 76434 - DNA, 13 bp, Artificial Sequence
  Oligonucleotide for detection of SNP TSC0019545
raaacataattcc

SEQ ID NO: 76435 - DNA, 13 bp, Artificial Sequence
  Oligonucleotide for detection of SNP TSC0019545
ggaattgtgttty

SEQ ID NO: 76436 - DNA, 13 bp, Artificial Sequence
  Oligonucleotide for detection of SNP TSC0019545
raaacacaattcc

SEQ ID NO: 76437 - DNA, 13 bp, Artificial Sequence
  Oligonucleotide for detection of SNP TSC0019545
ggaattacgttty

SEQ ID NO: 76438 - DNA, 13 bp, Artificial Sequence
  Oligonucleotide for detection of SNP TSC0019545
raaacgtaattcc

SEQ ID NO: 76439 - DNA, 13 bp, Artificial Sequence
  Oligonucleotide for detection of SNP TSC0019545
ggaatcgtgttty

SEQ ID NO: 76440 - DNA, 13 bp, Artificial Sequence
  Oligonucleotide for detection of SNP TSC0019545
raaacacgattcc

SEQ ID NO: 76441 - DNA, 13 bp, Artificial Sequence
  Oligonucleotide for detection of SNP TSC0019545
ggaattgcgttty

SEQ ID NO: 76442 - DNA, 13 bp, Artificial Sequence
  Oligonucleotide for detection of SNP TSC0019545
raaacgcaattcc

SEQ ID NO: 76443 - DNA, 13 bp, Artificial Sequence
  Oligonucleotide for detection of SNP TSC0019545
ggaatcgcgttty

SEQ ID NO: 76444 - DNA, 13 bp, Artificial Sequence
  Oligonucleotide for detection of SNP TSC0019545
raaacgcgattcc

SEQ ID NO: 76445 - DNA, 13 bp, Artificial Sequence
  Oligonucleotide for detection of SNP TSC0019545
gaggtgtggttty

SEQ ID NO: 76446 - DNA, 13 bp, Artificial Sequence
  Oligonucleotide for detection of SNP TSC0019545
raaaccacacctc

SEQ ID NO: 76447 - DNA, 13 bp, Artificial Sequence
  Oligonucleotide for detection of SNP TSC0019545
gaggcgtggttty

SEQ ID NO: 76448 - DNA, 13 bp, Artificial Sequence
  Oligonucleotide for detection of SNP TSC0019545
raaaccacgcctc

SEQ ID NO: 76449 - DNA, 13 bp, Artificial Sequence
  Oligonucleotide for detection of SNP TSC0019545
gaggtgcggttty

SEQ ID NO: 76450 - DNA, 13 bp, Artificial Sequence
  Oligonucleotide for detection of SNP TSC0019545
raaaccgcacctc

SEQ ID NO: 76451 - DNA, 13 bp, Artificial Sequence
  Oligonucleotide for detection of SNP TSC0019545
gaggcgcggttty

SEQ ID NO: 76452 - DNA, 13 bp, Artificial Sequence
  Oligonucleotide for detection of SNP TSC0019545
raaaccgcgcctc

SEQ ID NO: 76453 - DNA, 13 bp, Artificial Sequence
  Oligonucleotide for detection of SNP TSC0019548
aaaagagtaataa

SEQ ID NO: 76454 - DNA, 13 bp, Artificial Sequence
  Oligonucleotide for detection of SNP TSC0019548
ttattactctttt

SEQ ID NO: 76455 - DNA, 13 bp, Artificial Sequence
  Oligonucleotide for detection of SNP TSC0019548
aaaagaataataa

SEQ ID NO: 76456 - DNA, 13 bp, Artificial Sequence
  Oligonucleotide for detection of SNP TSC0019548
ttattattctttt

SEQ ID NO: 76457 - DNA, 13 bp, Artificial Sequence
  Oligonucleotide for detection of SNP TSC0019550
ttttaggttgtag

SEQ ID NO: 76458 - DNA, 13 bp, Artificial Sequence
  Oligonucleotide for detection of SNP TSC0019550
ctacaacctaaaa

SEQ ID NO: 76459 - DNA, 13 bp, Artificial Sequence
  Oligonucleotide for detection of SNP TSC0019550
ttttagattgtag

SEQ ID NO: 76460 - DNA, 13 bp, Artificial Sequence
  Oligonucleotide for detection of SNP TSC0019550
ctacaatctaaaa

SEQ ID NO: 76461 - DNA, 13 bp, Artificial Sequence
  Oligonucleotide for detection of SNP TSC0019551
ttgggagtaaagy

SEQ ID NO: 76462 - DNA, 13 bp, Artificial Sequence
  Oligonucleotide for detection of SNP TSC0019551
rctttactcccaa

SEQ ID NO: 76463 - DNA, 13 bp, Artificial Sequence
  Oligonucleotide for detection of SNP TSC0019551
ttgggattaaagy

SEQ ID NO: 76464 - DNA, 13 bp, Artificial Sequence
  Oligonucleotide for detection of SNP TSC0019551
rctttaatcccaa

SEQ ID NO: 76465 - DNA, 13 bp, Artificial Sequence
  Oligonucleotide for detection of SNP TSC0019551
gttttgtttttag

SEQ ID NO: 76466 - DNA, 13 bp, Artificial Sequence
  Oligonucleotide for detection of SNP TSC0019551
ctaaaaacaaaac

SEQ ID NO: 76467 - DNA, 13 bp, Artificial Sequence
  Oligonucleotide for detection of SNP TSC0019551
gttttgattttag

SEQ ID NO: 76468 - DNA, 13 bp, Artificial Sequence
  Oligonucleotide for detection of SNP TSC0019551
ctaaaatcaaaac

SEQ ID NO: 76469 - DNA, 13 bp, Artificial Sequence
  Oligonucleotide for detection of SNP TSC0019552
atattatgttaaa

SEQ ID NO: 76470 - DNA, 13 bp, Artificial Sequence
  Oligonucleotide for detection of SNP TSC0019552
tttaacataatat

SEQ ID NO: 76471 - DNA, 13 bp, Artificial Sequence
  Oligonucleotide for detection of SNP TSC0019552
atattacgttaaa

SEQ ID NO: 76472 - DNA, 13 bp, Artificial Sequence
  Oligonucleotide for detection of SNP TSC0019552
tttaacgtaatat

SEQ ID NO: 76473 - DNA, 13 bp, Artificial Sequence
  Oligonucleotide for detection of SNP TSC0019552
tttgatgtaatgt

SEQ ID NO: 76474 - DNA, 13 bp, Artificial Sequence
  Oligonucleotide for detection of SNP TSC0019552
acattacatcaaa

SEQ ID NO: 76475 - DNA, 13 bp, Artificial Sequence
  Oligonucleotide for detection of SNP TSC0019552
tttgatataatgt

SEQ ID NO: 76476 - DNA, 13 bp, Artificial Sequence
  Oligonucleotide for detection of SNP TSC0019552
acattatatcaaa

SEQ ID NO: 76477 - DNA, 13 bp, Artificial Sequence
  Oligonucleotide for detection of SNP TSC0019552
tttgacgtaatgt

SEQ ID NO: 76478 - DNA, 13 bp, Artificial Sequence
  Oligonucleotide for detection of SNP TSC0019552
acattacgtcaaa

SEQ ID NO: 76479 - DNA, 13 bp, Artificial Sequence
  Oligonucleotide for detection of SNP TSC0019553
ttgtttgaaagtt

SEQ ID NO: 76480 - DNA, 13 bp, Artificial Sequence
  Oligonucleotide for detection of SNP TSC0019553
aactttcaaacaa

SEQ ID NO: 76481 - DNA, 13 bp, Artificial Sequence
  Oligonucleotide for detection of SNP TSC0019553
ttgttttaaagtt

SEQ ID NO: 76482 - DNA, 13 bp, Artificial Sequence
  Oligonucleotide for detection of SNP TSC0019553
aactttaaaacaa

SEQ ID NO: 76483 - DNA, 13 bp, Artificial Sequence
  Oligonucleotide for detection of SNP TSC0019553
aatttttaaatag

SEQ ID NO: 76484 - DNA, 13 bp, Artificial Sequence
  Oligonucleotide for detection of SNP TSC0019553
ctatttaaaaatt

SEQ ID NO: 76485 - DNA, 13 bp, Artificial Sequence
  Oligonucleotide for detection of SNP TSC0019553
aattttaaaatag

SEQ ID NO: 76486 - DNA, 13 bp, Artificial Sequence
  Oligonucleotide for detection of SNP TSC0019553
ctattttaaaatt

SEQ ID NO: 76487 - DNA, 13 bp, Artificial Sequence
  Oligonucleotide for detection of SNP TSC0019555
tttgtgtgttgta

SEQ ID NO: 76488 - DNA, 13 bp, Artificial Sequence
  Oligonucleotide for detection of SNP TSC0019555
tacaacacacaaa

SEQ ID NO: 76489 - DNA, 13 bp, Artificial Sequence
  Oligonucleotide for detection of SNP TSC0019555
tttgtgcgttgta

SEQ ID NO: 76490 - DNA, 13 bp, Artificial Sequence
  Oligonucleotide for detection of SNP TSC0019555
tacaacgcacaaa

SEQ ID NO: 76491 - DNA, 13 bp, Artificial Sequence
  Oligonucleotide for detection of SNP TSC0019555
tgtagtgtataga

SEQ ID NO: 76492 - DNA, 13 bp, Artificial Sequence
  Oligonucleotide for detection of SNP TSC0019555
tctatacactaca

SEQ ID NO: 76493 - DNA, 13 bp, Artificial Sequence
  Oligonucleotide for detection of SNP TSC0019555
tgtagtatataga

SEQ ID NO: 76494 - DNA, 13 bp, Artificial Sequence
  Oligonucleotide for detection of SNP TSC0019555
tctatatactaca

SEQ ID NO: 76495 - DNA, 13 bp, Artificial Sequence
  Oligonucleotide for detection of SNP TSC0019555
tgtagcgtataga

SEQ ID NO: 76496 - DNA, 13 bp, Artificial Sequence
  Oligonucleotide for detection of SNP TSC0019555
tctatacgctaca

SEQ ID NO: 76497 - DNA, 13 bp, Artificial Sequence
  Oligonucleotide for detection of SNP TSC0019561
aaagtttggaaag

SEQ ID NO: 76498 - DNA, 13 bp, Artificial Sequence
  Oligonucleotide for detection of SNP TSC0019561
ctttccaaacttt

SEQ ID NO: 76499 - DNA, 13 bp, Artificial Sequence
  Oligonucleotide for detection of SNP TSC0019561
aaagttcggaaag

SEQ ID NO: 76500 - DNA, 13 bp, Artificial Sequence
  Oligonucleotide for detection of SNP TSC0019561
ctttccgaacttt

SEQ ID NO: 76501 - DNA, 13 bp, Artificial Sequence
  Oligonucleotide for detection of SNP TSC0019561
ttttttgggtttt

SEQ ID NO: 76502 - DNA, 13 bp, Artificial Sequence
  Oligonucleotide for detection of SNP TSC0019561
aaaacccaaaaaa

SEQ ID NO: 76503 - DNA, 13 bp, Artificial Sequence
  Oligonucleotide for detection of SNP TSC0019561
ttttttaggtttt

SEQ ID NO: 76504 - DNA, 13 bp, Artificial Sequence
  Oligonucleotide for detection of SNP TSC0019561
aaaacctaaaaaa

SEQ ID NO: 76505 - DNA, 13 bp, Artificial Sequence
  Oligonucleotide for detection of SNP TSC0019561
tttttcgggtttt

SEQ ID NO: 76506 - DNA, 13 bp, Artificial Sequence
  Oligonucleotide for detection of SNP TSC0019561
aaaacccgaaaaa

SEQ ID NO: 76507 - DNA, 13 bp, Artificial Sequence
  Oligonucleotide for detection of SNP TSC0019564
taatatgatagtt

SEQ ID NO: 76508 - DNA, 13 bp, Artificial Sequence
  Oligonucleotide for detection of SNP TSC0019564
aactatcatatta

SEQ ID NO: 76509 - DNA, 13 bp, Artificial Sequence
  Oligonucleotide for detection of SNP TSC0019564
taatattatagtt

SEQ ID NO: 76510 - DNA, 13 bp, Artificial Sequence
  Oligonucleotide for detection of SNP TSC0019564
aactataatatta

SEQ ID NO: 76511 - DNA, 13 bp, Artificial Sequence
  Oligonucleotide for detection of SNP TSC0019564
taatacgatagtt

SEQ ID NO: 76512 - DNA, 13 bp, Artificial Sequence
  Oligonucleotide for detection of SNP TSC0019564
aactatcgtatta

SEQ ID NO: 76513 - DNA, 13 bp, Artificial Sequence
  Oligonucleotide for detection of SNP TSC0019564
agttgttgtattg

SEQ ID NO: 76514 - DNA, 13 bp, Artificial Sequence
  Oligonucleotide for detection of SNP TSC0019564
caatacaacaact

SEQ ID NO: 76515 - DNA, 13 bp, Artificial Sequence
  Oligonucleotide for detection of SNP TSC0019564
agttgtagtattg

SEQ ID NO: 76516 - DNA, 13 bp, Artificial Sequence
  Oligonucleotide for detection of SNP TSC0019564
caatactacaact

SEQ ID NO: 76517 - DNA, 13 bp, Artificial Sequence
  Oligonucleotide for detection of SNP TSC0019564
agttgtcgtattg

SEQ ID NO: 76518 - DNA, 13 bp, Artificial Sequence
  Oligonucleotide for detection of SNP TSC0019564
caatacgacaact

SEQ ID NO: 76519 - DNA, 13 bp, Artificial Sequence
  Oligonucleotide for detection of SNP TSC0019565
tggaagatgttay

SEQ ID NO: 76520 - DNA, 13 bp, Artificial Sequence
  Oligonucleotide for detection of SNP TSC0019565
rtaacatcttcca

SEQ ID NO: 76521 - DNA, 13 bp, Artificial Sequence
  Oligonucleotide for detection of SNP TSC0019565
tggaagttgttay

SEQ ID NO: 76522 - DNA, 13 bp, Artificial Sequence
  Oligonucleotide for detection of SNP TSC0019565
rtaacaacttcca

SEQ ID NO: 76523 - DNA, 13 bp, Artificial Sequence
  Oligonucleotide for detection of SNP TSC0019565
gtagtatttttta

SEQ ID NO: 76524 - DNA, 13 bp, Artificial Sequence
  Oligonucleotide for detection of SNP TSC0019565
taaaaaatactac

SEQ ID NO: 76525 - DNA, 13 bp, Artificial Sequence
  Oligonucleotide for detection of SNP TSC0019565
gtagtagttttta

SEQ ID NO: 76526 - DNA, 13 bp, Artificial Sequence
  Oligonucleotide for detection of SNP TSC0019565
taaaaactactac

SEQ ID NO: 76527 - DNA, 13 bp, Artificial Sequence
  Oligonucleotide for detection of SNP TSC0019566
gggttttgttatg

SEQ ID NO: 76528 - DNA, 13 bp, Artificial Sequence
  Oligonucleotide for detection of SNP TSC0019566
cataacaaaaccc

SEQ ID NO: 76529 - DNA, 13 bp, Artificial Sequence
  Oligonucleotide for detection of SNP TSC0019566
gggtttcgttatg

SEQ ID NO: 76530 - DNA, 13 bp, Artificial Sequence
  Oligonucleotide for detection of SNP TSC0019566
cataacgaaaccc

SEQ ID NO: 76531 - DNA, 13 bp, Artificial Sequence
  Oligonucleotide for detection of SNP TSC0019566
tatggcgaaatty

SEQ ID NO: 76532 - DNA, 13 bp, Artificial Sequence
  Oligonucleotide for detection of SNP TSC0019566
raatttcgccata

SEQ ID NO: 76533 - DNA, 13 bp, Artificial Sequence
  Oligonucleotide for detection of SNP TSC0019567
tagagtaggaagy

SEQ ID NO: 76534 - DNA, 13 bp, Artificial Sequence
  Oligonucleotide for detection of SNP TSC0019567
rcttcctactcta

SEQ ID NO: 76535 - DNA, 13 bp, Artificial Sequence
  Oligonucleotide for detection of SNP TSC0019567
tagagtgggaagy

SEQ ID NO: 76536 - DNA, 13 bp, Artificial Sequence
  Oligonucleotide for detection of SNP TSC0019567
rcttcccactcta

SEQ ID NO: 76537 - DNA, 13 bp, Artificial Sequence
  Oligonucleotide for detection of SNP TSC0019568
gaagttatggagy

SEQ ID NO: 76538 - DNA, 13 bp, Artificial Sequence
  Oligonucleotide for detection of SNP TSC0019568
rctccataacttc

SEQ ID NO: 76539 - DNA, 13 bp, Artificial Sequence
  Oligonucleotide for detection of SNP TSC0019568
gaagttgtggagy

SEQ ID NO: 76540 - DNA, 13 bp, Artificial Sequence
  Oligonucleotide for detection of SNP TSC0019568
rctccacaacttc

SEQ ID NO: 76541 - DNA, 13 bp, Artificial Sequence
  Oligonucleotide for detection of SNP TSC0019569
ttattaggtggta

SEQ ID NO: 76542 - DNA, 13 bp, Artificial Sequence
  Oligonucleotide for detection of SNP TSC0019569
taccacctaataa

SEQ ID NO: 76543 - DNA, 13 bp, Artificial Sequence
  Oligonucleotide for detection of SNP TSC0019569
ttattaagtggta

SEQ ID NO: 76544 - DNA, 13 bp, Artificial Sequence
  Oligonucleotide for detection of SNP TSC0019569
taccacttaataa

SEQ ID NO: 76545 - DNA, 13 bp, Artificial Sequence
  Oligonucleotide for detection of SNP TSC0019570
tggttaatagaaa

SEQ ID NO: 76546 - DNA, 13 bp, Artificial Sequence
  Oligonucleotide for detection of SNP TSC0019570
tttctattaacca

SEQ ID NO: 76547 - DNA, 13 bp, Artificial Sequence
  Oligonucleotide for detection of SNP TSC0019570
tggttagtagaaa

SEQ ID NO: 76548 - DNA, 13 bp, Artificial Sequence
  Oligonucleotide for detection of SNP TSC0019570
tttctactaacca

SEQ ID NO: 76549 - DNA, 13 bp, Artificial Sequence
  Oligonucleotide for detection of SNP TSC0019571
ttgtttggttttt

SEQ ID NO: 76550 - DNA, 13 bp, Artificial Sequence
  Oligonucleotide for detection of SNP TSC0019571
aaaaaccaaacaa

SEQ ID NO: 76551 - DNA, 13 bp, Artificial Sequence
  Oligonucleotide for detection of SNP TSC0019571
aagggtgaaatag

SEQ ID NO: 76552 - DNA, 13 bp, Artificial Sequence
  Oligonucleotide for detection of SNP TSC0019571
ctatttcaccctt

SEQ ID NO: 76553 - DNA, 13 bp, Artificial Sequence
  Oligonucleotide for detection of SNP TSC0019571
aagggttaaatag

SEQ ID NO: 76554 - DNA, 13 bp, Artificial Sequence
  Oligonucleotide for detection of SNP TSC0019571
ctatttaaccctt

SEQ ID NO: 76555 - DNA, 13 bp, Artificial Sequence
  Oligonucleotide for detection of SNP TSC0019571
aagggcgaaatag

SEQ ID NO: 76556 - DNA, 13 bp, Artificial Sequence
  Oligonucleotide for detection of SNP TSC0019571
ctatttcgccctt

SEQ ID NO: 76557 - DNA, 13 bp, Artificial Sequence
  Oligonucleotide for detection of SNP TSC0019572
ttttaaaaagtat

SEQ ID NO: 76558 - DNA, 13 bp, Artificial Sequence
  Oligonucleotide for detection of SNP TSC0019572
atactttttaaaa

SEQ ID NO: 76559 - DNA, 13 bp, Artificial Sequence
  Oligonucleotide for detection of SNP TSC0019572
ttttaagaagtat

SEQ ID NO: 76560 - DNA, 13 bp, Artificial Sequence
  Oligonucleotide for detection of SNP TSC0019572
atacttcttaaaa

SEQ ID NO: 76561 - DNA, 13 bp, Artificial Sequence
  Oligonucleotide for detection of SNP TSC0019574
tgggttaaattat

SEQ ID NO: 76562 - DNA, 13 bp, Artificial Sequence
  Oligonucleotide for detection of SNP TSC0019574
ataatttaaccca

SEQ ID NO: 76563 - DNA, 13 bp, Artificial Sequence
  Oligonucleotide for detection of SNP TSC0019574
tgggttgaattat

SEQ ID NO: 76564 - DNA, 13 bp, Artificial Sequence
  Oligonucleotide for detection of SNP TSC0019574
ataattcaaccca

SEQ ID NO: 76565 - DNA, 13 bp, Artificial Sequence
  Oligonucleotide for detection of SNP TSC0019574
tgggtcgaattat

SEQ ID NO: 76566 - DNA, 13 bp, Artificial Sequence
  Oligonucleotide for detection of SNP TSC0019574
ataattcgaccca

SEQ ID NO: 76567 - DNA, 13 bp, Artificial Sequence
  Oligonucleotide for detection of SNP TSC0019574
ataatttgattta

SEQ ID NO: 76568 - DNA, 13 bp, Artificial Sequence
  Oligonucleotide for detection of SNP TSC0019574
taaatcaaattat

SEQ ID NO: 76569 - DNA, 13 bp, Artificial Sequence
  Oligonucleotide for detection of SNP TSC0019574
ataattcgattta

SEQ ID NO: 76570 - DNA, 13 bp, Artificial Sequence
  Oligonucleotide for detection of SNP TSC0019574
taaatcgaattat

SEQ ID NO: 76571 - DNA, 13 bp, Artificial Sequence
  Oligonucleotide for detection of SNP TSC0019576
tttttgtgttggg

SEQ ID NO: 76572 - DNA, 13 bp, Artificial Sequence
  Oligonucleotide for detection of SNP TSC0019576
cccaacacaaaaa

SEQ ID NO: 76573 - DNA, 13 bp, Artificial Sequence
  Oligonucleotide for detection of SNP TSC0019576
tttttgcgttggg

SEQ ID NO: 76574 - DNA, 13 bp, Artificial Sequence
  Oligonucleotide for detection of SNP TSC0019576
cccaacgcaaaaa

SEQ ID NO: 76575 - DNA, 13 bp, Artificial Sequence
  Oligonucleotide for detection of SNP TSC0019576
tttagtgtagaga

SEQ ID NO: 76576 - DNA, 13 bp, Artificial Sequence
  Oligonucleotide for detection of SNP TSC0019576
tctctacactaaa

SEQ ID NO: 76577 - DNA, 13 bp, Artificial Sequence
  Oligonucleotide for detection of SNP TSC0019576
tttagtatagaga

SEQ ID NO: 76578 - DNA, 13 bp, Artificial Sequence
  Oligonucleotide for detection of SNP TSC0019576
tctctatactaaa

SEQ ID NO: 76579 - DNA, 13 bp, Artificial Sequence
  Oligonucleotide for detection of SNP TSC0019576
tttagcgtagaga

SEQ ID NO: 76580 - DNA, 13 bp, Artificial Sequence
  Oligonucleotide for detection of SNP TSC0019576
tctctacgctaaa

SEQ ID NO: 76581 - DNA, 13 bp, Artificial Sequence
  Oligonucleotide for detection of SNP TSC0019577
agaggtaggttat

SEQ ID NO: 76582 - DNA, 13 bp, Artificial Sequence
  Oligonucleotide for detection of SNP TSC0019577
ataacctacctct

SEQ ID NO: 76583 - DNA, 13 bp, Artificial Sequence
  Oligonucleotide for detection of SNP TSC0019577
agaggtgggttat

SEQ ID NO: 76584 - DNA, 13 bp, Artificial Sequence
  Oligonucleotide for detection of SNP TSC0019577
ataacccacctct

SEQ ID NO: 76585 - DNA, 13 bp, Artificial Sequence
  Oligonucleotide for detection of SNP TSC0019577
agaggcgggttat

SEQ ID NO: 76586 - DNA, 13 bp, Artificial Sequence
  Oligonucleotide for detection of SNP TSC0019577
ataacccgcctct

SEQ ID NO: 76587 - DNA, 13 bp, Artificial Sequence
  Oligonucleotide for detection of SNP TSC0019577
ataatttgttttt

SEQ ID NO: 76588 - DNA, 13 bp, Artificial Sequence
  Oligonucleotide for detection of SNP TSC0019577
aaaaacaaattat

SEQ ID NO: 76589 - DNA, 13 bp, Artificial Sequence
  Oligonucleotide for detection of SNP TSC0019577
ataattcgttttt

SEQ ID NO: 76590 - DNA, 13 bp, Artificial Sequence
  Oligonucleotide for detection of SNP TSC0019577
aaaaacgaattat

SEQ ID NO: 76591 - DNA, 13 bp, Artificial Sequence
  Oligonucleotide for detection of SNP TSC0019580
attttgaattaaa

SEQ ID NO: 76592 - DNA, 13 bp, Artificial Sequence
  Oligonucleotide for detection of SNP TSC0019580
tttaattcaaaat

SEQ ID NO: 76593 - DNA, 13 bp, Artificial Sequence
  Oligonucleotide for detection of SNP TSC0019580
attttggattaaa

SEQ ID NO: 76594 - DNA, 13 bp, Artificial Sequence
  Oligonucleotide for detection of SNP TSC0019580
tttaatccaaaat

SEQ ID NO: 76595 - DNA, 13 bp, Artificial Sequence
  Oligonucleotide for detection of SNP TSC0019586
gatagtataggtg

SEQ ID NO: 76596 - DNA, 13 bp, Artificial Sequence
  Oligonucleotide for detection of SNP TSC0019586
cacctatactatc

SEQ ID NO: 76597 - DNA, 13 bp, Artificial Sequence
  Oligonucleotide for detection of SNP TSC0019586
gatagtgtaggtg

SEQ ID NO: 76598 - DNA, 13 bp, Artificial Sequence
  Oligonucleotide for detection of SNP TSC0019586
cacctacactatc

SEQ ID NO: 76599 - DNA, 13 bp, Artificial Sequence
  Oligonucleotide for detection of SNP TSC0019586
gatagcgtaggtg

SEQ ID NO: 76600 - DNA, 13 bp, Artificial Sequence
  Oligonucleotide for detection of SNP TSC0019586
cacctacgctatc

SEQ ID NO: 76601 - DNA, 13 bp, Artificial Sequence
  Oligonucleotide for detection of SNP TSC0019586
tatttgtgttgty

SEQ ID NO: 76602 - DNA, 13 bp, Artificial Sequence
  Oligonucleotide for detection of SNP TSC0019586
racaacacaaata

SEQ ID NO: 76603 - DNA, 13 bp, Artificial Sequence
  Oligonucleotide for detection of SNP TSC0019586
tatttgcgttgty

SEQ ID NO: 76604 - DNA, 13 bp, Artificial Sequence
  Oligonucleotide for detection of SNP TSC0019586
racaacgcaaata

SEQ ID NO: 76605 - DNA, 13 bp, Artificial Sequence
  Oligonucleotide for detection of SNP TSC0019587
agtgtttgggtta

SEQ ID NO: 76606 - DNA, 13 bp, Artificial Sequence
  Oligonucleotide for detection of SNP TSC0019587
taacccaaacact

SEQ ID NO: 76607 - DNA, 13 bp, Artificial Sequence
  Oligonucleotide for detection of SNP TSC0019587
agtgttcgggtta

SEQ ID NO: 76608 - DNA, 13 bp, Artificial Sequence
  Oligonucleotide for detection of SNP TSC0019587
taacccgaacact

SEQ ID NO: 76609 - DNA, 13 bp, Artificial Sequence
  Oligonucleotide for detection of SNP TSC0019587
tggtttggatatt

SEQ ID NO: 76610 - DNA, 13 bp, Artificial Sequence
  Oligonucleotide for detection of SNP TSC0019587
aatatccaaacca

SEQ ID NO: 76611 - DNA, 13 bp, Artificial Sequence
  Oligonucleotide for detection of SNP TSC0019587
tggtttagatatt

SEQ ID NO: 76612 - DNA, 13 bp, Artificial Sequence
  Oligonucleotide for detection of SNP TSC0019587
aatatctaaacca

SEQ ID NO: 76613 - DNA, 13 bp, Artificial Sequence
  Oligonucleotide for detection of SNP TSC0019587
tggttcggatatt

SEQ ID NO: 76614 - DNA, 13 bp, Artificial Sequence
  Oligonucleotide for detection of SNP TSC0019587
aatatccgaacca

SEQ ID NO: 76615 - DNA, 13 bp, Artificial Sequence
  Oligonucleotide for detection of SNP TSC0019588
tattatattgtty

SEQ ID NO: 76616 - DNA, 13 bp, Artificial Sequence
  Oligonucleotide for detection of SNP TSC0019588
raacaatataata

SEQ ID NO: 76617 - DNA, 13 bp, Artificial Sequence
  Oligonucleotide for detection of SNP TSC0019588
tattattttgtty

SEQ ID NO: 76618 - DNA, 13 bp, Artificial Sequence
  Oligonucleotide for detection of SNP TSC0019588
raacaaaataata

SEQ ID NO: 76619 - DNA, 13 bp, Artificial Sequence
  Oligonucleotide for detection of SNP TSC0019588
gaataatataatg

SEQ ID NO: 76620 - DNA, 13 bp, Artificial Sequence
  Oligonucleotide for detection of SNP TSC0019588
cattatattattc

SEQ ID NO: 76621 - DNA, 13 bp, Artificial Sequence
  Oligonucleotide for detection of SNP TSC0019588
gaataaaataatg

SEQ ID NO: 76622 - DNA, 13 bp, Artificial Sequence
  Oligonucleotide for detection of SNP TSC0019588
cattattttattc

SEQ ID NO: 76623 - DNA, 13 bp, Artificial Sequence
  Oligonucleotide for detection of SNP TSC0019589
ggttgtaggaatg

SEQ ID NO: 76624 - DNA, 13 bp, Artificial Sequence
  Oligonucleotide for detection of SNP TSC0019589
cattcctacaacc

SEQ ID NO: 76625 - DNA, 13 bp, Artificial Sequence
  Oligonucleotide for detection of SNP TSC0019589
ggttgtgggaatg

SEQ ID NO: 76626 - DNA, 13 bp, Artificial Sequence
  Oligonucleotide for detection of SNP TSC0019589
cattcccacaacc

SEQ ID NO: 76627 - DNA, 13 bp, Artificial Sequence
  Oligonucleotide for detection of SNP TSC0019589
ggttgcgggaatg

SEQ ID NO: 76628 - DNA, 13 bp, Artificial Sequence
  Oligonucleotide for detection of SNP TSC0019589
cattcccgcaacc

SEQ ID NO: 76629 - DNA, 13 bp, Artificial Sequence
  Oligonucleotide for detection of SNP TSC0019589
tatttttgtagty

SEQ ID NO: 76630 - DNA, 13 bp, Artificial Sequence
  Oligonucleotide for detection of SNP TSC0019589
ractacaaaaata

SEQ ID NO: 76631 - DNA, 13 bp, Artificial Sequence
  Oligonucleotide for detection of SNP TSC0019589
tattttcgtagty

SEQ ID NO: 76632 - DNA, 13 bp, Artificial Sequence
  Oligonucleotide for detection of SNP TSC0019589
ractacgaaaata

SEQ ID NO: 76633 - DNA, 13 bp, Artificial Sequence
  Oligonucleotide for detection of SNP TSC0019590
ttaaaataggtag

SEQ ID NO: 76634 - DNA, 13 bp, Artificial Sequence
  Oligonucleotide for detection of SNP TSC0019590
ctacctattttaa

SEQ ID NO: 76635 - DNA, 13 bp, Artificial Sequence
  Oligonucleotide for detection of SNP TSC0019590
ttaaaagaggtag

SEQ ID NO: 76636 - DNA, 13 bp, Artificial Sequence
  Oligonucleotide for detection of SNP TSC0019590
ctacctcttttaa

SEQ ID NO: 76637 - DNA, 13 bp, Artificial Sequence
  Oligonucleotide for detection of SNP TSC0019591
ttttagagaagag

SEQ ID NO: 76638 - DNA, 13 bp, Artificial Sequence
  Oligonucleotide for detection of SNP TSC0019591
ctcttctctaaaa

SEQ ID NO: 76639 - DNA, 13 bp, Artificial Sequence
  Oligonucleotide for detection of SNP TSC0019591
ttttagggaagag

SEQ ID NO: 76640 - DNA, 13 bp, Artificial Sequence
  Oligonucleotide for detection of SNP TSC0019591
ctcttccctaaaa

SEQ ID NO: 76641 - DNA, 13 bp, Artificial Sequence
  Oligonucleotide for detection of SNP TSC0019592
taatatgtataaa

SEQ ID NO: 76642 - DNA, 13 bp, Artificial Sequence
  Oligonucleotide for detection of SNP TSC0019592
tttatacatatta

SEQ ID NO: 76643 - DNA, 13 bp, Artificial Sequence
  Oligonucleotide for detection of SNP TSC0019592
taatatttataaa

SEQ ID NO: 76644 - DNA, 13 bp, Artificial Sequence
  Oligonucleotide for detection of SNP TSC0019592
tttataaatatta

SEQ ID NO: 76645 - DNA, 13 bp, Artificial Sequence
  Oligonucleotide for detection of SNP TSC0019592
tttatatatgtta

SEQ ID NO: 76646 - DNA, 13 bp, Artificial Sequence
  Oligonucleotide for detection of SNP TSC0019592
taacatatataaa

SEQ ID NO: 76647 - DNA, 13 bp, Artificial Sequence
  Oligonucleotide for detection of SNP TSC0019592
tttataaatgtta

SEQ ID NO: 76648 - DNA, 13 bp, Artificial Sequence
  Oligonucleotide for detection of SNP TSC0019592
taacatttataaa

SEQ ID NO: 76649 - DNA, 13 bp, Artificial Sequence
  Oligonucleotide for detection of SNP TSC0019593
taatttatttatt

SEQ ID NO: 76650 - DNA, 13 bp, Artificial Sequence
  Oligonucleotide for detection of SNP TSC0019593
aataaataaatta

SEQ ID NO: 76651 - DNA, 13 bp, Artificial Sequence
  Oligonucleotide for detection of SNP TSC0019593
taatttgtttatt

SEQ ID NO: 76652 - DNA, 13 bp, Artificial Sequence
  Oligonucleotide for detection of SNP TSC0019593
aataaacaaatta

SEQ ID NO: 76653 - DNA, 13 bp, Artificial Sequence
  Oligonucleotide for detection of SNP TSC0019593
taattcgtttatt

SEQ ID NO: 76654 - DNA, 13 bp, Artificial Sequence
  Oligonucleotide for detection of SNP TSC0019593
aataaacgaatta

SEQ ID NO: 76655 - DNA, 13 bp, Artificial Sequence
  Oligonucleotide for detection of SNP TSC0019593
aatggatgggtta

SEQ ID NO: 76656 - DNA, 13 bp, Artificial Sequence
  Oligonucleotide for detection of SNP TSC0019593
taacccatccatt

SEQ ID NO: 76657 - DNA, 13 bp, Artificial Sequence
  Oligonucleotide for detection of SNP TSC0019593
aatggacgggtta

SEQ ID NO: 76658 - DNA, 13 bp, Artificial Sequence
  Oligonucleotide for detection of SNP TSC0019593
taacccgtccatt

SEQ ID NO: 76659 - DNA, 13 bp, Artificial Sequence
  Oligonucleotide for detection of SNP TSC0019596
atgtgaaagataa

SEQ ID NO: 76660 - DNA, 13 bp, Artificial Sequence
  Oligonucleotide for detection of SNP TSC0019596
ttatctttcacat

SEQ ID NO: 76661 - DNA, 13 bp, Artificial Sequence
  Oligonucleotide for detection of SNP TSC0019596
atgtgatagataa

SEQ ID NO: 76662 - DNA, 13 bp, Artificial Sequence
  Oligonucleotide for detection of SNP TSC0019596
ttatctatcacat

SEQ ID NO: 76663 - DNA, 13 bp, Artificial Sequence
  Oligonucleotide for detection of SNP TSC0019596
ttattttttatat

SEQ ID NO: 76664 - DNA, 13 bp, Artificial Sequence
  Oligonucleotide for detection of SNP TSC0019596
atataaaaaataa

SEQ ID NO: 76665 - DNA, 13 bp, Artificial Sequence
  Oligonucleotide for detection of SNP TSC0019596
ttatttattatat

SEQ ID NO: 76666 - DNA, 13 bp, Artificial Sequence
  Oligonucleotide for detection of SNP TSC0019596
atataataaataa

SEQ ID NO: 76667 - DNA, 13 bp, Artificial Sequence
  Oligonucleotide for detection of SNP TSC0019597
aatgttatatgat

SEQ ID NO: 76668 - DNA, 13 bp, Artificial Sequence
  Oligonucleotide for detection of SNP TSC0019597
atcatataacatt

SEQ ID NO: 76669 - DNA, 13 bp, Artificial Sequence
  Oligonucleotide for detection of SNP TSC0019597
aatgttttatgat

SEQ ID NO: 76670 - DNA, 13 bp, Artificial Sequence
  Oligonucleotide for detection of SNP TSC0019597
atcataaaacatt

SEQ ID NO: 76671 - DNA, 13 bp, Artificial Sequence
  Oligonucleotide for detection of SNP TSC0019597
attatatggtatt

SEQ ID NO: 76672 - DNA, 13 bp, Artificial Sequence
  Oligonucleotide for detection of SNP TSC0019597
aataccatataat

SEQ ID NO: 76673 - DNA, 13 bp, Artificial Sequence
  Oligonucleotide for detection of SNP TSC0019597
attatagggtatt

SEQ ID NO: 76674 - DNA, 13 bp, Artificial Sequence
  Oligonucleotide for detection of SNP TSC0019597
aataccctataat

SEQ ID NO: 76675 - DNA, 13 bp, Artificial Sequence
  Oligonucleotide for detection of SNP TSC0019598
aaagttattgtga

SEQ ID NO: 76676 - DNA, 13 bp, Artificial Sequence
  Oligonucleotide for detection of SNP TSC0019598
tcacaataacttt

SEQ ID NO: 76677 - DNA, 13 bp, Artificial Sequence
  Oligonucleotide for detection of SNP TSC0019598
aaagttgttgtga

SEQ ID NO: 76678 - DNA, 13 bp, Artificial Sequence
  Oligonucleotide for detection of SNP TSC0019598
tcacaacaacttt

SEQ ID NO: 76679 - DNA, 13 bp, Artificial Sequence
  Oligonucleotide for detection of SNP TSC0019599
ttaggtatggttt

SEQ ID NO: 76680 - DNA, 13 bp, Artificial Sequence
  Oligonucleotide for detection of SNP TSC0019599
aaaccatacctaa

SEQ ID NO: 76681 - DNA, 13 bp, Artificial Sequence
  Oligonucleotide for detection of SNP TSC0019599
ttaggtgtggttt

SEQ ID NO: 76682 - DNA, 13 bp, Artificial Sequence
  Oligonucleotide for detection of SNP TSC0019599
aaaccacacctaa

SEQ ID NO: 76683 - DNA, 13 bp, Artificial Sequence
  Oligonucleotide for detection of SNP TSC0019599
ttaggtacggttt

SEQ ID NO: 76684 - DNA, 13 bp, Artificial Sequence
  Oligonucleotide for detection of SNP TSC0019599
aaaccgtacctaa

SEQ ID NO: 76685 - DNA, 13 bp, Artificial Sequence
  Oligonucleotide for detection of SNP TSC0019599
ttaggcgtggttt

SEQ ID NO: 76686 - DNA, 13 bp, Artificial Sequence
  Oligonucleotide for detection of SNP TSC0019599
aaaccacgcctaa

SEQ ID NO: 76687 - DNA, 13 bp, Artificial Sequence
  Oligonucleotide for detection of SNP TSC0019599
ttaggtgcggttt

SEQ ID NO: 76688 - DNA, 13 bp, Artificial Sequence
  Oligonucleotide for detection of SNP TSC0019599
aaaccgcacctaa

SEQ ID NO: 76689 - DNA, 13 bp, Artificial Sequence
  Oligonucleotide for detection of SNP TSC0019599
ttaggcgcggttt

SEQ ID NO: 76690 - DNA, 13 bp, Artificial Sequence
  Oligonucleotide for detection of SNP TSC0019599
aaaccgcgcctaa

SEQ ID NO: 76691 - DNA, 13 bp, Artificial Sequence
  Oligonucleotide for detection of SNP TSC0019599
agattgtgtttga

SEQ ID NO: 76692 - DNA, 13 bp, Artificial Sequence
  Oligonucleotide for detection of SNP TSC0019599
tcaaacacaatct

SEQ ID NO: 76693 - DNA, 13 bp, Artificial Sequence
  Oligonucleotide for detection of SNP TSC0019599
agatcgtgtttga

SEQ ID NO: 76694 - DNA, 13 bp, Artificial Sequence
  Oligonucleotide for detection of SNP TSC0019599
tcaaacacgatct

SEQ ID NO: 76695 - DNA, 13 bp, Artificial Sequence
  Oligonucleotide for detection of SNP TSC0019599
agattgcgtttga

SEQ ID NO: 76696 - DNA, 13 bp, Artificial Sequence
  Oligonucleotide for detection of SNP TSC0019599
tcaaacgcaatct

SEQ ID NO: 76697 - DNA, 13 bp, Artificial Sequence
  Oligonucleotide for detection of SNP TSC0019599
agatcgcgtttga

SEQ ID NO: 76698 - DNA, 13 bp, Artificial Sequence
  Oligonucleotide for detection of SNP TSC0019599
tcaaacgcgatct

SEQ ID NO: 76699 - DNA, 13 bp, Artificial Sequence
  Oligonucleotide for detection of SNP TSC0019600
gtatttatttgta

SEQ ID NO: 76700 - DNA, 13 bp, Artificial Sequence
  Oligonucleotide for detection of SNP TSC0019600
tacaaataaatac

SEQ ID NO: 76701 - DNA, 13 bp, Artificial Sequence
  Oligonucleotide for detection of SNP TSC0019600
gtatttgtttgta

SEQ ID NO: 76702 - DNA, 13 bp, Artificial Sequence
  Oligonucleotide for detection of SNP TSC0019600
tacaaacaaatac

SEQ ID NO: 76703 - DNA, 13 bp, Artificial Sequence
  Oligonucleotide for detection of SNP TSC0019600
gtattcgtttgta

SEQ ID NO: 76704 - DNA, 13 bp, Artificial Sequence
  Oligonucleotide for detection of SNP TSC0019600
tacaaacgaatac

SEQ ID NO: 76705 - DNA, 13 bp, Artificial Sequence
  Oligonucleotide for detection of SNP TSC0019600
tataggtgggtgy

SEQ ID NO: 76706 - DNA, 13 bp, Artificial Sequence
  Oligonucleotide for detection of SNP TSC0019600
rcacccacctata

SEQ ID NO: 76707 - DNA, 13 bp, Artificial Sequence
  Oligonucleotide for detection of SNP TSC0019600
tataggcgggtgy

SEQ ID NO: 76708 - DNA, 13 bp, Artificial Sequence
  Oligonucleotide for detection of SNP TSC0019600
rcacccgcctata

SEQ ID NO: 76709 - DNA, 13 bp, Artificial Sequence
  Oligonucleotide for detection of SNP TSC0019601
atattttttattg

SEQ ID NO: 76710 - DNA, 13 bp, Artificial Sequence
  Oligonucleotide for detection of SNP TSC0019601
caataaaaaatat

SEQ ID NO: 76711 - DNA, 13 bp, Artificial Sequence
  Oligonucleotide for detection of SNP TSC0019601
atatttgttattg

SEQ ID NO: 76712 - DNA, 13 bp, Artificial Sequence
  Oligonucleotide for detection of SNP TSC0019601
caataacaaatat

SEQ ID NO: 76713 - DNA, 13 bp, Artificial Sequence
  Oligonucleotide for detection of SNP TSC0019601
tagtgggaggtgt

SEQ ID NO: 76714 - DNA, 13 bp, Artificial Sequence
  Oligonucleotide for detection of SNP TSC0019601
acacctcccacta

SEQ ID NO: 76715 - DNA, 13 bp, Artificial Sequence
  Oligonucleotide for detection of SNP TSC0019601
tagtggtaggtgt

SEQ ID NO: 76716 - DNA, 13 bp, Artificial Sequence
  Oligonucleotide for detection of SNP TSC0019601
acacctaccacta

SEQ ID NO: 76717 - DNA, 13 bp, Artificial Sequence
  Oligonucleotide for detection of SNP TSC0019604
ggtggtaggtaty

SEQ ID NO: 76718 - DNA, 13 bp, Artificial Sequence
  Oligonucleotide for detection of SNP TSC0019604
ratacctaccacc

SEQ ID NO: 76719 - DNA, 13 bp, Artificial Sequence
  Oligonucleotide for detection of SNP TSC0019604
ggtggtgggtaty

SEQ ID NO: 76720 - DNA, 13 bp, Artificial Sequence
  Oligonucleotide for detection of SNP TSC0019604
ratacccaccacc

SEQ ID NO: 76721 - DNA, 13 bp, Artificial Sequence
  Oligonucleotide for detection of SNP TSC0019604
ggtggcgggtaty

SEQ ID NO: 76722 - DNA, 13 bp, Artificial Sequence
  Oligonucleotide for detection of SNP TSC0019604
ratacccgccacc

SEQ ID NO: 76723 - DNA, 13 bp, Artificial Sequence
  Oligonucleotide for detection of SNP TSC0019606
tttagaatatttt

SEQ ID NO: 76724 - DNA, 13 bp, Artificial Sequence
  Oligonucleotide for detection of SNP TSC0019606
aaaatattctaaa

SEQ ID NO: 76725 - DNA, 13 bp, Artificial Sequence
  Oligonucleotide for detection of SNP TSC0019606
tttagattatttt

SEQ ID NO: 76726 - DNA, 13 bp, Artificial Sequence
  Oligonucleotide for detection of SNP TSC0019606
aaaataatctaaa

SEQ ID NO: 76727 - DNA, 13 bp, Artificial Sequence
  Oligonucleotide for detection of SNP TSC0019606
agaatgttttaga

SEQ ID NO: 76728 - DNA, 13 bp, Artificial Sequence
  Oligonucleotide for detection of SNP TSC0019606
tctaaaacattct

SEQ ID NO: 76729 - DNA, 13 bp, Artificial Sequence
  Oligonucleotide for detection of SNP TSC0019606
agaatgatttaga

SEQ ID NO: 76730 - DNA, 13 bp, Artificial Sequence
  Oligonucleotide for detection of SNP TSC0019606
tctaaatcattct

SEQ ID NO: 76731 - DNA, 13 bp, Artificial Sequence
  Oligonucleotide for detection of SNP TSC0019608
gggttgtggtgay

SEQ ID NO: 76732 - DNA, 13 bp, Artificial Sequence
  Oligonucleotide for detection of SNP TSC0019608
rtcaccacaaccc

SEQ ID NO: 76733 - DNA, 13 bp, Artificial Sequence
  Oligonucleotide for detection of SNP TSC0019608
gggttgcggtgay

SEQ ID NO: 76734 - DNA, 13 bp, Artificial Sequence
  Oligonucleotide for detection of SNP TSC0019608
rtcaccgcaaccc

SEQ ID NO: 76735 - DNA, 13 bp, Artificial Sequence
  Oligonucleotide for detection of SNP TSC0019608
gttattgtagtty

SEQ ID NO: 76736 - DNA, 13 bp, Artificial Sequence
  Oligonucleotide for detection of SNP TSC0019608
raactacaataac

SEQ ID NO: 76737 - DNA, 13 bp, Artificial Sequence
  Oligonucleotide for detection of SNP TSC0019608
gttattatagtty

SEQ ID NO: 76738 - DNA, 13 bp, Artificial Sequence
  Oligonucleotide for detection of SNP TSC0019608
raactataataac

SEQ ID NO: 76739 - DNA, 13 bp, Artificial Sequence
  Oligonucleotide for detection of SNP TSC0019608
gttatcgtagtty

SEQ ID NO: 76740 - DNA, 13 bp, Artificial Sequence
  Oligonucleotide for detection of SNP TSC0019608
raactacgataac

SEQ ID NO: 76741 - DNA, 13 bp, Artificial Sequence
  Oligonucleotide for detection of SNP TSC0019609
aaggatgaggaga

SEQ ID NO: 76742 - DNA, 13 bp, Artificial Sequence
  Oligonucleotide for detection of SNP TSC0019609
tctcctcatcctt

SEQ ID NO: 76743 - DNA, 13 bp, Artificial Sequence
  Oligonucleotide for detection of SNP TSC0019609
aaggataaggaga

SEQ ID NO: 76744 - DNA, 13 bp, Artificial Sequence
  Oligonucleotide for detection of SNP TSC0019609
tctccttatcctt

SEQ ID NO: 76745 - DNA, 13 bp, Artificial Sequence
  Oligonucleotide for detection of SNP TSC0019609
aaggacgaggaga

SEQ ID NO: 76746 - DNA, 13 bp, Artificial Sequence
  Oligonucleotide for detection of SNP TSC0019609
tctcctcgtcctt

SEQ ID NO: 76747 - DNA, 13 bp, Artificial Sequence
  Oligonucleotide for detection of SNP TSC0019610
agggatgattagt

SEQ ID NO: 76748 - DNA, 13 bp, Artificial Sequence
  Oligonucleotide for detection of SNP TSC0019610
actaatcatccct

SEQ ID NO: 76749 - DNA, 13 bp, Artificial Sequence
  Oligonucleotide for detection of SNP TSC0019610
agggataattagt

SEQ ID NO: 76750 - DNA, 13 bp, Artificial Sequence
  Oligonucleotide for detection of SNP TSC0019610
actaattatccct

SEQ ID NO: 76751 - DNA, 13 bp, Artificial Sequence
  Oligonucleotide for detection of SNP TSC0019612
gtaaatgaaattg

SEQ ID NO: 76752 - DNA, 13 bp, Artificial Sequence
  Oligonucleotide for detection of SNP TSC0019612
caatttcatttac

SEQ ID NO: 76753 - DNA, 13 bp, Artificial Sequence
  Oligonucleotide for detection of SNP TSC0019612
gtaaataaaattg

SEQ ID NO: 76754 - DNA, 13 bp, Artificial Sequence
  Oligonucleotide for detection of SNP TSC0019612
caattttatttac

SEQ ID NO: 76755 - DNA, 13 bp, Artificial Sequence
  Oligonucleotide for detection of SNP TSC0019612
gtaaatgaaatcg

SEQ ID NO: 76756 - DNA, 13 bp, Artificial Sequence
  Oligonucleotide for detection of SNP TSC0019612
cgatttcatttac

SEQ ID NO: 76757 - DNA, 13 bp, Artificial Sequence
  Oligonucleotide for detection of SNP TSC0019612
gtaaataaaatcg

SEQ ID NO: 76758 - DNA, 13 bp, Artificial Sequence
  Oligonucleotide for detection of SNP TSC0019612
cgattttatttac

SEQ ID NO: 76759 - DNA, 13 bp, Artificial Sequence
  Oligonucleotide for detection of SNP TSC0019613
ttagagttgttay

SEQ ID NO: 76760 - DNA, 13 bp, Artificial Sequence
  Oligonucleotide for detection of SNP TSC0019613
rtaacaactctaa

SEQ ID NO: 76761 - DNA, 13 bp, Artificial Sequence
  Oligonucleotide for detection of SNP TSC0019613
ttagaggtgttay

SEQ ID NO: 76762 - DNA, 13 bp, Artificial Sequence
  Oligonucleotide for detection of SNP TSC0019613
rtaacacctctaa

SEQ ID NO: 76763 - DNA, 13 bp, Artificial Sequence
  Oligonucleotide for detection of SNP TSC0019613
gtggtagttttag

SEQ ID NO: 76764 - DNA, 13 bp, Artificial Sequence
  Oligonucleotide for detection of SNP TSC0019613
ctaaaactaccac

SEQ ID NO: 76765 - DNA, 13 bp, Artificial Sequence
  Oligonucleotide for detection of SNP TSC0019613
gtggtatttttag

SEQ ID NO: 76766 - DNA, 13 bp, Artificial Sequence
  Oligonucleotide for detection of SNP TSC0019613
ctaaaaataccac

SEQ ID NO: 76767 - DNA, 13 bp, Artificial Sequence
  Oligonucleotide for detection of SNP TSC0019614
attgtatttttta

SEQ ID NO: 76768 - DNA, 13 bp, Artificial Sequence
  Oligonucleotide for detection of SNP TSC0019614
taaaaaatacaat

SEQ ID NO: 76769 - DNA, 13 bp, Artificial Sequence
  Oligonucleotide for detection of SNP TSC0019614
attgtaattttta

SEQ ID NO: 76770 - DNA, 13 bp, Artificial Sequence
  Oligonucleotide for detection of SNP TSC0019614
taaaaattacaat

SEQ ID NO: 76771 - DNA, 13 bp, Artificial Sequence
  Oligonucleotide for detection of SNP TSC0019615
ttataggtattta

SEQ ID NO: 76772 - DNA, 13 bp, Artificial Sequence
  Oligonucleotide for detection of SNP TSC0019615
taaatacctataa

SEQ ID NO: 76773 - DNA, 13 bp, Artificial Sequence
  Oligonucleotide for detection of SNP TSC0019615
ttatagatattta

SEQ ID NO: 76774 - DNA, 13 bp, Artificial Sequence
  Oligonucleotide for detection of SNP TSC0019615
taaatatctataa

SEQ ID NO: 76775 - DNA, 13 bp, Artificial Sequence
  Oligonucleotide for detection of SNP TSC0019616
ggattttgtattg

SEQ ID NO: 76776 - DNA, 13 bp, Artificial Sequence
  Oligonucleotide for detection of SNP TSC0019616
caatacaaaatcc

SEQ ID NO: 76777 - DNA, 13 bp, Artificial Sequence
  Oligonucleotide for detection of SNP TSC0019616
ggatttggtattg

SEQ ID NO: 76778 - DNA, 13 bp, Artificial Sequence
  Oligonucleotide for detection of SNP TSC0019616
caataccaaatcc

SEQ ID NO: 76779 - DNA, 13 bp, Artificial Sequence
  Oligonucleotide for detection of SNP TSC0019616
ggatttcgtattg

SEQ ID NO: 76780 - DNA, 13 bp, Artificial Sequence
  Oligonucleotide for detection of SNP TSC0019616
caatacgaaatcc

SEQ ID NO: 76781 - DNA, 13 bp, Artificial Sequence
  Oligonucleotide for detection of SNP TSC0019616
tagtgtgaagtty

SEQ ID NO: 76782 - DNA, 13 bp, Artificial Sequence
  Oligonucleotide for detection of SNP TSC0019616
raacttcacacta

SEQ ID NO: 76783 - DNA, 13 bp, Artificial Sequence
  Oligonucleotide for detection of SNP TSC0019616
tagtgttaagtty

SEQ ID NO: 76784 - DNA, 13 bp, Artificial Sequence
  Oligonucleotide for detection of SNP TSC0019616
raacttaacacta

SEQ ID NO: 76785 - DNA, 13 bp, Artificial Sequence
  Oligonucleotide for detection of SNP TSC0019616
tagtgcgaagtty

SEQ ID NO: 76786 - DNA, 13 bp, Artificial Sequence
  Oligonucleotide for detection of SNP TSC0019616
raacttcgcacta

SEQ ID NO: 76787 - DNA, 13 bp, Artificial Sequence
  Oligonucleotide for detection of SNP TSC0019617
ggtgtatggaagg

SEQ ID NO: 76788 - DNA, 13 bp, Artificial Sequence
  Oligonucleotide for detection of SNP TSC0019617
ccttccatacacc

SEQ ID NO: 76789 - DNA, 13 bp, Artificial Sequence
  Oligonucleotide for detection of SNP TSC0019617
ggtgtagggaagg

SEQ ID NO: 76790 - DNA, 13 bp, Artificial Sequence
  Oligonucleotide for detection of SNP TSC0019617
ccttccctacacc

SEQ ID NO: 76791 - DNA, 13 bp, Artificial Sequence
  Oligonucleotide for detection of SNP TSC0019617
ggtgtacggaagg

SEQ ID NO: 76792 - DNA, 13 bp, Artificial Sequence
  Oligonucleotide for detection of SNP TSC0019617
ccttccgtacacc

SEQ ID NO: 76793 - DNA, 13 bp, Artificial Sequence
  Oligonucleotide for detection of SNP TSC0019617
ttttttgtgtaty

SEQ ID NO: 76794 - DNA, 13 bp, Artificial Sequence
  Oligonucleotide for detection of SNP TSC0019617
ratacacaaaaaa

SEQ ID NO: 76795 - DNA, 13 bp, Artificial Sequence
  Oligonucleotide for detection of SNP TSC0019617
ttttttttgtaty

SEQ ID NO: 76796 - DNA, 13 bp, Artificial Sequence
  Oligonucleotide for detection of SNP TSC0019617
ratacaaaaaaaa

SEQ ID NO: 76797 - DNA, 13 bp, Artificial Sequence
  Oligonucleotide for detection of SNP TSC0019617
tttttcgtgtaty

SEQ ID NO: 76798 - DNA, 13 bp, Artificial Sequence
  Oligonucleotide for detection of SNP TSC0019617
ratacacgaaaaa

SEQ ID NO: 76799 - DNA, 13 bp, Artificial Sequence
  Oligonucleotide for detection of SNP TSC0019618
ttttgtaatagty

SEQ ID NO: 76800 - DNA, 13 bp, Artificial Sequence
  Oligonucleotide for detection of SNP TSC0019618
ractattacaaaa

SEQ ID NO: 76801 - DNA, 13 bp, Artificial Sequence
  Oligonucleotide for detection of SNP TSC0019618
ttttgtgatagty

SEQ ID NO: 76802 - DNA, 13 bp, Artificial Sequence
  Oligonucleotide for detection of SNP TSC0019618
ractatcacaaaa

SEQ ID NO: 76803 - DNA, 13 bp, Artificial Sequence
  Oligonucleotide for detection of SNP TSC0019619
aattgagaataay

SEQ ID NO: 76804 - DNA, 13 bp, Artificial Sequence
  Oligonucleotide for detection of SNP TSC0019619
rttattctcaatt

SEQ ID NO: 76805 - DNA, 13 bp, Artificial Sequence
  Oligonucleotide for detection of SNP TSC0019619
aattgaaaataay

SEQ ID NO: 76806 - DNA, 13 bp, Artificial Sequence
  Oligonucleotide for detection of SNP TSC0019619
rttattttcaatt

SEQ ID NO: 76807 - DNA, 13 bp, Artificial Sequence
  Oligonucleotide for detection of SNP TSC0019622
gttttggtaatgg

SEQ ID NO: 76808 - DNA, 13 bp, Artificial Sequence
  Oligonucleotide for detection of SNP TSC0019622
ccattaccaaaac

SEQ ID NO: 76809 - DNA, 13 bp, Artificial Sequence
  Oligonucleotide for detection of SNP TSC0019622
gttttgataatgg

SEQ ID NO: 76810 - DNA, 13 bp, Artificial Sequence
  Oligonucleotide for detection of SNP TSC0019622
ccattatcaaaac

SEQ ID NO: 76811 - DNA, 13 bp, Artificial Sequence
  Oligonucleotide for detection of SNP TSC0019623
ggtaggagagaga

SEQ ID NO: 76812 - DNA, 13 bp, Artificial Sequence
  Oligonucleotide for detection of SNP TSC0019623
tctctctcctacc

SEQ ID NO: 76813 - DNA, 13 bp, Artificial Sequence
  Oligonucleotide for detection of SNP TSC0019623
ggtaggggagaga

SEQ ID NO: 76814 - DNA, 13 bp, Artificial Sequence
  Oligonucleotide for detection of SNP TSC0019623
tctctcccctacc

SEQ ID NO: 76815 - DNA, 13 bp, Artificial Sequence
  Oligonucleotide for detection of SNP TSC0019624
agaatagttgttt

SEQ ID NO: 76816 - DNA, 13 bp, Artificial Sequence
  Oligonucleotide for detection of SNP TSC0019624
aaacaactattct

SEQ ID NO: 76817 - DNA, 13 bp, Artificial Sequence
  Oligonucleotide for detection of SNP TSC0019624
agaataattgttt

SEQ ID NO: 76818 - DNA, 13 bp, Artificial Sequence
  Oligonucleotide for detection of SNP TSC0019624
aaacaattattct

SEQ ID NO: 76819 - DNA, 13 bp, Artificial Sequence
  Oligonucleotide for detection of SNP TSC0019625
agggtaaagttty

SEQ ID NO: 76820 - DNA, 13 bp, Artificial Sequence
  Oligonucleotide for detection of SNP TSC0019625
raaactttaccct

SEQ ID NO: 76821 - DNA, 13 bp, Artificial Sequence
  Oligonucleotide for detection of SNP TSC0019625
agggtagagttty

SEQ ID NO: 76822 - DNA, 13 bp, Artificial Sequence
  Oligonucleotide for detection of SNP TSC0019625
raaactctaccct

SEQ ID NO: 76823 - DNA, 13 bp, Artificial Sequence
  Oligonucleotide for detection of SNP TSC0019627
taggttgttgtga

SEQ ID NO: 76824 - DNA, 13 bp, Artificial Sequence
  Oligonucleotide for detection of SNP TSC0019627
tcacaacaaccta

SEQ ID NO: 76825 - DNA, 13 bp, Artificial Sequence
  Oligonucleotide for detection of SNP TSC0019627
taggtttttgtga

SEQ ID NO: 76826 - DNA, 13 bp, Artificial Sequence
  Oligonucleotide for detection of SNP TSC0019627
tcacaaaaaccta

SEQ ID NO: 76827 - DNA, 13 bp, Artificial Sequence
  Oligonucleotide for detection of SNP TSC0019627
ttataataattta

SEQ ID NO: 76828 - DNA, 13 bp, Artificial Sequence
  Oligonucleotide for detection of SNP TSC0019627
taaattattataa

SEQ ID NO: 76829 - DNA, 13 bp, Artificial Sequence
  Oligonucleotide for detection of SNP TSC0019627
ttataaaaattta

SEQ ID NO: 76830 - DNA, 13 bp, Artificial Sequence
  Oligonucleotide for detection of SNP TSC0019627
taaatttttataa

SEQ ID NO: 76831 - DNA, 13 bp, Artificial Sequence
  Oligonucleotide for detection of SNP TSC0019628
gggttttttttgt

SEQ ID NO: 76832 - DNA, 13 bp, Artificial Sequence
  Oligonucleotide for detection of SNP TSC0019628
acaaaaaaaaccc

SEQ ID NO: 76833 - DNA, 13 bp, Artificial Sequence
  Oligonucleotide for detection of SNP TSC0019628
atagggtaggtty

SEQ ID NO: 76834 - DNA, 13 bp, Artificial Sequence
  Oligonucleotide for detection of SNP TSC0019628
raacctaccctat

SEQ ID NO: 76835 - DNA, 13 bp, Artificial Sequence
  Oligonucleotide for detection of SNP TSC0019628
atagggaaggtty

SEQ ID NO: 76836 - DNA, 13 bp, Artificial Sequence
  Oligonucleotide for detection of SNP TSC0019628
raaccttccctat

SEQ ID NO: 76837 - DNA, 13 bp, Artificial Sequence
  Oligonucleotide for detection of SNP TSC0019629
agggttattttta

SEQ ID NO: 76838 - DNA, 13 bp, Artificial Sequence
  Oligonucleotide for detection of SNP TSC0019629
taaaaataaccct

SEQ ID NO: 76839 - DNA, 13 bp, Artificial Sequence
  Oligonucleotide for detection of SNP TSC0019632
atttttgttggga

SEQ ID NO: 76840 - DNA, 13 bp, Artificial Sequence
  Oligonucleotide for detection of SNP TSC0019632
tcccaacaaaaat

SEQ ID NO: 76841 - DNA, 13 bp, Artificial Sequence
  Oligonucleotide for detection of SNP TSC0019632
attttttttggga

SEQ ID NO: 76842 - DNA, 13 bp, Artificial Sequence
  Oligonucleotide for detection of SNP TSC0019632
tcccaaaaaaaat

SEQ ID NO: 76843 - DNA, 13 bp, Artificial Sequence
  Oligonucleotide for detection of SNP TSC0019632
attttcgttggga

SEQ ID NO: 76844 - DNA, 13 bp, Artificial Sequence
  Oligonucleotide for detection of SNP TSC0019632
tcccaacgaaaat

SEQ ID NO: 76845 - DNA, 13 bp, Artificial Sequence
  Oligonucleotide for detection of SNP TSC0019632
atttttttcggga

SEQ ID NO: 76846 - DNA, 13 bp, Artificial Sequence
  Oligonucleotide for detection of SNP TSC0019632
tcccgaaaaaaat

SEQ ID NO: 76847 - DNA, 13 bp, Artificial Sequence
  Oligonucleotide for detection of SNP TSC0019632
atttttgtcggga

SEQ ID NO: 76848 - DNA, 13 bp, Artificial Sequence
  Oligonucleotide for detection of SNP TSC0019632
tcccgacaaaaat

SEQ ID NO: 76849 - DNA, 13 bp, Artificial Sequence
  Oligonucleotide for detection of SNP TSC0019632
attttcgtcggga

SEQ ID NO: 76850 - DNA, 13 bp, Artificial Sequence
  Oligonucleotide for detection of SNP TSC0019632
tcccgacgaaaat

SEQ ID NO: 76851 - DNA, 13 bp, Artificial Sequence
  Oligonucleotide for detection of SNP TSC0019632
ttttgatgaggat

SEQ ID NO: 76852 - DNA, 13 bp, Artificial Sequence
  Oligonucleotide for detection of SNP TSC0019632
atcctcatcaaaa

SEQ ID NO: 76853 - DNA, 13 bp, Artificial Sequence
  Oligonucleotide for detection of SNP TSC0019632
ttttgaagaggat

SEQ ID NO: 76854 - DNA, 13 bp, Artificial Sequence
  Oligonucleotide for detection of SNP TSC0019632
atcctcttcaaaa

SEQ ID NO: 76855 - DNA, 13 bp, Artificial Sequence
  Oligonucleotide for detection of SNP TSC0019632
tttcgatgaggat

SEQ ID NO: 76856 - DNA, 13 bp, Artificial Sequence
  Oligonucleotide for detection of SNP TSC0019632
atcctcatcgaaa

SEQ ID NO: 76857 - DNA, 13 bp, Artificial Sequence
  Oligonucleotide for detection of SNP TSC0019632
tttcgaagaggat

SEQ ID NO: 76858 - DNA, 13 bp, Artificial Sequence
  Oligonucleotide for detection of SNP TSC0019632
atcctcttcgaaa

SEQ ID NO: 76859 - DNA, 13 bp, Artificial Sequence
  Oligonucleotide for detection of SNP TSC0019632
ttttgacgaggat

SEQ ID NO: 76860 - DNA, 13 bp, Artificial Sequence
  Oligonucleotide for detection of SNP TSC0019632
atcctcgtcaaaa

SEQ ID NO: 76861 - DNA, 13 bp, Artificial Sequence
  Oligonucleotide for detection of SNP TSC0019632
tttcgacgaggat

SEQ ID NO: 76862 - DNA, 13 bp, Artificial Sequence
  Oligonucleotide for detection of SNP TSC0019632
atcctcgtcgaaa

SEQ ID NO: 76863 - DNA, 13 bp, Artificial Sequence
  Oligonucleotide for detection of SNP TSC0019633
gggtatgagggta

SEQ ID NO: 76864 - DNA, 13 bp, Artificial Sequence
  Oligonucleotide for detection of SNP TSC0019633
taccctcataccc

SEQ ID NO: 76865 - DNA, 13 bp, Artificial Sequence
  Oligonucleotide for detection of SNP TSC0019633
gggtattagggta

SEQ ID NO: 76866 - DNA, 13 bp, Artificial Sequence
  Oligonucleotide for detection of SNP TSC0019633
taccctaataccc

SEQ ID NO: 76867 - DNA, 13 bp, Artificial Sequence
  Oligonucleotide for detection of SNP TSC0019633
tatttttatgtty

SEQ ID NO: 76868 - DNA, 13 bp, Artificial Sequence
  Oligonucleotide for detection of SNP TSC0019633
raacataaaaata

SEQ ID NO: 76869 - DNA, 13 bp, Artificial Sequence
  Oligonucleotide for detection of SNP TSC0019633
tattttaatgtty

SEQ ID NO: 76870 - DNA, 13 bp, Artificial Sequence
  Oligonucleotide for detection of SNP TSC0019633
raacattaaaata

SEQ ID NO: 76871 - DNA, 13 bp, Artificial Sequence
  Oligonucleotide for detection of SNP TSC0019634
tttaatatggttt

SEQ ID NO: 76872 - DNA, 13 bp, Artificial Sequence
  Oligonucleotide for detection of SNP TSC0019634
aaaccatattaaa

SEQ ID NO: 76873 - DNA, 13 bp, Artificial Sequence
  Oligonucleotide for detection of SNP TSC0019634
tttaatttggttt

SEQ ID NO: 76874 - DNA, 13 bp, Artificial Sequence
  Oligonucleotide for detection of SNP TSC0019634
aaaccaaattaaa

SEQ ID NO: 76875 - DNA, 13 bp, Artificial Sequence
  Oligonucleotide for detection of SNP TSC0019634
aagttatgttaga

SEQ ID NO: 76876 - DNA, 13 bp, Artificial Sequence
  Oligonucleotide for detection of SNP TSC0019634
tctaacataactt

SEQ ID NO: 76877 - DNA, 13 bp, Artificial Sequence
  Oligonucleotide for detection of SNP TSC0019634
aagttaagttaga

SEQ ID NO: 76878 - DNA, 13 bp, Artificial Sequence
  Oligonucleotide for detection of SNP TSC0019634
tctaacttaactt

SEQ ID NO: 76879 - DNA, 13 bp, Artificial Sequence
  Oligonucleotide for detection of SNP TSC0019635
aaggttagggaay

SEQ ID NO: 76880 - DNA, 13 bp, Artificial Sequence
  Oligonucleotide for detection of SNP TSC0019635
rttccctaacctt

SEQ ID NO: 76881 - DNA, 13 bp, Artificial Sequence
  Oligonucleotide for detection of SNP TSC0019635
aaggttggggaay

SEQ ID NO: 76882 - DNA, 13 bp, Artificial Sequence
  Oligonucleotide for detection of SNP TSC0019635
rttccccaacctt

SEQ ID NO: 76883 - DNA, 13 bp, Artificial Sequence
  Oligonucleotide for detection of SNP TSC0019636
gttttagtggttt

SEQ ID NO: 76884 - DNA, 13 bp, Artificial Sequence
  Oligonucleotide for detection of SNP TSC0019636
aaaccactaaaac

SEQ ID NO: 76885 - DNA, 13 bp, Artificial Sequence
  Oligonucleotide for detection of SNP TSC0019636
gttttaatggttt

SEQ ID NO: 76886 - DNA, 13 bp, Artificial Sequence
  Oligonucleotide for detection of SNP TSC0019636
aaaccattaaaac

SEQ ID NO: 76887 - DNA, 13 bp, Artificial Sequence
  Oligonucleotide for detection of SNP TSC0019638
gtgattaaaaaat

SEQ ID NO: 76888 - DNA, 13 bp, Artificial Sequence
  Oligonucleotide for detection of SNP TSC0019638
attttttaatcac

SEQ ID NO: 76889 - DNA, 13 bp, Artificial Sequence
  Oligonucleotide for detection of SNP TSC0019638
gtgattgaaaaat

SEQ ID NO: 76890 - DNA, 13 bp, Artificial Sequence
  Oligonucleotide for detection of SNP TSC0019638
atttttcaatcac

SEQ ID NO: 76891 - DNA, 13 bp, Artificial Sequence
  Oligonucleotide for detection of SNP TSC0019639
ttttttggtttta

SEQ ID NO: 76892 - DNA, 13 bp, Artificial Sequence
  Oligonucleotide for detection of SNP TSC0019639
taaaaccaaaaaa

SEQ ID NO: 76893 - DNA, 13 bp, Artificial Sequence
  Oligonucleotide for detection of SNP TSC0019639
ttttttagtttta

SEQ ID NO: 76894 - DNA, 13 bp, Artificial Sequence
  Oligonucleotide for detection of SNP TSC0019639
taaaactaaaaaa

SEQ ID NO: 76895 - DNA, 13 bp, Artificial Sequence
  Oligonucleotide for detection of SNP TSC0019640
aataggggtttga

SEQ ID NO: 76896 - DNA, 13 bp, Artificial Sequence
  Oligonucleotide for detection of SNP TSC0019640
tcaaacccctatt

SEQ ID NO: 76897 - DNA, 13 bp, Artificial Sequence
  Oligonucleotide for detection of SNP TSC0019640
aataggagtttga

SEQ ID NO: 76898 - DNA, 13 bp, Artificial Sequence
  Oligonucleotide for detection of SNP TSC0019640
tcaaactcctatt

SEQ ID NO: 76899 - DNA, 13 bp, Artificial Sequence
  Oligonucleotide for detection of SNP TSC0019641
atgggtagtataa

SEQ ID NO: 76900 - DNA, 13 bp, Artificial Sequence
  Oligonucleotide for detection of SNP TSC0019641
ttatactacccat

SEQ ID NO: 76901 - DNA, 13 bp, Artificial Sequence
  Oligonucleotide for detection of SNP TSC0019641
atgggtggtataa

SEQ ID NO: 76902 - DNA, 13 bp, Artificial Sequence
  Oligonucleotide for detection of SNP TSC0019641
ttataccacccat

SEQ ID NO: 76903 - DNA, 13 bp, Artificial Sequence
  Oligonucleotide for detection of SNP TSC0019641
atgggcggtataa

SEQ ID NO: 76904 - DNA, 13 bp, Artificial Sequence
  Oligonucleotide for detection of SNP TSC0019641
ttataccgcccat

SEQ ID NO: 76905 - DNA, 13 bp, Artificial Sequence
  Oligonucleotide for detection of SNP TSC0019641
ttatgtcgtttat

SEQ ID NO: 76906 - DNA, 13 bp, Artificial Sequence
  Oligonucleotide for detection of SNP TSC0019641
ataaacgacataa

SEQ ID NO: 76907 - DNA, 13 bp, Artificial Sequence
  Oligonucleotide for detection of SNP TSC0019643
ttagtagttttta

SEQ ID NO: 76908 - DNA, 13 bp, Artificial Sequence
  Oligonucleotide for detection of SNP TSC0019643
taaaaactactaa

SEQ ID NO: 76909 - DNA, 13 bp, Artificial Sequence
  Oligonucleotide for detection of SNP TSC0019643
ttagtatttttta

SEQ ID NO: 76910 - DNA, 13 bp, Artificial Sequence
  Oligonucleotide for detection of SNP TSC0019643
taaaaaatactaa

SEQ ID NO: 76911 - DNA, 13 bp, Artificial Sequence
  Oligonucleotide for detection of SNP TSC0019643
taaagattattga

SEQ ID NO: 76912 - DNA, 13 bp, Artificial Sequence
  Oligonucleotide for detection of SNP TSC0019643
tcaataatcttta

SEQ ID NO: 76913 - DNA, 13 bp, Artificial Sequence
  Oligonucleotide for detection of SNP TSC0019643
taaagaatattga

SEQ ID NO: 76914 - DNA, 13 bp, Artificial Sequence
  Oligonucleotide for detection of SNP TSC0019643
tcaatattcttta

SEQ ID NO: 76915 - DNA, 13 bp, Artificial Sequence
  Oligonucleotide for detection of SNP TSC0019644
tgggtttgtgtay

SEQ ID NO: 76916 - DNA, 13 bp, Artificial Sequence
  Oligonucleotide for detection of SNP TSC0019644
rtacacaaaccca

SEQ ID NO: 76917 - DNA, 13 bp, Artificial Sequence
  Oligonucleotide for detection of SNP TSC0019644
cgggtttgtgtay

SEQ ID NO: 76918 - DNA, 13 bp, Artificial Sequence
  Oligonucleotide for detection of SNP TSC0019644
rtacacaaacccg

SEQ ID NO: 76919 - DNA, 13 bp, Artificial Sequence
  Oligonucleotide for detection of SNP TSC0019644
tgggttcgtgtay

SEQ ID NO: 76920 - DNA, 13 bp, Artificial Sequence
  Oligonucleotide for detection of SNP TSC0019644
rtacacgaaccca

SEQ ID NO: 76921 - DNA, 13 bp, Artificial Sequence
  Oligonucleotide for detection of SNP TSC0019644
cgggttcgtgtay

SEQ ID NO: 76922 - DNA, 13 bp, Artificial Sequence
  Oligonucleotide for detection of SNP TSC0019644
rtacacgaacccg

SEQ ID NO: 76923 - DNA, 13 bp, Artificial Sequence
  Oligonucleotide for detection of SNP TSC0019644
gtgtatgggtttg

SEQ ID NO: 76924 - DNA, 13 bp, Artificial Sequence
  Oligonucleotide for detection of SNP TSC0019644
caaacccatacac

SEQ ID NO: 76925 - DNA, 13 bp, Artificial Sequence
  Oligonucleotide for detection of SNP TSC0019644
gtgtataggtttg

SEQ ID NO: 76926 - DNA, 13 bp, Artificial Sequence
  Oligonucleotide for detection of SNP TSC0019644
caaacctatacac

SEQ ID NO: 76927 - DNA, 13 bp, Artificial Sequence
  Oligonucleotide for detection of SNP TSC0019644
gtgtacgggtttg

SEQ ID NO: 76928 - DNA, 13 bp, Artificial Sequence
  Oligonucleotide for detection of SNP TSC0019644
caaacccgtacac

SEQ ID NO: 76929 - DNA, 13 bp, Artificial Sequence
  Oligonucleotide for detection of SNP TSC0019644
gtgtataggttcg

SEQ ID NO: 76930 - DNA, 13 bp, Artificial Sequence
  Oligonucleotide for detection of SNP TSC0019644
cgaacctatacac

SEQ ID NO: 76931 - DNA, 13 bp, Artificial Sequence
  Oligonucleotide for detection of SNP TSC0019644
gtgtatgggttcg

SEQ ID NO: 76932 - DNA, 13 bp, Artificial Sequence
  Oligonucleotide for detection of SNP TSC0019644
cgaacccatacac

SEQ ID NO: 76933 - DNA, 13 bp, Artificial Sequence
  Oligonucleotide for detection of SNP TSC0019644
gtgtacgggttcg

SEQ ID NO: 76934 - DNA, 13 bp, Artificial Sequence
  Oligonucleotide for detection of SNP TSC0019644
cgaacccgtacac

SEQ ID NO: 76935 - DNA, 13 bp, Artificial Sequence
  Oligonucleotide for detection of SNP TSC0019645
tggttatgtttay

SEQ ID NO: 76936 - DNA, 13 bp, Artificial Sequence
  Oligonucleotide for detection of SNP TSC0019645
rtaaacataacca

SEQ ID NO: 76937 - DNA, 13 bp, Artificial Sequence
  Oligonucleotide for detection of SNP TSC0019645
tggttacgtttay

SEQ ID NO: 76938 - DNA, 13 bp, Artificial Sequence
  Oligonucleotide for detection of SNP TSC0019645
rtaaacgtaacca

SEQ ID NO: 76939 - DNA, 13 bp, Artificial Sequence
  Oligonucleotide for detection of SNP TSC0019645
gtggatgtggtta

SEQ ID NO: 76940 - DNA, 13 bp, Artificial Sequence
  Oligonucleotide for detection of SNP TSC0019645
taaccacatccac

SEQ ID NO: 76941 - DNA, 13 bp, Artificial Sequence
  Oligonucleotide for detection of SNP TSC0019645
gtggatatggtta

SEQ ID NO: 76942 - DNA, 13 bp, Artificial Sequence
  Oligonucleotide for detection of SNP TSC0019645
taaccatatccac

SEQ ID NO: 76943 - DNA, 13 bp, Artificial Sequence
  Oligonucleotide for detection of SNP TSC0019645
gtggacgtggtta

SEQ ID NO: 76944 - DNA, 13 bp, Artificial Sequence
  Oligonucleotide for detection of SNP TSC0019645
taaccacgtccac

SEQ ID NO: 76945 - DNA, 13 bp, Artificial Sequence
  Oligonucleotide for detection of SNP TSC0019646
tgtattggtgttt

SEQ ID NO: 76946 - DNA, 13 bp, Artificial Sequence
  Oligonucleotide for detection of SNP TSC0019646
aaacaccaataca

SEQ ID NO: 76947 - DNA, 13 bp, Artificial Sequence
  Oligonucleotide for detection of SNP TSC0019646
tgtattagtgttt

SEQ ID NO: 76948 - DNA, 13 bp, Artificial Sequence
  Oligonucleotide for detection of SNP TSC0019646
aaacactaataca

SEQ ID NO: 76949 - DNA, 13 bp, Artificial Sequence
  Oligonucleotide for detection of SNP TSC0019646
cgtattggtgttt

SEQ ID NO: 76950 - DNA, 13 bp, Artificial Sequence
  Oligonucleotide for detection of SNP TSC0019646
aaacaccaatacg

SEQ ID NO: 76951 - DNA, 13 bp, Artificial Sequence
  Oligonucleotide for detection of SNP TSC0019646
cgtattagtgttt

SEQ ID NO: 76952 - DNA, 13 bp, Artificial Sequence
  Oligonucleotide for detection of SNP TSC0019646
aaacactaatacg

SEQ ID NO: 76953 - DNA, 13 bp, Artificial Sequence
  Oligonucleotide for detection of SNP TSC0019651
tttggaaaagatt

SEQ ID NO: 76954 - DNA, 13 bp, Artificial Sequence
  Oligonucleotide for detection of SNP TSC0019651
aatcttttccaaa

SEQ ID NO: 76955 - DNA, 13 bp, Artificial Sequence
  Oligonucleotide for detection of SNP TSC0019651
tttggagaagatt

SEQ ID NO: 76956 - DNA, 13 bp, Artificial Sequence
  Oligonucleotide for detection of SNP TSC0019651
aatcttctccaaa

SEQ ID NO: 76957 - DNA, 13 bp, Artificial Sequence
  Oligonucleotide for detection of SNP TSC0019653
gaataaataattg

SEQ ID NO: 76958 - DNA, 13 bp, Artificial Sequence
  Oligonucleotide for detection of SNP TSC0019653
caattatttattc

SEQ ID NO: 76959 - DNA, 13 bp, Artificial Sequence
  Oligonucleotide for detection of SNP TSC0019653
gaataagtaattg

SEQ ID NO: 76960 - DNA, 13 bp, Artificial Sequence
  Oligonucleotide for detection of SNP TSC0019653
caattacttattc

SEQ ID NO: 76961 - DNA, 13 bp, Artificial Sequence
  Oligonucleotide for detection of SNP TSC0019654
tttggtatttgay

SEQ ID NO: 76962 - DNA, 13 bp, Artificial Sequence
  Oligonucleotide for detection of SNP TSC0019654
rtcaaataccaaa

SEQ ID NO: 76963 - DNA, 13 bp, Artificial Sequence
  Oligonucleotide for detection of SNP TSC0019654
ttcggtatttgay

SEQ ID NO: 76964 - DNA, 13 bp, Artificial Sequence
  Oligonucleotide for detection of SNP TSC0019654
rtcaaataccgaa

SEQ ID NO: 76965 - DNA, 13 bp, Artificial Sequence
  Oligonucleotide for detection of SNP TSC0019654
tttggtattcgay

SEQ ID NO: 76966 - DNA, 13 bp, Artificial Sequence
  Oligonucleotide for detection of SNP TSC0019654
rtcgaataccaaa

SEQ ID NO: 76967 - DNA, 13 bp, Artificial Sequence
  Oligonucleotide for detection of SNP TSC0019654
ttcggtattcgay

SEQ ID NO: 76968 - DNA, 13 bp, Artificial Sequence
  Oligonucleotide for detection of SNP TSC0019654
rtcgaataccgaa

SEQ ID NO: 76969 - DNA, 13 bp, Artificial Sequence
  Oligonucleotide for detection of SNP TSC0019654
tttggtgttcgay

SEQ ID NO: 76970 - DNA, 13 bp, Artificial Sequence
  Oligonucleotide for detection of SNP TSC0019654
rtcgaacaccaaa

SEQ ID NO: 76971 - DNA, 13 bp, Artificial Sequence
  Oligonucleotide for detection of SNP TSC0019654
ttcggtgttcgay

SEQ ID NO: 76972 - DNA, 13 bp, Artificial Sequence
  Oligonucleotide for detection of SNP TSC0019654
rtcgaacaccgaa

SEQ ID NO: 76973 - DNA, 13 bp, Artificial Sequence
  Oligonucleotide for detection of SNP TSC0019654
tttggcgttcgay

SEQ ID NO: 76974 - DNA, 13 bp, Artificial Sequence
  Oligonucleotide for detection of SNP TSC0019654
rtcgaacgccaaa

SEQ ID NO: 76975 - DNA, 13 bp, Artificial Sequence
  Oligonucleotide for detection of SNP TSC0019654
ttcggcgttcgay

SEQ ID NO: 76976 - DNA, 13 bp, Artificial Sequence
  Oligonucleotide for detection of SNP TSC0019654
rtcgaacgccgaa

SEQ ID NO: 76977 - DNA, 13 bp, Artificial Sequence
  Oligonucleotide for detection of SNP TSC0019654
gttgggtgttgag

SEQ ID NO: 76978 - DNA, 13 bp, Artificial Sequence
  Oligonucleotide for detection of SNP TSC0019654
ctcaacacccaac

SEQ ID NO: 76979 - DNA, 13 bp, Artificial Sequence
  Oligonucleotide for detection of SNP TSC0019654
gtcgggtgttgag

SEQ ID NO: 76980 - DNA, 13 bp, Artificial Sequence
  Oligonucleotide for detection of SNP TSC0019654
ctcaacacccgac

SEQ ID NO: 76981 - DNA, 13 bp, Artificial Sequence
  Oligonucleotide for detection of SNP TSC0019654
gttgggtgtcgag

SEQ ID NO: 76982 - DNA, 13 bp, Artificial Sequence
  Oligonucleotide for detection of SNP TSC0019654
ctcgacacccaac

SEQ ID NO: 76983 - DNA, 13 bp, Artificial Sequence
  Oligonucleotide for detection of SNP TSC0019654
gttgggcgttgag

SEQ ID NO: 76984 - DNA, 13 bp, Artificial Sequence
  Oligonucleotide for detection of SNP TSC0019654
ctcaacgcccaac

SEQ ID NO: 76985 - DNA, 13 bp, Artificial Sequence
  Oligonucleotide for detection of SNP TSC0019654
gtcgggtgtcgag

SEQ ID NO: 76986 - DNA, 13 bp, Artificial Sequence
  Oligonucleotide for detection of SNP TSC0019654
ctcgacacccgac

SEQ ID NO: 76987 - DNA, 13 bp, Artificial Sequence
  Oligonucleotide for detection of SNP TSC0019654
gtcgggcgttgag

SEQ ID NO: 76988 - DNA, 13 bp, Artificial Sequence
  Oligonucleotide for detection of SNP TSC0019654
ctcaacgcccgac

SEQ ID NO: 76989 - DNA, 13 bp, Artificial Sequence
  Oligonucleotide for detection of SNP TSC0019654
gttgggcgtcgag

SEQ ID NO: 76990 - DNA, 13 bp, Artificial Sequence
  Oligonucleotide for detection of SNP TSC0019654
ctcgacgcccaac

SEQ ID NO: 76991 - DNA, 13 bp, Artificial Sequence
  Oligonucleotide for detection of SNP TSC0019654
gtcgggcgtcgag

SEQ ID NO: 76992 - DNA, 13 bp, Artificial Sequence
  Oligonucleotide for detection of SNP TSC0019654
ctcgacgcccgac

SEQ ID NO: 76993 - DNA, 13 bp, Artificial Sequence
  Oligonucleotide for detection of SNP TSC0019655
agttgtattgtgy

SEQ ID NO: 76994 - DNA, 13 bp, Artificial Sequence
  Oligonucleotide for detection of SNP TSC0019655
rcacaatacaact

SEQ ID NO: 76995 - DNA, 13 bp, Artificial Sequence
  Oligonucleotide for detection of SNP TSC0019655
agttgtgttgtgy

SEQ ID NO: 76996 - DNA, 13 bp, Artificial Sequence
  Oligonucleotide for detection of SNP TSC0019655
rcacaacacaact

SEQ ID NO: 76997 - DNA, 13 bp, Artificial Sequence
  Oligonucleotide for detection of SNP TSC0019655
agtcgtattgtgy

SEQ ID NO: 76998 - DNA, 13 bp, Artificial Sequence
  Oligonucleotide for detection of SNP TSC0019655
rcacaatacgact

SEQ ID NO: 76999 - DNA, 13 bp, Artificial Sequence
  Oligonucleotide for detection of SNP TSC0019655
agtcgtgttgtgy

SEQ ID NO: 77000 - DNA, 13 bp, Artificial Sequence
  Oligonucleotide for detection of SNP TSC0019655
rcacaacacgact

SEQ ID NO: 77001 - DNA, 13 bp, Artificial Sequence
  Oligonucleotide for detection of SNP TSC0019655
agttgtattgcgy

SEQ ID NO: 77002 - DNA, 13 bp, Artificial Sequence
  Oligonucleotide for detection of SNP TSC0019655
rcgcaatacaact

SEQ ID NO: 77003 - DNA, 13 bp, Artificial Sequence
  Oligonucleotide for detection of SNP TSC0019655
agttgcgttgtgy

SEQ ID NO: 77004 - DNA, 13 bp, Artificial Sequence
  Oligonucleotide for detection of SNP TSC0019655
rcacaacgcaact

SEQ ID NO: 77005 - DNA, 13 bp, Artificial Sequence
  Oligonucleotide for detection of SNP TSC0019655
agtcgtattgcgy

SEQ ID NO: 77006 - DNA, 13 bp, Artificial Sequence
  Oligonucleotide for detection of SNP TSC0019655
rcgcaatacgact

SEQ ID NO: 77007 - DNA, 13 bp, Artificial Sequence
  Oligonucleotide for detection of SNP TSC0019655
agttgtgttgcgy

SEQ ID NO: 77008 - DNA, 13 bp, Artificial Sequence
  Oligonucleotide for detection of SNP TSC0019655
rcgcaacacaact

SEQ ID NO: 77009 - DNA, 13 bp, Artificial Sequence
  Oligonucleotide for detection of SNP TSC0019655
agtcgcgttgtgy

SEQ ID NO: 77010 - DNA, 13 bp, Artificial Sequence
  Oligonucleotide for detection of SNP TSC0019655
rcacaacgcgact

SEQ ID NO: 77011 - DNA, 13 bp, Artificial Sequence
  Oligonucleotide for detection of SNP TSC0019655
agtcgtgttgcgy

SEQ ID NO: 77012 - DNA, 13 bp, Artificial Sequence
  Oligonucleotide for detection of SNP TSC0019655
rcgcaacacgact

SEQ ID NO: 77013 - DNA, 13 bp, Artificial Sequence
  Oligonucleotide for detection of SNP TSC0019655
agttgcgttgcgy

SEQ ID NO: 77014 - DNA, 13 bp, Artificial Sequence
  Oligonucleotide for detection of SNP TSC0019655
rcgcaacgcaact

SEQ ID NO: 77015 - DNA, 13 bp, Artificial Sequence
  Oligonucleotide for detection of SNP TSC0019655
agtcgcgttgcgy

SEQ ID NO: 77016 - DNA, 13 bp, Artificial Sequence
  Oligonucleotide for detection of SNP TSC0019655
rcgcaacgcgact

SEQ ID NO: 77017 - DNA, 13 bp, Artificial Sequence
  Oligonucleotide for detection of SNP TSC0019655
gtgtaatgtgatt

SEQ ID NO: 77018 - DNA, 13 bp, Artificial Sequence
  Oligonucleotide for detection of SNP TSC0019655
aatcacattacac

SEQ ID NO: 77019 - DNA, 13 bp, Artificial Sequence
  Oligonucleotide for detection of SNP TSC0019655
gcgtaatgtgatt

SEQ ID NO: 77020 - DNA, 13 bp, Artificial Sequence
  Oligonucleotide for detection of SNP TSC0019655
aatcacattacgc

SEQ ID NO: 77021 - DNA, 13 bp, Artificial Sequence
  Oligonucleotide for detection of SNP TSC0019655
gtgtaatgcgatt

SEQ ID NO: 77022 - DNA, 13 bp, Artificial Sequence
  Oligonucleotide for detection of SNP TSC0019655
aatcgcattacac

SEQ ID NO: 77023 - DNA, 13 bp, Artificial Sequence
  Oligonucleotide for detection of SNP TSC0019655
gtgtaacgtgatt

SEQ ID NO: 77024 - DNA, 13 bp, Artificial Sequence
  Oligonucleotide for detection of SNP TSC0019655
aatcacgttacac

SEQ ID NO: 77025 - DNA, 13 bp, Artificial Sequence
  Oligonucleotide for detection of SNP TSC0019655
gcgtaatgcgatt

SEQ ID NO: 77026 - DNA, 13 bp, Artificial Sequence
  Oligonucleotide for detection of SNP TSC0019655
aatcgcattacgc

SEQ ID NO: 77027 - DNA, 13 bp, Artificial Sequence
  Oligonucleotide for detection of SNP TSC0019655
gcgtaacgtgatt

SEQ ID NO: 77028 - DNA, 13 bp, Artificial Sequence
  Oligonucleotide for detection of SNP TSC0019655
aatcacgttacgc

SEQ ID NO: 77029 - DNA, 13 bp, Artificial Sequence
  Oligonucleotide for detection of SNP TSC0019655
gtgtaacgcgatt

SEQ ID NO: 77030 - DNA, 13 bp, Artificial Sequence
  Oligonucleotide for detection of SNP TSC0019655
aatcgcgttacac

SEQ ID NO: 77031 - DNA, 13 bp, Artificial Sequence
  Oligonucleotide for detection of SNP TSC0019655
gcgtaacgcgatt

SEQ ID NO: 77032 - DNA, 13 bp, Artificial Sequence
  Oligonucleotide for detection of SNP TSC0019655
aatcgcgttacgc

SEQ ID NO: 77033 - DNA, 13 bp, Artificial Sequence
  Oligonucleotide for detection of SNP TSC0019656
gtagtttttgtty

SEQ ID NO: 77034 - DNA, 13 bp, Artificial Sequence
  Oligonucleotide for detection of SNP TSC0019656
raacaaaaactac

SEQ ID NO: 77035 - DNA, 13 bp, Artificial Sequence
  Oligonucleotide for detection of SNP TSC0019656
gtagttgttgtty

SEQ ID NO: 77036 - DNA, 13 bp, Artificial Sequence
  Oligonucleotide for detection of SNP TSC0019656
raacaacaactac

SEQ ID NO: 77037 - DNA, 13 bp, Artificial Sequence
  Oligonucleotide for detection of SNP TSC0019656
gtagtcgttgtty

SEQ ID NO: 77038 - DNA, 13 bp, Artificial Sequence
  Oligonucleotide for detection of SNP TSC0019656
raacaacgactac

SEQ ID NO: 77039 - DNA, 13 bp, Artificial Sequence
  Oligonucleotide for detection of SNP TSC0019656
ggataggggttay

SEQ ID NO: 77040 - DNA, 13 bp, Artificial Sequence
  Oligonucleotide for detection of SNP TSC0019656
rtaacccctatcc

SEQ ID NO: 77041 - DNA, 13 bp, Artificial Sequence
  Oligonucleotide for detection of SNP TSC0019656
ggatagtggttay

SEQ ID NO: 77042 - DNA, 13 bp, Artificial Sequence
  Oligonucleotide for detection of SNP TSC0019656
rtaaccactatcc

SEQ ID NO: 77043 - DNA, 13 bp, Artificial Sequence
  Oligonucleotide for detection of SNP TSC0019656
ggatagcggttay

SEQ ID NO: 77044 - DNA, 13 bp, Artificial Sequence
  Oligonucleotide for detection of SNP TSC0019656
rtaaccgctatcc

SEQ ID NO: 77045 - DNA, 13 bp, Artificial Sequence
  Oligonucleotide for detection of SNP TSC0019657
atgttgttttaty

SEQ ID NO: 77046 - DNA, 13 bp, Artificial Sequence
  Oligonucleotide for detection of SNP TSC0019657
rataaaacaacat

SEQ ID NO: 77047 - DNA, 13 bp, Artificial Sequence
  Oligonucleotide for detection of SNP TSC0019657
atgttggtttaty

SEQ ID NO: 77048 - DNA, 13 bp, Artificial Sequence
  Oligonucleotide for detection of SNP TSC0019657
rataaaccaacat

SEQ ID NO: 77049 - DNA, 13 bp, Artificial Sequence
  Oligonucleotide for detection of SNP TSC0019657
gatgaggtaatat

SEQ ID NO: 77050 - DNA, 13 bp, Artificial Sequence
  Oligonucleotide for detection of SNP TSC0019657
atattacctcatc

SEQ ID NO: 77051 - DNA, 13 bp, Artificial Sequence
  Oligonucleotide for detection of SNP TSC0019657
gatgagttaatat

SEQ ID NO: 77052 - DNA, 13 bp, Artificial Sequence
  Oligonucleotide for detection of SNP TSC0019657
atattaactcatc

SEQ ID NO: 77053 - DNA, 13 bp, Artificial Sequence
  Oligonucleotide for detection of SNP TSC0019658
aataatagtatay

SEQ ID NO: 77054 - DNA, 13 bp, Artificial Sequence
  Oligonucleotide for detection of SNP TSC0019658
rtatactattatt

SEQ ID NO: 77055 - DNA, 13 bp, Artificial Sequence
  Oligonucleotide for detection of SNP TSC0019658
aataatggtatay

SEQ ID NO: 77056 - DNA, 13 bp, Artificial Sequence
  Oligonucleotide for detection of SNP TSC0019658
rtataccattatt

SEQ ID NO: 77057 - DNA, 13 bp, Artificial Sequence
  Oligonucleotide for detection of SNP TSC0019659
ttattagtatttg

SEQ ID NO: 77058 - DNA, 13 bp, Artificial Sequence
  Oligonucleotide for detection of SNP TSC0019659
caaatactaataa

SEQ ID NO: 77059 - DNA, 13 bp, Artificial Sequence
  Oligonucleotide for detection of SNP TSC0019659
ttattaatatttg

SEQ ID NO: 77060 - DNA, 13 bp, Artificial Sequence
  Oligonucleotide for detection of SNP TSC0019659
caaatattaataa

SEQ ID NO: 77061 - DNA, 13 bp, Artificial Sequence
  Oligonucleotide for detection of SNP TSC0019660
gatttaatggtga

SEQ ID NO: 77062 - DNA, 13 bp, Artificial Sequence
  Oligonucleotide for detection of SNP TSC0019660
tcaccattaaatc

SEQ ID NO: 77063 - DNA, 13 bp, Artificial Sequence
  Oligonucleotide for detection of SNP TSC0019660
gatttagtggtga

SEQ ID NO: 77064 - DNA, 13 bp, Artificial Sequence
  Oligonucleotide for detection of SNP TSC0019660
tcaccactaaatc

SEQ ID NO: 77065 - DNA, 13 bp, Artificial Sequence
  Oligonucleotide for detection of SNP TSC0019661
ttttatgttgagy

SEQ ID NO: 77066 - DNA, 13 bp, Artificial Sequence
  Oligonucleotide for detection of SNP TSC0019661
rctcaacataaaa

SEQ ID NO: 77067 - DNA, 13 bp, Artificial Sequence
  Oligonucleotide for detection of SNP TSC0019661
ttttatattgagy

SEQ ID NO: 77068 - DNA, 13 bp, Artificial Sequence
  Oligonucleotide for detection of SNP TSC0019661
rctcaatataaaa

SEQ ID NO: 77069 - DNA, 13 bp, Artificial Sequence
  Oligonucleotide for detection of SNP TSC0019663
gtgttggtattta

SEQ ID NO: 77070 - DNA, 13 bp, Artificial Sequence
  Oligonucleotide for detection of SNP TSC0019663
taaataccaacac

SEQ ID NO: 77071 - DNA, 13 bp, Artificial Sequence
  Oligonucleotide for detection of SNP TSC0019663
gtgttgttattta

SEQ ID NO: 77072 - DNA, 13 bp, Artificial Sequence
  Oligonucleotide for detection of SNP TSC0019663
taaataacaacac

SEQ ID NO: 77073 - DNA, 13 bp, Artificial Sequence
  Oligonucleotide for detection of SNP TSC0019663
gcgttggtattta

SEQ ID NO: 77074 - DNA, 13 bp, Artificial Sequence
  Oligonucleotide for detection of SNP TSC0019663
taaataccaacgc

SEQ ID NO: 77075 - DNA, 13 bp, Artificial Sequence
  Oligonucleotide for detection of SNP TSC0019663
gcgttgttattta

SEQ ID NO: 77076 - DNA, 13 bp, Artificial Sequence
  Oligonucleotide for detection of SNP TSC0019663
taaataacaacgc

SEQ ID NO: 77077 - DNA, 13 bp, Artificial Sequence
  Oligonucleotide for detection of SNP TSC0019663
gtgtcggtattta

SEQ ID NO: 77078 - DNA, 13 bp, Artificial Sequence
  Oligonucleotide for detection of SNP TSC0019663
taaataccgacac

SEQ ID NO: 77079 - DNA, 13 bp, Artificial Sequence
  Oligonucleotide for detection of SNP TSC0019663
gtgtcgttattta

SEQ ID NO: 77080 - DNA, 13 bp, Artificial Sequence
  Oligonucleotide for detection of SNP TSC0019663
taaataacgacac

SEQ ID NO: 77081 - DNA, 13 bp, Artificial Sequence
  Oligonucleotide for detection of SNP TSC0019663
gcgtcggtattta

SEQ ID NO: 77082 - DNA, 13 bp, Artificial Sequence
  Oligonucleotide for detection of SNP TSC0019663
taaataccgacgc

SEQ ID NO: 77083 - DNA, 13 bp, Artificial Sequence
  Oligonucleotide for detection of SNP TSC0019663
gcgtcgttattta

SEQ ID NO: 77084 - DNA, 13 bp, Artificial Sequence
  Oligonucleotide for detection of SNP TSC0019663
taaataacgacgc

SEQ ID NO: 77085 - DNA, 13 bp, Artificial Sequence
  Oligonucleotide for detection of SNP TSC0019663
tagatgttggtgy

SEQ ID NO: 77086 - DNA, 13 bp, Artificial Sequence
  Oligonucleotide for detection of SNP TSC0019663
rcaccaacatcta

SEQ ID NO: 77087 - DNA, 13 bp, Artificial Sequence
  Oligonucleotide for detection of SNP TSC0019663
tagatgatggtgy

SEQ ID NO: 77088 - DNA, 13 bp, Artificial Sequence
  Oligonucleotide for detection of SNP TSC0019663
rcaccatcatcta

SEQ ID NO: 77089 - DNA, 13 bp, Artificial Sequence
  Oligonucleotide for detection of SNP TSC0019663
tagatgtcggtgy

SEQ ID NO: 77090 - DNA, 13 bp, Artificial Sequence
  Oligonucleotide for detection of SNP TSC0019663
rcaccgacatcta

SEQ ID NO: 77091 - DNA, 13 bp, Artificial Sequence
  Oligonucleotide for detection of SNP TSC0019663
tagatgacggtgy

SEQ ID NO: 77092 - DNA, 13 bp, Artificial Sequence
  Oligonucleotide for detection of SNP TSC0019663
rcaccgtcatcta

SEQ ID NO: 77093 - DNA, 13 bp, Artificial Sequence
  Oligonucleotide for detection of SNP TSC0019663
tagatgttggcgy

SEQ ID NO: 77094 - DNA, 13 bp, Artificial Sequence
  Oligonucleotide for detection of SNP TSC0019663
rcgccaacatcta

SEQ ID NO: 77095 - DNA, 13 bp, Artificial Sequence
  Oligonucleotide for detection of SNP TSC0019663
tagatgatggcgy

SEQ ID NO: 77096 - DNA, 13 bp, Artificial Sequence
  Oligonucleotide for detection of SNP TSC0019663
rcgccatcatcta

SEQ ID NO: 77097 - DNA, 13 bp, Artificial Sequence
  Oligonucleotide for detection of SNP TSC0019663
tagatgtcggcgy

SEQ ID NO: 77098 - DNA, 13 bp, Artificial Sequence
  Oligonucleotide for detection of SNP TSC0019663
rcgccgacatcta

SEQ ID NO: 77099 - DNA, 13 bp, Artificial Sequence
  Oligonucleotide for detection of SNP TSC0019663
tagatgacggcgy

SEQ ID NO: 77100 - DNA, 13 bp, Artificial Sequence
  Oligonucleotide for detection of SNP TSC0019663
rcgccgtcatcta

SEQ ID NO: 77101 - DNA, 13 bp, Artificial Sequence
  Oligonucleotide for detection of SNP TSC0019664
gtgaattaatatt

SEQ ID NO: 77102 - DNA, 13 bp, Artificial Sequence
  Oligonucleotide for detection of SNP TSC0019664
aatattaattcac

SEQ ID NO: 77103 - DNA, 13 bp, Artificial Sequence
  Oligonucleotide for detection of SNP TSC0019664
gtgaatgaatatt

SEQ ID NO: 77104 - DNA, 13 bp, Artificial Sequence
  Oligonucleotide for detection of SNP TSC0019664
aatattcattcac

SEQ ID NO: 77105 - DNA, 13 bp, Artificial Sequence
  Oligonucleotide for detection of SNP TSC0019664
gtgaacgaatatt

SEQ ID NO: 77106 - DNA, 13 bp, Artificial Sequence
  Oligonucleotide for detection of SNP TSC0019664
aatattcgttcac

SEQ ID NO: 77107 - DNA, 13 bp, Artificial Sequence
  Oligonucleotide for detection of SNP TSC0019664
agtgttggtttay

SEQ ID NO: 77108 - DNA, 13 bp, Artificial Sequence
  Oligonucleotide for detection of SNP TSC0019664
rtaaaccaacact

SEQ ID NO: 77109 - DNA, 13 bp, Artificial Sequence
  Oligonucleotide for detection of SNP TSC0019664
agtgtttgtttay

SEQ ID NO: 77110 - DNA, 13 bp, Artificial Sequence
  Oligonucleotide for detection of SNP TSC0019664
rtaaacaaacact

SEQ ID NO: 77111 - DNA, 13 bp, Artificial Sequence
  Oligonucleotide for detection of SNP TSC0019664
agtgttcgtttay

SEQ ID NO: 77112 - DNA, 13 bp, Artificial Sequence
  Oligonucleotide for detection of SNP TSC0019664
rtaaacgaacact

SEQ ID NO: 77113 - DNA, 13 bp, Artificial Sequence
  Oligonucleotide for detection of SNP TSC0019665
agtattggggtat

SEQ ID NO: 77114 - DNA, 13 bp, Artificial Sequence
  Oligonucleotide for detection of SNP TSC0019665
ataccccaatact

SEQ ID NO: 77115 - DNA, 13 bp, Artificial Sequence
  Oligonucleotide for detection of SNP TSC0019665
agtatttgggtat

SEQ ID NO: 77116 - DNA, 13 bp, Artificial Sequence
  Oligonucleotide for detection of SNP TSC0019665
atacccaaatact

SEQ ID NO: 77117 - DNA, 13 bp, Artificial Sequence
  Oligonucleotide for detection of SNP TSC0019665
atattttagtatt

SEQ ID NO: 77118 - DNA, 13 bp, Artificial Sequence
  Oligonucleotide for detection of SNP TSC0019665
aatactaaaatat

SEQ ID NO: 77119 - DNA, 13 bp, Artificial Sequence
  Oligonucleotide for detection of SNP TSC0019665
atatttaagtatt

SEQ ID NO: 77120 - DNA, 13 bp, Artificial Sequence
  Oligonucleotide for detection of SNP TSC0019665
aatacttaaatat

SEQ ID NO: 77121 - DNA, 13 bp, Artificial Sequence
  Oligonucleotide for detection of SNP TSC0019667
tgttttggttttt

SEQ ID NO: 77122 - DNA, 13 bp, Artificial Sequence
  Oligonucleotide for detection of SNP TSC0019667
aaaaaccaaaaca

SEQ ID NO: 77123 - DNA, 13 bp, Artificial Sequence
  Oligonucleotide for detection of SNP TSC0019667
tgttttagttttt

SEQ ID NO: 77124 - DNA, 13 bp, Artificial Sequence
  Oligonucleotide for detection of SNP TSC0019667
aaaaactaaaaca

SEQ ID NO: 77125 - DNA, 13 bp, Artificial Sequence
  Oligonucleotide for detection of SNP TSC0019667
cgttttggttttt

SEQ ID NO: 77126 - DNA, 13 bp, Artificial Sequence
  Oligonucleotide for detection of SNP TSC0019667
aaaaaccaaaacg

SEQ ID NO: 77127 - DNA, 13 bp, Artificial Sequence
  Oligonucleotide for detection of SNP TSC0019667
cgttttagttttt

SEQ ID NO: 77128 - DNA, 13 bp, Artificial Sequence
  Oligonucleotide for detection of SNP TSC0019667
aaaaactaaaacg

SEQ ID NO: 77129 - DNA, 13 bp, Artificial Sequence
  Oligonucleotide for detection of SNP TSC0019672
ataaaaaaaaaaa

SEQ ID NO: 77130 - DNA, 13 bp, Artificial Sequence
  Oligonucleotide for detection of SNP TSC0019672
tttttttttttat

SEQ ID NO: 77131 - DNA, 13 bp, Artificial Sequence
  Oligonucleotide for detection of SNP TSC0019673
gtgattatgtttt

SEQ ID NO: 77132 - DNA, 13 bp, Artificial Sequence
  Oligonucleotide for detection of SNP TSC0019673
aaaacataatcac

SEQ ID NO: 77133 - DNA, 13 bp, Artificial Sequence
  Oligonucleotide for detection of SNP TSC0019673
gtgattgtgtttt

SEQ ID NO: 77134 - DNA, 13 bp, Artificial Sequence
  Oligonucleotide for detection of SNP TSC0019673
aaaacacaatcac

SEQ ID NO: 77135 - DNA, 13 bp, Artificial Sequence
  Oligonucleotide for detection of SNP TSC0019673
gtgattacgtttt

SEQ ID NO: 77136 - DNA, 13 bp, Artificial Sequence
  Oligonucleotide for detection of SNP TSC0019673
aaaacgtaatcac

SEQ ID NO: 77137 - DNA, 13 bp, Artificial Sequence
  Oligonucleotide for detection of SNP TSC0019673
gtgatcgtgtttt

SEQ ID NO: 77138 - DNA, 13 bp, Artificial Sequence
  Oligonucleotide for detection of SNP TSC0019673
aaaacacgatcac

SEQ ID NO: 77139 - DNA, 13 bp, Artificial Sequence
  Oligonucleotide for detection of SNP TSC0019673
gtgattgcgtttt

SEQ ID NO: 77140 - DNA, 13 bp, Artificial Sequence
  Oligonucleotide for detection of SNP TSC0019673
aaaacgcaatcac

SEQ ID NO: 77141 - DNA, 13 bp, Artificial Sequence
  Oligonucleotide for detection of SNP TSC0019673
gtgatcgcgtttt

SEQ ID NO: 77142 - DNA, 13 bp, Artificial Sequence
  Oligonucleotide for detection of SNP TSC0019673
aaaacgcgatcac

SEQ ID NO: 77143 - DNA, 13 bp, Artificial Sequence
  Oligonucleotide for detection of SNP TSC0019673
agagtgtggttay

SEQ ID NO: 77144 - DNA, 13 bp, Artificial Sequence
  Oligonucleotide for detection of SNP TSC0019673
rtaaccacactct

SEQ ID NO: 77145 - DNA, 13 bp, Artificial Sequence
  Oligonucleotide for detection of SNP TSC0019673
agagcgtggttay

SEQ ID NO: 77146 - DNA, 13 bp, Artificial Sequence
  Oligonucleotide for detection of SNP TSC0019673
rtaaccacgctct

SEQ ID NO: 77147 - DNA, 13 bp, Artificial Sequence
  Oligonucleotide for detection of SNP TSC0019673
agagtgcggttay

SEQ ID NO: 77148 - DNA, 13 bp, Artificial Sequence
  Oligonucleotide for detection of SNP TSC0019673
rtaaccgcactct

SEQ ID NO: 77149 - DNA, 13 bp, Artificial Sequence
  Oligonucleotide for detection of SNP TSC0019673
agagcgcggttay

SEQ ID NO: 77150 - DNA, 13 bp, Artificial Sequence
  Oligonucleotide for detection of SNP TSC0019673
rtaaccgcgctct

SEQ ID NO: 77151 - DNA, 13 bp, Artificial Sequence
  Oligonucleotide for detection of SNP TSC0019674
gtatgttggttty

SEQ ID NO: 77152 - DNA, 13 bp, Artificial Sequence
  Oligonucleotide for detection of SNP TSC0019674
raaaccaacatac

SEQ ID NO: 77153 - DNA, 13 bp, Artificial Sequence
  Oligonucleotide for detection of SNP TSC0019674
gtacgttggttty

SEQ ID NO: 77154 - DNA, 13 bp, Artificial Sequence
  Oligonucleotide for detection of SNP TSC0019674
raaaccaacgtac

SEQ ID NO: 77155 - DNA, 13 bp, Artificial Sequence
  Oligonucleotide for detection of SNP TSC0019674
gtatgtcggttty

SEQ ID NO: 77156 - DNA, 13 bp, Artificial Sequence
  Oligonucleotide for detection of SNP TSC0019674
raaaccgacatac

SEQ ID NO: 77157 - DNA, 13 bp, Artificial Sequence
  Oligonucleotide for detection of SNP TSC0019674
gtacgtcggttty

SEQ ID NO: 77158 - DNA, 13 bp, Artificial Sequence
  Oligonucleotide for detection of SNP TSC0019674
raaaccgacgtac

SEQ ID NO: 77159 - DNA, 13 bp, Artificial Sequence
  Oligonucleotide for detection of SNP TSC0019674
gaggttggtgtgy

SEQ ID NO: 77160 - DNA, 13 bp, Artificial Sequence
  Oligonucleotide for detection of SNP TSC0019674
rcacaccaacctc

SEQ ID NO: 77161 - DNA, 13 bp, Artificial Sequence
  Oligonucleotide for detection of SNP TSC0019674
gaggttagtgtgy

SEQ ID NO: 77162 - DNA, 13 bp, Artificial Sequence
  Oligonucleotide for detection of SNP TSC0019674
rcacactaacctc

SEQ ID NO: 77163 - DNA, 13 bp, Artificial Sequence
  Oligonucleotide for detection of SNP TSC0019674
gaggtcggtgtgy

SEQ ID NO: 77164 - DNA, 13 bp, Artificial Sequence
  Oligonucleotide for detection of SNP TSC0019674
rcacaccgacctc

SEQ ID NO: 77165 - DNA, 13 bp, Artificial Sequence
  Oligonucleotide for detection of SNP TSC0019674
gaggttagcgtgy

SEQ ID NO: 77166 - DNA, 13 bp, Artificial Sequence
  Oligonucleotide for detection of SNP TSC0019674
rcacgctaacctc

SEQ ID NO: 77167 - DNA, 13 bp, Artificial Sequence
  Oligonucleotide for detection of SNP TSC0019674
gaggttggcgtgy

SEQ ID NO: 77168 - DNA, 13 bp, Artificial Sequence
  Oligonucleotide for detection of SNP TSC0019674
rcacgccaacctc

SEQ ID NO: 77169 - DNA, 13 bp, Artificial Sequence
  Oligonucleotide for detection of SNP TSC0019674
gaggtcggcgtgy

SEQ ID NO: 77170 - DNA, 13 bp, Artificial Sequence
  Oligonucleotide for detection of SNP TSC0019674
rcacgccgacctc

SEQ ID NO: 77171 - DNA, 13 bp, Artificial Sequence
  Oligonucleotide for detection of SNP TSC0019675
gtttagggttatg

SEQ ID NO: 77172 - DNA, 13 bp, Artificial Sequence
  Oligonucleotide for detection of SNP TSC0019675
cataaccctaaac

SEQ ID NO: 77173 - DNA, 13 bp, Artificial Sequence
  Oligonucleotide for detection of SNP TSC0019675
gtttagagttatg

SEQ ID NO: 77174 - DNA, 13 bp, Artificial Sequence
  Oligonucleotide for detection of SNP TSC0019675
cataactctaaac

SEQ ID NO: 77175 - DNA, 13 bp, Artificial Sequence
  Oligonucleotide for detection of SNP TSC0019675
gtttagggttacg

SEQ ID NO: 77176 - DNA, 13 bp, Artificial Sequence
  Oligonucleotide for detection of SNP TSC0019675
cgtaaccctaaac

SEQ ID NO: 77177 - DNA, 13 bp, Artificial Sequence
  Oligonucleotide for detection of SNP TSC0019675
gtttagagttacg

SEQ ID NO: 77178 - DNA, 13 bp, Artificial Sequence
  Oligonucleotide for detection of SNP TSC0019675
cgtaactctaaac

SEQ ID NO: 77179 - DNA, 13 bp, Artificial Sequence
  Oligonucleotide for detection of SNP TSC0019677
ggatagaggggtt

SEQ ID NO: 77180 - DNA, 13 bp, Artificial Sequence
  Oligonucleotide for detection of SNP TSC0019677
aacccctctatcc

SEQ ID NO: 77181 - DNA, 13 bp, Artificial Sequence
  Oligonucleotide for detection of SNP TSC0019677
ggatagtggggtt

SEQ ID NO: 77182 - DNA, 13 bp, Artificial Sequence
  Oligonucleotide for detection of SNP TSC0019677
aaccccactatcc

SEQ ID NO: 77183 - DNA, 13 bp, Artificial Sequence
  Oligonucleotide for detection of SNP TSC0019677
ggatagcggggtt

SEQ ID NO: 77184 - DNA, 13 bp, Artificial Sequence
  Oligonucleotide for detection of SNP TSC0019677
aaccccgctatcc

SEQ ID NO: 77185 - DNA, 13 bp, Artificial Sequence
  Oligonucleotide for detection of SNP TSC0019677
agtttttttatty

SEQ ID NO: 77186 - DNA, 13 bp, Artificial Sequence
  Oligonucleotide for detection of SNP TSC0019677
raataaaaaaact

SEQ ID NO: 77187 - DNA, 13 bp, Artificial Sequence
  Oligonucleotide for detection of SNP TSC0019677
agttttgttatty

SEQ ID NO: 77188 - DNA, 13 bp, Artificial Sequence
  Oligonucleotide for detection of SNP TSC0019677
raataacaaaact

SEQ ID NO: 77189 - DNA, 13 bp, Artificial Sequence
  Oligonucleotide for detection of SNP TSC0019677
agtttcgttatty

SEQ ID NO: 77190 - DNA, 13 bp, Artificial Sequence
  Oligonucleotide for detection of SNP TSC0019677
raataacgaaact

SEQ ID NO: 77191 - DNA, 13 bp, Artificial Sequence
  Oligonucleotide for detection of SNP TSC0019678
tgttgttggtaga

SEQ ID NO: 77192 - DNA, 13 bp, Artificial Sequence
  Oligonucleotide for detection of SNP TSC0019678
tctaccaacaaca

SEQ ID NO: 77193 - DNA, 13 bp, Artificial Sequence
  Oligonucleotide for detection of SNP TSC0019678
tgttgtcggtaga

SEQ ID NO: 77194 - DNA, 13 bp, Artificial Sequence
  Oligonucleotide for detection of SNP TSC0019678
tctaccgacaaca

SEQ ID NO: 77195 - DNA, 13 bp, Artificial Sequence
  Oligonucleotide for detection of SNP TSC0019678
tttgttggtaata

SEQ ID NO: 77196 - DNA, 13 bp, Artificial Sequence
  Oligonucleotide for detection of SNP TSC0019678
tattaccaacaaa

SEQ ID NO: 77197 - DNA, 13 bp, Artificial Sequence
  Oligonucleotide for detection of SNP TSC0019678
tttgttagtaata

SEQ ID NO: 77198 - DNA, 13 bp, Artificial Sequence
  Oligonucleotide for detection of SNP TSC0019678
tattactaacaaa

SEQ ID NO: 77199 - DNA, 13 bp, Artificial Sequence
  Oligonucleotide for detection of SNP TSC0019678
tttgtcggtaata

SEQ ID NO: 77200 - DNA, 13 bp, Artificial Sequence
  Oligonucleotide for detection of SNP TSC0019678
tattaccgacaaa

SEQ ID NO: 77201 - DNA, 13 bp, Artificial Sequence
  Oligonucleotide for detection of SNP TSC0019679
ttttagggggtay

SEQ ID NO: 77202 - DNA, 13 bp, Artificial Sequence
  Oligonucleotide for detection of SNP TSC0019679
rtaccccctaaaa

SEQ ID NO: 77203 - DNA, 13 bp, Artificial Sequence
  Oligonucleotide for detection of SNP TSC0019679
ttttagagggtay

SEQ ID NO: 77204 - DNA, 13 bp, Artificial Sequence
  Oligonucleotide for detection of SNP TSC0019679
rtaccctctaaaa

SEQ ID NO: 77205 - DNA, 13 bp, Artificial Sequence
  Oligonucleotide for detection of SNP TSC0019680
ttttttagagaaa

SEQ ID NO: 77206 - DNA, 13 bp, Artificial Sequence
  Oligonucleotide for detection of SNP TSC0019680
tttctctaaaaaa

SEQ ID NO: 77207 - DNA, 13 bp, Artificial Sequence
  Oligonucleotide for detection of SNP TSC0019680
ttttttggagaaa

SEQ ID NO: 77208 - DNA, 13 bp, Artificial Sequence
  Oligonucleotide for detection of SNP TSC0019680
tttctccaaaaaa

SEQ ID NO: 77209 - DNA, 13 bp, Artificial Sequence
  Oligonucleotide for detection of SNP TSC0019681
agagatagtgtat

SEQ ID NO: 77210 - DNA, 13 bp, Artificial Sequence
  Oligonucleotide for detection of SNP TSC0019681
atacactatctct

SEQ ID NO: 77211 - DNA, 13 bp, Artificial Sequence
  Oligonucleotide for detection of SNP TSC0019681
agagatggtgtat

SEQ ID NO: 77212 - DNA, 13 bp, Artificial Sequence
  Oligonucleotide for detection of SNP TSC0019681
atacaccatctct

SEQ ID NO: 77213 - DNA, 13 bp, Artificial Sequence
  Oligonucleotide for detection of SNP TSC0019681
agagatagcgtat

SEQ ID NO: 77214 - DNA, 13 bp, Artificial Sequence
  Oligonucleotide for detection of SNP TSC0019681
atacgctatctct

SEQ ID NO: 77215 - DNA, 13 bp, Artificial Sequence
  Oligonucleotide for detection of SNP TSC0019681
agagacggtgtat

SEQ ID NO: 77216 - DNA, 13 bp, Artificial Sequence
  Oligonucleotide for detection of SNP TSC0019681
atacaccgtctct

SEQ ID NO: 77217 - DNA, 13 bp, Artificial Sequence
  Oligonucleotide for detection of SNP TSC0019681
agagatggcgtat

SEQ ID NO: 77218 - DNA, 13 bp, Artificial Sequence
  Oligonucleotide for detection of SNP TSC0019681
atacgccatctct

SEQ ID NO: 77219 - DNA, 13 bp, Artificial Sequence
  Oligonucleotide for detection of SNP TSC0019681
agagacggcgtat

SEQ ID NO: 77220 - DNA, 13 bp, Artificial Sequence
  Oligonucleotide for detection of SNP TSC0019681
atacgccgtctct

SEQ ID NO: 77221 - DNA, 13 bp, Artificial Sequence
  Oligonucleotide for detection of SNP TSC0019681
atatgttgttttt

SEQ ID NO: 77222 - DNA, 13 bp, Artificial Sequence
  Oligonucleotide for detection of SNP TSC0019681
aaaaacaacatat

SEQ ID NO: 77223 - DNA, 13 bp, Artificial Sequence
  Oligonucleotide for detection of SNP TSC0019681
atacgttgttttt

SEQ ID NO: 77224 - DNA, 13 bp, Artificial Sequence
  Oligonucleotide for detection of SNP TSC0019681
aaaaacaacgtat

SEQ ID NO: 77225 - DNA, 13 bp, Artificial Sequence
  Oligonucleotide for detection of SNP TSC0019681
atatgtcgttttt

SEQ ID NO: 77226 - DNA, 13 bp, Artificial Sequence
  Oligonucleotide for detection of SNP TSC0019681
aaaaacgacatat

SEQ ID NO: 77227 - DNA, 13 bp, Artificial Sequence
  Oligonucleotide for detection of SNP TSC0019681
atacgtcgttttt

SEQ ID NO: 77228 - DNA, 13 bp, Artificial Sequence
  Oligonucleotide for detection of SNP TSC0019681
aaaaacgacgtat

SEQ ID NO: 77229 - DNA, 13 bp, Artificial Sequence
  Oligonucleotide for detection of SNP TSC0019682
tttgggatagatt

SEQ ID NO: 77230 - DNA, 13 bp, Artificial Sequence
  Oligonucleotide for detection of SNP TSC0019682
aatctatcccaaa

SEQ ID NO: 77231 - DNA, 13 bp, Artificial Sequence
  Oligonucleotide for detection of SNP TSC0019682
tttggggtagatt

SEQ ID NO: 77232 - DNA, 13 bp, Artificial Sequence
  Oligonucleotide for detection of SNP TSC0019682
aatctaccccaaa

SEQ ID NO: 77233 - DNA, 13 bp, Artificial Sequence
  Oligonucleotide for detection of SNP TSC0019683
aggggtaattggt

SEQ ID NO: 77234 - DNA, 13 bp, Artificial Sequence
  Oligonucleotide for detection of SNP TSC0019683
accaattacccct

SEQ ID NO: 77235 - DNA, 13 bp, Artificial Sequence
  Oligonucleotide for detection of SNP TSC0019683
aggggtgattggt

SEQ ID NO: 77236 - DNA, 13 bp, Artificial Sequence
  Oligonucleotide for detection of SNP TSC0019683
accaatcacccct

SEQ ID NO: 77237 - DNA, 13 bp, Artificial Sequence
  Oligonucleotide for detection of SNP TSC0019683
aggggcgattggt

SEQ ID NO: 77238 - DNA, 13 bp, Artificial Sequence
  Oligonucleotide for detection of SNP TSC0019683
accaatcgcccct

SEQ ID NO: 77239 - DNA, 13 bp, Artificial Sequence
  Oligonucleotide for detection of SNP TSC0019685
atttagggaatta

SEQ ID NO: 77240 - DNA, 13 bp, Artificial Sequence
  Oligonucleotide for detection of SNP TSC0019685
taattccctaaat

SEQ ID NO: 77241 - DNA, 13 bp, Artificial Sequence
  Oligonucleotide for detection of SNP TSC0019685
atttagagaatta

SEQ ID NO: 77242 - DNA, 13 bp, Artificial Sequence
  Oligonucleotide for detection of SNP TSC0019685
taattctctaaat

SEQ ID NO: 77243 - DNA, 13 bp, Artificial Sequence
  Oligonucleotide for detection of SNP TSC0019686
tttaatatagtta

SEQ ID NO: 77244 - DNA, 13 bp, Artificial Sequence
  Oligonucleotide for detection of SNP TSC0019686
taactatattaaa

SEQ ID NO: 77245 - DNA, 13 bp, Artificial Sequence
  Oligonucleotide for detection of SNP TSC0019686
tttaatttagtta

SEQ ID NO: 77246 - DNA, 13 bp, Artificial Sequence
  Oligonucleotide for detection of SNP TSC0019686
taactaaattaaa

SEQ ID NO: 77247 - DNA, 13 bp, Artificial Sequence
  Oligonucleotide for detection of SNP TSC0019686
tgattgtattaag

SEQ ID NO: 77248 - DNA, 13 bp, Artificial Sequence
  Oligonucleotide for detection of SNP TSC0019686
cttaatacaatca

SEQ ID NO: 77249 - DNA, 13 bp, Artificial Sequence
  Oligonucleotide for detection of SNP TSC0019686
tgattggattaag

SEQ ID NO: 77250 - DNA, 13 bp, Artificial Sequence
  Oligonucleotide for detection of SNP TSC0019686
cttaatccaatca

SEQ ID NO: 77251 - DNA, 13 bp, Artificial Sequence
  Oligonucleotide for detection of SNP TSC0019687
tttatggttatta

SEQ ID NO: 77252 - DNA, 13 bp, Artificial Sequence
  Oligonucleotide for detection of SNP TSC0019687
taataaccataaa

SEQ ID NO: 77253 - DNA, 13 bp, Artificial Sequence
  Oligonucleotide for detection of SNP TSC0019687
tagtaattataaa

SEQ ID NO: 77254 - DNA, 13 bp, Artificial Sequence
  Oligonucleotide for detection of SNP TSC0019687
tttataattacta

SEQ ID NO: 77255 - DNA, 13 bp, Artificial Sequence
  Oligonucleotide for detection of SNP TSC0019687
tagtaaatataaa

SEQ ID NO: 77256 - DNA, 13 bp, Artificial Sequence
  Oligonucleotide for detection of SNP TSC0019687
tttatatttacta

SEQ ID NO: 77257 - DNA, 13 bp, Artificial Sequence
  Oligonucleotide for detection of SNP TSC0019688
tgtaaggtgtgtt

SEQ ID NO: 77258 - DNA, 13 bp, Artificial Sequence
  Oligonucleotide for detection of SNP TSC0019688
aacacaccttaca

SEQ ID NO: 77259 - DNA, 13 bp, Artificial Sequence
  Oligonucleotide for detection of SNP TSC0019688
tgtaagatgtgtt

SEQ ID NO: 77260 - DNA, 13 bp, Artificial Sequence
  Oligonucleotide for detection of SNP TSC0019688
aacacatcttaca

SEQ ID NO: 77261 - DNA, 13 bp, Artificial Sequence
  Oligonucleotide for detection of SNP TSC0019689
ggagtggtaggtt

SEQ ID NO: 77262 - DNA, 13 bp, Artificial Sequence
  Oligonucleotide for detection of SNP TSC0019689
aacctaccactcc

SEQ ID NO: 77263 - DNA, 13 bp, Artificial Sequence
  Oligonucleotide for detection of SNP TSC0019689
ggagtgataggtt

SEQ ID NO: 77264 - DNA, 13 bp, Artificial Sequence
  Oligonucleotide for detection of SNP TSC0019689
aacctatcactcc

SEQ ID NO: 77265 - DNA, 13 bp, Artificial Sequence
  Oligonucleotide for detection of SNP TSC0019689
ggagcggtaggtt

SEQ ID NO: 77266 - DNA, 13 bp, Artificial Sequence
  Oligonucleotide for detection of SNP TSC0019689
aacctaccgctcc

SEQ ID NO: 77267 - DNA, 13 bp, Artificial Sequence
  Oligonucleotide for detection of SNP TSC0019689
ggagcgataggtt

SEQ ID NO: 77268 - DNA, 13 bp, Artificial Sequence
  Oligonucleotide for detection of SNP TSC0019689
aacctatcgctcc

SEQ ID NO: 77269 - DNA, 13 bp, Artificial Sequence
  Oligonucleotide for detection of SNP TSC0019691
aagaggaaatgtt

SEQ ID NO: 77270 - DNA, 13 bp, Artificial Sequence
  Oligonucleotide for detection of SNP TSC0019691
aacatttcctctt

SEQ ID NO: 77271 - DNA, 13 bp, Artificial Sequence
  Oligonucleotide for detection of SNP TSC0019691
aagagggaatgtt

SEQ ID NO: 77272 - DNA, 13 bp, Artificial Sequence
  Oligonucleotide for detection of SNP TSC0019691
aacattccctctt

SEQ ID NO: 77273 - DNA, 13 bp, Artificial Sequence
  Oligonucleotide for detection of SNP TSC0019692
gaaataaatattg

SEQ ID NO: 77274 - DNA, 13 bp, Artificial Sequence
  Oligonucleotide for detection of SNP TSC0019692
caatatttatttc

SEQ ID NO: 77275 - DNA, 13 bp, Artificial Sequence
  Oligonucleotide for detection of SNP TSC0019692
gaaatatatattg

SEQ ID NO: 77276 - DNA, 13 bp, Artificial Sequence
  Oligonucleotide for detection of SNP TSC0019692
caatatatatttc

SEQ ID NO: 77277 - DNA, 13 bp, Artificial Sequence
  Oligonucleotide for detection of SNP TSC0019692
taatatttgttty

SEQ ID NO: 77278 - DNA, 13 bp, Artificial Sequence
  Oligonucleotide for detection of SNP TSC0019692
raaacaaatatta

SEQ ID NO: 77279 - DNA, 13 bp, Artificial Sequence
  Oligonucleotide for detection of SNP TSC0019692
taatatatgttty

SEQ ID NO: 77280 - DNA, 13 bp, Artificial Sequence
  Oligonucleotide for detection of SNP TSC0019692
raaacatatatta

SEQ ID NO: 77281 - DNA, 13 bp, Artificial Sequence
  Oligonucleotide for detection of SNP TSC0019693
attggagtatata

SEQ ID NO: 77282 - DNA, 13 bp, Artificial Sequence
  Oligonucleotide for detection of SNP TSC0019693
tatatactccaat

SEQ ID NO: 77283 - DNA, 13 bp, Artificial Sequence
  Oligonucleotide for detection of SNP TSC0019693
attggaatatata

SEQ ID NO: 77284 - DNA, 13 bp, Artificial Sequence
  Oligonucleotide for detection of SNP TSC0019693
tatatattccaat

SEQ ID NO: 77285 - DNA, 13 bp, Artificial Sequence
  Oligonucleotide for detection of SNP TSC0019695
tatgttaagtttt

SEQ ID NO: 77286 - DNA, 13 bp, Artificial Sequence
  Oligonucleotide for detection of SNP TSC0019695
aaaacttaacata

SEQ ID NO: 77287 - DNA, 13 bp, Artificial Sequence
  Oligonucleotide for detection of SNP TSC0019695
tatgttgagtttt

SEQ ID NO: 77288 - DNA, 13 bp, Artificial Sequence
  Oligonucleotide for detection of SNP TSC0019695
aaaactcaacata

SEQ ID NO: 77289 - DNA, 13 bp, Artificial Sequence
  Oligonucleotide for detection of SNP TSC0019695
tatgtcgagtttt

SEQ ID NO: 77290 - DNA, 13 bp, Artificial Sequence
  Oligonucleotide for detection of SNP TSC0019695
aaaactcgacata

SEQ ID NO: 77291 - DNA, 13 bp, Artificial Sequence
  Oligonucleotide for detection of SNP TSC0019695
aagatttggtatg

SEQ ID NO: 77292 - DNA, 13 bp, Artificial Sequence
  Oligonucleotide for detection of SNP TSC0019695
cataccaaatctt

SEQ ID NO: 77293 - DNA, 13 bp, Artificial Sequence
  Oligonucleotide for detection of SNP TSC0019695
aagattcggtatg

SEQ ID NO: 77294 - DNA, 13 bp, Artificial Sequence
  Oligonucleotide for detection of SNP TSC0019695
cataccgaatctt

SEQ ID NO: 77295 - DNA, 13 bp, Artificial Sequence
  Oligonucleotide for detection of SNP TSC0019696
aaataaattttty

SEQ ID NO: 77296 - DNA, 13 bp, Artificial Sequence
  Oligonucleotide for detection of SNP TSC0019696
raaaaatttattt

SEQ ID NO: 77297 - DNA, 13 bp, Artificial Sequence
  Oligonucleotide for detection of SNP TSC0019696
aaataatttttty

SEQ ID NO: 77298 - DNA, 13 bp, Artificial Sequence
  Oligonucleotide for detection of SNP TSC0019696
raaaaaattattt

SEQ ID NO: 77299 - DNA, 13 bp, Artificial Sequence
  Oligonucleotide for detection of SNP TSC0019696
ggggggtttgttt

SEQ ID NO: 77300 - DNA, 13 bp, Artificial Sequence
  Oligonucleotide for detection of SNP TSC0019696
aaacaaacccccc

SEQ ID NO: 77301 - DNA, 13 bp, Artificial Sequence
  Oligonucleotide for detection of SNP TSC0019696
gggggggttgttt

SEQ ID NO: 77302 - DNA, 13 bp, Artificial Sequence
  Oligonucleotide for detection of SNP TSC0019696
aaacaaccccccc

SEQ ID NO: 77303 - DNA, 13 bp, Artificial Sequence
  Oligonucleotide for detection of SNP TSC0019701
tagtaaagttttg

SEQ ID NO: 77304 - DNA, 13 bp, Artificial Sequence
  Oligonucleotide for detection of SNP TSC0019701
caaaactttacta

SEQ ID NO: 77305 - DNA, 13 bp, Artificial Sequence
  Oligonucleotide for detection of SNP TSC0019701
tagtaaggttttg

SEQ ID NO: 77306 - DNA, 13 bp, Artificial Sequence
  Oligonucleotide for detection of SNP TSC0019701
caaaaccttacta

SEQ ID NO: 77307 - DNA, 13 bp, Artificial Sequence
  Oligonucleotide for detection of SNP TSC0019701
tagtaaagtttcg

SEQ ID NO: 77308 - DNA, 13 bp, Artificial Sequence
  Oligonucleotide for detection of SNP TSC0019701
cgaaactttacta

SEQ ID NO: 77309 - DNA, 13 bp, Artificial Sequence
  Oligonucleotide for detection of SNP TSC0019701
tagtaaggtttcg

SEQ ID NO: 77310 - DNA, 13 bp, Artificial Sequence
  Oligonucleotide for detection of SNP TSC0019701
cgaaaccttacta

SEQ ID NO: 77311 - DNA, 13 bp, Artificial Sequence
  Oligonucleotide for detection of SNP TSC0019706
taggtggttttag

SEQ ID NO: 77312 - DNA, 13 bp, Artificial Sequence
  Oligonucleotide for detection of SNP TSC0019706
ctaaaaccaccta

SEQ ID NO: 77313 - DNA, 13 bp, Artificial Sequence
  Oligonucleotide for detection of SNP TSC0019706
taggtgattttag

SEQ ID NO: 77314 - DNA, 13 bp, Artificial Sequence
  Oligonucleotide for detection of SNP TSC0019706
ctaaaatcaccta

SEQ ID NO: 77315 - DNA, 13 bp, Artificial Sequence
  Oligonucleotide for detection of SNP TSC0019707
tagagaagttata

SEQ ID NO: 77316 - DNA, 13 bp, Artificial Sequence
  Oligonucleotide for detection of SNP TSC0019707
tataacttctcta

SEQ ID NO: 77317 - DNA, 13 bp, Artificial Sequence
  Oligonucleotide for detection of SNP TSC0019707
tagagatgttata

SEQ ID NO: 77318 - DNA, 13 bp, Artificial Sequence
  Oligonucleotide for detection of SNP TSC0019707
tataacatctcta

SEQ ID NO: 77319 - DNA, 13 bp, Artificial Sequence
  Oligonucleotide for detection of SNP TSC0019707
tagagacgttata

SEQ ID NO: 77320 - DNA, 13 bp, Artificial Sequence
  Oligonucleotide for detection of SNP TSC0019707
tataacgtctcta

SEQ ID NO: 77321 - DNA, 13 bp, Artificial Sequence
  Oligonucleotide for detection of SNP TSC0019707
tgtggtttttttg

SEQ ID NO: 77322 - DNA, 13 bp, Artificial Sequence
  Oligonucleotide for detection of SNP TSC0019707
caaaaaaaccaca

SEQ ID NO: 77323 - DNA, 13 bp, Artificial Sequence
  Oligonucleotide for detection of SNP TSC0019707
tgtggtgtttttg

SEQ ID NO: 77324 - DNA, 13 bp, Artificial Sequence
  Oligonucleotide for detection of SNP TSC0019707
caaaaacaccaca

SEQ ID NO: 77325 - DNA, 13 bp, Artificial Sequence
  Oligonucleotide for detection of SNP TSC0019707
tgtggcgtttttg

SEQ ID NO: 77326 - DNA, 13 bp, Artificial Sequence
  Oligonucleotide for detection of SNP TSC0019707
caaaaacgccaca

SEQ ID NO: 77327 - DNA, 13 bp, Artificial Sequence
  Oligonucleotide for detection of SNP TSC0019708
tattttaaatgag

SEQ ID NO: 77328 - DNA, 13 bp, Artificial Sequence
  Oligonucleotide for detection of SNP TSC0019708
ctcatttaaaata

SEQ ID NO: 77329 - DNA, 13 bp, Artificial Sequence
  Oligonucleotide for detection of SNP TSC0019708
tattttgaatgag

SEQ ID NO: 77330 - DNA, 13 bp, Artificial Sequence
  Oligonucleotide for detection of SNP TSC0019708
ctcattcaaaata

SEQ ID NO: 77331 - DNA, 13 bp, Artificial Sequence
  Oligonucleotide for detection of SNP TSC0019708
tatttcgaatgag

SEQ ID NO: 77332 - DNA, 13 bp, Artificial Sequence
  Oligonucleotide for detection of SNP TSC0019708
ctcattcgaaata

SEQ ID NO: 77333 - DNA, 13 bp, Artificial Sequence
  Oligonucleotide for detection of SNP TSC0019708
tttatttggggtg

SEQ ID NO: 77334 - DNA, 13 bp, Artificial Sequence
  Oligonucleotide for detection of SNP TSC0019708
caccccaaataaa

SEQ ID NO: 77335 - DNA, 13 bp, Artificial Sequence
  Oligonucleotide for detection of SNP TSC0019708
tttattcggggtg

SEQ ID NO: 77336 - DNA, 13 bp, Artificial Sequence
  Oligonucleotide for detection of SNP TSC0019708
caccccgaataaa

SEQ ID NO: 77337 - DNA, 13 bp, Artificial Sequence
  Oligonucleotide for detection of SNP TSC0019709
gattttatagaga

SEQ ID NO: 77338 - DNA, 13 bp, Artificial Sequence
  Oligonucleotide for detection of SNP TSC0019709
tctctataaaatc

SEQ ID NO: 77339 - DNA, 13 bp, Artificial Sequence
  Oligonucleotide for detection of SNP TSC0019709
gattttttagaga

SEQ ID NO: 77340 - DNA, 13 bp, Artificial Sequence
  Oligonucleotide for detection of SNP TSC0019709
tctctaaaaaatc

SEQ ID NO: 77341 - DNA, 13 bp, Artificial Sequence
  Oligonucleotide for detection of SNP TSC0019709
tttttgtgggaty

SEQ ID NO: 77342 - DNA, 13 bp, Artificial Sequence
  Oligonucleotide for detection of SNP TSC0019709
ratcccacaaaaa

SEQ ID NO: 77343 - DNA, 13 bp, Artificial Sequence
  Oligonucleotide for detection of SNP TSC0019709
tttttgggggaty

SEQ ID NO: 77344 - DNA, 13 bp, Artificial Sequence
  Oligonucleotide for detection of SNP TSC0019709
ratcccccaaaaa

SEQ ID NO: 77345 - DNA, 13 bp, Artificial Sequence
  Oligonucleotide for detection of SNP TSC0019710
gatttgtgtgttt

SEQ ID NO: 77346 - DNA, 13 bp, Artificial Sequence
  Oligonucleotide for detection of SNP TSC0019710
aaacacacaaatc

SEQ ID NO: 77347 - DNA, 13 bp, Artificial Sequence
  Oligonucleotide for detection of SNP TSC0019710
gatttgcgtgttt

SEQ ID NO: 77348 - DNA, 13 bp, Artificial Sequence
  Oligonucleotide for detection of SNP TSC0019710
aaacacgcaaatc

SEQ ID NO: 77349 - DNA, 13 bp, Artificial Sequence
  Oligonucleotide for detection of SNP TSC0019710
aggtatgtaagty

SEQ ID NO: 77350 - DNA, 13 bp, Artificial Sequence
  Oligonucleotide for detection of SNP TSC0019710
racttacatacct

SEQ ID NO: 77351 - DNA, 13 bp, Artificial Sequence
  Oligonucleotide for detection of SNP TSC0019710
aggtatataagty

SEQ ID NO: 77352 - DNA, 13 bp, Artificial Sequence
  Oligonucleotide for detection of SNP TSC0019710
racttatatacct

SEQ ID NO: 77353 - DNA, 13 bp, Artificial Sequence
  Oligonucleotide for detection of SNP TSC0019710
aggtacgtaagty

SEQ ID NO: 77354 - DNA, 13 bp, Artificial Sequence
  Oligonucleotide for detection of SNP TSC0019710
racttacgtacct

SEQ ID NO: 77355 - DNA, 13 bp, Artificial Sequence
  Oligonucleotide for detection of SNP TSC0019711
atattagatttag

SEQ ID NO: 77356 - DNA, 13 bp, Artificial Sequence
  Oligonucleotide for detection of SNP TSC0019711
ctaaatctaatat

SEQ ID NO: 77357 - DNA, 13 bp, Artificial Sequence
  Oligonucleotide for detection of SNP TSC0019711
atattatatttag

SEQ ID NO: 77358 - DNA, 13 bp, Artificial Sequence
  Oligonucleotide for detection of SNP TSC0019711
ctaaatataatat

SEQ ID NO: 77359 - DNA, 13 bp, Artificial Sequence
  Oligonucleotide for detection of SNP TSC0019711
ttgagtttggtat

SEQ ID NO: 77360 - DNA, 13 bp, Artificial Sequence
  Oligonucleotide for detection of SNP TSC0019711
ataccaaactcaa

SEQ ID NO: 77361 - DNA, 13 bp, Artificial Sequence
  Oligonucleotide for detection of SNP TSC0019711
ttgagtatggtat

SEQ ID NO: 77362 - DNA, 13 bp, Artificial Sequence
  Oligonucleotide for detection of SNP TSC0019711
ataccatactcaa

SEQ ID NO: 77363 - DNA, 13 bp, Artificial Sequence
  Oligonucleotide for detection of SNP TSC0019712
tattattgttttt

SEQ ID NO: 77364 - DNA, 13 bp, Artificial Sequence
  Oligonucleotide for detection of SNP TSC0019712
aaaaacaataata

SEQ ID NO: 77365 - DNA, 13 bp, Artificial Sequence
  Oligonucleotide for detection of SNP TSC0019712
tattatcgttttt

SEQ ID NO: 77366 - DNA, 13 bp, Artificial Sequence
  Oligonucleotide for detection of SNP TSC0019712
aaaaacgataata

SEQ ID NO: 77367 - DNA, 13 bp, Artificial Sequence
  Oligonucleotide for detection of SNP TSC0019712
agaaatgatagtg

SEQ ID NO: 77368 - DNA, 13 bp, Artificial Sequence
  Oligonucleotide for detection of SNP TSC0019712
cactatcatttct

SEQ ID NO: 77369 - DNA, 13 bp, Artificial Sequence
  Oligonucleotide for detection of SNP TSC0019712
agaaattatagtg

SEQ ID NO: 77370 - DNA, 13 bp, Artificial Sequence
  Oligonucleotide for detection of SNP TSC0019712
cactataatttct

SEQ ID NO: 77371 - DNA, 13 bp, Artificial Sequence
  Oligonucleotide for detection of SNP TSC0019712
agaaacgatagtg

SEQ ID NO: 77372 - DNA, 13 bp, Artificial Sequence
  Oligonucleotide for detection of SNP TSC0019712
cactatcgtttct

SEQ ID NO: 77373 - DNA, 13 bp, Artificial Sequence
  Oligonucleotide for detection of SNP TSC0019713
gtttaggttgtta

SEQ ID NO: 77374 - DNA, 13 bp, Artificial Sequence
  Oligonucleotide for detection of SNP TSC0019713
taacaacctaaac

SEQ ID NO: 77375 - DNA, 13 bp, Artificial Sequence
  Oligonucleotide for detection of SNP TSC0019713
gtttagtttgtta

SEQ ID NO: 77376 - DNA, 13 bp, Artificial Sequence
  Oligonucleotide for detection of SNP TSC0019713
taacaaactaaac

SEQ ID NO: 77377 - DNA, 13 bp, Artificial Sequence
  Oligonucleotide for detection of SNP TSC0019713
tgataatttgaay

SEQ ID NO: 77378 - DNA, 13 bp, Artificial Sequence
  Oligonucleotide for detection of SNP TSC0019713
rttcaaattatca

SEQ ID NO: 77379 - DNA, 13 bp, Artificial Sequence
  Oligonucleotide for detection of SNP TSC0019713
tgataaattgaay

SEQ ID NO: 77380 - DNA, 13 bp, Artificial Sequence
  Oligonucleotide for detection of SNP TSC0019713
rttcaatttatca

SEQ ID NO: 77381 - DNA, 13 bp, Artificial Sequence
  Oligonucleotide for detection of SNP TSC0019714
gaaatggtgtgaa

SEQ ID NO: 77382 - DNA, 13 bp, Artificial Sequence
  Oligonucleotide for detection of SNP TSC0019714
ttcacaccatttc

SEQ ID NO: 77383 - DNA, 13 bp, Artificial Sequence
  Oligonucleotide for detection of SNP TSC0019714
gaaatgatgtgaa

SEQ ID NO: 77384 - DNA, 13 bp, Artificial Sequence
  Oligonucleotide for detection of SNP TSC0019714
ttcacatcatttc

SEQ ID NO: 77385 - DNA, 13 bp, Artificial Sequence
  Oligonucleotide for detection of SNP TSC0019715
tgttttcgttttg

SEQ ID NO: 77386 - DNA, 13 bp, Artificial Sequence
  Oligonucleotide for detection of SNP TSC0019715
caaaacgaaaaca

SEQ ID NO: 77387 - DNA, 13 bp, Artificial Sequence
  Oligonucleotide for detection of SNP TSC0019715
tagggtggagata

SEQ ID NO: 77388 - DNA, 13 bp, Artificial Sequence
  Oligonucleotide for detection of SNP TSC0019715
tatctccacccta

SEQ ID NO: 77389 - DNA, 13 bp, Artificial Sequence
  Oligonucleotide for detection of SNP TSC0019715
tagggtagagata

SEQ ID NO: 77390 - DNA, 13 bp, Artificial Sequence
  Oligonucleotide for detection of SNP TSC0019715
tatctctacccta

SEQ ID NO: 77391 - DNA, 13 bp, Artificial Sequence
  Oligonucleotide for detection of SNP TSC0019715
tagggcggagata

SEQ ID NO: 77392 - DNA, 13 bp, Artificial Sequence
  Oligonucleotide for detection of SNP TSC0019715
tatctccgcccta

SEQ ID NO: 77393 - DNA, 13 bp, Artificial Sequence
  Oligonucleotide for detection of SNP TSC0019719
atttgagtgagtt

SEQ ID NO: 77394 - DNA, 13 bp, Artificial Sequence
  Oligonucleotide for detection of SNP TSC0019719
aactcactcaaat

SEQ ID NO: 77395 - DNA, 13 bp, Artificial Sequence
  Oligonucleotide for detection of SNP TSC0019719
atttgaatgagtt

SEQ ID NO: 77396 - DNA, 13 bp, Artificial Sequence
  Oligonucleotide for detection of SNP TSC0019719
aactcattcaaat

SEQ ID NO: 77397 - DNA, 13 bp, Artificial Sequence
  Oligonucleotide for detection of SNP TSC0019720
taatttgagtgag

SEQ ID NO: 77398 - DNA, 13 bp, Artificial Sequence
  Oligonucleotide for detection of SNP TSC0019720
ctcactcaaatta

SEQ ID NO: 77399 - DNA, 13 bp, Artificial Sequence
  Oligonucleotide for detection of SNP TSC0019720
taattttagtgag

SEQ ID NO: 77400 - DNA, 13 bp, Artificial Sequence
  Oligonucleotide for detection of SNP TSC0019720
ctcactaaaatta

SEQ ID NO: 77401 - DNA, 13 bp, Artificial Sequence
  Oligonucleotide for detection of SNP TSC0019723
tgttgggaggggg

SEQ ID NO: 77402 - DNA, 13 bp, Artificial Sequence
  Oligonucleotide for detection of SNP TSC0019723
ccccctcccaaca

SEQ ID NO: 77403 - DNA, 13 bp, Artificial Sequence
  Oligonucleotide for detection of SNP TSC0019723
tgttggaaggggg

SEQ ID NO: 77404 - DNA, 13 bp, Artificial Sequence
  Oligonucleotide for detection of SNP TSC0019723
cccccttccaaca

SEQ ID NO: 77405 - DNA, 13 bp, Artificial Sequence
  Oligonucleotide for detection of SNP TSC0019723
cgttgggaggggg

SEQ ID NO: 77406 - DNA, 13 bp, Artificial Sequence
  Oligonucleotide for detection of SNP TSC0019723
ccccctcccaacg

SEQ ID NO: 77407 - DNA, 13 bp, Artificial Sequence
  Oligonucleotide for detection of SNP TSC0019723
cgttggaaggggg

SEQ ID NO: 77408 - DNA, 13 bp, Artificial Sequence
  Oligonucleotide for detection of SNP TSC0019723
cccccttccaacg

SEQ ID NO: 77409 - DNA, 13 bp, Artificial Sequence
  Oligonucleotide for detection of SNP TSC0019724
tttttaatgggag

SEQ ID NO: 77410 - DNA, 13 bp, Artificial Sequence
  Oligonucleotide for detection of SNP TSC0019724
ctcccattaaaaa

SEQ ID NO: 77411 - DNA, 13 bp, Artificial Sequence
  Oligonucleotide for detection of SNP TSC0019724
tttttattgggag

SEQ ID NO: 77412 - DNA, 13 bp, Artificial Sequence
  Oligonucleotide for detection of SNP TSC0019724
ctcccaataaaaa

SEQ ID NO: 77413 - DNA, 13 bp, Artificial Sequence
  Oligonucleotide for detection of SNP TSC0019724
tttttaacgggag

SEQ ID NO: 77414 - DNA, 13 bp, Artificial Sequence
  Oligonucleotide for detection of SNP TSC0019724
ctcccgttaaaaa

SEQ ID NO: 77415 - DNA, 13 bp, Artificial Sequence
  Oligonucleotide for detection of SNP TSC0019724
tttttatcgggag

SEQ ID NO: 77416 - DNA, 13 bp, Artificial Sequence
  Oligonucleotide for detection of SNP TSC0019724
ctcccgataaaaa

SEQ ID NO: 77417 - DNA, 13 bp, Artificial Sequence
  Oligonucleotide for detection of SNP TSC0019724
tttttgttgggag

SEQ ID NO: 77418 - DNA, 13 bp, Artificial Sequence
  Oligonucleotide for detection of SNP TSC0019724
ctcccaacaaaaa

SEQ ID NO: 77419 - DNA, 13 bp, Artificial Sequence
  Oligonucleotide for detection of SNP TSC0019724
tttttggtgggag

SEQ ID NO: 77420 - DNA, 13 bp, Artificial Sequence
  Oligonucleotide for detection of SNP TSC0019724
ctcccaccaaaaa

SEQ ID NO: 77421 - DNA, 13 bp, Artificial Sequence
  Oligonucleotide for detection of SNP TSC0019724
ttttcgttgggag

SEQ ID NO: 77422 - DNA, 13 bp, Artificial Sequence
  Oligonucleotide for detection of SNP TSC0019724
ctcccaacgaaaa

SEQ ID NO: 77423 - DNA, 13 bp, Artificial Sequence
  Oligonucleotide for detection of SNP TSC0019724
ttttcggtgggag

SEQ ID NO: 77424 - DNA, 13 bp, Artificial Sequence
  Oligonucleotide for detection of SNP TSC0019724
ctcccaccgaaaa

SEQ ID NO: 77425 - DNA, 13 bp, Artificial Sequence
  Oligonucleotide for detection of SNP TSC0019725
tgattgtgttttt

SEQ ID NO: 77426 - DNA, 13 bp, Artificial Sequence
  Oligonucleotide for detection of SNP TSC0019725
aaaaacacaatca

SEQ ID NO: 77427 - DNA, 13 bp, Artificial Sequence
  Oligonucleotide for detection of SNP TSC0019725
tgattgcgttttt

SEQ ID NO: 77428 - DNA, 13 bp, Artificial Sequence
  Oligonucleotide for detection of SNP TSC0019725
aaaaacgcaatca

SEQ ID NO: 77429 - DNA, 13 bp, Artificial Sequence
  Oligonucleotide for detection of SNP TSC0019725
agaagtgtaatta

SEQ ID NO: 77430 - DNA, 13 bp, Artificial Sequence
  Oligonucleotide for detection of SNP TSC0019725
taattacacttct

SEQ ID NO: 77431 - DNA, 13 bp, Artificial Sequence
  Oligonucleotide for detection of SNP TSC0019725
agaagtataatta

SEQ ID NO: 77432 - DNA, 13 bp, Artificial Sequence
  Oligonucleotide for detection of SNP TSC0019725
taattatacttct

SEQ ID NO: 77433 - DNA, 13 bp, Artificial Sequence
  Oligonucleotide for detection of SNP TSC0019725
agaagcgtaatta

SEQ ID NO: 77434 - DNA, 13 bp, Artificial Sequence
  Oligonucleotide for detection of SNP TSC0019725
taattacgcttct

SEQ ID NO: 77435 - DNA, 13 bp, Artificial Sequence
  Oligonucleotide for detection of SNP TSC0019726
tatgtaatgtttg

SEQ ID NO: 77436 - DNA, 13 bp, Artificial Sequence
  Oligonucleotide for detection of SNP TSC0019726
caaacattacata

SEQ ID NO: 77437 - DNA, 13 bp, Artificial Sequence
  Oligonucleotide for detection of SNP TSC0019726
tatgtagtgtttg

SEQ ID NO: 77438 - DNA, 13 bp, Artificial Sequence
  Oligonucleotide for detection of SNP TSC0019726
caaacactacata

SEQ ID NO: 77439 - DNA, 13 bp, Artificial Sequence
  Oligonucleotide for detection of SNP TSC0019727
tgatagattgaty

SEQ ID NO: 77440 - DNA, 13 bp, Artificial Sequence
  Oligonucleotide for detection of SNP TSC0019727
ratcaatctatca

SEQ ID NO: 77441 - DNA, 13 bp, Artificial Sequence
  Oligonucleotide for detection of SNP TSC0019727
tgatagtttgaty

SEQ ID NO: 77442 - DNA, 13 bp, Artificial Sequence
  Oligonucleotide for detection of SNP TSC0019727
ratcaaactatca

SEQ ID NO: 77443 - DNA, 13 bp, Artificial Sequence
  Oligonucleotide for detection of SNP TSC0019727
ggttagtttatta

SEQ ID NO: 77444 - DNA, 13 bp, Artificial Sequence
  Oligonucleotide for detection of SNP TSC0019727
taataaactaacc

SEQ ID NO: 77445 - DNA, 13 bp, Artificial Sequence
  Oligonucleotide for detection of SNP TSC0019727
ggttaggttatta

SEQ ID NO: 77446 - DNA, 13 bp, Artificial Sequence
  Oligonucleotide for detection of SNP TSC0019727
taataacctaacc

SEQ ID NO: 77447 - DNA, 13 bp, Artificial Sequence
  Oligonucleotide for detection of SNP TSC0019730
tgattgggtttgg

SEQ ID NO: 77448 - DNA, 13 bp, Artificial Sequence
  Oligonucleotide for detection of SNP TSC0019730
ccaaacccaatca

SEQ ID NO: 77449 - DNA, 13 bp, Artificial Sequence
  Oligonucleotide for detection of SNP TSC0019730
tgattgtgtttgg

SEQ ID NO: 77450 - DNA, 13 bp, Artificial Sequence
  Oligonucleotide for detection of SNP TSC0019730
ccaaacacaatca

SEQ ID NO: 77451 - DNA, 13 bp, Artificial Sequence
  Oligonucleotide for detection of SNP TSC0019730
ttagatttagtta

SEQ ID NO: 77452 - DNA, 13 bp, Artificial Sequence
  Oligonucleotide for detection of SNP TSC0019730
taactaaatctaa

SEQ ID NO: 77453 - DNA, 13 bp, Artificial Sequence
  Oligonucleotide for detection of SNP TSC0019730
ttagatatagtta

SEQ ID NO: 77454 - DNA, 13 bp, Artificial Sequence
  Oligonucleotide for detection of SNP TSC0019730
taactatatctaa

SEQ ID NO: 77455 - DNA, 13 bp, Artificial Sequence
  Oligonucleotide for detection of SNP TSC0019732
tatggtatgtata

SEQ ID NO: 77456 - DNA, 13 bp, Artificial Sequence
  Oligonucleotide for detection of SNP TSC0019732
tatacataccata

SEQ ID NO: 77457 - DNA, 13 bp, Artificial Sequence
  Oligonucleotide for detection of SNP TSC0019732
tatggtgtgtata

SEQ ID NO: 77458 - DNA, 13 bp, Artificial Sequence
  Oligonucleotide for detection of SNP TSC0019732
tatacacaccata

SEQ ID NO: 77459 - DNA, 13 bp, Artificial Sequence
  Oligonucleotide for detection of SNP TSC0019732
tacggtatgtata

SEQ ID NO: 77460 - DNA, 13 bp, Artificial Sequence
  Oligonucleotide for detection of SNP TSC0019732
tatacataccgta

SEQ ID NO: 77461 - DNA, 13 bp, Artificial Sequence
  Oligonucleotide for detection of SNP TSC0019732
tacggtgtgtata

SEQ ID NO: 77462 - DNA, 13 bp, Artificial Sequence
  Oligonucleotide for detection of SNP TSC0019732
tatacacaccgta

SEQ ID NO: 77463 - DNA, 13 bp, Artificial Sequence
  Oligonucleotide for detection of SNP TSC0019733
gtatatatgttty

SEQ ID NO: 77464 - DNA, 13 bp, Artificial Sequence
  Oligonucleotide for detection of SNP TSC0019733
raaacatatatac

SEQ ID NO: 77465 - DNA, 13 bp, Artificial Sequence
  Oligonucleotide for detection of SNP TSC0019733
gtatatgtgttty

SEQ ID NO: 77466 - DNA, 13 bp, Artificial Sequence
  Oligonucleotide for detection of SNP TSC0019733
raaacacatatac

SEQ ID NO: 77467 - DNA, 13 bp, Artificial Sequence
  Oligonucleotide for detection of SNP TSC0019733
gtatacgtgttty

SEQ ID NO: 77468 - DNA, 13 bp, Artificial Sequence
  Oligonucleotide for detection of SNP TSC0019733
raaacacgtatac

SEQ ID NO: 77469 - DNA, 13 bp, Artificial Sequence
  Oligonucleotide for detection of SNP TSC0019733
ggggtatgtgtgy

SEQ ID NO: 77470 - DNA, 13 bp, Artificial Sequence
  Oligonucleotide for detection of SNP TSC0019733
rcacacatacccc

SEQ ID NO: 77471 - DNA, 13 bp, Artificial Sequence
  Oligonucleotide for detection of SNP TSC0019733
ggggtacgtgtgy

SEQ ID NO: 77472 - DNA, 13 bp, Artificial Sequence
  Oligonucleotide for detection of SNP TSC0019733
rcacacgtacccc

SEQ ID NO: 77473 - DNA, 13 bp, Artificial Sequence
  Oligonucleotide for detection of SNP TSC0019734
ggagagaaaaatg

SEQ ID NO: 77474 - DNA, 13 bp, Artificial Sequence
  Oligonucleotide for detection of SNP TSC0019734
catttttctctcc

SEQ ID NO: 77475 - DNA, 13 bp, Artificial Sequence
  Oligonucleotide for detection of SNP TSC0019734
ggagaggaaaatg

SEQ ID NO: 77476 - DNA, 13 bp, Artificial Sequence
  Oligonucleotide for detection of SNP TSC0019734
cattttcctctcc

SEQ ID NO: 77477 - DNA, 13 bp, Artificial Sequence
  Oligonucleotide for detection of SNP TSC0019736
tatgttattatty

SEQ ID NO: 77478 - DNA, 13 bp, Artificial Sequence
  Oligonucleotide for detection of SNP TSC0019736
raataataacata

SEQ ID NO: 77479 - DNA, 13 bp, Artificial Sequence
  Oligonucleotide for detection of SNP TSC0019736
tatgttgttatty

SEQ ID NO: 77480 - DNA, 13 bp, Artificial Sequence
  Oligonucleotide for detection of SNP TSC0019736
raataacaacata

SEQ ID NO: 77481 - DNA, 13 bp, Artificial Sequence
  Oligonucleotide for detection of SNP TSC0019737
ttagttgtggtgy

SEQ ID NO: 77482 - DNA, 13 bp, Artificial Sequence
  Oligonucleotide for detection of SNP TSC0019737
rcaccacaactaa

SEQ ID NO: 77483 - DNA, 13 bp, Artificial Sequence
  Oligonucleotide for detection of SNP TSC0019737
ttagttttggtgy

SEQ ID NO: 77484 - DNA, 13 bp, Artificial Sequence
  Oligonucleotide for detection of SNP TSC0019737
rcaccaaaactaa

SEQ ID NO: 77485 - DNA, 13 bp, Artificial Sequence
  Oligonucleotide for detection of SNP TSC0019737
ttagtcgtggtgy

SEQ ID NO: 77486 - DNA, 13 bp, Artificial Sequence
  Oligonucleotide for detection of SNP TSC0019737
rcaccacgactaa

SEQ ID NO: 77487 - DNA, 13 bp, Artificial Sequence
  Oligonucleotide for detection of SNP TSC0019737
ttagttttggcgy

SEQ ID NO: 77488 - DNA, 13 bp, Artificial Sequence
  Oligonucleotide for detection of SNP TSC0019737
rcgccaaaactaa

SEQ ID NO: 77489 - DNA, 13 bp, Artificial Sequence
  Oligonucleotide for detection of SNP TSC0019737
ttagttgtggcgy

SEQ ID NO: 77490 - DNA, 13 bp, Artificial Sequence
  Oligonucleotide for detection of SNP TSC0019737
rcgccacaactaa

SEQ ID NO: 77491 - DNA, 13 bp, Artificial Sequence
  Oligonucleotide for detection of SNP TSC0019737
ttagtcgtggcgy

SEQ ID NO: 77492 - DNA, 13 bp, Artificial Sequence
  Oligonucleotide for detection of SNP TSC0019737
rcgccacgactaa

SEQ ID NO: 77493 - DNA, 13 bp, Artificial Sequence
  Oligonucleotide for detection of SNP TSC0019737
gtgttatggttga

SEQ ID NO: 77494 - DNA, 13 bp, Artificial Sequence
  Oligonucleotide for detection of SNP TSC0019737
tcaaccataacac

SEQ ID NO: 77495 - DNA, 13 bp, Artificial Sequence
  Oligonucleotide for detection of SNP TSC0019737
gtgttaaggttga

SEQ ID NO: 77496 - DNA, 13 bp, Artificial Sequence
  Oligonucleotide for detection of SNP TSC0019737
tcaaccttaacac

SEQ ID NO: 77497 - DNA, 13 bp, Artificial Sequence
  Oligonucleotide for detection of SNP TSC0019737
gcgttatggttga

SEQ ID NO: 77498 - DNA, 13 bp, Artificial Sequence
  Oligonucleotide for detection of SNP TSC0019737
tcaaccataacgc

SEQ ID NO: 77499 - DNA, 13 bp, Artificial Sequence
  Oligonucleotide for detection of SNP TSC0019737
gcgttaaggttga

SEQ ID NO: 77500 - DNA, 13 bp, Artificial Sequence
  Oligonucleotide for detection of SNP TSC0019737
tcaaccttaacgc

SEQ ID NO: 77501 - DNA, 13 bp, Artificial Sequence
  Oligonucleotide for detection of SNP TSC0019737
gtgttacggttga

SEQ ID NO: 77502 - DNA, 13 bp, Artificial Sequence
  Oligonucleotide for detection of SNP TSC0019737
tcaaccgtaacac

SEQ ID NO: 77503 - DNA, 13 bp, Artificial Sequence
  Oligonucleotide for detection of SNP TSC0019737
gcgttacggttga

SEQ ID NO: 77504 - DNA, 13 bp, Artificial Sequence
  Oligonucleotide for detection of SNP TSC0019737
tcaaccgtaacgc

SEQ ID NO: 77505 - DNA, 13 bp, Artificial Sequence
  Oligonucleotide for detection of SNP TSC0019738
tagtaggaatgga

SEQ ID NO: 77506 - DNA, 13 bp, Artificial Sequence
  Oligonucleotide for detection of SNP TSC0019738
tccattcctacta

SEQ ID NO: 77507 - DNA, 13 bp, Artificial Sequence
  Oligonucleotide for detection of SNP TSC0019738
tagtagaaatgga

SEQ ID NO: 77508 - DNA, 13 bp, Artificial Sequence
  Oligonucleotide for detection of SNP TSC0019738
tccatttctacta

SEQ ID NO: 77509 - DNA, 13 bp, Artificial Sequence
  Oligonucleotide for detection of SNP TSC0019739
ggtataatatgty

SEQ ID NO: 77510 - DNA, 13 bp, Artificial Sequence
  Oligonucleotide for detection of SNP TSC0019739
racatattatacc

SEQ ID NO: 77511 - DNA, 13 bp, Artificial Sequence
  Oligonucleotide for detection of SNP TSC0019739
ggtatagtatgty

SEQ ID NO: 77512 - DNA, 13 bp, Artificial Sequence
  Oligonucleotide for detection of SNP TSC0019739
racatactatacc

SEQ ID NO: 77513 - DNA, 13 bp, Artificial Sequence
  Oligonucleotide for detection of SNP TSC0019740
ggtatgatagaaa

SEQ ID NO: 77514 - DNA, 13 bp, Artificial Sequence
  Oligonucleotide for detection of SNP TSC0019740
tttctatcatacc

SEQ ID NO: 77515 - DNA, 13 bp, Artificial Sequence
  Oligonucleotide for detection of SNP TSC0019740
ggtatggtagaaa

SEQ ID NO: 77516 - DNA, 13 bp, Artificial Sequence
  Oligonucleotide for detection of SNP TSC0019740
tttctaccatacc

SEQ ID NO: 77517 - DNA, 13 bp, Artificial Sequence
  Oligonucleotide for detection of SNP TSC0019741
agatgtagggggy

SEQ ID NO: 77518 - DNA, 13 bp, Artificial Sequence
  Oligonucleotide for detection of SNP TSC0019741
rccccctacatct

SEQ ID NO: 77519 - DNA, 13 bp, Artificial Sequence
  Oligonucleotide for detection of SNP TSC0019741
agatgtggggggy

SEQ ID NO: 77520 - DNA, 13 bp, Artificial Sequence
  Oligonucleotide for detection of SNP TSC0019741
rccccccacatct

SEQ ID NO: 77521 - DNA, 13 bp, Artificial Sequence
  Oligonucleotide for detection of SNP TSC0019743
tagggtatatagt

SEQ ID NO: 77522 - DNA, 13 bp, Artificial Sequence
  Oligonucleotide for detection of SNP TSC0019743
actatatacccta

SEQ ID NO: 77523 - DNA, 13 bp, Artificial Sequence
  Oligonucleotide for detection of SNP TSC0019743
tagggtgtatagt

SEQ ID NO: 77524 - DNA, 13 bp, Artificial Sequence
  Oligonucleotide for detection of SNP TSC0019743
actatacacccta

SEQ ID NO: 77525 - DNA, 13 bp, Artificial Sequence
  Oligonucleotide for detection of SNP TSC0019743
tagggcgtatagt

SEQ ID NO: 77526 - DNA, 13 bp, Artificial Sequence
  Oligonucleotide for detection of SNP TSC0019743
actatacgcccta

SEQ ID NO: 77527 - DNA, 13 bp, Artificial Sequence
  Oligonucleotide for detection of SNP TSC0019743
attatatgtttta

SEQ ID NO: 77528 - DNA, 13 bp, Artificial Sequence
  Oligonucleotide for detection of SNP TSC0019743
taaaacatataat

SEQ ID NO: 77529 - DNA, 13 bp, Artificial Sequence
  Oligonucleotide for detection of SNP TSC0019743
attatacgtttta

SEQ ID NO: 77530 - DNA, 13 bp, Artificial Sequence
  Oligonucleotide for detection of SNP TSC0019743
taaaacgtataat

SEQ ID NO: 77531 - DNA, 13 bp, Artificial Sequence
  Oligonucleotide for detection of SNP TSC0019744
atatagaaagaty

SEQ ID NO: 77532 - DNA, 13 bp, Artificial Sequence
  Oligonucleotide for detection of SNP TSC0019744
ratctttctatat

SEQ ID NO: 77533 - DNA, 13 bp, Artificial Sequence
  Oligonucleotide for detection of SNP TSC0019744
atatagtaagaty

SEQ ID NO: 77534 - DNA, 13 bp, Artificial Sequence
  Oligonucleotide for detection of SNP TSC0019744
ratcttactatat

SEQ ID NO: 77535 - DNA, 13 bp, Artificial Sequence
  Oligonucleotide for detection of SNP TSC0019744
ggtttttttatgt

SEQ ID NO: 77536 - DNA, 13 bp, Artificial Sequence
  Oligonucleotide for detection of SNP TSC0019744
acataaaaaaacc

SEQ ID NO: 77537 - DNA, 13 bp, Artificial Sequence
  Oligonucleotide for detection of SNP TSC0019748
ataggggtaaaat

SEQ ID NO: 77538 - DNA, 13 bp, Artificial Sequence
  Oligonucleotide for detection of SNP TSC0019748
attttacccctat

SEQ ID NO: 77539 - DNA, 13 bp, Artificial Sequence
  Oligonucleotide for detection of SNP TSC0019748
atagggttaaaat

SEQ ID NO: 77540 - DNA, 13 bp, Artificial Sequence
  Oligonucleotide for detection of SNP TSC0019748
attttaaccctat

SEQ ID NO: 77541 - DNA, 13 bp, Artificial Sequence
  Oligonucleotide for detection of SNP TSC0019748
attttgattttgt

SEQ ID NO: 77542 - DNA, 13 bp, Artificial Sequence
  Oligonucleotide for detection of SNP TSC0019748
acaaaatcaaaat

SEQ ID NO: 77543 - DNA, 13 bp, Artificial Sequence
  Oligonucleotide for detection of SNP TSC0019749
ttttgtatatgtt

SEQ ID NO: 77544 - DNA, 13 bp, Artificial Sequence
  Oligonucleotide for detection of SNP TSC0019749
aacatatacaaaa

SEQ ID NO: 77545 - DNA, 13 bp, Artificial Sequence
  Oligonucleotide for detection of SNP TSC0019749
ttttgtgtatgtt

SEQ ID NO: 77546 - DNA, 13 bp, Artificial Sequence
  Oligonucleotide for detection of SNP TSC0019749
aacatacacaaaa

SEQ ID NO: 77547 - DNA, 13 bp, Artificial Sequence
  Oligonucleotide for detection of SNP TSC0019751
tgagtttgggtay

SEQ ID NO: 77548 - DNA, 13 bp, Artificial Sequence
  Oligonucleotide for detection of SNP TSC0019751
rtacccaaactca

SEQ ID NO: 77549 - DNA, 13 bp, Artificial Sequence
  Oligonucleotide for detection of SNP TSC0019751
tgagttcgggtay

SEQ ID NO: 77550 - DNA, 13 bp, Artificial Sequence
  Oligonucleotide for detection of SNP TSC0019751
rtacccgaactca

SEQ ID NO: 77551 - DNA, 13 bp, Artificial Sequence
  Oligonucleotide for detection of SNP TSC0019751
gtgtttgagttta

SEQ ID NO: 77552 - DNA, 13 bp, Artificial Sequence
  Oligonucleotide for detection of SNP TSC0019751
taaactcaaacac

SEQ ID NO: 77553 - DNA, 13 bp, Artificial Sequence
  Oligonucleotide for detection of SNP TSC0019751
gtgtttaagttta

SEQ ID NO: 77554 - DNA, 13 bp, Artificial Sequence
  Oligonucleotide for detection of SNP TSC0019751
taaacttaaacac

SEQ ID NO: 77555 - DNA, 13 bp, Artificial Sequence
  Oligonucleotide for detection of SNP TSC0019751
gtgttcgagttta

SEQ ID NO: 77556 - DNA, 13 bp, Artificial Sequence
  Oligonucleotide for detection of SNP TSC0019751
taaactcgaacac

SEQ ID NO: 77557 - DNA, 13 bp, Artificial Sequence
  Oligonucleotide for detection of SNP TSC0019752
gtaaggagagatt

SEQ ID NO: 77558 - DNA, 13 bp, Artificial Sequence
  Oligonucleotide for detection of SNP TSC0019752
aatctctccttac

SEQ ID NO: 77559 - DNA, 13 bp, Artificial Sequence
  Oligonucleotide for detection of SNP TSC0019752
gtaaggtgagatt

SEQ ID NO: 77560 - DNA, 13 bp, Artificial Sequence
  Oligonucleotide for detection of SNP TSC0019752
aatctcaccttac

SEQ ID NO: 77561 - DNA, 13 bp, Artificial Sequence
  Oligonucleotide for detection of SNP TSC0019752
agtttttttttay

SEQ ID NO: 77562 - DNA, 13 bp, Artificial Sequence
  Oligonucleotide for detection of SNP TSC0019752
rtaaaaaaaaact

SEQ ID NO: 77563 - DNA, 13 bp, Artificial Sequence
  Oligonucleotide for detection of SNP TSC0019752
agttttattttay

SEQ ID NO: 77564 - DNA, 13 bp, Artificial Sequence
  Oligonucleotide for detection of SNP TSC0019752
rtaaaataaaact

SEQ ID NO: 77565 - DNA, 13 bp, Artificial Sequence
  Oligonucleotide for detection of SNP TSC0019753
tttgtggttttty

SEQ ID NO: 77566 - DNA, 13 bp, Artificial Sequence
  Oligonucleotide for detection of SNP TSC0019753
raaaaaccacaaa

SEQ ID NO: 77567 - DNA, 13 bp, Artificial Sequence
  Oligonucleotide for detection of SNP TSC0019753
tttgtgattttty

SEQ ID NO: 77568 - DNA, 13 bp, Artificial Sequence
  Oligonucleotide for detection of SNP TSC0019753
raaaaatcacaaa

SEQ ID NO: 77569 - DNA, 13 bp, Artificial Sequence
  Oligonucleotide for detection of SNP TSC0019754
ggggtaaatgtta

SEQ ID NO: 77570 - DNA, 13 bp, Artificial Sequence
  Oligonucleotide for detection of SNP TSC0019754
taacatttacccc

SEQ ID NO: 77571 - DNA, 13 bp, Artificial Sequence
  Oligonucleotide for detection of SNP TSC0019754
ggggtagatgtta

SEQ ID NO: 77572 - DNA, 13 bp, Artificial Sequence
  Oligonucleotide for detection of SNP TSC0019754
taacatctacccc

SEQ ID NO: 77573 - DNA, 13 bp, Artificial Sequence
  Oligonucleotide for detection of SNP TSC0019755
gaaagatgggagt

SEQ ID NO: 77574 - DNA, 13 bp, Artificial Sequence
  Oligonucleotide for detection of SNP TSC0019755
actcccatctttc

SEQ ID NO: 77575 - DNA, 13 bp, Artificial Sequence
  Oligonucleotide for detection of SNP TSC0019755
gaaagacgggagt

SEQ ID NO: 77576 - DNA, 13 bp, Artificial Sequence
  Oligonucleotide for detection of SNP TSC0019755
actcccgtctttc

SEQ ID NO: 77577 - DNA, 13 bp, Artificial Sequence
  Oligonucleotide for detection of SNP TSC0019758
atatatatgttaa

SEQ ID NO: 77578 - DNA, 13 bp, Artificial Sequence
  Oligonucleotide for detection of SNP TSC0019758
ttaacatatatat

SEQ ID NO: 77579 - DNA, 13 bp, Artificial Sequence
  Oligonucleotide for detection of SNP TSC0019758
atatatgtgttaa

SEQ ID NO: 77580 - DNA, 13 bp, Artificial Sequence
  Oligonucleotide for detection of SNP TSC0019758
ttaacacatatat

SEQ ID NO: 77581 - DNA, 13 bp, Artificial Sequence
  Oligonucleotide for detection of SNP TSC0019759
agttttatttaty

SEQ ID NO: 77582 - DNA, 13 bp, Artificial Sequence
  Oligonucleotide for detection of SNP TSC0019759
rataaataaaact

SEQ ID NO: 77583 - DNA, 13 bp, Artificial Sequence
  Oligonucleotide for detection of SNP TSC0019759
agttttgtttaty

SEQ ID NO: 77584 - DNA, 13 bp, Artificial Sequence
  Oligonucleotide for detection of SNP TSC0019759
rataaacaaaact

SEQ ID NO: 77585 - DNA, 13 bp, Artificial Sequence
  Oligonucleotide for detection of SNP TSC0019760
tggagatgtttgg

SEQ ID NO: 77586 - DNA, 13 bp, Artificial Sequence
  Oligonucleotide for detection of SNP TSC0019760
ccaaacatctcca

SEQ ID NO: 77587 - DNA, 13 bp, Artificial Sequence
  Oligonucleotide for detection of SNP TSC0019760
tggagacgtttgg

SEQ ID NO: 77588 - DNA, 13 bp, Artificial Sequence
  Oligonucleotide for detection of SNP TSC0019760
ccaaacgtctcca

SEQ ID NO: 77589 - DNA, 13 bp, Artificial Sequence
  Oligonucleotide for detection of SNP TSC0019761
atttttatgaatt

SEQ ID NO: 77590 - DNA, 13 bp, Artificial Sequence
  Oligonucleotide for detection of SNP TSC0019761
aattcataaaaat

SEQ ID NO: 77591 - DNA, 13 bp, Artificial Sequence
  Oligonucleotide for detection of SNP TSC0019761
atttttttgaatt

SEQ ID NO: 77592 - DNA, 13 bp, Artificial Sequence
  Oligonucleotide for detection of SNP TSC0019761
aattcaaaaaaat

SEQ ID NO: 77593 - DNA, 13 bp, Artificial Sequence
  Oligonucleotide for detection of SNP TSC0019761
aatttatggagat

SEQ ID NO: 77594 - DNA, 13 bp, Artificial Sequence
  Oligonucleotide for detection of SNP TSC0019761
atctccataaatt

SEQ ID NO: 77595 - DNA, 13 bp, Artificial Sequence
  Oligonucleotide for detection of SNP TSC0019761
aatttagggagat

SEQ ID NO: 77596 - DNA, 13 bp, Artificial Sequence
  Oligonucleotide for detection of SNP TSC0019761
atctccctaaatt

SEQ ID NO: 77597 - DNA, 13 bp, Artificial Sequence
  Oligonucleotide for detection of SNP TSC0019762
atattagatattt

SEQ ID NO: 77598 - DNA, 13 bp, Artificial Sequence
  Oligonucleotide for detection of SNP TSC0019762
aaatatctaatat

SEQ ID NO: 77599 - DNA, 13 bp, Artificial Sequence
  Oligonucleotide for detection of SNP TSC0019762
atattaaatattt

SEQ ID NO: 77600 - DNA, 13 bp, Artificial Sequence
  Oligonucleotide for detection of SNP TSC0019762
aaatatttaatat

SEQ ID NO: 77601 - DNA, 13 bp, Artificial Sequence
  Oligonucleotide for detection of SNP TSC0019763
agtgggaaatttt

SEQ ID NO: 77602 - DNA, 13 bp, Artificial Sequence
  Oligonucleotide for detection of SNP TSC0019763
aaaatttcccact

SEQ ID NO: 77603 - DNA, 13 bp, Artificial Sequence
  Oligonucleotide for detection of SNP TSC0019763
agtgggtaatttt

SEQ ID NO: 77604 - DNA, 13 bp, Artificial Sequence
  Oligonucleotide for detection of SNP TSC0019763
aaaattacccact

SEQ ID NO: 77605 - DNA, 13 bp, Artificial Sequence
  Oligonucleotide for detection of SNP TSC0019763
agagttttttatt

SEQ ID NO: 77606 - DNA, 13 bp, Artificial Sequence
  Oligonucleotide for detection of SNP TSC0019763
aataaaaaactct

SEQ ID NO: 77607 - DNA, 13 bp, Artificial Sequence
  Oligonucleotide for detection of SNP TSC0019763
agagttgtttatt

SEQ ID NO: 77608 - DNA, 13 bp, Artificial Sequence
  Oligonucleotide for detection of SNP TSC0019763
aataaacaactct

SEQ ID NO: 77609 - DNA, 13 bp, Artificial Sequence
  Oligonucleotide for detection of SNP TSC0019767
tggaggaaatatt

SEQ ID NO: 77610 - DNA, 13 bp, Artificial Sequence
  Oligonucleotide for detection of SNP TSC0019767
aatatttcctcca

SEQ ID NO: 77611 - DNA, 13 bp, Artificial Sequence
  Oligonucleotide for detection of SNP TSC0019767
tggagggaatatt

SEQ ID NO: 77612 - DNA, 13 bp, Artificial Sequence
  Oligonucleotide for detection of SNP TSC0019767
aatattccctcca

SEQ ID NO: 77613 - DNA, 13 bp, Artificial Sequence
  Oligonucleotide for detection of SNP TSC0019768
aatttttattttt

SEQ ID NO: 77614 - DNA, 13 bp, Artificial Sequence
  Oligonucleotide for detection of SNP TSC0019768
aaaaataaaaatt

SEQ ID NO: 77615 - DNA, 13 bp, Artificial Sequence
  Oligonucleotide for detection of SNP TSC0019772
gggaggggttgtt

SEQ ID NO: 77616 - DNA, 13 bp, Artificial Sequence
  Oligonucleotide for detection of SNP TSC0019772
aacaacccctccc

SEQ ID NO: 77617 - DNA, 13 bp, Artificial Sequence
  Oligonucleotide for detection of SNP TSC0019772
gggaggtgttgtt

SEQ ID NO: 77618 - DNA, 13 bp, Artificial Sequence
  Oligonucleotide for detection of SNP TSC0019772
aacaacacctccc

SEQ ID NO: 77619 - DNA, 13 bp, Artificial Sequence
  Oligonucleotide for detection of SNP TSC0019772
aataattttttty

SEQ ID NO: 77620 - DNA, 13 bp, Artificial Sequence
  Oligonucleotide for detection of SNP TSC0019772
raaaaaaattatt

SEQ ID NO: 77621 - DNA, 13 bp, Artificial Sequence
  Oligonucleotide for detection of SNP TSC0019772
aataatattttty

SEQ ID NO: 77622 - DNA, 13 bp, Artificial Sequence
  Oligonucleotide for detection of SNP TSC0019772
raaaaatattatt

SEQ ID NO: 77623 - DNA, 13 bp, Artificial Sequence
  Oligonucleotide for detection of SNP TSC0019773
aaatttagaaata

SEQ ID NO: 77624 - DNA, 13 bp, Artificial Sequence
  Oligonucleotide for detection of SNP TSC0019773
tatttctaaattt

SEQ ID NO: 77625 - DNA, 13 bp, Artificial Sequence
  Oligonucleotide for detection of SNP TSC0019773
aaattttgaaata

SEQ ID NO: 77626 - DNA, 13 bp, Artificial Sequence
  Oligonucleotide for detection of SNP TSC0019773
tatttcaaaattt

SEQ ID NO: 77627 - DNA, 13 bp, Artificial Sequence
  Oligonucleotide for detection of SNP TSC0019773
aaatttcgaaata

SEQ ID NO: 77628 - DNA, 13 bp, Artificial Sequence
  Oligonucleotide for detection of SNP TSC0019773
tatttcgaaattt

SEQ ID NO: 77629 - DNA, 13 bp, Artificial Sequence
  Oligonucleotide for detection of SNP TSC0019773
tatttttgaattt

SEQ ID NO: 77630 - DNA, 13 bp, Artificial Sequence
  Oligonucleotide for detection of SNP TSC0019773
aaattcaaaaata

SEQ ID NO: 77631 - DNA, 13 bp, Artificial Sequence
  Oligonucleotide for detection of SNP TSC0019773
tattttggaattt

SEQ ID NO: 77632 - DNA, 13 bp, Artificial Sequence
  Oligonucleotide for detection of SNP TSC0019773
aaattccaaaata

SEQ ID NO: 77633 - DNA, 13 bp, Artificial Sequence
  Oligonucleotide for detection of SNP TSC0019773
tatttcggaattt

SEQ ID NO: 77634 - DNA, 13 bp, Artificial Sequence
  Oligonucleotide for detection of SNP TSC0019773
aaattccgaaata

SEQ ID NO: 77635 - DNA, 13 bp, Artificial Sequence
  Oligonucleotide for detection of SNP TSC0019774
ggttgtttgatay

SEQ ID NO: 77636 - DNA, 13 bp, Artificial Sequence
  Oligonucleotide for detection of SNP TSC0019774
rtatcaaacaacc

SEQ ID NO: 77637 - DNA, 13 bp, Artificial Sequence
  Oligonucleotide for detection of SNP TSC0019774
ggttgtgtgatay

SEQ ID NO: 77638 - DNA, 13 bp, Artificial Sequence
  Oligonucleotide for detection of SNP TSC0019774
rtatcacacaacc

SEQ ID NO: 77639 - DNA, 13 bp, Artificial Sequence
  Oligonucleotide for detection of SNP TSC0019774
ggtcgtttgatay

SEQ ID NO: 77640 - DNA, 13 bp, Artificial Sequence
  Oligonucleotide for detection of SNP TSC0019774
rtatcaaacgacc

SEQ ID NO: 77641 - DNA, 13 bp, Artificial Sequence
  Oligonucleotide for detection of SNP TSC0019774
ggtcgtgtgatay

SEQ ID NO: 77642 - DNA, 13 bp, Artificial Sequence
  Oligonucleotide for detection of SNP TSC0019774
rtatcacacgacc

SEQ ID NO: 77643 - DNA, 13 bp, Artificial Sequence
  Oligonucleotide for detection of SNP TSC0019774
gtgttagatgaty

SEQ ID NO: 77644 - DNA, 13 bp, Artificial Sequence
  Oligonucleotide for detection of SNP TSC0019774
ratcatctaacac

SEQ ID NO: 77645 - DNA, 13 bp, Artificial Sequence
  Oligonucleotide for detection of SNP TSC0019774
gtgttatatgaty

SEQ ID NO: 77646 - DNA, 13 bp, Artificial Sequence
  Oligonucleotide for detection of SNP TSC0019774
ratcatataacac

SEQ ID NO: 77647 - DNA, 13 bp, Artificial Sequence
  Oligonucleotide for detection of SNP TSC0019774
gtgttagacgaty

SEQ ID NO: 77648 - DNA, 13 bp, Artificial Sequence
  Oligonucleotide for detection of SNP TSC0019774
ratcgtctaacac

SEQ ID NO: 77649 - DNA, 13 bp, Artificial Sequence
  Oligonucleotide for detection of SNP TSC0019774
gtgttatacgaty

SEQ ID NO: 77650 - DNA, 13 bp, Artificial Sequence
  Oligonucleotide for detection of SNP TSC0019774
ratcgtataacac

SEQ ID NO: 77651 - DNA, 13 bp, Artificial Sequence
  Oligonucleotide for detection of SNP TSC0019777
tttagaagtagag

SEQ ID NO: 77652 - DNA, 13 bp, Artificial Sequence
  Oligonucleotide for detection of SNP TSC0019777
ctctacttctaaa

SEQ ID NO: 77653 - DNA, 13 bp, Artificial Sequence
  Oligonucleotide for detection of SNP TSC0019777
tttagaggtagag

SEQ ID NO: 77654 - DNA, 13 bp, Artificial Sequence
  Oligonucleotide for detection of SNP TSC0019777
ctctacctctaaa

SEQ ID NO: 77655 - DNA, 13 bp, Artificial Sequence
  Oligonucleotide for detection of SNP TSC0019778
aatttttgttttt

SEQ ID NO: 77656 - DNA, 13 bp, Artificial Sequence
  Oligonucleotide for detection of SNP TSC0019778
aaaaacaaaaatt

SEQ ID NO: 77657 - DNA, 13 bp, Artificial Sequence
  Oligonucleotide for detection of SNP TSC0019778
aattttcgttttt

SEQ ID NO: 77658 - DNA, 13 bp, Artificial Sequence
  Oligonucleotide for detection of SNP TSC0019778
aaaaacgaaaatt

SEQ ID NO: 77659 - DNA, 13 bp, Artificial Sequence
  Oligonucleotide for detection of SNP TSC0019778
agagatggggatt

SEQ ID NO: 77660 - DNA, 13 bp, Artificial Sequence
  Oligonucleotide for detection of SNP TSC0019778
aatccccatctct

SEQ ID NO: 77661 - DNA, 13 bp, Artificial Sequence
  Oligonucleotide for detection of SNP TSC0019778
agagatagggatt

SEQ ID NO: 77662 - DNA, 13 bp, Artificial Sequence
  Oligonucleotide for detection of SNP TSC0019778
aatccctatctct

SEQ ID NO: 77663 - DNA, 13 bp, Artificial Sequence
  Oligonucleotide for detection of SNP TSC0019778
agagacggggatt

SEQ ID NO: 77664 - DNA, 13 bp, Artificial Sequence
  Oligonucleotide for detection of SNP TSC0019778
aatccccgtctct

SEQ ID NO: 77665 - DNA, 13 bp, Artificial Sequence
  Oligonucleotide for detection of SNP TSC0019779
atgtaaaaaatta

SEQ ID NO: 77666 - DNA, 13 bp, Artificial Sequence
  Oligonucleotide for detection of SNP TSC0019779
taattttttacat

SEQ ID NO: 77667 - DNA, 13 bp, Artificial Sequence
  Oligonucleotide for detection of SNP TSC0019779
atgtaataaatta

SEQ ID NO: 77668 - DNA, 13 bp, Artificial Sequence
  Oligonucleotide for detection of SNP TSC0019779
taatttattacat

SEQ ID NO: 77669 - DNA, 13 bp, Artificial Sequence
  Oligonucleotide for detection of SNP TSC0019779
taattttttgtat

SEQ ID NO: 77670 - DNA, 13 bp, Artificial Sequence
  Oligonucleotide for detection of SNP TSC0019779
atacaaaaaatta

SEQ ID NO: 77671 - DNA, 13 bp, Artificial Sequence
  Oligonucleotide for detection of SNP TSC0019779
taatttgttgtat

SEQ ID NO: 77672 - DNA, 13 bp, Artificial Sequence
  Oligonucleotide for detection of SNP TSC0019779
atacaacaaatta

SEQ ID NO: 77673 - DNA, 13 bp, Artificial Sequence
  Oligonucleotide for detection of SNP TSC0019782
taattagttatta

SEQ ID NO: 77674 - DNA, 13 bp, Artificial Sequence
  Oligonucleotide for detection of SNP TSC0019782
taataactaatta

SEQ ID NO: 77675 - DNA, 13 bp, Artificial Sequence
  Oligonucleotide for detection of SNP TSC0019782
taattaattatta

SEQ ID NO: 77676 - DNA, 13 bp, Artificial Sequence
  Oligonucleotide for detection of SNP TSC0019782
taataattaatta

SEQ ID NO: 77677 - DNA, 13 bp, Artificial Sequence
  Oligonucleotide for detection of SNP TSC0019783
gtaatgattgagy

SEQ ID NO: 77678 - DNA, 13 bp, Artificial Sequence
  Oligonucleotide for detection of SNP TSC0019783
rctcaatcattac

SEQ ID NO: 77679 - DNA, 13 bp, Artificial Sequence
  Oligonucleotide for detection of SNP TSC0019783
gtaatggttgagy

SEQ ID NO: 77680 - DNA, 13 bp, Artificial Sequence
  Oligonucleotide for detection of SNP TSC0019783
rctcaaccattac

SEQ ID NO: 77681 - DNA, 13 bp, Artificial Sequence
  Oligonucleotide for detection of SNP TSC0019783
gtaatgatcgagy

SEQ ID NO: 77682 - DNA, 13 bp, Artificial Sequence
  Oligonucleotide for detection of SNP TSC0019783
rctcgatcattac

SEQ ID NO: 77683 - DNA, 13 bp, Artificial Sequence
  Oligonucleotide for detection of SNP TSC0019783
gtaatggtcgagy

SEQ ID NO: 77684 - DNA, 13 bp, Artificial Sequence
  Oligonucleotide for detection of SNP TSC0019783
rctcgaccattac

SEQ ID NO: 77685 - DNA, 13 bp, Artificial Sequence
  Oligonucleotide for detection of SNP TSC0019784
taaatgatattga

SEQ ID NO: 77686 - DNA, 13 bp, Artificial Sequence
  Oligonucleotide for detection of SNP TSC0019784
tcaatatcattta

SEQ ID NO: 77687 - DNA, 13 bp, Artificial Sequence
  Oligonucleotide for detection of SNP TSC0019784
taaatgttattga

SEQ ID NO: 77688 - DNA, 13 bp, Artificial Sequence
  Oligonucleotide for detection of SNP TSC0019784
tcaataacattta

SEQ ID NO: 77689 - DNA, 13 bp, Artificial Sequence
  Oligonucleotide for detection of SNP TSC0019784
ttaatgttattta

SEQ ID NO: 77690 - DNA, 13 bp, Artificial Sequence
  Oligonucleotide for detection of SNP TSC0019784
taaataacattaa

SEQ ID NO: 77691 - DNA, 13 bp, Artificial Sequence
  Oligonucleotide for detection of SNP TSC0019784
ttaatggtattta

SEQ ID NO: 77692 - DNA, 13 bp, Artificial Sequence
  Oligonucleotide for detection of SNP TSC0019784
taaataccattaa

SEQ ID NO: 77693 - DNA, 13 bp, Artificial Sequence
  Oligonucleotide for detection of SNP TSC0019785
ttataaatgatag

SEQ ID NO: 77694 - DNA, 13 bp, Artificial Sequence
  Oligonucleotide for detection of SNP TSC0019785
ctatcatttataa

SEQ ID NO: 77695 - DNA, 13 bp, Artificial Sequence
  Oligonucleotide for detection of SNP TSC0019785
ttataattgatag

SEQ ID NO: 77696 - DNA, 13 bp, Artificial Sequence
  Oligonucleotide for detection of SNP TSC0019785
ctatcaattataa

SEQ ID NO: 77697 - DNA, 13 bp, Artificial Sequence
  Oligonucleotide for detection of SNP TSC0019785
ttattatttgtaa

SEQ ID NO: 77698 - DNA, 13 bp, Artificial Sequence
  Oligonucleotide for detection of SNP TSC0019785
ttacaaataataa

SEQ ID NO: 77699 - DNA, 13 bp, Artificial Sequence
  Oligonucleotide for detection of SNP TSC0019785
ttattagttgtaa

SEQ ID NO: 77700 - DNA, 13 bp, Artificial Sequence
  Oligonucleotide for detection of SNP TSC0019785
ttacaactaataa

SEQ ID NO: 77701 - DNA, 13 bp, Artificial Sequence
  Oligonucleotide for detection of SNP TSC0019786
ttttttatatatt

SEQ ID NO: 77702 - DNA, 13 bp, Artificial Sequence
  Oligonucleotide for detection of SNP TSC0019786
aatatataaaaaa

SEQ ID NO: 77703 - DNA, 13 bp, Artificial Sequence
  Oligonucleotide for detection of SNP TSC0019786
ttttttgtatatt

SEQ ID NO: 77704 - DNA, 13 bp, Artificial Sequence
  Oligonucleotide for detection of SNP TSC0019786
aatatacaaaaaa

SEQ ID NO: 77705 - DNA, 13 bp, Artificial Sequence
  Oligonucleotide for detection of SNP TSC0019787
tttttgggttagt

SEQ ID NO: 77706 - DNA, 13 bp, Artificial Sequence
  Oligonucleotide for detection of SNP TSC0019787
actaacccaaaaa

SEQ ID NO: 77707 - DNA, 13 bp, Artificial Sequence
  Oligonucleotide for detection of SNP TSC0019787
tttttgtgttagt

SEQ ID NO: 77708 - DNA, 13 bp, Artificial Sequence
  Oligonucleotide for detection of SNP TSC0019787
actaacacaaaaa

SEQ ID NO: 77709 - DNA, 13 bp, Artificial Sequence
  Oligonucleotide for detection of SNP TSC0019787
attaatttaagaa

SEQ ID NO: 77710 - DNA, 13 bp, Artificial Sequence
  Oligonucleotide for detection of SNP TSC0019787
ttcttaaattaat

SEQ ID NO: 77711 - DNA, 13 bp, Artificial Sequence
  Oligonucleotide for detection of SNP TSC0019787
attaatataagaa

SEQ ID NO: 77712 - DNA, 13 bp, Artificial Sequence
  Oligonucleotide for detection of SNP TSC0019787
ttcttatattaat

SEQ ID NO: 77713 - DNA, 13 bp, Artificial Sequence
  Oligonucleotide for detection of SNP TSC0019788
gaagtattgttay

SEQ ID NO: 77714 - DNA, 13 bp, Artificial Sequence
  Oligonucleotide for detection of SNP TSC0019788
rtaacaatacttc

SEQ ID NO: 77715 - DNA, 13 bp, Artificial Sequence
  Oligonucleotide for detection of SNP TSC0019788
gaagtagtgttay

SEQ ID NO: 77716 - DNA, 13 bp, Artificial Sequence
  Oligonucleotide for detection of SNP TSC0019788
rtaacactacttc

SEQ ID NO: 77717 - DNA, 13 bp, Artificial Sequence
  Oligonucleotide for detection of SNP TSC0019788
gtaatagtattty

SEQ ID NO: 77718 - DNA, 13 bp, Artificial Sequence
  Oligonucleotide for detection of SNP TSC0019788
raaatactattac

SEQ ID NO: 77719 - DNA, 13 bp, Artificial Sequence
  Oligonucleotide for detection of SNP TSC0019788
gtaatattattty

SEQ ID NO: 77720 - DNA, 13 bp, Artificial Sequence
  Oligonucleotide for detection of SNP TSC0019788
raaataatattac

SEQ ID NO: 77721 - DNA, 13 bp, Artificial Sequence
  Oligonucleotide for detection of SNP TSC0019789
gttattaaaattt

SEQ ID NO: 77722 - DNA, 13 bp, Artificial Sequence
  Oligonucleotide for detection of SNP TSC0019789
aaattttaataac

SEQ ID NO: 77723 - DNA, 13 bp, Artificial Sequence
  Oligonucleotide for detection of SNP TSC0019789
gttatttaaattt

SEQ ID NO: 77724 - DNA, 13 bp, Artificial Sequence
  Oligonucleotide for detection of SNP TSC0019789
aaatttaaataac

SEQ ID NO: 77725 - DNA, 13 bp, Artificial Sequence
  Oligonucleotide for detection of SNP TSC0019789
aaattttagtagy

SEQ ID NO: 77726 - DNA, 13 bp, Artificial Sequence
  Oligonucleotide for detection of SNP TSC0019789
rctactaaaattt

SEQ ID NO: 77727 - DNA, 13 bp, Artificial Sequence
  Oligonucleotide for detection of SNP TSC0019789
aaatttaagtagy

SEQ ID NO: 77728 - DNA, 13 bp, Artificial Sequence
  Oligonucleotide for detection of SNP TSC0019789
rctacttaaattt

SEQ ID NO: 77729 - DNA, 13 bp, Artificial Sequence
  Oligonucleotide for detection of SNP TSC0019793
ataattatgttta

SEQ ID NO: 77730 - DNA, 13 bp, Artificial Sequence
  Oligonucleotide for detection of SNP TSC0019793
taaacataattat

SEQ ID NO: 77731 - DNA, 13 bp, Artificial Sequence
  Oligonucleotide for detection of SNP TSC0019793
ataattgtgttta

SEQ ID NO: 77732 - DNA, 13 bp, Artificial Sequence
  Oligonucleotide for detection of SNP TSC0019793
taaacacaattat

SEQ ID NO: 77733 - DNA, 13 bp, Artificial Sequence
  Oligonucleotide for detection of SNP TSC0019794
gattatgaatgat

SEQ ID NO: 77734 - DNA, 13 bp, Artificial Sequence
  Oligonucleotide for detection of SNP TSC0019794
atcattcataatc

SEQ ID NO: 77735 - DNA, 13 bp, Artificial Sequence
  Oligonucleotide for detection of SNP TSC0019794
gattattaatgat

SEQ ID NO: 77736 - DNA, 13 bp, Artificial Sequence
  Oligonucleotide for detection of SNP TSC0019794
atcattaataatc

SEQ ID NO: 77737 - DNA, 13 bp, Artificial Sequence
  Oligonucleotide for detection of SNP TSC0019794
gattacgaatgat

SEQ ID NO: 77738 - DNA, 13 bp, Artificial Sequence
  Oligonucleotide for detection of SNP TSC0019794
atcattcgtaatc

SEQ ID NO: 77739 - DNA, 13 bp, Artificial Sequence
  Oligonucleotide for detection of SNP TSC0019794
attatttgtggty

SEQ ID NO: 77740 - DNA, 13 bp, Artificial Sequence
  Oligonucleotide for detection of SNP TSC0019794
raccacaaataat

SEQ ID NO: 77741 - DNA, 13 bp, Artificial Sequence
  Oligonucleotide for detection of SNP TSC0019794
attattagtggty

SEQ ID NO: 77742 - DNA, 13 bp, Artificial Sequence
  Oligonucleotide for detection of SNP TSC0019794
raccactaataat

SEQ ID NO: 77743 - DNA, 13 bp, Artificial Sequence
  Oligonucleotide for detection of SNP TSC0019794
attattcgtggty

SEQ ID NO: 77744 - DNA, 13 bp, Artificial Sequence
  Oligonucleotide for detection of SNP TSC0019794
raccacgaataat

SEQ ID NO: 77745 - DNA, 13 bp, Artificial Sequence
  Oligonucleotide for detection of SNP TSC0019795
ttttttgttaagt

SEQ ID NO: 77746 - DNA, 13 bp, Artificial Sequence
  Oligonucleotide for detection of SNP TSC0019795
acttaacaaaaaa

SEQ ID NO: 77747 - DNA, 13 bp, Artificial Sequence
  Oligonucleotide for detection of SNP TSC0019795
ttttttattaagt

SEQ ID NO: 77748 - DNA, 13 bp, Artificial Sequence
  Oligonucleotide for detection of SNP TSC0019795
acttaataaaaaa

SEQ ID NO: 77749 - DNA, 13 bp, Artificial Sequence
  Oligonucleotide for detection of SNP TSC0019796
gggtttggagtag

SEQ ID NO: 77750 - DNA, 13 bp, Artificial Sequence
  Oligonucleotide for detection of SNP TSC0019796
ctactccaaaccc

SEQ ID NO: 77751 - DNA, 13 bp, Artificial Sequence
  Oligonucleotide for detection of SNP TSC0019796
gggtttagagtag

SEQ ID NO: 77752 - DNA, 13 bp, Artificial Sequence
  Oligonucleotide for detection of SNP TSC0019796
ctactctaaaccc

SEQ ID NO: 77753 - DNA, 13 bp, Artificial Sequence
  Oligonucleotide for detection of SNP TSC0019797
tttgaggttatty

SEQ ID NO: 77754 - DNA, 13 bp, Artificial Sequence
  Oligonucleotide for detection of SNP TSC0019797
raataacctcaaa

SEQ ID NO: 77755 - DNA, 13 bp, Artificial Sequence
  Oligonucleotide for detection of SNP TSC0019797
ggatgggtttagg

SEQ ID NO: 77756 - DNA, 13 bp, Artificial Sequence
  Oligonucleotide for detection of SNP TSC0019797
cctaaacccatcc

SEQ ID NO: 77757 - DNA, 13 bp, Artificial Sequence
  Oligonucleotide for detection of SNP TSC0019797
ggatggttttagg

SEQ ID NO: 77758 - DNA, 13 bp, Artificial Sequence
  Oligonucleotide for detection of SNP TSC0019797
cctaaaaccatcc

SEQ ID NO: 77759 - DNA, 13 bp, Artificial Sequence
  Oligonucleotide for detection of SNP TSC0019798
tgggtaattttgt

SEQ ID NO: 77760 - DNA, 13 bp, Artificial Sequence
  Oligonucleotide for detection of SNP TSC0019798
acaaaattaccca

SEQ ID NO: 77761 - DNA, 13 bp, Artificial Sequence
  Oligonucleotide for detection of SNP TSC0019798
tgggtagttttgt

SEQ ID NO: 77762 - DNA, 13 bp, Artificial Sequence
  Oligonucleotide for detection of SNP TSC0019798
acaaaactaccca

SEQ ID NO: 77763 - DNA, 13 bp, Artificial Sequence
  Oligonucleotide for detection of SNP TSC0019802
tttggaggtgtag

SEQ ID NO: 77764 - DNA, 13 bp, Artificial Sequence
  Oligonucleotide for detection of SNP TSC0019802
ctacacctccaaa

SEQ ID NO: 77765 - DNA, 13 bp, Artificial Sequence
  Oligonucleotide for detection of SNP TSC0019802
tttggaagtgtag

SEQ ID NO: 77766 - DNA, 13 bp, Artificial Sequence
  Oligonucleotide for detection of SNP TSC0019802
ctacacttccaaa

SEQ ID NO: 77767 - DNA, 13 bp, Artificial Sequence
  Oligonucleotide for detection of SNP TSC0019808
gtattttggtgay

SEQ ID NO: 77768 - DNA, 13 bp, Artificial Sequence
  Oligonucleotide for detection of SNP TSC0019808
rtcaccaaaatac

SEQ ID NO: 77769 - DNA, 13 bp, Artificial Sequence
  Oligonucleotide for detection of SNP TSC0019808
gtatttcggtgay

SEQ ID NO: 77770 - DNA, 13 bp, Artificial Sequence
  Oligonucleotide for detection of SNP TSC0019808
rtcaccgaaatac

SEQ ID NO: 77771 - DNA, 13 bp, Artificial Sequence
  Oligonucleotide for detection of SNP TSC0019808
gttattggggtgy

SEQ ID NO: 77772 - DNA, 13 bp, Artificial Sequence
  Oligonucleotide for detection of SNP TSC0019808
rcaccccaataac

SEQ ID NO: 77773 - DNA, 13 bp, Artificial Sequence
  Oligonucleotide for detection of SNP TSC0019808
gttattagggtgy

SEQ ID NO: 77774 - DNA, 13 bp, Artificial Sequence
  Oligonucleotide for detection of SNP TSC0019808
rcaccctaataac

SEQ ID NO: 77775 - DNA, 13 bp, Artificial Sequence
  Oligonucleotide for detection of SNP TSC0019808
gttatcggggtgy

SEQ ID NO: 77776 - DNA, 13 bp, Artificial Sequence
  Oligonucleotide for detection of SNP TSC0019808
rcaccccgataac

SEQ ID NO: 77777 - DNA, 13 bp, Artificial Sequence
  Oligonucleotide for detection of SNP TSC0019809
tttgttggtgtat

SEQ ID NO: 77778 - DNA, 13 bp, Artificial Sequence
  Oligonucleotide for detection of SNP TSC0019809
atacaccaacaaa

SEQ ID NO: 77779 - DNA, 13 bp, Artificial Sequence
  Oligonucleotide for detection of SNP TSC0019809
tttgtttgtgtat

SEQ ID NO: 77780 - DNA, 13 bp, Artificial Sequence
  Oligonucleotide for detection of SNP TSC0019809
atacacaaacaaa

SEQ ID NO: 77781 - DNA, 13 bp, Artificial Sequence
  Oligonucleotide for detection of SNP TSC0019809
atgtattaatagg

SEQ ID NO: 77782 - DNA, 13 bp, Artificial Sequence
  Oligonucleotide for detection of SNP TSC0019809
cctattaatacat

SEQ ID NO: 77783 - DNA, 13 bp, Artificial Sequence
  Oligonucleotide for detection of SNP TSC0019809
atgtataaatagg

SEQ ID NO: 77784 - DNA, 13 bp, Artificial Sequence
  Oligonucleotide for detection of SNP TSC0019809
cctatttatacat

SEQ ID NO: 77785 - DNA, 13 bp, Artificial Sequence
  Oligonucleotide for detection of SNP TSC0019810
ttgggtatttaag

SEQ ID NO: 77786 - DNA, 13 bp, Artificial Sequence
  Oligonucleotide for detection of SNP TSC0019810
cttaaatacccaa

SEQ ID NO: 77787 - DNA, 13 bp, Artificial Sequence
  Oligonucleotide for detection of SNP TSC0019810
ttgggtgtttaag

SEQ ID NO: 77788 - DNA, 13 bp, Artificial Sequence
  Oligonucleotide for detection of SNP TSC0019810
cttaaacacccaa

SEQ ID NO: 77789 - DNA, 13 bp, Artificial Sequence
  Oligonucleotide for detection of SNP TSC0019811
gaaagtgagaagy

SEQ ID NO: 77790 - DNA, 13 bp, Artificial Sequence
  Oligonucleotide for detection of SNP TSC0019811
rcttctcactttc

SEQ ID NO: 77791 - DNA, 13 bp, Artificial Sequence
  Oligonucleotide for detection of SNP TSC0019811
gaaagtaagaagy

SEQ ID NO: 77792 - DNA, 13 bp, Artificial Sequence
  Oligonucleotide for detection of SNP TSC0019811
rcttcttactttc

SEQ ID NO: 77793 - DNA, 13 bp, Artificial Sequence
  Oligonucleotide for detection of SNP TSC0019811
gaaagcgagaagy

SEQ ID NO: 77794 - DNA, 13 bp, Artificial Sequence
  Oligonucleotide for detection of SNP TSC0019811
rcttctcgctttc

SEQ ID NO: 77795 - DNA, 13 bp, Artificial Sequence
  Oligonucleotide for detection of SNP TSC0019813
tttaggattaaat

SEQ ID NO: 77796 - DNA, 13 bp, Artificial Sequence
  Oligonucleotide for detection of SNP TSC0019813
atttaatcctaaa

SEQ ID NO: 77797 - DNA, 13 bp, Artificial Sequence
  Oligonucleotide for detection of SNP TSC0019813
tttagggttaaat

SEQ ID NO: 77798 - DNA, 13 bp, Artificial Sequence
  Oligonucleotide for detection of SNP TSC0019813
atttaaccctaaa

SEQ ID NO: 77799 - DNA, 13 bp, Artificial Sequence
  Oligonucleotide for detection of SNP TSC0019814
agaaattgaatgg

SEQ ID NO: 77800 - DNA, 13 bp, Artificial Sequence
  Oligonucleotide for detection of SNP TSC0019814
ccattcaatttct

SEQ ID NO: 77801 - DNA, 13 bp, Artificial Sequence
  Oligonucleotide for detection of SNP TSC0019814
agaaatggaatgg

SEQ ID NO: 77802 - DNA, 13 bp, Artificial Sequence
  Oligonucleotide for detection of SNP TSC0019814
ccattccatttct

SEQ ID NO: 77803 - DNA, 13 bp, Artificial Sequence
  Oligonucleotide for detection of SNP TSC0019815
ggttttaatttag

SEQ ID NO: 77804 - DNA, 13 bp, Artificial Sequence
  Oligonucleotide for detection of SNP TSC0019815
ctaaattaaaacc

SEQ ID NO: 77805 - DNA, 13 bp, Artificial Sequence
  Oligonucleotide for detection of SNP TSC0019815
ggtttttatttag

SEQ ID NO: 77806 - DNA, 13 bp, Artificial Sequence
  Oligonucleotide for detection of SNP TSC0019815
ctaaataaaaacc

SEQ ID NO: 77807 - DNA, 13 bp, Artificial Sequence
  Oligonucleotide for detection of SNP TSC0019815
ttagattagggty

SEQ ID NO: 77808 - DNA, 13 bp, Artificial Sequence
  Oligonucleotide for detection of SNP TSC0019815
raccctaatctaa

SEQ ID NO: 77809 - DNA, 13 bp, Artificial Sequence
  Oligonucleotide for detection of SNP TSC0019815
ttagatgagggty

SEQ ID NO: 77810 - DNA, 13 bp, Artificial Sequence
  Oligonucleotide for detection of SNP TSC0019815
raccctcatctaa

SEQ ID NO: 77811 - DNA, 13 bp, Artificial Sequence
  Oligonucleotide for detection of SNP TSC0019816
tatgttgagttay

SEQ ID NO: 77812 - DNA, 13 bp, Artificial Sequence
  Oligonucleotide for detection of SNP TSC0019816
rtaactcaacata

SEQ ID NO: 77813 - DNA, 13 bp, Artificial Sequence
  Oligonucleotide for detection of SNP TSC0019816
tatgttaagttay

SEQ ID NO: 77814 - DNA, 13 bp, Artificial Sequence
  Oligonucleotide for detection of SNP TSC0019816
rtaacttaacata

SEQ ID NO: 77815 - DNA, 13 bp, Artificial Sequence
  Oligonucleotide for detection of SNP TSC0019817
ggtttagttggag

SEQ ID NO: 77816 - DNA, 13 bp, Artificial Sequence
  Oligonucleotide for detection of SNP TSC0019817
ctccaactaaacc

SEQ ID NO: 77817 - DNA, 13 bp, Artificial Sequence
  Oligonucleotide for detection of SNP TSC0019817
ggtttatttggag

SEQ ID NO: 77818 - DNA, 13 bp, Artificial Sequence
  Oligonucleotide for detection of SNP TSC0019817
ctccaaataaacc

SEQ ID NO: 77819 - DNA, 13 bp, Artificial Sequence
  Oligonucleotide for detection of SNP TSC0019817
ttttaattggaty

SEQ ID NO: 77820 - DNA, 13 bp, Artificial Sequence
  Oligonucleotide for detection of SNP TSC0019817
ratccaattaaaa

SEQ ID NO: 77821 - DNA, 13 bp, Artificial Sequence
  Oligonucleotide for detection of SNP TSC0019817
ttttaaatggaty

SEQ ID NO: 77822 - DNA, 13 bp, Artificial Sequence
  Oligonucleotide for detection of SNP TSC0019817
ratccatttaaaa

SEQ ID NO: 77823 - DNA, 13 bp, Artificial Sequence
  Oligonucleotide for detection of SNP TSC0019819
tgggtaataaagy

SEQ ID NO: 77824 - DNA, 13 bp, Artificial Sequence
  Oligonucleotide for detection of SNP TSC0019819
rctttattaccca

SEQ ID NO: 77825 - DNA, 13 bp, Artificial Sequence
  Oligonucleotide for detection of SNP TSC0019819
tgggtagtaaagy

SEQ ID NO: 77826 - DNA, 13 bp, Artificial Sequence
  Oligonucleotide for detection of SNP TSC0019819
rctttactaccca

SEQ ID NO: 77827 - DNA, 13 bp, Artificial Sequence
  Oligonucleotide for detection of SNP TSC0019820
ttaaaagtataga

SEQ ID NO: 77828 - DNA, 13 bp, Artificial Sequence
  Oligonucleotide for detection of SNP TSC0019820
tctatacttttaa

SEQ ID NO: 77829 - DNA, 13 bp, Artificial Sequence
  Oligonucleotide for detection of SNP TSC0019820
ttaaaaatataga

SEQ ID NO: 77830 - DNA, 13 bp, Artificial Sequence
  Oligonucleotide for detection of SNP TSC0019820
tctatatttttaa

SEQ ID NO: 77831 - DNA, 13 bp, Artificial Sequence
  Oligonucleotide for detection of SNP TSC0019821
tttgtagataatt

SEQ ID NO: 77832 - DNA, 13 bp, Artificial Sequence
  Oligonucleotide for detection of SNP TSC0019821
aattatctacaaa

SEQ ID NO: 77833 - DNA, 13 bp, Artificial Sequence
  Oligonucleotide for detection of SNP TSC0019821
tttgtaaataatt

SEQ ID NO: 77834 - DNA, 13 bp, Artificial Sequence
  Oligonucleotide for detection of SNP TSC0019821
aattatttacaaa

SEQ ID NO: 77835 - DNA, 13 bp, Artificial Sequence
  Oligonucleotide for detection of SNP TSC0019822
taattagttatat

SEQ ID NO: 77836 - DNA, 13 bp, Artificial Sequence
  Oligonucleotide for detection of SNP TSC0019822
atataactaatta

SEQ ID NO: 77837 - DNA, 13 bp, Artificial Sequence
  Oligonucleotide for detection of SNP TSC0019822
taattaattatat

SEQ ID NO: 77838 - DNA, 13 bp, Artificial Sequence
  Oligonucleotide for detection of SNP TSC0019822
atataattaatta

SEQ ID NO: 77839 - DNA, 13 bp, Artificial Sequence
  Oligonucleotide for detection of SNP TSC0019825
atggtgttttgtg

SEQ ID NO: 77840 - DNA, 13 bp, Artificial Sequence
  Oligonucleotide for detection of SNP TSC0019825
cacaaaacaccat

SEQ ID NO: 77841 - DNA, 13 bp, Artificial Sequence
  Oligonucleotide for detection of SNP TSC0019825
atggtggtttgtg

SEQ ID NO: 77842 - DNA, 13 bp, Artificial Sequence
  Oligonucleotide for detection of SNP TSC0019825
cacaaaccaccat

SEQ ID NO: 77843 - DNA, 13 bp, Artificial Sequence
  Oligonucleotide for detection of SNP TSC0019825
acggtgttttgtg

SEQ ID NO: 77844 - DNA, 13 bp, Artificial Sequence
  Oligonucleotide for detection of SNP TSC0019825
cacaaaacaccgt

SEQ ID NO: 77845 - DNA, 13 bp, Artificial Sequence
  Oligonucleotide for detection of SNP TSC0019825
acggtggtttgtg

SEQ ID NO: 77846 - DNA, 13 bp, Artificial Sequence
  Oligonucleotide for detection of SNP TSC0019825
cacaaaccaccgt

SEQ ID NO: 77847 - DNA, 13 bp, Artificial Sequence
  Oligonucleotide for detection of SNP TSC0019825
atggtgttttgcg

SEQ ID NO: 77848 - DNA, 13 bp, Artificial Sequence
  Oligonucleotide for detection of SNP TSC0019825
cgcaaaacaccat

SEQ ID NO: 77849 - DNA, 13 bp, Artificial Sequence
  Oligonucleotide for detection of SNP TSC0019825
atggtggtttgcg

SEQ ID NO: 77850 - DNA, 13 bp, Artificial Sequence
  Oligonucleotide for detection of SNP TSC0019825
cgcaaaccaccat

SEQ ID NO: 77851 - DNA, 13 bp, Artificial Sequence
  Oligonucleotide for detection of SNP TSC0019825
acggtgttttgcg

SEQ ID NO: 77852 - DNA, 13 bp, Artificial Sequence
  Oligonucleotide for detection of SNP TSC0019825
cgcaaaacaccgt

SEQ ID NO: 77853 - DNA, 13 bp, Artificial Sequence
  Oligonucleotide for detection of SNP TSC0019825
acggtggtttgcg

SEQ ID NO: 77854 - DNA, 13 bp, Artificial Sequence
  Oligonucleotide for detection of SNP TSC0019825
cgcaaaccaccgt

SEQ ID NO: 77855 - DNA, 13 bp, Artificial Sequence
  Oligonucleotide for detection of SNP TSC0019825
tgtaaagtattgt

SEQ ID NO: 77856 - DNA, 13 bp, Artificial Sequence
  Oligonucleotide for detection of SNP TSC0019825
acaatactttaca

SEQ ID NO: 77857 - DNA, 13 bp, Artificial Sequence
  Oligonucleotide for detection of SNP TSC0019825
tgtaaattattgt

SEQ ID NO: 77858 - DNA, 13 bp, Artificial Sequence
  Oligonucleotide for detection of SNP TSC0019825
acaataatttaca

SEQ ID NO: 77859 - DNA, 13 bp, Artificial Sequence
  Oligonucleotide for detection of SNP TSC0019825
cgtaaagtattgt

SEQ ID NO: 77860 - DNA, 13 bp, Artificial Sequence
  Oligonucleotide for detection of SNP TSC0019825
acaatactttacg

SEQ ID NO: 77861 - DNA, 13 bp, Artificial Sequence
  Oligonucleotide for detection of SNP TSC0019825
cgtaaattattgt

SEQ ID NO: 77862 - DNA, 13 bp, Artificial Sequence
  Oligonucleotide for detection of SNP TSC0019825
acaataatttacg

SEQ ID NO: 77863 - DNA, 13 bp, Artificial Sequence
  Oligonucleotide for detection of SNP TSC0019825
tgtaaagtatcgt

SEQ ID NO: 77864 - DNA, 13 bp, Artificial Sequence
  Oligonucleotide for detection of SNP TSC0019825
acgatactttaca

SEQ ID NO: 77865 - DNA, 13 bp, Artificial Sequence
  Oligonucleotide for detection of SNP TSC0019825
tgtaaattatcgt

SEQ ID NO: 77866 - DNA, 13 bp, Artificial Sequence
  Oligonucleotide for detection of SNP TSC0019825
acgataatttaca

SEQ ID NO: 77867 - DNA, 13 bp, Artificial Sequence
  Oligonucleotide for detection of SNP TSC0019825
cgtaaagtatcgt

SEQ ID NO: 77868 - DNA, 13 bp, Artificial Sequence
  Oligonucleotide for detection of SNP TSC0019825
acgatactttacg

SEQ ID NO: 77869 - DNA, 13 bp, Artificial Sequence
  Oligonucleotide for detection of SNP TSC0019825
cgtaaattatcgt

SEQ ID NO: 77870 - DNA, 13 bp, Artificial Sequence
  Oligonucleotide for detection of SNP TSC0019825
acgataatttacg

SEQ ID NO: 77871 - DNA, 13 bp, Artificial Sequence
  Oligonucleotide for detection of SNP TSC0019826
tggttttgatgtt

SEQ ID NO: 77872 - DNA, 13 bp, Artificial Sequence
  Oligonucleotide for detection of SNP TSC0019826
aacatcaaaacca

SEQ ID NO: 77873 - DNA, 13 bp, Artificial Sequence
  Oligonucleotide for detection of SNP TSC0019826
tggtttcgatgtt

SEQ ID NO: 77874 - DNA, 13 bp, Artificial Sequence
  Oligonucleotide for detection of SNP TSC0019826
aacatcgaaacca

SEQ ID NO: 77875 - DNA, 13 bp, Artificial Sequence
  Oligonucleotide for detection of SNP TSC0019826
tggttttgacgtt

SEQ ID NO: 77876 - DNA, 13 bp, Artificial Sequence
  Oligonucleotide for detection of SNP TSC0019826
aacgtcaaaacca

SEQ ID NO: 77877 - DNA, 13 bp, Artificial Sequence
  Oligonucleotide for detection of SNP TSC0019826
tggtttcgacgtt

SEQ ID NO: 77878 - DNA, 13 bp, Artificial Sequence
  Oligonucleotide for detection of SNP TSC0019826
aacgtcgaaacca

SEQ ID NO: 77879 - DNA, 13 bp, Artificial Sequence
  Oligonucleotide for detection of SNP TSC0019826
aatgttggagtta

SEQ ID NO: 77880 - DNA, 13 bp, Artificial Sequence
  Oligonucleotide for detection of SNP TSC0019826
taactccaacatt

SEQ ID NO: 77881 - DNA, 13 bp, Artificial Sequence
  Oligonucleotide for detection of SNP TSC0019826
aatgttagagtta

SEQ ID NO: 77882 - DNA, 13 bp, Artificial Sequence
  Oligonucleotide for detection of SNP TSC0019826
taactctaacatt

SEQ ID NO: 77883 - DNA, 13 bp, Artificial Sequence
  Oligonucleotide for detection of SNP TSC0019826
aacgttggagtta

SEQ ID NO: 77884 - DNA, 13 bp, Artificial Sequence
  Oligonucleotide for detection of SNP TSC0019826
taactccaacgtt

SEQ ID NO: 77885 - DNA, 13 bp, Artificial Sequence
  Oligonucleotide for detection of SNP TSC0019826
aacgttagagtta

SEQ ID NO: 77886 - DNA, 13 bp, Artificial Sequence
  Oligonucleotide for detection of SNP TSC0019826
taactctaacgtt

SEQ ID NO: 77887 - DNA, 13 bp, Artificial Sequence
  Oligonucleotide for detection of SNP TSC0019826
aatgtcggagtta

SEQ ID NO: 77888 - DNA, 13 bp, Artificial Sequence
  Oligonucleotide for detection of SNP TSC0019826
taactccgacatt

SEQ ID NO: 77889 - DNA, 13 bp, Artificial Sequence
  Oligonucleotide for detection of SNP TSC0019826
aacgtcggagtta

SEQ ID NO: 77890 - DNA, 13 bp, Artificial Sequence
  Oligonucleotide for detection of SNP TSC0019826
taactccgacgtt

SEQ ID NO: 77891 - DNA, 13 bp, Artificial Sequence
  Oligonucleotide for detection of SNP TSC0019827
ttttgatgttttg

SEQ ID NO: 77892 - DNA, 13 bp, Artificial Sequence
  Oligonucleotide for detection of SNP TSC0019827
caaaacatcaaaa

SEQ ID NO: 77893 - DNA, 13 bp, Artificial Sequence
  Oligonucleotide for detection of SNP TSC0019827
ttttgacgttttg

SEQ ID NO: 77894 - DNA, 13 bp, Artificial Sequence
  Oligonucleotide for detection of SNP TSC0019827
caaaacgtcaaaa

SEQ ID NO: 77895 - DNA, 13 bp, Artificial Sequence
  Oligonucleotide for detection of SNP TSC0019827
taagatgttaaag

SEQ ID NO: 77896 - DNA, 13 bp, Artificial Sequence
  Oligonucleotide for detection of SNP TSC0019827
ctttaacatctta

SEQ ID NO: 77897 - DNA, 13 bp, Artificial Sequence
  Oligonucleotide for detection of SNP TSC0019827
taagatattaaag

SEQ ID NO: 77898 - DNA, 13 bp, Artificial Sequence
  Oligonucleotide for detection of SNP TSC0019827
ctttaatatctta

SEQ ID NO: 77899 - DNA, 13 bp, Artificial Sequence
  Oligonucleotide for detection of SNP TSC0019827
taagacgttaaag

SEQ ID NO: 77900 - DNA, 13 bp, Artificial Sequence
  Oligonucleotide for detection of SNP TSC0019827
ctttaacgtctta

SEQ ID NO: 77901 - DNA, 13 bp, Artificial Sequence
  Oligonucleotide for detection of SNP TSC0019828
tttttgtggtgag

SEQ ID NO: 77902 - DNA, 13 bp, Artificial Sequence
  Oligonucleotide for detection of SNP TSC0019828
ctcaccacaaaaa

SEQ ID NO: 77903 - DNA, 13 bp, Artificial Sequence
  Oligonucleotide for detection of SNP TSC0019828
tttttgcggtgag

SEQ ID NO: 77904 - DNA, 13 bp, Artificial Sequence
  Oligonucleotide for detection of SNP TSC0019828
ctcaccgcaaaaa

SEQ ID NO: 77905 - DNA, 13 bp, Artificial Sequence
  Oligonucleotide for detection of SNP TSC0019828
tttattgtaagag

SEQ ID NO: 77906 - DNA, 13 bp, Artificial Sequence
  Oligonucleotide for detection of SNP TSC0019828
ctcttacaataaa

SEQ ID NO: 77907 - DNA, 13 bp, Artificial Sequence
  Oligonucleotide for detection of SNP TSC0019828
tttattataagag

SEQ ID NO: 77908 - DNA, 13 bp, Artificial Sequence
  Oligonucleotide for detection of SNP TSC0019828
ctcttataataaa

SEQ ID NO: 77909 - DNA, 13 bp, Artificial Sequence
  Oligonucleotide for detection of SNP TSC0019828
tttatcgtaagag

SEQ ID NO: 77910 - DNA, 13 bp, Artificial Sequence
  Oligonucleotide for detection of SNP TSC0019828
ctcttacgataaa

SEQ ID NO: 77911 - DNA, 13 bp, Artificial Sequence
  Oligonucleotide for detection of SNP TSC0019829
agttagtgtgtty

SEQ ID NO: 77912 - DNA, 13 bp, Artificial Sequence
  Oligonucleotide for detection of SNP TSC0019829
raacacactaact

SEQ ID NO: 77913 - DNA, 13 bp, Artificial Sequence
  Oligonucleotide for detection of SNP TSC0019829
agttagcgtgtty

SEQ ID NO: 77914 - DNA, 13 bp, Artificial Sequence
  Oligonucleotide for detection of SNP TSC0019829
raacacgctaact

SEQ ID NO: 77915 - DNA, 13 bp, Artificial Sequence
  Oligonucleotide for detection of SNP TSC0019829
ggatatgttaatt

SEQ ID NO: 77916 - DNA, 13 bp, Artificial Sequence
  Oligonucleotide for detection of SNP TSC0019829
aattaacatatcc

SEQ ID NO: 77917 - DNA, 13 bp, Artificial Sequence
  Oligonucleotide for detection of SNP TSC0019829
ggatatattaatt

SEQ ID NO: 77918 - DNA, 13 bp, Artificial Sequence
  Oligonucleotide for detection of SNP TSC0019829
aattaatatatcc

SEQ ID NO: 77919 - DNA, 13 bp, Artificial Sequence
  Oligonucleotide for detection of SNP TSC0019829
ggatacgttaatt

SEQ ID NO: 77920 - DNA, 13 bp, Artificial Sequence
  Oligonucleotide for detection of SNP TSC0019829
aattaacgtatcc

SEQ ID NO: 77921 - DNA, 13 bp, Artificial Sequence
  Oligonucleotide for detection of SNP TSC0019830
ttaatagttagtg

SEQ ID NO: 77922 - DNA, 13 bp, Artificial Sequence
  Oligonucleotide for detection of SNP TSC0019830
cactaactattaa

SEQ ID NO: 77923 - DNA, 13 bp, Artificial Sequence
  Oligonucleotide for detection of SNP TSC0019830
ttaataattagtg

SEQ ID NO: 77924 - DNA, 13 bp, Artificial Sequence
  Oligonucleotide for detection of SNP TSC0019830
cactaattattaa

SEQ ID NO: 77925 - DNA, 13 bp, Artificial Sequence
  Oligonucleotide for detection of SNP TSC0019832
ggtttatttttty

SEQ ID NO: 77926 - DNA, 13 bp, Artificial Sequence
  Oligonucleotide for detection of SNP TSC0019832
raaaaaataaacc

SEQ ID NO: 77927 - DNA, 13 bp, Artificial Sequence
  Oligonucleotide for detection of SNP TSC0019832
ggtttagttttty

SEQ ID NO: 77928 - DNA, 13 bp, Artificial Sequence
  Oligonucleotide for detection of SNP TSC0019832
raaaaactaaacc

SEQ ID NO: 77929 - DNA, 13 bp, Artificial Sequence
  Oligonucleotide for detection of SNP TSC0019832
ggaagggtgaaty

SEQ ID NO: 77930 - DNA, 13 bp, Artificial Sequence
  Oligonucleotide for detection of SNP TSC0019832
rattcacccttcc

SEQ ID NO: 77931 - DNA, 13 bp, Artificial Sequence
  Oligonucleotide for detection of SNP TSC0019832
ggaaggttgaaty

SEQ ID NO: 77932 - DNA, 13 bp, Artificial Sequence
  Oligonucleotide for detection of SNP TSC0019832
rattcaaccttcc

SEQ ID NO: 77933 - DNA, 13 bp, Artificial Sequence
  Oligonucleotide for detection of SNP TSC0019833
tggaagtgaaaty

SEQ ID NO: 77934 - DNA, 13 bp, Artificial Sequence
  Oligonucleotide for detection of SNP TSC0019833
ratttcacttcca

SEQ ID NO: 77935 - DNA, 13 bp, Artificial Sequence
  Oligonucleotide for detection of SNP TSC0019833
tggaagcgaaaty

SEQ ID NO: 77936 - DNA, 13 bp, Artificial Sequence
  Oligonucleotide for detection of SNP TSC0019833
ratttcgcttcca

SEQ ID NO: 77937 - DNA, 13 bp, Artificial Sequence
  Oligonucleotide for detection of SNP TSC0019833
ggttttattttta

SEQ ID NO: 77938 - DNA, 13 bp, Artificial Sequence
  Oligonucleotide for detection of SNP TSC0019833
taaaaataaaacc

SEQ ID NO: 77939 - DNA, 13 bp, Artificial Sequence
  Oligonucleotide for detection of SNP TSC0019834
tgttttgggggag

SEQ ID NO: 77940 - DNA, 13 bp, Artificial Sequence
  Oligonucleotide for detection of SNP TSC0019834
ctcccccaaaaca

SEQ ID NO: 77941 - DNA, 13 bp, Artificial Sequence
  Oligonucleotide for detection of SNP TSC0019834
tgtttttggggag

SEQ ID NO: 77942 - DNA, 13 bp, Artificial Sequence
  Oligonucleotide for detection of SNP TSC0019834
ctccccaaaaaca

SEQ ID NO: 77943 - DNA, 13 bp, Artificial Sequence
  Oligonucleotide for detection of SNP TSC0019834
tgtttcgggggag

SEQ ID NO: 77944 - DNA, 13 bp, Artificial Sequence
  Oligonucleotide for detection of SNP TSC0019834
ctcccccgaaaca

SEQ ID NO: 77945 - DNA, 13 bp, Artificial Sequence
  Oligonucleotide for detection of SNP TSC0019834
tttttttggggta

SEQ ID NO: 77946 - DNA, 13 bp, Artificial Sequence
  Oligonucleotide for detection of SNP TSC0019834
taccccaaaaaaa

SEQ ID NO: 77947 - DNA, 13 bp, Artificial Sequence
  Oligonucleotide for detection of SNP TSC0019834
ttttttaggggta

SEQ ID NO: 77948 - DNA, 13 bp, Artificial Sequence
  Oligonucleotide for detection of SNP TSC0019834
tacccctaaaaaa

SEQ ID NO: 77949 - DNA, 13 bp, Artificial Sequence
  Oligonucleotide for detection of SNP TSC0019834
ttttttcggggta

SEQ ID NO: 77950 - DNA, 13 bp, Artificial Sequence
  Oligonucleotide for detection of SNP TSC0019834
taccccgaaaaaa

SEQ ID NO: 77951 - DNA, 13 bp, Artificial Sequence
  Oligonucleotide for detection of SNP TSC0019835
gttaaagaataty

SEQ ID NO: 77952 - DNA, 13 bp, Artificial Sequence
  Oligonucleotide for detection of SNP TSC0019835
ratattctttaac

SEQ ID NO: 77953 - DNA, 13 bp, Artificial Sequence
  Oligonucleotide for detection of SNP TSC0019835
gttaaataataty

SEQ ID NO: 77954 - DNA, 13 bp, Artificial Sequence
  Oligonucleotide for detection of SNP TSC0019835
ratattatttaac

SEQ ID NO: 77955 - DNA, 13 bp, Artificial Sequence
  Oligonucleotide for detection of SNP TSC0019835
gatattttttggy

SEQ ID NO: 77956 - DNA, 13 bp, Artificial Sequence
  Oligonucleotide for detection of SNP TSC0019835
rccaaaaaatatc

SEQ ID NO: 77957 - DNA, 13 bp, Artificial Sequence
  Oligonucleotide for detection of SNP TSC0019835
gatattatttggy

SEQ ID NO: 77958 - DNA, 13 bp, Artificial Sequence
  Oligonucleotide for detection of SNP TSC0019835
rccaaataatatc

SEQ ID NO: 77959 - DNA, 13 bp, Artificial Sequence
  Oligonucleotide for detection of SNP TSC0019837
tatattgtttaaa

SEQ ID NO: 77960 - DNA, 13 bp, Artificial Sequence
  Oligonucleotide for detection of SNP TSC0019837
tttaaacaatata

SEQ ID NO: 77961 - DNA, 13 bp, Artificial Sequence
  Oligonucleotide for detection of SNP TSC0019837
tatattttttaaa

SEQ ID NO: 77962 - DNA, 13 bp, Artificial Sequence
  Oligonucleotide for detection of SNP TSC0019837
tttaaaaaatata

SEQ ID NO: 77963 - DNA, 13 bp, Artificial Sequence
  Oligonucleotide for detection of SNP TSC0019837
tatatcgtttaaa

SEQ ID NO: 77964 - DNA, 13 bp, Artificial Sequence
  Oligonucleotide for detection of SNP TSC0019837
tttaaacgatata

SEQ ID NO: 77965 - DNA, 13 bp, Artificial Sequence
  Oligonucleotide for detection of SNP TSC0019837
tttaaatgatgtg

SEQ ID NO: 77966 - DNA, 13 bp, Artificial Sequence
  Oligonucleotide for detection of SNP TSC0019837
cacatcatttaaa

SEQ ID NO: 77967 - DNA, 13 bp, Artificial Sequence
  Oligonucleotide for detection of SNP TSC0019837
tttaaaagatgtg

SEQ ID NO: 77968 - DNA, 13 bp, Artificial Sequence
  Oligonucleotide for detection of SNP TSC0019837
cacatcttttaaa

SEQ ID NO: 77969 - DNA, 13 bp, Artificial Sequence
  Oligonucleotide for detection of SNP TSC0019837
tttaaacgatgtg

SEQ ID NO: 77970 - DNA, 13 bp, Artificial Sequence
  Oligonucleotide for detection of SNP TSC0019837
cacatcgtttaaa

SEQ ID NO: 77971 - DNA, 13 bp, Artificial Sequence
  Oligonucleotide for detection of SNP TSC0019845
agttggggggggg

SEQ ID NO: 77972 - DNA, 13 bp, Artificial Sequence
  Oligonucleotide for detection of SNP TSC0019845
cccccccccaact

SEQ ID NO: 77973 - DNA, 13 bp, Artificial Sequence
  Oligonucleotide for detection of SNP TSC0019845
agttggtgggggg

SEQ ID NO: 77974 - DNA, 13 bp, Artificial Sequence
  Oligonucleotide for detection of SNP TSC0019845
ccccccaccaact

SEQ ID NO: 77975 - DNA, 13 bp, Artificial Sequence
  Oligonucleotide for detection of SNP TSC0019845
agtcggggggggg

SEQ ID NO: 77976 - DNA, 13 bp, Artificial Sequence
  Oligonucleotide for detection of SNP TSC0019845
cccccccccgact

SEQ ID NO: 77977 - DNA, 13 bp, Artificial Sequence
  Oligonucleotide for detection of SNP TSC0019845
agtcggtgggggg

SEQ ID NO: 77978 - DNA, 13 bp, Artificial Sequence
  Oligonucleotide for detection of SNP TSC0019845
ccccccaccgact

SEQ ID NO: 77979 - DNA, 13 bp, Artificial Sequence
  Oligonucleotide for detection of SNP TSC0019845
ttttttttcggtt

SEQ ID NO: 77980 - DNA, 13 bp, Artificial Sequence
  Oligonucleotide for detection of SNP TSC0019845
aaccgaaaaaaaa

SEQ ID NO: 77981 - DNA, 13 bp, Artificial Sequence
  Oligonucleotide for detection of SNP TSC0019845
ttttttatcggtt

SEQ ID NO: 77982 - DNA, 13 bp, Artificial Sequence
  Oligonucleotide for detection of SNP TSC0019845
aaccgataaaaaa

SEQ ID NO: 77983 - DNA, 13 bp, Artificial Sequence
  Oligonucleotide for detection of SNP TSC0019848
agtaataggggaa

SEQ ID NO: 77984 - DNA, 13 bp, Artificial Sequence
  Oligonucleotide for detection of SNP TSC0019848
ttcccctattact

SEQ ID NO: 77985 - DNA, 13 bp, Artificial Sequence
  Oligonucleotide for detection of SNP TSC0019848
agtaattggggaa

SEQ ID NO: 77986 - DNA, 13 bp, Artificial Sequence
  Oligonucleotide for detection of SNP TSC0019848
ttccccaattact

SEQ ID NO: 77987 - DNA, 13 bp, Artificial Sequence
  Oligonucleotide for detection of SNP TSC0019849
gttttttgagtag

SEQ ID NO: 77988 - DNA, 13 bp, Artificial Sequence
  Oligonucleotide for detection of SNP TSC0019849
ctactcaaaaaac

SEQ ID NO: 77989 - DNA, 13 bp, Artificial Sequence
  Oligonucleotide for detection of SNP TSC0019849
gtttttcgagtag

SEQ ID NO: 77990 - DNA, 13 bp, Artificial Sequence
  Oligonucleotide for detection of SNP TSC0019849
ctactcgaaaaac

SEQ ID NO: 77991 - DNA, 13 bp, Artificial Sequence
  Oligonucleotide for detection of SNP TSC0019849
ttatttgggagay

SEQ ID NO: 77992 - DNA, 13 bp, Artificial Sequence
  Oligonucleotide for detection of SNP TSC0019849
rtctcccaaataa

SEQ ID NO: 77993 - DNA, 13 bp, Artificial Sequence
  Oligonucleotide for detection of SNP TSC0019849
ttatttaggagay

SEQ ID NO: 77994 - DNA, 13 bp, Artificial Sequence
  Oligonucleotide for detection of SNP TSC0019849
rtctcctaaataa

SEQ ID NO: 77995 - DNA, 13 bp, Artificial Sequence
  Oligonucleotide for detection of SNP TSC0019849
ttattcgggagay

SEQ ID NO: 77996 - DNA, 13 bp, Artificial Sequence
  Oligonucleotide for detection of SNP TSC0019849
rtctcccgaataa

SEQ ID NO: 77997 - DNA, 13 bp, Artificial Sequence
  Oligonucleotide for detection of SNP TSC0019851
atgttagagggga

SEQ ID NO: 77998 - DNA, 13 bp, Artificial Sequence
  Oligonucleotide for detection of SNP TSC0019851
tcccctctaacat

SEQ ID NO: 77999 - DNA, 13 bp, Artificial Sequence
  Oligonucleotide for detection of SNP TSC0019851
atgttaaagggga

SEQ ID NO: 78000 - DNA, 13 bp, Artificial Sequence
  Oligonucleotide for detection of SNP TSC0019851
tcccctttaacat

SEQ ID NO: 78001 - DNA, 13 bp, Artificial Sequence
  Oligonucleotide for detection of SNP TSC0019852
tttaaagttttta

SEQ ID NO: 78002 - DNA, 13 bp, Artificial Sequence
  Oligonucleotide for detection of SNP TSC0019852
taaaaactttaaa

SEQ ID NO: 78003 - DNA, 13 bp, Artificial Sequence
  Oligonucleotide for detection of SNP TSC0019853
tattatagtattt

SEQ ID NO: 78004 - DNA, 13 bp, Artificial Sequence
  Oligonucleotide for detection of SNP TSC0019853
aaatactataata

SEQ ID NO: 78005 - DNA, 13 bp, Artificial Sequence
  Oligonucleotide for detection of SNP TSC0019853
tattattgtattt

SEQ ID NO: 78006 - DNA, 13 bp, Artificial Sequence
  Oligonucleotide for detection of SNP TSC0019853
aaatacaataata

SEQ ID NO: 78007 - DNA, 13 bp, Artificial Sequence
  Oligonucleotide for detection of SNP TSC0019853
aaatattatgata

SEQ ID NO: 78008 - DNA, 13 bp, Artificial Sequence
  Oligonucleotide for detection of SNP TSC0019853
tatcataatattt

SEQ ID NO: 78009 - DNA, 13 bp, Artificial Sequence
  Oligonucleotide for detection of SNP TSC0019853
aaatataatgata

SEQ ID NO: 78010 - DNA, 13 bp, Artificial Sequence
  Oligonucleotide for detection of SNP TSC0019853
tatcattatattt

SEQ ID NO: 78011 - DNA, 13 bp, Artificial Sequence
  Oligonucleotide for detection of SNP TSC0019862
tcgaggtgggtgg

SEQ ID NO: 78012 - DNA, 13 bp, Artificial Sequence
  Oligonucleotide for detection of SNP TSC0019862
ccacccacctcga

SEQ ID NO: 78013 - DNA, 13 bp, Artificial Sequence
  Oligonucleotide for detection of SNP TSC0019862
tcgaggcgggtgg

SEQ ID NO: 78014 - DNA, 13 bp, Artificial Sequence
  Oligonucleotide for detection of SNP TSC0019862
ccacccgcctcga

SEQ ID NO: 78015 - DNA, 13 bp, Artificial Sequence
  Oligonucleotide for detection of SNP TSC0019862
ttatttattttgg

SEQ ID NO: 78016 - DNA, 13 bp, Artificial Sequence
  Oligonucleotide for detection of SNP TSC0019862
ccaaaataaataa

SEQ ID NO: 78017 - DNA, 13 bp, Artificial Sequence
  Oligonucleotide for detection of SNP TSC0019862
ttattcgttttgg

SEQ ID NO: 78018 - DNA, 13 bp, Artificial Sequence
  Oligonucleotide for detection of SNP TSC0019862
ccaaaacgaataa

SEQ ID NO: 78019 - DNA, 13 bp, Artificial Sequence
  Oligonucleotide for detection of SNP TSC0019862
ttatttatttcgg

SEQ ID NO: 78020 - DNA, 13 bp, Artificial Sequence
  Oligonucleotide for detection of SNP TSC0019862
ccgaaataaataa

SEQ ID NO: 78021 - DNA, 13 bp, Artificial Sequence
  Oligonucleotide for detection of SNP TSC0019862
ttatttgtttcgg

SEQ ID NO: 78022 - DNA, 13 bp, Artificial Sequence
  Oligonucleotide for detection of SNP TSC0019862
ccgaaacaaataa

SEQ ID NO: 78023 - DNA, 13 bp, Artificial Sequence
  Oligonucleotide for detection of SNP TSC0019862
ttattcgtttcgg

SEQ ID NO: 78024 - DNA, 13 bp, Artificial Sequence
  Oligonucleotide for detection of SNP TSC0019862
ccgaaacgaataa

SEQ ID NO: 78025 - DNA, 13 bp, Artificial Sequence
  Oligonucleotide for detection of SNP TSC0019863
aatatgagtttga

SEQ ID NO: 78026 - DNA, 13 bp, Artificial Sequence
  Oligonucleotide for detection of SNP TSC0019863
tcaaactcatatt

SEQ ID NO: 78027 - DNA, 13 bp, Artificial Sequence
  Oligonucleotide for detection of SNP TSC0019863
aatatgggtttga

SEQ ID NO: 78028 - DNA, 13 bp, Artificial Sequence
  Oligonucleotide for detection of SNP TSC0019863
tcaaacccatatt

SEQ ID NO: 78029 - DNA, 13 bp, Artificial Sequence
  Oligonucleotide for detection of SNP TSC0019864
ttttgatggtaat

SEQ ID NO: 78030 - DNA, 13 bp, Artificial Sequence
  Oligonucleotide for detection of SNP TSC0019864
attaccatcaaaa

SEQ ID NO: 78031 - DNA, 13 bp, Artificial Sequence
  Oligonucleotide for detection of SNP TSC0019864
ttttgacggtaat

SEQ ID NO: 78032 - DNA, 13 bp, Artificial Sequence
  Oligonucleotide for detection of SNP TSC0019864
attaccgtcaaaa

SEQ ID NO: 78033 - DNA, 13 bp, Artificial Sequence
  Oligonucleotide for detection of SNP TSC0019864
attgttgttagaa

SEQ ID NO: 78034 - DNA, 13 bp, Artificial Sequence
  Oligonucleotide for detection of SNP TSC0019864
ttctaacaacaat

SEQ ID NO: 78035 - DNA, 13 bp, Artificial Sequence
  Oligonucleotide for detection of SNP TSC0019864
attgttattagaa

SEQ ID NO: 78036 - DNA, 13 bp, Artificial Sequence
  Oligonucleotide for detection of SNP TSC0019864
ttctaataacaat

SEQ ID NO: 78037 - DNA, 13 bp, Artificial Sequence
  Oligonucleotide for detection of SNP TSC0019864
attgtcgttagaa

SEQ ID NO: 78038 - DNA, 13 bp, Artificial Sequence
  Oligonucleotide for detection of SNP TSC0019864
ttctaacgacaat

SEQ ID NO: 78039 - DNA, 13 bp, Artificial Sequence
  Oligonucleotide for detection of SNP TSC0019865
gggaaggttgata

SEQ ID NO: 78040 - DNA, 13 bp, Artificial Sequence
  Oligonucleotide for detection of SNP TSC0019865
tatcaaccttccc

SEQ ID NO: 78041 - DNA, 13 bp, Artificial Sequence
  Oligonucleotide for detection of SNP TSC0019865
gggaagattgata

SEQ ID NO: 78042 - DNA, 13 bp, Artificial Sequence
  Oligonucleotide for detection of SNP TSC0019865
tatcaatcttccc

SEQ ID NO: 78043 - DNA, 13 bp, Artificial Sequence
  Oligonucleotide for detection of SNP TSC0019866
tgtttgtaagaaa

SEQ ID NO: 78044 - DNA, 13 bp, Artificial Sequence
  Oligonucleotide for detection of SNP TSC0019866
tttcttacaaaca

SEQ ID NO: 78045 - DNA, 13 bp, Artificial Sequence
  Oligonucleotide for detection of SNP TSC0019866
tgtttgaaagaaa

SEQ ID NO: 78046 - DNA, 13 bp, Artificial Sequence
  Oligonucleotide for detection of SNP TSC0019866
tttctttcaaaca

SEQ ID NO: 78047 - DNA, 13 bp, Artificial Sequence
  Oligonucleotide for detection of SNP TSC0019867
tttttaattggtt

SEQ ID NO: 78048 - DNA, 13 bp, Artificial Sequence
  Oligonucleotide for detection of SNP TSC0019867
aaccaattaaaaa

SEQ ID NO: 78049 - DNA, 13 bp, Artificial Sequence
  Oligonucleotide for detection of SNP TSC0019867
tttttatttggtt

SEQ ID NO: 78050 - DNA, 13 bp, Artificial Sequence
  Oligonucleotide for detection of SNP TSC0019867
aaccaaataaaaa

SEQ ID NO: 78051 - DNA, 13 bp, Artificial Sequence
  Oligonucleotide for detection of SNP TSC0019867
agttaattggaaa

SEQ ID NO: 78052 - DNA, 13 bp, Artificial Sequence
  Oligonucleotide for detection of SNP TSC0019867
tttccaattaact

SEQ ID NO: 78053 - DNA, 13 bp, Artificial Sequence
  Oligonucleotide for detection of SNP TSC0019867
agttaaatggaaa

SEQ ID NO: 78054 - DNA, 13 bp, Artificial Sequence
  Oligonucleotide for detection of SNP TSC0019867
tttccatttaact

SEQ ID NO: 78055 - DNA, 13 bp, Artificial Sequence
  Oligonucleotide for detection of SNP TSC0019871
tgaaggtataatt

SEQ ID NO: 78056 - DNA, 13 bp, Artificial Sequence
  Oligonucleotide for detection of SNP TSC0019871
aattataccttca

SEQ ID NO: 78057 - DNA, 13 bp, Artificial Sequence
  Oligonucleotide for detection of SNP TSC0019871
tgaaggaataatt

SEQ ID NO: 78058 - DNA, 13 bp, Artificial Sequence
  Oligonucleotide for detection of SNP TSC0019871
aattattccttca

SEQ ID NO: 78059 - DNA, 13 bp, Artificial Sequence
  Oligonucleotide for detection of SNP TSC0019872
tttataatgttty

SEQ ID NO: 78060 - DNA, 13 bp, Artificial Sequence
  Oligonucleotide for detection of SNP TSC0019872
raaacattataaa

SEQ ID NO: 78061 - DNA, 13 bp, Artificial Sequence
  Oligonucleotide for detection of SNP TSC0019872
tttatagtgttty

SEQ ID NO: 78062 - DNA, 13 bp, Artificial Sequence
  Oligonucleotide for detection of SNP TSC0019872
raaacactataaa

SEQ ID NO: 78063 - DNA, 13 bp, Artificial Sequence
  Oligonucleotide for detection of SNP TSC0019875
aaaatagtgtgta

SEQ ID NO: 78064 - DNA, 13 bp, Artificial Sequence
  Oligonucleotide for detection of SNP TSC0019875
tacacactatttt

SEQ ID NO: 78065 - DNA, 13 bp, Artificial Sequence
  Oligonucleotide for detection of SNP TSC0019875
aaaataatgtgta

SEQ ID NO: 78066 - DNA, 13 bp, Artificial Sequence
  Oligonucleotide for detection of SNP TSC0019875
tacacattatttt

SEQ ID NO: 78067 - DNA, 13 bp, Artificial Sequence
  Oligonucleotide for detection of SNP TSC0019876
taatagatattat

SEQ ID NO: 78068 - DNA, 13 bp, Artificial Sequence
  Oligonucleotide for detection of SNP TSC0019876
ataatatctatta

SEQ ID NO: 78069 - DNA, 13 bp, Artificial Sequence
  Oligonucleotide for detection of SNP TSC0019876
taatagttattat

SEQ ID NO: 78070 - DNA, 13 bp, Artificial Sequence
  Oligonucleotide for detection of SNP TSC0019876
ataataactatta

SEQ ID NO: 78071 - DNA, 13 bp, Artificial Sequence
  Oligonucleotide for detection of SNP TSC0019876
atggtgtttattg

SEQ ID NO: 78072 - DNA, 13 bp, Artificial Sequence
  Oligonucleotide for detection of SNP TSC0019876
caataaacaccat

SEQ ID NO: 78073 - DNA, 13 bp, Artificial Sequence
  Oligonucleotide for detection of SNP TSC0019876
atggtggttattg

SEQ ID NO: 78074 - DNA, 13 bp, Artificial Sequence
  Oligonucleotide for detection of SNP TSC0019876
caataaccaccat

SEQ ID NO: 78075 - DNA, 13 bp, Artificial Sequence
  Oligonucleotide for detection of SNP TSC0019877
tattatattttat

SEQ ID NO: 78076 - DNA, 13 bp, Artificial Sequence
  Oligonucleotide for detection of SNP TSC0019877
ataaaatataata

SEQ ID NO: 78077 - DNA, 13 bp, Artificial Sequence
  Oligonucleotide for detection of SNP TSC0019877
tattatgttttat

SEQ ID NO: 78078 - DNA, 13 bp, Artificial Sequence
  Oligonucleotide for detection of SNP TSC0019877
ataaaacataata

SEQ ID NO: 78079 - DNA, 13 bp, Artificial Sequence
  Oligonucleotide for detection of SNP TSC0019877
tattacgttttat

SEQ ID NO: 78080 - DNA, 13 bp, Artificial Sequence
  Oligonucleotide for detection of SNP TSC0019877
ataaaacgtaata

SEQ ID NO: 78081 - DNA, 13 bp, Artificial Sequence
  Oligonucleotide for detection of SNP TSC0019877
atgaaatgtaata

SEQ ID NO: 78082 - DNA, 13 bp, Artificial Sequence
  Oligonucleotide for detection of SNP TSC0019877
tattacatttcat

SEQ ID NO: 78083 - DNA, 13 bp, Artificial Sequence
  Oligonucleotide for detection of SNP TSC0019877
atgaaacgtaata

SEQ ID NO: 78084 - DNA, 13 bp, Artificial Sequence
  Oligonucleotide for detection of SNP TSC0019877
tattacgtttcat

SEQ ID NO: 78085 - DNA, 13 bp, Artificial Sequence
  Oligonucleotide for detection of SNP TSC0019878
aggtaggggaatt

SEQ ID NO: 78086 - DNA, 13 bp, Artificial Sequence
  Oligonucleotide for detection of SNP TSC0019878
aattcccctacct

SEQ ID NO: 78087 - DNA, 13 bp, Artificial Sequence
  Oligonucleotide for detection of SNP TSC0019878
aggtagaggaatt

SEQ ID NO: 78088 - DNA, 13 bp, Artificial Sequence
  Oligonucleotide for detection of SNP TSC0019878
aattcctctacct

SEQ ID NO: 78089 - DNA, 13 bp, Artificial Sequence
  Oligonucleotide for detection of SNP TSC0019879
tagtggatattty

SEQ ID NO: 78090 - DNA, 13 bp, Artificial Sequence
  Oligonucleotide for detection of SNP TSC0019879
raaatatccacta

SEQ ID NO: 78091 - DNA, 13 bp, Artificial Sequence
  Oligonucleotide for detection of SNP TSC0019879
tagtggttattty

SEQ ID NO: 78092 - DNA, 13 bp, Artificial Sequence
  Oligonucleotide for detection of SNP TSC0019879
raaataaccacta

SEQ ID NO: 78093 - DNA, 13 bp, Artificial Sequence
  Oligonucleotide for detection of SNP TSC0019879
gggatatttatta

SEQ ID NO: 78094 - DNA, 13 bp, Artificial Sequence
  Oligonucleotide for detection of SNP TSC0019879
taataaatatccc

SEQ ID NO: 78095 - DNA, 13 bp, Artificial Sequence
  Oligonucleotide for detection of SNP TSC0019879
gggataattatta

SEQ ID NO: 78096 - DNA, 13 bp, Artificial Sequence
  Oligonucleotide for detection of SNP TSC0019879
taataattatccc

SEQ ID NO: 78097 - DNA, 13 bp, Artificial Sequence
  Oligonucleotide for detection of SNP TSC0019880
gtaaaggtaagtg

SEQ ID NO: 78098 - DNA, 13 bp, Artificial Sequence
  Oligonucleotide for detection of SNP TSC0019880
cacttacctttac

SEQ ID NO: 78099 - DNA, 13 bp, Artificial Sequence
  Oligonucleotide for detection of SNP TSC0019880
gtaaagataagtg

SEQ ID NO: 78100 - DNA, 13 bp, Artificial Sequence
  Oligonucleotide for detection of SNP TSC0019880
cacttatctttac

SEQ ID NO: 78101 - DNA, 13 bp, Artificial Sequence
  Oligonucleotide for detection of SNP TSC0019886
ggaagtttaggtg

SEQ ID NO: 78102 - DNA, 13 bp, Artificial Sequence
  Oligonucleotide for detection of SNP TSC0019886
cacctaaacttcc

SEQ ID NO: 78103 - DNA, 13 bp, Artificial Sequence
  Oligonucleotide for detection of SNP TSC0019886
ggaagtgtaggtg

SEQ ID NO: 78104 - DNA, 13 bp, Artificial Sequence
  Oligonucleotide for detection of SNP TSC0019886
cacctacacttcc

SEQ ID NO: 78105 - DNA, 13 bp, Artificial Sequence
  Oligonucleotide for detection of SNP TSC0019886
ggaagcgtaggtg

SEQ ID NO: 78106 - DNA, 13 bp, Artificial Sequence
  Oligonucleotide for detection of SNP TSC0019886
cacctacgcttcc

SEQ ID NO: 78107 - DNA, 13 bp, Artificial Sequence
  Oligonucleotide for detection of SNP TSC0019886
tatttgggtttty

SEQ ID NO: 78108 - DNA, 13 bp, Artificial Sequence
  Oligonucleotide for detection of SNP TSC0019886
raaaacccaaata

SEQ ID NO: 78109 - DNA, 13 bp, Artificial Sequence
  Oligonucleotide for detection of SNP TSC0019886
tatttgtgtttty

SEQ ID NO: 78110 - DNA, 13 bp, Artificial Sequence
  Oligonucleotide for detection of SNP TSC0019886
raaaacacaaata

SEQ ID NO: 78111 - DNA, 13 bp, Artificial Sequence
  Oligonucleotide for detection of SNP TSC0019886
tatttgcgtttty

SEQ ID NO: 78112 - DNA, 13 bp, Artificial Sequence
  Oligonucleotide for detection of SNP TSC0019886
raaaacgcaaata

SEQ ID NO: 78113 - DNA, 13 bp, Artificial Sequence
  Oligonucleotide for detection of SNP TSC0019887
atgttgttttgty

SEQ ID NO: 78114 - DNA, 13 bp, Artificial Sequence
  Oligonucleotide for detection of SNP TSC0019887
racaaaacaacat

SEQ ID NO: 78115 - DNA, 13 bp, Artificial Sequence
  Oligonucleotide for detection of SNP TSC0019887
atgttggtttgty

SEQ ID NO: 78116 - DNA, 13 bp, Artificial Sequence
  Oligonucleotide for detection of SNP TSC0019887
racaaaccaacat

SEQ ID NO: 78117 - DNA, 13 bp, Artificial Sequence
  Oligonucleotide for detection of SNP TSC0019887
ggtagggtagtat

SEQ ID NO: 78118 - DNA, 13 bp, Artificial Sequence
  Oligonucleotide for detection of SNP TSC0019887
atactaccctacc

SEQ ID NO: 78119 - DNA, 13 bp, Artificial Sequence
  Oligonucleotide for detection of SNP TSC0019887
ggtaggttagtat

SEQ ID NO: 78120 - DNA, 13 bp, Artificial Sequence
  Oligonucleotide for detection of SNP TSC0019887
atactaacctacc

SEQ ID NO: 78121 - DNA, 13 bp, Artificial Sequence
  Oligonucleotide for detection of SNP TSC0019889
agggaaatttttt

SEQ ID NO: 78122 - DNA, 13 bp, Artificial Sequence
  Oligonucleotide for detection of SNP TSC0019889
aaaaaatttccct

SEQ ID NO: 78123 - DNA, 13 bp, Artificial Sequence
  Oligonucleotide for detection of SNP TSC0019889
agggaagtttttt

SEQ ID NO: 78124 - DNA, 13 bp, Artificial Sequence
  Oligonucleotide for detection of SNP TSC0019889
aaaaaacttccct

SEQ ID NO: 78125 - DNA, 13 bp, Artificial Sequence
  Oligonucleotide for detection of SNP TSC0019893
attgtatgtttag

SEQ ID NO: 78126 - DNA, 13 bp, Artificial Sequence
  Oligonucleotide for detection of SNP TSC0019893
ctaaacatacaat

SEQ ID NO: 78127 - DNA, 13 bp, Artificial Sequence
  Oligonucleotide for detection of SNP TSC0019893
attgtacgtttag

SEQ ID NO: 78128 - DNA, 13 bp, Artificial Sequence
  Oligonucleotide for detection of SNP TSC0019893
ctaaacgtacaat

SEQ ID NO: 78129 - DNA, 13 bp, Artificial Sequence
  Oligonucleotide for detection of SNP TSC0019893
ttgagtgtgtaat

SEQ ID NO: 78130 - DNA, 13 bp, Artificial Sequence
  Oligonucleotide for detection of SNP TSC0019893
attacacactcaa

SEQ ID NO: 78131 - DNA, 13 bp, Artificial Sequence
  Oligonucleotide for detection of SNP TSC0019893
ttgagtatgtaat

SEQ ID NO: 78132 - DNA, 13 bp, Artificial Sequence
  Oligonucleotide for detection of SNP TSC0019893
attacatactcaa

SEQ ID NO: 78133 - DNA, 13 bp, Artificial Sequence
  Oligonucleotide for detection of SNP TSC0019893
ttgagcgtgtaat

SEQ ID NO: 78134 - DNA, 13 bp, Artificial Sequence
  Oligonucleotide for detection of SNP TSC0019893
attacacgctcaa

SEQ ID NO: 78135 - DNA, 13 bp, Artificial Sequence
  Oligonucleotide for detection of SNP TSC0019894
gagaagataatgy

SEQ ID NO: 78136 - DNA, 13 bp, Artificial Sequence
  Oligonucleotide for detection of SNP TSC0019894
rcattatcttctc

SEQ ID NO: 78137 - DNA, 13 bp, Artificial Sequence
  Oligonucleotide for detection of SNP TSC0019894
gagaaggtaatgy

SEQ ID NO: 78138 - DNA, 13 bp, Artificial Sequence
  Oligonucleotide for detection of SNP TSC0019894
rcattaccttctc

SEQ ID NO: 78139 - DNA, 13 bp, Artificial Sequence
  Oligonucleotide for detection of SNP TSC0019895
tttgtatattaty

SEQ ID NO: 78140 - DNA, 13 bp, Artificial Sequence
  Oligonucleotide for detection of SNP TSC0019895
rataatatacaaa

SEQ ID NO: 78141 - DNA, 13 bp, Artificial Sequence
  Oligonucleotide for detection of SNP TSC0019895
tttgtagattaty

SEQ ID NO: 78142 - DNA, 13 bp, Artificial Sequence
  Oligonucleotide for detection of SNP TSC0019895
rataatctacaaa

SEQ ID NO: 78143 - DNA, 13 bp, Artificial Sequence
  Oligonucleotide for detection of SNP TSC0019895
ggtggtgtgtaag

SEQ ID NO: 78144 - DNA, 13 bp, Artificial Sequence
  Oligonucleotide for detection of SNP TSC0019895
cttacacaccacc

SEQ ID NO: 78145 - DNA, 13 bp, Artificial Sequence
  Oligonucleotide for detection of SNP TSC0019895
ggtggtttgtaag

SEQ ID NO: 78146 - DNA, 13 bp, Artificial Sequence
  Oligonucleotide for detection of SNP TSC0019895
cttacaaaccacc

SEQ ID NO: 78147 - DNA, 13 bp, Artificial Sequence
  Oligonucleotide for detection of SNP TSC0019898
tagtaatgtgtag

SEQ ID NO: 78148 - DNA, 13 bp, Artificial Sequence
  Oligonucleotide for detection of SNP TSC0019898
ctacacattacta

SEQ ID NO: 78149 - DNA, 13 bp, Artificial Sequence
  Oligonucleotide for detection of SNP TSC0019898
tagtaacgtgtag

SEQ ID NO: 78150 - DNA, 13 bp, Artificial Sequence
  Oligonucleotide for detection of SNP TSC0019898
ctacacgttacta

SEQ ID NO: 78151 - DNA, 13 bp, Artificial Sequence
  Oligonucleotide for detection of SNP TSC0019898
ttatatgttatta

SEQ ID NO: 78152 - DNA, 13 bp, Artificial Sequence
  Oligonucleotide for detection of SNP TSC0019898
taataacatataa

SEQ ID NO: 78153 - DNA, 13 bp, Artificial Sequence
  Oligonucleotide for detection of SNP TSC0019898
ttatatattatta

SEQ ID NO: 78154 - DNA, 13 bp, Artificial Sequence
  Oligonucleotide for detection of SNP TSC0019898
taataatatataa

SEQ ID NO: 78155 - DNA, 13 bp, Artificial Sequence
  Oligonucleotide for detection of SNP TSC0019898
ttatacgttatta

SEQ ID NO: 78156 - DNA, 13 bp, Artificial Sequence
  Oligonucleotide for detection of SNP TSC0019898
taataacgtataa

SEQ ID NO: 78157 - DNA, 13 bp, Artificial Sequence
  Oligonucleotide for detection of SNP TSC0019899
agaattaatataa

SEQ ID NO: 78158 - DNA, 13 bp, Artificial Sequence
  Oligonucleotide for detection of SNP TSC0019899
ttatattaattct

SEQ ID NO: 78159 - DNA, 13 bp, Artificial Sequence
  Oligonucleotide for detection of SNP TSC0019899
agaattgatataa

SEQ ID NO: 78160 - DNA, 13 bp, Artificial Sequence
  Oligonucleotide for detection of SNP TSC0019899
ttatatcaattct

SEQ ID NO: 78161 - DNA, 13 bp, Artificial Sequence
  Oligonucleotide for detection of SNP TSC0019899
agaatcgatataa

SEQ ID NO: 78162 - DNA, 13 bp, Artificial Sequence
  Oligonucleotide for detection of SNP TSC0019899
ttatatcgattct

SEQ ID NO: 78163 - DNA, 13 bp, Artificial Sequence
  Oligonucleotide for detection of SNP TSC0019899
ttgtgttggtttt

SEQ ID NO: 78164 - DNA, 13 bp, Artificial Sequence
  Oligonucleotide for detection of SNP TSC0019899
aaaaccaacacaa

SEQ ID NO: 78165 - DNA, 13 bp, Artificial Sequence
  Oligonucleotide for detection of SNP TSC0019899
ttgtgtcggtttt

SEQ ID NO: 78166 - DNA, 13 bp, Artificial Sequence
  Oligonucleotide for detection of SNP TSC0019899
aaaaccgacacaa

SEQ ID NO: 78167 - DNA, 13 bp, Artificial Sequence
  Oligonucleotide for detection of SNP TSC0019902
atgttagagtttt

SEQ ID NO: 78168 - DNA, 13 bp, Artificial Sequence
  Oligonucleotide for detection of SNP TSC0019902
aaaactctaacat

SEQ ID NO: 78169 - DNA, 13 bp, Artificial Sequence
  Oligonucleotide for detection of SNP TSC0019902
atgttaaagtttt

SEQ ID NO: 78170 - DNA, 13 bp, Artificial Sequence
  Oligonucleotide for detection of SNP TSC0019902
aaaactttaacat

SEQ ID NO: 78171 - DNA, 13 bp, Artificial Sequence
  Oligonucleotide for detection of SNP TSC0019903
aatatggaatagy

SEQ ID NO: 78172 - DNA, 13 bp, Artificial Sequence
  Oligonucleotide for detection of SNP TSC0019903
rctattccatatt

SEQ ID NO: 78173 - DNA, 13 bp, Artificial Sequence
  Oligonucleotide for detection of SNP TSC0019903
aatatgaaatagy

SEQ ID NO: 78174 - DNA, 13 bp, Artificial Sequence
  Oligonucleotide for detection of SNP TSC0019903
rctatttcatatt

SEQ ID NO: 78175 - DNA, 13 bp, Artificial Sequence
  Oligonucleotide for detection of SNP TSC0019903
aatacggaatagy

SEQ ID NO: 78176 - DNA, 13 bp, Artificial Sequence
  Oligonucleotide for detection of SNP TSC0019903
rctattccgtatt

SEQ ID NO: 78177 - DNA, 13 bp, Artificial Sequence
  Oligonucleotide for detection of SNP TSC0019903
aatacgaaatagy

SEQ ID NO: 78178 - DNA, 13 bp, Artificial Sequence
  Oligonucleotide for detection of SNP TSC0019903
rctatttcgtatt

SEQ ID NO: 78179 - DNA, 13 bp, Artificial Sequence
  Oligonucleotide for detection of SNP TSC0019904
taaagatgggaty

SEQ ID NO: 78180 - DNA, 13 bp, Artificial Sequence
  Oligonucleotide for detection of SNP TSC0019904
ratcccatcttta

SEQ ID NO: 78181 - DNA, 13 bp, Artificial Sequence
  Oligonucleotide for detection of SNP TSC0019904
taaagacgggaty

SEQ ID NO: 78182 - DNA, 13 bp, Artificial Sequence
  Oligonucleotide for detection of SNP TSC0019904
ratcccgtcttta

SEQ ID NO: 78183 - DNA, 13 bp, Artificial Sequence
  Oligonucleotide for detection of SNP TSC0019905
agatagggtttta

SEQ ID NO: 78184 - DNA, 13 bp, Artificial Sequence
  Oligonucleotide for detection of SNP TSC0019905
taaaaccctatct

SEQ ID NO: 78185 - DNA, 13 bp, Artificial Sequence
  Oligonucleotide for detection of SNP TSC0019905
agatagagtttta

SEQ ID NO: 78186 - DNA, 13 bp, Artificial Sequence
  Oligonucleotide for detection of SNP TSC0019905
taaaactctatct

SEQ ID NO: 78187 - DNA, 13 bp, Artificial Sequence
  Oligonucleotide for detection of SNP TSC0019906
gtaaagaatagga

SEQ ID NO: 78188 - DNA, 13 bp, Artificial Sequence
  Oligonucleotide for detection of SNP TSC0019906
tcctattctttac

SEQ ID NO: 78189 - DNA, 13 bp, Artificial Sequence
  Oligonucleotide for detection of SNP TSC0019906
gtaaaggatagga

SEQ ID NO: 78190 - DNA, 13 bp, Artificial Sequence
  Oligonucleotide for detection of SNP TSC0019906
tcctatcctttac

SEQ ID NO: 78191 - DNA, 13 bp, Artificial Sequence
  Oligonucleotide for detection of SNP TSC0019909
ggtataaatttat

SEQ ID NO: 78192 - DNA, 13 bp, Artificial Sequence
  Oligonucleotide for detection of SNP TSC0019909
ataaatttatacc

SEQ ID NO: 78193 - DNA, 13 bp, Artificial Sequence
  Oligonucleotide for detection of SNP TSC0019909
ggtatagatttat

SEQ ID NO: 78194 - DNA, 13 bp, Artificial Sequence
  Oligonucleotide for detection of SNP TSC0019909
ataaatctatacc

SEQ ID NO: 78195 - DNA, 13 bp, Artificial Sequence
  Oligonucleotide for detection of SNP TSC0019911
aggttttgttaat

SEQ ID NO: 78196 - DNA, 13 bp, Artificial Sequence
  Oligonucleotide for detection of SNP TSC0019911
attaacaaaacct

SEQ ID NO: 78197 - DNA, 13 bp, Artificial Sequence
  Oligonucleotide for detection of SNP TSC0019911
aggtttcgttaat

SEQ ID NO: 78198 - DNA, 13 bp, Artificial Sequence
  Oligonucleotide for detection of SNP TSC0019911
attaacgaaacct

SEQ ID NO: 78199 - DNA, 13 bp, Artificial Sequence
  Oligonucleotide for detection of SNP TSC0019911
attagtggggttt

SEQ ID NO: 78200 - DNA, 13 bp, Artificial Sequence
  Oligonucleotide for detection of SNP TSC0019911
aaaccccactaat

SEQ ID NO: 78201 - DNA, 13 bp, Artificial Sequence
  Oligonucleotide for detection of SNP TSC0019911
attagtagggttt

SEQ ID NO: 78202 - DNA, 13 bp, Artificial Sequence
  Oligonucleotide for detection of SNP TSC0019911
aaaccctactaat

SEQ ID NO: 78203 - DNA, 13 bp, Artificial Sequence
  Oligonucleotide for detection of SNP TSC0019911
attagcggggttt

SEQ ID NO: 78204 - DNA, 13 bp, Artificial Sequence
  Oligonucleotide for detection of SNP TSC0019911
aaaccccgctaat

SEQ ID NO: 78205 - DNA, 13 bp, Artificial Sequence
  Oligonucleotide for detection of SNP TSC0019912
gaatatattgaaa

SEQ ID NO: 78206 - DNA, 13 bp, Artificial Sequence
  Oligonucleotide for detection of SNP TSC0019912
tttcaatatattc

SEQ ID NO: 78207 - DNA, 13 bp, Artificial Sequence
  Oligonucleotide for detection of SNP TSC0019912
gaatatgttgaaa

SEQ ID NO: 78208 - DNA, 13 bp, Artificial Sequence
  Oligonucleotide for detection of SNP TSC0019912
tttcaacatattc

SEQ ID NO: 78209 - DNA, 13 bp, Artificial Sequence
  Oligonucleotide for detection of SNP TSC0019912
gaatacgttgaaa

SEQ ID NO: 78210 - DNA, 13 bp, Artificial Sequence
  Oligonucleotide for detection of SNP TSC0019912
tttcaacgtattc

SEQ ID NO: 78211 - DNA, 13 bp, Artificial Sequence
  Oligonucleotide for detection of SNP TSC0019912
ttttagtgtgtty

SEQ ID NO: 78212 - DNA, 13 bp, Artificial Sequence
  Oligonucleotide for detection of SNP TSC0019912
raacacactaaaa

SEQ ID NO: 78213 - DNA, 13 bp, Artificial Sequence
  Oligonucleotide for detection of SNP TSC0019912
ttttagcgtgtty

SEQ ID NO: 78214 - DNA, 13 bp, Artificial Sequence
  Oligonucleotide for detection of SNP TSC0019912
raacacgctaaaa

SEQ ID NO: 78215 - DNA, 13 bp, Artificial Sequence
  Oligonucleotide for detection of SNP TSC0019913
tttgagatggggy

SEQ ID NO: 78216 - DNA, 13 bp, Artificial Sequence
  Oligonucleotide for detection of SNP TSC0019913
rccccatctcaaa

SEQ ID NO: 78217 - DNA, 13 bp, Artificial Sequence
  Oligonucleotide for detection of SNP TSC0019913
tttgaggtggggy

SEQ ID NO: 78218 - DNA, 13 bp, Artificial Sequence
  Oligonucleotide for detection of SNP TSC0019913
rccccacctcaaa

SEQ ID NO: 78219 - DNA, 13 bp, Artificial Sequence
  Oligonucleotide for detection of SNP TSC0019916
agggaaataggta

SEQ ID NO: 78220 - DNA, 13 bp, Artificial Sequence
  Oligonucleotide for detection of SNP TSC0019916
tacctatttccct

SEQ ID NO: 78221 - DNA, 13 bp, Artificial Sequence
  Oligonucleotide for detection of SNP TSC0019916
agggaagtaggta

SEQ ID NO: 78222 - DNA, 13 bp, Artificial Sequence
  Oligonucleotide for detection of SNP TSC0019916
tacctacttccct

SEQ ID NO: 78223 - DNA, 13 bp, Artificial Sequence
  Oligonucleotide for detection of SNP TSC0019917
gtggagattaagg

SEQ ID NO: 78224 - DNA, 13 bp, Artificial Sequence
  Oligonucleotide for detection of SNP TSC0019917
ccttaatctccac

SEQ ID NO: 78225 - DNA, 13 bp, Artificial Sequence
  Oligonucleotide for detection of SNP TSC0019917
gtggaggttaagg

SEQ ID NO: 78226 - DNA, 13 bp, Artificial Sequence
  Oligonucleotide for detection of SNP TSC0019917
ccttaacctccac

SEQ ID NO: 78227 - DNA, 13 bp, Artificial Sequence
  Oligonucleotide for detection of SNP TSC0019918
tattgtgttttag

SEQ ID NO: 78228 - DNA, 13 bp, Artificial Sequence
  Oligonucleotide for detection of SNP TSC0019918
ctaaaacacaata

SEQ ID NO: 78229 - DNA, 13 bp, Artificial Sequence
  Oligonucleotide for detection of SNP TSC0019918
tattgcgttttag

SEQ ID NO: 78230 - DNA, 13 bp, Artificial Sequence
  Oligonucleotide for detection of SNP TSC0019918
ctaaaacgcaata

SEQ ID NO: 78231 - DNA, 13 bp, Artificial Sequence
  Oligonucleotide for detection of SNP TSC0019918
ttggagcgtagtg

SEQ ID NO: 78232 - DNA, 13 bp, Artificial Sequence
  Oligonucleotide for detection of SNP TSC0019918
cactacgctccaa

SEQ ID NO: 78233 - DNA, 13 bp, Artificial Sequence
  Oligonucleotide for detection of SNP TSC0019924
attagtggttata

SEQ ID NO: 78234 - DNA, 13 bp, Artificial Sequence
  Oligonucleotide for detection of SNP TSC0019924
tataaccactaat

SEQ ID NO: 78235 - DNA, 13 bp, Artificial Sequence
  Oligonucleotide for detection of SNP TSC0019924
tgtagtgattgat

SEQ ID NO: 78236 - DNA, 13 bp, Artificial Sequence
  Oligonucleotide for detection of SNP TSC0019924
atcaatcactaca

SEQ ID NO: 78237 - DNA, 13 bp, Artificial Sequence
  Oligonucleotide for detection of SNP TSC0019924
tgtagttattgat

SEQ ID NO: 78238 - DNA, 13 bp, Artificial Sequence
  Oligonucleotide for detection of SNP TSC0019924
atcaataactaca

SEQ ID NO: 78239 - DNA, 13 bp, Artificial Sequence
  Oligonucleotide for detection of SNP TSC0019924
tgtagcgattgat

SEQ ID NO: 78240 - DNA, 13 bp, Artificial Sequence
  Oligonucleotide for detection of SNP TSC0019924
atcaatcgctaca

SEQ ID NO: 78241 - DNA, 13 bp, Artificial Sequence
  Oligonucleotide for detection of SNP TSC0019928
tgttatataggat

SEQ ID NO: 78242 - DNA, 13 bp, Artificial Sequence
  Oligonucleotide for detection of SNP TSC0019928
atcctatataaca

SEQ ID NO: 78243 - DNA, 13 bp, Artificial Sequence
  Oligonucleotide for detection of SNP TSC0019928
tgttatgtaggat

SEQ ID NO: 78244 - DNA, 13 bp, Artificial Sequence
  Oligonucleotide for detection of SNP TSC0019928
atcctacataaca

SEQ ID NO: 78245 - DNA, 13 bp, Artificial Sequence
  Oligonucleotide for detection of SNP TSC0019928
tgttacgtaggat

SEQ ID NO: 78246 - DNA, 13 bp, Artificial Sequence
  Oligonucleotide for detection of SNP TSC0019928
atcctacgtaaca

SEQ ID NO: 78247 - DNA, 13 bp, Artificial Sequence
  Oligonucleotide for detection of SNP TSC0019928
attttgtgtgata

SEQ ID NO: 78248 - DNA, 13 bp, Artificial Sequence
  Oligonucleotide for detection of SNP TSC0019928
tatcacacaaaat

SEQ ID NO: 78249 - DNA, 13 bp, Artificial Sequence
  Oligonucleotide for detection of SNP TSC0019928
attttgcgtgata

SEQ ID NO: 78250 - DNA, 13 bp, Artificial Sequence
  Oligonucleotide for detection of SNP TSC0019928
tatcacgcaaaat

SEQ ID NO: 78251 - DNA, 13 bp, Artificial Sequence
  Oligonucleotide for detection of SNP TSC0019929
attagggtttagy

SEQ ID NO: 78252 - DNA, 13 bp, Artificial Sequence
  Oligonucleotide for detection of SNP TSC0019929
rctaaaccctaat

SEQ ID NO: 78253 - DNA, 13 bp, Artificial Sequence
  Oligonucleotide for detection of SNP TSC0019929
attaggttttagy

SEQ ID NO: 78254 - DNA, 13 bp, Artificial Sequence
  Oligonucleotide for detection of SNP TSC0019929
rctaaaacctaat

SEQ ID NO: 78255 - DNA, 13 bp, Artificial Sequence
  Oligonucleotide for detection of SNP TSC0019929
gttagattttagt

SEQ ID NO: 78256 - DNA, 13 bp, Artificial Sequence
  Oligonucleotide for detection of SNP TSC0019929
actaaaatctaac

SEQ ID NO: 78257 - DNA, 13 bp, Artificial Sequence
  Oligonucleotide for detection of SNP TSC0019929
gttagaatttagt

SEQ ID NO: 78258 - DNA, 13 bp, Artificial Sequence
  Oligonucleotide for detection of SNP TSC0019929
actaaattctaac

SEQ ID NO: 78259 - DNA, 13 bp, Artificial Sequence
  Oligonucleotide for detection of SNP TSC0019930
gtttatatggaaa

SEQ ID NO: 78260 - DNA, 13 bp, Artificial Sequence
  Oligonucleotide for detection of SNP TSC0019930
tttccatataaac

SEQ ID NO: 78261 - DNA, 13 bp, Artificial Sequence
  Oligonucleotide for detection of SNP TSC0019930
gtttatttggaaa

SEQ ID NO: 78262 - DNA, 13 bp, Artificial Sequence
  Oligonucleotide for detection of SNP TSC0019930
tttccaaataaac

SEQ ID NO: 78263 - DNA, 13 bp, Artificial Sequence
  Oligonucleotide for detection of SNP TSC0019930
tttttatatgggy

SEQ ID NO: 78264 - DNA, 13 bp, Artificial Sequence
  Oligonucleotide for detection of SNP TSC0019930
rcccatataaaaa

SEQ ID NO: 78265 - DNA, 13 bp, Artificial Sequence
  Oligonucleotide for detection of SNP TSC0019930
tttttagatgggy

SEQ ID NO: 78266 - DNA, 13 bp, Artificial Sequence
  Oligonucleotide for detection of SNP TSC0019930
rcccatctaaaaa

SEQ ID NO: 78267 - DNA, 13 bp, Artificial Sequence
  Oligonucleotide for detection of SNP TSC0019932
aaattagatttay

SEQ ID NO: 78268 - DNA, 13 bp, Artificial Sequence
  Oligonucleotide for detection of SNP TSC0019932
rtaaatctaattt

SEQ ID NO: 78269 - DNA, 13 bp, Artificial Sequence
  Oligonucleotide for detection of SNP TSC0019932
aaattaaatttay

SEQ ID NO: 78270 - DNA, 13 bp, Artificial Sequence
  Oligonucleotide for detection of SNP TSC0019932
rtaaatttaattt

SEQ ID NO: 78271 - DNA, 13 bp, Artificial Sequence
  Oligonucleotide for detection of SNP TSC0019933
aatatagtattta

SEQ ID NO: 78272 - DNA, 13 bp, Artificial Sequence
  Oligonucleotide for detection of SNP TSC0019933
taaatactatatt

SEQ ID NO: 78273 - DNA, 13 bp, Artificial Sequence
  Oligonucleotide for detection of SNP TSC0019933
aatataatattta

SEQ ID NO: 78274 - DNA, 13 bp, Artificial Sequence
  Oligonucleotide for detection of SNP TSC0019933
taaatattatatt

SEQ ID NO: 78275 - DNA, 13 bp, Artificial Sequence
  Oligonucleotide for detection of SNP TSC0019936
tgatagagtttaa

SEQ ID NO: 78276 - DNA, 13 bp, Artificial Sequence
  Oligonucleotide for detection of SNP TSC0019936
ttaaactctatca

SEQ ID NO: 78277 - DNA, 13 bp, Artificial Sequence
  Oligonucleotide for detection of SNP TSC0019936
tgatagggtttaa

SEQ ID NO: 78278 - DNA, 13 bp, Artificial Sequence
  Oligonucleotide for detection of SNP TSC0019936
ttaaaccctatca

SEQ ID NO: 78279 - DNA, 13 bp, Artificial Sequence
  Oligonucleotide for detection of SNP TSC0019936
cgatagagtttaa

SEQ ID NO: 78280 - DNA, 13 bp, Artificial Sequence
  Oligonucleotide for detection of SNP TSC0019936
ttaaactctatcg

SEQ ID NO: 78281 - DNA, 13 bp, Artificial Sequence
  Oligonucleotide for detection of SNP TSC0019936
cgatagggtttaa

SEQ ID NO: 78282 - DNA, 13 bp, Artificial Sequence
  Oligonucleotide for detection of SNP TSC0019936
ttaaaccctatcg

SEQ ID NO: 78283 - DNA, 13 bp, Artificial Sequence
  Oligonucleotide for detection of SNP TSC0019937
gtgtttgtggggt

SEQ ID NO: 78284 - DNA, 13 bp, Artificial Sequence
  Oligonucleotide for detection of SNP TSC0019937
accccacaaacac

SEQ ID NO: 78285 - DNA, 13 bp, Artificial Sequence
  Oligonucleotide for detection of SNP TSC0019937
gtgtttatggggt

SEQ ID NO: 78286 - DNA, 13 bp, Artificial Sequence
  Oligonucleotide for detection of SNP TSC0019937
accccataaacac

SEQ ID NO: 78287 - DNA, 13 bp, Artificial Sequence
  Oligonucleotide for detection of SNP TSC0019940
aaaaattgtttta

SEQ ID NO: 78288 - DNA, 13 bp, Artificial Sequence
  Oligonucleotide for detection of SNP TSC0019940
taaaacaattttt

SEQ ID NO: 78289 - DNA, 13 bp, Artificial Sequence
  Oligonucleotide for detection of SNP TSC0019940
aaaaatcgtttta

SEQ ID NO: 78290 - DNA, 13 bp, Artificial Sequence
  Oligonucleotide for detection of SNP TSC0019940
taaaacgattttt

SEQ ID NO: 78291 - DNA, 13 bp, Artificial Sequence
  Oligonucleotide for detection of SNP TSC0019940
tgagatgattttt

SEQ ID NO: 78292 - DNA, 13 bp, Artificial Sequence
  Oligonucleotide for detection of SNP TSC0019940
aaaaatcatctca

SEQ ID NO: 78293 - DNA, 13 bp, Artificial Sequence
  Oligonucleotide for detection of SNP TSC0019940
tgagataattttt

SEQ ID NO: 78294 - DNA, 13 bp, Artificial Sequence
  Oligonucleotide for detection of SNP TSC0019940
aaaaattatctca

SEQ ID NO: 78295 - DNA, 13 bp, Artificial Sequence
  Oligonucleotide for detection of SNP TSC0019940
tgagacgattttt

SEQ ID NO: 78296 - DNA, 13 bp, Artificial Sequence
  Oligonucleotide for detection of SNP TSC0019940
aaaaatcgtctca

SEQ ID NO: 78297 - DNA, 13 bp, Artificial Sequence
  Oligonucleotide for detection of SNP TSC0019941
ttttaggatggty

SEQ ID NO: 78298 - DNA, 13 bp, Artificial Sequence
  Oligonucleotide for detection of SNP TSC0019941
raccatcctaaaa

SEQ ID NO: 78299 - DNA, 13 bp, Artificial Sequence
  Oligonucleotide for detection of SNP TSC0019941
ttttagaatggty

SEQ ID NO: 78300 - DNA, 13 bp, Artificial Sequence
  Oligonucleotide for detection of SNP TSC0019941
raccattctaaaa

SEQ ID NO: 78301 - DNA, 13 bp, Artificial Sequence
  Oligonucleotide for detection of SNP TSC0019941
ttttaggacggty

SEQ ID NO: 78302 - DNA, 13 bp, Artificial Sequence
  Oligonucleotide for detection of SNP TSC0019941
raccgtcctaaaa

SEQ ID NO: 78303 - DNA, 13 bp, Artificial Sequence
  Oligonucleotide for detection of SNP TSC0019941
ttttagaacggty

SEQ ID NO: 78304 - DNA, 13 bp, Artificial Sequence
  Oligonucleotide for detection of SNP TSC0019941
raccgttctaaaa

SEQ ID NO: 78305 - DNA, 13 bp, Artificial Sequence
  Oligonucleotide for detection of SNP TSC0019944
agaggatttagag

SEQ ID NO: 78306 - DNA, 13 bp, Artificial Sequence
  Oligonucleotide for detection of SNP TSC0019944
ctctaaatcctct

SEQ ID NO: 78307 - DNA, 13 bp, Artificial Sequence
  Oligonucleotide for detection of SNP TSC0019944
agaggagttagag

SEQ ID NO: 78308 - DNA, 13 bp, Artificial Sequence
  Oligonucleotide for detection of SNP TSC0019944
ctctaactcctct

SEQ ID NO: 78309 - DNA, 13 bp, Artificial Sequence
  Oligonucleotide for detection of SNP TSC0019945
aagtgagattaty

SEQ ID NO: 78310 - DNA, 13 bp, Artificial Sequence
  Oligonucleotide for detection of SNP TSC0019945
rataatctcactt

SEQ ID NO: 78311 - DNA, 13 bp, Artificial Sequence
  Oligonucleotide for detection of SNP TSC0019945
aagtgaaattaty

SEQ ID NO: 78312 - DNA, 13 bp, Artificial Sequence
  Oligonucleotide for detection of SNP TSC0019945
rataatttcactt

SEQ ID NO: 78313 - DNA, 13 bp, Artificial Sequence
  Oligonucleotide for detection of SNP TSC0019945
aagcgagattaty

SEQ ID NO: 78314 - DNA, 13 bp, Artificial Sequence
  Oligonucleotide for detection of SNP TSC0019945
rataatctcgctt

SEQ ID NO: 78315 - DNA, 13 bp, Artificial Sequence
  Oligonucleotide for detection of SNP TSC0019945
aagcgaaattaty

SEQ ID NO: 78316 - DNA, 13 bp, Artificial Sequence
  Oligonucleotide for detection of SNP TSC0019945
rataatttcgctt

SEQ ID NO: 78317 - DNA, 13 bp, Artificial Sequence
  Oligonucleotide for detection of SNP TSC0019946
aggggtttttaaa

SEQ ID NO: 78318 - DNA, 13 bp, Artificial Sequence
  Oligonucleotide for detection of SNP TSC0019946
tttaaaaacccct

SEQ ID NO: 78319 - DNA, 13 bp, Artificial Sequence
  Oligonucleotide for detection of SNP TSC0019946
aggggtatttaaa

SEQ ID NO: 78320 - DNA, 13 bp, Artificial Sequence
  Oligonucleotide for detection of SNP TSC0019946
tttaaatacccct

SEQ ID NO: 78321 - DNA, 13 bp, Artificial Sequence
  Oligonucleotide for detection of SNP TSC0019947
tatgtaagaaaaa

SEQ ID NO: 78322 - DNA, 13 bp, Artificial Sequence
  Oligonucleotide for detection of SNP TSC0019947
tttttcttacata

SEQ ID NO: 78323 - DNA, 13 bp, Artificial Sequence
  Oligonucleotide for detection of SNP TSC0019947
tatgtaggaaaaa

SEQ ID NO: 78324 - DNA, 13 bp, Artificial Sequence
  Oligonucleotide for detection of SNP TSC0019947
tttttcctacata

SEQ ID NO: 78325 - DNA, 13 bp, Artificial Sequence
  Oligonucleotide for detection of SNP TSC0019948
atttagggtggty

SEQ ID NO: 78326 - DNA, 13 bp, Artificial Sequence
  Oligonucleotide for detection of SNP TSC0019948
raccaccctaaat

SEQ ID NO: 78327 - DNA, 13 bp, Artificial Sequence
  Oligonucleotide for detection of SNP TSC0019948
atttagtgtggty

SEQ ID NO: 78328 - DNA, 13 bp, Artificial Sequence
  Oligonucleotide for detection of SNP TSC0019948
raccacactaaat

SEQ ID NO: 78329 - DNA, 13 bp, Artificial Sequence
  Oligonucleotide for detection of SNP TSC0019948
gattattttagat

SEQ ID NO: 78330 - DNA, 13 bp, Artificial Sequence
  Oligonucleotide for detection of SNP TSC0019948
atctaaaataatc

SEQ ID NO: 78331 - DNA, 13 bp, Artificial Sequence
  Oligonucleotide for detection of SNP TSC0019948
gattatattagat

SEQ ID NO: 78332 - DNA, 13 bp, Artificial Sequence
  Oligonucleotide for detection of SNP TSC0019948
atctaatataatc

SEQ ID NO: 78333 - DNA, 13 bp, Artificial Sequence
  Oligonucleotide for detection of SNP TSC0019956
atttatttgtagg

SEQ ID NO: 78334 - DNA, 13 bp, Artificial Sequence
  Oligonucleotide for detection of SNP TSC0019956
cctacaaataaat

SEQ ID NO: 78335 - DNA, 13 bp, Artificial Sequence
  Oligonucleotide for detection of SNP TSC0019956
tttgtatgtagat

SEQ ID NO: 78336 - DNA, 13 bp, Artificial Sequence
  Oligonucleotide for detection of SNP TSC0019956
atctacatacaaa

SEQ ID NO: 78337 - DNA, 13 bp, Artificial Sequence
  Oligonucleotide for detection of SNP TSC0019956
tttgtaggtagat

SEQ ID NO: 78338 - DNA, 13 bp, Artificial Sequence
  Oligonucleotide for detection of SNP TSC0019956
atctacctacaaa

SEQ ID NO: 78339 - DNA, 13 bp, Artificial Sequence
  Oligonucleotide for detection of SNP TSC0019957
ttgttaatttata

SEQ ID NO: 78340 - DNA, 13 bp, Artificial Sequence
  Oligonucleotide for detection of SNP TSC0019957
tataaattaacaa

SEQ ID NO: 78341 - DNA, 13 bp, Artificial Sequence
  Oligonucleotide for detection of SNP TSC0019957
ttgttagtttata

SEQ ID NO: 78342 - DNA, 13 bp, Artificial Sequence
  Oligonucleotide for detection of SNP TSC0019957
tataaactaacaa

SEQ ID NO: 78343 - DNA, 13 bp, Artificial Sequence
  Oligonucleotide for detection of SNP TSC0019959
gggtagagtttgg

SEQ ID NO: 78344 - DNA, 13 bp, Artificial Sequence
  Oligonucleotide for detection of SNP TSC0019959
ccaaactctaccc

SEQ ID NO: 78345 - DNA, 13 bp, Artificial Sequence
  Oligonucleotide for detection of SNP TSC0019959
gggtagggtttgg

SEQ ID NO: 78346 - DNA, 13 bp, Artificial Sequence
  Oligonucleotide for detection of SNP TSC0019959
ccaaaccctaccc

SEQ ID NO: 78347 - DNA, 13 bp, Artificial Sequence
  Oligonucleotide for detection of SNP TSC0019960
gaatttaagatta

SEQ ID NO: 78348 - DNA, 13 bp, Artificial Sequence
  Oligonucleotide for detection of SNP TSC0019960
taatcttaaattc

SEQ ID NO: 78349 - DNA, 13 bp, Artificial Sequence
  Oligonucleotide for detection of SNP TSC0019960
gaatttgagatta

SEQ ID NO: 78350 - DNA, 13 bp, Artificial Sequence
  Oligonucleotide for detection of SNP TSC0019960
taatctcaaattc

SEQ ID NO: 78351 - DNA, 13 bp, Artificial Sequence
  Oligonucleotide for detection of SNP TSC0019960
gaattcgagatta

SEQ ID NO: 78352 - DNA, 13 bp, Artificial Sequence
  Oligonucleotide for detection of SNP TSC0019960
taatctcgaattc

SEQ ID NO: 78353 - DNA, 13 bp, Artificial Sequence
  Oligonucleotide for detection of SNP TSC0019961
aaggtaggataaa

SEQ ID NO: 78354 - DNA, 13 bp, Artificial Sequence
  Oligonucleotide for detection of SNP TSC0019961
tttatcctacctt

SEQ ID NO: 78355 - DNA, 13 bp, Artificial Sequence
  Oligonucleotide for detection of SNP TSC0019961
aaggtaagataaa

SEQ ID NO: 78356 - DNA, 13 bp, Artificial Sequence
  Oligonucleotide for detection of SNP TSC0019961
tttatcttacctt

SEQ ID NO: 78357 - DNA, 13 bp, Artificial Sequence
  Oligonucleotide for detection of SNP TSC0019962
agatatgtaaatg

SEQ ID NO: 78358 - DNA, 13 bp, Artificial Sequence
  Oligonucleotide for detection of SNP TSC0019962
catttacatatct

SEQ ID NO: 78359 - DNA, 13 bp, Artificial Sequence
  Oligonucleotide for detection of SNP TSC0019962
agatatttaaatg

SEQ ID NO: 78360 - DNA, 13 bp, Artificial Sequence
  Oligonucleotide for detection of SNP TSC0019962
catttaaatatct

SEQ ID NO: 78361 - DNA, 13 bp, Artificial Sequence
  Oligonucleotide for detection of SNP TSC0019962
agatacgtaaatg

SEQ ID NO: 78362 - DNA, 13 bp, Artificial Sequence
  Oligonucleotide for detection of SNP TSC0019962
catttacgtatct

SEQ ID NO: 78363 - DNA, 13 bp, Artificial Sequence
  Oligonucleotide for detection of SNP TSC0019962
tatttatgtgttt

SEQ ID NO: 78364 - DNA, 13 bp, Artificial Sequence
  Oligonucleotide for detection of SNP TSC0019962
aaacacataaata

SEQ ID NO: 78365 - DNA, 13 bp, Artificial Sequence
  Oligonucleotide for detection of SNP TSC0019962
tatttaagtgttt

SEQ ID NO: 78366 - DNA, 13 bp, Artificial Sequence
  Oligonucleotide for detection of SNP TSC0019962
aaacacttaaata

SEQ ID NO: 78367 - DNA, 13 bp, Artificial Sequence
  Oligonucleotide for detection of SNP TSC0019962
tatttacgtgttt

SEQ ID NO: 78368 - DNA, 13 bp, Artificial Sequence
  Oligonucleotide for detection of SNP TSC0019962
aaacacgtaaata

SEQ ID NO: 78369 - DNA, 13 bp, Artificial Sequence
  Oligonucleotide for detection of SNP TSC0019963
agttttatagagy

SEQ ID NO: 78370 - DNA, 13 bp, Artificial Sequence
  Oligonucleotide for detection of SNP TSC0019963
rctctataaaact

SEQ ID NO: 78371 - DNA, 13 bp, Artificial Sequence
  Oligonucleotide for detection of SNP TSC0019963
agttttgtagagy

SEQ ID NO: 78372 - DNA, 13 bp, Artificial Sequence
  Oligonucleotide for detection of SNP TSC0019963
rctctacaaaact

SEQ ID NO: 78373 - DNA, 13 bp, Artificial Sequence
  Oligonucleotide for detection of SNP TSC0019965
aataaatgaataa

SEQ ID NO: 78374 - DNA, 13 bp, Artificial Sequence
  Oligonucleotide for detection of SNP TSC0019965
ttattcatttatt

SEQ ID NO: 78375 - DNA, 13 bp, Artificial Sequence
  Oligonucleotide for detection of SNP TSC0019965
aataaacgaataa

SEQ ID NO: 78376 - DNA, 13 bp, Artificial Sequence
  Oligonucleotide for detection of SNP TSC0019965
ttattcgtttatt

SEQ ID NO: 78377 - DNA, 13 bp, Artificial Sequence
  Oligonucleotide for detection of SNP TSC0019966
tgttgagtaggga

SEQ ID NO: 78378 - DNA, 13 bp, Artificial Sequence
  Oligonucleotide for detection of SNP TSC0019966
tccctactcaaca

SEQ ID NO: 78379 - DNA, 13 bp, Artificial Sequence
  Oligonucleotide for detection of SNP TSC0019966
tgttgaataggga

SEQ ID NO: 78380 - DNA, 13 bp, Artificial Sequence
  Oligonucleotide for detection of SNP TSC0019966
tccctattcaaca

SEQ ID NO: 78381 - DNA, 13 bp, Artificial Sequence
  Oligonucleotide for detection of SNP TSC0019967
ttgaaatgtaaaa

SEQ ID NO: 78382 - DNA, 13 bp, Artificial Sequence
  Oligonucleotide for detection of SNP TSC0019967
ttttacatttcaa

SEQ ID NO: 78383 - DNA, 13 bp, Artificial Sequence
  Oligonucleotide for detection of SNP TSC0019967
ttgaaacgtaaaa

SEQ ID NO: 78384 - DNA, 13 bp, Artificial Sequence
  Oligonucleotide for detection of SNP TSC0019967
ttttacgtttcaa

SEQ ID NO: 78385 - DNA, 13 bp, Artificial Sequence
  Oligonucleotide for detection of SNP TSC0019971
atagggaagtttt

SEQ ID NO: 78386 - DNA, 13 bp, Artificial Sequence
  Oligonucleotide for detection of SNP TSC0019971
aaaacttccctat

SEQ ID NO: 78387 - DNA, 13 bp, Artificial Sequence
  Oligonucleotide for detection of SNP TSC0019971
atagggtagtttt

SEQ ID NO: 78388 - DNA, 13 bp, Artificial Sequence
  Oligonucleotide for detection of SNP TSC0019971
aaaactaccctat

SEQ ID NO: 78389 - DNA, 13 bp, Artificial Sequence
  Oligonucleotide for detection of SNP TSC0019971
agggtttttttat

SEQ ID NO: 78390 - DNA, 13 bp, Artificial Sequence
  Oligonucleotide for detection of SNP TSC0019971
ataaaaaaaccct

SEQ ID NO: 78391 - DNA, 13 bp, Artificial Sequence
  Oligonucleotide for detection of SNP TSC0019972
tttatcgtatttt

SEQ ID NO: 78392 - DNA, 13 bp, Artificial Sequence
  Oligonucleotide for detection of SNP TSC0019972
aaaatacgataaa

SEQ ID NO: 78393 - DNA, 13 bp, Artificial Sequence
  Oligonucleotide for detection of SNP TSC0019972
agggtgtgatgga

SEQ ID NO: 78394 - DNA, 13 bp, Artificial Sequence
  Oligonucleotide for detection of SNP TSC0019972
tccatcacaccct

SEQ ID NO: 78395 - DNA, 13 bp, Artificial Sequence
  Oligonucleotide for detection of SNP TSC0019972
agggtgcgatgga

SEQ ID NO: 78396 - DNA, 13 bp, Artificial Sequence
  Oligonucleotide for detection of SNP TSC0019972
tccatcgcaccct

SEQ ID NO: 78397 - DNA, 13 bp, Artificial Sequence
  Oligonucleotide for detection of SNP TSC0019973
taatatggtttty

SEQ ID NO: 78398 - DNA, 13 bp, Artificial Sequence
  Oligonucleotide for detection of SNP TSC0019973
raaaaccatatta

SEQ ID NO: 78399 - DNA, 13 bp, Artificial Sequence
  Oligonucleotide for detection of SNP TSC0019973
taatacggtttty

SEQ ID NO: 78400 - DNA, 13 bp, Artificial Sequence
  Oligonucleotide for detection of SNP TSC0019973
raaaaccgtatta

SEQ ID NO: 78401 - DNA, 13 bp, Artificial Sequence
  Oligonucleotide for detection of SNP TSC0019973
gagggttgtgttg

SEQ ID NO: 78402 - DNA, 13 bp, Artificial Sequence
  Oligonucleotide for detection of SNP TSC0019973
caacacaaccctc

SEQ ID NO: 78403 - DNA, 13 bp, Artificial Sequence
  Oligonucleotide for detection of SNP TSC0019973
gagggtcgtgttg

SEQ ID NO: 78404 - DNA, 13 bp, Artificial Sequence
  Oligonucleotide for detection of SNP TSC0019973
caacacgaccctc

SEQ ID NO: 78405 - DNA, 13 bp, Artificial Sequence
  Oligonucleotide for detection of SNP TSC0019974
ttgtatatggggg

SEQ ID NO: 78406 - DNA, 13 bp, Artificial Sequence
  Oligonucleotide for detection of SNP TSC0019974
cccccatatacaa

SEQ ID NO: 78407 - DNA, 13 bp, Artificial Sequence
  Oligonucleotide for detection of SNP TSC0019974
ttgtatttggggg

SEQ ID NO: 78408 - DNA, 13 bp, Artificial Sequence
  Oligonucleotide for detection of SNP TSC0019974
cccccaaatacaa

SEQ ID NO: 78409 - DNA, 13 bp, Artificial Sequence
  Oligonucleotide for detection of SNP TSC0019974
ttgtatacggggg

SEQ ID NO: 78410 - DNA, 13 bp, Artificial Sequence
  Oligonucleotide for detection of SNP TSC0019974
cccccgtatacaa

SEQ ID NO: 78411 - DNA, 13 bp, Artificial Sequence
  Oligonucleotide for detection of SNP TSC0019974
ttgtattcggggg

SEQ ID NO: 78412 - DNA, 13 bp, Artificial Sequence
  Oligonucleotide for detection of SNP TSC0019974
cccccgaatacaa

SEQ ID NO: 78413 - DNA, 13 bp, Artificial Sequence
  Oligonucleotide for detection of SNP TSC0019974
tttttgtatatag

SEQ ID NO: 78414 - DNA, 13 bp, Artificial Sequence
  Oligonucleotide for detection of SNP TSC0019974
ctatatacaaaaa

SEQ ID NO: 78415 - DNA, 13 bp, Artificial Sequence
  Oligonucleotide for detection of SNP TSC0019974
tttttgaatatag

SEQ ID NO: 78416 - DNA, 13 bp, Artificial Sequence
  Oligonucleotide for detection of SNP TSC0019974
ctatattcaaaaa

SEQ ID NO: 78417 - DNA, 13 bp, Artificial Sequence
  Oligonucleotide for detection of SNP TSC0019974
ttttcgtatatag

SEQ ID NO: 78418 - DNA, 13 bp, Artificial Sequence
  Oligonucleotide for detection of SNP TSC0019974
ctatatacgaaaa

SEQ ID NO: 78419 - DNA, 13 bp, Artificial Sequence
  Oligonucleotide for detection of SNP TSC0019974
ttttcgaatatag

SEQ ID NO: 78420 - DNA, 13 bp, Artificial Sequence
  Oligonucleotide for detection of SNP TSC0019974
ctatattcgaaaa

SEQ ID NO: 78421 - DNA, 13 bp, Artificial Sequence
  Oligonucleotide for detection of SNP TSC0019975
gatttaatagaaa

SEQ ID NO: 78422 - DNA, 13 bp, Artificial Sequence
  Oligonucleotide for detection of SNP TSC0019975
tttctattaaatc

SEQ ID NO: 78423 - DNA, 13 bp, Artificial Sequence
  Oligonucleotide for detection of SNP TSC0019975
gatttagtagaaa

SEQ ID NO: 78424 - DNA, 13 bp, Artificial Sequence
  Oligonucleotide for detection of SNP TSC0019975
tttctactaaatc

SEQ ID NO: 78425 - DNA, 13 bp, Artificial Sequence
  Oligonucleotide for detection of SNP TSC0019979
ttttgatggtttg

SEQ ID NO: 78426 - DNA, 13 bp, Artificial Sequence
  Oligonucleotide for detection of SNP TSC0019979
caaaccatcaaaa

SEQ ID NO: 78427 - DNA, 13 bp, Artificial Sequence
  Oligonucleotide for detection of SNP TSC0019979
ttttgacggtttg

SEQ ID NO: 78428 - DNA, 13 bp, Artificial Sequence
  Oligonucleotide for detection of SNP TSC0019979
caaaccgtcaaaa

SEQ ID NO: 78429 - DNA, 13 bp, Artificial Sequence
  Oligonucleotide for detection of SNP TSC0019979
taggttgttagag

SEQ ID NO: 78430 - DNA, 13 bp, Artificial Sequence
  Oligonucleotide for detection of SNP TSC0019979
ctctaacaaccta

SEQ ID NO: 78431 - DNA, 13 bp, Artificial Sequence
  Oligonucleotide for detection of SNP TSC0019979
taggttattagag

SEQ ID NO: 78432 - DNA, 13 bp, Artificial Sequence
  Oligonucleotide for detection of SNP TSC0019979
ctctaataaccta

SEQ ID NO: 78433 - DNA, 13 bp, Artificial Sequence
  Oligonucleotide for detection of SNP TSC0019979
taggtcgttagag

SEQ ID NO: 78434 - DNA, 13 bp, Artificial Sequence
  Oligonucleotide for detection of SNP TSC0019979
ctctaacgaccta

SEQ ID NO: 78435 - DNA, 13 bp, Artificial Sequence
  Oligonucleotide for detection of SNP TSC0019980
taatattttattt

SEQ ID NO: 78436 - DNA, 13 bp, Artificial Sequence
  Oligonucleotide for detection of SNP TSC0019980
aaataaaatatta

SEQ ID NO: 78437 - DNA, 13 bp, Artificial Sequence
  Oligonucleotide for detection of SNP TSC0019980
taatatgttattt

SEQ ID NO: 78438 - DNA, 13 bp, Artificial Sequence
  Oligonucleotide for detection of SNP TSC0019980
aaataacatatta

SEQ ID NO: 78439 - DNA, 13 bp, Artificial Sequence
  Oligonucleotide for detection of SNP TSC0019980
taatacgttattt

SEQ ID NO: 78440 - DNA, 13 bp, Artificial Sequence
  Oligonucleotide for detection of SNP TSC0019980
aaataacgtatta

SEQ ID NO: 78441 - DNA, 13 bp, Artificial Sequence
  Oligonucleotide for detection of SNP TSC0019980
aggtgaggtatta

SEQ ID NO: 78442 - DNA, 13 bp, Artificial Sequence
  Oligonucleotide for detection of SNP TSC0019980
taatacctcacct

SEQ ID NO: 78443 - DNA, 13 bp, Artificial Sequence
  Oligonucleotide for detection of SNP TSC0019980
aggtgatgtatta

SEQ ID NO: 78444 - DNA, 13 bp, Artificial Sequence
  Oligonucleotide for detection of SNP TSC0019980
taatacatcacct

SEQ ID NO: 78445 - DNA, 13 bp, Artificial Sequence
  Oligonucleotide for detection of SNP TSC0019980
aggtgacgtatta

SEQ ID NO: 78446 - DNA, 13 bp, Artificial Sequence
  Oligonucleotide for detection of SNP TSC0019980
taatacgtcacct

SEQ ID NO: 78447 - DNA, 13 bp, Artificial Sequence
  Oligonucleotide for detection of SNP TSC0019981
aatttatagttty

SEQ ID NO: 78448 - DNA, 13 bp, Artificial Sequence
  Oligonucleotide for detection of SNP TSC0019981
raaactataaatt

SEQ ID NO: 78449 - DNA, 13 bp, Artificial Sequence
  Oligonucleotide for detection of SNP TSC0019981
aatttagagttty

SEQ ID NO: 78450 - DNA, 13 bp, Artificial Sequence
  Oligonucleotide for detection of SNP TSC0019981
raaactctaaatt

SEQ ID NO: 78451 - DNA, 13 bp, Artificial Sequence
  Oligonucleotide for detection of SNP TSC0019981
gggattgtaagtt

SEQ ID NO: 78452 - DNA, 13 bp, Artificial Sequence
  Oligonucleotide for detection of SNP TSC0019981
aacttacaatccc

SEQ ID NO: 78453 - DNA, 13 bp, Artificial Sequence
  Oligonucleotide for detection of SNP TSC0019981
gggattttaagtt

SEQ ID NO: 78454 - DNA, 13 bp, Artificial Sequence
  Oligonucleotide for detection of SNP TSC0019981
aacttaaaatccc

SEQ ID NO: 78455 - DNA, 13 bp, Artificial Sequence
  Oligonucleotide for detection of SNP TSC0019982
ttttgggaagaaa

SEQ ID NO: 78456 - DNA, 13 bp, Artificial Sequence
  Oligonucleotide for detection of SNP TSC0019982
tttcttcccaaaa

SEQ ID NO: 78457 - DNA, 13 bp, Artificial Sequence
  Oligonucleotide for detection of SNP TSC0019982
ttttggaaagaaa

SEQ ID NO: 78458 - DNA, 13 bp, Artificial Sequence
  Oligonucleotide for detection of SNP TSC0019982
tttctttccaaaa

SEQ ID NO: 78459 - DNA, 13 bp, Artificial Sequence
  Oligonucleotide for detection of SNP TSC0019983
gagggggttgagg

SEQ ID NO: 78460 - DNA, 13 bp, Artificial Sequence
  Oligonucleotide for detection of SNP TSC0019983
cctcaaccccctc

SEQ ID NO: 78461 - DNA, 13 bp, Artificial Sequence
  Oligonucleotide for detection of SNP TSC0019983
gaggggattgagg

SEQ ID NO: 78462 - DNA, 13 bp, Artificial Sequence
  Oligonucleotide for detection of SNP TSC0019983
cctcaatcccctc

SEQ ID NO: 78463 - DNA, 13 bp, Artificial Sequence
  Oligonucleotide for detection of SNP TSC0019985
tagtttagatata

SEQ ID NO: 78464 - DNA, 13 bp, Artificial Sequence
  Oligonucleotide for detection of SNP TSC0019985
tatatctaaacta

SEQ ID NO: 78465 - DNA, 13 bp, Artificial Sequence
  Oligonucleotide for detection of SNP TSC0019985
tagtttggatata

SEQ ID NO: 78466 - DNA, 13 bp, Artificial Sequence
  Oligonucleotide for detection of SNP TSC0019985
tatatccaaacta

SEQ ID NO: 78467 - DNA, 13 bp, Artificial Sequence
  Oligonucleotide for detection of SNP TSC0019986
aagagtggtgtgt

SEQ ID NO: 78468 - DNA, 13 bp, Artificial Sequence
  Oligonucleotide for detection of SNP TSC0019986
acacaccactctt

SEQ ID NO: 78469 - DNA, 13 bp, Artificial Sequence
  Oligonucleotide for detection of SNP TSC0019986
aagagtagtgtgt

SEQ ID NO: 78470 - DNA, 13 bp, Artificial Sequence
  Oligonucleotide for detection of SNP TSC0019986
acacactactctt

SEQ ID NO: 78471 - DNA, 13 bp, Artificial Sequence
  Oligonucleotide for detection of SNP TSC0019986
aagagcggtgtgt

SEQ ID NO: 78472 - DNA, 13 bp, Artificial Sequence
  Oligonucleotide for detection of SNP TSC0019986
acacaccgctctt

SEQ ID NO: 78473 - DNA, 13 bp, Artificial Sequence
  Oligonucleotide for detection of SNP TSC0019987
tatgtagtaaggy

SEQ ID NO: 78474 - DNA, 13 bp, Artificial Sequence
  Oligonucleotide for detection of SNP TSC0019987
rccttactacata

SEQ ID NO: 78475 - DNA, 13 bp, Artificial Sequence
  Oligonucleotide for detection of SNP TSC0019987
tatgtaataaggy

SEQ ID NO: 78476 - DNA, 13 bp, Artificial Sequence
  Oligonucleotide for detection of SNP TSC0019987
rccttattacata

SEQ ID NO: 78477 - DNA, 13 bp, Artificial Sequence
  Oligonucleotide for detection of SNP TSC0019988
ttttttgtttaat

SEQ ID NO: 78478 - DNA, 13 bp, Artificial Sequence
  Oligonucleotide for detection of SNP TSC0019988
attaaacaaaaaa

SEQ ID NO: 78479 - DNA, 13 bp, Artificial Sequence
  Oligonucleotide for detection of SNP TSC0019988
attaaagaaggga

SEQ ID NO: 78480 - DNA, 13 bp, Artificial Sequence
  Oligonucleotide for detection of SNP TSC0019988
tcccttctttaat

SEQ ID NO: 78481 - DNA, 13 bp, Artificial Sequence
  Oligonucleotide for detection of SNP TSC0019988
attaaataaggga

SEQ ID NO: 78482 - DNA, 13 bp, Artificial Sequence
  Oligonucleotide for detection of SNP TSC0019988
tcccttatttaat

SEQ ID NO: 78483 - DNA, 13 bp, Artificial Sequence
  Oligonucleotide for detection of SNP TSC0019989
ggatgaggtggty

SEQ ID NO: 78484 - DNA, 13 bp, Artificial Sequence
  Oligonucleotide for detection of SNP TSC0019989
raccacctcatcc

SEQ ID NO: 78485 - DNA, 13 bp, Artificial Sequence
  Oligonucleotide for detection of SNP TSC0019989
ggatgaagtggty

SEQ ID NO: 78486 - DNA, 13 bp, Artificial Sequence
  Oligonucleotide for detection of SNP TSC0019989
raccacttcatcc

SEQ ID NO: 78487 - DNA, 13 bp, Artificial Sequence
  Oligonucleotide for detection of SNP TSC0019990
ggtgaggtttagt

SEQ ID NO: 78488 - DNA, 13 bp, Artificial Sequence
  Oligonucleotide for detection of SNP TSC0019990
actaaacctcacc

SEQ ID NO: 78489 - DNA, 13 bp, Artificial Sequence
  Oligonucleotide for detection of SNP TSC0019990
ggtgagatttagt

SEQ ID NO: 78490 - DNA, 13 bp, Artificial Sequence
  Oligonucleotide for detection of SNP TSC0019990
actaaatctcacc

SEQ ID NO: 78491 - DNA, 13 bp, Artificial Sequence
  Oligonucleotide for detection of SNP TSC0019991
agaggtatattty

SEQ ID NO: 78492 - DNA, 13 bp, Artificial Sequence
  Oligonucleotide for detection of SNP TSC0019991
raaatatacctct

SEQ ID NO: 78493 - DNA, 13 bp, Artificial Sequence
  Oligonucleotide for detection of SNP TSC0019991
agaggtttattty

SEQ ID NO: 78494 - DNA, 13 bp, Artificial Sequence
  Oligonucleotide for detection of SNP TSC0019991
raaataaacctct

SEQ ID NO: 78495 - DNA, 13 bp, Artificial Sequence
  Oligonucleotide for detection of SNP TSC0019991
gaagtatgttttt

SEQ ID NO: 78496 - DNA, 13 bp, Artificial Sequence
  Oligonucleotide for detection of SNP TSC0019991
aaaaacatacttc

SEQ ID NO: 78497 - DNA, 13 bp, Artificial Sequence
  Oligonucleotide for detection of SNP TSC0019991
gaagtaggttttt

SEQ ID NO: 78498 - DNA, 13 bp, Artificial Sequence
  Oligonucleotide for detection of SNP TSC0019991
aaaaacctacttc

SEQ ID NO: 78499 - DNA, 13 bp, Artificial Sequence
  Oligonucleotide for detection of SNP TSC0019992
ttgtagagttggy

SEQ ID NO: 78500 - DNA, 13 bp, Artificial Sequence
  Oligonucleotide for detection of SNP TSC0019992
rccaactctacaa

SEQ ID NO: 78501 - DNA, 13 bp, Artificial Sequence
  Oligonucleotide for detection of SNP TSC0019992
ttgtagtgttggy

SEQ ID NO: 78502 - DNA, 13 bp, Artificial Sequence
  Oligonucleotide for detection of SNP TSC0019992
rccaacactacaa

SEQ ID NO: 78503 - DNA, 13 bp, Artificial Sequence
  Oligonucleotide for detection of SNP TSC0019992
tcgtagagttggy

SEQ ID NO: 78504 - DNA, 13 bp, Artificial Sequence
  Oligonucleotide for detection of SNP TSC0019992
rccaactctacga

SEQ ID NO: 78505 - DNA, 13 bp, Artificial Sequence
  Oligonucleotide for detection of SNP TSC0019992
tcgtagtgttggy

SEQ ID NO: 78506 - DNA, 13 bp, Artificial Sequence
  Oligonucleotide for detection of SNP TSC0019992
rccaacactacga

SEQ ID NO: 78507 - DNA, 13 bp, Artificial Sequence
  Oligonucleotide for detection of SNP TSC0019992
ttgtagagtcggy

SEQ ID NO: 78508 - DNA, 13 bp, Artificial Sequence
  Oligonucleotide for detection of SNP TSC0019992
rccgactctacaa

SEQ ID NO: 78509 - DNA, 13 bp, Artificial Sequence
  Oligonucleotide for detection of SNP TSC0019992
ttgtagcgttggy

SEQ ID NO: 78510 - DNA, 13 bp, Artificial Sequence
  Oligonucleotide for detection of SNP TSC0019992
rccaacgctacaa

SEQ ID NO: 78511 - DNA, 13 bp, Artificial Sequence
  Oligonucleotide for detection of SNP TSC0019992
tcgtagagtcggy

SEQ ID NO: 78512 - DNA, 13 bp, Artificial Sequence
  Oligonucleotide for detection of SNP TSC0019992
rccgactctacga

SEQ ID NO: 78513 - DNA, 13 bp, Artificial Sequence
  Oligonucleotide for detection of SNP TSC0019992
ttgtagtgtcggy

SEQ ID NO: 78514 - DNA, 13 bp, Artificial Sequence
  Oligonucleotide for detection of SNP TSC0019992
rccgacactacaa

SEQ ID NO: 78515 - DNA, 13 bp, Artificial Sequence
  Oligonucleotide for detection of SNP TSC0019992
tcgtagcgttggy

SEQ ID NO: 78516 - DNA, 13 bp, Artificial Sequence
  Oligonucleotide for detection of SNP TSC0019992
rccaacgctacga

SEQ ID NO: 78517 - DNA, 13 bp, Artificial Sequence
  Oligonucleotide for detection of SNP TSC0019992
tcgtagtgtcggy

SEQ ID NO: 78518 - DNA, 13 bp, Artificial Sequence
  Oligonucleotide for detection of SNP TSC0019992
rccgacactacga

SEQ ID NO: 78519 - DNA, 13 bp, Artificial Sequence
  Oligonucleotide for detection of SNP TSC0019992
ttgtagcgtcggy

SEQ ID NO: 78520 - DNA, 13 bp, Artificial Sequence
  Oligonucleotide for detection of SNP TSC0019992
rccgacgctacaa

SEQ ID NO: 78521 - DNA, 13 bp, Artificial Sequence
  Oligonucleotide for detection of SNP TSC0019992
tcgtagcgtcggy

SEQ ID NO: 78522 - DNA, 13 bp, Artificial Sequence
  Oligonucleotide for detection of SNP TSC0019992
rccgacgctacga

SEQ ID NO: 78523 - DNA, 13 bp, Artificial Sequence
  Oligonucleotide for detection of SNP TSC0019992
gttggttttgtgg

SEQ ID NO: 78524 - DNA, 13 bp, Artificial Sequence
  Oligonucleotide for detection of SNP TSC0019992
ccacaaaaccaac

SEQ ID NO: 78525 - DNA, 13 bp, Artificial Sequence
  Oligonucleotide for detection of SNP TSC0019992
gttggtgttgtgg

SEQ ID NO: 78526 - DNA, 13 bp, Artificial Sequence
  Oligonucleotide for detection of SNP TSC0019992
ccacaacaccaac

SEQ ID NO: 78527 - DNA, 13 bp, Artificial Sequence
  Oligonucleotide for detection of SNP TSC0019992
gtcggttttgtgg

SEQ ID NO: 78528 - DNA, 13 bp, Artificial Sequence
  Oligonucleotide for detection of SNP TSC0019992
ccacaaaaccgac

SEQ ID NO: 78529 - DNA, 13 bp, Artificial Sequence
  Oligonucleotide for detection of SNP TSC0019992
gtcggtgttgtgg

SEQ ID NO: 78530 - DNA, 13 bp, Artificial Sequence
  Oligonucleotide for detection of SNP TSC0019992
ccacaacaccgac

SEQ ID NO: 78531 - DNA, 13 bp, Artificial Sequence
  Oligonucleotide for detection of SNP TSC0019992
gttggttttgcgg

SEQ ID NO: 78532 - DNA, 13 bp, Artificial Sequence
  Oligonucleotide for detection of SNP TSC0019992
ccgcaaaaccaac

SEQ ID NO: 78533 - DNA, 13 bp, Artificial Sequence
  Oligonucleotide for detection of SNP TSC0019992
gttggcgttgtgg

SEQ ID NO: 78534 - DNA, 13 bp, Artificial Sequence
  Oligonucleotide for detection of SNP TSC0019992
ccacaacgccaac

SEQ ID NO: 78535 - DNA, 13 bp, Artificial Sequence
  Oligonucleotide for detection of SNP TSC0019992
gtcggttttgcgg

SEQ ID NO: 78536 - DNA, 13 bp, Artificial Sequence
  Oligonucleotide for detection of SNP TSC0019992
ccgcaaaaccgac

SEQ ID NO: 78537 - DNA, 13 bp, Artificial Sequence
  Oligonucleotide for detection of SNP TSC0019992
gttggtgttgcgg

SEQ ID NO: 78538 - DNA, 13 bp, Artificial Sequence
  Oligonucleotide for detection of SNP TSC0019992
ccgcaacaccaac

SEQ ID NO: 78539 - DNA, 13 bp, Artificial Sequence
  Oligonucleotide for detection of SNP TSC0019992
gtcggcgttgtgg

SEQ ID NO: 78540 - DNA, 13 bp, Artificial Sequence
  Oligonucleotide for detection of SNP TSC0019992
ccacaacgccgac

SEQ ID NO: 78541 - DNA, 13 bp, Artificial Sequence
  Oligonucleotide for detection of SNP TSC0019992
gtcggtgttgcgg

SEQ ID NO: 78542 - DNA, 13 bp, Artificial Sequence
  Oligonucleotide for detection of SNP TSC0019992
ccgcaacaccgac

SEQ ID NO: 78543 - DNA, 13 bp, Artificial Sequence
  Oligonucleotide for detection of SNP TSC0019992
gttggcgttgcgg

SEQ ID NO: 78544 - DNA, 13 bp, Artificial Sequence
  Oligonucleotide for detection of SNP TSC0019992
ccgcaacgccaac

SEQ ID NO: 78545 - DNA, 13 bp, Artificial Sequence
  Oligonucleotide for detection of SNP TSC0019992
gtcggcgttgcgg

SEQ ID NO: 78546 - DNA, 13 bp, Artificial Sequence
  Oligonucleotide for detection of SNP TSC0019992
ccgcaacgccgac

SEQ ID NO: 78547 - DNA, 13 bp, Artificial Sequence
  Oligonucleotide for detection of SNP TSC0019994
ttgttttgggaga

SEQ ID NO: 78548 - DNA, 13 bp, Artificial Sequence
  Oligonucleotide for detection of SNP TSC0019994
tctcccaaaacaa

SEQ ID NO: 78549 - DNA, 13 bp, Artificial Sequence
  Oligonucleotide for detection of SNP TSC0019994
ttgtttcgggaga

SEQ ID NO: 78550 - DNA, 13 bp, Artificial Sequence
  Oligonucleotide for detection of SNP TSC0019994
tctcccgaaacaa

SEQ ID NO: 78551 - DNA, 13 bp, Artificial Sequence
  Oligonucleotide for detection of SNP TSC0019994
ttttttagggtag

SEQ ID NO: 78552 - DNA, 13 bp, Artificial Sequence
  Oligonucleotide for detection of SNP TSC0019994
ctaccctaaaaaa

SEQ ID NO: 78553 - DNA, 13 bp, Artificial Sequence
  Oligonucleotide for detection of SNP TSC0019994
tttttcggggtag

SEQ ID NO: 78554 - DNA, 13 bp, Artificial Sequence
  Oligonucleotide for detection of SNP TSC0019994
ctaccccgaaaaa

SEQ ID NO: 78555 - DNA, 13 bp, Artificial Sequence
  Oligonucleotide for detection of SNP TSC0019995
gtttgtaaagata

SEQ ID NO: 78556 - DNA, 13 bp, Artificial Sequence
  Oligonucleotide for detection of SNP TSC0019995
tatctttacaaac

SEQ ID NO: 78557 - DNA, 13 bp, Artificial Sequence
  Oligonucleotide for detection of SNP TSC0019995
gtttgttaagata

SEQ ID NO: 78558 - DNA, 13 bp, Artificial Sequence
  Oligonucleotide for detection of SNP TSC0019995
tatcttaacaaac

SEQ ID NO: 78559 - DNA, 13 bp, Artificial Sequence
  Oligonucleotide for detection of SNP TSC0019995
tgtttttgtagay

SEQ ID NO: 78560 - DNA, 13 bp, Artificial Sequence
  Oligonucleotide for detection of SNP TSC0019995
rtctacaaaaaca

SEQ ID NO: 78561 - DNA, 13 bp, Artificial Sequence
  Oligonucleotide for detection of SNP TSC0019995
tgttttggtagay

SEQ ID NO: 78562 - DNA, 13 bp, Artificial Sequence
  Oligonucleotide for detection of SNP TSC0019995
rtctaccaaaaca

SEQ ID NO: 78563 - DNA, 13 bp, Artificial Sequence
  Oligonucleotide for detection of SNP TSC0019997
tggttttgtttty

SEQ ID NO: 78564 - DNA, 13 bp, Artificial Sequence
  Oligonucleotide for detection of SNP TSC0019997
raaaacaaaacca

SEQ ID NO: 78565 - DNA, 13 bp, Artificial Sequence
  Oligonucleotide for detection of SNP TSC0019997
tggtttcgtttty

SEQ ID NO: 78566 - DNA, 13 bp, Artificial Sequence
  Oligonucleotide for detection of SNP TSC0019997
raaaacgaaacca

SEQ ID NO: 78567 - DNA, 13 bp, Artificial Sequence
  Oligonucleotide for detection of SNP TSC0019997
gaaggtggggtta

SEQ ID NO: 78568 - DNA, 13 bp, Artificial Sequence
  Oligonucleotide for detection of SNP TSC0019997
taaccccaccttc

SEQ ID NO: 78569 - DNA, 13 bp, Artificial Sequence
  Oligonucleotide for detection of SNP TSC0019997
gaaggtagggtta

SEQ ID NO: 78570 - DNA, 13 bp, Artificial Sequence
  Oligonucleotide for detection of SNP TSC0019997
taaccctaccttc

SEQ ID NO: 78571 - DNA, 13 bp, Artificial Sequence
  Oligonucleotide for detection of SNP TSC0019997
gaaggcggggtta

SEQ ID NO: 78572 - DNA, 13 bp, Artificial Sequence
  Oligonucleotide for detection of SNP TSC0019997
taaccccgccttc

SEQ ID NO: 78573 - DNA, 13 bp, Artificial Sequence
  Oligonucleotide for detection of SNP TSC0019999
atttatggttatg

SEQ ID NO: 78574 - DNA, 13 bp, Artificial Sequence
  Oligonucleotide for detection of SNP TSC0019999
cataaccataaat

SEQ ID NO: 78575 - DNA, 13 bp, Artificial Sequence
  Oligonucleotide for detection of SNP TSC0019999
atttattgttatg

SEQ ID NO: 78576 - DNA, 13 bp, Artificial Sequence
  Oligonucleotide for detection of SNP TSC0019999
cataacaataaat

SEQ ID NO: 78577 - DNA, 13 bp, Artificial Sequence
  Oligonucleotide for detection of SNP TSC0019999
atttacggttatg

SEQ ID NO: 78578 - DNA, 13 bp, Artificial Sequence
  Oligonucleotide for detection of SNP TSC0019999
cataaccgtaaat

SEQ ID NO: 78579 - DNA, 13 bp, Artificial Sequence
  Oligonucleotide for detection of SNP TSC0019999
tataattgtaggt

SEQ ID NO: 78580 - DNA, 13 bp, Artificial Sequence
  Oligonucleotide for detection of SNP TSC0019999
acctacaattata

SEQ ID NO: 78581 - DNA, 13 bp, Artificial Sequence
  Oligonucleotide for detection of SNP TSC0019999
tataatagtaggt

SEQ ID NO: 78582 - DNA, 13 bp, Artificial Sequence
  Oligonucleotide for detection of SNP TSC0019999
acctactattata

SEQ ID NO: 78583 - DNA, 13 bp, Artificial Sequence
  Oligonucleotide for detection of SNP TSC0019999
tataatcgtaggt

SEQ ID NO: 78584 - DNA, 13 bp, Artificial Sequence
  Oligonucleotide for detection of SNP TSC0019999
acctacgattata

SEQ ID NO: 78585 - DNA, 13 bp, Artificial Sequence
  Oligonucleotide for detection of SNP TSC0020004
agtagtttgttga

SEQ ID NO: 78586 - DNA, 13 bp, Artificial Sequence
  Oligonucleotide for detection of SNP TSC0020004
tcaacaaactact

SEQ ID NO: 78587 - DNA, 13 bp, Artificial Sequence
  Oligonucleotide for detection of SNP TSC0020004
agtagtgtgttga

SEQ ID NO: 78588 - DNA, 13 bp, Artificial Sequence
  Oligonucleotide for detection of SNP TSC0020004
tcaacacactact

SEQ ID NO: 78589 - DNA, 13 bp, Artificial Sequence
  Oligonucleotide for detection of SNP TSC0020004
agtagttcgttga

SEQ ID NO: 78590 - DNA, 13 bp, Artificial Sequence
  Oligonucleotide for detection of SNP TSC0020004
tcaacgaactact

SEQ ID NO: 78591 - DNA, 13 bp, Artificial Sequence
  Oligonucleotide for detection of SNP TSC0020004
agtagcgtgttga

SEQ ID NO: 78592 - DNA, 13 bp, Artificial Sequence
  Oligonucleotide for detection of SNP TSC0020004
tcaacacgctact

SEQ ID NO: 78593 - DNA, 13 bp, Artificial Sequence
  Oligonucleotide for detection of SNP TSC0020004
agtagtgcgttga

SEQ ID NO: 78594 - DNA, 13 bp, Artificial Sequence
  Oligonucleotide for detection of SNP TSC0020004
tcaacgcactact

SEQ ID NO: 78595 - DNA, 13 bp, Artificial Sequence
  Oligonucleotide for detection of SNP TSC0020004
agtagcgcgttga

SEQ ID NO: 78596 - DNA, 13 bp, Artificial Sequence
  Oligonucleotide for detection of SNP TSC0020004
tcaacgcgctact

SEQ ID NO: 78597 - DNA, 13 bp, Artificial Sequence
  Oligonucleotide for detection of SNP TSC0020004
ttagtgggttgtt

SEQ ID NO: 78598 - DNA, 13 bp, Artificial Sequence
  Oligonucleotide for detection of SNP TSC0020004
aacaacccactaa

SEQ ID NO: 78599 - DNA, 13 bp, Artificial Sequence
  Oligonucleotide for detection of SNP TSC0020004
ttagtgtgttgtt

SEQ ID NO: 78600 - DNA, 13 bp, Artificial Sequence
  Oligonucleotide for detection of SNP TSC0020004
aacaacacactaa

SEQ ID NO: 78601 - DNA, 13 bp, Artificial Sequence
  Oligonucleotide for detection of SNP TSC0020004
ttagcgggttgtt

SEQ ID NO: 78602 - DNA, 13 bp, Artificial Sequence
  Oligonucleotide for detection of SNP TSC0020004
aacaacccgctaa

SEQ ID NO: 78603 - DNA, 13 bp, Artificial Sequence
  Oligonucleotide for detection of SNP TSC0020004
ttagcgtgttgtt

SEQ ID NO: 78604 - DNA, 13 bp, Artificial Sequence
  Oligonucleotide for detection of SNP TSC0020004
aacaacacgctaa

SEQ ID NO: 78605 - DNA, 13 bp, Artificial Sequence
  Oligonucleotide for detection of SNP TSC0020004
ttagtgcgttgtt

SEQ ID NO: 78606 - DNA, 13 bp, Artificial Sequence
  Oligonucleotide for detection of SNP TSC0020004
aacaacgcactaa

SEQ ID NO: 78607 - DNA, 13 bp, Artificial Sequence
  Oligonucleotide for detection of SNP TSC0020004
ttagcgcgttgtt

SEQ ID NO: 78608 - DNA, 13 bp, Artificial Sequence
  Oligonucleotide for detection of SNP TSC0020004
aacaacgcgctaa

SEQ ID NO: 78609 - DNA, 13 bp, Artificial Sequence
  Oligonucleotide for detection of SNP TSC0020005
tttgagaggtata

SEQ ID NO: 78610 - DNA, 13 bp, Artificial Sequence
  Oligonucleotide for detection of SNP TSC0020005
tatacctctcaaa

SEQ ID NO: 78611 - DNA, 13 bp, Artificial Sequence
  Oligonucleotide for detection of SNP TSC0020005
tttgaggggtata

SEQ ID NO: 78612 - DNA, 13 bp, Artificial Sequence
  Oligonucleotide for detection of SNP TSC0020005
tatacccctcaaa

SEQ ID NO: 78613 - DNA, 13 bp, Artificial Sequence
  Oligonucleotide for detection of SNP TSC0020006
ttggttgagtttt

SEQ ID NO: 78614 - DNA, 13 bp, Artificial Sequence
  Oligonucleotide for detection of SNP TSC0020006
aaaactcaaccaa

SEQ ID NO: 78615 - DNA, 13 bp, Artificial Sequence
  Oligonucleotide for detection of SNP TSC0020006
ttggttaagtttt

SEQ ID NO: 78616 - DNA, 13 bp, Artificial Sequence
  Oligonucleotide for detection of SNP TSC0020006
aaaacttaaccaa

SEQ ID NO: 78617 - DNA, 13 bp, Artificial Sequence
  Oligonucleotide for detection of SNP TSC0020009
taaatatgtggtt

SEQ ID NO: 78618 - DNA, 13 bp, Artificial Sequence
  Oligonucleotide for detection of SNP TSC0020009
aaccacatattta

SEQ ID NO: 78619 - DNA, 13 bp, Artificial Sequence
  Oligonucleotide for detection of SNP TSC0020009
taaatacgtggtt

SEQ ID NO: 78620 - DNA, 13 bp, Artificial Sequence
  Oligonucleotide for detection of SNP TSC0020009
aaccacgtattta

SEQ ID NO: 78621 - DNA, 13 bp, Artificial Sequence
  Oligonucleotide for detection of SNP TSC0020009
agttatgtgtttg

SEQ ID NO: 78622 - DNA, 13 bp, Artificial Sequence
  Oligonucleotide for detection of SNP TSC0020009
caaacacataact

SEQ ID NO: 78623 - DNA, 13 bp, Artificial Sequence
  Oligonucleotide for detection of SNP TSC0020009
agttatatgtttg

SEQ ID NO: 78624 - DNA, 13 bp, Artificial Sequence
  Oligonucleotide for detection of SNP TSC0020009
caaacatataact

SEQ ID NO: 78625 - DNA, 13 bp, Artificial Sequence
  Oligonucleotide for detection of SNP TSC0020009
agttacgtgtttg

SEQ ID NO: 78626 - DNA, 13 bp, Artificial Sequence
  Oligonucleotide for detection of SNP TSC0020009
caaacacgtaact

SEQ ID NO: 78627 - DNA, 13 bp, Artificial Sequence
  Oligonucleotide for detection of SNP TSC0020010
taattagagaata

SEQ ID NO: 78628 - DNA, 13 bp, Artificial Sequence
  Oligonucleotide for detection of SNP TSC0020010
tattctctaatta

SEQ ID NO: 78629 - DNA, 13 bp, Artificial Sequence
  Oligonucleotide for detection of SNP TSC0020010
taattatagaata

SEQ ID NO: 78630 - DNA, 13 bp, Artificial Sequence
  Oligonucleotide for detection of SNP TSC0020010
tattctataatta

SEQ ID NO: 78631 - DNA, 13 bp, Artificial Sequence
  Oligonucleotide for detection of SNP TSC0020010
tgttttttgattg

SEQ ID NO: 78632 - DNA, 13 bp, Artificial Sequence
  Oligonucleotide for detection of SNP TSC0020010
caatcaaaaaaca

SEQ ID NO: 78633 - DNA, 13 bp, Artificial Sequence
  Oligonucleotide for detection of SNP TSC0020010
tgttttatgattg

SEQ ID NO: 78634 - DNA, 13 bp, Artificial Sequence
  Oligonucleotide for detection of SNP TSC0020010
caatcataaaaca

SEQ ID NO: 78635 - DNA, 13 bp, Artificial Sequence
  Oligonucleotide for detection of SNP TSC0020019
gatgaagggatta

SEQ ID NO: 78636 - DNA, 13 bp, Artificial Sequence
  Oligonucleotide for detection of SNP TSC0020019
taatcccttcatc

SEQ ID NO: 78637 - DNA, 13 bp, Artificial Sequence
  Oligonucleotide for detection of SNP TSC0020019
gatgaaaggatta

SEQ ID NO: 78638 - DNA, 13 bp, Artificial Sequence
  Oligonucleotide for detection of SNP TSC0020019
taatcctttcatc

SEQ ID NO: 78639 - DNA, 13 bp, Artificial Sequence
  Oligonucleotide for detection of SNP TSC0020021
gatatagagatta

SEQ ID NO: 78640 - DNA, 13 bp, Artificial Sequence
  Oligonucleotide for detection of SNP TSC0020021
taatctctatatc

SEQ ID NO: 78641 - DNA, 13 bp, Artificial Sequence
  Oligonucleotide for detection of SNP TSC0020021
gatatatagatta

SEQ ID NO: 78642 - DNA, 13 bp, Artificial Sequence
  Oligonucleotide for detection of SNP TSC0020021
taatctatatatc

SEQ ID NO: 78643 - DNA, 13 bp, Artificial Sequence
  Oligonucleotide for detection of SNP TSC0020021
taatttttgtaty

SEQ ID NO: 78644 - DNA, 13 bp, Artificial Sequence
  Oligonucleotide for detection of SNP TSC0020021
ratacaaaaatta

SEQ ID NO: 78645 - DNA, 13 bp, Artificial Sequence
  Oligonucleotide for detection of SNP TSC0020021
taatttatgtaty

SEQ ID NO: 78646 - DNA, 13 bp, Artificial Sequence
  Oligonucleotide for detection of SNP TSC0020021
ratacataaatta

SEQ ID NO: 78647 - DNA, 13 bp, Artificial Sequence
  Oligonucleotide for detection of SNP TSC0020022
ggaaatgatatgg

SEQ ID NO: 78648 - DNA, 13 bp, Artificial Sequence
  Oligonucleotide for detection of SNP TSC0020022
ccatatcatttcc

SEQ ID NO: 78649 - DNA, 13 bp, Artificial Sequence
  Oligonucleotide for detection of SNP TSC0020022
ggaaataatatgg

SEQ ID NO: 78650 - DNA, 13 bp, Artificial Sequence
  Oligonucleotide for detection of SNP TSC0020022
ccatattatttcc

SEQ ID NO: 78651 - DNA, 13 bp, Artificial Sequence
  Oligonucleotide for detection of SNP TSC0020022
ggaaacgatatgg

SEQ ID NO: 78652 - DNA, 13 bp, Artificial Sequence
  Oligonucleotide for detection of SNP TSC0020022
ccatatcgtttcc

SEQ ID NO: 78653 - DNA, 13 bp, Artificial Sequence
  Oligonucleotide for detection of SNP TSC0020023
taagatgtaaaag

SEQ ID NO: 78654 - DNA, 13 bp, Artificial Sequence
  Oligonucleotide for detection of SNP TSC0020023
cttttacatctta

SEQ ID NO: 78655 - DNA, 13 bp, Artificial Sequence
  Oligonucleotide for detection of SNP TSC0020023
taagatataaaag

SEQ ID NO: 78656 - DNA, 13 bp, Artificial Sequence
  Oligonucleotide for detection of SNP TSC0020023
cttttatatctta

SEQ ID NO: 78657 - DNA, 13 bp, Artificial Sequence
  Oligonucleotide for detection of SNP TSC0020023
taagacgtaaaag

SEQ ID NO: 78658 - DNA, 13 bp, Artificial Sequence
  Oligonucleotide for detection of SNP TSC0020023
cttttacgtctta

SEQ ID NO: 78659 - DNA, 13 bp, Artificial Sequence
  Oligonucleotide for detection of SNP TSC0020027
aaaattattaaag

SEQ ID NO: 78660 - DNA, 13 bp, Artificial Sequence
  Oligonucleotide for detection of SNP TSC0020027
ctttaataatttt

SEQ ID NO: 78661 - DNA, 13 bp, Artificial Sequence
  Oligonucleotide for detection of SNP TSC0020027
aaaatttttaaag

SEQ ID NO: 78662 - DNA, 13 bp, Artificial Sequence
  Oligonucleotide for detection of SNP TSC0020027
ctttaaaaatttt

SEQ ID NO: 78663 - DNA, 13 bp, Artificial Sequence
  Oligonucleotide for detection of SNP TSC0020027
ttttaatggtttt

SEQ ID NO: 78664 - DNA, 13 bp, Artificial Sequence
  Oligonucleotide for detection of SNP TSC0020027
aaaaccattaaaa

SEQ ID NO: 78665 - DNA, 13 bp, Artificial Sequence
  Oligonucleotide for detection of SNP TSC0020027
ttttaaaggtttt

SEQ ID NO: 78666 - DNA, 13 bp, Artificial Sequence
  Oligonucleotide for detection of SNP TSC0020027
aaaacctttaaaa

SEQ ID NO: 78667 - DNA, 13 bp, Artificial Sequence
  Oligonucleotide for detection of SNP TSC0020028
tgagtttgttata

SEQ ID NO: 78668 - DNA, 13 bp, Artificial Sequence
  Oligonucleotide for detection of SNP TSC0020028
tataacaaactca

SEQ ID NO: 78669 - DNA, 13 bp, Artificial Sequence
  Oligonucleotide for detection of SNP TSC0020028
tgagttcgttata

SEQ ID NO: 78670 - DNA, 13 bp, Artificial Sequence
  Oligonucleotide for detection of SNP TSC0020028
tataacgaactca

SEQ ID NO: 78671 - DNA, 13 bp, Artificial Sequence
  Oligonucleotide for detection of SNP TSC0020028
tatagtgaattta

SEQ ID NO: 78672 - DNA, 13 bp, Artificial Sequence
  Oligonucleotide for detection of SNP TSC0020028
taaattcactata

SEQ ID NO: 78673 - DNA, 13 bp, Artificial Sequence
  Oligonucleotide for detection of SNP TSC0020028
tatagtaaattta

SEQ ID NO: 78674 - DNA, 13 bp, Artificial Sequence
  Oligonucleotide for detection of SNP TSC0020028
taaatttactata

SEQ ID NO: 78675 - DNA, 13 bp, Artificial Sequence
  Oligonucleotide for detection of SNP TSC0020028
tatagcgaattta

SEQ ID NO: 78676 - DNA, 13 bp, Artificial Sequence
  Oligonucleotide for detection of SNP TSC0020028
taaattcgctata

SEQ ID NO: 78677 - DNA, 13 bp, Artificial Sequence
  Oligonucleotide for detection of SNP TSC0020035
gtagagaattgty

SEQ ID NO: 78678 - DNA, 13 bp, Artificial Sequence
  Oligonucleotide for detection of SNP TSC0020035
racaattctctac

SEQ ID NO: 78679 - DNA, 13 bp, Artificial Sequence
  Oligonucleotide for detection of SNP TSC0020035
gtagaggattgty

SEQ ID NO: 78680 - DNA, 13 bp, Artificial Sequence
  Oligonucleotide for detection of SNP TSC0020035
racaatcctctac

SEQ ID NO: 78681 - DNA, 13 bp, Artificial Sequence
  Oligonucleotide for detection of SNP TSC0020038
gtggttgtagtga

SEQ ID NO: 78682 - DNA, 13 bp, Artificial Sequence
  Oligonucleotide for detection of SNP TSC0020038
tcactacaaccac

SEQ ID NO: 78683 - DNA, 13 bp, Artificial Sequence
  Oligonucleotide for detection of SNP TSC0020038
gtggttttagtga

SEQ ID NO: 78684 - DNA, 13 bp, Artificial Sequence
  Oligonucleotide for detection of SNP TSC0020038
tcactaaaaccac

SEQ ID NO: 78685 - DNA, 13 bp, Artificial Sequence
  Oligonucleotide for detection of SNP TSC0020038
ttattgtagttay

SEQ ID NO: 78686 - DNA, 13 bp, Artificial Sequence
  Oligonucleotide for detection of SNP TSC0020038
rtaactacaataa

SEQ ID NO: 78687 - DNA, 13 bp, Artificial Sequence
  Oligonucleotide for detection of SNP TSC0020038
ttattgaagttay

SEQ ID NO: 78688 - DNA, 13 bp, Artificial Sequence
  Oligonucleotide for detection of SNP TSC0020038
rtaacttcaataa

SEQ ID NO: 78689 - DNA, 13 bp, Artificial Sequence
  Oligonucleotide for detection of SNP TSC0020039
ttttatgttatag

SEQ ID NO: 78690 - DNA, 13 bp, Artificial Sequence
  Oligonucleotide for detection of SNP TSC0020039
ctataacataaaa

SEQ ID NO: 78691 - DNA, 13 bp, Artificial Sequence
  Oligonucleotide for detection of SNP TSC0020039
ttttattttatag

SEQ ID NO: 78692 - DNA, 13 bp, Artificial Sequence
  Oligonucleotide for detection of SNP TSC0020039
ctataaaataaaa

SEQ ID NO: 78693 - DNA, 13 bp, Artificial Sequence
  Oligonucleotide for detection of SNP TSC0020039
ttataatatggaa

SEQ ID NO: 78694 - DNA, 13 bp, Artificial Sequence
  Oligonucleotide for detection of SNP TSC0020039
ttccatattataa

SEQ ID NO: 78695 - DNA, 13 bp, Artificial Sequence
  Oligonucleotide for detection of SNP TSC0020039
ttataaaatggaa

SEQ ID NO: 78696 - DNA, 13 bp, Artificial Sequence
  Oligonucleotide for detection of SNP TSC0020039
ttccattttataa

SEQ ID NO: 78697 - DNA, 13 bp, Artificial Sequence
  Oligonucleotide for detection of SNP TSC0020041
aggattttgtttg

SEQ ID NO: 78698 - DNA, 13 bp, Artificial Sequence
  Oligonucleotide for detection of SNP TSC0020041
caaacaaaatcct

SEQ ID NO: 78699 - DNA, 13 bp, Artificial Sequence
  Oligonucleotide for detection of SNP TSC0020041
aggattgtgtttg

SEQ ID NO: 78700 - DNA, 13 bp, Artificial Sequence
  Oligonucleotide for detection of SNP TSC0020041
caaacacaatcct

SEQ ID NO: 78701 - DNA, 13 bp, Artificial Sequence
  Oligonucleotide for detection of SNP TSC0020041
aggatcgtgtttg

SEQ ID NO: 78702 - DNA, 13 bp, Artificial Sequence
  Oligonucleotide for detection of SNP TSC0020041
caaacacgatcct

SEQ ID NO: 78703 - DNA, 13 bp, Artificial Sequence
  Oligonucleotide for detection of SNP TSC0020041
taggtaggatttt

SEQ ID NO: 78704 - DNA, 13 bp, Artificial Sequence
  Oligonucleotide for detection of SNP TSC0020041
aaaatcctaccta

SEQ ID NO: 78705 - DNA, 13 bp, Artificial Sequence
  Oligonucleotide for detection of SNP TSC0020041
taggtatgatttt

SEQ ID NO: 78706 - DNA, 13 bp, Artificial Sequence
  Oligonucleotide for detection of SNP TSC0020041
aaaatcataccta

SEQ ID NO: 78707 - DNA, 13 bp, Artificial Sequence
  Oligonucleotide for detection of SNP TSC0020041
taggtacgatttt

SEQ ID NO: 78708 - DNA, 13 bp, Artificial Sequence
  Oligonucleotide for detection of SNP TSC0020041
aaaatcgtaccta

SEQ ID NO: 78709 - DNA, 13 bp, Artificial Sequence
  Oligonucleotide for detection of SNP TSC0020042
tgtttgttttgty

SEQ ID NO: 78710 - DNA, 13 bp, Artificial Sequence
  Oligonucleotide for detection of SNP TSC0020042
racaaaacaaaca

SEQ ID NO: 78711 - DNA, 13 bp, Artificial Sequence
  Oligonucleotide for detection of SNP TSC0020042
tgtttggtttgty

SEQ ID NO: 78712 - DNA, 13 bp, Artificial Sequence
  Oligonucleotide for detection of SNP TSC0020042
racaaaccaaaca

SEQ ID NO: 78713 - DNA, 13 bp, Artificial Sequence
  Oligonucleotide for detection of SNP TSC0020042
ggtaaagtaggta

SEQ ID NO: 78714 - DNA, 13 bp, Artificial Sequence
  Oligonucleotide for detection of SNP TSC0020042
tacctactttacc

SEQ ID NO: 78715 - DNA, 13 bp, Artificial Sequence
  Oligonucleotide for detection of SNP TSC0020042
ggtaaattaggta

SEQ ID NO: 78716 - DNA, 13 bp, Artificial Sequence
  Oligonucleotide for detection of SNP TSC0020042
tacctaatttacc

SEQ ID NO: 78717 - DNA, 13 bp, Artificial Sequence
  Oligonucleotide for detection of SNP TSC0020046
ttaataaggtgaa

SEQ ID NO: 78718 - DNA, 13 bp, Artificial Sequence
  Oligonucleotide for detection of SNP TSC0020046
ttcaccttattaa

SEQ ID NO: 78719 - DNA, 13 bp, Artificial Sequence
  Oligonucleotide for detection of SNP TSC0020046
tttattttgttgg

SEQ ID NO: 78720 - DNA, 13 bp, Artificial Sequence
  Oligonucleotide for detection of SNP TSC0020046
ccaacaaaataaa

SEQ ID NO: 78721 - DNA, 13 bp, Artificial Sequence
  Oligonucleotide for detection of SNP TSC0020046
tttattatgttgg

SEQ ID NO: 78722 - DNA, 13 bp, Artificial Sequence
  Oligonucleotide for detection of SNP TSC0020046
ccaacataataaa

SEQ ID NO: 78723 - DNA, 13 bp, Artificial Sequence
  Oligonucleotide for detection of SNP TSC0020048
attgttagggtta

SEQ ID NO: 78724 - DNA, 13 bp, Artificial Sequence
  Oligonucleotide for detection of SNP TSC0020048
taaccctaacaat

SEQ ID NO: 78725 - DNA, 13 bp, Artificial Sequence
  Oligonucleotide for detection of SNP TSC0020048
attgttggggtta

SEQ ID NO: 78726 - DNA, 13 bp, Artificial Sequence
  Oligonucleotide for detection of SNP TSC0020048
taaccccaacaat

SEQ ID NO: 78727 - DNA, 13 bp, Artificial Sequence
  Oligonucleotide for detection of SNP TSC0020048
attgtcggggtta

SEQ ID NO: 78728 - DNA, 13 bp, Artificial Sequence
  Oligonucleotide for detection of SNP TSC0020048
taaccccgacaat

SEQ ID NO: 78729 - DNA, 13 bp, Artificial Sequence
  Oligonucleotide for detection of SNP TSC0020048
tggttttgatagt

SEQ ID NO: 78730 - DNA, 13 bp, Artificial Sequence
  Oligonucleotide for detection of SNP TSC0020048
actatcaaaacca

SEQ ID NO: 78731 - DNA, 13 bp, Artificial Sequence
  Oligonucleotide for detection of SNP TSC0020048
tggtttcgatagt

SEQ ID NO: 78732 - DNA, 13 bp, Artificial Sequence
  Oligonucleotide for detection of SNP TSC0020048
actatcgaaacca

SEQ ID NO: 78733 - DNA, 13 bp, Artificial Sequence
  Oligonucleotide for detection of SNP TSC0020049
tggttagtgaatt

SEQ ID NO: 78734 - DNA, 13 bp, Artificial Sequence
  Oligonucleotide for detection of SNP TSC0020049
aattcactaacca

SEQ ID NO: 78735 - DNA, 13 bp, Artificial Sequence
  Oligonucleotide for detection of SNP TSC0020049
tggttaatgaatt

SEQ ID NO: 78736 - DNA, 13 bp, Artificial Sequence
  Oligonucleotide for detection of SNP TSC0020049
aattcattaacca

SEQ ID NO: 78737 - DNA, 13 bp, Artificial Sequence
  Oligonucleotide for detection of SNP TSC0020049
cggttagtgaatt

SEQ ID NO: 78738 - DNA, 13 bp, Artificial Sequence
  Oligonucleotide for detection of SNP TSC0020049
aattcactaaccg

SEQ ID NO: 78739 - DNA, 13 bp, Artificial Sequence
  Oligonucleotide for detection of SNP TSC0020049
cggttaatgaatt

SEQ ID NO: 78740 - DNA, 13 bp, Artificial Sequence
  Oligonucleotide for detection of SNP TSC0020049
aattcattaaccg

SEQ ID NO: 78741 - DNA, 13 bp, Artificial Sequence
  Oligonucleotide for detection of SNP TSC0020050
ggtggtaggtgty

SEQ ID NO: 78742 - DNA, 13 bp, Artificial Sequence
  Oligonucleotide for detection of SNP TSC0020050
racacctaccacc

SEQ ID NO: 78743 - DNA, 13 bp, Artificial Sequence
  Oligonucleotide for detection of SNP TSC0020050
ggtggtaggcgty

SEQ ID NO: 78744 - DNA, 13 bp, Artificial Sequence
  Oligonucleotide for detection of SNP TSC0020050
racgcctaccacc

SEQ ID NO: 78745 - DNA, 13 bp, Artificial Sequence
  Oligonucleotide for detection of SNP TSC0020053
ttttttcgagata

SEQ ID NO: 78746 - DNA, 13 bp, Artificial Sequence
  Oligonucleotide for detection of SNP TSC0020053
tatctcgaaaaaa

SEQ ID NO: 78747 - DNA, 13 bp, Artificial Sequence
  Oligonucleotide for detection of SNP TSC0020053
tattttggaggga

SEQ ID NO: 78748 - DNA, 13 bp, Artificial Sequence
  Oligonucleotide for detection of SNP TSC0020053
tccctccaaaata

SEQ ID NO: 78749 - DNA, 13 bp, Artificial Sequence
  Oligonucleotide for detection of SNP TSC0020053
tattttagaggga

SEQ ID NO: 78750 - DNA, 13 bp, Artificial Sequence
  Oligonucleotide for detection of SNP TSC0020053
tccctctaaaata

SEQ ID NO: 78751 - DNA, 13 bp, Artificial Sequence
  Oligonucleotide for detection of SNP TSC0020053
tatttcggaggga

SEQ ID NO: 78752 - DNA, 13 bp, Artificial Sequence
  Oligonucleotide for detection of SNP TSC0020053
tccctccgaaata

SEQ ID NO: 78753 - DNA, 13 bp, Artificial Sequence
  Oligonucleotide for detection of SNP TSC0020054
attttaggtggtt

SEQ ID NO: 78754 - DNA, 13 bp, Artificial Sequence
  Oligonucleotide for detection of SNP TSC0020054
aaccacctaaaat

SEQ ID NO: 78755 - DNA, 13 bp, Artificial Sequence
  Oligonucleotide for detection of SNP TSC0020054
aattatgtagagt

SEQ ID NO: 78756 - DNA, 13 bp, Artificial Sequence
  Oligonucleotide for detection of SNP TSC0020054
actctacataatt

SEQ ID NO: 78757 - DNA, 13 bp, Artificial Sequence
  Oligonucleotide for detection of SNP TSC0020054
aattatttagagt

SEQ ID NO: 78758 - DNA, 13 bp, Artificial Sequence
  Oligonucleotide for detection of SNP TSC0020054
actctaaataatt

SEQ ID NO: 78759 - DNA, 13 bp, Artificial Sequence
  Oligonucleotide for detection of SNP TSC0020054
aattacgtagagt

SEQ ID NO: 78760 - DNA, 13 bp, Artificial Sequence
  Oligonucleotide for detection of SNP TSC0020054
actctacgtaatt

SEQ ID NO: 78761 - DNA, 13 bp, Artificial Sequence
  Oligonucleotide for detection of SNP TSC0020055
tttttgtgtgatt

SEQ ID NO: 78762 - DNA, 13 bp, Artificial Sequence
  Oligonucleotide for detection of SNP TSC0020055
aatcacacaaaaa

SEQ ID NO: 78763 - DNA, 13 bp, Artificial Sequence
  Oligonucleotide for detection of SNP TSC0020055
tttttgcgtgatt

SEQ ID NO: 78764 - DNA, 13 bp, Artificial Sequence
  Oligonucleotide for detection of SNP TSC0020055
aatcacgcaaaaa

SEQ ID NO: 78765 - DNA, 13 bp, Artificial Sequence
  Oligonucleotide for detection of SNP TSC0020055
aattatgtagaag

SEQ ID NO: 78766 - DNA, 13 bp, Artificial Sequence
  Oligonucleotide for detection of SNP TSC0020055
cttctacataatt

SEQ ID NO: 78767 - DNA, 13 bp, Artificial Sequence
  Oligonucleotide for detection of SNP TSC0020055
aattatatagaag

SEQ ID NO: 78768 - DNA, 13 bp, Artificial Sequence
  Oligonucleotide for detection of SNP TSC0020055
cttctatataatt

SEQ ID NO: 78769 - DNA, 13 bp, Artificial Sequence
  Oligonucleotide for detection of SNP TSC0020055
aattacgtagaag

SEQ ID NO: 78770 - DNA, 13 bp, Artificial Sequence
  Oligonucleotide for detection of SNP TSC0020055
cttctacgtaatt

SEQ ID NO: 78771 - DNA, 13 bp, Artificial Sequence
  Oligonucleotide for detection of SNP TSC0020056
tgattgagtgtgt

SEQ ID NO: 78772 - DNA, 13 bp, Artificial Sequence
  Oligonucleotide for detection of SNP TSC0020056
acacactcaatca

SEQ ID NO: 78773 - DNA, 13 bp, Artificial Sequence
  Oligonucleotide for detection of SNP TSC0020056
tgattgtgtgtgt

SEQ ID NO: 78774 - DNA, 13 bp, Artificial Sequence
  Oligonucleotide for detection of SNP TSC0020056
acacacacaatca

SEQ ID NO: 78775 - DNA, 13 bp, Artificial Sequence
  Oligonucleotide for detection of SNP TSC0020056
atatatttaatta

SEQ ID NO: 78776 - DNA, 13 bp, Artificial Sequence
  Oligonucleotide for detection of SNP TSC0020056
taattaaatatat

SEQ ID NO: 78777 - DNA, 13 bp, Artificial Sequence
  Oligonucleotide for detection of SNP TSC0020056
atatatataatta

SEQ ID NO: 78778 - DNA, 13 bp, Artificial Sequence
  Oligonucleotide for detection of SNP TSC0020056
taattatatatat

SEQ ID NO: 78779 - DNA, 13 bp, Artificial Sequence
  Oligonucleotide for detection of SNP TSC0020059
gttggttttatty

SEQ ID NO: 78780 - DNA, 13 bp, Artificial Sequence
  Oligonucleotide for detection of SNP TSC0020059
raataaaaccaac

SEQ ID NO: 78781 - DNA, 13 bp, Artificial Sequence
  Oligonucleotide for detection of SNP TSC0020059
gttggtgttatty

SEQ ID NO: 78782 - DNA, 13 bp, Artificial Sequence
  Oligonucleotide for detection of SNP TSC0020059
raataacaccaac

SEQ ID NO: 78783 - DNA, 13 bp, Artificial Sequence
  Oligonucleotide for detection of SNP TSC0020059
gtcggttttatty

SEQ ID NO: 78784 - DNA, 13 bp, Artificial Sequence
  Oligonucleotide for detection of SNP TSC0020059
raataaaaccgac

SEQ ID NO: 78785 - DNA, 13 bp, Artificial Sequence
  Oligonucleotide for detection of SNP TSC0020059
gtcggtgttatty

SEQ ID NO: 78786 - DNA, 13 bp, Artificial Sequence
  Oligonucleotide for detection of SNP TSC0020059
raataacaccgac

SEQ ID NO: 78787 - DNA, 13 bp, Artificial Sequence
  Oligonucleotide for detection of SNP TSC0020059
ggatgagattggy

SEQ ID NO: 78788 - DNA, 13 bp, Artificial Sequence
  Oligonucleotide for detection of SNP TSC0020059
rccaatctcatcc

SEQ ID NO: 78789 - DNA, 13 bp, Artificial Sequence
  Oligonucleotide for detection of SNP TSC0020059
ggatgatattggy

SEQ ID NO: 78790 - DNA, 13 bp, Artificial Sequence
  Oligonucleotide for detection of SNP TSC0020059
rccaatatcatcc

SEQ ID NO: 78791 - DNA, 13 bp, Artificial Sequence
  Oligonucleotide for detection of SNP TSC0020059
ggatgagatcggy

SEQ ID NO: 78792 - DNA, 13 bp, Artificial Sequence
  Oligonucleotide for detection of SNP TSC0020059
rccgatctcatcc

SEQ ID NO: 78793 - DNA, 13 bp, Artificial Sequence
  Oligonucleotide for detection of SNP TSC0020059
ggatgatatcggy

SEQ ID NO: 78794 - DNA, 13 bp, Artificial Sequence
  Oligonucleotide for detection of SNP TSC0020059
rccgatatcatcc

SEQ ID NO: 78795 - DNA, 13 bp, Artificial Sequence
  Oligonucleotide for detection of SNP TSC0020060
tttgagatattag

SEQ ID NO: 78796 - DNA, 13 bp, Artificial Sequence
  Oligonucleotide for detection of SNP TSC0020060
ctaatatctcaaa

SEQ ID NO: 78797 - DNA, 13 bp, Artificial Sequence
  Oligonucleotide for detection of SNP TSC0020060
tttgagttattag

SEQ ID NO: 78798 - DNA, 13 bp, Artificial Sequence
  Oligonucleotide for detection of SNP TSC0020060
ctaataactcaaa

SEQ ID NO: 78799 - DNA, 13 bp, Artificial Sequence
  Oligonucleotide for detection of SNP TSC0020060
ttaatgttttaga

SEQ ID NO: 78800 - DNA, 13 bp, Artificial Sequence
  Oligonucleotide for detection of SNP TSC0020060
tctaaaacattaa

SEQ ID NO: 78801 - DNA, 13 bp, Artificial Sequence
  Oligonucleotide for detection of SNP TSC0020060
ttaatgatttaga

SEQ ID NO: 78802 - DNA, 13 bp, Artificial Sequence
  Oligonucleotide for detection of SNP TSC0020060
tctaaatcattaa

SEQ ID NO: 78803 - DNA, 13 bp, Artificial Sequence
  Oligonucleotide for detection of SNP TSC0020062
gagtaagtagtay

SEQ ID NO: 78804 - DNA, 13 bp, Artificial Sequence
  Oligonucleotide for detection of SNP TSC0020062
rtactacttactc

SEQ ID NO: 78805 - DNA, 13 bp, Artificial Sequence
  Oligonucleotide for detection of SNP TSC0020062
gagtaaatagtay

SEQ ID NO: 78806 - DNA, 13 bp, Artificial Sequence
  Oligonucleotide for detection of SNP TSC0020062
rtactatttactc

SEQ ID NO: 78807 - DNA, 13 bp, Artificial Sequence
  Oligonucleotide for detection of SNP TSC0020066
ggaaattggtagy

SEQ ID NO: 78808 - DNA, 13 bp, Artificial Sequence
  Oligonucleotide for detection of SNP TSC0020066
rctaccaatttcc

SEQ ID NO: 78809 - DNA, 13 bp, Artificial Sequence
  Oligonucleotide for detection of SNP TSC0020066
ggaaatcggtagy

SEQ ID NO: 78810 - DNA, 13 bp, Artificial Sequence
  Oligonucleotide for detection of SNP TSC0020066
rctaccgatttcc

SEQ ID NO: 78811 - DNA, 13 bp, Artificial Sequence
  Oligonucleotide for detection of SNP TSC0020066
gttgttggtttty

SEQ ID NO: 78812 - DNA, 13 bp, Artificial Sequence
  Oligonucleotide for detection of SNP TSC0020066
raaaaccaacaac

SEQ ID NO: 78813 - DNA, 13 bp, Artificial Sequence
  Oligonucleotide for detection of SNP TSC0020066
gttgttagtttty

SEQ ID NO: 78814 - DNA, 13 bp, Artificial Sequence
  Oligonucleotide for detection of SNP TSC0020066
raaaactaacaac

SEQ ID NO: 78815 - DNA, 13 bp, Artificial Sequence
  Oligonucleotide for detection of SNP TSC0020066
gttgtcggtttty

SEQ ID NO: 78816 - DNA, 13 bp, Artificial Sequence
  Oligonucleotide for detection of SNP TSC0020066
raaaaccgacaac

SEQ ID NO: 78817 - DNA, 13 bp, Artificial Sequence
  Oligonucleotide for detection of SNP TSC0020067
tgtattatgggay

SEQ ID NO: 78818 - DNA, 13 bp, Artificial Sequence
  Oligonucleotide for detection of SNP TSC0020067
rtcccataataca

SEQ ID NO: 78819 - DNA, 13 bp, Artificial Sequence
  Oligonucleotide for detection of SNP TSC0020067
tgtattgtgggay

SEQ ID NO: 78820 - DNA, 13 bp, Artificial Sequence
  Oligonucleotide for detection of SNP TSC0020067
rtcccacaataca

SEQ ID NO: 78821 - DNA, 13 bp, Artificial Sequence
  Oligonucleotide for detection of SNP TSC0020067
tgtatcgtgggay

SEQ ID NO: 78822 - DNA, 13 bp, Artificial Sequence
  Oligonucleotide for detection of SNP TSC0020067
rtcccacgataca

SEQ ID NO: 78823 - DNA, 13 bp, Artificial Sequence
  Oligonucleotide for detection of SNP TSC0020067
gttttatggtata

SEQ ID NO: 78824 - DNA, 13 bp, Artificial Sequence
  Oligonucleotide for detection of SNP TSC0020067
tataccataaaac

SEQ ID NO: 78825 - DNA, 13 bp, Artificial Sequence
  Oligonucleotide for detection of SNP TSC0020067
gttttacggtata

SEQ ID NO: 78826 - DNA, 13 bp, Artificial Sequence
  Oligonucleotide for detection of SNP TSC0020067
tataccgtaaaac

SEQ ID NO: 78827 - DNA, 13 bp, Artificial Sequence
  Oligonucleotide for detection of SNP TSC0020068
tttgtggtgttgt

SEQ ID NO: 78828 - DNA, 13 bp, Artificial Sequence
  Oligonucleotide for detection of SNP TSC0020068
acaacaccacaaa

SEQ ID NO: 78829 - DNA, 13 bp, Artificial Sequence
  Oligonucleotide for detection of SNP TSC0020068
tttgtgatgttgt

SEQ ID NO: 78830 - DNA, 13 bp, Artificial Sequence
  Oligonucleotide for detection of SNP TSC0020068
acaacatcacaaa

SEQ ID NO: 78831 - DNA, 13 bp, Artificial Sequence
  Oligonucleotide for detection of SNP TSC0020069
ttaataaaagttt

SEQ ID NO: 78832 - DNA, 13 bp, Artificial Sequence
  Oligonucleotide for detection of SNP TSC0020069
aaacttttattaa

SEQ ID NO: 78833 - DNA, 13 bp, Artificial Sequence
  Oligonucleotide for detection of SNP TSC0020069
ttaatagaagttt

SEQ ID NO: 78834 - DNA, 13 bp, Artificial Sequence
  Oligonucleotide for detection of SNP TSC0020069
aaacttctattaa

SEQ ID NO: 78835 - DNA, 13 bp, Artificial Sequence
  Oligonucleotide for detection of SNP TSC0020071
taggtatggaaty

SEQ ID NO: 78836 - DNA, 13 bp, Artificial Sequence
  Oligonucleotide for detection of SNP TSC0020071
rattccataccta

SEQ ID NO: 78837 - DNA, 13 bp, Artificial Sequence
  Oligonucleotide for detection of SNP TSC0020071
taggtacggaaty

SEQ ID NO: 78838 - DNA, 13 bp, Artificial Sequence
  Oligonucleotide for detection of SNP TSC0020071
rattccgtaccta

SEQ ID NO: 78839 - DNA, 13 bp, Artificial Sequence
  Oligonucleotide for detection of SNP TSC0020071
gattttgtattta

SEQ ID NO: 78840 - DNA, 13 bp, Artificial Sequence
  Oligonucleotide for detection of SNP TSC0020071
taaatacaaaatc

SEQ ID NO: 78841 - DNA, 13 bp, Artificial Sequence
  Oligonucleotide for detection of SNP TSC0020071
gattttatattta

SEQ ID NO: 78842 - DNA, 13 bp, Artificial Sequence
  Oligonucleotide for detection of SNP TSC0020071
taaatataaaatc

SEQ ID NO: 78843 - DNA, 13 bp, Artificial Sequence
  Oligonucleotide for detection of SNP TSC0020071
gatttcgtattta

SEQ ID NO: 78844 - DNA, 13 bp, Artificial Sequence
  Oligonucleotide for detection of SNP TSC0020071
taaatacgaaatc

SEQ ID NO: 78845 - DNA, 13 bp, Artificial Sequence
  Oligonucleotide for detection of SNP TSC0020072
gagtataagatty

SEQ ID NO: 78846 - DNA, 13 bp, Artificial Sequence
  Oligonucleotide for detection of SNP TSC0020072
raatcttatactc

SEQ ID NO: 78847 - DNA, 13 bp, Artificial Sequence
  Oligonucleotide for detection of SNP TSC0020072
gagtatgagatty

SEQ ID NO: 78848 - DNA, 13 bp, Artificial Sequence
  Oligonucleotide for detection of SNP TSC0020072
raatctcatactc

SEQ ID NO: 78849 - DNA, 13 bp, Artificial Sequence
  Oligonucleotide for detection of SNP TSC0020072
gagtacgagatty

SEQ ID NO: 78850 - DNA, 13 bp, Artificial Sequence
  Oligonucleotide for detection of SNP TSC0020072
raatctcgtactc

SEQ ID NO: 78851 - DNA, 13 bp, Artificial Sequence
  Oligonucleotide for detection of SNP TSC0020072
gagttttgtgtty

SEQ ID NO: 78852 - DNA, 13 bp, Artificial Sequence
  Oligonucleotide for detection of SNP TSC0020072
raacacaaaactc

SEQ ID NO: 78853 - DNA, 13 bp, Artificial Sequence
  Oligonucleotide for detection of SNP TSC0020072
gagtttcgtgtty

SEQ ID NO: 78854 - DNA, 13 bp, Artificial Sequence
  Oligonucleotide for detection of SNP TSC0020072
raacacgaaactc

SEQ ID NO: 78855 - DNA, 13 bp, Artificial Sequence
  Oligonucleotide for detection of SNP TSC0020073
ataaaggagaaag

SEQ ID NO: 78856 - DNA, 13 bp, Artificial Sequence
  Oligonucleotide for detection of SNP TSC0020073
ctttctcctttat

SEQ ID NO: 78857 - DNA, 13 bp, Artificial Sequence
  Oligonucleotide for detection of SNP TSC0020073
ataaagaagaaag

SEQ ID NO: 78858 - DNA, 13 bp, Artificial Sequence
  Oligonucleotide for detection of SNP TSC0020073
ctttcttctttat

SEQ ID NO: 78859 - DNA, 13 bp, Artificial Sequence
  Oligonucleotide for detection of SNP TSC0020074
aaggaggatgaaa

SEQ ID NO: 78860 - DNA, 13 bp, Artificial Sequence
  Oligonucleotide for detection of SNP TSC0020074
tttcatcctcctt

SEQ ID NO: 78861 - DNA, 13 bp, Artificial Sequence
  Oligonucleotide for detection of SNP TSC0020074
aaggagaatgaaa

SEQ ID NO: 78862 - DNA, 13 bp, Artificial Sequence
  Oligonucleotide for detection of SNP TSC0020074
tttcattctcctt

SEQ ID NO: 78863 - DNA, 13 bp, Artificial Sequence
  Oligonucleotide for detection of SNP TSC0020075
aaattgtttaaag

SEQ ID NO: 78864 - DNA, 13 bp, Artificial Sequence
  Oligonucleotide for detection of SNP TSC0020075
ctttaaacaattt

SEQ ID NO: 78865 - DNA, 13 bp, Artificial Sequence
  Oligonucleotide for detection of SNP TSC0020075
aaattggttaaag

SEQ ID NO: 78866 - DNA, 13 bp, Artificial Sequence
  Oligonucleotide for detection of SNP TSC0020075
ctttaaccaattt

SEQ ID NO: 78867 - DNA, 13 bp, Artificial Sequence
  Oligonucleotide for detection of SNP TSC0020075
ttttgggtagttt

SEQ ID NO: 78868 - DNA, 13 bp, Artificial Sequence
  Oligonucleotide for detection of SNP TSC0020075
aaactacccaaaa

SEQ ID NO: 78869 - DNA, 13 bp, Artificial Sequence
  Oligonucleotide for detection of SNP TSC0020075
ttttggttagttt

SEQ ID NO: 78870 - DNA, 13 bp, Artificial Sequence
  Oligonucleotide for detection of SNP TSC0020075
aaactaaccaaaa

SEQ ID NO: 78871 - DNA, 13 bp, Artificial Sequence
  Oligonucleotide for detection of SNP TSC0020076
ggtgtagttttgg

SEQ ID NO: 78872 - DNA, 13 bp, Artificial Sequence
  Oligonucleotide for detection of SNP TSC0020076
ccaaaactacacc

SEQ ID NO: 78873 - DNA, 13 bp, Artificial Sequence
  Oligonucleotide for detection of SNP TSC0020076
ggtgtaattttgg

SEQ ID NO: 78874 - DNA, 13 bp, Artificial Sequence
  Oligonucleotide for detection of SNP TSC0020076
ccaaaattacacc

SEQ ID NO: 78875 - DNA, 13 bp, Artificial Sequence
  Oligonucleotide for detection of SNP TSC0020077
gtagaaatattaa

SEQ ID NO: 78876 - DNA, 13 bp, Artificial Sequence
  Oligonucleotide for detection of SNP TSC0020077
ttaatatttctac

SEQ ID NO: 78877 - DNA, 13 bp, Artificial Sequence
  Oligonucleotide for detection of SNP TSC0020077
gtagaagtattaa

SEQ ID NO: 78878 - DNA, 13 bp, Artificial Sequence
  Oligonucleotide for detection of SNP TSC0020077
ttaatacttctac

SEQ ID NO: 78879 - DNA, 13 bp, Artificial Sequence
  Oligonucleotide for detection of SNP TSC0020078
attgtaattgtag

SEQ ID NO: 78880 - DNA, 13 bp, Artificial Sequence
  Oligonucleotide for detection of SNP TSC0020078
ctacaattacaat

SEQ ID NO: 78881 - DNA, 13 bp, Artificial Sequence
  Oligonucleotide for detection of SNP TSC0020078
attgtagttgtag

SEQ ID NO: 78882 - DNA, 13 bp, Artificial Sequence
  Oligonucleotide for detection of SNP TSC0020078
ctacaactacaat

SEQ ID NO: 78883 - DNA, 13 bp, Artificial Sequence
  Oligonucleotide for detection of SNP TSC0020079
ataggtagtagay

SEQ ID NO: 78884 - DNA, 13 bp, Artificial Sequence
  Oligonucleotide for detection of SNP TSC0020079
rtctactacctat

SEQ ID NO: 78885 - DNA, 13 bp, Artificial Sequence
  Oligonucleotide for detection of SNP TSC0020079
ataggttgtagay

SEQ ID NO: 78886 - DNA, 13 bp, Artificial Sequence
  Oligonucleotide for detection of SNP TSC0020079
rtctacaacctat

SEQ ID NO: 78887 - DNA, 13 bp, Artificial Sequence
  Oligonucleotide for detection of SNP TSC0020079
gtttgttgtttgt

SEQ ID NO: 78888 - DNA, 13 bp, Artificial Sequence
  Oligonucleotide for detection of SNP TSC0020079
acaaacaacaaac

SEQ ID NO: 78889 - DNA, 13 bp, Artificial Sequence
  Oligonucleotide for detection of SNP TSC0020079
gtttgtagtttgt

SEQ ID NO: 78890 - DNA, 13 bp, Artificial Sequence
  Oligonucleotide for detection of SNP TSC0020079
acaaactacaaac

SEQ ID NO: 78891 - DNA, 13 bp, Artificial Sequence
  Oligonucleotide for detection of SNP TSC0020080
agttaaattgaag

SEQ ID NO: 78892 - DNA, 13 bp, Artificial Sequence
  Oligonucleotide for detection of SNP TSC0020080
cttcaatttaact

SEQ ID NO: 78893 - DNA, 13 bp, Artificial Sequence
  Oligonucleotide for detection of SNP TSC0020080
agttaatttgaag

SEQ ID NO: 78894 - DNA, 13 bp, Artificial Sequence
  Oligonucleotide for detection of SNP TSC0020080
cttcaaattaact

SEQ ID NO: 78895 - DNA, 13 bp, Artificial Sequence
  Oligonucleotide for detection of SNP TSC0020080
ttttagtttaatt

SEQ ID NO: 78896 - DNA, 13 bp, Artificial Sequence
  Oligonucleotide for detection of SNP TSC0020080
aattaaactaaaa

SEQ ID NO: 78897 - DNA, 13 bp, Artificial Sequence
  Oligonucleotide for detection of SNP TSC0020080
ttttaggttaatt

SEQ ID NO: 78898 - DNA, 13 bp, Artificial Sequence
  Oligonucleotide for detection of SNP TSC0020080
aattaacctaaaa

SEQ ID NO: 78899 - DNA, 13 bp, Artificial Sequence
  Oligonucleotide for detection of SNP TSC0020083
tgtattaagtaty

SEQ ID NO: 78900 - DNA, 13 bp, Artificial Sequence
  Oligonucleotide for detection of SNP TSC0020083
ratacttaataca

SEQ ID NO: 78901 - DNA, 13 bp, Artificial Sequence
  Oligonucleotide for detection of SNP TSC0020083
tgtattgagtaty

SEQ ID NO: 78902 - DNA, 13 bp, Artificial Sequence
  Oligonucleotide for detection of SNP TSC0020083
ratactcaataca

SEQ ID NO: 78903 - DNA, 13 bp, Artificial Sequence
  Oligonucleotide for detection of SNP TSC0020084
ttatggggggtty

SEQ ID NO: 78904 - DNA, 13 bp, Artificial Sequence
  Oligonucleotide for detection of SNP TSC0020084
raaccccccataa

SEQ ID NO: 78905 - DNA, 13 bp, Artificial Sequence
  Oligonucleotide for detection of SNP TSC0020084
ttatggtgggtty

SEQ ID NO: 78906 - DNA, 13 bp, Artificial Sequence
  Oligonucleotide for detection of SNP TSC0020084
raacccaccataa

SEQ ID NO: 78907 - DNA, 13 bp, Artificial Sequence
  Oligonucleotide for detection of SNP TSC0020084
gggttttttatga

SEQ ID NO: 78908 - DNA, 13 bp, Artificial Sequence
  Oligonucleotide for detection of SNP TSC0020084
tcataaaaaaccc

SEQ ID NO: 78909 - DNA, 13 bp, Artificial Sequence
  Oligonucleotide for detection of SNP TSC0020084
gggtttattatga

SEQ ID NO: 78910 - DNA, 13 bp, Artificial Sequence
  Oligonucleotide for detection of SNP TSC0020084
tcataataaaccc

SEQ ID NO: 78911 - DNA, 13 bp, Artificial Sequence
  Oligonucleotide for detection of SNP TSC0020085
ggtaggaagtgag

SEQ ID NO: 78912 - DNA, 13 bp, Artificial Sequence
  Oligonucleotide for detection of SNP TSC0020085
ctcacttcctacc

SEQ ID NO: 78913 - DNA, 13 bp, Artificial Sequence
  Oligonucleotide for detection of SNP TSC0020085
ggtagggagtgag

SEQ ID NO: 78914 - DNA, 13 bp, Artificial Sequence
  Oligonucleotide for detection of SNP TSC0020085
ctcactccctacc

SEQ ID NO: 78915 - DNA, 13 bp, Artificial Sequence
  Oligonucleotide for detection of SNP TSC0020087
attggaatgtagy

SEQ ID NO: 78916 - DNA, 13 bp, Artificial Sequence
  Oligonucleotide for detection of SNP TSC0020087
rctacattccaat

SEQ ID NO: 78917 - DNA, 13 bp, Artificial Sequence
  Oligonucleotide for detection of SNP TSC0020087
attggagtgtagy

SEQ ID NO: 78918 - DNA, 13 bp, Artificial Sequence
  Oligonucleotide for detection of SNP TSC0020087
rctacactccaat

SEQ ID NO: 78919 - DNA, 13 bp, Artificial Sequence
  Oligonucleotide for detection of SNP TSC0020088
tatgataataagy

SEQ ID NO: 78920 - DNA, 13 bp, Artificial Sequence
  Oligonucleotide for detection of SNP TSC0020088
rcttattatcata

SEQ ID NO: 78921 - DNA, 13 bp, Artificial Sequence
  Oligonucleotide for detection of SNP TSC0020088
tatgattataagy

SEQ ID NO: 78922 - DNA, 13 bp, Artificial Sequence
  Oligonucleotide for detection of SNP TSC0020088
rcttataatcata

SEQ ID NO: 78923 - DNA, 13 bp, Artificial Sequence
  Oligonucleotide for detection of SNP TSC0020089
tttttaagtaatg

SEQ ID NO: 78924 - DNA, 13 bp, Artificial Sequence
  Oligonucleotide for detection of SNP TSC0020089
cattacttaaaaa

SEQ ID NO: 78925 - DNA, 13 bp, Artificial Sequence
  Oligonucleotide for detection of SNP TSC0020089
tttttatgtaatg

SEQ ID NO: 78926 - DNA, 13 bp, Artificial Sequence
  Oligonucleotide for detection of SNP TSC0020089
cattacataaaaa

SEQ ID NO: 78927 - DNA, 13 bp, Artificial Sequence
  Oligonucleotide for detection of SNP TSC0020089
tttttacgtaatg

SEQ ID NO: 78928 - DNA, 13 bp, Artificial Sequence
  Oligonucleotide for detection of SNP TSC0020089
cattacgtaaaaa

SEQ ID NO: 78929 - DNA, 13 bp, Artificial Sequence
  Oligonucleotide for detection of SNP TSC0020089
tattgtttaaagg

SEQ ID NO: 78930 - DNA, 13 bp, Artificial Sequence
  Oligonucleotide for detection of SNP TSC0020089
cctttaaacaata

SEQ ID NO: 78931 - DNA, 13 bp, Artificial Sequence
  Oligonucleotide for detection of SNP TSC0020089
tattgtgtaaagg

SEQ ID NO: 78932 - DNA, 13 bp, Artificial Sequence
  Oligonucleotide for detection of SNP TSC0020089
cctttacacaata

SEQ ID NO: 78933 - DNA, 13 bp, Artificial Sequence
  Oligonucleotide for detection of SNP TSC0020089
tattgcgtaaagg

SEQ ID NO: 78934 - DNA, 13 bp, Artificial Sequence
  Oligonucleotide for detection of SNP TSC0020089
cctttacgcaata

SEQ ID NO: 78935 - DNA, 13 bp, Artificial Sequence
  Oligonucleotide for detection of SNP TSC0020090
aaaaggagagaaa

SEQ ID NO: 78936 - DNA, 13 bp, Artificial Sequence
  Oligonucleotide for detection of SNP TSC0020090
tttctctcctttt

SEQ ID NO: 78937 - DNA, 13 bp, Artificial Sequence
  Oligonucleotide for detection of SNP TSC0020090
aaaaggggagaaa

SEQ ID NO: 78938 - DNA, 13 bp, Artificial Sequence
  Oligonucleotide for detection of SNP TSC0020090
tttctcccctttt

SEQ ID NO: 78939 - DNA, 13 bp, Artificial Sequence
  Oligonucleotide for detection of SNP TSC0020091
gaaaggagaaata

SEQ ID NO: 78940 - DNA, 13 bp, Artificial Sequence
  Oligonucleotide for detection of SNP TSC0020091
tatttctcctttc

SEQ ID NO: 78941 - DNA, 13 bp, Artificial Sequence
  Oligonucleotide for detection of SNP TSC0020091
gaaaggggaaata

SEQ ID NO: 78942 - DNA, 13 bp, Artificial Sequence
  Oligonucleotide for detection of SNP TSC0020091
tatttcccctttc

SEQ ID NO: 78943 - DNA, 13 bp, Artificial Sequence
  Oligonucleotide for detection of SNP TSC0020097
ttaagaatagtta

SEQ ID NO: 78944 - DNA, 13 bp, Artificial Sequence
  Oligonucleotide for detection of SNP TSC0020097
taactattcttaa

SEQ ID NO: 78945 - DNA, 13 bp, Artificial Sequence
  Oligonucleotide for detection of SNP TSC0020097
ttaagagtagtta

SEQ ID NO: 78946 - DNA, 13 bp, Artificial Sequence
  Oligonucleotide for detection of SNP TSC0020097
taactactcttaa

SEQ ID NO: 78947 - DNA, 13 bp, Artificial Sequence
  Oligonucleotide for detection of SNP TSC0020098
tttttagttgtgt

SEQ ID NO: 78948 - DNA, 13 bp, Artificial Sequence
  Oligonucleotide for detection of SNP TSC0020098
acacaactaaaaa

SEQ ID NO: 78949 - DNA, 13 bp, Artificial Sequence
  Oligonucleotide for detection of SNP TSC0020098
tttttaattgtgt

SEQ ID NO: 78950 - DNA, 13 bp, Artificial Sequence
  Oligonucleotide for detection of SNP TSC0020098
acacaattaaaaa

SEQ ID NO: 78951 - DNA, 13 bp, Artificial Sequence
  Oligonucleotide for detection of SNP TSC0020098
tttttagttgcgt

SEQ ID NO: 78952 - DNA, 13 bp, Artificial Sequence
  Oligonucleotide for detection of SNP TSC0020098
acgcaactaaaaa

SEQ ID NO: 78953 - DNA, 13 bp, Artificial Sequence
  Oligonucleotide for detection of SNP TSC0020098
tttttaattgcgt

SEQ ID NO: 78954 - DNA, 13 bp, Artificial Sequence
  Oligonucleotide for detection of SNP TSC0020098
acgcaattaaaaa

SEQ ID NO: 78955 - DNA, 13 bp, Artificial Sequence
  Oligonucleotide for detection of SNP TSC0020099
taatataggagtt

SEQ ID NO: 78956 - DNA, 13 bp, Artificial Sequence
  Oligonucleotide for detection of SNP TSC0020099
aactcctatatta

SEQ ID NO: 78957 - DNA, 13 bp, Artificial Sequence
  Oligonucleotide for detection of SNP TSC0020099
taatatgggagtt

SEQ ID NO: 78958 - DNA, 13 bp, Artificial Sequence
  Oligonucleotide for detection of SNP TSC0020099
aactcccatatta

SEQ ID NO: 78959 - DNA, 13 bp, Artificial Sequence
  Oligonucleotide for detection of SNP TSC0020100
gttttgattagtg

SEQ ID NO: 78960 - DNA, 13 bp, Artificial Sequence
  Oligonucleotide for detection of SNP TSC0020100
cactaatcaaaac

SEQ ID NO: 78961 - DNA, 13 bp, Artificial Sequence
  Oligonucleotide for detection of SNP TSC0020100
gttttggttagtg

SEQ ID NO: 78962 - DNA, 13 bp, Artificial Sequence
  Oligonucleotide for detection of SNP TSC0020100
cactaaccaaaac

SEQ ID NO: 78963 - DNA, 13 bp, Artificial Sequence
  Oligonucleotide for detection of SNP TSC0020101
gagtttagtggtg

SEQ ID NO: 78964 - DNA, 13 bp, Artificial Sequence
  Oligonucleotide for detection of SNP TSC0020101
caccactaaactc

SEQ ID NO: 78965 - DNA, 13 bp, Artificial Sequence
  Oligonucleotide for detection of SNP TSC0020101
gagtttggtggtg

SEQ ID NO: 78966 - DNA, 13 bp, Artificial Sequence
  Oligonucleotide for detection of SNP TSC0020101
caccaccaaactc

SEQ ID NO: 78967 - DNA, 13 bp, Artificial Sequence
  Oligonucleotide for detection of SNP TSC0020101
gagtttagtggcg

SEQ ID NO: 78968 - DNA, 13 bp, Artificial Sequence
  Oligonucleotide for detection of SNP TSC0020101
cgccactaaactc

SEQ ID NO: 78969 - DNA, 13 bp, Artificial Sequence
  Oligonucleotide for detection of SNP TSC0020101
gagttcggtggtg

SEQ ID NO: 78970 - DNA, 13 bp, Artificial Sequence
  Oligonucleotide for detection of SNP TSC0020101
caccaccgaactc

SEQ ID NO: 78971 - DNA, 13 bp, Artificial Sequence
  Oligonucleotide for detection of SNP TSC0020101
gagtttggtggcg

SEQ ID NO: 78972 - DNA, 13 bp, Artificial Sequence
  Oligonucleotide for detection of SNP TSC0020101
cgccaccaaactc

SEQ ID NO: 78973 - DNA, 13 bp, Artificial Sequence
  Oligonucleotide for detection of SNP TSC0020101
gagttcggtggcg

SEQ ID NO: 78974 - DNA, 13 bp, Artificial Sequence
  Oligonucleotide for detection of SNP TSC0020101
cgccaccgaactc

SEQ ID NO: 78975 - DNA, 13 bp, Artificial Sequence
  Oligonucleotide for detection of SNP TSC0020101
tgttattggatty

SEQ ID NO: 78976 - DNA, 13 bp, Artificial Sequence
  Oligonucleotide for detection of SNP TSC0020101
raatccaataaca

SEQ ID NO: 78977 - DNA, 13 bp, Artificial Sequence
  Oligonucleotide for detection of SNP TSC0020101
cgttattggatty

SEQ ID NO: 78978 - DNA, 13 bp, Artificial Sequence
  Oligonucleotide for detection of SNP TSC0020101
raatccaataacg

SEQ ID NO: 78979 - DNA, 13 bp, Artificial Sequence
  Oligonucleotide for detection of SNP TSC0020101
tgttatcggatty

SEQ ID NO: 78980 - DNA, 13 bp, Artificial Sequence
  Oligonucleotide for detection of SNP TSC0020101
raatccgataaca

SEQ ID NO: 78981 - DNA, 13 bp, Artificial Sequence
  Oligonucleotide for detection of SNP TSC0020101
cgttatcggatty

SEQ ID NO: 78982 - DNA, 13 bp, Artificial Sequence
  Oligonucleotide for detection of SNP TSC0020101
raatccgataacg

SEQ ID NO: 78983 - DNA, 13 bp, Artificial Sequence
  Oligonucleotide for detection of SNP TSC0020102
ggtatggtggtay

SEQ ID NO: 78984 - DNA, 13 bp, Artificial Sequence
  Oligonucleotide for detection of SNP TSC0020102
rtaccaccatacc

SEQ ID NO: 78985 - DNA, 13 bp, Artificial Sequence
  Oligonucleotide for detection of SNP TSC0020102
ggtatgatggtay

SEQ ID NO: 78986 - DNA, 13 bp, Artificial Sequence
  Oligonucleotide for detection of SNP TSC0020102
rtaccatcatacc

SEQ ID NO: 78987 - DNA, 13 bp, Artificial Sequence
  Oligonucleotide for detection of SNP TSC0020106
agttataggaaty

SEQ ID NO: 78988 - DNA, 13 bp, Artificial Sequence
  Oligonucleotide for detection of SNP TSC0020106
rattcctataact

SEQ ID NO: 78989 - DNA, 13 bp, Artificial Sequence
  Oligonucleotide for detection of SNP TSC0020106
agttatgggaaty

SEQ ID NO: 78990 - DNA, 13 bp, Artificial Sequence
  Oligonucleotide for detection of SNP TSC0020106
rattcccataact

SEQ ID NO: 78991 - DNA, 13 bp, Artificial Sequence
  Oligonucleotide for detection of SNP TSC0020107
aaaaaatgaaaat

SEQ ID NO: 78992 - DNA, 13 bp, Artificial Sequence
  Oligonucleotide for detection of SNP TSC0020107
attttcatttttt

SEQ ID NO: 78993 - DNA, 13 bp, Artificial Sequence
  Oligonucleotide for detection of SNP TSC0020107
aaaaaaggaaaat

SEQ ID NO: 78994 - DNA, 13 bp, Artificial Sequence
  Oligonucleotide for detection of SNP TSC0020107
attttcctttttt

SEQ ID NO: 78995 - DNA, 13 bp, Artificial Sequence
  Oligonucleotide for detection of SNP TSC0020108
tattttataaggy

SEQ ID NO: 78996 - DNA, 13 bp, Artificial Sequence
  Oligonucleotide for detection of SNP TSC0020108
rccttataaaata

SEQ ID NO: 78997 - DNA, 13 bp, Artificial Sequence
  Oligonucleotide for detection of SNP TSC0020108
tattttgtaaggy

SEQ ID NO: 78998 - DNA, 13 bp, Artificial Sequence
  Oligonucleotide for detection of SNP TSC0020108
rccttacaaaata

SEQ ID NO: 78999 - DNA, 13 bp, Artificial Sequence
  Oligonucleotide for detection of SNP TSC0020108
tatttcgtaaggy

SEQ ID NO: 79000 - DNA, 13 bp, Artificial Sequence
  Oligonucleotide for detection of SNP TSC0020108
rccttacgaaata

SEQ ID NO: 79001 - DNA, 13 bp, Artificial Sequence
  Oligonucleotide for detection of SNP TSC0020108
gttttgtgggatg

SEQ ID NO: 79002 - DNA, 13 bp, Artificial Sequence
  Oligonucleotide for detection of SNP TSC0020108
catcccacaaaac

SEQ ID NO: 79003 - DNA, 13 bp, Artificial Sequence
  Oligonucleotide for detection of SNP TSC0020108
gttttgcgggatg

SEQ ID NO: 79004 - DNA, 13 bp, Artificial Sequence
  Oligonucleotide for detection of SNP TSC0020108
catcccgcaaaac

SEQ ID NO: 79005 - DNA, 13 bp, Artificial Sequence
  Oligonucleotide for detection of SNP TSC0020109
ggggagttaggag

SEQ ID NO: 79006 - DNA, 13 bp, Artificial Sequence
  Oligonucleotide for detection of SNP TSC0020109
ctcctaactcccc

SEQ ID NO: 79007 - DNA, 13 bp, Artificial Sequence
  Oligonucleotide for detection of SNP TSC0020109
ggggaggtaggag

SEQ ID NO: 79008 - DNA, 13 bp, Artificial Sequence
  Oligonucleotide for detection of SNP TSC0020109
ctcctacctcccc

SEQ ID NO: 79009 - DNA, 13 bp, Artificial Sequence
  Oligonucleotide for detection of SNP TSC0020110
tagtatgggggag

SEQ ID NO: 79010 - DNA, 13 bp, Artificial Sequence
  Oligonucleotide for detection of SNP TSC0020110
ctcccccatacta

SEQ ID NO: 79011 - DNA, 13 bp, Artificial Sequence
  Oligonucleotide for detection of SNP TSC0020110
tagtataggggag

SEQ ID NO: 79012 - DNA, 13 bp, Artificial Sequence
  Oligonucleotide for detection of SNP TSC0020110
ctcccctatacta

SEQ ID NO: 79013 - DNA, 13 bp, Artificial Sequence
  Oligonucleotide for detection of SNP TSC0020110
tagtacgggggag

SEQ ID NO: 79014 - DNA, 13 bp, Artificial Sequence
  Oligonucleotide for detection of SNP TSC0020110
ctcccccgtacta

SEQ ID NO: 79015 - DNA, 13 bp, Artificial Sequence
  Oligonucleotide for detection of SNP TSC0020111
ttttgttgatgtg

SEQ ID NO: 79016 - DNA, 13 bp, Artificial Sequence
  Oligonucleotide for detection of SNP TSC0020111
cacatcaacaaaa

SEQ ID NO: 79017 - DNA, 13 bp, Artificial Sequence
  Oligonucleotide for detection of SNP TSC0020111
ttttgtcgatgtg

SEQ ID NO: 79018 - DNA, 13 bp, Artificial Sequence
  Oligonucleotide for detection of SNP TSC0020111
cacatcgacaaaa

SEQ ID NO: 79019 - DNA, 13 bp, Artificial Sequence
  Oligonucleotide for detection of SNP TSC0020111
ttttgttgacgtg

SEQ ID NO: 79020 - DNA, 13 bp, Artificial Sequence
  Oligonucleotide for detection of SNP TSC0020111
cacgtcaacaaaa

SEQ ID NO: 79021 - DNA, 13 bp, Artificial Sequence
  Oligonucleotide for detection of SNP TSC0020111
ttttgtcgacgtg

SEQ ID NO: 79022 - DNA, 13 bp, Artificial Sequence
  Oligonucleotide for detection of SNP TSC0020111
cacgtcgacaaaa

SEQ ID NO: 79023 - DNA, 13 bp, Artificial Sequence
  Oligonucleotide for detection of SNP TSC0020111
tatgttgatagag

SEQ ID NO: 79024 - DNA, 13 bp, Artificial Sequence
  Oligonucleotide for detection of SNP TSC0020111
ctctatcaacata

SEQ ID NO: 79025 - DNA, 13 bp, Artificial Sequence
  Oligonucleotide for detection of SNP TSC0020111
tatgttaatagag

SEQ ID NO: 79026 - DNA, 13 bp, Artificial Sequence
  Oligonucleotide for detection of SNP TSC0020111
ctctattaacata

SEQ ID NO: 79027 - DNA, 13 bp, Artificial Sequence
  Oligonucleotide for detection of SNP TSC0020111
tacgttgatagag

SEQ ID NO: 79028 - DNA, 13 bp, Artificial Sequence
  Oligonucleotide for detection of SNP TSC0020111
ctctatcaacgta

SEQ ID NO: 79029 - DNA, 13 bp, Artificial Sequence
  Oligonucleotide for detection of SNP TSC0020111
tacgttaatagag

SEQ ID NO: 79030 - DNA, 13 bp, Artificial Sequence
  Oligonucleotide for detection of SNP TSC0020111
ctctattaacgta

SEQ ID NO: 79031 - DNA, 13 bp, Artificial Sequence
  Oligonucleotide for detection of SNP TSC0020111
tatgtcgatagag

SEQ ID NO: 79032 - DNA, 13 bp, Artificial Sequence
  Oligonucleotide for detection of SNP TSC0020111
ctctatcgacata

SEQ ID NO: 79033 - DNA, 13 bp, Artificial Sequence
  Oligonucleotide for detection of SNP TSC0020111
tacgtcgatagag

SEQ ID NO: 79034 - DNA, 13 bp, Artificial Sequence
  Oligonucleotide for detection of SNP TSC0020111
ctctatcgacgta

SEQ ID NO: 79035 - DNA, 13 bp, Artificial Sequence
  Oligonucleotide for detection of SNP TSC0020112
aatgtagttattg

SEQ ID NO: 79036 - DNA, 13 bp, Artificial Sequence
  Oligonucleotide for detection of SNP TSC0020112
caataactacatt

SEQ ID NO: 79037 - DNA, 13 bp, Artificial Sequence
  Oligonucleotide for detection of SNP TSC0020112
aatgtatttattg

SEQ ID NO: 79038 - DNA, 13 bp, Artificial Sequence
  Oligonucleotide for detection of SNP TSC0020112
caataaatacatt

SEQ ID NO: 79039 - DNA, 13 bp, Artificial Sequence
  Oligonucleotide for detection of SNP TSC0020112
taatagttgtatt

SEQ ID NO: 79040 - DNA, 13 bp, Artificial Sequence
  Oligonucleotide for detection of SNP TSC0020112
aatacaactatta

SEQ ID NO: 79041 - DNA, 13 bp, Artificial Sequence
  Oligonucleotide for detection of SNP TSC0020112
taatagatgtatt

SEQ ID NO: 79042 - DNA, 13 bp, Artificial Sequence
  Oligonucleotide for detection of SNP TSC0020112
aatacatctatta

SEQ ID NO: 79043 - DNA, 13 bp, Artificial Sequence
  Oligonucleotide for detection of SNP TSC0020113
ggtgttatagttt

SEQ ID NO: 79044 - DNA, 13 bp, Artificial Sequence
  Oligonucleotide for detection of SNP TSC0020113
aaactataacacc

SEQ ID NO: 79045 - DNA, 13 bp, Artificial Sequence
  Oligonucleotide for detection of SNP TSC0020113
ggtgttgtagttt

SEQ ID NO: 79046 - DNA, 13 bp, Artificial Sequence
  Oligonucleotide for detection of SNP TSC0020113
aaactacaacacc

SEQ ID NO: 79047 - DNA, 13 bp, Artificial Sequence
  Oligonucleotide for detection of SNP TSC0020115
tattgaggtatag

SEQ ID NO: 79048 - DNA, 13 bp, Artificial Sequence
  Oligonucleotide for detection of SNP TSC0020115
ctatacctcaata

SEQ ID NO: 79049 - DNA, 13 bp, Artificial Sequence
  Oligonucleotide for detection of SNP TSC0020115
tattgaagtatag

SEQ ID NO: 79050 - DNA, 13 bp, Artificial Sequence
  Oligonucleotide for detection of SNP TSC0020115
ctatacttcaata

SEQ ID NO: 79051 - DNA, 13 bp, Artificial Sequence
  Oligonucleotide for detection of SNP TSC0020115
tatcgaggtatag

SEQ ID NO: 79052 - DNA, 13 bp, Artificial Sequence
  Oligonucleotide for detection of SNP TSC0020115
ctatacctcgata

SEQ ID NO: 79053 - DNA, 13 bp, Artificial Sequence
  Oligonucleotide for detection of SNP TSC0020115
tatcgaagtatag

SEQ ID NO: 79054 - DNA, 13 bp, Artificial Sequence
  Oligonucleotide for detection of SNP TSC0020115
ctatacttcgata

SEQ ID NO: 79055 - DNA, 13 bp, Artificial Sequence
  Oligonucleotide for detection of SNP TSC0020116
tttgtgaatggta

SEQ ID NO: 79056 - DNA, 13 bp, Artificial Sequence
  Oligonucleotide for detection of SNP TSC0020116
taccattcacaaa

SEQ ID NO: 79057 - DNA, 13 bp, Artificial Sequence
  Oligonucleotide for detection of SNP TSC0020116
tttgtggatggta

SEQ ID NO: 79058 - DNA, 13 bp, Artificial Sequence
  Oligonucleotide for detection of SNP TSC0020116
taccatccacaaa

SEQ ID NO: 79059 - DNA, 13 bp, Artificial Sequence
  Oligonucleotide for detection of SNP TSC0020118
gtttttagtttgg

SEQ ID NO: 79060 - DNA, 13 bp, Artificial Sequence
  Oligonucleotide for detection of SNP TSC0020118
ccaaactaaaaac

SEQ ID NO: 79061 - DNA, 13 bp, Artificial Sequence
  Oligonucleotide for detection of SNP TSC0020118
gttttttgtttgg

SEQ ID NO: 79062 - DNA, 13 bp, Artificial Sequence
  Oligonucleotide for detection of SNP TSC0020118
ccaaacaaaaaac

SEQ ID NO: 79063 - DNA, 13 bp, Artificial Sequence
  Oligonucleotide for detection of SNP TSC0020118
gtttttagttcgg

SEQ ID NO: 79064 - DNA, 13 bp, Artificial Sequence
  Oligonucleotide for detection of SNP TSC0020118
ccgaactaaaaac

SEQ ID NO: 79065 - DNA, 13 bp, Artificial Sequence
  Oligonucleotide for detection of SNP TSC0020118
gttttttgttcgg

SEQ ID NO: 79066 - DNA, 13 bp, Artificial Sequence
  Oligonucleotide for detection of SNP TSC0020118
ccgaacaaaaaac

SEQ ID NO: 79067 - DNA, 13 bp, Artificial Sequence
  Oligonucleotide for detection of SNP TSC0020118
ttgggttgaaggy

SEQ ID NO: 79068 - DNA, 13 bp, Artificial Sequence
  Oligonucleotide for detection of SNP TSC0020118
rccttcaacccaa

SEQ ID NO: 79069 - DNA, 13 bp, Artificial Sequence
  Oligonucleotide for detection of SNP TSC0020118
ttgggtagaaggy

SEQ ID NO: 79070 - DNA, 13 bp, Artificial Sequence
  Oligonucleotide for detection of SNP TSC0020118
rccttctacccaa

SEQ ID NO: 79071 - DNA, 13 bp, Artificial Sequence
  Oligonucleotide for detection of SNP TSC0020118
tcgggttgaaggy

SEQ ID NO: 79072 - DNA, 13 bp, Artificial Sequence
  Oligonucleotide for detection of SNP TSC0020118
rccttcaacccga

SEQ ID NO: 79073 - DNA, 13 bp, Artificial Sequence
  Oligonucleotide for detection of SNP TSC0020118
tcgggtagaaggy

SEQ ID NO: 79074 - DNA, 13 bp, Artificial Sequence
  Oligonucleotide for detection of SNP TSC0020118
rccttctacccga

SEQ ID NO: 79075 - DNA, 13 bp, Artificial Sequence
  Oligonucleotide for detection of SNP TSC0020119
gtttttatgatty

SEQ ID NO: 79076 - DNA, 13 bp, Artificial Sequence
  Oligonucleotide for detection of SNP TSC0020119
raatcataaaaac

SEQ ID NO: 79077 - DNA, 13 bp, Artificial Sequence
  Oligonucleotide for detection of SNP TSC0020119
gtttttgtgatty

SEQ ID NO: 79078 - DNA, 13 bp, Artificial Sequence
  Oligonucleotide for detection of SNP TSC0020119
raatcacaaaaac

SEQ ID NO: 79079 - DNA, 13 bp, Artificial Sequence
  Oligonucleotide for detection of SNP TSC0020119
gttttcgtgatty

SEQ ID NO: 79080 - DNA, 13 bp, Artificial Sequence
  Oligonucleotide for detection of SNP TSC0020119
raatcacgaaaac

SEQ ID NO: 79081 - DNA, 13 bp, Artificial Sequence
  Oligonucleotide for detection of SNP TSC0020119
gggttatgggggy

SEQ ID NO: 79082 - DNA, 13 bp, Artificial Sequence
  Oligonucleotide for detection of SNP TSC0020119
rcccccataaccc

SEQ ID NO: 79083 - DNA, 13 bp, Artificial Sequence
  Oligonucleotide for detection of SNP TSC0020119
gggttacgggggy

SEQ ID NO: 79084 - DNA, 13 bp, Artificial Sequence
  Oligonucleotide for detection of SNP TSC0020119
rcccccgtaaccc

SEQ ID NO: 79085 - DNA, 13 bp, Artificial Sequence
  Oligonucleotide for detection of SNP TSC0020120
gttattatggagy

SEQ ID NO: 79086 - DNA, 13 bp, Artificial Sequence
  Oligonucleotide for detection of SNP TSC0020120
rctccataataac

SEQ ID NO: 79087 - DNA, 13 bp, Artificial Sequence
  Oligonucleotide for detection of SNP TSC0020120
gttattgtggagy

SEQ ID NO: 79088 - DNA, 13 bp, Artificial Sequence
  Oligonucleotide for detection of SNP TSC0020120
rctccacaataac

SEQ ID NO: 79089 - DNA, 13 bp, Artificial Sequence
  Oligonucleotide for detection of SNP TSC0020120
gttatcgtggagy

SEQ ID NO: 79090 - DNA, 13 bp, Artificial Sequence
  Oligonucleotide for detection of SNP TSC0020120
rctccacgataac

SEQ ID NO: 79091 - DNA, 13 bp, Artificial Sequence
  Oligonucleotide for detection of SNP TSC0020120
gttttatggtggy

SEQ ID NO: 79092 - DNA, 13 bp, Artificial Sequence
  Oligonucleotide for detection of SNP TSC0020120
rccaccataaaac

SEQ ID NO: 79093 - DNA, 13 bp, Artificial Sequence
  Oligonucleotide for detection of SNP TSC0020120
gttttacggtggy

SEQ ID NO: 79094 - DNA, 13 bp, Artificial Sequence
  Oligonucleotide for detection of SNP TSC0020120
rccaccgtaaaac

SEQ ID NO: 79095 - DNA, 13 bp, Artificial Sequence
  Oligonucleotide for detection of SNP TSC0020121
attttggtaatta

SEQ ID NO: 79096 - DNA, 13 bp, Artificial Sequence
  Oligonucleotide for detection of SNP TSC0020121
taattaccaaaat

SEQ ID NO: 79097 - DNA, 13 bp, Artificial Sequence
  Oligonucleotide for detection of SNP TSC0020121
attttgttaatta

SEQ ID NO: 79098 - DNA, 13 bp, Artificial Sequence
  Oligonucleotide for detection of SNP TSC0020121
taattaacaaaat

SEQ ID NO: 79099 - DNA, 13 bp, Artificial Sequence
  Oligonucleotide for detection of SNP TSC0020121
tgattgttaagat

SEQ ID NO: 79100 - DNA, 13 bp, Artificial Sequence
  Oligonucleotide for detection of SNP TSC0020121
atcttaacaatca

SEQ ID NO: 79101 - DNA, 13 bp, Artificial Sequence
  Oligonucleotide for detection of SNP TSC0020121
tgattgataagat

SEQ ID NO: 79102 - DNA, 13 bp, Artificial Sequence
  Oligonucleotide for detection of SNP TSC0020121
atcttatcaatca

SEQ ID NO: 79103 - DNA, 13 bp, Artificial Sequence
  Oligonucleotide for detection of SNP TSC0020124
tttcgtatattta

SEQ ID NO: 79104 - DNA, 13 bp, Artificial Sequence
  Oligonucleotide for detection of SNP TSC0020124
taaatatacgaaa

SEQ ID NO: 79105 - DNA, 13 bp, Artificial Sequence
  Oligonucleotide for detection of SNP TSC0020124
tttcgtgtattta

SEQ ID NO: 79106 - DNA, 13 bp, Artificial Sequence
  Oligonucleotide for detection of SNP TSC0020124
taaatacacgaaa

SEQ ID NO: 79107 - DNA, 13 bp, Artificial Sequence
  Oligonucleotide for detection of SNP TSC0020125
gggagtagtagtt

SEQ ID NO: 79108 - DNA, 13 bp, Artificial Sequence
  Oligonucleotide for detection of SNP TSC0020125
aactactactccc

SEQ ID NO: 79109 - DNA, 13 bp, Artificial Sequence
  Oligonucleotide for detection of SNP TSC0020125
gggagtggtagtt

SEQ ID NO: 79110 - DNA, 13 bp, Artificial Sequence
  Oligonucleotide for detection of SNP TSC0020125
aactaccactccc

SEQ ID NO: 79111 - DNA, 13 bp, Artificial Sequence
  Oligonucleotide for detection of SNP TSC0020125
gggagcggtagtt

SEQ ID NO: 79112 - DNA, 13 bp, Artificial Sequence
  Oligonucleotide for detection of SNP TSC0020125
aactaccgctccc

SEQ ID NO: 79113 - DNA, 13 bp, Artificial Sequence
  Oligonucleotide for detection of SNP TSC0020125
aattgttgtttty

SEQ ID NO: 79114 - DNA, 13 bp, Artificial Sequence
  Oligonucleotide for detection of SNP TSC0020125
raaaacaacaatt

SEQ ID NO: 79115 - DNA, 13 bp, Artificial Sequence
  Oligonucleotide for detection of SNP TSC0020125
aattgtcgtttty

SEQ ID NO: 79116 - DNA, 13 bp, Artificial Sequence
  Oligonucleotide for detection of SNP TSC0020125
raaaacgacaatt

SEQ ID NO: 79117 - DNA, 13 bp, Artificial Sequence
  Oligonucleotide for detection of SNP TSC0020126
tttttaattgtgy

SEQ ID NO: 79118 - DNA, 13 bp, Artificial Sequence
  Oligonucleotide for detection of SNP TSC0020126
rcacaattaaaaa

SEQ ID NO: 79119 - DNA, 13 bp, Artificial Sequence
  Oligonucleotide for detection of SNP TSC0020126
tttttatttgtgy

SEQ ID NO: 79120 - DNA, 13 bp, Artificial Sequence
  Oligonucleotide for detection of SNP TSC0020126
rcacaaataaaaa

SEQ ID NO: 79121 - DNA, 13 bp, Artificial Sequence
  Oligonucleotide for detection of SNP TSC0020126
gtataattaaaga

SEQ ID NO: 79122 - DNA, 13 bp, Artificial Sequence
  Oligonucleotide for detection of SNP TSC0020126
tctttaattatac

SEQ ID NO: 79123 - DNA, 13 bp, Artificial Sequence
  Oligonucleotide for detection of SNP TSC0020126
gtataagtaaaga

SEQ ID NO: 79124 - DNA, 13 bp, Artificial Sequence
  Oligonucleotide for detection of SNP TSC0020126
tctttacttatac

SEQ ID NO: 79125 - DNA, 13 bp, Artificial Sequence
  Oligonucleotide for detection of SNP TSC0020127
tagtttatggtty

SEQ ID NO: 79126 - DNA, 13 bp, Artificial Sequence
  Oligonucleotide for detection of SNP TSC0020127
raaccataaacta

SEQ ID NO: 79127 - DNA, 13 bp, Artificial Sequence
  Oligonucleotide for detection of SNP TSC0020127
tagtttgtggtty

SEQ ID NO: 79128 - DNA, 13 bp, Artificial Sequence
  Oligonucleotide for detection of SNP TSC0020127
raaccacaaacta

SEQ ID NO: 79129 - DNA, 13 bp, Artificial Sequence
  Oligonucleotide for detection of SNP TSC0020127
tagttcgtggtty

SEQ ID NO: 79130 - DNA, 13 bp, Artificial Sequence
  Oligonucleotide for detection of SNP TSC0020127
raaccacgaacta

SEQ ID NO: 79131 - DNA, 13 bp, Artificial Sequence
  Oligonucleotide for detection of SNP TSC0020127
gggttatgggttg

SEQ ID NO: 79132 - DNA, 13 bp, Artificial Sequence
  Oligonucleotide for detection of SNP TSC0020127
caacccataaccc

SEQ ID NO: 79133 - DNA, 13 bp, Artificial Sequence
  Oligonucleotide for detection of SNP TSC0020127
gggttacgggttg

SEQ ID NO: 79134 - DNA, 13 bp, Artificial Sequence
  Oligonucleotide for detection of SNP TSC0020127
caacccgtaaccc

SEQ ID NO: 79135 - DNA, 13 bp, Artificial Sequence
  Oligonucleotide for detection of SNP TSC0020130
tgtgaggggggay

SEQ ID NO: 79136 - DNA, 13 bp, Artificial Sequence
  Oligonucleotide for detection of SNP TSC0020130
rtcccccctcaca

SEQ ID NO: 79137 - DNA, 13 bp, Artificial Sequence
  Oligonucleotide for detection of SNP TSC0020130
tgtgagaggggay

SEQ ID NO: 79138 - DNA, 13 bp, Artificial Sequence
  Oligonucleotide for detection of SNP TSC0020130
rtcccctctcaca

SEQ ID NO: 79139 - DNA, 13 bp, Artificial Sequence
  Oligonucleotide for detection of SNP TSC0020130
tgcgaggggggay

SEQ ID NO: 79140 - DNA, 13 bp, Artificial Sequence
  Oligonucleotide for detection of SNP TSC0020130
rtcccccctcgca

SEQ ID NO: 79141 - DNA, 13 bp, Artificial Sequence
  Oligonucleotide for detection of SNP TSC0020130
tgcgagaggggay

SEQ ID NO: 79142 - DNA, 13 bp, Artificial Sequence
  Oligonucleotide for detection of SNP TSC0020130
rtcccctctcgca

SEQ ID NO: 79143 - DNA, 13 bp, Artificial Sequence
  Oligonucleotide for detection of SNP TSC0020131
gagggtagatatg

SEQ ID NO: 79144 - DNA, 13 bp, Artificial Sequence
  Oligonucleotide for detection of SNP TSC0020131
catatctaccctc

SEQ ID NO: 79145 - DNA, 13 bp, Artificial Sequence
  Oligonucleotide for detection of SNP TSC0020131
gagggttgatatg

SEQ ID NO: 79146 - DNA, 13 bp, Artificial Sequence
  Oligonucleotide for detection of SNP TSC0020131
catatcaaccctc

SEQ ID NO: 79147 - DNA, 13 bp, Artificial Sequence
  Oligonucleotide for detection of SNP TSC0020131
tatgtttgtttty

SEQ ID NO: 79148 - DNA, 13 bp, Artificial Sequence
  Oligonucleotide for detection of SNP TSC0020131
raaaacaaacata

SEQ ID NO: 79149 - DNA, 13 bp, Artificial Sequence
  Oligonucleotide for detection of SNP TSC0020131
tatgttagtttty

SEQ ID NO: 79150 - DNA, 13 bp, Artificial Sequence
  Oligonucleotide for detection of SNP TSC0020131
raaaactaacata

SEQ ID NO: 79151 - DNA, 13 bp, Artificial Sequence
  Oligonucleotide for detection of SNP TSC0020132
tggtggagggtgg

SEQ ID NO: 79152 - DNA, 13 bp, Artificial Sequence
  Oligonucleotide for detection of SNP TSC0020132
ccaccctccacca

SEQ ID NO: 79153 - DNA, 13 bp, Artificial Sequence
  Oligonucleotide for detection of SNP TSC0020132
tggtggggggtgg

SEQ ID NO: 79154 - DNA, 13 bp, Artificial Sequence
  Oligonucleotide for detection of SNP TSC0020132
ccaccccccacca

SEQ ID NO: 79155 - DNA, 13 bp, Artificial Sequence
  Oligonucleotide for detection of SNP TSC0020133
tttaatgtaaatt

SEQ ID NO: 79156 - DNA, 13 bp, Artificial Sequence
  Oligonucleotide for detection of SNP TSC0020133
aatttacattaaa

SEQ ID NO: 79157 - DNA, 13 bp, Artificial Sequence
  Oligonucleotide for detection of SNP TSC0020133
tttaatataaatt

SEQ ID NO: 79158 - DNA, 13 bp, Artificial Sequence
  Oligonucleotide for detection of SNP TSC0020133
aatttatattaaa

SEQ ID NO: 79159 - DNA, 13 bp, Artificial Sequence
  Oligonucleotide for detection of SNP TSC0020135
aggattaggtata

SEQ ID NO: 79160 - DNA, 13 bp, Artificial Sequence
  Oligonucleotide for detection of SNP TSC0020135
tatacctaatcct

SEQ ID NO: 79161 - DNA, 13 bp, Artificial Sequence
  Oligonucleotide for detection of SNP TSC0020135
aggattgggtata

SEQ ID NO: 79162 - DNA, 13 bp, Artificial Sequence
  Oligonucleotide for detection of SNP TSC0020135
tatacccaatcct

SEQ ID NO: 79163 - DNA, 13 bp, Artificial Sequence
  Oligonucleotide for detection of SNP TSC0020135
aggatcgggtata

SEQ ID NO: 79164 - DNA, 13 bp, Artificial Sequence
  Oligonucleotide for detection of SNP TSC0020135
tatacccgatcct

SEQ ID NO: 79165 - DNA, 13 bp, Artificial Sequence
  Oligonucleotide for detection of SNP TSC0020136
ttttgtatatttt

SEQ ID NO: 79166 - DNA, 13 bp, Artificial Sequence
  Oligonucleotide for detection of SNP TSC0020136
aaaatatacaaaa

SEQ ID NO: 79167 - DNA, 13 bp, Artificial Sequence
  Oligonucleotide for detection of SNP TSC0020136
ttttgtgtatttt

SEQ ID NO: 79168 - DNA, 13 bp, Artificial Sequence
  Oligonucleotide for detection of SNP TSC0020136
aaaatacacaaaa

SEQ ID NO: 79169 - DNA, 13 bp, Artificial Sequence
  Oligonucleotide for detection of SNP TSC0020136
ttttgcgtatttt

SEQ ID NO: 79170 - DNA, 13 bp, Artificial Sequence
  Oligonucleotide for detection of SNP TSC0020136
aaaatacgcaaaa

SEQ ID NO: 79171 - DNA, 13 bp, Artificial Sequence
  Oligonucleotide for detection of SNP TSC0020136
aagatatgtaaag

SEQ ID NO: 79172 - DNA, 13 bp, Artificial Sequence
  Oligonucleotide for detection of SNP TSC0020136
ctttacatatctt

SEQ ID NO: 79173 - DNA, 13 bp, Artificial Sequence
  Oligonucleotide for detection of SNP TSC0020136
aagatacgtaaag

SEQ ID NO: 79174 - DNA, 13 bp, Artificial Sequence
  Oligonucleotide for detection of SNP TSC0020136
ctttacgtatctt

SEQ ID NO: 79175 - DNA, 13 bp, Artificial Sequence
  Oligonucleotide for detection of SNP TSC0020137
tgtgagtgatata

SEQ ID NO: 79176 - DNA, 13 bp, Artificial Sequence
  Oligonucleotide for detection of SNP TSC0020137
tatatcactcaca

SEQ ID NO: 79177 - DNA, 13 bp, Artificial Sequence
  Oligonucleotide for detection of SNP TSC0020137
cgtgagtgatata

SEQ ID NO: 79178 - DNA, 13 bp, Artificial Sequence
  Oligonucleotide for detection of SNP TSC0020137
tatatcactcacg

SEQ ID NO: 79179 - DNA, 13 bp, Artificial Sequence
  Oligonucleotide for detection of SNP TSC0020137
tgtgagcgatata

SEQ ID NO: 79180 - DNA, 13 bp, Artificial Sequence
  Oligonucleotide for detection of SNP TSC0020137
tatatcgctcaca

SEQ ID NO: 79181 - DNA, 13 bp, Artificial Sequence
  Oligonucleotide for detection of SNP TSC0020137
cgtgagcgatata

SEQ ID NO: 79182 - DNA, 13 bp, Artificial Sequence
  Oligonucleotide for detection of SNP TSC0020137
tatatcgctcacg

SEQ ID NO: 79183 - DNA, 13 bp, Artificial Sequence
  Oligonucleotide for detection of SNP TSC0020137
tgtgttgtttatg

SEQ ID NO: 79184 - DNA, 13 bp, Artificial Sequence
  Oligonucleotide for detection of SNP TSC0020137
cataaacaacaca

SEQ ID NO: 79185 - DNA, 13 bp, Artificial Sequence
  Oligonucleotide for detection of SNP TSC0020137
tgtgttatttatg

SEQ ID NO: 79186 - DNA, 13 bp, Artificial Sequence
  Oligonucleotide for detection of SNP TSC0020137
cataaataacaca

SEQ ID NO: 79187 - DNA, 13 bp, Artificial Sequence
  Oligonucleotide for detection of SNP TSC0020137
tgtgtcgtttatg

SEQ ID NO: 79188 - DNA, 13 bp, Artificial Sequence
  Oligonucleotide for detection of SNP TSC0020137
cataaacgacaca

SEQ ID NO: 79189 - DNA, 13 bp, Artificial Sequence
  Oligonucleotide for detection of SNP TSC0020137
tgtgttatttacg

SEQ ID NO: 79190 - DNA, 13 bp, Artificial Sequence
  Oligonucleotide for detection of SNP TSC0020137
cgtaaataacaca

SEQ ID NO: 79191 - DNA, 13 bp, Artificial Sequence
  Oligonucleotide for detection of SNP TSC0020137
tgtgttgtttacg

SEQ ID NO: 79192 - DNA, 13 bp, Artificial Sequence
  Oligonucleotide for detection of SNP TSC0020137
cgtaaacaacaca

SEQ ID NO: 79193 - DNA, 13 bp, Artificial Sequence
  Oligonucleotide for detection of SNP TSC0020137
tgtgtcgtttacg

SEQ ID NO: 79194 - DNA, 13 bp, Artificial Sequence
  Oligonucleotide for detection of SNP TSC0020137
cgtaaacgacaca

SEQ ID NO: 79195 - DNA, 13 bp, Artificial Sequence
  Oligonucleotide for detection of SNP TSC0020140
gtatttattttgt

SEQ ID NO: 79196 - DNA, 13 bp, Artificial Sequence
  Oligonucleotide for detection of SNP TSC0020140
acaaaataaatac

SEQ ID NO: 79197 - DNA, 13 bp, Artificial Sequence
  Oligonucleotide for detection of SNP TSC0020141
tttgaaaaatata

SEQ ID NO: 79198 - DNA, 13 bp, Artificial Sequence
  Oligonucleotide for detection of SNP TSC0020141
tatatttttcaaa

SEQ ID NO: 79199 - DNA, 13 bp, Artificial Sequence
  Oligonucleotide for detection of SNP TSC0020141
tttgaagaatata

SEQ ID NO: 79200 - DNA, 13 bp, Artificial Sequence
  Oligonucleotide for detection of SNP TSC0020141
tatattcttcaaa

SEQ ID NO: 79201 - DNA, 13 bp, Artificial Sequence
  Oligonucleotide for detection of SNP TSC0020142
atttaagaaaatt

SEQ ID NO: 79202 - DNA, 13 bp, Artificial Sequence
  Oligonucleotide for detection of SNP TSC0020142
aattttcttaaat

SEQ ID NO: 79203 - DNA, 13 bp, Artificial Sequence
  Oligonucleotide for detection of SNP TSC0020147
ttggttattttty

SEQ ID NO: 79204 - DNA, 13 bp, Artificial Sequence
  Oligonucleotide for detection of SNP TSC0020147
raaaaataaccaa

SEQ ID NO: 79205 - DNA, 13 bp, Artificial Sequence
  Oligonucleotide for detection of SNP TSC0020147
ttggtttttttty

SEQ ID NO: 79206 - DNA, 13 bp, Artificial Sequence
  Oligonucleotide for detection of SNP TSC0020147
raaaaaaaaccaa

SEQ ID NO: 79207 - DNA, 13 bp, Artificial Sequence
  Oligonucleotide for detection of SNP TSC0020147
ggggaatagttag

SEQ ID NO: 79208 - DNA, 13 bp, Artificial Sequence
  Oligonucleotide for detection of SNP TSC0020147
ctaactattcccc

SEQ ID NO: 79209 - DNA, 13 bp, Artificial Sequence
  Oligonucleotide for detection of SNP TSC0020147
ggggaagagttag

SEQ ID NO: 79210 - DNA, 13 bp, Artificial Sequence
  Oligonucleotide for detection of SNP TSC0020147
ctaactcttcccc

SEQ ID NO: 79211 - DNA, 13 bp, Artificial Sequence
  Oligonucleotide for detection of SNP TSC0020151
ttttttataagaa

SEQ ID NO: 79212 - DNA, 13 bp, Artificial Sequence
  Oligonucleotide for detection of SNP TSC0020151
ttcttataaaaaa

SEQ ID NO: 79213 - DNA, 13 bp, Artificial Sequence
  Oligonucleotide for detection of SNP TSC0020151
ttttttgtaagaa

SEQ ID NO: 79214 - DNA, 13 bp, Artificial Sequence
  Oligonucleotide for detection of SNP TSC0020151
ttcttacaaaaaa

SEQ ID NO: 79215 - DNA, 13 bp, Artificial Sequence
  Oligonucleotide for detection of SNP TSC0020152
taaagaaggattt

SEQ ID NO: 79216 - DNA, 13 bp, Artificial Sequence
  Oligonucleotide for detection of SNP TSC0020152
aaatccttcttta

SEQ ID NO: 79217 - DNA, 13 bp, Artificial Sequence
  Oligonucleotide for detection of SNP TSC0020152
taaagagggattt

SEQ ID NO: 79218 - DNA, 13 bp, Artificial Sequence
  Oligonucleotide for detection of SNP TSC0020152
aaatccctcttta

SEQ ID NO: 79219 - DNA, 13 bp, Artificial Sequence
  Oligonucleotide for detection of SNP TSC0020155
aaatattgagaaa

SEQ ID NO: 79220 - DNA, 13 bp, Artificial Sequence
  Oligonucleotide for detection of SNP TSC0020155
tttctcaatattt

SEQ ID NO: 79221 - DNA, 13 bp, Artificial Sequence
  Oligonucleotide for detection of SNP TSC0020155
aaatatcgagaaa

SEQ ID NO: 79222 - DNA, 13 bp, Artificial Sequence
  Oligonucleotide for detection of SNP TSC0020155
tttctcgatattt

SEQ ID NO: 79223 - DNA, 13 bp, Artificial Sequence
  Oligonucleotide for detection of SNP TSC0020155
ttttttgatattt

SEQ ID NO: 79224 - DNA, 13 bp, Artificial Sequence
  Oligonucleotide for detection of SNP TSC0020155
aaatatcaaaaaa

SEQ ID NO: 79225 - DNA, 13 bp, Artificial Sequence
  Oligonucleotide for detection of SNP TSC0020155
ttttttaatattt

SEQ ID NO: 79226 - DNA, 13 bp, Artificial Sequence
  Oligonucleotide for detection of SNP TSC0020155
aaatattaaaaaa

SEQ ID NO: 79227 - DNA, 13 bp, Artificial Sequence
  Oligonucleotide for detection of SNP TSC0020155
tttttcgatattt

SEQ ID NO: 79228 - DNA, 13 bp, Artificial Sequence
  Oligonucleotide for detection of SNP TSC0020155
aaatatcgaaaaa

SEQ ID NO: 79229 - DNA, 13 bp, Artificial Sequence
  Oligonucleotide for detection of SNP TSC0020156
tggtaggaaggga

SEQ ID NO: 79230 - DNA, 13 bp, Artificial Sequence
  Oligonucleotide for detection of SNP TSC0020156
tcccttcctacca

SEQ ID NO: 79231 - DNA, 13 bp, Artificial Sequence
  Oligonucleotide for detection of SNP TSC0020156
tggtagaaaggga

SEQ ID NO: 79232 - DNA, 13 bp, Artificial Sequence
  Oligonucleotide for detection of SNP TSC0020156
tccctttctacca

SEQ ID NO: 79233 - DNA, 13 bp, Artificial Sequence
  Oligonucleotide for detection of SNP TSC0020157
tttagtgtttgty

SEQ ID NO: 79234 - DNA, 13 bp, Artificial Sequence
  Oligonucleotide for detection of SNP TSC0020157
racaaacactaaa

SEQ ID NO: 79235 - DNA, 13 bp, Artificial Sequence
  Oligonucleotide for detection of SNP TSC0020157
tttagtttttgty

SEQ ID NO: 79236 - DNA, 13 bp, Artificial Sequence
  Oligonucleotide for detection of SNP TSC0020157
racaaaaactaaa

SEQ ID NO: 79237 - DNA, 13 bp, Artificial Sequence
  Oligonucleotide for detection of SNP TSC0020157
tttagcgtttgty

SEQ ID NO: 79238 - DNA, 13 bp, Artificial Sequence
  Oligonucleotide for detection of SNP TSC0020157
racaaacgctaaa

SEQ ID NO: 79239 - DNA, 13 bp, Artificial Sequence
  Oligonucleotide for detection of SNP TSC0020157
ggtagatgttagg

SEQ ID NO: 79240 - DNA, 13 bp, Artificial Sequence
  Oligonucleotide for detection of SNP TSC0020157
cctaacatctacc

SEQ ID NO: 79241 - DNA, 13 bp, Artificial Sequence
  Oligonucleotide for detection of SNP TSC0020157
ggtagaagttagg

SEQ ID NO: 79242 - DNA, 13 bp, Artificial Sequence
  Oligonucleotide for detection of SNP TSC0020157
cctaacttctacc

SEQ ID NO: 79243 - DNA, 13 bp, Artificial Sequence
  Oligonucleotide for detection of SNP TSC0020157
ggtagacgttagg

SEQ ID NO: 79244 - DNA, 13 bp, Artificial Sequence
  Oligonucleotide for detection of SNP TSC0020157
cctaacgtctacc

SEQ ID NO: 79245 - DNA, 13 bp, Artificial Sequence
  Oligonucleotide for detection of SNP TSC0020158
tagtgtttgttat

SEQ ID NO: 79246 - DNA, 13 bp, Artificial Sequence
  Oligonucleotide for detection of SNP TSC0020158
ataacaaacacta

SEQ ID NO: 79247 - DNA, 13 bp, Artificial Sequence
  Oligonucleotide for detection of SNP TSC0020158
tagtgtgtgttat

SEQ ID NO: 79248 - DNA, 13 bp, Artificial Sequence
  Oligonucleotide for detection of SNP TSC0020158
ataacacacacta

SEQ ID NO: 79249 - DNA, 13 bp, Artificial Sequence
  Oligonucleotide for detection of SNP TSC0020158
tagcgtttgttat

SEQ ID NO: 79250 - DNA, 13 bp, Artificial Sequence
  Oligonucleotide for detection of SNP TSC0020158
ataacaaacgcta

SEQ ID NO: 79251 - DNA, 13 bp, Artificial Sequence
  Oligonucleotide for detection of SNP TSC0020158
tagcgtgtgttat

SEQ ID NO: 79252 - DNA, 13 bp, Artificial Sequence
  Oligonucleotide for detection of SNP TSC0020158
ataacacacgcta

SEQ ID NO: 79253 - DNA, 13 bp, Artificial Sequence
  Oligonucleotide for detection of SNP TSC0020158
atggtagatgtta

SEQ ID NO: 79254 - DNA, 13 bp, Artificial Sequence
  Oligonucleotide for detection of SNP TSC0020158
taacatctaccat

SEQ ID NO: 79255 - DNA, 13 bp, Artificial Sequence
  Oligonucleotide for detection of SNP TSC0020158
atggtatatgtta

SEQ ID NO: 79256 - DNA, 13 bp, Artificial Sequence
  Oligonucleotide for detection of SNP TSC0020158
taacatataccat

SEQ ID NO: 79257 - DNA, 13 bp, Artificial Sequence
  Oligonucleotide for detection of SNP TSC0020158
atggtagacgtta

SEQ ID NO: 79258 - DNA, 13 bp, Artificial Sequence
  Oligonucleotide for detection of SNP TSC0020158
taacgtctaccat

SEQ ID NO: 79259 - DNA, 13 bp, Artificial Sequence
  Oligonucleotide for detection of SNP TSC0020158
atggtatacgtta

SEQ ID NO: 79260 - DNA, 13 bp, Artificial Sequence
  Oligonucleotide for detection of SNP TSC0020158
taacgtataccat

SEQ ID NO: 79261 - DNA, 13 bp, Artificial Sequence
  Oligonucleotide for detection of SNP TSC0020159
atttttagaaagy

SEQ ID NO: 79262 - DNA, 13 bp, Artificial Sequence
  Oligonucleotide for detection of SNP TSC0020159
rctttctaaaaat

SEQ ID NO: 79263 - DNA, 13 bp, Artificial Sequence
  Oligonucleotide for detection of SNP TSC0020159
atttttggaaagy

SEQ ID NO: 79264 - DNA, 13 bp, Artificial Sequence
  Oligonucleotide for detection of SNP TSC0020159
rctttccaaaaat

SEQ ID NO: 79265 - DNA, 13 bp, Artificial Sequence
  Oligonucleotide for detection of SNP TSC0020159
attttcggaaagy

SEQ ID NO: 79266 - DNA, 13 bp, Artificial Sequence
  Oligonucleotide for detection of SNP TSC0020159
rctttccgaaaat

SEQ ID NO: 79267 - DNA, 13 bp, Artificial Sequence
  Oligonucleotide for detection of SNP TSC0020159
gttttttgaggat

SEQ ID NO: 79268 - DNA, 13 bp, Artificial Sequence
  Oligonucleotide for detection of SNP TSC0020159
atcctcaaaaaac

SEQ ID NO: 79269 - DNA, 13 bp, Artificial Sequence
  Oligonucleotide for detection of SNP TSC0020159
gtttttcgaggat

SEQ ID NO: 79270 - DNA, 13 bp, Artificial Sequence
  Oligonucleotide for detection of SNP TSC0020159
atcctcgaaaaac

SEQ ID NO: 79271 - DNA, 13 bp, Artificial Sequence
  Oligonucleotide for detection of SNP TSC0020160
atttgtttttaga

SEQ ID NO: 79272 - DNA, 13 bp, Artificial Sequence
  Oligonucleotide for detection of SNP TSC0020160
tctaaaaacaaat

SEQ ID NO: 79273 - DNA, 13 bp, Artificial Sequence
  Oligonucleotide for detection of SNP TSC0020160
atttgtgtttaga

SEQ ID NO: 79274 - DNA, 13 bp, Artificial Sequence
  Oligonucleotide for detection of SNP TSC0020160
tctaaacacaaat

SEQ ID NO: 79275 - DNA, 13 bp, Artificial Sequence
  Oligonucleotide for detection of SNP TSC0020160
atttgcgtttaga

SEQ ID NO: 79276 - DNA, 13 bp, Artificial Sequence
  Oligonucleotide for detection of SNP TSC0020160
tctaaacgcaaat

SEQ ID NO: 79277 - DNA, 13 bp, Artificial Sequence
  Oligonucleotide for detection of SNP TSC0020160
tttgaaggtagat

SEQ ID NO: 79278 - DNA, 13 bp, Artificial Sequence
  Oligonucleotide for detection of SNP TSC0020160
atctaccttcaaa

SEQ ID NO: 79279 - DNA, 13 bp, Artificial Sequence
  Oligonucleotide for detection of SNP TSC0020160
tttgaatgtagat

SEQ ID NO: 79280 - DNA, 13 bp, Artificial Sequence
  Oligonucleotide for detection of SNP TSC0020160
atctacattcaaa

SEQ ID NO: 79281 - DNA, 13 bp, Artificial Sequence
  Oligonucleotide for detection of SNP TSC0020160
tttgaacgtagat

SEQ ID NO: 79282 - DNA, 13 bp, Artificial Sequence
  Oligonucleotide for detection of SNP TSC0020160
atctacgttcaaa

SEQ ID NO: 79283 - DNA, 13 bp, Artificial Sequence
  Oligonucleotide for detection of SNP TSC0020162
gtaattattttay

SEQ ID NO: 79284 - DNA, 13 bp, Artificial Sequence
  Oligonucleotide for detection of SNP TSC0020162
rtaaaataattac

SEQ ID NO: 79285 - DNA, 13 bp, Artificial Sequence
  Oligonucleotide for detection of SNP TSC0020162
gtaatttttttay

SEQ ID NO: 79286 - DNA, 13 bp, Artificial Sequence
  Oligonucleotide for detection of SNP TSC0020162
rtaaaaaaattac

SEQ ID NO: 79287 - DNA, 13 bp, Artificial Sequence
  Oligonucleotide for detection of SNP TSC0020162
gtaaaataattay

SEQ ID NO: 79288 - DNA, 13 bp, Artificial Sequence
  Oligonucleotide for detection of SNP TSC0020162
rtaattattttac

SEQ ID NO: 79289 - DNA, 13 bp, Artificial Sequence
  Oligonucleotide for detection of SNP TSC0020162
gtaaaagaattay

SEQ ID NO: 79290 - DNA, 13 bp, Artificial Sequence
  Oligonucleotide for detection of SNP TSC0020162
rtaattcttttac

SEQ ID NO: 79291 - DNA, 13 bp, Artificial Sequence
  Oligonucleotide for detection of SNP TSC0020163
atttaagttgtaa

SEQ ID NO: 79292 - DNA, 13 bp, Artificial Sequence
  Oligonucleotide for detection of SNP TSC0020163
ttacaacttaaat

SEQ ID NO: 79293 - DNA, 13 bp, Artificial Sequence
  Oligonucleotide for detection of SNP TSC0020163
atttaaattgtaa

SEQ ID NO: 79294 - DNA, 13 bp, Artificial Sequence
  Oligonucleotide for detection of SNP TSC0020163
ttacaatttaaat

SEQ ID NO: 79295 - DNA, 13 bp, Artificial Sequence
  Oligonucleotide for detection of SNP TSC0020165
tatttagaaggtt

SEQ ID NO: 79296 - DNA, 13 bp, Artificial Sequence
  Oligonucleotide for detection of SNP TSC0020165
aaccttctaaata

SEQ ID NO: 79297 - DNA, 13 bp, Artificial Sequence
  Oligonucleotide for detection of SNP TSC0020165
tatttaaaaggtt

SEQ ID NO: 79298 - DNA, 13 bp, Artificial Sequence
  Oligonucleotide for detection of SNP TSC0020165
aaccttttaaata

SEQ ID NO: 79299 - DNA, 13 bp, Artificial Sequence
  Oligonucleotide for detection of SNP TSC0020166
aaaatatggattt

SEQ ID NO: 79300 - DNA, 13 bp, Artificial Sequence
  Oligonucleotide for detection of SNP TSC0020166
aaatccatatttt

SEQ ID NO: 79301 - DNA, 13 bp, Artificial Sequence
  Oligonucleotide for detection of SNP TSC0020166
aaaatacggattt

SEQ ID NO: 79302 - DNA, 13 bp, Artificial Sequence
  Oligonucleotide for detection of SNP TSC0020166
aaatccgtatttt

SEQ ID NO: 79303 - DNA, 13 bp, Artificial Sequence
  Oligonucleotide for detection of SNP TSC0020166
aagtttgtatttt

SEQ ID NO: 79304 - DNA, 13 bp, Artificial Sequence
  Oligonucleotide for detection of SNP TSC0020166
aaaatacaaactt

SEQ ID NO: 79305 - DNA, 13 bp, Artificial Sequence
  Oligonucleotide for detection of SNP TSC0020166
aagtttatatttt

SEQ ID NO: 79306 - DNA, 13 bp, Artificial Sequence
  Oligonucleotide for detection of SNP TSC0020166
aaaatataaactt

SEQ ID NO: 79307 - DNA, 13 bp, Artificial Sequence
  Oligonucleotide for detection of SNP TSC0020166
aagttcgtatttt

SEQ ID NO: 79308 - DNA, 13 bp, Artificial Sequence
  Oligonucleotide for detection of SNP TSC0020166
aaaatacgaactt

SEQ ID NO: 79309 - DNA, 13 bp, Artificial Sequence
  Oligonucleotide for detection of SNP TSC0020167
tatttgatattaa

SEQ ID NO: 79310 - DNA, 13 bp, Artificial Sequence
  Oligonucleotide for detection of SNP TSC0020167
ttaatatcaaata

SEQ ID NO: 79311 - DNA, 13 bp, Artificial Sequence
  Oligonucleotide for detection of SNP TSC0020167
tatttgttattaa

SEQ ID NO: 79312 - DNA, 13 bp, Artificial Sequence
  Oligonucleotide for detection of SNP TSC0020167
ttaataacaaata

SEQ ID NO: 79313 - DNA, 13 bp, Artificial Sequence
  Oligonucleotide for detection of SNP TSC0020167
ttagtgttagata

SEQ ID NO: 79314 - DNA, 13 bp, Artificial Sequence
  Oligonucleotide for detection of SNP TSC0020167
tatctaacactaa

SEQ ID NO: 79315 - DNA, 13 bp, Artificial Sequence
  Oligonucleotide for detection of SNP TSC0020167
ttagtgatagata

SEQ ID NO: 79316 - DNA, 13 bp, Artificial Sequence
  Oligonucleotide for detection of SNP TSC0020167
tatctatcactaa

SEQ ID NO: 79317 - DNA, 13 bp, Artificial Sequence
  Oligonucleotide for detection of SNP TSC0020168
tttagtgttagat

SEQ ID NO: 79318 - DNA, 13 bp, Artificial Sequence
  Oligonucleotide for detection of SNP TSC0020168
atctaacactaaa

SEQ ID NO: 79319 - DNA, 13 bp, Artificial Sequence
  Oligonucleotide for detection of SNP TSC0020168
tttagtattagat

SEQ ID NO: 79320 - DNA, 13 bp, Artificial Sequence
  Oligonucleotide for detection of SNP TSC0020168
atctaatactaaa

SEQ ID NO: 79321 - DNA, 13 bp, Artificial Sequence
  Oligonucleotide for detection of SNP TSC0020169
gattttagtatga

SEQ ID NO: 79322 - DNA, 13 bp, Artificial Sequence
  Oligonucleotide for detection of SNP TSC0020169
tcatactaaaatc

SEQ ID NO: 79323 - DNA, 13 bp, Artificial Sequence
  Oligonucleotide for detection of SNP TSC0020169
gatttttgtatga

SEQ ID NO: 79324 - DNA, 13 bp, Artificial Sequence
  Oligonucleotide for detection of SNP TSC0020169
tcatacaaaaatc

SEQ ID NO: 79325 - DNA, 13 bp, Artificial Sequence
  Oligonucleotide for detection of SNP TSC0020169
ttatattggggty

SEQ ID NO: 79326 - DNA, 13 bp, Artificial Sequence
  Oligonucleotide for detection of SNP TSC0020169
raccccaatataa

SEQ ID NO: 79327 - DNA, 13 bp, Artificial Sequence
  Oligonucleotide for detection of SNP TSC0020169
ttatataggggty

SEQ ID NO: 79328 - DNA, 13 bp, Artificial Sequence
  Oligonucleotide for detection of SNP TSC0020169
racccctatataa

SEQ ID NO: 79329 - DNA, 13 bp, Artificial Sequence
  Oligonucleotide for detection of SNP TSC0020170
tgaataatgattt

SEQ ID NO: 79330 - DNA, 13 bp, Artificial Sequence
  Oligonucleotide for detection of SNP TSC0020170
aaatcattattca

SEQ ID NO: 79331 - DNA, 13 bp, Artificial Sequence
  Oligonucleotide for detection of SNP TSC0020170
tgaatagtgattt

SEQ ID NO: 79332 - DNA, 13 bp, Artificial Sequence
  Oligonucleotide for detection of SNP TSC0020170
aaatcactattca

SEQ ID NO: 79333 - DNA, 13 bp, Artificial Sequence
  Oligonucleotide for detection of SNP TSC0020171
tagtgatgaaggt

SEQ ID NO: 79334 - DNA, 13 bp, Artificial Sequence
  Oligonucleotide for detection of SNP TSC0020171
accttcatcacta

SEQ ID NO: 79335 - DNA, 13 bp, Artificial Sequence
  Oligonucleotide for detection of SNP TSC0020171
tagtgaagaaggt

SEQ ID NO: 79336 - DNA, 13 bp, Artificial Sequence
  Oligonucleotide for detection of SNP TSC0020171
accttcttcacta

SEQ ID NO: 79337 - DNA, 13 bp, Artificial Sequence
  Oligonucleotide for detection of SNP TSC0020172
tgttataatagtg

SEQ ID NO: 79338 - DNA, 13 bp, Artificial Sequence
  Oligonucleotide for detection of SNP TSC0020172
cactattataaca

SEQ ID NO: 79339 - DNA, 13 bp, Artificial Sequence
  Oligonucleotide for detection of SNP TSC0020172
tgttatgatagtg

SEQ ID NO: 79340 - DNA, 13 bp, Artificial Sequence
  Oligonucleotide for detection of SNP TSC0020172
cactatcataaca

SEQ ID NO: 79341 - DNA, 13 bp, Artificial Sequence
  Oligonucleotide for detection of SNP TSC0020172
tgttacgatagtg

SEQ ID NO: 79342 - DNA, 13 bp, Artificial Sequence
  Oligonucleotide for detection of SNP TSC0020172
cactatcgtaaca

SEQ ID NO: 79343 - DNA, 13 bp, Artificial Sequence
  Oligonucleotide for detection of SNP TSC0020172
tattattgtaata

SEQ ID NO: 79344 - DNA, 13 bp, Artificial Sequence
  Oligonucleotide for detection of SNP TSC0020172
tattacaataata

SEQ ID NO: 79345 - DNA, 13 bp, Artificial Sequence
  Oligonucleotide for detection of SNP TSC0020172
tattatcgtaata

SEQ ID NO: 79346 - DNA, 13 bp, Artificial Sequence
  Oligonucleotide for detection of SNP TSC0020172
tattacgataata

SEQ ID NO: 79347 - DNA, 13 bp, Artificial Sequence
  Oligonucleotide for detection of SNP TSC0020173
tgagaaaagagtt

SEQ ID NO: 79348 - DNA, 13 bp, Artificial Sequence
  Oligonucleotide for detection of SNP TSC0020173
aactcttttctca

SEQ ID NO: 79349 - DNA, 13 bp, Artificial Sequence
  Oligonucleotide for detection of SNP TSC0020173
tgagaagagagtt

SEQ ID NO: 79350 - DNA, 13 bp, Artificial Sequence
  Oligonucleotide for detection of SNP TSC0020173
aactctcttctca

SEQ ID NO: 79351 - DNA, 13 bp, Artificial Sequence
  Oligonucleotide for detection of SNP TSC0020174
gttttaagtaggt

SEQ ID NO: 79352 - DNA, 13 bp, Artificial Sequence
  Oligonucleotide for detection of SNP TSC0020174
acctacttaaaac

SEQ ID NO: 79353 - DNA, 13 bp, Artificial Sequence
  Oligonucleotide for detection of SNP TSC0020174
gttttaggtaggt

SEQ ID NO: 79354 - DNA, 13 bp, Artificial Sequence
  Oligonucleotide for detection of SNP TSC0020174
acctacctaaaac

SEQ ID NO: 79355 - DNA, 13 bp, Artificial Sequence
  Oligonucleotide for detection of SNP TSC0020175
agaaggtgttggy

SEQ ID NO: 79356 - DNA, 13 bp, Artificial Sequence
  Oligonucleotide for detection of SNP TSC0020175
rccaacaccttct

SEQ ID NO: 79357 - DNA, 13 bp, Artificial Sequence
  Oligonucleotide for detection of SNP TSC0020175
agaaggcgttggy

SEQ ID NO: 79358 - DNA, 13 bp, Artificial Sequence
  Oligonucleotide for detection of SNP TSC0020175
rccaacgccttct

SEQ ID NO: 79359 - DNA, 13 bp, Artificial Sequence
  Oligonucleotide for detection of SNP TSC0020175
agaaggtgtcggy

SEQ ID NO: 79360 - DNA, 13 bp, Artificial Sequence
  Oligonucleotide for detection of SNP TSC0020175
rccgacaccttct

SEQ ID NO: 79361 - DNA, 13 bp, Artificial Sequence
  Oligonucleotide for detection of SNP TSC0020175
agaaggcgtcggy

SEQ ID NO: 79362 - DNA, 13 bp, Artificial Sequence
  Oligonucleotide for detection of SNP TSC0020175
rccgacgccttct

SEQ ID NO: 79363 - DNA, 13 bp, Artificial Sequence
  Oligonucleotide for detection of SNP TSC0020175
gttggtgtttttt

SEQ ID NO: 79364 - DNA, 13 bp, Artificial Sequence
  Oligonucleotide for detection of SNP TSC0020175
aaaaaacaccaac

SEQ ID NO: 79365 - DNA, 13 bp, Artificial Sequence
  Oligonucleotide for detection of SNP TSC0020175
gttggtatttttt

SEQ ID NO: 79366 - DNA, 13 bp, Artificial Sequence
  Oligonucleotide for detection of SNP TSC0020175
aaaaaataccaac

SEQ ID NO: 79367 - DNA, 13 bp, Artificial Sequence
  Oligonucleotide for detection of SNP TSC0020175
gtcggtgtttttt

SEQ ID NO: 79368 - DNA, 13 bp, Artificial Sequence
  Oligonucleotide for detection of SNP TSC0020175
aaaaaacaccgac

SEQ ID NO: 79369 - DNA, 13 bp, Artificial Sequence
  Oligonucleotide for detection of SNP TSC0020175
gtcggtatttttt

SEQ ID NO: 79370 - DNA, 13 bp, Artificial Sequence
  Oligonucleotide for detection of SNP TSC0020175
aaaaaataccgac

SEQ ID NO: 79371 - DNA, 13 bp, Artificial Sequence
  Oligonucleotide for detection of SNP TSC0020175
gttggcgtttttt

SEQ ID NO: 79372 - DNA, 13 bp, Artificial Sequence
  Oligonucleotide for detection of SNP TSC0020175
aaaaaacgccaac

SEQ ID NO: 79373 - DNA, 13 bp, Artificial Sequence
  Oligonucleotide for detection of SNP TSC0020175
gtcggcgtttttt

SEQ ID NO: 79374 - DNA, 13 bp, Artificial Sequence
  Oligonucleotide for detection of SNP TSC0020175
aaaaaacgccgac

SEQ ID NO: 79375 - DNA, 13 bp, Artificial Sequence
  Oligonucleotide for detection of SNP TSC0020176
aattaatggtata

SEQ ID NO: 79376 - DNA, 13 bp, Artificial Sequence
  Oligonucleotide for detection of SNP TSC0020176
tataccattaatt

SEQ ID NO: 79377 - DNA, 13 bp, Artificial Sequence
  Oligonucleotide for detection of SNP TSC0020176
aattaagggtata

SEQ ID NO: 79378 - DNA, 13 bp, Artificial Sequence
  Oligonucleotide for detection of SNP TSC0020176
tatacccttaatt

SEQ ID NO: 79379 - DNA, 13 bp, Artificial Sequence
  Oligonucleotide for detection of SNP TSC0020176
aattaacggtata

SEQ ID NO: 79380 - DNA, 13 bp, Artificial Sequence
  Oligonucleotide for detection of SNP TSC0020176
tataccgttaatt

SEQ ID NO: 79381 - DNA, 13 bp, Artificial Sequence
  Oligonucleotide for detection of SNP TSC0020176
tgtattgttaatt

SEQ ID NO: 79382 - DNA, 13 bp, Artificial Sequence
  Oligonucleotide for detection of SNP TSC0020176
aattaacaataca

SEQ ID NO: 79383 - DNA, 13 bp, Artificial Sequence
  Oligonucleotide for detection of SNP TSC0020176
tgtatttttaatt

SEQ ID NO: 79384 - DNA, 13 bp, Artificial Sequence
  Oligonucleotide for detection of SNP TSC0020176
aattaaaaataca

SEQ ID NO: 79385 - DNA, 13 bp, Artificial Sequence
  Oligonucleotide for detection of SNP TSC0020176
tgtatcgttaatt

SEQ ID NO: 79386 - DNA, 13 bp, Artificial Sequence
  Oligonucleotide for detection of SNP TSC0020176
aattaacgataca

SEQ ID NO: 79387 - DNA, 13 bp, Artificial Sequence
  Oligonucleotide for detection of SNP TSC0020177
ggtttggtttttg

SEQ ID NO: 79388 - DNA, 13 bp, Artificial Sequence
  Oligonucleotide for detection of SNP TSC0020177
caaaaaccaaacc

SEQ ID NO: 79389 - DNA, 13 bp, Artificial Sequence
  Oligonucleotide for detection of SNP TSC0020177
ggtttgttttttg

SEQ ID NO: 79390 - DNA, 13 bp, Artificial Sequence
  Oligonucleotide for detection of SNP TSC0020177
caaaaaacaaacc

SEQ ID NO: 79391 - DNA, 13 bp, Artificial Sequence
  Oligonucleotide for detection of SNP TSC0020177
taaaaattaaaty

SEQ ID NO: 79392 - DNA, 13 bp, Artificial Sequence
  Oligonucleotide for detection of SNP TSC0020177
ratttaattttta

SEQ ID NO: 79393 - DNA, 13 bp, Artificial Sequence
  Oligonucleotide for detection of SNP TSC0020177
taaaaaataaaty

SEQ ID NO: 79394 - DNA, 13 bp, Artificial Sequence
  Oligonucleotide for detection of SNP TSC0020177
ratttatttttta

SEQ ID NO: 79395 - DNA, 13 bp, Artificial Sequence
  Oligonucleotide for detection of SNP TSC0020178
ggagagatagtgg

SEQ ID NO: 79396 - DNA, 13 bp, Artificial Sequence
  Oligonucleotide for detection of SNP TSC0020178
ccactatctctcc

SEQ ID NO: 79397 - DNA, 13 bp, Artificial Sequence
  Oligonucleotide for detection of SNP TSC0020178
ggagaggtagtgg

SEQ ID NO: 79398 - DNA, 13 bp, Artificial Sequence
  Oligonucleotide for detection of SNP TSC0020178
ccactacctctcc

SEQ ID NO: 79399 - DNA, 13 bp, Artificial Sequence
  Oligonucleotide for detection of SNP TSC0020179
cgttttgtttttg

SEQ ID NO: 79400 - DNA, 13 bp, Artificial Sequence
  Oligonucleotide for detection of SNP TSC0020179
caaaaacaaaacg

SEQ ID NO: 79401 - DNA, 13 bp, Artificial Sequence
  Oligonucleotide for detection of SNP TSC0020179
cgttttatttttg

SEQ ID NO: 79402 - DNA, 13 bp, Artificial Sequence
  Oligonucleotide for detection of SNP TSC0020179
caaaaataaaacg

SEQ ID NO: 79403 - DNA, 13 bp, Artificial Sequence
  Oligonucleotide for detection of SNP TSC0020180
aaatgataattgy

SEQ ID NO: 79404 - DNA, 13 bp, Artificial Sequence
  Oligonucleotide for detection of SNP TSC0020180
rcaattatcattt

SEQ ID NO: 79405 - DNA, 13 bp, Artificial Sequence
  Oligonucleotide for detection of SNP TSC0020180
aaatgagaattgy

SEQ ID NO: 79406 - DNA, 13 bp, Artificial Sequence
  Oligonucleotide for detection of SNP TSC0020180
rcaattctcattt

SEQ ID NO: 79407 - DNA, 13 bp, Artificial Sequence
  Oligonucleotide for detection of SNP TSC0020180
gtaattgttattt

SEQ ID NO: 79408 - DNA, 13 bp, Artificial Sequence
  Oligonucleotide for detection of SNP TSC0020180
aaataacaattac

SEQ ID NO: 79409 - DNA, 13 bp, Artificial Sequence
  Oligonucleotide for detection of SNP TSC0020180
gtaatttttattt

SEQ ID NO: 79410 - DNA, 13 bp, Artificial Sequence
  Oligonucleotide for detection of SNP TSC0020180
aaataaaaattac

SEQ ID NO: 79411 - DNA, 13 bp, Artificial Sequence
  Oligonucleotide for detection of SNP TSC0020181
agagtagttgtta

SEQ ID NO: 79412 - DNA, 13 bp, Artificial Sequence
  Oligonucleotide for detection of SNP TSC0020181
taacaactactct

SEQ ID NO: 79413 - DNA, 13 bp, Artificial Sequence
  Oligonucleotide for detection of SNP TSC0020181
agagtatttgtta

SEQ ID NO: 79414 - DNA, 13 bp, Artificial Sequence
  Oligonucleotide for detection of SNP TSC0020181
taacaaatactct

SEQ ID NO: 79415 - DNA, 13 bp, Artificial Sequence
  Oligonucleotide for detection of SNP TSC0020181
taataattgtttt

SEQ ID NO: 79416 - DNA, 13 bp, Artificial Sequence
  Oligonucleotide for detection of SNP TSC0020181
aaaacaattatta

SEQ ID NO: 79417 - DNA, 13 bp, Artificial Sequence
  Oligonucleotide for detection of SNP TSC0020181
taataaatgtttt

SEQ ID NO: 79418 - DNA, 13 bp, Artificial Sequence
  Oligonucleotide for detection of SNP TSC0020181
aaaacatttatta

SEQ ID NO: 79419 - DNA, 13 bp, Artificial Sequence
  Oligonucleotide for detection of SNP TSC0020182
aatagtgttatay

SEQ ID NO: 79420 - DNA, 13 bp, Artificial Sequence
  Oligonucleotide for detection of SNP TSC0020182
rtataacactatt

SEQ ID NO: 79421 - DNA, 13 bp, Artificial Sequence
  Oligonucleotide for detection of SNP TSC0020182
aatagtattatay

SEQ ID NO: 79422 - DNA, 13 bp, Artificial Sequence
  Oligonucleotide for detection of SNP TSC0020182
rtataatactatt

SEQ ID NO: 79423 - DNA, 13 bp, Artificial Sequence
  Oligonucleotide for detection of SNP TSC0020185
ttatgtggatatg

SEQ ID NO: 79424 - DNA, 13 bp, Artificial Sequence
  Oligonucleotide for detection of SNP TSC0020185
catatccacataa

SEQ ID NO: 79425 - DNA, 13 bp, Artificial Sequence
  Oligonucleotide for detection of SNP TSC0020185
ttatgtagatatg

SEQ ID NO: 79426 - DNA, 13 bp, Artificial Sequence
  Oligonucleotide for detection of SNP TSC0020185
catatctacataa

SEQ ID NO: 79427 - DNA, 13 bp, Artificial Sequence
  Oligonucleotide for detection of SNP TSC0020186
tatttgggttttt

SEQ ID NO: 79428 - DNA, 13 bp, Artificial Sequence
  Oligonucleotide for detection of SNP TSC0020186
aaaaacccaaata

SEQ ID NO: 79429 - DNA, 13 bp, Artificial Sequence
  Oligonucleotide for detection of SNP TSC0020186
tatttgtgttttt

SEQ ID NO: 79430 - DNA, 13 bp, Artificial Sequence
  Oligonucleotide for detection of SNP TSC0020186
aaaaacacaaata

SEQ ID NO: 79431 - DNA, 13 bp, Artificial Sequence
  Oligonucleotide for detection of SNP TSC0020186
agagatttagata

SEQ ID NO: 79432 - DNA, 13 bp, Artificial Sequence
  Oligonucleotide for detection of SNP TSC0020186
tatctaaatctct

SEQ ID NO: 79433 - DNA, 13 bp, Artificial Sequence
  Oligonucleotide for detection of SNP TSC0020186
agagatatagata

SEQ ID NO: 79434 - DNA, 13 bp, Artificial Sequence
  Oligonucleotide for detection of SNP TSC0020186
tatctatatctct

SEQ ID NO: 79435 - DNA, 13 bp, Artificial Sequence
  Oligonucleotide for detection of SNP TSC0020187
gaaaaaatttgta

SEQ ID NO: 79436 - DNA, 13 bp, Artificial Sequence
  Oligonucleotide for detection of SNP TSC0020187
tacaaattttttc

SEQ ID NO: 79437 - DNA, 13 bp, Artificial Sequence
  Oligonucleotide for detection of SNP TSC0020187
gaaaaattttgta

SEQ ID NO: 79438 - DNA, 13 bp, Artificial Sequence
  Oligonucleotide for detection of SNP TSC0020187
tacaaaatttttc

SEQ ID NO: 79439 - DNA, 13 bp, Artificial Sequence
  Oligonucleotide for detection of SNP TSC0020187
tgtaggtttttty

SEQ ID NO: 79440 - DNA, 13 bp, Artificial Sequence
  Oligonucleotide for detection of SNP TSC0020187
raaaaaacctaca

SEQ ID NO: 79441 - DNA, 13 bp, Artificial Sequence
  Oligonucleotide for detection of SNP TSC0020187
tgtagggttttty

SEQ ID NO: 79442 - DNA, 13 bp, Artificial Sequence
  Oligonucleotide for detection of SNP TSC0020187
raaaaaccctaca

SEQ ID NO: 79443 - DNA, 13 bp, Artificial Sequence
  Oligonucleotide for detection of SNP TSC0020188
tttgatagtttty

SEQ ID NO: 79444 - DNA, 13 bp, Artificial Sequence
  Oligonucleotide for detection of SNP TSC0020188
raaaactatcaaa

SEQ ID NO: 79445 - DNA, 13 bp, Artificial Sequence
  Oligonucleotide for detection of SNP TSC0020188
tttgattgtttty

SEQ ID NO: 79446 - DNA, 13 bp, Artificial Sequence
  Oligonucleotide for detection of SNP TSC0020188
raaaacaatcaaa

SEQ ID NO: 79447 - DNA, 13 bp, Artificial Sequence
  Oligonucleotide for detection of SNP TSC0020188
tttgatcgtttty

SEQ ID NO: 79448 - DNA, 13 bp, Artificial Sequence
  Oligonucleotide for detection of SNP TSC0020188
raaaacgatcaaa

SEQ ID NO: 79449 - DNA, 13 bp, Artificial Sequence
  Oligonucleotide for detection of SNP TSC0020188
gggaattattagg

SEQ ID NO: 79450 - DNA, 13 bp, Artificial Sequence
  Oligonucleotide for detection of SNP TSC0020188
cctaataattccc

SEQ ID NO: 79451 - DNA, 13 bp, Artificial Sequence
  Oligonucleotide for detection of SNP TSC0020188
gggaatgattagg

SEQ ID NO: 79452 - DNA, 13 bp, Artificial Sequence
  Oligonucleotide for detection of SNP TSC0020188
cctaatcattccc

SEQ ID NO: 79453 - DNA, 13 bp, Artificial Sequence
  Oligonucleotide for detection of SNP TSC0020188
gggaacgattagg

SEQ ID NO: 79454 - DNA, 13 bp, Artificial Sequence
  Oligonucleotide for detection of SNP TSC0020188
cctaatcgttccc

SEQ ID NO: 79455 - DNA, 13 bp, Artificial Sequence
  Oligonucleotide for detection of SNP TSC0020189
gttttatattagy

SEQ ID NO: 79456 - DNA, 13 bp, Artificial Sequence
  Oligonucleotide for detection of SNP TSC0020189
rctaatataaaac

SEQ ID NO: 79457 - DNA, 13 bp, Artificial Sequence
  Oligonucleotide for detection of SNP TSC0020189
gttttagattagy

SEQ ID NO: 79458 - DNA, 13 bp, Artificial Sequence
  Oligonucleotide for detection of SNP TSC0020189
rctaatctaaaac

SEQ ID NO: 79459 - DNA, 13 bp, Artificial Sequence
  Oligonucleotide for detection of SNP TSC0020189
gttggtgtggaay

SEQ ID NO: 79460 - DNA, 13 bp, Artificial Sequence
  Oligonucleotide for detection of SNP TSC0020189
rttccacaccaac

SEQ ID NO: 79461 - DNA, 13 bp, Artificial Sequence
  Oligonucleotide for detection of SNP TSC0020189
gttggtttggaay

SEQ ID NO: 79462 - DNA, 13 bp, Artificial Sequence
  Oligonucleotide for detection of SNP TSC0020189
rttccaaaccaac

SEQ ID NO: 79463 - DNA, 13 bp, Artificial Sequence
  Oligonucleotide for detection of SNP TSC0020190
gaagttaggatta

SEQ ID NO: 79464 - DNA, 13 bp, Artificial Sequence
  Oligonucleotide for detection of SNP TSC0020190
taatcctaacttc

SEQ ID NO: 79465 - DNA, 13 bp, Artificial Sequence
  Oligonucleotide for detection of SNP TSC0020190
gaagtttggatta

SEQ ID NO: 79466 - DNA, 13 bp, Artificial Sequence
  Oligonucleotide for detection of SNP TSC0020190
taatccaaacttc

SEQ ID NO: 79467 - DNA, 13 bp, Artificial Sequence
  Oligonucleotide for detection of SNP TSC0020190
tgattttgattty

SEQ ID NO: 79468 - DNA, 13 bp, Artificial Sequence
  Oligonucleotide for detection of SNP TSC0020190
raaatcaaaatca

SEQ ID NO: 79469 - DNA, 13 bp, Artificial Sequence
  Oligonucleotide for detection of SNP TSC0020190
tgatttagattty

SEQ ID NO: 79470 - DNA, 13 bp, Artificial Sequence
  Oligonucleotide for detection of SNP TSC0020190
raaatctaaatca

SEQ ID NO: 79471 - DNA, 13 bp, Artificial Sequence
  Oligonucleotide for detection of SNP TSC0020194
atgtttaagttty

SEQ ID NO: 79472 - DNA, 13 bp, Artificial Sequence
  Oligonucleotide for detection of SNP TSC0020194
raaacttaaacat

SEQ ID NO: 79473 - DNA, 13 bp, Artificial Sequence
  Oligonucleotide for detection of SNP TSC0020194
atgttttagttty

SEQ ID NO: 79474 - DNA, 13 bp, Artificial Sequence
  Oligonucleotide for detection of SNP TSC0020194
raaactaaaacat

SEQ ID NO: 79475 - DNA, 13 bp, Artificial Sequence
  Oligonucleotide for detection of SNP TSC0020194
gaaatttaaatat

SEQ ID NO: 79476 - DNA, 13 bp, Artificial Sequence
  Oligonucleotide for detection of SNP TSC0020194
atatttaaatttc

SEQ ID NO: 79477 - DNA, 13 bp, Artificial Sequence
  Oligonucleotide for detection of SNP TSC0020194
gaaattaaaatat

SEQ ID NO: 79478 - DNA, 13 bp, Artificial Sequence
  Oligonucleotide for detection of SNP TSC0020194
atattttaatttc

SEQ ID NO: 79479 - DNA, 13 bp, Artificial Sequence
  Oligonucleotide for detection of SNP TSC0020199
tatttttatttty

SEQ ID NO: 79480 - DNA, 13 bp, Artificial Sequence
  Oligonucleotide for detection of SNP TSC0020199
raaaataaaaata

SEQ ID NO: 79481 - DNA, 13 bp, Artificial Sequence
  Oligonucleotide for detection of SNP TSC0020199
tattttgatttty

SEQ ID NO: 79482 - DNA, 13 bp, Artificial Sequence
  Oligonucleotide for detection of SNP TSC0020199
raaaatcaaaata

SEQ ID NO: 79483 - DNA, 13 bp, Artificial Sequence
  Oligonucleotide for detection of SNP TSC0020199
tatttcgatttty

SEQ ID NO: 79484 - DNA, 13 bp, Artificial Sequence
  Oligonucleotide for detection of SNP TSC0020199
raaaatcgaaata

SEQ ID NO: 79485 - DNA, 13 bp, Artificial Sequence
  Oligonucleotide for detection of SNP TSC0020199
gagaatggaaatg

SEQ ID NO: 79486 - DNA, 13 bp, Artificial Sequence
  Oligonucleotide for detection of SNP TSC0020199
catttccattctc

SEQ ID NO: 79487 - DNA, 13 bp, Artificial Sequence
  Oligonucleotide for detection of SNP TSC0020199
gagaattgaaatg

SEQ ID NO: 79488 - DNA, 13 bp, Artificial Sequence
  Oligonucleotide for detection of SNP TSC0020199
catttcaattctc

SEQ ID NO: 79489 - DNA, 13 bp, Artificial Sequence
  Oligonucleotide for detection of SNP TSC0020199
gagaatcgaaatg

SEQ ID NO: 79490 - DNA, 13 bp, Artificial Sequence
  Oligonucleotide for detection of SNP TSC0020199
catttcgattctc

SEQ ID NO: 79491 - DNA, 13 bp, Artificial Sequence
  Oligonucleotide for detection of SNP TSC0020200
gaggatgggggty

SEQ ID NO: 79492 - DNA, 13 bp, Artificial Sequence
  Oligonucleotide for detection of SNP TSC0020200
racccccatcctc

SEQ ID NO: 79493 - DNA, 13 bp, Artificial Sequence
  Oligonucleotide for detection of SNP TSC0020200
gaggataggggty

SEQ ID NO: 79494 - DNA, 13 bp, Artificial Sequence
  Oligonucleotide for detection of SNP TSC0020200
racccctatcctc

SEQ ID NO: 79495 - DNA, 13 bp, Artificial Sequence
  Oligonucleotide for detection of SNP TSC0020200
gaggacgggggty

SEQ ID NO: 79496 - DNA, 13 bp, Artificial Sequence
  Oligonucleotide for detection of SNP TSC0020200
racccccgtcctc

SEQ ID NO: 79497 - DNA, 13 bp, Artificial Sequence
  Oligonucleotide for detection of SNP TSC0020201
ataatatgtggty

SEQ ID NO: 79498 - DNA, 13 bp, Artificial Sequence
  Oligonucleotide for detection of SNP TSC0020201
raccacatattat

SEQ ID NO: 79499 - DNA, 13 bp, Artificial Sequence
  Oligonucleotide for detection of SNP TSC0020201
ataatacgtggty

SEQ ID NO: 79500 - DNA, 13 bp, Artificial Sequence
  Oligonucleotide for detection of SNP TSC0020201
raccacgtattat

SEQ ID NO: 79501 - DNA, 13 bp, Artificial Sequence
  Oligonucleotide for detection of SNP TSC0020201
gattatgtgttat

SEQ ID NO: 79502 - DNA, 13 bp, Artificial Sequence
  Oligonucleotide for detection of SNP TSC0020201
ataacacataatc

SEQ ID NO: 79503 - DNA, 13 bp, Artificial Sequence
  Oligonucleotide for detection of SNP TSC0020201
gattatatgttat

SEQ ID NO: 79504 - DNA, 13 bp, Artificial Sequence
  Oligonucleotide for detection of SNP TSC0020201
ataacatataatc

SEQ ID NO: 79505 - DNA, 13 bp, Artificial Sequence
  Oligonucleotide for detection of SNP TSC0020201
gattacgtgttat

SEQ ID NO: 79506 - DNA, 13 bp, Artificial Sequence
  Oligonucleotide for detection of SNP TSC0020201
ataacacgtaatc

SEQ ID NO: 79507 - DNA, 13 bp, Artificial Sequence
  Oligonucleotide for detection of SNP TSC0020202
gtgttgtggttag

SEQ ID NO: 79508 - DNA, 13 bp, Artificial Sequence
  Oligonucleotide for detection of SNP TSC0020202
ctaaccacaacac

SEQ ID NO: 79509 - DNA, 13 bp, Artificial Sequence
  Oligonucleotide for detection of SNP TSC0020202
gtgttgcggttag

SEQ ID NO: 79510 - DNA, 13 bp, Artificial Sequence
  Oligonucleotide for detection of SNP TSC0020202
ctaaccgcaacac

SEQ ID NO: 79511 - DNA, 13 bp, Artificial Sequence
  Oligonucleotide for detection of SNP TSC0020202
ttgattgtagtay

SEQ ID NO: 79512 - DNA, 13 bp, Artificial Sequence
  Oligonucleotide for detection of SNP TSC0020202
rtactacaatcaa

SEQ ID NO: 79513 - DNA, 13 bp, Artificial Sequence
  Oligonucleotide for detection of SNP TSC0020202
ttgattatagtay

SEQ ID NO: 79514 - DNA, 13 bp, Artificial Sequence
  Oligonucleotide for detection of SNP TSC0020202
rtactataatcaa

SEQ ID NO: 79515 - DNA, 13 bp, Artificial Sequence
  Oligonucleotide for detection of SNP TSC0020202
ttgatcgtagtay

SEQ ID NO: 79516 - DNA, 13 bp, Artificial Sequence
  Oligonucleotide for detection of SNP TSC0020202
rtactacgatcaa

SEQ ID NO: 79517 - DNA, 13 bp, Artificial Sequence
  Oligonucleotide for detection of SNP TSC0020203
ttgtttattatay

SEQ ID NO: 79518 - DNA, 13 bp, Artificial Sequence
  Oligonucleotide for detection of SNP TSC0020203
rtataataaacaa

SEQ ID NO: 79519 - DNA, 13 bp, Artificial Sequence
  Oligonucleotide for detection of SNP TSC0020203
ttgtttgttatay

SEQ ID NO: 79520 - DNA, 13 bp, Artificial Sequence
  Oligonucleotide for detection of SNP TSC0020203
rtataacaaacaa

SEQ ID NO: 79521 - DNA, 13 bp, Artificial Sequence
  Oligonucleotide for detection of SNP TSC0020203
ttgttcgttatay

SEQ ID NO: 79522 - DNA, 13 bp, Artificial Sequence
  Oligonucleotide for detection of SNP TSC0020203
rtataacgaacaa

SEQ ID NO: 79523 - DNA, 13 bp, Artificial Sequence
  Oligonucleotide for detection of SNP TSC0020203
gtataatgagtaa

SEQ ID NO: 79524 - DNA, 13 bp, Artificial Sequence
  Oligonucleotide for detection of SNP TSC0020203
ttactcattatac

SEQ ID NO: 79525 - DNA, 13 bp, Artificial Sequence
  Oligonucleotide for detection of SNP TSC0020203
gtataacgagtaa

SEQ ID NO: 79526 - DNA, 13 bp, Artificial Sequence
  Oligonucleotide for detection of SNP TSC0020203
ttactcgttatac

SEQ ID NO: 79527 - DNA, 13 bp, Artificial Sequence
  Oligonucleotide for detection of SNP TSC0020204
aggaatatggttg

SEQ ID NO: 79528 - DNA, 13 bp, Artificial Sequence
  Oligonucleotide for detection of SNP TSC0020204
caaccatattcct

SEQ ID NO: 79529 - DNA, 13 bp, Artificial Sequence
  Oligonucleotide for detection of SNP TSC0020204
aggaatgtggttg

SEQ ID NO: 79530 - DNA, 13 bp, Artificial Sequence
  Oligonucleotide for detection of SNP TSC0020204
caaccacattcct

SEQ ID NO: 79531 - DNA, 13 bp, Artificial Sequence
  Oligonucleotide for detection of SNP TSC0020204
aggaatatggtcg

SEQ ID NO: 79532 - DNA, 13 bp, Artificial Sequence
  Oligonucleotide for detection of SNP TSC0020204
cgaccatattcct

SEQ ID NO: 79533 - DNA, 13 bp, Artificial Sequence
  Oligonucleotide for detection of SNP TSC0020204
aggaacgtggttg

SEQ ID NO: 79534 - DNA, 13 bp, Artificial Sequence
  Oligonucleotide for detection of SNP TSC0020204
caaccacgttcct

SEQ ID NO: 79535 - DNA, 13 bp, Artificial Sequence
  Oligonucleotide for detection of SNP TSC0020204
aggaatgtggtcg

SEQ ID NO: 79536 - DNA, 13 bp, Artificial Sequence
  Oligonucleotide for detection of SNP TSC0020204
cgaccacattcct

SEQ ID NO: 79537 - DNA, 13 bp, Artificial Sequence
  Oligonucleotide for detection of SNP TSC0020204
aggaacgtggtcg

SEQ ID NO: 79538 - DNA, 13 bp, Artificial Sequence
  Oligonucleotide for detection of SNP TSC0020204
cgaccacgttcct

SEQ ID NO: 79539 - DNA, 13 bp, Artificial Sequence
  Oligonucleotide for detection of SNP TSC0020206
agtgattggttgt

SEQ ID NO: 79540 - DNA, 13 bp, Artificial Sequence
  Oligonucleotide for detection of SNP TSC0020206
acaaccaatcact

SEQ ID NO: 79541 - DNA, 13 bp, Artificial Sequence
  Oligonucleotide for detection of SNP TSC0020206
agtgatgggttgt

SEQ ID NO: 79542 - DNA, 13 bp, Artificial Sequence
  Oligonucleotide for detection of SNP TSC0020206
acaacccatcact

SEQ ID NO: 79543 - DNA, 13 bp, Artificial Sequence
  Oligonucleotide for detection of SNP TSC0020206
agtgatcggttgt

SEQ ID NO: 79544 - DNA, 13 bp, Artificial Sequence
  Oligonucleotide for detection of SNP TSC0020206
acaaccgatcact

SEQ ID NO: 79545 - DNA, 13 bp, Artificial Sequence
  Oligonucleotide for detection of SNP TSC0020206
agtgacgggttgt

SEQ ID NO: 79546 - DNA, 13 bp, Artificial Sequence
  Oligonucleotide for detection of SNP TSC0020206
acaacccgtcact

SEQ ID NO: 79547 - DNA, 13 bp, Artificial Sequence
  Oligonucleotide for detection of SNP TSC0020206
atagttggttatt

SEQ ID NO: 79548 - DNA, 13 bp, Artificial Sequence
  Oligonucleotide for detection of SNP TSC0020206
aataaccaactat

SEQ ID NO: 79549 - DNA, 13 bp, Artificial Sequence
  Oligonucleotide for detection of SNP TSC0020206
atagtttgttatt

SEQ ID NO: 79550 - DNA, 13 bp, Artificial Sequence
  Oligonucleotide for detection of SNP TSC0020206
aataacaaactat

SEQ ID NO: 79551 - DNA, 13 bp, Artificial Sequence
  Oligonucleotide for detection of SNP TSC0020206
atagtcggttatt

SEQ ID NO: 79552 - DNA, 13 bp, Artificial Sequence
  Oligonucleotide for detection of SNP TSC0020206
aataaccgactat

SEQ ID NO: 79553 - DNA, 13 bp, Artificial Sequence
  Oligonucleotide for detection of SNP TSC0020206
atagttcgttatt

SEQ ID NO: 79554 - DNA, 13 bp, Artificial Sequence
  Oligonucleotide for detection of SNP TSC0020206
aataacgaactat

SEQ ID NO: 79555 - DNA, 13 bp, Artificial Sequence
  Oligonucleotide for detection of SNP TSC0020207
ttgagttgggtaa

SEQ ID NO: 79556 - DNA, 13 bp, Artificial Sequence
  Oligonucleotide for detection of SNP TSC0020207
ttacccaactcaa

SEQ ID NO: 79557 - DNA, 13 bp, Artificial Sequence
  Oligonucleotide for detection of SNP TSC0020207
ttgagtcgggtaa

SEQ ID NO: 79558 - DNA, 13 bp, Artificial Sequence
  Oligonucleotide for detection of SNP TSC0020207
ttacccgactcaa

SEQ ID NO: 79559 - DNA, 13 bp, Artificial Sequence
  Oligonucleotide for detection of SNP TSC0020207
ttgtttggtttaa

SEQ ID NO: 79560 - DNA, 13 bp, Artificial Sequence
  Oligonucleotide for detection of SNP TSC0020207
ttaaaccaaacaa

SEQ ID NO: 79561 - DNA, 13 bp, Artificial Sequence
  Oligonucleotide for detection of SNP TSC0020207
ttgtttagtttaa

SEQ ID NO: 79562 - DNA, 13 bp, Artificial Sequence
  Oligonucleotide for detection of SNP TSC0020207
ttaaactaaacaa

SEQ ID NO: 79563 - DNA, 13 bp, Artificial Sequence
  Oligonucleotide for detection of SNP TSC0020207
ttgttcggtttaa

SEQ ID NO: 79564 - DNA, 13 bp, Artificial Sequence
  Oligonucleotide for detection of SNP TSC0020207
ttaaaccgaacaa

SEQ ID NO: 79565 - DNA, 13 bp, Artificial Sequence
  Oligonucleotide for detection of SNP TSC0020209
ggaagtggtgtag

SEQ ID NO: 79566 - DNA, 13 bp, Artificial Sequence
  Oligonucleotide for detection of SNP TSC0020209
ctacaccacttcc

SEQ ID NO: 79567 - DNA, 13 bp, Artificial Sequence
  Oligonucleotide for detection of SNP TSC0020209
ggaagttgtgtag

SEQ ID NO: 79568 - DNA, 13 bp, Artificial Sequence
  Oligonucleotide for detection of SNP TSC0020209
ctacacaacttcc

SEQ ID NO: 79569 - DNA, 13 bp, Artificial Sequence
  Oligonucleotide for detection of SNP TSC0020209
ggaagtggcgtag

SEQ ID NO: 79570 - DNA, 13 bp, Artificial Sequence
  Oligonucleotide for detection of SNP TSC0020209
ctacgccacttcc

SEQ ID NO: 79571 - DNA, 13 bp, Artificial Sequence
  Oligonucleotide for detection of SNP TSC0020209
ggaagttgcgtag

SEQ ID NO: 79572 - DNA, 13 bp, Artificial Sequence
  Oligonucleotide for detection of SNP TSC0020209
ctacgcaacttcc

SEQ ID NO: 79573 - DNA, 13 bp, Artificial Sequence
  Oligonucleotide for detection of SNP TSC0020209
ttgtgttatttty

SEQ ID NO: 79574 - DNA, 13 bp, Artificial Sequence
  Oligonucleotide for detection of SNP TSC0020209
raaaataacacaa

SEQ ID NO: 79575 - DNA, 13 bp, Artificial Sequence
  Oligonucleotide for detection of SNP TSC0020209
ttgtgtaatttty

SEQ ID NO: 79576 - DNA, 13 bp, Artificial Sequence
  Oligonucleotide for detection of SNP TSC0020209
raaaattacacaa

SEQ ID NO: 79577 - DNA, 13 bp, Artificial Sequence
  Oligonucleotide for detection of SNP TSC0020209
ttgcgttatttty

SEQ ID NO: 79578 - DNA, 13 bp, Artificial Sequence
  Oligonucleotide for detection of SNP TSC0020209
raaaataacgcaa

SEQ ID NO: 79579 - DNA, 13 bp, Artificial Sequence
  Oligonucleotide for detection of SNP TSC0020209
ttgcgtaatttty

SEQ ID NO: 79580 - DNA, 13 bp, Artificial Sequence
  Oligonucleotide for detection of SNP TSC0020209
raaaattacgcaa

SEQ ID NO: 79581 - DNA, 13 bp, Artificial Sequence
  Oligonucleotide for detection of SNP TSC0020210
gtatttagggagg

SEQ ID NO: 79582 - DNA, 13 bp, Artificial Sequence
  Oligonucleotide for detection of SNP TSC0020210
cctccctaaatac

SEQ ID NO: 79583 - DNA, 13 bp, Artificial Sequence
  Oligonucleotide for detection of SNP TSC0020211
gggttaaggatag

SEQ ID NO: 79584 - DNA, 13 bp, Artificial Sequence
  Oligonucleotide for detection of SNP TSC0020211
ctatccttaaccc

SEQ ID NO: 79585 - DNA, 13 bp, Artificial Sequence
  Oligonucleotide for detection of SNP TSC0020211
gggttagggatag

SEQ ID NO: 79586 - DNA, 13 bp, Artificial Sequence
  Oligonucleotide for detection of SNP TSC0020211
ctatccctaaccc

SEQ ID NO: 79587 - DNA, 13 bp, Artificial Sequence
  Oligonucleotide for detection of SNP TSC0020212
ttatagttgtgag

SEQ ID NO: 79588 - DNA, 13 bp, Artificial Sequence
  Oligonucleotide for detection of SNP TSC0020212
ctcacaactataa

SEQ ID NO: 79589 - DNA, 13 bp, Artificial Sequence
  Oligonucleotide for detection of SNP TSC0020212
ttatagtcgtgag

SEQ ID NO: 79590 - DNA, 13 bp, Artificial Sequence
  Oligonucleotide for detection of SNP TSC0020212
ctcacgactataa

SEQ ID NO: 79591 - DNA, 13 bp, Artificial Sequence
  Oligonucleotide for detection of SNP TSC0020212
ttataggcgtgag

SEQ ID NO: 79592 - DNA, 13 bp, Artificial Sequence
  Oligonucleotide for detection of SNP TSC0020212
ctcacgcctataa

SEQ ID NO: 79593 - DNA, 13 bp, Artificial Sequence
  Oligonucleotide for detection of SNP TSC0020213
aaattgattatta

SEQ ID NO: 79594 - DNA, 13 bp, Artificial Sequence
  Oligonucleotide for detection of SNP TSC0020213
taataatcaattt

SEQ ID NO: 79595 - DNA, 13 bp, Artificial Sequence
  Oligonucleotide for detection of SNP TSC0020213
aaattggttatta

SEQ ID NO: 79596 - DNA, 13 bp, Artificial Sequence
  Oligonucleotide for detection of SNP TSC0020213
taataaccaattt

SEQ ID NO: 79597 - DNA, 13 bp, Artificial Sequence
  Oligonucleotide for detection of SNP TSC0020214
ttgagtgatgatt

SEQ ID NO: 79598 - DNA, 13 bp, Artificial Sequence
  Oligonucleotide for detection of SNP TSC0020214
aatcatcactcaa

SEQ ID NO: 79599 - DNA, 13 bp, Artificial Sequence
  Oligonucleotide for detection of SNP TSC0020214
ttgagtaatgatt

SEQ ID NO: 79600 - DNA, 13 bp, Artificial Sequence
  Oligonucleotide for detection of SNP TSC0020214
aatcattactcaa

SEQ ID NO: 79601 - DNA, 13 bp, Artificial Sequence
  Oligonucleotide for detection of SNP TSC0020217
tattagtgtaggg

SEQ ID NO: 79602 - DNA, 13 bp, Artificial Sequence
  Oligonucleotide for detection of SNP TSC0020217
ccctacactaata

SEQ ID NO: 79603 - DNA, 13 bp, Artificial Sequence
  Oligonucleotide for detection of SNP TSC0020217
tattagcgtaggg

SEQ ID NO: 79604 - DNA, 13 bp, Artificial Sequence
  Oligonucleotide for detection of SNP TSC0020217
ccctacgctaata

SEQ ID NO: 79605 - DNA, 13 bp, Artificial Sequence
  Oligonucleotide for detection of SNP TSC0020217
ttttgcgttggta

SEQ ID NO: 79606 - DNA, 13 bp, Artificial Sequence
  Oligonucleotide for detection of SNP TSC0020217
taccaacgcaaaa

SEQ ID NO: 79607 - DNA, 13 bp, Artificial Sequence
  Oligonucleotide for detection of SNP TSC0020218
gtgtgtgtgtgta

SEQ ID NO: 79608 - DNA, 13 bp, Artificial Sequence
  Oligonucleotide for detection of SNP TSC0020218
tacacacacacac

SEQ ID NO: 79609 - DNA, 13 bp, Artificial Sequence
  Oligonucleotide for detection of SNP TSC0020219
tttgaagtgagat

SEQ ID NO: 79610 - DNA, 13 bp, Artificial Sequence
  Oligonucleotide for detection of SNP TSC0020219
atctcacttcaaa

SEQ ID NO: 79611 - DNA, 13 bp, Artificial Sequence
  Oligonucleotide for detection of SNP TSC0020219
tttgaaatgagat

SEQ ID NO: 79612 - DNA, 13 bp, Artificial Sequence
  Oligonucleotide for detection of SNP TSC0020219
atctcatttcaaa

SEQ ID NO: 79613 - DNA, 13 bp, Artificial Sequence
  Oligonucleotide for detection of SNP TSC0020220
gaaagaagagtty

SEQ ID NO: 79614 - DNA, 13 bp, Artificial Sequence
  Oligonucleotide for detection of SNP TSC0020220
raactcttctttc

SEQ ID NO: 79615 - DNA, 13 bp, Artificial Sequence
  Oligonucleotide for detection of SNP TSC0020220
gaaagaggagtty

SEQ ID NO: 79616 - DNA, 13 bp, Artificial Sequence
  Oligonucleotide for detection of SNP TSC0020220
raactcctctttc

SEQ ID NO: 79617 - DNA, 13 bp, Artificial Sequence
  Oligonucleotide for detection of SNP TSC0020221
aaaaaaaggggaa

SEQ ID NO: 79618 - DNA, 13 bp, Artificial Sequence
  Oligonucleotide for detection of SNP TSC0020221
ttccccttttttt

SEQ ID NO: 79619 - DNA, 13 bp, Artificial Sequence
  Oligonucleotide for detection of SNP TSC0020221
aaaaaagggggaa

SEQ ID NO: 79620 - DNA, 13 bp, Artificial Sequence
  Oligonucleotide for detection of SNP TSC0020221
ttccccctttttt

SEQ ID NO: 79621 - DNA, 13 bp, Artificial Sequence
  Oligonucleotide for detection of SNP TSC0020222
gttggagtattty

SEQ ID NO: 79622 - DNA, 13 bp, Artificial Sequence
  Oligonucleotide for detection of SNP TSC0020222
raaatactccaac

SEQ ID NO: 79623 - DNA, 13 bp, Artificial Sequence
  Oligonucleotide for detection of SNP TSC0020222
gttggaatattty

SEQ ID NO: 79624 - DNA, 13 bp, Artificial Sequence
  Oligonucleotide for detection of SNP TSC0020222
raaatattccaac

SEQ ID NO: 79625 - DNA, 13 bp, Artificial Sequence
  Oligonucleotide for detection of SNP TSC0020225
atagtttgggtgg

SEQ ID NO: 79626 - DNA, 13 bp, Artificial Sequence
  Oligonucleotide for detection of SNP TSC0020225
ccacccaaactat

SEQ ID NO: 79627 - DNA, 13 bp, Artificial Sequence
  Oligonucleotide for detection of SNP TSC0020225
atagttcgggtgg

SEQ ID NO: 79628 - DNA, 13 bp, Artificial Sequence
  Oligonucleotide for detection of SNP TSC0020225
ccacccgaactat

SEQ ID NO: 79629 - DNA, 13 bp, Artificial Sequence
  Oligonucleotide for detection of SNP TSC0020225
ttatttgggttgt

SEQ ID NO: 79630 - DNA, 13 bp, Artificial Sequence
  Oligonucleotide for detection of SNP TSC0020225
acaacccaaataa

SEQ ID NO: 79631 - DNA, 13 bp, Artificial Sequence
  Oligonucleotide for detection of SNP TSC0020225
ttatttaggttgt

SEQ ID NO: 79632 - DNA, 13 bp, Artificial Sequence
  Oligonucleotide for detection of SNP TSC0020225
acaacctaaataa

SEQ ID NO: 79633 - DNA, 13 bp, Artificial Sequence
  Oligonucleotide for detection of SNP TSC0020225
ttattcgggttgt

SEQ ID NO: 79634 - DNA, 13 bp, Artificial Sequence
  Oligonucleotide for detection of SNP TSC0020225
acaacccgaataa

SEQ ID NO: 79635 - DNA, 13 bp, Artificial Sequence
  Oligonucleotide for detection of SNP TSC0020228
attattatagttt

SEQ ID NO: 79636 - DNA, 13 bp, Artificial Sequence
  Oligonucleotide for detection of SNP TSC0020228
aaactataataat

SEQ ID NO: 79637 - DNA, 13 bp, Artificial Sequence
  Oligonucleotide for detection of SNP TSC0020228
attattgtagttt

SEQ ID NO: 79638 - DNA, 13 bp, Artificial Sequence
  Oligonucleotide for detection of SNP TSC0020228
aaactacaataat

SEQ ID NO: 79639 - DNA, 13 bp, Artificial Sequence
  Oligonucleotide for detection of SNP TSC0020231
agaggtatttaaa

SEQ ID NO: 79640 - DNA, 13 bp, Artificial Sequence
  Oligonucleotide for detection of SNP TSC0020231
tttaaatacctct

SEQ ID NO: 79641 - DNA, 13 bp, Artificial Sequence
  Oligonucleotide for detection of SNP TSC0020231
agaggtttttaaa

SEQ ID NO: 79642 - DNA, 13 bp, Artificial Sequence
  Oligonucleotide for detection of SNP TSC0020231
tttaaaaacctct

SEQ ID NO: 79643 - DNA, 13 bp, Artificial Sequence
  Oligonucleotide for detection of SNP TSC0020231
tttgagtgttttt

SEQ ID NO: 79644 - DNA, 13 bp, Artificial Sequence
  Oligonucleotide for detection of SNP TSC0020231
aaaaacactcaaa

SEQ ID NO: 79645 - DNA, 13 bp, Artificial Sequence
  Oligonucleotide for detection of SNP TSC0020231
tttgagggttttt

SEQ ID NO: 79646 - DNA, 13 bp, Artificial Sequence
  Oligonucleotide for detection of SNP TSC0020231
aaaaaccctcaaa

SEQ ID NO: 79647 - DNA, 13 bp, Artificial Sequence
  Oligonucleotide for detection of SNP TSC0020232
tagaaagttgtgt

SEQ ID NO: 79648 - DNA, 13 bp, Artificial Sequence
  Oligonucleotide for detection of SNP TSC0020232
acacaactttcta

SEQ ID NO: 79649 - DNA, 13 bp, Artificial Sequence
  Oligonucleotide for detection of SNP TSC0020232
tagaaaattgtgt

SEQ ID NO: 79650 - DNA, 13 bp, Artificial Sequence
  Oligonucleotide for detection of SNP TSC0020232
acacaattttcta

SEQ ID NO: 79651 - DNA, 13 bp, Artificial Sequence
  Oligonucleotide for detection of SNP TSC0020233
gtatttagttatt

SEQ ID NO: 79652 - DNA, 13 bp, Artificial Sequence
  Oligonucleotide for detection of SNP TSC0020233
aataactaaatac

SEQ ID NO: 79653 - DNA, 13 bp, Artificial Sequence
  Oligonucleotide for detection of SNP TSC0020233
gtatttggttatt

SEQ ID NO: 79654 - DNA, 13 bp, Artificial Sequence
  Oligonucleotide for detection of SNP TSC0020233
aataaccaaatac

SEQ ID NO: 79655 - DNA, 13 bp, Artificial Sequence
  Oligonucleotide for detection of SNP TSC0020233
gtattcggttatt

SEQ ID NO: 79656 - DNA, 13 bp, Artificial Sequence
  Oligonucleotide for detection of SNP TSC0020233
aataaccgaatac

SEQ ID NO: 79657 - DNA, 13 bp, Artificial Sequence
  Oligonucleotide for detection of SNP TSC0020233
agtggttgagtgy

SEQ ID NO: 79658 - DNA, 13 bp, Artificial Sequence
  Oligonucleotide for detection of SNP TSC0020233
rcactcaaccact

SEQ ID NO: 79659 - DNA, 13 bp, Artificial Sequence
  Oligonucleotide for detection of SNP TSC0020233
agtggtcgagtgy

SEQ ID NO: 79660 - DNA, 13 bp, Artificial Sequence
  Oligonucleotide for detection of SNP TSC0020233
rcactcgaccact

SEQ ID NO: 79661 - DNA, 13 bp, Artificial Sequence
  Oligonucleotide for detection of SNP TSC0020234
attttatggggty

SEQ ID NO: 79662 - DNA, 13 bp, Artificial Sequence
  Oligonucleotide for detection of SNP TSC0020234
raccccataaaat

SEQ ID NO: 79663 - DNA, 13 bp, Artificial Sequence
  Oligonucleotide for detection of SNP TSC0020234
attttacggggty

SEQ ID NO: 79664 - DNA, 13 bp, Artificial Sequence
  Oligonucleotide for detection of SNP TSC0020234
raccccgtaaaat

SEQ ID NO: 79665 - DNA, 13 bp, Artificial Sequence
  Oligonucleotide for detection of SNP TSC0020234
gattttgtgaaat

SEQ ID NO: 79666 - DNA, 13 bp, Artificial Sequence
  Oligonucleotide for detection of SNP TSC0020234
atttcacaaaatc

SEQ ID NO: 79667 - DNA, 13 bp, Artificial Sequence
  Oligonucleotide for detection of SNP TSC0020234
gattttatgaaat

SEQ ID NO: 79668 - DNA, 13 bp, Artificial Sequence
  Oligonucleotide for detection of SNP TSC0020234
atttcataaaatc

SEQ ID NO: 79669 - DNA, 13 bp, Artificial Sequence
  Oligonucleotide for detection of SNP TSC0020234
gatttcgtgaaat

SEQ ID NO: 79670 - DNA, 13 bp, Artificial Sequence
  Oligonucleotide for detection of SNP TSC0020234
atttcacgaaatc

SEQ ID NO: 79671 - DNA, 13 bp, Artificial Sequence
  Oligonucleotide for detection of SNP TSC0020237
tatttatgttgga

SEQ ID NO: 79672 - DNA, 13 bp, Artificial Sequence
  Oligonucleotide for detection of SNP TSC0020237
tccaacataaata

SEQ ID NO: 79673 - DNA, 13 bp, Artificial Sequence
  Oligonucleotide for detection of SNP TSC0020237
tatttacgttgga

SEQ ID NO: 79674 - DNA, 13 bp, Artificial Sequence
  Oligonucleotide for detection of SNP TSC0020237
tccaacgtaaata

SEQ ID NO: 79675 - DNA, 13 bp, Artificial Sequence
  Oligonucleotide for detection of SNP TSC0020237
tttagtgtgggtg

SEQ ID NO: 79676 - DNA, 13 bp, Artificial Sequence
  Oligonucleotide for detection of SNP TSC0020237
cacccacactaaa

SEQ ID NO: 79677 - DNA, 13 bp, Artificial Sequence
  Oligonucleotide for detection of SNP TSC0020237
tttagtatgggtg

SEQ ID NO: 79678 - DNA, 13 bp, Artificial Sequence
  Oligonucleotide for detection of SNP TSC0020237
cacccatactaaa

SEQ ID NO: 79679 - DNA, 13 bp, Artificial Sequence
  Oligonucleotide for detection of SNP TSC0020237
tttagcgtgggtg

SEQ ID NO: 79680 - DNA, 13 bp, Artificial Sequence
  Oligonucleotide for detection of SNP TSC0020237
cacccacgctaaa

SEQ ID NO: 79681 - DNA, 13 bp, Artificial Sequence
  Oligonucleotide for detection of SNP TSC0020240
agtaaaatagaaa

SEQ ID NO: 79682 - DNA, 13 bp, Artificial Sequence
  Oligonucleotide for detection of SNP TSC0020240
tttctattttact

SEQ ID NO: 79683 - DNA, 13 bp, Artificial Sequence
  Oligonucleotide for detection of SNP TSC0020240
agtaaagtagaaa

SEQ ID NO: 79684 - DNA, 13 bp, Artificial Sequence
  Oligonucleotide for detection of SNP TSC0020240
tttctactttact

SEQ ID NO: 79685 - DNA, 13 bp, Artificial Sequence
  Oligonucleotide for detection of SNP TSC0020241
taaaaattgaaag

SEQ ID NO: 79686 - DNA, 13 bp, Artificial Sequence
  Oligonucleotide for detection of SNP TSC0020241
ctttcaattttta

SEQ ID NO: 79687 - DNA, 13 bp, Artificial Sequence
  Oligonucleotide for detection of SNP TSC0020241
taaaaaatgaaag

SEQ ID NO: 79688 - DNA, 13 bp, Artificial Sequence
  Oligonucleotide for detection of SNP TSC0020241
ctttcatttttta

SEQ ID NO: 79689 - DNA, 13 bp, Artificial Sequence
  Oligonucleotide for detection of SNP TSC0020243
tgtttgtaaggtt

SEQ ID NO: 79690 - DNA, 13 bp, Artificial Sequence
  Oligonucleotide for detection of SNP TSC0020243
aaccttacaaaca

SEQ ID NO: 79691 - DNA, 13 bp, Artificial Sequence
  Oligonucleotide for detection of SNP TSC0020243
tgtttggaaggtt

SEQ ID NO: 79692 - DNA, 13 bp, Artificial Sequence
  Oligonucleotide for detection of SNP TSC0020243
aaccttccaaaca

SEQ ID NO: 79693 - DNA, 13 bp, Artificial Sequence
  Oligonucleotide for detection of SNP TSC0020243
agttttgtaagta

SEQ ID NO: 79694 - DNA, 13 bp, Artificial Sequence
  Oligonucleotide for detection of SNP TSC0020243
tacttacaaaact

SEQ ID NO: 79695 - DNA, 13 bp, Artificial Sequence
  Oligonucleotide for detection of SNP TSC0020243
agttttttaagta

SEQ ID NO: 79696 - DNA, 13 bp, Artificial Sequence
  Oligonucleotide for detection of SNP TSC0020243
tacttaaaaaact

SEQ ID NO: 79697 - DNA, 13 bp, Artificial Sequence
  Oligonucleotide for detection of SNP TSC0020244
gtgtatatataty

SEQ ID NO: 79698 - DNA, 13 bp, Artificial Sequence
  Oligonucleotide for detection of SNP TSC0020244
ratatatatacac

SEQ ID NO: 79699 - DNA, 13 bp, Artificial Sequence
  Oligonucleotide for detection of SNP TSC0020244
gtgtatgtataty

SEQ ID NO: 79700 - DNA, 13 bp, Artificial Sequence
  Oligonucleotide for detection of SNP TSC0020244
ratatacatacac

SEQ ID NO: 79701 - DNA, 13 bp, Artificial Sequence
  Oligonucleotide for detection of SNP TSC0020244
gtgtacgtataty

SEQ ID NO: 79702 - DNA, 13 bp, Artificial Sequence
  Oligonucleotide for detection of SNP TSC0020244
ratatacgtacac

SEQ ID NO: 79703 - DNA, 13 bp, Artificial Sequence
  Oligonucleotide for detection of SNP TSC0020244
gatgtgtgtgtay

SEQ ID NO: 79704 - DNA, 13 bp, Artificial Sequence
  Oligonucleotide for detection of SNP TSC0020244
rtacacacacatc

SEQ ID NO: 79705 - DNA, 13 bp, Artificial Sequence
  Oligonucleotide for detection of SNP TSC0020244
gatgtgcgtgtay

SEQ ID NO: 79706 - DNA, 13 bp, Artificial Sequence
  Oligonucleotide for detection of SNP TSC0020244
rtacacgcacatc

SEQ ID NO: 79707 - DNA, 13 bp, Artificial Sequence
  Oligonucleotide for detection of SNP TSC0020247
ttgagtgtttttt

SEQ ID NO: 79708 - DNA, 13 bp, Artificial Sequence
  Oligonucleotide for detection of SNP TSC0020247
aaaaaacactcaa

SEQ ID NO: 79709 - DNA, 13 bp, Artificial Sequence
  Oligonucleotide for detection of SNP TSC0020248
aagggaggggtta

SEQ ID NO: 79710 - DNA, 13 bp, Artificial Sequence
  Oligonucleotide for detection of SNP TSC0020248
taacccctccctt

SEQ ID NO: 79711 - DNA, 13 bp, Artificial Sequence
  Oligonucleotide for detection of SNP TSC0020248
aagggaagggtta

SEQ ID NO: 79712 - DNA, 13 bp, Artificial Sequence
  Oligonucleotide for detection of SNP TSC0020248
taacccttccctt

SEQ ID NO: 79713 - DNA, 13 bp, Artificial Sequence
  Oligonucleotide for detection of SNP TSC0020249
gatgatataaatg

SEQ ID NO: 79714 - DNA, 13 bp, Artificial Sequence
  Oligonucleotide for detection of SNP TSC0020249
catttatatcatc

SEQ ID NO: 79715 - DNA, 13 bp, Artificial Sequence
  Oligonucleotide for detection of SNP TSC0020249
gatgatgtaaatg

SEQ ID NO: 79716 - DNA, 13 bp, Artificial Sequence
  Oligonucleotide for detection of SNP TSC0020249
catttacatcatc

SEQ ID NO: 79717 - DNA, 13 bp, Artificial Sequence
  Oligonucleotide for detection of SNP TSC0020249
gatgatataaacg

SEQ ID NO: 79718 - DNA, 13 bp, Artificial Sequence
  Oligonucleotide for detection of SNP TSC0020249
cgtttatatcatc

SEQ ID NO: 79719 - DNA, 13 bp, Artificial Sequence
  Oligonucleotide for detection of SNP TSC0020249
gatgatgtaaacg

SEQ ID NO: 79720 - DNA, 13 bp, Artificial Sequence
  Oligonucleotide for detection of SNP TSC0020249
cgtttacatcatc

SEQ ID NO: 79721 - DNA, 13 bp, Artificial Sequence
  Oligonucleotide for detection of SNP TSC0020251
agtagtagaatta

SEQ ID NO: 79722 - DNA, 13 bp, Artificial Sequence
  Oligonucleotide for detection of SNP TSC0020251
taattctactact

SEQ ID NO: 79723 - DNA, 13 bp, Artificial Sequence
  Oligonucleotide for detection of SNP TSC0020251
agtagtggaatta

SEQ ID NO: 79724 - DNA, 13 bp, Artificial Sequence
  Oligonucleotide for detection of SNP TSC0020251
taattccactact

SEQ ID NO: 79725 - DNA, 13 bp, Artificial Sequence
  Oligonucleotide for detection of SNP TSC0020251
agtagcggaatta

SEQ ID NO: 79726 - DNA, 13 bp, Artificial Sequence
  Oligonucleotide for detection of SNP TSC0020251
taattccgctact

SEQ ID NO: 79727 - DNA, 13 bp, Artificial Sequence
  Oligonucleotide for detection of SNP TSC0020251
tggttttgttatt

SEQ ID NO: 79728 - DNA, 13 bp, Artificial Sequence
  Oligonucleotide for detection of SNP TSC0020251
aataacaaaacca

SEQ ID NO: 79729 - DNA, 13 bp, Artificial Sequence
  Oligonucleotide for detection of SNP TSC0020251
tggtttcgttatt

SEQ ID NO: 79730 - DNA, 13 bp, Artificial Sequence
  Oligonucleotide for detection of SNP TSC0020251
aataacgaaacca

SEQ ID NO: 79731 - DNA, 13 bp, Artificial Sequence
  Oligonucleotide for detection of SNP TSC0020253
gtaaatggtttta

SEQ ID NO: 79732 - DNA, 13 bp, Artificial Sequence
  Oligonucleotide for detection of SNP TSC0020253
taaaaccatttac

SEQ ID NO: 79733 - DNA, 13 bp, Artificial Sequence
  Oligonucleotide for detection of SNP TSC0020253
gtaaatagtttta

SEQ ID NO: 79734 - DNA, 13 bp, Artificial Sequence
  Oligonucleotide for detection of SNP TSC0020253
taaaactatttac

SEQ ID NO: 79735 - DNA, 13 bp, Artificial Sequence
  Oligonucleotide for detection of SNP TSC0020254
aatttttgtatgt

SEQ ID NO: 79736 - DNA, 13 bp, Artificial Sequence
  Oligonucleotide for detection of SNP TSC0020254
acatacaaaaatt

SEQ ID NO: 79737 - DNA, 13 bp, Artificial Sequence
  Oligonucleotide for detection of SNP TSC0020254
aattttggtatgt

SEQ ID NO: 79738 - DNA, 13 bp, Artificial Sequence
  Oligonucleotide for detection of SNP TSC0020254
acataccaaaatt

SEQ ID NO: 79739 - DNA, 13 bp, Artificial Sequence
  Oligonucleotide for detection of SNP TSC0020254
aattttcgtatgt

SEQ ID NO: 79740 - DNA, 13 bp, Artificial Sequence
  Oligonucleotide for detection of SNP TSC0020254
acatacgaaaatt

SEQ ID NO: 79741 - DNA, 13 bp, Artificial Sequence
  Oligonucleotide for detection of SNP TSC0020254
aattttggtacgt

SEQ ID NO: 79742 - DNA, 13 bp, Artificial Sequence
  Oligonucleotide for detection of SNP TSC0020254
acgtaccaaaatt

SEQ ID NO: 79743 - DNA, 13 bp, Artificial Sequence
  Oligonucleotide for detection of SNP TSC0020254
aatttttgtacgt

SEQ ID NO: 79744 - DNA, 13 bp, Artificial Sequence
  Oligonucleotide for detection of SNP TSC0020254
acgtacaaaaatt

SEQ ID NO: 79745 - DNA, 13 bp, Artificial Sequence
  Oligonucleotide for detection of SNP TSC0020254
aattttcgtacgt

SEQ ID NO: 79746 - DNA, 13 bp, Artificial Sequence
  Oligonucleotide for detection of SNP TSC0020254
acgtacgaaaatt

SEQ ID NO: 79747 - DNA, 13 bp, Artificial Sequence
  Oligonucleotide for detection of SNP TSC0020254
atgtgtgaaaatt

SEQ ID NO: 79748 - DNA, 13 bp, Artificial Sequence
  Oligonucleotide for detection of SNP TSC0020254
aattttcacacat

SEQ ID NO: 79749 - DNA, 13 bp, Artificial Sequence
  Oligonucleotide for detection of SNP TSC0020254
atgtgttaaaatt

SEQ ID NO: 79750 - DNA, 13 bp, Artificial Sequence
  Oligonucleotide for detection of SNP TSC0020254
aattttaacacat

SEQ ID NO: 79751 - DNA, 13 bp, Artificial Sequence
  Oligonucleotide for detection of SNP TSC0020254
acgtgtgaaaatt

SEQ ID NO: 79752 - DNA, 13 bp, Artificial Sequence
  Oligonucleotide for detection of SNP TSC0020254
aattttcacacgt

SEQ ID NO: 79753 - DNA, 13 bp, Artificial Sequence
  Oligonucleotide for detection of SNP TSC0020254
acgtgttaaaatt

SEQ ID NO: 79754 - DNA, 13 bp, Artificial Sequence
  Oligonucleotide for detection of SNP TSC0020254
aattttaacacgt

SEQ ID NO: 79755 - DNA, 13 bp, Artificial Sequence
  Oligonucleotide for detection of SNP TSC0020254
atgtgcgaaaatt

SEQ ID NO: 79756 - DNA, 13 bp, Artificial Sequence
  Oligonucleotide for detection of SNP TSC0020254
aattttcgcacat

SEQ ID NO: 79757 - DNA, 13 bp, Artificial Sequence
  Oligonucleotide for detection of SNP TSC0020254
acgtgcgaaaatt

SEQ ID NO: 79758 - DNA, 13 bp, Artificial Sequence
  Oligonucleotide for detection of SNP TSC0020254
aattttcgcacgt

SEQ ID NO: 79759 - DNA, 13 bp, Artificial Sequence
  Oligonucleotide for detection of SNP TSC0020260
gttatttgtattt

SEQ ID NO: 79760 - DNA, 13 bp, Artificial Sequence
  Oligonucleotide for detection of SNP TSC0020260
aaatacaaataac

SEQ ID NO: 79761 - DNA, 13 bp, Artificial Sequence
  Oligonucleotide for detection of SNP TSC0020260
gttattcgtattt

SEQ ID NO: 79762 - DNA, 13 bp, Artificial Sequence
  Oligonucleotide for detection of SNP TSC0020260
aaatacgaataac

SEQ ID NO: 79763 - DNA, 13 bp, Artificial Sequence
  Oligonucleotide for detection of SNP TSC0020260
agatgtggatgay

SEQ ID NO: 79764 - DNA, 13 bp, Artificial Sequence
  Oligonucleotide for detection of SNP TSC0020260
rtcatccacatct

SEQ ID NO: 79765 - DNA, 13 bp, Artificial Sequence
  Oligonucleotide for detection of SNP TSC0020260
agatgtagatgay

SEQ ID NO: 79766 - DNA, 13 bp, Artificial Sequence
  Oligonucleotide for detection of SNP TSC0020260
rtcatctacatct

SEQ ID NO: 79767 - DNA, 13 bp, Artificial Sequence
  Oligonucleotide for detection of SNP TSC0020260
agatgcggatgay

SEQ ID NO: 79768 - DNA, 13 bp, Artificial Sequence
  Oligonucleotide for detection of SNP TSC0020260
rtcatccgcatct

SEQ ID NO: 79769 - DNA, 13 bp, Artificial Sequence
  Oligonucleotide for detection of SNP TSC0020261
agttagagtttgy

SEQ ID NO: 79770 - DNA, 13 bp, Artificial Sequence
  Oligonucleotide for detection of SNP TSC0020261
rcaaactctaact

SEQ ID NO: 79771 - DNA, 13 bp, Artificial Sequence
  Oligonucleotide for detection of SNP TSC0020261
agttagtgtttgy

SEQ ID NO: 79772 - DNA, 13 bp, Artificial Sequence
  Oligonucleotide for detection of SNP TSC0020261
rcaaacactaact

SEQ ID NO: 79773 - DNA, 13 bp, Artificial Sequence
  Oligonucleotide for detection of SNP TSC0020261
agttagcgtttgy

SEQ ID NO: 79774 - DNA, 13 bp, Artificial Sequence
  Oligonucleotide for detection of SNP TSC0020261
rcaaacgctaact

SEQ ID NO: 79775 - DNA, 13 bp, Artificial Sequence
  Oligonucleotide for detection of SNP TSC0020261
gtaagttttggtt

SEQ ID NO: 79776 - DNA, 13 bp, Artificial Sequence
  Oligonucleotide for detection of SNP TSC0020261
aaccaaaacttac

SEQ ID NO: 79777 - DNA, 13 bp, Artificial Sequence
  Oligonucleotide for detection of SNP TSC0020261
gtaagtgttggtt

SEQ ID NO: 79778 - DNA, 13 bp, Artificial Sequence
  Oligonucleotide for detection of SNP TSC0020261
aaccaacacttac

SEQ ID NO: 79779 - DNA, 13 bp, Artificial Sequence
  Oligonucleotide for detection of SNP TSC0020261
gtaagcgttggtt

SEQ ID NO: 79780 - DNA, 13 bp, Artificial Sequence
  Oligonucleotide for detection of SNP TSC0020261
aaccaacgcttac

SEQ ID NO: 79781 - DNA, 13 bp, Artificial Sequence
  Oligonucleotide for detection of SNP TSC0020262
tggatatggatta

SEQ ID NO: 79782 - DNA, 13 bp, Artificial Sequence
  Oligonucleotide for detection of SNP TSC0020262
taatccatatcca

SEQ ID NO: 79783 - DNA, 13 bp, Artificial Sequence
  Oligonucleotide for detection of SNP TSC0020262
cggatatggatta

SEQ ID NO: 79784 - DNA, 13 bp, Artificial Sequence
  Oligonucleotide for detection of SNP TSC0020262
taatccatatccg

SEQ ID NO: 79785 - DNA, 13 bp, Artificial Sequence
  Oligonucleotide for detection of SNP TSC0020262
tggatacggatta

SEQ ID NO: 79786 - DNA, 13 bp, Artificial Sequence
  Oligonucleotide for detection of SNP TSC0020262
taatccgtatcca

SEQ ID NO: 79787 - DNA, 13 bp, Artificial Sequence
  Oligonucleotide for detection of SNP TSC0020262
cggatacggatta

SEQ ID NO: 79788 - DNA, 13 bp, Artificial Sequence
  Oligonucleotide for detection of SNP TSC0020262
taatccgtatccg

SEQ ID NO: 79789 - DNA, 13 bp, Artificial Sequence
  Oligonucleotide for detection of SNP TSC0020263
ttttttttttgat

SEQ ID NO: 79790 - DNA, 13 bp, Artificial Sequence
  Oligonucleotide for detection of SNP TSC0020263
atcaaaaaaaaaa

SEQ ID NO: 79791 - DNA, 13 bp, Artificial Sequence
  Oligonucleotide for detection of SNP TSC0020263
ttttttgtttgat

SEQ ID NO: 79792 - DNA, 13 bp, Artificial Sequence
  Oligonucleotide for detection of SNP TSC0020263
atcaaacaaaaaa

SEQ ID NO: 79793 - DNA, 13 bp, Artificial Sequence
  Oligonucleotide for detection of SNP TSC0020263
attaaagagaagg

SEQ ID NO: 79794 - DNA, 13 bp, Artificial Sequence
  Oligonucleotide for detection of SNP TSC0020263
ccttctctttaat

SEQ ID NO: 79795 - DNA, 13 bp, Artificial Sequence
  Oligonucleotide for detection of SNP TSC0020263
attaaatagaagg

SEQ ID NO: 79796 - DNA, 13 bp, Artificial Sequence
  Oligonucleotide for detection of SNP TSC0020263
ccttctatttaat

SEQ ID NO: 79797 - DNA, 13 bp, Artificial Sequence
  Oligonucleotide for detection of SNP TSC0020264
gttgttagtggag

SEQ ID NO: 79798 - DNA, 13 bp, Artificial Sequence
  Oligonucleotide for detection of SNP TSC0020264
ctccactaacaac

SEQ ID NO: 79799 - DNA, 13 bp, Artificial Sequence
  Oligonucleotide for detection of SNP TSC0020264
gttgtttgtggag

SEQ ID NO: 79800 - DNA, 13 bp, Artificial Sequence
  Oligonucleotide for detection of SNP TSC0020264
ctccacaaacaac

SEQ ID NO: 79801 - DNA, 13 bp, Artificial Sequence
  Oligonucleotide for detection of SNP TSC0020264
gtcgttagtggag

SEQ ID NO: 79802 - DNA, 13 bp, Artificial Sequence
  Oligonucleotide for detection of SNP TSC0020264
ctccactaacgac

SEQ ID NO: 79803 - DNA, 13 bp, Artificial Sequence
  Oligonucleotide for detection of SNP TSC0020264
gtcgtttgtggag

SEQ ID NO: 79804 - DNA, 13 bp, Artificial Sequence
  Oligonucleotide for detection of SNP TSC0020264
ctccacaaacgac

SEQ ID NO: 79805 - DNA, 13 bp, Artificial Sequence
  Oligonucleotide for detection of SNP TSC0020264
gttgttcgtggag

SEQ ID NO: 79806 - DNA, 13 bp, Artificial Sequence
  Oligonucleotide for detection of SNP TSC0020264
ctccacgaacaac

SEQ ID NO: 79807 - DNA, 13 bp, Artificial Sequence
  Oligonucleotide for detection of SNP TSC0020264
gtcgttcgtggag

SEQ ID NO: 79808 - DNA, 13 bp, Artificial Sequence
  Oligonucleotide for detection of SNP TSC0020264
ctccacgaacgac

SEQ ID NO: 79809 - DNA, 13 bp, Artificial Sequence
  Oligonucleotide for detection of SNP TSC0020264
ttttattagtgay

SEQ ID NO: 79810 - DNA, 13 bp, Artificial Sequence
  Oligonucleotide for detection of SNP TSC0020264
rtcactaataaaa

SEQ ID NO: 79811 - DNA, 13 bp, Artificial Sequence
  Oligonucleotide for detection of SNP TSC0020264
ttttatgagtgay

SEQ ID NO: 79812 - DNA, 13 bp, Artificial Sequence
  Oligonucleotide for detection of SNP TSC0020264
rtcactcataaaa

SEQ ID NO: 79813 - DNA, 13 bp, Artificial Sequence
  Oligonucleotide for detection of SNP TSC0020264
ttttattagcgay

SEQ ID NO: 79814 - DNA, 13 bp, Artificial Sequence
  Oligonucleotide for detection of SNP TSC0020264
rtcgctaataaaa

SEQ ID NO: 79815 - DNA, 13 bp, Artificial Sequence
  Oligonucleotide for detection of SNP TSC0020264
ttttacgagtgay

SEQ ID NO: 79816 - DNA, 13 bp, Artificial Sequence
  Oligonucleotide for detection of SNP TSC0020264
rtcactcgtaaaa

SEQ ID NO: 79817 - DNA, 13 bp, Artificial Sequence
  Oligonucleotide for detection of SNP TSC0020264
ttttatgagcgay

SEQ ID NO: 79818 - DNA, 13 bp, Artificial Sequence
  Oligonucleotide for detection of SNP TSC0020264
rtcgctcataaaa

SEQ ID NO: 79819 - DNA, 13 bp, Artificial Sequence
  Oligonucleotide for detection of SNP TSC0020264
ttttacgagcgay

SEQ ID NO: 79820 - DNA, 13 bp, Artificial Sequence
  Oligonucleotide for detection of SNP TSC0020264
rtcgctcgtaaaa

SEQ ID NO: 79821 - DNA, 13 bp, Artificial Sequence
  Oligonucleotide for detection of SNP TSC0020265
tttgttatgttgg

SEQ ID NO: 79822 - DNA, 13 bp, Artificial Sequence
  Oligonucleotide for detection of SNP TSC0020265
ccaacataacaaa

SEQ ID NO: 79823 - DNA, 13 bp, Artificial Sequence
  Oligonucleotide for detection of SNP TSC0020265
tttgttgtgttgg

SEQ ID NO: 79824 - DNA, 13 bp, Artificial Sequence
  Oligonucleotide for detection of SNP TSC0020265
ccaacacaacaaa

SEQ ID NO: 79825 - DNA, 13 bp, Artificial Sequence
  Oligonucleotide for detection of SNP TSC0020265
tttgtcgtgttgg

SEQ ID NO: 79826 - DNA, 13 bp, Artificial Sequence
  Oligonucleotide for detection of SNP TSC0020265
ccaacacgacaaa

SEQ ID NO: 79827 - DNA, 13 bp, Artificial Sequence
  Oligonucleotide for detection of SNP TSC0020265
ttaatatggtaaa

SEQ ID NO: 79828 - DNA, 13 bp, Artificial Sequence
  Oligonucleotide for detection of SNP TSC0020265
tttaccatattaa

SEQ ID NO: 79829 - DNA, 13 bp, Artificial Sequence
  Oligonucleotide for detection of SNP TSC0020265
ttaatacggtaaa

SEQ ID NO: 79830 - DNA, 13 bp, Artificial Sequence
  Oligonucleotide for detection of SNP TSC0020265
tttaccgtattaa

SEQ ID NO: 79831 - DNA, 13 bp, Artificial Sequence
  Oligonucleotide for detection of SNP TSC0020266
ggtgttagagtty

SEQ ID NO: 79832 - DNA, 13 bp, Artificial Sequence
  Oligonucleotide for detection of SNP TSC0020266
raactctaacacc

SEQ ID NO: 79833 - DNA, 13 bp, Artificial Sequence
  Oligonucleotide for detection of SNP TSC0020266
ggtgttggagtty

SEQ ID NO: 79834 - DNA, 13 bp, Artificial Sequence
  Oligonucleotide for detection of SNP TSC0020266
raactccaacacc

SEQ ID NO: 79835 - DNA, 13 bp, Artificial Sequence
  Oligonucleotide for detection of SNP TSC0020267
gggggagtagata

SEQ ID NO: 79836 - DNA, 13 bp, Artificial Sequence
  Oligonucleotide for detection of SNP TSC0020267
tatctactccccc

SEQ ID NO: 79837 - DNA, 13 bp, Artificial Sequence
  Oligonucleotide for detection of SNP TSC0020267
gggggaatagata

SEQ ID NO: 79838 - DNA, 13 bp, Artificial Sequence
  Oligonucleotide for detection of SNP TSC0020267
tatctattccccc

SEQ ID NO: 79839 - DNA, 13 bp, Artificial Sequence
  Oligonucleotide for detection of SNP TSC0020268
ataagagggggag

SEQ ID NO: 79840 - DNA, 13 bp, Artificial Sequence
  Oligonucleotide for detection of SNP TSC0020268
ctccccctcttat

SEQ ID NO: 79841 - DNA, 13 bp, Artificial Sequence
  Oligonucleotide for detection of SNP TSC0020268
ataagaaggggag

SEQ ID NO: 79842 - DNA, 13 bp, Artificial Sequence
  Oligonucleotide for detection of SNP TSC0020268
ctccccttcttat

SEQ ID NO: 79843 - DNA, 13 bp, Artificial Sequence
  Oligonucleotide for detection of SNP TSC0020269
tggttaaatttta

SEQ ID NO: 79844 - DNA, 13 bp, Artificial Sequence
  Oligonucleotide for detection of SNP TSC0020269
taaaatttaacca

SEQ ID NO: 79845 - DNA, 13 bp, Artificial Sequence
  Oligonucleotide for detection of SNP TSC0020269
tggttatatttta

SEQ ID NO: 79846 - DNA, 13 bp, Artificial Sequence
  Oligonucleotide for detection of SNP TSC0020269
taaaatataacca

SEQ ID NO: 79847 - DNA, 13 bp, Artificial Sequence
  Oligonucleotide for detection of SNP TSC0020269
tggagtttggtta

SEQ ID NO: 79848 - DNA, 13 bp, Artificial Sequence
  Oligonucleotide for detection of SNP TSC0020269
taaccaaactcca

SEQ ID NO: 79849 - DNA, 13 bp, Artificial Sequence
  Oligonucleotide for detection of SNP TSC0020269
tggagtatggtta

SEQ ID NO: 79850 - DNA, 13 bp, Artificial Sequence
  Oligonucleotide for detection of SNP TSC0020269
taaccatactcca

SEQ ID NO: 79851 - DNA, 13 bp, Artificial Sequence
  Oligonucleotide for detection of SNP TSC0020270
gaagggaatatty

SEQ ID NO: 79852 - DNA, 13 bp, Artificial Sequence
  Oligonucleotide for detection of SNP TSC0020270
raatattcccttc

SEQ ID NO: 79853 - DNA, 13 bp, Artificial Sequence
  Oligonucleotide for detection of SNP TSC0020270
gaagggtatatty

SEQ ID NO: 79854 - DNA, 13 bp, Artificial Sequence
  Oligonucleotide for detection of SNP TSC0020270
raatatacccttc

SEQ ID NO: 79855 - DNA, 13 bp, Artificial Sequence
  Oligonucleotide for detection of SNP TSC0020270
gaatgttttttty

SEQ ID NO: 79856 - DNA, 13 bp, Artificial Sequence
  Oligonucleotide for detection of SNP TSC0020270
raaaaaaacattc

SEQ ID NO: 79857 - DNA, 13 bp, Artificial Sequence
  Oligonucleotide for detection of SNP TSC0020270
gaatgtgttttty

SEQ ID NO: 79858 - DNA, 13 bp, Artificial Sequence
  Oligonucleotide for detection of SNP TSC0020270
raaaaacacattc

SEQ ID NO: 79859 - DNA, 13 bp, Artificial Sequence
  Oligonucleotide for detection of SNP TSC0020273
aaattttgaaagt

SEQ ID NO: 79860 - DNA, 13 bp, Artificial Sequence
  Oligonucleotide for detection of SNP TSC0020273
actttcaaaattt

SEQ ID NO: 79861 - DNA, 13 bp, Artificial Sequence
  Oligonucleotide for detection of SNP TSC0020273
aaatttcgaaagt

SEQ ID NO: 79862 - DNA, 13 bp, Artificial Sequence
  Oligonucleotide for detection of SNP TSC0020273
actttcgaaattt

SEQ ID NO: 79863 - DNA, 13 bp, Artificial Sequence
  Oligonucleotide for detection of SNP TSC0020274
taaaatgttggga

SEQ ID NO: 79864 - DNA, 13 bp, Artificial Sequence
  Oligonucleotide for detection of SNP TSC0020274
tcccaacatttta

SEQ ID NO: 79865 - DNA, 13 bp, Artificial Sequence
  Oligonucleotide for detection of SNP TSC0020274
taaaatattggga

SEQ ID NO: 79866 - DNA, 13 bp, Artificial Sequence
  Oligonucleotide for detection of SNP TSC0020274
tcccaatatttta

SEQ ID NO: 79867 - DNA, 13 bp, Artificial Sequence
  Oligonucleotide for detection of SNP TSC0020277
tggtgtatgttta

SEQ ID NO: 79868 - DNA, 13 bp, Artificial Sequence
  Oligonucleotide for detection of SNP TSC0020277
taaacatacacca

SEQ ID NO: 79869 - DNA, 13 bp, Artificial Sequence
  Oligonucleotide for detection of SNP TSC0020277
tggtgtgtgttta

SEQ ID NO: 79870 - DNA, 13 bp, Artificial Sequence
  Oligonucleotide for detection of SNP TSC0020277
taaacacacacca

SEQ ID NO: 79871 - DNA, 13 bp, Artificial Sequence
  Oligonucleotide for detection of SNP TSC0020277
tggtgcgtgttta

SEQ ID NO: 79872 - DNA, 13 bp, Artificial Sequence
  Oligonucleotide for detection of SNP TSC0020277
taaacacgcacca

SEQ ID NO: 79873 - DNA, 13 bp, Artificial Sequence
  Oligonucleotide for detection of SNP TSC0020278
tttaaggatttta

SEQ ID NO: 79874 - DNA, 13 bp, Artificial Sequence
  Oligonucleotide for detection of SNP TSC0020278
taaaatccttaaa

SEQ ID NO: 79875 - DNA, 13 bp, Artificial Sequence
  Oligonucleotide for detection of SNP TSC0020278
tttaagaatttta

SEQ ID NO: 79876 - DNA, 13 bp, Artificial Sequence
  Oligonucleotide for detection of SNP TSC0020278
taaaattcttaaa

SEQ ID NO: 79877 - DNA, 13 bp, Artificial Sequence
  Oligonucleotide for detection of SNP TSC0020281
ggttaaggttagg

SEQ ID NO: 79878 - DNA, 13 bp, Artificial Sequence
  Oligonucleotide for detection of SNP TSC0020281
cctaaccttaacc

SEQ ID NO: 79879 - DNA, 13 bp, Artificial Sequence
  Oligonucleotide for detection of SNP TSC0020281
ggttaaagttagg

SEQ ID NO: 79880 - DNA, 13 bp, Artificial Sequence
  Oligonucleotide for detection of SNP TSC0020281
cctaactttaacc

SEQ ID NO: 79881 - DNA, 13 bp, Artificial Sequence
  Oligonucleotide for detection of SNP TSC0020284
attttatttatty

SEQ ID NO: 79882 - DNA, 13 bp, Artificial Sequence
  Oligonucleotide for detection of SNP TSC0020284
raataaataaaat

SEQ ID NO: 79883 - DNA, 13 bp, Artificial Sequence
  Oligonucleotide for detection of SNP TSC0020284
gaataattggaat

SEQ ID NO: 79884 - DNA, 13 bp, Artificial Sequence
  Oligonucleotide for detection of SNP TSC0020284
attccaattattc

SEQ ID NO: 79885 - DNA, 13 bp, Artificial Sequence
  Oligonucleotide for detection of SNP TSC0020284
gaataaatggaat

SEQ ID NO: 79886 - DNA, 13 bp, Artificial Sequence
  Oligonucleotide for detection of SNP TSC0020284
attccatttattc

SEQ ID NO: 79887 - DNA, 13 bp, Artificial Sequence
  Oligonucleotide for detection of SNP TSC0020285
taagattgttttt

SEQ ID NO: 79888 - DNA, 13 bp, Artificial Sequence
  Oligonucleotide for detection of SNP TSC0020285
aaaaacaatctta

SEQ ID NO: 79889 - DNA, 13 bp, Artificial Sequence
  Oligonucleotide for detection of SNP TSC0020285
taagatcgttttt

SEQ ID NO: 79890 - DNA, 13 bp, Artificial Sequence
  Oligonucleotide for detection of SNP TSC0020285
aaaaacgatctta

SEQ ID NO: 79891 - DNA, 13 bp, Artificial Sequence
  Oligonucleotide for detection of SNP TSC0020285
agagatgatttta

SEQ ID NO: 79892 - DNA, 13 bp, Artificial Sequence
  Oligonucleotide for detection of SNP TSC0020285
taaaatcatctct

SEQ ID NO: 79893 - DNA, 13 bp, Artificial Sequence
  Oligonucleotide for detection of SNP TSC0020285
agagataatttta

SEQ ID NO: 79894 - DNA, 13 bp, Artificial Sequence
  Oligonucleotide for detection of SNP TSC0020285
taaaattatctct

SEQ ID NO: 79895 - DNA, 13 bp, Artificial Sequence
  Oligonucleotide for detection of SNP TSC0020285
agagacgatttta

SEQ ID NO: 79896 - DNA, 13 bp, Artificial Sequence
  Oligonucleotide for detection of SNP TSC0020285
taaaatcgtctct

SEQ ID NO: 79897 - DNA, 13 bp, Artificial Sequence
  Oligonucleotide for detection of SNP TSC0020286
attagtgtgttay

SEQ ID NO: 79898 - DNA, 13 bp, Artificial Sequence
  Oligonucleotide for detection of SNP TSC0020286
rtaacacactaat

SEQ ID NO: 79899 - DNA, 13 bp, Artificial Sequence
  Oligonucleotide for detection of SNP TSC0020286
attagtttgttay

SEQ ID NO: 79900 - DNA, 13 bp, Artificial Sequence
  Oligonucleotide for detection of SNP TSC0020286
rtaacaaactaat

SEQ ID NO: 79901 - DNA, 13 bp, Artificial Sequence
  Oligonucleotide for detection of SNP TSC0020286
attagcgtgttay

SEQ ID NO: 79902 - DNA, 13 bp, Artificial Sequence
  Oligonucleotide for detection of SNP TSC0020286
rtaacacgctaat

SEQ ID NO: 79903 - DNA, 13 bp, Artificial Sequence
  Oligonucleotide for detection of SNP TSC0020286
attagttcgttay

SEQ ID NO: 79904 - DNA, 13 bp, Artificial Sequence
  Oligonucleotide for detection of SNP TSC0020286
rtaacgaactaat

SEQ ID NO: 79905 - DNA, 13 bp, Artificial Sequence
  Oligonucleotide for detection of SNP TSC0020286
attagtgcgttay

SEQ ID NO: 79906 - DNA, 13 bp, Artificial Sequence
  Oligonucleotide for detection of SNP TSC0020286
rtaacgcactaat

SEQ ID NO: 79907 - DNA, 13 bp, Artificial Sequence
  Oligonucleotide for detection of SNP TSC0020286
attagcgcgttay

SEQ ID NO: 79908 - DNA, 13 bp, Artificial Sequence
  Oligonucleotide for detection of SNP TSC0020286
rtaacgcgctaat

SEQ ID NO: 79909 - DNA, 13 bp, Artificial Sequence
  Oligonucleotide for detection of SNP TSC0020286
gtggtgtgttaat

SEQ ID NO: 79910 - DNA, 13 bp, Artificial Sequence
  Oligonucleotide for detection of SNP TSC0020286
attaacacaccac

SEQ ID NO: 79911 - DNA, 13 bp, Artificial Sequence
  Oligonucleotide for detection of SNP TSC0020286
gtggtgagttaat

SEQ ID NO: 79912 - DNA, 13 bp, Artificial Sequence
  Oligonucleotide for detection of SNP TSC0020286
attaactcaccac

SEQ ID NO: 79913 - DNA, 13 bp, Artificial Sequence
  Oligonucleotide for detection of SNP TSC0020286
gtggcgtgttaat

SEQ ID NO: 79914 - DNA, 13 bp, Artificial Sequence
  Oligonucleotide for detection of SNP TSC0020286
attaacacgccac

SEQ ID NO: 79915 - DNA, 13 bp, Artificial Sequence
  Oligonucleotide for detection of SNP TSC0020286
gtggcgagttaat

SEQ ID NO: 79916 - DNA, 13 bp, Artificial Sequence
  Oligonucleotide for detection of SNP TSC0020286
attaactcgccac

SEQ ID NO: 79917 - DNA, 13 bp, Artificial Sequence
  Oligonucleotide for detection of SNP TSC0020286
gtggtgcgttaat

SEQ ID NO: 79918 - DNA, 13 bp, Artificial Sequence
  Oligonucleotide for detection of SNP TSC0020286
attaacgcaccac

SEQ ID NO: 79919 - DNA, 13 bp, Artificial Sequence
  Oligonucleotide for detection of SNP TSC0020286
gtggcgcgttaat

SEQ ID NO: 79920 - DNA, 13 bp, Artificial Sequence
  Oligonucleotide for detection of SNP TSC0020286
attaacgcgccac

SEQ ID NO: 79921 - DNA, 13 bp, Artificial Sequence
  Oligonucleotide for detection of SNP TSC0020287
tagaggattttty

SEQ ID NO: 79922 - DNA, 13 bp, Artificial Sequence
  Oligonucleotide for detection of SNP TSC0020287
raaaaatcctcta

SEQ ID NO: 79923 - DNA, 13 bp, Artificial Sequence
  Oligonucleotide for detection of SNP TSC0020287
tagagggttttty

SEQ ID NO: 79924 - DNA, 13 bp, Artificial Sequence
  Oligonucleotide for detection of SNP TSC0020287
raaaaaccctcta

SEQ ID NO: 79925 - DNA, 13 bp, Artificial Sequence
  Oligonucleotide for detection of SNP TSC0020288
ttttttattgtga

SEQ ID NO: 79926 - DNA, 13 bp, Artificial Sequence
  Oligonucleotide for detection of SNP TSC0020288
tcacaataaaaaa

SEQ ID NO: 79927 - DNA, 13 bp, Artificial Sequence
  Oligonucleotide for detection of SNP TSC0020288
tttttttttgtga

SEQ ID NO: 79928 - DNA, 13 bp, Artificial Sequence
  Oligonucleotide for detection of SNP TSC0020288
tcacaaaaaaaaa

SEQ ID NO: 79929 - DNA, 13 bp, Artificial Sequence
  Oligonucleotide for detection of SNP TSC0020288
ttatagtgggaga

SEQ ID NO: 79930 - DNA, 13 bp, Artificial Sequence
  Oligonucleotide for detection of SNP TSC0020288
tctcccactataa

SEQ ID NO: 79931 - DNA, 13 bp, Artificial Sequence
  Oligonucleotide for detection of SNP TSC0020288
ttatagggggaga

SEQ ID NO: 79932 - DNA, 13 bp, Artificial Sequence
  Oligonucleotide for detection of SNP TSC0020288
tctccccctataa

SEQ ID NO: 79933 - DNA, 13 bp, Artificial Sequence
  Oligonucleotide for detection of SNP TSC0020289
ttgggtatagtgg

SEQ ID NO: 79934 - DNA, 13 bp, Artificial Sequence
  Oligonucleotide for detection of SNP TSC0020289
ccactatacccaa

SEQ ID NO: 79935 - DNA, 13 bp, Artificial Sequence
  Oligonucleotide for detection of SNP TSC0020289
ttgggtgtagtgg

SEQ ID NO: 79936 - DNA, 13 bp, Artificial Sequence
  Oligonucleotide for detection of SNP TSC0020289
ccactacacccaa

SEQ ID NO: 79937 - DNA, 13 bp, Artificial Sequence
  Oligonucleotide for detection of SNP TSC0020289
tcgggtatagtgg

SEQ ID NO: 79938 - DNA, 13 bp, Artificial Sequence
  Oligonucleotide for detection of SNP TSC0020289
ccactatacccga

SEQ ID NO: 79939 - DNA, 13 bp, Artificial Sequence
  Oligonucleotide for detection of SNP TSC0020289
tcgggtgtagtgg

SEQ ID NO: 79940 - DNA, 13 bp, Artificial Sequence
  Oligonucleotide for detection of SNP TSC0020289
ccactacacccga

SEQ ID NO: 79941 - DNA, 13 bp, Artificial Sequence
  Oligonucleotide for detection of SNP TSC0020289
ttgggcgtagtgg

SEQ ID NO: 79942 - DNA, 13 bp, Artificial Sequence
  Oligonucleotide for detection of SNP TSC0020289
ccactacgcccaa

SEQ ID NO: 79943 - DNA, 13 bp, Artificial Sequence
  Oligonucleotide for detection of SNP TSC0020289
tcgggcgtagtgg

SEQ ID NO: 79944 - DNA, 13 bp, Artificial Sequence
  Oligonucleotide for detection of SNP TSC0020289
ccactacgcccga

SEQ ID NO: 79945 - DNA, 13 bp, Artificial Sequence
  Oligonucleotide for detection of SNP TSC0020289
ttattgtgttcgg

SEQ ID NO: 79946 - DNA, 13 bp, Artificial Sequence
  Oligonucleotide for detection of SNP TSC0020289
ccgaacacaataa

SEQ ID NO: 79947 - DNA, 13 bp, Artificial Sequence
  Oligonucleotide for detection of SNP TSC0020289
ttattgcgttcgg

SEQ ID NO: 79948 - DNA, 13 bp, Artificial Sequence
  Oligonucleotide for detection of SNP TSC0020289
ccgaacgcaataa

SEQ ID NO: 79949 - DNA, 13 bp, Artificial Sequence
  Oligonucleotide for detection of SNP TSC0020293
ttttggggggatt

SEQ ID NO: 79950 - DNA, 13 bp, Artificial Sequence
  Oligonucleotide for detection of SNP TSC0020293
aatccccccaaaa

SEQ ID NO: 79951 - DNA, 13 bp, Artificial Sequence
  Oligonucleotide for detection of SNP TSC0020293
ttttggagggatt

SEQ ID NO: 79952 - DNA, 13 bp, Artificial Sequence
  Oligonucleotide for detection of SNP TSC0020293
aatccctccaaaa

SEQ ID NO: 79953 - DNA, 13 bp, Artificial Sequence
  Oligonucleotide for detection of SNP TSC0020293
tttcggggggatt

SEQ ID NO: 79954 - DNA, 13 bp, Artificial Sequence
  Oligonucleotide for detection of SNP TSC0020293
aatccccccgaaa

SEQ ID NO: 79955 - DNA, 13 bp, Artificial Sequence
  Oligonucleotide for detection of SNP TSC0020293
tttcggagggatt

SEQ ID NO: 79956 - DNA, 13 bp, Artificial Sequence
  Oligonucleotide for detection of SNP TSC0020293
aatccctccgaaa

SEQ ID NO: 79957 - DNA, 13 bp, Artificial Sequence
  Oligonucleotide for detection of SNP TSC0020294
attattggataty

SEQ ID NO: 79958 - DNA, 13 bp, Artificial Sequence
  Oligonucleotide for detection of SNP TSC0020294
ratatccaataat

SEQ ID NO: 79959 - DNA, 13 bp, Artificial Sequence
  Oligonucleotide for detection of SNP TSC0020294
attattagataty

SEQ ID NO: 79960 - DNA, 13 bp, Artificial Sequence
  Oligonucleotide for detection of SNP TSC0020294
ratatctaataat

SEQ ID NO: 79961 - DNA, 13 bp, Artificial Sequence
  Oligonucleotide for detection of SNP TSC0020295
ttgtaagaaataa

SEQ ID NO: 79962 - DNA, 13 bp, Artificial Sequence
  Oligonucleotide for detection of SNP TSC0020295
ttatttcttacaa

SEQ ID NO: 79963 - DNA, 13 bp, Artificial Sequence
  Oligonucleotide for detection of SNP TSC0020295
ttgtaaaaaataa

SEQ ID NO: 79964 - DNA, 13 bp, Artificial Sequence
  Oligonucleotide for detection of SNP TSC0020295
ttattttttacaa

SEQ ID NO: 79965 - DNA, 13 bp, Artificial Sequence
  Oligonucleotide for detection of SNP TSC0020296
tgtttagattatg

SEQ ID NO: 79966 - DNA, 13 bp, Artificial Sequence
  Oligonucleotide for detection of SNP TSC0020296
cataatctaaaca

SEQ ID NO: 79967 - DNA, 13 bp, Artificial Sequence
  Oligonucleotide for detection of SNP TSC0020296
tgtttatattatg

SEQ ID NO: 79968 - DNA, 13 bp, Artificial Sequence
  Oligonucleotide for detection of SNP TSC0020296
cataatataaaca

SEQ ID NO: 79969 - DNA, 13 bp, Artificial Sequence
  Oligonucleotide for detection of SNP TSC0020296
tatgatttgaata

SEQ ID NO: 79970 - DNA, 13 bp, Artificial Sequence
  Oligonucleotide for detection of SNP TSC0020296
tattcaaatcata

SEQ ID NO: 79971 - DNA, 13 bp, Artificial Sequence
  Oligonucleotide for detection of SNP TSC0020296
tatgatatgaata

SEQ ID NO: 79972 - DNA, 13 bp, Artificial Sequence
  Oligonucleotide for detection of SNP TSC0020296
tattcatatcata

SEQ ID NO: 79973 - DNA, 13 bp, Artificial Sequence
  Oligonucleotide for detection of SNP TSC0020297
ttgaaaattatta

SEQ ID NO: 79974 - DNA, 13 bp, Artificial Sequence
  Oligonucleotide for detection of SNP TSC0020297
taataattttcaa

SEQ ID NO: 79975 - DNA, 13 bp, Artificial Sequence
  Oligonucleotide for detection of SNP TSC0020297
ttgaaagttatta

SEQ ID NO: 79976 - DNA, 13 bp, Artificial Sequence
  Oligonucleotide for detection of SNP TSC0020297
taataactttcaa

SEQ ID NO: 79977 - DNA, 13 bp, Artificial Sequence
  Oligonucleotide for detection of SNP TSC0020298
aaaattgttgtaa

SEQ ID NO: 79978 - DNA, 13 bp, Artificial Sequence
  Oligonucleotide for detection of SNP TSC0020298
ttacaacaatttt

SEQ ID NO: 79979 - DNA, 13 bp, Artificial Sequence
  Oligonucleotide for detection of SNP TSC0020298
aaaatcgttgtaa

SEQ ID NO: 79980 - DNA, 13 bp, Artificial Sequence
  Oligonucleotide for detection of SNP TSC0020298
ttacaacgatttt

SEQ ID NO: 79981 - DNA, 13 bp, Artificial Sequence
  Oligonucleotide for detection of SNP TSC0020298
ttgtaatgatttt

SEQ ID NO: 79982 - DNA, 13 bp, Artificial Sequence
  Oligonucleotide for detection of SNP TSC0020298
aaaatcattacaa

SEQ ID NO: 79983 - DNA, 13 bp, Artificial Sequence
  Oligonucleotide for detection of SNP TSC0020298
ttgtaaagatttt

SEQ ID NO: 79984 - DNA, 13 bp, Artificial Sequence
  Oligonucleotide for detection of SNP TSC0020298
aaaatctttacaa

SEQ ID NO: 79985 - DNA, 13 bp, Artificial Sequence
  Oligonucleotide for detection of SNP TSC0020298
ttgtaacgatttt

SEQ ID NO: 79986 - DNA, 13 bp, Artificial Sequence
  Oligonucleotide for detection of SNP TSC0020298
aaaatcgttacaa

SEQ ID NO: 79987 - DNA, 13 bp, Artificial Sequence
  Oligonucleotide for detection of SNP TSC0020299
ttatttttatttt

SEQ ID NO: 79988 - DNA, 13 bp, Artificial Sequence
  Oligonucleotide for detection of SNP TSC0020299
aaaataaaaataa

SEQ ID NO: 79989 - DNA, 13 bp, Artificial Sequence
  Oligonucleotide for detection of SNP TSC0020299
aaaatatgaatga

SEQ ID NO: 79990 - DNA, 13 bp, Artificial Sequence
  Oligonucleotide for detection of SNP TSC0020299
tcattcatatttt

SEQ ID NO: 79991 - DNA, 13 bp, Artificial Sequence
  Oligonucleotide for detection of SNP TSC0020299
aaaataggaatga

SEQ ID NO: 79992 - DNA, 13 bp, Artificial Sequence
  Oligonucleotide for detection of SNP TSC0020299
tcattcctatttt

SEQ ID NO: 79993 - DNA, 13 bp, Artificial Sequence
  Oligonucleotide for detection of SNP TSC0020300
gatataggtagag

SEQ ID NO: 79994 - DNA, 13 bp, Artificial Sequence
  Oligonucleotide for detection of SNP TSC0020300
ctctacctatatc

SEQ ID NO: 79995 - DNA, 13 bp, Artificial Sequence
  Oligonucleotide for detection of SNP TSC0020300
gatataagtagag

SEQ ID NO: 79996 - DNA, 13 bp, Artificial Sequence
  Oligonucleotide for detection of SNP TSC0020300
ctctacttatatc

SEQ ID NO: 79997 - DNA, 13 bp, Artificial Sequence
  Oligonucleotide for detection of SNP TSC0020302
agagttgtgggat

SEQ ID NO: 79998 - DNA, 13 bp, Artificial Sequence
  Oligonucleotide for detection of SNP TSC0020302
atcccacaactct

SEQ ID NO: 79999 - DNA, 13 bp, Artificial Sequence
  Oligonucleotide for detection of SNP TSC0020302
agagttatgggat

SEQ ID NO: 80000 - DNA, 13 bp, Artificial Sequence
  Oligonucleotide for detection of SNP TSC0020302
atcccataactct

SEQ ID NO: 80001 - DNA, 13 bp, Artificial Sequence
  Oligonucleotide for detection of SNP TSC0020308
attaatggtgtat

SEQ ID NO: 80002 - DNA, 13 bp, Artificial Sequence
  Oligonucleotide for detection of SNP TSC0020308
atacaccattaat

SEQ ID NO: 80003 - DNA, 13 bp, Artificial Sequence
  Oligonucleotide for detection of SNP TSC0020308
attaatagtgtat

SEQ ID NO: 80004 - DNA, 13 bp, Artificial Sequence
  Oligonucleotide for detection of SNP TSC0020308
atacactattaat

SEQ ID NO: 80005 - DNA, 13 bp, Artificial Sequence
  Oligonucleotide for detection of SNP TSC0020311
tagggggatggag

SEQ ID NO: 80006 - DNA, 13 bp, Artificial Sequence
  Oligonucleotide for detection of SNP TSC0020311
ctccatcccccta

SEQ ID NO: 80007 - DNA, 13 bp, Artificial Sequence
  Oligonucleotide for detection of SNP TSC0020311
taggggaatggag

SEQ ID NO: 80008 - DNA, 13 bp, Artificial Sequence
  Oligonucleotide for detection of SNP TSC0020311
ctccattccccta

SEQ ID NO: 80009 - DNA, 13 bp, Artificial Sequence
  Oligonucleotide for detection of SNP TSC0020311
tagggggacggag

SEQ ID NO: 80010 - DNA, 13 bp, Artificial Sequence
  Oligonucleotide for detection of SNP TSC0020311
ctccgtcccccta

SEQ ID NO: 80011 - DNA, 13 bp, Artificial Sequence
  Oligonucleotide for detection of SNP TSC0020311
taggggaacggag

SEQ ID NO: 80012 - DNA, 13 bp, Artificial Sequence
  Oligonucleotide for detection of SNP TSC0020311
ctccgttccccta

SEQ ID NO: 80013 - DNA, 13 bp, Artificial Sequence
  Oligonucleotide for detection of SNP TSC0020312
agatataggaagg

SEQ ID NO: 80014 - DNA, 13 bp, Artificial Sequence
  Oligonucleotide for detection of SNP TSC0020312
ccttcctatatct

SEQ ID NO: 80015 - DNA, 13 bp, Artificial Sequence
  Oligonucleotide for detection of SNP TSC0020312
agatatgggaagg

SEQ ID NO: 80016 - DNA, 13 bp, Artificial Sequence
  Oligonucleotide for detection of SNP TSC0020312
ccttcccatatct

SEQ ID NO: 80017 - DNA, 13 bp, Artificial Sequence
  Oligonucleotide for detection of SNP TSC0020312
agatacgggaagg

SEQ ID NO: 80018 - DNA, 13 bp, Artificial Sequence
  Oligonucleotide for detection of SNP TSC0020312
ccttcccgtatct

SEQ ID NO: 80019 - DNA, 13 bp, Artificial Sequence
  Oligonucleotide for detection of SNP TSC0020313
ggaattaggggtt

SEQ ID NO: 80020 - DNA, 13 bp, Artificial Sequence
  Oligonucleotide for detection of SNP TSC0020313
aacccctaattcc

SEQ ID NO: 80021 - DNA, 13 bp, Artificial Sequence
  Oligonucleotide for detection of SNP TSC0020313
ggaattgggggtt

SEQ ID NO: 80022 - DNA, 13 bp, Artificial Sequence
  Oligonucleotide for detection of SNP TSC0020313
aacccccaattcc

SEQ ID NO: 80023 - DNA, 13 bp, Artificial Sequence
  Oligonucleotide for detection of SNP TSC0020313
ggaatcgggggtt

SEQ ID NO: 80024 - DNA, 13 bp, Artificial Sequence
  Oligonucleotide for detection of SNP TSC0020313
aacccccgattcc

SEQ ID NO: 80025 - DNA, 13 bp, Artificial Sequence
  Oligonucleotide for detection of SNP TSC0020313
agtttttggttty

SEQ ID NO: 80026 - DNA, 13 bp, Artificial Sequence
  Oligonucleotide for detection of SNP TSC0020313
raaaccaaaaact

SEQ ID NO: 80027 - DNA, 13 bp, Artificial Sequence
  Oligonucleotide for detection of SNP TSC0020313
agttttcggttty

SEQ ID NO: 80028 - DNA, 13 bp, Artificial Sequence
  Oligonucleotide for detection of SNP TSC0020313
raaaccgaaaact

SEQ ID NO: 80029 - DNA, 13 bp, Artificial Sequence
  Oligonucleotide for detection of SNP TSC0020318
ggtataatattag

SEQ ID NO: 80030 - DNA, 13 bp, Artificial Sequence
  Oligonucleotide for detection of SNP TSC0020318
ctaatattatacc

SEQ ID NO: 80031 - DNA, 13 bp, Artificial Sequence
  Oligonucleotide for detection of SNP TSC0020318
ggtatattattag

SEQ ID NO: 80032 - DNA, 13 bp, Artificial Sequence
  Oligonucleotide for detection of SNP TSC0020318
ctaataatatacc

SEQ ID NO: 80033 - DNA, 13 bp, Artificial Sequence
  Oligonucleotide for detection of SNP TSC0020318
ttggtgttgtgty

SEQ ID NO: 80034 - DNA, 13 bp, Artificial Sequence
  Oligonucleotide for detection of SNP TSC0020318
racacaacaccaa

SEQ ID NO: 80035 - DNA, 13 bp, Artificial Sequence
  Oligonucleotide for detection of SNP TSC0020318
ttggtggtgtgty

SEQ ID NO: 80036 - DNA, 13 bp, Artificial Sequence
  Oligonucleotide for detection of SNP TSC0020318
racacaccaccaa

SEQ ID NO: 80037 - DNA, 13 bp, Artificial Sequence
  Oligonucleotide for detection of SNP TSC0020322
ttttttatgtgtt

SEQ ID NO: 80038 - DNA, 13 bp, Artificial Sequence
  Oligonucleotide for detection of SNP TSC0020322
aacacataaaaaa

SEQ ID NO: 80039 - DNA, 13 bp, Artificial Sequence
  Oligonucleotide for detection of SNP TSC0020322
ttttttttgtgtt

SEQ ID NO: 80040 - DNA, 13 bp, Artificial Sequence
  Oligonucleotide for detection of SNP TSC0020322
aacacaaaaaaaa

SEQ ID NO: 80041 - DNA, 13 bp, Artificial Sequence
  Oligonucleotide for detection of SNP TSC0020322
agtatatgaagaa

SEQ ID NO: 80042 - DNA, 13 bp, Artificial Sequence
  Oligonucleotide for detection of SNP TSC0020322
ttcttcatatact

SEQ ID NO: 80043 - DNA, 13 bp, Artificial Sequence
  Oligonucleotide for detection of SNP TSC0020322
agtataagaagaa

SEQ ID NO: 80044 - DNA, 13 bp, Artificial Sequence
  Oligonucleotide for detection of SNP TSC0020322
ttcttcttatact

SEQ ID NO: 80045 - DNA, 13 bp, Artificial Sequence
  Oligonucleotide for detection of SNP TSC0020324
atatgatggtttg

SEQ ID NO: 80046 - DNA, 13 bp, Artificial Sequence
  Oligonucleotide for detection of SNP TSC0020324
caaaccatcatat

SEQ ID NO: 80047 - DNA, 13 bp, Artificial Sequence
  Oligonucleotide for detection of SNP TSC0020324
atatgacggtttg

SEQ ID NO: 80048 - DNA, 13 bp, Artificial Sequence
  Oligonucleotide for detection of SNP TSC0020324
caaaccgtcatat

SEQ ID NO: 80049 - DNA, 13 bp, Artificial Sequence
  Oligonucleotide for detection of SNP TSC0020324
taggttgttatgt

SEQ ID NO: 80050 - DNA, 13 bp, Artificial Sequence
  Oligonucleotide for detection of SNP TSC0020324
acataacaaccta

SEQ ID NO: 80051 - DNA, 13 bp, Artificial Sequence
  Oligonucleotide for detection of SNP TSC0020324
taggttattatgt

SEQ ID NO: 80052 - DNA, 13 bp, Artificial Sequence
  Oligonucleotide for detection of SNP TSC0020324
acataataaccta

SEQ ID NO: 80053 - DNA, 13 bp, Artificial Sequence
  Oligonucleotide for detection of SNP TSC0020324
taggtcgttatgt

SEQ ID NO: 80054 - DNA, 13 bp, Artificial Sequence
  Oligonucleotide for detection of SNP TSC0020324
acataacgaccta

SEQ ID NO: 80055 - DNA, 13 bp, Artificial Sequence
  Oligonucleotide for detection of SNP TSC0020326
tattttgtagttg

SEQ ID NO: 80056 - DNA, 13 bp, Artificial Sequence
  Oligonucleotide for detection of SNP TSC0020326
caactacaaaata

SEQ ID NO: 80057 - DNA, 13 bp, Artificial Sequence
  Oligonucleotide for detection of SNP TSC0020326
tatttcgtagttg

SEQ ID NO: 80058 - DNA, 13 bp, Artificial Sequence
  Oligonucleotide for detection of SNP TSC0020326
caactacgaaata

SEQ ID NO: 80059 - DNA, 13 bp, Artificial Sequence
  Oligonucleotide for detection of SNP TSC0020326
tagttatgaaatg

SEQ ID NO: 80060 - DNA, 13 bp, Artificial Sequence
  Oligonucleotide for detection of SNP TSC0020326
catttcataacta

SEQ ID NO: 80061 - DNA, 13 bp, Artificial Sequence
  Oligonucleotide for detection of SNP TSC0020326
tagttaagaaatg

SEQ ID NO: 80062 - DNA, 13 bp, Artificial Sequence
  Oligonucleotide for detection of SNP TSC0020326
catttcttaacta

SEQ ID NO: 80063 - DNA, 13 bp, Artificial Sequence
  Oligonucleotide for detection of SNP TSC0020326
tagttacgaaatg

SEQ ID NO: 80064 - DNA, 13 bp, Artificial Sequence
  Oligonucleotide for detection of SNP TSC0020326
catttcgtaacta

SEQ ID NO: 80065 - DNA, 13 bp, Artificial Sequence
  Oligonucleotide for detection of SNP TSC0020327
tattaatggtgaa

SEQ ID NO: 80066 - DNA, 13 bp, Artificial Sequence
  Oligonucleotide for detection of SNP TSC0020327
ttcaccattaata

SEQ ID NO: 80067 - DNA, 13 bp, Artificial Sequence
  Oligonucleotide for detection of SNP TSC0020327
tattaagggtgaa

SEQ ID NO: 80068 - DNA, 13 bp, Artificial Sequence
  Oligonucleotide for detection of SNP TSC0020327
ttcacccttaata

SEQ ID NO: 80069 - DNA, 13 bp, Artificial Sequence
  Oligonucleotide for detection of SNP TSC0020327
tattaacggtgaa

SEQ ID NO: 80070 - DNA, 13 bp, Artificial Sequence
  Oligonucleotide for detection of SNP TSC0020327
ttcaccgttaata

SEQ ID NO: 80071 - DNA, 13 bp, Artificial Sequence
  Oligonucleotide for detection of SNP TSC0020327
tttattgttaatg

SEQ ID NO: 80072 - DNA, 13 bp, Artificial Sequence
  Oligonucleotide for detection of SNP TSC0020327
cattaacaataaa

SEQ ID NO: 80073 - DNA, 13 bp, Artificial Sequence
  Oligonucleotide for detection of SNP TSC0020327
tttatttttaatg

SEQ ID NO: 80074 - DNA, 13 bp, Artificial Sequence
  Oligonucleotide for detection of SNP TSC0020327
cattaaaaataaa

SEQ ID NO: 80075 - DNA, 13 bp, Artificial Sequence
  Oligonucleotide for detection of SNP TSC0020327
tttatcgttaatg

SEQ ID NO: 80076 - DNA, 13 bp, Artificial Sequence
  Oligonucleotide for detection of SNP TSC0020327
cattaacgataaa

SEQ ID NO: 80077 - DNA, 13 bp, Artificial Sequence
  Oligonucleotide for detection of SNP TSC0020328
tttgttaggggty

SEQ ID NO: 80078 - DNA, 13 bp, Artificial Sequence
  Oligonucleotide for detection of SNP TSC0020328
racccctaacaaa

SEQ ID NO: 80079 - DNA, 13 bp, Artificial Sequence
  Oligonucleotide for detection of SNP TSC0020328
tttgtttggggty

SEQ ID NO: 80080 - DNA, 13 bp, Artificial Sequence
  Oligonucleotide for detection of SNP TSC0020328
raccccaaacaaa

SEQ ID NO: 80081 - DNA, 13 bp, Artificial Sequence
  Oligonucleotide for detection of SNP TSC0020328
gatttttggtagg

SEQ ID NO: 80082 - DNA, 13 bp, Artificial Sequence
  Oligonucleotide for detection of SNP TSC0020328
cctaccaaaaatc

SEQ ID NO: 80083 - DNA, 13 bp, Artificial Sequence
  Oligonucleotide for detection of SNP TSC0020328
gattttaggtagg

SEQ ID NO: 80084 - DNA, 13 bp, Artificial Sequence
  Oligonucleotide for detection of SNP TSC0020328
cctacctaaaatc

SEQ ID NO: 80085 - DNA, 13 bp, Artificial Sequence
  Oligonucleotide for detection of SNP TSC0020329
tgtttttttttta

SEQ ID NO: 80086 - DNA, 13 bp, Artificial Sequence
  Oligonucleotide for detection of SNP TSC0020329
taaaaaaaaaaca

SEQ ID NO: 80087 - DNA, 13 bp, Artificial Sequence
  Oligonucleotide for detection of SNP TSC0020329
cgttttgttttta

SEQ ID NO: 80088 - DNA, 13 bp, Artificial Sequence
  Oligonucleotide for detection of SNP TSC0020329
taaaaacaaaacg

SEQ ID NO: 80089 - DNA, 13 bp, Artificial Sequence
  Oligonucleotide for detection of SNP TSC0020329
cgtttttttttta

SEQ ID NO: 80090 - DNA, 13 bp, Artificial Sequence
  Oligonucleotide for detection of SNP TSC0020329
taaaaaaaaaacg

SEQ ID NO: 80091 - DNA, 13 bp, Artificial Sequence
  Oligonucleotide for detection of SNP TSC0020329
tgtttcgttttta

SEQ ID NO: 80092 - DNA, 13 bp, Artificial Sequence
  Oligonucleotide for detection of SNP TSC0020329
taaaaacgaaaca

SEQ ID NO: 80093 - DNA, 13 bp, Artificial Sequence
  Oligonucleotide for detection of SNP TSC0020329
cgtttcgttttta

SEQ ID NO: 80094 - DNA, 13 bp, Artificial Sequence
  Oligonucleotide for detection of SNP TSC0020329
taaaaacgaaacg

SEQ ID NO: 80095 - DNA, 13 bp, Artificial Sequence
  Oligonucleotide for detection of SNP TSC0020329
tagagatggagtg

SEQ ID NO: 80096 - DNA, 13 bp, Artificial Sequence
  Oligonucleotide for detection of SNP TSC0020329
cactccatctcta

SEQ ID NO: 80097 - DNA, 13 bp, Artificial Sequence
  Oligonucleotide for detection of SNP TSC0020329
tagagaaggagtg

SEQ ID NO: 80098 - DNA, 13 bp, Artificial Sequence
  Oligonucleotide for detection of SNP TSC0020329
cactccttctcta

SEQ ID NO: 80099 - DNA, 13 bp, Artificial Sequence
  Oligonucleotide for detection of SNP TSC0020329
tagagacggagtg

SEQ ID NO: 80100 - DNA, 13 bp, Artificial Sequence
  Oligonucleotide for detection of SNP TSC0020329
cactccgtctcta

SEQ ID NO: 80101 - DNA, 13 bp, Artificial Sequence
  Oligonucleotide for detection of SNP TSC0020329
tagagaaggagcg

SEQ ID NO: 80102 - DNA, 13 bp, Artificial Sequence
  Oligonucleotide for detection of SNP TSC0020329
cgctccttctcta

SEQ ID NO: 80103 - DNA, 13 bp, Artificial Sequence
  Oligonucleotide for detection of SNP TSC0020329
tagagatggagcg

SEQ ID NO: 80104 - DNA, 13 bp, Artificial Sequence
  Oligonucleotide for detection of SNP TSC0020329
cgctccatctcta

SEQ ID NO: 80105 - DNA, 13 bp, Artificial Sequence
  Oligonucleotide for detection of SNP TSC0020329
tagagacggagcg

SEQ ID NO: 80106 - DNA, 13 bp, Artificial Sequence
  Oligonucleotide for detection of SNP TSC0020329
cgctccgtctcta

SEQ ID NO: 80107 - DNA, 13 bp, Artificial Sequence
  Oligonucleotide for detection of SNP TSC0020333
agagggaagatgt

SEQ ID NO: 80108 - DNA, 13 bp, Artificial Sequence
  Oligonucleotide for detection of SNP TSC0020333
acatcttccctct

SEQ ID NO: 80109 - DNA, 13 bp, Artificial Sequence
  Oligonucleotide for detection of SNP TSC0020333
agagggtagatgt

SEQ ID NO: 80110 - DNA, 13 bp, Artificial Sequence
  Oligonucleotide for detection of SNP TSC0020333
acatctaccctct

SEQ ID NO: 80111 - DNA, 13 bp, Artificial Sequence
  Oligonucleotide for detection of SNP TSC0020333
atatttttttttt

SEQ ID NO: 80112 - DNA, 13 bp, Artificial Sequence
  Oligonucleotide for detection of SNP TSC0020333
aaaaaaaaaatat

SEQ ID NO: 80113 - DNA, 13 bp, Artificial Sequence
  Oligonucleotide for detection of SNP TSC0020334
taagagaaggatg

SEQ ID NO: 80114 - DNA, 13 bp, Artificial Sequence
  Oligonucleotide for detection of SNP TSC0020334
catccttctctta

SEQ ID NO: 80115 - DNA, 13 bp, Artificial Sequence
  Oligonucleotide for detection of SNP TSC0020334
taagagtaggatg

SEQ ID NO: 80116 - DNA, 13 bp, Artificial Sequence
  Oligonucleotide for detection of SNP TSC0020334
catcctactctta

SEQ ID NO: 80117 - DNA, 13 bp, Artificial Sequence
  Oligonucleotide for detection of SNP TSC0020335
tattgtatagttt

SEQ ID NO: 80118 - DNA, 13 bp, Artificial Sequence
  Oligonucleotide for detection of SNP TSC0020335
aaactatacaata

SEQ ID NO: 80119 - DNA, 13 bp, Artificial Sequence
  Oligonucleotide for detection of SNP TSC0020335
tattgtgtagttt

SEQ ID NO: 80120 - DNA, 13 bp, Artificial Sequence
  Oligonucleotide for detection of SNP TSC0020335
aaactacacaata

SEQ ID NO: 80121 - DNA, 13 bp, Artificial Sequence
  Oligonucleotide for detection of SNP TSC0020336
agagaggttatta

SEQ ID NO: 80122 - DNA, 13 bp, Artificial Sequence
  Oligonucleotide for detection of SNP TSC0020336
taataacctctct

SEQ ID NO: 80123 - DNA, 13 bp, Artificial Sequence
  Oligonucleotide for detection of SNP TSC0020336
agagagattatta

SEQ ID NO: 80124 - DNA, 13 bp, Artificial Sequence
  Oligonucleotide for detection of SNP TSC0020336
taataatctctct

SEQ ID NO: 80125 - DNA, 13 bp, Artificial Sequence
  Oligonucleotide for detection of SNP TSC0020339
gtttgtgtaagtg

SEQ ID NO: 80126 - DNA, 13 bp, Artificial Sequence
  Oligonucleotide for detection of SNP TSC0020339
cacttacacaaac

SEQ ID NO: 80127 - DNA, 13 bp, Artificial Sequence
  Oligonucleotide for detection of SNP TSC0020339
gtttgtttaagtg

SEQ ID NO: 80128 - DNA, 13 bp, Artificial Sequence
  Oligonucleotide for detection of SNP TSC0020339
cacttaaacaaac

SEQ ID NO: 80129 - DNA, 13 bp, Artificial Sequence
  Oligonucleotide for detection of SNP TSC0020339
tatttatataggy

SEQ ID NO: 80130 - DNA, 13 bp, Artificial Sequence
  Oligonucleotide for detection of SNP TSC0020339
rcctatataaata

SEQ ID NO: 80131 - DNA, 13 bp, Artificial Sequence
  Oligonucleotide for detection of SNP TSC0020340
tttattatgttga

SEQ ID NO: 80132 - DNA, 13 bp, Artificial Sequence
  Oligonucleotide for detection of SNP TSC0020340
tcaacataataaa

SEQ ID NO: 80133 - DNA, 13 bp, Artificial Sequence
  Oligonucleotide for detection of SNP TSC0020343
ttgttttatgttg

SEQ ID NO: 80134 - DNA, 13 bp, Artificial Sequence
  Oligonucleotide for detection of SNP TSC0020343
caacataaaacaa

SEQ ID NO: 80135 - DNA, 13 bp, Artificial Sequence
  Oligonucleotide for detection of SNP TSC0020343
ttgtttgatgttg

SEQ ID NO: 80136 - DNA, 13 bp, Artificial Sequence
  Oligonucleotide for detection of SNP TSC0020343
caacatcaaacaa

SEQ ID NO: 80137 - DNA, 13 bp, Artificial Sequence
  Oligonucleotide for detection of SNP TSC0020343
tcgttttatgttg

SEQ ID NO: 80138 - DNA, 13 bp, Artificial Sequence
  Oligonucleotide for detection of SNP TSC0020343
caacataaaacga

SEQ ID NO: 80139 - DNA, 13 bp, Artificial Sequence
  Oligonucleotide for detection of SNP TSC0020343
tcgtttgatgttg

SEQ ID NO: 80140 - DNA, 13 bp, Artificial Sequence
  Oligonucleotide for detection of SNP TSC0020343
caacatcaaacga

SEQ ID NO: 80141 - DNA, 13 bp, Artificial Sequence
  Oligonucleotide for detection of SNP TSC0020343
taatatgaagtgg

SEQ ID NO: 80142 - DNA, 13 bp, Artificial Sequence
  Oligonucleotide for detection of SNP TSC0020343
ccacttcatatta

SEQ ID NO: 80143 - DNA, 13 bp, Artificial Sequence
  Oligonucleotide for detection of SNP TSC0020343
taatattaagtgg

SEQ ID NO: 80144 - DNA, 13 bp, Artificial Sequence
  Oligonucleotide for detection of SNP TSC0020343
ccacttaatatta

SEQ ID NO: 80145 - DNA, 13 bp, Artificial Sequence
  Oligonucleotide for detection of SNP TSC0020343
taatatgaagcgg

SEQ ID NO: 80146 - DNA, 13 bp, Artificial Sequence
  Oligonucleotide for detection of SNP TSC0020343
ccgcttcatatta

SEQ ID NO: 80147 - DNA, 13 bp, Artificial Sequence
  Oligonucleotide for detection of SNP TSC0020343
taatattaagcgg

SEQ ID NO: 80148 - DNA, 13 bp, Artificial Sequence
  Oligonucleotide for detection of SNP TSC0020343
ccgcttaatatta

SEQ ID NO: 80149 - DNA, 13 bp, Artificial Sequence
  Oligonucleotide for detection of SNP TSC0020346
gtagtttgttatg

SEQ ID NO: 80150 - DNA, 13 bp, Artificial Sequence
  Oligonucleotide for detection of SNP TSC0020346
cataacaaactac

SEQ ID NO: 80151 - DNA, 13 bp, Artificial Sequence
  Oligonucleotide for detection of SNP TSC0020346
gtagttcgttatg

SEQ ID NO: 80152 - DNA, 13 bp, Artificial Sequence
  Oligonucleotide for detection of SNP TSC0020346
cataacgaactac

SEQ ID NO: 80153 - DNA, 13 bp, Artificial Sequence
  Oligonucleotide for detection of SNP TSC0020346
gtagtttgttacg

SEQ ID NO: 80154 - DNA, 13 bp, Artificial Sequence
  Oligonucleotide for detection of SNP TSC0020346
cgtaacaaactac

SEQ ID NO: 80155 - DNA, 13 bp, Artificial Sequence
  Oligonucleotide for detection of SNP TSC0020346
gtagttcgttacg

SEQ ID NO: 80156 - DNA, 13 bp, Artificial Sequence
  Oligonucleotide for detection of SNP TSC0020346
cgtaacgaactac

SEQ ID NO: 80157 - DNA, 13 bp, Artificial Sequence
  Oligonucleotide for detection of SNP TSC0020346
tgtgatgggttay

SEQ ID NO: 80158 - DNA, 13 bp, Artificial Sequence
  Oligonucleotide for detection of SNP TSC0020346
rtaacccatcaca

SEQ ID NO: 80159 - DNA, 13 bp, Artificial Sequence
  Oligonucleotide for detection of SNP TSC0020346
tgtgataggttay

SEQ ID NO: 80160 - DNA, 13 bp, Artificial Sequence
  Oligonucleotide for detection of SNP TSC0020346
rtaacctatcaca

SEQ ID NO: 80161 - DNA, 13 bp, Artificial Sequence
  Oligonucleotide for detection of SNP TSC0020346
cgtgatgggttay

SEQ ID NO: 80162 - DNA, 13 bp, Artificial Sequence
  Oligonucleotide for detection of SNP TSC0020346
rtaacccatcacg

SEQ ID NO: 80163 - DNA, 13 bp, Artificial Sequence
  Oligonucleotide for detection of SNP TSC0020346
cgtgataggttay

SEQ ID NO: 80164 - DNA, 13 bp, Artificial Sequence
  Oligonucleotide for detection of SNP TSC0020346
rtaacctatcacg

SEQ ID NO: 80165 - DNA, 13 bp, Artificial Sequence
  Oligonucleotide for detection of SNP TSC0020346
tgtgacgggttay

SEQ ID NO: 80166 - DNA, 13 bp, Artificial Sequence
  Oligonucleotide for detection of SNP TSC0020346
rtaacccgtcaca

SEQ ID NO: 80167 - DNA, 13 bp, Artificial Sequence
  Oligonucleotide for detection of SNP TSC0020346
cgtgacgggttay

SEQ ID NO: 80168 - DNA, 13 bp, Artificial Sequence
  Oligonucleotide for detection of SNP TSC0020346
rtaacccgtcacg

SEQ ID NO: 80169 - DNA, 13 bp, Artificial Sequence
  Oligonucleotide for detection of SNP TSC0020347
gttaatgtttgta

SEQ ID NO: 80170 - DNA, 13 bp, Artificial Sequence
  Oligonucleotide for detection of SNP TSC0020347
tacaaacattaac

SEQ ID NO: 80171 - DNA, 13 bp, Artificial Sequence
  Oligonucleotide for detection of SNP TSC0020347
gttaatttttgta

SEQ ID NO: 80172 - DNA, 13 bp, Artificial Sequence
  Oligonucleotide for detection of SNP TSC0020347
tacaaaaattaac

SEQ ID NO: 80173 - DNA, 13 bp, Artificial Sequence
  Oligonucleotide for detection of SNP TSC0020347
tataaatattagy

SEQ ID NO: 80174 - DNA, 13 bp, Artificial Sequence
  Oligonucleotide for detection of SNP TSC0020347
rctaatatttata

SEQ ID NO: 80175 - DNA, 13 bp, Artificial Sequence
  Oligonucleotide for detection of SNP TSC0020347
tataaaaattagy

SEQ ID NO: 80176 - DNA, 13 bp, Artificial Sequence
  Oligonucleotide for detection of SNP TSC0020347
rctaatttttata

SEQ ID NO: 80177 - DNA, 13 bp, Artificial Sequence
  Oligonucleotide for detection of SNP TSC0020349
gtgatgtgggaty

SEQ ID NO: 80178 - DNA, 13 bp, Artificial Sequence
  Oligonucleotide for detection of SNP TSC0020349
ratcccacatcac

SEQ ID NO: 80179 - DNA, 13 bp, Artificial Sequence
  Oligonucleotide for detection of SNP TSC0020349
gtgatgcgggaty

SEQ ID NO: 80180 - DNA, 13 bp, Artificial Sequence
  Oligonucleotide for detection of SNP TSC0020349
ratcccgcatcac

SEQ ID NO: 80181 - DNA, 13 bp, Artificial Sequence
  Oligonucleotide for detection of SNP TSC0020349
ggttttgtattay

SEQ ID NO: 80182 - DNA, 13 bp, Artificial Sequence
  Oligonucleotide for detection of SNP TSC0020349
rtaatacaaaacc

SEQ ID NO: 80183 - DNA, 13 bp, Artificial Sequence
  Oligonucleotide for detection of SNP TSC0020349
ggttttatattay

SEQ ID NO: 80184 - DNA, 13 bp, Artificial Sequence
  Oligonucleotide for detection of SNP TSC0020349
rtaatataaaacc

SEQ ID NO: 80185 - DNA, 13 bp, Artificial Sequence
  Oligonucleotide for detection of SNP TSC0020349
ggtttcgtattay

SEQ ID NO: 80186 - DNA, 13 bp, Artificial Sequence
  Oligonucleotide for detection of SNP TSC0020349
rtaatacgaaacc

SEQ ID NO: 80187 - DNA, 13 bp, Artificial Sequence
  Oligonucleotide for detection of SNP TSC0020350
gttttaaaagaaa

SEQ ID NO: 80188 - DNA, 13 bp, Artificial Sequence
  Oligonucleotide for detection of SNP TSC0020350
tttcttttaaaac

SEQ ID NO: 80189 - DNA, 13 bp, Artificial Sequence
  Oligonucleotide for detection of SNP TSC0020350
gttttagaagaaa

SEQ ID NO: 80190 - DNA, 13 bp, Artificial Sequence
  Oligonucleotide for detection of SNP TSC0020350
tttcttctaaaac

SEQ ID NO: 80191 - DNA, 13 bp, Artificial Sequence
  Oligonucleotide for detection of SNP TSC0020351
atttttagtttgy

SEQ ID NO: 80192 - DNA, 13 bp, Artificial Sequence
  Oligonucleotide for detection of SNP TSC0020351
rcaaactaaaaat

SEQ ID NO: 80193 - DNA, 13 bp, Artificial Sequence
  Oligonucleotide for detection of SNP TSC0020351
atttttggtttgy

SEQ ID NO: 80194 - DNA, 13 bp, Artificial Sequence
  Oligonucleotide for detection of SNP TSC0020351
rcaaaccaaaaat

SEQ ID NO: 80195 - DNA, 13 bp, Artificial Sequence
  Oligonucleotide for detection of SNP TSC0020351
atttttagttcgy

SEQ ID NO: 80196 - DNA, 13 bp, Artificial Sequence
  Oligonucleotide for detection of SNP TSC0020351
rcgaactaaaaat

SEQ ID NO: 80197 - DNA, 13 bp, Artificial Sequence
  Oligonucleotide for detection of SNP TSC0020351
attttcggtttgy

SEQ ID NO: 80198 - DNA, 13 bp, Artificial Sequence
  Oligonucleotide for detection of SNP TSC0020351
rcaaaccgaaaat

SEQ ID NO: 80199 - DNA, 13 bp, Artificial Sequence
  Oligonucleotide for detection of SNP TSC0020351
atttttggttcgy

SEQ ID NO: 80200 - DNA, 13 bp, Artificial Sequence
  Oligonucleotide for detection of SNP TSC0020351
rcgaaccaaaaat

SEQ ID NO: 80201 - DNA, 13 bp, Artificial Sequence
  Oligonucleotide for detection of SNP TSC0020351
attttcggttcgy

SEQ ID NO: 80202 - DNA, 13 bp, Artificial Sequence
  Oligonucleotide for detection of SNP TSC0020351
rcgaaccgaaaat

SEQ ID NO: 80203 - DNA, 13 bp, Artificial Sequence
  Oligonucleotide for detection of SNP TSC0020351
gtgaattgagagt

SEQ ID NO: 80204 - DNA, 13 bp, Artificial Sequence
  Oligonucleotide for detection of SNP TSC0020351
actctcaattcac

SEQ ID NO: 80205 - DNA, 13 bp, Artificial Sequence
  Oligonucleotide for detection of SNP TSC0020351
gcgaattgagagt

SEQ ID NO: 80206 - DNA, 13 bp, Artificial Sequence
  Oligonucleotide for detection of SNP TSC0020351
actctcaattcgc

SEQ ID NO: 80207 - DNA, 13 bp, Artificial Sequence
  Oligonucleotide for detection of SNP TSC0020351
gtgaatcgagagt

SEQ ID NO: 80208 - DNA, 13 bp, Artificial Sequence
  Oligonucleotide for detection of SNP TSC0020351
actctcgattcac

SEQ ID NO: 80209 - DNA, 13 bp, Artificial Sequence
  Oligonucleotide for detection of SNP TSC0020351
gcgaatcgagagt

SEQ ID NO: 80210 - DNA, 13 bp, Artificial Sequence
  Oligonucleotide for detection of SNP TSC0020351
actctcgattcgc

SEQ ID NO: 80211 - DNA, 13 bp, Artificial Sequence
  Oligonucleotide for detection of SNP TSC0020352
aagattaattgtg

SEQ ID NO: 80212 - DNA, 13 bp, Artificial Sequence
  Oligonucleotide for detection of SNP TSC0020352
cacaattaatctt

SEQ ID NO: 80213 - DNA, 13 bp, Artificial Sequence
  Oligonucleotide for detection of SNP TSC0020352
aagattgattgtg

SEQ ID NO: 80214 - DNA, 13 bp, Artificial Sequence
  Oligonucleotide for detection of SNP TSC0020352
cacaatcaatctt

SEQ ID NO: 80215 - DNA, 13 bp, Artificial Sequence
  Oligonucleotide for detection of SNP TSC0020352
aagattaattgcg

SEQ ID NO: 80216 - DNA, 13 bp, Artificial Sequence
  Oligonucleotide for detection of SNP TSC0020352
cgcaattaatctt

SEQ ID NO: 80217 - DNA, 13 bp, Artificial Sequence
  Oligonucleotide for detection of SNP TSC0020352
aagattgattgcg

SEQ ID NO: 80218 - DNA, 13 bp, Artificial Sequence
  Oligonucleotide for detection of SNP TSC0020352
cgcaatcaatctt

SEQ ID NO: 80219 - DNA, 13 bp, Artificial Sequence
  Oligonucleotide for detection of SNP TSC0020353
gtaagagtttggg

SEQ ID NO: 80220 - DNA, 13 bp, Artificial Sequence
  Oligonucleotide for detection of SNP TSC0020353
cccaaactcttac

SEQ ID NO: 80221 - DNA, 13 bp, Artificial Sequence
  Oligonucleotide for detection of SNP TSC0020353
gtaagaatttggg

SEQ ID NO: 80222 - DNA, 13 bp, Artificial Sequence
  Oligonucleotide for detection of SNP TSC0020353
cccaaattcttac

SEQ ID NO: 80223 - DNA, 13 bp, Artificial Sequence
  Oligonucleotide for detection of SNP TSC0020355
aatattaataggt

SEQ ID NO: 80224 - DNA, 13 bp, Artificial Sequence
  Oligonucleotide for detection of SNP TSC0020355
acctattaatatt

SEQ ID NO: 80225 - DNA, 13 bp, Artificial Sequence
  Oligonucleotide for detection of SNP TSC0020355
aatatttataggt

SEQ ID NO: 80226 - DNA, 13 bp, Artificial Sequence
  Oligonucleotide for detection of SNP TSC0020355
acctataaatatt

SEQ ID NO: 80227 - DNA, 13 bp, Artificial Sequence
  Oligonucleotide for detection of SNP TSC0020355
atttattaatatt

SEQ ID NO: 80228 - DNA, 13 bp, Artificial Sequence
  Oligonucleotide for detection of SNP TSC0020355
aatattaataaat

SEQ ID NO: 80229 - DNA, 13 bp, Artificial Sequence
  Oligonucleotide for detection of SNP TSC0020355
atttatgaatatt

SEQ ID NO: 80230 - DNA, 13 bp, Artificial Sequence
  Oligonucleotide for detection of SNP TSC0020355
aatattcataaat

SEQ ID NO: 80231 - DNA, 13 bp, Artificial Sequence
  Oligonucleotide for detection of SNP TSC0020356
tggtgggtgtttg

SEQ ID NO: 80232 - DNA, 13 bp, Artificial Sequence
  Oligonucleotide for detection of SNP TSC0020356
caaacacccacca

SEQ ID NO: 80233 - DNA, 13 bp, Artificial Sequence
  Oligonucleotide for detection of SNP TSC0020356
tggtggatgtttg

SEQ ID NO: 80234 - DNA, 13 bp, Artificial Sequence
  Oligonucleotide for detection of SNP TSC0020356
caaacatccacca

SEQ ID NO: 80235 - DNA, 13 bp, Artificial Sequence
  Oligonucleotide for detection of SNP TSC0020356
tggcgggtgtttg

SEQ ID NO: 80236 - DNA, 13 bp, Artificial Sequence
  Oligonucleotide for detection of SNP TSC0020356
caaacacccgcca

SEQ ID NO: 80237 - DNA, 13 bp, Artificial Sequence
  Oligonucleotide for detection of SNP TSC0020356
tggcggatgtttg

SEQ ID NO: 80238 - DNA, 13 bp, Artificial Sequence
  Oligonucleotide for detection of SNP TSC0020356
caaacatccgcca

SEQ ID NO: 80239 - DNA, 13 bp, Artificial Sequence
  Oligonucleotide for detection of SNP TSC0020356
tggtgggtgttcg

SEQ ID NO: 80240 - DNA, 13 bp, Artificial Sequence
  Oligonucleotide for detection of SNP TSC0020356
cgaacacccacca

SEQ ID NO: 80241 - DNA, 13 bp, Artificial Sequence
  Oligonucleotide for detection of SNP TSC0020356
tggtggatgttcg

SEQ ID NO: 80242 - DNA, 13 bp, Artificial Sequence
  Oligonucleotide for detection of SNP TSC0020356
cgaacatccacca

SEQ ID NO: 80243 - DNA, 13 bp, Artificial Sequence
  Oligonucleotide for detection of SNP TSC0020356
tggcgggtgttcg

SEQ ID NO: 80244 - DNA, 13 bp, Artificial Sequence
  Oligonucleotide for detection of SNP TSC0020356
cgaacacccgcca

SEQ ID NO: 80245 - DNA, 13 bp, Artificial Sequence
  Oligonucleotide for detection of SNP TSC0020356
tggcggatgttcg

SEQ ID NO: 80246 - DNA, 13 bp, Artificial Sequence
  Oligonucleotide for detection of SNP TSC0020356
cgaacatccgcca

SEQ ID NO: 80247 - DNA, 13 bp, Artificial Sequence
  Oligonucleotide for detection of SNP TSC0020357
agggaattttttt

SEQ ID NO: 80248 - DNA, 13 bp, Artificial Sequence
  Oligonucleotide for detection of SNP TSC0020357
aaaaaaattccct

SEQ ID NO: 80249 - DNA, 13 bp, Artificial Sequence
  Oligonucleotide for detection of SNP TSC0020360
atatgtagtataa

SEQ ID NO: 80250 - DNA, 13 bp, Artificial Sequence
  Oligonucleotide for detection of SNP TSC0020360
ttatactacatat

SEQ ID NO: 80251 - DNA, 13 bp, Artificial Sequence
  Oligonucleotide for detection of SNP TSC0020360
atatgtggtataa

SEQ ID NO: 80252 - DNA, 13 bp, Artificial Sequence
  Oligonucleotide for detection of SNP TSC0020360
ttataccacatat

SEQ ID NO: 80253 - DNA, 13 bp, Artificial Sequence
  Oligonucleotide for detection of SNP TSC0020361
agttaaatttttt

SEQ ID NO: 80254 - DNA, 13 bp, Artificial Sequence
  Oligonucleotide for detection of SNP TSC0020361
aaaaaatttaact

SEQ ID NO: 80255 - DNA, 13 bp, Artificial Sequence
  Oligonucleotide for detection of SNP TSC0020361
agttaattttttt

SEQ ID NO: 80256 - DNA, 13 bp, Artificial Sequence
  Oligonucleotide for detection of SNP TSC0020361
aaaaaaattaact

SEQ ID NO: 80257 - DNA, 13 bp, Artificial Sequence
  Oligonucleotide for detection of SNP TSC0020361
aagaagtttagtt

SEQ ID NO: 80258 - DNA, 13 bp, Artificial Sequence
  Oligonucleotide for detection of SNP TSC0020361
aactaaacttctt

SEQ ID NO: 80259 - DNA, 13 bp, Artificial Sequence
  Oligonucleotide for detection of SNP TSC0020361
aagaaggttagtt

SEQ ID NO: 80260 - DNA, 13 bp, Artificial Sequence
  Oligonucleotide for detection of SNP TSC0020361
aactaaccttctt

SEQ ID NO: 80261 - DNA, 13 bp, Artificial Sequence
  Oligonucleotide for detection of SNP TSC0020362
aaaaaagaagaag

SEQ ID NO: 80262 - DNA, 13 bp, Artificial Sequence
  Oligonucleotide for detection of SNP TSC0020362
cttcttctttttt

SEQ ID NO: 80263 - DNA, 13 bp, Artificial Sequence
  Oligonucleotide for detection of SNP TSC0020362
aaaaaaaaagaag

SEQ ID NO: 80264 - DNA, 13 bp, Artificial Sequence
  Oligonucleotide for detection of SNP TSC0020362
cttcttttttttt

SEQ ID NO: 80265 - DNA, 13 bp, Artificial Sequence
  Oligonucleotide for detection of SNP TSC0020363
atgatgtgtatat

SEQ ID NO: 80266 - DNA, 13 bp, Artificial Sequence
  Oligonucleotide for detection of SNP TSC0020363
atatacacatcat

SEQ ID NO: 80267 - DNA, 13 bp, Artificial Sequence
  Oligonucleotide for detection of SNP TSC0020363
atgatgcgtatat

SEQ ID NO: 80268 - DNA, 13 bp, Artificial Sequence
  Oligonucleotide for detection of SNP TSC0020363
atatacgcatcat

SEQ ID NO: 80269 - DNA, 13 bp, Artificial Sequence
  Oligonucleotide for detection of SNP TSC0020364
gaggaggagttgt

SEQ ID NO: 80270 - DNA, 13 bp, Artificial Sequence
  Oligonucleotide for detection of SNP TSC0020364
acaactcctcctc

SEQ ID NO: 80271 - DNA, 13 bp, Artificial Sequence
  Oligonucleotide for detection of SNP TSC0020364
gaggagaagttgt

SEQ ID NO: 80272 - DNA, 13 bp, Artificial Sequence
  Oligonucleotide for detection of SNP TSC0020364
acaacttctcctc

SEQ ID NO: 80273 - DNA, 13 bp, Artificial Sequence
  Oligonucleotide for detection of SNP TSC0020365
ttgagggttatga

SEQ ID NO: 80274 - DNA, 13 bp, Artificial Sequence
  Oligonucleotide for detection of SNP TSC0020365
tcataaccctcaa

SEQ ID NO: 80275 - DNA, 13 bp, Artificial Sequence
  Oligonucleotide for detection of SNP TSC0020365
ttgaggattatga

SEQ ID NO: 80276 - DNA, 13 bp, Artificial Sequence
  Oligonucleotide for detection of SNP TSC0020365
tcataatcctcaa

SEQ ID NO: 80277 - DNA, 13 bp, Artificial Sequence
  Oligonucleotide for detection of SNP TSC0020365
tcgagggttatga

SEQ ID NO: 80278 - DNA, 13 bp, Artificial Sequence
  Oligonucleotide for detection of SNP TSC0020365
tcataaccctcga

SEQ ID NO: 80279 - DNA, 13 bp, Artificial Sequence
  Oligonucleotide for detection of SNP TSC0020365
tcgaggattatga

SEQ ID NO: 80280 - DNA, 13 bp, Artificial Sequence
  Oligonucleotide for detection of SNP TSC0020365
tcataatcctcga

SEQ ID NO: 80281 - DNA, 13 bp, Artificial Sequence
  Oligonucleotide for detection of SNP TSC0020373
gaggtggtaaggg

SEQ ID NO: 80282 - DNA, 13 bp, Artificial Sequence
  Oligonucleotide for detection of SNP TSC0020373
cccttaccacctc

SEQ ID NO: 80283 - DNA, 13 bp, Artificial Sequence
  Oligonucleotide for detection of SNP TSC0020373
gaggtgataaggg

SEQ ID NO: 80284 - DNA, 13 bp, Artificial Sequence
  Oligonucleotide for detection of SNP TSC0020373
cccttatcacctc

SEQ ID NO: 80285 - DNA, 13 bp, Artificial Sequence
  Oligonucleotide for detection of SNP TSC0020374
gtgtagtgtatgg

SEQ ID NO: 80286 - DNA, 13 bp, Artificial Sequence
  Oligonucleotide for detection of SNP TSC0020374
ccatacactacac

SEQ ID NO: 80287 - DNA, 13 bp, Artificial Sequence
  Oligonucleotide for detection of SNP TSC0020374
gtgtagggtatgg

SEQ ID NO: 80288 - DNA, 13 bp, Artificial Sequence
  Oligonucleotide for detection of SNP TSC0020374
ccataccctacac

SEQ ID NO: 80289 - DNA, 13 bp, Artificial Sequence
  Oligonucleotide for detection of SNP TSC0020374
gtgtagcgtatgg

SEQ ID NO: 80290 - DNA, 13 bp, Artificial Sequence
  Oligonucleotide for detection of SNP TSC0020374
ccatacgctacac

SEQ ID NO: 80291 - DNA, 13 bp, Artificial Sequence
  Oligonucleotide for detection of SNP TSC0020374
ttatattttgtay

SEQ ID NO: 80292 - DNA, 13 bp, Artificial Sequence
  Oligonucleotide for detection of SNP TSC0020374
rtacaaaatataa

SEQ ID NO: 80293 - DNA, 13 bp, Artificial Sequence
  Oligonucleotide for detection of SNP TSC0020375
ttgtgttgtaggg

SEQ ID NO: 80294 - DNA, 13 bp, Artificial Sequence
  Oligonucleotide for detection of SNP TSC0020375
ccctacaacacaa

SEQ ID NO: 80295 - DNA, 13 bp, Artificial Sequence
  Oligonucleotide for detection of SNP TSC0020375
ttgtgtcgtaggg

SEQ ID NO: 80296 - DNA, 13 bp, Artificial Sequence
  Oligonucleotide for detection of SNP TSC0020375
ccctacgacacaa

SEQ ID NO: 80297 - DNA, 13 bp, Artificial Sequence
  Oligonucleotide for detection of SNP TSC0020375
ttttatgatataa

SEQ ID NO: 80298 - DNA, 13 bp, Artificial Sequence
  Oligonucleotide for detection of SNP TSC0020375
ttatatcataaaa

SEQ ID NO: 80299 - DNA, 13 bp, Artificial Sequence
  Oligonucleotide for detection of SNP TSC0020375
ttttataatataa

SEQ ID NO: 80300 - DNA, 13 bp, Artificial Sequence
  Oligonucleotide for detection of SNP TSC0020375
ttatattataaaa

SEQ ID NO: 80301 - DNA, 13 bp, Artificial Sequence
  Oligonucleotide for detection of SNP TSC0020375
ttttacgatataa

SEQ ID NO: 80302 - DNA, 13 bp, Artificial Sequence
  Oligonucleotide for detection of SNP TSC0020375
ttatatcgtaaaa

SEQ ID NO: 80303 - DNA, 13 bp, Artificial Sequence
  Oligonucleotide for detection of SNP TSC0020382
tttgggaaatatg

SEQ ID NO: 80304 - DNA, 13 bp, Artificial Sequence
  Oligonucleotide for detection of SNP TSC0020382
catatttcccaaa

SEQ ID NO: 80305 - DNA, 13 bp, Artificial Sequence
  Oligonucleotide for detection of SNP TSC0020382
tttgggtaatatg

SEQ ID NO: 80306 - DNA, 13 bp, Artificial Sequence
  Oligonucleotide for detection of SNP TSC0020382
catattacccaaa

SEQ ID NO: 80307 - DNA, 13 bp, Artificial Sequence
  Oligonucleotide for detection of SNP TSC0020382
tatgttttttagg

SEQ ID NO: 80308 - DNA, 13 bp, Artificial Sequence
  Oligonucleotide for detection of SNP TSC0020382
cctaaaaaacata

SEQ ID NO: 80309 - DNA, 13 bp, Artificial Sequence
  Oligonucleotide for detection of SNP TSC0020385
tattagtgtgtga

SEQ ID NO: 80310 - DNA, 13 bp, Artificial Sequence
  Oligonucleotide for detection of SNP TSC0020385
tcacacactaata

SEQ ID NO: 80311 - DNA, 13 bp, Artificial Sequence
  Oligonucleotide for detection of SNP TSC0020385
tattagcgtgtga

SEQ ID NO: 80312 - DNA, 13 bp, Artificial Sequence
  Oligonucleotide for detection of SNP TSC0020385
tcacacgctaata

SEQ ID NO: 80313 - DNA, 13 bp, Artificial Sequence
  Oligonucleotide for detection of SNP TSC0020385
ttatatgttagta

SEQ ID NO: 80314 - DNA, 13 bp, Artificial Sequence
  Oligonucleotide for detection of SNP TSC0020385
tactaacatataa

SEQ ID NO: 80315 - DNA, 13 bp, Artificial Sequence
  Oligonucleotide for detection of SNP TSC0020385
ttatatattagta

SEQ ID NO: 80316 - DNA, 13 bp, Artificial Sequence
  Oligonucleotide for detection of SNP TSC0020385
tactaatatataa

SEQ ID NO: 80317 - DNA, 13 bp, Artificial Sequence
  Oligonucleotide for detection of SNP TSC0020385
ttatacgttagta

SEQ ID NO: 80318 - DNA, 13 bp, Artificial Sequence
  Oligonucleotide for detection of SNP TSC0020385
tactaacgtataa

SEQ ID NO: 80319 - DNA, 13 bp, Artificial Sequence
  Oligonucleotide for detection of SNP TSC0020386
ttttagtgtatag

SEQ ID NO: 80320 - DNA, 13 bp, Artificial Sequence
  Oligonucleotide for detection of SNP TSC0020386
ctatacactaaaa

SEQ ID NO: 80321 - DNA, 13 bp, Artificial Sequence
  Oligonucleotide for detection of SNP TSC0020386
ttttagggtatag

SEQ ID NO: 80322 - DNA, 13 bp, Artificial Sequence
  Oligonucleotide for detection of SNP TSC0020386
ctataccctaaaa

SEQ ID NO: 80323 - DNA, 13 bp, Artificial Sequence
  Oligonucleotide for detection of SNP TSC0020386
ttttagcgtatag

SEQ ID NO: 80324 - DNA, 13 bp, Artificial Sequence
  Oligonucleotide for detection of SNP TSC0020386
ctatacgctaaaa

SEQ ID NO: 80325 - DNA, 13 bp, Artificial Sequence
  Oligonucleotide for detection of SNP TSC0020386
ttgtatgttgagg

SEQ ID NO: 80326 - DNA, 13 bp, Artificial Sequence
  Oligonucleotide for detection of SNP TSC0020386
cctcaacatacaa

SEQ ID NO: 80327 - DNA, 13 bp, Artificial Sequence
  Oligonucleotide for detection of SNP TSC0020386
ttgtattttgagg

SEQ ID NO: 80328 - DNA, 13 bp, Artificial Sequence
  Oligonucleotide for detection of SNP TSC0020386
cctcaaaatacaa

SEQ ID NO: 80329 - DNA, 13 bp, Artificial Sequence
  Oligonucleotide for detection of SNP TSC0020386
ttgtacgttgagg

SEQ ID NO: 80330 - DNA, 13 bp, Artificial Sequence
  Oligonucleotide for detection of SNP TSC0020386
cctcaacgtacaa

SEQ ID NO: 80331 - DNA, 13 bp, Artificial Sequence
  Oligonucleotide for detection of SNP TSC0020388
agggaaattttty

SEQ ID NO: 80332 - DNA, 13 bp, Artificial Sequence
  Oligonucleotide for detection of SNP TSC0020388
raaaaatttccct

SEQ ID NO: 80333 - DNA, 13 bp, Artificial Sequence
  Oligonucleotide for detection of SNP TSC0020388
agggaagttttty

SEQ ID NO: 80334 - DNA, 13 bp, Artificial Sequence
  Oligonucleotide for detection of SNP TSC0020388
raaaaacttccct

SEQ ID NO: 80335 - DNA, 13 bp, Artificial Sequence
  Oligonucleotide for detection of SNP TSC0020389
ttgaaaaaaatga

SEQ ID NO: 80336 - DNA, 13 bp, Artificial Sequence
  Oligonucleotide for detection of SNP TSC0020389
tcatttttttcaa

SEQ ID NO: 80337 - DNA, 13 bp, Artificial Sequence
  Oligonucleotide for detection of SNP TSC0020389
ttgaaagaaatga

SEQ ID NO: 80338 - DNA, 13 bp, Artificial Sequence
  Oligonucleotide for detection of SNP TSC0020389
tcatttctttcaa

SEQ ID NO: 80339 - DNA, 13 bp, Artificial Sequence
  Oligonucleotide for detection of SNP TSC0020391
ttaagtgtatata

SEQ ID NO: 80340 - DNA, 13 bp, Artificial Sequence
  Oligonucleotide for detection of SNP TSC0020391
tatatacacttaa

SEQ ID NO: 80341 - DNA, 13 bp, Artificial Sequence
  Oligonucleotide for detection of SNP TSC0020391
ttaagtatatata

SEQ ID NO: 80342 - DNA, 13 bp, Artificial Sequence
  Oligonucleotide for detection of SNP TSC0020391
tatatatacttaa

SEQ ID NO: 80343 - DNA, 13 bp, Artificial Sequence
  Oligonucleotide for detection of SNP TSC0020392
tggaaaggtggga

SEQ ID NO: 80344 - DNA, 13 bp, Artificial Sequence
  Oligonucleotide for detection of SNP TSC0020392
tcccacctttcca

SEQ ID NO: 80345 - DNA, 13 bp, Artificial Sequence
  Oligonucleotide for detection of SNP TSC0020392
tggaaaagtggga

SEQ ID NO: 80346 - DNA, 13 bp, Artificial Sequence
  Oligonucleotide for detection of SNP TSC0020392
tcccacttttcca

SEQ ID NO: 80347 - DNA, 13 bp, Artificial Sequence
  Oligonucleotide for detection of SNP TSC0020397
agagtgagaggga

SEQ ID NO: 80348 - DNA, 13 bp, Artificial Sequence
  Oligonucleotide for detection of SNP TSC0020397
tccctctcactct

SEQ ID NO: 80349 - DNA, 13 bp, Artificial Sequence
  Oligonucleotide for detection of SNP TSC0020397
agagtgggaggga

SEQ ID NO: 80350 - DNA, 13 bp, Artificial Sequence
  Oligonucleotide for detection of SNP TSC0020397
tccctcccactct

SEQ ID NO: 80351 - DNA, 13 bp, Artificial Sequence
  Oligonucleotide for detection of SNP TSC0020398
tgagagggatagg

SEQ ID NO: 80352 - DNA, 13 bp, Artificial Sequence
  Oligonucleotide for detection of SNP TSC0020398
cctatccctctca

SEQ ID NO: 80353 - DNA, 13 bp, Artificial Sequence
  Oligonucleotide for detection of SNP TSC0020398
tgagagtgatagg

SEQ ID NO: 80354 - DNA, 13 bp, Artificial Sequence
  Oligonucleotide for detection of SNP TSC0020398
cctatcactctca

SEQ ID NO: 80355 - DNA, 13 bp, Artificial Sequence
  Oligonucleotide for detection of SNP TSC0020398
tttgtttttttta

SEQ ID NO: 80356 - DNA, 13 bp, Artificial Sequence
  Oligonucleotide for detection of SNP TSC0020398
taaaaaaaacaaa

SEQ ID NO: 80357 - DNA, 13 bp, Artificial Sequence
  Oligonucleotide for detection of SNP TSC0020399
atagggaagagtg

SEQ ID NO: 80358 - DNA, 13 bp, Artificial Sequence
  Oligonucleotide for detection of SNP TSC0020399
cactcttccctat

SEQ ID NO: 80359 - DNA, 13 bp, Artificial Sequence
  Oligonucleotide for detection of SNP TSC0020399
ataggggagagtg

SEQ ID NO: 80360 - DNA, 13 bp, Artificial Sequence
  Oligonucleotide for detection of SNP TSC0020399
cactctcccctat

SEQ ID NO: 80361 - DNA, 13 bp, Artificial Sequence
  Oligonucleotide for detection of SNP TSC0020402
atttattgttagt

SEQ ID NO: 80362 - DNA, 13 bp, Artificial Sequence
  Oligonucleotide for detection of SNP TSC0020402
actaacaataaat

SEQ ID NO: 80363 - DNA, 13 bp, Artificial Sequence
  Oligonucleotide for detection of SNP TSC0020402
atttatcgttagt

SEQ ID NO: 80364 - DNA, 13 bp, Artificial Sequence
  Oligonucleotide for detection of SNP TSC0020402
actaacgataaat

SEQ ID NO: 80365 - DNA, 13 bp, Artificial Sequence
  Oligonucleotide for detection of SNP TSC0020402
attaatgatgaat

SEQ ID NO: 80366 - DNA, 13 bp, Artificial Sequence
  Oligonucleotide for detection of SNP TSC0020402
attcatcattaat

SEQ ID NO: 80367 - DNA, 13 bp, Artificial Sequence
  Oligonucleotide for detection of SNP TSC0020402
attaataatgaat

SEQ ID NO: 80368 - DNA, 13 bp, Artificial Sequence
  Oligonucleotide for detection of SNP TSC0020402
attcattattaat

SEQ ID NO: 80369 - DNA, 13 bp, Artificial Sequence
  Oligonucleotide for detection of SNP TSC0020402
attaacgatgaat

SEQ ID NO: 80370 - DNA, 13 bp, Artificial Sequence
  Oligonucleotide for detection of SNP TSC0020402
attcatcgttaat

SEQ ID NO: 80371 - DNA, 13 bp, Artificial Sequence
  Oligonucleotide for detection of SNP TSC0020403
tattggatatata

SEQ ID NO: 80372 - DNA, 13 bp, Artificial Sequence
  Oligonucleotide for detection of SNP TSC0020403
tatatatccaata

SEQ ID NO: 80373 - DNA, 13 bp, Artificial Sequence
  Oligonucleotide for detection of SNP TSC0020403
tattggttatata

SEQ ID NO: 80374 - DNA, 13 bp, Artificial Sequence
  Oligonucleotide for detection of SNP TSC0020403
tatataaccaata

SEQ ID NO: 80375 - DNA, 13 bp, Artificial Sequence
  Oligonucleotide for detection of SNP TSC0020403
tgtatatttagta

SEQ ID NO: 80376 - DNA, 13 bp, Artificial Sequence
  Oligonucleotide for detection of SNP TSC0020403
tactaaatataca

SEQ ID NO: 80377 - DNA, 13 bp, Artificial Sequence
  Oligonucleotide for detection of SNP TSC0020403
tgtataattagta

SEQ ID NO: 80378 - DNA, 13 bp, Artificial Sequence
  Oligonucleotide for detection of SNP TSC0020403
tactaattataca

SEQ ID NO: 80379 - DNA, 13 bp, Artificial Sequence
  Oligonucleotide for detection of SNP TSC0020404
ttggtaattattt

SEQ ID NO: 80380 - DNA, 13 bp, Artificial Sequence
  Oligonucleotide for detection of SNP TSC0020404
aaataattaccaa

SEQ ID NO: 80381 - DNA, 13 bp, Artificial Sequence
  Oligonucleotide for detection of SNP TSC0020404
ttggtatttattt

SEQ ID NO: 80382 - DNA, 13 bp, Artificial Sequence
  Oligonucleotide for detection of SNP TSC0020404
aaataaataccaa

SEQ ID NO: 80383 - DNA, 13 bp, Artificial Sequence
  Oligonucleotide for detection of SNP TSC0020404
aggtggttattag

SEQ ID NO: 80384 - DNA, 13 bp, Artificial Sequence
  Oligonucleotide for detection of SNP TSC0020404
ctaataaccacct

SEQ ID NO: 80385 - DNA, 13 bp, Artificial Sequence
  Oligonucleotide for detection of SNP TSC0020404
aggtggatattag

SEQ ID NO: 80386 - DNA, 13 bp, Artificial Sequence
  Oligonucleotide for detection of SNP TSC0020404
ctaatatccacct

SEQ ID NO: 80387 - DNA, 13 bp, Artificial Sequence
  Oligonucleotide for detection of SNP TSC0020405
atggatatattay

SEQ ID NO: 80388 - DNA, 13 bp, Artificial Sequence
  Oligonucleotide for detection of SNP TSC0020405
rtaatatatccat

SEQ ID NO: 80389 - DNA, 13 bp, Artificial Sequence
  Oligonucleotide for detection of SNP TSC0020405
atggatgtattay

SEQ ID NO: 80390 - DNA, 13 bp, Artificial Sequence
  Oligonucleotide for detection of SNP TSC0020405
rtaatacatccat

SEQ ID NO: 80391 - DNA, 13 bp, Artificial Sequence
  Oligonucleotide for detection of SNP TSC0020406
tttggggttttgg

SEQ ID NO: 80392 - DNA, 13 bp, Artificial Sequence
  Oligonucleotide for detection of SNP TSC0020406
ccaaaaccccaaa

SEQ ID NO: 80393 - DNA, 13 bp, Artificial Sequence
  Oligonucleotide for detection of SNP TSC0020406
tttgggattttgg

SEQ ID NO: 80394 - DNA, 13 bp, Artificial Sequence
  Oligonucleotide for detection of SNP TSC0020406
ccaaaatcccaaa

SEQ ID NO: 80395 - DNA, 13 bp, Artificial Sequence
  Oligonucleotide for detection of SNP TSC0020406
tttggggtttcgg

SEQ ID NO: 80396 - DNA, 13 bp, Artificial Sequence
  Oligonucleotide for detection of SNP TSC0020406
ccgaaaccccaaa

SEQ ID NO: 80397 - DNA, 13 bp, Artificial Sequence
  Oligonucleotide for detection of SNP TSC0020406
tttgggatttcgg

SEQ ID NO: 80398 - DNA, 13 bp, Artificial Sequence
  Oligonucleotide for detection of SNP TSC0020406
ccgaaatcccaaa

SEQ ID NO: 80399 - DNA, 13 bp, Artificial Sequence
  Oligonucleotide for detection of SNP TSC0020407
gttttaaggtttg

SEQ ID NO: 80400 - DNA, 13 bp, Artificial Sequence
  Oligonucleotide for detection of SNP TSC0020407
caaaccttaaaac

SEQ ID NO: 80401 - DNA, 13 bp, Artificial Sequence
  Oligonucleotide for detection of SNP TSC0020407
gttttagggtttg

SEQ ID NO: 80402 - DNA, 13 bp, Artificial Sequence
  Oligonucleotide for detection of SNP TSC0020407
caaaccctaaaac

SEQ ID NO: 80403 - DNA, 13 bp, Artificial Sequence
  Oligonucleotide for detection of SNP TSC0020408
ttggtatttagtt

SEQ ID NO: 80404 - DNA, 13 bp, Artificial Sequence
  Oligonucleotide for detection of SNP TSC0020408
aactaaataccaa

SEQ ID NO: 80405 - DNA, 13 bp, Artificial Sequence
  Oligonucleotide for detection of SNP TSC0020408
ttggtagttagtt

SEQ ID NO: 80406 - DNA, 13 bp, Artificial Sequence
  Oligonucleotide for detection of SNP TSC0020408
aactaactaccaa

SEQ ID NO: 80407 - DNA, 13 bp, Artificial Sequence
  Oligonucleotide for detection of SNP TSC0020408
agttgggtattaa

SEQ ID NO: 80408 - DNA, 13 bp, Artificial Sequence
  Oligonucleotide for detection of SNP TSC0020408
ttaatacccaact

SEQ ID NO: 80409 - DNA, 13 bp, Artificial Sequence
  Oligonucleotide for detection of SNP TSC0020408
agttggttattaa

SEQ ID NO: 80410 - DNA, 13 bp, Artificial Sequence
  Oligonucleotide for detection of SNP TSC0020408
ttaataaccaact

SEQ ID NO: 80411 - DNA, 13 bp, Artificial Sequence
  Oligonucleotide for detection of SNP TSC0020409
tttgtgtgattty

SEQ ID NO: 80412 - DNA, 13 bp, Artificial Sequence
  Oligonucleotide for detection of SNP TSC0020409
raaatcacacaaa

SEQ ID NO: 80413 - DNA, 13 bp, Artificial Sequence
  Oligonucleotide for detection of SNP TSC0020409
tttgcgtgattty

SEQ ID NO: 80414 - DNA, 13 bp, Artificial Sequence
  Oligonucleotide for detection of SNP TSC0020409
raaatcacgcaaa

SEQ ID NO: 80415 - DNA, 13 bp, Artificial Sequence
  Oligonucleotide for detection of SNP TSC0020409
tttgtgcgattty

SEQ ID NO: 80416 - DNA, 13 bp, Artificial Sequence
  Oligonucleotide for detection of SNP TSC0020409
raaatcgcacaaa

SEQ ID NO: 80417 - DNA, 13 bp, Artificial Sequence
  Oligonucleotide for detection of SNP TSC0020409
tttgcgcgattty

SEQ ID NO: 80418 - DNA, 13 bp, Artificial Sequence
  Oligonucleotide for detection of SNP TSC0020409
raaatcgcgcaaa

SEQ ID NO: 80419 - DNA, 13 bp, Artificial Sequence
  Oligonucleotide for detection of SNP TSC0020409
ggaattgtgtagg

SEQ ID NO: 80420 - DNA, 13 bp, Artificial Sequence
  Oligonucleotide for detection of SNP TSC0020409
cctacacaattcc

SEQ ID NO: 80421 - DNA, 13 bp, Artificial Sequence
  Oligonucleotide for detection of SNP TSC0020409
ggaattatgtagg

SEQ ID NO: 80422 - DNA, 13 bp, Artificial Sequence
  Oligonucleotide for detection of SNP TSC0020409
cctacataattcc

SEQ ID NO: 80423 - DNA, 13 bp, Artificial Sequence
  Oligonucleotide for detection of SNP TSC0020409
ggaatcgtgtagg

SEQ ID NO: 80424 - DNA, 13 bp, Artificial Sequence
  Oligonucleotide for detection of SNP TSC0020409
cctacacgattcc

SEQ ID NO: 80425 - DNA, 13 bp, Artificial Sequence
  Oligonucleotide for detection of SNP TSC0020409
ggaattacgtagg

SEQ ID NO: 80426 - DNA, 13 bp, Artificial Sequence
  Oligonucleotide for detection of SNP TSC0020409
cctacgtaattcc

SEQ ID NO: 80427 - DNA, 13 bp, Artificial Sequence
  Oligonucleotide for detection of SNP TSC0020409
ggaattgcgtagg

SEQ ID NO: 80428 - DNA, 13 bp, Artificial Sequence
  Oligonucleotide for detection of SNP TSC0020409
cctacgcaattcc

SEQ ID NO: 80429 - DNA, 13 bp, Artificial Sequence
  Oligonucleotide for detection of SNP TSC0020409
ggaatcgcgtagg

SEQ ID NO: 80430 - DNA, 13 bp, Artificial Sequence
  Oligonucleotide for detection of SNP TSC0020409
cctacgcgattcc

SEQ ID NO: 80431 - DNA, 13 bp, Artificial Sequence
  Oligonucleotide for detection of SNP TSC0020410
tataaggttgtga

SEQ ID NO: 80432 - DNA, 13 bp, Artificial Sequence
  Oligonucleotide for detection of SNP TSC0020410
tcacaaccttata

SEQ ID NO: 80433 - DNA, 13 bp, Artificial Sequence
  Oligonucleotide for detection of SNP TSC0020410
tataagattgtga

SEQ ID NO: 80434 - DNA, 13 bp, Artificial Sequence
  Oligonucleotide for detection of SNP TSC0020410
tcacaatcttata

SEQ ID NO: 80435 - DNA, 13 bp, Artificial Sequence
  Oligonucleotide for detection of SNP TSC0020412
ggggtatggggga

SEQ ID NO: 80436 - DNA, 13 bp, Artificial Sequence
  Oligonucleotide for detection of SNP TSC0020412
tcccccatacccc

SEQ ID NO: 80437 - DNA, 13 bp, Artificial Sequence
  Oligonucleotide for detection of SNP TSC0020412
ggggtagggggga

SEQ ID NO: 80438 - DNA, 13 bp, Artificial Sequence
  Oligonucleotide for detection of SNP TSC0020412
tcccccctacccc

SEQ ID NO: 80439 - DNA, 13 bp, Artificial Sequence
  Oligonucleotide for detection of SNP TSC0020412
ggggtacggggga

SEQ ID NO: 80440 - DNA, 13 bp, Artificial Sequence
  Oligonucleotide for detection of SNP TSC0020412
tcccccgtacccc

SEQ ID NO: 80441 - DNA, 13 bp, Artificial Sequence
  Oligonucleotide for detection of SNP TSC0020412
tttttcgtattty

SEQ ID NO: 80442 - DNA, 13 bp, Artificial Sequence
  Oligonucleotide for detection of SNP TSC0020412
raaatacgaaaaa

SEQ ID NO: 80443 - DNA, 13 bp, Artificial Sequence
  Oligonucleotide for detection of SNP TSC0020413
ttgttttgtgatt

SEQ ID NO: 80444 - DNA, 13 bp, Artificial Sequence
  Oligonucleotide for detection of SNP TSC0020413
aatcacaaaacaa

SEQ ID NO: 80445 - DNA, 13 bp, Artificial Sequence
  Oligonucleotide for detection of SNP TSC0020413
ttgtttcgtgatt

SEQ ID NO: 80446 - DNA, 13 bp, Artificial Sequence
  Oligonucleotide for detection of SNP TSC0020413
aatcacgaaacaa

SEQ ID NO: 80447 - DNA, 13 bp, Artificial Sequence
  Oligonucleotide for detection of SNP TSC0020413
aattatggagtag

SEQ ID NO: 80448 - DNA, 13 bp, Artificial Sequence
  Oligonucleotide for detection of SNP TSC0020413
ctactccataatt

SEQ ID NO: 80449 - DNA, 13 bp, Artificial Sequence
  Oligonucleotide for detection of SNP TSC0020413
aattatagagtag

SEQ ID NO: 80450 - DNA, 13 bp, Artificial Sequence
  Oligonucleotide for detection of SNP TSC0020413
ctactctataatt

SEQ ID NO: 80451 - DNA, 13 bp, Artificial Sequence
  Oligonucleotide for detection of SNP TSC0020413
aattacggagtag

SEQ ID NO: 80452 - DNA, 13 bp, Artificial Sequence
  Oligonucleotide for detection of SNP TSC0020413
ctactccgtaatt

SEQ ID NO: 80453 - DNA, 13 bp, Artificial Sequence
  Oligonucleotide for detection of SNP TSC0020414
aatttaaaatttt

SEQ ID NO: 80454 - DNA, 13 bp, Artificial Sequence
  Oligonucleotide for detection of SNP TSC0020414
aaaattttaaatt

SEQ ID NO: 80455 - DNA, 13 bp, Artificial Sequence
  Oligonucleotide for detection of SNP TSC0020414
aatttagaatttt

SEQ ID NO: 80456 - DNA, 13 bp, Artificial Sequence
  Oligonucleotide for detection of SNP TSC0020414
aaaattctaaatt

SEQ ID NO: 80457 - DNA, 13 bp, Artificial Sequence
  Oligonucleotide for detection of SNP TSC0020415
atttaaaattttt

SEQ ID NO: 80458 - DNA, 13 bp, Artificial Sequence
  Oligonucleotide for detection of SNP TSC0020415
aaaaattttaaat

SEQ ID NO: 80459 - DNA, 13 bp, Artificial Sequence
  Oligonucleotide for detection of SNP TSC0020415
atttaatattttt

SEQ ID NO: 80460 - DNA, 13 bp, Artificial Sequence
  Oligonucleotide for detection of SNP TSC0020415
aaaaatattaaat

SEQ ID NO: 80461 - DNA, 13 bp, Artificial Sequence
  Oligonucleotide for detection of SNP TSC0020415
aagggttttgggt

SEQ ID NO: 80462 - DNA, 13 bp, Artificial Sequence
  Oligonucleotide for detection of SNP TSC0020415
acccaaaaccctt

SEQ ID NO: 80463 - DNA, 13 bp, Artificial Sequence
  Oligonucleotide for detection of SNP TSC0020415
aagggtgttgggt

SEQ ID NO: 80464 - DNA, 13 bp, Artificial Sequence
  Oligonucleotide for detection of SNP TSC0020415
acccaacaccctt

SEQ ID NO: 80465 - DNA, 13 bp, Artificial Sequence
  Oligonucleotide for detection of SNP TSC0020416
gtggagagttttt

SEQ ID NO: 80466 - DNA, 13 bp, Artificial Sequence
  Oligonucleotide for detection of SNP TSC0020416
aaaaactctccac

SEQ ID NO: 80467 - DNA, 13 bp, Artificial Sequence
  Oligonucleotide for detection of SNP TSC0020416
gtggagggttttt

SEQ ID NO: 80468 - DNA, 13 bp, Artificial Sequence
  Oligonucleotide for detection of SNP TSC0020416
aaaaaccctccac

SEQ ID NO: 80469 - DNA, 13 bp, Artificial Sequence
  Oligonucleotide for detection of SNP TSC0020417
ttaaaagaaaaaa

SEQ ID NO: 80470 - DNA, 13 bp, Artificial Sequence
  Oligonucleotide for detection of SNP TSC0020417
ttttttcttttaa

SEQ ID NO: 80471 - DNA, 13 bp, Artificial Sequence
  Oligonucleotide for detection of SNP TSC0020418
attggggtaaata

SEQ ID NO: 80472 - DNA, 13 bp, Artificial Sequence
  Oligonucleotide for detection of SNP TSC0020418
tatttaccccaat

SEQ ID NO: 80473 - DNA, 13 bp, Artificial Sequence
  Oligonucleotide for detection of SNP TSC0020418
attgggataaata

SEQ ID NO: 80474 - DNA, 13 bp, Artificial Sequence
  Oligonucleotide for detection of SNP TSC0020418
tatttatcccaat

SEQ ID NO: 80475 - DNA, 13 bp, Artificial Sequence
  Oligonucleotide for detection of SNP TSC0020420
ttttaagtaggtg

SEQ ID NO: 80476 - DNA, 13 bp, Artificial Sequence
  Oligonucleotide for detection of SNP TSC0020420
cacctacttaaaa

SEQ ID NO: 80477 - DNA, 13 bp, Artificial Sequence
  Oligonucleotide for detection of SNP TSC0020420
ttttaaataggtg

SEQ ID NO: 80478 - DNA, 13 bp, Artificial Sequence
  Oligonucleotide for detection of SNP TSC0020420
cacctatttaaaa

SEQ ID NO: 80479 - DNA, 13 bp, Artificial Sequence
  Oligonucleotide for detection of SNP TSC0020420
ttttaagtaggcg

SEQ ID NO: 80480 - DNA, 13 bp, Artificial Sequence
  Oligonucleotide for detection of SNP TSC0020420
cgcctacttaaaa

SEQ ID NO: 80481 - DNA, 13 bp, Artificial Sequence
  Oligonucleotide for detection of SNP TSC0020420
ttttaaataggcg

SEQ ID NO: 80482 - DNA, 13 bp, Artificial Sequence
  Oligonucleotide for detection of SNP TSC0020420
cgcctatttaaaa

SEQ ID NO: 80483 - DNA, 13 bp, Artificial Sequence
  Oligonucleotide for detection of SNP TSC0020421
ttggtagaagtty

SEQ ID NO: 80484 - DNA, 13 bp, Artificial Sequence
  Oligonucleotide for detection of SNP TSC0020421
raacttctaccaa

SEQ ID NO: 80485 - DNA, 13 bp, Artificial Sequence
  Oligonucleotide for detection of SNP TSC0020421
ttggtaaaagtty

SEQ ID NO: 80486 - DNA, 13 bp, Artificial Sequence
  Oligonucleotide for detection of SNP TSC0020421
raacttttaccaa

SEQ ID NO: 80487 - DNA, 13 bp, Artificial Sequence
  Oligonucleotide for detection of SNP TSC0020421
tcggtagaagtty

SEQ ID NO: 80488 - DNA, 13 bp, Artificial Sequence
  Oligonucleotide for detection of SNP TSC0020421
raacttctaccga

SEQ ID NO: 80489 - DNA, 13 bp, Artificial Sequence
  Oligonucleotide for detection of SNP TSC0020421
tcggtaaaagtty

SEQ ID NO: 80490 - DNA, 13 bp, Artificial Sequence
  Oligonucleotide for detection of SNP TSC0020421
raacttttaccga

SEQ ID NO: 80491 - DNA, 13 bp, Artificial Sequence
  Oligonucleotide for detection of SNP TSC0020422
ttggttagtaagg

SEQ ID NO: 80492 - DNA, 13 bp, Artificial Sequence
  Oligonucleotide for detection of SNP TSC0020422
ccttactaaccaa

SEQ ID NO: 80493 - DNA, 13 bp, Artificial Sequence
  Oligonucleotide for detection of SNP TSC0020422
ttggttggtaagg

SEQ ID NO: 80494 - DNA, 13 bp, Artificial Sequence
  Oligonucleotide for detection of SNP TSC0020422
ccttaccaaccaa

SEQ ID NO: 80495 - DNA, 13 bp, Artificial Sequence
  Oligonucleotide for detection of SNP TSC0020422
ttggtcggtaagg

SEQ ID NO: 80496 - DNA, 13 bp, Artificial Sequence
  Oligonucleotide for detection of SNP TSC0020422
ccttaccgaccaa

SEQ ID NO: 80497 - DNA, 13 bp, Artificial Sequence
  Oligonucleotide for detection of SNP TSC0020422
ttttgttggttag

SEQ ID NO: 80498 - DNA, 13 bp, Artificial Sequence
  Oligonucleotide for detection of SNP TSC0020422
ctaaccaacaaaa

SEQ ID NO: 80499 - DNA, 13 bp, Artificial Sequence
  Oligonucleotide for detection of SNP TSC0020422
ttttgtcggttag

SEQ ID NO: 80500 - DNA, 13 bp, Artificial Sequence
  Oligonucleotide for detection of SNP TSC0020422
ctaaccgacaaaa

SEQ ID NO: 80501 - DNA, 13 bp, Artificial Sequence
  Oligonucleotide for detection of SNP TSC0020423
tttgtaaggtgty

SEQ ID NO: 80502 - DNA, 13 bp, Artificial Sequence
  Oligonucleotide for detection of SNP TSC0020423
racaccttacaaa

SEQ ID NO: 80503 - DNA, 13 bp, Artificial Sequence
  Oligonucleotide for detection of SNP TSC0020423
tttgtagggtgty

SEQ ID NO: 80504 - DNA, 13 bp, Artificial Sequence
  Oligonucleotide for detection of SNP TSC0020423
racaccctacaaa

SEQ ID NO: 80505 - DNA, 13 bp, Artificial Sequence
  Oligonucleotide for detection of SNP TSC0020425
aattgtgttagty

SEQ ID NO: 80506 - DNA, 13 bp, Artificial Sequence
  Oligonucleotide for detection of SNP TSC0020425
ractaacacaatt

SEQ ID NO: 80507 - DNA, 13 bp, Artificial Sequence
  Oligonucleotide for detection of SNP TSC0020425
aattgtattagty

SEQ ID NO: 80508 - DNA, 13 bp, Artificial Sequence
  Oligonucleotide for detection of SNP TSC0020425
ractaatacaatt

SEQ ID NO: 80509 - DNA, 13 bp, Artificial Sequence
  Oligonucleotide for detection of SNP TSC0020426
aaatggattaaat

SEQ ID NO: 80510 - DNA, 13 bp, Artificial Sequence
  Oligonucleotide for detection of SNP TSC0020426
atttaatccattt

SEQ ID NO: 80511 - DNA, 13 bp, Artificial Sequence
  Oligonucleotide for detection of SNP TSC0020426
aaatgggttaaat

SEQ ID NO: 80512 - DNA, 13 bp, Artificial Sequence
  Oligonucleotide for detection of SNP TSC0020426
atttaacccattt

SEQ ID NO: 80513 - DNA, 13 bp, Artificial Sequence
  Oligonucleotide for detection of SNP TSC0020427
gtttaagaaataa

SEQ ID NO: 80514 - DNA, 13 bp, Artificial Sequence
  Oligonucleotide for detection of SNP TSC0020427
ttatttcttaaac

SEQ ID NO: 80515 - DNA, 13 bp, Artificial Sequence
  Oligonucleotide for detection of SNP TSC0020427
gtttaaaaaataa

SEQ ID NO: 80516 - DNA, 13 bp, Artificial Sequence
  Oligonucleotide for detection of SNP TSC0020427
ttattttttaaac

SEQ ID NO: 80517 - DNA, 13 bp, Artificial Sequence
  Oligonucleotide for detection of SNP TSC0020428
taaaggattttay

SEQ ID NO: 80518 - DNA, 13 bp, Artificial Sequence
  Oligonucleotide for detection of SNP TSC0020428
rtaaaatccttta

SEQ ID NO: 80519 - DNA, 13 bp, Artificial Sequence
  Oligonucleotide for detection of SNP TSC0020428
taaaggtttttay

SEQ ID NO: 80520 - DNA, 13 bp, Artificial Sequence
  Oligonucleotide for detection of SNP TSC0020428
rtaaaaaccttta

SEQ ID NO: 80521 - DNA, 13 bp, Artificial Sequence
  Oligonucleotide for detection of SNP TSC0020428
gtgaaatttttta

SEQ ID NO: 80522 - DNA, 13 bp, Artificial Sequence
  Oligonucleotide for detection of SNP TSC0020428
taaaaaatttcac

SEQ ID NO: 80523 - DNA, 13 bp, Artificial Sequence
  Oligonucleotide for detection of SNP TSC0020428
gtgaaaattttta

SEQ ID NO: 80524 - DNA, 13 bp, Artificial Sequence
  Oligonucleotide for detection of SNP TSC0020428
taaaaattttcac

SEQ ID NO: 80525 - DNA, 13 bp, Artificial Sequence
  Oligonucleotide for detection of SNP TSC0020430
tattgtagtagaa

SEQ ID NO: 80526 - DNA, 13 bp, Artificial Sequence
  Oligonucleotide for detection of SNP TSC0020430
ttctactacaata

SEQ ID NO: 80527 - DNA, 13 bp, Artificial Sequence
  Oligonucleotide for detection of SNP TSC0020430
tattgtggtagaa

SEQ ID NO: 80528 - DNA, 13 bp, Artificial Sequence
  Oligonucleotide for detection of SNP TSC0020430
ttctaccacaata

SEQ ID NO: 80529 - DNA, 13 bp, Artificial Sequence
  Oligonucleotide for detection of SNP TSC0020431
attttagttttga

SEQ ID NO: 80530 - DNA, 13 bp, Artificial Sequence
  Oligonucleotide for detection of SNP TSC0020431
tcaaaactaaaat

SEQ ID NO: 80531 - DNA, 13 bp, Artificial Sequence
  Oligonucleotide for detection of SNP TSC0020431
attttaattttga

SEQ ID NO: 80532 - DNA, 13 bp, Artificial Sequence
  Oligonucleotide for detection of SNP TSC0020431
tcaaaattaaaat

SEQ ID NO: 80533 - DNA, 13 bp, Artificial Sequence
  Oligonucleotide for detection of SNP TSC0020432
atgaaggtaaagg

SEQ ID NO: 80534 - DNA, 13 bp, Artificial Sequence
  Oligonucleotide for detection of SNP TSC0020432
cctttaccttcat

SEQ ID NO: 80535 - DNA, 13 bp, Artificial Sequence
  Oligonucleotide for detection of SNP TSC0020432
atgaagttaaagg

SEQ ID NO: 80536 - DNA, 13 bp, Artificial Sequence
  Oligonucleotide for detection of SNP TSC0020432
cctttaacttcat

SEQ ID NO: 80537 - DNA, 13 bp, Artificial Sequence
  Oligonucleotide for detection of SNP TSC0020433
gttgtgtgggggt

SEQ ID NO: 80538 - DNA, 13 bp, Artificial Sequence
  Oligonucleotide for detection of SNP TSC0020433
acccccacacaac

SEQ ID NO: 80539 - DNA, 13 bp, Artificial Sequence
  Oligonucleotide for detection of SNP TSC0020433
gttgtgggggggt

SEQ ID NO: 80540 - DNA, 13 bp, Artificial Sequence
  Oligonucleotide for detection of SNP TSC0020433
acccccccacaac

SEQ ID NO: 80541 - DNA, 13 bp, Artificial Sequence
  Oligonucleotide for detection of SNP TSC0020433
gtcgtgtgggggt

SEQ ID NO: 80542 - DNA, 13 bp, Artificial Sequence
  Oligonucleotide for detection of SNP TSC0020433
acccccacacgac

SEQ ID NO: 80543 - DNA, 13 bp, Artificial Sequence
  Oligonucleotide for detection of SNP TSC0020433
gtcgtgggggggt

SEQ ID NO: 80544 - DNA, 13 bp, Artificial Sequence
  Oligonucleotide for detection of SNP TSC0020433
acccccccacgac

SEQ ID NO: 80545 - DNA, 13 bp, Artificial Sequence
  Oligonucleotide for detection of SNP TSC0020433
gttgcgtgggggt

SEQ ID NO: 80546 - DNA, 13 bp, Artificial Sequence
  Oligonucleotide for detection of SNP TSC0020433
acccccacgcaac

SEQ ID NO: 80547 - DNA, 13 bp, Artificial Sequence
  Oligonucleotide for detection of SNP TSC0020433
gttgcgggggggt

SEQ ID NO: 80548 - DNA, 13 bp, Artificial Sequence
  Oligonucleotide for detection of SNP TSC0020433
acccccccgcaac

SEQ ID NO: 80549 - DNA, 13 bp, Artificial Sequence
  Oligonucleotide for detection of SNP TSC0020433
gttgtgcgggggt

SEQ ID NO: 80550 - DNA, 13 bp, Artificial Sequence
  Oligonucleotide for detection of SNP TSC0020433
acccccgcacaac

SEQ ID NO: 80551 - DNA, 13 bp, Artificial Sequence
  Oligonucleotide for detection of SNP TSC0020433
gtcgcgggggggt

SEQ ID NO: 80552 - DNA, 13 bp, Artificial Sequence
  Oligonucleotide for detection of SNP TSC0020433
acccccccgcgac

SEQ ID NO: 80553 - DNA, 13 bp, Artificial Sequence
  Oligonucleotide for detection of SNP TSC0020433
gtcgcgtgggggt

SEQ ID NO: 80554 - DNA, 13 bp, Artificial Sequence
  Oligonucleotide for detection of SNP TSC0020433
acccccacgcgac

SEQ ID NO: 80555 - DNA, 13 bp, Artificial Sequence
  Oligonucleotide for detection of SNP TSC0020433
gtcgtgcgggggt

SEQ ID NO: 80556 - DNA, 13 bp, Artificial Sequence
  Oligonucleotide for detection of SNP TSC0020433
acccccgcacgac

SEQ ID NO: 80557 - DNA, 13 bp, Artificial Sequence
  Oligonucleotide for detection of SNP TSC0020433
gttgcgcgggggt

SEQ ID NO: 80558 - DNA, 13 bp, Artificial Sequence
  Oligonucleotide for detection of SNP TSC0020433
acccccgcgcaac

SEQ ID NO: 80559 - DNA, 13 bp, Artificial Sequence
  Oligonucleotide for detection of SNP TSC0020433
gtcgcgcgggggt

SEQ ID NO: 80560 - DNA, 13 bp, Artificial Sequence
  Oligonucleotide for detection of SNP TSC0020433
acccccgcgcgac

SEQ ID NO: 80561 - DNA, 13 bp, Artificial Sequence
  Oligonucleotide for detection of SNP TSC0020433
atttttgtgtgay

SEQ ID NO: 80562 - DNA, 13 bp, Artificial Sequence
  Oligonucleotide for detection of SNP TSC0020433
rtcacacaaaaat

SEQ ID NO: 80563 - DNA, 13 bp, Artificial Sequence
  Oligonucleotide for detection of SNP TSC0020433
atttttttgtgay

SEQ ID NO: 80564 - DNA, 13 bp, Artificial Sequence
  Oligonucleotide for detection of SNP TSC0020433
rtcacaaaaaaat

SEQ ID NO: 80565 - DNA, 13 bp, Artificial Sequence
  Oligonucleotide for detection of SNP TSC0020433
attttcgtgtgay

SEQ ID NO: 80566 - DNA, 13 bp, Artificial Sequence
  Oligonucleotide for detection of SNP TSC0020433
rtcacacgaaaat

SEQ ID NO: 80567 - DNA, 13 bp, Artificial Sequence
  Oligonucleotide for detection of SNP TSC0020433
attttttcgtgay

SEQ ID NO: 80568 - DNA, 13 bp, Artificial Sequence
  Oligonucleotide for detection of SNP TSC0020433
rtcacgaaaaaat

SEQ ID NO: 80569 - DNA, 13 bp, Artificial Sequence
  Oligonucleotide for detection of SNP TSC0020433
atttttgcgtgay

SEQ ID NO: 80570 - DNA, 13 bp, Artificial Sequence
  Oligonucleotide for detection of SNP TSC0020433
rtcacgcaaaaat

SEQ ID NO: 80571 - DNA, 13 bp, Artificial Sequence
  Oligonucleotide for detection of SNP TSC0020433
atttttttgcgay

SEQ ID NO: 80572 - DNA, 13 bp, Artificial Sequence
  Oligonucleotide for detection of SNP TSC0020433
rtcgcaaaaaaat

SEQ ID NO: 80573 - DNA, 13 bp, Artificial Sequence
  Oligonucleotide for detection of SNP TSC0020433
atttttgtgcgay

SEQ ID NO: 80574 - DNA, 13 bp, Artificial Sequence
  Oligonucleotide for detection of SNP TSC0020433
rtcgcacaaaaat

SEQ ID NO: 80575 - DNA, 13 bp, Artificial Sequence
  Oligonucleotide for detection of SNP TSC0020433
attttttcgcgay

SEQ ID NO: 80576 - DNA, 13 bp, Artificial Sequence
  Oligonucleotide for detection of SNP TSC0020433
rtcgcgaaaaaat

SEQ ID NO: 80577 - DNA, 13 bp, Artificial Sequence
  Oligonucleotide for detection of SNP TSC0020433
attttcgcgtgay

SEQ ID NO: 80578 - DNA, 13 bp, Artificial Sequence
  Oligonucleotide for detection of SNP TSC0020433
rtcacgcgaaaat

SEQ ID NO: 80579 - DNA, 13 bp, Artificial Sequence
  Oligonucleotide for detection of SNP TSC0020433
attttcgtgcgay

SEQ ID NO: 80580 - DNA, 13 bp, Artificial Sequence
  Oligonucleotide for detection of SNP TSC0020433
rtcgcacgaaaat

SEQ ID NO: 80581 - DNA, 13 bp, Artificial Sequence
  Oligonucleotide for detection of SNP TSC0020433
atttttgcgcgay

SEQ ID NO: 80582 - DNA, 13 bp, Artificial Sequence
  Oligonucleotide for detection of SNP TSC0020433
rtcgcgcaaaaat

SEQ ID NO: 80583 - DNA, 13 bp, Artificial Sequence
  Oligonucleotide for detection of SNP TSC0020433
attttcgcgcgay

SEQ ID NO: 80584 - DNA, 13 bp, Artificial Sequence
  Oligonucleotide for detection of SNP TSC0020433
rtcgcgcgaaaat

SEQ ID NO: 80585 - DNA, 13 bp, Artificial Sequence
  Oligonucleotide for detection of SNP TSC0020434
tgttgtattgttg

SEQ ID NO: 80586 - DNA, 13 bp, Artificial Sequence
  Oligonucleotide for detection of SNP TSC0020434
caacaatacaaca

SEQ ID NO: 80587 - DNA, 13 bp, Artificial Sequence
  Oligonucleotide for detection of SNP TSC0020434
tgttgtgttgttg

SEQ ID NO: 80588 - DNA, 13 bp, Artificial Sequence
  Oligonucleotide for detection of SNP TSC0020434
caacaacacaaca

SEQ ID NO: 80589 - DNA, 13 bp, Artificial Sequence
  Oligonucleotide for detection of SNP TSC0020434
tgttgcgttgttg

SEQ ID NO: 80590 - DNA, 13 bp, Artificial Sequence
  Oligonucleotide for detection of SNP TSC0020434
caacaacgcaaca

SEQ ID NO: 80591 - DNA, 13 bp, Artificial Sequence
  Oligonucleotide for detection of SNP TSC0020434
tagtaatgtaata

SEQ ID NO: 80592 - DNA, 13 bp, Artificial Sequence
  Oligonucleotide for detection of SNP TSC0020434
tattacattacta

SEQ ID NO: 80593 - DNA, 13 bp, Artificial Sequence
  Oligonucleotide for detection of SNP TSC0020434
tagtaacgtaata

SEQ ID NO: 80594 - DNA, 13 bp, Artificial Sequence
  Oligonucleotide for detection of SNP TSC0020434
tattacgttacta

SEQ ID NO: 80595 - DNA, 13 bp, Artificial Sequence
  Oligonucleotide for detection of SNP TSC0020436
atatatagatgtg

SEQ ID NO: 80596 - DNA, 13 bp, Artificial Sequence
  Oligonucleotide for detection of SNP TSC0020436
cacatctatatat

SEQ ID NO: 80597 - DNA, 13 bp, Artificial Sequence
  Oligonucleotide for detection of SNP TSC0020436
atatatggatgtg

SEQ ID NO: 80598 - DNA, 13 bp, Artificial Sequence
  Oligonucleotide for detection of SNP TSC0020436
cacatccatatat

SEQ ID NO: 80599 - DNA, 13 bp, Artificial Sequence
  Oligonucleotide for detection of SNP TSC0020440
aaattaagtttag

SEQ ID NO: 80600 - DNA, 13 bp, Artificial Sequence
  Oligonucleotide for detection of SNP TSC0020440
ctaaacttaattt

SEQ ID NO: 80601 - DNA, 13 bp, Artificial Sequence
  Oligonucleotide for detection of SNP TSC0020440
aaattatgtttag

SEQ ID NO: 80602 - DNA, 13 bp, Artificial Sequence
  Oligonucleotide for detection of SNP TSC0020440
ctaaacataattt

SEQ ID NO: 80603 - DNA, 13 bp, Artificial Sequence
  Oligonucleotide for detection of SNP TSC0020440
aaattacgtttag

SEQ ID NO: 80604 - DNA, 13 bp, Artificial Sequence
  Oligonucleotide for detection of SNP TSC0020440
ctaaacgtaattt

SEQ ID NO: 80605 - DNA, 13 bp, Artificial Sequence
  Oligonucleotide for detection of SNP TSC0020440
ttaggtttagttt

SEQ ID NO: 80606 - DNA, 13 bp, Artificial Sequence
  Oligonucleotide for detection of SNP TSC0020440
aaactaaacctaa

SEQ ID NO: 80607 - DNA, 13 bp, Artificial Sequence
  Oligonucleotide for detection of SNP TSC0020440
ttaggtgtagttt

SEQ ID NO: 80608 - DNA, 13 bp, Artificial Sequence
  Oligonucleotide for detection of SNP TSC0020440
aaactacacctaa

SEQ ID NO: 80609 - DNA, 13 bp, Artificial Sequence
  Oligonucleotide for detection of SNP TSC0020440
ttaggcgtagttt

SEQ ID NO: 80610 - DNA, 13 bp, Artificial Sequence
  Oligonucleotide for detection of SNP TSC0020440
aaactacgcctaa

SEQ ID NO: 80611 - DNA, 13 bp, Artificial Sequence
  Oligonucleotide for detection of SNP TSC0020441
ggaaatatgatta

SEQ ID NO: 80612 - DNA, 13 bp, Artificial Sequence
  Oligonucleotide for detection of SNP TSC0020441
taatcatatttcc

SEQ ID NO: 80613 - DNA, 13 bp, Artificial Sequence
  Oligonucleotide for detection of SNP TSC0020441
ggaaatgtgatta

SEQ ID NO: 80614 - DNA, 13 bp, Artificial Sequence
  Oligonucleotide for detection of SNP TSC0020441
taatcacatttcc

SEQ ID NO: 80615 - DNA, 13 bp, Artificial Sequence
  Oligonucleotide for detection of SNP TSC0020442
agatggattttaa

SEQ ID NO: 80616 - DNA, 13 bp, Artificial Sequence
  Oligonucleotide for detection of SNP TSC0020442
ttaaaatccatct

SEQ ID NO: 80617 - DNA, 13 bp, Artificial Sequence
  Oligonucleotide for detection of SNP TSC0020442
agatgggttttaa

SEQ ID NO: 80618 - DNA, 13 bp, Artificial Sequence
  Oligonucleotide for detection of SNP TSC0020442
ttaaaacccatct

SEQ ID NO: 80619 - DNA, 13 bp, Artificial Sequence
  Oligonucleotide for detection of SNP TSC0020443
gtttatatgggty

SEQ ID NO: 80620 - DNA, 13 bp, Artificial Sequence
  Oligonucleotide for detection of SNP TSC0020443
racccatataaac

SEQ ID NO: 80621 - DNA, 13 bp, Artificial Sequence
  Oligonucleotide for detection of SNP TSC0020443
gtttatttgggty

SEQ ID NO: 80622 - DNA, 13 bp, Artificial Sequence
  Oligonucleotide for detection of SNP TSC0020443
racccaaataaac

SEQ ID NO: 80623 - DNA, 13 bp, Artificial Sequence
  Oligonucleotide for detection of SNP TSC0020443
ggtttatgtggay

SEQ ID NO: 80624 - DNA, 13 bp, Artificial Sequence
  Oligonucleotide for detection of SNP TSC0020443
rtccacataaacc

SEQ ID NO: 80625 - DNA, 13 bp, Artificial Sequence
  Oligonucleotide for detection of SNP TSC0020443
ggtttaagtggay

SEQ ID NO: 80626 - DNA, 13 bp, Artificial Sequence
  Oligonucleotide for detection of SNP TSC0020443
rtccacttaaacc

SEQ ID NO: 80627 - DNA, 13 bp, Artificial Sequence
  Oligonucleotide for detection of SNP TSC0020444
aaaaatatgtata

SEQ ID NO: 80628 - DNA, 13 bp, Artificial Sequence
  Oligonucleotide for detection of SNP TSC0020444
tatacatattttt

SEQ ID NO: 80629 - DNA, 13 bp, Artificial Sequence
  Oligonucleotide for detection of SNP TSC0020444
aaaaatgtgtata

SEQ ID NO: 80630 - DNA, 13 bp, Artificial Sequence
  Oligonucleotide for detection of SNP TSC0020444
tatacacattttt

SEQ ID NO: 80631 - DNA, 13 bp, Artificial Sequence
  Oligonucleotide for detection of SNP TSC0020445
tttgttgtttaag

SEQ ID NO: 80632 - DNA, 13 bp, Artificial Sequence
  Oligonucleotide for detection of SNP TSC0020445
cttaaacaacaaa

SEQ ID NO: 80633 - DNA, 13 bp, Artificial Sequence
  Oligonucleotide for detection of SNP TSC0020445
tttgttatttaag

SEQ ID NO: 80634 - DNA, 13 bp, Artificial Sequence
  Oligonucleotide for detection of SNP TSC0020445
cttaaataacaaa

SEQ ID NO: 80635 - DNA, 13 bp, Artificial Sequence
  Oligonucleotide for detection of SNP TSC0020445
tttgtcgtttaag

SEQ ID NO: 80636 - DNA, 13 bp, Artificial Sequence
  Oligonucleotide for detection of SNP TSC0020445
cttaaacgacaaa

SEQ ID NO: 80637 - DNA, 13 bp, Artificial Sequence
  Oligonucleotide for detection of SNP TSC0020446
atgagtggggtgg

SEQ ID NO: 80638 - DNA, 13 bp, Artificial Sequence
  Oligonucleotide for detection of SNP TSC0020446
ccaccccactcat

SEQ ID NO: 80639 - DNA, 13 bp, Artificial Sequence
  Oligonucleotide for detection of SNP TSC0020446
atgagtagggtgg

SEQ ID NO: 80640 - DNA, 13 bp, Artificial Sequence
  Oligonucleotide for detection of SNP TSC0020446
ccaccctactcat

SEQ ID NO: 80641 - DNA, 13 bp, Artificial Sequence
  Oligonucleotide for detection of SNP TSC0020446
atgagcggggtgg

SEQ ID NO: 80642 - DNA, 13 bp, Artificial Sequence
  Oligonucleotide for detection of SNP TSC0020446
ccaccccgctcat

SEQ ID NO: 80643 - DNA, 13 bp, Artificial Sequence
  Oligonucleotide for detection of SNP TSC0020447
aaatgtaatttat

SEQ ID NO: 80644 - DNA, 13 bp, Artificial Sequence
  Oligonucleotide for detection of SNP TSC0020447
ataaattacattt

SEQ ID NO: 80645 - DNA, 13 bp, Artificial Sequence
  Oligonucleotide for detection of SNP TSC0020447
aaatgtgatttat

SEQ ID NO: 80646 - DNA, 13 bp, Artificial Sequence
  Oligonucleotide for detection of SNP TSC0020447
ataaatcacattt

SEQ ID NO: 80647 - DNA, 13 bp, Artificial Sequence
  Oligonucleotide for detection of SNP TSC0020447
aaacgtaatttat

SEQ ID NO: 80648 - DNA, 13 bp, Artificial Sequence
  Oligonucleotide for detection of SNP TSC0020447
ataaattacgttt

SEQ ID NO: 80649 - DNA, 13 bp, Artificial Sequence
  Oligonucleotide for detection of SNP TSC0020447
aaacgtgatttat

SEQ ID NO: 80650 - DNA, 13 bp, Artificial Sequence
  Oligonucleotide for detection of SNP TSC0020447
ataaatcacgttt

SEQ ID NO: 80651 - DNA, 13 bp, Artificial Sequence
  Oligonucleotide for detection of SNP TSC0020448
tttatgtgttagg

SEQ ID NO: 80652 - DNA, 13 bp, Artificial Sequence
  Oligonucleotide for detection of SNP TSC0020448
cctaacacataaa

SEQ ID NO: 80653 - DNA, 13 bp, Artificial Sequence
  Oligonucleotide for detection of SNP TSC0020448
tttatgggttagg

SEQ ID NO: 80654 - DNA, 13 bp, Artificial Sequence
  Oligonucleotide for detection of SNP TSC0020448
cctaacccataaa

SEQ ID NO: 80655 - DNA, 13 bp, Artificial Sequence
  Oligonucleotide for detection of SNP TSC0020448
tttatgcgttagg

SEQ ID NO: 80656 - DNA, 13 bp, Artificial Sequence
  Oligonucleotide for detection of SNP TSC0020448
cctaacgcataaa

SEQ ID NO: 80657 - DNA, 13 bp, Artificial Sequence
  Oligonucleotide for detection of SNP TSC0020448
tttagtttatgag

SEQ ID NO: 80658 - DNA, 13 bp, Artificial Sequence
  Oligonucleotide for detection of SNP TSC0020448
ctcataaactaaa

SEQ ID NO: 80659 - DNA, 13 bp, Artificial Sequence
  Oligonucleotide for detection of SNP TSC0020449
taattttagaata

SEQ ID NO: 80660 - DNA, 13 bp, Artificial Sequence
  Oligonucleotide for detection of SNP TSC0020449
tattctaaaatta

SEQ ID NO: 80661 - DNA, 13 bp, Artificial Sequence
  Oligonucleotide for detection of SNP TSC0020449
taatttgagaata

SEQ ID NO: 80662 - DNA, 13 bp, Artificial Sequence
  Oligonucleotide for detection of SNP TSC0020449
tattctcaaatta

SEQ ID NO: 80663 - DNA, 13 bp, Artificial Sequence
  Oligonucleotide for detection of SNP TSC0020449
taattcgagaata

SEQ ID NO: 80664 - DNA, 13 bp, Artificial Sequence
  Oligonucleotide for detection of SNP TSC0020449
tattctcgaatta

SEQ ID NO: 80665 - DNA, 13 bp, Artificial Sequence
  Oligonucleotide for detection of SNP TSC0020449
tgttttggggttg

SEQ ID NO: 80666 - DNA, 13 bp, Artificial Sequence
  Oligonucleotide for detection of SNP TSC0020449
caaccccaaaaca

SEQ ID NO: 80667 - DNA, 13 bp, Artificial Sequence
  Oligonucleotide for detection of SNP TSC0020449
tgtttttgggttg

SEQ ID NO: 80668 - DNA, 13 bp, Artificial Sequence
  Oligonucleotide for detection of SNP TSC0020449
caacccaaaaaca

SEQ ID NO: 80669 - DNA, 13 bp, Artificial Sequence
  Oligonucleotide for detection of SNP TSC0020449
tgttttcgggttg

SEQ ID NO: 80670 - DNA, 13 bp, Artificial Sequence
  Oligonucleotide for detection of SNP TSC0020449
caacccgaaaaca

SEQ ID NO: 80671 - DNA, 13 bp, Artificial Sequence
  Oligonucleotide for detection of SNP TSC0020450
gggttttgtggty

SEQ ID NO: 80672 - DNA, 13 bp, Artificial Sequence
  Oligonucleotide for detection of SNP TSC0020450
raccacaaaaccc

SEQ ID NO: 80673 - DNA, 13 bp, Artificial Sequence
  Oligonucleotide for detection of SNP TSC0020450
gggtttcgtggty

SEQ ID NO: 80674 - DNA, 13 bp, Artificial Sequence
  Oligonucleotide for detection of SNP TSC0020450
raccacgaaaccc

SEQ ID NO: 80675 - DNA, 13 bp, Artificial Sequence
  Oligonucleotide for detection of SNP TSC0020450
gattatgaaatty

SEQ ID NO: 80676 - DNA, 13 bp, Artificial Sequence
  Oligonucleotide for detection of SNP TSC0020450
raatttcataatc

SEQ ID NO: 80677 - DNA, 13 bp, Artificial Sequence
  Oligonucleotide for detection of SNP TSC0020450
gattataaaatty

SEQ ID NO: 80678 - DNA, 13 bp, Artificial Sequence
  Oligonucleotide for detection of SNP TSC0020450
raattttataatc

SEQ ID NO: 80679 - DNA, 13 bp, Artificial Sequence
  Oligonucleotide for detection of SNP TSC0020450
gattacgaaatty

SEQ ID NO: 80680 - DNA, 13 bp, Artificial Sequence
  Oligonucleotide for detection of SNP TSC0020450
raatttcgtaatc

SEQ ID NO: 80681 - DNA, 13 bp, Artificial Sequence
  Oligonucleotide for detection of SNP TSC0020451
tttttgtgtttgg

SEQ ID NO: 80682 - DNA, 13 bp, Artificial Sequence
  Oligonucleotide for detection of SNP TSC0020451
ccaaacacaaaaa

SEQ ID NO: 80683 - DNA, 13 bp, Artificial Sequence
  Oligonucleotide for detection of SNP TSC0020451
tttttgggtttgg

SEQ ID NO: 80684 - DNA, 13 bp, Artificial Sequence
  Oligonucleotide for detection of SNP TSC0020451
ccaaacccaaaaa

SEQ ID NO: 80685 - DNA, 13 bp, Artificial Sequence
  Oligonucleotide for detection of SNP TSC0020451
ttttcgtgtttgg

SEQ ID NO: 80686 - DNA, 13 bp, Artificial Sequence
  Oligonucleotide for detection of SNP TSC0020451
ccaaacacgaaaa

SEQ ID NO: 80687 - DNA, 13 bp, Artificial Sequence
  Oligonucleotide for detection of SNP TSC0020451
ttttcgggtttgg

SEQ ID NO: 80688 - DNA, 13 bp, Artificial Sequence
  Oligonucleotide for detection of SNP TSC0020451
ccaaacccgaaaa

SEQ ID NO: 80689 - DNA, 13 bp, Artificial Sequence
  Oligonucleotide for detection of SNP TSC0020451
tttttgcgtttgg

SEQ ID NO: 80690 - DNA, 13 bp, Artificial Sequence
  Oligonucleotide for detection of SNP TSC0020451
ccaaacgcaaaaa

SEQ ID NO: 80691 - DNA, 13 bp, Artificial Sequence
  Oligonucleotide for detection of SNP TSC0020451
ttttcgcgtttgg

SEQ ID NO: 80692 - DNA, 13 bp, Artificial Sequence
  Oligonucleotide for detection of SNP TSC0020451
ccaaacgcgaaaa

SEQ ID NO: 80693 - DNA, 13 bp, Artificial Sequence
  Oligonucleotide for detection of SNP TSC0020451
ttaggtgtggagg

SEQ ID NO: 80694 - DNA, 13 bp, Artificial Sequence
  Oligonucleotide for detection of SNP TSC0020451
cctccacacctaa

SEQ ID NO: 80695 - DNA, 13 bp, Artificial Sequence
  Oligonucleotide for detection of SNP TSC0020451
ttaggtttggagg

SEQ ID NO: 80696 - DNA, 13 bp, Artificial Sequence
  Oligonucleotide for detection of SNP TSC0020451
cctccaaacctaa

SEQ ID NO: 80697 - DNA, 13 bp, Artificial Sequence
  Oligonucleotide for detection of SNP TSC0020451
ttaggcgtggagg

SEQ ID NO: 80698 - DNA, 13 bp, Artificial Sequence
  Oligonucleotide for detection of SNP TSC0020451
cctccacgcctaa

SEQ ID NO: 80699 - DNA, 13 bp, Artificial Sequence
  Oligonucleotide for detection of SNP TSC0020451
ttaggttcggagg

SEQ ID NO: 80700 - DNA, 13 bp, Artificial Sequence
  Oligonucleotide for detection of SNP TSC0020451
cctccgaacctaa

SEQ ID NO: 80701 - DNA, 13 bp, Artificial Sequence
  Oligonucleotide for detection of SNP TSC0020451
ttaggtgcggagg

SEQ ID NO: 80702 - DNA, 13 bp, Artificial Sequence
  Oligonucleotide for detection of SNP TSC0020451
cctccgcacctaa

SEQ ID NO: 80703 - DNA, 13 bp, Artificial Sequence
  Oligonucleotide for detection of SNP TSC0020451
ttaggcgcggagg

SEQ ID NO: 80704 - DNA, 13 bp, Artificial Sequence
  Oligonucleotide for detection of SNP TSC0020451
cctccgcgcctaa

SEQ ID NO: 80705 - DNA, 13 bp, Artificial Sequence
  Oligonucleotide for detection of SNP TSC0020452
atagagtgaattg

SEQ ID NO: 80706 - DNA, 13 bp, Artificial Sequence
  Oligonucleotide for detection of SNP TSC0020452
caattcactctat

SEQ ID NO: 80707 - DNA, 13 bp, Artificial Sequence
  Oligonucleotide for detection of SNP TSC0020452
atagagcgaattg

SEQ ID NO: 80708 - DNA, 13 bp, Artificial Sequence
  Oligonucleotide for detection of SNP TSC0020452
caattcgctctat

SEQ ID NO: 80709 - DNA, 13 bp, Artificial Sequence
  Oligonucleotide for detection of SNP TSC0020453
tgggttattgtga

SEQ ID NO: 80710 - DNA, 13 bp, Artificial Sequence
  Oligonucleotide for detection of SNP TSC0020453
tcacaataaccca

SEQ ID NO: 80711 - DNA, 13 bp, Artificial Sequence
  Oligonucleotide for detection of SNP TSC0020453
tgggttgttgtga

SEQ ID NO: 80712 - DNA, 13 bp, Artificial Sequence
  Oligonucleotide for detection of SNP TSC0020453
tcacaacaaccca

SEQ ID NO: 80713 - DNA, 13 bp, Artificial Sequence
  Oligonucleotide for detection of SNP TSC0020453
tgggtcgttgtga

SEQ ID NO: 80714 - DNA, 13 bp, Artificial Sequence
  Oligonucleotide for detection of SNP TSC0020453
tcacaacgaccca

SEQ ID NO: 80715 - DNA, 13 bp, Artificial Sequence
  Oligonucleotide for detection of SNP TSC0020453
ttatagtgattta

SEQ ID NO: 80716 - DNA, 13 bp, Artificial Sequence
  Oligonucleotide for detection of SNP TSC0020453
taaatcactataa

SEQ ID NO: 80717 - DNA, 13 bp, Artificial Sequence
  Oligonucleotide for detection of SNP TSC0020453
ttatagcgattta

SEQ ID NO: 80718 - DNA, 13 bp, Artificial Sequence
  Oligonucleotide for detection of SNP TSC0020453
taaatcgctataa

SEQ ID NO: 80719 - DNA, 13 bp, Artificial Sequence
  Oligonucleotide for detection of SNP TSC0020454
atgagaataagty

SEQ ID NO: 80720 - DNA, 13 bp, Artificial Sequence
  Oligonucleotide for detection of SNP TSC0020454
racttattctcat

SEQ ID NO: 80721 - DNA, 13 bp, Artificial Sequence
  Oligonucleotide for detection of SNP TSC0020454
atgagattaagty

SEQ ID NO: 80722 - DNA, 13 bp, Artificial Sequence
  Oligonucleotide for detection of SNP TSC0020454
racttaatctcat

SEQ ID NO: 80723 - DNA, 13 bp, Artificial Sequence
  Oligonucleotide for detection of SNP TSC0020454
ggtttgtttttat

SEQ ID NO: 80724 - DNA, 13 bp, Artificial Sequence
  Oligonucleotide for detection of SNP TSC0020454
ataaaaacaaacc

SEQ ID NO: 80725 - DNA, 13 bp, Artificial Sequence
  Oligonucleotide for detection of SNP TSC0020454
ggtttggttttat

SEQ ID NO: 80726 - DNA, 13 bp, Artificial Sequence
  Oligonucleotide for detection of SNP TSC0020454
ataaaaccaaacc

SEQ ID NO: 80727 - DNA, 13 bp, Artificial Sequence
  Oligonucleotide for detection of SNP TSC0020455
ttataggagaggy

SEQ ID NO: 80728 - DNA, 13 bp, Artificial Sequence
  Oligonucleotide for detection of SNP TSC0020455
rcctctcctataa

SEQ ID NO: 80729 - DNA, 13 bp, Artificial Sequence
  Oligonucleotide for detection of SNP TSC0020455
ttatagaagaggy

SEQ ID NO: 80730 - DNA, 13 bp, Artificial Sequence
  Oligonucleotide for detection of SNP TSC0020455
rcctcttctataa

SEQ ID NO: 80731 - DNA, 13 bp, Artificial Sequence
  Oligonucleotide for detection of SNP TSC0020456
tttatagttaagy

SEQ ID NO: 80732 - DNA, 13 bp, Artificial Sequence
  Oligonucleotide for detection of SNP TSC0020456
rcttaactataaa

SEQ ID NO: 80733 - DNA, 13 bp, Artificial Sequence
  Oligonucleotide for detection of SNP TSC0020456
tttataattaagy

SEQ ID NO: 80734 - DNA, 13 bp, Artificial Sequence
  Oligonucleotide for detection of SNP TSC0020456
rcttaattataaa

SEQ ID NO: 80735 - DNA, 13 bp, Artificial Sequence
  Oligonucleotide for detection of SNP TSC0020457
gagttgggatata

SEQ ID NO: 80736 - DNA, 13 bp, Artificial Sequence
  Oligonucleotide for detection of SNP TSC0020457
tatatcccaactc

SEQ ID NO: 80737 - DNA, 13 bp, Artificial Sequence
  Oligonucleotide for detection of SNP TSC0020457
gagttgtgatata

SEQ ID NO: 80738 - DNA, 13 bp, Artificial Sequence
  Oligonucleotide for detection of SNP TSC0020457
tatatcacaactc

SEQ ID NO: 80739 - DNA, 13 bp, Artificial Sequence
  Oligonucleotide for detection of SNP TSC0020457
tgtattttagtty

SEQ ID NO: 80740 - DNA, 13 bp, Artificial Sequence
  Oligonucleotide for detection of SNP TSC0020457
raactaaaataca

SEQ ID NO: 80741 - DNA, 13 bp, Artificial Sequence
  Oligonucleotide for detection of SNP TSC0020457
tgtattatagtty

SEQ ID NO: 80742 - DNA, 13 bp, Artificial Sequence
  Oligonucleotide for detection of SNP TSC0020457
raactataataca

SEQ ID NO: 80743 - DNA, 13 bp, Artificial Sequence
  Oligonucleotide for detection of SNP TSC0020458
tgaggtagtggay

SEQ ID NO: 80744 - DNA, 13 bp, Artificial Sequence
  Oligonucleotide for detection of SNP TSC0020458
rtccactacctca

SEQ ID NO: 80745 - DNA, 13 bp, Artificial Sequence
  Oligonucleotide for detection of SNP TSC0020458
tgaggttgtggay

SEQ ID NO: 80746 - DNA, 13 bp, Artificial Sequence
  Oligonucleotide for detection of SNP TSC0020458
rtccacaacctca

SEQ ID NO: 80747 - DNA, 13 bp, Artificial Sequence
  Oligonucleotide for detection of SNP TSC0020458
cgaggtagtggay

SEQ ID NO: 80748 - DNA, 13 bp, Artificial Sequence
  Oligonucleotide for detection of SNP TSC0020458
rtccactacctcg

SEQ ID NO: 80749 - DNA, 13 bp, Artificial Sequence
  Oligonucleotide for detection of SNP TSC0020458
cgaggttgtggay

SEQ ID NO: 80750 - DNA, 13 bp, Artificial Sequence
  Oligonucleotide for detection of SNP TSC0020458
rtccacaacctcg

SEQ ID NO: 80751 - DNA, 13 bp, Artificial Sequence
  Oligonucleotide for detection of SNP TSC0020458
gtttattgttttg

SEQ ID NO: 80752 - DNA, 13 bp, Artificial Sequence
  Oligonucleotide for detection of SNP TSC0020458
caaaacaataaac

SEQ ID NO: 80753 - DNA, 13 bp, Artificial Sequence
  Oligonucleotide for detection of SNP TSC0020458
gtttatagttttg

SEQ ID NO: 80754 - DNA, 13 bp, Artificial Sequence
  Oligonucleotide for detection of SNP TSC0020458
caaaactataaac

SEQ ID NO: 80755 - DNA, 13 bp, Artificial Sequence
  Oligonucleotide for detection of SNP TSC0020458
gtttattgtttcg

SEQ ID NO: 80756 - DNA, 13 bp, Artificial Sequence
  Oligonucleotide for detection of SNP TSC0020458
cgaaacaataaac

SEQ ID NO: 80757 - DNA, 13 bp, Artificial Sequence
  Oligonucleotide for detection of SNP TSC0020458
gtttatagtttcg

SEQ ID NO: 80758 - DNA, 13 bp, Artificial Sequence
  Oligonucleotide for detection of SNP TSC0020458
cgaaactataaac

SEQ ID NO: 80759 - DNA, 13 bp, Artificial Sequence
  Oligonucleotide for detection of SNP TSC0020459
ggtttaaaaatgy

SEQ ID NO: 80760 - DNA, 13 bp, Artificial Sequence
  Oligonucleotide for detection of SNP TSC0020459
rcatttttaaacc

SEQ ID NO: 80761 - DNA, 13 bp, Artificial Sequence
  Oligonucleotide for detection of SNP TSC0020459
ggtttagaaatgy

SEQ ID NO: 80762 - DNA, 13 bp, Artificial Sequence
  Oligonucleotide for detection of SNP TSC0020459
rcatttctaaacc

SEQ ID NO: 80763 - DNA, 13 bp, Artificial Sequence
  Oligonucleotide for detection of SNP TSC0020460
ttgttgtttttty

SEQ ID NO: 80764 - DNA, 13 bp, Artificial Sequence
  Oligonucleotide for detection of SNP TSC0020460
raaaaaacaacaa

SEQ ID NO: 80765 - DNA, 13 bp, Artificial Sequence
  Oligonucleotide for detection of SNP TSC0020460
tcgttgattttty

SEQ ID NO: 80766 - DNA, 13 bp, Artificial Sequence
  Oligonucleotide for detection of SNP TSC0020460
raaaaatcaacga

SEQ ID NO: 80767 - DNA, 13 bp, Artificial Sequence
  Oligonucleotide for detection of SNP TSC0020460
tcgttgtttttty

SEQ ID NO: 80768 - DNA, 13 bp, Artificial Sequence
  Oligonucleotide for detection of SNP TSC0020460
raaaaaacaacga

SEQ ID NO: 80769 - DNA, 13 bp, Artificial Sequence
  Oligonucleotide for detection of SNP TSC0020460
ttgtcgattttty

SEQ ID NO: 80770 - DNA, 13 bp, Artificial Sequence
  Oligonucleotide for detection of SNP TSC0020460
raaaaatcgacaa

SEQ ID NO: 80771 - DNA, 13 bp, Artificial Sequence
  Oligonucleotide for detection of SNP TSC0020460
ttgtcgtttttty

SEQ ID NO: 80772 - DNA, 13 bp, Artificial Sequence
  Oligonucleotide for detection of SNP TSC0020460
raaaaaacgacaa

SEQ ID NO: 80773 - DNA, 13 bp, Artificial Sequence
  Oligonucleotide for detection of SNP TSC0020460
tcgtcgattttty

SEQ ID NO: 80774 - DNA, 13 bp, Artificial Sequence
  Oligonucleotide for detection of SNP TSC0020460
raaaaatcgacga

SEQ ID NO: 80775 - DNA, 13 bp, Artificial Sequence
  Oligonucleotide for detection of SNP TSC0020460
tcgtcgtttttty

SEQ ID NO: 80776 - DNA, 13 bp, Artificial Sequence
  Oligonucleotide for detection of SNP TSC0020460
raaaaaacgacga

SEQ ID NO: 80777 - DNA, 13 bp, Artificial Sequence
  Oligonucleotide for detection of SNP TSC0020460
ggggagttggtgg

SEQ ID NO: 80778 - DNA, 13 bp, Artificial Sequence
  Oligonucleotide for detection of SNP TSC0020460
ccaccaactcccc

SEQ ID NO: 80779 - DNA, 13 bp, Artificial Sequence
  Oligonucleotide for detection of SNP TSC0020460
ggggaggtggtgg

SEQ ID NO: 80780 - DNA, 13 bp, Artificial Sequence
  Oligonucleotide for detection of SNP TSC0020460
ccaccacctcccc

SEQ ID NO: 80781 - DNA, 13 bp, Artificial Sequence
  Oligonucleotide for detection of SNP TSC0020460
ggggagtcggtgg

SEQ ID NO: 80782 - DNA, 13 bp, Artificial Sequence
  Oligonucleotide for detection of SNP TSC0020460
ccaccgactcccc

SEQ ID NO: 80783 - DNA, 13 bp, Artificial Sequence
  Oligonucleotide for detection of SNP TSC0020460
ggggaggcggtgg

SEQ ID NO: 80784 - DNA, 13 bp, Artificial Sequence
  Oligonucleotide for detection of SNP TSC0020460
ccaccgcctcccc

SEQ ID NO: 80785 - DNA, 13 bp, Artificial Sequence
  Oligonucleotide for detection of SNP TSC0020460
ggggagttggcgg

SEQ ID NO: 80786 - DNA, 13 bp, Artificial Sequence
  Oligonucleotide for detection of SNP TSC0020460
ccgccaactcccc

SEQ ID NO: 80787 - DNA, 13 bp, Artificial Sequence
  Oligonucleotide for detection of SNP TSC0020460
ggggaggtggcgg

SEQ ID NO: 80788 - DNA, 13 bp, Artificial Sequence
  Oligonucleotide for detection of SNP TSC0020460
ccgccacctcccc

SEQ ID NO: 80789 - DNA, 13 bp, Artificial Sequence
  Oligonucleotide for detection of SNP TSC0020460
ggggagtcggcgg

SEQ ID NO: 80790 - DNA, 13 bp, Artificial Sequence
  Oligonucleotide for detection of SNP TSC0020460
ccgccgactcccc

SEQ ID NO: 80791 - DNA, 13 bp, Artificial Sequence
  Oligonucleotide for detection of SNP TSC0020460
ggggaggcggcgg

SEQ ID NO: 80792 - DNA, 13 bp, Artificial Sequence
  Oligonucleotide for detection of SNP TSC0020460
ccgccgcctcccc

SEQ ID NO: 80793 - DNA, 13 bp, Artificial Sequence
  Oligonucleotide for detection of SNP TSC0020464
ggtatttgatata

SEQ ID NO: 80794 - DNA, 13 bp, Artificial Sequence
  Oligonucleotide for detection of SNP TSC0020464
tatatcaaatacc

SEQ ID NO: 80795 - DNA, 13 bp, Artificial Sequence
  Oligonucleotide for detection of SNP TSC0020464
ggtattcgatata

SEQ ID NO: 80796 - DNA, 13 bp, Artificial Sequence
  Oligonucleotide for detection of SNP TSC0020464
tatatcgaatacc

SEQ ID NO: 80797 - DNA, 13 bp, Artificial Sequence
  Oligonucleotide for detection of SNP TSC0020464
tgtattggatgty

SEQ ID NO: 80798 - DNA, 13 bp, Artificial Sequence
  Oligonucleotide for detection of SNP TSC0020464
racatccaataca

SEQ ID NO: 80799 - DNA, 13 bp, Artificial Sequence
  Oligonucleotide for detection of SNP TSC0020464
tgtattagatgty

SEQ ID NO: 80800 - DNA, 13 bp, Artificial Sequence
  Oligonucleotide for detection of SNP TSC0020464
racatctaataca

SEQ ID NO: 80801 - DNA, 13 bp, Artificial Sequence
  Oligonucleotide for detection of SNP TSC0020464
tgtatcggatgty

SEQ ID NO: 80802 - DNA, 13 bp, Artificial Sequence
  Oligonucleotide for detection of SNP TSC0020464
racatccgataca

SEQ ID NO: 80803 - DNA, 13 bp, Artificial Sequence
  Oligonucleotide for detection of SNP TSC0020465
ttatgaagaatta

SEQ ID NO: 80804 - DNA, 13 bp, Artificial Sequence
  Oligonucleotide for detection of SNP TSC0020465
taattcttcataa

SEQ ID NO: 80805 - DNA, 13 bp, Artificial Sequence
  Oligonucleotide for detection of SNP TSC0020465
ttatgaggaatta

SEQ ID NO: 80806 - DNA, 13 bp, Artificial Sequence
  Oligonucleotide for detection of SNP TSC0020465
taattcctcataa

SEQ ID NO: 80807 - DNA, 13 bp, Artificial Sequence
  Oligonucleotide for detection of SNP TSC0020466
ggtttgggtttag

SEQ ID NO: 80808 - DNA, 13 bp, Artificial Sequence
  Oligonucleotide for detection of SNP TSC0020466
ctaaacccaaacc

SEQ ID NO: 80809 - DNA, 13 bp, Artificial Sequence
  Oligonucleotide for detection of SNP TSC0020466
ggtttgtgtttag

SEQ ID NO: 80810 - DNA, 13 bp, Artificial Sequence
  Oligonucleotide for detection of SNP TSC0020466
ctaaacacaaacc

SEQ ID NO: 80811 - DNA, 13 bp, Artificial Sequence
  Oligonucleotide for detection of SNP TSC0020466
ttgaatttaagty

SEQ ID NO: 80812 - DNA, 13 bp, Artificial Sequence
  Oligonucleotide for detection of SNP TSC0020466
racttaaattcaa

SEQ ID NO: 80813 - DNA, 13 bp, Artificial Sequence
  Oligonucleotide for detection of SNP TSC0020466
ttgaatataagty

SEQ ID NO: 80814 - DNA, 13 bp, Artificial Sequence
  Oligonucleotide for detection of SNP TSC0020466
racttatattcaa

SEQ ID NO: 80815 - DNA, 13 bp, Artificial Sequence
  Oligonucleotide for detection of SNP TSC0020467
gttttatgggtgt

SEQ ID NO: 80816 - DNA, 13 bp, Artificial Sequence
  Oligonucleotide for detection of SNP TSC0020467
acacccataaaac

SEQ ID NO: 80817 - DNA, 13 bp, Artificial Sequence
  Oligonucleotide for detection of SNP TSC0020467
gttttacgggtgt

SEQ ID NO: 80818 - DNA, 13 bp, Artificial Sequence
  Oligonucleotide for detection of SNP TSC0020467
acacccgtaaaac

SEQ ID NO: 80819 - DNA, 13 bp, Artificial Sequence
  Oligonucleotide for detection of SNP TSC0020467
atatttgtggagy

SEQ ID NO: 80820 - DNA, 13 bp, Artificial Sequence
  Oligonucleotide for detection of SNP TSC0020467
rctccacaaatat

SEQ ID NO: 80821 - DNA, 13 bp, Artificial Sequence
  Oligonucleotide for detection of SNP TSC0020467
atattcgtggagy

SEQ ID NO: 80822 - DNA, 13 bp, Artificial Sequence
  Oligonucleotide for detection of SNP TSC0020467
rctccacgaatat

SEQ ID NO: 80823 - DNA, 13 bp, Artificial Sequence
  Oligonucleotide for detection of SNP TSC0020470
ggagaagttagta

SEQ ID NO: 80824 - DNA, 13 bp, Artificial Sequence
  Oligonucleotide for detection of SNP TSC0020470
tactaacttctcc

SEQ ID NO: 80825 - DNA, 13 bp, Artificial Sequence
  Oligonucleotide for detection of SNP TSC0020470
ggagaaattagta

SEQ ID NO: 80826 - DNA, 13 bp, Artificial Sequence
  Oligonucleotide for detection of SNP TSC0020470
tactaatttctcc

SEQ ID NO: 80827 - DNA, 13 bp, Artificial Sequence
  Oligonucleotide for detection of SNP TSC0020471
gttttttgtagay

SEQ ID NO: 80828 - DNA, 13 bp, Artificial Sequence
  Oligonucleotide for detection of SNP TSC0020471
rtctacaaaaaac

SEQ ID NO: 80829 - DNA, 13 bp, Artificial Sequence
  Oligonucleotide for detection of SNP TSC0020471
gtttttcgtagay

SEQ ID NO: 80830 - DNA, 13 bp, Artificial Sequence
  Oligonucleotide for detection of SNP TSC0020471
rtctacgaaaaac

SEQ ID NO: 80831 - DNA, 13 bp, Artificial Sequence
  Oligonucleotide for detection of SNP TSC0020471
gtttatgagaagy

SEQ ID NO: 80832 - DNA, 13 bp, Artificial Sequence
  Oligonucleotide for detection of SNP TSC0020471
rcttctcataaac

SEQ ID NO: 80833 - DNA, 13 bp, Artificial Sequence
  Oligonucleotide for detection of SNP TSC0020471
gtttataagaagy

SEQ ID NO: 80834 - DNA, 13 bp, Artificial Sequence
  Oligonucleotide for detection of SNP TSC0020471
rcttcttataaac

SEQ ID NO: 80835 - DNA, 13 bp, Artificial Sequence
  Oligonucleotide for detection of SNP TSC0020471
gtttacgagaagy

SEQ ID NO: 80836 - DNA, 13 bp, Artificial Sequence
  Oligonucleotide for detection of SNP TSC0020471
rcttctcgtaaac

SEQ ID NO: 80837 - DNA, 13 bp, Artificial Sequence
  Oligonucleotide for detection of SNP TSC0020473
ttttaggttaggt

SEQ ID NO: 80838 - DNA, 13 bp, Artificial Sequence
  Oligonucleotide for detection of SNP TSC0020473
acctaacctaaaa

SEQ ID NO: 80839 - DNA, 13 bp, Artificial Sequence
  Oligonucleotide for detection of SNP TSC0020473
ttttagattaggt

SEQ ID NO: 80840 - DNA, 13 bp, Artificial Sequence
  Oligonucleotide for detection of SNP TSC0020473
acctaatctaaaa

SEQ ID NO: 80841 - DNA, 13 bp, Artificial Sequence
  Oligonucleotide for detection of SNP TSC0020474
tatatagaaatta

SEQ ID NO: 80842 - DNA, 13 bp, Artificial Sequence
  Oligonucleotide for detection of SNP TSC0020474
taatttctatata

SEQ ID NO: 80843 - DNA, 13 bp, Artificial Sequence
  Oligonucleotide for detection of SNP TSC0020474
tatataaaaatta

SEQ ID NO: 80844 - DNA, 13 bp, Artificial Sequence
  Oligonucleotide for detection of SNP TSC0020474
taatttttatata

SEQ ID NO: 80845 - DNA, 13 bp, Artificial Sequence
  Oligonucleotide for detection of SNP TSC0020475
ttgttagtgtaga

SEQ ID NO: 80846 - DNA, 13 bp, Artificial Sequence
  Oligonucleotide for detection of SNP TSC0020475
tctacactaacaa

SEQ ID NO: 80847 - DNA, 13 bp, Artificial Sequence
  Oligonucleotide for detection of SNP TSC0020475
ttgttaatgtaga

SEQ ID NO: 80848 - DNA, 13 bp, Artificial Sequence
  Oligonucleotide for detection of SNP TSC0020475
tctacattaacaa

SEQ ID NO: 80849 - DNA, 13 bp, Artificial Sequence
  Oligonucleotide for detection of SNP TSC0020477
aaggtggatgagt

SEQ ID NO: 80850 - DNA, 13 bp, Artificial Sequence
  Oligonucleotide for detection of SNP TSC0020477
actcatccacctt

SEQ ID NO: 80851 - DNA, 13 bp, Artificial Sequence
  Oligonucleotide for detection of SNP TSC0020477
aaggtgaatgagt

SEQ ID NO: 80852 - DNA, 13 bp, Artificial Sequence
  Oligonucleotide for detection of SNP TSC0020477
actcattcacctt

SEQ ID NO: 80853 - DNA, 13 bp, Artificial Sequence
  Oligonucleotide for detection of SNP TSC0020479
ggggtagagatag

SEQ ID NO: 80854 - DNA, 13 bp, Artificial Sequence
  Oligonucleotide for detection of SNP TSC0020479
ctatctctacccc

SEQ ID NO: 80855 - DNA, 13 bp, Artificial Sequence
  Oligonucleotide for detection of SNP TSC0020479
ggggtaaagatag

SEQ ID NO: 80856 - DNA, 13 bp, Artificial Sequence
  Oligonucleotide for detection of SNP TSC0020479
ctatctttacccc

SEQ ID NO: 80857 - DNA, 13 bp, Artificial Sequence
  Oligonucleotide for detection of SNP TSC0020486
aaattgtgtttta

SEQ ID NO: 80858 - DNA, 13 bp, Artificial Sequence
  Oligonucleotide for detection of SNP TSC0020486
taaaacacaattt

SEQ ID NO: 80859 - DNA, 13 bp, Artificial Sequence
  Oligonucleotide for detection of SNP TSC0020486
aaattgcgtttta

SEQ ID NO: 80860 - DNA, 13 bp, Artificial Sequence
  Oligonucleotide for detection of SNP TSC0020486
taaaacgcaattt

SEQ ID NO: 80861 - DNA, 13 bp, Artificial Sequence
  Oligonucleotide for detection of SNP TSC0020486
tagaatgtagttt

SEQ ID NO: 80862 - DNA, 13 bp, Artificial Sequence
  Oligonucleotide for detection of SNP TSC0020486
aaactacattcta

SEQ ID NO: 80863 - DNA, 13 bp, Artificial Sequence
  Oligonucleotide for detection of SNP TSC0020486
tagaatatagttt

SEQ ID NO: 80864 - DNA, 13 bp, Artificial Sequence
  Oligonucleotide for detection of SNP TSC0020486
aaactatattcta

SEQ ID NO: 80865 - DNA, 13 bp, Artificial Sequence
  Oligonucleotide for detection of SNP TSC0020486
tagaacgtagttt

SEQ ID NO: 80866 - DNA, 13 bp, Artificial Sequence
  Oligonucleotide for detection of SNP TSC0020486
aaactacgttcta

SEQ ID NO: 80867 - DNA, 13 bp, Artificial Sequence
  Oligonucleotide for detection of SNP TSC0020490
tgttttgttttga

SEQ ID NO: 80868 - DNA, 13 bp, Artificial Sequence
  Oligonucleotide for detection of SNP TSC0020490
tcaaaacaaaaca

SEQ ID NO: 80869 - DNA, 13 bp, Artificial Sequence
  Oligonucleotide for detection of SNP TSC0020490
tgtttttttttga

SEQ ID NO: 80870 - DNA, 13 bp, Artificial Sequence
  Oligonucleotide for detection of SNP TSC0020490
tcaaaaaaaaaca

SEQ ID NO: 80871 - DNA, 13 bp, Artificial Sequence
  Oligonucleotide for detection of SNP TSC0020490
tgtttcgttttga

SEQ ID NO: 80872 - DNA, 13 bp, Artificial Sequence
  Oligonucleotide for detection of SNP TSC0020490
tcaaaacgaaaca

SEQ ID NO: 80873 - DNA, 13 bp, Artificial Sequence
  Oligonucleotide for detection of SNP TSC0020490
ttaggatgggata

SEQ ID NO: 80874 - DNA, 13 bp, Artificial Sequence
  Oligonucleotide for detection of SNP TSC0020490
tatcccatcctaa

SEQ ID NO: 80875 - DNA, 13 bp, Artificial Sequence
  Oligonucleotide for detection of SNP TSC0020490
ttaggaagggata

SEQ ID NO: 80876 - DNA, 13 bp, Artificial Sequence
  Oligonucleotide for detection of SNP TSC0020490
tatcccttcctaa

SEQ ID NO: 80877 - DNA, 13 bp, Artificial Sequence
  Oligonucleotide for detection of SNP TSC0020490
ttaggacgggata

SEQ ID NO: 80878 - DNA, 13 bp, Artificial Sequence
  Oligonucleotide for detection of SNP TSC0020490
tatcccgtcctaa

SEQ ID NO: 80879 - DNA, 13 bp, Artificial Sequence
  Oligonucleotide for detection of SNP TSC0020491
agtggatgattag

SEQ ID NO: 80880 - DNA, 13 bp, Artificial Sequence
  Oligonucleotide for detection of SNP TSC0020491
ctaatcatccact

SEQ ID NO: 80881 - DNA, 13 bp, Artificial Sequence
  Oligonucleotide for detection of SNP TSC0020491
agtggacgattag

SEQ ID NO: 80882 - DNA, 13 bp, Artificial Sequence
  Oligonucleotide for detection of SNP TSC0020491
ctaatcgtccact

SEQ ID NO: 80883 - DNA, 13 bp, Artificial Sequence
  Oligonucleotide for detection of SNP TSC0020491
ttgattgtttatt

SEQ ID NO: 80884 - DNA, 13 bp, Artificial Sequence
  Oligonucleotide for detection of SNP TSC0020491
aataaacaatcaa

SEQ ID NO: 80885 - DNA, 13 bp, Artificial Sequence
  Oligonucleotide for detection of SNP TSC0020491
ttgattatttatt

SEQ ID NO: 80886 - DNA, 13 bp, Artificial Sequence
  Oligonucleotide for detection of SNP TSC0020491
aataaataatcaa

SEQ ID NO: 80887 - DNA, 13 bp, Artificial Sequence
  Oligonucleotide for detection of SNP TSC0020491
ttgatcgtttatt

SEQ ID NO: 80888 - DNA, 13 bp, Artificial Sequence
  Oligonucleotide for detection of SNP TSC0020491
aataaacgatcaa

SEQ ID NO: 80889 - DNA, 13 bp, Artificial Sequence
  Oligonucleotide for detection of SNP TSC0020492
tattgagtgtatt

SEQ ID NO: 80890 - DNA, 13 bp, Artificial Sequence
  Oligonucleotide for detection of SNP TSC0020492
aatacactcaata

SEQ ID NO: 80891 - DNA, 13 bp, Artificial Sequence
  Oligonucleotide for detection of SNP TSC0020492
tattgaatgtatt

SEQ ID NO: 80892 - DNA, 13 bp, Artificial Sequence
  Oligonucleotide for detection of SNP TSC0020492
aatacattcaata

SEQ ID NO: 80893 - DNA, 13 bp, Artificial Sequence
  Oligonucleotide for detection of SNP TSC0020494
ttgaaagatttta

SEQ ID NO: 80894 - DNA, 13 bp, Artificial Sequence
  Oligonucleotide for detection of SNP TSC0020494
taaaatctttcaa

SEQ ID NO: 80895 - DNA, 13 bp, Artificial Sequence
  Oligonucleotide for detection of SNP TSC0020494
ttgaaatatttta

SEQ ID NO: 80896 - DNA, 13 bp, Artificial Sequence
  Oligonucleotide for detection of SNP TSC0020494
taaaatatttcaa

SEQ ID NO: 80897 - DNA, 13 bp, Artificial Sequence
  Oligonucleotide for detection of SNP TSC0020494
taagattttttaa

SEQ ID NO: 80898 - DNA, 13 bp, Artificial Sequence
  Oligonucleotide for detection of SNP TSC0020494
ttaaaaaatctta

SEQ ID NO: 80899 - DNA, 13 bp, Artificial Sequence
  Oligonucleotide for detection of SNP TSC0020494
taagatattttaa

SEQ ID NO: 80900 - DNA, 13 bp, Artificial Sequence
  Oligonucleotide for detection of SNP TSC0020494
ttaaaatatctta

SEQ ID NO: 80901 - DNA, 13 bp, Artificial Sequence
  Oligonucleotide for detection of SNP TSC0020495
tatttaggaaatt

SEQ ID NO: 80902 - DNA, 13 bp, Artificial Sequence
  Oligonucleotide for detection of SNP TSC0020495
aatttcctaaata

SEQ ID NO: 80903 - DNA, 13 bp, Artificial Sequence
  Oligonucleotide for detection of SNP TSC0020495
tatttatgaaatt

SEQ ID NO: 80904 - DNA, 13 bp, Artificial Sequence
  Oligonucleotide for detection of SNP TSC0020495
aatttcataaata

SEQ ID NO: 80905 - DNA, 13 bp, Artificial Sequence
  Oligonucleotide for detection of SNP TSC0020495
agttttttgaata

SEQ ID NO: 80906 - DNA, 13 bp, Artificial Sequence
  Oligonucleotide for detection of SNP TSC0020495
tattcaaaaaact

SEQ ID NO: 80907 - DNA, 13 bp, Artificial Sequence
  Oligonucleotide for detection of SNP TSC0020495
agttttatgaata

SEQ ID NO: 80908 - DNA, 13 bp, Artificial Sequence
  Oligonucleotide for detection of SNP TSC0020495
tattcataaaact

SEQ ID NO: 80909 - DNA, 13 bp, Artificial Sequence
  Oligonucleotide for detection of SNP TSC0020496
tatttttttttga

SEQ ID NO: 80910 - DNA, 13 bp, Artificial Sequence
  Oligonucleotide for detection of SNP TSC0020496
tcaaaaaaaaata

SEQ ID NO: 80911 - DNA, 13 bp, Artificial Sequence
  Oligonucleotide for detection of SNP TSC0020497
tttaatttttgga

SEQ ID NO: 80912 - DNA, 13 bp, Artificial Sequence
  Oligonucleotide for detection of SNP TSC0020497
tccaaaaattaaa

SEQ ID NO: 80913 - DNA, 13 bp, Artificial Sequence
  Oligonucleotide for detection of SNP TSC0020497
tttaatgtttgga

SEQ ID NO: 80914 - DNA, 13 bp, Artificial Sequence
  Oligonucleotide for detection of SNP TSC0020497
tccaaacattaaa

SEQ ID NO: 80915 - DNA, 13 bp, Artificial Sequence
  Oligonucleotide for detection of SNP TSC0020497
tttaaggattgga

SEQ ID NO: 80916 - DNA, 13 bp, Artificial Sequence
  Oligonucleotide for detection of SNP TSC0020497
tccaatccttaaa

SEQ ID NO: 80917 - DNA, 13 bp, Artificial Sequence
  Oligonucleotide for detection of SNP TSC0020497
tttaagtattgga

SEQ ID NO: 80918 - DNA, 13 bp, Artificial Sequence
  Oligonucleotide for detection of SNP TSC0020497
tccaatacttaaa

SEQ ID NO: 80919 - DNA, 13 bp, Artificial Sequence
  Oligonucleotide for detection of SNP TSC0020498
ttgtgtattttga

SEQ ID NO: 80920 - DNA, 13 bp, Artificial Sequence
  Oligonucleotide for detection of SNP TSC0020498
tcaaaatacacaa

SEQ ID NO: 80921 - DNA, 13 bp, Artificial Sequence
  Oligonucleotide for detection of SNP TSC0020498
ttgtgttttttga

SEQ ID NO: 80922 - DNA, 13 bp, Artificial Sequence
  Oligonucleotide for detection of SNP TSC0020498
tcaaaaaacacaa

SEQ ID NO: 80923 - DNA, 13 bp, Artificial Sequence
  Oligonucleotide for detection of SNP TSC0020498
ttagggtatataa

SEQ ID NO: 80924 - DNA, 13 bp, Artificial Sequence
  Oligonucleotide for detection of SNP TSC0020498
ttatataccctaa

SEQ ID NO: 80925 - DNA, 13 bp, Artificial Sequence
  Oligonucleotide for detection of SNP TSC0020498
ttaggggatataa

SEQ ID NO: 80926 - DNA, 13 bp, Artificial Sequence
  Oligonucleotide for detection of SNP TSC0020498
ttatatcccctaa

SEQ ID NO: 80927 - DNA, 13 bp, Artificial Sequence
  Oligonucleotide for detection of SNP TSC0020501
atatttatttagt

SEQ ID NO: 80928 - DNA, 13 bp, Artificial Sequence
  Oligonucleotide for detection of SNP TSC0020501
actaaataaatat

SEQ ID NO: 80929 - DNA, 13 bp, Artificial Sequence
  Oligonucleotide for detection of SNP TSC0020501
atatttgtttagt

SEQ ID NO: 80930 - DNA, 13 bp, Artificial Sequence
  Oligonucleotide for detection of SNP TSC0020501
actaaacaaatat

SEQ ID NO: 80931 - DNA, 13 bp, Artificial Sequence
  Oligonucleotide for detection of SNP TSC0020501
atattcgtttagt

SEQ ID NO: 80932 - DNA, 13 bp, Artificial Sequence
  Oligonucleotide for detection of SNP TSC0020501
actaaacgaatat

SEQ ID NO: 80933 - DNA, 13 bp, Artificial Sequence
  Oligonucleotide for detection of SNP TSC0020501
attgggtgggtgt

SEQ ID NO: 80934 - DNA, 13 bp, Artificial Sequence
  Oligonucleotide for detection of SNP TSC0020501
acacccacccaat

SEQ ID NO: 80935 - DNA, 13 bp, Artificial Sequence
  Oligonucleotide for detection of SNP TSC0020501
attgggcgggtgt

SEQ ID NO: 80936 - DNA, 13 bp, Artificial Sequence
  Oligonucleotide for detection of SNP TSC0020501
acacccgcccaat

SEQ ID NO: 80937 - DNA, 13 bp, Artificial Sequence
  Oligonucleotide for detection of SNP TSC0020502
gaatgaattatty

SEQ ID NO: 80938 - DNA, 13 bp, Artificial Sequence
  Oligonucleotide for detection of SNP TSC0020502
raataattcattc

SEQ ID NO: 80939 - DNA, 13 bp, Artificial Sequence
  Oligonucleotide for detection of SNP TSC0020502
gaatgagttatty

SEQ ID NO: 80940 - DNA, 13 bp, Artificial Sequence
  Oligonucleotide for detection of SNP TSC0020502
raataactcattc

SEQ ID NO: 80941 - DNA, 13 bp, Artificial Sequence
  Oligonucleotide for detection of SNP TSC0020503
gtttataagggta

SEQ ID NO: 80942 - DNA, 13 bp, Artificial Sequence
  Oligonucleotide for detection of SNP TSC0020503
tacccttataaac

SEQ ID NO: 80943 - DNA, 13 bp, Artificial Sequence
  Oligonucleotide for detection of SNP TSC0020503
gtttattagggta

SEQ ID NO: 80944 - DNA, 13 bp, Artificial Sequence
  Oligonucleotide for detection of SNP TSC0020503
taccctaataaac

SEQ ID NO: 80945 - DNA, 13 bp, Artificial Sequence
  Oligonucleotide for detection of SNP TSC0020503
tgtttttgtgggy

SEQ ID NO: 80946 - DNA, 13 bp, Artificial Sequence
  Oligonucleotide for detection of SNP TSC0020503
rcccacaaaaaca

SEQ ID NO: 80947 - DNA, 13 bp, Artificial Sequence
  Oligonucleotide for detection of SNP TSC0020503
tgttttggtgggy

SEQ ID NO: 80948 - DNA, 13 bp, Artificial Sequence
  Oligonucleotide for detection of SNP TSC0020503
rcccaccaaaaca

SEQ ID NO: 80949 - DNA, 13 bp, Artificial Sequence
  Oligonucleotide for detection of SNP TSC0020504
gagtagggtgagg

SEQ ID NO: 80950 - DNA, 13 bp, Artificial Sequence
  Oligonucleotide for detection of SNP TSC0020504
cctcaccctactc

SEQ ID NO: 80951 - DNA, 13 bp, Artificial Sequence
  Oligonucleotide for detection of SNP TSC0020504
gagtagtgtgagg

SEQ ID NO: 80952 - DNA, 13 bp, Artificial Sequence
  Oligonucleotide for detection of SNP TSC0020504
cctcacactactc

SEQ ID NO: 80953 - DNA, 13 bp, Artificial Sequence
  Oligonucleotide for detection of SNP TSC0020506
gaagttgtagata

SEQ ID NO: 80954 - DNA, 13 bp, Artificial Sequence
  Oligonucleotide for detection of SNP TSC0020506
tatctacaacttc

SEQ ID NO: 80955 - DNA, 13 bp, Artificial Sequence
  Oligonucleotide for detection of SNP TSC0020506
gaagttatagata

SEQ ID NO: 80956 - DNA, 13 bp, Artificial Sequence
  Oligonucleotide for detection of SNP TSC0020506
tatctataacttc

SEQ ID NO: 80957 - DNA, 13 bp, Artificial Sequence
  Oligonucleotide for detection of SNP TSC0020506
gaagtcgtagata

SEQ ID NO: 80958 - DNA, 13 bp, Artificial Sequence
  Oligonucleotide for detection of SNP TSC0020506
tatctacgacttc

SEQ ID NO: 80959 - DNA, 13 bp, Artificial Sequence
  Oligonucleotide for detection of SNP TSC0020507
tgtattatttttt

SEQ ID NO: 80960 - DNA, 13 bp, Artificial Sequence
  Oligonucleotide for detection of SNP TSC0020507
aaaaaataataca

SEQ ID NO: 80961 - DNA, 13 bp, Artificial Sequence
  Oligonucleotide for detection of SNP TSC0020507
tgtattgtttttt

SEQ ID NO: 80962 - DNA, 13 bp, Artificial Sequence
  Oligonucleotide for detection of SNP TSC0020507
aaaaaacaataca

SEQ ID NO: 80963 - DNA, 13 bp, Artificial Sequence
  Oligonucleotide for detection of SNP TSC0020509
tgtagggttttat

SEQ ID NO: 80964 - DNA, 13 bp, Artificial Sequence
  Oligonucleotide for detection of SNP TSC0020509
ataaaaccctaca

SEQ ID NO: 80965 - DNA, 13 bp, Artificial Sequence
  Oligonucleotide for detection of SNP TSC0020509
tgtaggattttat

SEQ ID NO: 80966 - DNA, 13 bp, Artificial Sequence
  Oligonucleotide for detection of SNP TSC0020509
ataaaatcctaca

SEQ ID NO: 80967 - DNA, 13 bp, Artificial Sequence
  Oligonucleotide for detection of SNP TSC0020510
taaattggttagg

SEQ ID NO: 80968 - DNA, 13 bp, Artificial Sequence
  Oligonucleotide for detection of SNP TSC0020510
cctaaccaattta

SEQ ID NO: 80969 - DNA, 13 bp, Artificial Sequence
  Oligonucleotide for detection of SNP TSC0020510
taaattagttagg

SEQ ID NO: 80970 - DNA, 13 bp, Artificial Sequence
  Oligonucleotide for detection of SNP TSC0020510
cctaactaattta

SEQ ID NO: 80971 - DNA, 13 bp, Artificial Sequence
  Oligonucleotide for detection of SNP TSC0020511
ttatttgggaagt

SEQ ID NO: 80972 - DNA, 13 bp, Artificial Sequence
  Oligonucleotide for detection of SNP TSC0020511
acttcccaaataa

SEQ ID NO: 80973 - DNA, 13 bp, Artificial Sequence
  Oligonucleotide for detection of SNP TSC0020511
ttatttaggaagt

SEQ ID NO: 80974 - DNA, 13 bp, Artificial Sequence
  Oligonucleotide for detection of SNP TSC0020511
acttcctaaataa

SEQ ID NO: 80975 - DNA, 13 bp, Artificial Sequence
  Oligonucleotide for detection of SNP TSC0020512
aagagtaatgtgt

SEQ ID NO: 80976 - DNA, 13 bp, Artificial Sequence
  Oligonucleotide for detection of SNP TSC0020512
acacattactctt

SEQ ID NO: 80977 - DNA, 13 bp, Artificial Sequence
  Oligonucleotide for detection of SNP TSC0020512
aagagtgatgtgt

SEQ ID NO: 80978 - DNA, 13 bp, Artificial Sequence
  Oligonucleotide for detection of SNP TSC0020512
acacatcactctt

SEQ ID NO: 80979 - DNA, 13 bp, Artificial Sequence
  Oligonucleotide for detection of SNP TSC0020513
aaaaaagtagtag

SEQ ID NO: 80980 - DNA, 13 bp, Artificial Sequence
  Oligonucleotide for detection of SNP TSC0020513
ctactactttttt

SEQ ID NO: 80981 - DNA, 13 bp, Artificial Sequence
  Oligonucleotide for detection of SNP TSC0020513
aaaaaaatagtag

SEQ ID NO: 80982 - DNA, 13 bp, Artificial Sequence
  Oligonucleotide for detection of SNP TSC0020513
ctactattttttt

SEQ ID NO: 80983 - DNA, 13 bp, Artificial Sequence
  Oligonucleotide for detection of SNP TSC0020514
gtaaaggggtaag

SEQ ID NO: 80984 - DNA, 13 bp, Artificial Sequence
  Oligonucleotide for detection of SNP TSC0020514
cttacccctttac

SEQ ID NO: 80985 - DNA, 13 bp, Artificial Sequence
  Oligonucleotide for detection of SNP TSC0020514
gtaaagaggtaag

SEQ ID NO: 80986 - DNA, 13 bp, Artificial Sequence
  Oligonucleotide for detection of SNP TSC0020514
cttacctctttac

SEQ ID NO: 80987 - DNA, 13 bp, Artificial Sequence
  Oligonucleotide for detection of SNP TSC0020515
gaaaaagtatttg

SEQ ID NO: 80988 - DNA, 13 bp, Artificial Sequence
  Oligonucleotide for detection of SNP TSC0020515
caaatactttttc

SEQ ID NO: 80989 - DNA, 13 bp, Artificial Sequence
  Oligonucleotide for detection of SNP TSC0020515
gaaaaaatatttg

SEQ ID NO: 80990 - DNA, 13 bp, Artificial Sequence
  Oligonucleotide for detection of SNP TSC0020515
caaatattttttc

SEQ ID NO: 80991 - DNA, 13 bp, Artificial Sequence
  Oligonucleotide for detection of SNP TSC0020517
tgtaattgtataa

SEQ ID NO: 80992 - DNA, 13 bp, Artificial Sequence
  Oligonucleotide for detection of SNP TSC0020517
ttatacaattaca

SEQ ID NO: 80993 - DNA, 13 bp, Artificial Sequence
  Oligonucleotide for detection of SNP TSC0020517
tgtaatcgtataa

SEQ ID NO: 80994 - DNA, 13 bp, Artificial Sequence
  Oligonucleotide for detection of SNP TSC0020517
ttatacgattaca

SEQ ID NO: 80995 - DNA, 13 bp, Artificial Sequence
  Oligonucleotide for detection of SNP TSC0020517
ttgtatgattgta

SEQ ID NO: 80996 - DNA, 13 bp, Artificial Sequence
  Oligonucleotide for detection of SNP TSC0020517
tacaatcatacaa

SEQ ID NO: 80997 - DNA, 13 bp, Artificial Sequence
  Oligonucleotide for detection of SNP TSC0020517
ttgtataattgta

SEQ ID NO: 80998 - DNA, 13 bp, Artificial Sequence
  Oligonucleotide for detection of SNP TSC0020517
tacaattatacaa

SEQ ID NO: 80999 - DNA, 13 bp, Artificial Sequence
  Oligonucleotide for detection of SNP TSC0020517
ttgtacgattgta

SEQ ID NO: 81000 - DNA, 13 bp, Artificial Sequence
  Oligonucleotide for detection of SNP TSC0020517
tacaatcgtacaa

SEQ ID NO: 81001 - DNA, 13 bp, Artificial Sequence
  Oligonucleotide for detection of SNP TSC0020518
agtttgtgtttag

SEQ ID NO: 81002 - DNA, 13 bp, Artificial Sequence
  Oligonucleotide for detection of SNP TSC0020518
ctaaacacaaact

SEQ ID NO: 81003 - DNA, 13 bp, Artificial Sequence
  Oligonucleotide for detection of SNP TSC0020518
agttcgtgtttag

SEQ ID NO: 81004 - DNA, 13 bp, Artificial Sequence
  Oligonucleotide for detection of SNP TSC0020518
ctaaacacgaact

SEQ ID NO: 81005 - DNA, 13 bp, Artificial Sequence
  Oligonucleotide for detection of SNP TSC0020518
agtttgcgtttag

SEQ ID NO: 81006 - DNA, 13 bp, Artificial Sequence
  Oligonucleotide for detection of SNP TSC0020518
ctaaacgcaaact

SEQ ID NO: 81007 - DNA, 13 bp, Artificial Sequence
  Oligonucleotide for detection of SNP TSC0020518
agttcgcgtttag

SEQ ID NO: 81008 - DNA, 13 bp, Artificial Sequence
  Oligonucleotide for detection of SNP TSC0020518
ctaaacgcgaact

SEQ ID NO: 81009 - DNA, 13 bp, Artificial Sequence
  Oligonucleotide for detection of SNP TSC0020518
ttggatgtgggtt

SEQ ID NO: 81010 - DNA, 13 bp, Artificial Sequence
  Oligonucleotide for detection of SNP TSC0020518
aacccacatccaa

SEQ ID NO: 81011 - DNA, 13 bp, Artificial Sequence
  Oligonucleotide for detection of SNP TSC0020518
ttggatatgggtt

SEQ ID NO: 81012 - DNA, 13 bp, Artificial Sequence
  Oligonucleotide for detection of SNP TSC0020518
aacccatatccaa

SEQ ID NO: 81013 - DNA, 13 bp, Artificial Sequence
  Oligonucleotide for detection of SNP TSC0020518
ttggacgtgggtt

SEQ ID NO: 81014 - DNA, 13 bp, Artificial Sequence
  Oligonucleotide for detection of SNP TSC0020518
aacccacgtccaa

SEQ ID NO: 81015 - DNA, 13 bp, Artificial Sequence
  Oligonucleotide for detection of SNP TSC0020518
ttggatacgggtt

SEQ ID NO: 81016 - DNA, 13 bp, Artificial Sequence
  Oligonucleotide for detection of SNP TSC0020518
aacccgtatccaa

SEQ ID NO: 81017 - DNA, 13 bp, Artificial Sequence
  Oligonucleotide for detection of SNP TSC0020518
ttggatgcgggtt

SEQ ID NO: 81018 - DNA, 13 bp, Artificial Sequence
  Oligonucleotide for detection of SNP TSC0020518
aacccgcatccaa

SEQ ID NO: 81019 - DNA, 13 bp, Artificial Sequence
  Oligonucleotide for detection of SNP TSC0020518
ttggacgcgggtt

SEQ ID NO: 81020 - DNA, 13 bp, Artificial Sequence
  Oligonucleotide for detection of SNP TSC0020518
aacccgcgtccaa

SEQ ID NO: 81021 - DNA, 13 bp, Artificial Sequence
  Oligonucleotide for detection of SNP TSC0020520
ttgaatgttattt

SEQ ID NO: 81022 - DNA, 13 bp, Artificial Sequence
  Oligonucleotide for detection of SNP TSC0020520
aaataacattcaa

SEQ ID NO: 81023 - DNA, 13 bp, Artificial Sequence
  Oligonucleotide for detection of SNP TSC0020520
ttgaatattattt

SEQ ID NO: 81024 - DNA, 13 bp, Artificial Sequence
  Oligonucleotide for detection of SNP TSC0020520
aaataatattcaa

SEQ ID NO: 81025 - DNA, 13 bp, Artificial Sequence
  Oligonucleotide for detection of SNP TSC0020521
tattaggggtgaa

SEQ ID NO: 81026 - DNA, 13 bp, Artificial Sequence
  Oligonucleotide for detection of SNP TSC0020521
ttcacccctaata

SEQ ID NO: 81027 - DNA, 13 bp, Artificial Sequence
  Oligonucleotide for detection of SNP TSC0020521
tattagaggtgaa

SEQ ID NO: 81028 - DNA, 13 bp, Artificial Sequence
  Oligonucleotide for detection of SNP TSC0020521
ttcacctctaata

SEQ ID NO: 81029 - DNA, 13 bp, Artificial Sequence
  Oligonucleotide for detection of SNP TSC0020521
tattaggggcgaa

SEQ ID NO: 81030 - DNA, 13 bp, Artificial Sequence
  Oligonucleotide for detection of SNP TSC0020521
ttcgcccctaata

SEQ ID NO: 81031 - DNA, 13 bp, Artificial Sequence
  Oligonucleotide for detection of SNP TSC0020521
tattagaggcgaa

SEQ ID NO: 81032 - DNA, 13 bp, Artificial Sequence
  Oligonucleotide for detection of SNP TSC0020521
ttcgcctctaata

SEQ ID NO: 81033 - DNA, 13 bp, Artificial Sequence
  Oligonucleotide for detection of SNP TSC0020522
taagttatgggta

SEQ ID NO: 81034 - DNA, 13 bp, Artificial Sequence
  Oligonucleotide for detection of SNP TSC0020522
tacccataactta

SEQ ID NO: 81035 - DNA, 13 bp, Artificial Sequence
  Oligonucleotide for detection of SNP TSC0020522
taagttttgggta

SEQ ID NO: 81036 - DNA, 13 bp, Artificial Sequence
  Oligonucleotide for detection of SNP TSC0020522
tacccaaaactta

SEQ ID NO: 81037 - DNA, 13 bp, Artificial Sequence
  Oligonucleotide for detection of SNP TSC0020522
tgtttatggtttg

SEQ ID NO: 81038 - DNA, 13 bp, Artificial Sequence
  Oligonucleotide for detection of SNP TSC0020522
caaaccataaaca

SEQ ID NO: 81039 - DNA, 13 bp, Artificial Sequence
  Oligonucleotide for detection of SNP TSC0020522
tgtttagggtttg

SEQ ID NO: 81040 - DNA, 13 bp, Artificial Sequence
  Oligonucleotide for detection of SNP TSC0020522
caaaccctaaaca

SEQ ID NO: 81041 - DNA, 13 bp, Artificial Sequence
  Oligonucleotide for detection of SNP TSC0020523
tgtgtgtaaatay

SEQ ID NO: 81042 - DNA, 13 bp, Artificial Sequence
  Oligonucleotide for detection of SNP TSC0020523
rtatttacacaca

SEQ ID NO: 81043 - DNA, 13 bp, Artificial Sequence
  Oligonucleotide for detection of SNP TSC0020523
tgtgtggaaatay

SEQ ID NO: 81044 - DNA, 13 bp, Artificial Sequence
  Oligonucleotide for detection of SNP TSC0020523
rtatttccacaca

SEQ ID NO: 81045 - DNA, 13 bp, Artificial Sequence
  Oligonucleotide for detection of SNP TSC0020523
gtatttgtatata

SEQ ID NO: 81046 - DNA, 13 bp, Artificial Sequence
  Oligonucleotide for detection of SNP TSC0020523
tatatacaaatac

SEQ ID NO: 81047 - DNA, 13 bp, Artificial Sequence
  Oligonucleotide for detection of SNP TSC0020523
gtatttttatata

SEQ ID NO: 81048 - DNA, 13 bp, Artificial Sequence
  Oligonucleotide for detection of SNP TSC0020523
tatataaaaatac

SEQ ID NO: 81049 - DNA, 13 bp, Artificial Sequence
  Oligonucleotide for detection of SNP TSC0020527
gtttatatggagt

SEQ ID NO: 81050 - DNA, 13 bp, Artificial Sequence
  Oligonucleotide for detection of SNP TSC0020527
actccatataaac

SEQ ID NO: 81051 - DNA, 13 bp, Artificial Sequence
  Oligonucleotide for detection of SNP TSC0020527
gtttatgtggagt

SEQ ID NO: 81052 - DNA, 13 bp, Artificial Sequence
  Oligonucleotide for detection of SNP TSC0020527
actccacataaac

SEQ ID NO: 81053 - DNA, 13 bp, Artificial Sequence
  Oligonucleotide for detection of SNP TSC0020527
gtttacgtggagt

SEQ ID NO: 81054 - DNA, 13 bp, Artificial Sequence
  Oligonucleotide for detection of SNP TSC0020527
actccacgtaaac

SEQ ID NO: 81055 - DNA, 13 bp, Artificial Sequence
  Oligonucleotide for detection of SNP TSC0020527
attttatgtgagy

SEQ ID NO: 81056 - DNA, 13 bp, Artificial Sequence
  Oligonucleotide for detection of SNP TSC0020527
rctcacataaaat

SEQ ID NO: 81057 - DNA, 13 bp, Artificial Sequence
  Oligonucleotide for detection of SNP TSC0020527
attttacgtgagy

SEQ ID NO: 81058 - DNA, 13 bp, Artificial Sequence
  Oligonucleotide for detection of SNP TSC0020527
rctcacgtaaaat

SEQ ID NO: 81059 - DNA, 13 bp, Artificial Sequence
  Oligonucleotide for detection of SNP TSC0020528
ggtaaagaggaga

SEQ ID NO: 81060 - DNA, 13 bp, Artificial Sequence
  Oligonucleotide for detection of SNP TSC0020528
tctcctctttacc

SEQ ID NO: 81061 - DNA, 13 bp, Artificial Sequence
  Oligonucleotide for detection of SNP TSC0020528
ggtaaataggaga

SEQ ID NO: 81062 - DNA, 13 bp, Artificial Sequence
  Oligonucleotide for detection of SNP TSC0020528
tctcctatttacc

SEQ ID NO: 81063 - DNA, 13 bp, Artificial Sequence
  Oligonucleotide for detection of SNP TSC0020529
taaggtaatagty

SEQ ID NO: 81064 - DNA, 13 bp, Artificial Sequence
  Oligonucleotide for detection of SNP TSC0020529
ractattacctta

SEQ ID NO: 81065 - DNA, 13 bp, Artificial Sequence
  Oligonucleotide for detection of SNP TSC0020529
taaggttatagty

SEQ ID NO: 81066 - DNA, 13 bp, Artificial Sequence
  Oligonucleotide for detection of SNP TSC0020529
ractataacctta

SEQ ID NO: 81067 - DNA, 13 bp, Artificial Sequence
  Oligonucleotide for detection of SNP TSC0020529
gattgttgttttg

SEQ ID NO: 81068 - DNA, 13 bp, Artificial Sequence
  Oligonucleotide for detection of SNP TSC0020529
caaaacaacaatc

SEQ ID NO: 81069 - DNA, 13 bp, Artificial Sequence
  Oligonucleotide for detection of SNP TSC0020529
gattgtggttttg

SEQ ID NO: 81070 - DNA, 13 bp, Artificial Sequence
  Oligonucleotide for detection of SNP TSC0020529
caaaaccacaatc

SEQ ID NO: 81071 - DNA, 13 bp, Artificial Sequence
  Oligonucleotide for detection of SNP TSC0020530
aattaggtgatgt

SEQ ID NO: 81072 - DNA, 13 bp, Artificial Sequence
  Oligonucleotide for detection of SNP TSC0020530
acatcacctaatt

SEQ ID NO: 81073 - DNA, 13 bp, Artificial Sequence
  Oligonucleotide for detection of SNP TSC0020530
aattagatgatgt

SEQ ID NO: 81074 - DNA, 13 bp, Artificial Sequence
  Oligonucleotide for detection of SNP TSC0020530
acatcatctaatt

SEQ ID NO: 81075 - DNA, 13 bp, Artificial Sequence
  Oligonucleotide for detection of SNP TSC0020531
tgataaatgtaty

SEQ ID NO: 81076 - DNA, 13 bp, Artificial Sequence
  Oligonucleotide for detection of SNP TSC0020531
ratacatttatca

SEQ ID NO: 81077 - DNA, 13 bp, Artificial Sequence
  Oligonucleotide for detection of SNP TSC0020531
tgataagtgtaty

SEQ ID NO: 81078 - DNA, 13 bp, Artificial Sequence
  Oligonucleotide for detection of SNP TSC0020531
ratacacttatca

SEQ ID NO: 81079 - DNA, 13 bp, Artificial Sequence
  Oligonucleotide for detection of SNP TSC0020532
gataggtgtgagy

SEQ ID NO: 81080 - DNA, 13 bp, Artificial Sequence
  Oligonucleotide for detection of SNP TSC0020532
rctcacacctatc

SEQ ID NO: 81081 - DNA, 13 bp, Artificial Sequence
  Oligonucleotide for detection of SNP TSC0020532
gataggcgtgagy

SEQ ID NO: 81082 - DNA, 13 bp, Artificial Sequence
  Oligonucleotide for detection of SNP TSC0020532
rctcacgcctatc

SEQ ID NO: 81083 - DNA, 13 bp, Artificial Sequence
  Oligonucleotide for detection of SNP TSC0020532
gtttatatttgty

SEQ ID NO: 81084 - DNA, 13 bp, Artificial Sequence
  Oligonucleotide for detection of SNP TSC0020532
racaaatataaac

SEQ ID NO: 81085 - DNA, 13 bp, Artificial Sequence
  Oligonucleotide for detection of SNP TSC0020533
attaagagattgt

SEQ ID NO: 81086 - DNA, 13 bp, Artificial Sequence
  Oligonucleotide for detection of SNP TSC0020533
acaatctcttaat

SEQ ID NO: 81087 - DNA, 13 bp, Artificial Sequence
  Oligonucleotide for detection of SNP TSC0020533
attaagggattgt

SEQ ID NO: 81088 - DNA, 13 bp, Artificial Sequence
  Oligonucleotide for detection of SNP TSC0020533
acaatcccttaat

SEQ ID NO: 81089 - DNA, 13 bp, Artificial Sequence
  Oligonucleotide for detection of SNP TSC0020534
aggtttgggagty

SEQ ID NO: 81090 - DNA, 13 bp, Artificial Sequence
  Oligonucleotide for detection of SNP TSC0020534
ractcccaaacct

SEQ ID NO: 81091 - DNA, 13 bp, Artificial Sequence
  Oligonucleotide for detection of SNP TSC0020534
aggttttggagty

SEQ ID NO: 81092 - DNA, 13 bp, Artificial Sequence
  Oligonucleotide for detection of SNP TSC0020534
ractccaaaacct

SEQ ID NO: 81093 - DNA, 13 bp, Artificial Sequence
  Oligonucleotide for detection of SNP TSC0020534
ggttttaaggttt

SEQ ID NO: 81094 - DNA, 13 bp, Artificial Sequence
  Oligonucleotide for detection of SNP TSC0020534
aaaccttaaaacc

SEQ ID NO: 81095 - DNA, 13 bp, Artificial Sequence
  Oligonucleotide for detection of SNP TSC0020535
tatttttgatgty

SEQ ID NO: 81096 - DNA, 13 bp, Artificial Sequence
  Oligonucleotide for detection of SNP TSC0020535
racatcaaaaata

SEQ ID NO: 81097 - DNA, 13 bp, Artificial Sequence
  Oligonucleotide for detection of SNP TSC0020535
tattttcgatgty

SEQ ID NO: 81098 - DNA, 13 bp, Artificial Sequence
  Oligonucleotide for detection of SNP TSC0020535
racatcgaaaata

SEQ ID NO: 81099 - DNA, 13 bp, Artificial Sequence
  Oligonucleotide for detection of SNP TSC0020535
tatttttgacgty

SEQ ID NO: 81100 - DNA, 13 bp, Artificial Sequence
  Oligonucleotide for detection of SNP TSC0020535
racgtcaaaaata

SEQ ID NO: 81101 - DNA, 13 bp, Artificial Sequence
  Oligonucleotide for detection of SNP TSC0020535
tattttcgacgty

SEQ ID NO: 81102 - DNA, 13 bp, Artificial Sequence
  Oligonucleotide for detection of SNP TSC0020535
racgtcgaaaata

SEQ ID NO: 81103 - DNA, 13 bp, Artificial Sequence
  Oligonucleotide for detection of SNP TSC0020535
ggtgttgggggta

SEQ ID NO: 81104 - DNA, 13 bp, Artificial Sequence
  Oligonucleotide for detection of SNP TSC0020535
tacccccaacacc

SEQ ID NO: 81105 - DNA, 13 bp, Artificial Sequence
  Oligonucleotide for detection of SNP TSC0020535
ggtgttaggggta

SEQ ID NO: 81106 - DNA, 13 bp, Artificial Sequence
  Oligonucleotide for detection of SNP TSC0020535
tacccctaacacc

SEQ ID NO: 81107 - DNA, 13 bp, Artificial Sequence
  Oligonucleotide for detection of SNP TSC0020535
ggcgttgggggta

SEQ ID NO: 81108 - DNA, 13 bp, Artificial Sequence
  Oligonucleotide for detection of SNP TSC0020535
tacccccaacgcc

SEQ ID NO: 81109 - DNA, 13 bp, Artificial Sequence
  Oligonucleotide for detection of SNP TSC0020535
ggcgttaggggta

SEQ ID NO: 81110 - DNA, 13 bp, Artificial Sequence
  Oligonucleotide for detection of SNP TSC0020535
tacccctaacgcc

SEQ ID NO: 81111 - DNA, 13 bp, Artificial Sequence
  Oligonucleotide for detection of SNP TSC0020535
ggtgtcgggggta

SEQ ID NO: 81112 - DNA, 13 bp, Artificial Sequence
  Oligonucleotide for detection of SNP TSC0020535
tacccccgacacc

SEQ ID NO: 81113 - DNA, 13 bp, Artificial Sequence
  Oligonucleotide for detection of SNP TSC0020535
ggcgtcgggggta

SEQ ID NO: 81114 - DNA, 13 bp, Artificial Sequence
  Oligonucleotide for detection of SNP TSC0020535
tacccccgacgcc

SEQ ID NO: 81115 - DNA, 13 bp, Artificial Sequence
  Oligonucleotide for detection of SNP TSC0020536
taaggtaaaggta

SEQ ID NO: 81116 - DNA, 13 bp, Artificial Sequence
  Oligonucleotide for detection of SNP TSC0020536
tacctttacctta

SEQ ID NO: 81117 - DNA, 13 bp, Artificial Sequence
  Oligonucleotide for detection of SNP TSC0020536
taaggtgaaggta

SEQ ID NO: 81118 - DNA, 13 bp, Artificial Sequence
  Oligonucleotide for detection of SNP TSC0020536
taccttcacctta

SEQ ID NO: 81119 - DNA, 13 bp, Artificial Sequence
  Oligonucleotide for detection of SNP TSC0020536
taaggcgaaggta

SEQ ID NO: 81120 - DNA, 13 bp, Artificial Sequence
  Oligonucleotide for detection of SNP TSC0020536
taccttcgcctta

SEQ ID NO: 81121 - DNA, 13 bp, Artificial Sequence
  Oligonucleotide for detection of SNP TSC0020538
ggtaataaagtga

SEQ ID NO: 81122 - DNA, 13 bp, Artificial Sequence
  Oligonucleotide for detection of SNP TSC0020538
tcactttattacc

SEQ ID NO: 81123 - DNA, 13 bp, Artificial Sequence
  Oligonucleotide for detection of SNP TSC0020538
ggtaatgaagtga

SEQ ID NO: 81124 - DNA, 13 bp, Artificial Sequence
  Oligonucleotide for detection of SNP TSC0020538
tcacttcattacc

SEQ ID NO: 81125 - DNA, 13 bp, Artificial Sequence
  Oligonucleotide for detection of SNP TSC0020539
aggttatgggtgy

SEQ ID NO: 81126 - DNA, 13 bp, Artificial Sequence
  Oligonucleotide for detection of SNP TSC0020539
rcacccataacct

SEQ ID NO: 81127 - DNA, 13 bp, Artificial Sequence
  Oligonucleotide for detection of SNP TSC0020539
aggttaggggtgy

SEQ ID NO: 81128 - DNA, 13 bp, Artificial Sequence
  Oligonucleotide for detection of SNP TSC0020539
rcacccctaacct

SEQ ID NO: 81129 - DNA, 13 bp, Artificial Sequence
  Oligonucleotide for detection of SNP TSC0020539
aggttacgggtgy

SEQ ID NO: 81130 - DNA, 13 bp, Artificial Sequence
  Oligonucleotide for detection of SNP TSC0020539
rcacccgtaacct

SEQ ID NO: 81131 - DNA, 13 bp, Artificial Sequence
  Oligonucleotide for detection of SNP TSC0020539
gtatttgtggttt

SEQ ID NO: 81132 - DNA, 13 bp, Artificial Sequence
  Oligonucleotide for detection of SNP TSC0020539
aaaccacaaatac

SEQ ID NO: 81133 - DNA, 13 bp, Artificial Sequence
  Oligonucleotide for detection of SNP TSC0020539
gtatttttggttt

SEQ ID NO: 81134 - DNA, 13 bp, Artificial Sequence
  Oligonucleotide for detection of SNP TSC0020539
aaaccaaaaatac

SEQ ID NO: 81135 - DNA, 13 bp, Artificial Sequence
  Oligonucleotide for detection of SNP TSC0020539
gtattcgtggttt

SEQ ID NO: 81136 - DNA, 13 bp, Artificial Sequence
  Oligonucleotide for detection of SNP TSC0020539
aaaccacgaatac

SEQ ID NO: 81137 - DNA, 13 bp, Artificial Sequence
  Oligonucleotide for detection of SNP TSC0020540
agtagatatatta

SEQ ID NO: 81138 - DNA, 13 bp, Artificial Sequence
  Oligonucleotide for detection of SNP TSC0020540
taatatatctact

SEQ ID NO: 81139 - DNA, 13 bp, Artificial Sequence
  Oligonucleotide for detection of SNP TSC0020540
agtagagatatta

SEQ ID NO: 81140 - DNA, 13 bp, Artificial Sequence
  Oligonucleotide for detection of SNP TSC0020540
taatatctctact

SEQ ID NO: 81141 - DNA, 13 bp, Artificial Sequence
  Oligonucleotide for detection of SNP TSC0020540
tggtgtgtttgtt

SEQ ID NO: 81142 - DNA, 13 bp, Artificial Sequence
  Oligonucleotide for detection of SNP TSC0020540
aacaaacacacca

SEQ ID NO: 81143 - DNA, 13 bp, Artificial Sequence
  Oligonucleotide for detection of SNP TSC0020540
tggtgtttttgtt

SEQ ID NO: 81144 - DNA, 13 bp, Artificial Sequence
  Oligonucleotide for detection of SNP TSC0020540
aacaaaaacacca

SEQ ID NO: 81145 - DNA, 13 bp, Artificial Sequence
  Oligonucleotide for detection of SNP TSC0020541
aaagaaataaaty

SEQ ID NO: 81146 - DNA, 13 bp, Artificial Sequence
  Oligonucleotide for detection of SNP TSC0020541
ratttatttcttt

SEQ ID NO: 81147 - DNA, 13 bp, Artificial Sequence
  Oligonucleotide for detection of SNP TSC0020541
aaagaagtaaaty

SEQ ID NO: 81148 - DNA, 13 bp, Artificial Sequence
  Oligonucleotide for detection of SNP TSC0020541
ratttacttcttt

SEQ ID NO: 81149 - DNA, 13 bp, Artificial Sequence
  Oligonucleotide for detection of SNP TSC0020542
tgtttgaaataty

SEQ ID NO: 81150 - DNA, 13 bp, Artificial Sequence
  Oligonucleotide for detection of SNP TSC0020542
ratatttcaaaca

SEQ ID NO: 81151 - DNA, 13 bp, Artificial Sequence
  Oligonucleotide for detection of SNP TSC0020542
tgtttgtaataty

SEQ ID NO: 81152 - DNA, 13 bp, Artificial Sequence
  Oligonucleotide for detection of SNP TSC0020542
ratattacaaaca

SEQ ID NO: 81153 - DNA, 13 bp, Artificial Sequence
  Oligonucleotide for detection of SNP TSC0020542
gatgttttaagta

SEQ ID NO: 81154 - DNA, 13 bp, Artificial Sequence
  Oligonucleotide for detection of SNP TSC0020542
tacttaaaacatc

SEQ ID NO: 81155 - DNA, 13 bp, Artificial Sequence
  Oligonucleotide for detection of SNP TSC0020542
gatgttgtaagta

SEQ ID NO: 81156 - DNA, 13 bp, Artificial Sequence
  Oligonucleotide for detection of SNP TSC0020542
tacttacaacatc

SEQ ID NO: 81157 - DNA, 13 bp, Artificial Sequence
  Oligonucleotide for detection of SNP TSC0020543
ttaatagggggaa

SEQ ID NO: 81158 - DNA, 13 bp, Artificial Sequence
  Oligonucleotide for detection of SNP TSC0020543
ttccccctattaa

SEQ ID NO: 81159 - DNA, 13 bp, Artificial Sequence
  Oligonucleotide for detection of SNP TSC0020543
ttaataaggggaa

SEQ ID NO: 81160 - DNA, 13 bp, Artificial Sequence
  Oligonucleotide for detection of SNP TSC0020543
ttccccttattaa

SEQ ID NO: 81161 - DNA, 13 bp, Artificial Sequence
  Oligonucleotide for detection of SNP TSC0020546
aaaggtgtgtttg

SEQ ID NO: 81162 - DNA, 13 bp, Artificial Sequence
  Oligonucleotide for detection of SNP TSC0020546
caaacacaccttt

SEQ ID NO: 81163 - DNA, 13 bp, Artificial Sequence
  Oligonucleotide for detection of SNP TSC0020546
aaaggcgtgtttg

SEQ ID NO: 81164 - DNA, 13 bp, Artificial Sequence
  Oligonucleotide for detection of SNP TSC0020546
caaacacgccttt

SEQ ID NO: 81165 - DNA, 13 bp, Artificial Sequence
  Oligonucleotide for detection of SNP TSC0020547
atattagaagaag

SEQ ID NO: 81166 - DNA, 13 bp, Artificial Sequence
  Oligonucleotide for detection of SNP TSC0020547
cttcttctaatat

SEQ ID NO: 81167 - DNA, 13 bp, Artificial Sequence
  Oligonucleotide for detection of SNP TSC0020547
atattataagaag

SEQ ID NO: 81168 - DNA, 13 bp, Artificial Sequence
  Oligonucleotide for detection of SNP TSC0020547
cttcttataatat

SEQ ID NO: 81169 - DNA, 13 bp, Artificial Sequence
  Oligonucleotide for detection of SNP TSC0020547
ttttttttaatgt

SEQ ID NO: 81170 - DNA, 13 bp, Artificial Sequence
  Oligonucleotide for detection of SNP TSC0020547
acattaaaaaaaa

SEQ ID NO: 81171 - DNA, 13 bp, Artificial Sequence
  Oligonucleotide for detection of SNP TSC0020547
ttttttataatgt

SEQ ID NO: 81172 - DNA, 13 bp, Artificial Sequence
  Oligonucleotide for detection of SNP TSC0020547
acattataaaaaa

SEQ ID NO: 81173 - DNA, 13 bp, Artificial Sequence
  Oligonucleotide for detection of SNP TSC0020548
gaagttattttat

SEQ ID NO: 81174 - DNA, 13 bp, Artificial Sequence
  Oligonucleotide for detection of SNP TSC0020548
ataaaataacttc

SEQ ID NO: 81175 - DNA, 13 bp, Artificial Sequence
  Oligonucleotide for detection of SNP TSC0020548
gaagttgttttat

SEQ ID NO: 81176 - DNA, 13 bp, Artificial Sequence
  Oligonucleotide for detection of SNP TSC0020548
ataaaacaacttc

SEQ ID NO: 81177 - DNA, 13 bp, Artificial Sequence
  Oligonucleotide for detection of SNP TSC0020548
gaagtcgttttat

SEQ ID NO: 81178 - DNA, 13 bp, Artificial Sequence
  Oligonucleotide for detection of SNP TSC0020548
ataaaacgacttc

SEQ ID NO: 81179 - DNA, 13 bp, Artificial Sequence
  Oligonucleotide for detection of SNP TSC0020548
atagaatggttty

SEQ ID NO: 81180 - DNA, 13 bp, Artificial Sequence
  Oligonucleotide for detection of SNP TSC0020548
raaaccattctat

SEQ ID NO: 81181 - DNA, 13 bp, Artificial Sequence
  Oligonucleotide for detection of SNP TSC0020548
atagaacggttty

SEQ ID NO: 81182 - DNA, 13 bp, Artificial Sequence
  Oligonucleotide for detection of SNP TSC0020548
raaaccgttctat

SEQ ID NO: 81183 - DNA, 13 bp, Artificial Sequence
  Oligonucleotide for detection of SNP TSC0020550
ggttttggggggt

SEQ ID NO: 81184 - DNA, 13 bp, Artificial Sequence
  Oligonucleotide for detection of SNP TSC0020550
accccccaaaacc

SEQ ID NO: 81185 - DNA, 13 bp, Artificial Sequence
  Oligonucleotide for detection of SNP TSC0020550
ggtttttgggggt

SEQ ID NO: 81186 - DNA, 13 bp, Artificial Sequence
  Oligonucleotide for detection of SNP TSC0020550
acccccaaaaacc

SEQ ID NO: 81187 - DNA, 13 bp, Artificial Sequence
  Oligonucleotide for detection of SNP TSC0020550
attttttaaagty

SEQ ID NO: 81188 - DNA, 13 bp, Artificial Sequence
  Oligonucleotide for detection of SNP TSC0020550
ractttaaaaaat

SEQ ID NO: 81189 - DNA, 13 bp, Artificial Sequence
  Oligonucleotide for detection of SNP TSC0020550
atttttaaaagty

SEQ ID NO: 81190 - DNA, 13 bp, Artificial Sequence
  Oligonucleotide for detection of SNP TSC0020550
racttttaaaaat

SEQ ID NO: 81191 - DNA, 13 bp, Artificial Sequence
  Oligonucleotide for detection of SNP TSC0020552
tttggaggttgag

SEQ ID NO: 81192 - DNA, 13 bp, Artificial Sequence
  Oligonucleotide for detection of SNP TSC0020552
ctcaacctccaaa

SEQ ID NO: 81193 - DNA, 13 bp, Artificial Sequence
  Oligonucleotide for detection of SNP TSC0020552
tttggatgttgag

SEQ ID NO: 81194 - DNA, 13 bp, Artificial Sequence
  Oligonucleotide for detection of SNP TSC0020552
ctcaacatccaaa

SEQ ID NO: 81195 - DNA, 13 bp, Artificial Sequence
  Oligonucleotide for detection of SNP TSC0020552
tttagtttttaga

SEQ ID NO: 81196 - DNA, 13 bp, Artificial Sequence
  Oligonucleotide for detection of SNP TSC0020552
tctaaaaactaaa

SEQ ID NO: 81197 - DNA, 13 bp, Artificial Sequence
  Oligonucleotide for detection of SNP TSC0020552
tttagtatttaga

SEQ ID NO: 81198 - DNA, 13 bp, Artificial Sequence
  Oligonucleotide for detection of SNP TSC0020552
tctaaatactaaa

SEQ ID NO: 81199 - DNA, 13 bp, Artificial Sequence
  Oligonucleotide for detection of SNP TSC0020559
attttattggagy

SEQ ID NO: 81200 - DNA, 13 bp, Artificial Sequence
  Oligonucleotide for detection of SNP TSC0020559
rctccaataaaat

SEQ ID NO: 81201 - DNA, 13 bp, Artificial Sequence
  Oligonucleotide for detection of SNP TSC0020559
attttagtggagy

SEQ ID NO: 81202 - DNA, 13 bp, Artificial Sequence
  Oligonucleotide for detection of SNP TSC0020559
rctccactaaaat

SEQ ID NO: 81203 - DNA, 13 bp, Artificial Sequence
  Oligonucleotide for detection of SNP TSC0020559
attttatcggagy

SEQ ID NO: 81204 - DNA, 13 bp, Artificial Sequence
  Oligonucleotide for detection of SNP TSC0020559
rctccgataaaat

SEQ ID NO: 81205 - DNA, 13 bp, Artificial Sequence
  Oligonucleotide for detection of SNP TSC0020559
attttagcggagy

SEQ ID NO: 81206 - DNA, 13 bp, Artificial Sequence
  Oligonucleotide for detection of SNP TSC0020559
rctccgctaaaat

SEQ ID NO: 81207 - DNA, 13 bp, Artificial Sequence
  Oligonucleotide for detection of SNP TSC0020559
gttttggtgaggt

SEQ ID NO: 81208 - DNA, 13 bp, Artificial Sequence
  Oligonucleotide for detection of SNP TSC0020559
acctcaccaaaac

SEQ ID NO: 81209 - DNA, 13 bp, Artificial Sequence
  Oligonucleotide for detection of SNP TSC0020559
gttttgttgaggt

SEQ ID NO: 81210 - DNA, 13 bp, Artificial Sequence
  Oligonucleotide for detection of SNP TSC0020559
acctcaacaaaac

SEQ ID NO: 81211 - DNA, 13 bp, Artificial Sequence
  Oligonucleotide for detection of SNP TSC0020559
gtttcggtgaggt

SEQ ID NO: 81212 - DNA, 13 bp, Artificial Sequence
  Oligonucleotide for detection of SNP TSC0020559
acctcaccgaaac

SEQ ID NO: 81213 - DNA, 13 bp, Artificial Sequence
  Oligonucleotide for detection of SNP TSC0020559
gtttcgttgaggt

SEQ ID NO: 81214 - DNA, 13 bp, Artificial Sequence
  Oligonucleotide for detection of SNP TSC0020559
acctcaacgaaac

SEQ ID NO: 81215 - DNA, 13 bp, Artificial Sequence
  Oligonucleotide for detection of SNP TSC0020560
ttgtagtttttag

SEQ ID NO: 81216 - DNA, 13 bp, Artificial Sequence
  Oligonucleotide for detection of SNP TSC0020560
ctaaaaactacaa

SEQ ID NO: 81217 - DNA, 13 bp, Artificial Sequence
  Oligonucleotide for detection of SNP TSC0020560
ttgtaggttttag

SEQ ID NO: 81218 - DNA, 13 bp, Artificial Sequence
  Oligonucleotide for detection of SNP TSC0020560
ctaaaacctacaa

SEQ ID NO: 81219 - DNA, 13 bp, Artificial Sequence
  Oligonucleotide for detection of SNP TSC0020560
tcgtagtttttag

SEQ ID NO: 81220 - DNA, 13 bp, Artificial Sequence
  Oligonucleotide for detection of SNP TSC0020560
ctaaaaactacga

SEQ ID NO: 81221 - DNA, 13 bp, Artificial Sequence
  Oligonucleotide for detection of SNP TSC0020560
tcgtaggttttag

SEQ ID NO: 81222 - DNA, 13 bp, Artificial Sequence
  Oligonucleotide for detection of SNP TSC0020560
ctaaaacctacga

SEQ ID NO: 81223 - DNA, 13 bp, Artificial Sequence
  Oligonucleotide for detection of SNP TSC0020560
ttgggagttgtgg

SEQ ID NO: 81224 - DNA, 13 bp, Artificial Sequence
  Oligonucleotide for detection of SNP TSC0020560
ccacaactcccaa

SEQ ID NO: 81225 - DNA, 13 bp, Artificial Sequence
  Oligonucleotide for detection of SNP TSC0020560
ttgggatttgtgg

SEQ ID NO: 81226 - DNA, 13 bp, Artificial Sequence
  Oligonucleotide for detection of SNP TSC0020560
ccacaaatcccaa

SEQ ID NO: 81227 - DNA, 13 bp, Artificial Sequence
  Oligonucleotide for detection of SNP TSC0020560
ttgggagttgcgg

SEQ ID NO: 81228 - DNA, 13 bp, Artificial Sequence
  Oligonucleotide for detection of SNP TSC0020560
ccgcaactcccaa

SEQ ID NO: 81229 - DNA, 13 bp, Artificial Sequence
  Oligonucleotide for detection of SNP TSC0020560
ttgggatttgcgg

SEQ ID NO: 81230 - DNA, 13 bp, Artificial Sequence
  Oligonucleotide for detection of SNP TSC0020560
ccgcaaatcccaa

SEQ ID NO: 81231 - DNA, 13 bp, Artificial Sequence
  Oligonucleotide for detection of SNP TSC0020561
attatgagttata

SEQ ID NO: 81232 - DNA, 13 bp, Artificial Sequence
  Oligonucleotide for detection of SNP TSC0020561
tataactcataat

SEQ ID NO: 81233 - DNA, 13 bp, Artificial Sequence
  Oligonucleotide for detection of SNP TSC0020561
attatgggttata

SEQ ID NO: 81234 - DNA, 13 bp, Artificial Sequence
  Oligonucleotide for detection of SNP TSC0020561
tataacccataat

SEQ ID NO: 81235 - DNA, 13 bp, Artificial Sequence
  Oligonucleotide for detection of SNP TSC0020563
tatttaaaggtty

SEQ ID NO: 81236 - DNA, 13 bp, Artificial Sequence
  Oligonucleotide for detection of SNP TSC0020563
raacctttaaata

SEQ ID NO: 81237 - DNA, 13 bp, Artificial Sequence
  Oligonucleotide for detection of SNP TSC0020563
tatttagaggtty

SEQ ID NO: 81238 - DNA, 13 bp, Artificial Sequence
  Oligonucleotide for detection of SNP TSC0020563
raacctctaaata

SEQ ID NO: 81239 - DNA, 13 bp, Artificial Sequence
  Oligonucleotide for detection of SNP TSC0020565
aggttgatttttg

SEQ ID NO: 81240 - DNA, 13 bp, Artificial Sequence
  Oligonucleotide for detection of SNP TSC0020565
caaaaatcaacct

SEQ ID NO: 81241 - DNA, 13 bp, Artificial Sequence
  Oligonucleotide for detection of SNP TSC0020565
aggttgttttttg

SEQ ID NO: 81242 - DNA, 13 bp, Artificial Sequence
  Oligonucleotide for detection of SNP TSC0020565
caaaaaacaacct

SEQ ID NO: 81243 - DNA, 13 bp, Artificial Sequence
  Oligonucleotide for detection of SNP TSC0020565
taaaggttagttt

SEQ ID NO: 81244 - DNA, 13 bp, Artificial Sequence
  Oligonucleotide for detection of SNP TSC0020565
aaactaaccttta

SEQ ID NO: 81245 - DNA, 13 bp, Artificial Sequence
  Oligonucleotide for detection of SNP TSC0020565
taaagggtagttt

SEQ ID NO: 81246 - DNA, 13 bp, Artificial Sequence
  Oligonucleotide for detection of SNP TSC0020565
aaactacccttta

SEQ ID NO: 81247 - DNA, 13 bp, Artificial Sequence
  Oligonucleotide for detection of SNP TSC0020572
gaaatgggattat

SEQ ID NO: 81248 - DNA, 13 bp, Artificial Sequence
  Oligonucleotide for detection of SNP TSC0020572
ataatcccatttc

SEQ ID NO: 81249 - DNA, 13 bp, Artificial Sequence
  Oligonucleotide for detection of SNP TSC0020572
gaaatgagattat

SEQ ID NO: 81250 - DNA, 13 bp, Artificial Sequence
  Oligonucleotide for detection of SNP TSC0020572
ataatctcatttc

SEQ ID NO: 81251 - DNA, 13 bp, Artificial Sequence
  Oligonucleotide for detection of SNP TSC0020573
ttgtagtgggggy

SEQ ID NO: 81252 - DNA, 13 bp, Artificial Sequence
  Oligonucleotide for detection of SNP TSC0020573
rcccccactacaa

SEQ ID NO: 81253 - DNA, 13 bp, Artificial Sequence
  Oligonucleotide for detection of SNP TSC0020573
ttgtagcgggggy

SEQ ID NO: 81254 - DNA, 13 bp, Artificial Sequence
  Oligonucleotide for detection of SNP TSC0020573
rcccccgctacaa

SEQ ID NO: 81255 - DNA, 13 bp, Artificial Sequence
  Oligonucleotide for detection of SNP TSC0020573
gtttttgttgtag

SEQ ID NO: 81256 - DNA, 13 bp, Artificial Sequence
  Oligonucleotide for detection of SNP TSC0020573
ctacaacaaaaac

SEQ ID NO: 81257 - DNA, 13 bp, Artificial Sequence
  Oligonucleotide for detection of SNP TSC0020573
gtttttattgtag

SEQ ID NO: 81258 - DNA, 13 bp, Artificial Sequence
  Oligonucleotide for detection of SNP TSC0020573
ctacaataaaaac

SEQ ID NO: 81259 - DNA, 13 bp, Artificial Sequence
  Oligonucleotide for detection of SNP TSC0020573
gttttcgttgtag

SEQ ID NO: 81260 - DNA, 13 bp, Artificial Sequence
  Oligonucleotide for detection of SNP TSC0020573
ctacaacgaaaac

SEQ ID NO: 81261 - DNA, 13 bp, Artificial Sequence
  Oligonucleotide for detection of SNP TSC0020580
ttttttgtggatt

SEQ ID NO: 81262 - DNA, 13 bp, Artificial Sequence
  Oligonucleotide for detection of SNP TSC0020580
aatccacaaaaaa

SEQ ID NO: 81263 - DNA, 13 bp, Artificial Sequence
  Oligonucleotide for detection of SNP TSC0020580
ttttttatggatt

SEQ ID NO: 81264 - DNA, 13 bp, Artificial Sequence
  Oligonucleotide for detection of SNP TSC0020580
aatccataaaaaa

SEQ ID NO: 81265 - DNA, 13 bp, Artificial Sequence
  Oligonucleotide for detection of SNP TSC0020585
tttattgttggtt

SEQ ID NO: 81266 - DNA, 13 bp, Artificial Sequence
  Oligonucleotide for detection of SNP TSC0020585
aaccaacaataaa

SEQ ID NO: 81267 - DNA, 13 bp, Artificial Sequence
  Oligonucleotide for detection of SNP TSC0020585
tttattattggtt

SEQ ID NO: 81268 - DNA, 13 bp, Artificial Sequence
  Oligonucleotide for detection of SNP TSC0020585
aaccaataataaa

SEQ ID NO: 81269 - DNA, 13 bp, Artificial Sequence
  Oligonucleotide for detection of SNP TSC0020589
gaaaataatttga

SEQ ID NO: 81270 - DNA, 13 bp, Artificial Sequence
  Oligonucleotide for detection of SNP TSC0020589
tcaaattattttc

SEQ ID NO: 81271 - DNA, 13 bp, Artificial Sequence
  Oligonucleotide for detection of SNP TSC0020589
gaaaattatttga

SEQ ID NO: 81272 - DNA, 13 bp, Artificial Sequence
  Oligonucleotide for detection of SNP TSC0020589
tcaaataattttc

SEQ ID NO: 81273 - DNA, 13 bp, Artificial Sequence
  Oligonucleotide for detection of SNP TSC0020589
ttaaattatttty

SEQ ID NO: 81274 - DNA, 13 bp, Artificial Sequence
  Oligonucleotide for detection of SNP TSC0020589
raaaataatttaa

SEQ ID NO: 81275 - DNA, 13 bp, Artificial Sequence
  Oligonucleotide for detection of SNP TSC0020589
ttaaatgatttty

SEQ ID NO: 81276 - DNA, 13 bp, Artificial Sequence
  Oligonucleotide for detection of SNP TSC0020589
raaaatcatttaa

SEQ ID NO: 81277 - DNA, 13 bp, Artificial Sequence
  Oligonucleotide for detection of SNP TSC0020591
tttataatttgay

SEQ ID NO: 81278 - DNA, 13 bp, Artificial Sequence
  Oligonucleotide for detection of SNP TSC0020591
rtcaaattataaa

SEQ ID NO: 81279 - DNA, 13 bp, Artificial Sequence
  Oligonucleotide for detection of SNP TSC0020591
tttatagtttgay

SEQ ID NO: 81280 - DNA, 13 bp, Artificial Sequence
  Oligonucleotide for detection of SNP TSC0020591
rtcaaactataaa

SEQ ID NO: 81281 - DNA, 13 bp, Artificial Sequence
  Oligonucleotide for detection of SNP TSC0020594
aaatttaaaatty

SEQ ID NO: 81282 - DNA, 13 bp, Artificial Sequence
  Oligonucleotide for detection of SNP TSC0020594
raattttaaattt

SEQ ID NO: 81283 - DNA, 13 bp, Artificial Sequence
  Oligonucleotide for detection of SNP TSC0020594
aaattttaaatty

SEQ ID NO: 81284 - DNA, 13 bp, Artificial Sequence
  Oligonucleotide for detection of SNP TSC0020594
raatttaaaattt

SEQ ID NO: 81285 - DNA, 13 bp, Artificial Sequence
  Oligonucleotide for detection of SNP TSC0020594
ggattttaaattt

SEQ ID NO: 81286 - DNA, 13 bp, Artificial Sequence
  Oligonucleotide for detection of SNP TSC0020594
aaatttaaaatcc

SEQ ID NO: 81287 - DNA, 13 bp, Artificial Sequence
  Oligonucleotide for detection of SNP TSC0020594
ggatttaaaattt

SEQ ID NO: 81288 - DNA, 13 bp, Artificial Sequence
  Oligonucleotide for detection of SNP TSC0020594
aaattttaaatcc

SEQ ID NO: 81289 - DNA, 13 bp, Artificial Sequence
  Oligonucleotide for detection of SNP TSC0020595
ggatatgttataa

SEQ ID NO: 81290 - DNA, 13 bp, Artificial Sequence
  Oligonucleotide for detection of SNP TSC0020595
ttataacatatcc

SEQ ID NO: 81291 - DNA, 13 bp, Artificial Sequence
  Oligonucleotide for detection of SNP TSC0020595
ggatatattataa

SEQ ID NO: 81292 - DNA, 13 bp, Artificial Sequence
  Oligonucleotide for detection of SNP TSC0020595
ttataatatatcc

SEQ ID NO: 81293 - DNA, 13 bp, Artificial Sequence
  Oligonucleotide for detection of SNP TSC0020597
ggagagttgttag

SEQ ID NO: 81294 - DNA, 13 bp, Artificial Sequence
  Oligonucleotide for detection of SNP TSC0020597
ctaacaactctcc

SEQ ID NO: 81295 - DNA, 13 bp, Artificial Sequence
  Oligonucleotide for detection of SNP TSC0020597
ggagaggtgttag

SEQ ID NO: 81296 - DNA, 13 bp, Artificial Sequence
  Oligonucleotide for detection of SNP TSC0020597
ctaacacctctcc

SEQ ID NO: 81297 - DNA, 13 bp, Artificial Sequence
  Oligonucleotide for detection of SNP TSC0020597
ttaatagttttty

SEQ ID NO: 81298 - DNA, 13 bp, Artificial Sequence
  Oligonucleotide for detection of SNP TSC0020597
raaaaactattaa

SEQ ID NO: 81299 - DNA, 13 bp, Artificial Sequence
  Oligonucleotide for detection of SNP TSC0020597
ttaatatttttty

SEQ ID NO: 81300 - DNA, 13 bp, Artificial Sequence
  Oligonucleotide for detection of SNP TSC0020597
raaaaaatattaa

SEQ ID NO: 81301 - DNA, 13 bp, Artificial Sequence
  Oligonucleotide for detection of SNP TSC0020598
tgtggaagggtay

SEQ ID NO: 81302 - DNA, 13 bp, Artificial Sequence
  Oligonucleotide for detection of SNP TSC0020598
rtacccttccaca

SEQ ID NO: 81303 - DNA, 13 bp, Artificial Sequence
  Oligonucleotide for detection of SNP TSC0020598
tgtggaggggtay

SEQ ID NO: 81304 - DNA, 13 bp, Artificial Sequence
  Oligonucleotide for detection of SNP TSC0020598
rtacccctccaca

SEQ ID NO: 81305 - DNA, 13 bp, Artificial Sequence
  Oligonucleotide for detection of SNP TSC0020601
gagagaatattta

SEQ ID NO: 81306 - DNA, 13 bp, Artificial Sequence
  Oligonucleotide for detection of SNP TSC0020601
taaatattctctc

SEQ ID NO: 81307 - DNA, 13 bp, Artificial Sequence
  Oligonucleotide for detection of SNP TSC0020601
gagagattattta

SEQ ID NO: 81308 - DNA, 13 bp, Artificial Sequence
  Oligonucleotide for detection of SNP TSC0020601
taaataatctctc

SEQ ID NO: 81309 - DNA, 13 bp, Artificial Sequence
  Oligonucleotide for detection of SNP TSC0020601
tgagtgtttttty

SEQ ID NO: 81310 - DNA, 13 bp, Artificial Sequence
  Oligonucleotide for detection of SNP TSC0020601
raaaaaacactca

SEQ ID NO: 81311 - DNA, 13 bp, Artificial Sequence
  Oligonucleotide for detection of SNP TSC0020602
aagttgagaagtg

SEQ ID NO: 81312 - DNA, 13 bp, Artificial Sequence
  Oligonucleotide for detection of SNP TSC0020602
cacttctcaactt

SEQ ID NO: 81313 - DNA, 13 bp, Artificial Sequence
  Oligonucleotide for detection of SNP TSC0020602
aagttgggaagtg

SEQ ID NO: 81314 - DNA, 13 bp, Artificial Sequence
  Oligonucleotide for detection of SNP TSC0020602
cacttcccaactt

SEQ ID NO: 81315 - DNA, 13 bp, Artificial Sequence
  Oligonucleotide for detection of SNP TSC0020604
gtaaaatgattgg

SEQ ID NO: 81316 - DNA, 13 bp, Artificial Sequence
  Oligonucleotide for detection of SNP TSC0020604
ccaatcattttac

SEQ ID NO: 81317 - DNA, 13 bp, Artificial Sequence
  Oligonucleotide for detection of SNP TSC0020604
gtaaaacgattgg

SEQ ID NO: 81318 - DNA, 13 bp, Artificial Sequence
  Oligonucleotide for detection of SNP TSC0020604
ccaatcgttttac

SEQ ID NO: 81319 - DNA, 13 bp, Artificial Sequence
  Oligonucleotide for detection of SNP TSC0020604
ttaattgttttay

SEQ ID NO: 81320 - DNA, 13 bp, Artificial Sequence
  Oligonucleotide for detection of SNP TSC0020604
rtaaaacaattaa

SEQ ID NO: 81321 - DNA, 13 bp, Artificial Sequence
  Oligonucleotide for detection of SNP TSC0020604
ttaattattttay

SEQ ID NO: 81322 - DNA, 13 bp, Artificial Sequence
  Oligonucleotide for detection of SNP TSC0020604
rtaaaataattaa

SEQ ID NO: 81323 - DNA, 13 bp, Artificial Sequence
  Oligonucleotide for detection of SNP TSC0020604
ttaatcgttttay

SEQ ID NO: 81324 - DNA, 13 bp, Artificial Sequence
  Oligonucleotide for detection of SNP TSC0020604
rtaaaacgattaa

SEQ ID NO: 81325 - DNA, 13 bp, Artificial Sequence
  Oligonucleotide for detection of SNP TSC0020605
agttttatgttgy

SEQ ID NO: 81326 - DNA, 13 bp, Artificial Sequence
  Oligonucleotide for detection of SNP TSC0020605
rcaacataaaact

SEQ ID NO: 81327 - DNA, 13 bp, Artificial Sequence
  Oligonucleotide for detection of SNP TSC0020605
agttttgtgttgy

SEQ ID NO: 81328 - DNA, 13 bp, Artificial Sequence
  Oligonucleotide for detection of SNP TSC0020605
rcaacacaaaact

SEQ ID NO: 81329 - DNA, 13 bp, Artificial Sequence
  Oligonucleotide for detection of SNP TSC0020605
agttttacgttgy

SEQ ID NO: 81330 - DNA, 13 bp, Artificial Sequence
  Oligonucleotide for detection of SNP TSC0020605
rcaacgtaaaact

SEQ ID NO: 81331 - DNA, 13 bp, Artificial Sequence
  Oligonucleotide for detection of SNP TSC0020605
agttttgcgttgy

SEQ ID NO: 81332 - DNA, 13 bp, Artificial Sequence
  Oligonucleotide for detection of SNP TSC0020605
rcaacgcaaaact

SEQ ID NO: 81333 - DNA, 13 bp, Artificial Sequence
  Oligonucleotide for detection of SNP TSC0020606
taaaatagtatgg

SEQ ID NO: 81334 - DNA, 13 bp, Artificial Sequence
  Oligonucleotide for detection of SNP TSC0020606
ccatactatttta

SEQ ID NO: 81335 - DNA, 13 bp, Artificial Sequence
  Oligonucleotide for detection of SNP TSC0020606
taaaatggtatgg

SEQ ID NO: 81336 - DNA, 13 bp, Artificial Sequence
  Oligonucleotide for detection of SNP TSC0020606
ccataccatttta

SEQ ID NO: 81337 - DNA, 13 bp, Artificial Sequence
  Oligonucleotide for detection of SNP TSC0020606
taaaacggtatgg

SEQ ID NO: 81338 - DNA, 13 bp, Artificial Sequence
  Oligonucleotide for detection of SNP TSC0020606
ccataccgtttta

SEQ ID NO: 81339 - DNA, 13 bp, Artificial Sequence
  Oligonucleotide for detection of SNP TSC0020606
ttatgttgtttta

SEQ ID NO: 81340 - DNA, 13 bp, Artificial Sequence
  Oligonucleotide for detection of SNP TSC0020606
taaaacaacataa

SEQ ID NO: 81341 - DNA, 13 bp, Artificial Sequence
  Oligonucleotide for detection of SNP TSC0020606
ttatgtcgtttta

SEQ ID NO: 81342 - DNA, 13 bp, Artificial Sequence
  Oligonucleotide for detection of SNP TSC0020606
taaaacgacataa

SEQ ID NO: 81343 - DNA, 13 bp, Artificial Sequence
  Oligonucleotide for detection of SNP TSC0020607
aattgttgaagtg

SEQ ID NO: 81344 - DNA, 13 bp, Artificial Sequence
  Oligonucleotide for detection of SNP TSC0020607
cacttcaacaatt

SEQ ID NO: 81345 - DNA, 13 bp, Artificial Sequence
  Oligonucleotide for detection of SNP TSC0020607
aattgtggaagtg

SEQ ID NO: 81346 - DNA, 13 bp, Artificial Sequence
  Oligonucleotide for detection of SNP TSC0020607
cacttccacaatt

SEQ ID NO: 81347 - DNA, 13 bp, Artificial Sequence
  Oligonucleotide for detection of SNP TSC0020607
aattgtcgaagtg

SEQ ID NO: 81348 - DNA, 13 bp, Artificial Sequence
  Oligonucleotide for detection of SNP TSC0020607
cacttcgacaatt

SEQ ID NO: 81349 - DNA, 13 bp, Artificial Sequence
  Oligonucleotide for detection of SNP TSC0020607
aattgcggaagtg

SEQ ID NO: 81350 - DNA, 13 bp, Artificial Sequence
  Oligonucleotide for detection of SNP TSC0020607
cacttccgcaatt

SEQ ID NO: 81351 - DNA, 13 bp, Artificial Sequence
  Oligonucleotide for detection of SNP TSC0020607
tattttggtagtt

SEQ ID NO: 81352 - DNA, 13 bp, Artificial Sequence
  Oligonucleotide for detection of SNP TSC0020607
aactaccaaaata

SEQ ID NO: 81353 - DNA, 13 bp, Artificial Sequence
  Oligonucleotide for detection of SNP TSC0020607
tatttttgtagtt

SEQ ID NO: 81354 - DNA, 13 bp, Artificial Sequence
  Oligonucleotide for detection of SNP TSC0020607
aactacaaaaata

SEQ ID NO: 81355 - DNA, 13 bp, Artificial Sequence
  Oligonucleotide for detection of SNP TSC0020607
tatttcggtagtt

SEQ ID NO: 81356 - DNA, 13 bp, Artificial Sequence
  Oligonucleotide for detection of SNP TSC0020607
aactaccgaaata

SEQ ID NO: 81357 - DNA, 13 bp, Artificial Sequence
  Oligonucleotide for detection of SNP TSC0020607
tattttcgtagtt

SEQ ID NO: 81358 - DNA, 13 bp, Artificial Sequence
  Oligonucleotide for detection of SNP TSC0020607
aactacgaaaata

SEQ ID NO: 81359 - DNA, 13 bp, Artificial Sequence
  Oligonucleotide for detection of SNP TSC0020611
tagtttttttgta

SEQ ID NO: 81360 - DNA, 13 bp, Artificial Sequence
  Oligonucleotide for detection of SNP TSC0020611
tacaaaaaaacta

SEQ ID NO: 81361 - DNA, 13 bp, Artificial Sequence
  Oligonucleotide for detection of SNP TSC0020611
tagtttgtttgta

SEQ ID NO: 81362 - DNA, 13 bp, Artificial Sequence
  Oligonucleotide for detection of SNP TSC0020611
tacaaacaaacta

SEQ ID NO: 81363 - DNA, 13 bp, Artificial Sequence
  Oligonucleotide for detection of SNP TSC0020611
tatagagaagttg

SEQ ID NO: 81364 - DNA, 13 bp, Artificial Sequence
  Oligonucleotide for detection of SNP TSC0020611
caacttctctata

SEQ ID NO: 81365 - DNA, 13 bp, Artificial Sequence
  Oligonucleotide for detection of SNP TSC0020611
tatagataagttg

SEQ ID NO: 81366 - DNA, 13 bp, Artificial Sequence
  Oligonucleotide for detection of SNP TSC0020611
caacttatctata

SEQ ID NO: 81367 - DNA, 13 bp, Artificial Sequence
  Oligonucleotide for detection of SNP TSC0020612
aggaggggttgty

SEQ ID NO: 81368 - DNA, 13 bp, Artificial Sequence
  Oligonucleotide for detection of SNP TSC0020612
racaacccctcct

SEQ ID NO: 81369 - DNA, 13 bp, Artificial Sequence
  Oligonucleotide for detection of SNP TSC0020612
aggaggagttgty

SEQ ID NO: 81370 - DNA, 13 bp, Artificial Sequence
  Oligonucleotide for detection of SNP TSC0020612
racaactcctcct

SEQ ID NO: 81371 - DNA, 13 bp, Artificial Sequence
  Oligonucleotide for detection of SNP TSC0020612
aggaggggtcgty

SEQ ID NO: 81372 - DNA, 13 bp, Artificial Sequence
  Oligonucleotide for detection of SNP TSC0020612
racgacccctcct

SEQ ID NO: 81373 - DNA, 13 bp, Artificial Sequence
  Oligonucleotide for detection of SNP TSC0020612
aggaggagtcgty

SEQ ID NO: 81374 - DNA, 13 bp, Artificial Sequence
  Oligonucleotide for detection of SNP TSC0020612
racgactcctcct

SEQ ID NO: 81375 - DNA, 13 bp, Artificial Sequence
  Oligonucleotide for detection of SNP TSC0020613
tttttgatttgty

SEQ ID NO: 81376 - DNA, 13 bp, Artificial Sequence
  Oligonucleotide for detection of SNP TSC0020613
racaaatcaaaaa

SEQ ID NO: 81377 - DNA, 13 bp, Artificial Sequence
  Oligonucleotide for detection of SNP TSC0020613
tttttggtttgty

SEQ ID NO: 81378 - DNA, 13 bp, Artificial Sequence
  Oligonucleotide for detection of SNP TSC0020613
racaaaccaaaaa

SEQ ID NO: 81379 - DNA, 13 bp, Artificial Sequence
  Oligonucleotide for detection of SNP TSC0020613
ttttcgatttgty

SEQ ID NO: 81380 - DNA, 13 bp, Artificial Sequence
  Oligonucleotide for detection of SNP TSC0020613
racaaatcgaaaa

SEQ ID NO: 81381 - DNA, 13 bp, Artificial Sequence
  Oligonucleotide for detection of SNP TSC0020613
ttttcggtttgty

SEQ ID NO: 81382 - DNA, 13 bp, Artificial Sequence
  Oligonucleotide for detection of SNP TSC0020613
racaaaccgaaaa

SEQ ID NO: 81383 - DNA, 13 bp, Artificial Sequence
  Oligonucleotide for detection of SNP TSC0020615
gtttaaagtgaty

SEQ ID NO: 81384 - DNA, 13 bp, Artificial Sequence
  Oligonucleotide for detection of SNP TSC0020615
ratcactttaaac

SEQ ID NO: 81385 - DNA, 13 bp, Artificial Sequence
  Oligonucleotide for detection of SNP TSC0020615
gtttaaggtgaty

SEQ ID NO: 81386 - DNA, 13 bp, Artificial Sequence
  Oligonucleotide for detection of SNP TSC0020615
ratcaccttaaac

SEQ ID NO: 81387 - DNA, 13 bp, Artificial Sequence
  Oligonucleotide for detection of SNP TSC0020616
ataattagaattt

SEQ ID NO: 81388 - DNA, 13 bp, Artificial Sequence
  Oligonucleotide for detection of SNP TSC0020616
aaattctaattat

SEQ ID NO: 81389 - DNA, 13 bp, Artificial Sequence
  Oligonucleotide for detection of SNP TSC0020616
ataattggaattt

SEQ ID NO: 81390 - DNA, 13 bp, Artificial Sequence
  Oligonucleotide for detection of SNP TSC0020616
aaattccaattat

SEQ ID NO: 81391 - DNA, 13 bp, Artificial Sequence
  Oligonucleotide for detection of SNP TSC0020616
ataatcggaattt

SEQ ID NO: 81392 - DNA, 13 bp, Artificial Sequence
  Oligonucleotide for detection of SNP TSC0020616
aaattccgattat

SEQ ID NO: 81393 - DNA, 13 bp, Artificial Sequence
  Oligonucleotide for detection of SNP TSC0020617
tgttaaggggagt

SEQ ID NO: 81394 - DNA, 13 bp, Artificial Sequence
  Oligonucleotide for detection of SNP TSC0020617
actccccttaaca

SEQ ID NO: 81395 - DNA, 13 bp, Artificial Sequence
  Oligonucleotide for detection of SNP TSC0020617
tgttaaagggagt

SEQ ID NO: 81396 - DNA, 13 bp, Artificial Sequence
  Oligonucleotide for detection of SNP TSC0020617
actccctttaaca

SEQ ID NO: 81397 - DNA, 13 bp, Artificial Sequence
  Oligonucleotide for detection of SNP TSC0020618
gttatttggaagy

SEQ ID NO: 81398 - DNA, 13 bp, Artificial Sequence
  Oligonucleotide for detection of SNP TSC0020618
rcttccaaataac

SEQ ID NO: 81399 - DNA, 13 bp, Artificial Sequence
  Oligonucleotide for detection of SNP TSC0020618
gttattgggaagy

SEQ ID NO: 81400 - DNA, 13 bp, Artificial Sequence
  Oligonucleotide for detection of SNP TSC0020618
rcttcccaataac

SEQ ID NO: 81401 - DNA, 13 bp, Artificial Sequence
  Oligonucleotide for detection of SNP TSC0020618
gttattcggaagy

SEQ ID NO: 81402 - DNA, 13 bp, Artificial Sequence
  Oligonucleotide for detection of SNP TSC0020618
rcttccgaataac

SEQ ID NO: 81403 - DNA, 13 bp, Artificial Sequence
  Oligonucleotide for detection of SNP TSC0020618
gttatcgggaagy

SEQ ID NO: 81404 - DNA, 13 bp, Artificial Sequence
  Oligonucleotide for detection of SNP TSC0020618
rcttcccgataac

SEQ ID NO: 81405 - DNA, 13 bp, Artificial Sequence
  Oligonucleotide for detection of SNP TSC0020618
gtttttgggtggy

SEQ ID NO: 81406 - DNA, 13 bp, Artificial Sequence
  Oligonucleotide for detection of SNP TSC0020618
rccacccaaaaac

SEQ ID NO: 81407 - DNA, 13 bp, Artificial Sequence
  Oligonucleotide for detection of SNP TSC0020618
gttttttggtggy

SEQ ID NO: 81408 - DNA, 13 bp, Artificial Sequence
  Oligonucleotide for detection of SNP TSC0020618
rccaccaaaaaac

SEQ ID NO: 81409 - DNA, 13 bp, Artificial Sequence
  Oligonucleotide for detection of SNP TSC0020618
gttttcgggtggy

SEQ ID NO: 81410 - DNA, 13 bp, Artificial Sequence
  Oligonucleotide for detection of SNP TSC0020618
rccacccgaaaac

SEQ ID NO: 81411 - DNA, 13 bp, Artificial Sequence
  Oligonucleotide for detection of SNP TSC0020618
gtttttcggtggy

SEQ ID NO: 81412 - DNA, 13 bp, Artificial Sequence
  Oligonucleotide for detection of SNP TSC0020618
rccaccgaaaaac

SEQ ID NO: 81413 - DNA, 13 bp, Artificial Sequence
  Oligonucleotide for detection of SNP TSC0020619
agatttatttatt

SEQ ID NO: 81414 - DNA, 13 bp, Artificial Sequence
  Oligonucleotide for detection of SNP TSC0020619
aataaataaatct

SEQ ID NO: 81415 - DNA, 13 bp, Artificial Sequence
  Oligonucleotide for detection of SNP TSC0020619
agatttgtttatt

SEQ ID NO: 81416 - DNA, 13 bp, Artificial Sequence
  Oligonucleotide for detection of SNP TSC0020619
aataaacaaatct

SEQ ID NO: 81417 - DNA, 13 bp, Artificial Sequence
  Oligonucleotide for detection of SNP TSC0020619
agattcgtttatt

SEQ ID NO: 81418 - DNA, 13 bp, Artificial Sequence
  Oligonucleotide for detection of SNP TSC0020619
aataaacgaatct

SEQ ID NO: 81419 - DNA, 13 bp, Artificial Sequence
  Oligonucleotide for detection of SNP TSC0020619
agtgagtgggttt

SEQ ID NO: 81420 - DNA, 13 bp, Artificial Sequence
  Oligonucleotide for detection of SNP TSC0020619
aaacccactcact

SEQ ID NO: 81421 - DNA, 13 bp, Artificial Sequence
  Oligonucleotide for detection of SNP TSC0020619
agtgagcgggttt

SEQ ID NO: 81422 - DNA, 13 bp, Artificial Sequence
  Oligonucleotide for detection of SNP TSC0020619
aaacccgctcact

SEQ ID NO: 81423 - DNA, 13 bp, Artificial Sequence
  Oligonucleotide for detection of SNP TSC0020620
tagatttgtttay

SEQ ID NO: 81424 - DNA, 13 bp, Artificial Sequence
  Oligonucleotide for detection of SNP TSC0020620
rtaaacaaatcta

SEQ ID NO: 81425 - DNA, 13 bp, Artificial Sequence
  Oligonucleotide for detection of SNP TSC0020620
tagattcgtttay

SEQ ID NO: 81426 - DNA, 13 bp, Artificial Sequence
  Oligonucleotide for detection of SNP TSC0020620
rtaaacgaatcta

SEQ ID NO: 81427 - DNA, 13 bp, Artificial Sequence
  Oligonucleotide for detection of SNP TSC0020620
gtgagtgggtttg

SEQ ID NO: 81428 - DNA, 13 bp, Artificial Sequence
  Oligonucleotide for detection of SNP TSC0020620
caaacccactcac

SEQ ID NO: 81429 - DNA, 13 bp, Artificial Sequence
  Oligonucleotide for detection of SNP TSC0020620
gtgagtaggtttg

SEQ ID NO: 81430 - DNA, 13 bp, Artificial Sequence
  Oligonucleotide for detection of SNP TSC0020620
caaacctactcac

SEQ ID NO: 81431 - DNA, 13 bp, Artificial Sequence
  Oligonucleotide for detection of SNP TSC0020620
gtgagcgggtttg

SEQ ID NO: 81432 - DNA, 13 bp, Artificial Sequence
  Oligonucleotide for detection of SNP TSC0020620
caaacccgctcac

SEQ ID NO: 81433 - DNA, 13 bp, Artificial Sequence
  Oligonucleotide for detection of SNP TSC0020621
tttatatagatta

SEQ ID NO: 81434 - DNA, 13 bp, Artificial Sequence
  Oligonucleotide for detection of SNP TSC0020621
taatctatataaa

SEQ ID NO: 81435 - DNA, 13 bp, Artificial Sequence
  Oligonucleotide for detection of SNP TSC0020621
tttatagagatta

SEQ ID NO: 81436 - DNA, 13 bp, Artificial Sequence
  Oligonucleotide for detection of SNP TSC0020621
taatctctataaa

SEQ ID NO: 81437 - DNA, 13 bp, Artificial Sequence
  Oligonucleotide for detection of SNP TSC0020621
tgatttttgtagg

SEQ ID NO: 81438 - DNA, 13 bp, Artificial Sequence
  Oligonucleotide for detection of SNP TSC0020621
cctacaaaaatca

SEQ ID NO: 81439 - DNA, 13 bp, Artificial Sequence
  Oligonucleotide for detection of SNP TSC0020622
tatggtggtttay

SEQ ID NO: 81440 - DNA, 13 bp, Artificial Sequence
  Oligonucleotide for detection of SNP TSC0020622
rtaaaccaccata

SEQ ID NO: 81441 - DNA, 13 bp, Artificial Sequence
  Oligonucleotide for detection of SNP TSC0020622
tatggtagtttay

SEQ ID NO: 81442 - DNA, 13 bp, Artificial Sequence
  Oligonucleotide for detection of SNP TSC0020622
rtaaactaccata

SEQ ID NO: 81443 - DNA, 13 bp, Artificial Sequence
  Oligonucleotide for detection of SNP TSC0020622
tacggtggtttay

SEQ ID NO: 81444 - DNA, 13 bp, Artificial Sequence
  Oligonucleotide for detection of SNP TSC0020622
rtaaaccaccgta

SEQ ID NO: 81445 - DNA, 13 bp, Artificial Sequence
  Oligonucleotide for detection of SNP TSC0020622
tacggtagtttay

SEQ ID NO: 81446 - DNA, 13 bp, Artificial Sequence
  Oligonucleotide for detection of SNP TSC0020622
rtaaactaccgta

SEQ ID NO: 81447 - DNA, 13 bp, Artificial Sequence
  Oligonucleotide for detection of SNP TSC0020623
aattatattttat

SEQ ID NO: 81448 - DNA, 13 bp, Artificial Sequence
  Oligonucleotide for detection of SNP TSC0020623
ataaaatataatt

SEQ ID NO: 81449 - DNA, 13 bp, Artificial Sequence
  Oligonucleotide for detection of SNP TSC0020623
aattatgttttat

SEQ ID NO: 81450 - DNA, 13 bp, Artificial Sequence
  Oligonucleotide for detection of SNP TSC0020623
ataaaacataatt

SEQ ID NO: 81451 - DNA, 13 bp, Artificial Sequence
  Oligonucleotide for detection of SNP TSC0020624
atgtttgatatta

SEQ ID NO: 81452 - DNA, 13 bp, Artificial Sequence
  Oligonucleotide for detection of SNP TSC0020624
taatatcaaacat

SEQ ID NO: 81453 - DNA, 13 bp, Artificial Sequence
  Oligonucleotide for detection of SNP TSC0020624
atgtttaatatta

SEQ ID NO: 81454 - DNA, 13 bp, Artificial Sequence
  Oligonucleotide for detection of SNP TSC0020624
taatattaaacat

SEQ ID NO: 81455 - DNA, 13 bp, Artificial Sequence
  Oligonucleotide for detection of SNP TSC0020625
aaaatgaagtgga

SEQ ID NO: 81456 - DNA, 13 bp, Artificial Sequence
  Oligonucleotide for detection of SNP TSC0020625
tccacttcatttt

SEQ ID NO: 81457 - DNA, 13 bp, Artificial Sequence
  Oligonucleotide for detection of SNP TSC0020625
aaaatgtagtgga

SEQ ID NO: 81458 - DNA, 13 bp, Artificial Sequence
  Oligonucleotide for detection of SNP TSC0020625
tccactacatttt

SEQ ID NO: 81459 - DNA, 13 bp, Artificial Sequence
  Oligonucleotide for detection of SNP TSC0020625
tttattttatttt

SEQ ID NO: 81460 - DNA, 13 bp, Artificial Sequence
  Oligonucleotide for detection of SNP TSC0020625
aaaataaaataaa

SEQ ID NO: 81461 - DNA, 13 bp, Artificial Sequence
  Oligonucleotide for detection of SNP TSC0020626
agtgtaatggtat

SEQ ID NO: 81462 - DNA, 13 bp, Artificial Sequence
  Oligonucleotide for detection of SNP TSC0020626
ataccattacact

SEQ ID NO: 81463 - DNA, 13 bp, Artificial Sequence
  Oligonucleotide for detection of SNP TSC0020626
agtgtagtggtat

SEQ ID NO: 81464 - DNA, 13 bp, Artificial Sequence
  Oligonucleotide for detection of SNP TSC0020626
ataccactacact

SEQ ID NO: 81465 - DNA, 13 bp, Artificial Sequence
  Oligonucleotide for detection of SNP TSC0020627
gttgatattagat

SEQ ID NO: 81466 - DNA, 13 bp, Artificial Sequence
  Oligonucleotide for detection of SNP TSC0020627
atctaatatcaac

SEQ ID NO: 81467 - DNA, 13 bp, Artificial Sequence
  Oligonucleotide for detection of SNP TSC0020627
gttgatgttagat

SEQ ID NO: 81468 - DNA, 13 bp, Artificial Sequence
  Oligonucleotide for detection of SNP TSC0020627
atctaacatcaac

SEQ ID NO: 81469 - DNA, 13 bp, Artificial Sequence
  Oligonucleotide for detection of SNP TSC0020627
gttgacgttagat

SEQ ID NO: 81470 - DNA, 13 bp, Artificial Sequence
  Oligonucleotide for detection of SNP TSC0020627
atctaacgtcaac

SEQ ID NO: 81471 - DNA, 13 bp, Artificial Sequence
  Oligonucleotide for detection of SNP TSC0020627
atttgatgttagy

SEQ ID NO: 81472 - DNA, 13 bp, Artificial Sequence
  Oligonucleotide for detection of SNP TSC0020627
rctaacatcaaat

SEQ ID NO: 81473 - DNA, 13 bp, Artificial Sequence
  Oligonucleotide for detection of SNP TSC0020627
atttgacgttagy

SEQ ID NO: 81474 - DNA, 13 bp, Artificial Sequence
  Oligonucleotide for detection of SNP TSC0020627
rctaacgtcaaat

SEQ ID NO: 81475 - DNA, 13 bp, Artificial Sequence
  Oligonucleotide for detection of SNP TSC0020628
ataaattgtatty

SEQ ID NO: 81476 - DNA, 13 bp, Artificial Sequence
  Oligonucleotide for detection of SNP TSC0020628
raatacaatttat

SEQ ID NO: 81477 - DNA, 13 bp, Artificial Sequence
  Oligonucleotide for detection of SNP TSC0020628
ataaatcgtatty

SEQ ID NO: 81478 - DNA, 13 bp, Artificial Sequence
  Oligonucleotide for detection of SNP TSC0020628
raatacgatttat

SEQ ID NO: 81479 - DNA, 13 bp, Artificial Sequence
  Oligonucleotide for detection of SNP TSC0020628
gggtatggtttat

SEQ ID NO: 81480 - DNA, 13 bp, Artificial Sequence
  Oligonucleotide for detection of SNP TSC0020628
ataaaccataccc

SEQ ID NO: 81481 - DNA, 13 bp, Artificial Sequence
  Oligonucleotide for detection of SNP TSC0020628
gggtatagtttat

SEQ ID NO: 81482 - DNA, 13 bp, Artificial Sequence
  Oligonucleotide for detection of SNP TSC0020628
ataaactataccc

SEQ ID NO: 81483 - DNA, 13 bp, Artificial Sequence
  Oligonucleotide for detection of SNP TSC0020628
gggtacggtttat

SEQ ID NO: 81484 - DNA, 13 bp, Artificial Sequence
  Oligonucleotide for detection of SNP TSC0020628
ataaaccgtaccc

SEQ ID NO: 81485 - DNA, 13 bp, Artificial Sequence
  Oligonucleotide for detection of SNP TSC0020629
tttaattaagaat

SEQ ID NO: 81486 - DNA, 13 bp, Artificial Sequence
  Oligonucleotide for detection of SNP TSC0020629
attcttaattaaa

SEQ ID NO: 81487 - DNA, 13 bp, Artificial Sequence
  Oligonucleotide for detection of SNP TSC0020629
tttaatgaagaat

SEQ ID NO: 81488 - DNA, 13 bp, Artificial Sequence
  Oligonucleotide for detection of SNP TSC0020629
attcttcattaaa

SEQ ID NO: 81489 - DNA, 13 bp, Artificial Sequence
  Oligonucleotide for detection of SNP TSC0020629
tttaacgaagaat

SEQ ID NO: 81490 - DNA, 13 bp, Artificial Sequence
  Oligonucleotide for detection of SNP TSC0020629
attcttcgttaaa

SEQ ID NO: 81491 - DNA, 13 bp, Artificial Sequence
  Oligonucleotide for detection of SNP TSC0020629
atttttggttgaa

SEQ ID NO: 81492 - DNA, 13 bp, Artificial Sequence
  Oligonucleotide for detection of SNP TSC0020629
ttcaaccaaaaat

SEQ ID NO: 81493 - DNA, 13 bp, Artificial Sequence
  Oligonucleotide for detection of SNP TSC0020629
attttttgttgaa

SEQ ID NO: 81494 - DNA, 13 bp, Artificial Sequence
  Oligonucleotide for detection of SNP TSC0020629
ttcaacaaaaaat

SEQ ID NO: 81495 - DNA, 13 bp, Artificial Sequence
  Oligonucleotide for detection of SNP TSC0020629
atttttcgttgaa

SEQ ID NO: 81496 - DNA, 13 bp, Artificial Sequence
  Oligonucleotide for detection of SNP TSC0020629
ttcaacgaaaaat

SEQ ID NO: 81497 - DNA, 13 bp, Artificial Sequence
  Oligonucleotide for detection of SNP TSC0020630
tgtgttgatatty

SEQ ID NO: 81498 - DNA, 13 bp, Artificial Sequence
  Oligonucleotide for detection of SNP TSC0020630
raatatcaacaca

SEQ ID NO: 81499 - DNA, 13 bp, Artificial Sequence
  Oligonucleotide for detection of SNP TSC0020630
tgtgttaatatty

SEQ ID NO: 81500 - DNA, 13 bp, Artificial Sequence
  Oligonucleotide for detection of SNP TSC0020630
raatattaacaca

SEQ ID NO: 81501 - DNA, 13 bp, Artificial Sequence
  Oligonucleotide for detection of SNP TSC0020631
tgttataatttat

SEQ ID NO: 81502 - DNA, 13 bp, Artificial Sequence
  Oligonucleotide for detection of SNP TSC0020631
ataaattataaca

SEQ ID NO: 81503 - DNA, 13 bp, Artificial Sequence
  Oligonucleotide for detection of SNP TSC0020631
tgttattatttat

SEQ ID NO: 81504 - DNA, 13 bp, Artificial Sequence
  Oligonucleotide for detection of SNP TSC0020631
ataaataataaca

SEQ ID NO: 81505 - DNA, 13 bp, Artificial Sequence
  Oligonucleotide for detection of SNP TSC0020631
atgagttgtgata

SEQ ID NO: 81506 - DNA, 13 bp, Artificial Sequence
  Oligonucleotide for detection of SNP TSC0020631
tatcacaactcat

SEQ ID NO: 81507 - DNA, 13 bp, Artificial Sequence
  Oligonucleotide for detection of SNP TSC0020631
atgagtggtgata

SEQ ID NO: 81508 - DNA, 13 bp, Artificial Sequence
  Oligonucleotide for detection of SNP TSC0020631
tatcaccactcat

SEQ ID NO: 81509 - DNA, 13 bp, Artificial Sequence
  Oligonucleotide for detection of SNP TSC0020632
ttaatttgtgggg

SEQ ID NO: 81510 - DNA, 13 bp, Artificial Sequence
  Oligonucleotide for detection of SNP TSC0020632
ccccacaaattaa

SEQ ID NO: 81511 - DNA, 13 bp, Artificial Sequence
  Oligonucleotide for detection of SNP TSC0020632
ttaattcgtgggg

SEQ ID NO: 81512 - DNA, 13 bp, Artificial Sequence
  Oligonucleotide for detection of SNP TSC0020632
ccccacgaattaa

SEQ ID NO: 81513 - DNA, 13 bp, Artificial Sequence
  Oligonucleotide for detection of SNP TSC0020632
ttttatgggttgg

SEQ ID NO: 81514 - DNA, 13 bp, Artificial Sequence
  Oligonucleotide for detection of SNP TSC0020632
ccaacccataaaa

SEQ ID NO: 81515 - DNA, 13 bp, Artificial Sequence
  Oligonucleotide for detection of SNP TSC0020632
ttttataggttgg

SEQ ID NO: 81516 - DNA, 13 bp, Artificial Sequence
  Oligonucleotide for detection of SNP TSC0020632
ccaacctataaaa

SEQ ID NO: 81517 - DNA, 13 bp, Artificial Sequence
  Oligonucleotide for detection of SNP TSC0020632
ttttacgggttgg

SEQ ID NO: 81518 - DNA, 13 bp, Artificial Sequence
  Oligonucleotide for detection of SNP TSC0020632
ccaacccgtaaaa

SEQ ID NO: 81519 - DNA, 13 bp, Artificial Sequence
  Oligonucleotide for detection of SNP TSC0020633
agagggagtattt

SEQ ID NO: 81520 - DNA, 13 bp, Artificial Sequence
  Oligonucleotide for detection of SNP TSC0020633
aaatactccctct

SEQ ID NO: 81521 - DNA, 13 bp, Artificial Sequence
  Oligonucleotide for detection of SNP TSC0020633
agagggggtattt

SEQ ID NO: 81522 - DNA, 13 bp, Artificial Sequence
  Oligonucleotide for detection of SNP TSC0020633
aaataccccctct

SEQ ID NO: 81523 - DNA, 13 bp, Artificial Sequence
  Oligonucleotide for detection of SNP TSC0020634
tttttgggttata

SEQ ID NO: 81524 - DNA, 13 bp, Artificial Sequence
  Oligonucleotide for detection of SNP TSC0020634
tataacccaaaaa

SEQ ID NO: 81525 - DNA, 13 bp, Artificial Sequence
  Oligonucleotide for detection of SNP TSC0020634
ttttcgggttata

SEQ ID NO: 81526 - DNA, 13 bp, Artificial Sequence
  Oligonucleotide for detection of SNP TSC0020634
tataacccgaaaa

SEQ ID NO: 81527 - DNA, 13 bp, Artificial Sequence
  Oligonucleotide for detection of SNP TSC0020634
ttttcgtgttata

SEQ ID NO: 81528 - DNA, 13 bp, Artificial Sequence
  Oligonucleotide for detection of SNP TSC0020634
tataacacgaaaa

SEQ ID NO: 81529 - DNA, 13 bp, Artificial Sequence
  Oligonucleotide for detection of SNP TSC0020634
tgtgatttgggag

SEQ ID NO: 81530 - DNA, 13 bp, Artificial Sequence
  Oligonucleotide for detection of SNP TSC0020634
ctcccaaatcaca

SEQ ID NO: 81531 - DNA, 13 bp, Artificial Sequence
  Oligonucleotide for detection of SNP TSC0020634
tgtgatatgggag

SEQ ID NO: 81532 - DNA, 13 bp, Artificial Sequence
  Oligonucleotide for detection of SNP TSC0020634
ctcccatatcaca

SEQ ID NO: 81533 - DNA, 13 bp, Artificial Sequence
  Oligonucleotide for detection of SNP TSC0020634
tgtgattcgggag

SEQ ID NO: 81534 - DNA, 13 bp, Artificial Sequence
  Oligonucleotide for detection of SNP TSC0020634
ctcccgaatcaca

SEQ ID NO: 81535 - DNA, 13 bp, Artificial Sequence
  Oligonucleotide for detection of SNP TSC0020634
tgtgatacgggag

SEQ ID NO: 81536 - DNA, 13 bp, Artificial Sequence
  Oligonucleotide for detection of SNP TSC0020634
ctcccgtatcaca

SEQ ID NO: 81537 - DNA, 13 bp, Artificial Sequence
  Oligonucleotide for detection of SNP TSC0020635
tatgaaagatttg

SEQ ID NO: 81538 - DNA, 13 bp, Artificial Sequence
  Oligonucleotide for detection of SNP TSC0020635
caaatctttcata

SEQ ID NO: 81539 - DNA, 13 bp, Artificial Sequence
  Oligonucleotide for detection of SNP TSC0020635
tatgaaggatttg

SEQ ID NO: 81540 - DNA, 13 bp, Artificial Sequence
  Oligonucleotide for detection of SNP TSC0020635
caaatccttcata

SEQ ID NO: 81541 - DNA, 13 bp, Artificial Sequence
  Oligonucleotide for detection of SNP TSC0020636
tttagtgtttata

SEQ ID NO: 81542 - DNA, 13 bp, Artificial Sequence
  Oligonucleotide for detection of SNP TSC0020636
tataaacactaaa

SEQ ID NO: 81543 - DNA, 13 bp, Artificial Sequence
  Oligonucleotide for detection of SNP TSC0020636
tttagtatttata

SEQ ID NO: 81544 - DNA, 13 bp, Artificial Sequence
  Oligonucleotide for detection of SNP TSC0020636
tataaatactaaa

SEQ ID NO: 81545 - DNA, 13 bp, Artificial Sequence
  Oligonucleotide for detection of SNP TSC0020637
tgtgtggtttttt

SEQ ID NO: 81546 - DNA, 13 bp, Artificial Sequence
  Oligonucleotide for detection of SNP TSC0020637
aaaaaaccacaca

SEQ ID NO: 81547 - DNA, 13 bp, Artificial Sequence
  Oligonucleotide for detection of SNP TSC0020637
tgtgtgttttttt

SEQ ID NO: 81548 - DNA, 13 bp, Artificial Sequence
  Oligonucleotide for detection of SNP TSC0020637
aaaaaaacacaca

SEQ ID NO: 81549 - DNA, 13 bp, Artificial Sequence
  Oligonucleotide for detection of SNP TSC0020639
aattaatgttaat

SEQ ID NO: 81550 - DNA, 13 bp, Artificial Sequence
  Oligonucleotide for detection of SNP TSC0020639
attaacattaatt

SEQ ID NO: 81551 - DNA, 13 bp, Artificial Sequence
  Oligonucleotide for detection of SNP TSC0020639
aattaacgttaat

SEQ ID NO: 81552 - DNA, 13 bp, Artificial Sequence
  Oligonucleotide for detection of SNP TSC0020639
attaacgttaatt

SEQ ID NO: 81553 - DNA, 13 bp, Artificial Sequence
  Oligonucleotide for detection of SNP TSC0020639
attggtgttggtt

SEQ ID NO: 81554 - DNA, 13 bp, Artificial Sequence
  Oligonucleotide for detection of SNP TSC0020639
aaccaacaccaat

SEQ ID NO: 81555 - DNA, 13 bp, Artificial Sequence
  Oligonucleotide for detection of SNP TSC0020639
attggtattggtt

SEQ ID NO: 81556 - DNA, 13 bp, Artificial Sequence
  Oligonucleotide for detection of SNP TSC0020639
aaccaataccaat

SEQ ID NO: 81557 - DNA, 13 bp, Artificial Sequence
  Oligonucleotide for detection of SNP TSC0020639
attggcgttggtt

SEQ ID NO: 81558 - DNA, 13 bp, Artificial Sequence
  Oligonucleotide for detection of SNP TSC0020639
aaccaacgccaat

SEQ ID NO: 81559 - DNA, 13 bp, Artificial Sequence
  Oligonucleotide for detection of SNP TSC0020640
attttagaagggy

SEQ ID NO: 81560 - DNA, 13 bp, Artificial Sequence
  Oligonucleotide for detection of SNP TSC0020640
rcccttctaaaat

SEQ ID NO: 81561 - DNA, 13 bp, Artificial Sequence
  Oligonucleotide for detection of SNP TSC0020640
attttaaaagggy

SEQ ID NO: 81562 - DNA, 13 bp, Artificial Sequence
  Oligonucleotide for detection of SNP TSC0020640
rcccttttaaaat

SEQ ID NO: 81563 - DNA, 13 bp, Artificial Sequence
  Oligonucleotide for detection of SNP TSC0020641
ggtttttttatty

SEQ ID NO: 81564 - DNA, 13 bp, Artificial Sequence
  Oligonucleotide for detection of SNP TSC0020641
raataaaaaaacc

SEQ ID NO: 81565 - DNA, 13 bp, Artificial Sequence
  Oligonucleotide for detection of SNP TSC0020641
gaatgatggagty

SEQ ID NO: 81566 - DNA, 13 bp, Artificial Sequence
  Oligonucleotide for detection of SNP TSC0020641
ractccatcattc

SEQ ID NO: 81567 - DNA, 13 bp, Artificial Sequence
  Oligonucleotide for detection of SNP TSC0020641
gaatgaaggagty

SEQ ID NO: 81568 - DNA, 13 bp, Artificial Sequence
  Oligonucleotide for detection of SNP TSC0020641
ractccttcattc

SEQ ID NO: 81569 - DNA, 13 bp, Artificial Sequence
  Oligonucleotide for detection of SNP TSC0020641
gaatgacggagty

SEQ ID NO: 81570 - DNA, 13 bp, Artificial Sequence
  Oligonucleotide for detection of SNP TSC0020641
ractccgtcattc

SEQ ID NO: 81571 - DNA, 13 bp, Artificial Sequence
  Oligonucleotide for detection of SNP TSC0020642
gggtatggggtgt

SEQ ID NO: 81572 - DNA, 13 bp, Artificial Sequence
  Oligonucleotide for detection of SNP TSC0020642
acaccccataccc

SEQ ID NO: 81573 - DNA, 13 bp, Artificial Sequence
  Oligonucleotide for detection of SNP TSC0020642
gggtatagggtgt

SEQ ID NO: 81574 - DNA, 13 bp, Artificial Sequence
  Oligonucleotide for detection of SNP TSC0020642
acaccctataccc

SEQ ID NO: 81575 - DNA, 13 bp, Artificial Sequence
  Oligonucleotide for detection of SNP TSC0020643
gttttaggagtty

SEQ ID NO: 81576 - DNA, 13 bp, Artificial Sequence
  Oligonucleotide for detection of SNP TSC0020643
raactcctaaaac

SEQ ID NO: 81577 - DNA, 13 bp, Artificial Sequence
  Oligonucleotide for detection of SNP TSC0020643
gttttaagagtty

SEQ ID NO: 81578 - DNA, 13 bp, Artificial Sequence
  Oligonucleotide for detection of SNP TSC0020643
raactcttaaaac

SEQ ID NO: 81579 - DNA, 13 bp, Artificial Sequence
  Oligonucleotide for detection of SNP TSC0020644
tgtttgggtaaaa

SEQ ID NO: 81580 - DNA, 13 bp, Artificial Sequence
  Oligonucleotide for detection of SNP TSC0020644
ttttacccaaaca

SEQ ID NO: 81581 - DNA, 13 bp, Artificial Sequence
  Oligonucleotide for detection of SNP TSC0020644
tgtttgagtaaaa

SEQ ID NO: 81582 - DNA, 13 bp, Artificial Sequence
  Oligonucleotide for detection of SNP TSC0020644
ttttactcaaaca

SEQ ID NO: 81583 - DNA, 13 bp, Artificial Sequence
  Oligonucleotide for detection of SNP TSC0020645
ataaaaattttaa

SEQ ID NO: 81584 - DNA, 13 bp, Artificial Sequence
  Oligonucleotide for detection of SNP TSC0020645
ttaaaatttttat

SEQ ID NO: 81585 - DNA, 13 bp, Artificial Sequence
  Oligonucleotide for detection of SNP TSC0020645
ataaaatttttaa

SEQ ID NO: 81586 - DNA, 13 bp, Artificial Sequence
  Oligonucleotide for detection of SNP TSC0020645
ttaaaaattttat

SEQ ID NO: 81587 - DNA, 13 bp, Artificial Sequence
  Oligonucleotide for detection of SNP TSC0020645
ttagagtttttat

SEQ ID NO: 81588 - DNA, 13 bp, Artificial Sequence
  Oligonucleotide for detection of SNP TSC0020645
ataaaaactctaa

SEQ ID NO: 81589 - DNA, 13 bp, Artificial Sequence
  Oligonucleotide for detection of SNP TSC0020645
ttagagattttat

SEQ ID NO: 81590 - DNA, 13 bp, Artificial Sequence
  Oligonucleotide for detection of SNP TSC0020645
ataaaatctctaa

SEQ ID NO: 81591 - DNA, 13 bp, Artificial Sequence
  Oligonucleotide for detection of SNP TSC0020646
tagtgaattattt

SEQ ID NO: 81592 - DNA, 13 bp, Artificial Sequence
  Oligonucleotide for detection of SNP TSC0020646
aaataattcacta

SEQ ID NO: 81593 - DNA, 13 bp, Artificial Sequence
  Oligonucleotide for detection of SNP TSC0020646
tagtgagttattt

SEQ ID NO: 81594 - DNA, 13 bp, Artificial Sequence
  Oligonucleotide for detection of SNP TSC0020646
aaataactcacta

SEQ ID NO: 81595 - DNA, 13 bp, Artificial Sequence
  Oligonucleotide for detection of SNP TSC0020647
gtgtttattatat

SEQ ID NO: 81596 - DNA, 13 bp, Artificial Sequence
  Oligonucleotide for detection of SNP TSC0020647
atataataaacac

SEQ ID NO: 81597 - DNA, 13 bp, Artificial Sequence
  Oligonucleotide for detection of SNP TSC0020647
gtgttttttatat

SEQ ID NO: 81598 - DNA, 13 bp, Artificial Sequence
  Oligonucleotide for detection of SNP TSC0020647
atataaaaaacac

SEQ ID NO: 81599 - DNA, 13 bp, Artificial Sequence
  Oligonucleotide for detection of SNP TSC0020647
atatagtaagtay

SEQ ID NO: 81600 - DNA, 13 bp, Artificial Sequence
  Oligonucleotide for detection of SNP TSC0020647
rtacttactatat

SEQ ID NO: 81601 - DNA, 13 bp, Artificial Sequence
  Oligonucleotide for detection of SNP TSC0020647
atataggaagtay

SEQ ID NO: 81602 - DNA, 13 bp, Artificial Sequence
  Oligonucleotide for detection of SNP TSC0020647
rtacttcctatat

SEQ ID NO: 81603 - DNA, 13 bp, Artificial Sequence
  Oligonucleotide for detection of SNP TSC0020648
agtatagataaty

SEQ ID NO: 81604 - DNA, 13 bp, Artificial Sequence
  Oligonucleotide for detection of SNP TSC0020648
rattatctatact

SEQ ID NO: 81605 - DNA, 13 bp, Artificial Sequence
  Oligonucleotide for detection of SNP TSC0020648
agtataaataaty

SEQ ID NO: 81606 - DNA, 13 bp, Artificial Sequence
  Oligonucleotide for detection of SNP TSC0020648
rattatttatact

SEQ ID NO: 81607 - DNA, 13 bp, Artificial Sequence
  Oligonucleotide for detection of SNP TSC0020649
ttttttatgttty

SEQ ID NO: 81608 - DNA, 13 bp, Artificial Sequence
  Oligonucleotide for detection of SNP TSC0020649
raaacataaaaaa

SEQ ID NO: 81609 - DNA, 13 bp, Artificial Sequence
  Oligonucleotide for detection of SNP TSC0020649
tttttcgtgttty

SEQ ID NO: 81610 - DNA, 13 bp, Artificial Sequence
  Oligonucleotide for detection of SNP TSC0020649
raaacacgaaaaa

SEQ ID NO: 81611 - DNA, 13 bp, Artificial Sequence
  Oligonucleotide for detection of SNP TSC0020649
ggagtatggggga

SEQ ID NO: 81612 - DNA, 13 bp, Artificial Sequence
  Oligonucleotide for detection of SNP TSC0020649
tcccccatactcc

SEQ ID NO: 81613 - DNA, 13 bp, Artificial Sequence
  Oligonucleotide for detection of SNP TSC0020649
ggagtacggggga

SEQ ID NO: 81614 - DNA, 13 bp, Artificial Sequence
  Oligonucleotide for detection of SNP TSC0020649
tcccccgtactcc

SEQ ID NO: 81615 - DNA, 13 bp, Artificial Sequence
  Oligonucleotide for detection of SNP TSC0020650
gggggtagtgtta

SEQ ID NO: 81616 - DNA, 13 bp, Artificial Sequence
  Oligonucleotide for detection of SNP TSC0020650
taacactaccccc

SEQ ID NO: 81617 - DNA, 13 bp, Artificial Sequence
  Oligonucleotide for detection of SNP TSC0020650
gggggtggtgtta

SEQ ID NO: 81618 - DNA, 13 bp, Artificial Sequence
  Oligonucleotide for detection of SNP TSC0020650
taacaccaccccc

SEQ ID NO: 81619 - DNA, 13 bp, Artificial Sequence
  Oligonucleotide for detection of SNP TSC0020650
gggggcggtgtta

SEQ ID NO: 81620 - DNA, 13 bp, Artificial Sequence
  Oligonucleotide for detection of SNP TSC0020650
taacaccgccccc

SEQ ID NO: 81621 - DNA, 13 bp, Artificial Sequence
  Oligonucleotide for detection of SNP TSC0020650
tagtattgtttty

SEQ ID NO: 81622 - DNA, 13 bp, Artificial Sequence
  Oligonucleotide for detection of SNP TSC0020650
raaaacaatacta

SEQ ID NO: 81623 - DNA, 13 bp, Artificial Sequence
  Oligonucleotide for detection of SNP TSC0020650
tagtatcgtttty

SEQ ID NO: 81624 - DNA, 13 bp, Artificial Sequence
  Oligonucleotide for detection of SNP TSC0020650
raaaacgatacta

SEQ ID NO: 81625 - DNA, 13 bp, Artificial Sequence
  Oligonucleotide for detection of SNP TSC0020652
ggagtttgtttty

SEQ ID NO: 81626 - DNA, 13 bp, Artificial Sequence
  Oligonucleotide for detection of SNP TSC0020652
raaaacaaactcc

SEQ ID NO: 81627 - DNA, 13 bp, Artificial Sequence
  Oligonucleotide for detection of SNP TSC0020652
ggagttcgtttty

SEQ ID NO: 81628 - DNA, 13 bp, Artificial Sequence
  Oligonucleotide for detection of SNP TSC0020652
raaaacgaactcc

SEQ ID NO: 81629 - DNA, 13 bp, Artificial Sequence
  Oligonucleotide for detection of SNP TSC0020652
gaaaatgaattty

SEQ ID NO: 81630 - DNA, 13 bp, Artificial Sequence
  Oligonucleotide for detection of SNP TSC0020652
raaattcattttc

SEQ ID NO: 81631 - DNA, 13 bp, Artificial Sequence
  Oligonucleotide for detection of SNP TSC0020652
gaaaataaattty

SEQ ID NO: 81632 - DNA, 13 bp, Artificial Sequence
  Oligonucleotide for detection of SNP TSC0020652
raaatttattttc

SEQ ID NO: 81633 - DNA, 13 bp, Artificial Sequence
  Oligonucleotide for detection of SNP TSC0020652
gaaaacgaattty

SEQ ID NO: 81634 - DNA, 13 bp, Artificial Sequence
  Oligonucleotide for detection of SNP TSC0020652
raaattcgttttc

SEQ ID NO: 81635 - DNA, 13 bp, Artificial Sequence
  Oligonucleotide for detection of SNP TSC0020653
ggtaatgaaatag

SEQ ID NO: 81636 - DNA, 13 bp, Artificial Sequence
  Oligonucleotide for detection of SNP TSC0020653
ctatttcattacc

SEQ ID NO: 81637 - DNA, 13 bp, Artificial Sequence
  Oligonucleotide for detection of SNP TSC0020653
ggtaataaaatag

SEQ ID NO: 81638 - DNA, 13 bp, Artificial Sequence
  Oligonucleotide for detection of SNP TSC0020653
ctattttattacc

SEQ ID NO: 81639 - DNA, 13 bp, Artificial Sequence
  Oligonucleotide for detection of SNP TSC0020653
ggtaacgaaatag

SEQ ID NO: 81640 - DNA, 13 bp, Artificial Sequence
  Oligonucleotide for detection of SNP TSC0020653
ctatttcgttacc

SEQ ID NO: 81641 - DNA, 13 bp, Artificial Sequence
  Oligonucleotide for detection of SNP TSC0020654
tatgttattgtay

SEQ ID NO: 81642 - DNA, 13 bp, Artificial Sequence
  Oligonucleotide for detection of SNP TSC0020654
rtacaataacata

SEQ ID NO: 81643 - DNA, 13 bp, Artificial Sequence
  Oligonucleotide for detection of SNP TSC0020654
tatgttgttgtay

SEQ ID NO: 81644 - DNA, 13 bp, Artificial Sequence
  Oligonucleotide for detection of SNP TSC0020654
rtacaacaacata

SEQ ID NO: 81645 - DNA, 13 bp, Artificial Sequence
  Oligonucleotide for detection of SNP TSC0020654
tacgttattgtay

SEQ ID NO: 81646 - DNA, 13 bp, Artificial Sequence
  Oligonucleotide for detection of SNP TSC0020654
rtacaataacgta

SEQ ID NO: 81647 - DNA, 13 bp, Artificial Sequence
  Oligonucleotide for detection of SNP TSC0020654
tacgttgttgtay

SEQ ID NO: 81648 - DNA, 13 bp, Artificial Sequence
  Oligonucleotide for detection of SNP TSC0020654
rtacaacaacgta

SEQ ID NO: 81649 - DNA, 13 bp, Artificial Sequence
  Oligonucleotide for detection of SNP TSC0020659
taaaatgttttag

SEQ ID NO: 81650 - DNA, 13 bp, Artificial Sequence
  Oligonucleotide for detection of SNP TSC0020659
ctaaaacatttta

SEQ ID NO: 81651 - DNA, 13 bp, Artificial Sequence
  Oligonucleotide for detection of SNP TSC0020659
taaaatattttag

SEQ ID NO: 81652 - DNA, 13 bp, Artificial Sequence
  Oligonucleotide for detection of SNP TSC0020659
ctaaaatatttta

SEQ ID NO: 81653 - DNA, 13 bp, Artificial Sequence
  Oligonucleotide for detection of SNP TSC0020660
atggatagatgga

SEQ ID NO: 81654 - DNA, 13 bp, Artificial Sequence
  Oligonucleotide for detection of SNP TSC0020660
tccatctatccat

SEQ ID NO: 81655 - DNA, 13 bp, Artificial Sequence
  Oligonucleotide for detection of SNP TSC0020660
atggatggatgga

SEQ ID NO: 81656 - DNA, 13 bp, Artificial Sequence
  Oligonucleotide for detection of SNP TSC0020660
tccatccatccat

SEQ ID NO: 81657 - DNA, 13 bp, Artificial Sequence
  Oligonucleotide for detection of SNP TSC0020663
gagtttttgggta

SEQ ID NO: 81658 - DNA, 13 bp, Artificial Sequence
  Oligonucleotide for detection of SNP TSC0020663
tacccaaaaactc

SEQ ID NO: 81659 - DNA, 13 bp, Artificial Sequence
  Oligonucleotide for detection of SNP TSC0020663
gagtttgtgggta

SEQ ID NO: 81660 - DNA, 13 bp, Artificial Sequence
  Oligonucleotide for detection of SNP TSC0020663
tacccacaaactc

SEQ ID NO: 81661 - DNA, 13 bp, Artificial Sequence
  Oligonucleotide for detection of SNP TSC0020663
tgtttagaaatty

SEQ ID NO: 81662 - DNA, 13 bp, Artificial Sequence
  Oligonucleotide for detection of SNP TSC0020663
raatttctaaaca

SEQ ID NO: 81663 - DNA, 13 bp, Artificial Sequence
  Oligonucleotide for detection of SNP TSC0020663
tgtttataaatty

SEQ ID NO: 81664 - DNA, 13 bp, Artificial Sequence
  Oligonucleotide for detection of SNP TSC0020663
raatttataaaca

SEQ ID NO: 81665 - DNA, 13 bp, Artificial Sequence
  Oligonucleotide for detection of SNP TSC0020664
tgggtgaatttta

SEQ ID NO: 81666 - DNA, 13 bp, Artificial Sequence
  Oligonucleotide for detection of SNP TSC0020664
taaaattcaccca

SEQ ID NO: 81667 - DNA, 13 bp, Artificial Sequence
  Oligonucleotide for detection of SNP TSC0020664
tgggtggatttta

SEQ ID NO: 81668 - DNA, 13 bp, Artificial Sequence
  Oligonucleotide for detection of SNP TSC0020664
taaaatccaccca

SEQ ID NO: 81669 - DNA, 13 bp, Artificial Sequence
  Oligonucleotide for detection of SNP TSC0020665
aggttgataatga

SEQ ID NO: 81670 - DNA, 13 bp, Artificial Sequence
  Oligonucleotide for detection of SNP TSC0020665
tcattatcaacct

SEQ ID NO: 81671 - DNA, 13 bp, Artificial Sequence
  Oligonucleotide for detection of SNP TSC0020665
aggttggtaatga

SEQ ID NO: 81672 - DNA, 13 bp, Artificial Sequence
  Oligonucleotide for detection of SNP TSC0020665
tcattaccaacct

SEQ ID NO: 81673 - DNA, 13 bp, Artificial Sequence
  Oligonucleotide for detection of SNP TSC0020666
taagtaaaaagtt

SEQ ID NO: 81674 - DNA, 13 bp, Artificial Sequence
  Oligonucleotide for detection of SNP TSC0020666
aactttttactta

SEQ ID NO: 81675 - DNA, 13 bp, Artificial Sequence
  Oligonucleotide for detection of SNP TSC0020666
taagtagaaagtt

SEQ ID NO: 81676 - DNA, 13 bp, Artificial Sequence
  Oligonucleotide for detection of SNP TSC0020666
aactttctactta

SEQ ID NO: 81677 - DNA, 13 bp, Artificial Sequence
  Oligonucleotide for detection of SNP TSC0020668
ttagtaggtgaty

SEQ ID NO: 81678 - DNA, 13 bp, Artificial Sequence
  Oligonucleotide for detection of SNP TSC0020668
ratcacctactaa

SEQ ID NO: 81679 - DNA, 13 bp, Artificial Sequence
  Oligonucleotide for detection of SNP TSC0020668
ttagtaagtgaty

SEQ ID NO: 81680 - DNA, 13 bp, Artificial Sequence
  Oligonucleotide for detection of SNP TSC0020668
ratcacttactaa

SEQ ID NO: 81681 - DNA, 13 bp, Artificial Sequence
  Oligonucleotide for detection of SNP TSC0020669
tttttgagttaat

SEQ ID NO: 81682 - DNA, 13 bp, Artificial Sequence
  Oligonucleotide for detection of SNP TSC0020669
attaactcaaaaa

SEQ ID NO: 81683 - DNA, 13 bp, Artificial Sequence
  Oligonucleotide for detection of SNP TSC0020669
tttttgggttaat

SEQ ID NO: 81684 - DNA, 13 bp, Artificial Sequence
  Oligonucleotide for detection of SNP TSC0020669
attaacccaaaaa

SEQ ID NO: 81685 - DNA, 13 bp, Artificial Sequence
  Oligonucleotide for detection of SNP TSC0020671
agaatattgtgga

SEQ ID NO: 81686 - DNA, 13 bp, Artificial Sequence
  Oligonucleotide for detection of SNP TSC0020671
tccacaatattct

SEQ ID NO: 81687 - DNA, 13 bp, Artificial Sequence
  Oligonucleotide for detection of SNP TSC0020671
agaatagtgtgga

SEQ ID NO: 81688 - DNA, 13 bp, Artificial Sequence
  Oligonucleotide for detection of SNP TSC0020671
tccacactattct

SEQ ID NO: 81689 - DNA, 13 bp, Artificial Sequence
  Oligonucleotide for detection of SNP TSC0020671
agaatatcgtgga

SEQ ID NO: 81690 - DNA, 13 bp, Artificial Sequence
  Oligonucleotide for detection of SNP TSC0020671
tccacgatattct

SEQ ID NO: 81691 - DNA, 13 bp, Artificial Sequence
  Oligonucleotide for detection of SNP TSC0020671
agaatagcgtgga

SEQ ID NO: 81692 - DNA, 13 bp, Artificial Sequence
  Oligonucleotide for detection of SNP TSC0020671
tccacgctattct

SEQ ID NO: 81693 - DNA, 13 bp, Artificial Sequence
  Oligonucleotide for detection of SNP TSC0020671
tttatggtatttt

SEQ ID NO: 81694 - DNA, 13 bp, Artificial Sequence
  Oligonucleotide for detection of SNP TSC0020671
aaaataccataaa

SEQ ID NO: 81695 - DNA, 13 bp, Artificial Sequence
  Oligonucleotide for detection of SNP TSC0020671
tttatgttatttt

SEQ ID NO: 81696 - DNA, 13 bp, Artificial Sequence
  Oligonucleotide for detection of SNP TSC0020671
aaaataacataaa

SEQ ID NO: 81697 - DNA, 13 bp, Artificial Sequence
  Oligonucleotide for detection of SNP TSC0020671
tttacggtatttt

SEQ ID NO: 81698 - DNA, 13 bp, Artificial Sequence
  Oligonucleotide for detection of SNP TSC0020671
aaaataccgtaaa

SEQ ID NO: 81699 - DNA, 13 bp, Artificial Sequence
  Oligonucleotide for detection of SNP TSC0020671
tttacgttatttt

SEQ ID NO: 81700 - DNA, 13 bp, Artificial Sequence
  Oligonucleotide for detection of SNP TSC0020671
aaaataacgtaaa

SEQ ID NO: 81701 - DNA, 13 bp, Artificial Sequence
  Oligonucleotide for detection of SNP TSC0020673
gtaatttgggtga

SEQ ID NO: 81702 - DNA, 13 bp, Artificial Sequence
  Oligonucleotide for detection of SNP TSC0020673
tcacccaaattac

SEQ ID NO: 81703 - DNA, 13 bp, Artificial Sequence
  Oligonucleotide for detection of SNP TSC0020673
gtaattcgggtga

SEQ ID NO: 81704 - DNA, 13 bp, Artificial Sequence
  Oligonucleotide for detection of SNP TSC0020673
tcacccgaattac

SEQ ID NO: 81705 - DNA, 13 bp, Artificial Sequence
  Oligonucleotide for detection of SNP TSC0020673
ttatttgggttay

SEQ ID NO: 81706 - DNA, 13 bp, Artificial Sequence
  Oligonucleotide for detection of SNP TSC0020673
rtaacccaaataa

SEQ ID NO: 81707 - DNA, 13 bp, Artificial Sequence
  Oligonucleotide for detection of SNP TSC0020673
ttatttaggttay

SEQ ID NO: 81708 - DNA, 13 bp, Artificial Sequence
  Oligonucleotide for detection of SNP TSC0020673
rtaacctaaataa

SEQ ID NO: 81709 - DNA, 13 bp, Artificial Sequence
  Oligonucleotide for detection of SNP TSC0020673
ttattcgggttay

SEQ ID NO: 81710 - DNA, 13 bp, Artificial Sequence
  Oligonucleotide for detection of SNP TSC0020673
rtaacccgaataa

SEQ ID NO: 81711 - DNA, 13 bp, Artificial Sequence
  Oligonucleotide for detection of SNP TSC0020674
aggtggagatatg

SEQ ID NO: 81712 - DNA, 13 bp, Artificial Sequence
  Oligonucleotide for detection of SNP TSC0020674
catatctccacct

SEQ ID NO: 81713 - DNA, 13 bp, Artificial Sequence
  Oligonucleotide for detection of SNP TSC0020674
aggtggggatatg

SEQ ID NO: 81714 - DNA, 13 bp, Artificial Sequence
  Oligonucleotide for detection of SNP TSC0020674
catatccccacct

SEQ ID NO: 81715 - DNA, 13 bp, Artificial Sequence
  Oligonucleotide for detection of SNP TSC0020675
gtgtttataatta

SEQ ID NO: 81716 - DNA, 13 bp, Artificial Sequence
  Oligonucleotide for detection of SNP TSC0020675
taattataaacac

SEQ ID NO: 81717 - DNA, 13 bp, Artificial Sequence
  Oligonucleotide for detection of SNP TSC0020675
gtgtttgtaatta

SEQ ID NO: 81718 - DNA, 13 bp, Artificial Sequence
  Oligonucleotide for detection of SNP TSC0020675
taattacaaacac

SEQ ID NO: 81719 - DNA, 13 bp, Artificial Sequence
  Oligonucleotide for detection of SNP TSC0020675
gtgttcgtaatta

SEQ ID NO: 81720 - DNA, 13 bp, Artificial Sequence
  Oligonucleotide for detection of SNP TSC0020675
taattacgaacac

SEQ ID NO: 81721 - DNA, 13 bp, Artificial Sequence
  Oligonucleotide for detection of SNP TSC0020675
tagttgtgggtay

SEQ ID NO: 81722 - DNA, 13 bp, Artificial Sequence
  Oligonucleotide for detection of SNP TSC0020675
rtacccacaacta

SEQ ID NO: 81723 - DNA, 13 bp, Artificial Sequence
  Oligonucleotide for detection of SNP TSC0020675
tagttgcgggtay

SEQ ID NO: 81724 - DNA, 13 bp, Artificial Sequence
  Oligonucleotide for detection of SNP TSC0020675
rtacccgcaacta

SEQ ID NO: 81725 - DNA, 13 bp, Artificial Sequence
  Oligonucleotide for detection of SNP TSC0020676
gtttattattatg

SEQ ID NO: 81726 - DNA, 13 bp, Artificial Sequence
  Oligonucleotide for detection of SNP TSC0020676
cataataataaac

SEQ ID NO: 81727 - DNA, 13 bp, Artificial Sequence
  Oligonucleotide for detection of SNP TSC0020676
tatagttgtgggy

SEQ ID NO: 81728 - DNA, 13 bp, Artificial Sequence
  Oligonucleotide for detection of SNP TSC0020676
rcccacaactata

SEQ ID NO: 81729 - DNA, 13 bp, Artificial Sequence
  Oligonucleotide for detection of SNP TSC0020676
tatagtggtgggy

SEQ ID NO: 81730 - DNA, 13 bp, Artificial Sequence
  Oligonucleotide for detection of SNP TSC0020676
rcccaccactata

SEQ ID NO: 81731 - DNA, 13 bp, Artificial Sequence
  Oligonucleotide for detection of SNP TSC0020677
aatggggttgggg

SEQ ID NO: 81732 - DNA, 13 bp, Artificial Sequence
  Oligonucleotide for detection of SNP TSC0020677
ccccaaccccatt

SEQ ID NO: 81733 - DNA, 13 bp, Artificial Sequence
  Oligonucleotide for detection of SNP TSC0020677
aatgggtttgggg

SEQ ID NO: 81734 - DNA, 13 bp, Artificial Sequence
  Oligonucleotide for detection of SNP TSC0020677
ccccaaacccatt

SEQ ID NO: 81735 - DNA, 13 bp, Artificial Sequence
  Oligonucleotide for detection of SNP TSC0020677
ttttagttttatt

SEQ ID NO: 81736 - DNA, 13 bp, Artificial Sequence
  Oligonucleotide for detection of SNP TSC0020677
aataaaactaaaa

SEQ ID NO: 81737 - DNA, 13 bp, Artificial Sequence
  Oligonucleotide for detection of SNP TSC0020678
agattgtagtaaa

SEQ ID NO: 81738 - DNA, 13 bp, Artificial Sequence
  Oligonucleotide for detection of SNP TSC0020678
tttactacaatct

SEQ ID NO: 81739 - DNA, 13 bp, Artificial Sequence
  Oligonucleotide for detection of SNP TSC0020678
agattggagtaaa

SEQ ID NO: 81740 - DNA, 13 bp, Artificial Sequence
  Oligonucleotide for detection of SNP TSC0020678
tttactccaatct

SEQ ID NO: 81741 - DNA, 13 bp, Artificial Sequence
  Oligonucleotide for detection of SNP TSC0020679
atatttataaatg

SEQ ID NO: 81742 - DNA, 13 bp, Artificial Sequence
  Oligonucleotide for detection of SNP TSC0020679
catttataaatat

SEQ ID NO: 81743 - DNA, 13 bp, Artificial Sequence
  Oligonucleotide for detection of SNP TSC0020679
atatttttaaatg

SEQ ID NO: 81744 - DNA, 13 bp, Artificial Sequence
  Oligonucleotide for detection of SNP TSC0020679
catttaaaaatat

SEQ ID NO: 81745 - DNA, 13 bp, Artificial Sequence
  Oligonucleotide for detection of SNP TSC0020679
tatttataaatat

SEQ ID NO: 81746 - DNA, 13 bp, Artificial Sequence
  Oligonucleotide for detection of SNP TSC0020679
atatttataaata

SEQ ID NO: 81747 - DNA, 13 bp, Artificial Sequence
  Oligonucleotide for detection of SNP TSC0020679
tatttaaaaatat

SEQ ID NO: 81748 - DNA, 13 bp, Artificial Sequence
  Oligonucleotide for detection of SNP TSC0020679
atatttttaaata

SEQ ID NO: 81749 - DNA, 13 bp, Artificial Sequence
  Oligonucleotide for detection of SNP TSC0020680
ggaaatgagggta

SEQ ID NO: 81750 - DNA, 13 bp, Artificial Sequence
  Oligonucleotide for detection of SNP TSC0020680
taccctcatttcc

SEQ ID NO: 81751 - DNA, 13 bp, Artificial Sequence
  Oligonucleotide for detection of SNP TSC0020680
ggaaattagggta

SEQ ID NO: 81752 - DNA, 13 bp, Artificial Sequence
  Oligonucleotide for detection of SNP TSC0020680
taccctaatttcc

SEQ ID NO: 81753 - DNA, 13 bp, Artificial Sequence
  Oligonucleotide for detection of SNP TSC0020680
ggaaacgagggta

SEQ ID NO: 81754 - DNA, 13 bp, Artificial Sequence
  Oligonucleotide for detection of SNP TSC0020680
taccctcgtttcc

SEQ ID NO: 81755 - DNA, 13 bp, Artificial Sequence
  Oligonucleotide for detection of SNP TSC0020681
ttagatgaaggaa

SEQ ID NO: 81756 - DNA, 13 bp, Artificial Sequence
  Oligonucleotide for detection of SNP TSC0020681
ttccttcatctaa

SEQ ID NO: 81757 - DNA, 13 bp, Artificial Sequence
  Oligonucleotide for detection of SNP TSC0020681
ttagataaaggaa

SEQ ID NO: 81758 - DNA, 13 bp, Artificial Sequence
  Oligonucleotide for detection of SNP TSC0020681
ttcctttatctaa

SEQ ID NO: 81759 - DNA, 13 bp, Artificial Sequence
  Oligonucleotide for detection of SNP TSC0020682
tggttttggaagy

SEQ ID NO: 81760 - DNA, 13 bp, Artificial Sequence
  Oligonucleotide for detection of SNP TSC0020682
rcttccaaaacca

SEQ ID NO: 81761 - DNA, 13 bp, Artificial Sequence
  Oligonucleotide for detection of SNP TSC0020682
tggtttcggaagy

SEQ ID NO: 81762 - DNA, 13 bp, Artificial Sequence
  Oligonucleotide for detection of SNP TSC0020682
rcttccgaaacca

SEQ ID NO: 81763 - DNA, 13 bp, Artificial Sequence
  Oligonucleotide for detection of SNP TSC0020682
gtttttggagtta

SEQ ID NO: 81764 - DNA, 13 bp, Artificial Sequence
  Oligonucleotide for detection of SNP TSC0020682
taactccaaaaac

SEQ ID NO: 81765 - DNA, 13 bp, Artificial Sequence
  Oligonucleotide for detection of SNP TSC0020682
gtttttagagtta

SEQ ID NO: 81766 - DNA, 13 bp, Artificial Sequence
  Oligonucleotide for detection of SNP TSC0020682
taactctaaaaac

SEQ ID NO: 81767 - DNA, 13 bp, Artificial Sequence
  Oligonucleotide for detection of SNP TSC0020682
gttttcggagtta

SEQ ID NO: 81768 - DNA, 13 bp, Artificial Sequence
  Oligonucleotide for detection of SNP TSC0020682
taactccgaaaac

SEQ ID NO: 81769 - DNA, 13 bp, Artificial Sequence
  Oligonucleotide for detection of SNP TSC0020683
ttttgggttttgg

SEQ ID NO: 81770 - DNA, 13 bp, Artificial Sequence
  Oligonucleotide for detection of SNP TSC0020683
ccaaaacccaaaa

SEQ ID NO: 81771 - DNA, 13 bp, Artificial Sequence
  Oligonucleotide for detection of SNP TSC0020683
ttttggtttttgg

SEQ ID NO: 81772 - DNA, 13 bp, Artificial Sequence
  Oligonucleotide for detection of SNP TSC0020683
ccaaaaaccaaaa

SEQ ID NO: 81773 - DNA, 13 bp, Artificial Sequence
  Oligonucleotide for detection of SNP TSC0020683
ttaagatttaaga

SEQ ID NO: 81774 - DNA, 13 bp, Artificial Sequence
  Oligonucleotide for detection of SNP TSC0020683
tcttaaatcttaa

SEQ ID NO: 81775 - DNA, 13 bp, Artificial Sequence
  Oligonucleotide for detection of SNP TSC0020683
ttaagaattaaga

SEQ ID NO: 81776 - DNA, 13 bp, Artificial Sequence
  Oligonucleotide for detection of SNP TSC0020683
tcttaattcttaa

SEQ ID NO: 81777 - DNA, 13 bp, Artificial Sequence
  Oligonucleotide for detection of SNP TSC0020684
agtttatgaggtt

SEQ ID NO: 81778 - DNA, 13 bp, Artificial Sequence
  Oligonucleotide for detection of SNP TSC0020684
aacctcataaact

SEQ ID NO: 81779 - DNA, 13 bp, Artificial Sequence
  Oligonucleotide for detection of SNP TSC0020684
agtttacgaggtt

SEQ ID NO: 81780 - DNA, 13 bp, Artificial Sequence
  Oligonucleotide for detection of SNP TSC0020684
aacctcgtaaact

SEQ ID NO: 81781 - DNA, 13 bp, Artificial Sequence
  Oligonucleotide for detection of SNP TSC0020685
atttttaagtttg

SEQ ID NO: 81782 - DNA, 13 bp, Artificial Sequence
  Oligonucleotide for detection of SNP TSC0020685
caaacttaaaaat

SEQ ID NO: 81783 - DNA, 13 bp, Artificial Sequence
  Oligonucleotide for detection of SNP TSC0020685
atttttgagtttg

SEQ ID NO: 81784 - DNA, 13 bp, Artificial Sequence
  Oligonucleotide for detection of SNP TSC0020685
caaactcaaaaat

SEQ ID NO: 81785 - DNA, 13 bp, Artificial Sequence
  Oligonucleotide for detection of SNP TSC0020685
atttttaagttcg

SEQ ID NO: 81786 - DNA, 13 bp, Artificial Sequence
  Oligonucleotide for detection of SNP TSC0020685
cgaacttaaaaat

SEQ ID NO: 81787 - DNA, 13 bp, Artificial Sequence
  Oligonucleotide for detection of SNP TSC0020685
attttcgagtttg

SEQ ID NO: 81788 - DNA, 13 bp, Artificial Sequence
  Oligonucleotide for detection of SNP TSC0020685
caaactcgaaaat

SEQ ID NO: 81789 - DNA, 13 bp, Artificial Sequence
  Oligonucleotide for detection of SNP TSC0020685
atttttgagttcg

SEQ ID NO: 81790 - DNA, 13 bp, Artificial Sequence
  Oligonucleotide for detection of SNP TSC0020685
cgaactcaaaaat

SEQ ID NO: 81791 - DNA, 13 bp, Artificial Sequence
  Oligonucleotide for detection of SNP TSC0020685
attttcgagttcg

SEQ ID NO: 81792 - DNA, 13 bp, Artificial Sequence
  Oligonucleotide for detection of SNP TSC0020685
cgaactcgaaaat

SEQ ID NO: 81793 - DNA, 13 bp, Artificial Sequence
  Oligonucleotide for detection of SNP TSC0020685
tgggtttgaaaat

SEQ ID NO: 81794 - DNA, 13 bp, Artificial Sequence
  Oligonucleotide for detection of SNP TSC0020685
attttcaaaccca

SEQ ID NO: 81795 - DNA, 13 bp, Artificial Sequence
  Oligonucleotide for detection of SNP TSC0020685
cgggtttgaaaat

SEQ ID NO: 81796 - DNA, 13 bp, Artificial Sequence
  Oligonucleotide for detection of SNP TSC0020685
attttcaaacccg

SEQ ID NO: 81797 - DNA, 13 bp, Artificial Sequence
  Oligonucleotide for detection of SNP TSC0020685
tgggttcgaaaat

SEQ ID NO: 81798 - DNA, 13 bp, Artificial Sequence
  Oligonucleotide for detection of SNP TSC0020685
attttcgaaccca

SEQ ID NO: 81799 - DNA, 13 bp, Artificial Sequence
  Oligonucleotide for detection of SNP TSC0020685
cgggttcgaaaat

SEQ ID NO: 81800 - DNA, 13 bp, Artificial Sequence
  Oligonucleotide for detection of SNP TSC0020685
attttcgaacccg

SEQ ID NO: 81801 - DNA, 13 bp, Artificial Sequence
  Oligonucleotide for detection of SNP TSC0020686
gtttgtaggtttg

SEQ ID NO: 81802 - DNA, 13 bp, Artificial Sequence
  Oligonucleotide for detection of SNP TSC0020686
caaacctacaaac

SEQ ID NO: 81803 - DNA, 13 bp, Artificial Sequence
  Oligonucleotide for detection of SNP TSC0020686
gtttgtgggtttg

SEQ ID NO: 81804 - DNA, 13 bp, Artificial Sequence
  Oligonucleotide for detection of SNP TSC0020686
caaacccacaaac

SEQ ID NO: 81805 - DNA, 13 bp, Artificial Sequence
  Oligonucleotide for detection of SNP TSC0020686
gtttgcgggtttg

SEQ ID NO: 81806 - DNA, 13 bp, Artificial Sequence
  Oligonucleotide for detection of SNP TSC0020686
caaacccgcaaac

SEQ ID NO: 81807 - DNA, 13 bp, Artificial Sequence
  Oligonucleotide for detection of SNP TSC0020686
taggtttgtaggy

SEQ ID NO: 81808 - DNA, 13 bp, Artificial Sequence
  Oligonucleotide for detection of SNP TSC0020686
rcctacaaaccta

SEQ ID NO: 81809 - DNA, 13 bp, Artificial Sequence
  Oligonucleotide for detection of SNP TSC0020686
taggttcgtaggy

SEQ ID NO: 81810 - DNA, 13 bp, Artificial Sequence
  Oligonucleotide for detection of SNP TSC0020686
rcctacgaaccta

SEQ ID NO: 81811 - DNA, 13 bp, Artificial Sequence
  Oligonucleotide for detection of SNP TSC0020687
ttttgttggagta

SEQ ID NO: 81812 - DNA, 13 bp, Artificial Sequence
  Oligonucleotide for detection of SNP TSC0020687
tactccaacaaaa

SEQ ID NO: 81813 - DNA, 13 bp, Artificial Sequence
  Oligonucleotide for detection of SNP TSC0020687
tttcgttggagta

SEQ ID NO: 81814 - DNA, 13 bp, Artificial Sequence
  Oligonucleotide for detection of SNP TSC0020687
tactccaacgaaa

SEQ ID NO: 81815 - DNA, 13 bp, Artificial Sequence
  Oligonucleotide for detection of SNP TSC0020687
ttttgtcggagta

SEQ ID NO: 81816 - DNA, 13 bp, Artificial Sequence
  Oligonucleotide for detection of SNP TSC0020687
tactccgacaaaa

SEQ ID NO: 81817 - DNA, 13 bp, Artificial Sequence
  Oligonucleotide for detection of SNP TSC0020687
tttcgtcggagta

SEQ ID NO: 81818 - DNA, 13 bp, Artificial Sequence
  Oligonucleotide for detection of SNP TSC0020687
tactccgacgaaa

SEQ ID NO: 81819 - DNA, 13 bp, Artificial Sequence
  Oligonucleotide for detection of SNP TSC0020687
tgttttgatggga

SEQ ID NO: 81820 - DNA, 13 bp, Artificial Sequence
  Oligonucleotide for detection of SNP TSC0020687
tcccatcaaaaca

SEQ ID NO: 81821 - DNA, 13 bp, Artificial Sequence
  Oligonucleotide for detection of SNP TSC0020687
tgttttaatggga

SEQ ID NO: 81822 - DNA, 13 bp, Artificial Sequence
  Oligonucleotide for detection of SNP TSC0020687
tcccattaaaaca

SEQ ID NO: 81823 - DNA, 13 bp, Artificial Sequence
  Oligonucleotide for detection of SNP TSC0020687
tgtttcgatggga

SEQ ID NO: 81824 - DNA, 13 bp, Artificial Sequence
  Oligonucleotide for detection of SNP TSC0020687
tcccatcgaaaca

SEQ ID NO: 81825 - DNA, 13 bp, Artificial Sequence
  Oligonucleotide for detection of SNP TSC0020687
tgttttaacggga

SEQ ID NO: 81826 - DNA, 13 bp, Artificial Sequence
  Oligonucleotide for detection of SNP TSC0020687
tcccgttaaaaca

SEQ ID NO: 81827 - DNA, 13 bp, Artificial Sequence
  Oligonucleotide for detection of SNP TSC0020687
tgttttgacggga

SEQ ID NO: 81828 - DNA, 13 bp, Artificial Sequence
  Oligonucleotide for detection of SNP TSC0020687
tcccgtcaaaaca

SEQ ID NO: 81829 - DNA, 13 bp, Artificial Sequence
  Oligonucleotide for detection of SNP TSC0020687
tgtttcgacggga

SEQ ID NO: 81830 - DNA, 13 bp, Artificial Sequence
  Oligonucleotide for detection of SNP TSC0020687
tcccgtcgaaaca

SEQ ID NO: 81831 - DNA, 13 bp, Artificial Sequence
  Oligonucleotide for detection of SNP TSC0020688
tttaaatgtatgt

SEQ ID NO: 81832 - DNA, 13 bp, Artificial Sequence
  Oligonucleotide for detection of SNP TSC0020688
acatacatttaaa

SEQ ID NO: 81833 - DNA, 13 bp, Artificial Sequence
  Oligonucleotide for detection of SNP TSC0020688
tttaaacgtatgt

SEQ ID NO: 81834 - DNA, 13 bp, Artificial Sequence
  Oligonucleotide for detection of SNP TSC0020688
acatacgtttaaa

SEQ ID NO: 81835 - DNA, 13 bp, Artificial Sequence
  Oligonucleotide for detection of SNP TSC0020688
atatatgtttaaa

SEQ ID NO: 81836 - DNA, 13 bp, Artificial Sequence
  Oligonucleotide for detection of SNP TSC0020688
tttaaacatatat

SEQ ID NO: 81837 - DNA, 13 bp, Artificial Sequence
  Oligonucleotide for detection of SNP TSC0020688
atatacgtttaaa

SEQ ID NO: 81838 - DNA, 13 bp, Artificial Sequence
  Oligonucleotide for detection of SNP TSC0020688
tttaaacgtatat

SEQ ID NO: 81839 - DNA, 13 bp, Artificial Sequence
  Oligonucleotide for detection of SNP TSC0020689
gtatatggattgt

SEQ ID NO: 81840 - DNA, 13 bp, Artificial Sequence
  Oligonucleotide for detection of SNP TSC0020689
acaatccatatac

SEQ ID NO: 81841 - DNA, 13 bp, Artificial Sequence
  Oligonucleotide for detection of SNP TSC0020689
gtatatagattgt

SEQ ID NO: 81842 - DNA, 13 bp, Artificial Sequence
  Oligonucleotide for detection of SNP TSC0020689
acaatctatatac

SEQ ID NO: 81843 - DNA, 13 bp, Artificial Sequence
  Oligonucleotide for detection of SNP TSC0020690
ataataggggtga

SEQ ID NO: 81844 - DNA, 13 bp, Artificial Sequence
  Oligonucleotide for detection of SNP TSC0020690
tcacccctattat

SEQ ID NO: 81845 - DNA, 13 bp, Artificial Sequence
  Oligonucleotide for detection of SNP TSC0020690
ataatatgggtga

SEQ ID NO: 81846 - DNA, 13 bp, Artificial Sequence
  Oligonucleotide for detection of SNP TSC0020690
tcacccatattat

SEQ ID NO: 81847 - DNA, 13 bp, Artificial Sequence
  Oligonucleotide for detection of SNP TSC0020690
ttatttttattat

SEQ ID NO: 81848 - DNA, 13 bp, Artificial Sequence
  Oligonucleotide for detection of SNP TSC0020690
ataataaaaataa

SEQ ID NO: 81849 - DNA, 13 bp, Artificial Sequence
  Oligonucleotide for detection of SNP TSC0020691
agaataaggtgta

SEQ ID NO: 81850 - DNA, 13 bp, Artificial Sequence
  Oligonucleotide for detection of SNP TSC0020691
tacaccttattct

SEQ ID NO: 81851 - DNA, 13 bp, Artificial Sequence
  Oligonucleotide for detection of SNP TSC0020691
agaatagggtgta

SEQ ID NO: 81852 - DNA, 13 bp, Artificial Sequence
  Oligonucleotide for detection of SNP TSC0020691
tacaccctattct

SEQ ID NO: 81853 - DNA, 13 bp, Artificial Sequence
  Oligonucleotide for detection of SNP TSC0020692
agaaggtatatga

SEQ ID NO: 81854 - DNA, 13 bp, Artificial Sequence
  Oligonucleotide for detection of SNP TSC0020692
tcatataccttct

SEQ ID NO: 81855 - DNA, 13 bp, Artificial Sequence
  Oligonucleotide for detection of SNP TSC0020692
agaagggatatga

SEQ ID NO: 81856 - DNA, 13 bp, Artificial Sequence
  Oligonucleotide for detection of SNP TSC0020692
tcatatcccttct

SEQ ID NO: 81857 - DNA, 13 bp, Artificial Sequence
  Oligonucleotide for detection of SNP TSC0020692
ttatgtttttttt

SEQ ID NO: 81858 - DNA, 13 bp, Artificial Sequence
  Oligonucleotide for detection of SNP TSC0020692
aaaaaaaacataa

SEQ ID NO: 81859 - DNA, 13 bp, Artificial Sequence
  Oligonucleotide for detection of SNP TSC0020693
aggattgtaagtg

SEQ ID NO: 81860 - DNA, 13 bp, Artificial Sequence
  Oligonucleotide for detection of SNP TSC0020693
cacttacaatcct

SEQ ID NO: 81861 - DNA, 13 bp, Artificial Sequence
  Oligonucleotide for detection of SNP TSC0020693
aggattataagtg

SEQ ID NO: 81862 - DNA, 13 bp, Artificial Sequence
  Oligonucleotide for detection of SNP TSC0020693
cacttataatcct

SEQ ID NO: 81863 - DNA, 13 bp, Artificial Sequence
  Oligonucleotide for detection of SNP TSC0020694
ttgaatgtagggg

SEQ ID NO: 81864 - DNA, 13 bp, Artificial Sequence
  Oligonucleotide for detection of SNP TSC0020694
cccctacattcaa

SEQ ID NO: 81865 - DNA, 13 bp, Artificial Sequence
  Oligonucleotide for detection of SNP TSC0020694
ttgaatatagggg

SEQ ID NO: 81866 - DNA, 13 bp, Artificial Sequence
  Oligonucleotide for detection of SNP TSC0020694
cccctatattcaa

SEQ ID NO: 81867 - DNA, 13 bp, Artificial Sequence
  Oligonucleotide for detection of SNP TSC0020694
ttgaacgtagggg

SEQ ID NO: 81868 - DNA, 13 bp, Artificial Sequence
  Oligonucleotide for detection of SNP TSC0020694
cccctacgttcaa

SEQ ID NO: 81869 - DNA, 13 bp, Artificial Sequence
  Oligonucleotide for detection of SNP TSC0020696
tttaaagtgagtt

SEQ ID NO: 81870 - DNA, 13 bp, Artificial Sequence
  Oligonucleotide for detection of SNP TSC0020696
aactcactttaaa

SEQ ID NO: 81871 - DNA, 13 bp, Artificial Sequence
  Oligonucleotide for detection of SNP TSC0020696
tttaaaatgagtt

SEQ ID NO: 81872 - DNA, 13 bp, Artificial Sequence
  Oligonucleotide for detection of SNP TSC0020696
aactcattttaaa

SEQ ID NO: 81873 - DNA, 13 bp, Artificial Sequence
  Oligonucleotide for detection of SNP TSC0020697
ggggttaaatttg

SEQ ID NO: 81874 - DNA, 13 bp, Artificial Sequence
  Oligonucleotide for detection of SNP TSC0020697
caaatttaacccc

SEQ ID NO: 81875 - DNA, 13 bp, Artificial Sequence
  Oligonucleotide for detection of SNP TSC0020697
ggggtttaatttg

SEQ ID NO: 81876 - DNA, 13 bp, Artificial Sequence
  Oligonucleotide for detection of SNP TSC0020697
caaattaaacccc

SEQ ID NO: 81877 - DNA, 13 bp, Artificial Sequence
  Oligonucleotide for detection of SNP TSC0020697
tagatttgattty

SEQ ID NO: 81878 - DNA, 13 bp, Artificial Sequence
  Oligonucleotide for detection of SNP TSC0020697
raaatcaaatcta

SEQ ID NO: 81879 - DNA, 13 bp, Artificial Sequence
  Oligonucleotide for detection of SNP TSC0020697
tagattagattty

SEQ ID NO: 81880 - DNA, 13 bp, Artificial Sequence
  Oligonucleotide for detection of SNP TSC0020697
raaatctaatcta

SEQ ID NO: 81881 - DNA, 13 bp, Artificial Sequence
  Oligonucleotide for detection of SNP TSC0020698
gttgataaaggty

SEQ ID NO: 81882 - DNA, 13 bp, Artificial Sequence
  Oligonucleotide for detection of SNP TSC0020698
racctttatcaac

SEQ ID NO: 81883 - DNA, 13 bp, Artificial Sequence
  Oligonucleotide for detection of SNP TSC0020698
gttgatgaaggty

SEQ ID NO: 81884 - DNA, 13 bp, Artificial Sequence
  Oligonucleotide for detection of SNP TSC0020698
raccttcatcaac

SEQ ID NO: 81885 - DNA, 13 bp, Artificial Sequence
  Oligonucleotide for detection of SNP TSC0020699
tattggttattat

SEQ ID NO: 81886 - DNA, 13 bp, Artificial Sequence
  Oligonucleotide for detection of SNP TSC0020699
ataataaccaata

SEQ ID NO: 81887 - DNA, 13 bp, Artificial Sequence
  Oligonucleotide for detection of SNP TSC0020699
ataatggttagta

SEQ ID NO: 81888 - DNA, 13 bp, Artificial Sequence
  Oligonucleotide for detection of SNP TSC0020699
tactaaccattat

SEQ ID NO: 81889 - DNA, 13 bp, Artificial Sequence
  Oligonucleotide for detection of SNP TSC0020699
ataatgtttagta

SEQ ID NO: 81890 - DNA, 13 bp, Artificial Sequence
  Oligonucleotide for detection of SNP TSC0020699
tactaaacattat

SEQ ID NO: 81891 - DNA, 13 bp, Artificial Sequence
  Oligonucleotide for detection of SNP TSC0020701
gtggttgtaagaa

SEQ ID NO: 81892 - DNA, 13 bp, Artificial Sequence
  Oligonucleotide for detection of SNP TSC0020701
ttcttacaaccac

SEQ ID NO: 81893 - DNA, 13 bp, Artificial Sequence
  Oligonucleotide for detection of SNP TSC0020701
gtggttataagaa

SEQ ID NO: 81894 - DNA, 13 bp, Artificial Sequence
  Oligonucleotide for detection of SNP TSC0020701
ttcttataaccac

SEQ ID NO: 81895 - DNA, 13 bp, Artificial Sequence
  Oligonucleotide for detection of SNP TSC0020701
gcggttgtaagaa

SEQ ID NO: 81896 - DNA, 13 bp, Artificial Sequence
  Oligonucleotide for detection of SNP TSC0020701
ttcttacaaccgc

SEQ ID NO: 81897 - DNA, 13 bp, Artificial Sequence
  Oligonucleotide for detection of SNP TSC0020701
gcggttataagaa

SEQ ID NO: 81898 - DNA, 13 bp, Artificial Sequence
  Oligonucleotide for detection of SNP TSC0020701
ttcttataaccgc

SEQ ID NO: 81899 - DNA, 13 bp, Artificial Sequence
  Oligonucleotide for detection of SNP TSC0020702
tttgattgttttt

SEQ ID NO: 81900 - DNA, 13 bp, Artificial Sequence
  Oligonucleotide for detection of SNP TSC0020702
aaaaacaatcaaa

SEQ ID NO: 81901 - DNA, 13 bp, Artificial Sequence
  Oligonucleotide for detection of SNP TSC0020702
ttcgattgttttt

SEQ ID NO: 81902 - DNA, 13 bp, Artificial Sequence
  Oligonucleotide for detection of SNP TSC0020702
aaaaacaatcgaa

SEQ ID NO: 81903 - DNA, 13 bp, Artificial Sequence
  Oligonucleotide for detection of SNP TSC0020702
tttgatcgttttt

SEQ ID NO: 81904 - DNA, 13 bp, Artificial Sequence
  Oligonucleotide for detection of SNP TSC0020702
aaaaacgatcaaa

SEQ ID NO: 81905 - DNA, 13 bp, Artificial Sequence
  Oligonucleotide for detection of SNP TSC0020702
ttcgatcgttttt

SEQ ID NO: 81906 - DNA, 13 bp, Artificial Sequence
  Oligonucleotide for detection of SNP TSC0020702
aaaaacgatcgaa

SEQ ID NO: 81907 - DNA, 13 bp, Artificial Sequence
  Oligonucleotide for detection of SNP TSC0020702
agaggtggttgga

SEQ ID NO: 81908 - DNA, 13 bp, Artificial Sequence
  Oligonucleotide for detection of SNP TSC0020702
tccaaccacctct

SEQ ID NO: 81909 - DNA, 13 bp, Artificial Sequence
  Oligonucleotide for detection of SNP TSC0020702
agaggtagttgga

SEQ ID NO: 81910 - DNA, 13 bp, Artificial Sequence
  Oligonucleotide for detection of SNP TSC0020702
tccaactacctct

SEQ ID NO: 81911 - DNA, 13 bp, Artificial Sequence
  Oligonucleotide for detection of SNP TSC0020702
agaggcggttgga

SEQ ID NO: 81912 - DNA, 13 bp, Artificial Sequence
  Oligonucleotide for detection of SNP TSC0020702
tccaaccgcctct

SEQ ID NO: 81913 - DNA, 13 bp, Artificial Sequence
  Oligonucleotide for detection of SNP TSC0020702
agaggtagtcgga

SEQ ID NO: 81914 - DNA, 13 bp, Artificial Sequence
  Oligonucleotide for detection of SNP TSC0020702
tccgactacctct

SEQ ID NO: 81915 - DNA, 13 bp, Artificial Sequence
  Oligonucleotide for detection of SNP TSC0020702
agaggtggtcgga

SEQ ID NO: 81916 - DNA, 13 bp, Artificial Sequence
  Oligonucleotide for detection of SNP TSC0020702
tccgaccacctct

SEQ ID NO: 81917 - DNA, 13 bp, Artificial Sequence
  Oligonucleotide for detection of SNP TSC0020702
agaggcggtcgga

SEQ ID NO: 81918 - DNA, 13 bp, Artificial Sequence
  Oligonucleotide for detection of SNP TSC0020702
tccgaccgcctct

SEQ ID NO: 81919 - DNA, 13 bp, Artificial Sequence
  Oligonucleotide for detection of SNP TSC0020719
gataatggaaaat

SEQ ID NO: 81920 - DNA, 13 bp, Artificial Sequence
  Oligonucleotide for detection of SNP TSC0020719
attttccattatc

SEQ ID NO: 81921 - DNA, 13 bp, Artificial Sequence
  Oligonucleotide for detection of SNP TSC0020719
gataatagaaaat

SEQ ID NO: 81922 - DNA, 13 bp, Artificial Sequence
  Oligonucleotide for detection of SNP TSC0020719
attttctattatc

SEQ ID NO: 81923 - DNA, 13 bp, Artificial Sequence
  Oligonucleotide for detection of SNP TSC0020720
tgttttgaagtgt

SEQ ID NO: 81924 - DNA, 13 bp, Artificial Sequence
  Oligonucleotide for detection of SNP TSC0020720
acacttcaaaaca

SEQ ID NO: 81925 - DNA, 13 bp, Artificial Sequence
  Oligonucleotide for detection of SNP TSC0020720
tgttttaaagtgt

SEQ ID NO: 81926 - DNA, 13 bp, Artificial Sequence
  Oligonucleotide for detection of SNP TSC0020720
acactttaaaaca

SEQ ID NO: 81927 - DNA, 13 bp, Artificial Sequence
  Oligonucleotide for detection of SNP TSC0020721
tattttaagataa

SEQ ID NO: 81928 - DNA, 13 bp, Artificial Sequence
  Oligonucleotide for detection of SNP TSC0020721
ttatcttaaaata

SEQ ID NO: 81929 - DNA, 13 bp, Artificial Sequence
  Oligonucleotide for detection of SNP TSC0020721
tattttgagataa

SEQ ID NO: 81930 - DNA, 13 bp, Artificial Sequence
  Oligonucleotide for detection of SNP TSC0020721
ttatctcaaaata

SEQ ID NO: 81931 - DNA, 13 bp, Artificial Sequence
  Oligonucleotide for detection of SNP TSC0020721
tatttcgagataa

SEQ ID NO: 81932 - DNA, 13 bp, Artificial Sequence
  Oligonucleotide for detection of SNP TSC0020721
ttatctcgaaata

SEQ ID NO: 81933 - DNA, 13 bp, Artificial Sequence
  Oligonucleotide for detection of SNP TSC0020721
ttgttttgaagtg

SEQ ID NO: 81934 - DNA, 13 bp, Artificial Sequence
  Oligonucleotide for detection of SNP TSC0020721
cacttcaaaacaa

SEQ ID NO: 81935 - DNA, 13 bp, Artificial Sequence
  Oligonucleotide for detection of SNP TSC0020721
ttgtttcgaagtg

SEQ ID NO: 81936 - DNA, 13 bp, Artificial Sequence
  Oligonucleotide for detection of SNP TSC0020721
cacttcgaaacaa

SEQ ID NO: 81937 - DNA, 13 bp, Artificial Sequence
  Oligonucleotide for detection of SNP TSC0020723
gtggatgtttgtg

SEQ ID NO: 81938 - DNA, 13 bp, Artificial Sequence
  Oligonucleotide for detection of SNP TSC0020723
cacaaacatccac

SEQ ID NO: 81939 - DNA, 13 bp, Artificial Sequence
  Oligonucleotide for detection of SNP TSC0020723
gtggatatttgtg

SEQ ID NO: 81940 - DNA, 13 bp, Artificial Sequence
  Oligonucleotide for detection of SNP TSC0020723
cacaaatatccac

SEQ ID NO: 81941 - DNA, 13 bp, Artificial Sequence
  Oligonucleotide for detection of SNP TSC0020723
gtggacgtttgtg

SEQ ID NO: 81942 - DNA, 13 bp, Artificial Sequence
  Oligonucleotide for detection of SNP TSC0020723
cacaaacgtccac

SEQ ID NO: 81943 - DNA, 13 bp, Artificial Sequence
  Oligonucleotide for detection of SNP TSC0020724
ggaaaggattttt

SEQ ID NO: 81944 - DNA, 13 bp, Artificial Sequence
  Oligonucleotide for detection of SNP TSC0020724
aaaaatcctttcc

SEQ ID NO: 81945 - DNA, 13 bp, Artificial Sequence
  Oligonucleotide for detection of SNP TSC0020724
ggaaagtattttt

SEQ ID NO: 81946 - DNA, 13 bp, Artificial Sequence
  Oligonucleotide for detection of SNP TSC0020724
aaaaatactttcc

SEQ ID NO: 81947 - DNA, 13 bp, Artificial Sequence
  Oligonucleotide for detection of SNP TSC0020724
aaaaattttttty

SEQ ID NO: 81948 - DNA, 13 bp, Artificial Sequence
  Oligonucleotide for detection of SNP TSC0020724
raaaaaaattttt

SEQ ID NO: 81949 - DNA, 13 bp, Artificial Sequence
  Oligonucleotide for detection of SNP TSC0020724
aaaaatattttty

SEQ ID NO: 81950 - DNA, 13 bp, Artificial Sequence
  Oligonucleotide for detection of SNP TSC0020724
raaaaatattttt

SEQ ID NO: 81951 - DNA, 13 bp, Artificial Sequence
  Oligonucleotide for detection of SNP TSC0020725
tggattggagtgy

SEQ ID NO: 81952 - DNA, 13 bp, Artificial Sequence
  Oligonucleotide for detection of SNP TSC0020725
rcactccaatcca

SEQ ID NO: 81953 - DNA, 13 bp, Artificial Sequence
  Oligonucleotide for detection of SNP TSC0020725
tggattagagtgy

SEQ ID NO: 81954 - DNA, 13 bp, Artificial Sequence
  Oligonucleotide for detection of SNP TSC0020725
rcactctaatcca

SEQ ID NO: 81955 - DNA, 13 bp, Artificial Sequence
  Oligonucleotide for detection of SNP TSC0020726
ggaggaaaaggtt

SEQ ID NO: 81956 - DNA, 13 bp, Artificial Sequence
  Oligonucleotide for detection of SNP TSC0020726
aaccttttcctcc

SEQ ID NO: 81957 - DNA, 13 bp, Artificial Sequence
  Oligonucleotide for detection of SNP TSC0020726
ggaggagaaggtt

SEQ ID NO: 81958 - DNA, 13 bp, Artificial Sequence
  Oligonucleotide for detection of SNP TSC0020726
aaccttctcctcc

SEQ ID NO: 81959 - DNA, 13 bp, Artificial Sequence
  Oligonucleotide for detection of SNP TSC0020727
agggatgattaty

SEQ ID NO: 81960 - DNA, 13 bp, Artificial Sequence
  Oligonucleotide for detection of SNP TSC0020727
rataatcatccct

SEQ ID NO: 81961 - DNA, 13 bp, Artificial Sequence
  Oligonucleotide for detection of SNP TSC0020727
agggattattaty

SEQ ID NO: 81962 - DNA, 13 bp, Artificial Sequence
  Oligonucleotide for detection of SNP TSC0020727
rataataatccct

SEQ ID NO: 81963 - DNA, 13 bp, Artificial Sequence
  Oligonucleotide for detection of SNP TSC0020727
ggtgattattttt

SEQ ID NO: 81964 - DNA, 13 bp, Artificial Sequence
  Oligonucleotide for detection of SNP TSC0020727
aaaaataatcacc

SEQ ID NO: 81965 - DNA, 13 bp, Artificial Sequence
  Oligonucleotide for detection of SNP TSC0020727
ggtgataattttt

SEQ ID NO: 81966 - DNA, 13 bp, Artificial Sequence
  Oligonucleotide for detection of SNP TSC0020727
aaaaattatcacc

SEQ ID NO: 81967 - DNA, 13 bp, Artificial Sequence
  Oligonucleotide for detection of SNP TSC0020728
aggaatatgttty

SEQ ID NO: 81968 - DNA, 13 bp, Artificial Sequence
  Oligonucleotide for detection of SNP TSC0020728
raaacatattcct

SEQ ID NO: 81969 - DNA, 13 bp, Artificial Sequence
  Oligonucleotide for detection of SNP TSC0020728
aggaatgtgttty

SEQ ID NO: 81970 - DNA, 13 bp, Artificial Sequence
  Oligonucleotide for detection of SNP TSC0020728
raaacacattcct

SEQ ID NO: 81971 - DNA, 13 bp, Artificial Sequence
  Oligonucleotide for detection of SNP TSC0020729
aagttgtggtagg

SEQ ID NO: 81972 - DNA, 13 bp, Artificial Sequence
  Oligonucleotide for detection of SNP TSC0020729
cctaccacaactt

SEQ ID NO: 81973 - DNA, 13 bp, Artificial Sequence
  Oligonucleotide for detection of SNP TSC0020729
aagttgaggtagg

SEQ ID NO: 81974 - DNA, 13 bp, Artificial Sequence
  Oligonucleotide for detection of SNP TSC0020729
cctacctcaactt

SEQ ID NO: 81975 - DNA, 13 bp, Artificial Sequence
  Oligonucleotide for detection of SNP TSC0020730
gtagatgtttgta

SEQ ID NO: 81976 - DNA, 13 bp, Artificial Sequence
  Oligonucleotide for detection of SNP TSC0020730
tacaaacatctac

SEQ ID NO: 81977 - DNA, 13 bp, Artificial Sequence
  Oligonucleotide for detection of SNP TSC0020730
gtagatatttgta

SEQ ID NO: 81978 - DNA, 13 bp, Artificial Sequence
  Oligonucleotide for detection of SNP TSC0020730
tacaaatatctac

SEQ ID NO: 81979 - DNA, 13 bp, Artificial Sequence
  Oligonucleotide for detection of SNP TSC0020732
atatggggaaaty

SEQ ID NO: 81980 - DNA, 13 bp, Artificial Sequence
  Oligonucleotide for detection of SNP TSC0020732
ratttccccatat

SEQ ID NO: 81981 - DNA, 13 bp, Artificial Sequence
  Oligonucleotide for detection of SNP TSC0020733
gtatttatattay

SEQ ID NO: 81982 - DNA, 13 bp, Artificial Sequence
  Oligonucleotide for detection of SNP TSC0020733
rtaatataaatac

SEQ ID NO: 81983 - DNA, 13 bp, Artificial Sequence
  Oligonucleotide for detection of SNP TSC0020733
gtatttgtattay

SEQ ID NO: 81984 - DNA, 13 bp, Artificial Sequence
  Oligonucleotide for detection of SNP TSC0020733
rtaatacaaatac

SEQ ID NO: 81985 - DNA, 13 bp, Artificial Sequence
  Oligonucleotide for detection of SNP TSC0020734
ttaaggaggagtg

SEQ ID NO: 81986 - DNA, 13 bp, Artificial Sequence
  Oligonucleotide for detection of SNP TSC0020734
cactcctccttaa

SEQ ID NO: 81987 - DNA, 13 bp, Artificial Sequence
  Oligonucleotide for detection of SNP TSC0020734
ttaaggtggagtg

SEQ ID NO: 81988 - DNA, 13 bp, Artificial Sequence
  Oligonucleotide for detection of SNP TSC0020734
cactccaccttaa

SEQ ID NO: 81989 - DNA, 13 bp, Artificial Sequence
  Oligonucleotide for detection of SNP TSC0020734
ttaaggcggagtg

SEQ ID NO: 81990 - DNA, 13 bp, Artificial Sequence
  Oligonucleotide for detection of SNP TSC0020734
cactccgccttaa

SEQ ID NO: 81991 - DNA, 13 bp, Artificial Sequence
  Oligonucleotide for detection of SNP TSC0020734
tatttttttttgg

SEQ ID NO: 81992 - DNA, 13 bp, Artificial Sequence
  Oligonucleotide for detection of SNP TSC0020734
ccaaaaaaaaata

SEQ ID NO: 81993 - DNA, 13 bp, Artificial Sequence
  Oligonucleotide for detection of SNP TSC0020734
tattttgttttgg

SEQ ID NO: 81994 - DNA, 13 bp, Artificial Sequence
  Oligonucleotide for detection of SNP TSC0020734
ccaaaacaaaata

SEQ ID NO: 81995 - DNA, 13 bp, Artificial Sequence
  Oligonucleotide for detection of SNP TSC0020734
tatttcgttttgg

SEQ ID NO: 81996 - DNA, 13 bp, Artificial Sequence
  Oligonucleotide for detection of SNP TSC0020734
ccaaaacgaaata

SEQ ID NO: 81997 - DNA, 13 bp, Artificial Sequence
  Oligonucleotide for detection of SNP TSC0020735
cgtataatttttt

SEQ ID NO: 81998 - DNA, 13 bp, Artificial Sequence
  Oligonucleotide for detection of SNP TSC0020735
aaaaaattatacg

SEQ ID NO: 81999 - DNA, 13 bp, Artificial Sequence
  Oligonucleotide for detection of SNP TSC0020735
cgtatattttttt

SEQ ID NO: 82000 - DNA, 13 bp, Artificial Sequence
  Oligonucleotide for detection of SNP TSC0020735
aaaaaaatatacg

SEQ ID NO: 82001 - DNA, 13 bp, Artificial Sequence
  Oligonucleotide for detection of SNP TSC0020735
aaggggttgtgtg

SEQ ID NO: 82002 - DNA, 13 bp, Artificial Sequence
  Oligonucleotide for detection of SNP TSC0020735
cacacaacccctt

SEQ ID NO: 82003 - DNA, 13 bp, Artificial Sequence
  Oligonucleotide for detection of SNP TSC0020735
aagggggtgtgtg

SEQ ID NO: 82004 - DNA, 13 bp, Artificial Sequence
  Oligonucleotide for detection of SNP TSC0020735
cacacaccccctt

SEQ ID NO: 82005 - DNA, 13 bp, Artificial Sequence
  Oligonucleotide for detection of SNP TSC0020735
aaggggttgtgcg

SEQ ID NO: 82006 - DNA, 13 bp, Artificial Sequence
  Oligonucleotide for detection of SNP TSC0020735
cgcacaacccctt

SEQ ID NO: 82007 - DNA, 13 bp, Artificial Sequence
  Oligonucleotide for detection of SNP TSC0020735
aagggggtgtgcg

SEQ ID NO: 82008 - DNA, 13 bp, Artificial Sequence
  Oligonucleotide for detection of SNP TSC0020735
cgcacaccccctt

SEQ ID NO: 82009 - DNA, 13 bp, Artificial Sequence
  Oligonucleotide for detection of SNP TSC0020736
attttagtttaay

SEQ ID NO: 82010 - DNA, 13 bp, Artificial Sequence
  Oligonucleotide for detection of SNP TSC0020736
rttaaactaaaat

SEQ ID NO: 82011 - DNA, 13 bp, Artificial Sequence
  Oligonucleotide for detection of SNP TSC0020736
attttaatttaay

SEQ ID NO: 82012 - DNA, 13 bp, Artificial Sequence
  Oligonucleotide for detection of SNP TSC0020736
rttaaattaaaat

SEQ ID NO: 82013 - DNA, 13 bp, Artificial Sequence
  Oligonucleotide for detection of SNP TSC0020737
ttattagtaattt

SEQ ID NO: 82014 - DNA, 13 bp, Artificial Sequence
  Oligonucleotide for detection of SNP TSC0020737
aaattactaataa

SEQ ID NO: 82015 - DNA, 13 bp, Artificial Sequence
  Oligonucleotide for detection of SNP TSC0020737
ttattaataattt

SEQ ID NO: 82016 - DNA, 13 bp, Artificial Sequence
  Oligonucleotide for detection of SNP TSC0020737
aaattattaataa

SEQ ID NO: 82017 - DNA, 13 bp, Artificial Sequence
  Oligonucleotide for detection of SNP TSC0020738
tttttgattattt

SEQ ID NO: 82018 - DNA, 13 bp, Artificial Sequence
  Oligonucleotide for detection of SNP TSC0020738
aaataatcaaaaa

SEQ ID NO: 82019 - DNA, 13 bp, Artificial Sequence
  Oligonucleotide for detection of SNP TSC0020738
tttttgtttattt

SEQ ID NO: 82020 - DNA, 13 bp, Artificial Sequence
  Oligonucleotide for detection of SNP TSC0020738
aaataaacaaaaa

SEQ ID NO: 82021 - DNA, 13 bp, Artificial Sequence
  Oligonucleotide for detection of SNP TSC0020738
aggtggttaaagg

SEQ ID NO: 82022 - DNA, 13 bp, Artificial Sequence
  Oligonucleotide for detection of SNP TSC0020738
cctttaaccacct

SEQ ID NO: 82023 - DNA, 13 bp, Artificial Sequence
  Oligonucleotide for detection of SNP TSC0020738
aggtgggtaaagg

SEQ ID NO: 82024 - DNA, 13 bp, Artificial Sequence
  Oligonucleotide for detection of SNP TSC0020738
cctttacccacct

SEQ ID NO: 82025 - DNA, 13 bp, Artificial Sequence
  Oligonucleotide for detection of SNP TSC0020739
tagtatttggttg

SEQ ID NO: 82026 - DNA, 13 bp, Artificial Sequence
  Oligonucleotide for detection of SNP TSC0020739
caaccaaatacta

SEQ ID NO: 82027 - DNA, 13 bp, Artificial Sequence
  Oligonucleotide for detection of SNP TSC0020739
tagtatgtggttg

SEQ ID NO: 82028 - DNA, 13 bp, Artificial Sequence
  Oligonucleotide for detection of SNP TSC0020739
caaccacatacta

SEQ ID NO: 82029 - DNA, 13 bp, Artificial Sequence
  Oligonucleotide for detection of SNP TSC0020739
tagttagatgttg

SEQ ID NO: 82030 - DNA, 13 bp, Artificial Sequence
  Oligonucleotide for detection of SNP TSC0020739
caacatctaacta

SEQ ID NO: 82031 - DNA, 13 bp, Artificial Sequence
  Oligonucleotide for detection of SNP TSC0020739
tagttatatgttg

SEQ ID NO: 82032 - DNA, 13 bp, Artificial Sequence
  Oligonucleotide for detection of SNP TSC0020739
caacatataacta

SEQ ID NO: 82033 - DNA, 13 bp, Artificial Sequence
  Oligonucleotide for detection of SNP TSC0020743
ttgttgtgatata

SEQ ID NO: 82034 - DNA, 13 bp, Artificial Sequence
  Oligonucleotide for detection of SNP TSC0020743
tatatcacaacaa

SEQ ID NO: 82035 - DNA, 13 bp, Artificial Sequence
  Oligonucleotide for detection of SNP TSC0020743
ttgttgggatata

SEQ ID NO: 82036 - DNA, 13 bp, Artificial Sequence
  Oligonucleotide for detection of SNP TSC0020743
tatatcccaacaa

SEQ ID NO: 82037 - DNA, 13 bp, Artificial Sequence
  Oligonucleotide for detection of SNP TSC0020743
tcgttgtgatata

SEQ ID NO: 82038 - DNA, 13 bp, Artificial Sequence
  Oligonucleotide for detection of SNP TSC0020743
tatatcacaacga

SEQ ID NO: 82039 - DNA, 13 bp, Artificial Sequence
  Oligonucleotide for detection of SNP TSC0020743
tcgttgggatata

SEQ ID NO: 82040 - DNA, 13 bp, Artificial Sequence
  Oligonucleotide for detection of SNP TSC0020743
tatatcccaacga

SEQ ID NO: 82041 - DNA, 13 bp, Artificial Sequence
  Oligonucleotide for detection of SNP TSC0020743
ttgttgcgatata

SEQ ID NO: 82042 - DNA, 13 bp, Artificial Sequence
  Oligonucleotide for detection of SNP TSC0020743
tatatcgcaacaa

SEQ ID NO: 82043 - DNA, 13 bp, Artificial Sequence
  Oligonucleotide for detection of SNP TSC0020743
tcgttgcgatata

SEQ ID NO: 82044 - DNA, 13 bp, Artificial Sequence
  Oligonucleotide for detection of SNP TSC0020743
tatatcgcaacga

SEQ ID NO: 82045 - DNA, 13 bp, Artificial Sequence
  Oligonucleotide for detection of SNP TSC0020743
tgtgttgtagtga

SEQ ID NO: 82046 - DNA, 13 bp, Artificial Sequence
  Oligonucleotide for detection of SNP TSC0020743
tcactacaacaca

SEQ ID NO: 82047 - DNA, 13 bp, Artificial Sequence
  Oligonucleotide for detection of SNP TSC0020743
tgtgttttagtga

SEQ ID NO: 82048 - DNA, 13 bp, Artificial Sequence
  Oligonucleotide for detection of SNP TSC0020743
tcactaaaacaca

SEQ ID NO: 82049 - DNA, 13 bp, Artificial Sequence
  Oligonucleotide for detection of SNP TSC0020743
tgtgtcgtagtga

SEQ ID NO: 82050 - DNA, 13 bp, Artificial Sequence
  Oligonucleotide for detection of SNP TSC0020743
tcactacgacaca

SEQ ID NO: 82051 - DNA, 13 bp, Artificial Sequence
  Oligonucleotide for detection of SNP TSC0020743
tgtgttttagcga

SEQ ID NO: 82052 - DNA, 13 bp, Artificial Sequence
  Oligonucleotide for detection of SNP TSC0020743
tcgctaaaacaca

SEQ ID NO: 82053 - DNA, 13 bp, Artificial Sequence
  Oligonucleotide for detection of SNP TSC0020743
tgtgttgtagcga

SEQ ID NO: 82054 - DNA, 13 bp, Artificial Sequence
  Oligonucleotide for detection of SNP TSC0020743
tcgctacaacaca

SEQ ID NO: 82055 - DNA, 13 bp, Artificial Sequence
  Oligonucleotide for detection of SNP TSC0020743
tgtgtcgtagcga

SEQ ID NO: 82056 - DNA, 13 bp, Artificial Sequence
  Oligonucleotide for detection of SNP TSC0020743
tcgctacgacaca

SEQ ID NO: 82057 - DNA, 13 bp, Artificial Sequence
  Oligonucleotide for detection of SNP TSC0020745
tgaggtaggcgga

SEQ ID NO: 82058 - DNA, 13 bp, Artificial Sequence
  Oligonucleotide for detection of SNP TSC0020745
tccgcctacctca

SEQ ID NO: 82059 - DNA, 13 bp, Artificial Sequence
  Oligonucleotide for detection of SNP TSC0020745
tgaggtgggcgga

SEQ ID NO: 82060 - DNA, 13 bp, Artificial Sequence
  Oligonucleotide for detection of SNP TSC0020745
tccgcccacctca

SEQ ID NO: 82061 - DNA, 13 bp, Artificial Sequence
  Oligonucleotide for detection of SNP TSC0020745
tgaggcgggcgga

SEQ ID NO: 82062 - DNA, 13 bp, Artificial Sequence
  Oligonucleotide for detection of SNP TSC0020745
tccgcccgcctca

SEQ ID NO: 82063 - DNA, 13 bp, Artificial Sequence
  Oligonucleotide for detection of SNP TSC0020745
tttgtttgtttta

SEQ ID NO: 82064 - DNA, 13 bp, Artificial Sequence
  Oligonucleotide for detection of SNP TSC0020745
taaaacaaacaaa

SEQ ID NO: 82065 - DNA, 13 bp, Artificial Sequence
  Oligonucleotide for detection of SNP TSC0020745
ttcgtttgtttta

SEQ ID NO: 82066 - DNA, 13 bp, Artificial Sequence
  Oligonucleotide for detection of SNP TSC0020745
taaaacaaacgaa

SEQ ID NO: 82067 - DNA, 13 bp, Artificial Sequence
  Oligonucleotide for detection of SNP TSC0020745
tttgttcgtttta

SEQ ID NO: 82068 - DNA, 13 bp, Artificial Sequence
  Oligonucleotide for detection of SNP TSC0020745
taaaacgaacaaa

SEQ ID NO: 82069 - DNA, 13 bp, Artificial Sequence
  Oligonucleotide for detection of SNP TSC0020745
ttcgttcgtttta

SEQ ID NO: 82070 - DNA, 13 bp, Artificial Sequence
  Oligonucleotide for detection of SNP TSC0020745
taaaacgaacgaa

SEQ ID NO: 82071 - DNA, 13 bp, Artificial Sequence
  Oligonucleotide for detection of SNP TSC0020749
tttataatttaay

SEQ ID NO: 82072 - DNA, 13 bp, Artificial Sequence
  Oligonucleotide for detection of SNP TSC0020749
rttaaattataaa

SEQ ID NO: 82073 - DNA, 13 bp, Artificial Sequence
  Oligonucleotide for detection of SNP TSC0020749
tttatagtttaay

SEQ ID NO: 82074 - DNA, 13 bp, Artificial Sequence
  Oligonucleotide for detection of SNP TSC0020749
rttaaactataaa

SEQ ID NO: 82075 - DNA, 13 bp, Artificial Sequence
  Oligonucleotide for detection of SNP TSC0020751
agaggaatttttt

SEQ ID NO: 82076 - DNA, 13 bp, Artificial Sequence
  Oligonucleotide for detection of SNP TSC0020751
aaaaaattcctct

SEQ ID NO: 82077 - DNA, 13 bp, Artificial Sequence
  Oligonucleotide for detection of SNP TSC0020751
agaggagtttttt

SEQ ID NO: 82078 - DNA, 13 bp, Artificial Sequence
  Oligonucleotide for detection of SNP TSC0020751
aaaaaactcctct

SEQ ID NO: 82079 - DNA, 13 bp, Artificial Sequence
  Oligonucleotide for detection of SNP TSC0020752
gtttagtttttat

SEQ ID NO: 82080 - DNA, 13 bp, Artificial Sequence
  Oligonucleotide for detection of SNP TSC0020752
ataaaaactaaac

SEQ ID NO: 82081 - DNA, 13 bp, Artificial Sequence
  Oligonucleotide for detection of SNP TSC0020752
gtttaggttttat

SEQ ID NO: 82082 - DNA, 13 bp, Artificial Sequence
  Oligonucleotide for detection of SNP TSC0020752
ataaaacctaaac

SEQ ID NO: 82083 - DNA, 13 bp, Artificial Sequence
  Oligonucleotide for detection of SNP TSC0020752
atagaagttaaay

SEQ ID NO: 82084 - DNA, 13 bp, Artificial Sequence
  Oligonucleotide for detection of SNP TSC0020752
rtttaacttctat

SEQ ID NO: 82085 - DNA, 13 bp, Artificial Sequence
  Oligonucleotide for detection of SNP TSC0020752
atagaatttaaay

SEQ ID NO: 82086 - DNA, 13 bp, Artificial Sequence
  Oligonucleotide for detection of SNP TSC0020752
rtttaaattctat

SEQ ID NO: 82087 - DNA, 13 bp, Artificial Sequence
  Oligonucleotide for detection of SNP TSC0020753
ataggtataaaga

SEQ ID NO: 82088 - DNA, 13 bp, Artificial Sequence
  Oligonucleotide for detection of SNP TSC0020753
tctttatacctat

SEQ ID NO: 82089 - DNA, 13 bp, Artificial Sequence
  Oligonucleotide for detection of SNP TSC0020753
ataggtgtaaaga

SEQ ID NO: 82090 - DNA, 13 bp, Artificial Sequence
  Oligonucleotide for detection of SNP TSC0020753
tctttacacctat

SEQ ID NO: 82091 - DNA, 13 bp, Artificial Sequence
  Oligonucleotide for detection of SNP TSC0020753
ataggcgtaaaga

SEQ ID NO: 82092 - DNA, 13 bp, Artificial Sequence
  Oligonucleotide for detection of SNP TSC0020753
tctttacgcctat

SEQ ID NO: 82093 - DNA, 13 bp, Artificial Sequence
  Oligonucleotide for detection of SNP TSC0020753
tttttgtgtttgt

SEQ ID NO: 82094 - DNA, 13 bp, Artificial Sequence
  Oligonucleotide for detection of SNP TSC0020753
acaaacacaaaaa

SEQ ID NO: 82095 - DNA, 13 bp, Artificial Sequence
  Oligonucleotide for detection of SNP TSC0020753
tttttgcgtttgt

SEQ ID NO: 82096 - DNA, 13 bp, Artificial Sequence
  Oligonucleotide for detection of SNP TSC0020753
acaaacgcaaaaa

SEQ ID NO: 82097 - DNA, 13 bp, Artificial Sequence
  Oligonucleotide for detection of SNP TSC0020754
gagaaatgaaatt

SEQ ID NO: 82098 - DNA, 13 bp, Artificial Sequence
  Oligonucleotide for detection of SNP TSC0020754
aatttcatttctc

SEQ ID NO: 82099 - DNA, 13 bp, Artificial Sequence
  Oligonucleotide for detection of SNP TSC0020754
gagaaacgaaatt

SEQ ID NO: 82100 - DNA, 13 bp, Artificial Sequence
  Oligonucleotide for detection of SNP TSC0020754
aatttcgtttctc

SEQ ID NO: 82101 - DNA, 13 bp, Artificial Sequence
  Oligonucleotide for detection of SNP TSC0020755
ataaagaatagta

SEQ ID NO: 82102 - DNA, 13 bp, Artificial Sequence
  Oligonucleotide for detection of SNP TSC0020755
tactattctttat

SEQ ID NO: 82103 - DNA, 13 bp, Artificial Sequence
  Oligonucleotide for detection of SNP TSC0020755
ataaagtatagta

SEQ ID NO: 82104 - DNA, 13 bp, Artificial Sequence
  Oligonucleotide for detection of SNP TSC0020755
tactatactttat

SEQ ID NO: 82105 - DNA, 13 bp, Artificial Sequence
  Oligonucleotide for detection of SNP TSC0020757
agttttgagaaga

SEQ ID NO: 82106 - DNA, 13 bp, Artificial Sequence
  Oligonucleotide for detection of SNP TSC0020757
tcttctcaaaact

SEQ ID NO: 82107 - DNA, 13 bp, Artificial Sequence
  Oligonucleotide for detection of SNP TSC0020757
agtttttagaaga

SEQ ID NO: 82108 - DNA, 13 bp, Artificial Sequence
  Oligonucleotide for detection of SNP TSC0020757
tcttctaaaaact

SEQ ID NO: 82109 - DNA, 13 bp, Artificial Sequence
  Oligonucleotide for detection of SNP TSC0020757
agtttcgagaaga

SEQ ID NO: 82110 - DNA, 13 bp, Artificial Sequence
  Oligonucleotide for detection of SNP TSC0020757
tcttctcgaaact

SEQ ID NO: 82111 - DNA, 13 bp, Artificial Sequence
  Oligonucleotide for detection of SNP TSC0020757
ttttttagaaatt

SEQ ID NO: 82112 - DNA, 13 bp, Artificial Sequence
  Oligonucleotide for detection of SNP TSC0020757
aatttctaaaaaa

SEQ ID NO: 82113 - DNA, 13 bp, Artificial Sequence
  Oligonucleotide for detection of SNP TSC0020762
agaattattatag

SEQ ID NO: 82114 - DNA, 13 bp, Artificial Sequence
  Oligonucleotide for detection of SNP TSC0020762
ctataataattct

SEQ ID NO: 82115 - DNA, 13 bp, Artificial Sequence
  Oligonucleotide for detection of SNP TSC0020762
agaatttttatag

SEQ ID NO: 82116 - DNA, 13 bp, Artificial Sequence
  Oligonucleotide for detection of SNP TSC0020762
ctataaaaattct

SEQ ID NO: 82117 - DNA, 13 bp, Artificial Sequence
  Oligonucleotide for detection of SNP TSC0020762
ttgtgataatttt

SEQ ID NO: 82118 - DNA, 13 bp, Artificial Sequence
  Oligonucleotide for detection of SNP TSC0020762
aaaattatcacaa

SEQ ID NO: 82119 - DNA, 13 bp, Artificial Sequence
  Oligonucleotide for detection of SNP TSC0020762
ttgtgaaaatttt

SEQ ID NO: 82120 - DNA, 13 bp, Artificial Sequence
  Oligonucleotide for detection of SNP TSC0020762
aaaattttcacaa

SEQ ID NO: 82121 - DNA, 13 bp, Artificial Sequence
  Oligonucleotide for detection of SNP TSC0020763
ataattatagtta

SEQ ID NO: 82122 - DNA, 13 bp, Artificial Sequence
  Oligonucleotide for detection of SNP TSC0020763
taactataattat

SEQ ID NO: 82123 - DNA, 13 bp, Artificial Sequence
  Oligonucleotide for detection of SNP TSC0020763
ataattgtagtta

SEQ ID NO: 82124 - DNA, 13 bp, Artificial Sequence
  Oligonucleotide for detection of SNP TSC0020763
taactacaattat

SEQ ID NO: 82125 - DNA, 13 bp, Artificial Sequence
  Oligonucleotide for detection of SNP TSC0020763
ataatcgtagtta

SEQ ID NO: 82126 - DNA, 13 bp, Artificial Sequence
  Oligonucleotide for detection of SNP TSC0020763
taactacgattat

SEQ ID NO: 82127 - DNA, 13 bp, Artificial Sequence
  Oligonucleotide for detection of SNP TSC0020763
tagttgtggttat

SEQ ID NO: 82128 - DNA, 13 bp, Artificial Sequence
  Oligonucleotide for detection of SNP TSC0020763
ataaccacaacta

SEQ ID NO: 82129 - DNA, 13 bp, Artificial Sequence
  Oligonucleotide for detection of SNP TSC0020763
tagttgcggttat

SEQ ID NO: 82130 - DNA, 13 bp, Artificial Sequence
  Oligonucleotide for detection of SNP TSC0020763
ataaccgcaacta

SEQ ID NO: 82131 - DNA, 13 bp, Artificial Sequence
  Oligonucleotide for detection of SNP TSC0020764
ggattgaggtttg

SEQ ID NO: 82132 - DNA, 13 bp, Artificial Sequence
  Oligonucleotide for detection of SNP TSC0020764
caaacctcaatcc

SEQ ID NO: 82133 - DNA, 13 bp, Artificial Sequence
  Oligonucleotide for detection of SNP TSC0020764
ggattgtggtttg

SEQ ID NO: 82134 - DNA, 13 bp, Artificial Sequence
  Oligonucleotide for detection of SNP TSC0020764
caaaccacaatcc

SEQ ID NO: 82135 - DNA, 13 bp, Artificial Sequence
  Oligonucleotide for detection of SNP TSC0020764
ggatcgaggtttg

SEQ ID NO: 82136 - DNA, 13 bp, Artificial Sequence
  Oligonucleotide for detection of SNP TSC0020764
caaacctcgatcc

SEQ ID NO: 82137 - DNA, 13 bp, Artificial Sequence
  Oligonucleotide for detection of SNP TSC0020764
ggatcgtggtttg

SEQ ID NO: 82138 - DNA, 13 bp, Artificial Sequence
  Oligonucleotide for detection of SNP TSC0020764
caaaccacgatcc

SEQ ID NO: 82139 - DNA, 13 bp, Artificial Sequence
  Oligonucleotide for detection of SNP TSC0020764
ggattgaggttcg

SEQ ID NO: 82140 - DNA, 13 bp, Artificial Sequence
  Oligonucleotide for detection of SNP TSC0020764
cgaacctcaatcc

SEQ ID NO: 82141 - DNA, 13 bp, Artificial Sequence
  Oligonucleotide for detection of SNP TSC0020764
ggattgcggtttg

SEQ ID NO: 82142 - DNA, 13 bp, Artificial Sequence
  Oligonucleotide for detection of SNP TSC0020764
caaaccgcaatcc

SEQ ID NO: 82143 - DNA, 13 bp, Artificial Sequence
  Oligonucleotide for detection of SNP TSC0020764
ggatcgaggttcg

SEQ ID NO: 82144 - DNA, 13 bp, Artificial Sequence
  Oligonucleotide for detection of SNP TSC0020764
cgaacctcgatcc

SEQ ID NO: 82145 - DNA, 13 bp, Artificial Sequence
  Oligonucleotide for detection of SNP TSC0020764
ggattgtggttcg

SEQ ID NO: 82146 - DNA, 13 bp, Artificial Sequence
  Oligonucleotide for detection of SNP TSC0020764
cgaaccacaatcc

SEQ ID NO: 82147 - DNA, 13 bp, Artificial Sequence
  Oligonucleotide for detection of SNP TSC0020764
ggatcgcggtttg

SEQ ID NO: 82148 - DNA, 13 bp, Artificial Sequence
  Oligonucleotide for detection of SNP TSC0020764
caaaccgcgatcc

SEQ ID NO: 82149 - DNA, 13 bp, Artificial Sequence
  Oligonucleotide for detection of SNP TSC0020764
ggatcgtggttcg

SEQ ID NO: 82150 - DNA, 13 bp, Artificial Sequence
  Oligonucleotide for detection of SNP TSC0020764
cgaaccacgatcc

SEQ ID NO: 82151 - DNA, 13 bp, Artificial Sequence
  Oligonucleotide for detection of SNP TSC0020764
ggattgcggttcg

SEQ ID NO: 82152 - DNA, 13 bp, Artificial Sequence
  Oligonucleotide for detection of SNP TSC0020764
cgaaccgcaatcc

SEQ ID NO: 82153 - DNA, 13 bp, Artificial Sequence
  Oligonucleotide for detection of SNP TSC0020764
ggatcgcggttcg

SEQ ID NO: 82154 - DNA, 13 bp, Artificial Sequence
  Oligonucleotide for detection of SNP TSC0020764
cgaaccgcgatcc

SEQ ID NO: 82155 - DNA, 13 bp, Artificial Sequence
  Oligonucleotide for detection of SNP TSC0020764
tggattttgatty

SEQ ID NO: 82156 - DNA, 13 bp, Artificial Sequence
  Oligonucleotide for detection of SNP TSC0020764
raatcaaaatcca

SEQ ID NO: 82157 - DNA, 13 bp, Artificial Sequence
  Oligonucleotide for detection of SNP TSC0020764
tggattgtgatty

SEQ ID NO: 82158 - DNA, 13 bp, Artificial Sequence
  Oligonucleotide for detection of SNP TSC0020764
raatcacaatcca

SEQ ID NO: 82159 - DNA, 13 bp, Artificial Sequence
  Oligonucleotide for detection of SNP TSC0020764
cggattttgatty

SEQ ID NO: 82160 - DNA, 13 bp, Artificial Sequence
  Oligonucleotide for detection of SNP TSC0020764
raatcaaaatccg

SEQ ID NO: 82161 - DNA, 13 bp, Artificial Sequence
  Oligonucleotide for detection of SNP TSC0020764
cggattgtgatty

SEQ ID NO: 82162 - DNA, 13 bp, Artificial Sequence
  Oligonucleotide for detection of SNP TSC0020764
raatcacaatccg

SEQ ID NO: 82163 - DNA, 13 bp, Artificial Sequence
  Oligonucleotide for detection of SNP TSC0020764
tggatttcgatty

SEQ ID NO: 82164 - DNA, 13 bp, Artificial Sequence
  Oligonucleotide for detection of SNP TSC0020764
raatcgaaatcca

SEQ ID NO: 82165 - DNA, 13 bp, Artificial Sequence
  Oligonucleotide for detection of SNP TSC0020764
tggatcgtgatty

SEQ ID NO: 82166 - DNA, 13 bp, Artificial Sequence
  Oligonucleotide for detection of SNP TSC0020764
raatcacgatcca

SEQ ID NO: 82167 - DNA, 13 bp, Artificial Sequence
  Oligonucleotide for detection of SNP TSC0020764
cggatttcgatty

SEQ ID NO: 82168 - DNA, 13 bp, Artificial Sequence
  Oligonucleotide for detection of SNP TSC0020764
raatcgaaatccg

SEQ ID NO: 82169 - DNA, 13 bp, Artificial Sequence
  Oligonucleotide for detection of SNP TSC0020764
tggattgcgatty

SEQ ID NO: 82170 - DNA, 13 bp, Artificial Sequence
  Oligonucleotide for detection of SNP TSC0020764
raatcgcaatcca

SEQ ID NO: 82171 - DNA, 13 bp, Artificial Sequence
  Oligonucleotide for detection of SNP TSC0020764
cggatcgtgatty

SEQ ID NO: 82172 - DNA, 13 bp, Artificial Sequence
  Oligonucleotide for detection of SNP TSC0020764
raatcacgatccg

SEQ ID NO: 82173 - DNA, 13 bp, Artificial Sequence
  Oligonucleotide for detection of SNP TSC0020764
cggattgcgatty

SEQ ID NO: 82174 - DNA, 13 bp, Artificial Sequence
  Oligonucleotide for detection of SNP TSC0020764
raatcgcaatccg

SEQ ID NO: 82175 - DNA, 13 bp, Artificial Sequence
  Oligonucleotide for detection of SNP TSC0020764
tggatcgcgatty

SEQ ID NO: 82176 - DNA, 13 bp, Artificial Sequence
  Oligonucleotide for detection of SNP TSC0020764
raatcgcgatcca

SEQ ID NO: 82177 - DNA, 13 bp, Artificial Sequence
  Oligonucleotide for detection of SNP TSC0020764
cggatcgcgatty

SEQ ID NO: 82178 - DNA, 13 bp, Artificial Sequence
  Oligonucleotide for detection of SNP TSC0020764
raatcgcgatccg

SEQ ID NO: 82179 - DNA, 13 bp, Artificial Sequence
  Oligonucleotide for detection of SNP TSC0020766
gaaattatttgaa

SEQ ID NO: 82180 - DNA, 13 bp, Artificial Sequence
  Oligonucleotide for detection of SNP TSC0020766
ttcaaataatttc

SEQ ID NO: 82181 - DNA, 13 bp, Artificial Sequence
  Oligonucleotide for detection of SNP TSC0020766
gaaattgtttgaa

SEQ ID NO: 82182 - DNA, 13 bp, Artificial Sequence
  Oligonucleotide for detection of SNP TSC0020766
ttcaaacaatttc

SEQ ID NO: 82183 - DNA, 13 bp, Artificial Sequence
  Oligonucleotide for detection of SNP TSC0020766
gaaatcgtttgaa

SEQ ID NO: 82184 - DNA, 13 bp, Artificial Sequence
  Oligonucleotide for detection of SNP TSC0020766
ttcaaacgatttc

SEQ ID NO: 82185 - DNA, 13 bp, Artificial Sequence
  Oligonucleotide for detection of SNP TSC0020766
tttaagtgattty

SEQ ID NO: 82186 - DNA, 13 bp, Artificial Sequence
  Oligonucleotide for detection of SNP TSC0020766
raaatcacttaaa

SEQ ID NO: 82187 - DNA, 13 bp, Artificial Sequence
  Oligonucleotide for detection of SNP TSC0020766
tttaagcgattty

SEQ ID NO: 82188 - DNA, 13 bp, Artificial Sequence
  Oligonucleotide for detection of SNP TSC0020766
raaatcgcttaaa

SEQ ID NO: 82189 - DNA, 13 bp, Artificial Sequence
  Oligonucleotide for detection of SNP TSC0020767
ggtaatagagtga

SEQ ID NO: 82190 - DNA, 13 bp, Artificial Sequence
  Oligonucleotide for detection of SNP TSC0020767
tcactctattacc

SEQ ID NO: 82191 - DNA, 13 bp, Artificial Sequence
  Oligonucleotide for detection of SNP TSC0020767
ggtaatggagtga

SEQ ID NO: 82192 - DNA, 13 bp, Artificial Sequence
  Oligonucleotide for detection of SNP TSC0020767
tcactccattacc

SEQ ID NO: 82193 - DNA, 13 bp, Artificial Sequence
  Oligonucleotide for detection of SNP TSC0020767
ggtaacggagtga

SEQ ID NO: 82194 - DNA, 13 bp, Artificial Sequence
  Oligonucleotide for detection of SNP TSC0020767
tcactccgttacc

SEQ ID NO: 82195 - DNA, 13 bp, Artificial Sequence
  Oligonucleotide for detection of SNP TSC0020767
ttattttgttgty

SEQ ID NO: 82196 - DNA, 13 bp, Artificial Sequence
  Oligonucleotide for detection of SNP TSC0020767
racaacaaaataa

SEQ ID NO: 82197 - DNA, 13 bp, Artificial Sequence
  Oligonucleotide for detection of SNP TSC0020767
ttatttcgttgty

SEQ ID NO: 82198 - DNA, 13 bp, Artificial Sequence
  Oligonucleotide for detection of SNP TSC0020767
racaacgaaataa

SEQ ID NO: 82199 - DNA, 13 bp, Artificial Sequence
  Oligonucleotide for detection of SNP TSC0020770
aattatgtgtgag

SEQ ID NO: 82200 - DNA, 13 bp, Artificial Sequence
  Oligonucleotide for detection of SNP TSC0020770
ctcacacataatt

SEQ ID NO: 82201 - DNA, 13 bp, Artificial Sequence
  Oligonucleotide for detection of SNP TSC0020770
aattatatgtgag

SEQ ID NO: 82202 - DNA, 13 bp, Artificial Sequence
  Oligonucleotide for detection of SNP TSC0020770
ctcacatataatt

SEQ ID NO: 82203 - DNA, 13 bp, Artificial Sequence
  Oligonucleotide for detection of SNP TSC0020771
atattttgttttt

SEQ ID NO: 82204 - DNA, 13 bp, Artificial Sequence
  Oligonucleotide for detection of SNP TSC0020771
aaaaacaaaatat

SEQ ID NO: 82205 - DNA, 13 bp, Artificial Sequence
  Oligonucleotide for detection of SNP TSC0020771
atatttcgttttt

SEQ ID NO: 82206 - DNA, 13 bp, Artificial Sequence
  Oligonucleotide for detection of SNP TSC0020771
aaaaacgaaatat

SEQ ID NO: 82207 - DNA, 13 bp, Artificial Sequence
  Oligonucleotide for detection of SNP TSC0020771
agaaatggaatgt

SEQ ID NO: 82208 - DNA, 13 bp, Artificial Sequence
  Oligonucleotide for detection of SNP TSC0020771
acattccatttct

SEQ ID NO: 82209 - DNA, 13 bp, Artificial Sequence
  Oligonucleotide for detection of SNP TSC0020771
agaaatagaatgt

SEQ ID NO: 82210 - DNA, 13 bp, Artificial Sequence
  Oligonucleotide for detection of SNP TSC0020771
acattctatttct

SEQ ID NO: 82211 - DNA, 13 bp, Artificial Sequence
  Oligonucleotide for detection of SNP TSC0020771
agaaacggaatgt

SEQ ID NO: 82212 - DNA, 13 bp, Artificial Sequence
  Oligonucleotide for detection of SNP TSC0020771
acattccgtttct

SEQ ID NO: 82213 - DNA, 13 bp, Artificial Sequence
  Oligonucleotide for detection of SNP TSC0020772
aggaatgaggttg

SEQ ID NO: 82214 - DNA, 13 bp, Artificial Sequence
  Oligonucleotide for detection of SNP TSC0020772
caacctcattcct

SEQ ID NO: 82215 - DNA, 13 bp, Artificial Sequence
  Oligonucleotide for detection of SNP TSC0020772
aggaattaggttg

SEQ ID NO: 82216 - DNA, 13 bp, Artificial Sequence
  Oligonucleotide for detection of SNP TSC0020772
caacctaattcct

SEQ ID NO: 82217 - DNA, 13 bp, Artificial Sequence
  Oligonucleotide for detection of SNP TSC0020772
aggaacgaggttg

SEQ ID NO: 82218 - DNA, 13 bp, Artificial Sequence
  Oligonucleotide for detection of SNP TSC0020772
caacctcgttcct

SEQ ID NO: 82219 - DNA, 13 bp, Artificial Sequence
  Oligonucleotide for detection of SNP TSC0020772
tagtttagttttt

SEQ ID NO: 82220 - DNA, 13 bp, Artificial Sequence
  Oligonucleotide for detection of SNP TSC0020772
aaaaactaaacta

SEQ ID NO: 82221 - DNA, 13 bp, Artificial Sequence
  Oligonucleotide for detection of SNP TSC0020773
tgtgggggttttt

SEQ ID NO: 82222 - DNA, 13 bp, Artificial Sequence
  Oligonucleotide for detection of SNP TSC0020773
aaaaacccccaca

SEQ ID NO: 82223 - DNA, 13 bp, Artificial Sequence
  Oligonucleotide for detection of SNP TSC0020773
aggagtttttata

SEQ ID NO: 82224 - DNA, 13 bp, Artificial Sequence
  Oligonucleotide for detection of SNP TSC0020773
tataaaaactcct

SEQ ID NO: 82225 - DNA, 13 bp, Artificial Sequence
  Oligonucleotide for detection of SNP TSC0020773
aggagtatttata

SEQ ID NO: 82226 - DNA, 13 bp, Artificial Sequence
  Oligonucleotide for detection of SNP TSC0020773
tataaatactcct

SEQ ID NO: 82227 - DNA, 13 bp, Artificial Sequence
  Oligonucleotide for detection of SNP TSC0020775
taataagaataat

SEQ ID NO: 82228 - DNA, 13 bp, Artificial Sequence
  Oligonucleotide for detection of SNP TSC0020775
attattcttatta

SEQ ID NO: 82229 - DNA, 13 bp, Artificial Sequence
  Oligonucleotide for detection of SNP TSC0020776
ttttggtgggtgt

SEQ ID NO: 82230 - DNA, 13 bp, Artificial Sequence
  Oligonucleotide for detection of SNP TSC0020776
acacccaccaaaa

SEQ ID NO: 82231 - DNA, 13 bp, Artificial Sequence
  Oligonucleotide for detection of SNP TSC0020776
ttttggcgggtgt

SEQ ID NO: 82232 - DNA, 13 bp, Artificial Sequence
  Oligonucleotide for detection of SNP TSC0020776
acacccgccaaaa

SEQ ID NO: 82233 - DNA, 13 bp, Artificial Sequence
  Oligonucleotide for detection of SNP TSC0020776
atatttgttaagg

SEQ ID NO: 82234 - DNA, 13 bp, Artificial Sequence
  Oligonucleotide for detection of SNP TSC0020776
ccttaacaaatat

SEQ ID NO: 82235 - DNA, 13 bp, Artificial Sequence
  Oligonucleotide for detection of SNP TSC0020776
atatttattaagg

SEQ ID NO: 82236 - DNA, 13 bp, Artificial Sequence
  Oligonucleotide for detection of SNP TSC0020776
ccttaataaatat

SEQ ID NO: 82237 - DNA, 13 bp, Artificial Sequence
  Oligonucleotide for detection of SNP TSC0020776
atattcgttaagg

SEQ ID NO: 82238 - DNA, 13 bp, Artificial Sequence
  Oligonucleotide for detection of SNP TSC0020776
ccttaacgaatat

SEQ ID NO: 82239 - DNA, 13 bp, Artificial Sequence
  Oligonucleotide for detection of SNP TSC0020777
aattttatggata

SEQ ID NO: 82240 - DNA, 13 bp, Artificial Sequence
  Oligonucleotide for detection of SNP TSC0020777
tatccataaaatt

SEQ ID NO: 82241 - DNA, 13 bp, Artificial Sequence
  Oligonucleotide for detection of SNP TSC0020777
aattttgtggata

SEQ ID NO: 82242 - DNA, 13 bp, Artificial Sequence
  Oligonucleotide for detection of SNP TSC0020777
tatccacaaaatt

SEQ ID NO: 82243 - DNA, 13 bp, Artificial Sequence
  Oligonucleotide for detection of SNP TSC0020778
tttgtaatatagt

SEQ ID NO: 82244 - DNA, 13 bp, Artificial Sequence
  Oligonucleotide for detection of SNP TSC0020778
actatattacaaa

SEQ ID NO: 82245 - DNA, 13 bp, Artificial Sequence
  Oligonucleotide for detection of SNP TSC0020778
tttgtagtatagt

SEQ ID NO: 82246 - DNA, 13 bp, Artificial Sequence
  Oligonucleotide for detection of SNP TSC0020778
actatactacaaa

SEQ ID NO: 82247 - DNA, 13 bp, Artificial Sequence
  Oligonucleotide for detection of SNP TSC0020779
attgtttgggggt

SEQ ID NO: 82248 - DNA, 13 bp, Artificial Sequence
  Oligonucleotide for detection of SNP TSC0020779
acccccaaacaat

SEQ ID NO: 82249 - DNA, 13 bp, Artificial Sequence
  Oligonucleotide for detection of SNP TSC0020779
attgttcgggggt

SEQ ID NO: 82250 - DNA, 13 bp, Artificial Sequence
  Oligonucleotide for detection of SNP TSC0020779
acccccgaacaat

SEQ ID NO: 82251 - DNA, 13 bp, Artificial Sequence
  Oligonucleotide for detection of SNP TSC0020779
atttttggataat

SEQ ID NO: 82252 - DNA, 13 bp, Artificial Sequence
  Oligonucleotide for detection of SNP TSC0020779
attatccaaaaat

SEQ ID NO: 82253 - DNA, 13 bp, Artificial Sequence
  Oligonucleotide for detection of SNP TSC0020779
atttttagataat

SEQ ID NO: 82254 - DNA, 13 bp, Artificial Sequence
  Oligonucleotide for detection of SNP TSC0020779
attatctaaaaat

SEQ ID NO: 82255 - DNA, 13 bp, Artificial Sequence
  Oligonucleotide for detection of SNP TSC0020779
attttcggataat

SEQ ID NO: 82256 - DNA, 13 bp, Artificial Sequence
  Oligonucleotide for detection of SNP TSC0020779
attatccgaaaat

SEQ ID NO: 82257 - DNA, 13 bp, Artificial Sequence
  Oligonucleotide for detection of SNP TSC0020780
atgtgtattagtt

SEQ ID NO: 82258 - DNA, 13 bp, Artificial Sequence
  Oligonucleotide for detection of SNP TSC0020780
aactaatacacat

SEQ ID NO: 82259 - DNA, 13 bp, Artificial Sequence
  Oligonucleotide for detection of SNP TSC0020780
atgtgtgttagtt

SEQ ID NO: 82260 - DNA, 13 bp, Artificial Sequence
  Oligonucleotide for detection of SNP TSC0020780
aactaacacacat

SEQ ID NO: 82261 - DNA, 13 bp, Artificial Sequence
  Oligonucleotide for detection of SNP TSC0020780
atgtgcgttagtt

SEQ ID NO: 82262 - DNA, 13 bp, Artificial Sequence
  Oligonucleotide for detection of SNP TSC0020780
aactaacgcacat

SEQ ID NO: 82263 - DNA, 13 bp, Artificial Sequence
  Oligonucleotide for detection of SNP TSC0020780
agttaatgtatat

SEQ ID NO: 82264 - DNA, 13 bp, Artificial Sequence
  Oligonucleotide for detection of SNP TSC0020780
atatacattaact

SEQ ID NO: 82265 - DNA, 13 bp, Artificial Sequence
  Oligonucleotide for detection of SNP TSC0020780
agttaacgtatat

SEQ ID NO: 82266 - DNA, 13 bp, Artificial Sequence
  Oligonucleotide for detection of SNP TSC0020780
atatacgttaact

SEQ ID NO: 82267 - DNA, 13 bp, Artificial Sequence
  Oligonucleotide for detection of SNP TSC0020781
gtaatagtagtag

SEQ ID NO: 82268 - DNA, 13 bp, Artificial Sequence
  Oligonucleotide for detection of SNP TSC0020781
ctactactattac

SEQ ID NO: 82269 - DNA, 13 bp, Artificial Sequence
  Oligonucleotide for detection of SNP TSC0020781
gtaatattagtag

SEQ ID NO: 82270 - DNA, 13 bp, Artificial Sequence
  Oligonucleotide for detection of SNP TSC0020781
ctactaatattac

SEQ ID NO: 82271 - DNA, 13 bp, Artificial Sequence
  Oligonucleotide for detection of SNP TSC0020781
ttattattattay

SEQ ID NO: 82272 - DNA, 13 bp, Artificial Sequence
  Oligonucleotide for detection of SNP TSC0020781
rtaataataataa

SEQ ID NO: 82273 - DNA, 13 bp, Artificial Sequence
  Oligonucleotide for detection of SNP TSC0020781
ttattaatattay

SEQ ID NO: 82274 - DNA, 13 bp, Artificial Sequence
  Oligonucleotide for detection of SNP TSC0020781
rtaatattaataa

SEQ ID NO: 82275 - DNA, 13 bp, Artificial Sequence
  Oligonucleotide for detection of SNP TSC0020782
ttttaggggataa

SEQ ID NO: 82276 - DNA, 13 bp, Artificial Sequence
  Oligonucleotide for detection of SNP TSC0020782
ttatcccctaaaa

SEQ ID NO: 82277 - DNA, 13 bp, Artificial Sequence
  Oligonucleotide for detection of SNP TSC0020782
ttttagaggataa

SEQ ID NO: 82278 - DNA, 13 bp, Artificial Sequence
  Oligonucleotide for detection of SNP TSC0020782
ttatcctctaaaa

SEQ ID NO: 82279 - DNA, 13 bp, Artificial Sequence
  Oligonucleotide for detection of SNP TSC0020783
gttaatgatgagy

SEQ ID NO: 82280 - DNA, 13 bp, Artificial Sequence
  Oligonucleotide for detection of SNP TSC0020783
rctcatcattaac

SEQ ID NO: 82281 - DNA, 13 bp, Artificial Sequence
  Oligonucleotide for detection of SNP TSC0020783
gttaataatgagy

SEQ ID NO: 82282 - DNA, 13 bp, Artificial Sequence
  Oligonucleotide for detection of SNP TSC0020783
rctcattattaac

SEQ ID NO: 82283 - DNA, 13 bp, Artificial Sequence
  Oligonucleotide for detection of SNP TSC0020785
tatattattttaa

SEQ ID NO: 82284 - DNA, 13 bp, Artificial Sequence
  Oligonucleotide for detection of SNP TSC0020785
ttaaaataatata

SEQ ID NO: 82285 - DNA, 13 bp, Artificial Sequence
  Oligonucleotide for detection of SNP TSC0020785
tatatttttttaa

SEQ ID NO: 82286 - DNA, 13 bp, Artificial Sequence
  Oligonucleotide for detection of SNP TSC0020785
ttaaaaaaatata

SEQ ID NO: 82287 - DNA, 13 bp, Artificial Sequence
  Oligonucleotide for detection of SNP TSC0020785
ttagaataatata

SEQ ID NO: 82288 - DNA, 13 bp, Artificial Sequence
  Oligonucleotide for detection of SNP TSC0020785
tatattattctaa

SEQ ID NO: 82289 - DNA, 13 bp, Artificial Sequence
  Oligonucleotide for detection of SNP TSC0020785
ttagaaaaatata

SEQ ID NO: 82290 - DNA, 13 bp, Artificial Sequence
  Oligonucleotide for detection of SNP TSC0020785
tatatttttctaa

SEQ ID NO: 82291 - DNA, 13 bp, Artificial Sequence
  Oligonucleotide for detection of SNP TSC0020786
atggggtggggag

SEQ ID NO: 82292 - DNA, 13 bp, Artificial Sequence
  Oligonucleotide for detection of SNP TSC0020786
ctccccaccccat

SEQ ID NO: 82293 - DNA, 13 bp, Artificial Sequence
  Oligonucleotide for detection of SNP TSC0020786
atgggggggggag

SEQ ID NO: 82294 - DNA, 13 bp, Artificial Sequence
  Oligonucleotide for detection of SNP TSC0020786
ctcccccccccat

SEQ ID NO: 82295 - DNA, 13 bp, Artificial Sequence
  Oligonucleotide for detection of SNP TSC0020786
acggggtggggag

SEQ ID NO: 82296 - DNA, 13 bp, Artificial Sequence
  Oligonucleotide for detection of SNP TSC0020786
ctccccaccccgt

SEQ ID NO: 82297 - DNA, 13 bp, Artificial Sequence
  Oligonucleotide for detection of SNP TSC0020786
acgggggggggag

SEQ ID NO: 82298 - DNA, 13 bp, Artificial Sequence
  Oligonucleotide for detection of SNP TSC0020786
ctcccccccccgt

SEQ ID NO: 82299 - DNA, 13 bp, Artificial Sequence
  Oligonucleotide for detection of SNP TSC0020786
atggggcggggag

SEQ ID NO: 82300 - DNA, 13 bp, Artificial Sequence
  Oligonucleotide for detection of SNP TSC0020786
ctccccgccccat

SEQ ID NO: 82301 - DNA, 13 bp, Artificial Sequence
  Oligonucleotide for detection of SNP TSC0020786
acggggcggggag

SEQ ID NO: 82302 - DNA, 13 bp, Artificial Sequence
  Oligonucleotide for detection of SNP TSC0020786
ctccccgccccgt

SEQ ID NO: 82303 - DNA, 13 bp, Artificial Sequence
  Oligonucleotide for detection of SNP TSC0020786
ttttttttttcgt

SEQ ID NO: 82304 - DNA, 13 bp, Artificial Sequence
  Oligonucleotide for detection of SNP TSC0020786
acgaaaaaaaaaa

SEQ ID NO: 82305 - DNA, 13 bp, Artificial Sequence
  Oligonucleotide for detection of SNP TSC0020786
ttttttgtttcgt

SEQ ID NO: 82306 - DNA, 13 bp, Artificial Sequence
  Oligonucleotide for detection of SNP TSC0020786
acgaaacaaaaaa

SEQ ID NO: 82307 - DNA, 13 bp, Artificial Sequence
  Oligonucleotide for detection of SNP TSC0020786
tttttcgtttcgt

SEQ ID NO: 82308 - DNA, 13 bp, Artificial Sequence
  Oligonucleotide for detection of SNP TSC0020786
acgaaacgaaaaa

SEQ ID NO: 82309 - DNA, 13 bp, Artificial Sequence
  Oligonucleotide for detection of SNP TSC0020787
aatttatgattgy

SEQ ID NO: 82310 - DNA, 13 bp, Artificial Sequence
  Oligonucleotide for detection of SNP TSC0020787
rcaatcataaatt

SEQ ID NO: 82311 - DNA, 13 bp, Artificial Sequence
  Oligonucleotide for detection of SNP TSC0020787
aatttacgattgy

SEQ ID NO: 82312 - DNA, 13 bp, Artificial Sequence
  Oligonucleotide for detection of SNP TSC0020787
rcaatcgtaaatt

SEQ ID NO: 82313 - DNA, 13 bp, Artificial Sequence
  Oligonucleotide for detection of SNP TSC0020787
gtaattgtggatt

SEQ ID NO: 82314 - DNA, 13 bp, Artificial Sequence
  Oligonucleotide for detection of SNP TSC0020787
aatccacaattac

SEQ ID NO: 82315 - DNA, 13 bp, Artificial Sequence
  Oligonucleotide for detection of SNP TSC0020787
gtaattatggatt

SEQ ID NO: 82316 - DNA, 13 bp, Artificial Sequence
  Oligonucleotide for detection of SNP TSC0020787
aatccataattac

SEQ ID NO: 82317 - DNA, 13 bp, Artificial Sequence
  Oligonucleotide for detection of SNP TSC0020787
gtaatcgtggatt

SEQ ID NO: 82318 - DNA, 13 bp, Artificial Sequence
  Oligonucleotide for detection of SNP TSC0020787
aatccacgattac

SEQ ID NO: 82319 - DNA, 13 bp, Artificial Sequence
  Oligonucleotide for detection of SNP TSC0020789
tatattagttgat

SEQ ID NO: 82320 - DNA, 13 bp, Artificial Sequence
  Oligonucleotide for detection of SNP TSC0020789
atcaactaatata

SEQ ID NO: 82321 - DNA, 13 bp, Artificial Sequence
  Oligonucleotide for detection of SNP TSC0020789
tatatttgttgat

SEQ ID NO: 82322 - DNA, 13 bp, Artificial Sequence
  Oligonucleotide for detection of SNP TSC0020789
atcaacaaatata

SEQ ID NO: 82323 - DNA, 13 bp, Artificial Sequence
  Oligonucleotide for detection of SNP TSC0020789
attagttagtgta

SEQ ID NO: 82324 - DNA, 13 bp, Artificial Sequence
  Oligonucleotide for detection of SNP TSC0020789
tacactaactaat

SEQ ID NO: 82325 - DNA, 13 bp, Artificial Sequence
  Oligonucleotide for detection of SNP TSC0020789
attagtaagtgta

SEQ ID NO: 82326 - DNA, 13 bp, Artificial Sequence
  Oligonucleotide for detection of SNP TSC0020789
tacacttactaat

SEQ ID NO: 82327 - DNA, 13 bp, Artificial Sequence
  Oligonucleotide for detection of SNP TSC0020790
tttttagggaata

SEQ ID NO: 82328 - DNA, 13 bp, Artificial Sequence
  Oligonucleotide for detection of SNP TSC0020790
tattccctaaaaa

SEQ ID NO: 82329 - DNA, 13 bp, Artificial Sequence
  Oligonucleotide for detection of SNP TSC0020790
tttttaaggaata

SEQ ID NO: 82330 - DNA, 13 bp, Artificial Sequence
  Oligonucleotide for detection of SNP TSC0020790
tattccttaaaaa

SEQ ID NO: 82331 - DNA, 13 bp, Artificial Sequence
  Oligonucleotide for detection of SNP TSC0020791
tgttagtaatgta

SEQ ID NO: 82332 - DNA, 13 bp, Artificial Sequence
  Oligonucleotide for detection of SNP TSC0020791
tacattactaaca

SEQ ID NO: 82333 - DNA, 13 bp, Artificial Sequence
  Oligonucleotide for detection of SNP TSC0020791
tgttaggaatgta

SEQ ID NO: 82334 - DNA, 13 bp, Artificial Sequence
  Oligonucleotide for detection of SNP TSC0020791
tacattcctaaca

SEQ ID NO: 82335 - DNA, 13 bp, Artificial Sequence
  Oligonucleotide for detection of SNP TSC0020791
tgtattgttgata

SEQ ID NO: 82336 - DNA, 13 bp, Artificial Sequence
  Oligonucleotide for detection of SNP TSC0020791
tatcaacaataca

SEQ ID NO: 82337 - DNA, 13 bp, Artificial Sequence
  Oligonucleotide for detection of SNP TSC0020791
tgtatttttgata

SEQ ID NO: 82338 - DNA, 13 bp, Artificial Sequence
  Oligonucleotide for detection of SNP TSC0020791
tatcaaaaataca

SEQ ID NO: 82339 - DNA, 13 bp, Artificial Sequence
  Oligonucleotide for detection of SNP TSC0020792
ttatatggtaaat

SEQ ID NO: 82340 - DNA, 13 bp, Artificial Sequence
  Oligonucleotide for detection of SNP TSC0020792
atttaccatataa

SEQ ID NO: 82341 - DNA, 13 bp, Artificial Sequence
  Oligonucleotide for detection of SNP TSC0020792
ttatattgtaaat

SEQ ID NO: 82342 - DNA, 13 bp, Artificial Sequence
  Oligonucleotide for detection of SNP TSC0020792
atttacaatataa

SEQ ID NO: 82343 - DNA, 13 bp, Artificial Sequence
  Oligonucleotide for detection of SNP TSC0020792
atttattatgtga

SEQ ID NO: 82344 - DNA, 13 bp, Artificial Sequence
  Oligonucleotide for detection of SNP TSC0020792
tcacataataaat

SEQ ID NO: 82345 - DNA, 13 bp, Artificial Sequence
  Oligonucleotide for detection of SNP TSC0020792
atttataatgtga

SEQ ID NO: 82346 - DNA, 13 bp, Artificial Sequence
  Oligonucleotide for detection of SNP TSC0020792
tcacattataaat

SEQ ID NO: 82347 - DNA, 13 bp, Artificial Sequence
  Oligonucleotide for detection of SNP TSC0020793
tgttaggtgatgy

SEQ ID NO: 82348 - DNA, 13 bp, Artificial Sequence
  Oligonucleotide for detection of SNP TSC0020793
rcatcacctaaca

SEQ ID NO: 82349 - DNA, 13 bp, Artificial Sequence
  Oligonucleotide for detection of SNP TSC0020793
tgttagatgatgy

SEQ ID NO: 82350 - DNA, 13 bp, Artificial Sequence
  Oligonucleotide for detection of SNP TSC0020793
rcatcatctaaca

SEQ ID NO: 82351 - DNA, 13 bp, Artificial Sequence
  Oligonucleotide for detection of SNP TSC0020794
taggtgtgtgtag

SEQ ID NO: 82352 - DNA, 13 bp, Artificial Sequence
  Oligonucleotide for detection of SNP TSC0020794
ctacacacaccta

SEQ ID NO: 82353 - DNA, 13 bp, Artificial Sequence
  Oligonucleotide for detection of SNP TSC0020794
taggtgcgtgtag

SEQ ID NO: 82354 - DNA, 13 bp, Artificial Sequence
  Oligonucleotide for detection of SNP TSC0020794
ctacacgcaccta

SEQ ID NO: 82355 - DNA, 13 bp, Artificial Sequence
  Oligonucleotide for detection of SNP TSC0020794
taggtgtgcgtag

SEQ ID NO: 82356 - DNA, 13 bp, Artificial Sequence
  Oligonucleotide for detection of SNP TSC0020794
ctacgcacaccta

SEQ ID NO: 82357 - DNA, 13 bp, Artificial Sequence
  Oligonucleotide for detection of SNP TSC0020794
taggtgcgcgtag

SEQ ID NO: 82358 - DNA, 13 bp, Artificial Sequence
  Oligonucleotide for detection of SNP TSC0020794
ctacgcgcaccta

SEQ ID NO: 82359 - DNA, 13 bp, Artificial Sequence
  Oligonucleotide for detection of SNP TSC0020794
ttgtgtgtatttg

SEQ ID NO: 82360 - DNA, 13 bp, Artificial Sequence
  Oligonucleotide for detection of SNP TSC0020794
caaatacacacaa

SEQ ID NO: 82361 - DNA, 13 bp, Artificial Sequence
  Oligonucleotide for detection of SNP TSC0020794
ttgtgtatatttg

SEQ ID NO: 82362 - DNA, 13 bp, Artificial Sequence
  Oligonucleotide for detection of SNP TSC0020794
caaatatacacaa

SEQ ID NO: 82363 - DNA, 13 bp, Artificial Sequence
  Oligonucleotide for detection of SNP TSC0020794
ttgcgtgtatttg

SEQ ID NO: 82364 - DNA, 13 bp, Artificial Sequence
  Oligonucleotide for detection of SNP TSC0020794
caaatacacgcaa

SEQ ID NO: 82365 - DNA, 13 bp, Artificial Sequence
  Oligonucleotide for detection of SNP TSC0020794
ttgcgtatatttg

SEQ ID NO: 82366 - DNA, 13 bp, Artificial Sequence
  Oligonucleotide for detection of SNP TSC0020794
caaatatacgcaa

SEQ ID NO: 82367 - DNA, 13 bp, Artificial Sequence
  Oligonucleotide for detection of SNP TSC0020794
ttgtgcgtatttg

SEQ ID NO: 82368 - DNA, 13 bp, Artificial Sequence
  Oligonucleotide for detection of SNP TSC0020794
caaatacgcacaa

SEQ ID NO: 82369 - DNA, 13 bp, Artificial Sequence
  Oligonucleotide for detection of SNP TSC0020794
ttgcgcgtatttg

SEQ ID NO: 82370 - DNA, 13 bp, Artificial Sequence
  Oligonucleotide for detection of SNP TSC0020794
caaatacgcgcaa

SEQ ID NO: 82371 - DNA, 13 bp, Artificial Sequence
  Oligonucleotide for detection of SNP TSC0020795
gtgatgtgttatt

SEQ ID NO: 82372 - DNA, 13 bp, Artificial Sequence
  Oligonucleotide for detection of SNP TSC0020795
aataacacatcac

SEQ ID NO: 82373 - DNA, 13 bp, Artificial Sequence
  Oligonucleotide for detection of SNP TSC0020795
gtgatgggttatt

SEQ ID NO: 82374 - DNA, 13 bp, Artificial Sequence
  Oligonucleotide for detection of SNP TSC0020795
aataacccatcac

SEQ ID NO: 82375 - DNA, 13 bp, Artificial Sequence
  Oligonucleotide for detection of SNP TSC0020795
gtgacgtgttatt

SEQ ID NO: 82376 - DNA, 13 bp, Artificial Sequence
  Oligonucleotide for detection of SNP TSC0020795
aataacacgtcac

SEQ ID NO: 82377 - DNA, 13 bp, Artificial Sequence
  Oligonucleotide for detection of SNP TSC0020795
gtgacgggttatt

SEQ ID NO: 82378 - DNA, 13 bp, Artificial Sequence
  Oligonucleotide for detection of SNP TSC0020795
aataacccgtcac

SEQ ID NO: 82379 - DNA, 13 bp, Artificial Sequence
  Oligonucleotide for detection of SNP TSC0020795
gtgatgcgttatt

SEQ ID NO: 82380 - DNA, 13 bp, Artificial Sequence
  Oligonucleotide for detection of SNP TSC0020795
aataacgcatcac

SEQ ID NO: 82381 - DNA, 13 bp, Artificial Sequence
  Oligonucleotide for detection of SNP TSC0020795
gtgacgcgttatt

SEQ ID NO: 82382 - DNA, 13 bp, Artificial Sequence
  Oligonucleotide for detection of SNP TSC0020795
aataacgcgtcac

SEQ ID NO: 82383 - DNA, 13 bp, Artificial Sequence
  Oligonucleotide for detection of SNP TSC0020795
agtgatgtgttay

SEQ ID NO: 82384 - DNA, 13 bp, Artificial Sequence
  Oligonucleotide for detection of SNP TSC0020795
rtaacacatcact

SEQ ID NO: 82385 - DNA, 13 bp, Artificial Sequence
  Oligonucleotide for detection of SNP TSC0020795
agtgatttgttay

SEQ ID NO: 82386 - DNA, 13 bp, Artificial Sequence
  Oligonucleotide for detection of SNP TSC0020795
rtaacaaatcact

SEQ ID NO: 82387 - DNA, 13 bp, Artificial Sequence
  Oligonucleotide for detection of SNP TSC0020795
agtgacgtgttay

SEQ ID NO: 82388 - DNA, 13 bp, Artificial Sequence
  Oligonucleotide for detection of SNP TSC0020795
rtaacacgtcact

SEQ ID NO: 82389 - DNA, 13 bp, Artificial Sequence
  Oligonucleotide for detection of SNP TSC0020795
agtgattcgttay

SEQ ID NO: 82390 - DNA, 13 bp, Artificial Sequence
  Oligonucleotide for detection of SNP TSC0020795
rtaacgaatcact

SEQ ID NO: 82391 - DNA, 13 bp, Artificial Sequence
  Oligonucleotide for detection of SNP TSC0020795
agtgatgcgttay

SEQ ID NO: 82392 - DNA, 13 bp, Artificial Sequence
  Oligonucleotide for detection of SNP TSC0020795
rtaacgcatcact

SEQ ID NO: 82393 - DNA, 13 bp, Artificial Sequence
  Oligonucleotide for detection of SNP TSC0020795
agtgacgcgttay

SEQ ID NO: 82394 - DNA, 13 bp, Artificial Sequence
  Oligonucleotide for detection of SNP TSC0020795
rtaacgcgtcact

SEQ ID NO: 82395 - DNA, 13 bp, Artificial Sequence
  Oligonucleotide for detection of SNP TSC0020796
ggtttttggttta

SEQ ID NO: 82396 - DNA, 13 bp, Artificial Sequence
  Oligonucleotide for detection of SNP TSC0020796
taaaccaaaaacc

SEQ ID NO: 82397 - DNA, 13 bp, Artificial Sequence
  Oligonucleotide for detection of SNP TSC0020796
ggttttcggttta

SEQ ID NO: 82398 - DNA, 13 bp, Artificial Sequence
  Oligonucleotide for detection of SNP TSC0020796
taaaccgaaaacc

SEQ ID NO: 82399 - DNA, 13 bp, Artificial Sequence
  Oligonucleotide for detection of SNP TSC0020796
taggttgggggty

SEQ ID NO: 82400 - DNA, 13 bp, Artificial Sequence
  Oligonucleotide for detection of SNP TSC0020796
racccccaaccta

SEQ ID NO: 82401 - DNA, 13 bp, Artificial Sequence
  Oligonucleotide for detection of SNP TSC0020796
taggttaggggty

SEQ ID NO: 82402 - DNA, 13 bp, Artificial Sequence
  Oligonucleotide for detection of SNP TSC0020796
racccctaaccta

SEQ ID NO: 82403 - DNA, 13 bp, Artificial Sequence
  Oligonucleotide for detection of SNP TSC0020796
taggtcgggggty

SEQ ID NO: 82404 - DNA, 13 bp, Artificial Sequence
  Oligonucleotide for detection of SNP TSC0020796
racccccgaccta

SEQ ID NO: 82405 - DNA, 13 bp, Artificial Sequence
  Oligonucleotide for detection of SNP TSC0020797
attttagtatttt

SEQ ID NO: 82406 - DNA, 13 bp, Artificial Sequence
  Oligonucleotide for detection of SNP TSC0020797
aaaatactaaaat

SEQ ID NO: 82407 - DNA, 13 bp, Artificial Sequence
  Oligonucleotide for detection of SNP TSC0020797
attttattatttt

SEQ ID NO: 82408 - DNA, 13 bp, Artificial Sequence
  Oligonucleotide for detection of SNP TSC0020797
aaaataataaaat

SEQ ID NO: 82409 - DNA, 13 bp, Artificial Sequence
  Oligonucleotide for detection of SNP TSC0020797
aaagtgttaggat

SEQ ID NO: 82410 - DNA, 13 bp, Artificial Sequence
  Oligonucleotide for detection of SNP TSC0020797
atcctaacacttt

SEQ ID NO: 82411 - DNA, 13 bp, Artificial Sequence
  Oligonucleotide for detection of SNP TSC0020797
aaagtgataggat

SEQ ID NO: 82412 - DNA, 13 bp, Artificial Sequence
  Oligonucleotide for detection of SNP TSC0020797
atcctatcacttt

SEQ ID NO: 82413 - DNA, 13 bp, Artificial Sequence
  Oligonucleotide for detection of SNP TSC0020798
aggagtgaaatta

SEQ ID NO: 82414 - DNA, 13 bp, Artificial Sequence
  Oligonucleotide for detection of SNP TSC0020798
taatttcactcct

SEQ ID NO: 82415 - DNA, 13 bp, Artificial Sequence
  Oligonucleotide for detection of SNP TSC0020798
aggagtaaaatta

SEQ ID NO: 82416 - DNA, 13 bp, Artificial Sequence
  Oligonucleotide for detection of SNP TSC0020798
taattttactcct

SEQ ID NO: 82417 - DNA, 13 bp, Artificial Sequence
  Oligonucleotide for detection of SNP TSC0020798
aggagcgaaatta

SEQ ID NO: 82418 - DNA, 13 bp, Artificial Sequence
  Oligonucleotide for detection of SNP TSC0020798
taatttcgctcct

SEQ ID NO: 82419 - DNA, 13 bp, Artificial Sequence
  Oligonucleotide for detection of SNP TSC0020799
tagatgtggatgt

SEQ ID NO: 82420 - DNA, 13 bp, Artificial Sequence
  Oligonucleotide for detection of SNP TSC0020799
acatccacatcta

SEQ ID NO: 82421 - DNA, 13 bp, Artificial Sequence
  Oligonucleotide for detection of SNP TSC0020799
tagatgcggatgt

SEQ ID NO: 82422 - DNA, 13 bp, Artificial Sequence
  Oligonucleotide for detection of SNP TSC0020799
acatccgcatcta

SEQ ID NO: 82423 - DNA, 13 bp, Artificial Sequence
  Oligonucleotide for detection of SNP TSC0020799
atatttgtatttg

SEQ ID NO: 82424 - DNA, 13 bp, Artificial Sequence
  Oligonucleotide for detection of SNP TSC0020799
caaatacaaatat

SEQ ID NO: 82425 - DNA, 13 bp, Artificial Sequence
  Oligonucleotide for detection of SNP TSC0020799
atatttatatttg

SEQ ID NO: 82426 - DNA, 13 bp, Artificial Sequence
  Oligonucleotide for detection of SNP TSC0020799
caaatataaatat

SEQ ID NO: 82427 - DNA, 13 bp, Artificial Sequence
  Oligonucleotide for detection of SNP TSC0020799
atattcgtatttg

SEQ ID NO: 82428 - DNA, 13 bp, Artificial Sequence
  Oligonucleotide for detection of SNP TSC0020799
caaatacgaatat

SEQ ID NO: 82429 - DNA, 13 bp, Artificial Sequence
  Oligonucleotide for detection of SNP TSC0020803
atatttattttty

SEQ ID NO: 82430 - DNA, 13 bp, Artificial Sequence
  Oligonucleotide for detection of SNP TSC0020803
raaaaataaatat

SEQ ID NO: 82431 - DNA, 13 bp, Artificial Sequence
  Oligonucleotide for detection of SNP TSC0020803
atatttgttttty

SEQ ID NO: 82432 - DNA, 13 bp, Artificial Sequence
  Oligonucleotide for detection of SNP TSC0020803
raaaaacaaatat

SEQ ID NO: 82433 - DNA, 13 bp, Artificial Sequence
  Oligonucleotide for detection of SNP TSC0020805
atagatgttggtt

SEQ ID NO: 82434 - DNA, 13 bp, Artificial Sequence
  Oligonucleotide for detection of SNP TSC0020805
aaccaacatctat

SEQ ID NO: 82435 - DNA, 13 bp, Artificial Sequence
  Oligonucleotide for detection of SNP TSC0020805
atagattttggtt

SEQ ID NO: 82436 - DNA, 13 bp, Artificial Sequence
  Oligonucleotide for detection of SNP TSC0020805
aaccaaaatctat

SEQ ID NO: 82437 - DNA, 13 bp, Artificial Sequence
  Oligonucleotide for detection of SNP TSC0020805
agttagtatttgt

SEQ ID NO: 82438 - DNA, 13 bp, Artificial Sequence
  Oligonucleotide for detection of SNP TSC0020805
acaaatactaact

SEQ ID NO: 82439 - DNA, 13 bp, Artificial Sequence
  Oligonucleotide for detection of SNP TSC0020805
agttagaatttgt

SEQ ID NO: 82440 - DNA, 13 bp, Artificial Sequence
  Oligonucleotide for detection of SNP TSC0020805
acaaattctaact

SEQ ID NO: 82441 - DNA, 13 bp, Artificial Sequence
  Oligonucleotide for detection of SNP TSC0020806
ttttggtgtaagg

SEQ ID NO: 82442 - DNA, 13 bp, Artificial Sequence
  Oligonucleotide for detection of SNP TSC0020806
ccttacaccaaaa

SEQ ID NO: 82443 - DNA, 13 bp, Artificial Sequence
  Oligonucleotide for detection of SNP TSC0020806
tttcggtgtaagg

SEQ ID NO: 82444 - DNA, 13 bp, Artificial Sequence
  Oligonucleotide for detection of SNP TSC0020806
ccttacaccgaaa

SEQ ID NO: 82445 - DNA, 13 bp, Artificial Sequence
  Oligonucleotide for detection of SNP TSC0020806
ttttggcgtaagg

SEQ ID NO: 82446 - DNA, 13 bp, Artificial Sequence
  Oligonucleotide for detection of SNP TSC0020806
ccttacgccaaaa

SEQ ID NO: 82447 - DNA, 13 bp, Artificial Sequence
  Oligonucleotide for detection of SNP TSC0020806
tttcggcgtaagg

SEQ ID NO: 82448 - DNA, 13 bp, Artificial Sequence
  Oligonucleotide for detection of SNP TSC0020806
ccttacgccgaaa

SEQ ID NO: 82449 - DNA, 13 bp, Artificial Sequence
  Oligonucleotide for detection of SNP TSC0020806
ttttgtgttggga

SEQ ID NO: 82450 - DNA, 13 bp, Artificial Sequence
  Oligonucleotide for detection of SNP TSC0020806
tcccaacacaaaa

SEQ ID NO: 82451 - DNA, 13 bp, Artificial Sequence
  Oligonucleotide for detection of SNP TSC0020806
ttttgtattggga

SEQ ID NO: 82452 - DNA, 13 bp, Artificial Sequence
  Oligonucleotide for detection of SNP TSC0020806
tcccaatacaaaa

SEQ ID NO: 82453 - DNA, 13 bp, Artificial Sequence
  Oligonucleotide for detection of SNP TSC0020806
ttttgcgttggga

SEQ ID NO: 82454 - DNA, 13 bp, Artificial Sequence
  Oligonucleotide for detection of SNP TSC0020806
tcccaacgcaaaa

SEQ ID NO: 82455 - DNA, 13 bp, Artificial Sequence
  Oligonucleotide for detection of SNP TSC0020806
ttttgtatcggga

SEQ ID NO: 82456 - DNA, 13 bp, Artificial Sequence
  Oligonucleotide for detection of SNP TSC0020806
tcccgatacaaaa

SEQ ID NO: 82457 - DNA, 13 bp, Artificial Sequence
  Oligonucleotide for detection of SNP TSC0020806
ttttgtgtcggga

SEQ ID NO: 82458 - DNA, 13 bp, Artificial Sequence
  Oligonucleotide for detection of SNP TSC0020806
tcccgacacaaaa

SEQ ID NO: 82459 - DNA, 13 bp, Artificial Sequence
  Oligonucleotide for detection of SNP TSC0020806
ttttgcgtcggga

SEQ ID NO: 82460 - DNA, 13 bp, Artificial Sequence
  Oligonucleotide for detection of SNP TSC0020806
tcccgacgcaaaa

SEQ ID NO: 82461 - DNA, 13 bp, Artificial Sequence
  Oligonucleotide for detection of SNP TSC0020808
ttttttatgtttt

SEQ ID NO: 82462 - DNA, 13 bp, Artificial Sequence
  Oligonucleotide for detection of SNP TSC0020808
aaaacataaaaaa

SEQ ID NO: 82463 - DNA, 13 bp, Artificial Sequence
  Oligonucleotide for detection of SNP TSC0020808
ttttttgtgtttt

SEQ ID NO: 82464 - DNA, 13 bp, Artificial Sequence
  Oligonucleotide for detection of SNP TSC0020808
aaaacacaaaaaa

SEQ ID NO: 82465 - DNA, 13 bp, Artificial Sequence
  Oligonucleotide for detection of SNP TSC0020809
tgtgtgtttatta

SEQ ID NO: 82466 - DNA, 13 bp, Artificial Sequence
  Oligonucleotide for detection of SNP TSC0020809
taataaacacaca

SEQ ID NO: 82467 - DNA, 13 bp, Artificial Sequence
  Oligonucleotide for detection of SNP TSC0020809
tgtgtggttatta

SEQ ID NO: 82468 - DNA, 13 bp, Artificial Sequence
  Oligonucleotide for detection of SNP TSC0020809
taataaccacaca

SEQ ID NO: 82469 - DNA, 13 bp, Artificial Sequence
  Oligonucleotide for detection of SNP TSC0020809
tggtgggtatata

SEQ ID NO: 82470 - DNA, 13 bp, Artificial Sequence
  Oligonucleotide for detection of SNP TSC0020809
tatatacccacca

SEQ ID NO: 82471 - DNA, 13 bp, Artificial Sequence
  Oligonucleotide for detection of SNP TSC0020809
tggtggttatata

SEQ ID NO: 82472 - DNA, 13 bp, Artificial Sequence
  Oligonucleotide for detection of SNP TSC0020809
tatataaccacca

SEQ ID NO: 82473 - DNA, 13 bp, Artificial Sequence
  Oligonucleotide for detection of SNP TSC0020810
atgttggggatty

SEQ ID NO: 82474 - DNA, 13 bp, Artificial Sequence
  Oligonucleotide for detection of SNP TSC0020810
raatccccaacat

SEQ ID NO: 82475 - DNA, 13 bp, Artificial Sequence
  Oligonucleotide for detection of SNP TSC0020810
atgttgaggatty

SEQ ID NO: 82476 - DNA, 13 bp, Artificial Sequence
  Oligonucleotide for detection of SNP TSC0020810
raatcctcaacat

SEQ ID NO: 82477 - DNA, 13 bp, Artificial Sequence
  Oligonucleotide for detection of SNP TSC0020810
acgttggggatty

SEQ ID NO: 82478 - DNA, 13 bp, Artificial Sequence
  Oligonucleotide for detection of SNP TSC0020810
raatccccaacgt

SEQ ID NO: 82479 - DNA, 13 bp, Artificial Sequence
  Oligonucleotide for detection of SNP TSC0020810
acgttgaggatty

SEQ ID NO: 82480 - DNA, 13 bp, Artificial Sequence
  Oligonucleotide for detection of SNP TSC0020810
raatcctcaacgt

SEQ ID NO: 82481 - DNA, 13 bp, Artificial Sequence
  Oligonucleotide for detection of SNP TSC0020811
tgtgtagatttty

SEQ ID NO: 82482 - DNA, 13 bp, Artificial Sequence
  Oligonucleotide for detection of SNP TSC0020811
raaaatctacaca

SEQ ID NO: 82483 - DNA, 13 bp, Artificial Sequence
  Oligonucleotide for detection of SNP TSC0020811
tgcgtagatttty

SEQ ID NO: 82484 - DNA, 13 bp, Artificial Sequence
  Oligonucleotide for detection of SNP TSC0020811
raaaatctacgca

SEQ ID NO: 82485 - DNA, 13 bp, Artificial Sequence
  Oligonucleotide for detection of SNP TSC0020811
gagggtttatgta

SEQ ID NO: 82486 - DNA, 13 bp, Artificial Sequence
  Oligonucleotide for detection of SNP TSC0020811
tacataaaccctc

SEQ ID NO: 82487 - DNA, 13 bp, Artificial Sequence
  Oligonucleotide for detection of SNP TSC0020811
gagggtatatgta

SEQ ID NO: 82488 - DNA, 13 bp, Artificial Sequence
  Oligonucleotide for detection of SNP TSC0020811
tacatataccctc

SEQ ID NO: 82489 - DNA, 13 bp, Artificial Sequence
  Oligonucleotide for detection of SNP TSC0020811
gagggtttacgta

SEQ ID NO: 82490 - DNA, 13 bp, Artificial Sequence
  Oligonucleotide for detection of SNP TSC0020811
tacgtaaaccctc

SEQ ID NO: 82491 - DNA, 13 bp, Artificial Sequence
  Oligonucleotide for detection of SNP TSC0020811
gagggtatacgta

SEQ ID NO: 82492 - DNA, 13 bp, Artificial Sequence
  Oligonucleotide for detection of SNP TSC0020811
tacgtataccctc

SEQ ID NO: 82493 - DNA, 13 bp, Artificial Sequence
  Oligonucleotide for detection of SNP TSC0020812
agtttagtgataa

SEQ ID NO: 82494 - DNA, 13 bp, Artificial Sequence
  Oligonucleotide for detection of SNP TSC0020812
ttatcactaaact

SEQ ID NO: 82495 - DNA, 13 bp, Artificial Sequence
  Oligonucleotide for detection of SNP TSC0020812
agtttaatgataa

SEQ ID NO: 82496 - DNA, 13 bp, Artificial Sequence
  Oligonucleotide for detection of SNP TSC0020812
ttatcattaaact

SEQ ID NO: 82497 - DNA, 13 bp, Artificial Sequence
  Oligonucleotide for detection of SNP TSC0020813
tatatatattagt

SEQ ID NO: 82498 - DNA, 13 bp, Artificial Sequence
  Oligonucleotide for detection of SNP TSC0020813
actaatatatata

SEQ ID NO: 82499 - DNA, 13 bp, Artificial Sequence
  Oligonucleotide for detection of SNP TSC0020813
tatatagattagt

SEQ ID NO: 82500 - DNA, 13 bp, Artificial Sequence
  Oligonucleotide for detection of SNP TSC0020813
actaatctatata

SEQ ID NO: 82501 - DNA, 13 bp, Artificial Sequence
  Oligonucleotide for detection of SNP TSC0020813
attagtgtgtgtg

SEQ ID NO: 82502 - DNA, 13 bp, Artificial Sequence
  Oligonucleotide for detection of SNP TSC0020813
cacacacactaat

SEQ ID NO: 82503 - DNA, 13 bp, Artificial Sequence
  Oligonucleotide for detection of SNP TSC0020813
attagtttgtgtg

SEQ ID NO: 82504 - DNA, 13 bp, Artificial Sequence
  Oligonucleotide for detection of SNP TSC0020813
cacacaaactaat

SEQ ID NO: 82505 - DNA, 13 bp, Artificial Sequence
  Oligonucleotide for detection of SNP TSC0020814
agtttgggtaaaa

SEQ ID NO: 82506 - DNA, 13 bp, Artificial Sequence
  Oligonucleotide for detection of SNP TSC0020814
ttttacccaaact

SEQ ID NO: 82507 - DNA, 13 bp, Artificial Sequence
  Oligonucleotide for detection of SNP TSC0020814
agtttgagtaaaa

SEQ ID NO: 82508 - DNA, 13 bp, Artificial Sequence
  Oligonucleotide for detection of SNP TSC0020814
ttttactcaaact

SEQ ID NO: 82509 - DNA, 13 bp, Artificial Sequence
  Oligonucleotide for detection of SNP TSC0020816
ttttaagataagy

SEQ ID NO: 82510 - DNA, 13 bp, Artificial Sequence
  Oligonucleotide for detection of SNP TSC0020816
rcttatcttaaaa

SEQ ID NO: 82511 - DNA, 13 bp, Artificial Sequence
  Oligonucleotide for detection of SNP TSC0020816
ttttaaaataagy

SEQ ID NO: 82512 - DNA, 13 bp, Artificial Sequence
  Oligonucleotide for detection of SNP TSC0020816
rcttattttaaaa

SEQ ID NO: 82513 - DNA, 13 bp, Artificial Sequence
  Oligonucleotide for detection of SNP TSC0020817
tatatttgtatty

SEQ ID NO: 82514 - DNA, 13 bp, Artificial Sequence
  Oligonucleotide for detection of SNP TSC0020817
raatacaaatata

SEQ ID NO: 82515 - DNA, 13 bp, Artificial Sequence
  Oligonucleotide for detection of SNP TSC0020817
tatattcgtatty

SEQ ID NO: 82516 - DNA, 13 bp, Artificial Sequence
  Oligonucleotide for detection of SNP TSC0020817
raatacgaatata

SEQ ID NO: 82517 - DNA, 13 bp, Artificial Sequence
  Oligonucleotide for detection of SNP TSC0020817
gggtgtgggtgtg

SEQ ID NO: 82518 - DNA, 13 bp, Artificial Sequence
  Oligonucleotide for detection of SNP TSC0020817
cacacccacaccc

SEQ ID NO: 82519 - DNA, 13 bp, Artificial Sequence
  Oligonucleotide for detection of SNP TSC0020817
gggtgtaggtgtg

SEQ ID NO: 82520 - DNA, 13 bp, Artificial Sequence
  Oligonucleotide for detection of SNP TSC0020817
cacacctacaccc

SEQ ID NO: 82521 - DNA, 13 bp, Artificial Sequence
  Oligonucleotide for detection of SNP TSC0020817
gggtgcgggtgtg

SEQ ID NO: 82522 - DNA, 13 bp, Artificial Sequence
  Oligonucleotide for detection of SNP TSC0020817
cacacccgcaccc

SEQ ID NO: 82523 - DNA, 13 bp, Artificial Sequence
  Oligonucleotide for detection of SNP TSC0020822
taaaatggaatgg

SEQ ID NO: 82524 - DNA, 13 bp, Artificial Sequence
  Oligonucleotide for detection of SNP TSC0020822
ccattccatttta

SEQ ID NO: 82525 - DNA, 13 bp, Artificial Sequence
  Oligonucleotide for detection of SNP TSC0020822
taaaatagaatgg

SEQ ID NO: 82526 - DNA, 13 bp, Artificial Sequence
  Oligonucleotide for detection of SNP TSC0020822
ccattctatttta

SEQ ID NO: 82527 - DNA, 13 bp, Artificial Sequence
  Oligonucleotide for detection of SNP TSC0020823
gattttatgatag

SEQ ID NO: 82528 - DNA, 13 bp, Artificial Sequence
  Oligonucleotide for detection of SNP TSC0020823
ctatcataaaatc

SEQ ID NO: 82529 - DNA, 13 bp, Artificial Sequence
  Oligonucleotide for detection of SNP TSC0020823
gattttgtgatag

SEQ ID NO: 82530 - DNA, 13 bp, Artificial Sequence
  Oligonucleotide for detection of SNP TSC0020823
ctatcacaaaatc

SEQ ID NO: 82531 - DNA, 13 bp, Artificial Sequence
  Oligonucleotide for detection of SNP TSC0020823
gatttcgtgatag

SEQ ID NO: 82532 - DNA, 13 bp, Artificial Sequence
  Oligonucleotide for detection of SNP TSC0020823
ctatcacgaaatc

SEQ ID NO: 82533 - DNA, 13 bp, Artificial Sequence
  Oligonucleotide for detection of SNP TSC0020823
ttgttatgggaty

SEQ ID NO: 82534 - DNA, 13 bp, Artificial Sequence
  Oligonucleotide for detection of SNP TSC0020823
ratcccataacaa

SEQ ID NO: 82535 - DNA, 13 bp, Artificial Sequence
  Oligonucleotide for detection of SNP TSC0020823
ttgttacgggaty

SEQ ID NO: 82536 - DNA, 13 bp, Artificial Sequence
  Oligonucleotide for detection of SNP TSC0020823
ratcccgtaacaa

SEQ ID NO: 82537 - DNA, 13 bp, Artificial Sequence
  Oligonucleotide for detection of SNP TSC0020824
ataggtaggagty

SEQ ID NO: 82538 - DNA, 13 bp, Artificial Sequence
  Oligonucleotide for detection of SNP TSC0020824
ractcctacctat

SEQ ID NO: 82539 - DNA, 13 bp, Artificial Sequence
  Oligonucleotide for detection of SNP TSC0020824
ataggtgggagty

SEQ ID NO: 82540 - DNA, 13 bp, Artificial Sequence
  Oligonucleotide for detection of SNP TSC0020824
ractcccacctat

SEQ ID NO: 82541 - DNA, 13 bp, Artificial Sequence
  Oligonucleotide for detection of SNP TSC0020824
ataggcgggagty

SEQ ID NO: 82542 - DNA, 13 bp, Artificial Sequence
  Oligonucleotide for detection of SNP TSC0020824
ractcccgcctat

SEQ ID NO: 82543 - DNA, 13 bp, Artificial Sequence
  Oligonucleotide for detection of SNP TSC0020825
taggtaggagtta

SEQ ID NO: 82544 - DNA, 13 bp, Artificial Sequence
  Oligonucleotide for detection of SNP TSC0020825
taactcctaccta

SEQ ID NO: 82545 - DNA, 13 bp, Artificial Sequence
  Oligonucleotide for detection of SNP TSC0020825
taggtatgagtta

SEQ ID NO: 82546 - DNA, 13 bp, Artificial Sequence
  Oligonucleotide for detection of SNP TSC0020825
taactcataccta

SEQ ID NO: 82547 - DNA, 13 bp, Artificial Sequence
  Oligonucleotide for detection of SNP TSC0020825
tggtttttgtttg

SEQ ID NO: 82548 - DNA, 13 bp, Artificial Sequence
  Oligonucleotide for detection of SNP TSC0020825
caaacaaaaacca

SEQ ID NO: 82549 - DNA, 13 bp, Artificial Sequence
  Oligonucleotide for detection of SNP TSC0020826
tttattttgtata

SEQ ID NO: 82550 - DNA, 13 bp, Artificial Sequence
  Oligonucleotide for detection of SNP TSC0020826
tatacaaaataaa

SEQ ID NO: 82551 - DNA, 13 bp, Artificial Sequence
  Oligonucleotide for detection of SNP TSC0020826
tgtgtagagtggg

SEQ ID NO: 82552 - DNA, 13 bp, Artificial Sequence
  Oligonucleotide for detection of SNP TSC0020826
cccactctacaca

SEQ ID NO: 82553 - DNA, 13 bp, Artificial Sequence
  Oligonucleotide for detection of SNP TSC0020826
tgtgtatagtggg

SEQ ID NO: 82554 - DNA, 13 bp, Artificial Sequence
  Oligonucleotide for detection of SNP TSC0020826
cccactatacaca

SEQ ID NO: 82555 - DNA, 13 bp, Artificial Sequence
  Oligonucleotide for detection of SNP TSC0020829
gtatttgcggttt

SEQ ID NO: 82556 - DNA, 13 bp, Artificial Sequence
  Oligonucleotide for detection of SNP TSC0020829
aaaccgcaaatac

SEQ ID NO: 82557 - DNA, 13 bp, Artificial Sequence
  Oligonucleotide for detection of SNP TSC0020829
gtattttcggttt

SEQ ID NO: 82558 - DNA, 13 bp, Artificial Sequence
  Oligonucleotide for detection of SNP TSC0020829
aaaccgaaaatac

SEQ ID NO: 82559 - DNA, 13 bp, Artificial Sequence
  Oligonucleotide for detection of SNP TSC0020829
aggttgtaggtgy

SEQ ID NO: 82560 - DNA, 13 bp, Artificial Sequence
  Oligonucleotide for detection of SNP TSC0020829
rcacctacaacct

SEQ ID NO: 82561 - DNA, 13 bp, Artificial Sequence
  Oligonucleotide for detection of SNP TSC0020829
aggttgaaggtgy

SEQ ID NO: 82562 - DNA, 13 bp, Artificial Sequence
  Oligonucleotide for detection of SNP TSC0020829
rcaccttcaacct

SEQ ID NO: 82563 - DNA, 13 bp, Artificial Sequence
  Oligonucleotide for detection of SNP TSC0020829
aggtcgtaggtgy

SEQ ID NO: 82564 - DNA, 13 bp, Artificial Sequence
  Oligonucleotide for detection of SNP TSC0020829
rcacctacgacct

SEQ ID NO: 82565 - DNA, 13 bp, Artificial Sequence
  Oligonucleotide for detection of SNP TSC0020829
aggtcgaaggtgy

SEQ ID NO: 82566 - DNA, 13 bp, Artificial Sequence
  Oligonucleotide for detection of SNP TSC0020829
rcaccttcgacct

SEQ ID NO: 82567 - DNA, 13 bp, Artificial Sequence
  Oligonucleotide for detection of SNP TSC0020830
tgtgttattttgy

SEQ ID NO: 82568 - DNA, 13 bp, Artificial Sequence
  Oligonucleotide for detection of SNP TSC0020830
rcaaaataacaca

SEQ ID NO: 82569 - DNA, 13 bp, Artificial Sequence
  Oligonucleotide for detection of SNP TSC0020830
tgtgtttttttgy

SEQ ID NO: 82570 - DNA, 13 bp, Artificial Sequence
  Oligonucleotide for detection of SNP TSC0020830
rcaaaaaaacaca

SEQ ID NO: 82571 - DNA, 13 bp, Artificial Sequence
  Oligonucleotide for detection of SNP TSC0020830
gtaaggtggtata

SEQ ID NO: 82572 - DNA, 13 bp, Artificial Sequence
  Oligonucleotide for detection of SNP TSC0020830
tataccaccttac

SEQ ID NO: 82573 - DNA, 13 bp, Artificial Sequence
  Oligonucleotide for detection of SNP TSC0020830
gtaagggggtata

SEQ ID NO: 82574 - DNA, 13 bp, Artificial Sequence
  Oligonucleotide for detection of SNP TSC0020830
tatacccccttac

SEQ ID NO: 82575 - DNA, 13 bp, Artificial Sequence
  Oligonucleotide for detection of SNP TSC0020831
atagaggttttay

SEQ ID NO: 82576 - DNA, 13 bp, Artificial Sequence
  Oligonucleotide for detection of SNP TSC0020831
rtaaaacctctat

SEQ ID NO: 82577 - DNA, 13 bp, Artificial Sequence
  Oligonucleotide for detection of SNP TSC0020831
atagagattttay

SEQ ID NO: 82578 - DNA, 13 bp, Artificial Sequence
  Oligonucleotide for detection of SNP TSC0020831
rtaaaatctctat

SEQ ID NO: 82579 - DNA, 13 bp, Artificial Sequence
  Oligonucleotide for detection of SNP TSC0020834
ttagttatgtagy

SEQ ID NO: 82580 - DNA, 13 bp, Artificial Sequence
  Oligonucleotide for detection of SNP TSC0020834
rctacataactaa

SEQ ID NO: 82581 - DNA, 13 bp, Artificial Sequence
  Oligonucleotide for detection of SNP TSC0020834
ttagttttgtagy

SEQ ID NO: 82582 - DNA, 13 bp, Artificial Sequence
  Oligonucleotide for detection of SNP TSC0020834
rctacaaaactaa

SEQ ID NO: 82583 - DNA, 13 bp, Artificial Sequence
  Oligonucleotide for detection of SNP TSC0020834
gttatatgattga

SEQ ID NO: 82584 - DNA, 13 bp, Artificial Sequence
  Oligonucleotide for detection of SNP TSC0020834
tcaatcatataac

SEQ ID NO: 82585 - DNA, 13 bp, Artificial Sequence
  Oligonucleotide for detection of SNP TSC0020834
gttataggattga

SEQ ID NO: 82586 - DNA, 13 bp, Artificial Sequence
  Oligonucleotide for detection of SNP TSC0020834
tcaatcctataac

SEQ ID NO: 82587 - DNA, 13 bp, Artificial Sequence
  Oligonucleotide for detection of SNP TSC0020835
gttgtagttttat

SEQ ID NO: 82588 - DNA, 13 bp, Artificial Sequence
  Oligonucleotide for detection of SNP TSC0020835
ataaaactacaac

SEQ ID NO: 82589 - DNA, 13 bp, Artificial Sequence
  Oligonucleotide for detection of SNP TSC0020835
gttgtaattttat

SEQ ID NO: 82590 - DNA, 13 bp, Artificial Sequence
  Oligonucleotide for detection of SNP TSC0020835
ataaaattacaac

SEQ ID NO: 82591 - DNA, 13 bp, Artificial Sequence
  Oligonucleotide for detection of SNP TSC0020836
ttttgatttttgg

SEQ ID NO: 82592 - DNA, 13 bp, Artificial Sequence
  Oligonucleotide for detection of SNP TSC0020836
ccaaaaatcaaaa

SEQ ID NO: 82593 - DNA, 13 bp, Artificial Sequence
  Oligonucleotide for detection of SNP TSC0020836
ttttgagttttgg

SEQ ID NO: 82594 - DNA, 13 bp, Artificial Sequence
  Oligonucleotide for detection of SNP TSC0020836
ccaaaactcaaaa

SEQ ID NO: 82595 - DNA, 13 bp, Artificial Sequence
  Oligonucleotide for detection of SNP TSC0020836
ttaaaggttagga

SEQ ID NO: 82596 - DNA, 13 bp, Artificial Sequence
  Oligonucleotide for detection of SNP TSC0020836
tcctaacctttaa

SEQ ID NO: 82597 - DNA, 13 bp, Artificial Sequence
  Oligonucleotide for detection of SNP TSC0020836
ttaaagtttagga

SEQ ID NO: 82598 - DNA, 13 bp, Artificial Sequence
  Oligonucleotide for detection of SNP TSC0020836
tcctaaactttaa

SEQ ID NO: 82599 - DNA, 13 bp, Artificial Sequence
  Oligonucleotide for detection of SNP TSC0020837
tttgttgttaata

SEQ ID NO: 82600 - DNA, 13 bp, Artificial Sequence
  Oligonucleotide for detection of SNP TSC0020837
tattaacaacaaa

SEQ ID NO: 82601 - DNA, 13 bp, Artificial Sequence
  Oligonucleotide for detection of SNP TSC0020837
tttgttattaata

SEQ ID NO: 82602 - DNA, 13 bp, Artificial Sequence
  Oligonucleotide for detection of SNP TSC0020837
tattaataacaaa

SEQ ID NO: 82603 - DNA, 13 bp, Artificial Sequence
  Oligonucleotide for detection of SNP TSC0020838
taatgtatatttg

SEQ ID NO: 82604 - DNA, 13 bp, Artificial Sequence
  Oligonucleotide for detection of SNP TSC0020838
caaatatacatta

SEQ ID NO: 82605 - DNA, 13 bp, Artificial Sequence
  Oligonucleotide for detection of SNP TSC0020838
taatgtgtatttg

SEQ ID NO: 82606 - DNA, 13 bp, Artificial Sequence
  Oligonucleotide for detection of SNP TSC0020838
caaatacacatta

SEQ ID NO: 82607 - DNA, 13 bp, Artificial Sequence
  Oligonucleotide for detection of SNP TSC0020838
taatgcgtatttg

SEQ ID NO: 82608 - DNA, 13 bp, Artificial Sequence
  Oligonucleotide for detection of SNP TSC0020838
caaatacgcatta

SEQ ID NO: 82609 - DNA, 13 bp, Artificial Sequence
  Oligonucleotide for detection of SNP TSC0020838
taagtgtgtattg

SEQ ID NO: 82610 - DNA, 13 bp, Artificial Sequence
  Oligonucleotide for detection of SNP TSC0020838
caatacacactta

SEQ ID NO: 82611 - DNA, 13 bp, Artificial Sequence
  Oligonucleotide for detection of SNP TSC0020838
taagtgcgtattg

SEQ ID NO: 82612 - DNA, 13 bp, Artificial Sequence
  Oligonucleotide for detection of SNP TSC0020838
caatacgcactta

SEQ ID NO: 82613 - DNA, 13 bp, Artificial Sequence
  Oligonucleotide for detection of SNP TSC0020839
tgtttggtataaa

SEQ ID NO: 82614 - DNA, 13 bp, Artificial Sequence
  Oligonucleotide for detection of SNP TSC0020839
tttataccaaaca

SEQ ID NO: 82615 - DNA, 13 bp, Artificial Sequence
  Oligonucleotide for detection of SNP TSC0020839
tgtttgatataaa

SEQ ID NO: 82616 - DNA, 13 bp, Artificial Sequence
  Oligonucleotide for detection of SNP TSC0020839
tttatatcaaaca

SEQ ID NO: 82617 - DNA, 13 bp, Artificial Sequence
  Oligonucleotide for detection of SNP TSC0020839
cgtttggtataaa

SEQ ID NO: 82618 - DNA, 13 bp, Artificial Sequence
  Oligonucleotide for detection of SNP TSC0020839
tttataccaaacg

SEQ ID NO: 82619 - DNA, 13 bp, Artificial Sequence
  Oligonucleotide for detection of SNP TSC0020839
cgtttgatataaa

SEQ ID NO: 82620 - DNA, 13 bp, Artificial Sequence
  Oligonucleotide for detection of SNP TSC0020839
tttatatcaaacg

SEQ ID NO: 82621 - DNA, 13 bp, Artificial Sequence
  Oligonucleotide for detection of SNP TSC0020841
gggattgtggaaa

SEQ ID NO: 82622 - DNA, 13 bp, Artificial Sequence
  Oligonucleotide for detection of SNP TSC0020841
tttccacaatccc

SEQ ID NO: 82623 - DNA, 13 bp, Artificial Sequence
  Oligonucleotide for detection of SNP TSC0020841
gggattttggaaa

SEQ ID NO: 82624 - DNA, 13 bp, Artificial Sequence
  Oligonucleotide for detection of SNP TSC0020841
tttccaaaatccc

SEQ ID NO: 82625 - DNA, 13 bp, Artificial Sequence
  Oligonucleotide for detection of SNP TSC0020841
gggatcgtggaaa

SEQ ID NO: 82626 - DNA, 13 bp, Artificial Sequence
  Oligonucleotide for detection of SNP TSC0020841
tttccacgatccc

SEQ ID NO: 82627 - DNA, 13 bp, Artificial Sequence
  Oligonucleotide for detection of SNP TSC0020841
tttttatgattty

SEQ ID NO: 82628 - DNA, 13 bp, Artificial Sequence
  Oligonucleotide for detection of SNP TSC0020841
raaatcataaaaa

SEQ ID NO: 82629 - DNA, 13 bp, Artificial Sequence
  Oligonucleotide for detection of SNP TSC0020841
tttttaagattty

SEQ ID NO: 82630 - DNA, 13 bp, Artificial Sequence
  Oligonucleotide for detection of SNP TSC0020841
raaatcttaaaaa

SEQ ID NO: 82631 - DNA, 13 bp, Artificial Sequence
  Oligonucleotide for detection of SNP TSC0020841
tttttacgattty

SEQ ID NO: 82632 - DNA, 13 bp, Artificial Sequence
  Oligonucleotide for detection of SNP TSC0020841
raaatcgtaaaaa

SEQ ID NO: 82633 - DNA, 13 bp, Artificial Sequence
  Oligonucleotide for detection of SNP TSC0020842
tatgtagattgaa

SEQ ID NO: 82634 - DNA, 13 bp, Artificial Sequence
  Oligonucleotide for detection of SNP TSC0020842
ttcaatctacata

SEQ ID NO: 82635 - DNA, 13 bp, Artificial Sequence
  Oligonucleotide for detection of SNP TSC0020842
tatgtatattgaa

SEQ ID NO: 82636 - DNA, 13 bp, Artificial Sequence
  Oligonucleotide for detection of SNP TSC0020842
ttcaatatacata

SEQ ID NO: 82637 - DNA, 13 bp, Artificial Sequence
  Oligonucleotide for detection of SNP TSC0020842
tttagtttatata

SEQ ID NO: 82638 - DNA, 13 bp, Artificial Sequence
  Oligonucleotide for detection of SNP TSC0020842
tatataaactaaa

SEQ ID NO: 82639 - DNA, 13 bp, Artificial Sequence
  Oligonucleotide for detection of SNP TSC0020842
tttagtatatata

SEQ ID NO: 82640 - DNA, 13 bp, Artificial Sequence
  Oligonucleotide for detection of SNP TSC0020842
tatatatactaaa

SEQ ID NO: 82641 - DNA, 13 bp, Artificial Sequence
  Oligonucleotide for detection of SNP TSC0020844
tggattaagttaa

SEQ ID NO: 82642 - DNA, 13 bp, Artificial Sequence
  Oligonucleotide for detection of SNP TSC0020844
ttaacttaatcca

SEQ ID NO: 82643 - DNA, 13 bp, Artificial Sequence
  Oligonucleotide for detection of SNP TSC0020844
tggattgagttaa

SEQ ID NO: 82644 - DNA, 13 bp, Artificial Sequence
  Oligonucleotide for detection of SNP TSC0020844
ttaactcaatcca

SEQ ID NO: 82645 - DNA, 13 bp, Artificial Sequence
  Oligonucleotide for detection of SNP TSC0020845
tatgatatgatty

SEQ ID NO: 82646 - DNA, 13 bp, Artificial Sequence
  Oligonucleotide for detection of SNP TSC0020845
raatcatatcata

SEQ ID NO: 82647 - DNA, 13 bp, Artificial Sequence
  Oligonucleotide for detection of SNP TSC0020845
tatgatgtgatty

SEQ ID NO: 82648 - DNA, 13 bp, Artificial Sequence
  Oligonucleotide for detection of SNP TSC0020845
raatcacatcata

SEQ ID NO: 82649 - DNA, 13 bp, Artificial Sequence
  Oligonucleotide for detection of SNP TSC0020845
tatgacgtgatty

SEQ ID NO: 82650 - DNA, 13 bp, Artificial Sequence
  Oligonucleotide for detection of SNP TSC0020845
raatcacgtcata

SEQ ID NO: 82651 - DNA, 13 bp, Artificial Sequence
  Oligonucleotide for detection of SNP TSC0020845
gaattatgttata

SEQ ID NO: 82652 - DNA, 13 bp, Artificial Sequence
  Oligonucleotide for detection of SNP TSC0020845
tataacataattc

SEQ ID NO: 82653 - DNA, 13 bp, Artificial Sequence
  Oligonucleotide for detection of SNP TSC0020845
gaattacgttata

SEQ ID NO: 82654 - DNA, 13 bp, Artificial Sequence
  Oligonucleotide for detection of SNP TSC0020845
tataacgtaattc

SEQ ID NO: 82655 - DNA, 13 bp, Artificial Sequence
  Oligonucleotide for detection of SNP TSC0020846
ttagtgagatttg

SEQ ID NO: 82656 - DNA, 13 bp, Artificial Sequence
  Oligonucleotide for detection of SNP TSC0020846
caaatctcactaa

SEQ ID NO: 82657 - DNA, 13 bp, Artificial Sequence
  Oligonucleotide for detection of SNP TSC0020846
ttagtgggatttg

SEQ ID NO: 82658 - DNA, 13 bp, Artificial Sequence
  Oligonucleotide for detection of SNP TSC0020846
caaatcccactaa

SEQ ID NO: 82659 - DNA, 13 bp, Artificial Sequence
  Oligonucleotide for detection of SNP TSC0020847
attaataaataat

SEQ ID NO: 82660 - DNA, 13 bp, Artificial Sequence
  Oligonucleotide for detection of SNP TSC0020847
attatttattaat

SEQ ID NO: 82661 - DNA, 13 bp, Artificial Sequence
  Oligonucleotide for detection of SNP TSC0020847
attaatgaataat

SEQ ID NO: 82662 - DNA, 13 bp, Artificial Sequence
  Oligonucleotide for detection of SNP TSC0020847
attattcattaat

SEQ ID NO: 82663 - DNA, 13 bp, Artificial Sequence
  Oligonucleotide for detection of SNP TSC0020848
taaattaaattat

SEQ ID NO: 82664 - DNA, 13 bp, Artificial Sequence
  Oligonucleotide for detection of SNP TSC0020848
ataatttaattta

SEQ ID NO: 82665 - DNA, 13 bp, Artificial Sequence
  Oligonucleotide for detection of SNP TSC0020848
taaatttaattat

SEQ ID NO: 82666 - DNA, 13 bp, Artificial Sequence
  Oligonucleotide for detection of SNP TSC0020848
ataattaaattta

SEQ ID NO: 82667 - DNA, 13 bp, Artificial Sequence
  Oligonucleotide for detection of SNP TSC0020848
ataatttagttta

SEQ ID NO: 82668 - DNA, 13 bp, Artificial Sequence
  Oligonucleotide for detection of SNP TSC0020848
taaactaaattat

SEQ ID NO: 82669 - DNA, 13 bp, Artificial Sequence
  Oligonucleotide for detection of SNP TSC0020848
ataattgagttta

SEQ ID NO: 82670 - DNA, 13 bp, Artificial Sequence
  Oligonucleotide for detection of SNP TSC0020848
taaactcaattat

SEQ ID NO: 82671 - DNA, 13 bp, Artificial Sequence
  Oligonucleotide for detection of SNP TSC0020849
agtgttgtaagag

SEQ ID NO: 82672 - DNA, 13 bp, Artificial Sequence
  Oligonucleotide for detection of SNP TSC0020849
ctcttacaacact

SEQ ID NO: 82673 - DNA, 13 bp, Artificial Sequence
  Oligonucleotide for detection of SNP TSC0020849
agtgttataagag

SEQ ID NO: 82674 - DNA, 13 bp, Artificial Sequence
  Oligonucleotide for detection of SNP TSC0020849
ctcttataacact

SEQ ID NO: 82675 - DNA, 13 bp, Artificial Sequence
  Oligonucleotide for detection of SNP TSC0020850
ttgtgttttttta

SEQ ID NO: 82676 - DNA, 13 bp, Artificial Sequence
  Oligonucleotide for detection of SNP TSC0020850
taaaaaaacacaa

SEQ ID NO: 82677 - DNA, 13 bp, Artificial Sequence
  Oligonucleotide for detection of SNP TSC0020850
ttgcgtattttta

SEQ ID NO: 82678 - DNA, 13 bp, Artificial Sequence
  Oligonucleotide for detection of SNP TSC0020850
taaaaatacgcaa

SEQ ID NO: 82679 - DNA, 13 bp, Artificial Sequence
  Oligonucleotide for detection of SNP TSC0020850
ttgcgttttttta

SEQ ID NO: 82680 - DNA, 13 bp, Artificial Sequence
  Oligonucleotide for detection of SNP TSC0020850
taaaaaaacgcaa

SEQ ID NO: 82681 - DNA, 13 bp, Artificial Sequence
  Oligonucleotide for detection of SNP TSC0020850
tggaaatgtgtag

SEQ ID NO: 82682 - DNA, 13 bp, Artificial Sequence
  Oligonucleotide for detection of SNP TSC0020850
ctacacatttcca

SEQ ID NO: 82683 - DNA, 13 bp, Artificial Sequence
  Oligonucleotide for detection of SNP TSC0020850
tggaaaggtgtag

SEQ ID NO: 82684 - DNA, 13 bp, Artificial Sequence
  Oligonucleotide for detection of SNP TSC0020850
ctacacctttcca

SEQ ID NO: 82685 - DNA, 13 bp, Artificial Sequence
  Oligonucleotide for detection of SNP TSC0020850
tggaaatgcgtag

SEQ ID NO: 82686 - DNA, 13 bp, Artificial Sequence
  Oligonucleotide for detection of SNP TSC0020850
ctacgcatttcca

SEQ ID NO: 82687 - DNA, 13 bp, Artificial Sequence
  Oligonucleotide for detection of SNP TSC0020850
tggaaaggcgtag

SEQ ID NO: 82688 - DNA, 13 bp, Artificial Sequence
  Oligonucleotide for detection of SNP TSC0020850
ctacgcctttcca

SEQ ID NO: 82689 - DNA, 13 bp, Artificial Sequence
  Oligonucleotide for detection of SNP TSC0020851
tttgaaaatttay

SEQ ID NO: 82690 - DNA, 13 bp, Artificial Sequence
  Oligonucleotide for detection of SNP TSC0020851
rtaaattttcaaa

SEQ ID NO: 82691 - DNA, 13 bp, Artificial Sequence
  Oligonucleotide for detection of SNP TSC0020851
tttgaagatttay

SEQ ID NO: 82692 - DNA, 13 bp, Artificial Sequence
  Oligonucleotide for detection of SNP TSC0020851
rtaaatcttcaaa

SEQ ID NO: 82693 - DNA, 13 bp, Artificial Sequence
  Oligonucleotide for detection of SNP TSC0020854
agtttagttttta

SEQ ID NO: 82694 - DNA, 13 bp, Artificial Sequence
  Oligonucleotide for detection of SNP TSC0020854
taaaaactaaact

SEQ ID NO: 82695 - DNA, 13 bp, Artificial Sequence
  Oligonucleotide for detection of SNP TSC0020854
agtttaattttta

SEQ ID NO: 82696 - DNA, 13 bp, Artificial Sequence
  Oligonucleotide for detection of SNP TSC0020854
taaaaattaaact

SEQ ID NO: 82697 - DNA, 13 bp, Artificial Sequence
  Oligonucleotide for detection of SNP TSC0020855
attttgaggtaat

SEQ ID NO: 82698 - DNA, 13 bp, Artificial Sequence
  Oligonucleotide for detection of SNP TSC0020855
attacctcaaaat

SEQ ID NO: 82699 - DNA, 13 bp, Artificial Sequence
  Oligonucleotide for detection of SNP TSC0020855
attttggggtaat

SEQ ID NO: 82700 - DNA, 13 bp, Artificial Sequence
  Oligonucleotide for detection of SNP TSC0020855
attaccccaaaat

SEQ ID NO: 82701 - DNA, 13 bp, Artificial Sequence
  Oligonucleotide for detection of SNP TSC0020856
aagagagttttaa

SEQ ID NO: 82702 - DNA, 13 bp, Artificial Sequence
  Oligonucleotide for detection of SNP TSC0020856
ttaaaactctctt

SEQ ID NO: 82703 - DNA, 13 bp, Artificial Sequence
  Oligonucleotide for detection of SNP TSC0020856
aagagaattttaa

SEQ ID NO: 82704 - DNA, 13 bp, Artificial Sequence
  Oligonucleotide for detection of SNP TSC0020856
ttaaaattctctt

SEQ ID NO: 82705 - DNA, 13 bp, Artificial Sequence
  Oligonucleotide for detection of SNP TSC0020859
tggggtagtagga

SEQ ID NO: 82706 - DNA, 13 bp, Artificial Sequence
  Oligonucleotide for detection of SNP TSC0020859
tcctactacccca

SEQ ID NO: 82707 - DNA, 13 bp, Artificial Sequence
  Oligonucleotide for detection of SNP TSC0020859
tggggtggtagga

SEQ ID NO: 82708 - DNA, 13 bp, Artificial Sequence
  Oligonucleotide for detection of SNP TSC0020859
tcctaccacccca

SEQ ID NO: 82709 - DNA, 13 bp, Artificial Sequence
  Oligonucleotide for detection of SNP TSC0020859
cggggtagtagga

SEQ ID NO: 82710 - DNA, 13 bp, Artificial Sequence
  Oligonucleotide for detection of SNP TSC0020859
tcctactaccccg

SEQ ID NO: 82711 - DNA, 13 bp, Artificial Sequence
  Oligonucleotide for detection of SNP TSC0020859
cggggtggtagga

SEQ ID NO: 82712 - DNA, 13 bp, Artificial Sequence
  Oligonucleotide for detection of SNP TSC0020859
tcctaccaccccg

SEQ ID NO: 82713 - DNA, 13 bp, Artificial Sequence
  Oligonucleotide for detection of SNP TSC0020860
attatttgtgtgy

SEQ ID NO: 82714 - DNA, 13 bp, Artificial Sequence
  Oligonucleotide for detection of SNP TSC0020860
rcacacaaataat

SEQ ID NO: 82715 - DNA, 13 bp, Artificial Sequence
  Oligonucleotide for detection of SNP TSC0020860
attattcgtgtgy

SEQ ID NO: 82716 - DNA, 13 bp, Artificial Sequence
  Oligonucleotide for detection of SNP TSC0020860
rcacacgaataat

SEQ ID NO: 82717 - DNA, 13 bp, Artificial Sequence
  Oligonucleotide for detection of SNP TSC0020860
gtatatgggtggt

SEQ ID NO: 82718 - DNA, 13 bp, Artificial Sequence
  Oligonucleotide for detection of SNP TSC0020860
accacccatatac

SEQ ID NO: 82719 - DNA, 13 bp, Artificial Sequence
  Oligonucleotide for detection of SNP TSC0020860
gtatataggtggt

SEQ ID NO: 82720 - DNA, 13 bp, Artificial Sequence
  Oligonucleotide for detection of SNP TSC0020860
accacctatatac

SEQ ID NO: 82721 - DNA, 13 bp, Artificial Sequence
  Oligonucleotide for detection of SNP TSC0020860
gtatacgggtggt

SEQ ID NO: 82722 - DNA, 13 bp, Artificial Sequence
  Oligonucleotide for detection of SNP TSC0020860
accacccgtatac

SEQ ID NO: 82723 - DNA, 13 bp, Artificial Sequence
  Oligonucleotide for detection of SNP TSC0020862
tttggtttatggy

SEQ ID NO: 82724 - DNA, 13 bp, Artificial Sequence
  Oligonucleotide for detection of SNP TSC0020862
rccataaaccaaa

SEQ ID NO: 82725 - DNA, 13 bp, Artificial Sequence
  Oligonucleotide for detection of SNP TSC0020862
tttggtgtatggy

SEQ ID NO: 82726 - DNA, 13 bp, Artificial Sequence
  Oligonucleotide for detection of SNP TSC0020862
rccatacaccaaa

SEQ ID NO: 82727 - DNA, 13 bp, Artificial Sequence
  Oligonucleotide for detection of SNP TSC0020862
tttggcgtatggy

SEQ ID NO: 82728 - DNA, 13 bp, Artificial Sequence
  Oligonucleotide for detection of SNP TSC0020862
rccatacgccaaa

SEQ ID NO: 82729 - DNA, 13 bp, Artificial Sequence
  Oligonucleotide for detection of SNP TSC0020862
gttatgggttaga

SEQ ID NO: 82730 - DNA, 13 bp, Artificial Sequence
  Oligonucleotide for detection of SNP TSC0020862
tctaacccataac

SEQ ID NO: 82731 - DNA, 13 bp, Artificial Sequence
  Oligonucleotide for detection of SNP TSC0020862
gttatgtgttaga

SEQ ID NO: 82732 - DNA, 13 bp, Artificial Sequence
  Oligonucleotide for detection of SNP TSC0020862
tctaacacataac

SEQ ID NO: 82733 - DNA, 13 bp, Artificial Sequence
  Oligonucleotide for detection of SNP TSC0020862
gttatgcgttaga

SEQ ID NO: 82734 - DNA, 13 bp, Artificial Sequence
  Oligonucleotide for detection of SNP TSC0020862
tctaacgcataac

SEQ ID NO: 82735 - DNA, 13 bp, Artificial Sequence
  Oligonucleotide for detection of SNP TSC0020863
tgagtatggtata

SEQ ID NO: 82736 - DNA, 13 bp, Artificial Sequence
  Oligonucleotide for detection of SNP TSC0020863
tataccatactca

SEQ ID NO: 82737 - DNA, 13 bp, Artificial Sequence
  Oligonucleotide for detection of SNP TSC0020863
cgagtatggtata

SEQ ID NO: 82738 - DNA, 13 bp, Artificial Sequence
  Oligonucleotide for detection of SNP TSC0020863
tataccatactcg

SEQ ID NO: 82739 - DNA, 13 bp, Artificial Sequence
  Oligonucleotide for detection of SNP TSC0020863
tgagtacggtata

SEQ ID NO: 82740 - DNA, 13 bp, Artificial Sequence
  Oligonucleotide for detection of SNP TSC0020863
tataccgtactca

SEQ ID NO: 82741 - DNA, 13 bp, Artificial Sequence
  Oligonucleotide for detection of SNP TSC0020863
cgagtacggtata

SEQ ID NO: 82742 - DNA, 13 bp, Artificial Sequence
  Oligonucleotide for detection of SNP TSC0020863
tataccgtactcg

SEQ ID NO: 82743 - DNA, 13 bp, Artificial Sequence
  Oligonucleotide for detection of SNP TSC0020863
tgtgttgtgtttg

SEQ ID NO: 82744 - DNA, 13 bp, Artificial Sequence
  Oligonucleotide for detection of SNP TSC0020863
caaacacaacaca

SEQ ID NO: 82745 - DNA, 13 bp, Artificial Sequence
  Oligonucleotide for detection of SNP TSC0020863
tgtgttatgtttg

SEQ ID NO: 82746 - DNA, 13 bp, Artificial Sequence
  Oligonucleotide for detection of SNP TSC0020863
caaacataacaca

SEQ ID NO: 82747 - DNA, 13 bp, Artificial Sequence
  Oligonucleotide for detection of SNP TSC0020863
tgtgtcgtgtttg

SEQ ID NO: 82748 - DNA, 13 bp, Artificial Sequence
  Oligonucleotide for detection of SNP TSC0020863
caaacacgacaca

SEQ ID NO: 82749 - DNA, 13 bp, Artificial Sequence
  Oligonucleotide for detection of SNP TSC0020863
tgtgttatgttcg

SEQ ID NO: 82750 - DNA, 13 bp, Artificial Sequence
  Oligonucleotide for detection of SNP TSC0020863
cgaacataacaca

SEQ ID NO: 82751 - DNA, 13 bp, Artificial Sequence
  Oligonucleotide for detection of SNP TSC0020863
tgtgttgtgttcg

SEQ ID NO: 82752 - DNA, 13 bp, Artificial Sequence
  Oligonucleotide for detection of SNP TSC0020863
cgaacacaacaca

SEQ ID NO: 82753 - DNA, 13 bp, Artificial Sequence
  Oligonucleotide for detection of SNP TSC0020863
tgtgtcgtgttcg

SEQ ID NO: 82754 - DNA, 13 bp, Artificial Sequence
  Oligonucleotide for detection of SNP TSC0020863
cgaacacgacaca

SEQ ID NO: 82755 - DNA, 13 bp, Artificial Sequence
  Oligonucleotide for detection of SNP TSC0020865
taaggagtttata

SEQ ID NO: 82756 - DNA, 13 bp, Artificial Sequence
  Oligonucleotide for detection of SNP TSC0020865
tataaactcctta

SEQ ID NO: 82757 - DNA, 13 bp, Artificial Sequence
  Oligonucleotide for detection of SNP TSC0020865
taaggaatttata

SEQ ID NO: 82758 - DNA, 13 bp, Artificial Sequence
  Oligonucleotide for detection of SNP TSC0020865
tataaattcctta

SEQ ID NO: 82759 - DNA, 13 bp, Artificial Sequence
  Oligonucleotide for detection of SNP TSC0020868
aattttattatta

SEQ ID NO: 82760 - DNA, 13 bp, Artificial Sequence
  Oligonucleotide for detection of SNP TSC0020868
taataataaaatt

SEQ ID NO: 82761 - DNA, 13 bp, Artificial Sequence
  Oligonucleotide for detection of SNP TSC0020868
aattttgttatta

SEQ ID NO: 82762 - DNA, 13 bp, Artificial Sequence
  Oligonucleotide for detection of SNP TSC0020868
taataacaaaatt

SEQ ID NO: 82763 - DNA, 13 bp, Artificial Sequence
  Oligonucleotide for detection of SNP TSC0020868
aatttcgttatta

SEQ ID NO: 82764 - DNA, 13 bp, Artificial Sequence
  Oligonucleotide for detection of SNP TSC0020868
taataacgaaatt

SEQ ID NO: 82765 - DNA, 13 bp, Artificial Sequence
  Oligonucleotide for detection of SNP TSC0020868
taatggtggaatt

SEQ ID NO: 82766 - DNA, 13 bp, Artificial Sequence
  Oligonucleotide for detection of SNP TSC0020868
aattccaccatta

SEQ ID NO: 82767 - DNA, 13 bp, Artificial Sequence
  Oligonucleotide for detection of SNP TSC0020868
taatggcggaatt

SEQ ID NO: 82768 - DNA, 13 bp, Artificial Sequence
  Oligonucleotide for detection of SNP TSC0020868
aattccgccatta

SEQ ID NO: 82769 - DNA, 13 bp, Artificial Sequence
  Oligonucleotide for detection of SNP TSC0020870
attaatattggtt

SEQ ID NO: 82770 - DNA, 13 bp, Artificial Sequence
  Oligonucleotide for detection of SNP TSC0020870
aaccaatattaat

SEQ ID NO: 82771 - DNA, 13 bp, Artificial Sequence
  Oligonucleotide for detection of SNP TSC0020870
attaatgttggtt

SEQ ID NO: 82772 - DNA, 13 bp, Artificial Sequence
  Oligonucleotide for detection of SNP TSC0020870
aaccaacattaat

SEQ ID NO: 82773 - DNA, 13 bp, Artificial Sequence
  Oligonucleotide for detection of SNP TSC0020870
attaacgttggtt

SEQ ID NO: 82774 - DNA, 13 bp, Artificial Sequence
  Oligonucleotide for detection of SNP TSC0020870
aaccaacgttaat

SEQ ID NO: 82775 - DNA, 13 bp, Artificial Sequence
  Oligonucleotide for detection of SNP TSC0020871
ttttttggtttag

SEQ ID NO: 82776 - DNA, 13 bp, Artificial Sequence
  Oligonucleotide for detection of SNP TSC0020871
ctaaaccaaaaaa

SEQ ID NO: 82777 - DNA, 13 bp, Artificial Sequence
  Oligonucleotide for detection of SNP TSC0020871
ttaggttaaaaaa

SEQ ID NO: 82778 - DNA, 13 bp, Artificial Sequence
  Oligonucleotide for detection of SNP TSC0020871
ttttttaacctaa

SEQ ID NO: 82779 - DNA, 13 bp, Artificial Sequence
  Oligonucleotide for detection of SNP TSC0020871
ttaggtaaaaaaa

SEQ ID NO: 82780 - DNA, 13 bp, Artificial Sequence
  Oligonucleotide for detection of SNP TSC0020871
tttttttacctaa

SEQ ID NO: 82781 - DNA, 13 bp, Artificial Sequence
  Oligonucleotide for detection of SNP TSC0020872
gatgaaaagattt

SEQ ID NO: 82782 - DNA, 13 bp, Artificial Sequence
  Oligonucleotide for detection of SNP TSC0020872
aaatcttttcatc

SEQ ID NO: 82783 - DNA, 13 bp, Artificial Sequence
  Oligonucleotide for detection of SNP TSC0020872
gatgaatagattt

SEQ ID NO: 82784 - DNA, 13 bp, Artificial Sequence
  Oligonucleotide for detection of SNP TSC0020872
aaatctattcatc

SEQ ID NO: 82785 - DNA, 13 bp, Artificial Sequence
  Oligonucleotide for detection of SNP TSC0020872
aaatttttttaty

SEQ ID NO: 82786 - DNA, 13 bp, Artificial Sequence
  Oligonucleotide for detection of SNP TSC0020872
rataaaaaaattt

SEQ ID NO: 82787 - DNA, 13 bp, Artificial Sequence
  Oligonucleotide for detection of SNP TSC0020872
aaatttgtttaty

SEQ ID NO: 82788 - DNA, 13 bp, Artificial Sequence
  Oligonucleotide for detection of SNP TSC0020872
rataaacaaattt

SEQ ID NO: 82789 - DNA, 13 bp, Artificial Sequence
  Oligonucleotide for detection of SNP TSC0020873
tagttaataggta

SEQ ID NO: 82790 - DNA, 13 bp, Artificial Sequence
  Oligonucleotide for detection of SNP TSC0020873
tacctattaacta

SEQ ID NO: 82791 - DNA, 13 bp, Artificial Sequence
  Oligonucleotide for detection of SNP TSC0020873
tagttagtaggta

SEQ ID NO: 82792 - DNA, 13 bp, Artificial Sequence
  Oligonucleotide for detection of SNP TSC0020873
tacctactaacta

SEQ ID NO: 82793 - DNA, 13 bp, Artificial Sequence
  Oligonucleotide for detection of SNP TSC0020875
aagattgtgtatg

SEQ ID NO: 82794 - DNA, 13 bp, Artificial Sequence
  Oligonucleotide for detection of SNP TSC0020875
catacacaatctt

SEQ ID NO: 82795 - DNA, 13 bp, Artificial Sequence
  Oligonucleotide for detection of SNP TSC0020875
aagattttgtatg

SEQ ID NO: 82796 - DNA, 13 bp, Artificial Sequence
  Oligonucleotide for detection of SNP TSC0020875
catacaaaatctt

SEQ ID NO: 82797 - DNA, 13 bp, Artificial Sequence
  Oligonucleotide for detection of SNP TSC0020875
aagattgcgtatg

SEQ ID NO: 82798 - DNA, 13 bp, Artificial Sequence
  Oligonucleotide for detection of SNP TSC0020875
catacgcaatctt

SEQ ID NO: 82799 - DNA, 13 bp, Artificial Sequence
  Oligonucleotide for detection of SNP TSC0020875
aagatttcgtatg

SEQ ID NO: 82800 - DNA, 13 bp, Artificial Sequence
  Oligonucleotide for detection of SNP TSC0020875
catacgaaatctt

SEQ ID NO: 82801 - DNA, 13 bp, Artificial Sequence
  Oligonucleotide for detection of SNP TSC0020875
tatgtgtagtttt

SEQ ID NO: 82802 - DNA, 13 bp, Artificial Sequence
  Oligonucleotide for detection of SNP TSC0020875
aaaactacacata

SEQ ID NO: 82803 - DNA, 13 bp, Artificial Sequence
  Oligonucleotide for detection of SNP TSC0020875
tatgtgaagtttt

SEQ ID NO: 82804 - DNA, 13 bp, Artificial Sequence
  Oligonucleotide for detection of SNP TSC0020875
aaaacttcacata

SEQ ID NO: 82805 - DNA, 13 bp, Artificial Sequence
  Oligonucleotide for detection of SNP TSC0020875
tatgcgtagtttt

SEQ ID NO: 82806 - DNA, 13 bp, Artificial Sequence
  Oligonucleotide for detection of SNP TSC0020875
aaaactacgcata

SEQ ID NO: 82807 - DNA, 13 bp, Artificial Sequence
  Oligonucleotide for detection of SNP TSC0020875
tatgcgaagtttt

SEQ ID NO: 82808 - DNA, 13 bp, Artificial Sequence
  Oligonucleotide for detection of SNP TSC0020875
aaaacttcgcata

SEQ ID NO: 82809 - DNA, 13 bp, Artificial Sequence
  Oligonucleotide for detection of SNP TSC0020876
ttaggggaatatg

SEQ ID NO: 82810 - DNA, 13 bp, Artificial Sequence
  Oligonucleotide for detection of SNP TSC0020876
catattcccctaa

SEQ ID NO: 82811 - DNA, 13 bp, Artificial Sequence
  Oligonucleotide for detection of SNP TSC0020876
ttagggaaatatg

SEQ ID NO: 82812 - DNA, 13 bp, Artificial Sequence
  Oligonucleotide for detection of SNP TSC0020876
catatttccctaa

SEQ ID NO: 82813 - DNA, 13 bp, Artificial Sequence
  Oligonucleotide for detection of SNP TSC0020879
ggtttttgggaag

SEQ ID NO: 82814 - DNA, 13 bp, Artificial Sequence
  Oligonucleotide for detection of SNP TSC0020879
cttcccaaaaacc

SEQ ID NO: 82815 - DNA, 13 bp, Artificial Sequence
  Oligonucleotide for detection of SNP TSC0020879
ggttttggggaag

SEQ ID NO: 82816 - DNA, 13 bp, Artificial Sequence
  Oligonucleotide for detection of SNP TSC0020879
cttccccaaaacc

SEQ ID NO: 82817 - DNA, 13 bp, Artificial Sequence
  Oligonucleotide for detection of SNP TSC0020879
ggttttcgggaag

SEQ ID NO: 82818 - DNA, 13 bp, Artificial Sequence
  Oligonucleotide for detection of SNP TSC0020879
cttcccgaaaacc

SEQ ID NO: 82819 - DNA, 13 bp, Artificial Sequence
  Oligonucleotide for detection of SNP TSC0020879
ttttttgaggaty

SEQ ID NO: 82820 - DNA, 13 bp, Artificial Sequence
  Oligonucleotide for detection of SNP TSC0020879
ratcctcaaaaaa

SEQ ID NO: 82821 - DNA, 13 bp, Artificial Sequence
  Oligonucleotide for detection of SNP TSC0020879
tttttttaggaty

SEQ ID NO: 82822 - DNA, 13 bp, Artificial Sequence
  Oligonucleotide for detection of SNP TSC0020879
ratcctaaaaaaa

SEQ ID NO: 82823 - DNA, 13 bp, Artificial Sequence
  Oligonucleotide for detection of SNP TSC0020879
tttttcgaggaty

SEQ ID NO: 82824 - DNA, 13 bp, Artificial Sequence
  Oligonucleotide for detection of SNP TSC0020879
ratcctcgaaaaa

SEQ ID NO: 82825 - DNA, 13 bp, Artificial Sequence
  Oligonucleotide for detection of SNP TSC0020881
ttgttgttgttag

SEQ ID NO: 82826 - DNA, 13 bp, Artificial Sequence
  Oligonucleotide for detection of SNP TSC0020881
ctaacaacaacaa

SEQ ID NO: 82827 - DNA, 13 bp, Artificial Sequence
  Oligonucleotide for detection of SNP TSC0020881
ttgttggtgttag

SEQ ID NO: 82828 - DNA, 13 bp, Artificial Sequence
  Oligonucleotide for detection of SNP TSC0020881
ctaacaccaacaa

SEQ ID NO: 82829 - DNA, 13 bp, Artificial Sequence
  Oligonucleotide for detection of SNP TSC0020881
ttagtagtagtaa

SEQ ID NO: 82830 - DNA, 13 bp, Artificial Sequence
  Oligonucleotide for detection of SNP TSC0020881
ttactactactaa

SEQ ID NO: 82831 - DNA, 13 bp, Artificial Sequence
  Oligonucleotide for detection of SNP TSC0020881
ttagtattagtaa

SEQ ID NO: 82832 - DNA, 13 bp, Artificial Sequence
  Oligonucleotide for detection of SNP TSC0020881
ttactaatactaa

SEQ ID NO: 82833 - DNA, 13 bp, Artificial Sequence
  Oligonucleotide for detection of SNP TSC0020883
tttattgatttga

SEQ ID NO: 82834 - DNA, 13 bp, Artificial Sequence
  Oligonucleotide for detection of SNP TSC0020883
tcaaatcaataaa

SEQ ID NO: 82835 - DNA, 13 bp, Artificial Sequence
  Oligonucleotide for detection of SNP TSC0020883
tttatttatttga

SEQ ID NO: 82836 - DNA, 13 bp, Artificial Sequence
  Oligonucleotide for detection of SNP TSC0020883
tcaaataaataaa

SEQ ID NO: 82837 - DNA, 13 bp, Artificial Sequence
  Oligonucleotide for detection of SNP TSC0020883
tttatcgatttga

SEQ ID NO: 82838 - DNA, 13 bp, Artificial Sequence
  Oligonucleotide for detection of SNP TSC0020883
tcaaatcgataaa

SEQ ID NO: 82839 - DNA, 13 bp, Artificial Sequence
  Oligonucleotide for detection of SNP TSC0020883
ttaggttgatggg

SEQ ID NO: 82840 - DNA, 13 bp, Artificial Sequence
  Oligonucleotide for detection of SNP TSC0020883
cccatcaacctaa

SEQ ID NO: 82841 - DNA, 13 bp, Artificial Sequence
  Oligonucleotide for detection of SNP TSC0020883
ttaggtagatggg

SEQ ID NO: 82842 - DNA, 13 bp, Artificial Sequence
  Oligonucleotide for detection of SNP TSC0020883
cccatctacctaa

SEQ ID NO: 82843 - DNA, 13 bp, Artificial Sequence
  Oligonucleotide for detection of SNP TSC0020883
ttaggtcgatggg

SEQ ID NO: 82844 - DNA, 13 bp, Artificial Sequence
  Oligonucleotide for detection of SNP TSC0020883
cccatcgacctaa

SEQ ID NO: 82845 - DNA, 13 bp, Artificial Sequence
  Oligonucleotide for detection of SNP TSC0020884
tgatagggggttg

SEQ ID NO: 82846 - DNA, 13 bp, Artificial Sequence
  Oligonucleotide for detection of SNP TSC0020884
caaccccctatca

SEQ ID NO: 82847 - DNA, 13 bp, Artificial Sequence
  Oligonucleotide for detection of SNP TSC0020884
tgatagtgggttg

SEQ ID NO: 82848 - DNA, 13 bp, Artificial Sequence
  Oligonucleotide for detection of SNP TSC0020884
caacccactatca

SEQ ID NO: 82849 - DNA, 13 bp, Artificial Sequence
  Oligonucleotide for detection of SNP TSC0020884
tagttttttgtta

SEQ ID NO: 82850 - DNA, 13 bp, Artificial Sequence
  Oligonucleotide for detection of SNP TSC0020884
taacaaaaaacta

SEQ ID NO: 82851 - DNA, 13 bp, Artificial Sequence
  Oligonucleotide for detection of SNP TSC0020884
tagtttattgtta

SEQ ID NO: 82852 - DNA, 13 bp, Artificial Sequence
  Oligonucleotide for detection of SNP TSC0020884
taacaataaacta

SEQ ID NO: 82853 - DNA, 13 bp, Artificial Sequence
  Oligonucleotide for detection of SNP TSC0020886
gttataataatgt

SEQ ID NO: 82854 - DNA, 13 bp, Artificial Sequence
  Oligonucleotide for detection of SNP TSC0020886
acattattataac

SEQ ID NO: 82855 - DNA, 13 bp, Artificial Sequence
  Oligonucleotide for detection of SNP TSC0020886
gttatagtaatgt

SEQ ID NO: 82856 - DNA, 13 bp, Artificial Sequence
  Oligonucleotide for detection of SNP TSC0020886
acattactataac

SEQ ID NO: 82857 - DNA, 13 bp, Artificial Sequence
  Oligonucleotide for detection of SNP TSC0020887
gggttaattgaga

SEQ ID NO: 82858 - DNA, 13 bp, Artificial Sequence
  Oligonucleotide for detection of SNP TSC0020887
tctcaattaaccc

SEQ ID NO: 82859 - DNA, 13 bp, Artificial Sequence
  Oligonucleotide for detection of SNP TSC0020887
gggttagttgaga

SEQ ID NO: 82860 - DNA, 13 bp, Artificial Sequence
  Oligonucleotide for detection of SNP TSC0020887
tctcaactaaccc

SEQ ID NO: 82861 - DNA, 13 bp, Artificial Sequence
  Oligonucleotide for detection of SNP TSC0020887
gggttaatcgaga

SEQ ID NO: 82862 - DNA, 13 bp, Artificial Sequence
  Oligonucleotide for detection of SNP TSC0020887
tctcgattaaccc

SEQ ID NO: 82863 - DNA, 13 bp, Artificial Sequence
  Oligonucleotide for detection of SNP TSC0020887
gggttagtcgaga

SEQ ID NO: 82864 - DNA, 13 bp, Artificial Sequence
  Oligonucleotide for detection of SNP TSC0020887
tctcgactaaccc

SEQ ID NO: 82865 - DNA, 13 bp, Artificial Sequence
  Oligonucleotide for detection of SNP TSC0020888
ggttgtatttgty

SEQ ID NO: 82866 - DNA, 13 bp, Artificial Sequence
  Oligonucleotide for detection of SNP TSC0020888
racaaatacaacc

SEQ ID NO: 82867 - DNA, 13 bp, Artificial Sequence
  Oligonucleotide for detection of SNP TSC0020888
ggttgtttttgty

SEQ ID NO: 82868 - DNA, 13 bp, Artificial Sequence
  Oligonucleotide for detection of SNP TSC0020888
racaaaaacaacc

SEQ ID NO: 82869 - DNA, 13 bp, Artificial Sequence
  Oligonucleotide for detection of SNP TSC0020888
gatagatgtaaty

SEQ ID NO: 82870 - DNA, 13 bp, Artificial Sequence
  Oligonucleotide for detection of SNP TSC0020888
rattacatctatc

SEQ ID NO: 82871 - DNA, 13 bp, Artificial Sequence
  Oligonucleotide for detection of SNP TSC0020888
gatagaggtaaty

SEQ ID NO: 82872 - DNA, 13 bp, Artificial Sequence
  Oligonucleotide for detection of SNP TSC0020888
rattacctctatc

SEQ ID NO: 82873 - DNA, 13 bp, Artificial Sequence
  Oligonucleotide for detection of SNP TSC0020889
ttatgtatttaag

SEQ ID NO: 82874 - DNA, 13 bp, Artificial Sequence
  Oligonucleotide for detection of SNP TSC0020889
cttaaatacataa

SEQ ID NO: 82875 - DNA, 13 bp, Artificial Sequence
  Oligonucleotide for detection of SNP TSC0020889
ttatgtttttaag

SEQ ID NO: 82876 - DNA, 13 bp, Artificial Sequence
  Oligonucleotide for detection of SNP TSC0020889
cttaaaaacataa

SEQ ID NO: 82877 - DNA, 13 bp, Artificial Sequence
  Oligonucleotide for detection of SNP TSC0020889
tttgagtgtatgg

SEQ ID NO: 82878 - DNA, 13 bp, Artificial Sequence
  Oligonucleotide for detection of SNP TSC0020889
ccatacactcaaa

SEQ ID NO: 82879 - DNA, 13 bp, Artificial Sequence
  Oligonucleotide for detection of SNP TSC0020889
tttgagagtatgg

SEQ ID NO: 82880 - DNA, 13 bp, Artificial Sequence
  Oligonucleotide for detection of SNP TSC0020889
ccatactctcaaa

SEQ ID NO: 82881 - DNA, 13 bp, Artificial Sequence
  Oligonucleotide for detection of SNP TSC0020890
agatagaagtaty

SEQ ID NO: 82882 - DNA, 13 bp, Artificial Sequence
  Oligonucleotide for detection of SNP TSC0020890
ratacttctatct

SEQ ID NO: 82883 - DNA, 13 bp, Artificial Sequence
  Oligonucleotide for detection of SNP TSC0020890
agataggagtaty

SEQ ID NO: 82884 - DNA, 13 bp, Artificial Sequence
  Oligonucleotide for detection of SNP TSC0020890
ratactcctatct

SEQ ID NO: 82885 - DNA, 13 bp, Artificial Sequence
  Oligonucleotide for detection of SNP TSC0020892
tattttaaggaga

SEQ ID NO: 82886 - DNA, 13 bp, Artificial Sequence
  Oligonucleotide for detection of SNP TSC0020892
tctccttaaaata

SEQ ID NO: 82887 - DNA, 13 bp, Artificial Sequence
  Oligonucleotide for detection of SNP TSC0020892
tatttttaggaga

SEQ ID NO: 82888 - DNA, 13 bp, Artificial Sequence
  Oligonucleotide for detection of SNP TSC0020892
tctcctaaaaata

SEQ ID NO: 82889 - DNA, 13 bp, Artificial Sequence
  Oligonucleotide for detection of SNP TSC0020894
ttatttattgttg

SEQ ID NO: 82890 - DNA, 13 bp, Artificial Sequence
  Oligonucleotide for detection of SNP TSC0020894
caacaataaataa

SEQ ID NO: 82891 - DNA, 13 bp, Artificial Sequence
  Oligonucleotide for detection of SNP TSC0020894
ttatttgttgttg

SEQ ID NO: 82892 - DNA, 13 bp, Artificial Sequence
  Oligonucleotide for detection of SNP TSC0020894
caacaacaaataa

SEQ ID NO: 82893 - DNA, 13 bp, Artificial Sequence
  Oligonucleotide for detection of SNP TSC0020895
ttaaatattggaa

SEQ ID NO: 82894 - DNA, 13 bp, Artificial Sequence
  Oligonucleotide for detection of SNP TSC0020895
ttccaatatttaa

SEQ ID NO: 82895 - DNA, 13 bp, Artificial Sequence
  Oligonucleotide for detection of SNP TSC0020895
ttaaattttggaa

SEQ ID NO: 82896 - DNA, 13 bp, Artificial Sequence
  Oligonucleotide for detection of SNP TSC0020895
ttccaaaatttaa

SEQ ID NO: 82897 - DNA, 13 bp, Artificial Sequence
  Oligonucleotide for detection of SNP TSC0020895
ttttaatatttag

SEQ ID NO: 82898 - DNA, 13 bp, Artificial Sequence
  Oligonucleotide for detection of SNP TSC0020895
ctaaatattaaaa

SEQ ID NO: 82899 - DNA, 13 bp, Artificial Sequence
  Oligonucleotide for detection of SNP TSC0020896
gtagagagaaaaa

SEQ ID NO: 82900 - DNA, 13 bp, Artificial Sequence
  Oligonucleotide for detection of SNP TSC0020896
tttttctctctac

SEQ ID NO: 82901 - DNA, 13 bp, Artificial Sequence
  Oligonucleotide for detection of SNP TSC0020896
gtagagggaaaaa

SEQ ID NO: 82902 - DNA, 13 bp, Artificial Sequence
  Oligonucleotide for detection of SNP TSC0020896
tttttccctctac

SEQ ID NO: 82903 - DNA, 13 bp, Artificial Sequence
  Oligonucleotide for detection of SNP TSC0020897
tattttgaattgt

SEQ ID NO: 82904 - DNA, 13 bp, Artificial Sequence
  Oligonucleotide for detection of SNP TSC0020897
acaattcaaaata

SEQ ID NO: 82905 - DNA, 13 bp, Artificial Sequence
  Oligonucleotide for detection of SNP TSC0020897
tattttaaattgt

SEQ ID NO: 82906 - DNA, 13 bp, Artificial Sequence
  Oligonucleotide for detection of SNP TSC0020897
acaatttaaaata

SEQ ID NO: 82907 - DNA, 13 bp, Artificial Sequence
  Oligonucleotide for detection of SNP TSC0020898
gtattggtttttt

SEQ ID NO: 82908 - DNA, 13 bp, Artificial Sequence
  Oligonucleotide for detection of SNP TSC0020898
aaaaaaccaatac

SEQ ID NO: 82909 - DNA, 13 bp, Artificial Sequence
  Oligonucleotide for detection of SNP TSC0020898
gtattgttttttt

SEQ ID NO: 82910 - DNA, 13 bp, Artificial Sequence
  Oligonucleotide for detection of SNP TSC0020898
aaaaaaacaatac

SEQ ID NO: 82911 - DNA, 13 bp, Artificial Sequence
  Oligonucleotide for detection of SNP TSC0020898
aaagaattaatgy

SEQ ID NO: 82912 - DNA, 13 bp, Artificial Sequence
  Oligonucleotide for detection of SNP TSC0020898
rcattaattcttt

SEQ ID NO: 82913 - DNA, 13 bp, Artificial Sequence
  Oligonucleotide for detection of SNP TSC0020898
aaagaaataatgy

SEQ ID NO: 82914 - DNA, 13 bp, Artificial Sequence
  Oligonucleotide for detection of SNP TSC0020898
rcattatttcttt

SEQ ID NO: 82915 - DNA, 13 bp, Artificial Sequence
  Oligonucleotide for detection of SNP TSC0020899
gaatatattttty

SEQ ID NO: 82916 - DNA, 13 bp, Artificial Sequence
  Oligonucleotide for detection of SNP TSC0020899
raaaaatatattc

SEQ ID NO: 82917 - DNA, 13 bp, Artificial Sequence
  Oligonucleotide for detection of SNP TSC0020899
ggagaaggtatty

SEQ ID NO: 82918 - DNA, 13 bp, Artificial Sequence
  Oligonucleotide for detection of SNP TSC0020899
raataccttctcc

SEQ ID NO: 82919 - DNA, 13 bp, Artificial Sequence
  Oligonucleotide for detection of SNP TSC0020900
tgggggtgggggy

SEQ ID NO: 82920 - DNA, 13 bp, Artificial Sequence
  Oligonucleotide for detection of SNP TSC0020900
rcccccaccccca

SEQ ID NO: 82921 - DNA, 13 bp, Artificial Sequence
  Oligonucleotide for detection of SNP TSC0020900
tgggggggggggy

SEQ ID NO: 82922 - DNA, 13 bp, Artificial Sequence
  Oligonucleotide for detection of SNP TSC0020900
rccccccccccca

SEQ ID NO: 82923 - DNA, 13 bp, Artificial Sequence
  Oligonucleotide for detection of SNP TSC0020901
tttttatgaagty

SEQ ID NO: 82924 - DNA, 13 bp, Artificial Sequence
  Oligonucleotide for detection of SNP TSC0020901
racttcataaaaa

SEQ ID NO: 82925 - DNA, 13 bp, Artificial Sequence
  Oligonucleotide for detection of SNP TSC0020901
tttttacgaagty

SEQ ID NO: 82926 - DNA, 13 bp, Artificial Sequence
  Oligonucleotide for detection of SNP TSC0020901
racttcgtaaaaa

SEQ ID NO: 82927 - DNA, 13 bp, Artificial Sequence
  Oligonucleotide for detection of SNP TSC0020901
gattttgtggggg

SEQ ID NO: 82928 - DNA, 13 bp, Artificial Sequence
  Oligonucleotide for detection of SNP TSC0020901
cccccacaaaatc

SEQ ID NO: 82929 - DNA, 13 bp, Artificial Sequence
  Oligonucleotide for detection of SNP TSC0020901
gattttatggggg

SEQ ID NO: 82930 - DNA, 13 bp, Artificial Sequence
  Oligonucleotide for detection of SNP TSC0020901
cccccataaaatc

SEQ ID NO: 82931 - DNA, 13 bp, Artificial Sequence
  Oligonucleotide for detection of SNP TSC0020901
gatttcgtggggg

SEQ ID NO: 82932 - DNA, 13 bp, Artificial Sequence
  Oligonucleotide for detection of SNP TSC0020901
cccccacgaaatc

SEQ ID NO: 82933 - DNA, 13 bp, Artificial Sequence
  Oligonucleotide for detection of SNP TSC0020902
agaatagataaty

SEQ ID NO: 82934 - DNA, 13 bp, Artificial Sequence
  Oligonucleotide for detection of SNP TSC0020902
rattatctattct

SEQ ID NO: 82935 - DNA, 13 bp, Artificial Sequence
  Oligonucleotide for detection of SNP TSC0020902
agaataaataaty

SEQ ID NO: 82936 - DNA, 13 bp, Artificial Sequence
  Oligonucleotide for detection of SNP TSC0020902
rattatttattct

SEQ ID NO: 82937 - DNA, 13 bp, Artificial Sequence
  Oligonucleotide for detection of SNP TSC0020909
agagttagggaaa

SEQ ID NO: 82938 - DNA, 13 bp, Artificial Sequence
  Oligonucleotide for detection of SNP TSC0020909
tttccctaactct

SEQ ID NO: 82939 - DNA, 13 bp, Artificial Sequence
  Oligonucleotide for detection of SNP TSC0020909
agagttggggaaa

SEQ ID NO: 82940 - DNA, 13 bp, Artificial Sequence
  Oligonucleotide for detection of SNP TSC0020909
tttccccaactct

SEQ ID NO: 82941 - DNA, 13 bp, Artificial Sequence
  Oligonucleotide for detection of SNP TSC0020909
agagtcggggaaa

SEQ ID NO: 82942 - DNA, 13 bp, Artificial Sequence
  Oligonucleotide for detection of SNP TSC0020909
tttccccgactct

SEQ ID NO: 82943 - DNA, 13 bp, Artificial Sequence
  Oligonucleotide for detection of SNP TSC0020910
tgatatatgatat

SEQ ID NO: 82944 - DNA, 13 bp, Artificial Sequence
  Oligonucleotide for detection of SNP TSC0020910
atatcatatatca

SEQ ID NO: 82945 - DNA, 13 bp, Artificial Sequence
  Oligonucleotide for detection of SNP TSC0020910
tgatatgtgatat

SEQ ID NO: 82946 - DNA, 13 bp, Artificial Sequence
  Oligonucleotide for detection of SNP TSC0020910
atatcacatatca

SEQ ID NO: 82947 - DNA, 13 bp, Artificial Sequence
  Oligonucleotide for detection of SNP TSC0020910
tgatacgtgatat

SEQ ID NO: 82948 - DNA, 13 bp, Artificial Sequence
  Oligonucleotide for detection of SNP TSC0020910
atatcacgtatca

SEQ ID NO: 82949 - DNA, 13 bp, Artificial Sequence
  Oligonucleotide for detection of SNP TSC0020910
atattacgtatta

SEQ ID NO: 82950 - DNA, 13 bp, Artificial Sequence
  Oligonucleotide for detection of SNP TSC0020910
taatacgtaatat

SEQ ID NO: 82951 - DNA, 13 bp, Artificial Sequence
  Oligonucleotide for detection of SNP TSC0020911
ttatagaatgagg

SEQ ID NO: 82952 - DNA, 13 bp, Artificial Sequence
  Oligonucleotide for detection of SNP TSC0020911
cctcattctataa

SEQ ID NO: 82953 - DNA, 13 bp, Artificial Sequence
  Oligonucleotide for detection of SNP TSC0020911
ttataggatgagg

SEQ ID NO: 82954 - DNA, 13 bp, Artificial Sequence
  Oligonucleotide for detection of SNP TSC0020911
cctcatcctataa

SEQ ID NO: 82955 - DNA, 13 bp, Artificial Sequence
  Oligonucleotide for detection of SNP TSC0020912
ggtaatagttgtg

SEQ ID NO: 82956 - DNA, 13 bp, Artificial Sequence
  Oligonucleotide for detection of SNP TSC0020912
cacaactattacc

SEQ ID NO: 82957 - DNA, 13 bp, Artificial Sequence
  Oligonucleotide for detection of SNP TSC0020912
ggtaatggttgtg

SEQ ID NO: 82958 - DNA, 13 bp, Artificial Sequence
  Oligonucleotide for detection of SNP TSC0020912
cacaaccattacc

SEQ ID NO: 82959 - DNA, 13 bp, Artificial Sequence
  Oligonucleotide for detection of SNP TSC0020912
ggtaatagtcgtg

SEQ ID NO: 82960 - DNA, 13 bp, Artificial Sequence
  Oligonucleotide for detection of SNP TSC0020912
cacgactattacc

SEQ ID NO: 82961 - DNA, 13 bp, Artificial Sequence
  Oligonucleotide for detection of SNP TSC0020912
ggtaacggttgtg

SEQ ID NO: 82962 - DNA, 13 bp, Artificial Sequence
  Oligonucleotide for detection of SNP TSC0020912
cacaaccgttacc

SEQ ID NO: 82963 - DNA, 13 bp, Artificial Sequence
  Oligonucleotide for detection of SNP TSC0020912
ggtaatggtcgtg

SEQ ID NO: 82964 - DNA, 13 bp, Artificial Sequence
  Oligonucleotide for detection of SNP TSC0020912
cacgaccattacc

SEQ ID NO: 82965 - DNA, 13 bp, Artificial Sequence
  Oligonucleotide for detection of SNP TSC0020912
ggtaacggtcgtg

SEQ ID NO: 82966 - DNA, 13 bp, Artificial Sequence
  Oligonucleotide for detection of SNP TSC0020912
cacgaccgttacc

SEQ ID NO: 82967 - DNA, 13 bp, Artificial Sequence
  Oligonucleotide for detection of SNP TSC0020912
tatggttgttgty

SEQ ID NO: 82968 - DNA, 13 bp, Artificial Sequence
  Oligonucleotide for detection of SNP TSC0020912
racaacaaccata

SEQ ID NO: 82969 - DNA, 13 bp, Artificial Sequence
  Oligonucleotide for detection of SNP TSC0020912
tacggttgttgty

SEQ ID NO: 82970 - DNA, 13 bp, Artificial Sequence
  Oligonucleotide for detection of SNP TSC0020912
racaacaaccgta

SEQ ID NO: 82971 - DNA, 13 bp, Artificial Sequence
  Oligonucleotide for detection of SNP TSC0020912
tatggtcgttgty

SEQ ID NO: 82972 - DNA, 13 bp, Artificial Sequence
  Oligonucleotide for detection of SNP TSC0020912
racaacgaccata

SEQ ID NO: 82973 - DNA, 13 bp, Artificial Sequence
  Oligonucleotide for detection of SNP TSC0020912
tacggtcgttgty

SEQ ID NO: 82974 - DNA, 13 bp, Artificial Sequence
  Oligonucleotide for detection of SNP TSC0020912
racaacgaccgta

SEQ ID NO: 82975 - DNA, 13 bp, Artificial Sequence
  Oligonucleotide for detection of SNP TSC0020913
tttgaaaagatgy

SEQ ID NO: 82976 - DNA, 13 bp, Artificial Sequence
  Oligonucleotide for detection of SNP TSC0020913
rcatcttttcaaa

SEQ ID NO: 82977 - DNA, 13 bp, Artificial Sequence
  Oligonucleotide for detection of SNP TSC0020913
tttgaagagatgy

SEQ ID NO: 82978 - DNA, 13 bp, Artificial Sequence
  Oligonucleotide for detection of SNP TSC0020913
rcatctcttcaaa

SEQ ID NO: 82979 - DNA, 13 bp, Artificial Sequence
  Oligonucleotide for detection of SNP TSC0020913
tttgaaaagacgy

SEQ ID NO: 82980 - DNA, 13 bp, Artificial Sequence
  Oligonucleotide for detection of SNP TSC0020913
rcgtcttttcaaa

SEQ ID NO: 82981 - DNA, 13 bp, Artificial Sequence
  Oligonucleotide for detection of SNP TSC0020913
tttgaagagacgy

SEQ ID NO: 82982 - DNA, 13 bp, Artificial Sequence
  Oligonucleotide for detection of SNP TSC0020913
rcgtctcttcaaa

SEQ ID NO: 82983 - DNA, 13 bp, Artificial Sequence
  Oligonucleotide for detection of SNP TSC0020917
gaatttcgttatg

SEQ ID NO: 82984 - DNA, 13 bp, Artificial Sequence
  Oligonucleotide for detection of SNP TSC0020917
cataacgaaattc

SEQ ID NO: 82985 - DNA, 13 bp, Artificial Sequence
  Oligonucleotide for detection of SNP TSC0020917
tatggtggggtty

SEQ ID NO: 82986 - DNA, 13 bp, Artificial Sequence
  Oligonucleotide for detection of SNP TSC0020917
raaccccaccata

SEQ ID NO: 82987 - DNA, 13 bp, Artificial Sequence
  Oligonucleotide for detection of SNP TSC0020917
tatggtagggtty

SEQ ID NO: 82988 - DNA, 13 bp, Artificial Sequence
  Oligonucleotide for detection of SNP TSC0020917
raaccctaccata

SEQ ID NO: 82989 - DNA, 13 bp, Artificial Sequence
  Oligonucleotide for detection of SNP TSC0020917
tatggcggggtty

SEQ ID NO: 82990 - DNA, 13 bp, Artificial Sequence
  Oligonucleotide for detection of SNP TSC0020917
raaccccgccata

SEQ ID NO: 82991 - DNA, 13 bp, Artificial Sequence
  Oligonucleotide for detection of SNP TSC0020918
tggtaaagtatgy

SEQ ID NO: 82992 - DNA, 13 bp, Artificial Sequence
  Oligonucleotide for detection of SNP TSC0020918
rcatactttacca

SEQ ID NO: 82993 - DNA, 13 bp, Artificial Sequence
  Oligonucleotide for detection of SNP TSC0020918
tggtaaggtatgy

SEQ ID NO: 82994 - DNA, 13 bp, Artificial Sequence
  Oligonucleotide for detection of SNP TSC0020918
rcataccttacca

SEQ ID NO: 82995 - DNA, 13 bp, Artificial Sequence
  Oligonucleotide for detection of SNP TSC0020918
tggtaaagtacgy

SEQ ID NO: 82996 - DNA, 13 bp, Artificial Sequence
  Oligonucleotide for detection of SNP TSC0020918
rcgtactttacca

SEQ ID NO: 82997 - DNA, 13 bp, Artificial Sequence
  Oligonucleotide for detection of SNP TSC0020918
tggtaaggtacgy

SEQ ID NO: 82998 - DNA, 13 bp, Artificial Sequence
  Oligonucleotide for detection of SNP TSC0020918
rcgtaccttacca

SEQ ID NO: 82999 - DNA, 13 bp, Artificial Sequence
  Oligonucleotide for detection of SNP TSC0020926
gtgggtaaggtty

SEQ ID NO: 83000 - DNA, 13 bp, Artificial Sequence
  Oligonucleotide for detection of SNP TSC0020926
raaccttacccac

SEQ ID NO: 83001 - DNA, 13 bp, Artificial Sequence
  Oligonucleotide for detection of SNP TSC0020926
gtgggtgaggtty

SEQ ID NO: 83002 - DNA, 13 bp, Artificial Sequence
  Oligonucleotide for detection of SNP TSC0020926
raacctcacccac

SEQ ID NO: 83003 - DNA, 13 bp, Artificial Sequence
  Oligonucleotide for detection of SNP TSC0020926
gtgggcgaggtty

SEQ ID NO: 83004 - DNA, 13 bp, Artificial Sequence
  Oligonucleotide for detection of SNP TSC0020926
raacctcgcccac

SEQ ID NO: 83005 - DNA, 13 bp, Artificial Sequence
  Oligonucleotide for detection of SNP TSC0020926
ggattttgtttay

SEQ ID NO: 83006 - DNA, 13 bp, Artificial Sequence
  Oligonucleotide for detection of SNP TSC0020926
rtaaacaaaatcc

SEQ ID NO: 83007 - DNA, 13 bp, Artificial Sequence
  Oligonucleotide for detection of SNP TSC0020926
ggatttcgtttay

SEQ ID NO: 83008 - DNA, 13 bp, Artificial Sequence
  Oligonucleotide for detection of SNP TSC0020926
rtaaacgaaatcc

SEQ ID NO: 83009 - DNA, 13 bp, Artificial Sequence
  Oligonucleotide for detection of SNP TSC0020930
gtatagttattaa

SEQ ID NO: 83010 - DNA, 13 bp, Artificial Sequence
  Oligonucleotide for detection of SNP TSC0020930
ttaataactatac

SEQ ID NO: 83011 - DNA, 13 bp, Artificial Sequence
  Oligonucleotide for detection of SNP TSC0020930
gtataggtattaa

SEQ ID NO: 83012 - DNA, 13 bp, Artificial Sequence
  Oligonucleotide for detection of SNP TSC0020930
ttaatacctatac

SEQ ID NO: 83013 - DNA, 13 bp, Artificial Sequence
  Oligonucleotide for detection of SNP TSC0020930
ttgatggttatgy

SEQ ID NO: 83014 - DNA, 13 bp, Artificial Sequence
  Oligonucleotide for detection of SNP TSC0020930
rcataaccatcaa

SEQ ID NO: 83015 - DNA, 13 bp, Artificial Sequence
  Oligonucleotide for detection of SNP TSC0020930
ttgatgtttatgy

SEQ ID NO: 83016 - DNA, 13 bp, Artificial Sequence
  Oligonucleotide for detection of SNP TSC0020930
rcataaacatcaa

SEQ ID NO: 83017 - DNA, 13 bp, Artificial Sequence
  Oligonucleotide for detection of SNP TSC0020931
ttttagtgtgttt

SEQ ID NO: 83018 - DNA, 13 bp, Artificial Sequence
  Oligonucleotide for detection of SNP TSC0020931
aaacacactaaaa

SEQ ID NO: 83019 - DNA, 13 bp, Artificial Sequence
  Oligonucleotide for detection of SNP TSC0020931
ttttagcgtgttt

SEQ ID NO: 83020 - DNA, 13 bp, Artificial Sequence
  Oligonucleotide for detection of SNP TSC0020931
aaacacgctaaaa

SEQ ID NO: 83021 - DNA, 13 bp, Artificial Sequence
  Oligonucleotide for detection of SNP TSC0020931
aaatatgttgagg

SEQ ID NO: 83022 - DNA, 13 bp, Artificial Sequence
  Oligonucleotide for detection of SNP TSC0020931
cctcaacatattt

SEQ ID NO: 83023 - DNA, 13 bp, Artificial Sequence
  Oligonucleotide for detection of SNP TSC0020931
aaatatattgagg

SEQ ID NO: 83024 - DNA, 13 bp, Artificial Sequence
  Oligonucleotide for detection of SNP TSC0020931
cctcaatatattt

SEQ ID NO: 83025 - DNA, 13 bp, Artificial Sequence
  Oligonucleotide for detection of SNP TSC0020931
aaatacgttgagg

SEQ ID NO: 83026 - DNA, 13 bp, Artificial Sequence
  Oligonucleotide for detection of SNP TSC0020931
cctcaacgtattt

SEQ ID NO: 83027 - DNA, 13 bp, Artificial Sequence
  Oligonucleotide for detection of SNP TSC0020934
ttgttgaggtttt

SEQ ID NO: 83028 - DNA, 13 bp, Artificial Sequence
  Oligonucleotide for detection of SNP TSC0020934
aaaacctcaacaa

SEQ ID NO: 83029 - DNA, 13 bp, Artificial Sequence
  Oligonucleotide for detection of SNP TSC0020935
tattttattttta

SEQ ID NO: 83030 - DNA, 13 bp, Artificial Sequence
  Oligonucleotide for detection of SNP TSC0020935
taaaaataaaata

SEQ ID NO: 83031 - DNA, 13 bp, Artificial Sequence
  Oligonucleotide for detection of SNP TSC0020935
tgggggtggggtg

SEQ ID NO: 83032 - DNA, 13 bp, Artificial Sequence
  Oligonucleotide for detection of SNP TSC0020935
caccccaccccca

SEQ ID NO: 83033 - DNA, 13 bp, Artificial Sequence
  Oligonucleotide for detection of SNP TSC0020935
tggggggggggtg

SEQ ID NO: 83034 - DNA, 13 bp, Artificial Sequence
  Oligonucleotide for detection of SNP TSC0020935
cacccccccccca

SEQ ID NO: 83035 - DNA, 13 bp, Artificial Sequence
  Oligonucleotide for detection of SNP TSC0020936
tttggtgttaatt

SEQ ID NO: 83036 - DNA, 13 bp, Artificial Sequence
  Oligonucleotide for detection of SNP TSC0020936
aattaacaccaaa

SEQ ID NO: 83037 - DNA, 13 bp, Artificial Sequence
  Oligonucleotide for detection of SNP TSC0020936
tttggtattaatt

SEQ ID NO: 83038 - DNA, 13 bp, Artificial Sequence
  Oligonucleotide for detection of SNP TSC0020936
aattaataccaaa

SEQ ID NO: 83039 - DNA, 13 bp, Artificial Sequence
  Oligonucleotide for detection of SNP TSC0020937
gtatggtggtatg

SEQ ID NO: 83040 - DNA, 13 bp, Artificial Sequence
  Oligonucleotide for detection of SNP TSC0020937
cataccaccatac

SEQ ID NO: 83041 - DNA, 13 bp, Artificial Sequence
  Oligonucleotide for detection of SNP TSC0020937
gtatggcggtatg

SEQ ID NO: 83042 - DNA, 13 bp, Artificial Sequence
  Oligonucleotide for detection of SNP TSC0020937
cataccgccatac

SEQ ID NO: 83043 - DNA, 13 bp, Artificial Sequence
  Oligonucleotide for detection of SNP TSC0020937
gtatggtggtacg

SEQ ID NO: 83044 - DNA, 13 bp, Artificial Sequence
  Oligonucleotide for detection of SNP TSC0020937
cgtaccaccatac

SEQ ID NO: 83045 - DNA, 13 bp, Artificial Sequence
  Oligonucleotide for detection of SNP TSC0020937
gtatggcggtacg

SEQ ID NO: 83046 - DNA, 13 bp, Artificial Sequence
  Oligonucleotide for detection of SNP TSC0020937
cgtaccgccatac

SEQ ID NO: 83047 - DNA, 13 bp, Artificial Sequence
  Oligonucleotide for detection of SNP TSC0020937
tgtgttgttatgy

SEQ ID NO: 83048 - DNA, 13 bp, Artificial Sequence
  Oligonucleotide for detection of SNP TSC0020937
rcataacaacaca

SEQ ID NO: 83049 - DNA, 13 bp, Artificial Sequence
  Oligonucleotide for detection of SNP TSC0020937
tgtgttattatgy

SEQ ID NO: 83050 - DNA, 13 bp, Artificial Sequence
  Oligonucleotide for detection of SNP TSC0020937
rcataataacaca

SEQ ID NO: 83051 - DNA, 13 bp, Artificial Sequence
  Oligonucleotide for detection of SNP TSC0020937
cgtgttgttatgy

SEQ ID NO: 83052 - DNA, 13 bp, Artificial Sequence
  Oligonucleotide for detection of SNP TSC0020937
rcataacaacacg

SEQ ID NO: 83053 - DNA, 13 bp, Artificial Sequence
  Oligonucleotide for detection of SNP TSC0020937
cgtgttattatgy

SEQ ID NO: 83054 - DNA, 13 bp, Artificial Sequence
  Oligonucleotide for detection of SNP TSC0020937
rcataataacacg

SEQ ID NO: 83055 - DNA, 13 bp, Artificial Sequence
  Oligonucleotide for detection of SNP TSC0020937
tgtgtcgttatgy

SEQ ID NO: 83056 - DNA, 13 bp, Artificial Sequence
  Oligonucleotide for detection of SNP TSC0020937
rcataacgacaca

SEQ ID NO: 83057 - DNA, 13 bp, Artificial Sequence
  Oligonucleotide for detection of SNP TSC0020937
cgtgtcgttatgy

SEQ ID NO: 83058 - DNA, 13 bp, Artificial Sequence
  Oligonucleotide for detection of SNP TSC0020937
rcataacgacacg

SEQ ID NO: 83059 - DNA, 13 bp, Artificial Sequence
  Oligonucleotide for detection of SNP TSC0020939
ggtattggagtgy

SEQ ID NO: 83060 - DNA, 13 bp, Artificial Sequence
  Oligonucleotide for detection of SNP TSC0020939
rcactccaatacc

SEQ ID NO: 83061 - DNA, 13 bp, Artificial Sequence
  Oligonucleotide for detection of SNP TSC0020939
ggtattagagtgy

SEQ ID NO: 83062 - DNA, 13 bp, Artificial Sequence
  Oligonucleotide for detection of SNP TSC0020939
rcactctaatacc

SEQ ID NO: 83063 - DNA, 13 bp, Artificial Sequence
  Oligonucleotide for detection of SNP TSC0020940
atgtaatggtttt

SEQ ID NO: 83064 - DNA, 13 bp, Artificial Sequence
  Oligonucleotide for detection of SNP TSC0020940
aaaaccattacat

SEQ ID NO: 83065 - DNA, 13 bp, Artificial Sequence
  Oligonucleotide for detection of SNP TSC0020940
atgtaacggtttt

SEQ ID NO: 83066 - DNA, 13 bp, Artificial Sequence
  Oligonucleotide for detection of SNP TSC0020940
aaaaccgttacat

SEQ ID NO: 83067 - DNA, 13 bp, Artificial Sequence
  Oligonucleotide for detection of SNP TSC0020940
aaaattgttgtat

SEQ ID NO: 83068 - DNA, 13 bp, Artificial Sequence
  Oligonucleotide for detection of SNP TSC0020940
atacaacaatttt

SEQ ID NO: 83069 - DNA, 13 bp, Artificial Sequence
  Oligonucleotide for detection of SNP TSC0020940
aaaattattgtat

SEQ ID NO: 83070 - DNA, 13 bp, Artificial Sequence
  Oligonucleotide for detection of SNP TSC0020940
atacaataatttt

SEQ ID NO: 83071 - DNA, 13 bp, Artificial Sequence
  Oligonucleotide for detection of SNP TSC0020940
aaaatcgttgtat

SEQ ID NO: 83072 - DNA, 13 bp, Artificial Sequence
  Oligonucleotide for detection of SNP TSC0020940
atacaacgatttt

SEQ ID NO: 83073 - DNA, 13 bp, Artificial Sequence
  Oligonucleotide for detection of SNP TSC0020945
ttttttattataa

SEQ ID NO: 83074 - DNA, 13 bp, Artificial Sequence
  Oligonucleotide for detection of SNP TSC0020945
ttataataaaaaa

SEQ ID NO: 83075 - DNA, 13 bp, Artificial Sequence
  Oligonucleotide for detection of SNP TSC0020945
ttatgataaagga

SEQ ID NO: 83076 - DNA, 13 bp, Artificial Sequence
  Oligonucleotide for detection of SNP TSC0020945
tcctttatcataa

SEQ ID NO: 83077 - DNA, 13 bp, Artificial Sequence
  Oligonucleotide for detection of SNP TSC0020945
ttatgagaaagga

SEQ ID NO: 83078 - DNA, 13 bp, Artificial Sequence
  Oligonucleotide for detection of SNP TSC0020945
tcctttctcataa

SEQ ID NO: 83079 - DNA, 13 bp, Artificial Sequence
  Oligonucleotide for detection of SNP TSC0020948
tgtatagatgggg

SEQ ID NO: 83080 - DNA, 13 bp, Artificial Sequence
  Oligonucleotide for detection of SNP TSC0020948
ccccatctataca

SEQ ID NO: 83081 - DNA, 13 bp, Artificial Sequence
  Oligonucleotide for detection of SNP TSC0020948
tgtataaatgggg

SEQ ID NO: 83082 - DNA, 13 bp, Artificial Sequence
  Oligonucleotide for detection of SNP TSC0020948
ccccatttataca

SEQ ID NO: 83083 - DNA, 13 bp, Artificial Sequence
  Oligonucleotide for detection of SNP TSC0020951
ggtgttagtttgt

SEQ ID NO: 83084 - DNA, 13 bp, Artificial Sequence
  Oligonucleotide for detection of SNP TSC0020951
acaaactaacacc

SEQ ID NO: 83085 - DNA, 13 bp, Artificial Sequence
  Oligonucleotide for detection of SNP TSC0020951
ggtgttggtttgt

SEQ ID NO: 83086 - DNA, 13 bp, Artificial Sequence
  Oligonucleotide for detection of SNP TSC0020951
acaaaccaacacc

SEQ ID NO: 83087 - DNA, 13 bp, Artificial Sequence
  Oligonucleotide for detection of SNP TSC0020951
ggtgttagttcgt

SEQ ID NO: 83088 - DNA, 13 bp, Artificial Sequence
  Oligonucleotide for detection of SNP TSC0020951
acgaactaacacc

SEQ ID NO: 83089 - DNA, 13 bp, Artificial Sequence
  Oligonucleotide for detection of SNP TSC0020951
ggtgttggttcgt

SEQ ID NO: 83090 - DNA, 13 bp, Artificial Sequence
  Oligonucleotide for detection of SNP TSC0020951
acgaaccaacacc

SEQ ID NO: 83091 - DNA, 13 bp, Artificial Sequence
  Oligonucleotide for detection of SNP TSC0020952
tttgtttagttty

SEQ ID NO: 83092 - DNA, 13 bp, Artificial Sequence
  Oligonucleotide for detection of SNP TSC0020952
raaactaaacaaa

SEQ ID NO: 83093 - DNA, 13 bp, Artificial Sequence
  Oligonucleotide for detection of SNP TSC0020952
tttgttgagttty

SEQ ID NO: 83094 - DNA, 13 bp, Artificial Sequence
  Oligonucleotide for detection of SNP TSC0020952
raaactcaacaaa

SEQ ID NO: 83095 - DNA, 13 bp, Artificial Sequence
  Oligonucleotide for detection of SNP TSC0020952
ttcgtttagttty

SEQ ID NO: 83096 - DNA, 13 bp, Artificial Sequence
  Oligonucleotide for detection of SNP TSC0020952
raaactaaacgaa

SEQ ID NO: 83097 - DNA, 13 bp, Artificial Sequence
  Oligonucleotide for detection of SNP TSC0020952
ttcgttgagttty

SEQ ID NO: 83098 - DNA, 13 bp, Artificial Sequence
  Oligonucleotide for detection of SNP TSC0020952
raaactcaacgaa

SEQ ID NO: 83099 - DNA, 13 bp, Artificial Sequence
  Oligonucleotide for detection of SNP TSC0020952
tttgtcgagttty

SEQ ID NO: 83100 - DNA, 13 bp, Artificial Sequence
  Oligonucleotide for detection of SNP TSC0020952
raaactcgacaaa

SEQ ID NO: 83101 - DNA, 13 bp, Artificial Sequence
  Oligonucleotide for detection of SNP TSC0020952
ttcgtcgagttty

SEQ ID NO: 83102 - DNA, 13 bp, Artificial Sequence
  Oligonucleotide for detection of SNP TSC0020952
raaactcgacgaa

SEQ ID NO: 83103 - DNA, 13 bp, Artificial Sequence
  Oligonucleotide for detection of SNP TSC0020952
gaggttgggtggg

SEQ ID NO: 83104 - DNA, 13 bp, Artificial Sequence
  Oligonucleotide for detection of SNP TSC0020952
cccacccaacctc

SEQ ID NO: 83105 - DNA, 13 bp, Artificial Sequence
  Oligonucleotide for detection of SNP TSC0020952
gaggtttggtggg

SEQ ID NO: 83106 - DNA, 13 bp, Artificial Sequence
  Oligonucleotide for detection of SNP TSC0020952
cccaccaaacctc

SEQ ID NO: 83107 - DNA, 13 bp, Artificial Sequence
  Oligonucleotide for detection of SNP TSC0020952
gaggttgggcggg

SEQ ID NO: 83108 - DNA, 13 bp, Artificial Sequence
  Oligonucleotide for detection of SNP TSC0020952
cccgcccaacctc

SEQ ID NO: 83109 - DNA, 13 bp, Artificial Sequence
  Oligonucleotide for detection of SNP TSC0020952
gaggttcggtggg

SEQ ID NO: 83110 - DNA, 13 bp, Artificial Sequence
  Oligonucleotide for detection of SNP TSC0020952
cccaccgaacctc

SEQ ID NO: 83111 - DNA, 13 bp, Artificial Sequence
  Oligonucleotide for detection of SNP TSC0020952
gaggtttggcggg

SEQ ID NO: 83112 - DNA, 13 bp, Artificial Sequence
  Oligonucleotide for detection of SNP TSC0020952
cccgccaaacctc

SEQ ID NO: 83113 - DNA, 13 bp, Artificial Sequence
  Oligonucleotide for detection of SNP TSC0020952
gaggttcggcggg

SEQ ID NO: 83114 - DNA, 13 bp, Artificial Sequence
  Oligonucleotide for detection of SNP TSC0020952
cccgccgaacctc

SEQ ID NO: 83115 - DNA, 13 bp, Artificial Sequence
  Oligonucleotide for detection of SNP TSC0020962
aaatgagagaaaa

SEQ ID NO: 83116 - DNA, 13 bp, Artificial Sequence
  Oligonucleotide for detection of SNP TSC0020962
ttttctctcattt

SEQ ID NO: 83117 - DNA, 13 bp, Artificial Sequence
  Oligonucleotide for detection of SNP TSC0020962
aaatgaaagaaaa

SEQ ID NO: 83118 - DNA, 13 bp, Artificial Sequence
  Oligonucleotide for detection of SNP TSC0020962
ttttctttcattt

SEQ ID NO: 83119 - DNA, 13 bp, Artificial Sequence
  Oligonucleotide for detection of SNP TSC0020963
aaaaatgagagaa

SEQ ID NO: 83120 - DNA, 13 bp, Artificial Sequence
  Oligonucleotide for detection of SNP TSC0020963
ttctctcattttt

SEQ ID NO: 83121 - DNA, 13 bp, Artificial Sequence
  Oligonucleotide for detection of SNP TSC0020963
aaaaataagagaa

SEQ ID NO: 83122 - DNA, 13 bp, Artificial Sequence
  Oligonucleotide for detection of SNP TSC0020963
ttctcttattttt

SEQ ID NO: 83123 - DNA, 13 bp, Artificial Sequence
  Oligonucleotide for detection of SNP TSC0020964
gtaatatgattta

SEQ ID NO: 83124 - DNA, 13 bp, Artificial Sequence
  Oligonucleotide for detection of SNP TSC0020964
taaatcatattac

SEQ ID NO: 83125 - DNA, 13 bp, Artificial Sequence
  Oligonucleotide for detection of SNP TSC0020964
gtaatacgattta

SEQ ID NO: 83126 - DNA, 13 bp, Artificial Sequence
  Oligonucleotide for detection of SNP TSC0020964
taaatcgtattac

SEQ ID NO: 83127 - DNA, 13 bp, Artificial Sequence
  Oligonucleotide for detection of SNP TSC0020964
tgaattgtattgy

SEQ ID NO: 83128 - DNA, 13 bp, Artificial Sequence
  Oligonucleotide for detection of SNP TSC0020964
rcaatacaattca

SEQ ID NO: 83129 - DNA, 13 bp, Artificial Sequence
  Oligonucleotide for detection of SNP TSC0020964
tgaattatattgy

SEQ ID NO: 83130 - DNA, 13 bp, Artificial Sequence
  Oligonucleotide for detection of SNP TSC0020964
rcaatataattca

SEQ ID NO: 83131 - DNA, 13 bp, Artificial Sequence
  Oligonucleotide for detection of SNP TSC0020964
tgaatcgtattgy

SEQ ID NO: 83132 - DNA, 13 bp, Artificial Sequence
  Oligonucleotide for detection of SNP TSC0020964
rcaatacgattca

SEQ ID NO: 83133 - DNA, 13 bp, Artificial Sequence
  Oligonucleotide for detection of SNP TSC0020966
aggaaagttagga

SEQ ID NO: 83134 - DNA, 13 bp, Artificial Sequence
  Oligonucleotide for detection of SNP TSC0020966
tcctaactttcct

SEQ ID NO: 83135 - DNA, 13 bp, Artificial Sequence
  Oligonucleotide for detection of SNP TSC0020966
aggaaaattagga

SEQ ID NO: 83136 - DNA, 13 bp, Artificial Sequence
  Oligonucleotide for detection of SNP TSC0020966
tcctaattttcct

SEQ ID NO: 83137 - DNA, 13 bp, Artificial Sequence
  Oligonucleotide for detection of SNP TSC0020967
ggaattgtttaty

SEQ ID NO: 83138 - DNA, 13 bp, Artificial Sequence
  Oligonucleotide for detection of SNP TSC0020967
rataaacaattcc

SEQ ID NO: 83139 - DNA, 13 bp, Artificial Sequence
  Oligonucleotide for detection of SNP TSC0020967
ggaattttttaty

SEQ ID NO: 83140 - DNA, 13 bp, Artificial Sequence
  Oligonucleotide for detection of SNP TSC0020967
rataaaaaattcc

SEQ ID NO: 83141 - DNA, 13 bp, Artificial Sequence
  Oligonucleotide for detection of SNP TSC0020967
ggaatcgtttaty

SEQ ID NO: 83142 - DNA, 13 bp, Artificial Sequence
  Oligonucleotide for detection of SNP TSC0020967
rataaacgattcc

SEQ ID NO: 83143 - DNA, 13 bp, Artificial Sequence
  Oligonucleotide for detection of SNP TSC0020967
gataaaaggttty

SEQ ID NO: 83144 - DNA, 13 bp, Artificial Sequence
  Oligonucleotide for detection of SNP TSC0020967
raaaccttttatc

SEQ ID NO: 83145 - DNA, 13 bp, Artificial Sequence
  Oligonucleotide for detection of SNP TSC0020968
tgttatatattat

SEQ ID NO: 83146 - DNA, 13 bp, Artificial Sequence
  Oligonucleotide for detection of SNP TSC0020968
ataatatataaca

SEQ ID NO: 83147 - DNA, 13 bp, Artificial Sequence
  Oligonucleotide for detection of SNP TSC0020968
tgttatgtattat

SEQ ID NO: 83148 - DNA, 13 bp, Artificial Sequence
  Oligonucleotide for detection of SNP TSC0020968
ataatacataaca

SEQ ID NO: 83149 - DNA, 13 bp, Artificial Sequence
  Oligonucleotide for detection of SNP TSC0020969
agtgtttgttttg

SEQ ID NO: 83150 - DNA, 13 bp, Artificial Sequence
  Oligonucleotide for detection of SNP TSC0020969
caaaacaaacact

SEQ ID NO: 83151 - DNA, 13 bp, Artificial Sequence
  Oligonucleotide for detection of SNP TSC0020969
agtgttcgttttg

SEQ ID NO: 83152 - DNA, 13 bp, Artificial Sequence
  Oligonucleotide for detection of SNP TSC0020969
caaaacgaacact

SEQ ID NO: 83153 - DNA, 13 bp, Artificial Sequence
  Oligonucleotide for detection of SNP TSC0020969
tagggtggatatt

SEQ ID NO: 83154 - DNA, 13 bp, Artificial Sequence
  Oligonucleotide for detection of SNP TSC0020969
aatatccacccta

SEQ ID NO: 83155 - DNA, 13 bp, Artificial Sequence
  Oligonucleotide for detection of SNP TSC0020969
tagggtagatatt

SEQ ID NO: 83156 - DNA, 13 bp, Artificial Sequence
  Oligonucleotide for detection of SNP TSC0020969
aatatctacccta

SEQ ID NO: 83157 - DNA, 13 bp, Artificial Sequence
  Oligonucleotide for detection of SNP TSC0020969
tagggcggatatt

SEQ ID NO: 83158 - DNA, 13 bp, Artificial Sequence
  Oligonucleotide for detection of SNP TSC0020969
aatatccgcccta

SEQ ID NO: 83159 - DNA, 13 bp, Artificial Sequence
  Oligonucleotide for detection of SNP TSC0020970
ggtgtgtggatgt

SEQ ID NO: 83160 - DNA, 13 bp, Artificial Sequence
  Oligonucleotide for detection of SNP TSC0020970
acatccacacacc

SEQ ID NO: 83161 - DNA, 13 bp, Artificial Sequence
  Oligonucleotide for detection of SNP TSC0020970
ggtgcgtggatgt

SEQ ID NO: 83162 - DNA, 13 bp, Artificial Sequence
  Oligonucleotide for detection of SNP TSC0020970
acatccacgcacc

SEQ ID NO: 83163 - DNA, 13 bp, Artificial Sequence
  Oligonucleotide for detection of SNP TSC0020970
ggtgtgcggatgt

SEQ ID NO: 83164 - DNA, 13 bp, Artificial Sequence
  Oligonucleotide for detection of SNP TSC0020970
acatccgcacacc

SEQ ID NO: 83165 - DNA, 13 bp, Artificial Sequence
  Oligonucleotide for detection of SNP TSC0020970
ggtgtgtggacgt

SEQ ID NO: 83166 - DNA, 13 bp, Artificial Sequence
  Oligonucleotide for detection of SNP TSC0020970
acgtccacacacc

SEQ ID NO: 83167 - DNA, 13 bp, Artificial Sequence
  Oligonucleotide for detection of SNP TSC0020970
ggtgcgtggacgt

SEQ ID NO: 83168 - DNA, 13 bp, Artificial Sequence
  Oligonucleotide for detection of SNP TSC0020970
acgtccacgcacc

SEQ ID NO: 83169 - DNA, 13 bp, Artificial Sequence
  Oligonucleotide for detection of SNP TSC0020970
ggtgcgcggatgt

SEQ ID NO: 83170 - DNA, 13 bp, Artificial Sequence
  Oligonucleotide for detection of SNP TSC0020970
acatccgcgcacc

SEQ ID NO: 83171 - DNA, 13 bp, Artificial Sequence
  Oligonucleotide for detection of SNP TSC0020970
ggtgtgcggacgt

SEQ ID NO: 83172 - DNA, 13 bp, Artificial Sequence
  Oligonucleotide for detection of SNP TSC0020970
acgtccgcacacc

SEQ ID NO: 83173 - DNA, 13 bp, Artificial Sequence
  Oligonucleotide for detection of SNP TSC0020970
ggtgcgcggacgt

SEQ ID NO: 83174 - DNA, 13 bp, Artificial Sequence
  Oligonucleotide for detection of SNP TSC0020970
acgtccgcgcacc

SEQ ID NO: 83175 - DNA, 13 bp, Artificial Sequence
  Oligonucleotide for detection of SNP TSC0020970
atgtttgtgtaty

SEQ ID NO: 83176 - DNA, 13 bp, Artificial Sequence
  Oligonucleotide for detection of SNP TSC0020970
ratacacaaacat

SEQ ID NO: 83177 - DNA, 13 bp, Artificial Sequence
  Oligonucleotide for detection of SNP TSC0020970
atgtttatgtaty

SEQ ID NO: 83178 - DNA, 13 bp, Artificial Sequence
  Oligonucleotide for detection of SNP TSC0020970
ratacataaacat

SEQ ID NO: 83179 - DNA, 13 bp, Artificial Sequence
  Oligonucleotide for detection of SNP TSC0020970
acgtttgtgtaty

SEQ ID NO: 83180 - DNA, 13 bp, Artificial Sequence
  Oligonucleotide for detection of SNP TSC0020970
ratacacaaacgt

SEQ ID NO: 83181 - DNA, 13 bp, Artificial Sequence
  Oligonucleotide for detection of SNP TSC0020970
acgtttatgtaty

SEQ ID NO: 83182 - DNA, 13 bp, Artificial Sequence
  Oligonucleotide for detection of SNP TSC0020970
ratacataaacgt

SEQ ID NO: 83183 - DNA, 13 bp, Artificial Sequence
  Oligonucleotide for detection of SNP TSC0020970
atgttcgtgtaty

SEQ ID NO: 83184 - DNA, 13 bp, Artificial Sequence
  Oligonucleotide for detection of SNP TSC0020970
ratacacgaacat

SEQ ID NO: 83185 - DNA, 13 bp, Artificial Sequence
  Oligonucleotide for detection of SNP TSC0020970
atgtttacgtaty

SEQ ID NO: 83186 - DNA, 13 bp, Artificial Sequence
  Oligonucleotide for detection of SNP TSC0020970
ratacgtaaacat

SEQ ID NO: 83187 - DNA, 13 bp, Artificial Sequence
  Oligonucleotide for detection of SNP TSC0020970
atgtttgcgtaty

SEQ ID NO: 83188 - DNA, 13 bp, Artificial Sequence
  Oligonucleotide for detection of SNP TSC0020970
ratacgcaaacat

SEQ ID NO: 83189 - DNA, 13 bp, Artificial Sequence
  Oligonucleotide for detection of SNP TSC0020970
acgtttacgtaty

SEQ ID NO: 83190 - DNA, 13 bp, Artificial Sequence
  Oligonucleotide for detection of SNP TSC0020970
ratacgtaaacgt

SEQ ID NO: 83191 - DNA, 13 bp, Artificial Sequence
  Oligonucleotide for detection of SNP TSC0020970
acgttcgtgtaty

SEQ ID NO: 83192 - DNA, 13 bp, Artificial Sequence
  Oligonucleotide for detection of SNP TSC0020970
ratacacgaacgt

SEQ ID NO: 83193 - DNA, 13 bp, Artificial Sequence
  Oligonucleotide for detection of SNP TSC0020970
acgtttgcgtaty

SEQ ID NO: 83194 - DNA, 13 bp, Artificial Sequence
  Oligonucleotide for detection of SNP TSC0020970
ratacgcaaacgt

SEQ ID NO: 83195 - DNA, 13 bp, Artificial Sequence
  Oligonucleotide for detection of SNP TSC0020970
atgttcgcgtaty

SEQ ID NO: 83196 - DNA, 13 bp, Artificial Sequence
  Oligonucleotide for detection of SNP TSC0020970
ratacgcgaacat

SEQ ID NO: 83197 - DNA, 13 bp, Artificial Sequence
  Oligonucleotide for detection of SNP TSC0020970
acgttcgcgtaty

SEQ ID NO: 83198 - DNA, 13 bp, Artificial Sequence
  Oligonucleotide for detection of SNP TSC0020970
ratacgcgaacgt

SEQ ID NO: 83199 - DNA, 13 bp, Artificial Sequence
  Oligonucleotide for detection of SNP TSC0020971
atggattgtggag

SEQ ID NO: 83200 - DNA, 13 bp, Artificial Sequence
  Oligonucleotide for detection of SNP TSC0020971
ctccacaatccat

SEQ ID NO: 83201 - DNA, 13 bp, Artificial Sequence
  Oligonucleotide for detection of SNP TSC0020971
acggattgtggag

SEQ ID NO: 83202 - DNA, 13 bp, Artificial Sequence
  Oligonucleotide for detection of SNP TSC0020971
ctccacaatccgt

SEQ ID NO: 83203 - DNA, 13 bp, Artificial Sequence
  Oligonucleotide for detection of SNP TSC0020971
atggatcgtggag

SEQ ID NO: 83204 - DNA, 13 bp, Artificial Sequence
  Oligonucleotide for detection of SNP TSC0020971
ctccacgatccat

SEQ ID NO: 83205 - DNA, 13 bp, Artificial Sequence
  Oligonucleotide for detection of SNP TSC0020971
acggatcgtggag

SEQ ID NO: 83206 - DNA, 13 bp, Artificial Sequence
  Oligonucleotide for detection of SNP TSC0020971
ctccacgatccgt

SEQ ID NO: 83207 - DNA, 13 bp, Artificial Sequence
  Oligonucleotide for detection of SNP TSC0020971
ttttatggtttgt

SEQ ID NO: 83208 - DNA, 13 bp, Artificial Sequence
  Oligonucleotide for detection of SNP TSC0020971
acaaaccataaaa

SEQ ID NO: 83209 - DNA, 13 bp, Artificial Sequence
  Oligonucleotide for detection of SNP TSC0020971
ttttatagtttgt

SEQ ID NO: 83210 - DNA, 13 bp, Artificial Sequence
  Oligonucleotide for detection of SNP TSC0020971
acaaactataaaa

SEQ ID NO: 83211 - DNA, 13 bp, Artificial Sequence
  Oligonucleotide for detection of SNP TSC0020971
ttttacggtttgt

SEQ ID NO: 83212 - DNA, 13 bp, Artificial Sequence
  Oligonucleotide for detection of SNP TSC0020971
acaaaccgtaaaa

SEQ ID NO: 83213 - DNA, 13 bp, Artificial Sequence
  Oligonucleotide for detection of SNP TSC0020971
ttttatagttcgt

SEQ ID NO: 83214 - DNA, 13 bp, Artificial Sequence
  Oligonucleotide for detection of SNP TSC0020971
acgaactataaaa

SEQ ID NO: 83215 - DNA, 13 bp, Artificial Sequence
  Oligonucleotide for detection of SNP TSC0020971
ttttatggttcgt

SEQ ID NO: 83216 - DNA, 13 bp, Artificial Sequence
  Oligonucleotide for detection of SNP TSC0020971
acgaaccataaaa

SEQ ID NO: 83217 - DNA, 13 bp, Artificial Sequence
  Oligonucleotide for detection of SNP TSC0020971
ttttacggttcgt

SEQ ID NO: 83218 - DNA, 13 bp, Artificial Sequence
  Oligonucleotide for detection of SNP TSC0020971
acgaaccgtaaaa

SEQ ID NO: 83219 - DNA, 13 bp, Artificial Sequence
  Oligonucleotide for detection of SNP TSC0020975
tatttttgatagy

SEQ ID NO: 83220 - DNA, 13 bp, Artificial Sequence
  Oligonucleotide for detection of SNP TSC0020975
rctatcaaaaata

SEQ ID NO: 83221 - DNA, 13 bp, Artificial Sequence
  Oligonucleotide for detection of SNP TSC0020975
tattttcgatagy

SEQ ID NO: 83222 - DNA, 13 bp, Artificial Sequence
  Oligonucleotide for detection of SNP TSC0020975
rctatcgaaaata

SEQ ID NO: 83223 - DNA, 13 bp, Artificial Sequence
  Oligonucleotide for detection of SNP TSC0020975
gttgttgggagtg

SEQ ID NO: 83224 - DNA, 13 bp, Artificial Sequence
  Oligonucleotide for detection of SNP TSC0020975
cactcccaacaac

SEQ ID NO: 83225 - DNA, 13 bp, Artificial Sequence
  Oligonucleotide for detection of SNP TSC0020975
gttgttaggagtg

SEQ ID NO: 83226 - DNA, 13 bp, Artificial Sequence
  Oligonucleotide for detection of SNP TSC0020975
cactcctaacaac

SEQ ID NO: 83227 - DNA, 13 bp, Artificial Sequence
  Oligonucleotide for detection of SNP TSC0020975
gttgtcgggagtg

SEQ ID NO: 83228 - DNA, 13 bp, Artificial Sequence
  Oligonucleotide for detection of SNP TSC0020975
cactcccgacaac

SEQ ID NO: 83229 - DNA, 13 bp, Artificial Sequence
  Oligonucleotide for detection of SNP TSC0020976
tttggggtttaaa

SEQ ID NO: 83230 - DNA, 13 bp, Artificial Sequence
  Oligonucleotide for detection of SNP TSC0020976
tttaaaccccaaa

SEQ ID NO: 83231 - DNA, 13 bp, Artificial Sequence
  Oligonucleotide for detection of SNP TSC0020976
tttgggttttaaa

SEQ ID NO: 83232 - DNA, 13 bp, Artificial Sequence
  Oligonucleotide for detection of SNP TSC0020976
tttaaaacccaaa

SEQ ID NO: 83233 - DNA, 13 bp, Artificial Sequence
  Oligonucleotide for detection of SNP TSC0020976
tttaagttttaag

SEQ ID NO: 83234 - DNA, 13 bp, Artificial Sequence
  Oligonucleotide for detection of SNP TSC0020976
cttaaaacttaaa

SEQ ID NO: 83235 - DNA, 13 bp, Artificial Sequence
  Oligonucleotide for detection of SNP TSC0020976
tttaagatttaag

SEQ ID NO: 83236 - DNA, 13 bp, Artificial Sequence
  Oligonucleotide for detection of SNP TSC0020976
cttaaatcttaaa

SEQ ID NO: 83237 - DNA, 13 bp, Artificial Sequence
  Oligonucleotide for detection of SNP TSC0020977
ttaaaggtttggy

SEQ ID NO: 83238 - DNA, 13 bp, Artificial Sequence
  Oligonucleotide for detection of SNP TSC0020977
rccaaacctttaa

SEQ ID NO: 83239 - DNA, 13 bp, Artificial Sequence
  Oligonucleotide for detection of SNP TSC0020977
ttaaagttttggy

SEQ ID NO: 83240 - DNA, 13 bp, Artificial Sequence
  Oligonucleotide for detection of SNP TSC0020977
rccaaaactttaa

SEQ ID NO: 83241 - DNA, 13 bp, Artificial Sequence
  Oligonucleotide for detection of SNP TSC0020977
gttaagtttttaa

SEQ ID NO: 83242 - DNA, 13 bp, Artificial Sequence
  Oligonucleotide for detection of SNP TSC0020977
ttaaaaacttaac

SEQ ID NO: 83243 - DNA, 13 bp, Artificial Sequence
  Oligonucleotide for detection of SNP TSC0020977
gttaagattttaa

SEQ ID NO: 83244 - DNA, 13 bp, Artificial Sequence
  Oligonucleotide for detection of SNP TSC0020977
ttaaaatcttaac

SEQ ID NO: 83245 - DNA, 13 bp, Artificial Sequence
  Oligonucleotide for detection of SNP TSC0020979
attttagagataa

SEQ ID NO: 83246 - DNA, 13 bp, Artificial Sequence
  Oligonucleotide for detection of SNP TSC0020979
ttatctctaaaat

SEQ ID NO: 83247 - DNA, 13 bp, Artificial Sequence
  Oligonucleotide for detection of SNP TSC0020979
attttaaagataa

SEQ ID NO: 83248 - DNA, 13 bp, Artificial Sequence
  Oligonucleotide for detection of SNP TSC0020979
ttatctttaaaat

SEQ ID NO: 83249 - DNA, 13 bp, Artificial Sequence
  Oligonucleotide for detection of SNP TSC0020981
tttttgtgaagtt

SEQ ID NO: 83250 - DNA, 13 bp, Artificial Sequence
  Oligonucleotide for detection of SNP TSC0020981
aacttcacaaaaa

SEQ ID NO: 83251 - DNA, 13 bp, Artificial Sequence
  Oligonucleotide for detection of SNP TSC0020981
tttttgcgaagtt

SEQ ID NO: 83252 - DNA, 13 bp, Artificial Sequence
  Oligonucleotide for detection of SNP TSC0020981
aacttcgcaaaaa

SEQ ID NO: 83253 - DNA, 13 bp, Artificial Sequence
  Oligonucleotide for detection of SNP TSC0020981
aattttgtaaagg

SEQ ID NO: 83254 - DNA, 13 bp, Artificial Sequence
  Oligonucleotide for detection of SNP TSC0020981
cctttacaaaatt

SEQ ID NO: 83255 - DNA, 13 bp, Artificial Sequence
  Oligonucleotide for detection of SNP TSC0020981
aattttataaagg

SEQ ID NO: 83256 - DNA, 13 bp, Artificial Sequence
  Oligonucleotide for detection of SNP TSC0020981
cctttataaaatt

SEQ ID NO: 83257 - DNA, 13 bp, Artificial Sequence
  Oligonucleotide for detection of SNP TSC0020981
aatttcgtaaagg

SEQ ID NO: 83258 - DNA, 13 bp, Artificial Sequence
  Oligonucleotide for detection of SNP TSC0020981
cctttacgaaatt

SEQ ID NO: 83259 - DNA, 13 bp, Artificial Sequence
  Oligonucleotide for detection of SNP TSC0020982
tttagaattgtay

SEQ ID NO: 83260 - DNA, 13 bp, Artificial Sequence
  Oligonucleotide for detection of SNP TSC0020982
rtacaattctaaa

SEQ ID NO: 83261 - DNA, 13 bp, Artificial Sequence
  Oligonucleotide for detection of SNP TSC0020982
tttagagttgtay

SEQ ID NO: 83262 - DNA, 13 bp, Artificial Sequence
  Oligonucleotide for detection of SNP TSC0020982
rtacaactctaaa

SEQ ID NO: 83263 - DNA, 13 bp, Artificial Sequence
  Oligonucleotide for detection of SNP TSC0020983
tagtatatagaty

SEQ ID NO: 83264 - DNA, 13 bp, Artificial Sequence
  Oligonucleotide for detection of SNP TSC0020983
ratctatatacta

SEQ ID NO: 83265 - DNA, 13 bp, Artificial Sequence
  Oligonucleotide for detection of SNP TSC0020983
tagtatttagaty

SEQ ID NO: 83266 - DNA, 13 bp, Artificial Sequence
  Oligonucleotide for detection of SNP TSC0020983
ratctaaatacta

SEQ ID NO: 83267 - DNA, 13 bp, Artificial Sequence
  Oligonucleotide for detection of SNP TSC0020983
gatttgtgtgttg

SEQ ID NO: 83268 - DNA, 13 bp, Artificial Sequence
  Oligonucleotide for detection of SNP TSC0020983
caacacacaaatc

SEQ ID NO: 83269 - DNA, 13 bp, Artificial Sequence
  Oligonucleotide for detection of SNP TSC0020983
gatttgggtgttg

SEQ ID NO: 83270 - DNA, 13 bp, Artificial Sequence
  Oligonucleotide for detection of SNP TSC0020983
caacacccaaatc

SEQ ID NO: 83271 - DNA, 13 bp, Artificial Sequence
  Oligonucleotide for detection of SNP TSC0020990
gatggttgtaatt

SEQ ID NO: 83272 - DNA, 13 bp, Artificial Sequence
  Oligonucleotide for detection of SNP TSC0020990
aattacaaccatc

SEQ ID NO: 83273 - DNA, 13 bp, Artificial Sequence
  Oligonucleotide for detection of SNP TSC0020990
gatggtggtaatt

SEQ ID NO: 83274 - DNA, 13 bp, Artificial Sequence
  Oligonucleotide for detection of SNP TSC0020990
aattaccaccatc

SEQ ID NO: 83275 - DNA, 13 bp, Artificial Sequence
  Oligonucleotide for detection of SNP TSC0020990
gatggtcgtaatt

SEQ ID NO: 83276 - DNA, 13 bp, Artificial Sequence
  Oligonucleotide for detection of SNP TSC0020990
aattacgaccatc

SEQ ID NO: 83277 - DNA, 13 bp, Artificial Sequence
  Oligonucleotide for detection of SNP TSC0020990
gatggcggtaatt

SEQ ID NO: 83278 - DNA, 13 bp, Artificial Sequence
  Oligonucleotide for detection of SNP TSC0020990
aattaccgccatc

SEQ ID NO: 83279 - DNA, 13 bp, Artificial Sequence
  Oligonucleotide for detection of SNP TSC0020990
aattatggttaty

SEQ ID NO: 83280 - DNA, 13 bp, Artificial Sequence
  Oligonucleotide for detection of SNP TSC0020990
rataaccataatt

SEQ ID NO: 83281 - DNA, 13 bp, Artificial Sequence
  Oligonucleotide for detection of SNP TSC0020990
aattattgttaty

SEQ ID NO: 83282 - DNA, 13 bp, Artificial Sequence
  Oligonucleotide for detection of SNP TSC0020990
rataacaataatt

SEQ ID NO: 83283 - DNA, 13 bp, Artificial Sequence
  Oligonucleotide for detection of SNP TSC0020990
aattacggttaty

SEQ ID NO: 83284 - DNA, 13 bp, Artificial Sequence
  Oligonucleotide for detection of SNP TSC0020990
rataaccgtaatt

SEQ ID NO: 83285 - DNA, 13 bp, Artificial Sequence
  Oligonucleotide for detection of SNP TSC0020990
aattatcgttaty

SEQ ID NO: 83286 - DNA, 13 bp, Artificial Sequence
  Oligonucleotide for detection of SNP TSC0020990
rataacgataatt

SEQ ID NO: 83287 - DNA, 13 bp, Artificial Sequence
  Oligonucleotide for detection of SNP TSC0020991
tttttcgtatagy

SEQ ID NO: 83288 - DNA, 13 bp, Artificial Sequence
  Oligonucleotide for detection of SNP TSC0020991
rctatacgaaaaa

SEQ ID NO: 83289 - DNA, 13 bp, Artificial Sequence
  Oligonucleotide for detection of SNP TSC0020991
gttatatgaagaa

SEQ ID NO: 83290 - DNA, 13 bp, Artificial Sequence
  Oligonucleotide for detection of SNP TSC0020991
ttcttcatataac

SEQ ID NO: 83291 - DNA, 13 bp, Artificial Sequence
  Oligonucleotide for detection of SNP TSC0020991
gttatacgaagaa

SEQ ID NO: 83292 - DNA, 13 bp, Artificial Sequence
  Oligonucleotide for detection of SNP TSC0020991
ttcttcgtataac

SEQ ID NO: 83293 - DNA, 13 bp, Artificial Sequence
  Oligonucleotide for detection of SNP TSC0020992
tattagtggattt

SEQ ID NO: 83294 - DNA, 13 bp, Artificial Sequence
  Oligonucleotide for detection of SNP TSC0020992
aaatccactaata

SEQ ID NO: 83295 - DNA, 13 bp, Artificial Sequence
  Oligonucleotide for detection of SNP TSC0020992
tattagcggattt

SEQ ID NO: 83296 - DNA, 13 bp, Artificial Sequence
  Oligonucleotide for detection of SNP TSC0020992
aaatccgctaata

SEQ ID NO: 83297 - DNA, 13 bp, Artificial Sequence
  Oligonucleotide for detection of SNP TSC0020996
taatgatgaagat

SEQ ID NO: 83298 - DNA, 13 bp, Artificial Sequence
  Oligonucleotide for detection of SNP TSC0020996
atcttcatcatta

SEQ ID NO: 83299 - DNA, 13 bp, Artificial Sequence
  Oligonucleotide for detection of SNP TSC0020996
taatgaagaagat

SEQ ID NO: 83300 - DNA, 13 bp, Artificial Sequence
  Oligonucleotide for detection of SNP TSC0020996
atcttcttcatta

SEQ ID NO: 83301 - DNA, 13 bp, Artificial Sequence
  Oligonucleotide for detection of SNP TSC0020997
ttggtgaggaggg

SEQ ID NO: 83302 - DNA, 13 bp, Artificial Sequence
  Oligonucleotide for detection of SNP TSC0020997
ccctcctcaccaa

SEQ ID NO: 83303 - DNA, 13 bp, Artificial Sequence
  Oligonucleotide for detection of SNP TSC0020997
ttggtgtggaggg

SEQ ID NO: 83304 - DNA, 13 bp, Artificial Sequence
  Oligonucleotide for detection of SNP TSC0020997
ccctccacaccaa

SEQ ID NO: 83305 - DNA, 13 bp, Artificial Sequence
  Oligonucleotide for detection of SNP TSC0020997
ttggcgaggaggg

SEQ ID NO: 83306 - DNA, 13 bp, Artificial Sequence
  Oligonucleotide for detection of SNP TSC0020997
ccctcctcgccaa

SEQ ID NO: 83307 - DNA, 13 bp, Artificial Sequence
  Oligonucleotide for detection of SNP TSC0020997
ttggcgtggaggg

SEQ ID NO: 83308 - DNA, 13 bp, Artificial Sequence
  Oligonucleotide for detection of SNP TSC0020997
ccctccacgccaa

SEQ ID NO: 83309 - DNA, 13 bp, Artificial Sequence
  Oligonucleotide for detection of SNP TSC0020997
ttttttttgttaa

SEQ ID NO: 83310 - DNA, 13 bp, Artificial Sequence
  Oligonucleotide for detection of SNP TSC0020997
ttaacaaaaaaaa

SEQ ID NO: 83311 - DNA, 13 bp, Artificial Sequence
  Oligonucleotide for detection of SNP TSC0020997
ttttttatgttaa

SEQ ID NO: 83312 - DNA, 13 bp, Artificial Sequence
  Oligonucleotide for detection of SNP TSC0020997
ttaacataaaaaa

SEQ ID NO: 83313 - DNA, 13 bp, Artificial Sequence
  Oligonucleotide for detection of SNP TSC0020997
tttttttcgttaa

SEQ ID NO: 83314 - DNA, 13 bp, Artificial Sequence
  Oligonucleotide for detection of SNP TSC0020997
ttaacgaaaaaaa

SEQ ID NO: 83315 - DNA, 13 bp, Artificial Sequence
  Oligonucleotide for detection of SNP TSC0020997
ttttttacgttaa

SEQ ID NO: 83316 - DNA, 13 bp, Artificial Sequence
  Oligonucleotide for detection of SNP TSC0020997
ttaacgtaaaaaa

SEQ ID NO: 83317 - DNA, 13 bp, Artificial Sequence
  Oligonucleotide for detection of SNP TSC0020998
tgatatatatttt

SEQ ID NO: 83318 - DNA, 13 bp, Artificial Sequence
  Oligonucleotide for detection of SNP TSC0020998
aaaatatatatca

SEQ ID NO: 83319 - DNA, 13 bp, Artificial Sequence
  Oligonucleotide for detection of SNP TSC0020998
tgatatgtatttt

SEQ ID NO: 83320 - DNA, 13 bp, Artificial Sequence
  Oligonucleotide for detection of SNP TSC0020998
aaaatacatatca

SEQ ID NO: 83321 - DNA, 13 bp, Artificial Sequence
  Oligonucleotide for detection of SNP TSC0020998
cgatatatatttt

SEQ ID NO: 83322 - DNA, 13 bp, Artificial Sequence
  Oligonucleotide for detection of SNP TSC0020998
aaaatatatatcg

SEQ ID NO: 83323 - DNA, 13 bp, Artificial Sequence
  Oligonucleotide for detection of SNP TSC0020998
cgatatgtatttt

SEQ ID NO: 83324 - DNA, 13 bp, Artificial Sequence
  Oligonucleotide for detection of SNP TSC0020998
aaaatacatatcg

SEQ ID NO: 83325 - DNA, 13 bp, Artificial Sequence
  Oligonucleotide for detection of SNP TSC0020998
tgatacgtatttt

SEQ ID NO: 83326 - DNA, 13 bp, Artificial Sequence
  Oligonucleotide for detection of SNP TSC0020998
aaaatacgtatca

SEQ ID NO: 83327 - DNA, 13 bp, Artificial Sequence
  Oligonucleotide for detection of SNP TSC0020998
cgatacgtatttt

SEQ ID NO: 83328 - DNA, 13 bp, Artificial Sequence
  Oligonucleotide for detection of SNP TSC0020998
aaaatacgtatcg

SEQ ID NO: 83329 - DNA, 13 bp, Artificial Sequence
  Oligonucleotide for detection of SNP TSC0020998
agaatatgtattg

SEQ ID NO: 83330 - DNA, 13 bp, Artificial Sequence
  Oligonucleotide for detection of SNP TSC0020998
caatacatattct

SEQ ID NO: 83331 - DNA, 13 bp, Artificial Sequence
  Oligonucleotide for detection of SNP TSC0020998
agaatatgtatcg

SEQ ID NO: 83332 - DNA, 13 bp, Artificial Sequence
  Oligonucleotide for detection of SNP TSC0020998
cgatacatattct

SEQ ID NO: 83333 - DNA, 13 bp, Artificial Sequence
  Oligonucleotide for detection of SNP TSC0020998
agaatacgtattg

SEQ ID NO: 83334 - DNA, 13 bp, Artificial Sequence
  Oligonucleotide for detection of SNP TSC0020998
caatacgtattct

SEQ ID NO: 83335 - DNA, 13 bp, Artificial Sequence
  Oligonucleotide for detection of SNP TSC0020998
agaatacgtatcg

SEQ ID NO: 83336 - DNA, 13 bp, Artificial Sequence
  Oligonucleotide for detection of SNP TSC0020998
cgatacgtattct

SEQ ID NO: 83337 - DNA, 13 bp, Artificial Sequence
  Oligonucleotide for detection of SNP TSC0020999
attattgtgtatt

SEQ ID NO: 83338 - DNA, 13 bp, Artificial Sequence
  Oligonucleotide for detection of SNP TSC0020999
aatacacaataat

SEQ ID NO: 83339 - DNA, 13 bp, Artificial Sequence
  Oligonucleotide for detection of SNP TSC0020999
attattttgtatt

SEQ ID NO: 83340 - DNA, 13 bp, Artificial Sequence
  Oligonucleotide for detection of SNP TSC0020999
aatacaaaataat

SEQ ID NO: 83341 - DNA, 13 bp, Artificial Sequence
  Oligonucleotide for detection of SNP TSC0020999
attattgcgtatt

SEQ ID NO: 83342 - DNA, 13 bp, Artificial Sequence
  Oligonucleotide for detection of SNP TSC0020999
aatacgcaataat

SEQ ID NO: 83343 - DNA, 13 bp, Artificial Sequence
  Oligonucleotide for detection of SNP TSC0020999
attatttcgtatt

SEQ ID NO: 83344 - DNA, 13 bp, Artificial Sequence
  Oligonucleotide for detection of SNP TSC0020999
aatacgaaataat

SEQ ID NO: 83345 - DNA, 13 bp, Artificial Sequence
  Oligonucleotide for detection of SNP TSC0020999
agtatgtagtgat

SEQ ID NO: 83346 - DNA, 13 bp, Artificial Sequence
  Oligonucleotide for detection of SNP TSC0020999
atcactacatact

SEQ ID NO: 83347 - DNA, 13 bp, Artificial Sequence
  Oligonucleotide for detection of SNP TSC0020999
agtatgaagtgat

SEQ ID NO: 83348 - DNA, 13 bp, Artificial Sequence
  Oligonucleotide for detection of SNP TSC0020999
atcacttcatact

SEQ ID NO: 83349 - DNA, 13 bp, Artificial Sequence
  Oligonucleotide for detection of SNP TSC0020999
agtacgtagtgat

SEQ ID NO: 83350 - DNA, 13 bp, Artificial Sequence
  Oligonucleotide for detection of SNP TSC0020999
atcactacgtact

SEQ ID NO: 83351 - DNA, 13 bp, Artificial Sequence
  Oligonucleotide for detection of SNP TSC0020999
agtacgaagtgat

SEQ ID NO: 83352 - DNA, 13 bp, Artificial Sequence
  Oligonucleotide for detection of SNP TSC0020999
atcacttcgtact

SEQ ID NO: 83353 - DNA, 13 bp, Artificial Sequence
  Oligonucleotide for detection of SNP TSC0021000
gtttttaatatty

SEQ ID NO: 83354 - DNA, 13 bp, Artificial Sequence
  Oligonucleotide for detection of SNP TSC0021000
raatattaaaaac

SEQ ID NO: 83355 - DNA, 13 bp, Artificial Sequence
  Oligonucleotide for detection of SNP TSC0021000
gtttttgatatty

SEQ ID NO: 83356 - DNA, 13 bp, Artificial Sequence
  Oligonucleotide for detection of SNP TSC0021000
raatatcaaaaac

SEQ ID NO: 83357 - DNA, 13 bp, Artificial Sequence
  Oligonucleotide for detection of SNP TSC0021000
gttttcgatatty

SEQ ID NO: 83358 - DNA, 13 bp, Artificial Sequence
  Oligonucleotide for detection of SNP TSC0021000
raatatcgaaaac

SEQ ID NO: 83359 - DNA, 13 bp, Artificial Sequence
  Oligonucleotide for detection of SNP TSC0021000
ggatgttgggggy

SEQ ID NO: 83360 - DNA, 13 bp, Artificial Sequence
  Oligonucleotide for detection of SNP TSC0021000
rcccccaacatcc

SEQ ID NO: 83361 - DNA, 13 bp, Artificial Sequence
  Oligonucleotide for detection of SNP TSC0021000
ggatgtcgggggy

SEQ ID NO: 83362 - DNA, 13 bp, Artificial Sequence
  Oligonucleotide for detection of SNP TSC0021000
rcccccgacatcc

SEQ ID NO: 83363 - DNA, 13 bp, Artificial Sequence
  Oligonucleotide for detection of SNP TSC0021002
ttttatgggtaga

SEQ ID NO: 83364 - DNA, 13 bp, Artificial Sequence
  Oligonucleotide for detection of SNP TSC0021002
tctacccataaaa

SEQ ID NO: 83365 - DNA, 13 bp, Artificial Sequence
  Oligonucleotide for detection of SNP TSC0021002
ttttattggtaga

SEQ ID NO: 83366 - DNA, 13 bp, Artificial Sequence
  Oligonucleotide for detection of SNP TSC0021002
tctaccaataaaa

SEQ ID NO: 83367 - DNA, 13 bp, Artificial Sequence
  Oligonucleotide for detection of SNP TSC0021002
ttttacgggtaga

SEQ ID NO: 83368 - DNA, 13 bp, Artificial Sequence
  Oligonucleotide for detection of SNP TSC0021002
tctacccgtaaaa

SEQ ID NO: 83369 - DNA, 13 bp, Artificial Sequence
  Oligonucleotide for detection of SNP TSC0021002
tttatttgtagga

SEQ ID NO: 83370 - DNA, 13 bp, Artificial Sequence
  Oligonucleotide for detection of SNP TSC0021002
tcctacaaataaa

SEQ ID NO: 83371 - DNA, 13 bp, Artificial Sequence
  Oligonucleotide for detection of SNP TSC0021002
tttattagtagga

SEQ ID NO: 83372 - DNA, 13 bp, Artificial Sequence
  Oligonucleotide for detection of SNP TSC0021002
tcctactaataaa

SEQ ID NO: 83373 - DNA, 13 bp, Artificial Sequence
  Oligonucleotide for detection of SNP TSC0021002
tttattcgtagga

SEQ ID NO: 83374 - DNA, 13 bp, Artificial Sequence
  Oligonucleotide for detection of SNP TSC0021002
tcctacgaataaa

SEQ ID NO: 83375 - DNA, 13 bp, Artificial Sequence
  Oligonucleotide for detection of SNP TSC0021003
tttgtatagtaag

SEQ ID NO: 83376 - DNA, 13 bp, Artificial Sequence
  Oligonucleotide for detection of SNP TSC0021003
cttactatacaaa

SEQ ID NO: 83377 - DNA, 13 bp, Artificial Sequence
  Oligonucleotide for detection of SNP TSC0021003
tttgtagagtaag

SEQ ID NO: 83378 - DNA, 13 bp, Artificial Sequence
  Oligonucleotide for detection of SNP TSC0021003
cttactctacaaa

SEQ ID NO: 83379 - DNA, 13 bp, Artificial Sequence
  Oligonucleotide for detection of SNP TSC0021003
tttgttgtgtagg

SEQ ID NO: 83380 - DNA, 13 bp, Artificial Sequence
  Oligonucleotide for detection of SNP TSC0021003
cctacacaacaaa

SEQ ID NO: 83381 - DNA, 13 bp, Artificial Sequence
  Oligonucleotide for detection of SNP TSC0021003
tttgttttgtagg

SEQ ID NO: 83382 - DNA, 13 bp, Artificial Sequence
  Oligonucleotide for detection of SNP TSC0021003
cctacaaaacaaa

SEQ ID NO: 83383 - DNA, 13 bp, Artificial Sequence
  Oligonucleotide for detection of SNP TSC0021004
ttatttaatggga

SEQ ID NO: 83384 - DNA, 13 bp, Artificial Sequence
  Oligonucleotide for detection of SNP TSC0021004
tcccattaaataa

SEQ ID NO: 83385 - DNA, 13 bp, Artificial Sequence
  Oligonucleotide for detection of SNP TSC0021004
ttattttatggga

SEQ ID NO: 83386 - DNA, 13 bp, Artificial Sequence
  Oligonucleotide for detection of SNP TSC0021004
tcccataaaataa

SEQ ID NO: 83387 - DNA, 13 bp, Artificial Sequence
  Oligonucleotide for detection of SNP TSC0021004
ttttattaaatag

SEQ ID NO: 83388 - DNA, 13 bp, Artificial Sequence
  Oligonucleotide for detection of SNP TSC0021004
ctatttaataaaa

SEQ ID NO: 83389 - DNA, 13 bp, Artificial Sequence
  Oligonucleotide for detection of SNP TSC0021004
ttttataaaatag

SEQ ID NO: 83390 - DNA, 13 bp, Artificial Sequence
  Oligonucleotide for detection of SNP TSC0021004
ctattttataaaa

SEQ ID NO: 83391 - DNA, 13 bp, Artificial Sequence
  Oligonucleotide for detection of SNP TSC0021005
tattgaattaatt

SEQ ID NO: 83392 - DNA, 13 bp, Artificial Sequence
  Oligonucleotide for detection of SNP TSC0021005
aattaattcaata

SEQ ID NO: 83393 - DNA, 13 bp, Artificial Sequence
  Oligonucleotide for detection of SNP TSC0021005
tattgatttaatt

SEQ ID NO: 83394 - DNA, 13 bp, Artificial Sequence
  Oligonucleotide for detection of SNP TSC0021005
aattaaatcaata

SEQ ID NO: 83395 - DNA, 13 bp, Artificial Sequence
  Oligonucleotide for detection of SNP TSC0021005
agttaaattaata

SEQ ID NO: 83396 - DNA, 13 bp, Artificial Sequence
  Oligonucleotide for detection of SNP TSC0021005
tattaatttaact

SEQ ID NO: 83397 - DNA, 13 bp, Artificial Sequence
  Oligonucleotide for detection of SNP TSC0021006
taattgggttaty

SEQ ID NO: 83398 - DNA, 13 bp, Artificial Sequence
  Oligonucleotide for detection of SNP TSC0021006
rataacccaatta

SEQ ID NO: 83399 - DNA, 13 bp, Artificial Sequence
  Oligonucleotide for detection of SNP TSC0021006
taattgtgttaty

SEQ ID NO: 83400 - DNA, 13 bp, Artificial Sequence
  Oligonucleotide for detection of SNP TSC0021006
rataacacaatta

SEQ ID NO: 83401 - DNA, 13 bp, Artificial Sequence
  Oligonucleotide for detection of SNP TSC0021006
ggtgatttagtta

SEQ ID NO: 83402 - DNA, 13 bp, Artificial Sequence
  Oligonucleotide for detection of SNP TSC0021006
taactaaatcacc

SEQ ID NO: 83403 - DNA, 13 bp, Artificial Sequence
  Oligonucleotide for detection of SNP TSC0021006
ggtgatatagtta

SEQ ID NO: 83404 - DNA, 13 bp, Artificial Sequence
  Oligonucleotide for detection of SNP TSC0021006
taactatatcacc

SEQ ID NO: 83405 - DNA, 13 bp, Artificial Sequence
  Oligonucleotide for detection of SNP TSC0021013
ttttattttgtty

SEQ ID NO: 83406 - DNA, 13 bp, Artificial Sequence
  Oligonucleotide for detection of SNP TSC0021013
raacaaaataaaa

SEQ ID NO: 83407 - DNA, 13 bp, Artificial Sequence
  Oligonucleotide for detection of SNP TSC0021013
ttttatgttgtty

SEQ ID NO: 83408 - DNA, 13 bp, Artificial Sequence
  Oligonucleotide for detection of SNP TSC0021013
raacaacataaaa

SEQ ID NO: 83409 - DNA, 13 bp, Artificial Sequence
  Oligonucleotide for detection of SNP TSC0021013
ttttacgttgtty

SEQ ID NO: 83410 - DNA, 13 bp, Artificial Sequence
  Oligonucleotide for detection of SNP TSC0021013
raacaacgtaaaa

SEQ ID NO: 83411 - DNA, 13 bp, Artificial Sequence
  Oligonucleotide for detection of SNP TSC0021013
gggtagggtaagg

SEQ ID NO: 83412 - DNA, 13 bp, Artificial Sequence
  Oligonucleotide for detection of SNP TSC0021013
ccttaccctaccc

SEQ ID NO: 83413 - DNA, 13 bp, Artificial Sequence
  Oligonucleotide for detection of SNP TSC0021013
gggtagtgtaagg

SEQ ID NO: 83414 - DNA, 13 bp, Artificial Sequence
  Oligonucleotide for detection of SNP TSC0021013
ccttacactaccc

SEQ ID NO: 83415 - DNA, 13 bp, Artificial Sequence
  Oligonucleotide for detection of SNP TSC0021013
gggtagcgtaagg

SEQ ID NO: 83416 - DNA, 13 bp, Artificial Sequence
  Oligonucleotide for detection of SNP TSC0021013
ccttacgctaccc

SEQ ID NO: 83417 - DNA, 13 bp, Artificial Sequence
  Oligonucleotide for detection of SNP TSC0021014
taaggagaatgta

SEQ ID NO: 83418 - DNA, 13 bp, Artificial Sequence
  Oligonucleotide for detection of SNP TSC0021014
tacattctcctta

SEQ ID NO: 83419 - DNA, 13 bp, Artificial Sequence
  Oligonucleotide for detection of SNP TSC0021014
taaggaaaatgta

SEQ ID NO: 83420 - DNA, 13 bp, Artificial Sequence
  Oligonucleotide for detection of SNP TSC0021014
tacattttcctta

SEQ ID NO: 83421 - DNA, 13 bp, Artificial Sequence
  Oligonucleotide for detection of SNP TSC0021015
aataaggagaatg

SEQ ID NO: 83422 - DNA, 13 bp, Artificial Sequence
  Oligonucleotide for detection of SNP TSC0021015
cattctccttatt

SEQ ID NO: 83423 - DNA, 13 bp, Artificial Sequence
  Oligonucleotide for detection of SNP TSC0021015
aataagaagaatg

SEQ ID NO: 83424 - DNA, 13 bp, Artificial Sequence
  Oligonucleotide for detection of SNP TSC0021015
cattcttcttatt

SEQ ID NO: 83425 - DNA, 13 bp, Artificial Sequence
  Oligonucleotide for detection of SNP TSC0021016
ttggttgtgttty

SEQ ID NO: 83426 - DNA, 13 bp, Artificial Sequence
  Oligonucleotide for detection of SNP TSC0021016
raaacacaaccaa

SEQ ID NO: 83427 - DNA, 13 bp, Artificial Sequence
  Oligonucleotide for detection of SNP TSC0021016
gagatagagttaa

SEQ ID NO: 83428 - DNA, 13 bp, Artificial Sequence
  Oligonucleotide for detection of SNP TSC0021016
ttaactctatctc

SEQ ID NO: 83429 - DNA, 13 bp, Artificial Sequence
  Oligonucleotide for detection of SNP TSC0021016
gagatatagttaa

SEQ ID NO: 83430 - DNA, 13 bp, Artificial Sequence
  Oligonucleotide for detection of SNP TSC0021016
ttaactatatctc

SEQ ID NO: 83431 - DNA, 13 bp, Artificial Sequence
  Oligonucleotide for detection of SNP TSC0021021
tattaaaagttty

SEQ ID NO: 83432 - DNA, 13 bp, Artificial Sequence
  Oligonucleotide for detection of SNP TSC0021021
raaacttttaata

SEQ ID NO: 83433 - DNA, 13 bp, Artificial Sequence
  Oligonucleotide for detection of SNP TSC0021021
tattaagagttty

SEQ ID NO: 83434 - DNA, 13 bp, Artificial Sequence
  Oligonucleotide for detection of SNP TSC0021021
raaactcttaata

SEQ ID NO: 83435 - DNA, 13 bp, Artificial Sequence
  Oligonucleotide for detection of SNP TSC0021022
ataaaagagatga

SEQ ID NO: 83436 - DNA, 13 bp, Artificial Sequence
  Oligonucleotide for detection of SNP TSC0021022
tcatctcttttat

SEQ ID NO: 83437 - DNA, 13 bp, Artificial Sequence
  Oligonucleotide for detection of SNP TSC0021022
ataaaaaagatga

SEQ ID NO: 83438 - DNA, 13 bp, Artificial Sequence
  Oligonucleotide for detection of SNP TSC0021022
tcatcttttttat

SEQ ID NO: 83439 - DNA, 13 bp, Artificial Sequence
  Oligonucleotide for detection of SNP TSC0021023
gatattattttaa

SEQ ID NO: 83440 - DNA, 13 bp, Artificial Sequence
  Oligonucleotide for detection of SNP TSC0021023
ttaaaataatatc

SEQ ID NO: 83441 - DNA, 13 bp, Artificial Sequence
  Oligonucleotide for detection of SNP TSC0021023
gatattgttttaa

SEQ ID NO: 83442 - DNA, 13 bp, Artificial Sequence
  Oligonucleotide for detection of SNP TSC0021023
ttaaaacaatatc

SEQ ID NO: 83443 - DNA, 13 bp, Artificial Sequence
  Oligonucleotide for detection of SNP TSC0021024
tagttggtttgtt

SEQ ID NO: 83444 - DNA, 13 bp, Artificial Sequence
  Oligonucleotide for detection of SNP TSC0021024
aacaaaccaacta

SEQ ID NO: 83445 - DNA, 13 bp, Artificial Sequence
  Oligonucleotide for detection of SNP TSC0021024
tagttgatttgtt

SEQ ID NO: 83446 - DNA, 13 bp, Artificial Sequence
  Oligonucleotide for detection of SNP TSC0021024
aacaaatcaacta

SEQ ID NO: 83447 - DNA, 13 bp, Artificial Sequence
  Oligonucleotide for detection of SNP TSC0021024
tagttggttcgtt

SEQ ID NO: 83448 - DNA, 13 bp, Artificial Sequence
  Oligonucleotide for detection of SNP TSC0021024
aacgaaccaacta

SEQ ID NO: 83449 - DNA, 13 bp, Artificial Sequence
  Oligonucleotide for detection of SNP TSC0021024
tagttgattcgtt

SEQ ID NO: 83450 - DNA, 13 bp, Artificial Sequence
  Oligonucleotide for detection of SNP TSC0021024
aacgaatcaacta

SEQ ID NO: 83451 - DNA, 13 bp, Artificial Sequence
  Oligonucleotide for detection of SNP TSC0021025
tattgtaggttgt

SEQ ID NO: 83452 - DNA, 13 bp, Artificial Sequence
  Oligonucleotide for detection of SNP TSC0021025
acaacctacaata

SEQ ID NO: 83453 - DNA, 13 bp, Artificial Sequence
  Oligonucleotide for detection of SNP TSC0021025
tattgtgggttgt

SEQ ID NO: 83454 - DNA, 13 bp, Artificial Sequence
  Oligonucleotide for detection of SNP TSC0021025
acaacccacaata

SEQ ID NO: 83455 - DNA, 13 bp, Artificial Sequence
  Oligonucleotide for detection of SNP TSC0021025
tattgcgggttgt

SEQ ID NO: 83456 - DNA, 13 bp, Artificial Sequence
  Oligonucleotide for detection of SNP TSC0021025
acaacccgcaata

SEQ ID NO: 83457 - DNA, 13 bp, Artificial Sequence
  Oligonucleotide for detection of SNP TSC0021026
tgataagggagtt

SEQ ID NO: 83458 - DNA, 13 bp, Artificial Sequence
  Oligonucleotide for detection of SNP TSC0021026
aactcccttatca

SEQ ID NO: 83459 - DNA, 13 bp, Artificial Sequence
  Oligonucleotide for detection of SNP TSC0021026
tgataaaggagtt

SEQ ID NO: 83460 - DNA, 13 bp, Artificial Sequence
  Oligonucleotide for detection of SNP TSC0021026
aactcctttatca

SEQ ID NO: 83461 - DNA, 13 bp, Artificial Sequence
  Oligonucleotide for detection of SNP TSC0021026
cgataagggagtt

SEQ ID NO: 83462 - DNA, 13 bp, Artificial Sequence
  Oligonucleotide for detection of SNP TSC0021026
aactcccttatcg

SEQ ID NO: 83463 - DNA, 13 bp, Artificial Sequence
  Oligonucleotide for detection of SNP TSC0021026
cgataaaggagtt

SEQ ID NO: 83464 - DNA, 13 bp, Artificial Sequence
  Oligonucleotide for detection of SNP TSC0021026
aactcctttatcg

SEQ ID NO: 83465 - DNA, 13 bp, Artificial Sequence
  Oligonucleotide for detection of SNP TSC0021027
ttaaggatggtgg

SEQ ID NO: 83466 - DNA, 13 bp, Artificial Sequence
  Oligonucleotide for detection of SNP TSC0021027
ccaccatccttaa

SEQ ID NO: 83467 - DNA, 13 bp, Artificial Sequence
  Oligonucleotide for detection of SNP TSC0021027
ttaagggtggtgg

SEQ ID NO: 83468 - DNA, 13 bp, Artificial Sequence
  Oligonucleotide for detection of SNP TSC0021027
ccaccacccttaa

SEQ ID NO: 83469 - DNA, 13 bp, Artificial Sequence
  Oligonucleotide for detection of SNP TSC0021027
ttaaggatggcgg

SEQ ID NO: 83470 - DNA, 13 bp, Artificial Sequence
  Oligonucleotide for detection of SNP TSC0021027
ccgccatccttaa

SEQ ID NO: 83471 - DNA, 13 bp, Artificial Sequence
  Oligonucleotide for detection of SNP TSC0021027
ttaagggtggcgg

SEQ ID NO: 83472 - DNA, 13 bp, Artificial Sequence
  Oligonucleotide for detection of SNP TSC0021027
ccgccacccttaa

SEQ ID NO: 83473 - DNA, 13 bp, Artificial Sequence
  Oligonucleotide for detection of SNP TSC0021028
tgggaggttggta

SEQ ID NO: 83474 - DNA, 13 bp, Artificial Sequence
  Oligonucleotide for detection of SNP TSC0021028
taccaacctccca

SEQ ID NO: 83475 - DNA, 13 bp, Artificial Sequence
  Oligonucleotide for detection of SNP TSC0021028
tgggagtttggta

SEQ ID NO: 83476 - DNA, 13 bp, Artificial Sequence
  Oligonucleotide for detection of SNP TSC0021028
taccaaactccca

SEQ ID NO: 83477 - DNA, 13 bp, Artificial Sequence
  Oligonucleotide for detection of SNP TSC0021028
cgggaggttggta

SEQ ID NO: 83478 - DNA, 13 bp, Artificial Sequence
  Oligonucleotide for detection of SNP TSC0021028
taccaacctcccg

SEQ ID NO: 83479 - DNA, 13 bp, Artificial Sequence
  Oligonucleotide for detection of SNP TSC0021028
cgggagtttggta

SEQ ID NO: 83480 - DNA, 13 bp, Artificial Sequence
  Oligonucleotide for detection of SNP TSC0021028
taccaaactcccg

SEQ ID NO: 83481 - DNA, 13 bp, Artificial Sequence
  Oligonucleotide for detection of SNP TSC0021028
tgttagttttttg

SEQ ID NO: 83482 - DNA, 13 bp, Artificial Sequence
  Oligonucleotide for detection of SNP TSC0021028
caaaaaactaaca

SEQ ID NO: 83483 - DNA, 13 bp, Artificial Sequence
  Oligonucleotide for detection of SNP TSC0021028
tgttagatttttg

SEQ ID NO: 83484 - DNA, 13 bp, Artificial Sequence
  Oligonucleotide for detection of SNP TSC0021028
caaaaatctaaca

SEQ ID NO: 83485 - DNA, 13 bp, Artificial Sequence
  Oligonucleotide for detection of SNP TSC0021028
tgttagtttttcg

SEQ ID NO: 83486 - DNA, 13 bp, Artificial Sequence
  Oligonucleotide for detection of SNP TSC0021028
cgaaaaactaaca

SEQ ID NO: 83487 - DNA, 13 bp, Artificial Sequence
  Oligonucleotide for detection of SNP TSC0021028
tgttagattttcg

SEQ ID NO: 83488 - DNA, 13 bp, Artificial Sequence
  Oligonucleotide for detection of SNP TSC0021028
cgaaaatctaaca

SEQ ID NO: 83489 - DNA, 13 bp, Artificial Sequence
  Oligonucleotide for detection of SNP TSC0021029
taaatggggttgg

SEQ ID NO: 83490 - DNA, 13 bp, Artificial Sequence
  Oligonucleotide for detection of SNP TSC0021029
ccaaccccattta

SEQ ID NO: 83491 - DNA, 13 bp, Artificial Sequence
  Oligonucleotide for detection of SNP TSC0021029
taaatgaggttgg

SEQ ID NO: 83492 - DNA, 13 bp, Artificial Sequence
  Oligonucleotide for detection of SNP TSC0021029
ccaacctcattta

SEQ ID NO: 83493 - DNA, 13 bp, Artificial Sequence
  Oligonucleotide for detection of SNP TSC0021029
taaacggggttgg

SEQ ID NO: 83494 - DNA, 13 bp, Artificial Sequence
  Oligonucleotide for detection of SNP TSC0021029
ccaaccccgttta

SEQ ID NO: 83495 - DNA, 13 bp, Artificial Sequence
  Oligonucleotide for detection of SNP TSC0021029
taaacgaggttgg

SEQ ID NO: 83496 - DNA, 13 bp, Artificial Sequence
  Oligonucleotide for detection of SNP TSC0021029
ccaacctcgttta

SEQ ID NO: 83497 - DNA, 13 bp, Artificial Sequence
  Oligonucleotide for detection of SNP TSC0021031
gaatatgtaggaa

SEQ ID NO: 83498 - DNA, 13 bp, Artificial Sequence
  Oligonucleotide for detection of SNP TSC0021031
ttcctacatattc

SEQ ID NO: 83499 - DNA, 13 bp, Artificial Sequence
  Oligonucleotide for detection of SNP TSC0021031
gaatatataggaa

SEQ ID NO: 83500 - DNA, 13 bp, Artificial Sequence
  Oligonucleotide for detection of SNP TSC0021031
ttcctatatattc

SEQ ID NO: 83501 - DNA, 13 bp, Artificial Sequence
  Oligonucleotide for detection of SNP TSC0021031
gaatacgtaggaa

SEQ ID NO: 83502 - DNA, 13 bp, Artificial Sequence
  Oligonucleotide for detection of SNP TSC0021031
ttcctacgtattc

SEQ ID NO: 83503 - DNA, 13 bp, Artificial Sequence
  Oligonucleotide for detection of SNP TSC0021032
tgaggagttgtaa

SEQ ID NO: 83504 - DNA, 13 bp, Artificial Sequence
  Oligonucleotide for detection of SNP TSC0021032
ttacaactcctca

SEQ ID NO: 83505 - DNA, 13 bp, Artificial Sequence
  Oligonucleotide for detection of SNP TSC0021032
tgaggaattgtaa

SEQ ID NO: 83506 - DNA, 13 bp, Artificial Sequence
  Oligonucleotide for detection of SNP TSC0021032
ttacaattcctca

SEQ ID NO: 83507 - DNA, 13 bp, Artificial Sequence
  Oligonucleotide for detection of SNP TSC0021032
tgaggagtcgtaa

SEQ ID NO: 83508 - DNA, 13 bp, Artificial Sequence
  Oligonucleotide for detection of SNP TSC0021032
ttacgactcctca

SEQ ID NO: 83509 - DNA, 13 bp, Artificial Sequence
  Oligonucleotide for detection of SNP TSC0021032
tgaggaatcgtaa

SEQ ID NO: 83510 - DNA, 13 bp, Artificial Sequence
  Oligonucleotide for detection of SNP TSC0021032
ttacgattcctca

SEQ ID NO: 83511 - DNA, 13 bp, Artificial Sequence
  Oligonucleotide for detection of SNP TSC0021034
ataagatggaagg

SEQ ID NO: 83512 - DNA, 13 bp, Artificial Sequence
  Oligonucleotide for detection of SNP TSC0021034
ccttccatcttat

SEQ ID NO: 83513 - DNA, 13 bp, Artificial Sequence
  Oligonucleotide for detection of SNP TSC0021034
ataagacggaagg

SEQ ID NO: 83514 - DNA, 13 bp, Artificial Sequence
  Oligonucleotide for detection of SNP TSC0021034
ccttccgtcttat

SEQ ID NO: 83515 - DNA, 13 bp, Artificial Sequence
  Oligonucleotide for detection of SNP TSC0021035
gggattataggta

SEQ ID NO: 83516 - DNA, 13 bp, Artificial Sequence
  Oligonucleotide for detection of SNP TSC0021035
tacctataatccc

SEQ ID NO: 83517 - DNA, 13 bp, Artificial Sequence
  Oligonucleotide for detection of SNP TSC0021036
ttattgggaagta

SEQ ID NO: 83518 - DNA, 13 bp, Artificial Sequence
  Oligonucleotide for detection of SNP TSC0021036
tacttcccaataa

SEQ ID NO: 83519 - DNA, 13 bp, Artificial Sequence
  Oligonucleotide for detection of SNP TSC0021036
ttattgtgaagta

SEQ ID NO: 83520 - DNA, 13 bp, Artificial Sequence
  Oligonucleotide for detection of SNP TSC0021036
tacttcacaataa

SEQ ID NO: 83521 - DNA, 13 bp, Artificial Sequence
  Oligonucleotide for detection of SNP TSC0021036
tattttttagtaa

SEQ ID NO: 83522 - DNA, 13 bp, Artificial Sequence
  Oligonucleotide for detection of SNP TSC0021036
ttactaaaaaata

SEQ ID NO: 83523 - DNA, 13 bp, Artificial Sequence
  Oligonucleotide for detection of SNP TSC0021036
tattttatagtaa

SEQ ID NO: 83524 - DNA, 13 bp, Artificial Sequence
  Oligonucleotide for detection of SNP TSC0021036
ttactataaaata

SEQ ID NO: 83525 - DNA, 13 bp, Artificial Sequence
  Oligonucleotide for detection of SNP TSC0021037
tttttatttagta

SEQ ID NO: 83526 - DNA, 13 bp, Artificial Sequence
  Oligonucleotide for detection of SNP TSC0021037
tactaaataaaaa

SEQ ID NO: 83527 - DNA, 13 bp, Artificial Sequence
  Oligonucleotide for detection of SNP TSC0021037
tttttagttagta

SEQ ID NO: 83528 - DNA, 13 bp, Artificial Sequence
  Oligonucleotide for detection of SNP TSC0021037
tactaactaaaaa

SEQ ID NO: 83529 - DNA, 13 bp, Artificial Sequence
  Oligonucleotide for detection of SNP TSC0021037
tgttgggtggagg

SEQ ID NO: 83530 - DNA, 13 bp, Artificial Sequence
  Oligonucleotide for detection of SNP TSC0021037
cctccacccaaca

SEQ ID NO: 83531 - DNA, 13 bp, Artificial Sequence
  Oligonucleotide for detection of SNP TSC0021037
tgttggttggagg

SEQ ID NO: 83532 - DNA, 13 bp, Artificial Sequence
  Oligonucleotide for detection of SNP TSC0021037
cctccaaccaaca

SEQ ID NO: 83533 - DNA, 13 bp, Artificial Sequence
  Oligonucleotide for detection of SNP TSC0021038
tttttgagttttg

SEQ ID NO: 83534 - DNA, 13 bp, Artificial Sequence
  Oligonucleotide for detection of SNP TSC0021038
caaaactcaaaaa

SEQ ID NO: 83535 - DNA, 13 bp, Artificial Sequence
  Oligonucleotide for detection of SNP TSC0021038
tttttgggttttg

SEQ ID NO: 83536 - DNA, 13 bp, Artificial Sequence
  Oligonucleotide for detection of SNP TSC0021038
caaaacccaaaaa

SEQ ID NO: 83537 - DNA, 13 bp, Artificial Sequence
  Oligonucleotide for detection of SNP TSC0021039
gtgggtggaagga

SEQ ID NO: 83538 - DNA, 13 bp, Artificial Sequence
  Oligonucleotide for detection of SNP TSC0021039
tccttccacccac

SEQ ID NO: 83539 - DNA, 13 bp, Artificial Sequence
  Oligonucleotide for detection of SNP TSC0021039
gtgggtagaagga

SEQ ID NO: 83540 - DNA, 13 bp, Artificial Sequence
  Oligonucleotide for detection of SNP TSC0021039
tccttctacccac

SEQ ID NO: 83541 - DNA, 13 bp, Artificial Sequence
  Oligonucleotide for detection of SNP TSC0021041
agagaggagaatt

SEQ ID NO: 83542 - DNA, 13 bp, Artificial Sequence
  Oligonucleotide for detection of SNP TSC0021041
aattctcctctct

SEQ ID NO: 83543 - DNA, 13 bp, Artificial Sequence
  Oligonucleotide for detection of SNP TSC0021041
agagagaagaatt

SEQ ID NO: 83544 - DNA, 13 bp, Artificial Sequence
  Oligonucleotide for detection of SNP TSC0021041
aattcttctctct

SEQ ID NO: 83545 - DNA, 13 bp, Artificial Sequence
  Oligonucleotide for detection of SNP TSC0021042
ttggatgatgttg

SEQ ID NO: 83546 - DNA, 13 bp, Artificial Sequence
  Oligonucleotide for detection of SNP TSC0021042
caacatcatccaa

SEQ ID NO: 83547 - DNA, 13 bp, Artificial Sequence
  Oligonucleotide for detection of SNP TSC0021042
ttggataatgttg

SEQ ID NO: 83548 - DNA, 13 bp, Artificial Sequence
  Oligonucleotide for detection of SNP TSC0021042
caacattatccaa

SEQ ID NO: 83549 - DNA, 13 bp, Artificial Sequence
  Oligonucleotide for detection of SNP TSC0021042
tcggatgatgttg

SEQ ID NO: 83550 - DNA, 13 bp, Artificial Sequence
  Oligonucleotide for detection of SNP TSC0021042
caacatcatccga

SEQ ID NO: 83551 - DNA, 13 bp, Artificial Sequence
  Oligonucleotide for detection of SNP TSC0021042
tcggataatgttg

SEQ ID NO: 83552 - DNA, 13 bp, Artificial Sequence
  Oligonucleotide for detection of SNP TSC0021042
caacattatccga

SEQ ID NO: 83553 - DNA, 13 bp, Artificial Sequence
  Oligonucleotide for detection of SNP TSC0021043
ttttagaaaggta

SEQ ID NO: 83554 - DNA, 13 bp, Artificial Sequence
  Oligonucleotide for detection of SNP TSC0021043
tacctttctaaaa

SEQ ID NO: 83555 - DNA, 13 bp, Artificial Sequence
  Oligonucleotide for detection of SNP TSC0021043
ttttaggaaggta

SEQ ID NO: 83556 - DNA, 13 bp, Artificial Sequence
  Oligonucleotide for detection of SNP TSC0021043
taccttcctaaaa

SEQ ID NO: 83557 - DNA, 13 bp, Artificial Sequence
  Oligonucleotide for detection of SNP TSC0021044
gagatgttatttt

SEQ ID NO: 83558 - DNA, 13 bp, Artificial Sequence
  Oligonucleotide for detection of SNP TSC0021044
aaaataacatctc

SEQ ID NO: 83559 - DNA, 13 bp, Artificial Sequence
  Oligonucleotide for detection of SNP TSC0021044
gagatggtatttt

SEQ ID NO: 83560 - DNA, 13 bp, Artificial Sequence
  Oligonucleotide for detection of SNP TSC0021044
aaaataccatctc

SEQ ID NO: 83561 - DNA, 13 bp, Artificial Sequence
  Oligonucleotide for detection of SNP TSC0021044
aaaatggtattty

SEQ ID NO: 83562 - DNA, 13 bp, Artificial Sequence
  Oligonucleotide for detection of SNP TSC0021044
raaataccatttt

SEQ ID NO: 83563 - DNA, 13 bp, Artificial Sequence
  Oligonucleotide for detection of SNP TSC0021048
ttttgtaaattta

SEQ ID NO: 83564 - DNA, 13 bp, Artificial Sequence
  Oligonucleotide for detection of SNP TSC0021048
taaatttacaaaa

SEQ ID NO: 83565 - DNA, 13 bp, Artificial Sequence
  Oligonucleotide for detection of SNP TSC0021048
ttttgtgaattta

SEQ ID NO: 83566 - DNA, 13 bp, Artificial Sequence
  Oligonucleotide for detection of SNP TSC0021048
taaattcacaaaa

SEQ ID NO: 83567 - DNA, 13 bp, Artificial Sequence
  Oligonucleotide for detection of SNP TSC0021049
atttatatattta

SEQ ID NO: 83568 - DNA, 13 bp, Artificial Sequence
  Oligonucleotide for detection of SNP TSC0021049
taaatatataaat

SEQ ID NO: 83569 - DNA, 13 bp, Artificial Sequence
  Oligonucleotide for detection of SNP TSC0021049
atttatgtattta

SEQ ID NO: 83570 - DNA, 13 bp, Artificial Sequence
  Oligonucleotide for detection of SNP TSC0021049
taaatacataaat

SEQ ID NO: 83571 - DNA, 13 bp, Artificial Sequence
  Oligonucleotide for detection of SNP TSC0021054
attattattttaa

SEQ ID NO: 83572 - DNA, 13 bp, Artificial Sequence
  Oligonucleotide for detection of SNP TSC0021054
ttaaaataataat

SEQ ID NO: 83573 - DNA, 13 bp, Artificial Sequence
  Oligonucleotide for detection of SNP TSC0021054
attattgttttaa

SEQ ID NO: 83574 - DNA, 13 bp, Artificial Sequence
  Oligonucleotide for detection of SNP TSC0021054
ttaaaacaataat

SEQ ID NO: 83575 - DNA, 13 bp, Artificial Sequence
  Oligonucleotide for detection of SNP TSC0021055
tatagatgaaata

SEQ ID NO: 83576 - DNA, 13 bp, Artificial Sequence
  Oligonucleotide for detection of SNP TSC0021055
tatttcatctata

SEQ ID NO: 83577 - DNA, 13 bp, Artificial Sequence
  Oligonucleotide for detection of SNP TSC0021055
tatagacgaaata

SEQ ID NO: 83578 - DNA, 13 bp, Artificial Sequence
  Oligonucleotide for detection of SNP TSC0021055
tatttcgtctata

SEQ ID NO: 83579 - DNA, 13 bp, Artificial Sequence
  Oligonucleotide for detection of SNP TSC0021055
tattttgtttatg

SEQ ID NO: 83580 - DNA, 13 bp, Artificial Sequence
  Oligonucleotide for detection of SNP TSC0021055
cataaacaaaata

SEQ ID NO: 83581 - DNA, 13 bp, Artificial Sequence
  Oligonucleotide for detection of SNP TSC0021055
tattttatttatg

SEQ ID NO: 83582 - DNA, 13 bp, Artificial Sequence
  Oligonucleotide for detection of SNP TSC0021055
cataaataaaata

SEQ ID NO: 83583 - DNA, 13 bp, Artificial Sequence
  Oligonucleotide for detection of SNP TSC0021055
tatttcgtttatg

SEQ ID NO: 83584 - DNA, 13 bp, Artificial Sequence
  Oligonucleotide for detection of SNP TSC0021055
cataaacgaaata

SEQ ID NO: 83585 - DNA, 13 bp, Artificial Sequence
  Oligonucleotide for detection of SNP TSC0021059
ttatgtatttatt

SEQ ID NO: 83586 - DNA, 13 bp, Artificial Sequence
  Oligonucleotide for detection of SNP TSC0021059
aataaatacataa

SEQ ID NO: 83587 - DNA, 13 bp, Artificial Sequence
  Oligonucleotide for detection of SNP TSC0021059
aatgagcgtatga

SEQ ID NO: 83588 - DNA, 13 bp, Artificial Sequence
  Oligonucleotide for detection of SNP TSC0021059
tcatacgctcatt

SEQ ID NO: 83589 - DNA, 13 bp, Artificial Sequence
  Oligonucleotide for detection of SNP TSC0021060
tagttttggattt

SEQ ID NO: 83590 - DNA, 13 bp, Artificial Sequence
  Oligonucleotide for detection of SNP TSC0021060
aaatccaaaacta

SEQ ID NO: 83591 - DNA, 13 bp, Artificial Sequence
  Oligonucleotide for detection of SNP TSC0021060
tagtttcggattt

SEQ ID NO: 83592 - DNA, 13 bp, Artificial Sequence
  Oligonucleotide for detection of SNP TSC0021060
aaatccgaaacta

SEQ ID NO: 83593 - DNA, 13 bp, Artificial Sequence
  Oligonucleotide for detection of SNP TSC0021060
agatttggggttg

SEQ ID NO: 83594 - DNA, 13 bp, Artificial Sequence
  Oligonucleotide for detection of SNP TSC0021060
caaccccaaatct

SEQ ID NO: 83595 - DNA, 13 bp, Artificial Sequence
  Oligonucleotide for detection of SNP TSC0021060
agatttagggttg

SEQ ID NO: 83596 - DNA, 13 bp, Artificial Sequence
  Oligonucleotide for detection of SNP TSC0021060
caaccctaaatct

SEQ ID NO: 83597 - DNA, 13 bp, Artificial Sequence
  Oligonucleotide for detection of SNP TSC0021060
agattcggggttg

SEQ ID NO: 83598 - DNA, 13 bp, Artificial Sequence
  Oligonucleotide for detection of SNP TSC0021060
caaccccgaatct

SEQ ID NO: 83599 - DNA, 13 bp, Artificial Sequence
  Oligonucleotide for detection of SNP TSC0021061
tatgaaaggagat

SEQ ID NO: 83600 - DNA, 13 bp, Artificial Sequence
  Oligonucleotide for detection of SNP TSC0021061
atctcctttcata

SEQ ID NO: 83601 - DNA, 13 bp, Artificial Sequence
  Oligonucleotide for detection of SNP TSC0021061
tatgaagggagat

SEQ ID NO: 83602 - DNA, 13 bp, Artificial Sequence
  Oligonucleotide for detection of SNP TSC0021061
atctcccttcata

SEQ ID NO: 83603 - DNA, 13 bp, Artificial Sequence
  Oligonucleotide for detection of SNP TSC0021062
tgggtatgtgtta

SEQ ID NO: 83604 - DNA, 13 bp, Artificial Sequence
  Oligonucleotide for detection of SNP TSC0021062
taacacataccca

SEQ ID NO: 83605 - DNA, 13 bp, Artificial Sequence
  Oligonucleotide for detection of SNP TSC0021062
tgggtacgtgtta

SEQ ID NO: 83606 - DNA, 13 bp, Artificial Sequence
  Oligonucleotide for detection of SNP TSC0021062
taacacgtaccca

SEQ ID NO: 83607 - DNA, 13 bp, Artificial Sequence
  Oligonucleotide for detection of SNP TSC0021062
tgatatatgttta

SEQ ID NO: 83608 - DNA, 13 bp, Artificial Sequence
  Oligonucleotide for detection of SNP TSC0021062
taaacatatatca

SEQ ID NO: 83609 - DNA, 13 bp, Artificial Sequence
  Oligonucleotide for detection of SNP TSC0021063
aataatatgtatg

SEQ ID NO: 83610 - DNA, 13 bp, Artificial Sequence
  Oligonucleotide for detection of SNP TSC0021063
catacatattatt

SEQ ID NO: 83611 - DNA, 13 bp, Artificial Sequence
  Oligonucleotide for detection of SNP TSC0021063
aataatttgtatg

SEQ ID NO: 83612 - DNA, 13 bp, Artificial Sequence
  Oligonucleotide for detection of SNP TSC0021063
catacaaattatt

SEQ ID NO: 83613 - DNA, 13 bp, Artificial Sequence
  Oligonucleotide for detection of SNP TSC0021063
aataatacgtatg

SEQ ID NO: 83614 - DNA, 13 bp, Artificial Sequence
  Oligonucleotide for detection of SNP TSC0021063
catacgtattatt

SEQ ID NO: 83615 - DNA, 13 bp, Artificial Sequence
  Oligonucleotide for detection of SNP TSC0021063
aataattcgtatg

SEQ ID NO: 83616 - DNA, 13 bp, Artificial Sequence
  Oligonucleotide for detection of SNP TSC0021063
catacgaattatt

SEQ ID NO: 83617 - DNA, 13 bp, Artificial Sequence
  Oligonucleotide for detection of SNP TSC0021063
tatatgtgttgtt

SEQ ID NO: 83618 - DNA, 13 bp, Artificial Sequence
  Oligonucleotide for detection of SNP TSC0021063
aacaacacatata

SEQ ID NO: 83619 - DNA, 13 bp, Artificial Sequence
  Oligonucleotide for detection of SNP TSC0021063
tatatgggttgtt

SEQ ID NO: 83620 - DNA, 13 bp, Artificial Sequence
  Oligonucleotide for detection of SNP TSC0021063
aacaacccatata

SEQ ID NO: 83621 - DNA, 13 bp, Artificial Sequence
  Oligonucleotide for detection of SNP TSC0021063
tatacgtgttgtt

SEQ ID NO: 83622 - DNA, 13 bp, Artificial Sequence
  Oligonucleotide for detection of SNP TSC0021063
aacaacacgtata

SEQ ID NO: 83623 - DNA, 13 bp, Artificial Sequence
  Oligonucleotide for detection of SNP TSC0021063
tatacgggttgtt

SEQ ID NO: 83624 - DNA, 13 bp, Artificial Sequence
  Oligonucleotide for detection of SNP TSC0021063
aacaacccgtata

SEQ ID NO: 83625 - DNA, 13 bp, Artificial Sequence
  Oligonucleotide for detection of SNP TSC0021064
taggttaggtatg

SEQ ID NO: 83626 - DNA, 13 bp, Artificial Sequence
  Oligonucleotide for detection of SNP TSC0021064
catacctaaccta

SEQ ID NO: 83627 - DNA, 13 bp, Artificial Sequence
  Oligonucleotide for detection of SNP TSC0021064
taggttgggtatg

SEQ ID NO: 83628 - DNA, 13 bp, Artificial Sequence
  Oligonucleotide for detection of SNP TSC0021064
catacccaaccta

SEQ ID NO: 83629 - DNA, 13 bp, Artificial Sequence
  Oligonucleotide for detection of SNP TSC0021064
taggttaggtacg

SEQ ID NO: 83630 - DNA, 13 bp, Artificial Sequence
  Oligonucleotide for detection of SNP TSC0021064
cgtacctaaccta

SEQ ID NO: 83631 - DNA, 13 bp, Artificial Sequence
  Oligonucleotide for detection of SNP TSC0021064
taggtcgggtatg

SEQ ID NO: 83632 - DNA, 13 bp, Artificial Sequence
  Oligonucleotide for detection of SNP TSC0021064
catacccgaccta

SEQ ID NO: 83633 - DNA, 13 bp, Artificial Sequence
  Oligonucleotide for detection of SNP TSC0021064
taggttgggtacg

SEQ ID NO: 83634 - DNA, 13 bp, Artificial Sequence
  Oligonucleotide for detection of SNP TSC0021064
cgtacccaaccta

SEQ ID NO: 83635 - DNA, 13 bp, Artificial Sequence
  Oligonucleotide for detection of SNP TSC0021064
taggtcgggtacg

SEQ ID NO: 83636 - DNA, 13 bp, Artificial Sequence
  Oligonucleotide for detection of SNP TSC0021064
cgtacccgaccta

SEQ ID NO: 83637 - DNA, 13 bp, Artificial Sequence
  Oligonucleotide for detection of SNP TSC0021064
tgtgtttggtttg

SEQ ID NO: 83638 - DNA, 13 bp, Artificial Sequence
  Oligonucleotide for detection of SNP TSC0021064
caaaccaaacaca

SEQ ID NO: 83639 - DNA, 13 bp, Artificial Sequence
  Oligonucleotide for detection of SNP TSC0021064
cgtgtttggtttg

SEQ ID NO: 83640 - DNA, 13 bp, Artificial Sequence
  Oligonucleotide for detection of SNP TSC0021064
caaaccaaacacg

SEQ ID NO: 83641 - DNA, 13 bp, Artificial Sequence
  Oligonucleotide for detection of SNP TSC0021064
tgtgttcggtttg

SEQ ID NO: 83642 - DNA, 13 bp, Artificial Sequence
  Oligonucleotide for detection of SNP TSC0021064
caaaccgaacaca

SEQ ID NO: 83643 - DNA, 13 bp, Artificial Sequence
  Oligonucleotide for detection of SNP TSC0021064
cgtgttcggtttg

SEQ ID NO: 83644 - DNA, 13 bp, Artificial Sequence
  Oligonucleotide for detection of SNP TSC0021064
caaaccgaacacg

SEQ ID NO: 83645 - DNA, 13 bp, Artificial Sequence
  Oligonucleotide for detection of SNP TSC0021065
tgttatgtattty

SEQ ID NO: 83646 - DNA, 13 bp, Artificial Sequence
  Oligonucleotide for detection of SNP TSC0021065
raaatacataaca

SEQ ID NO: 83647 - DNA, 13 bp, Artificial Sequence
  Oligonucleotide for detection of SNP TSC0021065
tgttatatattty

SEQ ID NO: 83648 - DNA, 13 bp, Artificial Sequence
  Oligonucleotide for detection of SNP TSC0021065
raaatatataaca

SEQ ID NO: 83649 - DNA, 13 bp, Artificial Sequence
  Oligonucleotide for detection of SNP TSC0021067
tttgggtttgaty

SEQ ID NO: 83650 - DNA, 13 bp, Artificial Sequence
  Oligonucleotide for detection of SNP TSC0021067
ratcaaacccaaa

SEQ ID NO: 83651 - DNA, 13 bp, Artificial Sequence
  Oligonucleotide for detection of SNP TSC0021067
ttcgggtttgaty

SEQ ID NO: 83652 - DNA, 13 bp, Artificial Sequence
  Oligonucleotide for detection of SNP TSC0021067
ratcaaacccgaa

SEQ ID NO: 83653 - DNA, 13 bp, Artificial Sequence
  Oligonucleotide for detection of SNP TSC0021067
gattaggtttggg

SEQ ID NO: 83654 - DNA, 13 bp, Artificial Sequence
  Oligonucleotide for detection of SNP TSC0021067
cccaaacctaatc

SEQ ID NO: 83655 - DNA, 13 bp, Artificial Sequence
  Oligonucleotide for detection of SNP TSC0021067
gattagttttggg

SEQ ID NO: 83656 - DNA, 13 bp, Artificial Sequence
  Oligonucleotide for detection of SNP TSC0021067
cccaaaactaatc

SEQ ID NO: 83657 - DNA, 13 bp, Artificial Sequence
  Oligonucleotide for detection of SNP TSC0021067
gattaggttcggg

SEQ ID NO: 83658 - DNA, 13 bp, Artificial Sequence
  Oligonucleotide for detection of SNP TSC0021067
cccgaacctaatc

SEQ ID NO: 83659 - DNA, 13 bp, Artificial Sequence
  Oligonucleotide for detection of SNP TSC0021067
gattagtttcggg

SEQ ID NO: 83660 - DNA, 13 bp, Artificial Sequence
  Oligonucleotide for detection of SNP TSC0021067
cccgaaactaatc

SEQ ID NO: 83661 - DNA, 13 bp, Artificial Sequence
  Oligonucleotide for detection of SNP TSC0021068
aaagtagtattgy

SEQ ID NO: 83662 - DNA, 13 bp, Artificial Sequence
  Oligonucleotide for detection of SNP TSC0021068
rcaatactacttt

SEQ ID NO: 83663 - DNA, 13 bp, Artificial Sequence
  Oligonucleotide for detection of SNP TSC0021068
aaagtattattgy

SEQ ID NO: 83664 - DNA, 13 bp, Artificial Sequence
  Oligonucleotide for detection of SNP TSC0021068
rcaataatacttt

SEQ ID NO: 83665 - DNA, 13 bp, Artificial Sequence
  Oligonucleotide for detection of SNP TSC0021068
gtaatattatttt

SEQ ID NO: 83666 - DNA, 13 bp, Artificial Sequence
  Oligonucleotide for detection of SNP TSC0021068
aaaataatattac

SEQ ID NO: 83667 - DNA, 13 bp, Artificial Sequence
  Oligonucleotide for detection of SNP TSC0021068
gtaataatatttt

SEQ ID NO: 83668 - DNA, 13 bp, Artificial Sequence
  Oligonucleotide for detection of SNP TSC0021068
aaaatattattac

SEQ ID NO: 83669 - DNA, 13 bp, Artificial Sequence
  Oligonucleotide for detection of SNP TSC0021069
gtggtgatttatg

SEQ ID NO: 83670 - DNA, 13 bp, Artificial Sequence
  Oligonucleotide for detection of SNP TSC0021069
cataaatcaccac

SEQ ID NO: 83671 - DNA, 13 bp, Artificial Sequence
  Oligonucleotide for detection of SNP TSC0021069
gtggtggtttatg

SEQ ID NO: 83672 - DNA, 13 bp, Artificial Sequence
  Oligonucleotide for detection of SNP TSC0021069
cataaaccaccac

SEQ ID NO: 83673 - DNA, 13 bp, Artificial Sequence
  Oligonucleotide for detection of SNP TSC0021069
gtggtgatttacg

SEQ ID NO: 83674 - DNA, 13 bp, Artificial Sequence
  Oligonucleotide for detection of SNP TSC0021069
cgtaaatcaccac

SEQ ID NO: 83675 - DNA, 13 bp, Artificial Sequence
  Oligonucleotide for detection of SNP TSC0021069
gtggtggtttacg

SEQ ID NO: 83676 - DNA, 13 bp, Artificial Sequence
  Oligonucleotide for detection of SNP TSC0021069
cgtaaaccaccac

SEQ ID NO: 83677 - DNA, 13 bp, Artificial Sequence
  Oligonucleotide for detection of SNP TSC0021070
gtgatttatgttt

SEQ ID NO: 83678 - DNA, 13 bp, Artificial Sequence
  Oligonucleotide for detection of SNP TSC0021070
aaacataaatcac

SEQ ID NO: 83679 - DNA, 13 bp, Artificial Sequence
  Oligonucleotide for detection of SNP TSC0021070
gtgattgatgttt

SEQ ID NO: 83680 - DNA, 13 bp, Artificial Sequence
  Oligonucleotide for detection of SNP TSC0021070
aaacatcaatcac

SEQ ID NO: 83681 - DNA, 13 bp, Artificial Sequence
  Oligonucleotide for detection of SNP TSC0021070
gtgatttacgttt

SEQ ID NO: 83682 - DNA, 13 bp, Artificial Sequence
  Oligonucleotide for detection of SNP TSC0021070
aaacgtaaatcac

SEQ ID NO: 83683 - DNA, 13 bp, Artificial Sequence
  Oligonucleotide for detection of SNP TSC0021070
gtgattgacgttt

SEQ ID NO: 83684 - DNA, 13 bp, Artificial Sequence
  Oligonucleotide for detection of SNP TSC0021070
aaacgtcaatcac

SEQ ID NO: 83685 - DNA, 13 bp, Artificial Sequence
  Oligonucleotide for detection of SNP TSC0021070
aggtgttagttay

SEQ ID NO: 83686 - DNA, 13 bp, Artificial Sequence
  Oligonucleotide for detection of SNP TSC0021070
rtaactaacacct

SEQ ID NO: 83687 - DNA, 13 bp, Artificial Sequence
  Oligonucleotide for detection of SNP TSC0021070
aggcgttagttay

SEQ ID NO: 83688 - DNA, 13 bp, Artificial Sequence
  Oligonucleotide for detection of SNP TSC0021070
rtaactaacgcct

SEQ ID NO: 83689 - DNA, 13 bp, Artificial Sequence
  Oligonucleotide for detection of SNP TSC0021071
tatataatattay

SEQ ID NO: 83690 - DNA, 13 bp, Artificial Sequence
  Oligonucleotide for detection of SNP TSC0021071
rtaatattatata

SEQ ID NO: 83691 - DNA, 13 bp, Artificial Sequence
  Oligonucleotide for detection of SNP TSC0021071
tatatagtattay

SEQ ID NO: 83692 - DNA, 13 bp, Artificial Sequence
  Oligonucleotide for detection of SNP TSC0021071
rtaatactatata

SEQ ID NO: 83693 - DNA, 13 bp, Artificial Sequence
  Oligonucleotide for detection of SNP TSC0021074
attttaatatgty

SEQ ID NO: 83694 - DNA, 13 bp, Artificial Sequence
  Oligonucleotide for detection of SNP TSC0021074
racatattaaaat

SEQ ID NO: 83695 - DNA, 13 bp, Artificial Sequence
  Oligonucleotide for detection of SNP TSC0021074
attttagtatgty

SEQ ID NO: 83696 - DNA, 13 bp, Artificial Sequence
  Oligonucleotide for detection of SNP TSC0021074
racatactaaaat

SEQ ID NO: 83697 - DNA, 13 bp, Artificial Sequence
  Oligonucleotide for detection of SNP TSC0021075
ttgtatgataagt

SEQ ID NO: 83698 - DNA, 13 bp, Artificial Sequence
  Oligonucleotide for detection of SNP TSC0021075
acttatcatacaa

SEQ ID NO: 83699 - DNA, 13 bp, Artificial Sequence
  Oligonucleotide for detection of SNP TSC0021075
ttgtataataagt

SEQ ID NO: 83700 - DNA, 13 bp, Artificial Sequence
  Oligonucleotide for detection of SNP TSC0021075
acttattatacaa

SEQ ID NO: 83701 - DNA, 13 bp, Artificial Sequence
  Oligonucleotide for detection of SNP TSC0021076
tgttgtgtgttty

SEQ ID NO: 83702 - DNA, 13 bp, Artificial Sequence
  Oligonucleotide for detection of SNP TSC0021076
raaacacacaaca

SEQ ID NO: 83703 - DNA, 13 bp, Artificial Sequence
  Oligonucleotide for detection of SNP TSC0021076
tgttgtatgttty

SEQ ID NO: 83704 - DNA, 13 bp, Artificial Sequence
  Oligonucleotide for detection of SNP TSC0021076
raaacatacaaca

SEQ ID NO: 83705 - DNA, 13 bp, Artificial Sequence
  Oligonucleotide for detection of SNP TSC0021076
cgttgtgtgttty

SEQ ID NO: 83706 - DNA, 13 bp, Artificial Sequence
  Oligonucleotide for detection of SNP TSC0021076
raaacacacaacg

SEQ ID NO: 83707 - DNA, 13 bp, Artificial Sequence
  Oligonucleotide for detection of SNP TSC0021076
cgttgtatgttty

SEQ ID NO: 83708 - DNA, 13 bp, Artificial Sequence
  Oligonucleotide for detection of SNP TSC0021076
raaacatacaacg

SEQ ID NO: 83709 - DNA, 13 bp, Artificial Sequence
  Oligonucleotide for detection of SNP TSC0021077
atattggatttay

SEQ ID NO: 83710 - DNA, 13 bp, Artificial Sequence
  Oligonucleotide for detection of SNP TSC0021077
rtaaatccaatat

SEQ ID NO: 83711 - DNA, 13 bp, Artificial Sequence
  Oligonucleotide for detection of SNP TSC0021077
atattgtatttay

SEQ ID NO: 83712 - DNA, 13 bp, Artificial Sequence
  Oligonucleotide for detection of SNP TSC0021077
rtaaatacaatat

SEQ ID NO: 83713 - DNA, 13 bp, Artificial Sequence
  Oligonucleotide for detection of SNP TSC0021077
atatcggatttay

SEQ ID NO: 83714 - DNA, 13 bp, Artificial Sequence
  Oligonucleotide for detection of SNP TSC0021077
rtaaatccgatat

SEQ ID NO: 83715 - DNA, 13 bp, Artificial Sequence
  Oligonucleotide for detection of SNP TSC0021077
atatcgtatttay

SEQ ID NO: 83716 - DNA, 13 bp, Artificial Sequence
  Oligonucleotide for detection of SNP TSC0021077
rtaaatacgatat

SEQ ID NO: 83717 - DNA, 13 bp, Artificial Sequence
  Oligonucleotide for detection of SNP TSC0021077
gtgagtttggtgt

SEQ ID NO: 83718 - DNA, 13 bp, Artificial Sequence
  Oligonucleotide for detection of SNP TSC0021077
acaccaaactcac

SEQ ID NO: 83719 - DNA, 13 bp, Artificial Sequence
  Oligonucleotide for detection of SNP TSC0021077
gtgagtatggtgt

SEQ ID NO: 83720 - DNA, 13 bp, Artificial Sequence
  Oligonucleotide for detection of SNP TSC0021077
acaccatactcac

SEQ ID NO: 83721 - DNA, 13 bp, Artificial Sequence
  Oligonucleotide for detection of SNP TSC0021077
gtgagttcggtgt

SEQ ID NO: 83722 - DNA, 13 bp, Artificial Sequence
  Oligonucleotide for detection of SNP TSC0021077
acaccgaactcac

SEQ ID NO: 83723 - DNA, 13 bp, Artificial Sequence
  Oligonucleotide for detection of SNP TSC0021077
gtgagtacggtgt

SEQ ID NO: 83724 - DNA, 13 bp, Artificial Sequence
  Oligonucleotide for detection of SNP TSC0021077
acaccgtactcac

SEQ ID NO: 83725 - DNA, 13 bp, Artificial Sequence
  Oligonucleotide for detection of SNP TSC0021078
ttaatttgttaty

SEQ ID NO: 83726 - DNA, 13 bp, Artificial Sequence
  Oligonucleotide for detection of SNP TSC0021078
rataacaaattaa

SEQ ID NO: 83727 - DNA, 13 bp, Artificial Sequence
  Oligonucleotide for detection of SNP TSC0021078
ttaattcgttaty

SEQ ID NO: 83728 - DNA, 13 bp, Artificial Sequence
  Oligonucleotide for detection of SNP TSC0021078
rataacgaattaa

SEQ ID NO: 83729 - DNA, 13 bp, Artificial Sequence
  Oligonucleotide for detection of SNP TSC0021078
gatgatgggttga

SEQ ID NO: 83730 - DNA, 13 bp, Artificial Sequence
  Oligonucleotide for detection of SNP TSC0021078
tcaacccatcatc

SEQ ID NO: 83731 - DNA, 13 bp, Artificial Sequence
  Oligonucleotide for detection of SNP TSC0021078
gatgataggttga

SEQ ID NO: 83732 - DNA, 13 bp, Artificial Sequence
  Oligonucleotide for detection of SNP TSC0021078
tcaacctatcatc

SEQ ID NO: 83733 - DNA, 13 bp, Artificial Sequence
  Oligonucleotide for detection of SNP TSC0021078
gatgacgggttga

SEQ ID NO: 83734 - DNA, 13 bp, Artificial Sequence
  Oligonucleotide for detection of SNP TSC0021078
tcaacccgtcatc

SEQ ID NO: 83735 - DNA, 13 bp, Artificial Sequence
  Oligonucleotide for detection of SNP TSC0021079
gatgaagttggaa

SEQ ID NO: 83736 - DNA, 13 bp, Artificial Sequence
  Oligonucleotide for detection of SNP TSC0021079
ttccaacttcatc

SEQ ID NO: 83737 - DNA, 13 bp, Artificial Sequence
  Oligonucleotide for detection of SNP TSC0021079
gatgaaattggaa

SEQ ID NO: 83738 - DNA, 13 bp, Artificial Sequence
  Oligonucleotide for detection of SNP TSC0021079
ttccaatttcatc

SEQ ID NO: 83739 - DNA, 13 bp, Artificial Sequence
  Oligonucleotide for detection of SNP TSC0021080
ttgttagatgagg

SEQ ID NO: 83740 - DNA, 13 bp, Artificial Sequence
  Oligonucleotide for detection of SNP TSC0021080
cctcatctaacaa

SEQ ID NO: 83741 - DNA, 13 bp, Artificial Sequence
  Oligonucleotide for detection of SNP TSC0021080
ttgttaaatgagg

SEQ ID NO: 83742 - DNA, 13 bp, Artificial Sequence
  Oligonucleotide for detection of SNP TSC0021080
cctcatttaacaa

SEQ ID NO: 83743 - DNA, 13 bp, Artificial Sequence
  Oligonucleotide for detection of SNP TSC0021081
ttatgagttttta

SEQ ID NO: 83744 - DNA, 13 bp, Artificial Sequence
  Oligonucleotide for detection of SNP TSC0021081
taaaaactcataa

SEQ ID NO: 83745 - DNA, 13 bp, Artificial Sequence
  Oligonucleotide for detection of SNP TSC0021081
ttatgaattttta

SEQ ID NO: 83746 - DNA, 13 bp, Artificial Sequence
  Oligonucleotide for detection of SNP TSC0021081
taaaaattcataa

SEQ ID NO: 83747 - DNA, 13 bp, Artificial Sequence
  Oligonucleotide for detection of SNP TSC0021081
ttacgagttttta

SEQ ID NO: 83748 - DNA, 13 bp, Artificial Sequence
  Oligonucleotide for detection of SNP TSC0021081
taaaaactcgtaa

SEQ ID NO: 83749 - DNA, 13 bp, Artificial Sequence
  Oligonucleotide for detection of SNP TSC0021081
ttacgaattttta

SEQ ID NO: 83750 - DNA, 13 bp, Artificial Sequence
  Oligonucleotide for detection of SNP TSC0021081
taaaaattcgtaa

SEQ ID NO: 83751 - DNA, 13 bp, Artificial Sequence
  Oligonucleotide for detection of SNP TSC0021082
aaaggaaggaaga

SEQ ID NO: 83752 - DNA, 13 bp, Artificial Sequence
  Oligonucleotide for detection of SNP TSC0021082
tcttccttccttt

SEQ ID NO: 83753 - DNA, 13 bp, Artificial Sequence
  Oligonucleotide for detection of SNP TSC0021082
aaaggagggaaga

SEQ ID NO: 83754 - DNA, 13 bp, Artificial Sequence
  Oligonucleotide for detection of SNP TSC0021082
tcttccctccttt

SEQ ID NO: 83755 - DNA, 13 bp, Artificial Sequence
  Oligonucleotide for detection of SNP TSC0021083
ggtgatatttaaa

SEQ ID NO: 83756 - DNA, 13 bp, Artificial Sequence
  Oligonucleotide for detection of SNP TSC0021083
tttaaatatcacc

SEQ ID NO: 83757 - DNA, 13 bp, Artificial Sequence
  Oligonucleotide for detection of SNP TSC0021083
ggtgatttttaaa

SEQ ID NO: 83758 - DNA, 13 bp, Artificial Sequence
  Oligonucleotide for detection of SNP TSC0021083
tttaaaaatcacc

SEQ ID NO: 83759 - DNA, 13 bp, Artificial Sequence
  Oligonucleotide for detection of SNP TSC0021083
tttaggtgttaty

SEQ ID NO: 83760 - DNA, 13 bp, Artificial Sequence
  Oligonucleotide for detection of SNP TSC0021083
rataacacctaaa

SEQ ID NO: 83761 - DNA, 13 bp, Artificial Sequence
  Oligonucleotide for detection of SNP TSC0021083
tttaggagttaty

SEQ ID NO: 83762 - DNA, 13 bp, Artificial Sequence
  Oligonucleotide for detection of SNP TSC0021083
rataactcctaaa

SEQ ID NO: 83763 - DNA, 13 bp, Artificial Sequence
  Oligonucleotide for detection of SNP TSC0021084
ttaatataaaaga

SEQ ID NO: 83764 - DNA, 13 bp, Artificial Sequence
  Oligonucleotide for detection of SNP TSC0021084
tcttttatattaa

SEQ ID NO: 83765 - DNA, 13 bp, Artificial Sequence
  Oligonucleotide for detection of SNP TSC0021084
ttaatagaaaaga

SEQ ID NO: 83766 - DNA, 13 bp, Artificial Sequence
  Oligonucleotide for detection of SNP TSC0021084
tcttttctattaa

SEQ ID NO: 83767 - DNA, 13 bp, Artificial Sequence
  Oligonucleotide for detection of SNP TSC0021084
ttttttgtattgg

SEQ ID NO: 83768 - DNA, 13 bp, Artificial Sequence
  Oligonucleotide for detection of SNP TSC0021084
ccaatacaaaaaa

SEQ ID NO: 83769 - DNA, 13 bp, Artificial Sequence
  Oligonucleotide for detection of SNP TSC0021084
ttttttttattgg

SEQ ID NO: 83770 - DNA, 13 bp, Artificial Sequence
  Oligonucleotide for detection of SNP TSC0021084
ccaataaaaaaaa

SEQ ID NO: 83771 - DNA, 13 bp, Artificial Sequence
  Oligonucleotide for detection of SNP TSC0021089
tgggattattatt

SEQ ID NO: 83772 - DNA, 13 bp, Artificial Sequence
  Oligonucleotide for detection of SNP TSC0021089
aataataatccca

SEQ ID NO: 83773 - DNA, 13 bp, Artificial Sequence
  Oligonucleotide for detection of SNP TSC0021089
tgggatgattatt

SEQ ID NO: 83774 - DNA, 13 bp, Artificial Sequence
  Oligonucleotide for detection of SNP TSC0021089
aataatcatccca

SEQ ID NO: 83775 - DNA, 13 bp, Artificial Sequence
  Oligonucleotide for detection of SNP TSC0021089
tgggacgattatt

SEQ ID NO: 83776 - DNA, 13 bp, Artificial Sequence
  Oligonucleotide for detection of SNP TSC0021089
aataatcgtccca

SEQ ID NO: 83777 - DNA, 13 bp, Artificial Sequence
  Oligonucleotide for detection of SNP TSC0021089
aatggtggtttta

SEQ ID NO: 83778 - DNA, 13 bp, Artificial Sequence
  Oligonucleotide for detection of SNP TSC0021089
taaaaccaccatt

SEQ ID NO: 83779 - DNA, 13 bp, Artificial Sequence
  Oligonucleotide for detection of SNP TSC0021089
aatggttgtttta

SEQ ID NO: 83780 - DNA, 13 bp, Artificial Sequence
  Oligonucleotide for detection of SNP TSC0021089
taaaacaaccatt

SEQ ID NO: 83781 - DNA, 13 bp, Artificial Sequence
  Oligonucleotide for detection of SNP TSC0021089
aatggtcgtttta

SEQ ID NO: 83782 - DNA, 13 bp, Artificial Sequence
  Oligonucleotide for detection of SNP TSC0021089
taaaacgaccatt

SEQ ID NO: 83783 - DNA, 13 bp, Artificial Sequence
  Oligonucleotide for detection of SNP TSC0021094
aataaatgaatgt

SEQ ID NO: 83784 - DNA, 13 bp, Artificial Sequence
  Oligonucleotide for detection of SNP TSC0021094
acattcatttatt

SEQ ID NO: 83785 - DNA, 13 bp, Artificial Sequence
  Oligonucleotide for detection of SNP TSC0021094
aataaacgaatgt

SEQ ID NO: 83786 - DNA, 13 bp, Artificial Sequence
  Oligonucleotide for detection of SNP TSC0021094
acattcgtttatt

SEQ ID NO: 83787 - DNA, 13 bp, Artificial Sequence
  Oligonucleotide for detection of SNP TSC0021094
atatttgtttatt

SEQ ID NO: 83788 - DNA, 13 bp, Artificial Sequence
  Oligonucleotide for detection of SNP TSC0021094
aataaacaaatat

SEQ ID NO: 83789 - DNA, 13 bp, Artificial Sequence
  Oligonucleotide for detection of SNP TSC0021094
atatttatttatt

SEQ ID NO: 83790 - DNA, 13 bp, Artificial Sequence
  Oligonucleotide for detection of SNP TSC0021094
aataaataaatat

SEQ ID NO: 83791 - DNA, 13 bp, Artificial Sequence
  Oligonucleotide for detection of SNP TSC0021094
atattcgtttatt

SEQ ID NO: 83792 - DNA, 13 bp, Artificial Sequence
  Oligonucleotide for detection of SNP TSC0021094
aataaacgaatat

SEQ ID NO: 83793 - DNA, 13 bp, Artificial Sequence
  Oligonucleotide for detection of SNP TSC0021095
tagtggagatagy

SEQ ID NO: 83794 - DNA, 13 bp, Artificial Sequence
  Oligonucleotide for detection of SNP TSC0021095
rctatctccacta

SEQ ID NO: 83795 - DNA, 13 bp, Artificial Sequence
  Oligonucleotide for detection of SNP TSC0021095
tagtggggatagy

SEQ ID NO: 83796 - DNA, 13 bp, Artificial Sequence
  Oligonucleotide for detection of SNP TSC0021095
rctatccccacta

SEQ ID NO: 83797 - DNA, 13 bp, Artificial Sequence
  Oligonucleotide for detection of SNP TSC0021096
atagaggtatttg

SEQ ID NO: 83798 - DNA, 13 bp, Artificial Sequence
  Oligonucleotide for detection of SNP TSC0021096
caaatacctctat

SEQ ID NO: 83799 - DNA, 13 bp, Artificial Sequence
  Oligonucleotide for detection of SNP TSC0021096
atagagatatttg

SEQ ID NO: 83800 - DNA, 13 bp, Artificial Sequence
  Oligonucleotide for detection of SNP TSC0021096
caaatatctctat

SEQ ID NO: 83801 - DNA, 13 bp, Artificial Sequence
  Oligonucleotide for detection of SNP TSC0021097
agggtatgtgtty

SEQ ID NO: 83802 - DNA, 13 bp, Artificial Sequence
  Oligonucleotide for detection of SNP TSC0021097
raacacataccct

SEQ ID NO: 83803 - DNA, 13 bp, Artificial Sequence
  Oligonucleotide for detection of SNP TSC0021097
agggtacgtgtty

SEQ ID NO: 83804 - DNA, 13 bp, Artificial Sequence
  Oligonucleotide for detection of SNP TSC0021097
raacacgtaccct

SEQ ID NO: 83805 - DNA, 13 bp, Artificial Sequence
  Oligonucleotide for detection of SNP TSC0021097
gggtatgtatttt

SEQ ID NO: 83806 - DNA, 13 bp, Artificial Sequence
  Oligonucleotide for detection of SNP TSC0021097
aaaatacataccc

SEQ ID NO: 83807 - DNA, 13 bp, Artificial Sequence
  Oligonucleotide for detection of SNP TSC0021097
gggtatatatttt

SEQ ID NO: 83808 - DNA, 13 bp, Artificial Sequence
  Oligonucleotide for detection of SNP TSC0021097
aaaatatataccc

SEQ ID NO: 83809 - DNA, 13 bp, Artificial Sequence
  Oligonucleotide for detection of SNP TSC0021097
gggtacgtatttt

SEQ ID NO: 83810 - DNA, 13 bp, Artificial Sequence
  Oligonucleotide for detection of SNP TSC0021097
aaaatacgtaccc

SEQ ID NO: 83811 - DNA, 13 bp, Artificial Sequence
  Oligonucleotide for detection of SNP TSC0021098
tagtttgtatttt

SEQ ID NO: 83812 - DNA, 13 bp, Artificial Sequence
  Oligonucleotide for detection of SNP TSC0021098
aaaatacaaacta

SEQ ID NO: 83813 - DNA, 13 bp, Artificial Sequence
  Oligonucleotide for detection of SNP TSC0021098
tagtttatatttt

SEQ ID NO: 83814 - DNA, 13 bp, Artificial Sequence
  Oligonucleotide for detection of SNP TSC0021098
aaaatataaacta

SEQ ID NO: 83815 - DNA, 13 bp, Artificial Sequence
  Oligonucleotide for detection of SNP TSC0021099
aagtttaggatta

SEQ ID NO: 83816 - DNA, 13 bp, Artificial Sequence
  Oligonucleotide for detection of SNP TSC0021099
taatcctaaactt

SEQ ID NO: 83817 - DNA, 13 bp, Artificial Sequence
  Oligonucleotide for detection of SNP TSC0021099
aagttcgggatta

SEQ ID NO: 83818 - DNA, 13 bp, Artificial Sequence
  Oligonucleotide for detection of SNP TSC0021099
taatcccgaactt

SEQ ID NO: 83819 - DNA, 13 bp, Artificial Sequence
  Oligonucleotide for detection of SNP TSC0021099
tgattttggattt

SEQ ID NO: 83820 - DNA, 13 bp, Artificial Sequence
  Oligonucleotide for detection of SNP TSC0021099
aaatccaaaatca

SEQ ID NO: 83821 - DNA, 13 bp, Artificial Sequence
  Oligonucleotide for detection of SNP TSC0021099
tgatttcggattt

SEQ ID NO: 83822 - DNA, 13 bp, Artificial Sequence
  Oligonucleotide for detection of SNP TSC0021099
aaatccgaaatca

SEQ ID NO: 83823 - DNA, 13 bp, Artificial Sequence
  Oligonucleotide for detection of SNP TSC0021100
attttattattty

SEQ ID NO: 83824 - DNA, 13 bp, Artificial Sequence
  Oligonucleotide for detection of SNP TSC0021100
raaataataaaat

SEQ ID NO: 83825 - DNA, 13 bp, Artificial Sequence
  Oligonucleotide for detection of SNP TSC0021100
gaaatattgaagt

SEQ ID NO: 83826 - DNA, 13 bp, Artificial Sequence
  Oligonucleotide for detection of SNP TSC0021100
acttcaatatttc

SEQ ID NO: 83827 - DNA, 13 bp, Artificial Sequence
  Oligonucleotide for detection of SNP TSC0021100
gaaatagtgaagt

SEQ ID NO: 83828 - DNA, 13 bp, Artificial Sequence
  Oligonucleotide for detection of SNP TSC0021100
acttcactatttc

SEQ ID NO: 83829 - DNA, 13 bp, Artificial Sequence
  Oligonucleotide for detection of SNP TSC0021101
ttttgttgttaty

SEQ ID NO: 83830 - DNA, 13 bp, Artificial Sequence
  Oligonucleotide for detection of SNP TSC0021101
rataacaacaaaa

SEQ ID NO: 83831 - DNA, 13 bp, Artificial Sequence
  Oligonucleotide for detection of SNP TSC0021101
ttttgtcgttaty

SEQ ID NO: 83832 - DNA, 13 bp, Artificial Sequence
  Oligonucleotide for detection of SNP TSC0021101
rataacgacaaaa

SEQ ID NO: 83833 - DNA, 13 bp, Artificial Sequence
  Oligonucleotide for detection of SNP TSC0021101
gatgatggtaaag

SEQ ID NO: 83834 - DNA, 13 bp, Artificial Sequence
  Oligonucleotide for detection of SNP TSC0021101
ctttaccatcatc

SEQ ID NO: 83835 - DNA, 13 bp, Artificial Sequence
  Oligonucleotide for detection of SNP TSC0021101
gatgatagtaaag

SEQ ID NO: 83836 - DNA, 13 bp, Artificial Sequence
  Oligonucleotide for detection of SNP TSC0021101
ctttactatcatc

SEQ ID NO: 83837 - DNA, 13 bp, Artificial Sequence
  Oligonucleotide for detection of SNP TSC0021101
gatgacggtaaag

SEQ ID NO: 83838 - DNA, 13 bp, Artificial Sequence
  Oligonucleotide for detection of SNP TSC0021101
ctttaccgtcatc

SEQ ID NO: 83839 - DNA, 13 bp, Artificial Sequence
  Oligonucleotide for detection of SNP TSC0021102
gtggggagaatta

SEQ ID NO: 83840 - DNA, 13 bp, Artificial Sequence
  Oligonucleotide for detection of SNP TSC0021102
taattctccccac

SEQ ID NO: 83841 - DNA, 13 bp, Artificial Sequence
  Oligonucleotide for detection of SNP TSC0021102
gtggggggaatta

SEQ ID NO: 83842 - DNA, 13 bp, Artificial Sequence
  Oligonucleotide for detection of SNP TSC0021102
taattccccccac

SEQ ID NO: 83843 - DNA, 13 bp, Artificial Sequence
  Oligonucleotide for detection of SNP TSC0021106
ttttgttgttagg

SEQ ID NO: 83844 - DNA, 13 bp, Artificial Sequence
  Oligonucleotide for detection of SNP TSC0021106
cctaacaacaaaa

SEQ ID NO: 83845 - DNA, 13 bp, Artificial Sequence
  Oligonucleotide for detection of SNP TSC0021106
ttttgtcgttagg

SEQ ID NO: 83846 - DNA, 13 bp, Artificial Sequence
  Oligonucleotide for detection of SNP TSC0021106
cctaacgacaaaa

SEQ ID NO: 83847 - DNA, 13 bp, Artificial Sequence
  Oligonucleotide for detection of SNP TSC0021106
tttggtgataaag

SEQ ID NO: 83848 - DNA, 13 bp, Artificial Sequence
  Oligonucleotide for detection of SNP TSC0021106
ctttatcaccaaa

SEQ ID NO: 83849 - DNA, 13 bp, Artificial Sequence
  Oligonucleotide for detection of SNP TSC0021106
tttggtaataaag

SEQ ID NO: 83850 - DNA, 13 bp, Artificial Sequence
  Oligonucleotide for detection of SNP TSC0021106
ctttattaccaaa

SEQ ID NO: 83851 - DNA, 13 bp, Artificial Sequence
  Oligonucleotide for detection of SNP TSC0021106
tttggcgataaag

SEQ ID NO: 83852 - DNA, 13 bp, Artificial Sequence
  Oligonucleotide for detection of SNP TSC0021106
ctttatcgccaaa

SEQ ID NO: 83853 - DNA, 13 bp, Artificial Sequence
  Oligonucleotide for detection of SNP TSC0021107
ataggtataagty

SEQ ID NO: 83854 - DNA, 13 bp, Artificial Sequence
  Oligonucleotide for detection of SNP TSC0021107
racttatacctat

SEQ ID NO: 83855 - DNA, 13 bp, Artificial Sequence
  Oligonucleotide for detection of SNP TSC0021107
ataggtgtaagty

SEQ ID NO: 83856 - DNA, 13 bp, Artificial Sequence
  Oligonucleotide for detection of SNP TSC0021107
racttacacctat

SEQ ID NO: 83857 - DNA, 13 bp, Artificial Sequence
  Oligonucleotide for detection of SNP TSC0021107
ataggcgtaagty

SEQ ID NO: 83858 - DNA, 13 bp, Artificial Sequence
  Oligonucleotide for detection of SNP TSC0021107
racttacgcctat

SEQ ID NO: 83859 - DNA, 13 bp, Artificial Sequence
  Oligonucleotide for detection of SNP TSC0021108
atttttagggaga

SEQ ID NO: 83860 - DNA, 13 bp, Artificial Sequence
  Oligonucleotide for detection of SNP TSC0021108
tctccctaaaaat

SEQ ID NO: 83861 - DNA, 13 bp, Artificial Sequence
  Oligonucleotide for detection of SNP TSC0021108
atttttggggaga

SEQ ID NO: 83862 - DNA, 13 bp, Artificial Sequence
  Oligonucleotide for detection of SNP TSC0021108
tctccccaaaaat

SEQ ID NO: 83863 - DNA, 13 bp, Artificial Sequence
  Oligonucleotide for detection of SNP TSC0021110
gatgggtgtgtta

SEQ ID NO: 83864 - DNA, 13 bp, Artificial Sequence
  Oligonucleotide for detection of SNP TSC0021110
taacacacccatc

SEQ ID NO: 83865 - DNA, 13 bp, Artificial Sequence
  Oligonucleotide for detection of SNP TSC0021110
gatgggcgtgtta

SEQ ID NO: 83866 - DNA, 13 bp, Artificial Sequence
  Oligonucleotide for detection of SNP TSC0021110
taacacgcccatc

SEQ ID NO: 83867 - DNA, 13 bp, Artificial Sequence
  Oligonucleotide for detection of SNP TSC0021110
taatatgtttaty

SEQ ID NO: 83868 - DNA, 13 bp, Artificial Sequence
  Oligonucleotide for detection of SNP TSC0021110
rataaacatatta

SEQ ID NO: 83869 - DNA, 13 bp, Artificial Sequence
  Oligonucleotide for detection of SNP TSC0021110
taatatatttaty

SEQ ID NO: 83870 - DNA, 13 bp, Artificial Sequence
  Oligonucleotide for detection of SNP TSC0021110
rataaatatatta

SEQ ID NO: 83871 - DNA, 13 bp, Artificial Sequence
  Oligonucleotide for detection of SNP TSC0021110
taatacgtttaty

SEQ ID NO: 83872 - DNA, 13 bp, Artificial Sequence
  Oligonucleotide for detection of SNP TSC0021110
rataaacgtatta

SEQ ID NO: 83873 - DNA, 13 bp, Artificial Sequence
  Oligonucleotide for detection of SNP TSC0021114
agttttggttttt

SEQ ID NO: 83874 - DNA, 13 bp, Artificial Sequence
  Oligonucleotide for detection of SNP TSC0021114
aaaaaccaaaact

SEQ ID NO: 83875 - DNA, 13 bp, Artificial Sequence
  Oligonucleotide for detection of SNP TSC0021114
agtttttgttttt

SEQ ID NO: 83876 - DNA, 13 bp, Artificial Sequence
  Oligonucleotide for detection of SNP TSC0021114
aaaaacaaaaact

SEQ ID NO: 83877 - DNA, 13 bp, Artificial Sequence
  Oligonucleotide for detection of SNP TSC0021114
agtttcggttttt

SEQ ID NO: 83878 - DNA, 13 bp, Artificial Sequence
  Oligonucleotide for detection of SNP TSC0021114
aaaaaccgaaact

SEQ ID NO: 83879 - DNA, 13 bp, Artificial Sequence
  Oligonucleotide for detection of SNP TSC0021114
aggggttgaagtt

SEQ ID NO: 83880 - DNA, 13 bp, Artificial Sequence
  Oligonucleotide for detection of SNP TSC0021114
aacttcaacccct

SEQ ID NO: 83881 - DNA, 13 bp, Artificial Sequence
  Oligonucleotide for detection of SNP TSC0021114
aggggtagaagtt

SEQ ID NO: 83882 - DNA, 13 bp, Artificial Sequence
  Oligonucleotide for detection of SNP TSC0021114
aacttctacccct

SEQ ID NO: 83883 - DNA, 13 bp, Artificial Sequence
  Oligonucleotide for detection of SNP TSC0021114
aggggtcgaagtt

SEQ ID NO: 83884 - DNA, 13 bp, Artificial Sequence
  Oligonucleotide for detection of SNP TSC0021114
aacttcgacccct

SEQ ID NO: 83885 - DNA, 13 bp, Artificial Sequence
  Oligonucleotide for detection of SNP TSC0021115
aatagtaattagy

SEQ ID NO: 83886 - DNA, 13 bp, Artificial Sequence
  Oligonucleotide for detection of SNP TSC0021115
rctaattactatt

SEQ ID NO: 83887 - DNA, 13 bp, Artificial Sequence
  Oligonucleotide for detection of SNP TSC0021115
aatagttattagy

SEQ ID NO: 83888 - DNA, 13 bp, Artificial Sequence
  Oligonucleotide for detection of SNP TSC0021115
rctaataactatt

SEQ ID NO: 83889 - DNA, 13 bp, Artificial Sequence
  Oligonucleotide for detection of SNP TSC0021115
gttggttattatt

SEQ ID NO: 83890 - DNA, 13 bp, Artificial Sequence
  Oligonucleotide for detection of SNP TSC0021115
aataataaccaac

SEQ ID NO: 83891 - DNA, 13 bp, Artificial Sequence
  Oligonucleotide for detection of SNP TSC0021115
gttggtgattatt

SEQ ID NO: 83892 - DNA, 13 bp, Artificial Sequence
  Oligonucleotide for detection of SNP TSC0021115
aataatcaccaac

SEQ ID NO: 83893 - DNA, 13 bp, Artificial Sequence
  Oligonucleotide for detection of SNP TSC0021116
ttttgtagttgtt

SEQ ID NO: 83894 - DNA, 13 bp, Artificial Sequence
  Oligonucleotide for detection of SNP TSC0021116
aacaactacaaaa

SEQ ID NO: 83895 - DNA, 13 bp, Artificial Sequence
  Oligonucleotide for detection of SNP TSC0021116
ttttgtggttgtt

SEQ ID NO: 83896 - DNA, 13 bp, Artificial Sequence
  Oligonucleotide for detection of SNP TSC0021116
aacaaccacaaaa

SEQ ID NO: 83897 - DNA, 13 bp, Artificial Sequence
  Oligonucleotide for detection of SNP TSC0021116
ttttgtagtcgtt

SEQ ID NO: 83898 - DNA, 13 bp, Artificial Sequence
  Oligonucleotide for detection of SNP TSC0021116
aacgactacaaaa

SEQ ID NO: 83899 - DNA, 13 bp, Artificial Sequence
  Oligonucleotide for detection of SNP TSC0021116
ttttgcggttgtt

SEQ ID NO: 83900 - DNA, 13 bp, Artificial Sequence
  Oligonucleotide for detection of SNP TSC0021116
aacaaccgcaaaa

SEQ ID NO: 83901 - DNA, 13 bp, Artificial Sequence
  Oligonucleotide for detection of SNP TSC0021116
ttttgtggtcgtt

SEQ ID NO: 83902 - DNA, 13 bp, Artificial Sequence
  Oligonucleotide for detection of SNP TSC0021116
aacgaccacaaaa

SEQ ID NO: 83903 - DNA, 13 bp, Artificial Sequence
  Oligonucleotide for detection of SNP TSC0021116
ttttgcggtcgtt

SEQ ID NO: 83904 - DNA, 13 bp, Artificial Sequence
  Oligonucleotide for detection of SNP TSC0021116
aacgaccgcaaaa

SEQ ID NO: 83905 - DNA, 13 bp, Artificial Sequence
  Oligonucleotide for detection of SNP TSC0021116
aatgattgtagga

SEQ ID NO: 83906 - DNA, 13 bp, Artificial Sequence
  Oligonucleotide for detection of SNP TSC0021116
tcctacaatcatt

SEQ ID NO: 83907 - DNA, 13 bp, Artificial Sequence
  Oligonucleotide for detection of SNP TSC0021116
aacgattgtagga

SEQ ID NO: 83908 - DNA, 13 bp, Artificial Sequence
  Oligonucleotide for detection of SNP TSC0021116
tcctacaatcgtt

SEQ ID NO: 83909 - DNA, 13 bp, Artificial Sequence
  Oligonucleotide for detection of SNP TSC0021116
aatgatcgtagga

SEQ ID NO: 83910 - DNA, 13 bp, Artificial Sequence
  Oligonucleotide for detection of SNP TSC0021116
tcctacgatcatt

SEQ ID NO: 83911 - DNA, 13 bp, Artificial Sequence
  Oligonucleotide for detection of SNP TSC0021116
aacgatcgtagga

SEQ ID NO: 83912 - DNA, 13 bp, Artificial Sequence
  Oligonucleotide for detection of SNP TSC0021116
tcctacgatcgtt

SEQ ID NO: 83913 - DNA, 13 bp, Artificial Sequence
  Oligonucleotide for detection of SNP TSC0021117
gtagttataaatt

SEQ ID NO: 83914 - DNA, 13 bp, Artificial Sequence
  Oligonucleotide for detection of SNP TSC0021117
aatttataactac

SEQ ID NO: 83915 - DNA, 13 bp, Artificial Sequence
  Oligonucleotide for detection of SNP TSC0021117
gtagttttaaatt

SEQ ID NO: 83916 - DNA, 13 bp, Artificial Sequence
  Oligonucleotide for detection of SNP TSC0021117
aatttaaaactac

SEQ ID NO: 83917 - DNA, 13 bp, Artificial Sequence
  Oligonucleotide for detection of SNP TSC0021117
agtttgtggttgy

SEQ ID NO: 83918 - DNA, 13 bp, Artificial Sequence
  Oligonucleotide for detection of SNP TSC0021117
rcaaccacaaact

SEQ ID NO: 83919 - DNA, 13 bp, Artificial Sequence
  Oligonucleotide for detection of SNP TSC0021117
agtttgaggttgy

SEQ ID NO: 83920 - DNA, 13 bp, Artificial Sequence
  Oligonucleotide for detection of SNP TSC0021117
rcaacctcaaact

SEQ ID NO: 83921 - DNA, 13 bp, Artificial Sequence
  Oligonucleotide for detection of SNP TSC0021118
tgtgttatagatg

SEQ ID NO: 83922 - DNA, 13 bp, Artificial Sequence
  Oligonucleotide for detection of SNP TSC0021118
catctataacaca

SEQ ID NO: 83923 - DNA, 13 bp, Artificial Sequence
  Oligonucleotide for detection of SNP TSC0021118
tgtgttgtagatg

SEQ ID NO: 83924 - DNA, 13 bp, Artificial Sequence
  Oligonucleotide for detection of SNP TSC0021118
catctacaacaca

SEQ ID NO: 83925 - DNA, 13 bp, Artificial Sequence
  Oligonucleotide for detection of SNP TSC0021118
cgtgttatagatg

SEQ ID NO: 83926 - DNA, 13 bp, Artificial Sequence
  Oligonucleotide for detection of SNP TSC0021118
catctataacacg

SEQ ID NO: 83927 - DNA, 13 bp, Artificial Sequence
  Oligonucleotide for detection of SNP TSC0021118
cgtgttgtagatg

SEQ ID NO: 83928 - DNA, 13 bp, Artificial Sequence
  Oligonucleotide for detection of SNP TSC0021118
catctacaacacg

SEQ ID NO: 83929 - DNA, 13 bp, Artificial Sequence
  Oligonucleotide for detection of SNP TSC0021121
tggtttacgtttg

SEQ ID NO: 83930 - DNA, 13 bp, Artificial Sequence
  Oligonucleotide for detection of SNP TSC0021121
caaacgtaaacca

SEQ ID NO: 83931 - DNA, 13 bp, Artificial Sequence
  Oligonucleotide for detection of SNP TSC0021121
tggtttgcgtttg

SEQ ID NO: 83932 - DNA, 13 bp, Artificial Sequence
  Oligonucleotide for detection of SNP TSC0021121
caaacgcaaacca

SEQ ID NO: 83933 - DNA, 13 bp, Artificial Sequence
  Oligonucleotide for detection of SNP TSC0021121
tggttcgcgtttg

SEQ ID NO: 83934 - DNA, 13 bp, Artificial Sequence
  Oligonucleotide for detection of SNP TSC0021121
caaacgcgaacca

SEQ ID NO: 83935 - DNA, 13 bp, Artificial Sequence
  Oligonucleotide for detection of SNP TSC0021121
taggtgtgagtta

SEQ ID NO: 83936 - DNA, 13 bp, Artificial Sequence
  Oligonucleotide for detection of SNP TSC0021121
taactcacaccta

SEQ ID NO: 83937 - DNA, 13 bp, Artificial Sequence
  Oligonucleotide for detection of SNP TSC0021121
taggcgtgagtta

SEQ ID NO: 83938 - DNA, 13 bp, Artificial Sequence
  Oligonucleotide for detection of SNP TSC0021121
taactcacgccta

SEQ ID NO: 83939 - DNA, 13 bp, Artificial Sequence
  Oligonucleotide for detection of SNP TSC0021121
taggtgcgagtta

SEQ ID NO: 83940 - DNA, 13 bp, Artificial Sequence
  Oligonucleotide for detection of SNP TSC0021121
taactcgcaccta

SEQ ID NO: 83941 - DNA, 13 bp, Artificial Sequence
  Oligonucleotide for detection of SNP TSC0021121
taggcgcgagtta

SEQ ID NO: 83942 - DNA, 13 bp, Artificial Sequence
  Oligonucleotide for detection of SNP TSC0021121
taactcgcgccta

SEQ ID NO: 83943 - DNA, 13 bp, Artificial Sequence
  Oligonucleotide for detection of SNP TSC0021122
ggtattgttggta

SEQ ID NO: 83944 - DNA, 13 bp, Artificial Sequence
  Oligonucleotide for detection of SNP TSC0021122
taccaacaatacc

SEQ ID NO: 83945 - DNA, 13 bp, Artificial Sequence
  Oligonucleotide for detection of SNP TSC0021122
ggtattattggta

SEQ ID NO: 83946 - DNA, 13 bp, Artificial Sequence
  Oligonucleotide for detection of SNP TSC0021122
taccaataatacc

SEQ ID NO: 83947 - DNA, 13 bp, Artificial Sequence
  Oligonucleotide for detection of SNP TSC0021124
agttatacgtttg

SEQ ID NO: 83948 - DNA, 13 bp, Artificial Sequence
  Oligonucleotide for detection of SNP TSC0021124
caaacgtataact

SEQ ID NO: 83949 - DNA, 13 bp, Artificial Sequence
  Oligonucleotide for detection of SNP TSC0021124
agttatatgttcg

SEQ ID NO: 83950 - DNA, 13 bp, Artificial Sequence
  Oligonucleotide for detection of SNP TSC0021124
cgaacatataact

SEQ ID NO: 83951 - DNA, 13 bp, Artificial Sequence
  Oligonucleotide for detection of SNP TSC0021124
agttatgcgtttg

SEQ ID NO: 83952 - DNA, 13 bp, Artificial Sequence
  Oligonucleotide for detection of SNP TSC0021124
caaacgcataact

SEQ ID NO: 83953 - DNA, 13 bp, Artificial Sequence
  Oligonucleotide for detection of SNP TSC0021124
agttatacgttcg

SEQ ID NO: 83954 - DNA, 13 bp, Artificial Sequence
  Oligonucleotide for detection of SNP TSC0021124
cgaacgtataact

SEQ ID NO: 83955 - DNA, 13 bp, Artificial Sequence
  Oligonucleotide for detection of SNP TSC0021124
agttatgtgttcg

SEQ ID NO: 83956 - DNA, 13 bp, Artificial Sequence
  Oligonucleotide for detection of SNP TSC0021124
cgaacacataact

SEQ ID NO: 83957 - DNA, 13 bp, Artificial Sequence
  Oligonucleotide for detection of SNP TSC0021124
agttacgcgtttg

SEQ ID NO: 83958 - DNA, 13 bp, Artificial Sequence
  Oligonucleotide for detection of SNP TSC0021124
caaacgcgtaact

SEQ ID NO: 83959 - DNA, 13 bp, Artificial Sequence
  Oligonucleotide for detection of SNP TSC0021124
agttacgtgttcg

SEQ ID NO: 83960 - DNA, 13 bp, Artificial Sequence
  Oligonucleotide for detection of SNP TSC0021124
cgaacacgtaact

SEQ ID NO: 83961 - DNA, 13 bp, Artificial Sequence
  Oligonucleotide for detection of SNP TSC0021124
agttatgcgttcg

SEQ ID NO: 83962 - DNA, 13 bp, Artificial Sequence
  Oligonucleotide for detection of SNP TSC0021124
cgaacgcataact

SEQ ID NO: 83963 - DNA, 13 bp, Artificial Sequence
  Oligonucleotide for detection of SNP TSC0021124
agttacgcgttcg

SEQ ID NO: 83964 - DNA, 13 bp, Artificial Sequence
  Oligonucleotide for detection of SNP TSC0021124
cgaacgcgtaact

SEQ ID NO: 83965 - DNA, 13 bp, Artificial Sequence
  Oligonucleotide for detection of SNP TSC0021124
tgggtgtgtggtt

SEQ ID NO: 83966 - DNA, 13 bp, Artificial Sequence
  Oligonucleotide for detection of SNP TSC0021124
aaccacacaccca

SEQ ID NO: 83967 - DNA, 13 bp, Artificial Sequence
  Oligonucleotide for detection of SNP TSC0021124
cgggtgtgtggtt

SEQ ID NO: 83968 - DNA, 13 bp, Artificial Sequence
  Oligonucleotide for detection of SNP TSC0021124
aaccacacacccg

SEQ ID NO: 83969 - DNA, 13 bp, Artificial Sequence
  Oligonucleotide for detection of SNP TSC0021124
tgggcgtgtggtt

SEQ ID NO: 83970 - DNA, 13 bp, Artificial Sequence
  Oligonucleotide for detection of SNP TSC0021124
aaccacacgccca

SEQ ID NO: 83971 - DNA, 13 bp, Artificial Sequence
  Oligonucleotide for detection of SNP TSC0021124
cgggcgtgtggtt

SEQ ID NO: 83972 - DNA, 13 bp, Artificial Sequence
  Oligonucleotide for detection of SNP TSC0021124
aaccacacgcccg

SEQ ID NO: 83973 - DNA, 13 bp, Artificial Sequence
  Oligonucleotide for detection of SNP TSC0021124
tgggtgcgtggtt

SEQ ID NO: 83974 - DNA, 13 bp, Artificial Sequence
  Oligonucleotide for detection of SNP TSC0021124
aaccacgcaccca

SEQ ID NO: 83975 - DNA, 13 bp, Artificial Sequence
  Oligonucleotide for detection of SNP TSC0021124
cgggtgcgtggtt

SEQ ID NO: 83976 - DNA, 13 bp, Artificial Sequence
  Oligonucleotide for detection of SNP TSC0021124
aaccacgcacccg

SEQ ID NO: 83977 - DNA, 13 bp, Artificial Sequence
  Oligonucleotide for detection of SNP TSC0021124
tgggcgcgtggtt

SEQ ID NO: 83978 - DNA, 13 bp, Artificial Sequence
  Oligonucleotide for detection of SNP TSC0021124
aaccacgcgccca

SEQ ID NO: 83979 - DNA, 13 bp, Artificial Sequence
  Oligonucleotide for detection of SNP TSC0021124
cgggcgcgtggtt

SEQ ID NO: 83980 - DNA, 13 bp, Artificial Sequence
  Oligonucleotide for detection of SNP TSC0021124
aaccacgcgcccg

SEQ ID NO: 83981 - DNA, 13 bp, Artificial Sequence
  Oligonucleotide for detection of SNP TSC0021126
ttaagtagggagt

SEQ ID NO: 83982 - DNA, 13 bp, Artificial Sequence
  Oligonucleotide for detection of SNP TSC0021126
actccctacttaa

SEQ ID NO: 83983 - DNA, 13 bp, Artificial Sequence
  Oligonucleotide for detection of SNP TSC0021126
ttaagtggggagt

SEQ ID NO: 83984 - DNA, 13 bp, Artificial Sequence
  Oligonucleotide for detection of SNP TSC0021126
actccccacttaa

SEQ ID NO: 83985 - DNA, 13 bp, Artificial Sequence
  Oligonucleotide for detection of SNP TSC0021127
tttagttgttaaa

SEQ ID NO: 83986 - DNA, 13 bp, Artificial Sequence
  Oligonucleotide for detection of SNP TSC0021127
tttaacaactaaa

SEQ ID NO: 83987 - DNA, 13 bp, Artificial Sequence
  Oligonucleotide for detection of SNP TSC0021127
tttagtagttaaa

SEQ ID NO: 83988 - DNA, 13 bp, Artificial Sequence
  Oligonucleotide for detection of SNP TSC0021127
tttaactactaaa

SEQ ID NO: 83989 - DNA, 13 bp, Artificial Sequence
  Oligonucleotide for detection of SNP TSC0021128
gtaatgatgaagt

SEQ ID NO: 83990 - DNA, 13 bp, Artificial Sequence
  Oligonucleotide for detection of SNP TSC0021128
acttcatcattac

SEQ ID NO: 83991 - DNA, 13 bp, Artificial Sequence
  Oligonucleotide for detection of SNP TSC0021128
gtaatggtgaagt

SEQ ID NO: 83992 - DNA, 13 bp, Artificial Sequence
  Oligonucleotide for detection of SNP TSC0021128
acttcaccattac

SEQ ID NO: 83993 - DNA, 13 bp, Artificial Sequence
  Oligonucleotide for detection of SNP TSC0021129
aagttattaaata

SEQ ID NO: 83994 - DNA, 13 bp, Artificial Sequence
  Oligonucleotide for detection of SNP TSC0021129
tatttaataactt

SEQ ID NO: 83995 - DNA, 13 bp, Artificial Sequence
  Oligonucleotide for detection of SNP TSC0021129
aagttagtaaata

SEQ ID NO: 83996 - DNA, 13 bp, Artificial Sequence
  Oligonucleotide for detection of SNP TSC0021129
tatttactaactt

SEQ ID NO: 83997 - DNA, 13 bp, Artificial Sequence
  Oligonucleotide for detection of SNP TSC0021129
tgtttattaattt

SEQ ID NO: 83998 - DNA, 13 bp, Artificial Sequence
  Oligonucleotide for detection of SNP TSC0021129
aaattaataaaca

SEQ ID NO: 83999 - DNA, 13 bp, Artificial Sequence
  Oligonucleotide for detection of SNP TSC0021130
tttttaaaaagag

SEQ ID NO: 84000 - DNA, 13 bp, Artificial Sequence
  Oligonucleotide for detection of SNP TSC0021130
ctctttttaaaaa

SEQ ID NO: 84001 - DNA, 13 bp, Artificial Sequence
  Oligonucleotide for detection of SNP TSC0021130
tttttagaaagag

SEQ ID NO: 84002 - DNA, 13 bp, Artificial Sequence
  Oligonucleotide for detection of SNP TSC0021130
ctctttctaaaaa

SEQ ID NO: 84003 - DNA, 13 bp, Artificial Sequence
  Oligonucleotide for detection of SNP TSC0021131
gagtaagaaagta

SEQ ID NO: 84004 - DNA, 13 bp, Artificial Sequence
  Oligonucleotide for detection of SNP TSC0021131
tactttcttactc

SEQ ID NO: 84005 - DNA, 13 bp, Artificial Sequence
  Oligonucleotide for detection of SNP TSC0021131
gagtaaaaaagta

SEQ ID NO: 84006 - DNA, 13 bp, Artificial Sequence
  Oligonucleotide for detection of SNP TSC0021131
tacttttttactc

SEQ ID NO: 84007 - DNA, 13 bp, Artificial Sequence
  Oligonucleotide for detection of SNP TSC0021132
gtggaatgataag

SEQ ID NO: 84008 - DNA, 13 bp, Artificial Sequence
  Oligonucleotide for detection of SNP TSC0021132
cttatcattccac

SEQ ID NO: 84009 - DNA, 13 bp, Artificial Sequence
  Oligonucleotide for detection of SNP TSC0021132
gtggaaggataag

SEQ ID NO: 84010 - DNA, 13 bp, Artificial Sequence
  Oligonucleotide for detection of SNP TSC0021132
cttatccttccac

SEQ ID NO: 84011 - DNA, 13 bp, Artificial Sequence
  Oligonucleotide for detection of SNP TSC0021132
gtggaacgataag

SEQ ID NO: 84012 - DNA, 13 bp, Artificial Sequence
  Oligonucleotide for detection of SNP TSC0021132
cttatcgttccac

SEQ ID NO: 84013 - DNA, 13 bp, Artificial Sequence
  Oligonucleotide for detection of SNP TSC0021133
tgttataatttty

SEQ ID NO: 84014 - DNA, 13 bp, Artificial Sequence
  Oligonucleotide for detection of SNP TSC0021133
raaaattataaca

SEQ ID NO: 84015 - DNA, 13 bp, Artificial Sequence
  Oligonucleotide for detection of SNP TSC0021133
tgttatgatttty

SEQ ID NO: 84016 - DNA, 13 bp, Artificial Sequence
  Oligonucleotide for detection of SNP TSC0021133
raaaatcataaca

SEQ ID NO: 84017 - DNA, 13 bp, Artificial Sequence
  Oligonucleotide for detection of SNP TSC0021134
ttattagatagtt

SEQ ID NO: 84018 - DNA, 13 bp, Artificial Sequence
  Oligonucleotide for detection of SNP TSC0021134
aactatctaataa

SEQ ID NO: 84019 - DNA, 13 bp, Artificial Sequence
  Oligonucleotide for detection of SNP TSC0021134
ttattaaatagtt

SEQ ID NO: 84020 - DNA, 13 bp, Artificial Sequence
  Oligonucleotide for detection of SNP TSC0021134
aactatttaataa

SEQ ID NO: 84021 - DNA, 13 bp, Artificial Sequence
  Oligonucleotide for detection of SNP TSC0021135
gggaatgattatt

SEQ ID NO: 84022 - DNA, 13 bp, Artificial Sequence
  Oligonucleotide for detection of SNP TSC0021135
aataatcattccc

SEQ ID NO: 84023 - DNA, 13 bp, Artificial Sequence
  Oligonucleotide for detection of SNP TSC0021135
gggaattattatt

SEQ ID NO: 84024 - DNA, 13 bp, Artificial Sequence
  Oligonucleotide for detection of SNP TSC0021135
aataataattccc

SEQ ID NO: 84025 - DNA, 13 bp, Artificial Sequence
  Oligonucleotide for detection of SNP TSC0021135
aataattatttty

SEQ ID NO: 84026 - DNA, 13 bp, Artificial Sequence
  Oligonucleotide for detection of SNP TSC0021135
raaaataattatt

SEQ ID NO: 84027 - DNA, 13 bp, Artificial Sequence
  Oligonucleotide for detection of SNP TSC0021135
aataataatttty

SEQ ID NO: 84028 - DNA, 13 bp, Artificial Sequence
  Oligonucleotide for detection of SNP TSC0021135
raaaattattatt

SEQ ID NO: 84029 - DNA, 13 bp, Artificial Sequence
  Oligonucleotide for detection of SNP TSC0021140
aattttaataata

SEQ ID NO: 84030 - DNA, 13 bp, Artificial Sequence
  Oligonucleotide for detection of SNP TSC0021140
tattattaaaatt

SEQ ID NO: 84031 - DNA, 13 bp, Artificial Sequence
  Oligonucleotide for detection of SNP TSC0021140
aattttgataata

SEQ ID NO: 84032 - DNA, 13 bp, Artificial Sequence
  Oligonucleotide for detection of SNP TSC0021140
tattatcaaaatt

SEQ ID NO: 84033 - DNA, 13 bp, Artificial Sequence
  Oligonucleotide for detection of SNP TSC0021141
agggggtttggta

SEQ ID NO: 84034 - DNA, 13 bp, Artificial Sequence
  Oligonucleotide for detection of SNP TSC0021141
taccaaaccccct

SEQ ID NO: 84035 - DNA, 13 bp, Artificial Sequence
  Oligonucleotide for detection of SNP TSC0021141
aggggggttggta

SEQ ID NO: 84036 - DNA, 13 bp, Artificial Sequence
  Oligonucleotide for detection of SNP TSC0021141
taccaacccccct

SEQ ID NO: 84037 - DNA, 13 bp, Artificial Sequence
  Oligonucleotide for detection of SNP TSC0021142
gggtagggtatty

SEQ ID NO: 84038 - DNA, 13 bp, Artificial Sequence
  Oligonucleotide for detection of SNP TSC0021142
raataccctaccc

SEQ ID NO: 84039 - DNA, 13 bp, Artificial Sequence
  Oligonucleotide for detection of SNP TSC0021142
gggtagagtatty

SEQ ID NO: 84040 - DNA, 13 bp, Artificial Sequence
  Oligonucleotide for detection of SNP TSC0021142
raatactctaccc

SEQ ID NO: 84041 - DNA, 13 bp, Artificial Sequence
  Oligonucleotide for detection of SNP TSC0021143
tgatatgatttta

SEQ ID NO: 84042 - DNA, 13 bp, Artificial Sequence
  Oligonucleotide for detection of SNP TSC0021143
taaaatcatatca

SEQ ID NO: 84043 - DNA, 13 bp, Artificial Sequence
  Oligonucleotide for detection of SNP TSC0021143
tgatattatttta

SEQ ID NO: 84044 - DNA, 13 bp, Artificial Sequence
  Oligonucleotide for detection of SNP TSC0021143
taaaataatatca

SEQ ID NO: 84045 - DNA, 13 bp, Artificial Sequence
  Oligonucleotide for detection of SNP TSC0021143
tggaattatatta

SEQ ID NO: 84046 - DNA, 13 bp, Artificial Sequence
  Oligonucleotide for detection of SNP TSC0021143
taatataattcca

SEQ ID NO: 84047 - DNA, 13 bp, Artificial Sequence
  Oligonucleotide for detection of SNP TSC0021143
tggaataatatta

SEQ ID NO: 84048 - DNA, 13 bp, Artificial Sequence
  Oligonucleotide for detection of SNP TSC0021143
taatattattcca

SEQ ID NO: 84049 - DNA, 13 bp, Artificial Sequence
  Oligonucleotide for detection of SNP TSC0021144
tgttatatgggag

SEQ ID NO: 84050 - DNA, 13 bp, Artificial Sequence
  Oligonucleotide for detection of SNP TSC0021144
ctcccatataaca

SEQ ID NO: 84051 - DNA, 13 bp, Artificial Sequence
  Oligonucleotide for detection of SNP TSC0021144
tgttatgtgggag

SEQ ID NO: 84052 - DNA, 13 bp, Artificial Sequence
  Oligonucleotide for detection of SNP TSC0021144
ctcccacataaca

SEQ ID NO: 84053 - DNA, 13 bp, Artificial Sequence
  Oligonucleotide for detection of SNP TSC0021144
tgttacgtgggag

SEQ ID NO: 84054 - DNA, 13 bp, Artificial Sequence
  Oligonucleotide for detection of SNP TSC0021144
ctcccacgtaaca

SEQ ID NO: 84055 - DNA, 13 bp, Artificial Sequence
  Oligonucleotide for detection of SNP TSC0021144
tttttatgtagta

SEQ ID NO: 84056 - DNA, 13 bp, Artificial Sequence
  Oligonucleotide for detection of SNP TSC0021144
tactacataaaaa

SEQ ID NO: 84057 - DNA, 13 bp, Artificial Sequence
  Oligonucleotide for detection of SNP TSC0021144
tttttacgtagta

SEQ ID NO: 84058 - DNA, 13 bp, Artificial Sequence
  Oligonucleotide for detection of SNP TSC0021144
tactacgtaaaaa

SEQ ID NO: 84059 - DNA, 13 bp, Artificial Sequence
  Oligonucleotide for detection of SNP TSC0021145
aggattagatagg

SEQ ID NO: 84060 - DNA, 13 bp, Artificial Sequence
  Oligonucleotide for detection of SNP TSC0021145
cctatctaatcct

SEQ ID NO: 84061 - DNA, 13 bp, Artificial Sequence
  Oligonucleotide for detection of SNP TSC0021145
aggattggatagg

SEQ ID NO: 84062 - DNA, 13 bp, Artificial Sequence
  Oligonucleotide for detection of SNP TSC0021145
cctatccaatcct

SEQ ID NO: 84063 - DNA, 13 bp, Artificial Sequence
  Oligonucleotide for detection of SNP TSC0021145
aggatcggatagg

SEQ ID NO: 84064 - DNA, 13 bp, Artificial Sequence
  Oligonucleotide for detection of SNP TSC0021145
cctatccgatcct

SEQ ID NO: 84065 - DNA, 13 bp, Artificial Sequence
  Oligonucleotide for detection of SNP TSC0021145
tttgtttggtttt

SEQ ID NO: 84066 - DNA, 13 bp, Artificial Sequence
  Oligonucleotide for detection of SNP TSC0021145
aaaaccaaacaaa

SEQ ID NO: 84067 - DNA, 13 bp, Artificial Sequence
  Oligonucleotide for detection of SNP TSC0021145
tttgttcggtttt

SEQ ID NO: 84068 - DNA, 13 bp, Artificial Sequence
  Oligonucleotide for detection of SNP TSC0021145
aaaaccgaacaaa

SEQ ID NO: 84069 - DNA, 13 bp, Artificial Sequence
  Oligonucleotide for detection of SNP TSC0021146
gtttggataatat

SEQ ID NO: 84070 - DNA, 13 bp, Artificial Sequence
  Oligonucleotide for detection of SNP TSC0021146
atattatccaaac

SEQ ID NO: 84071 - DNA, 13 bp, Artificial Sequence
  Oligonucleotide for detection of SNP TSC0021146
gtttgggtaatat

SEQ ID NO: 84072 - DNA, 13 bp, Artificial Sequence
  Oligonucleotide for detection of SNP TSC0021146
atattacccaaac

SEQ ID NO: 84073 - DNA, 13 bp, Artificial Sequence
  Oligonucleotide for detection of SNP TSC0021147
tgaaatttttaty

SEQ ID NO: 84074 - DNA, 13 bp, Artificial Sequence
  Oligonucleotide for detection of SNP TSC0021147
rataaaaatttca

SEQ ID NO: 84075 - DNA, 13 bp, Artificial Sequence
  Oligonucleotide for detection of SNP TSC0021147
tgaaatgtttaty

SEQ ID NO: 84076 - DNA, 13 bp, Artificial Sequence
  Oligonucleotide for detection of SNP TSC0021147
rataaacatttca

SEQ ID NO: 84077 - DNA, 13 bp, Artificial Sequence
  Oligonucleotide for detection of SNP TSC0021147
tgaaacgtttaty

SEQ ID NO: 84078 - DNA, 13 bp, Artificial Sequence
  Oligonucleotide for detection of SNP TSC0021147
rataaacgtttca

SEQ ID NO: 84079 - DNA, 13 bp, Artificial Sequence
  Oligonucleotide for detection of SNP TSC0021147
gatgagggtttta

SEQ ID NO: 84080 - DNA, 13 bp, Artificial Sequence
  Oligonucleotide for detection of SNP TSC0021147
taaaaccctcatc

SEQ ID NO: 84081 - DNA, 13 bp, Artificial Sequence
  Oligonucleotide for detection of SNP TSC0021147
gatgagtgtttta

SEQ ID NO: 84082 - DNA, 13 bp, Artificial Sequence
  Oligonucleotide for detection of SNP TSC0021147
taaaacactcatc

SEQ ID NO: 84083 - DNA, 13 bp, Artificial Sequence
  Oligonucleotide for detection of SNP TSC0021147
gatgagcgtttta

SEQ ID NO: 84084 - DNA, 13 bp, Artificial Sequence
  Oligonucleotide for detection of SNP TSC0021147
taaaacgctcatc

SEQ ID NO: 84085 - DNA, 13 bp, Artificial Sequence
  Oligonucleotide for detection of SNP TSC0021148
tgatttggagtty

SEQ ID NO: 84086 - DNA, 13 bp, Artificial Sequence
  Oligonucleotide for detection of SNP TSC0021148
raactccaaatca

SEQ ID NO: 84087 - DNA, 13 bp, Artificial Sequence
  Oligonucleotide for detection of SNP TSC0021148
tgattttgagtty

SEQ ID NO: 84088 - DNA, 13 bp, Artificial Sequence
  Oligonucleotide for detection of SNP TSC0021148
raactcaaaatca

SEQ ID NO: 84089 - DNA, 13 bp, Artificial Sequence
  Oligonucleotide for detection of SNP TSC0021148
tgattcggagtty

SEQ ID NO: 84090 - DNA, 13 bp, Artificial Sequence
  Oligonucleotide for detection of SNP TSC0021148
raactccgaatca

SEQ ID NO: 84091 - DNA, 13 bp, Artificial Sequence
  Oligonucleotide for detection of SNP TSC0021148
gagttttgaatta

SEQ ID NO: 84092 - DNA, 13 bp, Artificial Sequence
  Oligonucleotide for detection of SNP TSC0021148
taattcaaaactc

SEQ ID NO: 84093 - DNA, 13 bp, Artificial Sequence
  Oligonucleotide for detection of SNP TSC0021148
gagtttagaatta

SEQ ID NO: 84094 - DNA, 13 bp, Artificial Sequence
  Oligonucleotide for detection of SNP TSC0021148
taattctaaactc

SEQ ID NO: 84095 - DNA, 13 bp, Artificial Sequence
  Oligonucleotide for detection of SNP TSC0021148
gagtttcgaatta

SEQ ID NO: 84096 - DNA, 13 bp, Artificial Sequence
  Oligonucleotide for detection of SNP TSC0021148
taattcgaaactc

SEQ ID NO: 84097 - DNA, 13 bp, Artificial Sequence
  Oligonucleotide for detection of SNP TSC0021149
atttagagaagty

SEQ ID NO: 84098 - DNA, 13 bp, Artificial Sequence
  Oligonucleotide for detection of SNP TSC0021149
racttctctaaat

SEQ ID NO: 84099 - DNA, 13 bp, Artificial Sequence
  Oligonucleotide for detection of SNP TSC0021149
atttagggaagty

SEQ ID NO: 84100 - DNA, 13 bp, Artificial Sequence
  Oligonucleotide for detection of SNP TSC0021149
racttccctaaat

SEQ ID NO: 84101 - DNA, 13 bp, Artificial Sequence
  Oligonucleotide for detection of SNP TSC0021150
atttgggggttta

SEQ ID NO: 84102 - DNA, 13 bp, Artificial Sequence
  Oligonucleotide for detection of SNP TSC0021150
taaacccccaaat

SEQ ID NO: 84103 - DNA, 13 bp, Artificial Sequence
  Oligonucleotide for detection of SNP TSC0021150
atttggtggttta

SEQ ID NO: 84104 - DNA, 13 bp, Artificial Sequence
  Oligonucleotide for detection of SNP TSC0021150
taaaccaccaaat

SEQ ID NO: 84105 - DNA, 13 bp, Artificial Sequence
  Oligonucleotide for detection of SNP TSC0021150
tgagtttttaggt

SEQ ID NO: 84106 - DNA, 13 bp, Artificial Sequence
  Oligonucleotide for detection of SNP TSC0021150
acctaaaaactca

SEQ ID NO: 84107 - DNA, 13 bp, Artificial Sequence
  Oligonucleotide for detection of SNP TSC0021150
tgagttattaggt

SEQ ID NO: 84108 - DNA, 13 bp, Artificial Sequence
  Oligonucleotide for detection of SNP TSC0021150
acctaataactca

SEQ ID NO: 84109 - DNA, 13 bp, Artificial Sequence
  Oligonucleotide for detection of SNP TSC0021152
tatttttgatgta

SEQ ID NO: 84110 - DNA, 13 bp, Artificial Sequence
  Oligonucleotide for detection of SNP TSC0021152
tacatcaaaaata

SEQ ID NO: 84111 - DNA, 13 bp, Artificial Sequence
  Oligonucleotide for detection of SNP TSC0021152
tattttcgatgta

SEQ ID NO: 84112 - DNA, 13 bp, Artificial Sequence
  Oligonucleotide for detection of SNP TSC0021152
tacatcgaaaata

SEQ ID NO: 84113 - DNA, 13 bp, Artificial Sequence
  Oligonucleotide for detection of SNP TSC0021152
tgtattgaagata

SEQ ID NO: 84114 - DNA, 13 bp, Artificial Sequence
  Oligonucleotide for detection of SNP TSC0021152
tatcttcaataca

SEQ ID NO: 84115 - DNA, 13 bp, Artificial Sequence
  Oligonucleotide for detection of SNP TSC0021152
tgtattaaagata

SEQ ID NO: 84116 - DNA, 13 bp, Artificial Sequence
  Oligonucleotide for detection of SNP TSC0021152
tatctttaataca

SEQ ID NO: 84117 - DNA, 13 bp, Artificial Sequence
  Oligonucleotide for detection of SNP TSC0021152
tgtatcgaagata

SEQ ID NO: 84118 - DNA, 13 bp, Artificial Sequence
  Oligonucleotide for detection of SNP TSC0021152
tatcttcgataca

SEQ ID NO: 84119 - DNA, 13 bp, Artificial Sequence
  Oligonucleotide for detection of SNP TSC0021154
atgattgttttat

SEQ ID NO: 84120 - DNA, 13 bp, Artificial Sequence
  Oligonucleotide for detection of SNP TSC0021154
ataaaacaatcat

SEQ ID NO: 84121 - DNA, 13 bp, Artificial Sequence
  Oligonucleotide for detection of SNP TSC0021154
atgattattttat

SEQ ID NO: 84122 - DNA, 13 bp, Artificial Sequence
  Oligonucleotide for detection of SNP TSC0021154
ataaaataatcat

SEQ ID NO: 84123 - DNA, 13 bp, Artificial Sequence
  Oligonucleotide for detection of SNP TSC0021155
aattaggattttt

SEQ ID NO: 84124 - DNA, 13 bp, Artificial Sequence
  Oligonucleotide for detection of SNP TSC0021155
aaaaatcctaatt

SEQ ID NO: 84125 - DNA, 13 bp, Artificial Sequence
  Oligonucleotide for detection of SNP TSC0021156
aatttgtgaaggg

SEQ ID NO: 84126 - DNA, 13 bp, Artificial Sequence
  Oligonucleotide for detection of SNP TSC0021156
cccttcacaaatt

SEQ ID NO: 84127 - DNA, 13 bp, Artificial Sequence
  Oligonucleotide for detection of SNP TSC0021156
aatttgcgaaggg

SEQ ID NO: 84128 - DNA, 13 bp, Artificial Sequence
  Oligonucleotide for detection of SNP TSC0021156
cccttcgcaaatt

SEQ ID NO: 84129 - DNA, 13 bp, Artificial Sequence
  Oligonucleotide for detection of SNP TSC0021159
tggttttgaaaga

SEQ ID NO: 84130 - DNA, 13 bp, Artificial Sequence
  Oligonucleotide for detection of SNP TSC0021159
tctttcaaaacca

SEQ ID NO: 84131 - DNA, 13 bp, Artificial Sequence
  Oligonucleotide for detection of SNP TSC0021159
tggtttcgaaaga

SEQ ID NO: 84132 - DNA, 13 bp, Artificial Sequence
  Oligonucleotide for detection of SNP TSC0021159
tctttcgaaacca

SEQ ID NO: 84133 - DNA, 13 bp, Artificial Sequence
  Oligonucleotide for detection of SNP TSC0021160
aaagttatatttt

SEQ ID NO: 84134 - DNA, 13 bp, Artificial Sequence
  Oligonucleotide for detection of SNP TSC0021160
aaaatataacttt

SEQ ID NO: 84135 - DNA, 13 bp, Artificial Sequence
  Oligonucleotide for detection of SNP TSC0021160
aaagttgtatttt

SEQ ID NO: 84136 - DNA, 13 bp, Artificial Sequence
  Oligonucleotide for detection of SNP TSC0021160
aaaatacaacttt

SEQ ID NO: 84137 - DNA, 13 bp, Artificial Sequence
  Oligonucleotide for detection of SNP TSC0021161
atgggtgataatg

SEQ ID NO: 84138 - DNA, 13 bp, Artificial Sequence
  Oligonucleotide for detection of SNP TSC0021161
cattatcacccat

SEQ ID NO: 84139 - DNA, 13 bp, Artificial Sequence
  Oligonucleotide for detection of SNP TSC0021161
atgggtaataatg

SEQ ID NO: 84140 - DNA, 13 bp, Artificial Sequence
  Oligonucleotide for detection of SNP TSC0021161
cattattacccat

SEQ ID NO: 84141 - DNA, 13 bp, Artificial Sequence
  Oligonucleotide for detection of SNP TSC0021162
atattgggagttt

SEQ ID NO: 84142 - DNA, 13 bp, Artificial Sequence
  Oligonucleotide for detection of SNP TSC0021162
aaactcccaatat

SEQ ID NO: 84143 - DNA, 13 bp, Artificial Sequence
  Oligonucleotide for detection of SNP TSC0021162
atattgtgagttt

SEQ ID NO: 84144 - DNA, 13 bp, Artificial Sequence
  Oligonucleotide for detection of SNP TSC0021162
aaactcacaatat

SEQ ID NO: 84145 - DNA, 13 bp, Artificial Sequence
  Oligonucleotide for detection of SNP TSC0021162
aagtttttaatat

SEQ ID NO: 84146 - DNA, 13 bp, Artificial Sequence
  Oligonucleotide for detection of SNP TSC0021162
atattaaaaactt

SEQ ID NO: 84147 - DNA, 13 bp, Artificial Sequence
  Oligonucleotide for detection of SNP TSC0021162
aagtttataatat

SEQ ID NO: 84148 - DNA, 13 bp, Artificial Sequence
  Oligonucleotide for detection of SNP TSC0021162
atattataaactt

SEQ ID NO: 84149 - DNA, 13 bp, Artificial Sequence
  Oligonucleotide for detection of SNP TSC0021163
tttggggttaatg

SEQ ID NO: 84150 - DNA, 13 bp, Artificial Sequence
  Oligonucleotide for detection of SNP TSC0021163
cattaaccccaaa

SEQ ID NO: 84151 - DNA, 13 bp, Artificial Sequence
  Oligonucleotide for detection of SNP TSC0021163
tttgggattaatg

SEQ ID NO: 84152 - DNA, 13 bp, Artificial Sequence
  Oligonucleotide for detection of SNP TSC0021163
cattaatcccaaa

SEQ ID NO: 84153 - DNA, 13 bp, Artificial Sequence
  Oligonucleotide for detection of SNP TSC0021163
tttggggttaacg

SEQ ID NO: 84154 - DNA, 13 bp, Artificial Sequence
  Oligonucleotide for detection of SNP TSC0021163
cgttaaccccaaa

SEQ ID NO: 84155 - DNA, 13 bp, Artificial Sequence
  Oligonucleotide for detection of SNP TSC0021163
tttgggattaacg

SEQ ID NO: 84156 - DNA, 13 bp, Artificial Sequence
  Oligonucleotide for detection of SNP TSC0021163
cgttaatcccaaa

SEQ ID NO: 84157 - DNA, 13 bp, Artificial Sequence
  Oligonucleotide for detection of SNP TSC0021164
agttatatggatt

SEQ ID NO: 84158 - DNA, 13 bp, Artificial Sequence
  Oligonucleotide for detection of SNP TSC0021164
aatccatataact

SEQ ID NO: 84159 - DNA, 13 bp, Artificial Sequence
  Oligonucleotide for detection of SNP TSC0021164
agttatgtggatt

SEQ ID NO: 84160 - DNA, 13 bp, Artificial Sequence
  Oligonucleotide for detection of SNP TSC0021164
aatccacataact

SEQ ID NO: 84161 - DNA, 13 bp, Artificial Sequence
  Oligonucleotide for detection of SNP TSC0021164
agttacgtggatt

SEQ ID NO: 84162 - DNA, 13 bp, Artificial Sequence
  Oligonucleotide for detection of SNP TSC0021164
aatccacgtaact

SEQ ID NO: 84163 - DNA, 13 bp, Artificial Sequence
  Oligonucleotide for detection of SNP TSC0021164
agtttatgtggtt

SEQ ID NO: 84164 - DNA, 13 bp, Artificial Sequence
  Oligonucleotide for detection of SNP TSC0021164
aaccacataaact

SEQ ID NO: 84165 - DNA, 13 bp, Artificial Sequence
  Oligonucleotide for detection of SNP TSC0021164
agtttacgtggtt

SEQ ID NO: 84166 - DNA, 13 bp, Artificial Sequence
  Oligonucleotide for detection of SNP TSC0021164
aaccacgtaaact

SEQ ID NO: 84167 - DNA, 13 bp, Artificial Sequence
  Oligonucleotide for detection of SNP TSC0021165
ttaaaagtgtatg

SEQ ID NO: 84168 - DNA, 13 bp, Artificial Sequence
  Oligonucleotide for detection of SNP TSC0021165
catacacttttaa

SEQ ID NO: 84169 - DNA, 13 bp, Artificial Sequence
  Oligonucleotide for detection of SNP TSC0021165
ttaaaaatgtatg

SEQ ID NO: 84170 - DNA, 13 bp, Artificial Sequence
  Oligonucleotide for detection of SNP TSC0021165
catacatttttaa

SEQ ID NO: 84171 - DNA, 13 bp, Artificial Sequence
  Oligonucleotide for detection of SNP TSC0021165
ttaaaagcgtatg

SEQ ID NO: 84172 - DNA, 13 bp, Artificial Sequence
  Oligonucleotide for detection of SNP TSC0021165
catacgcttttaa

SEQ ID NO: 84173 - DNA, 13 bp, Artificial Sequence
  Oligonucleotide for detection of SNP TSC0021165
ttaaaaacgtatg

SEQ ID NO: 84174 - DNA, 13 bp, Artificial Sequence
  Oligonucleotide for detection of SNP TSC0021165
catacgtttttaa

SEQ ID NO: 84175 - DNA, 13 bp, Artificial Sequence
  Oligonucleotide for detection of SNP TSC0021168
tttttgggagata

SEQ ID NO: 84176 - DNA, 13 bp, Artificial Sequence
  Oligonucleotide for detection of SNP TSC0021168
tatctcccaaaaa

SEQ ID NO: 84177 - DNA, 13 bp, Artificial Sequence
  Oligonucleotide for detection of SNP TSC0021168
tttttgtgagata

SEQ ID NO: 84178 - DNA, 13 bp, Artificial Sequence
  Oligonucleotide for detection of SNP TSC0021168
tatctcacaaaaa

SEQ ID NO: 84179 - DNA, 13 bp, Artificial Sequence
  Oligonucleotide for detection of SNP TSC0021168
tgttttttaagaa

SEQ ID NO: 84180 - DNA, 13 bp, Artificial Sequence
  Oligonucleotide for detection of SNP TSC0021168
ttcttaaaaaaca

SEQ ID NO: 84181 - DNA, 13 bp, Artificial Sequence
  Oligonucleotide for detection of SNP TSC0021168
tgttttataagaa

SEQ ID NO: 84182 - DNA, 13 bp, Artificial Sequence
  Oligonucleotide for detection of SNP TSC0021168
ttcttataaaaca

SEQ ID NO: 84183 - DNA, 13 bp, Artificial Sequence
  Oligonucleotide for detection of SNP TSC0021169
tttggaataagty

SEQ ID NO: 84184 - DNA, 13 bp, Artificial Sequence
  Oligonucleotide for detection of SNP TSC0021169
racttattccaaa

SEQ ID NO: 84185 - DNA, 13 bp, Artificial Sequence
  Oligonucleotide for detection of SNP TSC0021169
tttggagtaagty

SEQ ID NO: 84186 - DNA, 13 bp, Artificial Sequence
  Oligonucleotide for detection of SNP TSC0021169
racttactccaaa

SEQ ID NO: 84187 - DNA, 13 bp, Artificial Sequence
  Oligonucleotide for detection of SNP TSC0021170
tttgataaaaaay

SEQ ID NO: 84188 - DNA, 13 bp, Artificial Sequence
  Oligonucleotide for detection of SNP TSC0021170
rttttttatcaaa

SEQ ID NO: 84189 - DNA, 13 bp, Artificial Sequence
  Oligonucleotide for detection of SNP TSC0021170
tttgatgaaaaay

SEQ ID NO: 84190 - DNA, 13 bp, Artificial Sequence
  Oligonucleotide for detection of SNP TSC0021170
rtttttcatcaaa

SEQ ID NO: 84191 - DNA, 13 bp, Artificial Sequence
  Oligonucleotide for detection of SNP TSC0021170
tttgacgaaaaay

SEQ ID NO: 84192 - DNA, 13 bp, Artificial Sequence
  Oligonucleotide for detection of SNP TSC0021170
rtttttcgtcaaa

SEQ ID NO: 84193 - DNA, 13 bp, Artificial Sequence
  Oligonucleotide for detection of SNP TSC0021170
gttttttgttagg

SEQ ID NO: 84194 - DNA, 13 bp, Artificial Sequence
  Oligonucleotide for detection of SNP TSC0021170
cctaacaaaaaac

SEQ ID NO: 84195 - DNA, 13 bp, Artificial Sequence
  Oligonucleotide for detection of SNP TSC0021170
gtttttcgttagg

SEQ ID NO: 84196 - DNA, 13 bp, Artificial Sequence
  Oligonucleotide for detection of SNP TSC0021170
cctaacgaaaaac

SEQ ID NO: 84197 - DNA, 13 bp, Artificial Sequence
  Oligonucleotide for detection of SNP TSC0021171
gttatatgataga

SEQ ID NO: 84198 - DNA, 13 bp, Artificial Sequence
  Oligonucleotide for detection of SNP TSC0021171
tctatcatataac

SEQ ID NO: 84199 - DNA, 13 bp, Artificial Sequence
  Oligonucleotide for detection of SNP TSC0021171
gttatacgataga

SEQ ID NO: 84200 - DNA, 13 bp, Artificial Sequence
  Oligonucleotide for detection of SNP TSC0021171
tctatcgtataac

SEQ ID NO: 84201 - DNA, 13 bp, Artificial Sequence
  Oligonucleotide for detection of SNP TSC0021171
tttattgtgtaay

SEQ ID NO: 84202 - DNA, 13 bp, Artificial Sequence
  Oligonucleotide for detection of SNP TSC0021171
rttacacaataaa

SEQ ID NO: 84203 - DNA, 13 bp, Artificial Sequence
  Oligonucleotide for detection of SNP TSC0021171
tttattatgtaay

SEQ ID NO: 84204 - DNA, 13 bp, Artificial Sequence
  Oligonucleotide for detection of SNP TSC0021171
rttacataataaa

SEQ ID NO: 84205 - DNA, 13 bp, Artificial Sequence
  Oligonucleotide for detection of SNP TSC0021171
tttatcgtgtaay

SEQ ID NO: 84206 - DNA, 13 bp, Artificial Sequence
  Oligonucleotide for detection of SNP TSC0021171
rttacacgataaa

SEQ ID NO: 84207 - DNA, 13 bp, Artificial Sequence
  Oligonucleotide for detection of SNP TSC0021173
tggatgatagata

SEQ ID NO: 84208 - DNA, 13 bp, Artificial Sequence
  Oligonucleotide for detection of SNP TSC0021173
tatctatcatcca

SEQ ID NO: 84209 - DNA, 13 bp, Artificial Sequence
  Oligonucleotide for detection of SNP TSC0021173
tggatgttagata

SEQ ID NO: 84210 - DNA, 13 bp, Artificial Sequence
  Oligonucleotide for detection of SNP TSC0021173
tatctaacatcca

SEQ ID NO: 84211 - DNA, 13 bp, Artificial Sequence
  Oligonucleotide for detection of SNP TSC0021173
tgtttgttattta

SEQ ID NO: 84212 - DNA, 13 bp, Artificial Sequence
  Oligonucleotide for detection of SNP TSC0021173
taaataacaaaca

SEQ ID NO: 84213 - DNA, 13 bp, Artificial Sequence
  Oligonucleotide for detection of SNP TSC0021173
tgtttgatattta

SEQ ID NO: 84214 - DNA, 13 bp, Artificial Sequence
  Oligonucleotide for detection of SNP TSC0021173
taaatatcaaaca

SEQ ID NO: 84215 - DNA, 13 bp, Artificial Sequence
  Oligonucleotide for detection of SNP TSC0021174
aggtgtgaggaag

SEQ ID NO: 84216 - DNA, 13 bp, Artificial Sequence
  Oligonucleotide for detection of SNP TSC0021174
cttcctcacacct

SEQ ID NO: 84217 - DNA, 13 bp, Artificial Sequence
  Oligonucleotide for detection of SNP TSC0021174
aggtgtaaggaag

SEQ ID NO: 84218 - DNA, 13 bp, Artificial Sequence
  Oligonucleotide for detection of SNP TSC0021174
cttccttacacct

SEQ ID NO: 84219 - DNA, 13 bp, Artificial Sequence
  Oligonucleotide for detection of SNP TSC0021175
ttatttagatgtg

SEQ ID NO: 84220 - DNA, 13 bp, Artificial Sequence
  Oligonucleotide for detection of SNP TSC0021175
cacatctaaataa

SEQ ID NO: 84221 - DNA, 13 bp, Artificial Sequence
  Oligonucleotide for detection of SNP TSC0021175
ttattttgatgtg

SEQ ID NO: 84222 - DNA, 13 bp, Artificial Sequence
  Oligonucleotide for detection of SNP TSC0021175
cacatcaaaataa

SEQ ID NO: 84223 - DNA, 13 bp, Artificial Sequence
  Oligonucleotide for detection of SNP TSC0021175
ttatttcgatgtg

SEQ ID NO: 84224 - DNA, 13 bp, Artificial Sequence
  Oligonucleotide for detection of SNP TSC0021175
cacatcgaaataa

SEQ ID NO: 84225 - DNA, 13 bp, Artificial Sequence
  Oligonucleotide for detection of SNP TSC0021175
tatatttgagtaa

SEQ ID NO: 84226 - DNA, 13 bp, Artificial Sequence
  Oligonucleotide for detection of SNP TSC0021175
ttactcaaatata

SEQ ID NO: 84227 - DNA, 13 bp, Artificial Sequence
  Oligonucleotide for detection of SNP TSC0021175
tatattggagtaa

SEQ ID NO: 84228 - DNA, 13 bp, Artificial Sequence
  Oligonucleotide for detection of SNP TSC0021175
ttactccaatata

SEQ ID NO: 84229 - DNA, 13 bp, Artificial Sequence
  Oligonucleotide for detection of SNP TSC0021175
tatatcggagtaa

SEQ ID NO: 84230 - DNA, 13 bp, Artificial Sequence
  Oligonucleotide for detection of SNP TSC0021175
ttactccgatata

SEQ ID NO: 84231 - DNA, 13 bp, Artificial Sequence
  Oligonucleotide for detection of SNP TSC0021176
ggtagtaatttgg

SEQ ID NO: 84232 - DNA, 13 bp, Artificial Sequence
  Oligonucleotide for detection of SNP TSC0021176
ccaaattactacc

SEQ ID NO: 84233 - DNA, 13 bp, Artificial Sequence
  Oligonucleotide for detection of SNP TSC0021176
ggtagtgatttgg

SEQ ID NO: 84234 - DNA, 13 bp, Artificial Sequence
  Oligonucleotide for detection of SNP TSC0021176
ccaaatcactacc

SEQ ID NO: 84235 - DNA, 13 bp, Artificial Sequence
  Oligonucleotide for detection of SNP TSC0021181
ggggggtattttg

SEQ ID NO: 84236 - DNA, 13 bp, Artificial Sequence
  Oligonucleotide for detection of SNP TSC0021181
caaaatacccccc

SEQ ID NO: 84237 - DNA, 13 bp, Artificial Sequence
  Oligonucleotide for detection of SNP TSC0021181
gggggggattttg

SEQ ID NO: 84238 - DNA, 13 bp, Artificial Sequence
  Oligonucleotide for detection of SNP TSC0021181
caaaatccccccc

SEQ ID NO: 84239 - DNA, 13 bp, Artificial Sequence
  Oligonucleotide for detection of SNP TSC0021181
taaagtgttttty

SEQ ID NO: 84240 - DNA, 13 bp, Artificial Sequence
  Oligonucleotide for detection of SNP TSC0021181
raaaaacacttta

SEQ ID NO: 84241 - DNA, 13 bp, Artificial Sequence
  Oligonucleotide for detection of SNP TSC0021181
taaagttttttty

SEQ ID NO: 84242 - DNA, 13 bp, Artificial Sequence
  Oligonucleotide for detection of SNP TSC0021181
raaaaaaacttta

SEQ ID NO: 84243 - DNA, 13 bp, Artificial Sequence
  Oligonucleotide for detection of SNP TSC0021183
atttttatattag

SEQ ID NO: 84244 - DNA, 13 bp, Artificial Sequence
  Oligonucleotide for detection of SNP TSC0021183
ctaatataaaaat

SEQ ID NO: 84245 - DNA, 13 bp, Artificial Sequence
  Oligonucleotide for detection of SNP TSC0021183
attttcgtattag

SEQ ID NO: 84246 - DNA, 13 bp, Artificial Sequence
  Oligonucleotide for detection of SNP TSC0021183
ctaatacgaaaat

SEQ ID NO: 84247 - DNA, 13 bp, Artificial Sequence
  Oligonucleotide for detection of SNP TSC0021183
ttggtgtgggaat

SEQ ID NO: 84248 - DNA, 13 bp, Artificial Sequence
  Oligonucleotide for detection of SNP TSC0021183
attcccacaccaa

SEQ ID NO: 84249 - DNA, 13 bp, Artificial Sequence
  Oligonucleotide for detection of SNP TSC0021183
ttggtgcgggaat

SEQ ID NO: 84250 - DNA, 13 bp, Artificial Sequence
  Oligonucleotide for detection of SNP TSC0021183
attcccgcaccaa

SEQ ID NO: 84251 - DNA, 13 bp, Artificial Sequence
  Oligonucleotide for detection of SNP TSC0021184
aggggatgggtty

SEQ ID NO: 84252 - DNA, 13 bp, Artificial Sequence
  Oligonucleotide for detection of SNP TSC0021184
raacccatcccct

SEQ ID NO: 84253 - DNA, 13 bp, Artificial Sequence
  Oligonucleotide for detection of SNP TSC0021184
aggggacgggtty

SEQ ID NO: 84254 - DNA, 13 bp, Artificial Sequence
  Oligonucleotide for detection of SNP TSC0021184
raacccgtcccct

SEQ ID NO: 84255 - DNA, 13 bp, Artificial Sequence
  Oligonucleotide for detection of SNP TSC0021187
gaaggtaattttt

SEQ ID NO: 84256 - DNA, 13 bp, Artificial Sequence
  Oligonucleotide for detection of SNP TSC0021187
aaaaattaccttc

SEQ ID NO: 84257 - DNA, 13 bp, Artificial Sequence
  Oligonucleotide for detection of SNP TSC0021187
gaaggtgattttt

SEQ ID NO: 84258 - DNA, 13 bp, Artificial Sequence
  Oligonucleotide for detection of SNP TSC0021187
aaaaatcaccttc

SEQ ID NO: 84259 - DNA, 13 bp, Artificial Sequence
  Oligonucleotide for detection of SNP TSC0021187
gaaggcgattttt

SEQ ID NO: 84260 - DNA, 13 bp, Artificial Sequence
  Oligonucleotide for detection of SNP TSC0021187
aaaaatcgccttc

SEQ ID NO: 84261 - DNA, 13 bp, Artificial Sequence
  Oligonucleotide for detection of SNP TSC0021187
aggaattgtttty

SEQ ID NO: 84262 - DNA, 13 bp, Artificial Sequence
  Oligonucleotide for detection of SNP TSC0021187
raaaacaattcct

SEQ ID NO: 84263 - DNA, 13 bp, Artificial Sequence
  Oligonucleotide for detection of SNP TSC0021187
aggaatcgtttty

SEQ ID NO: 84264 - DNA, 13 bp, Artificial Sequence
  Oligonucleotide for detection of SNP TSC0021187
raaaacgattcct

SEQ ID NO: 84265 - DNA, 13 bp, Artificial Sequence
  Oligonucleotide for detection of SNP TSC0021190
ttaaaatgtaaag

SEQ ID NO: 84266 - DNA, 13 bp, Artificial Sequence
  Oligonucleotide for detection of SNP TSC0021190
ctttacattttaa

SEQ ID NO: 84267 - DNA, 13 bp, Artificial Sequence
  Oligonucleotide for detection of SNP TSC0021190
ttaaaacgtaaag

SEQ ID NO: 84268 - DNA, 13 bp, Artificial Sequence
  Oligonucleotide for detection of SNP TSC0021190
ctttacgttttaa

SEQ ID NO: 84269 - DNA, 13 bp, Artificial Sequence
  Oligonucleotide for detection of SNP TSC0021190
ttttgtgttttaa

SEQ ID NO: 84270 - DNA, 13 bp, Artificial Sequence
  Oligonucleotide for detection of SNP TSC0021190
ttaaaacacaaaa

SEQ ID NO: 84271 - DNA, 13 bp, Artificial Sequence
  Oligonucleotide for detection of SNP TSC0021190
ttttgcgttttaa

SEQ ID NO: 84272 - DNA, 13 bp, Artificial Sequence
  Oligonucleotide for detection of SNP TSC0021190
ttaaaacgcaaaa

SEQ ID NO: 84273 - DNA, 13 bp, Artificial Sequence
  Oligonucleotide for detection of SNP TSC0021191
aaatatggtgaga

SEQ ID NO: 84274 - DNA, 13 bp, Artificial Sequence
  Oligonucleotide for detection of SNP TSC0021191
tctcaccatattt

SEQ ID NO: 84275 - DNA, 13 bp, Artificial Sequence
  Oligonucleotide for detection of SNP TSC0021191
aaatatagtgaga

SEQ ID NO: 84276 - DNA, 13 bp, Artificial Sequence
  Oligonucleotide for detection of SNP TSC0021191
tctcactatattt

SEQ ID NO: 84277 - DNA, 13 bp, Artificial Sequence
  Oligonucleotide for detection of SNP TSC0021192
ttttgtaaggtag

SEQ ID NO: 84278 - DNA, 13 bp, Artificial Sequence
  Oligonucleotide for detection of SNP TSC0021192
ctaccttacaaaa

SEQ ID NO: 84279 - DNA, 13 bp, Artificial Sequence
  Oligonucleotide for detection of SNP TSC0021192
ttttgtgaggtag

SEQ ID NO: 84280 - DNA, 13 bp, Artificial Sequence
  Oligonucleotide for detection of SNP TSC0021192
ctacctcacaaaa

SEQ ID NO: 84281 - DNA, 13 bp, Artificial Sequence
  Oligonucleotide for detection of SNP TSC0021192
ttttgcgaggtag

SEQ ID NO: 84282 - DNA, 13 bp, Artificial Sequence
  Oligonucleotide for detection of SNP TSC0021192
ctacctcgcaaaa

SEQ ID NO: 84283 - DNA, 13 bp, Artificial Sequence
  Oligonucleotide for detection of SNP TSC0021192
ttattttgtagag

SEQ ID NO: 84284 - DNA, 13 bp, Artificial Sequence
  Oligonucleotide for detection of SNP TSC0021192
ctctacaaaataa

SEQ ID NO: 84285 - DNA, 13 bp, Artificial Sequence
  Oligonucleotide for detection of SNP TSC0021192
ttatttcgtagag

SEQ ID NO: 84286 - DNA, 13 bp, Artificial Sequence
  Oligonucleotide for detection of SNP TSC0021192
ctctacgaaataa

SEQ ID NO: 84287 - DNA, 13 bp, Artificial Sequence
  Oligonucleotide for detection of SNP TSC0021193
gttggagaggtgg

SEQ ID NO: 84288 - DNA, 13 bp, Artificial Sequence
  Oligonucleotide for detection of SNP TSC0021193
ccacctctccaac

SEQ ID NO: 84289 - DNA, 13 bp, Artificial Sequence
  Oligonucleotide for detection of SNP TSC0021193
gttggaaaggtgg

SEQ ID NO: 84290 - DNA, 13 bp, Artificial Sequence
  Oligonucleotide for detection of SNP TSC0021193
ccacctttccaac

SEQ ID NO: 84291 - DNA, 13 bp, Artificial Sequence
  Oligonucleotide for detection of SNP TSC0021195
aagaatattgaaa

SEQ ID NO: 84292 - DNA, 13 bp, Artificial Sequence
  Oligonucleotide for detection of SNP TSC0021195
tttcaatattctt

SEQ ID NO: 84293 - DNA, 13 bp, Artificial Sequence
  Oligonucleotide for detection of SNP TSC0021195
aagaatgttgaaa

SEQ ID NO: 84294 - DNA, 13 bp, Artificial Sequence
  Oligonucleotide for detection of SNP TSC0021195
tttcaacattctt

SEQ ID NO: 84295 - DNA, 13 bp, Artificial Sequence
  Oligonucleotide for detection of SNP TSC0021197
gagttagagagat

SEQ ID NO: 84296 - DNA, 13 bp, Artificial Sequence
  Oligonucleotide for detection of SNP TSC0021197
atctctctaactc

SEQ ID NO: 84297 - DNA, 13 bp, Artificial Sequence
  Oligonucleotide for detection of SNP TSC0021197
gagttatagagat

SEQ ID NO: 84298 - DNA, 13 bp, Artificial Sequence
  Oligonucleotide for detection of SNP TSC0021197
atctctataactc

SEQ ID NO: 84299 - DNA, 13 bp, Artificial Sequence
  Oligonucleotide for detection of SNP TSC0021199
tggtttattatta

SEQ ID NO: 84300 - DNA, 13 bp, Artificial Sequence
  Oligonucleotide for detection of SNP TSC0021199
taataataaacca

SEQ ID NO: 84301 - DNA, 13 bp, Artificial Sequence
  Oligonucleotide for detection of SNP TSC0021199
tggtttgttatta

SEQ ID NO: 84302 - DNA, 13 bp, Artificial Sequence
  Oligonucleotide for detection of SNP TSC0021199
taataacaaacca

SEQ ID NO: 84303 - DNA, 13 bp, Artificial Sequence
  Oligonucleotide for detection of SNP TSC0021199
tggttcgttatta

SEQ ID NO: 84304 - DNA, 13 bp, Artificial Sequence
  Oligonucleotide for detection of SNP TSC0021199
taataacgaacca

SEQ ID NO: 84305 - DNA, 13 bp, Artificial Sequence
  Oligonucleotide for detection of SNP TSC0021199
taatagtgagtta

SEQ ID NO: 84306 - DNA, 13 bp, Artificial Sequence
  Oligonucleotide for detection of SNP TSC0021199
taactcactatta

SEQ ID NO: 84307 - DNA, 13 bp, Artificial Sequence
  Oligonucleotide for detection of SNP TSC0021199
taatagcgagtta

SEQ ID NO: 84308 - DNA, 13 bp, Artificial Sequence
  Oligonucleotide for detection of SNP TSC0021199
taactcgctatta

SEQ ID NO: 84309 - DNA, 13 bp, Artificial Sequence
  Oligonucleotide for detection of SNP TSC0021200
ttagtgagtaata

SEQ ID NO: 84310 - DNA, 13 bp, Artificial Sequence
  Oligonucleotide for detection of SNP TSC0021200
tattactcactaa

SEQ ID NO: 84311 - DNA, 13 bp, Artificial Sequence
  Oligonucleotide for detection of SNP TSC0021200
ttagtgggtaata

SEQ ID NO: 84312 - DNA, 13 bp, Artificial Sequence
  Oligonucleotide for detection of SNP TSC0021200
tattacccactaa

SEQ ID NO: 84313 - DNA, 13 bp, Artificial Sequence
  Oligonucleotide for detection of SNP TSC0021201
gtttttgtggtty

SEQ ID NO: 84314 - DNA, 13 bp, Artificial Sequence
  Oligonucleotide for detection of SNP TSC0021201
raaccacaaaaac

SEQ ID NO: 84315 - DNA, 13 bp, Artificial Sequence
  Oligonucleotide for detection of SNP TSC0021201
gtttttatggtty

SEQ ID NO: 84316 - DNA, 13 bp, Artificial Sequence
  Oligonucleotide for detection of SNP TSC0021201
raaccataaaaac

SEQ ID NO: 84317 - DNA, 13 bp, Artificial Sequence
  Oligonucleotide for detection of SNP TSC0021202
gtaaagtgtatta

SEQ ID NO: 84318 - DNA, 13 bp, Artificial Sequence
  Oligonucleotide for detection of SNP TSC0021202
taatacactttac

SEQ ID NO: 84319 - DNA, 13 bp, Artificial Sequence
  Oligonucleotide for detection of SNP TSC0021202
gtaaagggtatta

SEQ ID NO: 84320 - DNA, 13 bp, Artificial Sequence
  Oligonucleotide for detection of SNP TSC0021202
taataccctttac

SEQ ID NO: 84321 - DNA, 13 bp, Artificial Sequence
  Oligonucleotide for detection of SNP TSC0021202
gtaaagcgtatta

SEQ ID NO: 84322 - DNA, 13 bp, Artificial Sequence
  Oligonucleotide for detection of SNP TSC0021202
taatacgctttac

SEQ ID NO: 84323 - DNA, 13 bp, Artificial Sequence
  Oligonucleotide for detection of SNP TSC0021202
tggtatgttttgy

SEQ ID NO: 84324 - DNA, 13 bp, Artificial Sequence
  Oligonucleotide for detection of SNP TSC0021202
rcaaaacatacca

SEQ ID NO: 84325 - DNA, 13 bp, Artificial Sequence
  Oligonucleotide for detection of SNP TSC0021202
tggtattttttgy

SEQ ID NO: 84326 - DNA, 13 bp, Artificial Sequence
  Oligonucleotide for detection of SNP TSC0021202
rcaaaaaatacca

SEQ ID NO: 84327 - DNA, 13 bp, Artificial Sequence
  Oligonucleotide for detection of SNP TSC0021202
tggtacgttttgy

SEQ ID NO: 84328 - DNA, 13 bp, Artificial Sequence
  Oligonucleotide for detection of SNP TSC0021202
rcaaaacgtacca

SEQ ID NO: 84329 - DNA, 13 bp, Artificial Sequence
  Oligonucleotide for detection of SNP TSC0021203
gttgagatttaga

SEQ ID NO: 84330 - DNA, 13 bp, Artificial Sequence
  Oligonucleotide for detection of SNP TSC0021203
tctaaatctcaac

SEQ ID NO: 84331 - DNA, 13 bp, Artificial Sequence
  Oligonucleotide for detection of SNP TSC0021203
gttgagttttaga

SEQ ID NO: 84332 - DNA, 13 bp, Artificial Sequence
  Oligonucleotide for detection of SNP TSC0021203
tctaaaactcaac

SEQ ID NO: 84333 - DNA, 13 bp, Artificial Sequence
  Oligonucleotide for detection of SNP TSC0021203
tttgagttttagy

SEQ ID NO: 84334 - DNA, 13 bp, Artificial Sequence
  Oligonucleotide for detection of SNP TSC0021203
rctaaaactcaaa

SEQ ID NO: 84335 - DNA, 13 bp, Artificial Sequence
  Oligonucleotide for detection of SNP TSC0021203
tttgaggtttagy

SEQ ID NO: 84336 - DNA, 13 bp, Artificial Sequence
  Oligonucleotide for detection of SNP TSC0021203
rctaaacctcaaa

SEQ ID NO: 84337 - DNA, 13 bp, Artificial Sequence
  Oligonucleotide for detection of SNP TSC0021205
gagatggagatty

SEQ ID NO: 84338 - DNA, 13 bp, Artificial Sequence
  Oligonucleotide for detection of SNP TSC0021205
raatctccatctc

SEQ ID NO: 84339 - DNA, 13 bp, Artificial Sequence
  Oligonucleotide for detection of SNP TSC0021205
gagatgaagatty

SEQ ID NO: 84340 - DNA, 13 bp, Artificial Sequence
  Oligonucleotide for detection of SNP TSC0021205
raatcttcatctc

SEQ ID NO: 84341 - DNA, 13 bp, Artificial Sequence
  Oligonucleotide for detection of SNP TSC0021206
gtaaatgagatty

SEQ ID NO: 84342 - DNA, 13 bp, Artificial Sequence
  Oligonucleotide for detection of SNP TSC0021206
raatctcatttac

SEQ ID NO: 84343 - DNA, 13 bp, Artificial Sequence
  Oligonucleotide for detection of SNP TSC0021206
gtaaataagatty

SEQ ID NO: 84344 - DNA, 13 bp, Artificial Sequence
  Oligonucleotide for detection of SNP TSC0021206
raatcttatttac

SEQ ID NO: 84345 - DNA, 13 bp, Artificial Sequence
  Oligonucleotide for detection of SNP TSC0021207
ttggtttgttttt

SEQ ID NO: 84346 - DNA, 13 bp, Artificial Sequence
  Oligonucleotide for detection of SNP TSC0021207
aaaaacaaaccaa

SEQ ID NO: 84347 - DNA, 13 bp, Artificial Sequence
  Oligonucleotide for detection of SNP TSC0021207
ttggttcgttttt

SEQ ID NO: 84348 - DNA, 13 bp, Artificial Sequence
  Oligonucleotide for detection of SNP TSC0021207
aaaaacgaaccaa

SEQ ID NO: 84349 - DNA, 13 bp, Artificial Sequence
  Oligonucleotide for detection of SNP TSC0021207
agaaattgattaa

SEQ ID NO: 84350 - DNA, 13 bp, Artificial Sequence
  Oligonucleotide for detection of SNP TSC0021207
ttaatcaatttct

SEQ ID NO: 84351 - DNA, 13 bp, Artificial Sequence
  Oligonucleotide for detection of SNP TSC0021207
agaaatggattaa

SEQ ID NO: 84352 - DNA, 13 bp, Artificial Sequence
  Oligonucleotide for detection of SNP TSC0021207
ttaatccatttct

SEQ ID NO: 84353 - DNA, 13 bp, Artificial Sequence
  Oligonucleotide for detection of SNP TSC0021207
agaaacggattaa

SEQ ID NO: 84354 - DNA, 13 bp, Artificial Sequence
  Oligonucleotide for detection of SNP TSC0021207
ttaatccgtttct

SEQ ID NO: 84355 - DNA, 13 bp, Artificial Sequence
  Oligonucleotide for detection of SNP TSC0021210
tttttattaatta

SEQ ID NO: 84356 - DNA, 13 bp, Artificial Sequence
  Oligonucleotide for detection of SNP TSC0021210
taattaataaaaa

SEQ ID NO: 84357 - DNA, 13 bp, Artificial Sequence
  Oligonucleotide for detection of SNP TSC0021210
tttttagtaatta

SEQ ID NO: 84358 - DNA, 13 bp, Artificial Sequence
  Oligonucleotide for detection of SNP TSC0021210
taattactaaaaa

SEQ ID NO: 84359 - DNA, 13 bp, Artificial Sequence
  Oligonucleotide for detection of SNP TSC0021210
tagttagtgggaa

SEQ ID NO: 84360 - DNA, 13 bp, Artificial Sequence
  Oligonucleotide for detection of SNP TSC0021210
ttcccactaacta

SEQ ID NO: 84361 - DNA, 13 bp, Artificial Sequence
  Oligonucleotide for detection of SNP TSC0021210
tagttattgggaa

SEQ ID NO: 84362 - DNA, 13 bp, Artificial Sequence
  Oligonucleotide for detection of SNP TSC0021210
ttcccaataacta

SEQ ID NO: 84363 - DNA, 13 bp, Artificial Sequence
  Oligonucleotide for detection of SNP TSC0021212
gttttagaaaaaa

SEQ ID NO: 84364 - DNA, 13 bp, Artificial Sequence
  Oligonucleotide for detection of SNP TSC0021212
ttttttctaaaac

SEQ ID NO: 84365 - DNA, 13 bp, Artificial Sequence
  Oligonucleotide for detection of SNP TSC0021212
gttttaaaaaaaa

SEQ ID NO: 84366 - DNA, 13 bp, Artificial Sequence
  Oligonucleotide for detection of SNP TSC0021212
ttttttttaaaac

SEQ ID NO: 84367 - DNA, 13 bp, Artificial Sequence
  Oligonucleotide for detection of SNP TSC0021213
tgtttttgttttt

SEQ ID NO: 84368 - DNA, 13 bp, Artificial Sequence
  Oligonucleotide for detection of SNP TSC0021213
aaaaacaaaaaca

SEQ ID NO: 84369 - DNA, 13 bp, Artificial Sequence
  Oligonucleotide for detection of SNP TSC0021213
tgttttcgttttt

SEQ ID NO: 84370 - DNA, 13 bp, Artificial Sequence
  Oligonucleotide for detection of SNP TSC0021213
aaaaacgaaaaca

SEQ ID NO: 84371 - DNA, 13 bp, Artificial Sequence
  Oligonucleotide for detection of SNP TSC0021213
aaaaatgaaaata

SEQ ID NO: 84372 - DNA, 13 bp, Artificial Sequence
  Oligonucleotide for detection of SNP TSC0021213
tattttcattttt

SEQ ID NO: 84373 - DNA, 13 bp, Artificial Sequence
  Oligonucleotide for detection of SNP TSC0021213
aaaaataaaaata

SEQ ID NO: 84374 - DNA, 13 bp, Artificial Sequence
  Oligonucleotide for detection of SNP TSC0021213
tatttttattttt

SEQ ID NO: 84375 - DNA, 13 bp, Artificial Sequence
  Oligonucleotide for detection of SNP TSC0021213
aaaaacgaaaata

SEQ ID NO: 84376 - DNA, 13 bp, Artificial Sequence
  Oligonucleotide for detection of SNP TSC0021213
tattttcgttttt

SEQ ID NO: 84377 - DNA, 13 bp, Artificial Sequence
  Oligonucleotide for detection of SNP TSC0021215
tttattgagaatt

SEQ ID NO: 84378 - DNA, 13 bp, Artificial Sequence
  Oligonucleotide for detection of SNP TSC0021215
aattctcaataaa

SEQ ID NO: 84379 - DNA, 13 bp, Artificial Sequence
  Oligonucleotide for detection of SNP TSC0021215
tttattaagaatt

SEQ ID NO: 84380 - DNA, 13 bp, Artificial Sequence
  Oligonucleotide for detection of SNP TSC0021215
aattcttaataaa

SEQ ID NO: 84381 - DNA, 13 bp, Artificial Sequence
  Oligonucleotide for detection of SNP TSC0021216
tttgtatgtagag

SEQ ID NO: 84382 - DNA, 13 bp, Artificial Sequence
  Oligonucleotide for detection of SNP TSC0021216
ctctacatacaaa

SEQ ID NO: 84383 - DNA, 13 bp, Artificial Sequence
  Oligonucleotide for detection of SNP TSC0021216
tttgtacgtagag

SEQ ID NO: 84384 - DNA, 13 bp, Artificial Sequence
  Oligonucleotide for detection of SNP TSC0021216
ctctacgtacaaa

SEQ ID NO: 84385 - DNA, 13 bp, Artificial Sequence
  Oligonucleotide for detection of SNP TSC0021216
ttttgtgtgtaga

SEQ ID NO: 84386 - DNA, 13 bp, Artificial Sequence
  Oligonucleotide for detection of SNP TSC0021216
tctacacacaaaa

SEQ ID NO: 84387 - DNA, 13 bp, Artificial Sequence
  Oligonucleotide for detection of SNP TSC0021216
ttttgtatgtaga

SEQ ID NO: 84388 - DNA, 13 bp, Artificial Sequence
  Oligonucleotide for detection of SNP TSC0021216
tctacatacaaaa

SEQ ID NO: 84389 - DNA, 13 bp, Artificial Sequence
  Oligonucleotide for detection of SNP TSC0021216
ttttgcgtgtaga

SEQ ID NO: 84390 - DNA, 13 bp, Artificial Sequence
  Oligonucleotide for detection of SNP TSC0021216
tctacacgcaaaa

SEQ ID NO: 84391 - DNA, 13 bp, Artificial Sequence
  Oligonucleotide for detection of SNP TSC0021217
tttgttattaatt

SEQ ID NO: 84392 - DNA, 13 bp, Artificial Sequence
  Oligonucleotide for detection of SNP TSC0021217
aattaataacaaa

SEQ ID NO: 84393 - DNA, 13 bp, Artificial Sequence
  Oligonucleotide for detection of SNP TSC0021217
tttgttgttaatt

SEQ ID NO: 84394 - DNA, 13 bp, Artificial Sequence
  Oligonucleotide for detection of SNP TSC0021217
aattaacaacaaa

SEQ ID NO: 84395 - DNA, 13 bp, Artificial Sequence
  Oligonucleotide for detection of SNP TSC0021217
tttgtcgttaatt

SEQ ID NO: 84396 - DNA, 13 bp, Artificial Sequence
  Oligonucleotide for detection of SNP TSC0021217
aattaacgacaaa

SEQ ID NO: 84397 - DNA, 13 bp, Artificial Sequence
  Oligonucleotide for detection of SNP TSC0021217
agttgatggtagg

SEQ ID NO: 84398 - DNA, 13 bp, Artificial Sequence
  Oligonucleotide for detection of SNP TSC0021217
cctaccatcaact

SEQ ID NO: 84399 - DNA, 13 bp, Artificial Sequence
  Oligonucleotide for detection of SNP TSC0021217
agttgacggtagg

SEQ ID NO: 84400 - DNA, 13 bp, Artificial Sequence
  Oligonucleotide for detection of SNP TSC0021217
cctaccgtcaact

SEQ ID NO: 84401 - DNA, 13 bp, Artificial Sequence
  Oligonucleotide for detection of SNP TSC0021218
aggggatagaaaa

SEQ ID NO: 84402 - DNA, 13 bp, Artificial Sequence
  Oligonucleotide for detection of SNP TSC0021218
ttttctatcccct

SEQ ID NO: 84403 - DNA, 13 bp, Artificial Sequence
  Oligonucleotide for detection of SNP TSC0021218
aggggagagaaaa

SEQ ID NO: 84404 - DNA, 13 bp, Artificial Sequence
  Oligonucleotide for detection of SNP TSC0021218
ttttctctcccct

SEQ ID NO: 84405 - DNA, 13 bp, Artificial Sequence
  Oligonucleotide for detection of SNP TSC0021219
gataaggtttggt

SEQ ID NO: 84406 - DNA, 13 bp, Artificial Sequence
  Oligonucleotide for detection of SNP TSC0021219
accaaaccttatc

SEQ ID NO: 84407 - DNA, 13 bp, Artificial Sequence
  Oligonucleotide for detection of SNP TSC0021219
gataagatttggt

SEQ ID NO: 84408 - DNA, 13 bp, Artificial Sequence
  Oligonucleotide for detection of SNP TSC0021219
accaaatcttatc

SEQ ID NO: 84409 - DNA, 13 bp, Artificial Sequence
  Oligonucleotide for detection of SNP TSC0021220
ttattattagaga

SEQ ID NO: 84410 - DNA, 13 bp, Artificial Sequence
  Oligonucleotide for detection of SNP TSC0021220
tctctaataataa

SEQ ID NO: 84411 - DNA, 13 bp, Artificial Sequence
  Oligonucleotide for detection of SNP TSC0021220
ttattagtagaga

SEQ ID NO: 84412 - DNA, 13 bp, Artificial Sequence
  Oligonucleotide for detection of SNP TSC0021220
tctctactaataa

SEQ ID NO: 84413 - DNA, 13 bp, Artificial Sequence
  Oligonucleotide for detection of SNP TSC0021220
tttttagtaataa

SEQ ID NO: 84414 - DNA, 13 bp, Artificial Sequence
  Oligonucleotide for detection of SNP TSC0021220
ttattactaaaaa

SEQ ID NO: 84415 - DNA, 13 bp, Artificial Sequence
  Oligonucleotide for detection of SNP TSC0021220
tttttattaataa

SEQ ID NO: 84416 - DNA, 13 bp, Artificial Sequence
  Oligonucleotide for detection of SNP TSC0021220
ttattaataaaaa

SEQ ID NO: 84417 - DNA, 13 bp, Artificial Sequence
  Oligonucleotide for detection of SNP TSC0021221
gggagtatttgta

SEQ ID NO: 84418 - DNA, 13 bp, Artificial Sequence
  Oligonucleotide for detection of SNP TSC0021221
tacaaatactccc

SEQ ID NO: 84419 - DNA, 13 bp, Artificial Sequence
  Oligonucleotide for detection of SNP TSC0021221
gggagtttttgta

SEQ ID NO: 84420 - DNA, 13 bp, Artificial Sequence
  Oligonucleotide for detection of SNP TSC0021221
tacaaaaactccc

SEQ ID NO: 84421 - DNA, 13 bp, Artificial Sequence
  Oligonucleotide for detection of SNP TSC0021221
tgtagatgtttty

SEQ ID NO: 84422 - DNA, 13 bp, Artificial Sequence
  Oligonucleotide for detection of SNP TSC0021221
raaaacatctaca

SEQ ID NO: 84423 - DNA, 13 bp, Artificial Sequence
  Oligonucleotide for detection of SNP TSC0021221
tgtagaggtttty

SEQ ID NO: 84424 - DNA, 13 bp, Artificial Sequence
  Oligonucleotide for detection of SNP TSC0021221
raaaacctctaca

SEQ ID NO: 84425 - DNA, 13 bp, Artificial Sequence
  Oligonucleotide for detection of SNP TSC0021226
tgggagagtatgg

SEQ ID NO: 84426 - DNA, 13 bp, Artificial Sequence
  Oligonucleotide for detection of SNP TSC0021226
ccatactctccca

SEQ ID NO: 84427 - DNA, 13 bp, Artificial Sequence
  Oligonucleotide for detection of SNP TSC0021226
tgggagggtatgg

SEQ ID NO: 84428 - DNA, 13 bp, Artificial Sequence
  Oligonucleotide for detection of SNP TSC0021226
ccataccctccca

SEQ ID NO: 84429 - DNA, 13 bp, Artificial Sequence
  Oligonucleotide for detection of SNP TSC0021226
cgggagagtatgg

SEQ ID NO: 84430 - DNA, 13 bp, Artificial Sequence
  Oligonucleotide for detection of SNP TSC0021226
ccatactctcccg

SEQ ID NO: 84431 - DNA, 13 bp, Artificial Sequence
  Oligonucleotide for detection of SNP TSC0021226
cgggagggtatgg

SEQ ID NO: 84432 - DNA, 13 bp, Artificial Sequence
  Oligonucleotide for detection of SNP TSC0021226
ccataccctcccg

SEQ ID NO: 84433 - DNA, 13 bp, Artificial Sequence
  Oligonucleotide for detection of SNP TSC0021226
tgggagagtacgg

SEQ ID NO: 84434 - DNA, 13 bp, Artificial Sequence
  Oligonucleotide for detection of SNP TSC0021226
ccgtactctccca

SEQ ID NO: 84435 - DNA, 13 bp, Artificial Sequence
  Oligonucleotide for detection of SNP TSC0021226
tgggagggtacgg

SEQ ID NO: 84436 - DNA, 13 bp, Artificial Sequence
  Oligonucleotide for detection of SNP TSC0021226
ccgtaccctccca

SEQ ID NO: 84437 - DNA, 13 bp, Artificial Sequence
  Oligonucleotide for detection of SNP TSC0021226
cgggagagtacgg

SEQ ID NO: 84438 - DNA, 13 bp, Artificial Sequence
  Oligonucleotide for detection of SNP TSC0021226
ccgtactctcccg

SEQ ID NO: 84439 - DNA, 13 bp, Artificial Sequence
  Oligonucleotide for detection of SNP TSC0021226
cgggagggtacgg

SEQ ID NO: 84440 - DNA, 13 bp, Artificial Sequence
  Oligonucleotide for detection of SNP TSC0021226
ccgtaccctcccg

SEQ ID NO: 84441 - DNA, 13 bp, Artificial Sequence
  Oligonucleotide for detection of SNP TSC0021234
tttgtaagatgaa

SEQ ID NO: 84442 - DNA, 13 bp, Artificial Sequence
  Oligonucleotide for detection of SNP TSC0021234
ttcatcttacaaa

SEQ ID NO: 84443 - DNA, 13 bp, Artificial Sequence
  Oligonucleotide for detection of SNP TSC0021234
tttgtaggatgaa

SEQ ID NO: 84444 - DNA, 13 bp, Artificial Sequence
  Oligonucleotide for detection of SNP TSC0021234
ttcatcctacaaa

SEQ ID NO: 84445 - DNA, 13 bp, Artificial Sequence
  Oligonucleotide for detection of SNP TSC0021237
gaaggggaggtgg

SEQ ID NO: 84446 - DNA, 13 bp, Artificial Sequence
  Oligonucleotide for detection of SNP TSC0021237
ccacctccccttc

SEQ ID NO: 84447 - DNA, 13 bp, Artificial Sequence
  Oligonucleotide for detection of SNP TSC0021237
gaagggaaggtgg

SEQ ID NO: 84448 - DNA, 13 bp, Artificial Sequence
  Oligonucleotide for detection of SNP TSC0021237
ccaccttcccttc

SEQ ID NO: 84449 - DNA, 13 bp, Artificial Sequence
  Oligonucleotide for detection of SNP TSC0021238
gtttaaaatattg

SEQ ID NO: 84450 - DNA, 13 bp, Artificial Sequence
  Oligonucleotide for detection of SNP TSC0021238
caatattttaaac

SEQ ID NO: 84451 - DNA, 13 bp, Artificial Sequence
  Oligonucleotide for detection of SNP TSC0021238
gtttaagatattg

SEQ ID NO: 84452 - DNA, 13 bp, Artificial Sequence
  Oligonucleotide for detection of SNP TSC0021238
caatatcttaaac

SEQ ID NO: 84453 - DNA, 13 bp, Artificial Sequence
  Oligonucleotide for detection of SNP TSC0021248
attattatagaat

SEQ ID NO: 84454 - DNA, 13 bp, Artificial Sequence
  Oligonucleotide for detection of SNP TSC0021248
attctataataat

SEQ ID NO: 84455 - DNA, 13 bp, Artificial Sequence
  Oligonucleotide for detection of SNP TSC0021248
attattttagaat

SEQ ID NO: 84456 - DNA, 13 bp, Artificial Sequence
  Oligonucleotide for detection of SNP TSC0021248
attctaaaataat

SEQ ID NO: 84457 - DNA, 13 bp, Artificial Sequence
  Oligonucleotide for detection of SNP TSC0021248
attttgtaataat

SEQ ID NO: 84458 - DNA, 13 bp, Artificial Sequence
  Oligonucleotide for detection of SNP TSC0021248
attattacaaaat

SEQ ID NO: 84459 - DNA, 13 bp, Artificial Sequence
  Oligonucleotide for detection of SNP TSC0021248
attttggaataat

SEQ ID NO: 84460 - DNA, 13 bp, Artificial Sequence
  Oligonucleotide for detection of SNP TSC0021248
attattccaaaat

SEQ ID NO: 84461 - DNA, 13 bp, Artificial Sequence
  Oligonucleotide for detection of SNP TSC0021249
ttaggatgggtgg

SEQ ID NO: 84462 - DNA, 13 bp, Artificial Sequence
  Oligonucleotide for detection of SNP TSC0021249
ccacccatcctaa

SEQ ID NO: 84463 - DNA, 13 bp, Artificial Sequence
  Oligonucleotide for detection of SNP TSC0021249
ttaggacgggtgg

SEQ ID NO: 84464 - DNA, 13 bp, Artificial Sequence
  Oligonucleotide for detection of SNP TSC0021249
ccacccgtcctaa

SEQ ID NO: 84465 - DNA, 13 bp, Artificial Sequence
  Oligonucleotide for detection of SNP TSC0021250
tagtttaaggtty

SEQ ID NO: 84466 - DNA, 13 bp, Artificial Sequence
  Oligonucleotide for detection of SNP TSC0021250
raaccttaaacta

SEQ ID NO: 84467 - DNA, 13 bp, Artificial Sequence
  Oligonucleotide for detection of SNP TSC0021250
tagtttgaggtty

SEQ ID NO: 84468 - DNA, 13 bp, Artificial Sequence
  Oligonucleotide for detection of SNP TSC0021250
raacctcaaacta

SEQ ID NO: 84469 - DNA, 13 bp, Artificial Sequence
  Oligonucleotide for detection of SNP TSC0021250
tagttcgaggtty

SEQ ID NO: 84470 - DNA, 13 bp, Artificial Sequence
  Oligonucleotide for detection of SNP TSC0021250
raacctcgaacta

SEQ ID NO: 84471 - DNA, 13 bp, Artificial Sequence
  Oligonucleotide for detection of SNP TSC0021250
ggattttggattg

SEQ ID NO: 84472 - DNA, 13 bp, Artificial Sequence
  Oligonucleotide for detection of SNP TSC0021250
caatccaaaatcc

SEQ ID NO: 84473 - DNA, 13 bp, Artificial Sequence
  Oligonucleotide for detection of SNP TSC0021250
ggatttcggattg

SEQ ID NO: 84474 - DNA, 13 bp, Artificial Sequence
  Oligonucleotide for detection of SNP TSC0021250
caatccgaaatcc

SEQ ID NO: 84475 - DNA, 13 bp, Artificial Sequence
  Oligonucleotide for detection of SNP TSC0021252
tagaaaatatttt

SEQ ID NO: 84476 - DNA, 13 bp, Artificial Sequence
  Oligonucleotide for detection of SNP TSC0021252
aaaatattttcta

SEQ ID NO: 84477 - DNA, 13 bp, Artificial Sequence
  Oligonucleotide for detection of SNP TSC0021252
tagaaattatttt

SEQ ID NO: 84478 - DNA, 13 bp, Artificial Sequence
  Oligonucleotide for detection of SNP TSC0021252
aaaataatttcta

SEQ ID NO: 84479 - DNA, 13 bp, Artificial Sequence
  Oligonucleotide for detection of SNP TSC0021254
tattaagtaattt

SEQ ID NO: 84480 - DNA, 13 bp, Artificial Sequence
  Oligonucleotide for detection of SNP TSC0021254
aaattacttaata

SEQ ID NO: 84481 - DNA, 13 bp, Artificial Sequence
  Oligonucleotide for detection of SNP TSC0021254
tattaaataattt

SEQ ID NO: 84482 - DNA, 13 bp, Artificial Sequence
  Oligonucleotide for detection of SNP TSC0021254
aaattatttaata

SEQ ID NO: 84483 - DNA, 13 bp, Artificial Sequence
  Oligonucleotide for detection of SNP TSC0021255
tatttaatgtgty

SEQ ID NO: 84484 - DNA, 13 bp, Artificial Sequence
  Oligonucleotide for detection of SNP TSC0021255
racacattaaata

SEQ ID NO: 84485 - DNA, 13 bp, Artificial Sequence
  Oligonucleotide for detection of SNP TSC0021255
tatttagtgtgty

SEQ ID NO: 84486 - DNA, 13 bp, Artificial Sequence
  Oligonucleotide for detection of SNP TSC0021255
racacactaaata

SEQ ID NO: 84487 - DNA, 13 bp, Artificial Sequence
  Oligonucleotide for detection of SNP TSC0021257
gagtgaggaaggy

SEQ ID NO: 84488 - DNA, 13 bp, Artificial Sequence
  Oligonucleotide for detection of SNP TSC0021257
rccttcctcactc

SEQ ID NO: 84489 - DNA, 13 bp, Artificial Sequence
  Oligonucleotide for detection of SNP TSC0021257
gagtgaagaaggy

SEQ ID NO: 84490 - DNA, 13 bp, Artificial Sequence
  Oligonucleotide for detection of SNP TSC0021257
rccttcttcactc

SEQ ID NO: 84491 - DNA, 13 bp, Artificial Sequence
  Oligonucleotide for detection of SNP TSC0021259
tgtattataattt

SEQ ID NO: 84492 - DNA, 13 bp, Artificial Sequence
  Oligonucleotide for detection of SNP TSC0021259
aaattataataca

SEQ ID NO: 84493 - DNA, 13 bp, Artificial Sequence
  Oligonucleotide for detection of SNP TSC0021259
tgtattgtaattt

SEQ ID NO: 84494 - DNA, 13 bp, Artificial Sequence
  Oligonucleotide for detection of SNP TSC0021259
aaattacaataca

SEQ ID NO: 84495 - DNA, 13 bp, Artificial Sequence
  Oligonucleotide for detection of SNP TSC0021259
tgtatcgtaattt

SEQ ID NO: 84496 - DNA, 13 bp, Artificial Sequence
  Oligonucleotide for detection of SNP TSC0021259
aaattacgataca

SEQ ID NO: 84497 - DNA, 13 bp, Artificial Sequence
  Oligonucleotide for detection of SNP TSC0021259
aaattatggtata

SEQ ID NO: 84498 - DNA, 13 bp, Artificial Sequence
  Oligonucleotide for detection of SNP TSC0021259
tataccataattt

SEQ ID NO: 84499 - DNA, 13 bp, Artificial Sequence
  Oligonucleotide for detection of SNP TSC0021259
aaattacggtata

SEQ ID NO: 84500 - DNA, 13 bp, Artificial Sequence
  Oligonucleotide for detection of SNP TSC0021259
tataccgtaattt

SEQ ID NO: 84501 - DNA, 13 bp, Artificial Sequence
  Oligonucleotide for detection of SNP TSC0021260
tttaggattttta

SEQ ID NO: 84502 - DNA, 13 bp, Artificial Sequence
  Oligonucleotide for detection of SNP TSC0021260
taaaaatcctaaa

SEQ ID NO: 84503 - DNA, 13 bp, Artificial Sequence
  Oligonucleotide for detection of SNP TSC0021260
tttaggtttttta

SEQ ID NO: 84504 - DNA, 13 bp, Artificial Sequence
  Oligonucleotide for detection of SNP TSC0021260
taaaaaacctaaa

SEQ ID NO: 84505 - DNA, 13 bp, Artificial Sequence
  Oligonucleotide for detection of SNP TSC0021260
tagaagttttggg

SEQ ID NO: 84506 - DNA, 13 bp, Artificial Sequence
  Oligonucleotide for detection of SNP TSC0021260
cccaaaacttcta

SEQ ID NO: 84507 - DNA, 13 bp, Artificial Sequence
  Oligonucleotide for detection of SNP TSC0021260
tagaagatttggg

SEQ ID NO: 84508 - DNA, 13 bp, Artificial Sequence
  Oligonucleotide for detection of SNP TSC0021260
cccaaatcttcta

SEQ ID NO: 84509 - DNA, 13 bp, Artificial Sequence
  Oligonucleotide for detection of SNP TSC0021261
attaaaatgatga

SEQ ID NO: 84510 - DNA, 13 bp, Artificial Sequence
  Oligonucleotide for detection of SNP TSC0021261
tcatcattttaat

SEQ ID NO: 84511 - DNA, 13 bp, Artificial Sequence
  Oligonucleotide for detection of SNP TSC0021261
attaaagtgatga

SEQ ID NO: 84512 - DNA, 13 bp, Artificial Sequence
  Oligonucleotide for detection of SNP TSC0021261
tcatcactttaat

SEQ ID NO: 84513 - DNA, 13 bp, Artificial Sequence
  Oligonucleotide for detection of SNP TSC0021261
attaaaacgatga

SEQ ID NO: 84514 - DNA, 13 bp, Artificial Sequence
  Oligonucleotide for detection of SNP TSC0021261
tcatcgttttaat

SEQ ID NO: 84515 - DNA, 13 bp, Artificial Sequence
  Oligonucleotide for detection of SNP TSC0021261
attaaagcgatga

SEQ ID NO: 84516 - DNA, 13 bp, Artificial Sequence
  Oligonucleotide for detection of SNP TSC0021261
tcatcgctttaat

SEQ ID NO: 84517 - DNA, 13 bp, Artificial Sequence
  Oligonucleotide for detection of SNP TSC0021264
tgtattgatagta

SEQ ID NO: 84518 - DNA, 13 bp, Artificial Sequence
  Oligonucleotide for detection of SNP TSC0021264
tactatcaataca

SEQ ID NO: 84519 - DNA, 13 bp, Artificial Sequence
  Oligonucleotide for detection of SNP TSC0021264
tgtattaatagta

SEQ ID NO: 84520 - DNA, 13 bp, Artificial Sequence
  Oligonucleotide for detection of SNP TSC0021264
tactattaataca

SEQ ID NO: 84521 - DNA, 13 bp, Artificial Sequence
  Oligonucleotide for detection of SNP TSC0021266
aatatgatattgy

SEQ ID NO: 84522 - DNA, 13 bp, Artificial Sequence
  Oligonucleotide for detection of SNP TSC0021266
rcaatatcatatt

SEQ ID NO: 84523 - DNA, 13 bp, Artificial Sequence
  Oligonucleotide for detection of SNP TSC0021266
aatatgttattgy

SEQ ID NO: 84524 - DNA, 13 bp, Artificial Sequence
  Oligonucleotide for detection of SNP TSC0021266
rcaataacatatt

SEQ ID NO: 84525 - DNA, 13 bp, Artificial Sequence
  Oligonucleotide for detection of SNP TSC0021266
gtaatattatgtt

SEQ ID NO: 84526 - DNA, 13 bp, Artificial Sequence
  Oligonucleotide for detection of SNP TSC0021266
aacataatattac

SEQ ID NO: 84527 - DNA, 13 bp, Artificial Sequence
  Oligonucleotide for detection of SNP TSC0021266
gtaatagtatgtt

SEQ ID NO: 84528 - DNA, 13 bp, Artificial Sequence
  Oligonucleotide for detection of SNP TSC0021266
aacatactattac

SEQ ID NO: 84529 - DNA, 13 bp, Artificial Sequence
  Oligonucleotide for detection of SNP TSC0021267
aagtgtgtttttt

SEQ ID NO: 84530 - DNA, 13 bp, Artificial Sequence
  Oligonucleotide for detection of SNP TSC0021267
aaaaaacacactt

SEQ ID NO: 84531 - DNA, 13 bp, Artificial Sequence
  Oligonucleotide for detection of SNP TSC0021267
aagtgtatttttt

SEQ ID NO: 84532 - DNA, 13 bp, Artificial Sequence
  Oligonucleotide for detection of SNP TSC0021267
aaaaaatacactt

SEQ ID NO: 84533 - DNA, 13 bp, Artificial Sequence
  Oligonucleotide for detection of SNP TSC0021268
aggaatatatttt

SEQ ID NO: 84534 - DNA, 13 bp, Artificial Sequence
  Oligonucleotide for detection of SNP TSC0021268
aaaatatattcct

SEQ ID NO: 84535 - DNA, 13 bp, Artificial Sequence
  Oligonucleotide for detection of SNP TSC0021268
aggaatgtatttt

SEQ ID NO: 84536 - DNA, 13 bp, Artificial Sequence
  Oligonucleotide for detection of SNP TSC0021268
aaaatacattcct

SEQ ID NO: 84537 - DNA, 13 bp, Artificial Sequence
  Oligonucleotide for detection of SNP TSC0021268
aggaacgtatttt

SEQ ID NO: 84538 - DNA, 13 bp, Artificial Sequence
  Oligonucleotide for detection of SNP TSC0021268
aaaatacgttcct

SEQ ID NO: 84539 - DNA, 13 bp, Artificial Sequence
  Oligonucleotide for detection of SNP TSC0021268
aaagtgtgttttt

SEQ ID NO: 84540 - DNA, 13 bp, Artificial Sequence
  Oligonucleotide for detection of SNP TSC0021268
aaaaacacacttt

SEQ ID NO: 84541 - DNA, 13 bp, Artificial Sequence
  Oligonucleotide for detection of SNP TSC0021268
aaagtgcgttttt

SEQ ID NO: 84542 - DNA, 13 bp, Artificial Sequence
  Oligonucleotide for detection of SNP TSC0021268
aaaaacgcacttt

SEQ ID NO: 84543 - DNA, 13 bp, Artificial Sequence
  Oligonucleotide for detection of SNP TSC0021270
ttttaggtgttgt

SEQ ID NO: 84544 - DNA, 13 bp, Artificial Sequence
  Oligonucleotide for detection of SNP TSC0021270
acaacacctaaaa

SEQ ID NO: 84545 - DNA, 13 bp, Artificial Sequence
  Oligonucleotide for detection of SNP TSC0021270
ttttagatgttgt

SEQ ID NO: 84546 - DNA, 13 bp, Artificial Sequence
  Oligonucleotide for detection of SNP TSC0021270
acaacatctaaaa

SEQ ID NO: 84547 - DNA, 13 bp, Artificial Sequence
  Oligonucleotide for detection of SNP TSC0021271
tatgtttgtaggg

SEQ ID NO: 84548 - DNA, 13 bp, Artificial Sequence
  Oligonucleotide for detection of SNP TSC0021271
ccctacaaacata

SEQ ID NO: 84549 - DNA, 13 bp, Artificial Sequence
  Oligonucleotide for detection of SNP TSC0021271
tatgttcgtaggg

SEQ ID NO: 84550 - DNA, 13 bp, Artificial Sequence
  Oligonucleotide for detection of SNP TSC0021271
ccctacgaacata

SEQ ID NO: 84551 - DNA, 13 bp, Artificial Sequence
  Oligonucleotide for detection of SNP TSC0021271
ttttatggatatg

SEQ ID NO: 84552 - DNA, 13 bp, Artificial Sequence
  Oligonucleotide for detection of SNP TSC0021271
catatccataaaa

SEQ ID NO: 84553 - DNA, 13 bp, Artificial Sequence
  Oligonucleotide for detection of SNP TSC0021271
ttttatagatatg

SEQ ID NO: 84554 - DNA, 13 bp, Artificial Sequence
  Oligonucleotide for detection of SNP TSC0021271
catatctataaaa

SEQ ID NO: 84555 - DNA, 13 bp, Artificial Sequence
  Oligonucleotide for detection of SNP TSC0021271
ttttacggatatg

SEQ ID NO: 84556 - DNA, 13 bp, Artificial Sequence
  Oligonucleotide for detection of SNP TSC0021271
catatccgtaaaa

SEQ ID NO: 84557 - DNA, 13 bp, Artificial Sequence
  Oligonucleotide for detection of SNP TSC0021275
tttttaaaggatt

SEQ ID NO: 84558 - DNA, 13 bp, Artificial Sequence
  Oligonucleotide for detection of SNP TSC0021275
aatcctttaaaaa

SEQ ID NO: 84559 - DNA, 13 bp, Artificial Sequence
  Oligonucleotide for detection of SNP TSC0021275
tttttagaggatt

SEQ ID NO: 84560 - DNA, 13 bp, Artificial Sequence
  Oligonucleotide for detection of SNP TSC0021275
aatcctctaaaaa

SEQ ID NO: 84561 - DNA, 13 bp, Artificial Sequence
  Oligonucleotide for detection of SNP TSC0021276
tatttttgaggga

SEQ ID NO: 84562 - DNA, 13 bp, Artificial Sequence
  Oligonucleotide for detection of SNP TSC0021276
tccctcaaaaata

SEQ ID NO: 84563 - DNA, 13 bp, Artificial Sequence
  Oligonucleotide for detection of SNP TSC0021276
tattttcgaggga

SEQ ID NO: 84564 - DNA, 13 bp, Artificial Sequence
  Oligonucleotide for detection of SNP TSC0021276
tccctcgaaaata

SEQ ID NO: 84565 - DNA, 13 bp, Artificial Sequence
  Oligonucleotide for detection of SNP TSC0021276
ttttttagggatg

SEQ ID NO: 84566 - DNA, 13 bp, Artificial Sequence
  Oligonucleotide for detection of SNP TSC0021276
catccctaaaaaa

SEQ ID NO: 84567 - DNA, 13 bp, Artificial Sequence
  Oligonucleotide for detection of SNP TSC0021276
tttttcggggatg

SEQ ID NO: 84568 - DNA, 13 bp, Artificial Sequence
  Oligonucleotide for detection of SNP TSC0021276
catccccgaaaaa

SEQ ID NO: 84569 - DNA, 13 bp, Artificial Sequence
  Oligonucleotide for detection of SNP TSC0021277
atttttataatta

SEQ ID NO: 84570 - DNA, 13 bp, Artificial Sequence
  Oligonucleotide for detection of SNP TSC0021277
taattataaaaat

SEQ ID NO: 84571 - DNA, 13 bp, Artificial Sequence
  Oligonucleotide for detection of SNP TSC0021280
ggagaaattatag

SEQ ID NO: 84572 - DNA, 13 bp, Artificial Sequence
  Oligonucleotide for detection of SNP TSC0021280
ctataatttctcc

SEQ ID NO: 84573 - DNA, 13 bp, Artificial Sequence
  Oligonucleotide for detection of SNP TSC0021280
ggagaatttatag

SEQ ID NO: 84574 - DNA, 13 bp, Artificial Sequence
  Oligonucleotide for detection of SNP TSC0021280
ctataaattctcc

SEQ ID NO: 84575 - DNA, 13 bp, Artificial Sequence
  Oligonucleotide for detection of SNP TSC0021280
ttgtgatttttty

SEQ ID NO: 84576 - DNA, 13 bp, Artificial Sequence
  Oligonucleotide for detection of SNP TSC0021280
raaaaaatcacaa

SEQ ID NO: 84577 - DNA, 13 bp, Artificial Sequence
  Oligonucleotide for detection of SNP TSC0021280
ttgtgaattttty

SEQ ID NO: 84578 - DNA, 13 bp, Artificial Sequence
  Oligonucleotide for detection of SNP TSC0021280
raaaaattcacaa

SEQ ID NO: 84579 - DNA, 13 bp, Artificial Sequence
  Oligonucleotide for detection of SNP TSC0021282
tgtttttttgttt

SEQ ID NO: 84580 - DNA, 13 bp, Artificial Sequence
  Oligonucleotide for detection of SNP TSC0021282
aaacaaaaaaaca

SEQ ID NO: 84581 - DNA, 13 bp, Artificial Sequence
  Oligonucleotide for detection of SNP TSC0021282
aggtagtggaata

SEQ ID NO: 84582 - DNA, 13 bp, Artificial Sequence
  Oligonucleotide for detection of SNP TSC0021282
tattccactacct

SEQ ID NO: 84583 - DNA, 13 bp, Artificial Sequence
  Oligonucleotide for detection of SNP TSC0021282
aggtaggggaata

SEQ ID NO: 84584 - DNA, 13 bp, Artificial Sequence
  Oligonucleotide for detection of SNP TSC0021282
tattcccctacct

SEQ ID NO: 84585 - DNA, 13 bp, Artificial Sequence
  Oligonucleotide for detection of SNP TSC0021283
agtagggttttaa

SEQ ID NO: 84586 - DNA, 13 bp, Artificial Sequence
  Oligonucleotide for detection of SNP TSC0021283
ttaaaaccctact

SEQ ID NO: 84587 - DNA, 13 bp, Artificial Sequence
  Oligonucleotide for detection of SNP TSC0021283
agtaggattttaa

SEQ ID NO: 84588 - DNA, 13 bp, Artificial Sequence
  Oligonucleotide for detection of SNP TSC0021283
ttaaaatcctact

SEQ ID NO: 84589 - DNA, 13 bp, Artificial Sequence
  Oligonucleotide for detection of SNP TSC0021284
gggtaatgtgata

SEQ ID NO: 84590 - DNA, 13 bp, Artificial Sequence
  Oligonucleotide for detection of SNP TSC0021284
tatcacattaccc

SEQ ID NO: 84591 - DNA, 13 bp, Artificial Sequence
  Oligonucleotide for detection of SNP TSC0021284
gggtaacgtgata

SEQ ID NO: 84592 - DNA, 13 bp, Artificial Sequence
  Oligonucleotide for detection of SNP TSC0021284
tatcacgttaccc

SEQ ID NO: 84593 - DNA, 13 bp, Artificial Sequence
  Oligonucleotide for detection of SNP TSC0021284
tgttacgttgtty

SEQ ID NO: 84594 - DNA, 13 bp, Artificial Sequence
  Oligonucleotide for detection of SNP TSC0021284
raacaacgtaaca

SEQ ID NO: 84595 - DNA, 13 bp, Artificial Sequence
  Oligonucleotide for detection of SNP TSC0021285
ataagtttatttt

SEQ ID NO: 84596 - DNA, 13 bp, Artificial Sequence
  Oligonucleotide for detection of SNP TSC0021285
aaaataaacttat

SEQ ID NO: 84597 - DNA, 13 bp, Artificial Sequence
  Oligonucleotide for detection of SNP TSC0021285
ataagtgtatttt

SEQ ID NO: 84598 - DNA, 13 bp, Artificial Sequence
  Oligonucleotide for detection of SNP TSC0021285
aaaatacacttat

SEQ ID NO: 84599 - DNA, 13 bp, Artificial Sequence
  Oligonucleotide for detection of SNP TSC0021285
aaagtggatttat

SEQ ID NO: 84600 - DNA, 13 bp, Artificial Sequence
  Oligonucleotide for detection of SNP TSC0021285
ataaatccacttt

SEQ ID NO: 84601 - DNA, 13 bp, Artificial Sequence
  Oligonucleotide for detection of SNP TSC0021285
aaagtgtatttat

SEQ ID NO: 84602 - DNA, 13 bp, Artificial Sequence
  Oligonucleotide for detection of SNP TSC0021285
ataaatacacttt

SEQ ID NO: 84603 - DNA, 13 bp, Artificial Sequence
  Oligonucleotide for detection of SNP TSC0021288
aatagaattttta

SEQ ID NO: 84604 - DNA, 13 bp, Artificial Sequence
  Oligonucleotide for detection of SNP TSC0021288
taaaaattctatt

SEQ ID NO: 84605 - DNA, 13 bp, Artificial Sequence
  Oligonucleotide for detection of SNP TSC0021288
aatagagttttta

SEQ ID NO: 84606 - DNA, 13 bp, Artificial Sequence
  Oligonucleotide for detection of SNP TSC0021288
taaaaactctatt

SEQ ID NO: 84607 - DNA, 13 bp, Artificial Sequence
  Oligonucleotide for detection of SNP TSC0021289
atttttaataatt

SEQ ID NO: 84608 - DNA, 13 bp, Artificial Sequence
  Oligonucleotide for detection of SNP TSC0021289
aattattaaaaat

SEQ ID NO: 84609 - DNA, 13 bp, Artificial Sequence
  Oligonucleotide for detection of SNP TSC0021289
atttttgataatt

SEQ ID NO: 84610 - DNA, 13 bp, Artificial Sequence
  Oligonucleotide for detection of SNP TSC0021289
aattatcaaaaat

SEQ ID NO: 84611 - DNA, 13 bp, Artificial Sequence
  Oligonucleotide for detection of SNP TSC0021290
gtatggggtaaag

SEQ ID NO: 84612 - DNA, 13 bp, Artificial Sequence
  Oligonucleotide for detection of SNP TSC0021290
ctttaccccatac

SEQ ID NO: 84613 - DNA, 13 bp, Artificial Sequence
  Oligonucleotide for detection of SNP TSC0021290
gtatggagtaaag

SEQ ID NO: 84614 - DNA, 13 bp, Artificial Sequence
  Oligonucleotide for detection of SNP TSC0021290
ctttactccatac

SEQ ID NO: 84615 - DNA, 13 bp, Artificial Sequence
  Oligonucleotide for detection of SNP TSC0021291
tagaggggaggat

SEQ ID NO: 84616 - DNA, 13 bp, Artificial Sequence
  Oligonucleotide for detection of SNP TSC0021291
atcctcccctcta

SEQ ID NO: 84617 - DNA, 13 bp, Artificial Sequence
  Oligonucleotide for detection of SNP TSC0021291
tagaggagaggat

SEQ ID NO: 84618 - DNA, 13 bp, Artificial Sequence
  Oligonucleotide for detection of SNP TSC0021291
atcctctcctcta

SEQ ID NO: 84619 - DNA, 13 bp, Artificial Sequence
  Oligonucleotide for detection of SNP TSC0021298
ttgaggagttgta

SEQ ID NO: 84620 - DNA, 13 bp, Artificial Sequence
  Oligonucleotide for detection of SNP TSC0021298
tacaactcctcaa

SEQ ID NO: 84621 - DNA, 13 bp, Artificial Sequence
  Oligonucleotide for detection of SNP TSC0021298
ttgaggtgttgta

SEQ ID NO: 84622 - DNA, 13 bp, Artificial Sequence
  Oligonucleotide for detection of SNP TSC0021298
tacaacacctcaa

SEQ ID NO: 84623 - DNA, 13 bp, Artificial Sequence
  Oligonucleotide for detection of SNP TSC0021298
ttgaggcgttgta

SEQ ID NO: 84624 - DNA, 13 bp, Artificial Sequence
  Oligonucleotide for detection of SNP TSC0021298
tacaacgcctcaa

SEQ ID NO: 84625 - DNA, 13 bp, Artificial Sequence
  Oligonucleotide for detection of SNP TSC0021298
tgtaattttttag

SEQ ID NO: 84626 - DNA, 13 bp, Artificial Sequence
  Oligonucleotide for detection of SNP TSC0021298
ctaaaaaattaca

SEQ ID NO: 84627 - DNA, 13 bp, Artificial Sequence
  Oligonucleotide for detection of SNP TSC0021298
tgtaatgttttag

SEQ ID NO: 84628 - DNA, 13 bp, Artificial Sequence
  Oligonucleotide for detection of SNP TSC0021298
ctaaaacattaca

SEQ ID NO: 84629 - DNA, 13 bp, Artificial Sequence
  Oligonucleotide for detection of SNP TSC0021298
tgtaacgttttag

SEQ ID NO: 84630 - DNA, 13 bp, Artificial Sequence
  Oligonucleotide for detection of SNP TSC0021298
ctaaaacgttaca

SEQ ID NO: 84631 - DNA, 13 bp, Artificial Sequence
  Oligonucleotide for detection of SNP TSC0021300
taatggaaataaa

SEQ ID NO: 84632 - DNA, 13 bp, Artificial Sequence
  Oligonucleotide for detection of SNP TSC0021300
tttatttccatta

SEQ ID NO: 84633 - DNA, 13 bp, Artificial Sequence
  Oligonucleotide for detection of SNP TSC0021300
taatgggaataaa

SEQ ID NO: 84634 - DNA, 13 bp, Artificial Sequence
  Oligonucleotide for detection of SNP TSC0021300
tttattcccatta

SEQ ID NO: 84635 - DNA, 13 bp, Artificial Sequence
  Oligonucleotide for detection of SNP TSC0021304
atttggagtttgy

SEQ ID NO: 84636 - DNA, 13 bp, Artificial Sequence
  Oligonucleotide for detection of SNP TSC0021304
rcaaactccaaat

SEQ ID NO: 84637 - DNA, 13 bp, Artificial Sequence
  Oligonucleotide for detection of SNP TSC0021304
atttggggtttgy

SEQ ID NO: 84638 - DNA, 13 bp, Artificial Sequence
  Oligonucleotide for detection of SNP TSC0021304
rcaaaccccaaat

SEQ ID NO: 84639 - DNA, 13 bp, Artificial Sequence
  Oligonucleotide for detection of SNP TSC0021305
gtagaggtaagtt

SEQ ID NO: 84640 - DNA, 13 bp, Artificial Sequence
  Oligonucleotide for detection of SNP TSC0021305
aacttacctctac

SEQ ID NO: 84641 - DNA, 13 bp, Artificial Sequence
  Oligonucleotide for detection of SNP TSC0021305
gtagagataagtt

SEQ ID NO: 84642 - DNA, 13 bp, Artificial Sequence
  Oligonucleotide for detection of SNP TSC0021305
aacttatctctac

SEQ ID NO: 84643 - DNA, 13 bp, Artificial Sequence
  Oligonucleotide for detection of SNP TSC0021306
atagtaatgaatt

SEQ ID NO: 84644 - DNA, 13 bp, Artificial Sequence
  Oligonucleotide for detection of SNP TSC0021306
aattcattactat

SEQ ID NO: 84645 - DNA, 13 bp, Artificial Sequence
  Oligonucleotide for detection of SNP TSC0021306
atagtagtgaatt

SEQ ID NO: 84646 - DNA, 13 bp, Artificial Sequence
  Oligonucleotide for detection of SNP TSC0021306
aattcactactat

SEQ ID NO: 84647 - DNA, 13 bp, Artificial Sequence
  Oligonucleotide for detection of SNP TSC0021307
gaagataagattt

SEQ ID NO: 84648 - DNA, 13 bp, Artificial Sequence
  Oligonucleotide for detection of SNP TSC0021307
aaatcttatcttc

SEQ ID NO: 84649 - DNA, 13 bp, Artificial Sequence
  Oligonucleotide for detection of SNP TSC0021307
gaagattagattt

SEQ ID NO: 84650 - DNA, 13 bp, Artificial Sequence
  Oligonucleotide for detection of SNP TSC0021307
aaatctaatcttc

SEQ ID NO: 84651 - DNA, 13 bp, Artificial Sequence
  Oligonucleotide for detection of SNP TSC0021307
aagttttgtttty

SEQ ID NO: 84652 - DNA, 13 bp, Artificial Sequence
  Oligonucleotide for detection of SNP TSC0021307
raaaacaaaactt

SEQ ID NO: 84653 - DNA, 13 bp, Artificial Sequence
  Oligonucleotide for detection of SNP TSC0021307
aagtttggtttty

SEQ ID NO: 84654 - DNA, 13 bp, Artificial Sequence
  Oligonucleotide for detection of SNP TSC0021307
raaaaccaaactt

SEQ ID NO: 84655 - DNA, 13 bp, Artificial Sequence
  Oligonucleotide for detection of SNP TSC0021308
tgtattattttgt

SEQ ID NO: 84656 - DNA, 13 bp, Artificial Sequence
  Oligonucleotide for detection of SNP TSC0021308
acaaaataataca

SEQ ID NO: 84657 - DNA, 13 bp, Artificial Sequence
  Oligonucleotide for detection of SNP TSC0021308
tgtatttttttgt

SEQ ID NO: 84658 - DNA, 13 bp, Artificial Sequence
  Oligonucleotide for detection of SNP TSC0021308
acaaaaaaataca

SEQ ID NO: 84659 - DNA, 13 bp, Artificial Sequence
  Oligonucleotide for detection of SNP TSC0021308
atagagtgatata

SEQ ID NO: 84660 - DNA, 13 bp, Artificial Sequence
  Oligonucleotide for detection of SNP TSC0021308
tatatcactctat

SEQ ID NO: 84661 - DNA, 13 bp, Artificial Sequence
  Oligonucleotide for detection of SNP TSC0021308
atagagggatata

SEQ ID NO: 84662 - DNA, 13 bp, Artificial Sequence
  Oligonucleotide for detection of SNP TSC0021308
tatatccctctat

SEQ ID NO: 84663 - DNA, 13 bp, Artificial Sequence
  Oligonucleotide for detection of SNP TSC0021309
gtttttgggttaa

SEQ ID NO: 84664 - DNA, 13 bp, Artificial Sequence
  Oligonucleotide for detection of SNP TSC0021309
ttaacccaaaaac

SEQ ID NO: 84665 - DNA, 13 bp, Artificial Sequence
  Oligonucleotide for detection of SNP TSC0021309
gtttttaggttaa

SEQ ID NO: 84666 - DNA, 13 bp, Artificial Sequence
  Oligonucleotide for detection of SNP TSC0021309
ttaacctaaaaac

SEQ ID NO: 84667 - DNA, 13 bp, Artificial Sequence
  Oligonucleotide for detection of SNP TSC0021311
ttgtatgtttaga

SEQ ID NO: 84668 - DNA, 13 bp, Artificial Sequence
  Oligonucleotide for detection of SNP TSC0021311
tctaaacatacaa

SEQ ID NO: 84669 - DNA, 13 bp, Artificial Sequence
  Oligonucleotide for detection of SNP TSC0021311
ttgtatatttaga

SEQ ID NO: 84670 - DNA, 13 bp, Artificial Sequence
  Oligonucleotide for detection of SNP TSC0021311
tctaaatatacaa

SEQ ID NO: 84671 - DNA, 13 bp, Artificial Sequence
  Oligonucleotide for detection of SNP TSC0021313
ggttgtgtggaga

SEQ ID NO: 84672 - DNA, 13 bp, Artificial Sequence
  Oligonucleotide for detection of SNP TSC0021313
tctccacacaacc

SEQ ID NO: 84673 - DNA, 13 bp, Artificial Sequence
  Oligonucleotide for detection of SNP TSC0021313
ggttgtatggaga

SEQ ID NO: 84674 - DNA, 13 bp, Artificial Sequence
  Oligonucleotide for detection of SNP TSC0021313
tctccatacaacc

SEQ ID NO: 84675 - DNA, 13 bp, Artificial Sequence
  Oligonucleotide for detection of SNP TSC0021314
ttttttgttgttg

SEQ ID NO: 84676 - DNA, 13 bp, Artificial Sequence
  Oligonucleotide for detection of SNP TSC0021314
caacaacaaaaaa

SEQ ID NO: 84677 - DNA, 13 bp, Artificial Sequence
  Oligonucleotide for detection of SNP TSC0021314
ttttttattgttg

SEQ ID NO: 84678 - DNA, 13 bp, Artificial Sequence
  Oligonucleotide for detection of SNP TSC0021314
caacaataaaaaa

SEQ ID NO: 84679 - DNA, 13 bp, Artificial Sequence
  Oligonucleotide for detection of SNP TSC0021315
tggttatgttgtg

SEQ ID NO: 84680 - DNA, 13 bp, Artificial Sequence
  Oligonucleotide for detection of SNP TSC0021315
cacaacataacca

SEQ ID NO: 84681 - DNA, 13 bp, Artificial Sequence
  Oligonucleotide for detection of SNP TSC0021315
tggttacgttgtg

SEQ ID NO: 84682 - DNA, 13 bp, Artificial Sequence
  Oligonucleotide for detection of SNP TSC0021315
cacaacgtaacca

SEQ ID NO: 84683 - DNA, 13 bp, Artificial Sequence
  Oligonucleotide for detection of SNP TSC0021315
tataatgtagtta

SEQ ID NO: 84684 - DNA, 13 bp, Artificial Sequence
  Oligonucleotide for detection of SNP TSC0021315
taactacattata

SEQ ID NO: 84685 - DNA, 13 bp, Artificial Sequence
  Oligonucleotide for detection of SNP TSC0021315
tataatatagtta

SEQ ID NO: 84686 - DNA, 13 bp, Artificial Sequence
  Oligonucleotide for detection of SNP TSC0021315
taactatattata

SEQ ID NO: 84687 - DNA, 13 bp, Artificial Sequence
  Oligonucleotide for detection of SNP TSC0021315
tataacgtagtta

SEQ ID NO: 84688 - DNA, 13 bp, Artificial Sequence
  Oligonucleotide for detection of SNP TSC0021315
taactacgttata

SEQ ID NO: 84689 - DNA, 13 bp, Artificial Sequence
  Oligonucleotide for detection of SNP TSC0021316
atattttgatggy

SEQ ID NO: 84690 - DNA, 13 bp, Artificial Sequence
  Oligonucleotide for detection of SNP TSC0021316
rccatcaaaatat

SEQ ID NO: 84691 - DNA, 13 bp, Artificial Sequence
  Oligonucleotide for detection of SNP TSC0021316
atatttcgatggy

SEQ ID NO: 84692 - DNA, 13 bp, Artificial Sequence
  Oligonucleotide for detection of SNP TSC0021316
rccatcgaaatat

SEQ ID NO: 84693 - DNA, 13 bp, Artificial Sequence
  Oligonucleotide for detection of SNP TSC0021316
gttattggggtgt

SEQ ID NO: 84694 - DNA, 13 bp, Artificial Sequence
  Oligonucleotide for detection of SNP TSC0021316
acaccccaataac

SEQ ID NO: 84695 - DNA, 13 bp, Artificial Sequence
  Oligonucleotide for detection of SNP TSC0021316
gttattagggtgt

SEQ ID NO: 84696 - DNA, 13 bp, Artificial Sequence
  Oligonucleotide for detection of SNP TSC0021316
acaccctaataac

SEQ ID NO: 84697 - DNA, 13 bp, Artificial Sequence
  Oligonucleotide for detection of SNP TSC0021316
gttatcggggtgt

SEQ ID NO: 84698 - DNA, 13 bp, Artificial Sequence
  Oligonucleotide for detection of SNP TSC0021316
acaccccgataac

SEQ ID NO: 84699 - DNA, 13 bp, Artificial Sequence
  Oligonucleotide for detection of SNP TSC0021322
ttttttggtaaty

SEQ ID NO: 84700 - DNA, 13 bp, Artificial Sequence
  Oligonucleotide for detection of SNP TSC0021322
rattaccaaaaaa

SEQ ID NO: 84701 - DNA, 13 bp, Artificial Sequence
  Oligonucleotide for detection of SNP TSC0021322
ttttttagtaaty

SEQ ID NO: 84702 - DNA, 13 bp, Artificial Sequence
  Oligonucleotide for detection of SNP TSC0021322
rattactaaaaaa

SEQ ID NO: 84703 - DNA, 13 bp, Artificial Sequence
  Oligonucleotide for detection of SNP TSC0021323
agggagatggaga

SEQ ID NO: 84704 - DNA, 13 bp, Artificial Sequence
  Oligonucleotide for detection of SNP TSC0021323
tctccatctccct

SEQ ID NO: 84705 - DNA, 13 bp, Artificial Sequence
  Oligonucleotide for detection of SNP TSC0021323
agggaggtggaga

SEQ ID NO: 84706 - DNA, 13 bp, Artificial Sequence
  Oligonucleotide for detection of SNP TSC0021323
tctccacctccct

SEQ ID NO: 84707 - DNA, 13 bp, Artificial Sequence
  Oligonucleotide for detection of SNP TSC0021324
aaaaaaatttgat

SEQ ID NO: 84708 - DNA, 13 bp, Artificial Sequence
  Oligonucleotide for detection of SNP TSC0021324
atcaaattttttt

SEQ ID NO: 84709 - DNA, 13 bp, Artificial Sequence
  Oligonucleotide for detection of SNP TSC0021324
aaaaaagtttgat

SEQ ID NO: 84710 - DNA, 13 bp, Artificial Sequence
  Oligonucleotide for detection of SNP TSC0021324
atcaaactttttt

SEQ ID NO: 84711 - DNA, 13 bp, Artificial Sequence
  Oligonucleotide for detection of SNP TSC0021325
taattaattatag

SEQ ID NO: 84712 - DNA, 13 bp, Artificial Sequence
  Oligonucleotide for detection of SNP TSC0021325
ctataattaatta

SEQ ID NO: 84713 - DNA, 13 bp, Artificial Sequence
  Oligonucleotide for detection of SNP TSC0021325
taattagttatag

SEQ ID NO: 84714 - DNA, 13 bp, Artificial Sequence
  Oligonucleotide for detection of SNP TSC0021325
ctataactaatta

SEQ ID NO: 84715 - DNA, 13 bp, Artificial Sequence
  Oligonucleotide for detection of SNP TSC0021326
aggagaattaatt

SEQ ID NO: 84716 - DNA, 13 bp, Artificial Sequence
  Oligonucleotide for detection of SNP TSC0021326
aattaattctcct

SEQ ID NO: 84717 - DNA, 13 bp, Artificial Sequence
  Oligonucleotide for detection of SNP TSC0021326
aggagagttaatt

SEQ ID NO: 84718 - DNA, 13 bp, Artificial Sequence
  Oligonucleotide for detection of SNP TSC0021326
aattaactctcct

SEQ ID NO: 84719 - DNA, 13 bp, Artificial Sequence
  Oligonucleotide for detection of SNP TSC0021327
ttaattttattat

SEQ ID NO: 84720 - DNA, 13 bp, Artificial Sequence
  Oligonucleotide for detection of SNP TSC0021327
ataataaaattaa

SEQ ID NO: 84721 - DNA, 13 bp, Artificial Sequence
  Oligonucleotide for detection of SNP TSC0021327
ttaattgtattat

SEQ ID NO: 84722 - DNA, 13 bp, Artificial Sequence
  Oligonucleotide for detection of SNP TSC0021327
ataatacaattaa

SEQ ID NO: 84723 - DNA, 13 bp, Artificial Sequence
  Oligonucleotide for detection of SNP TSC0021327
ataatggaattag

SEQ ID NO: 84724 - DNA, 13 bp, Artificial Sequence
  Oligonucleotide for detection of SNP TSC0021327
ctaattccattat

SEQ ID NO: 84725 - DNA, 13 bp, Artificial Sequence
  Oligonucleotide for detection of SNP TSC0021327
ataatgtaattag

SEQ ID NO: 84726 - DNA, 13 bp, Artificial Sequence
  Oligonucleotide for detection of SNP TSC0021327
ctaattacattat

SEQ ID NO: 84727 - DNA, 13 bp, Artificial Sequence
  Oligonucleotide for detection of SNP TSC0021329
gagtaagtgttty

SEQ ID NO: 84728 - DNA, 13 bp, Artificial Sequence
  Oligonucleotide for detection of SNP TSC0021329
raaacacttactc

SEQ ID NO: 84729 - DNA, 13 bp, Artificial Sequence
  Oligonucleotide for detection of SNP TSC0021329
gagtaaatgttty

SEQ ID NO: 84730 - DNA, 13 bp, Artificial Sequence
  Oligonucleotide for detection of SNP TSC0021329
raaacatttactc

SEQ ID NO: 84731 - DNA, 13 bp, Artificial Sequence
  Oligonucleotide for detection of SNP TSC0021331
tgttacgtttttt

SEQ ID NO: 84732 - DNA, 13 bp, Artificial Sequence
  Oligonucleotide for detection of SNP TSC0021331
aaaaaacgtaaca

SEQ ID NO: 84733 - DNA, 13 bp, Artificial Sequence
  Oligonucleotide for detection of SNP TSC0021331
agaaaatgtagta

SEQ ID NO: 84734 - DNA, 13 bp, Artificial Sequence
  Oligonucleotide for detection of SNP TSC0021331
tactacattttct

SEQ ID NO: 84735 - DNA, 13 bp, Artificial Sequence
  Oligonucleotide for detection of SNP TSC0021331
agaaaacgtagta

SEQ ID NO: 84736 - DNA, 13 bp, Artificial Sequence
  Oligonucleotide for detection of SNP TSC0021331
tactacgttttct

SEQ ID NO: 84737 - DNA, 13 bp, Artificial Sequence
  Oligonucleotide for detection of SNP TSC0021332
tttgttgttgggt

SEQ ID NO: 84738 - DNA, 13 bp, Artificial Sequence
  Oligonucleotide for detection of SNP TSC0021332
acccaacaacaaa

SEQ ID NO: 84739 - DNA, 13 bp, Artificial Sequence
  Oligonucleotide for detection of SNP TSC0021332
tttgttattgggt

SEQ ID NO: 84740 - DNA, 13 bp, Artificial Sequence
  Oligonucleotide for detection of SNP TSC0021332
acccaataacaaa

SEQ ID NO: 84741 - DNA, 13 bp, Artificial Sequence
  Oligonucleotide for detection of SNP TSC0021333
ggaggtagggaag

SEQ ID NO: 84742 - DNA, 13 bp, Artificial Sequence
  Oligonucleotide for detection of SNP TSC0021333
cttccctacctcc

SEQ ID NO: 84743 - DNA, 13 bp, Artificial Sequence
  Oligonucleotide for detection of SNP TSC0021333
ggaggttgggaag

SEQ ID NO: 84744 - DNA, 13 bp, Artificial Sequence
  Oligonucleotide for detection of SNP TSC0021333
cttcccaacctcc

SEQ ID NO: 84745 - DNA, 13 bp, Artificial Sequence
  Oligonucleotide for detection of SNP TSC0021333
ggaggtcgggaag

SEQ ID NO: 84746 - DNA, 13 bp, Artificial Sequence
  Oligonucleotide for detection of SNP TSC0021333
cttcccgacctcc

SEQ ID NO: 84747 - DNA, 13 bp, Artificial Sequence
  Oligonucleotide for detection of SNP TSC0021333
ttttttgatttty

SEQ ID NO: 84748 - DNA, 13 bp, Artificial Sequence
  Oligonucleotide for detection of SNP TSC0021333
raaaatcaaaaaa

SEQ ID NO: 84749 - DNA, 13 bp, Artificial Sequence
  Oligonucleotide for detection of SNP TSC0021333
tttttcgatttty

SEQ ID NO: 84750 - DNA, 13 bp, Artificial Sequence
  Oligonucleotide for detection of SNP TSC0021333
raaaatcgaaaaa

SEQ ID NO: 84751 - DNA, 13 bp, Artificial Sequence
  Oligonucleotide for detection of SNP TSC0021334
tttgtatttttaa

SEQ ID NO: 84752 - DNA, 13 bp, Artificial Sequence
  Oligonucleotide for detection of SNP TSC0021334
ttaaaaatacaaa

SEQ ID NO: 84753 - DNA, 13 bp, Artificial Sequence
  Oligonucleotide for detection of SNP TSC0021334
tttgtagttttaa

SEQ ID NO: 84754 - DNA, 13 bp, Artificial Sequence
  Oligonucleotide for detection of SNP TSC0021334
ttaaaactacaaa

SEQ ID NO: 84755 - DNA, 13 bp, Artificial Sequence
  Oligonucleotide for detection of SNP TSC0021334
ttgagagtgtaag

SEQ ID NO: 84756 - DNA, 13 bp, Artificial Sequence
  Oligonucleotide for detection of SNP TSC0021334
cttacactctcaa

SEQ ID NO: 84757 - DNA, 13 bp, Artificial Sequence
  Oligonucleotide for detection of SNP TSC0021334
ttgagattgtaag

SEQ ID NO: 84758 - DNA, 13 bp, Artificial Sequence
  Oligonucleotide for detection of SNP TSC0021334
cttacaatctcaa

SEQ ID NO: 84759 - DNA, 13 bp, Artificial Sequence
  Oligonucleotide for detection of SNP TSC0021335
tgtagagaatgtg

SEQ ID NO: 84760 - DNA, 13 bp, Artificial Sequence
  Oligonucleotide for detection of SNP TSC0021335
cacattctctaca

SEQ ID NO: 84761 - DNA, 13 bp, Artificial Sequence
  Oligonucleotide for detection of SNP TSC0021335
tgtagaaaatgtg

SEQ ID NO: 84762 - DNA, 13 bp, Artificial Sequence
  Oligonucleotide for detection of SNP TSC0021335
cacattttctaca

SEQ ID NO: 84763 - DNA, 13 bp, Artificial Sequence
  Oligonucleotide for detection of SNP TSC0021335
cgtagagaatgtg

SEQ ID NO: 84764 - DNA, 13 bp, Artificial Sequence
  Oligonucleotide for detection of SNP TSC0021335
cacattctctacg

SEQ ID NO: 84765 - DNA, 13 bp, Artificial Sequence
  Oligonucleotide for detection of SNP TSC0021335
cgtagaaaatgtg

SEQ ID NO: 84766 - DNA, 13 bp, Artificial Sequence
  Oligonucleotide for detection of SNP TSC0021335
cacattttctacg

SEQ ID NO: 84767 - DNA, 13 bp, Artificial Sequence
  Oligonucleotide for detection of SNP TSC0021336
tgttgtttttgtt

SEQ ID NO: 84768 - DNA, 13 bp, Artificial Sequence
  Oligonucleotide for detection of SNP TSC0021336
aacaaaaacaaca

SEQ ID NO: 84769 - DNA, 13 bp, Artificial Sequence
  Oligonucleotide for detection of SNP TSC0021336
cgttgtatttgtt

SEQ ID NO: 84770 - DNA, 13 bp, Artificial Sequence
  Oligonucleotide for detection of SNP TSC0021336
aacaaatacaacg

SEQ ID NO: 84771 - DNA, 13 bp, Artificial Sequence
  Oligonucleotide for detection of SNP TSC0021336
cgttgtttttgtt

SEQ ID NO: 84772 - DNA, 13 bp, Artificial Sequence
  Oligonucleotide for detection of SNP TSC0021336
aacaaaaacaacg

SEQ ID NO: 84773 - DNA, 13 bp, Artificial Sequence
  Oligonucleotide for detection of SNP TSC0021336
agtaagtatagtg

SEQ ID NO: 84774 - DNA, 13 bp, Artificial Sequence
  Oligonucleotide for detection of SNP TSC0021336
cactatacttact

SEQ ID NO: 84775 - DNA, 13 bp, Artificial Sequence
  Oligonucleotide for detection of SNP TSC0021336
agtaagaatagtg

SEQ ID NO: 84776 - DNA, 13 bp, Artificial Sequence
  Oligonucleotide for detection of SNP TSC0021336
cactattcttact

SEQ ID NO: 84777 - DNA, 13 bp, Artificial Sequence
  Oligonucleotide for detection of SNP TSC0021336
agtaagtatagcg

SEQ ID NO: 84778 - DNA, 13 bp, Artificial Sequence
  Oligonucleotide for detection of SNP TSC0021336
cgctatacttact

SEQ ID NO: 84779 - DNA, 13 bp, Artificial Sequence
  Oligonucleotide for detection of SNP TSC0021336
agtaagaatagcg

SEQ ID NO: 84780 - DNA, 13 bp, Artificial Sequence
  Oligonucleotide for detection of SNP TSC0021336
cgctattcttact

SEQ ID NO: 84781 - DNA, 13 bp, Artificial Sequence
  Oligonucleotide for detection of SNP TSC0021337
agggtgattggaa

SEQ ID NO: 84782 - DNA, 13 bp, Artificial Sequence
  Oligonucleotide for detection of SNP TSC0021337
ttccaatcaccct

SEQ ID NO: 84783 - DNA, 13 bp, Artificial Sequence
  Oligonucleotide for detection of SNP TSC0021337
agggtgtttggaa

SEQ ID NO: 84784 - DNA, 13 bp, Artificial Sequence
  Oligonucleotide for detection of SNP TSC0021337
ttccaaacaccct

SEQ ID NO: 84785 - DNA, 13 bp, Artificial Sequence
  Oligonucleotide for detection of SNP TSC0021337
ttttagttatttt

SEQ ID NO: 84786 - DNA, 13 bp, Artificial Sequence
  Oligonucleotide for detection of SNP TSC0021337
aaaataactaaaa

SEQ ID NO: 84787 - DNA, 13 bp, Artificial Sequence
  Oligonucleotide for detection of SNP TSC0021340
tagaaaagtgtty

SEQ ID NO: 84788 - DNA, 13 bp, Artificial Sequence
  Oligonucleotide for detection of SNP TSC0021340
raacacttttcta

SEQ ID NO: 84789 - DNA, 13 bp, Artificial Sequence
  Oligonucleotide for detection of SNP TSC0021340
tagaaatgtgtty

SEQ ID NO: 84790 - DNA, 13 bp, Artificial Sequence
  Oligonucleotide for detection of SNP TSC0021340
raacacatttcta

SEQ ID NO: 84791 - DNA, 13 bp, Artificial Sequence
  Oligonucleotide for detection of SNP TSC0021340
tagaaacgtgtty

SEQ ID NO: 84792 - DNA, 13 bp, Artificial Sequence
  Oligonucleotide for detection of SNP TSC0021340
raacacgtttcta

SEQ ID NO: 84793 - DNA, 13 bp, Artificial Sequence
  Oligonucleotide for detection of SNP TSC0021340
gggtatttttttg

SEQ ID NO: 84794 - DNA, 13 bp, Artificial Sequence
  Oligonucleotide for detection of SNP TSC0021340
caaaaaaataccc

SEQ ID NO: 84795 - DNA, 13 bp, Artificial Sequence
  Oligonucleotide for detection of SNP TSC0021340
gggtatgtttttg

SEQ ID NO: 84796 - DNA, 13 bp, Artificial Sequence
  Oligonucleotide for detection of SNP TSC0021340
caaaaacataccc

SEQ ID NO: 84797 - DNA, 13 bp, Artificial Sequence
  Oligonucleotide for detection of SNP TSC0021340
gggtacgtttttg

SEQ ID NO: 84798 - DNA, 13 bp, Artificial Sequence
  Oligonucleotide for detection of SNP TSC0021340
caaaaacgtaccc

SEQ ID NO: 84799 - DNA, 13 bp, Artificial Sequence
  Oligonucleotide for detection of SNP TSC0021341
tttaaaattttga

SEQ ID NO: 84800 - DNA, 13 bp, Artificial Sequence
  Oligonucleotide for detection of SNP TSC0021341
tcaaaattttaaa

SEQ ID NO: 84801 - DNA, 13 bp, Artificial Sequence
  Oligonucleotide for detection of SNP TSC0021341
tttaaagttttga

SEQ ID NO: 84802 - DNA, 13 bp, Artificial Sequence
  Oligonucleotide for detection of SNP TSC0021341
tcaaaactttaaa

SEQ ID NO: 84803 - DNA, 13 bp, Artificial Sequence
  Oligonucleotide for detection of SNP TSC0021342
ttagggtagggag

SEQ ID NO: 84804 - DNA, 13 bp, Artificial Sequence
  Oligonucleotide for detection of SNP TSC0021342
ctccctaccctaa

SEQ ID NO: 84805 - DNA, 13 bp, Artificial Sequence
  Oligonucleotide for detection of SNP TSC0021342
ttaggggagggag

SEQ ID NO: 84806 - DNA, 13 bp, Artificial Sequence
  Oligonucleotide for detection of SNP TSC0021342
ctccctcccctaa

SEQ ID NO: 84807 - DNA, 13 bp, Artificial Sequence
  Oligonucleotide for detection of SNP TSC0021343
tagggtagggaga

SEQ ID NO: 84808 - DNA, 13 bp, Artificial Sequence
  Oligonucleotide for detection of SNP TSC0021343
tctccctacccta

SEQ ID NO: 84809 - DNA, 13 bp, Artificial Sequence
  Oligonucleotide for detection of SNP TSC0021343
tagggtggggaga

SEQ ID NO: 84810 - DNA, 13 bp, Artificial Sequence
  Oligonucleotide for detection of SNP TSC0021343
tctccccacccta

SEQ ID NO: 84811 - DNA, 13 bp, Artificial Sequence
  Oligonucleotide for detection of SNP TSC0021343
tagggcggggaga

SEQ ID NO: 84812 - DNA, 13 bp, Artificial Sequence
  Oligonucleotide for detection of SNP TSC0021343
tctccccgcccta

SEQ ID NO: 84813 - DNA, 13 bp, Artificial Sequence
  Oligonucleotide for detection of SNP TSC0021344
ggtttagaaggag

SEQ ID NO: 84814 - DNA, 13 bp, Artificial Sequence
  Oligonucleotide for detection of SNP TSC0021344
ctccttctaaacc

SEQ ID NO: 84815 - DNA, 13 bp, Artificial Sequence
  Oligonucleotide for detection of SNP TSC0021344
ggtttataaggag

SEQ ID NO: 84816 - DNA, 13 bp, Artificial Sequence
  Oligonucleotide for detection of SNP TSC0021344
ctccttataaacc

SEQ ID NO: 84817 - DNA, 13 bp, Artificial Sequence
  Oligonucleotide for detection of SNP TSC0021344
ttttttttgaaty

SEQ ID NO: 84818 - DNA, 13 bp, Artificial Sequence
  Oligonucleotide for detection of SNP TSC0021344
rattcaaaaaaaa

SEQ ID NO: 84819 - DNA, 13 bp, Artificial Sequence
  Oligonucleotide for detection of SNP TSC0021346
ttttttagttggg

SEQ ID NO: 84820 - DNA, 13 bp, Artificial Sequence
  Oligonucleotide for detection of SNP TSC0021346
cccaactaaaaaa

SEQ ID NO: 84821 - DNA, 13 bp, Artificial Sequence
  Oligonucleotide for detection of SNP TSC0021346
ttttttggttggg

SEQ ID NO: 84822 - DNA, 13 bp, Artificial Sequence
  Oligonucleotide for detection of SNP TSC0021346
cccaaccaaaaaa

SEQ ID NO: 84823 - DNA, 13 bp, Artificial Sequence
  Oligonucleotide for detection of SNP TSC0021346
ttttttagtcggg

SEQ ID NO: 84824 - DNA, 13 bp, Artificial Sequence
  Oligonucleotide for detection of SNP TSC0021346
cccgactaaaaaa

SEQ ID NO: 84825 - DNA, 13 bp, Artificial Sequence
  Oligonucleotide for detection of SNP TSC0021346
tttttcggttggg

SEQ ID NO: 84826 - DNA, 13 bp, Artificial Sequence
  Oligonucleotide for detection of SNP TSC0021346
cccaaccgaaaaa

SEQ ID NO: 84827 - DNA, 13 bp, Artificial Sequence
  Oligonucleotide for detection of SNP TSC0021346
ttttttggtcggg

SEQ ID NO: 84828 - DNA, 13 bp, Artificial Sequence
  Oligonucleotide for detection of SNP TSC0021346
cccgaccaaaaaa

SEQ ID NO: 84829 - DNA, 13 bp, Artificial Sequence
  Oligonucleotide for detection of SNP TSC0021346
tttttcggtcggg

SEQ ID NO: 84830 - DNA, 13 bp, Artificial Sequence
  Oligonucleotide for detection of SNP TSC0021346
cccgaccgaaaaa

SEQ ID NO: 84831 - DNA, 13 bp, Artificial Sequence
  Oligonucleotide for detection of SNP TSC0021346
tttggttggaaaa

SEQ ID NO: 84832 - DNA, 13 bp, Artificial Sequence
  Oligonucleotide for detection of SNP TSC0021346
ttttccaaccaaa

SEQ ID NO: 84833 - DNA, 13 bp, Artificial Sequence
  Oligonucleotide for detection of SNP TSC0021346
ttcggttggaaaa

SEQ ID NO: 84834 - DNA, 13 bp, Artificial Sequence
  Oligonucleotide for detection of SNP TSC0021346
ttttccaaccgaa

SEQ ID NO: 84835 - DNA, 13 bp, Artificial Sequence
  Oligonucleotide for detection of SNP TSC0021346
tttggtcggaaaa

SEQ ID NO: 84836 - DNA, 13 bp, Artificial Sequence
  Oligonucleotide for detection of SNP TSC0021346
ttttccgaccaaa

SEQ ID NO: 84837 - DNA, 13 bp, Artificial Sequence
  Oligonucleotide for detection of SNP TSC0021346
ttcggtcggaaaa

SEQ ID NO: 84838 - DNA, 13 bp, Artificial Sequence
  Oligonucleotide for detection of SNP TSC0021346
ttttccgaccgaa

SEQ ID NO: 84839 - DNA, 13 bp, Artificial Sequence
  Oligonucleotide for detection of SNP TSC0021347
tggtagtgtgtat

SEQ ID NO: 84840 - DNA, 13 bp, Artificial Sequence
  Oligonucleotide for detection of SNP TSC0021347
atacacactacca

SEQ ID NO: 84841 - DNA, 13 bp, Artificial Sequence
  Oligonucleotide for detection of SNP TSC0021347
tggtagcgtgtat

SEQ ID NO: 84842 - DNA, 13 bp, Artificial Sequence
  Oligonucleotide for detection of SNP TSC0021347
atacacgctacca

SEQ ID NO: 84843 - DNA, 13 bp, Artificial Sequence
  Oligonucleotide for detection of SNP TSC0021347
atatatgttatta

SEQ ID NO: 84844 - DNA, 13 bp, Artificial Sequence
  Oligonucleotide for detection of SNP TSC0021347
taataacatatat

SEQ ID NO: 84845 - DNA, 13 bp, Artificial Sequence
  Oligonucleotide for detection of SNP TSC0021347
atatacgttatta

SEQ ID NO: 84846 - DNA, 13 bp, Artificial Sequence
  Oligonucleotide for detection of SNP TSC0021347
taataacgtatat

SEQ ID NO: 84847 - DNA, 13 bp, Artificial Sequence
  Oligonucleotide for detection of SNP TSC0021348
agtagagaaaagt

SEQ ID NO: 84848 - DNA, 13 bp, Artificial Sequence
  Oligonucleotide for detection of SNP TSC0021348
acttttctctact

SEQ ID NO: 84849 - DNA, 13 bp, Artificial Sequence
  Oligonucleotide for detection of SNP TSC0021348
agtagataaaagt

SEQ ID NO: 84850 - DNA, 13 bp, Artificial Sequence
  Oligonucleotide for detection of SNP TSC0021348
acttttatctact

SEQ ID NO: 84851 - DNA, 13 bp, Artificial Sequence
  Oligonucleotide for detection of SNP TSC0021350
ttgtaaaaattat

SEQ ID NO: 84852 - DNA, 13 bp, Artificial Sequence
  Oligonucleotide for detection of SNP TSC0021350
ataatttttacaa

SEQ ID NO: 84853 - DNA, 13 bp, Artificial Sequence
  Oligonucleotide for detection of SNP TSC0021350
ttgtaataattat

SEQ ID NO: 84854 - DNA, 13 bp, Artificial Sequence
  Oligonucleotide for detection of SNP TSC0021350
ataattattacaa

SEQ ID NO: 84855 - DNA, 13 bp, Artificial Sequence
  Oligonucleotide for detection of SNP TSC0021350
atagtttttataa

SEQ ID NO: 84856 - DNA, 13 bp, Artificial Sequence
  Oligonucleotide for detection of SNP TSC0021350
ttataaaaactat

SEQ ID NO: 84857 - DNA, 13 bp, Artificial Sequence
  Oligonucleotide for detection of SNP TSC0021350
atagttattataa

SEQ ID NO: 84858 - DNA, 13 bp, Artificial Sequence
  Oligonucleotide for detection of SNP TSC0021350
ttataataactat

SEQ ID NO: 84859 - DNA, 13 bp, Artificial Sequence
  Oligonucleotide for detection of SNP TSC0021352
gggtttttggtgg

SEQ ID NO: 84860 - DNA, 13 bp, Artificial Sequence
  Oligonucleotide for detection of SNP TSC0021352
ccaccaaaaaccc

SEQ ID NO: 84861 - DNA, 13 bp, Artificial Sequence
  Oligonucleotide for detection of SNP TSC0021352
gggtttgtggtgg

SEQ ID NO: 84862 - DNA, 13 bp, Artificial Sequence
  Oligonucleotide for detection of SNP TSC0021352
ccaccacaaaccc

SEQ ID NO: 84863 - DNA, 13 bp, Artificial Sequence
  Oligonucleotide for detection of SNP TSC0021352
gggttcgtggtgg

SEQ ID NO: 84864 - DNA, 13 bp, Artificial Sequence
  Oligonucleotide for detection of SNP TSC0021352
ccaccacgaaccc

SEQ ID NO: 84865 - DNA, 13 bp, Artificial Sequence
  Oligonucleotide for detection of SNP TSC0021352
ttattaggagtty

SEQ ID NO: 84866 - DNA, 13 bp, Artificial Sequence
  Oligonucleotide for detection of SNP TSC0021352
raactcctaataa

SEQ ID NO: 84867 - DNA, 13 bp, Artificial Sequence
  Oligonucleotide for detection of SNP TSC0021352
ttattatgagtty

SEQ ID NO: 84868 - DNA, 13 bp, Artificial Sequence
  Oligonucleotide for detection of SNP TSC0021352
raactcataataa

SEQ ID NO: 84869 - DNA, 13 bp, Artificial Sequence
  Oligonucleotide for detection of SNP TSC0021352
ttattacgagtty

SEQ ID NO: 84870 - DNA, 13 bp, Artificial Sequence
  Oligonucleotide for detection of SNP TSC0021352
raactcgtaataa

SEQ ID NO: 84871 - DNA, 13 bp, Artificial Sequence
  Oligonucleotide for detection of SNP TSC0021353
ttatatagtagay

SEQ ID NO: 84872 - DNA, 13 bp, Artificial Sequence
  Oligonucleotide for detection of SNP TSC0021353
rtctactatataa

SEQ ID NO: 84873 - DNA, 13 bp, Artificial Sequence
  Oligonucleotide for detection of SNP TSC0021353
ttatatggtagay

SEQ ID NO: 84874 - DNA, 13 bp, Artificial Sequence
  Oligonucleotide for detection of SNP TSC0021353
rtctaccatataa

SEQ ID NO: 84875 - DNA, 13 bp, Artificial Sequence
  Oligonucleotide for detection of SNP TSC0021353
ttatacggtagay

SEQ ID NO: 84876 - DNA, 13 bp, Artificial Sequence
  Oligonucleotide for detection of SNP TSC0021353
rtctaccgtataa

SEQ ID NO: 84877 - DNA, 13 bp, Artificial Sequence
  Oligonucleotide for detection of SNP TSC0021353
gtttattgtgtaa

SEQ ID NO: 84878 - DNA, 13 bp, Artificial Sequence
  Oligonucleotide for detection of SNP TSC0021353
ttacacaataaac

SEQ ID NO: 84879 - DNA, 13 bp, Artificial Sequence
  Oligonucleotide for detection of SNP TSC0021353
gtttatcgtgtaa

SEQ ID NO: 84880 - DNA, 13 bp, Artificial Sequence
  Oligonucleotide for detection of SNP TSC0021353
ttacacgataaac

SEQ ID NO: 84881 - DNA, 13 bp, Artificial Sequence
  Oligonucleotide for detection of SNP TSC0021354
ttgtttatgtaga

SEQ ID NO: 84882 - DNA, 13 bp, Artificial Sequence
  Oligonucleotide for detection of SNP TSC0021354
tctacataaacaa

SEQ ID NO: 84883 - DNA, 13 bp, Artificial Sequence
  Oligonucleotide for detection of SNP TSC0021354
ttgtttgtgtaga

SEQ ID NO: 84884 - DNA, 13 bp, Artificial Sequence
  Oligonucleotide for detection of SNP TSC0021354
tctacacaaacaa

SEQ ID NO: 84885 - DNA, 13 bp, Artificial Sequence
  Oligonucleotide for detection of SNP TSC0021354
ttgttcgtgtaga

SEQ ID NO: 84886 - DNA, 13 bp, Artificial Sequence
  Oligonucleotide for detection of SNP TSC0021354
tctacacgaacaa

SEQ ID NO: 84887 - DNA, 13 bp, Artificial Sequence
  Oligonucleotide for detection of SNP TSC0021354
tttgtatgggtag

SEQ ID NO: 84888 - DNA, 13 bp, Artificial Sequence
  Oligonucleotide for detection of SNP TSC0021354
ctacccatacaaa

SEQ ID NO: 84889 - DNA, 13 bp, Artificial Sequence
  Oligonucleotide for detection of SNP TSC0021354
tttgtacgggtag

SEQ ID NO: 84890 - DNA, 13 bp, Artificial Sequence
  Oligonucleotide for detection of SNP TSC0021354
ctacccgtacaaa

SEQ ID NO: 84891 - DNA, 13 bp, Artificial Sequence
  Oligonucleotide for detection of SNP TSC0021357
tttttaatgtgty

SEQ ID NO: 84892 - DNA, 13 bp, Artificial Sequence
  Oligonucleotide for detection of SNP TSC0021357
racacattaaaaa

SEQ ID NO: 84893 - DNA, 13 bp, Artificial Sequence
  Oligonucleotide for detection of SNP TSC0021357
tttttagtgtgty

SEQ ID NO: 84894 - DNA, 13 bp, Artificial Sequence
  Oligonucleotide for detection of SNP TSC0021357
racacactaaaaa

SEQ ID NO: 84895 - DNA, 13 bp, Artificial Sequence
  Oligonucleotide for detection of SNP TSC0021358
tattagaaggttg

SEQ ID NO: 84896 - DNA, 13 bp, Artificial Sequence
  Oligonucleotide for detection of SNP TSC0021358
caaccttctaata

SEQ ID NO: 84897 - DNA, 13 bp, Artificial Sequence
  Oligonucleotide for detection of SNP TSC0021358
tattaggaggttg

SEQ ID NO: 84898 - DNA, 13 bp, Artificial Sequence
  Oligonucleotide for detection of SNP TSC0021358
caacctcctaata

SEQ ID NO: 84899 - DNA, 13 bp, Artificial Sequence
  Oligonucleotide for detection of SNP TSC0021359
attatagtattgy

SEQ ID NO: 84900 - DNA, 13 bp, Artificial Sequence
  Oligonucleotide for detection of SNP TSC0021359
rcaatactataat

SEQ ID NO: 84901 - DNA, 13 bp, Artificial Sequence
  Oligonucleotide for detection of SNP TSC0021359
gtagtattgtagt

SEQ ID NO: 84902 - DNA, 13 bp, Artificial Sequence
  Oligonucleotide for detection of SNP TSC0021359
actacaatactac

SEQ ID NO: 84903 - DNA, 13 bp, Artificial Sequence
  Oligonucleotide for detection of SNP TSC0021359
gtagtaatgtagt

SEQ ID NO: 84904 - DNA, 13 bp, Artificial Sequence
  Oligonucleotide for detection of SNP TSC0021359
actacattactac

SEQ ID NO: 84905 - DNA, 13 bp, Artificial Sequence
  Oligonucleotide for detection of SNP TSC0021360
gttagggggattg

SEQ ID NO: 84906 - DNA, 13 bp, Artificial Sequence
  Oligonucleotide for detection of SNP TSC0021360
caatccccctaac

SEQ ID NO: 84907 - DNA, 13 bp, Artificial Sequence
  Oligonucleotide for detection of SNP TSC0021360
gttaggaggattg

SEQ ID NO: 84908 - DNA, 13 bp, Artificial Sequence
  Oligonucleotide for detection of SNP TSC0021360
caatcctcctaac

SEQ ID NO: 84909 - DNA, 13 bp, Artificial Sequence
  Oligonucleotide for detection of SNP TSC0021362
tagagtagaagtt

SEQ ID NO: 84910 - DNA, 13 bp, Artificial Sequence
  Oligonucleotide for detection of SNP TSC0021362
aacttctactcta

SEQ ID NO: 84911 - DNA, 13 bp, Artificial Sequence
  Oligonucleotide for detection of SNP TSC0021362
tagagtggaagtt

SEQ ID NO: 84912 - DNA, 13 bp, Artificial Sequence
  Oligonucleotide for detection of SNP TSC0021362
aacttccactcta

SEQ ID NO: 84913 - DNA, 13 bp, Artificial Sequence
  Oligonucleotide for detection of SNP TSC0021362
tagagcggaagtt

SEQ ID NO: 84914 - DNA, 13 bp, Artificial Sequence
  Oligonucleotide for detection of SNP TSC0021362
aacttccgctcta

SEQ ID NO: 84915 - DNA, 13 bp, Artificial Sequence
  Oligonucleotide for detection of SNP TSC0021363
gtttagataatay

SEQ ID NO: 84916 - DNA, 13 bp, Artificial Sequence
  Oligonucleotide for detection of SNP TSC0021363
rtattatctaaac

SEQ ID NO: 84917 - DNA, 13 bp, Artificial Sequence
  Oligonucleotide for detection of SNP TSC0021363
gtttaggtaatay

SEQ ID NO: 84918 - DNA, 13 bp, Artificial Sequence
  Oligonucleotide for detection of SNP TSC0021363
rtattacctaaac

SEQ ID NO: 84919 - DNA, 13 bp, Artificial Sequence
  Oligonucleotide for detection of SNP TSC0021364
gtttgtgttgttt

SEQ ID NO: 84920 - DNA, 13 bp, Artificial Sequence
  Oligonucleotide for detection of SNP TSC0021364
aaacaacacaaac

SEQ ID NO: 84921 - DNA, 13 bp, Artificial Sequence
  Oligonucleotide for detection of SNP TSC0021364
gtttgtattgttt

SEQ ID NO: 84922 - DNA, 13 bp, Artificial Sequence
  Oligonucleotide for detection of SNP TSC0021364
aaacaatacaaac

SEQ ID NO: 84923 - DNA, 13 bp, Artificial Sequence
  Oligonucleotide for detection of SNP TSC0021364
gttcgtgttgttt

SEQ ID NO: 84924 - DNA, 13 bp, Artificial Sequence
  Oligonucleotide for detection of SNP TSC0021364
aaacaacacgaac

SEQ ID NO: 84925 - DNA, 13 bp, Artificial Sequence
  Oligonucleotide for detection of SNP TSC0021364
gttcgtattgttt

SEQ ID NO: 84926 - DNA, 13 bp, Artificial Sequence
  Oligonucleotide for detection of SNP TSC0021364
aaacaatacgaac

SEQ ID NO: 84927 - DNA, 13 bp, Artificial Sequence
  Oligonucleotide for detection of SNP TSC0021365
tattagggggaga

SEQ ID NO: 84928 - DNA, 13 bp, Artificial Sequence
  Oligonucleotide for detection of SNP TSC0021365
tctccccctaata

SEQ ID NO: 84929 - DNA, 13 bp, Artificial Sequence
  Oligonucleotide for detection of SNP TSC0021365
tattagagggaga

SEQ ID NO: 84930 - DNA, 13 bp, Artificial Sequence
  Oligonucleotide for detection of SNP TSC0021365
tctccctctaata

SEQ ID NO: 84931 - DNA, 13 bp, Artificial Sequence
  Oligonucleotide for detection of SNP TSC0021366
gggggataggggy

SEQ ID NO: 84932 - DNA, 13 bp, Artificial Sequence
  Oligonucleotide for detection of SNP TSC0021366
rcccctatccccc

SEQ ID NO: 84933 - DNA, 13 bp, Artificial Sequence
  Oligonucleotide for detection of SNP TSC0021366
gggggaaaggggy

SEQ ID NO: 84934 - DNA, 13 bp, Artificial Sequence
  Oligonucleotide for detection of SNP TSC0021366
rcccctttccccc

SEQ ID NO: 84935 - DNA, 13 bp, Artificial Sequence
  Oligonucleotide for detection of SNP TSC0021368
tttattgaatatt

SEQ ID NO: 84936 - DNA, 13 bp, Artificial Sequence
  Oligonucleotide for detection of SNP TSC0021368
aatattcaataaa

SEQ ID NO: 84937 - DNA, 13 bp, Artificial Sequence
  Oligonucleotide for detection of SNP TSC0021368
tttatttaatatt

SEQ ID NO: 84938 - DNA, 13 bp, Artificial Sequence
  Oligonucleotide for detection of SNP TSC0021368
aatattaaataaa

SEQ ID NO: 84939 - DNA, 13 bp, Artificial Sequence
  Oligonucleotide for detection of SNP TSC0021368
aatatttaatgag

SEQ ID NO: 84940 - DNA, 13 bp, Artificial Sequence
  Oligonucleotide for detection of SNP TSC0021368
ctcattaaatatt

SEQ ID NO: 84941 - DNA, 13 bp, Artificial Sequence
  Oligonucleotide for detection of SNP TSC0021368
aatattaaatgag

SEQ ID NO: 84942 - DNA, 13 bp, Artificial Sequence
  Oligonucleotide for detection of SNP TSC0021368
ctcatttaatatt

SEQ ID NO: 84943 - DNA, 13 bp, Artificial Sequence
  Oligonucleotide for detection of SNP TSC0021369
gagaatgaaatag

SEQ ID NO: 84944 - DNA, 13 bp, Artificial Sequence
  Oligonucleotide for detection of SNP TSC0021369
ctatttcattctc

SEQ ID NO: 84945 - DNA, 13 bp, Artificial Sequence
  Oligonucleotide for detection of SNP TSC0021369
gagaataaaatag

SEQ ID NO: 84946 - DNA, 13 bp, Artificial Sequence
  Oligonucleotide for detection of SNP TSC0021369
ctattttattctc

SEQ ID NO: 84947 - DNA, 13 bp, Artificial Sequence
  Oligonucleotide for detection of SNP TSC0021369
gagaacgaaatag

SEQ ID NO: 84948 - DNA, 13 bp, Artificial Sequence
  Oligonucleotide for detection of SNP TSC0021369
ctatttcgttctc

SEQ ID NO: 84949 - DNA, 13 bp, Artificial Sequence
  Oligonucleotide for detection of SNP TSC0021370
atgggtgggtggg

SEQ ID NO: 84950 - DNA, 13 bp, Artificial Sequence
  Oligonucleotide for detection of SNP TSC0021370
cccacccacccat

SEQ ID NO: 84951 - DNA, 13 bp, Artificial Sequence
  Oligonucleotide for detection of SNP TSC0021370
atgggtaggtggg

SEQ ID NO: 84952 - DNA, 13 bp, Artificial Sequence
  Oligonucleotide for detection of SNP TSC0021370
cccacctacccat

SEQ ID NO: 84953 - DNA, 13 bp, Artificial Sequence
  Oligonucleotide for detection of SNP TSC0021370
atgggcgggtggg

SEQ ID NO: 84954 - DNA, 13 bp, Artificial Sequence
  Oligonucleotide for detection of SNP TSC0021370
cccacccgcccat

SEQ ID NO: 84955 - DNA, 13 bp, Artificial Sequence
  Oligonucleotide for detection of SNP TSC0021371
gtgagtattgttt

SEQ ID NO: 84956 - DNA, 13 bp, Artificial Sequence
  Oligonucleotide for detection of SNP TSC0021371
aaacaatactcac

SEQ ID NO: 84957 - DNA, 13 bp, Artificial Sequence
  Oligonucleotide for detection of SNP TSC0021371
gtgagtgttgttt

SEQ ID NO: 84958 - DNA, 13 bp, Artificial Sequence
  Oligonucleotide for detection of SNP TSC0021371
aaacaacactcac

SEQ ID NO: 84959 - DNA, 13 bp, Artificial Sequence
  Oligonucleotide for detection of SNP TSC0021373
gtgggagtagaat

SEQ ID NO: 84960 - DNA, 13 bp, Artificial Sequence
  Oligonucleotide for detection of SNP TSC0021373
attctactcccac

SEQ ID NO: 84961 - DNA, 13 bp, Artificial Sequence
  Oligonucleotide for detection of SNP TSC0021373
gtgggaatagaat

SEQ ID NO: 84962 - DNA, 13 bp, Artificial Sequence
  Oligonucleotide for detection of SNP TSC0021373
attctattcccac

SEQ ID NO: 84963 - DNA, 13 bp, Artificial Sequence
  Oligonucleotide for detection of SNP TSC0021374
tataggtgaagag

SEQ ID NO: 84964 - DNA, 13 bp, Artificial Sequence
  Oligonucleotide for detection of SNP TSC0021374
ctcttcacctata

SEQ ID NO: 84965 - DNA, 13 bp, Artificial Sequence
  Oligonucleotide for detection of SNP TSC0021374
tataggggaagag

SEQ ID NO: 84966 - DNA, 13 bp, Artificial Sequence
  Oligonucleotide for detection of SNP TSC0021374
ctcttcccctata

SEQ ID NO: 84967 - DNA, 13 bp, Artificial Sequence
  Oligonucleotide for detection of SNP TSC0021374
tataggcgaagag

SEQ ID NO: 84968 - DNA, 13 bp, Artificial Sequence
  Oligonucleotide for detection of SNP TSC0021374
ctcttcgcctata

SEQ ID NO: 84969 - DNA, 13 bp, Artificial Sequence
  Oligonucleotide for detection of SNP TSC0021375
ggaataatggtty

SEQ ID NO: 84970 - DNA, 13 bp, Artificial Sequence
  Oligonucleotide for detection of SNP TSC0021375
raaccattattcc

SEQ ID NO: 84971 - DNA, 13 bp, Artificial Sequence
  Oligonucleotide for detection of SNP TSC0021375
ggaatattggtty

SEQ ID NO: 84972 - DNA, 13 bp, Artificial Sequence
  Oligonucleotide for detection of SNP TSC0021375
raaccaatattcc

SEQ ID NO: 84973 - DNA, 13 bp, Artificial Sequence
  Oligonucleotide for detection of SNP TSC0021375
gagttattgttty

SEQ ID NO: 84974 - DNA, 13 bp, Artificial Sequence
  Oligonucleotide for detection of SNP TSC0021375
raaacaataactc

SEQ ID NO: 84975 - DNA, 13 bp, Artificial Sequence
  Oligonucleotide for detection of SNP TSC0021375
gagttaatgttty

SEQ ID NO: 84976 - DNA, 13 bp, Artificial Sequence
  Oligonucleotide for detection of SNP TSC0021375
raaacattaactc

SEQ ID NO: 84977 - DNA, 13 bp, Artificial Sequence
  Oligonucleotide for detection of SNP TSC0021376
tagtggtttttga

SEQ ID NO: 84978 - DNA, 13 bp, Artificial Sequence
  Oligonucleotide for detection of SNP TSC0021376
tcaaaaaccacta

SEQ ID NO: 84979 - DNA, 13 bp, Artificial Sequence
  Oligonucleotide for detection of SNP TSC0021376
tagtgggtttcga

SEQ ID NO: 84980 - DNA, 13 bp, Artificial Sequence
  Oligonucleotide for detection of SNP TSC0021376
tcgaaacccacta

SEQ ID NO: 84981 - DNA, 13 bp, Artificial Sequence
  Oligonucleotide for detection of SNP TSC0021376
tagtggttttcga

SEQ ID NO: 84982 - DNA, 13 bp, Artificial Sequence
  Oligonucleotide for detection of SNP TSC0021376
tcgaaaaccacta

SEQ ID NO: 84983 - DNA, 13 bp, Artificial Sequence
  Oligonucleotide for detection of SNP TSC0021376
ttggagtttatta

SEQ ID NO: 84984 - DNA, 13 bp, Artificial Sequence
  Oligonucleotide for detection of SNP TSC0021376
taataaactccaa

SEQ ID NO: 84985 - DNA, 13 bp, Artificial Sequence
  Oligonucleotide for detection of SNP TSC0021376
ttggagattatta

SEQ ID NO: 84986 - DNA, 13 bp, Artificial Sequence
  Oligonucleotide for detection of SNP TSC0021376
taataatctccaa

SEQ ID NO: 84987 - DNA, 13 bp, Artificial Sequence
  Oligonucleotide for detection of SNP TSC0021376
tcggagtttatta

SEQ ID NO: 84988 - DNA, 13 bp, Artificial Sequence
  Oligonucleotide for detection of SNP TSC0021376
taataaactccga

SEQ ID NO: 84989 - DNA, 13 bp, Artificial Sequence
  Oligonucleotide for detection of SNP TSC0021376
tcggagattatta

SEQ ID NO: 84990 - DNA, 13 bp, Artificial Sequence
  Oligonucleotide for detection of SNP TSC0021376
taataatctccga

SEQ ID NO: 84991 - DNA, 13 bp, Artificial Sequence
  Oligonucleotide for detection of SNP TSC0021377
agtaatatattaa

SEQ ID NO: 84992 - DNA, 13 bp, Artificial Sequence
  Oligonucleotide for detection of SNP TSC0021377
ttaatatattact

SEQ ID NO: 84993 - DNA, 13 bp, Artificial Sequence
  Oligonucleotide for detection of SNP TSC0021377
agtaatgtattaa

SEQ ID NO: 84994 - DNA, 13 bp, Artificial Sequence
  Oligonucleotide for detection of SNP TSC0021377
ttaatacattact

SEQ ID NO: 84995 - DNA, 13 bp, Artificial Sequence
  Oligonucleotide for detection of SNP TSC0021380
gtaaatgtgatta

SEQ ID NO: 84996 - DNA, 13 bp, Artificial Sequence
  Oligonucleotide for detection of SNP TSC0021380
taatcacatttac

SEQ ID NO: 84997 - DNA, 13 bp, Artificial Sequence
  Oligonucleotide for detection of SNP TSC0021380
gtaaatatgatta

SEQ ID NO: 84998 - DNA, 13 bp, Artificial Sequence
  Oligonucleotide for detection of SNP TSC0021380
taatcatatttac

SEQ ID NO: 84999 - DNA, 13 bp, Artificial Sequence
  Oligonucleotide for detection of SNP TSC0021381
gtgaaagttttta

SEQ ID NO: 85000 - DNA, 13 bp, Artificial Sequence
  Oligonucleotide for detection of SNP TSC0021381
taaaaactttcac

SEQ ID NO: 85001 - DNA, 13 bp, Artificial Sequence
  Oligonucleotide for detection of SNP TSC0021381
tgaagatttttay

SEQ ID NO: 85002 - DNA, 13 bp, Artificial Sequence
  Oligonucleotide for detection of SNP TSC0021381
rtaaaaatcttca

SEQ ID NO: 85003 - DNA, 13 bp, Artificial Sequence
  Oligonucleotide for detection of SNP TSC0021381
tgaagaattttay

SEQ ID NO: 85004 - DNA, 13 bp, Artificial Sequence
  Oligonucleotide for detection of SNP TSC0021381
rtaaaattcttca

SEQ ID NO: 85005 - DNA, 13 bp, Artificial Sequence
  Oligonucleotide for detection of SNP TSC0021382
atattttaaaatt

SEQ ID NO: 85006 - DNA, 13 bp, Artificial Sequence
  Oligonucleotide for detection of SNP TSC0021382
aattttaaaatat

SEQ ID NO: 85007 - DNA, 13 bp, Artificial Sequence
  Oligonucleotide for detection of SNP TSC0021382
atatttgaaaatt

SEQ ID NO: 85008 - DNA, 13 bp, Artificial Sequence
  Oligonucleotide for detection of SNP TSC0021382
aattttcaaatat

SEQ ID NO: 85009 - DNA, 13 bp, Artificial Sequence
  Oligonucleotide for detection of SNP TSC0021382
aattttgaagtat

SEQ ID NO: 85010 - DNA, 13 bp, Artificial Sequence
  Oligonucleotide for detection of SNP TSC0021382
atacttcaaaatt

SEQ ID NO: 85011 - DNA, 13 bp, Artificial Sequence
  Oligonucleotide for detection of SNP TSC0021382
aatttttaagtat

SEQ ID NO: 85012 - DNA, 13 bp, Artificial Sequence
  Oligonucleotide for detection of SNP TSC0021382
atacttaaaaatt

SEQ ID NO: 85013 - DNA, 13 bp, Artificial Sequence
  Oligonucleotide for detection of SNP TSC0021383
attttaaaattty

SEQ ID NO: 85014 - DNA, 13 bp, Artificial Sequence
  Oligonucleotide for detection of SNP TSC0021383
raaattttaaaat

SEQ ID NO: 85015 - DNA, 13 bp, Artificial Sequence
  Oligonucleotide for detection of SNP TSC0021383
attttataattty

SEQ ID NO: 85016 - DNA, 13 bp, Artificial Sequence
  Oligonucleotide for detection of SNP TSC0021383
raaattataaaat

SEQ ID NO: 85017 - DNA, 13 bp, Artificial Sequence
  Oligonucleotide for detection of SNP TSC0021383
gaaattttgaagt

SEQ ID NO: 85018 - DNA, 13 bp, Artificial Sequence
  Oligonucleotide for detection of SNP TSC0021383
acttcaaaatttc

SEQ ID NO: 85019 - DNA, 13 bp, Artificial Sequence
  Oligonucleotide for detection of SNP TSC0021383
gaaattatgaagt

SEQ ID NO: 85020 - DNA, 13 bp, Artificial Sequence
  Oligonucleotide for detection of SNP TSC0021383
acttcataatttc

SEQ ID NO: 85021 - DNA, 13 bp, Artificial Sequence
  Oligonucleotide for detection of SNP TSC0021384
aaaggatgattag

SEQ ID NO: 85022 - DNA, 13 bp, Artificial Sequence
  Oligonucleotide for detection of SNP TSC0021384
ctaatcatccttt

SEQ ID NO: 85023 - DNA, 13 bp, Artificial Sequence
  Oligonucleotide for detection of SNP TSC0021384
aaaggacgattag

SEQ ID NO: 85024 - DNA, 13 bp, Artificial Sequence
  Oligonucleotide for detection of SNP TSC0021384
ctaatcgtccttt

SEQ ID NO: 85025 - DNA, 13 bp, Artificial Sequence
  Oligonucleotide for detection of SNP TSC0021385
agtaataatattt

SEQ ID NO: 85026 - DNA, 13 bp, Artificial Sequence
  Oligonucleotide for detection of SNP TSC0021385
aaatattattact

SEQ ID NO: 85027 - DNA, 13 bp, Artificial Sequence
  Oligonucleotide for detection of SNP TSC0021385
agtaatgatattt

SEQ ID NO: 85028 - DNA, 13 bp, Artificial Sequence
  Oligonucleotide for detection of SNP TSC0021385
aaatatcattact

SEQ ID NO: 85029 - DNA, 13 bp, Artificial Sequence
  Oligonucleotide for detection of SNP TSC0021386
ttttatatatgat

SEQ ID NO: 85030 - DNA, 13 bp, Artificial Sequence
  Oligonucleotide for detection of SNP TSC0021386
atcatatataaaa

SEQ ID NO: 85031 - DNA, 13 bp, Artificial Sequence
  Oligonucleotide for detection of SNP TSC0021386
ttttatgtatgat

SEQ ID NO: 85032 - DNA, 13 bp, Artificial Sequence
  Oligonucleotide for detection of SNP TSC0021386
atcatacataaaa

SEQ ID NO: 85033 - DNA, 13 bp, Artificial Sequence
  Oligonucleotide for detection of SNP TSC0021388
tataaagttatat

SEQ ID NO: 85034 - DNA, 13 bp, Artificial Sequence
  Oligonucleotide for detection of SNP TSC0021388
atataactttata

SEQ ID NO: 85035 - DNA, 13 bp, Artificial Sequence
  Oligonucleotide for detection of SNP TSC0021388
tataaaattatat

SEQ ID NO: 85036 - DNA, 13 bp, Artificial Sequence
  Oligonucleotide for detection of SNP TSC0021388
atataattttata

SEQ ID NO: 85037 - DNA, 13 bp, Artificial Sequence
  Oligonucleotide for detection of SNP TSC0021389
ttatttattaagt

SEQ ID NO: 85038 - DNA, 13 bp, Artificial Sequence
  Oligonucleotide for detection of SNP TSC0021389
acttaataaataa

SEQ ID NO: 85039 - DNA, 13 bp, Artificial Sequence
  Oligonucleotide for detection of SNP TSC0021389
ttatttgttaagt

SEQ ID NO: 85040 - DNA, 13 bp, Artificial Sequence
  Oligonucleotide for detection of SNP TSC0021389
acttaacaaataa

SEQ ID NO: 85041 - DNA, 13 bp, Artificial Sequence
  Oligonucleotide for detection of SNP TSC0021389
ttattcgttaagt

SEQ ID NO: 85042 - DNA, 13 bp, Artificial Sequence
  Oligonucleotide for detection of SNP TSC0021389
acttaacgaataa

SEQ ID NO: 85043 - DNA, 13 bp, Artificial Sequence
  Oligonucleotide for detection of SNP TSC0021389
atttgatggatgg

SEQ ID NO: 85044 - DNA, 13 bp, Artificial Sequence
  Oligonucleotide for detection of SNP TSC0021389
ccatccatcaaat

SEQ ID NO: 85045 - DNA, 13 bp, Artificial Sequence
  Oligonucleotide for detection of SNP TSC0021389
atttgacggatgg

SEQ ID NO: 85046 - DNA, 13 bp, Artificial Sequence
  Oligonucleotide for detection of SNP TSC0021389
ccatccgtcaaat

SEQ ID NO: 85047 - DNA, 13 bp, Artificial Sequence
  Oligonucleotide for detection of SNP TSC0021390
agtaaaattttga

SEQ ID NO: 85048 - DNA, 13 bp, Artificial Sequence
  Oligonucleotide for detection of SNP TSC0021390
tcaaaattttact

SEQ ID NO: 85049 - DNA, 13 bp, Artificial Sequence
  Oligonucleotide for detection of SNP TSC0021390
agtaaagttttga

SEQ ID NO: 85050 - DNA, 13 bp, Artificial Sequence
  Oligonucleotide for detection of SNP TSC0021390
tcaaaactttact

SEQ ID NO: 85051 - DNA, 13 bp, Artificial Sequence
  Oligonucleotide for detection of SNP TSC0021391
atttaaagttagg

SEQ ID NO: 85052 - DNA, 13 bp, Artificial Sequence
  Oligonucleotide for detection of SNP TSC0021391
cctaactttaaat

SEQ ID NO: 85053 - DNA, 13 bp, Artificial Sequence
  Oligonucleotide for detection of SNP TSC0021391
atttaatgttagg

SEQ ID NO: 85054 - DNA, 13 bp, Artificial Sequence
  Oligonucleotide for detection of SNP TSC0021391
cctaacattaaat

SEQ ID NO: 85055 - DNA, 13 bp, Artificial Sequence
  Oligonucleotide for detection of SNP TSC0021391
tttaattttaaat

SEQ ID NO: 85056 - DNA, 13 bp, Artificial Sequence
  Oligonucleotide for detection of SNP TSC0021391
atttaaaattaaa

SEQ ID NO: 85057 - DNA, 13 bp, Artificial Sequence
  Oligonucleotide for detection of SNP TSC0021391
tttaatattaaat

SEQ ID NO: 85058 - DNA, 13 bp, Artificial Sequence
  Oligonucleotide for detection of SNP TSC0021391
atttaatattaaa

SEQ ID NO: 85059 - DNA, 13 bp, Artificial Sequence
  Oligonucleotide for detection of SNP TSC0021392
atttttatttatt

SEQ ID NO: 85060 - DNA, 13 bp, Artificial Sequence
  Oligonucleotide for detection of SNP TSC0021392
aataaataaaaat

SEQ ID NO: 85061 - DNA, 13 bp, Artificial Sequence
  Oligonucleotide for detection of SNP TSC0021393
agttatggtttaa

SEQ ID NO: 85062 - DNA, 13 bp, Artificial Sequence
  Oligonucleotide for detection of SNP TSC0021393
ttaaaccataact

SEQ ID NO: 85063 - DNA, 13 bp, Artificial Sequence
  Oligonucleotide for detection of SNP TSC0021393
agttatagtttaa

SEQ ID NO: 85064 - DNA, 13 bp, Artificial Sequence
  Oligonucleotide for detection of SNP TSC0021393
ttaaactataact

SEQ ID NO: 85065 - DNA, 13 bp, Artificial Sequence
  Oligonucleotide for detection of SNP TSC0021395
aatgtagaaaatg

SEQ ID NO: 85066 - DNA, 13 bp, Artificial Sequence
  Oligonucleotide for detection of SNP TSC0021395
cattttctacatt

SEQ ID NO: 85067 - DNA, 13 bp, Artificial Sequence
  Oligonucleotide for detection of SNP TSC0021395
aatgtaaaaaatg

SEQ ID NO: 85068 - DNA, 13 bp, Artificial Sequence
  Oligonucleotide for detection of SNP TSC0021395
cattttttacatt

SEQ ID NO: 85069 - DNA, 13 bp, Artificial Sequence
  Oligonucleotide for detection of SNP TSC0021396
gaaggtatttgat

SEQ ID NO: 85070 - DNA, 13 bp, Artificial Sequence
  Oligonucleotide for detection of SNP TSC0021396
atcaaataccttc

SEQ ID NO: 85071 - DNA, 13 bp, Artificial Sequence
  Oligonucleotide for detection of SNP TSC0021396
gaaggtgtttgat

SEQ ID NO: 85072 - DNA, 13 bp, Artificial Sequence
  Oligonucleotide for detection of SNP TSC0021396
atcaaacaccttc

SEQ ID NO: 85073 - DNA, 13 bp, Artificial Sequence
  Oligonucleotide for detection of SNP TSC0021397
attttaatattaa

SEQ ID NO: 85074 - DNA, 13 bp, Artificial Sequence
  Oligonucleotide for detection of SNP TSC0021397
ttaatattaaaat

SEQ ID NO: 85075 - DNA, 13 bp, Artificial Sequence
  Oligonucleotide for detection of SNP TSC0021397
attttagtattaa

SEQ ID NO: 85076 - DNA, 13 bp, Artificial Sequence
  Oligonucleotide for detection of SNP TSC0021397
ttaatactaaaat

SEQ ID NO: 85077 - DNA, 13 bp, Artificial Sequence
  Oligonucleotide for detection of SNP TSC0021398
gtattaattttty

SEQ ID NO: 85078 - DNA, 13 bp, Artificial Sequence
  Oligonucleotide for detection of SNP TSC0021398
raaaaattaatac

SEQ ID NO: 85079 - DNA, 13 bp, Artificial Sequence
  Oligonucleotide for detection of SNP TSC0021398
gtattatttttty

SEQ ID NO: 85080 - DNA, 13 bp, Artificial Sequence
  Oligonucleotide for detection of SNP TSC0021398
raaaaaataatac

SEQ ID NO: 85081 - DNA, 13 bp, Artificial Sequence
  Oligonucleotide for detection of SNP TSC0021398
gaggagttaatgy

SEQ ID NO: 85082 - DNA, 13 bp, Artificial Sequence
  Oligonucleotide for detection of SNP TSC0021398
rcattaactcctc

SEQ ID NO: 85083 - DNA, 13 bp, Artificial Sequence
  Oligonucleotide for detection of SNP TSC0021398
gaggagataatgy

SEQ ID NO: 85084 - DNA, 13 bp, Artificial Sequence
  Oligonucleotide for detection of SNP TSC0021398
rcattatctcctc

SEQ ID NO: 85085 - DNA, 13 bp, Artificial Sequence
  Oligonucleotide for detection of SNP TSC0021399
ttatggttaggtt

SEQ ID NO: 85086 - DNA, 13 bp, Artificial Sequence
  Oligonucleotide for detection of SNP TSC0021399
aacctaaccataa

SEQ ID NO: 85087 - DNA, 13 bp, Artificial Sequence
  Oligonucleotide for detection of SNP TSC0021399
ttatgggtaggtt

SEQ ID NO: 85088 - DNA, 13 bp, Artificial Sequence
  Oligonucleotide for detection of SNP TSC0021399
aacctacccataa

SEQ ID NO: 85089 - DNA, 13 bp, Artificial Sequence
  Oligonucleotide for detection of SNP TSC0021399
agtttggttatga

SEQ ID NO: 85090 - DNA, 13 bp, Artificial Sequence
  Oligonucleotide for detection of SNP TSC0021399
tcataaccaaact

SEQ ID NO: 85091 - DNA, 13 bp, Artificial Sequence
  Oligonucleotide for detection of SNP TSC0021399
agtttgtttatga

SEQ ID NO: 85092 - DNA, 13 bp, Artificial Sequence
  Oligonucleotide for detection of SNP TSC0021399
tcataaacaaact

SEQ ID NO: 85093 - DNA, 13 bp, Artificial Sequence
  Oligonucleotide for detection of SNP TSC0021400
gtgttgattttty

SEQ ID NO: 85094 - DNA, 13 bp, Artificial Sequence
  Oligonucleotide for detection of SNP TSC0021400
raaaaatcaacac

SEQ ID NO: 85095 - DNA, 13 bp, Artificial Sequence
  Oligonucleotide for detection of SNP TSC0021400
gtgttggttttty

SEQ ID NO: 85096 - DNA, 13 bp, Artificial Sequence
  Oligonucleotide for detection of SNP TSC0021400
raaaaaccaacac

SEQ ID NO: 85097 - DNA, 13 bp, Artificial Sequence
  Oligonucleotide for detection of SNP TSC0021400
gtgtcgattttty

SEQ ID NO: 85098 - DNA, 13 bp, Artificial Sequence
  Oligonucleotide for detection of SNP TSC0021400
raaaaatcgacac

SEQ ID NO: 85099 - DNA, 13 bp, Artificial Sequence
  Oligonucleotide for detection of SNP TSC0021400
gtgtcggttttty

SEQ ID NO: 85100 - DNA, 13 bp, Artificial Sequence
  Oligonucleotide for detection of SNP TSC0021400
raaaaaccgacac

SEQ ID NO: 85101 - DNA, 13 bp, Artificial Sequence
  Oligonucleotide for detection of SNP TSC0021401
ggatgggaataga

SEQ ID NO: 85102 - DNA, 13 bp, Artificial Sequence
  Oligonucleotide for detection of SNP TSC0021401
tctattcccatcc

SEQ ID NO: 85103 - DNA, 13 bp, Artificial Sequence
  Oligonucleotide for detection of SNP TSC0021401
ggatggaaataga

SEQ ID NO: 85104 - DNA, 13 bp, Artificial Sequence
  Oligonucleotide for detection of SNP TSC0021401
tctatttccatcc

SEQ ID NO: 85105 - DNA, 13 bp, Artificial Sequence
  Oligonucleotide for detection of SNP TSC0021402
gatgttgtgagat

SEQ ID NO: 85106 - DNA, 13 bp, Artificial Sequence
  Oligonucleotide for detection of SNP TSC0021402
atctcacaacatc

SEQ ID NO: 85107 - DNA, 13 bp, Artificial Sequence
  Oligonucleotide for detection of SNP TSC0021402
gatgttatgagat

SEQ ID NO: 85108 - DNA, 13 bp, Artificial Sequence
  Oligonucleotide for detection of SNP TSC0021402
atctcataacatc

SEQ ID NO: 85109 - DNA, 13 bp, Artificial Sequence
  Oligonucleotide for detection of SNP TSC0021409
atttttaaataga

SEQ ID NO: 85110 - DNA, 13 bp, Artificial Sequence
  Oligonucleotide for detection of SNP TSC0021409
tctatttaaaaat

SEQ ID NO: 85111 - DNA, 13 bp, Artificial Sequence
  Oligonucleotide for detection of SNP TSC0021409
atttttgaataga

SEQ ID NO: 85112 - DNA, 13 bp, Artificial Sequence
  Oligonucleotide for detection of SNP TSC0021409
tctattcaaaaat

SEQ ID NO: 85113 - DNA, 13 bp, Artificial Sequence
  Oligonucleotide for detection of SNP TSC0021411
tattgtgtagaat

SEQ ID NO: 85114 - DNA, 13 bp, Artificial Sequence
  Oligonucleotide for detection of SNP TSC0021411
attctacacaata

SEQ ID NO: 85115 - DNA, 13 bp, Artificial Sequence
  Oligonucleotide for detection of SNP TSC0021411
tattgtatagaat

SEQ ID NO: 85116 - DNA, 13 bp, Artificial Sequence
  Oligonucleotide for detection of SNP TSC0021411
attctatacaata

SEQ ID NO: 85117 - DNA, 13 bp, Artificial Sequence
  Oligonucleotide for detection of SNP TSC0021412
tagaataggatgy

SEQ ID NO: 85118 - DNA, 13 bp, Artificial Sequence
  Oligonucleotide for detection of SNP TSC0021412
rcatcctattcta

SEQ ID NO: 85119 - DNA, 13 bp, Artificial Sequence
  Oligonucleotide for detection of SNP TSC0021412
tagaatgggatgy

SEQ ID NO: 85120 - DNA, 13 bp, Artificial Sequence
  Oligonucleotide for detection of SNP TSC0021412
rcatcccattcta

SEQ ID NO: 85121 - DNA, 13 bp, Artificial Sequence
  Oligonucleotide for detection of SNP TSC0021412
tagaacgggatgy

SEQ ID NO: 85122 - DNA, 13 bp, Artificial Sequence
  Oligonucleotide for detection of SNP TSC0021412
rcatcccgttcta

SEQ ID NO: 85123 - DNA, 13 bp, Artificial Sequence
  Oligonucleotide for detection of SNP TSC0021414
tgttggattttag

SEQ ID NO: 85124 - DNA, 13 bp, Artificial Sequence
  Oligonucleotide for detection of SNP TSC0021414
ctaaaatccaaca

SEQ ID NO: 85125 - DNA, 13 bp, Artificial Sequence
  Oligonucleotide for detection of SNP TSC0021414
cgttggattttag

SEQ ID NO: 85126 - DNA, 13 bp, Artificial Sequence
  Oligonucleotide for detection of SNP TSC0021414
ctaaaatccaacg

SEQ ID NO: 85127 - DNA, 13 bp, Artificial Sequence
  Oligonucleotide for detection of SNP TSC0021414
ttggaatttagtg

SEQ ID NO: 85128 - DNA, 13 bp, Artificial Sequence
  Oligonucleotide for detection of SNP TSC0021414
cactaaattccaa

SEQ ID NO: 85129 - DNA, 13 bp, Artificial Sequence
  Oligonucleotide for detection of SNP TSC0021414
ttggaagttagtg

SEQ ID NO: 85130 - DNA, 13 bp, Artificial Sequence
  Oligonucleotide for detection of SNP TSC0021414
cactaacttccaa

SEQ ID NO: 85131 - DNA, 13 bp, Artificial Sequence
  Oligonucleotide for detection of SNP TSC0021414
ttggaatttagcg

SEQ ID NO: 85132 - DNA, 13 bp, Artificial Sequence
  Oligonucleotide for detection of SNP TSC0021414
cgctaaattccaa

SEQ ID NO: 85133 - DNA, 13 bp, Artificial Sequence
  Oligonucleotide for detection of SNP TSC0021414
ttggaagttagcg

SEQ ID NO: 85134 - DNA, 13 bp, Artificial Sequence
  Oligonucleotide for detection of SNP TSC0021414
cgctaacttccaa

SEQ ID NO: 85135 - DNA, 13 bp, Artificial Sequence
  Oligonucleotide for detection of SNP TSC0021415
tttttatagggga

SEQ ID NO: 85136 - DNA, 13 bp, Artificial Sequence
  Oligonucleotide for detection of SNP TSC0021415
tcccctataaaaa

SEQ ID NO: 85137 - DNA, 13 bp, Artificial Sequence
  Oligonucleotide for detection of SNP TSC0021415
tttttagagggga

SEQ ID NO: 85138 - DNA, 13 bp, Artificial Sequence
  Oligonucleotide for detection of SNP TSC0021415
tcccctctaaaaa

SEQ ID NO: 85139 - DNA, 13 bp, Artificial Sequence
  Oligonucleotide for detection of SNP TSC0021415
ttttttgtaaagg

SEQ ID NO: 85140 - DNA, 13 bp, Artificial Sequence
  Oligonucleotide for detection of SNP TSC0021415
cctttacaaaaaa

SEQ ID NO: 85141 - DNA, 13 bp, Artificial Sequence
  Oligonucleotide for detection of SNP TSC0021415
ttttttttaaagg

SEQ ID NO: 85142 - DNA, 13 bp, Artificial Sequence
  Oligonucleotide for detection of SNP TSC0021415
cctttaaaaaaaa

SEQ ID NO: 85143 - DNA, 13 bp, Artificial Sequence
  Oligonucleotide for detection of SNP TSC0021417
tgttgtggttgtg

SEQ ID NO: 85144 - DNA, 13 bp, Artificial Sequence
  Oligonucleotide for detection of SNP TSC0021417
cacaaccacaaca

SEQ ID NO: 85145 - DNA, 13 bp, Artificial Sequence
  Oligonucleotide for detection of SNP TSC0021417
tgttgttgttgtg

SEQ ID NO: 85146 - DNA, 13 bp, Artificial Sequence
  Oligonucleotide for detection of SNP TSC0021417
cacaacaacaaca

SEQ ID NO: 85147 - DNA, 13 bp, Artificial Sequence
  Oligonucleotide for detection of SNP TSC0021417
tataattataata

SEQ ID NO: 85148 - DNA, 13 bp, Artificial Sequence
  Oligonucleotide for detection of SNP TSC0021417
tattataattata

SEQ ID NO: 85149 - DNA, 13 bp, Artificial Sequence
  Oligonucleotide for detection of SNP TSC0021417
tataataataata

SEQ ID NO: 85150 - DNA, 13 bp, Artificial Sequence
  Oligonucleotide for detection of SNP TSC0021417
tattattattata

SEQ ID NO: 85151 - DNA, 13 bp, Artificial Sequence
  Oligonucleotide for detection of SNP TSC0021418
gatttttgtgtay

SEQ ID NO: 85152 - DNA, 13 bp, Artificial Sequence
  Oligonucleotide for detection of SNP TSC0021418
rtacacaaaaatc

SEQ ID NO: 85153 - DNA, 13 bp, Artificial Sequence
  Oligonucleotide for detection of SNP TSC0021418
gattttcgtgtay

SEQ ID NO: 85154 - DNA, 13 bp, Artificial Sequence
  Oligonucleotide for detection of SNP TSC0021418
rtacacgaaaatc

SEQ ID NO: 85155 - DNA, 13 bp, Artificial Sequence
  Oligonucleotide for detection of SNP TSC0021418
gtgtatgagggty

SEQ ID NO: 85156 - DNA, 13 bp, Artificial Sequence
  Oligonucleotide for detection of SNP TSC0021418
raccctcatacac

SEQ ID NO: 85157 - DNA, 13 bp, Artificial Sequence
  Oligonucleotide for detection of SNP TSC0021418
gtgtataagggty

SEQ ID NO: 85158 - DNA, 13 bp, Artificial Sequence
  Oligonucleotide for detection of SNP TSC0021418
racccttatacac

SEQ ID NO: 85159 - DNA, 13 bp, Artificial Sequence
  Oligonucleotide for detection of SNP TSC0021418
gtgtacgagggty

SEQ ID NO: 85160 - DNA, 13 bp, Artificial Sequence
  Oligonucleotide for detection of SNP TSC0021418
raccctcgtacac

SEQ ID NO: 85161 - DNA, 13 bp, Artificial Sequence
  Oligonucleotide for detection of SNP TSC0021421
atagaggaagaty

SEQ ID NO: 85162 - DNA, 13 bp, Artificial Sequence
  Oligonucleotide for detection of SNP TSC0021421
ratcttcctctat

SEQ ID NO: 85163 - DNA, 13 bp, Artificial Sequence
  Oligonucleotide for detection of SNP TSC0021421
atagagtaagaty

SEQ ID NO: 85164 - DNA, 13 bp, Artificial Sequence
  Oligonucleotide for detection of SNP TSC0021421
ratcttactctat

SEQ ID NO: 85165 - DNA, 13 bp, Artificial Sequence
  Oligonucleotide for detection of SNP TSC0021421
ggtttttttttat

SEQ ID NO: 85166 - DNA, 13 bp, Artificial Sequence
  Oligonucleotide for detection of SNP TSC0021421
ataaaaaaaaacc

SEQ ID NO: 85167 - DNA, 13 bp, Artificial Sequence
  Oligonucleotide for detection of SNP TSC0021424
ttgttattaatty

SEQ ID NO: 85168 - DNA, 13 bp, Artificial Sequence
  Oligonucleotide for detection of SNP TSC0021424
raattaataacaa

SEQ ID NO: 85169 - DNA, 13 bp, Artificial Sequence
  Oligonucleotide for detection of SNP TSC0021424
ggattggtggtag

SEQ ID NO: 85170 - DNA, 13 bp, Artificial Sequence
  Oligonucleotide for detection of SNP TSC0021424
ctaccaccaatcc

SEQ ID NO: 85171 - DNA, 13 bp, Artificial Sequence
  Oligonucleotide for detection of SNP TSC0021424
ggattgttggtag

SEQ ID NO: 85172 - DNA, 13 bp, Artificial Sequence
  Oligonucleotide for detection of SNP TSC0021424
ctaccaacaatcc

SEQ ID NO: 85173 - DNA, 13 bp, Artificial Sequence
  Oligonucleotide for detection of SNP TSC0021425
gtttaaaagttat

SEQ ID NO: 85174 - DNA, 13 bp, Artificial Sequence
  Oligonucleotide for detection of SNP TSC0021425
ataacttttaaac

SEQ ID NO: 85175 - DNA, 13 bp, Artificial Sequence
  Oligonucleotide for detection of SNP TSC0021425
gtttaatagttat

SEQ ID NO: 85176 - DNA, 13 bp, Artificial Sequence
  Oligonucleotide for detection of SNP TSC0021425
ataactattaaac

SEQ ID NO: 85177 - DNA, 13 bp, Artificial Sequence
  Oligonucleotide for detection of SNP TSC0021425
atgatttttaggy

SEQ ID NO: 85178 - DNA, 13 bp, Artificial Sequence
  Oligonucleotide for detection of SNP TSC0021425
rcctaaaaatcat

SEQ ID NO: 85179 - DNA, 13 bp, Artificial Sequence
  Oligonucleotide for detection of SNP TSC0021425
atgattgttaggy

SEQ ID NO: 85180 - DNA, 13 bp, Artificial Sequence
  Oligonucleotide for detection of SNP TSC0021425
rcctaacaatcat

SEQ ID NO: 85181 - DNA, 13 bp, Artificial Sequence
  Oligonucleotide for detection of SNP TSC0021426
ggaatatggttta

SEQ ID NO: 85182 - DNA, 13 bp, Artificial Sequence
  Oligonucleotide for detection of SNP TSC0021426
taaaccatattcc

SEQ ID NO: 85183 - DNA, 13 bp, Artificial Sequence
  Oligonucleotide for detection of SNP TSC0021426
ggaatacggttta

SEQ ID NO: 85184 - DNA, 13 bp, Artificial Sequence
  Oligonucleotide for detection of SNP TSC0021426
taaaccgtattcc

SEQ ID NO: 85185 - DNA, 13 bp, Artificial Sequence
  Oligonucleotide for detection of SNP TSC0021426
tgaatcgtgttty

SEQ ID NO: 85186 - DNA, 13 bp, Artificial Sequence
  Oligonucleotide for detection of SNP TSC0021426
raaacacgattca

SEQ ID NO: 85187 - DNA, 13 bp, Artificial Sequence
  Oligonucleotide for detection of SNP TSC0021427
ttgttgaatttga

SEQ ID NO: 85188 - DNA, 13 bp, Artificial Sequence
  Oligonucleotide for detection of SNP TSC0021427
tcaaattcaacaa

SEQ ID NO: 85189 - DNA, 13 bp, Artificial Sequence
  Oligonucleotide for detection of SNP TSC0021427
ttgttggatttga

SEQ ID NO: 85190 - DNA, 13 bp, Artificial Sequence
  Oligonucleotide for detection of SNP TSC0021427
tcaaatccaacaa

SEQ ID NO: 85191 - DNA, 13 bp, Artificial Sequence
  Oligonucleotide for detection of SNP TSC0021428
tgagtatatgagg

SEQ ID NO: 85192 - DNA, 13 bp, Artificial Sequence
  Oligonucleotide for detection of SNP TSC0021428
cctcatatactca

SEQ ID NO: 85193 - DNA, 13 bp, Artificial Sequence
  Oligonucleotide for detection of SNP TSC0021428
tgagtagatgagg

SEQ ID NO: 85194 - DNA, 13 bp, Artificial Sequence
  Oligonucleotide for detection of SNP TSC0021428
cctcatctactca

SEQ ID NO: 85195 - DNA, 13 bp, Artificial Sequence
  Oligonucleotide for detection of SNP TSC0021429
ttattgatggtgg

SEQ ID NO: 85196 - DNA, 13 bp, Artificial Sequence
  Oligonucleotide for detection of SNP TSC0021429
ccaccatcaataa

SEQ ID NO: 85197 - DNA, 13 bp, Artificial Sequence
  Oligonucleotide for detection of SNP TSC0021429
ttattgttggtgg

SEQ ID NO: 85198 - DNA, 13 bp, Artificial Sequence
  Oligonucleotide for detection of SNP TSC0021429
ccaccaacaataa

SEQ ID NO: 85199 - DNA, 13 bp, Artificial Sequence
  Oligonucleotide for detection of SNP TSC0021429
ttattgacggtgg

SEQ ID NO: 85200 - DNA, 13 bp, Artificial Sequence
  Oligonucleotide for detection of SNP TSC0021429
ccaccgtcaataa

SEQ ID NO: 85201 - DNA, 13 bp, Artificial Sequence
  Oligonucleotide for detection of SNP TSC0021429
ttattgtcggtgg

SEQ ID NO: 85202 - DNA, 13 bp, Artificial Sequence
  Oligonucleotide for detection of SNP TSC0021429
ccaccgacaataa

SEQ ID NO: 85203 - DNA, 13 bp, Artificial Sequence
  Oligonucleotide for detection of SNP TSC0021429
ttattgttaatga

SEQ ID NO: 85204 - DNA, 13 bp, Artificial Sequence
  Oligonucleotide for detection of SNP TSC0021429
tcattaacaataa

SEQ ID NO: 85205 - DNA, 13 bp, Artificial Sequence
  Oligonucleotide for detection of SNP TSC0021429
ttattggtaatga

SEQ ID NO: 85206 - DNA, 13 bp, Artificial Sequence
  Oligonucleotide for detection of SNP TSC0021429
tcattaccaataa

SEQ ID NO: 85207 - DNA, 13 bp, Artificial Sequence
  Oligonucleotide for detection of SNP TSC0021429
ttatcgttaatga

SEQ ID NO: 85208 - DNA, 13 bp, Artificial Sequence
  Oligonucleotide for detection of SNP TSC0021429
tcattaacgataa

SEQ ID NO: 85209 - DNA, 13 bp, Artificial Sequence
  Oligonucleotide for detection of SNP TSC0021429
ttatcggtaatga

SEQ ID NO: 85210 - DNA, 13 bp, Artificial Sequence
  Oligonucleotide for detection of SNP TSC0021429
tcattaccgataa

SEQ ID NO: 85211 - DNA, 13 bp, Artificial Sequence
  Oligonucleotide for detection of SNP TSC0021430
ttttttagttaty

SEQ ID NO: 85212 - DNA, 13 bp, Artificial Sequence
  Oligonucleotide for detection of SNP TSC0021430
rataactaaaaaa

SEQ ID NO: 85213 - DNA, 13 bp, Artificial Sequence
  Oligonucleotide for detection of SNP TSC0021430
ttttttggttaty

SEQ ID NO: 85214 - DNA, 13 bp, Artificial Sequence
  Oligonucleotide for detection of SNP TSC0021430
rataaccaaaaaa

SEQ ID NO: 85215 - DNA, 13 bp, Artificial Sequence
  Oligonucleotide for detection of SNP TSC0021430
tttttcggttaty

SEQ ID NO: 85216 - DNA, 13 bp, Artificial Sequence
  Oligonucleotide for detection of SNP TSC0021430
rataaccgaaaaa

SEQ ID NO: 85217 - DNA, 13 bp, Artificial Sequence
  Oligonucleotide for detection of SNP TSC0021430
gatgattggagag

SEQ ID NO: 85218 - DNA, 13 bp, Artificial Sequence
  Oligonucleotide for detection of SNP TSC0021430
ctctccaatcatc

SEQ ID NO: 85219 - DNA, 13 bp, Artificial Sequence
  Oligonucleotide for detection of SNP TSC0021430
gatgatcggagag

SEQ ID NO: 85220 - DNA, 13 bp, Artificial Sequence
  Oligonucleotide for detection of SNP TSC0021430
ctctccgatcatc

SEQ ID NO: 85221 - DNA, 13 bp, Artificial Sequence
  Oligonucleotide for detection of SNP TSC0021431
ttatttattggtt

SEQ ID NO: 85222 - DNA, 13 bp, Artificial Sequence
  Oligonucleotide for detection of SNP TSC0021431
aaccaataaataa

SEQ ID NO: 85223 - DNA, 13 bp, Artificial Sequence
  Oligonucleotide for detection of SNP TSC0021431
ttatttgttggtt

SEQ ID NO: 85224 - DNA, 13 bp, Artificial Sequence
  Oligonucleotide for detection of SNP TSC0021431
aaccaacaaataa

SEQ ID NO: 85225 - DNA, 13 bp, Artificial Sequence
  Oligonucleotide for detection of SNP TSC0021431
ttatttatcggtt

SEQ ID NO: 85226 - DNA, 13 bp, Artificial Sequence
  Oligonucleotide for detection of SNP TSC0021431
aaccgataaataa

SEQ ID NO: 85227 - DNA, 13 bp, Artificial Sequence
  Oligonucleotide for detection of SNP TSC0021431
ttattcgttggtt

SEQ ID NO: 85228 - DNA, 13 bp, Artificial Sequence
  Oligonucleotide for detection of SNP TSC0021431
aaccaacgaataa

SEQ ID NO: 85229 - DNA, 13 bp, Artificial Sequence
  Oligonucleotide for detection of SNP TSC0021431
ttatttgtcggtt

SEQ ID NO: 85230 - DNA, 13 bp, Artificial Sequence
  Oligonucleotide for detection of SNP TSC0021431
aaccgacaaataa

SEQ ID NO: 85231 - DNA, 13 bp, Artificial Sequence
  Oligonucleotide for detection of SNP TSC0021431
ttattcgtcggtt

SEQ ID NO: 85232 - DNA, 13 bp, Artificial Sequence
  Oligonucleotide for detection of SNP TSC0021431
aaccgacgaataa

SEQ ID NO: 85233 - DNA, 13 bp, Artificial Sequence
  Oligonucleotide for detection of SNP TSC0021431
agttgatggatag

SEQ ID NO: 85234 - DNA, 13 bp, Artificial Sequence
  Oligonucleotide for detection of SNP TSC0021431
ctatccatcaact

SEQ ID NO: 85235 - DNA, 13 bp, Artificial Sequence
  Oligonucleotide for detection of SNP TSC0021431
agtcgatggatag

SEQ ID NO: 85236 - DNA, 13 bp, Artificial Sequence
  Oligonucleotide for detection of SNP TSC0021431
ctatccatcgact

SEQ ID NO: 85237 - DNA, 13 bp, Artificial Sequence
  Oligonucleotide for detection of SNP TSC0021431
agttgacggatag

SEQ ID NO: 85238 - DNA, 13 bp, Artificial Sequence
  Oligonucleotide for detection of SNP TSC0021431
ctatccgtcaact

SEQ ID NO: 85239 - DNA, 13 bp, Artificial Sequence
  Oligonucleotide for detection of SNP TSC0021431
agtcgacggatag

SEQ ID NO: 85240 - DNA, 13 bp, Artificial Sequence
  Oligonucleotide for detection of SNP TSC0021431
ctatccgtcgact

SEQ ID NO: 85241 - DNA, 13 bp, Artificial Sequence
  Oligonucleotide for detection of SNP TSC0021432
ttattaattttty

SEQ ID NO: 85242 - DNA, 13 bp, Artificial Sequence
  Oligonucleotide for detection of SNP TSC0021432
raaaaattaataa

SEQ ID NO: 85243 - DNA, 13 bp, Artificial Sequence
  Oligonucleotide for detection of SNP TSC0021432
ttattagttttty

SEQ ID NO: 85244 - DNA, 13 bp, Artificial Sequence
  Oligonucleotide for detection of SNP TSC0021432
raaaaactaataa

SEQ ID NO: 85245 - DNA, 13 bp, Artificial Sequence
  Oligonucleotide for detection of SNP TSC0021439
attttgatttgta

SEQ ID NO: 85246 - DNA, 13 bp, Artificial Sequence
  Oligonucleotide for detection of SNP TSC0021439
tacaaatcaaaat

SEQ ID NO: 85247 - DNA, 13 bp, Artificial Sequence
  Oligonucleotide for detection of SNP TSC0021439
attttggtttgta

SEQ ID NO: 85248 - DNA, 13 bp, Artificial Sequence
  Oligonucleotide for detection of SNP TSC0021439
tacaaaccaaaat

SEQ ID NO: 85249 - DNA, 13 bp, Artificial Sequence
  Oligonucleotide for detection of SNP TSC0021439
attttgattcgta

SEQ ID NO: 85250 - DNA, 13 bp, Artificial Sequence
  Oligonucleotide for detection of SNP TSC0021439
tacgaatcaaaat

SEQ ID NO: 85251 - DNA, 13 bp, Artificial Sequence
  Oligonucleotide for detection of SNP TSC0021439
attttggttcgta

SEQ ID NO: 85252 - DNA, 13 bp, Artificial Sequence
  Oligonucleotide for detection of SNP TSC0021439
tacgaaccaaaat

SEQ ID NO: 85253 - DNA, 13 bp, Artificial Sequence
  Oligonucleotide for detection of SNP TSC0021440
gttaggtgtagtg

SEQ ID NO: 85254 - DNA, 13 bp, Artificial Sequence
  Oligonucleotide for detection of SNP TSC0021440
cactacacctaac

SEQ ID NO: 85255 - DNA, 13 bp, Artificial Sequence
  Oligonucleotide for detection of SNP TSC0021440
gttaggcgtagtg

SEQ ID NO: 85256 - DNA, 13 bp, Artificial Sequence
  Oligonucleotide for detection of SNP TSC0021440
cactacgcctaac

SEQ ID NO: 85257 - DNA, 13 bp, Artificial Sequence
  Oligonucleotide for detection of SNP TSC0021442
ttttggatttttg

SEQ ID NO: 85258 - DNA, 13 bp, Artificial Sequence
  Oligonucleotide for detection of SNP TSC0021442
caaaaatccaaaa

SEQ ID NO: 85259 - DNA, 13 bp, Artificial Sequence
  Oligonucleotide for detection of SNP TSC0021442
ttttggttttttg

SEQ ID NO: 85260 - DNA, 13 bp, Artificial Sequence
  Oligonucleotide for detection of SNP TSC0021442
caaaaaaccaaaa

SEQ ID NO: 85261 - DNA, 13 bp, Artificial Sequence
  Oligonucleotide for detection of SNP TSC0021442
tttcggatttttg

SEQ ID NO: 85262 - DNA, 13 bp, Artificial Sequence
  Oligonucleotide for detection of SNP TSC0021442
caaaaatccgaaa

SEQ ID NO: 85263 - DNA, 13 bp, Artificial Sequence
  Oligonucleotide for detection of SNP TSC0021442
tttcggttttttg

SEQ ID NO: 85264 - DNA, 13 bp, Artificial Sequence
  Oligonucleotide for detection of SNP TSC0021442
caaaaaaccgaaa

SEQ ID NO: 85265 - DNA, 13 bp, Artificial Sequence
  Oligonucleotide for detection of SNP TSC0021442
taagggtttgggg

SEQ ID NO: 85266 - DNA, 13 bp, Artificial Sequence
  Oligonucleotide for detection of SNP TSC0021442
ccccaaaccctta

SEQ ID NO: 85267 - DNA, 13 bp, Artificial Sequence
  Oligonucleotide for detection of SNP TSC0021442
taaggggttgggg

SEQ ID NO: 85268 - DNA, 13 bp, Artificial Sequence
  Oligonucleotide for detection of SNP TSC0021442
ccccaacccctta

SEQ ID NO: 85269 - DNA, 13 bp, Artificial Sequence
  Oligonucleotide for detection of SNP TSC0021442
taagggttcgggg

SEQ ID NO: 85270 - DNA, 13 bp, Artificial Sequence
  Oligonucleotide for detection of SNP TSC0021442
ccccgaaccctta

SEQ ID NO: 85271 - DNA, 13 bp, Artificial Sequence
  Oligonucleotide for detection of SNP TSC0021442
taaggggtcgggg

SEQ ID NO: 85272 - DNA, 13 bp, Artificial Sequence
  Oligonucleotide for detection of SNP TSC0021442
ccccgacccctta

SEQ ID NO: 85273 - DNA, 13 bp, Artificial Sequence
  Oligonucleotide for detection of SNP TSC0021443
tgaatataggttg

SEQ ID NO: 85274 - DNA, 13 bp, Artificial Sequence
  Oligonucleotide for detection of SNP TSC0021443
caacctatattca

SEQ ID NO: 85275 - DNA, 13 bp, Artificial Sequence
  Oligonucleotide for detection of SNP TSC0021443
tgaatagaggttg

SEQ ID NO: 85276 - DNA, 13 bp, Artificial Sequence
  Oligonucleotide for detection of SNP TSC0021443
caacctctattca

SEQ ID NO: 85277 - DNA, 13 bp, Artificial Sequence
  Oligonucleotide for detection of SNP TSC0021443
tagtttgtattta

SEQ ID NO: 85278 - DNA, 13 bp, Artificial Sequence
  Oligonucleotide for detection of SNP TSC0021443
taaatacaaacta

SEQ ID NO: 85279 - DNA, 13 bp, Artificial Sequence
  Oligonucleotide for detection of SNP TSC0021443
tagtttttattta

SEQ ID NO: 85280 - DNA, 13 bp, Artificial Sequence
  Oligonucleotide for detection of SNP TSC0021443
taaataaaaacta

SEQ ID NO: 85281 - DNA, 13 bp, Artificial Sequence
  Oligonucleotide for detection of SNP TSC0021444
taagtagttttta

SEQ ID NO: 85282 - DNA, 13 bp, Artificial Sequence
  Oligonucleotide for detection of SNP TSC0021444
taaaaactactta

SEQ ID NO: 85283 - DNA, 13 bp, Artificial Sequence
  Oligonucleotide for detection of SNP TSC0021444
taagtaattttta

SEQ ID NO: 85284 - DNA, 13 bp, Artificial Sequence
  Oligonucleotide for detection of SNP TSC0021444
taaaaattactta

SEQ ID NO: 85285 - DNA, 13 bp, Artificial Sequence
  Oligonucleotide for detection of SNP TSC0021445
taatttaatagat

SEQ ID NO: 85286 - DNA, 13 bp, Artificial Sequence
  Oligonucleotide for detection of SNP TSC0021445
atctattaaatta

SEQ ID NO: 85287 - DNA, 13 bp, Artificial Sequence
  Oligonucleotide for detection of SNP TSC0021445
taatttgatagat

SEQ ID NO: 85288 - DNA, 13 bp, Artificial Sequence
  Oligonucleotide for detection of SNP TSC0021445
atctatcaaatta

SEQ ID NO: 85289 - DNA, 13 bp, Artificial Sequence
  Oligonucleotide for detection of SNP TSC0021446
ttgaagtgggtag

SEQ ID NO: 85290 - DNA, 13 bp, Artificial Sequence
  Oligonucleotide for detection of SNP TSC0021446
ctacccacttcaa

SEQ ID NO: 85291 - DNA, 13 bp, Artificial Sequence
  Oligonucleotide for detection of SNP TSC0021446
tcgaagtgggtag

SEQ ID NO: 85292 - DNA, 13 bp, Artificial Sequence
  Oligonucleotide for detection of SNP TSC0021446
ctacccacttcga

SEQ ID NO: 85293 - DNA, 13 bp, Artificial Sequence
  Oligonucleotide for detection of SNP TSC0021446
ttgaagcgggtag

SEQ ID NO: 85294 - DNA, 13 bp, Artificial Sequence
  Oligonucleotide for detection of SNP TSC0021446
ctacccgcttcaa

SEQ ID NO: 85295 - DNA, 13 bp, Artificial Sequence
  Oligonucleotide for detection of SNP TSC0021446
tcgaagcgggtag

SEQ ID NO: 85296 - DNA, 13 bp, Artificial Sequence
  Oligonucleotide for detection of SNP TSC0021446
ctacccgcttcga

SEQ ID NO: 85297 - DNA, 13 bp, Artificial Sequence
  Oligonucleotide for detection of SNP TSC0021447
gagttatgtagay

SEQ ID NO: 85298 - DNA, 13 bp, Artificial Sequence
  Oligonucleotide for detection of SNP TSC0021447
rtctacataactc

SEQ ID NO: 85299 - DNA, 13 bp, Artificial Sequence
  Oligonucleotide for detection of SNP TSC0021447
gagttacgtagay

SEQ ID NO: 85300 - DNA, 13 bp, Artificial Sequence
  Oligonucleotide for detection of SNP TSC0021447
rtctacgtaactc

SEQ ID NO: 85301 - DNA, 13 bp, Artificial Sequence
  Oligonucleotide for detection of SNP TSC0021447
gtttgtgtgatty

SEQ ID NO: 85302 - DNA, 13 bp, Artificial Sequence
  Oligonucleotide for detection of SNP TSC0021447
raatcacacaaac

SEQ ID NO: 85303 - DNA, 13 bp, Artificial Sequence
  Oligonucleotide for detection of SNP TSC0021447
gtttgtatgatty

SEQ ID NO: 85304 - DNA, 13 bp, Artificial Sequence
  Oligonucleotide for detection of SNP TSC0021447
raatcatacaaac

SEQ ID NO: 85305 - DNA, 13 bp, Artificial Sequence
  Oligonucleotide for detection of SNP TSC0021447
gtttgcgtgatty

SEQ ID NO: 85306 - DNA, 13 bp, Artificial Sequence
  Oligonucleotide for detection of SNP TSC0021447
raatcacgcaaac

SEQ ID NO: 85307 - DNA, 13 bp, Artificial Sequence
  Oligonucleotide for detection of SNP TSC0021449
aatagatggttgg

SEQ ID NO: 85308 - DNA, 13 bp, Artificial Sequence
  Oligonucleotide for detection of SNP TSC0021449
ccaaccatctatt

SEQ ID NO: 85309 - DNA, 13 bp, Artificial Sequence
  Oligonucleotide for detection of SNP TSC0021449
aatagacggttgg

SEQ ID NO: 85310 - DNA, 13 bp, Artificial Sequence
  Oligonucleotide for detection of SNP TSC0021449
ccaaccgtctatt

SEQ ID NO: 85311 - DNA, 13 bp, Artificial Sequence
  Oligonucleotide for detection of SNP TSC0021449
ttagtcgtttgtt

SEQ ID NO: 85312 - DNA, 13 bp, Artificial Sequence
  Oligonucleotide for detection of SNP TSC0021449
aacaaacgactaa

SEQ ID NO: 85313 - DNA, 13 bp, Artificial Sequence
  Oligonucleotide for detection of SNP TSC0021450
gttttttgtgtaa

SEQ ID NO: 85314 - DNA, 13 bp, Artificial Sequence
  Oligonucleotide for detection of SNP TSC0021450
ttacacaaaaaac

SEQ ID NO: 85315 - DNA, 13 bp, Artificial Sequence
  Oligonucleotide for detection of SNP TSC0021450
gtttttggtgtaa

SEQ ID NO: 85316 - DNA, 13 bp, Artificial Sequence
  Oligonucleotide for detection of SNP TSC0021450
ttacaccaaaaac

SEQ ID NO: 85317 - DNA, 13 bp, Artificial Sequence
  Oligonucleotide for detection of SNP TSC0021450
gtttttcgtgtaa

SEQ ID NO: 85318 - DNA, 13 bp, Artificial Sequence
  Oligonucleotide for detection of SNP TSC0021450
ttacacgaaaaac

SEQ ID NO: 85319 - DNA, 13 bp, Artificial Sequence
  Oligonucleotide for detection of SNP TSC0021450
ttatatgagaagy

SEQ ID NO: 85320 - DNA, 13 bp, Artificial Sequence
  Oligonucleotide for detection of SNP TSC0021450
rcttctcatataa

SEQ ID NO: 85321 - DNA, 13 bp, Artificial Sequence
  Oligonucleotide for detection of SNP TSC0021450
ttatattagaagy

SEQ ID NO: 85322 - DNA, 13 bp, Artificial Sequence
  Oligonucleotide for detection of SNP TSC0021450
rcttctaatataa

SEQ ID NO: 85323 - DNA, 13 bp, Artificial Sequence
  Oligonucleotide for detection of SNP TSC0021450
ttatacgagaagy

SEQ ID NO: 85324 - DNA, 13 bp, Artificial Sequence
  Oligonucleotide for detection of SNP TSC0021450
rcttctcgtataa

SEQ ID NO: 85325 - DNA, 13 bp, Artificial Sequence
  Oligonucleotide for detection of SNP TSC0021453
tttaggaagtgag

SEQ ID NO: 85326 - DNA, 13 bp, Artificial Sequence
  Oligonucleotide for detection of SNP TSC0021453
ctcacttcctaaa

SEQ ID NO: 85327 - DNA, 13 bp, Artificial Sequence
  Oligonucleotide for detection of SNP TSC0021453
tttagggagtgag

SEQ ID NO: 85328 - DNA, 13 bp, Artificial Sequence
  Oligonucleotide for detection of SNP TSC0021453
ctcactccctaaa

SEQ ID NO: 85329 - DNA, 13 bp, Artificial Sequence
  Oligonucleotide for detection of SNP TSC0021454
taaaggtggttay

SEQ ID NO: 85330 - DNA, 13 bp, Artificial Sequence
  Oligonucleotide for detection of SNP TSC0021454
rtaaccaccttta

SEQ ID NO: 85331 - DNA, 13 bp, Artificial Sequence
  Oligonucleotide for detection of SNP TSC0021454
taaaggcggttay

SEQ ID NO: 85332 - DNA, 13 bp, Artificial Sequence
  Oligonucleotide for detection of SNP TSC0021454
rtaaccgccttta

SEQ ID NO: 85333 - DNA, 13 bp, Artificial Sequence
  Oligonucleotide for detection of SNP TSC0021454
gtggttgtttttg

SEQ ID NO: 85334 - DNA, 13 bp, Artificial Sequence
  Oligonucleotide for detection of SNP TSC0021454
caaaaacaaccac

SEQ ID NO: 85335 - DNA, 13 bp, Artificial Sequence
  Oligonucleotide for detection of SNP TSC0021454
gtggttatttttg

SEQ ID NO: 85336 - DNA, 13 bp, Artificial Sequence
  Oligonucleotide for detection of SNP TSC0021454
caaaaataaccac

SEQ ID NO: 85337 - DNA, 13 bp, Artificial Sequence
  Oligonucleotide for detection of SNP TSC0021454
gtggtcgtttttg

SEQ ID NO: 85338 - DNA, 13 bp, Artificial Sequence
  Oligonucleotide for detection of SNP TSC0021454
caaaaacgaccac

SEQ ID NO: 85339 - DNA, 13 bp, Artificial Sequence
  Oligonucleotide for detection of SNP TSC0021455
ggtggtaggagag

SEQ ID NO: 85340 - DNA, 13 bp, Artificial Sequence
  Oligonucleotide for detection of SNP TSC0021455
ctctcctaccacc

SEQ ID NO: 85341 - DNA, 13 bp, Artificial Sequence
  Oligonucleotide for detection of SNP TSC0021455
ggtggtgggagag

SEQ ID NO: 85342 - DNA, 13 bp, Artificial Sequence
  Oligonucleotide for detection of SNP TSC0021455
ctctcccaccacc

SEQ ID NO: 85343 - DNA, 13 bp, Artificial Sequence
  Oligonucleotide for detection of SNP TSC0021455
ggtggcgggagag

SEQ ID NO: 85344 - DNA, 13 bp, Artificial Sequence
  Oligonucleotide for detection of SNP TSC0021455
ctctcccgccacc

SEQ ID NO: 85345 - DNA, 13 bp, Artificial Sequence
  Oligonucleotide for detection of SNP TSC0021455
tttttttgttaty

SEQ ID NO: 85346 - DNA, 13 bp, Artificial Sequence
  Oligonucleotide for detection of SNP TSC0021455
rataacaaaaaaa

SEQ ID NO: 85347 - DNA, 13 bp, Artificial Sequence
  Oligonucleotide for detection of SNP TSC0021455
ttttttcgttaty

SEQ ID NO: 85348 - DNA, 13 bp, Artificial Sequence
  Oligonucleotide for detection of SNP TSC0021455
rataacgaaaaaa

SEQ ID NO: 85349 - DNA, 13 bp, Artificial Sequence
  Oligonucleotide for detection of SNP TSC0021457
attttaaaattgg

SEQ ID NO: 85350 - DNA, 13 bp, Artificial Sequence
  Oligonucleotide for detection of SNP TSC0021457
ccaattttaaaat

SEQ ID NO: 85351 - DNA, 13 bp, Artificial Sequence
  Oligonucleotide for detection of SNP TSC0021457
attttagaattgg

SEQ ID NO: 85352 - DNA, 13 bp, Artificial Sequence
  Oligonucleotide for detection of SNP TSC0021457
ccaattctaaaat

SEQ ID NO: 85353 - DNA, 13 bp, Artificial Sequence
  Oligonucleotide for detection of SNP TSC0021458
gtggttgtggttt

SEQ ID NO: 85354 - DNA, 13 bp, Artificial Sequence
  Oligonucleotide for detection of SNP TSC0021458
aaaccacaaccac

SEQ ID NO: 85355 - DNA, 13 bp, Artificial Sequence
  Oligonucleotide for detection of SNP TSC0021458
gtggttatggttt

SEQ ID NO: 85356 - DNA, 13 bp, Artificial Sequence
  Oligonucleotide for detection of SNP TSC0021458
aaaccataaccac

SEQ ID NO: 85357 - DNA, 13 bp, Artificial Sequence
  Oligonucleotide for detection of SNP TSC0021459
ttggatattaggy

SEQ ID NO: 85358 - DNA, 13 bp, Artificial Sequence
  Oligonucleotide for detection of SNP TSC0021459
rcctaatatccaa

SEQ ID NO: 85359 - DNA, 13 bp, Artificial Sequence
  Oligonucleotide for detection of SNP TSC0021459
ttggattttaggy

SEQ ID NO: 85360 - DNA, 13 bp, Artificial Sequence
  Oligonucleotide for detection of SNP TSC0021459
rcctaaaatccaa

SEQ ID NO: 85361 - DNA, 13 bp, Artificial Sequence
  Oligonucleotide for detection of SNP TSC0021459
gtttggtgtttag

SEQ ID NO: 85362 - DNA, 13 bp, Artificial Sequence
  Oligonucleotide for detection of SNP TSC0021459
ctaaacaccaaac

SEQ ID NO: 85363 - DNA, 13 bp, Artificial Sequence
  Oligonucleotide for detection of SNP TSC0021459
gtttggagtttag

SEQ ID NO: 85364 - DNA, 13 bp, Artificial Sequence
  Oligonucleotide for detection of SNP TSC0021459
ctaaactccaaac

SEQ ID NO: 85365 - DNA, 13 bp, Artificial Sequence
  Oligonucleotide for detection of SNP TSC0021460
tgtaaatgtgttg

SEQ ID NO: 85366 - DNA, 13 bp, Artificial Sequence
  Oligonucleotide for detection of SNP TSC0021460
caacacatttaca

SEQ ID NO: 85367 - DNA, 13 bp, Artificial Sequence
  Oligonucleotide for detection of SNP TSC0021460
tgtaaaggtgttg

SEQ ID NO: 85368 - DNA, 13 bp, Artificial Sequence
  Oligonucleotide for detection of SNP TSC0021460
caacacctttaca

SEQ ID NO: 85369 - DNA, 13 bp, Artificial Sequence
  Oligonucleotide for detection of SNP TSC0021460
tgtaaacgtgttg

SEQ ID NO: 85370 - DNA, 13 bp, Artificial Sequence
  Oligonucleotide for detection of SNP TSC0021460
caacacgtttaca

SEQ ID NO: 85371 - DNA, 13 bp, Artificial Sequence
  Oligonucleotide for detection of SNP TSC0021460
tgtaaaggcgttg

SEQ ID NO: 85372 - DNA, 13 bp, Artificial Sequence
  Oligonucleotide for detection of SNP TSC0021460
caacgcctttaca

SEQ ID NO: 85373 - DNA, 13 bp, Artificial Sequence
  Oligonucleotide for detection of SNP TSC0021460
tgtaaatgcgttg

SEQ ID NO: 85374 - DNA, 13 bp, Artificial Sequence
  Oligonucleotide for detection of SNP TSC0021460
caacgcatttaca

SEQ ID NO: 85375 - DNA, 13 bp, Artificial Sequence
  Oligonucleotide for detection of SNP TSC0021460
tgtaaacgcgttg

SEQ ID NO: 85376 - DNA, 13 bp, Artificial Sequence
  Oligonucleotide for detection of SNP TSC0021460
caacgcgtttaca

SEQ ID NO: 85377 - DNA, 13 bp, Artificial Sequence
  Oligonucleotide for detection of SNP TSC0021460
tagtgtgtttgta

SEQ ID NO: 85378 - DNA, 13 bp, Artificial Sequence
  Oligonucleotide for detection of SNP TSC0021460
tacaaacacacta

SEQ ID NO: 85379 - DNA, 13 bp, Artificial Sequence
  Oligonucleotide for detection of SNP TSC0021460
tagtgtttttgta

SEQ ID NO: 85380 - DNA, 13 bp, Artificial Sequence
  Oligonucleotide for detection of SNP TSC0021460
tacaaaaacacta

SEQ ID NO: 85381 - DNA, 13 bp, Artificial Sequence
  Oligonucleotide for detection of SNP TSC0021460
tagcgtgtttgta

SEQ ID NO: 85382 - DNA, 13 bp, Artificial Sequence
  Oligonucleotide for detection of SNP TSC0021460
tacaaacacgcta

SEQ ID NO: 85383 - DNA, 13 bp, Artificial Sequence
  Oligonucleotide for detection of SNP TSC0021460
tagcgtttttgta

SEQ ID NO: 85384 - DNA, 13 bp, Artificial Sequence
  Oligonucleotide for detection of SNP TSC0021460
tacaaaaacgcta

SEQ ID NO: 85385 - DNA, 13 bp, Artificial Sequence
  Oligonucleotide for detection of SNP TSC0021460
tagtgcgtttgta

SEQ ID NO: 85386 - DNA, 13 bp, Artificial Sequence
  Oligonucleotide for detection of SNP TSC0021460
tacaaacgcacta

SEQ ID NO: 85387 - DNA, 13 bp, Artificial Sequence
  Oligonucleotide for detection of SNP TSC0021460
tagcgcgtttgta

SEQ ID NO: 85388 - DNA, 13 bp, Artificial Sequence
  Oligonucleotide for detection of SNP TSC0021460
tacaaacgcgcta

SEQ ID NO: 85389 - DNA, 13 bp, Artificial Sequence
  Oligonucleotide for detection of SNP TSC0021461
ttaatttgtatty

SEQ ID NO: 85390 - DNA, 13 bp, Artificial Sequence
  Oligonucleotide for detection of SNP TSC0021461
raatacaaattaa

SEQ ID NO: 85391 - DNA, 13 bp, Artificial Sequence
  Oligonucleotide for detection of SNP TSC0021461
ttaattcgtatty

SEQ ID NO: 85392 - DNA, 13 bp, Artificial Sequence
  Oligonucleotide for detection of SNP TSC0021461
raatacgaattaa

SEQ ID NO: 85393 - DNA, 13 bp, Artificial Sequence
  Oligonucleotide for detection of SNP TSC0021461
gagtgtggattga

SEQ ID NO: 85394 - DNA, 13 bp, Artificial Sequence
  Oligonucleotide for detection of SNP TSC0021461
tcaatccacactc

SEQ ID NO: 85395 - DNA, 13 bp, Artificial Sequence
  Oligonucleotide for detection of SNP TSC0021461
gagtgtagattga

SEQ ID NO: 85396 - DNA, 13 bp, Artificial Sequence
  Oligonucleotide for detection of SNP TSC0021461
tcaatctacactc

SEQ ID NO: 85397 - DNA, 13 bp, Artificial Sequence
  Oligonucleotide for detection of SNP TSC0021461
gagtgcggattga

SEQ ID NO: 85398 - DNA, 13 bp, Artificial Sequence
  Oligonucleotide for detection of SNP TSC0021461
tcaatccgcactc

SEQ ID NO: 85399 - DNA, 13 bp, Artificial Sequence
  Oligonucleotide for detection of SNP TSC0021462
ttttggaggtgty

SEQ ID NO: 85400 - DNA, 13 bp, Artificial Sequence
  Oligonucleotide for detection of SNP TSC0021462
racacctccaaaa

SEQ ID NO: 85401 - DNA, 13 bp, Artificial Sequence
  Oligonucleotide for detection of SNP TSC0021462
ttttggtggtgty

SEQ ID NO: 85402 - DNA, 13 bp, Artificial Sequence
  Oligonucleotide for detection of SNP TSC0021462
racaccaccaaaa

SEQ ID NO: 85403 - DNA, 13 bp, Artificial Sequence
  Oligonucleotide for detection of SNP TSC0021462
ttttggcggtgty

SEQ ID NO: 85404 - DNA, 13 bp, Artificial Sequence
  Oligonucleotide for detection of SNP TSC0021462
racaccgccaaaa

SEQ ID NO: 85405 - DNA, 13 bp, Artificial Sequence
  Oligonucleotide for detection of SNP TSC0021462
gatatttttagag

SEQ ID NO: 85406 - DNA, 13 bp, Artificial Sequence
  Oligonucleotide for detection of SNP TSC0021462
ctctaaaaatatc

SEQ ID NO: 85407 - DNA, 13 bp, Artificial Sequence
  Oligonucleotide for detection of SNP TSC0021462
gatattgttagag

SEQ ID NO: 85408 - DNA, 13 bp, Artificial Sequence
  Oligonucleotide for detection of SNP TSC0021462
ctctaacaatatc

SEQ ID NO: 85409 - DNA, 13 bp, Artificial Sequence
  Oligonucleotide for detection of SNP TSC0021462
gatatcgttagag

SEQ ID NO: 85410 - DNA, 13 bp, Artificial Sequence
  Oligonucleotide for detection of SNP TSC0021462
ctctaacgatatc

SEQ ID NO: 85411 - DNA, 13 bp, Artificial Sequence
  Oligonucleotide for detection of SNP TSC0021464
atttgggatgggy

SEQ ID NO: 85412 - DNA, 13 bp, Artificial Sequence
  Oligonucleotide for detection of SNP TSC0021464
rcccatcccaaat

SEQ ID NO: 85413 - DNA, 13 bp, Artificial Sequence
  Oligonucleotide for detection of SNP TSC0021464
atttggaatgggy

SEQ ID NO: 85414 - DNA, 13 bp, Artificial Sequence
  Oligonucleotide for detection of SNP TSC0021464
rcccattccaaat

SEQ ID NO: 85415 - DNA, 13 bp, Artificial Sequence
  Oligonucleotide for detection of SNP TSC0021465
gtaaagatagtgg

SEQ ID NO: 85416 - DNA, 13 bp, Artificial Sequence
  Oligonucleotide for detection of SNP TSC0021465
ccactatctttac

SEQ ID NO: 85417 - DNA, 13 bp, Artificial Sequence
  Oligonucleotide for detection of SNP TSC0021465
gtaaagttagtgg

SEQ ID NO: 85418 - DNA, 13 bp, Artificial Sequence
  Oligonucleotide for detection of SNP TSC0021465
ccactaactttac

SEQ ID NO: 85419 - DNA, 13 bp, Artificial Sequence
  Oligonucleotide for detection of SNP TSC0021465
ttattgtttttay

SEQ ID NO: 85420 - DNA, 13 bp, Artificial Sequence
  Oligonucleotide for detection of SNP TSC0021465
rtaaaaacaataa

SEQ ID NO: 85421 - DNA, 13 bp, Artificial Sequence
  Oligonucleotide for detection of SNP TSC0021466
tgttatatgatgg

SEQ ID NO: 85422 - DNA, 13 bp, Artificial Sequence
  Oligonucleotide for detection of SNP TSC0021466
ccatcatataaca

SEQ ID NO: 85423 - DNA, 13 bp, Artificial Sequence
  Oligonucleotide for detection of SNP TSC0021466
tgttatgtgatgg

SEQ ID NO: 85424 - DNA, 13 bp, Artificial Sequence
  Oligonucleotide for detection of SNP TSC0021466
ccatcacataaca

SEQ ID NO: 85425 - DNA, 13 bp, Artificial Sequence
  Oligonucleotide for detection of SNP TSC0021467
gttttgggtttty

SEQ ID NO: 85426 - DNA, 13 bp, Artificial Sequence
  Oligonucleotide for detection of SNP TSC0021467
raaaacccaaaac

SEQ ID NO: 85427 - DNA, 13 bp, Artificial Sequence
  Oligonucleotide for detection of SNP TSC0021467
gttttgagtttty

SEQ ID NO: 85428 - DNA, 13 bp, Artificial Sequence
  Oligonucleotide for detection of SNP TSC0021467
raaaactcaaaac

SEQ ID NO: 85429 - DNA, 13 bp, Artificial Sequence
  Oligonucleotide for detection of SNP TSC0021468
tatagggtataga

SEQ ID NO: 85430 - DNA, 13 bp, Artificial Sequence
  Oligonucleotide for detection of SNP TSC0021468
tctataccctata

SEQ ID NO: 85431 - DNA, 13 bp, Artificial Sequence
  Oligonucleotide for detection of SNP TSC0021468
tttgtgttttatg

SEQ ID NO: 85432 - DNA, 13 bp, Artificial Sequence
  Oligonucleotide for detection of SNP TSC0021468
cataaaacacaaa

SEQ ID NO: 85433 - DNA, 13 bp, Artificial Sequence
  Oligonucleotide for detection of SNP TSC0021468
tttgtgatttatg

SEQ ID NO: 85434 - DNA, 13 bp, Artificial Sequence
  Oligonucleotide for detection of SNP TSC0021468
cataaatcacaaa

SEQ ID NO: 85435 - DNA, 13 bp, Artificial Sequence
  Oligonucleotide for detection of SNP TSC0021469
ttatatatgttty

SEQ ID NO: 85436 - DNA, 13 bp, Artificial Sequence
  Oligonucleotide for detection of SNP TSC0021469
raaacatatataa

SEQ ID NO: 85437 - DNA, 13 bp, Artificial Sequence
  Oligonucleotide for detection of SNP TSC0021469
ttatatttgttty

SEQ ID NO: 85438 - DNA, 13 bp, Artificial Sequence
  Oligonucleotide for detection of SNP TSC0021469
raaacaaatataa

SEQ ID NO: 85439 - DNA, 13 bp, Artificial Sequence
  Oligonucleotide for detection of SNP TSC0021469
ttatatacgttty

SEQ ID NO: 85440 - DNA, 13 bp, Artificial Sequence
  Oligonucleotide for detection of SNP TSC0021469
raaacgtatataa

SEQ ID NO: 85441 - DNA, 13 bp, Artificial Sequence
  Oligonucleotide for detection of SNP TSC0021469
ttatattcgttty

SEQ ID NO: 85442 - DNA, 13 bp, Artificial Sequence
  Oligonucleotide for detection of SNP TSC0021469
raaacgaatataa

SEQ ID NO: 85443 - DNA, 13 bp, Artificial Sequence
  Oligonucleotide for detection of SNP TSC0021469
ggggtgtgtgtgg

SEQ ID NO: 85444 - DNA, 13 bp, Artificial Sequence
  Oligonucleotide for detection of SNP TSC0021469
ccacacacacccc

SEQ ID NO: 85445 - DNA, 13 bp, Artificial Sequence
  Oligonucleotide for detection of SNP TSC0021469
ggggtgagtgtgg

SEQ ID NO: 85446 - DNA, 13 bp, Artificial Sequence
  Oligonucleotide for detection of SNP TSC0021469
ccacactcacccc

SEQ ID NO: 85447 - DNA, 13 bp, Artificial Sequence
  Oligonucleotide for detection of SNP TSC0021469
ggggcgtgtgtgg

SEQ ID NO: 85448 - DNA, 13 bp, Artificial Sequence
  Oligonucleotide for detection of SNP TSC0021469
ccacacacgcccc

SEQ ID NO: 85449 - DNA, 13 bp, Artificial Sequence
  Oligonucleotide for detection of SNP TSC0021469
ggggcgagtgtgg

SEQ ID NO: 85450 - DNA, 13 bp, Artificial Sequence
  Oligonucleotide for detection of SNP TSC0021469
ccacactcgcccc

SEQ ID NO: 85451 - DNA, 13 bp, Artificial Sequence
  Oligonucleotide for detection of SNP TSC0021474
tgttttatagtay

SEQ ID NO: 85452 - DNA, 13 bp, Artificial Sequence
  Oligonucleotide for detection of SNP TSC0021474
rtactataaaaca

SEQ ID NO: 85453 - DNA, 13 bp, Artificial Sequence
  Oligonucleotide for detection of SNP TSC0021474
tgttttgtagtay

SEQ ID NO: 85454 - DNA, 13 bp, Artificial Sequence
  Oligonucleotide for detection of SNP TSC0021474
rtactacaaaaca

SEQ ID NO: 85455 - DNA, 13 bp, Artificial Sequence
  Oligonucleotide for detection of SNP TSC0021475
gtttgagagttgy

SEQ ID NO: 85456 - DNA, 13 bp, Artificial Sequence
  Oligonucleotide for detection of SNP TSC0021475
rcaactctcaaac

SEQ ID NO: 85457 - DNA, 13 bp, Artificial Sequence
  Oligonucleotide for detection of SNP TSC0021475
gtttgaaagttgy

SEQ ID NO: 85458 - DNA, 13 bp, Artificial Sequence
  Oligonucleotide for detection of SNP TSC0021475
rcaactttcaaac

SEQ ID NO: 85459 - DNA, 13 bp, Artificial Sequence
  Oligonucleotide for detection of SNP TSC0021476
tttgtaatttgat

SEQ ID NO: 85460 - DNA, 13 bp, Artificial Sequence
  Oligonucleotide for detection of SNP TSC0021476
atcaaattacaaa

SEQ ID NO: 85461 - DNA, 13 bp, Artificial Sequence
  Oligonucleotide for detection of SNP TSC0021476
tttgtattttgat

SEQ ID NO: 85462 - DNA, 13 bp, Artificial Sequence
  Oligonucleotide for detection of SNP TSC0021476
atcaaaatacaaa

SEQ ID NO: 85463 - DNA, 13 bp, Artificial Sequence
  Oligonucleotide for detection of SNP TSC0021476
attaaggtataga

SEQ ID NO: 85464 - DNA, 13 bp, Artificial Sequence
  Oligonucleotide for detection of SNP TSC0021476
tctataccttaat

SEQ ID NO: 85465 - DNA, 13 bp, Artificial Sequence
  Oligonucleotide for detection of SNP TSC0021477
gtttttaaggaga

SEQ ID NO: 85466 - DNA, 13 bp, Artificial Sequence
  Oligonucleotide for detection of SNP TSC0021477
tctccttaaaaac

SEQ ID NO: 85467 - DNA, 13 bp, Artificial Sequence
  Oligonucleotide for detection of SNP TSC0021477
gtttttgaggaga

SEQ ID NO: 85468 - DNA, 13 bp, Artificial Sequence
  Oligonucleotide for detection of SNP TSC0021477
tctcctcaaaaac

SEQ ID NO: 85469 - DNA, 13 bp, Artificial Sequence
  Oligonucleotide for detection of SNP TSC0021478
ttggtaagaatgy

SEQ ID NO: 85470 - DNA, 13 bp, Artificial Sequence
  Oligonucleotide for detection of SNP TSC0021478
rcattcttaccaa

SEQ ID NO: 85471 - DNA, 13 bp, Artificial Sequence
  Oligonucleotide for detection of SNP TSC0021478
ttggtaggaatgy

SEQ ID NO: 85472 - DNA, 13 bp, Artificial Sequence
  Oligonucleotide for detection of SNP TSC0021478
rcattcctaccaa

SEQ ID NO: 85473 - DNA, 13 bp, Artificial Sequence
  Oligonucleotide for detection of SNP TSC0021478
ttggtaagaacgy

SEQ ID NO: 85474 - DNA, 13 bp, Artificial Sequence
  Oligonucleotide for detection of SNP TSC0021478
rcgttcttaccaa

SEQ ID NO: 85475 - DNA, 13 bp, Artificial Sequence
  Oligonucleotide for detection of SNP TSC0021478
ttggtaggaacgy

SEQ ID NO: 85476 - DNA, 13 bp, Artificial Sequence
  Oligonucleotide for detection of SNP TSC0021478
rcgttcctaccaa

SEQ ID NO: 85477 - DNA, 13 bp, Artificial Sequence
  Oligonucleotide for detection of SNP TSC0021481
atagtagggataa

SEQ ID NO: 85478 - DNA, 13 bp, Artificial Sequence
  Oligonucleotide for detection of SNP TSC0021481
ttatccctactat

SEQ ID NO: 85479 - DNA, 13 bp, Artificial Sequence
  Oligonucleotide for detection of SNP TSC0021481
atagtaaggataa

SEQ ID NO: 85480 - DNA, 13 bp, Artificial Sequence
  Oligonucleotide for detection of SNP TSC0021481
ttatccttactat

SEQ ID NO: 85481 - DNA, 13 bp, Artificial Sequence
  Oligonucleotide for detection of SNP TSC0021482
aaatgtgtatgtt

SEQ ID NO: 85482 - DNA, 13 bp, Artificial Sequence
  Oligonucleotide for detection of SNP TSC0021482
aacatacacattt

SEQ ID NO: 85483 - DNA, 13 bp, Artificial Sequence
  Oligonucleotide for detection of SNP TSC0021482
aaatgtatatgtt

SEQ ID NO: 85484 - DNA, 13 bp, Artificial Sequence
  Oligonucleotide for detection of SNP TSC0021482
aacatatacattt

SEQ ID NO: 85485 - DNA, 13 bp, Artificial Sequence
  Oligonucleotide for detection of SNP TSC0021483
tatttagttaatg

SEQ ID NO: 85486 - DNA, 13 bp, Artificial Sequence
  Oligonucleotide for detection of SNP TSC0021483
cattaactaaata

SEQ ID NO: 85487 - DNA, 13 bp, Artificial Sequence
  Oligonucleotide for detection of SNP TSC0021483
tatttaattaatg

SEQ ID NO: 85488 - DNA, 13 bp, Artificial Sequence
  Oligonucleotide for detection of SNP TSC0021483
cattaattaaata

SEQ ID NO: 85489 - DNA, 13 bp, Artificial Sequence
  Oligonucleotide for detection of SNP TSC0021484
gttgatatattag

SEQ ID NO: 85490 - DNA, 13 bp, Artificial Sequence
  Oligonucleotide for detection of SNP TSC0021484
ctaatatatcaac

SEQ ID NO: 85491 - DNA, 13 bp, Artificial Sequence
  Oligonucleotide for detection of SNP TSC0021484
gttgatgtattag

SEQ ID NO: 85492 - DNA, 13 bp, Artificial Sequence
  Oligonucleotide for detection of SNP TSC0021484
ctaatacatcaac

SEQ ID NO: 85493 - DNA, 13 bp, Artificial Sequence
  Oligonucleotide for detection of SNP TSC0021484
gttgacgtattag

SEQ ID NO: 85494 - DNA, 13 bp, Artificial Sequence
  Oligonucleotide for detection of SNP TSC0021484
ctaatacgtcaac

SEQ ID NO: 85495 - DNA, 13 bp, Artificial Sequence
  Oligonucleotide for detection of SNP TSC0021484
ttaatatgttaay

SEQ ID NO: 85496 - DNA, 13 bp, Artificial Sequence
  Oligonucleotide for detection of SNP TSC0021484
rttaacatattaa

SEQ ID NO: 85497 - DNA, 13 bp, Artificial Sequence
  Oligonucleotide for detection of SNP TSC0021484
ttaatacgttaay

SEQ ID NO: 85498 - DNA, 13 bp, Artificial Sequence
  Oligonucleotide for detection of SNP TSC0021484
rttaacgtattaa

SEQ ID NO: 85499 - DNA, 13 bp, Artificial Sequence
  Oligonucleotide for detection of SNP TSC0021486
taatgatggtttt

SEQ ID NO: 85500 - DNA, 13 bp, Artificial Sequence
  Oligonucleotide for detection of SNP TSC0021486
aaaaccatcatta

SEQ ID NO: 85501 - DNA, 13 bp, Artificial Sequence
  Oligonucleotide for detection of SNP TSC0021486
taatgacggtttt

SEQ ID NO: 85502 - DNA, 13 bp, Artificial Sequence
  Oligonucleotide for detection of SNP TSC0021486
aaaaccgtcatta

SEQ ID NO: 85503 - DNA, 13 bp, Artificial Sequence
  Oligonucleotide for detection of SNP TSC0021486
aaaattgttattg

SEQ ID NO: 85504 - DNA, 13 bp, Artificial Sequence
  Oligonucleotide for detection of SNP TSC0021486
caataacaatttt

SEQ ID NO: 85505 - DNA, 13 bp, Artificial Sequence
  Oligonucleotide for detection of SNP TSC0021486
aaaattattattg

SEQ ID NO: 85506 - DNA, 13 bp, Artificial Sequence
  Oligonucleotide for detection of SNP TSC0021486
caataataatttt

SEQ ID NO: 85507 - DNA, 13 bp, Artificial Sequence
  Oligonucleotide for detection of SNP TSC0021486
aaaatcgttattg

SEQ ID NO: 85508 - DNA, 13 bp, Artificial Sequence
  Oligonucleotide for detection of SNP TSC0021486
caataacgatttt

SEQ ID NO: 85509 - DNA, 13 bp, Artificial Sequence
  Oligonucleotide for detection of SNP TSC0021487
gttaatgtaaaaa

SEQ ID NO: 85510 - DNA, 13 bp, Artificial Sequence
  Oligonucleotide for detection of SNP TSC0021487
tttttacattaac

SEQ ID NO: 85511 - DNA, 13 bp, Artificial Sequence
  Oligonucleotide for detection of SNP TSC0021487
gttaatataaaaa

SEQ ID NO: 85512 - DNA, 13 bp, Artificial Sequence
  Oligonucleotide for detection of SNP TSC0021487
tttttatattaac

SEQ ID NO: 85513 - DNA, 13 bp, Artificial Sequence
  Oligonucleotide for detection of SNP TSC0021488
tttattgttagat

SEQ ID NO: 85514 - DNA, 13 bp, Artificial Sequence
  Oligonucleotide for detection of SNP TSC0021488
atctaacaataaa

SEQ ID NO: 85515 - DNA, 13 bp, Artificial Sequence
  Oligonucleotide for detection of SNP TSC0021488
tttatcgttagat

SEQ ID NO: 85516 - DNA, 13 bp, Artificial Sequence
  Oligonucleotide for detection of SNP TSC0021488
atctaacgataaa

SEQ ID NO: 85517 - DNA, 13 bp, Artificial Sequence
  Oligonucleotide for detection of SNP TSC0021488
atttaatggtgag

SEQ ID NO: 85518 - DNA, 13 bp, Artificial Sequence
  Oligonucleotide for detection of SNP TSC0021488
ctcaccattaaat

SEQ ID NO: 85519 - DNA, 13 bp, Artificial Sequence
  Oligonucleotide for detection of SNP TSC0021488
atttaacggtgag

SEQ ID NO: 85520 - DNA, 13 bp, Artificial Sequence
  Oligonucleotide for detection of SNP TSC0021488
ctcaccgttaaat

SEQ ID NO: 85521 - DNA, 13 bp, Artificial Sequence
  Oligonucleotide for detection of SNP TSC0021489
aagaaagaattaa

SEQ ID NO: 85522 - DNA, 13 bp, Artificial Sequence
  Oligonucleotide for detection of SNP TSC0021489
ttaattctttctt

SEQ ID NO: 85523 - DNA, 13 bp, Artificial Sequence
  Oligonucleotide for detection of SNP TSC0021489
aagaaataattaa

SEQ ID NO: 85524 - DNA, 13 bp, Artificial Sequence
  Oligonucleotide for detection of SNP TSC0021489
ttaattatttctt

SEQ ID NO: 85525 - DNA, 13 bp, Artificial Sequence
  Oligonucleotide for detection of SNP TSC0021490
gggtataaggaaa

SEQ ID NO: 85526 - DNA, 13 bp, Artificial Sequence
  Oligonucleotide for detection of SNP TSC0021490
tttccttataccc

SEQ ID NO: 85527 - DNA, 13 bp, Artificial Sequence
  Oligonucleotide for detection of SNP TSC0021490
gggtatgaggaaa

SEQ ID NO: 85528 - DNA, 13 bp, Artificial Sequence
  Oligonucleotide for detection of SNP TSC0021490
tttcctcataccc

SEQ ID NO: 85529 - DNA, 13 bp, Artificial Sequence
  Oligonucleotide for detection of SNP TSC0021491
gtttgttggtgty

SEQ ID NO: 85530 - DNA, 13 bp, Artificial Sequence
  Oligonucleotide for detection of SNP TSC0021491
racaccaacaaac

SEQ ID NO: 85531 - DNA, 13 bp, Artificial Sequence
  Oligonucleotide for detection of SNP TSC0021491
gtttgtcggtgty

SEQ ID NO: 85532 - DNA, 13 bp, Artificial Sequence
  Oligonucleotide for detection of SNP TSC0021491
racaccgacaaac

SEQ ID NO: 85533 - DNA, 13 bp, Artificial Sequence
  Oligonucleotide for detection of SNP TSC0021491
gatattggtaggy

SEQ ID NO: 85534 - DNA, 13 bp, Artificial Sequence
  Oligonucleotide for detection of SNP TSC0021491
rcctaccaatatc

SEQ ID NO: 85535 - DNA, 13 bp, Artificial Sequence
  Oligonucleotide for detection of SNP TSC0021491
gatattagtaggy

SEQ ID NO: 85536 - DNA, 13 bp, Artificial Sequence
  Oligonucleotide for detection of SNP TSC0021491
rcctactaatatc

SEQ ID NO: 85537 - DNA, 13 bp, Artificial Sequence
  Oligonucleotide for detection of SNP TSC0021491
gatatcggtaggy

SEQ ID NO: 85538 - DNA, 13 bp, Artificial Sequence
  Oligonucleotide for detection of SNP TSC0021491
rcctaccgatatc

SEQ ID NO: 85539 - DNA, 13 bp, Artificial Sequence
  Oligonucleotide for detection of SNP TSC0021492
ggtatggtaaggg

SEQ ID NO: 85540 - DNA, 13 bp, Artificial Sequence
  Oligonucleotide for detection of SNP TSC0021492
cccttaccatacc

SEQ ID NO: 85541 - DNA, 13 bp, Artificial Sequence
  Oligonucleotide for detection of SNP TSC0021492
ggtatgataaggg

SEQ ID NO: 85542 - DNA, 13 bp, Artificial Sequence
  Oligonucleotide for detection of SNP TSC0021492
cccttatcatacc

SEQ ID NO: 85543 - DNA, 13 bp, Artificial Sequence
  Oligonucleotide for detection of SNP TSC0021495
gggtagaggatga

SEQ ID NO: 85544 - DNA, 13 bp, Artificial Sequence
  Oligonucleotide for detection of SNP TSC0021495
tcatcctctaccc

SEQ ID NO: 85545 - DNA, 13 bp, Artificial Sequence
  Oligonucleotide for detection of SNP TSC0021495
gggtaggggatga

SEQ ID NO: 85546 - DNA, 13 bp, Artificial Sequence
  Oligonucleotide for detection of SNP TSC0021495
tcatcccctaccc

SEQ ID NO: 85547 - DNA, 13 bp, Artificial Sequence
  Oligonucleotide for detection of SNP TSC0021496
aagagataatttt

SEQ ID NO: 85548 - DNA, 13 bp, Artificial Sequence
  Oligonucleotide for detection of SNP TSC0021496
aaaattatctctt

SEQ ID NO: 85549 - DNA, 13 bp, Artificial Sequence
  Oligonucleotide for detection of SNP TSC0021496
aagagagaatttt

SEQ ID NO: 85550 - DNA, 13 bp, Artificial Sequence
  Oligonucleotide for detection of SNP TSC0021496
aaaattctctctt

SEQ ID NO: 85551 - DNA, 13 bp, Artificial Sequence
  Oligonucleotide for detection of SNP TSC0021497
tgtaatatgatat

SEQ ID NO: 85552 - DNA, 13 bp, Artificial Sequence
  Oligonucleotide for detection of SNP TSC0021497
atatcatattaca

SEQ ID NO: 85553 - DNA, 13 bp, Artificial Sequence
  Oligonucleotide for detection of SNP TSC0021497
tgtaatgtgatat

SEQ ID NO: 85554 - DNA, 13 bp, Artificial Sequence
  Oligonucleotide for detection of SNP TSC0021497
atatcacattaca

SEQ ID NO: 85555 - DNA, 13 bp, Artificial Sequence
  Oligonucleotide for detection of SNP TSC0021497
tgtaatacgatat

SEQ ID NO: 85556 - DNA, 13 bp, Artificial Sequence
  Oligonucleotide for detection of SNP TSC0021497
atatcgtattaca

SEQ ID NO: 85557 - DNA, 13 bp, Artificial Sequence
  Oligonucleotide for detection of SNP TSC0021497
tgtaatgcgatat

SEQ ID NO: 85558 - DNA, 13 bp, Artificial Sequence
  Oligonucleotide for detection of SNP TSC0021497
atatcgcattaca

SEQ ID NO: 85559 - DNA, 13 bp, Artificial Sequence
  Oligonucleotide for detection of SNP TSC0021504
tgatatgagtttt

SEQ ID NO: 85560 - DNA, 13 bp, Artificial Sequence
  Oligonucleotide for detection of SNP TSC0021504
aaaactcatatca

SEQ ID NO: 85561 - DNA, 13 bp, Artificial Sequence
  Oligonucleotide for detection of SNP TSC0021504
tgatattagtttt

SEQ ID NO: 85562 - DNA, 13 bp, Artificial Sequence
  Oligonucleotide for detection of SNP TSC0021504
aaaactaatatca

SEQ ID NO: 85563 - DNA, 13 bp, Artificial Sequence
  Oligonucleotide for detection of SNP TSC0021504
aaaatttatgtta

SEQ ID NO: 85564 - DNA, 13 bp, Artificial Sequence
  Oligonucleotide for detection of SNP TSC0021504
taacataaatttt

SEQ ID NO: 85565 - DNA, 13 bp, Artificial Sequence
  Oligonucleotide for detection of SNP TSC0021504
aaaattaatgtta

SEQ ID NO: 85566 - DNA, 13 bp, Artificial Sequence
  Oligonucleotide for detection of SNP TSC0021504
taacattaatttt

SEQ ID NO: 85567 - DNA, 13 bp, Artificial Sequence
  Oligonucleotide for detection of SNP TSC0021505
agtggtgagtaty

SEQ ID NO: 85568 - DNA, 13 bp, Artificial Sequence
  Oligonucleotide for detection of SNP TSC0021505
ratactcaccact

SEQ ID NO: 85569 - DNA, 13 bp, Artificial Sequence
  Oligonucleotide for detection of SNP TSC0021505
agtggtaagtaty

SEQ ID NO: 85570 - DNA, 13 bp, Artificial Sequence
  Oligonucleotide for detection of SNP TSC0021505
ratacttaccact

SEQ ID NO: 85571 - DNA, 13 bp, Artificial Sequence
  Oligonucleotide for detection of SNP TSC0021507
aatattgtgagta

SEQ ID NO: 85572 - DNA, 13 bp, Artificial Sequence
  Oligonucleotide for detection of SNP TSC0021507
tactcacaatatt

SEQ ID NO: 85573 - DNA, 13 bp, Artificial Sequence
  Oligonucleotide for detection of SNP TSC0021507
aatattttgagta

SEQ ID NO: 85574 - DNA, 13 bp, Artificial Sequence
  Oligonucleotide for detection of SNP TSC0021507
tactcaaaatatt

SEQ ID NO: 85575 - DNA, 13 bp, Artificial Sequence
  Oligonucleotide for detection of SNP TSC0021507
tatttataatatt

SEQ ID NO: 85576 - DNA, 13 bp, Artificial Sequence
  Oligonucleotide for detection of SNP TSC0021507
aatattataaata

SEQ ID NO: 85577 - DNA, 13 bp, Artificial Sequence
  Oligonucleotide for detection of SNP TSC0021507
tatttaaaatatt

SEQ ID NO: 85578 - DNA, 13 bp, Artificial Sequence
  Oligonucleotide for detection of SNP TSC0021507
aatattttaaata

SEQ ID NO: 85579 - DNA, 13 bp, Artificial Sequence
  Oligonucleotide for detection of SNP TSC0021508
taattgggtttta

SEQ ID NO: 85580 - DNA, 13 bp, Artificial Sequence
  Oligonucleotide for detection of SNP TSC0021508
taaaacccaatta

SEQ ID NO: 85581 - DNA, 13 bp, Artificial Sequence
  Oligonucleotide for detection of SNP TSC0021508
taattgtgtttta

SEQ ID NO: 85582 - DNA, 13 bp, Artificial Sequence
  Oligonucleotide for detection of SNP TSC0021508
taaaacacaatta

SEQ ID NO: 85583 - DNA, 13 bp, Artificial Sequence
  Oligonucleotide for detection of SNP TSC0021508
taatcgggtttta

SEQ ID NO: 85584 - DNA, 13 bp, Artificial Sequence
  Oligonucleotide for detection of SNP TSC0021508
taaaacccgatta

SEQ ID NO: 85585 - DNA, 13 bp, Artificial Sequence
  Oligonucleotide for detection of SNP TSC0021508
taatcgtgtttta

SEQ ID NO: 85586 - DNA, 13 bp, Artificial Sequence
  Oligonucleotide for detection of SNP TSC0021508
taaaacacgatta

SEQ ID NO: 85587 - DNA, 13 bp, Artificial Sequence
  Oligonucleotide for detection of SNP TSC0021508
tggagtttgatta

SEQ ID NO: 85588 - DNA, 13 bp, Artificial Sequence
  Oligonucleotide for detection of SNP TSC0021508
taatcaaactcca

SEQ ID NO: 85589 - DNA, 13 bp, Artificial Sequence
  Oligonucleotide for detection of SNP TSC0021508
tggagtatgatta

SEQ ID NO: 85590 - DNA, 13 bp, Artificial Sequence
  Oligonucleotide for detection of SNP TSC0021508
taatcatactcca

SEQ ID NO: 85591 - DNA, 13 bp, Artificial Sequence
  Oligonucleotide for detection of SNP TSC0021508
tggagttcgatta

SEQ ID NO: 85592 - DNA, 13 bp, Artificial Sequence
  Oligonucleotide for detection of SNP TSC0021508
taatcgaactcca

SEQ ID NO: 85593 - DNA, 13 bp, Artificial Sequence
  Oligonucleotide for detection of SNP TSC0021508
tggagtacgatta

SEQ ID NO: 85594 - DNA, 13 bp, Artificial Sequence
  Oligonucleotide for detection of SNP TSC0021508
taatcgtactcca

SEQ ID NO: 85595 - DNA, 13 bp, Artificial Sequence
  Oligonucleotide for detection of SNP TSC0021509
tttatatgtttty

SEQ ID NO: 85596 - DNA, 13 bp, Artificial Sequence
  Oligonucleotide for detection of SNP TSC0021509
raaaacatataaa

SEQ ID NO: 85597 - DNA, 13 bp, Artificial Sequence
  Oligonucleotide for detection of SNP TSC0021509
tttatacgtttty

SEQ ID NO: 85598 - DNA, 13 bp, Artificial Sequence
  Oligonucleotide for detection of SNP TSC0021509
raaaacgtataaa

SEQ ID NO: 85599 - DNA, 13 bp, Artificial Sequence
  Oligonucleotide for detection of SNP TSC0021509
ggaaatgtatgga

SEQ ID NO: 85600 - DNA, 13 bp, Artificial Sequence
  Oligonucleotide for detection of SNP TSC0021509
tccatacatttcc

SEQ ID NO: 85601 - DNA, 13 bp, Artificial Sequence
  Oligonucleotide for detection of SNP TSC0021509
ggaaatatatgga

SEQ ID NO: 85602 - DNA, 13 bp, Artificial Sequence
  Oligonucleotide for detection of SNP TSC0021509
tccatatatttcc

SEQ ID NO: 85603 - DNA, 13 bp, Artificial Sequence
  Oligonucleotide for detection of SNP TSC0021509
ggaaacgtatgga

SEQ ID NO: 85604 - DNA, 13 bp, Artificial Sequence
  Oligonucleotide for detection of SNP TSC0021509
tccatacgtttcc

SEQ ID NO: 85605 - DNA, 13 bp, Artificial Sequence
  Oligonucleotide for detection of SNP TSC0021513
aatatgtgagaga

SEQ ID NO: 85606 - DNA, 13 bp, Artificial Sequence
  Oligonucleotide for detection of SNP TSC0021513
tctctcacatatt

SEQ ID NO: 85607 - DNA, 13 bp, Artificial Sequence
  Oligonucleotide for detection of SNP TSC0021513
aatatgcgagaga

SEQ ID NO: 85608 - DNA, 13 bp, Artificial Sequence
  Oligonucleotide for detection of SNP TSC0021513
tctctcgcatatt

SEQ ID NO: 85609 - DNA, 13 bp, Artificial Sequence
  Oligonucleotide for detection of SNP TSC0021513
ttttttatatgtt

SEQ ID NO: 85610 - DNA, 13 bp, Artificial Sequence
  Oligonucleotide for detection of SNP TSC0021513
aacatataaaaaa

SEQ ID NO: 85611 - DNA, 13 bp, Artificial Sequence
  Oligonucleotide for detection of SNP TSC0021513
tttttcgtatgtt

SEQ ID NO: 85612 - DNA, 13 bp, Artificial Sequence
  Oligonucleotide for detection of SNP TSC0021513
aacatacgaaaaa

SEQ ID NO: 85613 - DNA, 13 bp, Artificial Sequence
  Oligonucleotide for detection of SNP TSC0021514
attgagtgttagy

SEQ ID NO: 85614 - DNA, 13 bp, Artificial Sequence
  Oligonucleotide for detection of SNP TSC0021514
rctaacactcaat

SEQ ID NO: 85615 - DNA, 13 bp, Artificial Sequence
  Oligonucleotide for detection of SNP TSC0021514
attgagcgttagy

SEQ ID NO: 85616 - DNA, 13 bp, Artificial Sequence
  Oligonucleotide for detection of SNP TSC0021514
rctaacgctcaat

SEQ ID NO: 85617 - DNA, 13 bp, Artificial Sequence
  Oligonucleotide for detection of SNP TSC0021515
ttgaagggaggta

SEQ ID NO: 85618 - DNA, 13 bp, Artificial Sequence
  Oligonucleotide for detection of SNP TSC0021515
tacctcccttcaa

SEQ ID NO: 85619 - DNA, 13 bp, Artificial Sequence
  Oligonucleotide for detection of SNP TSC0021515
ttgaagagaggta

SEQ ID NO: 85620 - DNA, 13 bp, Artificial Sequence
  Oligonucleotide for detection of SNP TSC0021515
tacctctcttcaa

SEQ ID NO: 85621 - DNA, 13 bp, Artificial Sequence
  Oligonucleotide for detection of SNP TSC0021522
tattataatgggt

SEQ ID NO: 85622 - DNA, 13 bp, Artificial Sequence
  Oligonucleotide for detection of SNP TSC0021522
acccattataata

SEQ ID NO: 85623 - DNA, 13 bp, Artificial Sequence
  Oligonucleotide for detection of SNP TSC0021522
tattatgatgggt

SEQ ID NO: 85624 - DNA, 13 bp, Artificial Sequence
  Oligonucleotide for detection of SNP TSC0021522
acccatcataata

SEQ ID NO: 85625 - DNA, 13 bp, Artificial Sequence
  Oligonucleotide for detection of SNP TSC0021522
tattacgatgggt

SEQ ID NO: 85626 - DNA, 13 bp, Artificial Sequence
  Oligonucleotide for detection of SNP TSC0021522
acccatcgtaata

SEQ ID NO: 85627 - DNA, 13 bp, Artificial Sequence
  Oligonucleotide for detection of SNP TSC0021522
atttattgtaatg

SEQ ID NO: 85628 - DNA, 13 bp, Artificial Sequence
  Oligonucleotide for detection of SNP TSC0021522
cattacaataaat

SEQ ID NO: 85629 - DNA, 13 bp, Artificial Sequence
  Oligonucleotide for detection of SNP TSC0021522
atttatcgtaatg

SEQ ID NO: 85630 - DNA, 13 bp, Artificial Sequence
  Oligonucleotide for detection of SNP TSC0021522
cattacgataaat

SEQ ID NO: 85631 - DNA, 13 bp, Artificial Sequence
  Oligonucleotide for detection of SNP TSC0021525
gattggtttggty

SEQ ID NO: 85632 - DNA, 13 bp, Artificial Sequence
  Oligonucleotide for detection of SNP TSC0021525
raccaaaccaatc

SEQ ID NO: 85633 - DNA, 13 bp, Artificial Sequence
  Oligonucleotide for detection of SNP TSC0021525
gattgggttggty

SEQ ID NO: 85634 - DNA, 13 bp, Artificial Sequence
  Oligonucleotide for detection of SNP TSC0021525
raccaacccaatc

SEQ ID NO: 85635 - DNA, 13 bp, Artificial Sequence
  Oligonucleotide for detection of SNP TSC0021525
gattaggttaaty

SEQ ID NO: 85636 - DNA, 13 bp, Artificial Sequence
  Oligonucleotide for detection of SNP TSC0021525
rattaacctaatc

SEQ ID NO: 85637 - DNA, 13 bp, Artificial Sequence
  Oligonucleotide for detection of SNP TSC0021525
gattagtttaaty

SEQ ID NO: 85638 - DNA, 13 bp, Artificial Sequence
  Oligonucleotide for detection of SNP TSC0021525
rattaaactaatc

SEQ ID NO: 85639 - DNA, 13 bp, Artificial Sequence
  Oligonucleotide for detection of SNP TSC0021527
attatgggtagga

SEQ ID NO: 85640 - DNA, 13 bp, Artificial Sequence
  Oligonucleotide for detection of SNP TSC0021527
tcctacccataat

SEQ ID NO: 85641 - DNA, 13 bp, Artificial Sequence
  Oligonucleotide for detection of SNP TSC0021527
attatgagtagga

SEQ ID NO: 85642 - DNA, 13 bp, Artificial Sequence
  Oligonucleotide for detection of SNP TSC0021527
tcctactcataat

SEQ ID NO: 85643 - DNA, 13 bp, Artificial Sequence
  Oligonucleotide for detection of SNP TSC0021528
tgattttgaatty

SEQ ID NO: 85644 - DNA, 13 bp, Artificial Sequence
  Oligonucleotide for detection of SNP TSC0021528
raattcaaaatca

SEQ ID NO: 85645 - DNA, 13 bp, Artificial Sequence
  Oligonucleotide for detection of SNP TSC0021528
tgatttggaatty

SEQ ID NO: 85646 - DNA, 13 bp, Artificial Sequence
  Oligonucleotide for detection of SNP TSC0021528
raattccaaatca

SEQ ID NO: 85647 - DNA, 13 bp, Artificial Sequence
  Oligonucleotide for detection of SNP TSC0021528
tgatttcgaatty

SEQ ID NO: 85648 - DNA, 13 bp, Artificial Sequence
  Oligonucleotide for detection of SNP TSC0021528
raattcgaaatca

SEQ ID NO: 85649 - DNA, 13 bp, Artificial Sequence
  Oligonucleotide for detection of SNP TSC0021528
tgattcggaatty

SEQ ID NO: 85650 - DNA, 13 bp, Artificial Sequence
  Oligonucleotide for detection of SNP TSC0021528
raattccgaatca

SEQ ID NO: 85651 - DNA, 13 bp, Artificial Sequence
  Oligonucleotide for detection of SNP TSC0021528
gaatttggggtta

SEQ ID NO: 85652 - DNA, 13 bp, Artificial Sequence
  Oligonucleotide for detection of SNP TSC0021528
taaccccaaattc

SEQ ID NO: 85653 - DNA, 13 bp, Artificial Sequence
  Oligonucleotide for detection of SNP TSC0021528
gaattttgggtta

SEQ ID NO: 85654 - DNA, 13 bp, Artificial Sequence
  Oligonucleotide for detection of SNP TSC0021528
taacccaaaattc

SEQ ID NO: 85655 - DNA, 13 bp, Artificial Sequence
  Oligonucleotide for detection of SNP TSC0021528
gaattcggggtta

SEQ ID NO: 85656 - DNA, 13 bp, Artificial Sequence
  Oligonucleotide for detection of SNP TSC0021528
taaccccgaattc

SEQ ID NO: 85657 - DNA, 13 bp, Artificial Sequence
  Oligonucleotide for detection of SNP TSC0021528
gaatttcgggtta

SEQ ID NO: 85658 - DNA, 13 bp, Artificial Sequence
  Oligonucleotide for detection of SNP TSC0021528
taacccgaaattc

SEQ ID NO: 85659 - DNA, 13 bp, Artificial Sequence
  Oligonucleotide for detection of SNP TSC0021530
tttgggatttatg

SEQ ID NO: 85660 - DNA, 13 bp, Artificial Sequence
  Oligonucleotide for detection of SNP TSC0021530
cataaatcccaaa

SEQ ID NO: 85661 - DNA, 13 bp, Artificial Sequence
  Oligonucleotide for detection of SNP TSC0021530
tttgggttttatg

SEQ ID NO: 85662 - DNA, 13 bp, Artificial Sequence
  Oligonucleotide for detection of SNP TSC0021530
cataaaacccaaa

SEQ ID NO: 85663 - DNA, 13 bp, Artificial Sequence
  Oligonucleotide for detection of SNP TSC0021530
tatagattttagg

SEQ ID NO: 85664 - DNA, 13 bp, Artificial Sequence
  Oligonucleotide for detection of SNP TSC0021530
cctaaaatctata

SEQ ID NO: 85665 - DNA, 13 bp, Artificial Sequence
  Oligonucleotide for detection of SNP TSC0021530
tatagagtttagg

SEQ ID NO: 85666 - DNA, 13 bp, Artificial Sequence
  Oligonucleotide for detection of SNP TSC0021530
cctaaactctata

SEQ ID NO: 85667 - DNA, 13 bp, Artificial Sequence
  Oligonucleotide for detection of SNP TSC0021531
taaattgttgggy

SEQ ID NO: 85668 - DNA, 13 bp, Artificial Sequence
  Oligonucleotide for detection of SNP TSC0021531
rcccaacaattta

SEQ ID NO: 85669 - DNA, 13 bp, Artificial Sequence
  Oligonucleotide for detection of SNP TSC0021531
taaatttttgggy

SEQ ID NO: 85670 - DNA, 13 bp, Artificial Sequence
  Oligonucleotide for detection of SNP TSC0021531
rcccaaaaattta

SEQ ID NO: 85671 - DNA, 13 bp, Artificial Sequence
  Oligonucleotide for detection of SNP TSC0021531
gtttagtagtttg

SEQ ID NO: 85672 - DNA, 13 bp, Artificial Sequence
  Oligonucleotide for detection of SNP TSC0021531
caaactactaaac

SEQ ID NO: 85673 - DNA, 13 bp, Artificial Sequence
  Oligonucleotide for detection of SNP TSC0021531
gtttagaagtttg

SEQ ID NO: 85674 - DNA, 13 bp, Artificial Sequence
  Oligonucleotide for detection of SNP TSC0021531
caaacttctaaac

SEQ ID NO: 85675 - DNA, 13 bp, Artificial Sequence
  Oligonucleotide for detection of SNP TSC0021532
gggttttgggttt

SEQ ID NO: 85676 - DNA, 13 bp, Artificial Sequence
  Oligonucleotide for detection of SNP TSC0021532
aaacccaaaaccc

SEQ ID NO: 85677 - DNA, 13 bp, Artificial Sequence
  Oligonucleotide for detection of SNP TSC0021532
gggtttcgggttt

SEQ ID NO: 85678 - DNA, 13 bp, Artificial Sequence
  Oligonucleotide for detection of SNP TSC0021532
aaacccgaaaccc

SEQ ID NO: 85679 - DNA, 13 bp, Artificial Sequence
  Oligonucleotide for detection of SNP TSC0021532
agatttgaggtty

SEQ ID NO: 85680 - DNA, 13 bp, Artificial Sequence
  Oligonucleotide for detection of SNP TSC0021532
raacctcaaatct

SEQ ID NO: 85681 - DNA, 13 bp, Artificial Sequence
  Oligonucleotide for detection of SNP TSC0021532
agatttaaggtty

SEQ ID NO: 85682 - DNA, 13 bp, Artificial Sequence
  Oligonucleotide for detection of SNP TSC0021532
raaccttaaatct

SEQ ID NO: 85683 - DNA, 13 bp, Artificial Sequence
  Oligonucleotide for detection of SNP TSC0021532
agattcgaggtty

SEQ ID NO: 85684 - DNA, 13 bp, Artificial Sequence
  Oligonucleotide for detection of SNP TSC0021532
raacctcgaatct

SEQ ID NO: 85685 - DNA, 13 bp, Artificial Sequence
  Oligonucleotide for detection of SNP TSC0021533
tagttttgtttgg

SEQ ID NO: 85686 - DNA, 13 bp, Artificial Sequence
  Oligonucleotide for detection of SNP TSC0021533
ccaaacaaaacta

SEQ ID NO: 85687 - DNA, 13 bp, Artificial Sequence
  Oligonucleotide for detection of SNP TSC0021533
tagtttcgtttgg

SEQ ID NO: 85688 - DNA, 13 bp, Artificial Sequence
  Oligonucleotide for detection of SNP TSC0021533
ccaaacgaaacta

SEQ ID NO: 85689 - DNA, 13 bp, Artificial Sequence
  Oligonucleotide for detection of SNP TSC0021533
ttagatggggttg

SEQ ID NO: 85690 - DNA, 13 bp, Artificial Sequence
  Oligonucleotide for detection of SNP TSC0021533
caaccccatctaa

SEQ ID NO: 85691 - DNA, 13 bp, Artificial Sequence
  Oligonucleotide for detection of SNP TSC0021533
ttagatagggttg

SEQ ID NO: 85692 - DNA, 13 bp, Artificial Sequence
  Oligonucleotide for detection of SNP TSC0021533
caaccctatctaa

SEQ ID NO: 85693 - DNA, 13 bp, Artificial Sequence
  Oligonucleotide for detection of SNP TSC0021533
ttagacggggttg

SEQ ID NO: 85694 - DNA, 13 bp, Artificial Sequence
  Oligonucleotide for detection of SNP TSC0021533
caaccccgtctaa

SEQ ID NO: 85695 - DNA, 13 bp, Artificial Sequence
  Oligonucleotide for detection of SNP TSC0021534
agggttggagaaa

SEQ ID NO: 85696 - DNA, 13 bp, Artificial Sequence
  Oligonucleotide for detection of SNP TSC0021534
tttctccaaccct

SEQ ID NO: 85697 - DNA, 13 bp, Artificial Sequence
  Oligonucleotide for detection of SNP TSC0021534
agggttagagaaa

SEQ ID NO: 85698 - DNA, 13 bp, Artificial Sequence
  Oligonucleotide for detection of SNP TSC0021534
tttctctaaccct

SEQ ID NO: 85699 - DNA, 13 bp, Artificial Sequence
  Oligonucleotide for detection of SNP TSC0021535
ggggagtggaggy

SEQ ID NO: 85700 - DNA, 13 bp, Artificial Sequence
  Oligonucleotide for detection of SNP TSC0021535
rcctccactcccc

SEQ ID NO: 85701 - DNA, 13 bp, Artificial Sequence
  Oligonucleotide for detection of SNP TSC0021535
ggggagcggaggy

SEQ ID NO: 85702 - DNA, 13 bp, Artificial Sequence
  Oligonucleotide for detection of SNP TSC0021535
rcctccgctcccc

SEQ ID NO: 85703 - DNA, 13 bp, Artificial Sequence
  Oligonucleotide for detection of SNP TSC0021536
ttttataaaatty

SEQ ID NO: 85704 - DNA, 13 bp, Artificial Sequence
  Oligonucleotide for detection of SNP TSC0021536
raattttataaaa

SEQ ID NO: 85705 - DNA, 13 bp, Artificial Sequence
  Oligonucleotide for detection of SNP TSC0021536
ttttatgaaatty

SEQ ID NO: 85706 - DNA, 13 bp, Artificial Sequence
  Oligonucleotide for detection of SNP TSC0021536
raatttcataaaa

SEQ ID NO: 85707 - DNA, 13 bp, Artificial Sequence
  Oligonucleotide for detection of SNP TSC0021536
ttttacgaaatty

SEQ ID NO: 85708 - DNA, 13 bp, Artificial Sequence
  Oligonucleotide for detection of SNP TSC0021536
raatttcgtaaaa

SEQ ID NO: 85709 - DNA, 13 bp, Artificial Sequence
  Oligonucleotide for detection of SNP TSC0021536
gagttttgtgaga

SEQ ID NO: 85710 - DNA, 13 bp, Artificial Sequence
  Oligonucleotide for detection of SNP TSC0021536
tctcacaaaactc

SEQ ID NO: 85711 - DNA, 13 bp, Artificial Sequence
  Oligonucleotide for detection of SNP TSC0021536
gagtttcgtgaga

SEQ ID NO: 85712 - DNA, 13 bp, Artificial Sequence
  Oligonucleotide for detection of SNP TSC0021536
tctcacgaaactc

SEQ ID NO: 85713 - DNA, 13 bp, Artificial Sequence
  Oligonucleotide for detection of SNP TSC0021538
atattgattaata

SEQ ID NO: 85714 - DNA, 13 bp, Artificial Sequence
  Oligonucleotide for detection of SNP TSC0021538
tattaatcaatat

SEQ ID NO: 85715 - DNA, 13 bp, Artificial Sequence
  Oligonucleotide for detection of SNP TSC0021538
atattggttaata

SEQ ID NO: 85716 - DNA, 13 bp, Artificial Sequence
  Oligonucleotide for detection of SNP TSC0021538
tattaaccaatat

SEQ ID NO: 85717 - DNA, 13 bp, Artificial Sequence
  Oligonucleotide for detection of SNP TSC0021539
gtgtaggtaggtg

SEQ ID NO: 85718 - DNA, 13 bp, Artificial Sequence
  Oligonucleotide for detection of SNP TSC0021539
cacctacctacac

SEQ ID NO: 85719 - DNA, 13 bp, Artificial Sequence
  Oligonucleotide for detection of SNP TSC0021539
gtgtagataggtg

SEQ ID NO: 85720 - DNA, 13 bp, Artificial Sequence
  Oligonucleotide for detection of SNP TSC0021539
cacctatctacac

SEQ ID NO: 85721 - DNA, 13 bp, Artificial Sequence
  Oligonucleotide for detection of SNP TSC0021540
ttataaaagatay

SEQ ID NO: 85722 - DNA, 13 bp, Artificial Sequence
  Oligonucleotide for detection of SNP TSC0021540
rtatcttttataa

SEQ ID NO: 85723 - DNA, 13 bp, Artificial Sequence
  Oligonucleotide for detection of SNP TSC0021540
ttataatagatay

SEQ ID NO: 85724 - DNA, 13 bp, Artificial Sequence
  Oligonucleotide for detection of SNP TSC0021540
rtatctattataa

SEQ ID NO: 85725 - DNA, 13 bp, Artificial Sequence
  Oligonucleotide for detection of SNP TSC0021540
gtgttttttgtgg

SEQ ID NO: 85726 - DNA, 13 bp, Artificial Sequence
  Oligonucleotide for detection of SNP TSC0021540
ccacaaaaaacac

SEQ ID NO: 85727 - DNA, 13 bp, Artificial Sequence
  Oligonucleotide for detection of SNP TSC0021540
gtgtttgttgtgg

SEQ ID NO: 85728 - DNA, 13 bp, Artificial Sequence
  Oligonucleotide for detection of SNP TSC0021540
ccacaacaaacac

SEQ ID NO: 85729 - DNA, 13 bp, Artificial Sequence
  Oligonucleotide for detection of SNP TSC0021541
taagttaattggg

SEQ ID NO: 85730 - DNA, 13 bp, Artificial Sequence
  Oligonucleotide for detection of SNP TSC0021541
cccaattaactta

SEQ ID NO: 85731 - DNA, 13 bp, Artificial Sequence
  Oligonucleotide for detection of SNP TSC0021541
taagttgattggg

SEQ ID NO: 85732 - DNA, 13 bp, Artificial Sequence
  Oligonucleotide for detection of SNP TSC0021541
cccaatcaactta

SEQ ID NO: 85733 - DNA, 13 bp, Artificial Sequence
  Oligonucleotide for detection of SNP TSC0021541
taagttaatcggg

SEQ ID NO: 85734 - DNA, 13 bp, Artificial Sequence
  Oligonucleotide for detection of SNP TSC0021541
cccgattaactta

SEQ ID NO: 85735 - DNA, 13 bp, Artificial Sequence
  Oligonucleotide for detection of SNP TSC0021541
taagtcgattggg

SEQ ID NO: 85736 - DNA, 13 bp, Artificial Sequence
  Oligonucleotide for detection of SNP TSC0021541
cccaatcgactta

SEQ ID NO: 85737 - DNA, 13 bp, Artificial Sequence
  Oligonucleotide for detection of SNP TSC0021541
taagttgatcggg

SEQ ID NO: 85738 - DNA, 13 bp, Artificial Sequence
  Oligonucleotide for detection of SNP TSC0021541
cccgatcaactta

SEQ ID NO: 85739 - DNA, 13 bp, Artificial Sequence
  Oligonucleotide for detection of SNP TSC0021541
taagtcgatcggg

SEQ ID NO: 85740 - DNA, 13 bp, Artificial Sequence
  Oligonucleotide for detection of SNP TSC0021541
cccgatcgactta

SEQ ID NO: 85741 - DNA, 13 bp, Artificial Sequence
  Oligonucleotide for detection of SNP TSC0021541
tttggttgatttg

SEQ ID NO: 85742 - DNA, 13 bp, Artificial Sequence
  Oligonucleotide for detection of SNP TSC0021541
caaatcaaccaaa

SEQ ID NO: 85743 - DNA, 13 bp, Artificial Sequence
  Oligonucleotide for detection of SNP TSC0021541
ttcggttgatttg

SEQ ID NO: 85744 - DNA, 13 bp, Artificial Sequence
  Oligonucleotide for detection of SNP TSC0021541
caaatcaaccgaa

SEQ ID NO: 85745 - DNA, 13 bp, Artificial Sequence
  Oligonucleotide for detection of SNP TSC0021541
tttggtcgatttg

SEQ ID NO: 85746 - DNA, 13 bp, Artificial Sequence
  Oligonucleotide for detection of SNP TSC0021541
caaatcgaccaaa

SEQ ID NO: 85747 - DNA, 13 bp, Artificial Sequence
  Oligonucleotide for detection of SNP TSC0021541
ttcggtcgatttg

SEQ ID NO: 85748 - DNA, 13 bp, Artificial Sequence
  Oligonucleotide for detection of SNP TSC0021541
caaatcgaccgaa

SEQ ID NO: 85749 - DNA, 13 bp, Artificial Sequence
  Oligonucleotide for detection of SNP TSC0021544
aattgggtaatty

SEQ ID NO: 85750 - DNA, 13 bp, Artificial Sequence
  Oligonucleotide for detection of SNP TSC0021544
raattacccaatt

SEQ ID NO: 85751 - DNA, 13 bp, Artificial Sequence
  Oligonucleotide for detection of SNP TSC0021544
aattggttaatty

SEQ ID NO: 85752 - DNA, 13 bp, Artificial Sequence
  Oligonucleotide for detection of SNP TSC0021544
raattaaccaatt

SEQ ID NO: 85753 - DNA, 13 bp, Artificial Sequence
  Oligonucleotide for detection of SNP TSC0021544
gagttgtttagtt

SEQ ID NO: 85754 - DNA, 13 bp, Artificial Sequence
  Oligonucleotide for detection of SNP TSC0021544
aactaaacaactc

SEQ ID NO: 85755 - DNA, 13 bp, Artificial Sequence
  Oligonucleotide for detection of SNP TSC0021544
gagttgattagtt

SEQ ID NO: 85756 - DNA, 13 bp, Artificial Sequence
  Oligonucleotide for detection of SNP TSC0021544
aactaatcaactc

SEQ ID NO: 85757 - DNA, 13 bp, Artificial Sequence
  Oligonucleotide for detection of SNP TSC0021545
tttagatagtttt

SEQ ID NO: 85758 - DNA, 13 bp, Artificial Sequence
  Oligonucleotide for detection of SNP TSC0021545
aaaactatctaaa

SEQ ID NO: 85759 - DNA, 13 bp, Artificial Sequence
  Oligonucleotide for detection of SNP TSC0021545
tttagagagtttt

SEQ ID NO: 85760 - DNA, 13 bp, Artificial Sequence
  Oligonucleotide for detection of SNP TSC0021545
aaaactctctaaa

SEQ ID NO: 85761 - DNA, 13 bp, Artificial Sequence
  Oligonucleotide for detection of SNP TSC0021545
aaggttgtttaaa

SEQ ID NO: 85762 - DNA, 13 bp, Artificial Sequence
  Oligonucleotide for detection of SNP TSC0021545
tttaaacaacctt

SEQ ID NO: 85763 - DNA, 13 bp, Artificial Sequence
  Oligonucleotide for detection of SNP TSC0021545
aaggttttttaaa

SEQ ID NO: 85764 - DNA, 13 bp, Artificial Sequence
  Oligonucleotide for detection of SNP TSC0021545
tttaaaaaacctt

SEQ ID NO: 85765 - DNA, 13 bp, Artificial Sequence
  Oligonucleotide for detection of SNP TSC0021549
aaaagaaaatgtt

SEQ ID NO: 85766 - DNA, 13 bp, Artificial Sequence
  Oligonucleotide for detection of SNP TSC0021549
aacattttctttt

SEQ ID NO: 85767 - DNA, 13 bp, Artificial Sequence
  Oligonucleotide for detection of SNP TSC0021549
aaaagataatgtt

SEQ ID NO: 85768 - DNA, 13 bp, Artificial Sequence
  Oligonucleotide for detection of SNP TSC0021549
aacattatctttt

SEQ ID NO: 85769 - DNA, 13 bp, Artificial Sequence
  Oligonucleotide for detection of SNP TSC0021549
agtattgtttttt

SEQ ID NO: 85770 - DNA, 13 bp, Artificial Sequence
  Oligonucleotide for detection of SNP TSC0021549
aaaaaacaatact

SEQ ID NO: 85771 - DNA, 13 bp, Artificial Sequence
  Oligonucleotide for detection of SNP TSC0021550
ggaaagggaaaty

SEQ ID NO: 85772 - DNA, 13 bp, Artificial Sequence
  Oligonucleotide for detection of SNP TSC0021550
ratttccctttcc

SEQ ID NO: 85773 - DNA, 13 bp, Artificial Sequence
  Oligonucleotide for detection of SNP TSC0021550
ggaaagtgaaaty

SEQ ID NO: 85774 - DNA, 13 bp, Artificial Sequence
  Oligonucleotide for detection of SNP TSC0021550
ratttcactttcc

SEQ ID NO: 85775 - DNA, 13 bp, Artificial Sequence
  Oligonucleotide for detection of SNP TSC0021550
ggtttttttttty

SEQ ID NO: 85776 - DNA, 13 bp, Artificial Sequence
  Oligonucleotide for detection of SNP TSC0021550
raaaaaaaaaacc

SEQ ID NO: 85777 - DNA, 13 bp, Artificial Sequence
  Oligonucleotide for detection of SNP TSC0021550
ggttttattttty

SEQ ID NO: 85778 - DNA, 13 bp, Artificial Sequence
  Oligonucleotide for detection of SNP TSC0021550
raaaaataaaacc

SEQ ID NO: 85779 - DNA, 13 bp, Artificial Sequence
  Oligonucleotide for detection of SNP TSC0021552
tagtattgtttaa

SEQ ID NO: 85780 - DNA, 13 bp, Artificial Sequence
  Oligonucleotide for detection of SNP TSC0021552
ttaaacaatacta

SEQ ID NO: 85781 - DNA, 13 bp, Artificial Sequence
  Oligonucleotide for detection of SNP TSC0021552
tagtatcgtttaa

SEQ ID NO: 85782 - DNA, 13 bp, Artificial Sequence
  Oligonucleotide for detection of SNP TSC0021552
ttaaacgatacta

SEQ ID NO: 85783 - DNA, 13 bp, Artificial Sequence
  Oligonucleotide for detection of SNP TSC0021552
ttagatgatattg

SEQ ID NO: 85784 - DNA, 13 bp, Artificial Sequence
  Oligonucleotide for detection of SNP TSC0021552
caatatcatctaa

SEQ ID NO: 85785 - DNA, 13 bp, Artificial Sequence
  Oligonucleotide for detection of SNP TSC0021552
ttagataatattg

SEQ ID NO: 85786 - DNA, 13 bp, Artificial Sequence
  Oligonucleotide for detection of SNP TSC0021552
caatattatctaa

SEQ ID NO: 85787 - DNA, 13 bp, Artificial Sequence
  Oligonucleotide for detection of SNP TSC0021552
ttagacgatattg

SEQ ID NO: 85788 - DNA, 13 bp, Artificial Sequence
  Oligonucleotide for detection of SNP TSC0021552
caatatcgtctaa

SEQ ID NO: 85789 - DNA, 13 bp, Artificial Sequence
  Oligonucleotide for detection of SNP TSC0021553
atatatatagtaa

SEQ ID NO: 85790 - DNA, 13 bp, Artificial Sequence
  Oligonucleotide for detection of SNP TSC0021553
ttactatatatat

SEQ ID NO: 85791 - DNA, 13 bp, Artificial Sequence
  Oligonucleotide for detection of SNP TSC0021553
atatatgtagtaa

SEQ ID NO: 85792 - DNA, 13 bp, Artificial Sequence
  Oligonucleotide for detection of SNP TSC0021553
ttactacatatat

SEQ ID NO: 85793 - DNA, 13 bp, Artificial Sequence
  Oligonucleotide for detection of SNP TSC0021553
atatacgtagtaa

SEQ ID NO: 85794 - DNA, 13 bp, Artificial Sequence
  Oligonucleotide for detection of SNP TSC0021553
ttactacgtatat

SEQ ID NO: 85795 - DNA, 13 bp, Artificial Sequence
  Oligonucleotide for detection of SNP TSC0021553
ttattgtgtatgt

SEQ ID NO: 85796 - DNA, 13 bp, Artificial Sequence
  Oligonucleotide for detection of SNP TSC0021553
acatacacaataa

SEQ ID NO: 85797 - DNA, 13 bp, Artificial Sequence
  Oligonucleotide for detection of SNP TSC0021553
ttattgcgtatgt

SEQ ID NO: 85798 - DNA, 13 bp, Artificial Sequence
  Oligonucleotide for detection of SNP TSC0021553
acatacgcaataa

SEQ ID NO: 85799 - DNA, 13 bp, Artificial Sequence
  Oligonucleotide for detection of SNP TSC0021555
tgttttaggggga

SEQ ID NO: 85800 - DNA, 13 bp, Artificial Sequence
  Oligonucleotide for detection of SNP TSC0021555
tccccctaaaaca

SEQ ID NO: 85801 - DNA, 13 bp, Artificial Sequence
  Oligonucleotide for detection of SNP TSC0021555
tgttttgggggga

SEQ ID NO: 85802 - DNA, 13 bp, Artificial Sequence
  Oligonucleotide for detection of SNP TSC0021555
tccccccaaaaca

SEQ ID NO: 85803 - DNA, 13 bp, Artificial Sequence
  Oligonucleotide for detection of SNP TSC0021555
tgtttcgggggga

SEQ ID NO: 85804 - DNA, 13 bp, Artificial Sequence
  Oligonucleotide for detection of SNP TSC0021555
tccccccgaaaca

SEQ ID NO: 85805 - DNA, 13 bp, Artificial Sequence
  Oligonucleotide for detection of SNP TSC0021557
ttaatagttttay

SEQ ID NO: 85806 - DNA, 13 bp, Artificial Sequence
  Oligonucleotide for detection of SNP TSC0021557
rtaaaactattaa

SEQ ID NO: 85807 - DNA, 13 bp, Artificial Sequence
  Oligonucleotide for detection of SNP TSC0021557
ttaatatttttay

SEQ ID NO: 85808 - DNA, 13 bp, Artificial Sequence
  Oligonucleotide for detection of SNP TSC0021557
rtaaaaatattaa

SEQ ID NO: 85809 - DNA, 13 bp, Artificial Sequence
  Oligonucleotide for detection of SNP TSC0021557
gtggggttattag

SEQ ID NO: 85810 - DNA, 13 bp, Artificial Sequence
  Oligonucleotide for detection of SNP TSC0021557
ctaataaccccac

SEQ ID NO: 85811 - DNA, 13 bp, Artificial Sequence
  Oligonucleotide for detection of SNP TSC0021557
gtggggatattag

SEQ ID NO: 85812 - DNA, 13 bp, Artificial Sequence
  Oligonucleotide for detection of SNP TSC0021557
ctaatatccccac

SEQ ID NO: 85813 - DNA, 13 bp, Artificial Sequence
  Oligonucleotide for detection of SNP TSC0021558
atagataatattg

SEQ ID NO: 85814 - DNA, 13 bp, Artificial Sequence
  Oligonucleotide for detection of SNP TSC0021558
caatattatctat

SEQ ID NO: 85815 - DNA, 13 bp, Artificial Sequence
  Oligonucleotide for detection of SNP TSC0021558
atagattatattg

SEQ ID NO: 85816 - DNA, 13 bp, Artificial Sequence
  Oligonucleotide for detection of SNP TSC0021558
caatataatctat

SEQ ID NO: 85817 - DNA, 13 bp, Artificial Sequence
  Oligonucleotide for detection of SNP TSC0021558
taatgttatttgt

SEQ ID NO: 85818 - DNA, 13 bp, Artificial Sequence
  Oligonucleotide for detection of SNP TSC0021558
acaaataacatta

SEQ ID NO: 85819 - DNA, 13 bp, Artificial Sequence
  Oligonucleotide for detection of SNP TSC0021558
taatgtgatttgt

SEQ ID NO: 85820 - DNA, 13 bp, Artificial Sequence
  Oligonucleotide for detection of SNP TSC0021558
acaaatcacatta

SEQ ID NO: 85821 - DNA, 13 bp, Artificial Sequence
  Oligonucleotide for detection of SNP TSC0021559
ataaatgtgtaat

SEQ ID NO: 85822 - DNA, 13 bp, Artificial Sequence
  Oligonucleotide for detection of SNP TSC0021559
attacacatttat

SEQ ID NO: 85823 - DNA, 13 bp, Artificial Sequence
  Oligonucleotide for detection of SNP TSC0021559
ataaatatgtaat

SEQ ID NO: 85824 - DNA, 13 bp, Artificial Sequence
  Oligonucleotide for detection of SNP TSC0021559
attacatatttat

SEQ ID NO: 85825 - DNA, 13 bp, Artificial Sequence
  Oligonucleotide for detection of SNP TSC0021561
aattatggatttt

SEQ ID NO: 85826 - DNA, 13 bp, Artificial Sequence
  Oligonucleotide for detection of SNP TSC0021561
aaaatccataatt

SEQ ID NO: 85827 - DNA, 13 bp, Artificial Sequence
  Oligonucleotide for detection of SNP TSC0021561
aattatagatttt

SEQ ID NO: 85828 - DNA, 13 bp, Artificial Sequence
  Oligonucleotide for detection of SNP TSC0021561
aaaatctataatt

SEQ ID NO: 85829 - DNA, 13 bp, Artificial Sequence
  Oligonucleotide for detection of SNP TSC0021562
ttattttatttgg

SEQ ID NO: 85830 - DNA, 13 bp, Artificial Sequence
  Oligonucleotide for detection of SNP TSC0021562
ccaaataaaataa

SEQ ID NO: 85831 - DNA, 13 bp, Artificial Sequence
  Oligonucleotide for detection of SNP TSC0021562
ttaaattaaatgg

SEQ ID NO: 85832 - DNA, 13 bp, Artificial Sequence
  Oligonucleotide for detection of SNP TSC0021562
ccatttaatttaa

SEQ ID NO: 85833 - DNA, 13 bp, Artificial Sequence
  Oligonucleotide for detection of SNP TSC0021562
ttaaataaaatgg

SEQ ID NO: 85834 - DNA, 13 bp, Artificial Sequence
  Oligonucleotide for detection of SNP TSC0021562
ccattttatttaa

SEQ ID NO: 85835 - DNA, 13 bp, Artificial Sequence
  Oligonucleotide for detection of SNP TSC0021563
aaatttgattttt

SEQ ID NO: 85836 - DNA, 13 bp, Artificial Sequence
  Oligonucleotide for detection of SNP TSC0021563
aaaaatcaaattt

SEQ ID NO: 85837 - DNA, 13 bp, Artificial Sequence
  Oligonucleotide for detection of SNP TSC0021564
taattataaaaaa

SEQ ID NO: 85838 - DNA, 13 bp, Artificial Sequence
  Oligonucleotide for detection of SNP TSC0021564
ttttttataatta

SEQ ID NO: 85839 - DNA, 13 bp, Artificial Sequence
  Oligonucleotide for detection of SNP TSC0021564
taattagaaaaaa

SEQ ID NO: 85840 - DNA, 13 bp, Artificial Sequence
  Oligonucleotide for detection of SNP TSC0021564
ttttttctaatta

SEQ ID NO: 85841 - DNA, 13 bp, Artificial Sequence
  Oligonucleotide for detection of SNP TSC0021564
ttttttgtggttg

SEQ ID NO: 85842 - DNA, 13 bp, Artificial Sequence
  Oligonucleotide for detection of SNP TSC0021564
caaccacaaaaaa

SEQ ID NO: 85843 - DNA, 13 bp, Artificial Sequence
  Oligonucleotide for detection of SNP TSC0021564
ttttttttggttg

SEQ ID NO: 85844 - DNA, 13 bp, Artificial Sequence
  Oligonucleotide for detection of SNP TSC0021564
caaccaaaaaaaa

SEQ ID NO: 85845 - DNA, 13 bp, Artificial Sequence
  Oligonucleotide for detection of SNP TSC0021567
ggtgagggatgtg

SEQ ID NO: 85846 - DNA, 13 bp, Artificial Sequence
  Oligonucleotide for detection of SNP TSC0021567
cacatccctcacc

SEQ ID NO: 85847 - DNA, 13 bp, Artificial Sequence
  Oligonucleotide for detection of SNP TSC0021567
ggtgagagatgtg

SEQ ID NO: 85848 - DNA, 13 bp, Artificial Sequence
  Oligonucleotide for detection of SNP TSC0021567
cacatctctcacc

SEQ ID NO: 85849 - DNA, 13 bp, Artificial Sequence
  Oligonucleotide for detection of SNP TSC0021569
atattgggattay

SEQ ID NO: 85850 - DNA, 13 bp, Artificial Sequence
  Oligonucleotide for detection of SNP TSC0021569
rtaatcccaatat

SEQ ID NO: 85851 - DNA, 13 bp, Artificial Sequence
  Oligonucleotide for detection of SNP TSC0021569
atattgtgattay

SEQ ID NO: 85852 - DNA, 13 bp, Artificial Sequence
  Oligonucleotide for detection of SNP TSC0021569
rtaatcacaatat

SEQ ID NO: 85853 - DNA, 13 bp, Artificial Sequence
  Oligonucleotide for detection of SNP TSC0021569
gtgattttagtgt

SEQ ID NO: 85854 - DNA, 13 bp, Artificial Sequence
  Oligonucleotide for detection of SNP TSC0021569
acactaaaatcac

SEQ ID NO: 85855 - DNA, 13 bp, Artificial Sequence
  Oligonucleotide for detection of SNP TSC0021569
gtgattatagtgt

SEQ ID NO: 85856 - DNA, 13 bp, Artificial Sequence
  Oligonucleotide for detection of SNP TSC0021569
acactataatcac

SEQ ID NO: 85857 - DNA, 13 bp, Artificial Sequence
  Oligonucleotide for detection of SNP TSC0021570
gtgtttggtatat

SEQ ID NO: 85858 - DNA, 13 bp, Artificial Sequence
  Oligonucleotide for detection of SNP TSC0021570
atataccaaacac

SEQ ID NO: 85859 - DNA, 13 bp, Artificial Sequence
  Oligonucleotide for detection of SNP TSC0021570
gtgtttagtatat

SEQ ID NO: 85860 - DNA, 13 bp, Artificial Sequence
  Oligonucleotide for detection of SNP TSC0021570
atatactaaacac

SEQ ID NO: 85861 - DNA, 13 bp, Artificial Sequence
  Oligonucleotide for detection of SNP TSC0021571
taagataaaatag

SEQ ID NO: 85862 - DNA, 13 bp, Artificial Sequence
  Oligonucleotide for detection of SNP TSC0021571
ctattttatctta

SEQ ID NO: 85863 - DNA, 13 bp, Artificial Sequence
  Oligonucleotide for detection of SNP TSC0021571
taagatgaaatag

SEQ ID NO: 85864 - DNA, 13 bp, Artificial Sequence
  Oligonucleotide for detection of SNP TSC0021571
ctatttcatctta

SEQ ID NO: 85865 - DNA, 13 bp, Artificial Sequence
  Oligonucleotide for detection of SNP TSC0021571
taagacgaaatag

SEQ ID NO: 85866 - DNA, 13 bp, Artificial Sequence
  Oligonucleotide for detection of SNP TSC0021571
ctatttcgtctta

SEQ ID NO: 85867 - DNA, 13 bp, Artificial Sequence
  Oligonucleotide for detection of SNP TSC0021581
gtatatatttagg

SEQ ID NO: 85868 - DNA, 13 bp, Artificial Sequence
  Oligonucleotide for detection of SNP TSC0021581
cctaaatatatac

SEQ ID NO: 85869 - DNA, 13 bp, Artificial Sequence
  Oligonucleotide for detection of SNP TSC0021581
gtatatgtttagg

SEQ ID NO: 85870 - DNA, 13 bp, Artificial Sequence
  Oligonucleotide for detection of SNP TSC0021581
cctaaacatatac

SEQ ID NO: 85871 - DNA, 13 bp, Artificial Sequence
  Oligonucleotide for detection of SNP TSC0021581
gtatacgtttagg

SEQ ID NO: 85872 - DNA, 13 bp, Artificial Sequence
  Oligonucleotide for detection of SNP TSC0021581
cctaaacgtatac

SEQ ID NO: 85873 - DNA, 13 bp, Artificial Sequence
  Oligonucleotide for detection of SNP TSC0021581
tttgggtgtatgy

SEQ ID NO: 85874 - DNA, 13 bp, Artificial Sequence
  Oligonucleotide for detection of SNP TSC0021581
rcatacacccaaa

SEQ ID NO: 85875 - DNA, 13 bp, Artificial Sequence
  Oligonucleotide for detection of SNP TSC0021581
tttgggcgtatgy

SEQ ID NO: 85876 - DNA, 13 bp, Artificial Sequence
  Oligonucleotide for detection of SNP TSC0021581
rcatacgcccaaa

SEQ ID NO: 85877 - DNA, 13 bp, Artificial Sequence
  Oligonucleotide for detection of SNP TSC0021584
tttttttaatttg

SEQ ID NO: 85878 - DNA, 13 bp, Artificial Sequence
  Oligonucleotide for detection of SNP TSC0021584
caaattaaaaaaa

SEQ ID NO: 85879 - DNA, 13 bp, Artificial Sequence
  Oligonucleotide for detection of SNP TSC0021584
taaattgaagaag

SEQ ID NO: 85880 - DNA, 13 bp, Artificial Sequence
  Oligonucleotide for detection of SNP TSC0021584
cttcttcaattta

SEQ ID NO: 85881 - DNA, 13 bp, Artificial Sequence
  Oligonucleotide for detection of SNP TSC0021584
taaatttaagaag

SEQ ID NO: 85882 - DNA, 13 bp, Artificial Sequence
  Oligonucleotide for detection of SNP TSC0021584
cttcttaaattta

SEQ ID NO: 85883 - DNA, 13 bp, Artificial Sequence
  Oligonucleotide for detection of SNP TSC0021585
gaggttatatgta

SEQ ID NO: 85884 - DNA, 13 bp, Artificial Sequence
  Oligonucleotide for detection of SNP TSC0021585
tacatataacctc

SEQ ID NO: 85885 - DNA, 13 bp, Artificial Sequence
  Oligonucleotide for detection of SNP TSC0021585
gaggttgtatgta

SEQ ID NO: 85886 - DNA, 13 bp, Artificial Sequence
  Oligonucleotide for detection of SNP TSC0021585
tacatacaacctc

SEQ ID NO: 85887 - DNA, 13 bp, Artificial Sequence
  Oligonucleotide for detection of SNP TSC0021585
gaggtcgtatgta

SEQ ID NO: 85888 - DNA, 13 bp, Artificial Sequence
  Oligonucleotide for detection of SNP TSC0021585
tacatacgacctc

SEQ ID NO: 85889 - DNA, 13 bp, Artificial Sequence
  Oligonucleotide for detection of SNP TSC0021585
tatatgtggttty

SEQ ID NO: 85890 - DNA, 13 bp, Artificial Sequence
  Oligonucleotide for detection of SNP TSC0021585
raaaccacatata

SEQ ID NO: 85891 - DNA, 13 bp, Artificial Sequence
  Oligonucleotide for detection of SNP TSC0021585
tatatgcggttty

SEQ ID NO: 85892 - DNA, 13 bp, Artificial Sequence
  Oligonucleotide for detection of SNP TSC0021585
raaaccgcatata

SEQ ID NO: 85893 - DNA, 13 bp, Artificial Sequence
  Oligonucleotide for detection of SNP TSC0021586
atgtttgttggtt

SEQ ID NO: 85894 - DNA, 13 bp, Artificial Sequence
  Oligonucleotide for detection of SNP TSC0021586
aaccaacaaacat

SEQ ID NO: 85895 - DNA, 13 bp, Artificial Sequence
  Oligonucleotide for detection of SNP TSC0021586
atgtttattggtt

SEQ ID NO: 85896 - DNA, 13 bp, Artificial Sequence
  Oligonucleotide for detection of SNP TSC0021586
aaccaataaacat

SEQ ID NO: 85897 - DNA, 13 bp, Artificial Sequence
  Oligonucleotide for detection of SNP TSC0021589
agtattaggggat

SEQ ID NO: 85898 - DNA, 13 bp, Artificial Sequence
  Oligonucleotide for detection of SNP TSC0021589
atcccctaatact

SEQ ID NO: 85899 - DNA, 13 bp, Artificial Sequence
  Oligonucleotide for detection of SNP TSC0021589
agtattgggggat

SEQ ID NO: 85900 - DNA, 13 bp, Artificial Sequence
  Oligonucleotide for detection of SNP TSC0021589
atcccccaatact

SEQ ID NO: 85901 - DNA, 13 bp, Artificial Sequence
  Oligonucleotide for detection of SNP TSC0021589
agtatcgggggat

SEQ ID NO: 85902 - DNA, 13 bp, Artificial Sequence
  Oligonucleotide for detection of SNP TSC0021589
atcccccgatact

SEQ ID NO: 85903 - DNA, 13 bp, Artificial Sequence
  Oligonucleotide for detection of SNP TSC0021589
attttttgatgtt

SEQ ID NO: 85904 - DNA, 13 bp, Artificial Sequence
  Oligonucleotide for detection of SNP TSC0021589
aacatcaaaaaat

SEQ ID NO: 85905 - DNA, 13 bp, Artificial Sequence
  Oligonucleotide for detection of SNP TSC0021589
atttttcgatgtt

SEQ ID NO: 85906 - DNA, 13 bp, Artificial Sequence
  Oligonucleotide for detection of SNP TSC0021589
aacatcgaaaaat

SEQ ID NO: 85907 - DNA, 13 bp, Artificial Sequence
  Oligonucleotide for detection of SNP TSC0021590
gaaaagttttagg

SEQ ID NO: 85908 - DNA, 13 bp, Artificial Sequence
  Oligonucleotide for detection of SNP TSC0021590
cctaaaacttttc

SEQ ID NO: 85909 - DNA, 13 bp, Artificial Sequence
  Oligonucleotide for detection of SNP TSC0021590
gaaaagatttagg

SEQ ID NO: 85910 - DNA, 13 bp, Artificial Sequence
  Oligonucleotide for detection of SNP TSC0021590
cctaaatcttttc

SEQ ID NO: 85911 - DNA, 13 bp, Artificial Sequence
  Oligonucleotide for detection of SNP TSC0021591
gaatttattaatt

SEQ ID NO: 85912 - DNA, 13 bp, Artificial Sequence
  Oligonucleotide for detection of SNP TSC0021591
aattaataaattc

SEQ ID NO: 85913 - DNA, 13 bp, Artificial Sequence
  Oligonucleotide for detection of SNP TSC0021591
gaattttttaatt

SEQ ID NO: 85914 - DNA, 13 bp, Artificial Sequence
  Oligonucleotide for detection of SNP TSC0021591
aattaaaaaattc

SEQ ID NO: 85915 - DNA, 13 bp, Artificial Sequence
  Oligonucleotide for detection of SNP TSC0021591
aattaataaatty

SEQ ID NO: 85916 - DNA, 13 bp, Artificial Sequence
  Oligonucleotide for detection of SNP TSC0021591
raatttattaatt

SEQ ID NO: 85917 - DNA, 13 bp, Artificial Sequence
  Oligonucleotide for detection of SNP TSC0021591
aattaagaaatty

SEQ ID NO: 85918 - DNA, 13 bp, Artificial Sequence
  Oligonucleotide for detection of SNP TSC0021591
raatttcttaatt

SEQ ID NO: 85919 - DNA, 13 bp, Artificial Sequence
  Oligonucleotide for detection of SNP TSC0021595
ataatttttaaay

SEQ ID NO: 85920 - DNA, 13 bp, Artificial Sequence
  Oligonucleotide for detection of SNP TSC0021595
rtttaaaaattat

SEQ ID NO: 85921 - DNA, 13 bp, Artificial Sequence
  Oligonucleotide for detection of SNP TSC0021595
ataattgttaaay

SEQ ID NO: 85922 - DNA, 13 bp, Artificial Sequence
  Oligonucleotide for detection of SNP TSC0021595
rtttaacaattat

SEQ ID NO: 85923 - DNA, 13 bp, Artificial Sequence
  Oligonucleotide for detection of SNP TSC0021595
gtttgggagttat

SEQ ID NO: 85924 - DNA, 13 bp, Artificial Sequence
  Oligonucleotide for detection of SNP TSC0021595
ataactcccaaac

SEQ ID NO: 85925 - DNA, 13 bp, Artificial Sequence
  Oligonucleotide for detection of SNP TSC0021595
gtttggtagttat

SEQ ID NO: 85926 - DNA, 13 bp, Artificial Sequence
  Oligonucleotide for detection of SNP TSC0021595
ataactaccaaac

SEQ ID NO: 85927 - DNA, 13 bp, Artificial Sequence
  Oligonucleotide for detection of SNP TSC0021596
ggtttggtttgtt

SEQ ID NO: 85928 - DNA, 13 bp, Artificial Sequence
  Oligonucleotide for detection of SNP TSC0021596
aacaaaccaaacc

SEQ ID NO: 85929 - DNA, 13 bp, Artificial Sequence
  Oligonucleotide for detection of SNP TSC0021596
ggtttgatttgtt

SEQ ID NO: 85930 - DNA, 13 bp, Artificial Sequence
  Oligonucleotide for detection of SNP TSC0021596
aacaaatcaaacc

SEQ ID NO: 85931 - DNA, 13 bp, Artificial Sequence
  Oligonucleotide for detection of SNP TSC0021597
tatttggtaggta

SEQ ID NO: 85932 - DNA, 13 bp, Artificial Sequence
  Oligonucleotide for detection of SNP TSC0021597
tacctaccaaata

SEQ ID NO: 85933 - DNA, 13 bp, Artificial Sequence
  Oligonucleotide for detection of SNP TSC0021597
tatttgttaggta

SEQ ID NO: 85934 - DNA, 13 bp, Artificial Sequence
  Oligonucleotide for detection of SNP TSC0021597
tacctaacaaata

SEQ ID NO: 85935 - DNA, 13 bp, Artificial Sequence
  Oligonucleotide for detection of SNP TSC0021597
tgtttgttaaatg

SEQ ID NO: 85936 - DNA, 13 bp, Artificial Sequence
  Oligonucleotide for detection of SNP TSC0021597
catttaacaaaca

SEQ ID NO: 85937 - DNA, 13 bp, Artificial Sequence
  Oligonucleotide for detection of SNP TSC0021597
tgtttgataaatg

SEQ ID NO: 85938 - DNA, 13 bp, Artificial Sequence
  Oligonucleotide for detection of SNP TSC0021597
catttatcaaaca

SEQ ID NO: 85939 - DNA, 13 bp, Artificial Sequence
  Oligonucleotide for detection of SNP TSC0021598
aaaaaaagataat

SEQ ID NO: 85940 - DNA, 13 bp, Artificial Sequence
  Oligonucleotide for detection of SNP TSC0021598
attatcttttttt

SEQ ID NO: 85941 - DNA, 13 bp, Artificial Sequence
  Oligonucleotide for detection of SNP TSC0021598
aaaaaaggataat

SEQ ID NO: 85942 - DNA, 13 bp, Artificial Sequence
  Oligonucleotide for detection of SNP TSC0021598
attatcctttttt

SEQ ID NO: 85943 - DNA, 13 bp, Artificial Sequence
  Oligonucleotide for detection of SNP TSC0021600
tgtaaagggtgtg

SEQ ID NO: 85944 - DNA, 13 bp, Artificial Sequence
  Oligonucleotide for detection of SNP TSC0021600
cacaccctttaca

SEQ ID NO: 85945 - DNA, 13 bp, Artificial Sequence
  Oligonucleotide for detection of SNP TSC0021600
tgtaaaaggtgtg

SEQ ID NO: 85946 - DNA, 13 bp, Artificial Sequence
  Oligonucleotide for detection of SNP TSC0021600
cacaccttttaca

SEQ ID NO: 85947 - DNA, 13 bp, Artificial Sequence
  Oligonucleotide for detection of SNP TSC0021601
atgtatgtgtaga

SEQ ID NO: 85948 - DNA, 13 bp, Artificial Sequence
  Oligonucleotide for detection of SNP TSC0021601
tctacacatacat

SEQ ID NO: 85949 - DNA, 13 bp, Artificial Sequence
  Oligonucleotide for detection of SNP TSC0021601
atgtatatgtaga

SEQ ID NO: 85950 - DNA, 13 bp, Artificial Sequence
  Oligonucleotide for detection of SNP TSC0021601
tctacatatacat

SEQ ID NO: 85951 - DNA, 13 bp, Artificial Sequence
  Oligonucleotide for detection of SNP TSC0021602
ggttgtgtttgty

SEQ ID NO: 85952 - DNA, 13 bp, Artificial Sequence
  Oligonucleotide for detection of SNP TSC0021602
racaaacacaacc

SEQ ID NO: 85953 - DNA, 13 bp, Artificial Sequence
  Oligonucleotide for detection of SNP TSC0021602
ggttgtattcgty

SEQ ID NO: 85954 - DNA, 13 bp, Artificial Sequence
  Oligonucleotide for detection of SNP TSC0021602
racgaatacaacc

SEQ ID NO: 85955 - DNA, 13 bp, Artificial Sequence
  Oligonucleotide for detection of SNP TSC0021602
ggttgtgttcgty

SEQ ID NO: 85956 - DNA, 13 bp, Artificial Sequence
  Oligonucleotide for detection of SNP TSC0021602
racgaacacaacc

SEQ ID NO: 85957 - DNA, 13 bp, Artificial Sequence
  Oligonucleotide for detection of SNP TSC0021603
taggatgtgttgg

SEQ ID NO: 85958 - DNA, 13 bp, Artificial Sequence
  Oligonucleotide for detection of SNP TSC0021603
ccaacacatccta

SEQ ID NO: 85959 - DNA, 13 bp, Artificial Sequence
  Oligonucleotide for detection of SNP TSC0021603
taggatatgttgg

SEQ ID NO: 85960 - DNA, 13 bp, Artificial Sequence
  Oligonucleotide for detection of SNP TSC0021603
ccaacatatccta

SEQ ID NO: 85961 - DNA, 13 bp, Artificial Sequence
  Oligonucleotide for detection of SNP TSC0021604
tatggggtttaga

SEQ ID NO: 85962 - DNA, 13 bp, Artificial Sequence
  Oligonucleotide for detection of SNP TSC0021604
tctaaaccccata

SEQ ID NO: 85963 - DNA, 13 bp, Artificial Sequence
  Oligonucleotide for detection of SNP TSC0021604
tatgggatttaga

SEQ ID NO: 85964 - DNA, 13 bp, Artificial Sequence
  Oligonucleotide for detection of SNP TSC0021604
tctaaatcccata

SEQ ID NO: 85965 - DNA, 13 bp, Artificial Sequence
  Oligonucleotide for detection of SNP TSC0021606
agttttatgggtg

SEQ ID NO: 85966 - DNA, 13 bp, Artificial Sequence
  Oligonucleotide for detection of SNP TSC0021606
cacccataaaact

SEQ ID NO: 85967 - DNA, 13 bp, Artificial Sequence
  Oligonucleotide for detection of SNP TSC0021606
agttttgtgggtg

SEQ ID NO: 85968 - DNA, 13 bp, Artificial Sequence
  Oligonucleotide for detection of SNP TSC0021606
cacccacaaaact

SEQ ID NO: 85969 - DNA, 13 bp, Artificial Sequence
  Oligonucleotide for detection of SNP TSC0021606
agtttcgtgggtg

SEQ ID NO: 85970 - DNA, 13 bp, Artificial Sequence
  Oligonucleotide for detection of SNP TSC0021606
cacccacgaaact

SEQ ID NO: 85971 - DNA, 13 bp, Artificial Sequence
  Oligonucleotide for detection of SNP TSC0021606
tatttatggggtt

SEQ ID NO: 85972 - DNA, 13 bp, Artificial Sequence
  Oligonucleotide for detection of SNP TSC0021606
aaccccataaata

SEQ ID NO: 85973 - DNA, 13 bp, Artificial Sequence
  Oligonucleotide for detection of SNP TSC0021606
tatttacggggtt

SEQ ID NO: 85974 - DNA, 13 bp, Artificial Sequence
  Oligonucleotide for detection of SNP TSC0021606
aaccccgtaaata

SEQ ID NO: 85975 - DNA, 13 bp, Artificial Sequence
  Oligonucleotide for detection of SNP TSC0021607
ttgaggataagaa

SEQ ID NO: 85976 - DNA, 13 bp, Artificial Sequence
  Oligonucleotide for detection of SNP TSC0021607
ttcttatcctcaa

SEQ ID NO: 85977 - DNA, 13 bp, Artificial Sequence
  Oligonucleotide for detection of SNP TSC0021607
ttgagggtaagaa

SEQ ID NO: 85978 - DNA, 13 bp, Artificial Sequence
  Oligonucleotide for detection of SNP TSC0021607
ttcttaccctcaa

SEQ ID NO: 85979 - DNA, 13 bp, Artificial Sequence
  Oligonucleotide for detection of SNP TSC0021610
aaaagtaaattga

SEQ ID NO: 85980 - DNA, 13 bp, Artificial Sequence
  Oligonucleotide for detection of SNP TSC0021610
tcaatttactttt

SEQ ID NO: 85981 - DNA, 13 bp, Artificial Sequence
  Oligonucleotide for detection of SNP TSC0021610
aaaagttaattga

SEQ ID NO: 85982 - DNA, 13 bp, Artificial Sequence
  Oligonucleotide for detection of SNP TSC0021610
tcaattaactttt

SEQ ID NO: 85983 - DNA, 13 bp, Artificial Sequence
  Oligonucleotide for detection of SNP TSC0021610
ttagtttgttttt

SEQ ID NO: 85984 - DNA, 13 bp, Artificial Sequence
  Oligonucleotide for detection of SNP TSC0021610
aaaaacaaactaa

SEQ ID NO: 85985 - DNA, 13 bp, Artificial Sequence
  Oligonucleotide for detection of SNP TSC0021610
ttagttagttttt

SEQ ID NO: 85986 - DNA, 13 bp, Artificial Sequence
  Oligonucleotide for detection of SNP TSC0021610
aaaaactaactaa

SEQ ID NO: 85987 - DNA, 13 bp, Artificial Sequence
  Oligonucleotide for detection of SNP TSC0021611
tttaaaaaatatt

SEQ ID NO: 85988 - DNA, 13 bp, Artificial Sequence
  Oligonucleotide for detection of SNP TSC0021611
aatattttttaaa

SEQ ID NO: 85989 - DNA, 13 bp, Artificial Sequence
  Oligonucleotide for detection of SNP TSC0021611
tttaaagaatatt

SEQ ID NO: 85990 - DNA, 13 bp, Artificial Sequence
  Oligonucleotide for detection of SNP TSC0021611
aatattctttaaa

SEQ ID NO: 85991 - DNA, 13 bp, Artificial Sequence
  Oligonucleotide for detection of SNP TSC0021613
aaaaaaaagtgga

SEQ ID NO: 85992 - DNA, 13 bp, Artificial Sequence
  Oligonucleotide for detection of SNP TSC0021613
tccactttttttt

SEQ ID NO: 85993 - DNA, 13 bp, Artificial Sequence
  Oligonucleotide for detection of SNP TSC0021613
aaaaaatagtgga

SEQ ID NO: 85994 - DNA, 13 bp, Artificial Sequence
  Oligonucleotide for detection of SNP TSC0021613
tccactatttttt

SEQ ID NO: 85995 - DNA, 13 bp, Artificial Sequence
  Oligonucleotide for detection of SNP TSC0021614
atggggttatggg

SEQ ID NO: 85996 - DNA, 13 bp, Artificial Sequence
  Oligonucleotide for detection of SNP TSC0021614
cccataaccccat

SEQ ID NO: 85997 - DNA, 13 bp, Artificial Sequence
  Oligonucleotide for detection of SNP TSC0021614
atgggggtatggg

SEQ ID NO: 85998 - DNA, 13 bp, Artificial Sequence
  Oligonucleotide for detection of SNP TSC0021614
cccatacccccat

SEQ ID NO: 85999 - DNA, 13 bp, Artificial Sequence
  Oligonucleotide for detection of SNP TSC0021614
acggggttatggg

SEQ ID NO: 86000 - DNA, 13 bp, Artificial Sequence
  Oligonucleotide for detection of SNP TSC0021614
cccataaccccgt

SEQ ID NO: 86001 - DNA, 13 bp, Artificial Sequence
  Oligonucleotide for detection of SNP TSC0021614
acgggggtatggg

SEQ ID NO: 86002 - DNA, 13 bp, Artificial Sequence
  Oligonucleotide for detection of SNP TSC0021614
cccatacccccgt

SEQ ID NO: 86003 - DNA, 13 bp, Artificial Sequence
  Oligonucleotide for detection of SNP TSC0021614
tttatagttttgt

SEQ ID NO: 86004 - DNA, 13 bp, Artificial Sequence
  Oligonucleotide for detection of SNP TSC0021614
acaaaactataaa

SEQ ID NO: 86005 - DNA, 13 bp, Artificial Sequence
  Oligonucleotide for detection of SNP TSC0021614
tttatatttttgt

SEQ ID NO: 86006 - DNA, 13 bp, Artificial Sequence
  Oligonucleotide for detection of SNP TSC0021614
acaaaaatataaa

SEQ ID NO: 86007 - DNA, 13 bp, Artificial Sequence
  Oligonucleotide for detection of SNP TSC0021614
tttatagtttcgt

SEQ ID NO: 86008 - DNA, 13 bp, Artificial Sequence
  Oligonucleotide for detection of SNP TSC0021614
acgaaactataaa

SEQ ID NO: 86009 - DNA, 13 bp, Artificial Sequence
  Oligonucleotide for detection of SNP TSC0021614
tttatattttcgt

SEQ ID NO: 86010 - DNA, 13 bp, Artificial Sequence
  Oligonucleotide for detection of SNP TSC0021614
acgaaaatataaa

SEQ ID NO: 86011 - DNA, 13 bp, Artificial Sequence
  Oligonucleotide for detection of SNP TSC0021616
aatgataatttaa

SEQ ID NO: 86012 - DNA, 13 bp, Artificial Sequence
  Oligonucleotide for detection of SNP TSC0021616
ttaaattatcatt

SEQ ID NO: 86013 - DNA, 13 bp, Artificial Sequence
  Oligonucleotide for detection of SNP TSC0021616
aatgatgatttaa

SEQ ID NO: 86014 - DNA, 13 bp, Artificial Sequence
  Oligonucleotide for detection of SNP TSC0021616
ttaaatcatcatt

SEQ ID NO: 86015 - DNA, 13 bp, Artificial Sequence
  Oligonucleotide for detection of SNP TSC0021616
aatgacgatttaa

SEQ ID NO: 86016 - DNA, 13 bp, Artificial Sequence
  Oligonucleotide for detection of SNP TSC0021616
ttaaatcgtcatt

SEQ ID NO: 86017 - DNA, 13 bp, Artificial Sequence
  Oligonucleotide for detection of SNP TSC0021616
ttaaattgttatt

SEQ ID NO: 86018 - DNA, 13 bp, Artificial Sequence
  Oligonucleotide for detection of SNP TSC0021616
aataacaatttaa

SEQ ID NO: 86019 - DNA, 13 bp, Artificial Sequence
  Oligonucleotide for detection of SNP TSC0021616
ttaaatcgttatt

SEQ ID NO: 86020 - DNA, 13 bp, Artificial Sequence
  Oligonucleotide for detection of SNP TSC0021616
aataacgatttaa

SEQ ID NO: 86021 - DNA, 13 bp, Artificial Sequence
  Oligonucleotide for detection of SNP TSC0021618
agttttaaggaat

SEQ ID NO: 86022 - DNA, 13 bp, Artificial Sequence
  Oligonucleotide for detection of SNP TSC0021618
attccttaaaact

SEQ ID NO: 86023 - DNA, 13 bp, Artificial Sequence
  Oligonucleotide for detection of SNP TSC0021618
agttttgaggaat

SEQ ID NO: 86024 - DNA, 13 bp, Artificial Sequence
  Oligonucleotide for detection of SNP TSC0021618
attcctcaaaact

SEQ ID NO: 86025 - DNA, 13 bp, Artificial Sequence
  Oligonucleotide for detection of SNP TSC0021618
agtttcgaggaat

SEQ ID NO: 86026 - DNA, 13 bp, Artificial Sequence
  Oligonucleotide for detection of SNP TSC0021618
attcctcgaaact

SEQ ID NO: 86027 - DNA, 13 bp, Artificial Sequence
  Oligonucleotide for detection of SNP TSC0021621
atagtttgggaga

SEQ ID NO: 86028 - DNA, 13 bp, Artificial Sequence
  Oligonucleotide for detection of SNP TSC0021621
tctcccaaactat

SEQ ID NO: 86029 - DNA, 13 bp, Artificial Sequence
  Oligonucleotide for detection of SNP TSC0021621
atagttcgggaga

SEQ ID NO: 86030 - DNA, 13 bp, Artificial Sequence
  Oligonucleotide for detection of SNP TSC0021621
tctcccgaactat

SEQ ID NO: 86031 - DNA, 13 bp, Artificial Sequence
  Oligonucleotide for detection of SNP TSC0021621
ttttttgggttgt

SEQ ID NO: 86032 - DNA, 13 bp, Artificial Sequence
  Oligonucleotide for detection of SNP TSC0021621
acaacccaaaaaa

SEQ ID NO: 86033 - DNA, 13 bp, Artificial Sequence
  Oligonucleotide for detection of SNP TSC0021621
ttttttaggttgt

SEQ ID NO: 86034 - DNA, 13 bp, Artificial Sequence
  Oligonucleotide for detection of SNP TSC0021621
acaacctaaaaaa

SEQ ID NO: 86035 - DNA, 13 bp, Artificial Sequence
  Oligonucleotide for detection of SNP TSC0021621
tttttcgggttgt

SEQ ID NO: 86036 - DNA, 13 bp, Artificial Sequence
  Oligonucleotide for detection of SNP TSC0021621
acaacccgaaaaa

SEQ ID NO: 86037 - DNA, 13 bp, Artificial Sequence
  Oligonucleotide for detection of SNP TSC0021622
atttttatgtata

SEQ ID NO: 86038 - DNA, 13 bp, Artificial Sequence
  Oligonucleotide for detection of SNP TSC0021622
tatacataaaaat

SEQ ID NO: 86039 - DNA, 13 bp, Artificial Sequence
  Oligonucleotide for detection of SNP TSC0021622
atttttgtgtata

SEQ ID NO: 86040 - DNA, 13 bp, Artificial Sequence
  Oligonucleotide for detection of SNP TSC0021622
tatacacaaaaat

SEQ ID NO: 86041 - DNA, 13 bp, Artificial Sequence
  Oligonucleotide for detection of SNP TSC0021622
attttcgtgtata

SEQ ID NO: 86042 - DNA, 13 bp, Artificial Sequence
  Oligonucleotide for detection of SNP TSC0021622
tatacacgaaaat

SEQ ID NO: 86043 - DNA, 13 bp, Artificial Sequence
  Oligonucleotide for detection of SNP TSC0021622
tgtgtatgagggt

SEQ ID NO: 86044 - DNA, 13 bp, Artificial Sequence
  Oligonucleotide for detection of SNP TSC0021622
accctcatacaca

SEQ ID NO: 86045 - DNA, 13 bp, Artificial Sequence
  Oligonucleotide for detection of SNP TSC0021622
tgtgtacgagggt

SEQ ID NO: 86046 - DNA, 13 bp, Artificial Sequence
  Oligonucleotide for detection of SNP TSC0021622
accctcgtacaca

SEQ ID NO: 86047 - DNA, 13 bp, Artificial Sequence
  Oligonucleotide for detection of SNP TSC0021623
gatgtatggtagt

SEQ ID NO: 86048 - DNA, 13 bp, Artificial Sequence
  Oligonucleotide for detection of SNP TSC0021623
actaccatacatc

SEQ ID NO: 86049 - DNA, 13 bp, Artificial Sequence
  Oligonucleotide for detection of SNP TSC0021623
gatgtacggtagt

SEQ ID NO: 86050 - DNA, 13 bp, Artificial Sequence
  Oligonucleotide for detection of SNP TSC0021623
actaccgtacatc

SEQ ID NO: 86051 - DNA, 13 bp, Artificial Sequence
  Oligonucleotide for detection of SNP TSC0021623
attattgtgtaty

SEQ ID NO: 86052 - DNA, 13 bp, Artificial Sequence
  Oligonucleotide for detection of SNP TSC0021623
ratacacaataat

SEQ ID NO: 86053 - DNA, 13 bp, Artificial Sequence
  Oligonucleotide for detection of SNP TSC0021623
attattatgtaty

SEQ ID NO: 86054 - DNA, 13 bp, Artificial Sequence
  Oligonucleotide for detection of SNP TSC0021623
ratacataataat

SEQ ID NO: 86055 - DNA, 13 bp, Artificial Sequence
  Oligonucleotide for detection of SNP TSC0021623
attatcgtgtaty

SEQ ID NO: 86056 - DNA, 13 bp, Artificial Sequence
  Oligonucleotide for detection of SNP TSC0021623
ratacacgataat

SEQ ID NO: 86057 - DNA, 13 bp, Artificial Sequence
  Oligonucleotide for detection of SNP TSC0021624
gtttttagattta

SEQ ID NO: 86058 - DNA, 13 bp, Artificial Sequence
  Oligonucleotide for detection of SNP TSC0021624
taaatctaaaaac

SEQ ID NO: 86059 - DNA, 13 bp, Artificial Sequence
  Oligonucleotide for detection of SNP TSC0021624
gtttttggattta

SEQ ID NO: 86060 - DNA, 13 bp, Artificial Sequence
  Oligonucleotide for detection of SNP TSC0021624
taaatccaaaaac

SEQ ID NO: 86061 - DNA, 13 bp, Artificial Sequence
  Oligonucleotide for detection of SNP TSC0021624
gttttcggattta

SEQ ID NO: 86062 - DNA, 13 bp, Artificial Sequence
  Oligonucleotide for detection of SNP TSC0021624
taaatccgaaaac

SEQ ID NO: 86063 - DNA, 13 bp, Artificial Sequence
  Oligonucleotide for detection of SNP TSC0021624
tggatttgagagy

SEQ ID NO: 86064 - DNA, 13 bp, Artificial Sequence
  Oligonucleotide for detection of SNP TSC0021624
rctctcaaatcca

SEQ ID NO: 86065 - DNA, 13 bp, Artificial Sequence
  Oligonucleotide for detection of SNP TSC0021624
tggattcgagagy

SEQ ID NO: 86066 - DNA, 13 bp, Artificial Sequence
  Oligonucleotide for detection of SNP TSC0021624
rctctcgaatcca

SEQ ID NO: 86067 - DNA, 13 bp, Artificial Sequence
  Oligonucleotide for detection of SNP TSC0021629
aattggatgttga

SEQ ID NO: 86068 - DNA, 13 bp, Artificial Sequence
  Oligonucleotide for detection of SNP TSC0021629
tcaacatccaatt

SEQ ID NO: 86069 - DNA, 13 bp, Artificial Sequence
  Oligonucleotide for detection of SNP TSC0021629
aattgggtgttga

SEQ ID NO: 86070 - DNA, 13 bp, Artificial Sequence
  Oligonucleotide for detection of SNP TSC0021629
tcaacacccaatt

SEQ ID NO: 86071 - DNA, 13 bp, Artificial Sequence
  Oligonucleotide for detection of SNP TSC0021631
aatagatatgggg

SEQ ID NO: 86072 - DNA, 13 bp, Artificial Sequence
  Oligonucleotide for detection of SNP TSC0021631
ccccatatctatt

SEQ ID NO: 86073 - DNA, 13 bp, Artificial Sequence
  Oligonucleotide for detection of SNP TSC0021631
aatagagatgggg

SEQ ID NO: 86074 - DNA, 13 bp, Artificial Sequence
  Oligonucleotide for detection of SNP TSC0021631
ccccatctctatt

SEQ ID NO: 86075 - DNA, 13 bp, Artificial Sequence
  Oligonucleotide for detection of SNP TSC0021631
ttttatttttatt

SEQ ID NO: 86076 - DNA, 13 bp, Artificial Sequence
  Oligonucleotide for detection of SNP TSC0021631
aataaaaataaaa

SEQ ID NO: 86077 - DNA, 13 bp, Artificial Sequence
  Oligonucleotide for detection of SNP TSC0021632
gatataagtttga

SEQ ID NO: 86078 - DNA, 13 bp, Artificial Sequence
  Oligonucleotide for detection of SNP TSC0021632
tcaaacttatatc

SEQ ID NO: 86079 - DNA, 13 bp, Artificial Sequence
  Oligonucleotide for detection of SNP TSC0021632
gatatatgtttga

SEQ ID NO: 86080 - DNA, 13 bp, Artificial Sequence
  Oligonucleotide for detection of SNP TSC0021632
tcaaacatatatc

SEQ ID NO: 86081 - DNA, 13 bp, Artificial Sequence
  Oligonucleotide for detection of SNP TSC0021632
gatatacgtttga

SEQ ID NO: 86082 - DNA, 13 bp, Artificial Sequence
  Oligonucleotide for detection of SNP TSC0021632
tcaaacgtatatc

SEQ ID NO: 86083 - DNA, 13 bp, Artificial Sequence
  Oligonucleotide for detection of SNP TSC0021632
ttagatttgtgty

SEQ ID NO: 86084 - DNA, 13 bp, Artificial Sequence
  Oligonucleotide for detection of SNP TSC0021632
racacaaatctaa

SEQ ID NO: 86085 - DNA, 13 bp, Artificial Sequence
  Oligonucleotide for detection of SNP TSC0021632
ttagatgtgtgty

SEQ ID NO: 86086 - DNA, 13 bp, Artificial Sequence
  Oligonucleotide for detection of SNP TSC0021632
racacacatctaa

SEQ ID NO: 86087 - DNA, 13 bp, Artificial Sequence
  Oligonucleotide for detection of SNP TSC0021632
ttagacgtgtgty

SEQ ID NO: 86088 - DNA, 13 bp, Artificial Sequence
  Oligonucleotide for detection of SNP TSC0021632
racacacgtctaa

SEQ ID NO: 86089 - DNA, 13 bp, Artificial Sequence
  Oligonucleotide for detection of SNP TSC0021637
agtgttggggttt

SEQ ID NO: 86090 - DNA, 13 bp, Artificial Sequence
  Oligonucleotide for detection of SNP TSC0021637
aaaccccaacact

SEQ ID NO: 86091 - DNA, 13 bp, Artificial Sequence
  Oligonucleotide for detection of SNP TSC0021637
agcgttagggttt

SEQ ID NO: 86092 - DNA, 13 bp, Artificial Sequence
  Oligonucleotide for detection of SNP TSC0021637
aaaccctaacgct

SEQ ID NO: 86093 - DNA, 13 bp, Artificial Sequence
  Oligonucleotide for detection of SNP TSC0021637
agcgttggggttt

SEQ ID NO: 86094 - DNA, 13 bp, Artificial Sequence
  Oligonucleotide for detection of SNP TSC0021637
aaaccccaacgct

SEQ ID NO: 86095 - DNA, 13 bp, Artificial Sequence
  Oligonucleotide for detection of SNP TSC0021637
agtgtcggggttt

SEQ ID NO: 86096 - DNA, 13 bp, Artificial Sequence
  Oligonucleotide for detection of SNP TSC0021637
aaaccccgacact

SEQ ID NO: 86097 - DNA, 13 bp, Artificial Sequence
  Oligonucleotide for detection of SNP TSC0021637
agcgtcggggttt

SEQ ID NO: 86098 - DNA, 13 bp, Artificial Sequence
  Oligonucleotide for detection of SNP TSC0021637
aaaccccgacgct

SEQ ID NO: 86099 - DNA, 13 bp, Artificial Sequence
  Oligonucleotide for detection of SNP TSC0021637
agattttgatgtt

SEQ ID NO: 86100 - DNA, 13 bp, Artificial Sequence
  Oligonucleotide for detection of SNP TSC0021637
aacatcaaaatct

SEQ ID NO: 86101 - DNA, 13 bp, Artificial Sequence
  Oligonucleotide for detection of SNP TSC0021637
agattttgacgtt

SEQ ID NO: 86102 - DNA, 13 bp, Artificial Sequence
  Oligonucleotide for detection of SNP TSC0021637
aacgtcaaaatct

SEQ ID NO: 86103 - DNA, 13 bp, Artificial Sequence
  Oligonucleotide for detection of SNP TSC0021637
agatttcgatgtt

SEQ ID NO: 86104 - DNA, 13 bp, Artificial Sequence
  Oligonucleotide for detection of SNP TSC0021637
aacatcgaaatct

SEQ ID NO: 86105 - DNA, 13 bp, Artificial Sequence
  Oligonucleotide for detection of SNP TSC0021637
agatttcgacgtt

SEQ ID NO: 86106 - DNA, 13 bp, Artificial Sequence
  Oligonucleotide for detection of SNP TSC0021637
aacgtcgaaatct

SEQ ID NO: 86107 - DNA, 13 bp, Artificial Sequence
  Oligonucleotide for detection of SNP TSC0021638
tttttaaggagtt

SEQ ID NO: 86108 - DNA, 13 bp, Artificial Sequence
  Oligonucleotide for detection of SNP TSC0021638
aactccttaaaaa

SEQ ID NO: 86109 - DNA, 13 bp, Artificial Sequence
  Oligonucleotide for detection of SNP TSC0021638
tttttagggagtt

SEQ ID NO: 86110 - DNA, 13 bp, Artificial Sequence
  Oligonucleotide for detection of SNP TSC0021638
aactccctaaaaa

SEQ ID NO: 86111 - DNA, 13 bp, Artificial Sequence
  Oligonucleotide for detection of SNP TSC0021639
atttttaaaatat

SEQ ID NO: 86112 - DNA, 13 bp, Artificial Sequence
  Oligonucleotide for detection of SNP TSC0021639
atattttaaaaat

SEQ ID NO: 86113 - DNA, 13 bp, Artificial Sequence
  Oligonucleotide for detection of SNP TSC0021639
attttttaaatat

SEQ ID NO: 86114 - DNA, 13 bp, Artificial Sequence
  Oligonucleotide for detection of SNP TSC0021639
atatttaaaaaat

SEQ ID NO: 86115 - DNA, 13 bp, Artificial Sequence
  Oligonucleotide for detection of SNP TSC0021640
tgtgaggtaggga

SEQ ID NO: 86116 - DNA, 13 bp, Artificial Sequence
  Oligonucleotide for detection of SNP TSC0021640
tccctacctcaca

SEQ ID NO: 86117 - DNA, 13 bp, Artificial Sequence
  Oligonucleotide for detection of SNP TSC0021640
tgtgagataggga

SEQ ID NO: 86118 - DNA, 13 bp, Artificial Sequence
  Oligonucleotide for detection of SNP TSC0021640
tccctatctcaca

SEQ ID NO: 86119 - DNA, 13 bp, Artificial Sequence
  Oligonucleotide for detection of SNP TSC0021641
gtggtaaagggaa

SEQ ID NO: 86120 - DNA, 13 bp, Artificial Sequence
  Oligonucleotide for detection of SNP TSC0021641
ttccctttaccac

SEQ ID NO: 86121 - DNA, 13 bp, Artificial Sequence
  Oligonucleotide for detection of SNP TSC0021641
gtggtagagggaa

SEQ ID NO: 86122 - DNA, 13 bp, Artificial Sequence
  Oligonucleotide for detection of SNP TSC0021641
ttccctctaccac

SEQ ID NO: 86123 - DNA, 13 bp, Artificial Sequence
  Oligonucleotide for detection of SNP TSC0021642
ggtgtagttttay

SEQ ID NO: 86124 - DNA, 13 bp, Artificial Sequence
  Oligonucleotide for detection of SNP TSC0021642
rtaaaactacacc

SEQ ID NO: 86125 - DNA, 13 bp, Artificial Sequence
  Oligonucleotide for detection of SNP TSC0021642
ggtgtaattttay

SEQ ID NO: 86126 - DNA, 13 bp, Artificial Sequence
  Oligonucleotide for detection of SNP TSC0021642
rtaaaattacacc

SEQ ID NO: 86127 - DNA, 13 bp, Artificial Sequence
  Oligonucleotide for detection of SNP TSC0021643
atttttaggttgy

SEQ ID NO: 86128 - DNA, 13 bp, Artificial Sequence
  Oligonucleotide for detection of SNP TSC0021643
rcaacctaaaaat

SEQ ID NO: 86129 - DNA, 13 bp, Artificial Sequence
  Oligonucleotide for detection of SNP TSC0021643
atttttgggttgy

SEQ ID NO: 86130 - DNA, 13 bp, Artificial Sequence
  Oligonucleotide for detection of SNP TSC0021643
rcaacccaaaaat

SEQ ID NO: 86131 - DNA, 13 bp, Artificial Sequence
  Oligonucleotide for detection of SNP TSC0021643
atttttaggtcgy

SEQ ID NO: 86132 - DNA, 13 bp, Artificial Sequence
  Oligonucleotide for detection of SNP TSC0021643
rcgacctaaaaat

SEQ ID NO: 86133 - DNA, 13 bp, Artificial Sequence
  Oligonucleotide for detection of SNP TSC0021643
atttttgggtcgy

SEQ ID NO: 86134 - DNA, 13 bp, Artificial Sequence
  Oligonucleotide for detection of SNP TSC0021643
rcgacccaaaaat

SEQ ID NO: 86135 - DNA, 13 bp, Artificial Sequence
  Oligonucleotide for detection of SNP TSC0021645
agggaagtatttg

SEQ ID NO: 86136 - DNA, 13 bp, Artificial Sequence
  Oligonucleotide for detection of SNP TSC0021645
caaatacttccct

SEQ ID NO: 86137 - DNA, 13 bp, Artificial Sequence
  Oligonucleotide for detection of SNP TSC0021645
agggaaatatttg

SEQ ID NO: 86138 - DNA, 13 bp, Artificial Sequence
  Oligonucleotide for detection of SNP TSC0021645
caaatatttccct

SEQ ID NO: 86139 - DNA, 13 bp, Artificial Sequence
  Oligonucleotide for detection of SNP TSC0021645
agggaagtattcg

SEQ ID NO: 86140 - DNA, 13 bp, Artificial Sequence
  Oligonucleotide for detection of SNP TSC0021645
cgaatacttccct

SEQ ID NO: 86141 - DNA, 13 bp, Artificial Sequence
  Oligonucleotide for detection of SNP TSC0021645
agggaaatattcg

SEQ ID NO: 86142 - DNA, 13 bp, Artificial Sequence
  Oligonucleotide for detection of SNP TSC0021645
cgaatatttccct

SEQ ID NO: 86143 - DNA, 13 bp, Artificial Sequence
  Oligonucleotide for detection of SNP TSC0021650
tggtttttaaggg

SEQ ID NO: 86144 - DNA, 13 bp, Artificial Sequence
  Oligonucleotide for detection of SNP TSC0021650
cccttaaaaacca

SEQ ID NO: 86145 - DNA, 13 bp, Artificial Sequence
  Oligonucleotide for detection of SNP TSC0021650
tggtttgtaaggg

SEQ ID NO: 86146 - DNA, 13 bp, Artificial Sequence
  Oligonucleotide for detection of SNP TSC0021650
cccttacaaacca

SEQ ID NO: 86147 - DNA, 13 bp, Artificial Sequence
  Oligonucleotide for detection of SNP TSC0021650
tttttagaggtta

SEQ ID NO: 86148 - DNA, 13 bp, Artificial Sequence
  Oligonucleotide for detection of SNP TSC0021650
taacctctaaaaa

SEQ ID NO: 86149 - DNA, 13 bp, Artificial Sequence
  Oligonucleotide for detection of SNP TSC0021650
tttttataggtta

SEQ ID NO: 86150 - DNA, 13 bp, Artificial Sequence
  Oligonucleotide for detection of SNP TSC0021650
taacctataaaaa

SEQ ID NO: 86151 - DNA, 13 bp, Artificial Sequence
  Oligonucleotide for detection of SNP TSC0021651
tttattagataga

SEQ ID NO: 86152 - DNA, 13 bp, Artificial Sequence
  Oligonucleotide for detection of SNP TSC0021651
tctatctaataaa

SEQ ID NO: 86153 - DNA, 13 bp, Artificial Sequence
  Oligonucleotide for detection of SNP TSC0021651
tttattggataga

SEQ ID NO: 86154 - DNA, 13 bp, Artificial Sequence
  Oligonucleotide for detection of SNP TSC0021651
tctatccaataaa

SEQ ID NO: 86155 - DNA, 13 bp, Artificial Sequence
  Oligonucleotide for detection of SNP TSC0021651
tttatcggataga

SEQ ID NO: 86156 - DNA, 13 bp, Artificial Sequence
  Oligonucleotide for detection of SNP TSC0021651
tctatccgataaa

SEQ ID NO: 86157 - DNA, 13 bp, Artificial Sequence
  Oligonucleotide for detection of SNP TSC0021651
tttgtttggtaaa

SEQ ID NO: 86158 - DNA, 13 bp, Artificial Sequence
  Oligonucleotide for detection of SNP TSC0021651
tttaccaaacaaa

SEQ ID NO: 86159 - DNA, 13 bp, Artificial Sequence
  Oligonucleotide for detection of SNP TSC0021651
tttgttcggtaaa

SEQ ID NO: 86160 - DNA, 13 bp, Artificial Sequence
  Oligonucleotide for detection of SNP TSC0021651
tttaccgaacaaa

SEQ ID NO: 86161 - DNA, 13 bp, Artificial Sequence
  Oligonucleotide for detection of SNP TSC0021652
ttagttattgttg

SEQ ID NO: 86162 - DNA, 13 bp, Artificial Sequence
  Oligonucleotide for detection of SNP TSC0021652
caacaataactaa

SEQ ID NO: 86163 - DNA, 13 bp, Artificial Sequence
  Oligonucleotide for detection of SNP TSC0021652
ttagttgttgttg

SEQ ID NO: 86164 - DNA, 13 bp, Artificial Sequence
  Oligonucleotide for detection of SNP TSC0021652
caacaacaactaa

SEQ ID NO: 86165 - DNA, 13 bp, Artificial Sequence
  Oligonucleotide for detection of SNP TSC0021654
atttttagtagag

SEQ ID NO: 86166 - DNA, 13 bp, Artificial Sequence
  Oligonucleotide for detection of SNP TSC0021654
ctctactaaaaat

SEQ ID NO: 86167 - DNA, 13 bp, Artificial Sequence
  Oligonucleotide for detection of SNP TSC0021654
attttttgtagag

SEQ ID NO: 86168 - DNA, 13 bp, Artificial Sequence
  Oligonucleotide for detection of SNP TSC0021654
ctctacaaaaaat

SEQ ID NO: 86169 - DNA, 13 bp, Artificial Sequence
  Oligonucleotide for detection of SNP TSC0021654
atttttcgtagag

SEQ ID NO: 86170 - DNA, 13 bp, Artificial Sequence
  Oligonucleotide for detection of SNP TSC0021654
ctctacgaaaaat

SEQ ID NO: 86171 - DNA, 13 bp, Artificial Sequence
  Oligonucleotide for detection of SNP TSC0021654
ttttattaaaaat

SEQ ID NO: 86172 - DNA, 13 bp, Artificial Sequence
  Oligonucleotide for detection of SNP TSC0021654
atttttaataaaa

SEQ ID NO: 86173 - DNA, 13 bp, Artificial Sequence
  Oligonucleotide for detection of SNP TSC0021654
ttttatgaaaaat

SEQ ID NO: 86174 - DNA, 13 bp, Artificial Sequence
  Oligonucleotide for detection of SNP TSC0021654
atttttcataaaa

SEQ ID NO: 86175 - DNA, 13 bp, Artificial Sequence
  Oligonucleotide for detection of SNP TSC0021654
ttttacgaaaaat

SEQ ID NO: 86176 - DNA, 13 bp, Artificial Sequence
  Oligonucleotide for detection of SNP TSC0021654
atttttcgtaaaa

SEQ ID NO: 86177 - DNA, 13 bp, Artificial Sequence
  Oligonucleotide for detection of SNP TSC0021655
taattaaaaatta

SEQ ID NO: 86178 - DNA, 13 bp, Artificial Sequence
  Oligonucleotide for detection of SNP TSC0021655
taatttttaatta

SEQ ID NO: 86179 - DNA, 13 bp, Artificial Sequence
  Oligonucleotide for detection of SNP TSC0021655
taattataaatta

SEQ ID NO: 86180 - DNA, 13 bp, Artificial Sequence
  Oligonucleotide for detection of SNP TSC0021655
taatttataatta

SEQ ID NO: 86181 - DNA, 13 bp, Artificial Sequence
  Oligonucleotide for detection of SNP TSC0021655
taatttttaattg

SEQ ID NO: 86182 - DNA, 13 bp, Artificial Sequence
  Oligonucleotide for detection of SNP TSC0021655
caattaaaaatta

SEQ ID NO: 86183 - DNA, 13 bp, Artificial Sequence
  Oligonucleotide for detection of SNP TSC0021656
tattttaggaggy

SEQ ID NO: 86184 - DNA, 13 bp, Artificial Sequence
  Oligonucleotide for detection of SNP TSC0021656
rcctcctaaaata

SEQ ID NO: 86185 - DNA, 13 bp, Artificial Sequence
  Oligonucleotide for detection of SNP TSC0021656
tattttgggaggy

SEQ ID NO: 86186 - DNA, 13 bp, Artificial Sequence
  Oligonucleotide for detection of SNP TSC0021656
rcctcccaaaata

SEQ ID NO: 86187 - DNA, 13 bp, Artificial Sequence
  Oligonucleotide for detection of SNP TSC0021656
tatttcgggaggy

SEQ ID NO: 86188 - DNA, 13 bp, Artificial Sequence
  Oligonucleotide for detection of SNP TSC0021656
rcctcccgaaata

SEQ ID NO: 86189 - DNA, 13 bp, Artificial Sequence
  Oligonucleotide for detection of SNP TSC0021656
gttttttggagtg

SEQ ID NO: 86190 - DNA, 13 bp, Artificial Sequence
  Oligonucleotide for detection of SNP TSC0021656
cactccaaaaaac

SEQ ID NO: 86191 - DNA, 13 bp, Artificial Sequence
  Oligonucleotide for detection of SNP TSC0021656
gtttttcggagtg

SEQ ID NO: 86192 - DNA, 13 bp, Artificial Sequence
  Oligonucleotide for detection of SNP TSC0021656
cactccgaaaaac

SEQ ID NO: 86193 - DNA, 13 bp, Artificial Sequence
  Oligonucleotide for detection of SNP TSC0021657
attaaaaatatta

SEQ ID NO: 86194 - DNA, 13 bp, Artificial Sequence
  Oligonucleotide for detection of SNP TSC0021657
taatatttttaat

SEQ ID NO: 86195 - DNA, 13 bp, Artificial Sequence
  Oligonucleotide for detection of SNP TSC0021657
attaaagatatta

SEQ ID NO: 86196 - DNA, 13 bp, Artificial Sequence
  Oligonucleotide for detection of SNP TSC0021657
taatatctttaat

SEQ ID NO: 86197 - DNA, 13 bp, Artificial Sequence
  Oligonucleotide for detection of SNP TSC0021658
aatggtagtttga

SEQ ID NO: 86198 - DNA, 13 bp, Artificial Sequence
  Oligonucleotide for detection of SNP TSC0021658
tcaaactaccatt

SEQ ID NO: 86199 - DNA, 13 bp, Artificial Sequence
  Oligonucleotide for detection of SNP TSC0021658
aatggtggtttga

SEQ ID NO: 86200 - DNA, 13 bp, Artificial Sequence
  Oligonucleotide for detection of SNP TSC0021658
tcaaaccaccatt

SEQ ID NO: 86201 - DNA, 13 bp, Artificial Sequence
  Oligonucleotide for detection of SNP TSC0021659
aaggattggagay

SEQ ID NO: 86202 - DNA, 13 bp, Artificial Sequence
  Oligonucleotide for detection of SNP TSC0021659
rtctccaatcctt

SEQ ID NO: 86203 - DNA, 13 bp, Artificial Sequence
  Oligonucleotide for detection of SNP TSC0021659
aaggatcggagay

SEQ ID NO: 86204 - DNA, 13 bp, Artificial Sequence
  Oligonucleotide for detection of SNP TSC0021659
rtctccgatcctt

SEQ ID NO: 86205 - DNA, 13 bp, Artificial Sequence
  Oligonucleotide for detection of SNP TSC0021660
tgttgaagggaag

SEQ ID NO: 86206 - DNA, 13 bp, Artificial Sequence
  Oligonucleotide for detection of SNP TSC0021660
cttcccttcaaca

SEQ ID NO: 86207 - DNA, 13 bp, Artificial Sequence
  Oligonucleotide for detection of SNP TSC0021660
tgttgaggggaag

SEQ ID NO: 86208 - DNA, 13 bp, Artificial Sequence
  Oligonucleotide for detection of SNP TSC0021660
cttcccctcaaca

SEQ ID NO: 86209 - DNA, 13 bp, Artificial Sequence
  Oligonucleotide for detection of SNP TSC0021661
agagggggtttaa

SEQ ID NO: 86210 - DNA, 13 bp, Artificial Sequence
  Oligonucleotide for detection of SNP TSC0021661
ttaaaccccctct

SEQ ID NO: 86211 - DNA, 13 bp, Artificial Sequence
  Oligonucleotide for detection of SNP TSC0021661
agagggagtttaa

SEQ ID NO: 86212 - DNA, 13 bp, Artificial Sequence
  Oligonucleotide for detection of SNP TSC0021661
ttaaactccctct

SEQ ID NO: 86213 - DNA, 13 bp, Artificial Sequence
  Oligonucleotide for detection of SNP TSC0021663
gtaggaaagtaty

SEQ ID NO: 86214 - DNA, 13 bp, Artificial Sequence
  Oligonucleotide for detection of SNP TSC0021663
ratactttcctac

SEQ ID NO: 86215 - DNA, 13 bp, Artificial Sequence
  Oligonucleotide for detection of SNP TSC0021663
gtaggagagtaty

SEQ ID NO: 86216 - DNA, 13 bp, Artificial Sequence
  Oligonucleotide for detection of SNP TSC0021663
ratactctcctac

SEQ ID NO: 86217 - DNA, 13 bp, Artificial Sequence
  Oligonucleotide for detection of SNP TSC0021664
gggaaagagagtt

SEQ ID NO: 86218 - DNA, 13 bp, Artificial Sequence
  Oligonucleotide for detection of SNP TSC0021664
aactctctttccc

SEQ ID NO: 86219 - DNA, 13 bp, Artificial Sequence
  Oligonucleotide for detection of SNP TSC0021664
gggaaaaagagtt

SEQ ID NO: 86220 - DNA, 13 bp, Artificial Sequence
  Oligonucleotide for detection of SNP TSC0021664
aactctttttccc

SEQ ID NO: 86221 - DNA, 13 bp, Artificial Sequence
  Oligonucleotide for detection of SNP TSC0021665
atatttaattgtt

SEQ ID NO: 86222 - DNA, 13 bp, Artificial Sequence
  Oligonucleotide for detection of SNP TSC0021665
aacaattaaatat

SEQ ID NO: 86223 - DNA, 13 bp, Artificial Sequence
  Oligonucleotide for detection of SNP TSC0021665
atatttgattgtt

SEQ ID NO: 86224 - DNA, 13 bp, Artificial Sequence
  Oligonucleotide for detection of SNP TSC0021665
aacaatcaaatat

SEQ ID NO: 86225 - DNA, 13 bp, Artificial Sequence
  Oligonucleotide for detection of SNP TSC0021666
aaaattattaagg

SEQ ID NO: 86226 - DNA, 13 bp, Artificial Sequence
  Oligonucleotide for detection of SNP TSC0021666
ccttaataatttt

SEQ ID NO: 86227 - DNA, 13 bp, Artificial Sequence
  Oligonucleotide for detection of SNP TSC0021666
aaaatttttaagg

SEQ ID NO: 86228 - DNA, 13 bp, Artificial Sequence
  Oligonucleotide for detection of SNP TSC0021666
ccttaaaaatttt

SEQ ID NO: 86229 - DNA, 13 bp, Artificial Sequence
  Oligonucleotide for detection of SNP TSC0021666
ttttggtaatttt

SEQ ID NO: 86230 - DNA, 13 bp, Artificial Sequence
  Oligonucleotide for detection of SNP TSC0021666
aaaattaccaaaa

SEQ ID NO: 86231 - DNA, 13 bp, Artificial Sequence
  Oligonucleotide for detection of SNP TSC0021666
ttttgggaatttt

SEQ ID NO: 86232 - DNA, 13 bp, Artificial Sequence
  Oligonucleotide for detection of SNP TSC0021666
aaaattcccaaaa

SEQ ID NO: 86233 - DNA, 13 bp, Artificial Sequence
  Oligonucleotide for detection of SNP TSC0021667
aggggaaaattta

SEQ ID NO: 86234 - DNA, 13 bp, Artificial Sequence
  Oligonucleotide for detection of SNP TSC0021667
taaattttcccct

SEQ ID NO: 86235 - DNA, 13 bp, Artificial Sequence
  Oligonucleotide for detection of SNP TSC0021667
aggggagaattta

SEQ ID NO: 86236 - DNA, 13 bp, Artificial Sequence
  Oligonucleotide for detection of SNP TSC0021667
taaattctcccct

SEQ ID NO: 86237 - DNA, 13 bp, Artificial Sequence
  Oligonucleotide for detection of SNP TSC0021670
gtaaaaaagaata

SEQ ID NO: 86238 - DNA, 13 bp, Artificial Sequence
  Oligonucleotide for detection of SNP TSC0021670
tattcttttttac

SEQ ID NO: 86239 - DNA, 13 bp, Artificial Sequence
  Oligonucleotide for detection of SNP TSC0021670
gtaaaagagaata

SEQ ID NO: 86240 - DNA, 13 bp, Artificial Sequence
  Oligonucleotide for detection of SNP TSC0021670
tattctcttttac

SEQ ID NO: 86241 - DNA, 13 bp, Artificial Sequence
  Oligonucleotide for detection of SNP TSC0021671
aattttatataag

SEQ ID NO: 86242 - DNA, 13 bp, Artificial Sequence
  Oligonucleotide for detection of SNP TSC0021671
cttatataaaatt

SEQ ID NO: 86243 - DNA, 13 bp, Artificial Sequence
  Oligonucleotide for detection of SNP TSC0021671
aattttgtataag

SEQ ID NO: 86244 - DNA, 13 bp, Artificial Sequence
  Oligonucleotide for detection of SNP TSC0021671
cttatacaaaatt

SEQ ID NO: 86245 - DNA, 13 bp, Artificial Sequence
  Oligonucleotide for detection of SNP TSC0021674
gattgaaaaatta

SEQ ID NO: 86246 - DNA, 13 bp, Artificial Sequence
  Oligonucleotide for detection of SNP TSC0021674
taatttttcaatc

SEQ ID NO: 86247 - DNA, 13 bp, Artificial Sequence
  Oligonucleotide for detection of SNP TSC0021674
gattgagaaatta

SEQ ID NO: 86248 - DNA, 13 bp, Artificial Sequence
  Oligonucleotide for detection of SNP TSC0021674
taatttctcaatc

SEQ ID NO: 86249 - DNA, 13 bp, Artificial Sequence
  Oligonucleotide for detection of SNP TSC0021675
aagtttagtttgy

SEQ ID NO: 86250 - DNA, 13 bp, Artificial Sequence
  Oligonucleotide for detection of SNP TSC0021675
rcaaactaaactt

SEQ ID NO: 86251 - DNA, 13 bp, Artificial Sequence
  Oligonucleotide for detection of SNP TSC0021675
aagttttgtttgy

SEQ ID NO: 86252 - DNA, 13 bp, Artificial Sequence
  Oligonucleotide for detection of SNP TSC0021675
rcaaacaaaactt

SEQ ID NO: 86253 - DNA, 13 bp, Artificial Sequence
  Oligonucleotide for detection of SNP TSC0021675
aagtttcgtttgy

SEQ ID NO: 86254 - DNA, 13 bp, Artificial Sequence
  Oligonucleotide for detection of SNP TSC0021675
rcaaacgaaactt

SEQ ID NO: 86255 - DNA, 13 bp, Artificial Sequence
  Oligonucleotide for detection of SNP TSC0021675
gtaaattgggttt

SEQ ID NO: 86256 - DNA, 13 bp, Artificial Sequence
  Oligonucleotide for detection of SNP TSC0021675
aaacccaatttac

SEQ ID NO: 86257 - DNA, 13 bp, Artificial Sequence
  Oligonucleotide for detection of SNP TSC0021675
gtaaatggggttt

SEQ ID NO: 86258 - DNA, 13 bp, Artificial Sequence
  Oligonucleotide for detection of SNP TSC0021675
aaaccccatttac

SEQ ID NO: 86259 - DNA, 13 bp, Artificial Sequence
  Oligonucleotide for detection of SNP TSC0021675
gtaaacggggttt

SEQ ID NO: 86260 - DNA, 13 bp, Artificial Sequence
  Oligonucleotide for detection of SNP TSC0021675
aaaccccgtttac

SEQ ID NO: 86261 - DNA, 13 bp, Artificial Sequence
  Oligonucleotide for detection of SNP TSC0021676
agattttgttaaa

SEQ ID NO: 86262 - DNA, 13 bp, Artificial Sequence
  Oligonucleotide for detection of SNP TSC0021676
tttaacaaaatct

SEQ ID NO: 86263 - DNA, 13 bp, Artificial Sequence
  Oligonucleotide for detection of SNP TSC0021676
agatttcgttaaa

SEQ ID NO: 86264 - DNA, 13 bp, Artificial Sequence
  Oligonucleotide for detection of SNP TSC0021676
tttaacgaaatct

SEQ ID NO: 86265 - DNA, 13 bp, Artificial Sequence
  Oligonucleotide for detection of SNP TSC0021676
tttgatggagttt

SEQ ID NO: 86266 - DNA, 13 bp, Artificial Sequence
  Oligonucleotide for detection of SNP TSC0021676
aaactccatcaaa

SEQ ID NO: 86267 - DNA, 13 bp, Artificial Sequence
  Oligonucleotide for detection of SNP TSC0021676
tttgatagagttt

SEQ ID NO: 86268 - DNA, 13 bp, Artificial Sequence
  Oligonucleotide for detection of SNP TSC0021676
aaactctatcaaa

SEQ ID NO: 86269 - DNA, 13 bp, Artificial Sequence
  Oligonucleotide for detection of SNP TSC0021676
tttgacggagttt

SEQ ID NO: 86270 - DNA, 13 bp, Artificial Sequence
  Oligonucleotide for detection of SNP TSC0021676
aaactccgtcaaa

SEQ ID NO: 86271 - DNA, 13 bp, Artificial Sequence
  Oligonucleotide for detection of SNP TSC0021677
aaaatgtgatgaa

SEQ ID NO: 86272 - DNA, 13 bp, Artificial Sequence
  Oligonucleotide for detection of SNP TSC0021677
ttcatcacatttt

SEQ ID NO: 86273 - DNA, 13 bp, Artificial Sequence
  Oligonucleotide for detection of SNP TSC0021677
aaaacgtgatgaa

SEQ ID NO: 86274 - DNA, 13 bp, Artificial Sequence
  Oligonucleotide for detection of SNP TSC0021677
ttcatcacgtttt

SEQ ID NO: 86275 - DNA, 13 bp, Artificial Sequence
  Oligonucleotide for detection of SNP TSC0021677
aaaatgcgatgaa

SEQ ID NO: 86276 - DNA, 13 bp, Artificial Sequence
  Oligonucleotide for detection of SNP TSC0021677
ttcatcgcatttt

SEQ ID NO: 86277 - DNA, 13 bp, Artificial Sequence
  Oligonucleotide for detection of SNP TSC0021677
aaaacgcgatgaa

SEQ ID NO: 86278 - DNA, 13 bp, Artificial Sequence
  Oligonucleotide for detection of SNP TSC0021677
ttcatcgcgtttt

SEQ ID NO: 86279 - DNA, 13 bp, Artificial Sequence
  Oligonucleotide for detection of SNP TSC0021677
tttattacgtttt

SEQ ID NO: 86280 - DNA, 13 bp, Artificial Sequence
  Oligonucleotide for detection of SNP TSC0021677
aaaacgtaataaa

SEQ ID NO: 86281 - DNA, 13 bp, Artificial Sequence
  Oligonucleotide for detection of SNP TSC0021677
tttattgcgtttt

SEQ ID NO: 86282 - DNA, 13 bp, Artificial Sequence
  Oligonucleotide for detection of SNP TSC0021677
aaaacgcaataaa

SEQ ID NO: 86283 - DNA, 13 bp, Artificial Sequence
  Oligonucleotide for detection of SNP TSC0021677
tttatcgcgtttt

SEQ ID NO: 86284 - DNA, 13 bp, Artificial Sequence
  Oligonucleotide for detection of SNP TSC0021677
aaaacgcgataaa

SEQ ID NO: 86285 - DNA, 13 bp, Artificial Sequence
  Oligonucleotide for detection of SNP TSC0021678
aatttaatgtgtt

SEQ ID NO: 86286 - DNA, 13 bp, Artificial Sequence
  Oligonucleotide for detection of SNP TSC0021678
aacacattaaatt

SEQ ID NO: 86287 - DNA, 13 bp, Artificial Sequence
  Oligonucleotide for detection of SNP TSC0021678
aatttattgtgtt

SEQ ID NO: 86288 - DNA, 13 bp, Artificial Sequence
  Oligonucleotide for detection of SNP TSC0021678
aacacaataaatt

SEQ ID NO: 86289 - DNA, 13 bp, Artificial Sequence
  Oligonucleotide for detection of SNP TSC0021678
agtatattgagtt

SEQ ID NO: 86290 - DNA, 13 bp, Artificial Sequence
  Oligonucleotide for detection of SNP TSC0021678
aactcaatatact

SEQ ID NO: 86291 - DNA, 13 bp, Artificial Sequence
  Oligonucleotide for detection of SNP TSC0021678
agtatagtgagtt

SEQ ID NO: 86292 - DNA, 13 bp, Artificial Sequence
  Oligonucleotide for detection of SNP TSC0021678
aactcactatact

SEQ ID NO: 86293 - DNA, 13 bp, Artificial Sequence
  Oligonucleotide for detection of SNP TSC0021681
gttttaggttgta

SEQ ID NO: 86294 - DNA, 13 bp, Artificial Sequence
  Oligonucleotide for detection of SNP TSC0021681
tacaacctaaaac

SEQ ID NO: 86295 - DNA, 13 bp, Artificial Sequence
  Oligonucleotide for detection of SNP TSC0021681
gttttatgttgta

SEQ ID NO: 86296 - DNA, 13 bp, Artificial Sequence
  Oligonucleotide for detection of SNP TSC0021681
tacaacataaaac

SEQ ID NO: 86297 - DNA, 13 bp, Artificial Sequence
  Oligonucleotide for detection of SNP TSC0021681
tgtagtttggaay

SEQ ID NO: 86298 - DNA, 13 bp, Artificial Sequence
  Oligonucleotide for detection of SNP TSC0021681
rttccaaactaca

SEQ ID NO: 86299 - DNA, 13 bp, Artificial Sequence
  Oligonucleotide for detection of SNP TSC0021681
tgtagtatggaay

SEQ ID NO: 86300 - DNA, 13 bp, Artificial Sequence
  Oligonucleotide for detection of SNP TSC0021681
rttccatactaca

SEQ ID NO: 86301 - DNA, 13 bp, Artificial Sequence
  Oligonucleotide for detection of SNP TSC0021682
aggaagattttta

SEQ ID NO: 86302 - DNA, 13 bp, Artificial Sequence
  Oligonucleotide for detection of SNP TSC0021682
taaaaatcttcct

SEQ ID NO: 86303 - DNA, 13 bp, Artificial Sequence
  Oligonucleotide for detection of SNP TSC0021682
aggaaggttttta

SEQ ID NO: 86304 - DNA, 13 bp, Artificial Sequence
  Oligonucleotide for detection of SNP TSC0021682
taaaaaccttcct

SEQ ID NO: 86305 - DNA, 13 bp, Artificial Sequence
  Oligonucleotide for detection of SNP TSC0021684
agaataaatgata

SEQ ID NO: 86306 - DNA, 13 bp, Artificial Sequence
  Oligonucleotide for detection of SNP TSC0021684
tatcatttattct

SEQ ID NO: 86307 - DNA, 13 bp, Artificial Sequence
  Oligonucleotide for detection of SNP TSC0021684
agaatatatgata

SEQ ID NO: 86308 - DNA, 13 bp, Artificial Sequence
  Oligonucleotide for detection of SNP TSC0021684
tatcatatattct

SEQ ID NO: 86309 - DNA, 13 bp, Artificial Sequence
  Oligonucleotide for detection of SNP TSC0021684
tattatttgtttt

SEQ ID NO: 86310 - DNA, 13 bp, Artificial Sequence
  Oligonucleotide for detection of SNP TSC0021684
aaaacaaataata

SEQ ID NO: 86311 - DNA, 13 bp, Artificial Sequence
  Oligonucleotide for detection of SNP TSC0021684
tattatgtgtttt

SEQ ID NO: 86312 - DNA, 13 bp, Artificial Sequence
  Oligonucleotide for detection of SNP TSC0021684
aaaacacataata

SEQ ID NO: 86313 - DNA, 13 bp, Artificial Sequence
  Oligonucleotide for detection of SNP TSC0021685
aaatttagatttt

SEQ ID NO: 86314 - DNA, 13 bp, Artificial Sequence
  Oligonucleotide for detection of SNP TSC0021685
aaaatctaaattt

SEQ ID NO: 86315 - DNA, 13 bp, Artificial Sequence
  Oligonucleotide for detection of SNP TSC0021685
aaattttgatttt

SEQ ID NO: 86316 - DNA, 13 bp, Artificial Sequence
  Oligonucleotide for detection of SNP TSC0021685
aaaatcaaaattt

SEQ ID NO: 86317 - DNA, 13 bp, Artificial Sequence
  Oligonucleotide for detection of SNP TSC0021685
agggtttgggttt

SEQ ID NO: 86318 - DNA, 13 bp, Artificial Sequence
  Oligonucleotide for detection of SNP TSC0021685
aaacccaaaccct

SEQ ID NO: 86319 - DNA, 13 bp, Artificial Sequence
  Oligonucleotide for detection of SNP TSC0021685
agggttagggttt

SEQ ID NO: 86320 - DNA, 13 bp, Artificial Sequence
  Oligonucleotide for detection of SNP TSC0021685
aaaccctaaccct

SEQ ID NO: 86321 - DNA, 13 bp, Artificial Sequence
  Oligonucleotide for detection of SNP TSC0021686
ttagttatttgga

SEQ ID NO: 86322 - DNA, 13 bp, Artificial Sequence
  Oligonucleotide for detection of SNP TSC0021686
tccaaataactaa

SEQ ID NO: 86323 - DNA, 13 bp, Artificial Sequence
  Oligonucleotide for detection of SNP TSC0021686
ttagttttttgga

SEQ ID NO: 86324 - DNA, 13 bp, Artificial Sequence
  Oligonucleotide for detection of SNP TSC0021686
tccaaaaaactaa

SEQ ID NO: 86325 - DNA, 13 bp, Artificial Sequence
  Oligonucleotide for detection of SNP TSC0021686
tttaagtaattgg

SEQ ID NO: 86326 - DNA, 13 bp, Artificial Sequence
  Oligonucleotide for detection of SNP TSC0021686
ccaattacttaaa

SEQ ID NO: 86327 - DNA, 13 bp, Artificial Sequence
  Oligonucleotide for detection of SNP TSC0021686
tttaaggaattgg

SEQ ID NO: 86328 - DNA, 13 bp, Artificial Sequence
  Oligonucleotide for detection of SNP TSC0021686
ccaattccttaaa

SEQ ID NO: 86329 - DNA, 13 bp, Artificial Sequence
  Oligonucleotide for detection of SNP TSC0021688
gtattaaattttg

SEQ ID NO: 86330 - DNA, 13 bp, Artificial Sequence
  Oligonucleotide for detection of SNP TSC0021688
caaaatttaatac

SEQ ID NO: 86331 - DNA, 13 bp, Artificial Sequence
  Oligonucleotide for detection of SNP TSC0021688
gtattagattttg

SEQ ID NO: 86332 - DNA, 13 bp, Artificial Sequence
  Oligonucleotide for detection of SNP TSC0021688
caaaatctaatac

SEQ ID NO: 86333 - DNA, 13 bp, Artificial Sequence
  Oligonucleotide for detection of SNP TSC0021689
ttttgtagtttta

SEQ ID NO: 86334 - DNA, 13 bp, Artificial Sequence
  Oligonucleotide for detection of SNP TSC0021689
taaaactacaaaa

SEQ ID NO: 86335 - DNA, 13 bp, Artificial Sequence
  Oligonucleotide for detection of SNP TSC0021689
ttttgttgtttta

SEQ ID NO: 86336 - DNA, 13 bp, Artificial Sequence
  Oligonucleotide for detection of SNP TSC0021689
taaaacaacaaaa

SEQ ID NO: 86337 - DNA, 13 bp, Artificial Sequence
  Oligonucleotide for detection of SNP TSC0021689
tttcgtagtttta

SEQ ID NO: 86338 - DNA, 13 bp, Artificial Sequence
  Oligonucleotide for detection of SNP TSC0021689
taaaactacgaaa

SEQ ID NO: 86339 - DNA, 13 bp, Artificial Sequence
  Oligonucleotide for detection of SNP TSC0021689
tttcgttgtttta

SEQ ID NO: 86340 - DNA, 13 bp, Artificial Sequence
  Oligonucleotide for detection of SNP TSC0021689
taaaacaacgaaa

SEQ ID NO: 86341 - DNA, 13 bp, Artificial Sequence
  Oligonucleotide for detection of SNP TSC0021689
ttttgtcgtttta

SEQ ID NO: 86342 - DNA, 13 bp, Artificial Sequence
  Oligonucleotide for detection of SNP TSC0021689
taaaacgacaaaa

SEQ ID NO: 86343 - DNA, 13 bp, Artificial Sequence
  Oligonucleotide for detection of SNP TSC0021689
tttcgtcgtttta

SEQ ID NO: 86344 - DNA, 13 bp, Artificial Sequence
  Oligonucleotide for detection of SNP TSC0021689
taaaacgacgaaa

SEQ ID NO: 86345 - DNA, 13 bp, Artificial Sequence
  Oligonucleotide for detection of SNP TSC0021689
tggggttgtgagg

SEQ ID NO: 86346 - DNA, 13 bp, Artificial Sequence
  Oligonucleotide for detection of SNP TSC0021689
cctcacaacccca

SEQ ID NO: 86347 - DNA, 13 bp, Artificial Sequence
  Oligonucleotide for detection of SNP TSC0021689
tggggtggtgagg

SEQ ID NO: 86348 - DNA, 13 bp, Artificial Sequence
  Oligonucleotide for detection of SNP TSC0021689
cctcaccacccca

SEQ ID NO: 86349 - DNA, 13 bp, Artificial Sequence
  Oligonucleotide for detection of SNP TSC0021689
tggggttgcgagg

SEQ ID NO: 86350 - DNA, 13 bp, Artificial Sequence
  Oligonucleotide for detection of SNP TSC0021689
cctcgcaacccca

SEQ ID NO: 86351 - DNA, 13 bp, Artificial Sequence
  Oligonucleotide for detection of SNP TSC0021689
tggggcggtgagg

SEQ ID NO: 86352 - DNA, 13 bp, Artificial Sequence
  Oligonucleotide for detection of SNP TSC0021689
cctcaccgcccca

SEQ ID NO: 86353 - DNA, 13 bp, Artificial Sequence
  Oligonucleotide for detection of SNP TSC0021689
tggggtggcgagg

SEQ ID NO: 86354 - DNA, 13 bp, Artificial Sequence
  Oligonucleotide for detection of SNP TSC0021689
cctcgccacccca

SEQ ID NO: 86355 - DNA, 13 bp, Artificial Sequence
  Oligonucleotide for detection of SNP TSC0021689
tggggcggcgagg

SEQ ID NO: 86356 - DNA, 13 bp, Artificial Sequence
  Oligonucleotide for detection of SNP TSC0021689
cctcgccgcccca

SEQ ID NO: 86357 - DNA, 13 bp, Artificial Sequence
  Oligonucleotide for detection of SNP TSC0021690
tgtttgagaatty

SEQ ID NO: 86358 - DNA, 13 bp, Artificial Sequence
  Oligonucleotide for detection of SNP TSC0021690
raattctcaaaca

SEQ ID NO: 86359 - DNA, 13 bp, Artificial Sequence
  Oligonucleotide for detection of SNP TSC0021690
tgtttgtgaatty

SEQ ID NO: 86360 - DNA, 13 bp, Artificial Sequence
  Oligonucleotide for detection of SNP TSC0021690
raattcacaaaca

SEQ ID NO: 86361 - DNA, 13 bp, Artificial Sequence
  Oligonucleotide for detection of SNP TSC0021690
gagtttttaaata

SEQ ID NO: 86362 - DNA, 13 bp, Artificial Sequence
  Oligonucleotide for detection of SNP TSC0021690
tatttaaaaactc

SEQ ID NO: 86363 - DNA, 13 bp, Artificial Sequence
  Oligonucleotide for detection of SNP TSC0021690
gagtttataaata

SEQ ID NO: 86364 - DNA, 13 bp, Artificial Sequence
  Oligonucleotide for detection of SNP TSC0021690
tatttataaactc

SEQ ID NO: 86365 - DNA, 13 bp, Artificial Sequence
  Oligonucleotide for detection of SNP TSC0021691
attatagtatttg

SEQ ID NO: 86366 - DNA, 13 bp, Artificial Sequence
  Oligonucleotide for detection of SNP TSC0021691
caaatactataat

SEQ ID NO: 86367 - DNA, 13 bp, Artificial Sequence
  Oligonucleotide for detection of SNP TSC0021691
attataatatttg

SEQ ID NO: 86368 - DNA, 13 bp, Artificial Sequence
  Oligonucleotide for detection of SNP TSC0021691
caaatattataat

SEQ ID NO: 86369 - DNA, 13 bp, Artificial Sequence
  Oligonucleotide for detection of SNP TSC0021692
gtagtagtataaa

SEQ ID NO: 86370 - DNA, 13 bp, Artificial Sequence
  Oligonucleotide for detection of SNP TSC0021692
tttatactactac

SEQ ID NO: 86371 - DNA, 13 bp, Artificial Sequence
  Oligonucleotide for detection of SNP TSC0021692
gtagtaatataaa

SEQ ID NO: 86372 - DNA, 13 bp, Artificial Sequence
  Oligonucleotide for detection of SNP TSC0021692
tttatattactac

SEQ ID NO: 86373 - DNA, 13 bp, Artificial Sequence
  Oligonucleotide for detection of SNP TSC0021694
aggagaatataat

SEQ ID NO: 86374 - DNA, 13 bp, Artificial Sequence
  Oligonucleotide for detection of SNP TSC0021694
attatattctcct

SEQ ID NO: 86375 - DNA, 13 bp, Artificial Sequence
  Oligonucleotide for detection of SNP TSC0021694
aggagagtataat

SEQ ID NO: 86376 - DNA, 13 bp, Artificial Sequence
  Oligonucleotide for detection of SNP TSC0021694
attatactctcct

SEQ ID NO: 86377 - DNA, 13 bp, Artificial Sequence
  Oligonucleotide for detection of SNP TSC0021695
aattttgatttta

SEQ ID NO: 86378 - DNA, 13 bp, Artificial Sequence
  Oligonucleotide for detection of SNP TSC0021695
taaaatcaaaatt

SEQ ID NO: 86379 - DNA, 13 bp, Artificial Sequence
  Oligonucleotide for detection of SNP TSC0021696
ttttaatttggag

SEQ ID NO: 86380 - DNA, 13 bp, Artificial Sequence
  Oligonucleotide for detection of SNP TSC0021696
ctccaaattaaaa

SEQ ID NO: 86381 - DNA, 13 bp, Artificial Sequence
  Oligonucleotide for detection of SNP TSC0021696
ttttaagttggag

SEQ ID NO: 86382 - DNA, 13 bp, Artificial Sequence
  Oligonucleotide for detection of SNP TSC0021696
ctccaacttaaaa

SEQ ID NO: 86383 - DNA, 13 bp, Artificial Sequence
  Oligonucleotide for detection of SNP TSC0021697
tagtatgagaatt

SEQ ID NO: 86384 - DNA, 13 bp, Artificial Sequence
  Oligonucleotide for detection of SNP TSC0021697
aattctcatacta

SEQ ID NO: 86385 - DNA, 13 bp, Artificial Sequence
  Oligonucleotide for detection of SNP TSC0021697
tagtataagaatt

SEQ ID NO: 86386 - DNA, 13 bp, Artificial Sequence
  Oligonucleotide for detection of SNP TSC0021697
aattcttatacta

SEQ ID NO: 86387 - DNA, 13 bp, Artificial Sequence
  Oligonucleotide for detection of SNP TSC0021699
aggggatgaagtt

SEQ ID NO: 86388 - DNA, 13 bp, Artificial Sequence
  Oligonucleotide for detection of SNP TSC0021699
aacttcatcccct

SEQ ID NO: 86389 - DNA, 13 bp, Artificial Sequence
  Oligonucleotide for detection of SNP TSC0021699
aggggaggaagtt

SEQ ID NO: 86390 - DNA, 13 bp, Artificial Sequence
  Oligonucleotide for detection of SNP TSC0021699
aacttcctcccct

SEQ ID NO: 86391 - DNA, 13 bp, Artificial Sequence
  Oligonucleotide for detection of SNP TSC0021699
aggggacgaagtt

SEQ ID NO: 86392 - DNA, 13 bp, Artificial Sequence
  Oligonucleotide for detection of SNP TSC0021699
aacttcgtcccct

SEQ ID NO: 86393 - DNA, 13 bp, Artificial Sequence
  Oligonucleotide for detection of SNP TSC0021699
aatttcgtttttt

SEQ ID NO: 86394 - DNA, 13 bp, Artificial Sequence
  Oligonucleotide for detection of SNP TSC0021699
aaaaaacgaaatt

SEQ ID NO: 86395 - DNA, 13 bp, Artificial Sequence
  Oligonucleotide for detection of SNP TSC0021700
atatatatggtta

SEQ ID NO: 86396 - DNA, 13 bp, Artificial Sequence
  Oligonucleotide for detection of SNP TSC0021700
taaccatatatat

SEQ ID NO: 86397 - DNA, 13 bp, Artificial Sequence
  Oligonucleotide for detection of SNP TSC0021700
atatatttggtta

SEQ ID NO: 86398 - DNA, 13 bp, Artificial Sequence
  Oligonucleotide for detection of SNP TSC0021700
taaccaaatatat

SEQ ID NO: 86399 - DNA, 13 bp, Artificial Sequence
  Oligonucleotide for detection of SNP TSC0021700
tagttatgtatat

SEQ ID NO: 86400 - DNA, 13 bp, Artificial Sequence
  Oligonucleotide for detection of SNP TSC0021700
atatacataacta

SEQ ID NO: 86401 - DNA, 13 bp, Artificial Sequence
  Oligonucleotide for detection of SNP TSC0021700
tagttaggtatat

SEQ ID NO: 86402 - DNA, 13 bp, Artificial Sequence
  Oligonucleotide for detection of SNP TSC0021700
atatacctaacta

SEQ ID NO: 86403 - DNA, 13 bp, Artificial Sequence
  Oligonucleotide for detection of SNP TSC0021701
tgttattatgttt

SEQ ID NO: 86404 - DNA, 13 bp, Artificial Sequence
  Oligonucleotide for detection of SNP TSC0021701
aaacataataaca

SEQ ID NO: 86405 - DNA, 13 bp, Artificial Sequence
  Oligonucleotide for detection of SNP TSC0021701
tgttatgatgttt

SEQ ID NO: 86406 - DNA, 13 bp, Artificial Sequence
  Oligonucleotide for detection of SNP TSC0021701
aaacatcataaca

SEQ ID NO: 86407 - DNA, 13 bp, Artificial Sequence
  Oligonucleotide for detection of SNP TSC0021701
cgttattatgttt

SEQ ID NO: 86408 - DNA, 13 bp, Artificial Sequence
  Oligonucleotide for detection of SNP TSC0021701
aaacataataacg

SEQ ID NO: 86409 - DNA, 13 bp, Artificial Sequence
  Oligonucleotide for detection of SNP TSC0021701
cgttatgatgttt

SEQ ID NO: 86410 - DNA, 13 bp, Artificial Sequence
  Oligonucleotide for detection of SNP TSC0021701
aaacatcataacg

SEQ ID NO: 86411 - DNA, 13 bp, Artificial Sequence
  Oligonucleotide for detection of SNP TSC0021701
tgttacgatgttt

SEQ ID NO: 86412 - DNA, 13 bp, Artificial Sequence
  Oligonucleotide for detection of SNP TSC0021701
aaacatcgtaaca

SEQ ID NO: 86413 - DNA, 13 bp, Artificial Sequence
  Oligonucleotide for detection of SNP TSC0021701
cgttacgatgttt

SEQ ID NO: 86414 - DNA, 13 bp, Artificial Sequence
  Oligonucleotide for detection of SNP TSC0021701
aaacatcgtaacg

SEQ ID NO: 86415 - DNA, 13 bp, Artificial Sequence
  Oligonucleotide for detection of SNP TSC0021701
aggtatggtggtg

SEQ ID NO: 86416 - DNA, 13 bp, Artificial Sequence
  Oligonucleotide for detection of SNP TSC0021701
caccaccatacct

SEQ ID NO: 86417 - DNA, 13 bp, Artificial Sequence
  Oligonucleotide for detection of SNP TSC0021701
aggtattgtggtg

SEQ ID NO: 86418 - DNA, 13 bp, Artificial Sequence
  Oligonucleotide for detection of SNP TSC0021701
caccacaatacct

SEQ ID NO: 86419 - DNA, 13 bp, Artificial Sequence
  Oligonucleotide for detection of SNP TSC0021701
aggtatggtggcg

SEQ ID NO: 86420 - DNA, 13 bp, Artificial Sequence
  Oligonucleotide for detection of SNP TSC0021701
cgccaccatacct

SEQ ID NO: 86421 - DNA, 13 bp, Artificial Sequence
  Oligonucleotide for detection of SNP TSC0021701
aggtatcgtggtg

SEQ ID NO: 86422 - DNA, 13 bp, Artificial Sequence
  Oligonucleotide for detection of SNP TSC0021701
caccacgatacct

SEQ ID NO: 86423 - DNA, 13 bp, Artificial Sequence
  Oligonucleotide for detection of SNP TSC0021701
aggtattgtggcg

SEQ ID NO: 86424 - DNA, 13 bp, Artificial Sequence
  Oligonucleotide for detection of SNP TSC0021701
cgccacaatacct

SEQ ID NO: 86425 - DNA, 13 bp, Artificial Sequence
  Oligonucleotide for detection of SNP TSC0021701
aggtatcgtggcg

SEQ ID NO: 86426 - DNA, 13 bp, Artificial Sequence
  Oligonucleotide for detection of SNP TSC0021701
cgccacgatacct

SEQ ID NO: 86427 - DNA, 13 bp, Artificial Sequence
  Oligonucleotide for detection of SNP TSC0021702
ttattttggttty

SEQ ID NO: 86428 - DNA, 13 bp, Artificial Sequence
  Oligonucleotide for detection of SNP TSC0021702
raaaccaaaataa

SEQ ID NO: 86429 - DNA, 13 bp, Artificial Sequence
  Oligonucleotide for detection of SNP TSC0021702
ttatttcggttty

SEQ ID NO: 86430 - DNA, 13 bp, Artificial Sequence
  Oligonucleotide for detection of SNP TSC0021702
raaaccgaaataa

SEQ ID NO: 86431 - DNA, 13 bp, Artificial Sequence
  Oligonucleotide for detection of SNP TSC0021703
attataaagtaty

SEQ ID NO: 86432 - DNA, 13 bp, Artificial Sequence
  Oligonucleotide for detection of SNP TSC0021703
ratactttataat

SEQ ID NO: 86433 - DNA, 13 bp, Artificial Sequence
  Oligonucleotide for detection of SNP TSC0021703
attatatagtaty

SEQ ID NO: 86434 - DNA, 13 bp, Artificial Sequence
  Oligonucleotide for detection of SNP TSC0021703
ratactatataat

SEQ ID NO: 86435 - DNA, 13 bp, Artificial Sequence
  Oligonucleotide for detection of SNP TSC0021703
gatattttgtagt

SEQ ID NO: 86436 - DNA, 13 bp, Artificial Sequence
  Oligonucleotide for detection of SNP TSC0021703
actacaaaatatc

SEQ ID NO: 86437 - DNA, 13 bp, Artificial Sequence
  Oligonucleotide for detection of SNP TSC0021703
gatattgtgtagt

SEQ ID NO: 86438 - DNA, 13 bp, Artificial Sequence
  Oligonucleotide for detection of SNP TSC0021703
actacacaatatc

SEQ ID NO: 86439 - DNA, 13 bp, Artificial Sequence
  Oligonucleotide for detection of SNP TSC0021704
atatgatgatggg

SEQ ID NO: 86440 - DNA, 13 bp, Artificial Sequence
  Oligonucleotide for detection of SNP TSC0021704
cccatcatcatat

SEQ ID NO: 86441 - DNA, 13 bp, Artificial Sequence
  Oligonucleotide for detection of SNP TSC0021704
atatgacgatggg

SEQ ID NO: 86442 - DNA, 13 bp, Artificial Sequence
  Oligonucleotide for detection of SNP TSC0021704
cccatcgtcatat

SEQ ID NO: 86443 - DNA, 13 bp, Artificial Sequence
  Oligonucleotide for detection of SNP TSC0021704
tttattgttatgt

SEQ ID NO: 86444 - DNA, 13 bp, Artificial Sequence
  Oligonucleotide for detection of SNP TSC0021704
acataacaataaa

SEQ ID NO: 86445 - DNA, 13 bp, Artificial Sequence
  Oligonucleotide for detection of SNP TSC0021704
tttattattatgt

SEQ ID NO: 86446 - DNA, 13 bp, Artificial Sequence
  Oligonucleotide for detection of SNP TSC0021704
acataataataaa

SEQ ID NO: 86447 - DNA, 13 bp, Artificial Sequence
  Oligonucleotide for detection of SNP TSC0021704
tttatcgttatgt

SEQ ID NO: 86448 - DNA, 13 bp, Artificial Sequence
  Oligonucleotide for detection of SNP TSC0021704
acataacgataaa

SEQ ID NO: 86449 - DNA, 13 bp, Artificial Sequence
  Oligonucleotide for detection of SNP TSC0021706
ttaattatgtttg

SEQ ID NO: 86450 - DNA, 13 bp, Artificial Sequence
  Oligonucleotide for detection of SNP TSC0021706
caaacataattaa

SEQ ID NO: 86451 - DNA, 13 bp, Artificial Sequence
  Oligonucleotide for detection of SNP TSC0021706
ttaattgtgtttg

SEQ ID NO: 86452 - DNA, 13 bp, Artificial Sequence
  Oligonucleotide for detection of SNP TSC0021706
caaacacaattaa

SEQ ID NO: 86453 - DNA, 13 bp, Artificial Sequence
  Oligonucleotide for detection of SNP TSC0021710
tttttaatatggg

SEQ ID NO: 86454 - DNA, 13 bp, Artificial Sequence
  Oligonucleotide for detection of SNP TSC0021710
cccatattaaaaa

SEQ ID NO: 86455 - DNA, 13 bp, Artificial Sequence
  Oligonucleotide for detection of SNP TSC0021710
tttttagtatggg

SEQ ID NO: 86456 - DNA, 13 bp, Artificial Sequence
  Oligonucleotide for detection of SNP TSC0021710
cccatactaaaaa

SEQ ID NO: 86457 - DNA, 13 bp, Artificial Sequence
  Oligonucleotide for detection of SNP TSC0021716
ttgttgaggggaa

SEQ ID NO: 86458 - DNA, 13 bp, Artificial Sequence
  Oligonucleotide for detection of SNP TSC0021716
ttcccctcaacaa

SEQ ID NO: 86459 - DNA, 13 bp, Artificial Sequence
  Oligonucleotide for detection of SNP TSC0021716
ttgttggggggaa

SEQ ID NO: 86460 - DNA, 13 bp, Artificial Sequence
  Oligonucleotide for detection of SNP TSC0021716
ttccccccaacaa

SEQ ID NO: 86461 - DNA, 13 bp, Artificial Sequence
  Oligonucleotide for detection of SNP TSC0021717
ttaaaagatgtgy

SEQ ID NO: 86462 - DNA, 13 bp, Artificial Sequence
  Oligonucleotide for detection of SNP TSC0021717
rcacatcttttaa

SEQ ID NO: 86463 - DNA, 13 bp, Artificial Sequence
  Oligonucleotide for detection of SNP TSC0021717
ttaaaatatgtgy

SEQ ID NO: 86464 - DNA, 13 bp, Artificial Sequence
  Oligonucleotide for detection of SNP TSC0021717
rcacatattttaa

SEQ ID NO: 86465 - DNA, 13 bp, Artificial Sequence
  Oligonucleotide for detection of SNP TSC0021717
gtatattttttgg

SEQ ID NO: 86466 - DNA, 13 bp, Artificial Sequence
  Oligonucleotide for detection of SNP TSC0021717
ccaaaaaatatac

SEQ ID NO: 86467 - DNA, 13 bp, Artificial Sequence
  Oligonucleotide for detection of SNP TSC0021717
gtatatattttgg

SEQ ID NO: 86468 - DNA, 13 bp, Artificial Sequence
  Oligonucleotide for detection of SNP TSC0021717
ccaaaatatatac

SEQ ID NO: 86469 - DNA, 13 bp, Artificial Sequence
  Oligonucleotide for detection of SNP TSC0021718
atttttaaaaatg

SEQ ID NO: 86470 - DNA, 13 bp, Artificial Sequence
  Oligonucleotide for detection of SNP TSC0021718
catttttaaaaat

SEQ ID NO: 86471 - DNA, 13 bp, Artificial Sequence
  Oligonucleotide for detection of SNP TSC0021718
attttttaaaatg

SEQ ID NO: 86472 - DNA, 13 bp, Artificial Sequence
  Oligonucleotide for detection of SNP TSC0021718
cattttaaaaaat

SEQ ID NO: 86473 - DNA, 13 bp, Artificial Sequence
  Oligonucleotide for detection of SNP TSC0021718
tatttttaagggt

SEQ ID NO: 86474 - DNA, 13 bp, Artificial Sequence
  Oligonucleotide for detection of SNP TSC0021718
acccttaaaaata

SEQ ID NO: 86475 - DNA, 13 bp, Artificial Sequence
  Oligonucleotide for detection of SNP TSC0021718
tattttaaagggt

SEQ ID NO: 86476 - DNA, 13 bp, Artificial Sequence
  Oligonucleotide for detection of SNP TSC0021718
accctttaaaata

SEQ ID NO: 86477 - DNA, 13 bp, Artificial Sequence
  Oligonucleotide for detection of SNP TSC0021719
aaatagagaagag

SEQ ID NO: 86478 - DNA, 13 bp, Artificial Sequence
  Oligonucleotide for detection of SNP TSC0021719
ctcttctctattt

SEQ ID NO: 86479 - DNA, 13 bp, Artificial Sequence
  Oligonucleotide for detection of SNP TSC0021719
aaatagggaagag

SEQ ID NO: 86480 - DNA, 13 bp, Artificial Sequence
  Oligonucleotide for detection of SNP TSC0021719
ctcttccctattt

SEQ ID NO: 86481 - DNA, 13 bp, Artificial Sequence
  Oligonucleotide for detection of SNP TSC0021720
gataggggtgtty

SEQ ID NO: 86482 - DNA, 13 bp, Artificial Sequence
  Oligonucleotide for detection of SNP TSC0021720
raacacccctatc

SEQ ID NO: 86483 - DNA, 13 bp, Artificial Sequence
  Oligonucleotide for detection of SNP TSC0021720
gataggtgtgtty

SEQ ID NO: 86484 - DNA, 13 bp, Artificial Sequence
  Oligonucleotide for detection of SNP TSC0021720
raacacacctatc

SEQ ID NO: 86485 - DNA, 13 bp, Artificial Sequence
  Oligonucleotide for detection of SNP TSC0021720
gagtatttttgty

SEQ ID NO: 86486 - DNA, 13 bp, Artificial Sequence
  Oligonucleotide for detection of SNP TSC0021720
racaaaaatactc

SEQ ID NO: 86487 - DNA, 13 bp, Artificial Sequence
  Oligonucleotide for detection of SNP TSC0021720
gagtatatttgty

SEQ ID NO: 86488 - DNA, 13 bp, Artificial Sequence
  Oligonucleotide for detection of SNP TSC0021720
racaaatatactc

SEQ ID NO: 86489 - DNA, 13 bp, Artificial Sequence
  Oligonucleotide for detection of SNP TSC0021721
tattataggtggg

SEQ ID NO: 86490 - DNA, 13 bp, Artificial Sequence
  Oligonucleotide for detection of SNP TSC0021721
cccacctataata

SEQ ID NO: 86491 - DNA, 13 bp, Artificial Sequence
  Oligonucleotide for detection of SNP TSC0021721
tattatgggtggg

SEQ ID NO: 86492 - DNA, 13 bp, Artificial Sequence
  Oligonucleotide for detection of SNP TSC0021721
cccacccataata

SEQ ID NO: 86493 - DNA, 13 bp, Artificial Sequence
  Oligonucleotide for detection of SNP TSC0021721
tattacgggtggg

SEQ ID NO: 86494 - DNA, 13 bp, Artificial Sequence
  Oligonucleotide for detection of SNP TSC0021721
cccacccgtaata

SEQ ID NO: 86495 - DNA, 13 bp, Artificial Sequence
  Oligonucleotide for detection of SNP TSC0021721
tttatttgtgatg

SEQ ID NO: 86496 - DNA, 13 bp, Artificial Sequence
  Oligonucleotide for detection of SNP TSC0021721
catcacaaataaa

SEQ ID NO: 86497 - DNA, 13 bp, Artificial Sequence
  Oligonucleotide for detection of SNP TSC0021721
tttattcgtgatg

SEQ ID NO: 86498 - DNA, 13 bp, Artificial Sequence
  Oligonucleotide for detection of SNP TSC0021721
catcacgaataaa

SEQ ID NO: 86499 - DNA, 13 bp, Artificial Sequence
  Oligonucleotide for detection of SNP TSC0021722
gtttatgattttg

SEQ ID NO: 86500 - DNA, 13 bp, Artificial Sequence
  Oligonucleotide for detection of SNP TSC0021722
caaaatcataaac

SEQ ID NO: 86501 - DNA, 13 bp, Artificial Sequence
  Oligonucleotide for detection of SNP TSC0021722
taaggtgatgggy

SEQ ID NO: 86502 - DNA, 13 bp, Artificial Sequence
  Oligonucleotide for detection of SNP TSC0021722
rcccatcacctta

SEQ ID NO: 86503 - DNA, 13 bp, Artificial Sequence
  Oligonucleotide for detection of SNP TSC0021722
taaggttatgggy

SEQ ID NO: 86504 - DNA, 13 bp, Artificial Sequence
  Oligonucleotide for detection of SNP TSC0021722
rcccataacctta

SEQ ID NO: 86505 - DNA, 13 bp, Artificial Sequence
  Oligonucleotide for detection of SNP TSC0021724
tttaaagagttay

SEQ ID NO: 86506 - DNA, 13 bp, Artificial Sequence
  Oligonucleotide for detection of SNP TSC0021724
rtaactctttaaa

SEQ ID NO: 86507 - DNA, 13 bp, Artificial Sequence
  Oligonucleotide for detection of SNP TSC0021724
tttaaaaagttay

SEQ ID NO: 86508 - DNA, 13 bp, Artificial Sequence
  Oligonucleotide for detection of SNP TSC0021724
rtaactttttaaa

SEQ ID NO: 86509 - DNA, 13 bp, Artificial Sequence
  Oligonucleotide for detection of SNP TSC0021725
atagttagaatty

SEQ ID NO: 86510 - DNA, 13 bp, Artificial Sequence
  Oligonucleotide for detection of SNP TSC0021725
raattctaactat

SEQ ID NO: 86511 - DNA, 13 bp, Artificial Sequence
  Oligonucleotide for detection of SNP TSC0021725
atagttggaatty

SEQ ID NO: 86512 - DNA, 13 bp, Artificial Sequence
  Oligonucleotide for detection of SNP TSC0021725
raattccaactat

SEQ ID NO: 86513 - DNA, 13 bp, Artificial Sequence
  Oligonucleotide for detection of SNP TSC0021725
atagtcggaatty

SEQ ID NO: 86514 - DNA, 13 bp, Artificial Sequence
  Oligonucleotide for detection of SNP TSC0021725
raattccgactat

SEQ ID NO: 86515 - DNA, 13 bp, Artificial Sequence
  Oligonucleotide for detection of SNP TSC0021725
gagttttgattgt

SEQ ID NO: 86516 - DNA, 13 bp, Artificial Sequence
  Oligonucleotide for detection of SNP TSC0021725
acaatcaaaactc

SEQ ID NO: 86517 - DNA, 13 bp, Artificial Sequence
  Oligonucleotide for detection of SNP TSC0021725
gagtttcgattgt

SEQ ID NO: 86518 - DNA, 13 bp, Artificial Sequence
  Oligonucleotide for detection of SNP TSC0021725
acaatcgaaactc

SEQ ID NO: 86519 - DNA, 13 bp, Artificial Sequence
  Oligonucleotide for detection of SNP TSC0021728
tttagtaataaaa

SEQ ID NO: 86520 - DNA, 13 bp, Artificial Sequence
  Oligonucleotide for detection of SNP TSC0021728
ttttattactaaa

SEQ ID NO: 86521 - DNA, 13 bp, Artificial Sequence
  Oligonucleotide for detection of SNP TSC0021728
tttagttataaaa

SEQ ID NO: 86522 - DNA, 13 bp, Artificial Sequence
  Oligonucleotide for detection of SNP TSC0021728
ttttataactaaa

SEQ ID NO: 86523 - DNA, 13 bp, Artificial Sequence
  Oligonucleotide for detection of SNP TSC0021728
ttttgttgttgga

SEQ ID NO: 86524 - DNA, 13 bp, Artificial Sequence
  Oligonucleotide for detection of SNP TSC0021728
tccaacaacaaaa

SEQ ID NO: 86525 - DNA, 13 bp, Artificial Sequence
  Oligonucleotide for detection of SNP TSC0021728
ttttgtagttgga

SEQ ID NO: 86526 - DNA, 13 bp, Artificial Sequence
  Oligonucleotide for detection of SNP TSC0021728
tccaactacaaaa

SEQ ID NO: 86527 - DNA, 13 bp, Artificial Sequence
  Oligonucleotide for detection of SNP TSC0021729
gggtttattttta

SEQ ID NO: 86528 - DNA, 13 bp, Artificial Sequence
  Oligonucleotide for detection of SNP TSC0021729
taaaaataaaccc

SEQ ID NO: 86529 - DNA, 13 bp, Artificial Sequence
  Oligonucleotide for detection of SNP TSC0021729
gggtttgttttta

SEQ ID NO: 86530 - DNA, 13 bp, Artificial Sequence
  Oligonucleotide for detection of SNP TSC0021729
taaaaacaaaccc

SEQ ID NO: 86531 - DNA, 13 bp, Artificial Sequence
  Oligonucleotide for detection of SNP TSC0021729
gggttcgttttta

SEQ ID NO: 86532 - DNA, 13 bp, Artificial Sequence
  Oligonucleotide for detection of SNP TSC0021729
taaaaacgaaccc

SEQ ID NO: 86533 - DNA, 13 bp, Artificial Sequence
  Oligonucleotide for detection of SNP TSC0021729
tgggggtggatty

SEQ ID NO: 86534 - DNA, 13 bp, Artificial Sequence
  Oligonucleotide for detection of SNP TSC0021729
raatccaccccca

SEQ ID NO: 86535 - DNA, 13 bp, Artificial Sequence
  Oligonucleotide for detection of SNP TSC0021729
tgggggcggatty

SEQ ID NO: 86536 - DNA, 13 bp, Artificial Sequence
  Oligonucleotide for detection of SNP TSC0021729
raatccgccccca

SEQ ID NO: 86537 - DNA, 13 bp, Artificial Sequence
  Oligonucleotide for detection of SNP TSC0021730
atttggattagat

SEQ ID NO: 86538 - DNA, 13 bp, Artificial Sequence
  Oligonucleotide for detection of SNP TSC0021730
atctaatccaaat

SEQ ID NO: 86539 - DNA, 13 bp, Artificial Sequence
  Oligonucleotide for detection of SNP TSC0021730
atttgggttagat

SEQ ID NO: 86540 - DNA, 13 bp, Artificial Sequence
  Oligonucleotide for detection of SNP TSC0021730
atctaacccaaat

SEQ ID NO: 86541 - DNA, 13 bp, Artificial Sequence
  Oligonucleotide for detection of SNP TSC0021731
gttatttgtgtay

SEQ ID NO: 86542 - DNA, 13 bp, Artificial Sequence
  Oligonucleotide for detection of SNP TSC0021731
rtacacaaataac

SEQ ID NO: 86543 - DNA, 13 bp, Artificial Sequence
  Oligonucleotide for detection of SNP TSC0021731
gttattcgtgtay

SEQ ID NO: 86544 - DNA, 13 bp, Artificial Sequence
  Oligonucleotide for detection of SNP TSC0021731
rtacacgaataac

SEQ ID NO: 86545 - DNA, 13 bp, Artificial Sequence
  Oligonucleotide for detection of SNP TSC0021731
gtgtatgggtggy

SEQ ID NO: 86546 - DNA, 13 bp, Artificial Sequence
  Oligonucleotide for detection of SNP TSC0021731
rccacccatacac

SEQ ID NO: 86547 - DNA, 13 bp, Artificial Sequence
  Oligonucleotide for detection of SNP TSC0021731
gtgtataggtggy

SEQ ID NO: 86548 - DNA, 13 bp, Artificial Sequence
  Oligonucleotide for detection of SNP TSC0021731
rccacctatacac

SEQ ID NO: 86549 - DNA, 13 bp, Artificial Sequence
  Oligonucleotide for detection of SNP TSC0021731
gtgtacgggtggy

SEQ ID NO: 86550 - DNA, 13 bp, Artificial Sequence
  Oligonucleotide for detection of SNP TSC0021731
rccacccgtacac

SEQ ID NO: 86551 - DNA, 13 bp, Artificial Sequence
  Oligonucleotide for detection of SNP TSC0021734
ttgtatatttttt

SEQ ID NO: 86552 - DNA, 13 bp, Artificial Sequence
  Oligonucleotide for detection of SNP TSC0021734
aaaaaatatacaa

SEQ ID NO: 86553 - DNA, 13 bp, Artificial Sequence
  Oligonucleotide for detection of SNP TSC0021734
ttgtacgtttttt

SEQ ID NO: 86554 - DNA, 13 bp, Artificial Sequence
  Oligonucleotide for detection of SNP TSC0021734
aaaaaacgtacaa

SEQ ID NO: 86555 - DNA, 13 bp, Artificial Sequence
  Oligonucleotide for detection of SNP TSC0021734
aggaaatgtgtaa

SEQ ID NO: 86556 - DNA, 13 bp, Artificial Sequence
  Oligonucleotide for detection of SNP TSC0021734
ttacacatttcct

SEQ ID NO: 86557 - DNA, 13 bp, Artificial Sequence
  Oligonucleotide for detection of SNP TSC0021734
aggaaacgtgtaa

SEQ ID NO: 86558 - DNA, 13 bp, Artificial Sequence
  Oligonucleotide for detection of SNP TSC0021734
ttacacgtttcct

SEQ ID NO: 86559 - DNA, 13 bp, Artificial Sequence
  Oligonucleotide for detection of SNP TSC0021736
aggtagtgaattt

SEQ ID NO: 86560 - DNA, 13 bp, Artificial Sequence
  Oligonucleotide for detection of SNP TSC0021736
aaattcactacct

SEQ ID NO: 86561 - DNA, 13 bp, Artificial Sequence
  Oligonucleotide for detection of SNP TSC0021736
aggtagcgaattt

SEQ ID NO: 86562 - DNA, 13 bp, Artificial Sequence
  Oligonucleotide for detection of SNP TSC0021736
aaattcgctacct

SEQ ID NO: 86563 - DNA, 13 bp, Artificial Sequence
  Oligonucleotide for detection of SNP TSC0021736
agattcgttgttt

SEQ ID NO: 86564 - DNA, 13 bp, Artificial Sequence
  Oligonucleotide for detection of SNP TSC0021736
aaacaacgaatct

SEQ ID NO: 86565 - DNA, 13 bp, Artificial Sequence
  Oligonucleotide for detection of SNP TSC0021749
tttttaattagta

SEQ ID NO: 86566 - DNA, 13 bp, Artificial Sequence
  Oligonucleotide for detection of SNP TSC0021749
tactaattaaaaa

SEQ ID NO: 86567 - DNA, 13 bp, Artificial Sequence
  Oligonucleotide for detection of SNP TSC0021757
tagtgtatttagg

SEQ ID NO: 86568 - DNA, 13 bp, Artificial Sequence
  Oligonucleotide for detection of SNP TSC0021757
cctaaatacacta

SEQ ID NO: 86569 - DNA, 13 bp, Artificial Sequence
  Oligonucleotide for detection of SNP TSC0021757
tagtgtgtttagg

SEQ ID NO: 86570 - DNA, 13 bp, Artificial Sequence
  Oligonucleotide for detection of SNP TSC0021757
cctaaacacacta

SEQ ID NO: 86571 - DNA, 13 bp, Artificial Sequence
  Oligonucleotide for detection of SNP TSC0021758
ttttttgttagtg

SEQ ID NO: 86572 - DNA, 13 bp, Artificial Sequence
  Oligonucleotide for detection of SNP TSC0021758
cactaacaaaaaa

SEQ ID NO: 86573 - DNA, 13 bp, Artificial Sequence
  Oligonucleotide for detection of SNP TSC0021758
ttttttattagtg

SEQ ID NO: 86574 - DNA, 13 bp, Artificial Sequence
  Oligonucleotide for detection of SNP TSC0021758
cactaataaaaaa

SEQ ID NO: 86575 - DNA, 13 bp, Artificial Sequence
  Oligonucleotide for detection of SNP TSC0021759
aattttatatttt

SEQ ID NO: 86576 - DNA, 13 bp, Artificial Sequence
  Oligonucleotide for detection of SNP TSC0021759
aaaatataaaatt

SEQ ID NO: 86577 - DNA, 13 bp, Artificial Sequence
  Oligonucleotide for detection of SNP TSC0021759
aattttgtatttt

SEQ ID NO: 86578 - DNA, 13 bp, Artificial Sequence
  Oligonucleotide for detection of SNP TSC0021759
aaaatacaaaatt

SEQ ID NO: 86579 - DNA, 13 bp, Artificial Sequence
  Oligonucleotide for detection of SNP TSC0021759
aatttcgtatttt

SEQ ID NO: 86580 - DNA, 13 bp, Artificial Sequence
  Oligonucleotide for detection of SNP TSC0021759
aaaatacgaaatt

SEQ ID NO: 86581 - DNA, 13 bp, Artificial Sequence
  Oligonucleotide for detection of SNP TSC0021759
aggatgtggaatt

SEQ ID NO: 86582 - DNA, 13 bp, Artificial Sequence
  Oligonucleotide for detection of SNP TSC0021759
aattccacatcct

SEQ ID NO: 86583 - DNA, 13 bp, Artificial Sequence
  Oligonucleotide for detection of SNP TSC0021759
aggatgcggaatt

SEQ ID NO: 86584 - DNA, 13 bp, Artificial Sequence
  Oligonucleotide for detection of SNP TSC0021759
aattccgcatcct

SEQ ID NO: 86585 - DNA, 13 bp, Artificial Sequence
  Oligonucleotide for detection of SNP TSC0021760
gggaagtggagtt

SEQ ID NO: 86586 - DNA, 13 bp, Artificial Sequence
  Oligonucleotide for detection of SNP TSC0021760
aactccacttccc

SEQ ID NO: 86587 - DNA, 13 bp, Artificial Sequence
  Oligonucleotide for detection of SNP TSC0021760
gggaagaggagtt

SEQ ID NO: 86588 - DNA, 13 bp, Artificial Sequence
  Oligonucleotide for detection of SNP TSC0021760
aactcctcttccc

SEQ ID NO: 86589 - DNA, 13 bp, Artificial Sequence
  Oligonucleotide for detection of SNP TSC0021761
tttgttttgtgtg

SEQ ID NO: 86590 - DNA, 13 bp, Artificial Sequence
  Oligonucleotide for detection of SNP TSC0021761
cacacaaaacaaa

SEQ ID NO: 86591 - DNA, 13 bp, Artificial Sequence
  Oligonucleotide for detection of SNP TSC0021761
tttgttgtgtgtg

SEQ ID NO: 86592 - DNA, 13 bp, Artificial Sequence
  Oligonucleotide for detection of SNP TSC0021761
cacacacaacaaa

SEQ ID NO: 86593 - DNA, 13 bp, Artificial Sequence
  Oligonucleotide for detection of SNP TSC0021761
tatatagaataaa

SEQ ID NO: 86594 - DNA, 13 bp, Artificial Sequence
  Oligonucleotide for detection of SNP TSC0021761
tttattctatata

SEQ ID NO: 86595 - DNA, 13 bp, Artificial Sequence
  Oligonucleotide for detection of SNP TSC0021763
ttttttaaattat

SEQ ID NO: 86596 - DNA, 13 bp, Artificial Sequence
  Oligonucleotide for detection of SNP TSC0021763
ataatttaaaaaa

SEQ ID NO: 86597 - DNA, 13 bp, Artificial Sequence
  Oligonucleotide for detection of SNP TSC0021764
atgatttgatttg

SEQ ID NO: 86598 - DNA, 13 bp, Artificial Sequence
  Oligonucleotide for detection of SNP TSC0021764
caaatcaaatcat

SEQ ID NO: 86599 - DNA, 13 bp, Artificial Sequence
  Oligonucleotide for detection of SNP TSC0021764
atgattcgatttg

SEQ ID NO: 86600 - DNA, 13 bp, Artificial Sequence
  Oligonucleotide for detection of SNP TSC0021764
caaatcgaatcat

SEQ ID NO: 86601 - DNA, 13 bp, Artificial Sequence
  Oligonucleotide for detection of SNP TSC0021764
taaattgaattat

SEQ ID NO: 86602 - DNA, 13 bp, Artificial Sequence
  Oligonucleotide for detection of SNP TSC0021764
ataattcaattta

SEQ ID NO: 86603 - DNA, 13 bp, Artificial Sequence
  Oligonucleotide for detection of SNP TSC0021766
atttttttgtaty

SEQ ID NO: 86604 - DNA, 13 bp, Artificial Sequence
  Oligonucleotide for detection of SNP TSC0021766
ratacaaaaaaat

SEQ ID NO: 86605 - DNA, 13 bp, Artificial Sequence
  Oligonucleotide for detection of SNP TSC0021766
atttttgtgtaty

SEQ ID NO: 86606 - DNA, 13 bp, Artificial Sequence
  Oligonucleotide for detection of SNP TSC0021766
ratacacaaaaat

SEQ ID NO: 86607 - DNA, 13 bp, Artificial Sequence
  Oligonucleotide for detection of SNP TSC0021766
gatatagagaaat

SEQ ID NO: 86608 - DNA, 13 bp, Artificial Sequence
  Oligonucleotide for detection of SNP TSC0021766
atttctctatatc

SEQ ID NO: 86609 - DNA, 13 bp, Artificial Sequence
  Oligonucleotide for detection of SNP TSC0021766
gatatatagaaat

SEQ ID NO: 86610 - DNA, 13 bp, Artificial Sequence
  Oligonucleotide for detection of SNP TSC0021766
atttctatatatc

SEQ ID NO: 86611 - DNA, 13 bp, Artificial Sequence
  Oligonucleotide for detection of SNP TSC0021767
agtttttggagag

SEQ ID NO: 86612 - DNA, 13 bp, Artificial Sequence
  Oligonucleotide for detection of SNP TSC0021767
ctctccaaaaact

SEQ ID NO: 86613 - DNA, 13 bp, Artificial Sequence
  Oligonucleotide for detection of SNP TSC0021767
agttttcggagag

SEQ ID NO: 86614 - DNA, 13 bp, Artificial Sequence
  Oligonucleotide for detection of SNP TSC0021767
ctctccgaaaact

SEQ ID NO: 86615 - DNA, 13 bp, Artificial Sequence
  Oligonucleotide for detection of SNP TSC0021767
ttttttggaggtt

SEQ ID NO: 86616 - DNA, 13 bp, Artificial Sequence
  Oligonucleotide for detection of SNP TSC0021767
aacctccaaaaaa

SEQ ID NO: 86617 - DNA, 13 bp, Artificial Sequence
  Oligonucleotide for detection of SNP TSC0021767
ttttttagaggtt

SEQ ID NO: 86618 - DNA, 13 bp, Artificial Sequence
  Oligonucleotide for detection of SNP TSC0021767
aacctctaaaaaa

SEQ ID NO: 86619 - DNA, 13 bp, Artificial Sequence
  Oligonucleotide for detection of SNP TSC0021767
tttttcggaggtt

SEQ ID NO: 86620 - DNA, 13 bp, Artificial Sequence
  Oligonucleotide for detection of SNP TSC0021767
aacctccgaaaaa

SEQ ID NO: 86621 - DNA, 13 bp, Artificial Sequence
  Oligonucleotide for detection of SNP TSC0021768
ggtttaaaggaty

SEQ ID NO: 86622 - DNA, 13 bp, Artificial Sequence
  Oligonucleotide for detection of SNP TSC0021768
ratcctttaaacc

SEQ ID NO: 86623 - DNA, 13 bp, Artificial Sequence
  Oligonucleotide for detection of SNP TSC0021768
ggtttagaggaty

SEQ ID NO: 86624 - DNA, 13 bp, Artificial Sequence
  Oligonucleotide for detection of SNP TSC0021768
ratcctctaaacc

SEQ ID NO: 86625 - DNA, 13 bp, Artificial Sequence
  Oligonucleotide for detection of SNP TSC0021769
tatggtatttttt

SEQ ID NO: 86626 - DNA, 13 bp, Artificial Sequence
  Oligonucleotide for detection of SNP TSC0021769
aaaaaataccata

SEQ ID NO: 86627 - DNA, 13 bp, Artificial Sequence
  Oligonucleotide for detection of SNP TSC0021769
tatggtttttttt

SEQ ID NO: 86628 - DNA, 13 bp, Artificial Sequence
  Oligonucleotide for detection of SNP TSC0021769
aaaaaaaaccata

SEQ ID NO: 86629 - DNA, 13 bp, Artificial Sequence
  Oligonucleotide for detection of SNP TSC0021769
tacggtatttttt

SEQ ID NO: 86630 - DNA, 13 bp, Artificial Sequence
  Oligonucleotide for detection of SNP TSC0021769
aaaaaataccgta

SEQ ID NO: 86631 - DNA, 13 bp, Artificial Sequence
  Oligonucleotide for detection of SNP TSC0021769
tacggtttttttt

SEQ ID NO: 86632 - DNA, 13 bp, Artificial Sequence
  Oligonucleotide for detection of SNP TSC0021769
aaaaaaaaccgta

SEQ ID NO: 86633 - DNA, 13 bp, Artificial Sequence
  Oligonucleotide for detection of SNP TSC0021769
agaaaatattgta

SEQ ID NO: 86634 - DNA, 13 bp, Artificial Sequence
  Oligonucleotide for detection of SNP TSC0021769
tacaatattttct

SEQ ID NO: 86635 - DNA, 13 bp, Artificial Sequence
  Oligonucleotide for detection of SNP TSC0021769
agaaaaaattgta

SEQ ID NO: 86636 - DNA, 13 bp, Artificial Sequence
  Oligonucleotide for detection of SNP TSC0021769
tacaattttttct

SEQ ID NO: 86637 - DNA, 13 bp, Artificial Sequence
  Oligonucleotide for detection of SNP TSC0021769
agaaaatatcgta

SEQ ID NO: 86638 - DNA, 13 bp, Artificial Sequence
  Oligonucleotide for detection of SNP TSC0021769
tacgatattttct

SEQ ID NO: 86639 - DNA, 13 bp, Artificial Sequence
  Oligonucleotide for detection of SNP TSC0021769
agaaaaaatcgta

SEQ ID NO: 86640 - DNA, 13 bp, Artificial Sequence
  Oligonucleotide for detection of SNP TSC0021769
tacgattttttct

SEQ ID NO: 86641 - DNA, 13 bp, Artificial Sequence
  Oligonucleotide for detection of SNP TSC0021770
tatgtaattatgy

SEQ ID NO: 86642 - DNA, 13 bp, Artificial Sequence
  Oligonucleotide for detection of SNP TSC0021770
rcataattacata

SEQ ID NO: 86643 - DNA, 13 bp, Artificial Sequence
  Oligonucleotide for detection of SNP TSC0021770
tatgtagttatgy

SEQ ID NO: 86644 - DNA, 13 bp, Artificial Sequence
  Oligonucleotide for detection of SNP TSC0021770
rcataactacata

SEQ ID NO: 86645 - DNA, 13 bp, Artificial Sequence
  Oligonucleotide for detection of SNP TSC0021773
aaaaatgagatat

SEQ ID NO: 86646 - DNA, 13 bp, Artificial Sequence
  Oligonucleotide for detection of SNP TSC0021773
atatctcattttt

SEQ ID NO: 86647 - DNA, 13 bp, Artificial Sequence
  Oligonucleotide for detection of SNP TSC0021773
aaaaataagatat

SEQ ID NO: 86648 - DNA, 13 bp, Artificial Sequence
  Oligonucleotide for detection of SNP TSC0021773
atatcttattttt

SEQ ID NO: 86649 - DNA, 13 bp, Artificial Sequence
  Oligonucleotide for detection of SNP TSC0021774
tttgattgtattt

SEQ ID NO: 86650 - DNA, 13 bp, Artificial Sequence
  Oligonucleotide for detection of SNP TSC0021774
aaatacaatcaaa

SEQ ID NO: 86651 - DNA, 13 bp, Artificial Sequence
  Oligonucleotide for detection of SNP TSC0021774
tttgatcgtattt

SEQ ID NO: 86652 - DNA, 13 bp, Artificial Sequence
  Oligonucleotide for detection of SNP TSC0021774
aaatacgatcaaa

SEQ ID NO: 86653 - DNA, 13 bp, Artificial Sequence
  Oligonucleotide for detection of SNP TSC0021774
aaatatggttaag

SEQ ID NO: 86654 - DNA, 13 bp, Artificial Sequence
  Oligonucleotide for detection of SNP TSC0021774
cttaaccatattt

SEQ ID NO: 86655 - DNA, 13 bp, Artificial Sequence
  Oligonucleotide for detection of SNP TSC0021774
aaatatagttaag

SEQ ID NO: 86656 - DNA, 13 bp, Artificial Sequence
  Oligonucleotide for detection of SNP TSC0021774
cttaactatattt

SEQ ID NO: 86657 - DNA, 13 bp, Artificial Sequence
  Oligonucleotide for detection of SNP TSC0021774
aaatacggttaag

SEQ ID NO: 86658 - DNA, 13 bp, Artificial Sequence
  Oligonucleotide for detection of SNP TSC0021774
cttaaccgtattt

SEQ ID NO: 86659 - DNA, 13 bp, Artificial Sequence
  Oligonucleotide for detection of SNP TSC0021775
tggtgtagtggtt

SEQ ID NO: 86660 - DNA, 13 bp, Artificial Sequence
  Oligonucleotide for detection of SNP TSC0021775
aaccactacacca

SEQ ID NO: 86661 - DNA, 13 bp, Artificial Sequence
  Oligonucleotide for detection of SNP TSC0021775
tggtgtggtggtt

SEQ ID NO: 86662 - DNA, 13 bp, Artificial Sequence
  Oligonucleotide for detection of SNP TSC0021775
aaccaccacacca

SEQ ID NO: 86663 - DNA, 13 bp, Artificial Sequence
  Oligonucleotide for detection of SNP TSC0021775
cggtgtagtggtt

SEQ ID NO: 86664 - DNA, 13 bp, Artificial Sequence
  Oligonucleotide for detection of SNP TSC0021775
aaccactacaccg

SEQ ID NO: 86665 - DNA, 13 bp, Artificial Sequence
  Oligonucleotide for detection of SNP TSC0021775
cggtgtggtggtt

SEQ ID NO: 86666 - DNA, 13 bp, Artificial Sequence
  Oligonucleotide for detection of SNP TSC0021775
aaccaccacaccg

SEQ ID NO: 86667 - DNA, 13 bp, Artificial Sequence
  Oligonucleotide for detection of SNP TSC0021775
tggtgcggtggtt

SEQ ID NO: 86668 - DNA, 13 bp, Artificial Sequence
  Oligonucleotide for detection of SNP TSC0021775
aaccaccgcacca

SEQ ID NO: 86669 - DNA, 13 bp, Artificial Sequence
  Oligonucleotide for detection of SNP TSC0021775
cggtgcggtggtt

SEQ ID NO: 86670 - DNA, 13 bp, Artificial Sequence
  Oligonucleotide for detection of SNP TSC0021775
aaccaccgcaccg

SEQ ID NO: 86671 - DNA, 13 bp, Artificial Sequence
  Oligonucleotide for detection of SNP TSC0021775
agttattgtattg

SEQ ID NO: 86672 - DNA, 13 bp, Artificial Sequence
  Oligonucleotide for detection of SNP TSC0021775
caatacaataact

SEQ ID NO: 86673 - DNA, 13 bp, Artificial Sequence
  Oligonucleotide for detection of SNP TSC0021775
agttattgtatcg

SEQ ID NO: 86674 - DNA, 13 bp, Artificial Sequence
  Oligonucleotide for detection of SNP TSC0021775
cgatacaataact

SEQ ID NO: 86675 - DNA, 13 bp, Artificial Sequence
  Oligonucleotide for detection of SNP TSC0021775
agttatcgtattg

SEQ ID NO: 86676 - DNA, 13 bp, Artificial Sequence
  Oligonucleotide for detection of SNP TSC0021775
caatacgataact

SEQ ID NO: 86677 - DNA, 13 bp, Artificial Sequence
  Oligonucleotide for detection of SNP TSC0021775
agttatcgtatcg

SEQ ID NO: 86678 - DNA, 13 bp, Artificial Sequence
  Oligonucleotide for detection of SNP TSC0021775
cgatacgataact

SEQ ID NO: 86679 - DNA, 13 bp, Artificial Sequence
  Oligonucleotide for detection of SNP TSC0021776
atttaagtgttty

SEQ ID NO: 86680 - DNA, 13 bp, Artificial Sequence
  Oligonucleotide for detection of SNP TSC0021776
raaacacttaaat

SEQ ID NO: 86681 - DNA, 13 bp, Artificial Sequence
  Oligonucleotide for detection of SNP TSC0021776
atttaaatgttty

SEQ ID NO: 86682 - DNA, 13 bp, Artificial Sequence
  Oligonucleotide for detection of SNP TSC0021776
raaacatttaaat

SEQ ID NO: 86683 - DNA, 13 bp, Artificial Sequence
  Oligonucleotide for detection of SNP TSC0021777
tattaaagttatg

SEQ ID NO: 86684 - DNA, 13 bp, Artificial Sequence
  Oligonucleotide for detection of SNP TSC0021777
cataactttaata

SEQ ID NO: 86685 - DNA, 13 bp, Artificial Sequence
  Oligonucleotide for detection of SNP TSC0021777
tattaatgttatg

SEQ ID NO: 86686 - DNA, 13 bp, Artificial Sequence
  Oligonucleotide for detection of SNP TSC0021777
cataacattaata

SEQ ID NO: 86687 - DNA, 13 bp, Artificial Sequence
  Oligonucleotide for detection of SNP TSC0021777
tatgattttgata

SEQ ID NO: 86688 - DNA, 13 bp, Artificial Sequence
  Oligonucleotide for detection of SNP TSC0021777
tatcaaaatcata

SEQ ID NO: 86689 - DNA, 13 bp, Artificial Sequence
  Oligonucleotide for detection of SNP TSC0021777
tatgatattgata

SEQ ID NO: 86690 - DNA, 13 bp, Artificial Sequence
  Oligonucleotide for detection of SNP TSC0021777
tatcaatatcata

SEQ ID NO: 86691 - DNA, 13 bp, Artificial Sequence
  Oligonucleotide for detection of SNP TSC0021778
tgttgaatgaatg

SEQ ID NO: 86692 - DNA, 13 bp, Artificial Sequence
  Oligonucleotide for detection of SNP TSC0021778
cattcattcaaca

SEQ ID NO: 86693 - DNA, 13 bp, Artificial Sequence
  Oligonucleotide for detection of SNP TSC0021778
tgttgagtgaatg

SEQ ID NO: 86694 - DNA, 13 bp, Artificial Sequence
  Oligonucleotide for detection of SNP TSC0021778
cattcactcaaca

SEQ ID NO: 86695 - DNA, 13 bp, Artificial Sequence
  Oligonucleotide for detection of SNP TSC0021784
ggagggatgagtt

SEQ ID NO: 86696 - DNA, 13 bp, Artificial Sequence
  Oligonucleotide for detection of SNP TSC0021784
aactcatccctcc

SEQ ID NO: 86697 - DNA, 13 bp, Artificial Sequence
  Oligonucleotide for detection of SNP TSC0021784
ggaggggtgagtt

SEQ ID NO: 86698 - DNA, 13 bp, Artificial Sequence
  Oligonucleotide for detection of SNP TSC0021784
aactcacccctcc

SEQ ID NO: 86699 - DNA, 13 bp, Artificial Sequence
  Oligonucleotide for detection of SNP TSC0021789
ttttttggggggg

SEQ ID NO: 86700 - DNA, 13 bp, Artificial Sequence
  Oligonucleotide for detection of SNP TSC0021789
cccccccaaaaaa

SEQ ID NO: 86701 - DNA, 13 bp, Artificial Sequence
  Oligonucleotide for detection of SNP TSC0021789
tttttttgggggg

SEQ ID NO: 86702 - DNA, 13 bp, Artificial Sequence
  Oligonucleotide for detection of SNP TSC0021789
ccccccaaaaaaa

SEQ ID NO: 86703 - DNA, 13 bp, Artificial Sequence
  Oligonucleotide for detection of SNP TSC0021790
tagttaataaaat

SEQ ID NO: 86704 - DNA, 13 bp, Artificial Sequence
  Oligonucleotide for detection of SNP TSC0021790
attttattaacta

SEQ ID NO: 86705 - DNA, 13 bp, Artificial Sequence
  Oligonucleotide for detection of SNP TSC0021790
tagttagtaaaat

SEQ ID NO: 86706 - DNA, 13 bp, Artificial Sequence
  Oligonucleotide for detection of SNP TSC0021790
attttactaacta

SEQ ID NO: 86707 - DNA, 13 bp, Artificial Sequence
  Oligonucleotide for detection of SNP TSC0021791
gaagaaaaatgaa

SEQ ID NO: 86708 - DNA, 13 bp, Artificial Sequence
  Oligonucleotide for detection of SNP TSC0021791
ttcatttttcttc

SEQ ID NO: 86709 - DNA, 13 bp, Artificial Sequence
  Oligonucleotide for detection of SNP TSC0021791
gaagaataatgaa

SEQ ID NO: 86710 - DNA, 13 bp, Artificial Sequence
  Oligonucleotide for detection of SNP TSC0021791
ttcattattcttc

SEQ ID NO: 86711 - DNA, 13 bp, Artificial Sequence
  Oligonucleotide for detection of SNP TSC0021794
gagttaaatgtag

SEQ ID NO: 86712 - DNA, 13 bp, Artificial Sequence
  Oligonucleotide for detection of SNP TSC0021794
ctacatttaactc

SEQ ID NO: 86713 - DNA, 13 bp, Artificial Sequence
  Oligonucleotide for detection of SNP TSC0021794
gagttatatgtag

SEQ ID NO: 86714 - DNA, 13 bp, Artificial Sequence
  Oligonucleotide for detection of SNP TSC0021794
ctacatataactc

SEQ ID NO: 86715 - DNA, 13 bp, Artificial Sequence
  Oligonucleotide for detection of SNP TSC0021794
gagttaaacgtag

SEQ ID NO: 86716 - DNA, 13 bp, Artificial Sequence
  Oligonucleotide for detection of SNP TSC0021794
ctacgtttaactc

SEQ ID NO: 86717 - DNA, 13 bp, Artificial Sequence
  Oligonucleotide for detection of SNP TSC0021794
gagttatacgtag

SEQ ID NO: 86718 - DNA, 13 bp, Artificial Sequence
  Oligonucleotide for detection of SNP TSC0021794
ctacgtataactc

SEQ ID NO: 86719 - DNA, 13 bp, Artificial Sequence
  Oligonucleotide for detection of SNP TSC0021794
ttgtgtttaatty

SEQ ID NO: 86720 - DNA, 13 bp, Artificial Sequence
  Oligonucleotide for detection of SNP TSC0021794
raattaaacacaa

SEQ ID NO: 86721 - DNA, 13 bp, Artificial Sequence
  Oligonucleotide for detection of SNP TSC0021794
ttgtgtgtaatty

SEQ ID NO: 86722 - DNA, 13 bp, Artificial Sequence
  Oligonucleotide for detection of SNP TSC0021794
raattacacacaa

SEQ ID NO: 86723 - DNA, 13 bp, Artificial Sequence
  Oligonucleotide for detection of SNP TSC0021794
ttgcgtttaatty

SEQ ID NO: 86724 - DNA, 13 bp, Artificial Sequence
  Oligonucleotide for detection of SNP TSC0021794
raattaaacgcaa

SEQ ID NO: 86725 - DNA, 13 bp, Artificial Sequence
  Oligonucleotide for detection of SNP TSC0021794
ttgcgtgtaatty

SEQ ID NO: 86726 - DNA, 13 bp, Artificial Sequence
  Oligonucleotide for detection of SNP TSC0021794
raattacacgcaa

SEQ ID NO: 86727 - DNA, 13 bp, Artificial Sequence
  Oligonucleotide for detection of SNP TSC0021795
tttattgatattg

SEQ ID NO: 86728 - DNA, 13 bp, Artificial Sequence
  Oligonucleotide for detection of SNP TSC0021795
caatatcaataaa

SEQ ID NO: 86729 - DNA, 13 bp, Artificial Sequence
  Oligonucleotide for detection of SNP TSC0021795
tttatttatattg

SEQ ID NO: 86730 - DNA, 13 bp, Artificial Sequence
  Oligonucleotide for detection of SNP TSC0021795
caatataaataaa

SEQ ID NO: 86731 - DNA, 13 bp, Artificial Sequence
  Oligonucleotide for detection of SNP TSC0021795
tagtgttaatgaa

SEQ ID NO: 86732 - DNA, 13 bp, Artificial Sequence
  Oligonucleotide for detection of SNP TSC0021795
ttcattaacacta

SEQ ID NO: 86733 - DNA, 13 bp, Artificial Sequence
  Oligonucleotide for detection of SNP TSC0021795
tagtgtaaatgaa

SEQ ID NO: 86734 - DNA, 13 bp, Artificial Sequence
  Oligonucleotide for detection of SNP TSC0021795
ttcatttacacta

SEQ ID NO: 86735 - DNA, 13 bp, Artificial Sequence
  Oligonucleotide for detection of SNP TSC0021796
ggaattgtttgaa

SEQ ID NO: 86736 - DNA, 13 bp, Artificial Sequence
  Oligonucleotide for detection of SNP TSC0021796
ttcaaacaattcc

SEQ ID NO: 86737 - DNA, 13 bp, Artificial Sequence
  Oligonucleotide for detection of SNP TSC0021796
ggaatcgtttgaa

SEQ ID NO: 86738 - DNA, 13 bp, Artificial Sequence
  Oligonucleotide for detection of SNP TSC0021796
ttcaaacgattcc

SEQ ID NO: 86739 - DNA, 13 bp, Artificial Sequence
  Oligonucleotide for detection of SNP TSC0021796
tttaaatgattty

SEQ ID NO: 86740 - DNA, 13 bp, Artificial Sequence
  Oligonucleotide for detection of SNP TSC0021796
raaatcatttaaa

SEQ ID NO: 86741 - DNA, 13 bp, Artificial Sequence
  Oligonucleotide for detection of SNP TSC0021796
tttaaacgattty

SEQ ID NO: 86742 - DNA, 13 bp, Artificial Sequence
  Oligonucleotide for detection of SNP TSC0021796
raaatcgtttaaa

SEQ ID NO: 86743 - DNA, 13 bp, Artificial Sequence
  Oligonucleotide for detection of SNP TSC0021797
tgattttattttg

SEQ ID NO: 86744 - DNA, 13 bp, Artificial Sequence
  Oligonucleotide for detection of SNP TSC0021797
caaaataaaatca

SEQ ID NO: 86745 - DNA, 13 bp, Artificial Sequence
  Oligonucleotide for detection of SNP TSC0021797
taaagtgaggtta

SEQ ID NO: 86746 - DNA, 13 bp, Artificial Sequence
  Oligonucleotide for detection of SNP TSC0021797
taacctcacttta

SEQ ID NO: 86747 - DNA, 13 bp, Artificial Sequence
  Oligonucleotide for detection of SNP TSC0021797
taaagttaggtta

SEQ ID NO: 86748 - DNA, 13 bp, Artificial Sequence
  Oligonucleotide for detection of SNP TSC0021797
taacctaacttta

SEQ ID NO: 86749 - DNA, 13 bp, Artificial Sequence
  Oligonucleotide for detection of SNP TSC0021798
tttggtagtagag

SEQ ID NO: 86750 - DNA, 13 bp, Artificial Sequence
  Oligonucleotide for detection of SNP TSC0021798
ctctactaccaaa

SEQ ID NO: 86751 - DNA, 13 bp, Artificial Sequence
  Oligonucleotide for detection of SNP TSC0021798
tttggtggtagag

SEQ ID NO: 86752 - DNA, 13 bp, Artificial Sequence
  Oligonucleotide for detection of SNP TSC0021798
ctctaccaccaaa

SEQ ID NO: 86753 - DNA, 13 bp, Artificial Sequence
  Oligonucleotide for detection of SNP TSC0021798
tttggcggtagag

SEQ ID NO: 86754 - DNA, 13 bp, Artificial Sequence
  Oligonucleotide for detection of SNP TSC0021798
ctctaccgccaaa

SEQ ID NO: 86755 - DNA, 13 bp, Artificial Sequence
  Oligonucleotide for detection of SNP TSC0021798
ttttgttgttaag

SEQ ID NO: 86756 - DNA, 13 bp, Artificial Sequence
  Oligonucleotide for detection of SNP TSC0021798
cttaacaacaaaa

SEQ ID NO: 86757 - DNA, 13 bp, Artificial Sequence
  Oligonucleotide for detection of SNP TSC0021798
ttttgtcgttaag

SEQ ID NO: 86758 - DNA, 13 bp, Artificial Sequence
  Oligonucleotide for detection of SNP TSC0021798
cttaacgacaaaa

SEQ ID NO: 86759 - DNA, 13 bp, Artificial Sequence
  Oligonucleotide for detection of SNP TSC0021799
ttgggatgttgag

SEQ ID NO: 86760 - DNA, 13 bp, Artificial Sequence
  Oligonucleotide for detection of SNP TSC0021799
ctcaacatcccaa

SEQ ID NO: 86761 - DNA, 13 bp, Artificial Sequence
  Oligonucleotide for detection of SNP TSC0021799
tttagttttttaa

SEQ ID NO: 86762 - DNA, 13 bp, Artificial Sequence
  Oligonucleotide for detection of SNP TSC0021799
ttaaaaaactaaa

SEQ ID NO: 86763 - DNA, 13 bp, Artificial Sequence
  Oligonucleotide for detection of SNP TSC0021800
tgttttatgggtt

SEQ ID NO: 86764 - DNA, 13 bp, Artificial Sequence
  Oligonucleotide for detection of SNP TSC0021800
aacccataaaaca

SEQ ID NO: 86765 - DNA, 13 bp, Artificial Sequence
  Oligonucleotide for detection of SNP TSC0021800
tgttttgtgggtt

SEQ ID NO: 86766 - DNA, 13 bp, Artificial Sequence
  Oligonucleotide for detection of SNP TSC0021800
aacccacaaaaca

SEQ ID NO: 86767 - DNA, 13 bp, Artificial Sequence
  Oligonucleotide for detection of SNP TSC0021800
tgtttcgtgggtt

SEQ ID NO: 86768 - DNA, 13 bp, Artificial Sequence
  Oligonucleotide for detection of SNP TSC0021800
aacccacgaaaca

SEQ ID NO: 86769 - DNA, 13 bp, Artificial Sequence
  Oligonucleotide for detection of SNP TSC0021800
aatttatgaaata

SEQ ID NO: 86770 - DNA, 13 bp, Artificial Sequence
  Oligonucleotide for detection of SNP TSC0021800
tatttcataaatt

SEQ ID NO: 86771 - DNA, 13 bp, Artificial Sequence
  Oligonucleotide for detection of SNP TSC0021800
aatttacgaaata

SEQ ID NO: 86772 - DNA, 13 bp, Artificial Sequence
  Oligonucleotide for detection of SNP TSC0021800
tatttcgtaaatt

SEQ ID NO: 86773 - DNA, 13 bp, Artificial Sequence
  Oligonucleotide for detection of SNP TSC0021803
gtgttaaaattgy

SEQ ID NO: 86774 - DNA, 13 bp, Artificial Sequence
  Oligonucleotide for detection of SNP TSC0021803
rcaattttaacac

SEQ ID NO: 86775 - DNA, 13 bp, Artificial Sequence
  Oligonucleotide for detection of SNP TSC0021803
gtgttagaattgy

SEQ ID NO: 86776 - DNA, 13 bp, Artificial Sequence
  Oligonucleotide for detection of SNP TSC0021803
rcaattctaacac

SEQ ID NO: 86777 - DNA, 13 bp, Artificial Sequence
  Oligonucleotide for detection of SNP TSC0021804
aaatgttggtgty

SEQ ID NO: 86778 - DNA, 13 bp, Artificial Sequence
  Oligonucleotide for detection of SNP TSC0021804
racaccaacattt

SEQ ID NO: 86779 - DNA, 13 bp, Artificial Sequence
  Oligonucleotide for detection of SNP TSC0021804
aaatgtcggtgty

SEQ ID NO: 86780 - DNA, 13 bp, Artificial Sequence
  Oligonucleotide for detection of SNP TSC0021804
racaccgacattt

SEQ ID NO: 86781 - DNA, 13 bp, Artificial Sequence
  Oligonucleotide for detection of SNP TSC0021804
ggtattggtattt

SEQ ID NO: 86782 - DNA, 13 bp, Artificial Sequence
  Oligonucleotide for detection of SNP TSC0021804
aaataccaatacc

SEQ ID NO: 86783 - DNA, 13 bp, Artificial Sequence
  Oligonucleotide for detection of SNP TSC0021804
ggtattagtattt

SEQ ID NO: 86784 - DNA, 13 bp, Artificial Sequence
  Oligonucleotide for detection of SNP TSC0021804
aaatactaatacc

SEQ ID NO: 86785 - DNA, 13 bp, Artificial Sequence
  Oligonucleotide for detection of SNP TSC0021804
ggtatcggtattt

SEQ ID NO: 86786 - DNA, 13 bp, Artificial Sequence
  Oligonucleotide for detection of SNP TSC0021804
aaataccgatacc

SEQ ID NO: 86787 - DNA, 13 bp, Artificial Sequence
  Oligonucleotide for detection of SNP TSC0021805
ttatatggaagaa

SEQ ID NO: 86788 - DNA, 13 bp, Artificial Sequence
  Oligonucleotide for detection of SNP TSC0021805
ttcttccatataa

SEQ ID NO: 86789 - DNA, 13 bp, Artificial Sequence
  Oligonucleotide for detection of SNP TSC0021805
ttatattgaagaa

SEQ ID NO: 86790 - DNA, 13 bp, Artificial Sequence
  Oligonucleotide for detection of SNP TSC0021805
ttcttcaatataa

SEQ ID NO: 86791 - DNA, 13 bp, Artificial Sequence
  Oligonucleotide for detection of SNP TSC0021805
ttatacggaagaa

SEQ ID NO: 86792 - DNA, 13 bp, Artificial Sequence
  Oligonucleotide for detection of SNP TSC0021805
ttcttccgtataa

SEQ ID NO: 86793 - DNA, 13 bp, Artificial Sequence
  Oligonucleotide for detection of SNP TSC0021805
tttttttgtgtga

SEQ ID NO: 86794 - DNA, 13 bp, Artificial Sequence
  Oligonucleotide for detection of SNP TSC0021805
tcacacaaaaaaa

SEQ ID NO: 86795 - DNA, 13 bp, Artificial Sequence
  Oligonucleotide for detection of SNP TSC0021805
ttttttagtgtga

SEQ ID NO: 86796 - DNA, 13 bp, Artificial Sequence
  Oligonucleotide for detection of SNP TSC0021805
tcacactaaaaaa

SEQ ID NO: 86797 - DNA, 13 bp, Artificial Sequence
  Oligonucleotide for detection of SNP TSC0021805
ttttttcgtgtga

SEQ ID NO: 86798 - DNA, 13 bp, Artificial Sequence
  Oligonucleotide for detection of SNP TSC0021805
tcacacgaaaaaa

SEQ ID NO: 86799 - DNA, 13 bp, Artificial Sequence
  Oligonucleotide for detection of SNP TSC0021806
aatttttgtttaa

SEQ ID NO: 86800 - DNA, 13 bp, Artificial Sequence
  Oligonucleotide for detection of SNP TSC0021806
ttaaacaaaaatt

SEQ ID NO: 86801 - DNA, 13 bp, Artificial Sequence
  Oligonucleotide for detection of SNP TSC0021806
aattttcgtttaa

SEQ ID NO: 86802 - DNA, 13 bp, Artificial Sequence
  Oligonucleotide for detection of SNP TSC0021806
ttaaacgaaaatt

SEQ ID NO: 86803 - DNA, 13 bp, Artificial Sequence
  Oligonucleotide for detection of SNP TSC0021806
ttagatgagaatt

SEQ ID NO: 86804 - DNA, 13 bp, Artificial Sequence
  Oligonucleotide for detection of SNP TSC0021806
aattctcatctaa

SEQ ID NO: 86805 - DNA, 13 bp, Artificial Sequence
  Oligonucleotide for detection of SNP TSC0021806
ttagattagaatt

SEQ ID NO: 86806 - DNA, 13 bp, Artificial Sequence
  Oligonucleotide for detection of SNP TSC0021806
aattctaatctaa

SEQ ID NO: 86807 - DNA, 13 bp, Artificial Sequence
  Oligonucleotide for detection of SNP TSC0021806
ttagacgagaatt

SEQ ID NO: 86808 - DNA, 13 bp, Artificial Sequence
  Oligonucleotide for detection of SNP TSC0021806
aattctcgtctaa

SEQ ID NO: 86809 - DNA, 13 bp, Artificial Sequence
  Oligonucleotide for detection of SNP TSC0021809
gagttttgaggtg

SEQ ID NO: 86810 - DNA, 13 bp, Artificial Sequence
  Oligonucleotide for detection of SNP TSC0021809
cacctcaaaactc

SEQ ID NO: 86811 - DNA, 13 bp, Artificial Sequence
  Oligonucleotide for detection of SNP TSC0021809
gagtttcgaggtg

SEQ ID NO: 86812 - DNA, 13 bp, Artificial Sequence
  Oligonucleotide for detection of SNP TSC0021809
cacctcgaaactc

SEQ ID NO: 86813 - DNA, 13 bp, Artificial Sequence
  Oligonucleotide for detection of SNP TSC0021809
tattttgggatty

SEQ ID NO: 86814 - DNA, 13 bp, Artificial Sequence
  Oligonucleotide for detection of SNP TSC0021809
raatcccaaaata

SEQ ID NO: 86815 - DNA, 13 bp, Artificial Sequence
  Oligonucleotide for detection of SNP TSC0021809
tattttaggatty

SEQ ID NO: 86816 - DNA, 13 bp, Artificial Sequence
  Oligonucleotide for detection of SNP TSC0021809
raatcctaaaata

SEQ ID NO: 86817 - DNA, 13 bp, Artificial Sequence
  Oligonucleotide for detection of SNP TSC0021809
tatttcgggatty

SEQ ID NO: 86818 - DNA, 13 bp, Artificial Sequence
  Oligonucleotide for detection of SNP TSC0021809
raatcccgaaata

SEQ ID NO: 86819 - DNA, 13 bp, Artificial Sequence
  Oligonucleotide for detection of SNP TSC0021810
atatttatataag

SEQ ID NO: 86820 - DNA, 13 bp, Artificial Sequence
  Oligonucleotide for detection of SNP TSC0021810
cttatataaatat

SEQ ID NO: 86821 - DNA, 13 bp, Artificial Sequence
  Oligonucleotide for detection of SNP TSC0021810
atatttgtataag

SEQ ID NO: 86822 - DNA, 13 bp, Artificial Sequence
  Oligonucleotide for detection of SNP TSC0021810
cttatacaaatat

SEQ ID NO: 86823 - DNA, 13 bp, Artificial Sequence
  Oligonucleotide for detection of SNP TSC0021811
agtagtgtgaggg

SEQ ID NO: 86824 - DNA, 13 bp, Artificial Sequence
  Oligonucleotide for detection of SNP TSC0021811
ccctcacactact

SEQ ID NO: 86825 - DNA, 13 bp, Artificial Sequence
  Oligonucleotide for detection of SNP TSC0021811
agtagtatgaggg

SEQ ID NO: 86826 - DNA, 13 bp, Artificial Sequence
  Oligonucleotide for detection of SNP TSC0021811
ccctcatactact

SEQ ID NO: 86827 - DNA, 13 bp, Artificial Sequence
  Oligonucleotide for detection of SNP TSC0021812
ttatataattgty

SEQ ID NO: 86828 - DNA, 13 bp, Artificial Sequence
  Oligonucleotide for detection of SNP TSC0021812
racaattatataa

SEQ ID NO: 86829 - DNA, 13 bp, Artificial Sequence
  Oligonucleotide for detection of SNP TSC0021812
ttatatgattgty

SEQ ID NO: 86830 - DNA, 13 bp, Artificial Sequence
  Oligonucleotide for detection of SNP TSC0021812
racaatcatataa

SEQ ID NO: 86831 - DNA, 13 bp, Artificial Sequence
  Oligonucleotide for detection of SNP TSC0021812
ttatacgattgty

SEQ ID NO: 86832 - DNA, 13 bp, Artificial Sequence
  Oligonucleotide for detection of SNP TSC0021812
racaatcgtataa

SEQ ID NO: 86833 - DNA, 13 bp, Artificial Sequence
  Oligonucleotide for detection of SNP TSC0021812
ggtagttgtatga

SEQ ID NO: 86834 - DNA, 13 bp, Artificial Sequence
  Oligonucleotide for detection of SNP TSC0021812
tcatacaactacc

SEQ ID NO: 86835 - DNA, 13 bp, Artificial Sequence
  Oligonucleotide for detection of SNP TSC0021812
ggtagtcgtatga

SEQ ID NO: 86836 - DNA, 13 bp, Artificial Sequence
  Oligonucleotide for detection of SNP TSC0021812
tcatacgactacc

SEQ ID NO: 86837 - DNA, 13 bp, Artificial Sequence
  Oligonucleotide for detection of SNP TSC0021813
gggtggtggggay

SEQ ID NO: 86838 - DNA, 13 bp, Artificial Sequence
  Oligonucleotide for detection of SNP TSC0021813
rtccccaccaccc

SEQ ID NO: 86839 - DNA, 13 bp, Artificial Sequence
  Oligonucleotide for detection of SNP TSC0021813
gggtggcggggay

SEQ ID NO: 86840 - DNA, 13 bp, Artificial Sequence
  Oligonucleotide for detection of SNP TSC0021813
rtccccgccaccc

SEQ ID NO: 86841 - DNA, 13 bp, Artificial Sequence
  Oligonucleotide for detection of SNP TSC0021814
ggattgagaaaay

SEQ ID NO: 86842 - DNA, 13 bp, Artificial Sequence
  Oligonucleotide for detection of SNP TSC0021814
rttttctcaatcc

SEQ ID NO: 86843 - DNA, 13 bp, Artificial Sequence
  Oligonucleotide for detection of SNP TSC0021814
ggattgggaaaay

SEQ ID NO: 86844 - DNA, 13 bp, Artificial Sequence
  Oligonucleotide for detection of SNP TSC0021814
rttttcccaatcc

SEQ ID NO: 86845 - DNA, 13 bp, Artificial Sequence
  Oligonucleotide for detection of SNP TSC0021817
aaaaggtagggta

SEQ ID NO: 86846 - DNA, 13 bp, Artificial Sequence
  Oligonucleotide for detection of SNP TSC0021817
taccctacctttt

SEQ ID NO: 86847 - DNA, 13 bp, Artificial Sequence
  Oligonucleotide for detection of SNP TSC0021817
aaaaggaagggta

SEQ ID NO: 86848 - DNA, 13 bp, Artificial Sequence
  Oligonucleotide for detection of SNP TSC0021817
tacccttcctttt

SEQ ID NO: 86849 - DNA, 13 bp, Artificial Sequence
  Oligonucleotide for detection of SNP TSC0021818
aaaagttgaatat

SEQ ID NO: 86850 - DNA, 13 bp, Artificial Sequence
  Oligonucleotide for detection of SNP TSC0021818
atattcaactttt

SEQ ID NO: 86851 - DNA, 13 bp, Artificial Sequence
  Oligonucleotide for detection of SNP TSC0021818
aaaagtggaatat

SEQ ID NO: 86852 - DNA, 13 bp, Artificial Sequence
  Oligonucleotide for detection of SNP TSC0021818
atattccactttt

SEQ ID NO: 86853 - DNA, 13 bp, Artificial Sequence
  Oligonucleotide for detection of SNP TSC0021818
aaaagcggaatat

SEQ ID NO: 86854 - DNA, 13 bp, Artificial Sequence
  Oligonucleotide for detection of SNP TSC0021818
atattccgctttt

SEQ ID NO: 86855 - DNA, 13 bp, Artificial Sequence
  Oligonucleotide for detection of SNP TSC0021819
gggaatatttatt

SEQ ID NO: 86856 - DNA, 13 bp, Artificial Sequence
  Oligonucleotide for detection of SNP TSC0021819
aataaatattccc

SEQ ID NO: 86857 - DNA, 13 bp, Artificial Sequence
  Oligonucleotide for detection of SNP TSC0021819
gggaatttttatt

SEQ ID NO: 86858 - DNA, 13 bp, Artificial Sequence
  Oligonucleotide for detection of SNP TSC0021819
aataaaaattccc

SEQ ID NO: 86859 - DNA, 13 bp, Artificial Sequence
  Oligonucleotide for detection of SNP TSC0021819
agtgggtgtttty

SEQ ID NO: 86860 - DNA, 13 bp, Artificial Sequence
  Oligonucleotide for detection of SNP TSC0021819
raaaacacccact

SEQ ID NO: 86861 - DNA, 13 bp, Artificial Sequence
  Oligonucleotide for detection of SNP TSC0021819
agtgggggtttty

SEQ ID NO: 86862 - DNA, 13 bp, Artificial Sequence
  Oligonucleotide for detection of SNP TSC0021819
raaaacccccact

SEQ ID NO: 86863 - DNA, 13 bp, Artificial Sequence
  Oligonucleotide for detection of SNP TSC0021820
agttatagtagtt

SEQ ID NO: 86864 - DNA, 13 bp, Artificial Sequence
  Oligonucleotide for detection of SNP TSC0021820
aactactataact

SEQ ID NO: 86865 - DNA, 13 bp, Artificial Sequence
  Oligonucleotide for detection of SNP TSC0021820
agttattgtagtt

SEQ ID NO: 86866 - DNA, 13 bp, Artificial Sequence
  Oligonucleotide for detection of SNP TSC0021820
aactacaataact

SEQ ID NO: 86867 - DNA, 13 bp, Artificial Sequence
  Oligonucleotide for detection of SNP TSC0021820
aattattgtagtt

SEQ ID NO: 86868 - DNA, 13 bp, Artificial Sequence
  Oligonucleotide for detection of SNP TSC0021820
aactacaataatt

SEQ ID NO: 86869 - DNA, 13 bp, Artificial Sequence
  Oligonucleotide for detection of SNP TSC0021820
aattatagtagtt

SEQ ID NO: 86870 - DNA, 13 bp, Artificial Sequence
  Oligonucleotide for detection of SNP TSC0021820
aactactataatt

SEQ ID NO: 86871 - DNA, 13 bp, Artificial Sequence
  Oligonucleotide for detection of SNP TSC0021822
atagaggggaaag

SEQ ID NO: 86872 - DNA, 13 bp, Artificial Sequence
  Oligonucleotide for detection of SNP TSC0021822
ctttcccctctat

SEQ ID NO: 86873 - DNA, 13 bp, Artificial Sequence
  Oligonucleotide for detection of SNP TSC0021822
atagagaggaaag

SEQ ID NO: 86874 - DNA, 13 bp, Artificial Sequence
  Oligonucleotide for detection of SNP TSC0021822
ctttcctctctat

SEQ ID NO: 86875 - DNA, 13 bp, Artificial Sequence
  Oligonucleotide for detection of SNP TSC0021825
attttttggtttt

SEQ ID NO: 86876 - DNA, 13 bp, Artificial Sequence
  Oligonucleotide for detection of SNP TSC0021825
aaaaccaaaaaat

SEQ ID NO: 86877 - DNA, 13 bp, Artificial Sequence
  Oligonucleotide for detection of SNP TSC0021825
atttttcggtttt

SEQ ID NO: 86878 - DNA, 13 bp, Artificial Sequence
  Oligonucleotide for detection of SNP TSC0021825
aaaaccgaaaaat

SEQ ID NO: 86879 - DNA, 13 bp, Artificial Sequence
  Oligonucleotide for detection of SNP TSC0021825
aagattgggggat

SEQ ID NO: 86880 - DNA, 13 bp, Artificial Sequence
  Oligonucleotide for detection of SNP TSC0021825
atcccccaatctt

SEQ ID NO: 86881 - DNA, 13 bp, Artificial Sequence
  Oligonucleotide for detection of SNP TSC0021825
aagatttggggat

SEQ ID NO: 86882 - DNA, 13 bp, Artificial Sequence
  Oligonucleotide for detection of SNP TSC0021825
atccccaaatctt

SEQ ID NO: 86883 - DNA, 13 bp, Artificial Sequence
  Oligonucleotide for detection of SNP TSC0021825
aagatcgggggat

SEQ ID NO: 86884 - DNA, 13 bp, Artificial Sequence
  Oligonucleotide for detection of SNP TSC0021825
atcccccgatctt

SEQ ID NO: 86885 - DNA, 13 bp, Artificial Sequence
  Oligonucleotide for detection of SNP TSC0021825
aagattcggggat

SEQ ID NO: 86886 - DNA, 13 bp, Artificial Sequence
  Oligonucleotide for detection of SNP TSC0021825
atccccgaatctt

SEQ ID NO: 86887 - DNA, 13 bp, Artificial Sequence
  Oligonucleotide for detection of SNP TSC0021827
atttttatggttt

SEQ ID NO: 86888 - DNA, 13 bp, Artificial Sequence
  Oligonucleotide for detection of SNP TSC0021827
aaaccataaaaat

SEQ ID NO: 86889 - DNA, 13 bp, Artificial Sequence
  Oligonucleotide for detection of SNP TSC0021827
atttttttggttt

SEQ ID NO: 86890 - DNA, 13 bp, Artificial Sequence
  Oligonucleotide for detection of SNP TSC0021827
aaaccaaaaaaat

SEQ ID NO: 86891 - DNA, 13 bp, Artificial Sequence
  Oligonucleotide for detection of SNP TSC0021827
aagttatgggggt

SEQ ID NO: 86892 - DNA, 13 bp, Artificial Sequence
  Oligonucleotide for detection of SNP TSC0021827
acccccataactt

SEQ ID NO: 86893 - DNA, 13 bp, Artificial Sequence
  Oligonucleotide for detection of SNP TSC0021827
aagttaggggggt

SEQ ID NO: 86894 - DNA, 13 bp, Artificial Sequence
  Oligonucleotide for detection of SNP TSC0021827
acccccctaactt

SEQ ID NO: 86895 - DNA, 13 bp, Artificial Sequence
  Oligonucleotide for detection of SNP TSC0021828
tgtttaatgtaaa

SEQ ID NO: 86896 - DNA, 13 bp, Artificial Sequence
  Oligonucleotide for detection of SNP TSC0021828
tttacattaaaca

SEQ ID NO: 86897 - DNA, 13 bp, Artificial Sequence
  Oligonucleotide for detection of SNP TSC0021828
tgtttattgtaaa

SEQ ID NO: 86898 - DNA, 13 bp, Artificial Sequence
  Oligonucleotide for detection of SNP TSC0021828
tttacaataaaca

SEQ ID NO: 86899 - DNA, 13 bp, Artificial Sequence
  Oligonucleotide for detection of SNP TSC0021828
tgtttaacgtaaa

SEQ ID NO: 86900 - DNA, 13 bp, Artificial Sequence
  Oligonucleotide for detection of SNP TSC0021828
tttacgttaaaca

SEQ ID NO: 86901 - DNA, 13 bp, Artificial Sequence
  Oligonucleotide for detection of SNP TSC0021828
tgtttatcgtaaa

SEQ ID NO: 86902 - DNA, 13 bp, Artificial Sequence
  Oligonucleotide for detection of SNP TSC0021828
tttacgataaaca

SEQ ID NO: 86903 - DNA, 13 bp, Artificial Sequence
  Oligonucleotide for detection of SNP TSC0021828
tttatgttgggta

SEQ ID NO: 86904 - DNA, 13 bp, Artificial Sequence
  Oligonucleotide for detection of SNP TSC0021828
tacccaacataaa

SEQ ID NO: 86905 - DNA, 13 bp, Artificial Sequence
  Oligonucleotide for detection of SNP TSC0021828
tttatggtgggta

SEQ ID NO: 86906 - DNA, 13 bp, Artificial Sequence
  Oligonucleotide for detection of SNP TSC0021828
tacccaccataaa

SEQ ID NO: 86907 - DNA, 13 bp, Artificial Sequence
  Oligonucleotide for detection of SNP TSC0021828
tttacgttgggta

SEQ ID NO: 86908 - DNA, 13 bp, Artificial Sequence
  Oligonucleotide for detection of SNP TSC0021828
tacccaacgtaaa

SEQ ID NO: 86909 - DNA, 13 bp, Artificial Sequence
  Oligonucleotide for detection of SNP TSC0021828
tttacggtgggta

SEQ ID NO: 86910 - DNA, 13 bp, Artificial Sequence
  Oligonucleotide for detection of SNP TSC0021828
tacccaccgtaaa

SEQ ID NO: 86911 - DNA, 13 bp, Artificial Sequence
  Oligonucleotide for detection of SNP TSC0021834
ggaattatagttt

SEQ ID NO: 86912 - DNA, 13 bp, Artificial Sequence
  Oligonucleotide for detection of SNP TSC0021834
aaactataattcc

SEQ ID NO: 86913 - DNA, 13 bp, Artificial Sequence
  Oligonucleotide for detection of SNP TSC0021834
ggaattgtagttt

SEQ ID NO: 86914 - DNA, 13 bp, Artificial Sequence
  Oligonucleotide for detection of SNP TSC0021834
aaactacaattcc

SEQ ID NO: 86915 - DNA, 13 bp, Artificial Sequence
  Oligonucleotide for detection of SNP TSC0021835
tgtagttgaatgg

SEQ ID NO: 86916 - DNA, 13 bp, Artificial Sequence
  Oligonucleotide for detection of SNP TSC0021835
ccattcaactaca

SEQ ID NO: 86917 - DNA, 13 bp, Artificial Sequence
  Oligonucleotide for detection of SNP TSC0021835
tgtagtcgaatgg

SEQ ID NO: 86918 - DNA, 13 bp, Artificial Sequence
  Oligonucleotide for detection of SNP TSC0021835
ccattcgactaca

SEQ ID NO: 86919 - DNA, 13 bp, Artificial Sequence
  Oligonucleotide for detection of SNP TSC0021835
ttatttgattgta

SEQ ID NO: 86920 - DNA, 13 bp, Artificial Sequence
  Oligonucleotide for detection of SNP TSC0021835
tacaatcaaataa

SEQ ID NO: 86921 - DNA, 13 bp, Artificial Sequence
  Oligonucleotide for detection of SNP TSC0021835
ttatttaattgta

SEQ ID NO: 86922 - DNA, 13 bp, Artificial Sequence
  Oligonucleotide for detection of SNP TSC0021835
tacaattaaataa

SEQ ID NO: 86923 - DNA, 13 bp, Artificial Sequence
  Oligonucleotide for detection of SNP TSC0021835
ttattcgattgta

SEQ ID NO: 86924 - DNA, 13 bp, Artificial Sequence
  Oligonucleotide for detection of SNP TSC0021835
tacaatcgaataa

SEQ ID NO: 86925 - DNA, 13 bp, Artificial Sequence
  Oligonucleotide for detection of SNP TSC0021839
gtagtaggggaga

SEQ ID NO: 86926 - DNA, 13 bp, Artificial Sequence
  Oligonucleotide for detection of SNP TSC0021839
tctcccctactac

SEQ ID NO: 86927 - DNA, 13 bp, Artificial Sequence
  Oligonucleotide for detection of SNP TSC0021839
gtagtaagggaga

SEQ ID NO: 86928 - DNA, 13 bp, Artificial Sequence
  Oligonucleotide for detection of SNP TSC0021839
tctcccttactac

SEQ ID NO: 86929 - DNA, 13 bp, Artificial Sequence
  Oligonucleotide for detection of SNP TSC0021842
tgaattgttgtta

SEQ ID NO: 86930 - DNA, 13 bp, Artificial Sequence
  Oligonucleotide for detection of SNP TSC0021842
taacaacaattca

SEQ ID NO: 86931 - DNA, 13 bp, Artificial Sequence
  Oligonucleotide for detection of SNP TSC0021842
tgaatttttgtta

SEQ ID NO: 86932 - DNA, 13 bp, Artificial Sequence
  Oligonucleotide for detection of SNP TSC0021842
taacaaaaattca

SEQ ID NO: 86933 - DNA, 13 bp, Artificial Sequence
  Oligonucleotide for detection of SNP TSC0021842
tgatagtagttta

SEQ ID NO: 86934 - DNA, 13 bp, Artificial Sequence
  Oligonucleotide for detection of SNP TSC0021842
taaactactatca

SEQ ID NO: 86935 - DNA, 13 bp, Artificial Sequence
  Oligonucleotide for detection of SNP TSC0021842
tgatagaagttta

SEQ ID NO: 86936 - DNA, 13 bp, Artificial Sequence
  Oligonucleotide for detection of SNP TSC0021842
taaacttctatca

SEQ ID NO: 86937 - DNA, 13 bp, Artificial Sequence
  Oligonucleotide for detection of SNP TSC0021843
tttgttatttgty

SEQ ID NO: 86938 - DNA, 13 bp, Artificial Sequence
  Oligonucleotide for detection of SNP TSC0021843
racaaataacaaa

SEQ ID NO: 86939 - DNA, 13 bp, Artificial Sequence
  Oligonucleotide for detection of SNP TSC0021845
agatataattatg

SEQ ID NO: 86940 - DNA, 13 bp, Artificial Sequence
  Oligonucleotide for detection of SNP TSC0021845
cataattatatct

SEQ ID NO: 86941 - DNA, 13 bp, Artificial Sequence
  Oligonucleotide for detection of SNP TSC0021845
agatattattatg

SEQ ID NO: 86942 - DNA, 13 bp, Artificial Sequence
  Oligonucleotide for detection of SNP TSC0021845
cataataatatct

SEQ ID NO: 86943 - DNA, 13 bp, Artificial Sequence
  Oligonucleotide for detection of SNP TSC0021845
tataattatattt

SEQ ID NO: 86944 - DNA, 13 bp, Artificial Sequence
  Oligonucleotide for detection of SNP TSC0021845
aaatataattata

SEQ ID NO: 86945 - DNA, 13 bp, Artificial Sequence
  Oligonucleotide for detection of SNP TSC0021845
tataatgatattt

SEQ ID NO: 86946 - DNA, 13 bp, Artificial Sequence
  Oligonucleotide for detection of SNP TSC0021845
aaatatcattata

SEQ ID NO: 86947 - DNA, 13 bp, Artificial Sequence
  Oligonucleotide for detection of SNP TSC0021846
ttatggtagattt

SEQ ID NO: 86948 - DNA, 13 bp, Artificial Sequence
  Oligonucleotide for detection of SNP TSC0021846
aaatctaccataa

SEQ ID NO: 86949 - DNA, 13 bp, Artificial Sequence
  Oligonucleotide for detection of SNP TSC0021846
ttatgggagattt

SEQ ID NO: 86950 - DNA, 13 bp, Artificial Sequence
  Oligonucleotide for detection of SNP TSC0021846
aaatctcccataa

SEQ ID NO: 86951 - DNA, 13 bp, Artificial Sequence
  Oligonucleotide for detection of SNP TSC0021846
ttacggtagattt

SEQ ID NO: 86952 - DNA, 13 bp, Artificial Sequence
  Oligonucleotide for detection of SNP TSC0021846
aaatctaccgtaa

SEQ ID NO: 86953 - DNA, 13 bp, Artificial Sequence
  Oligonucleotide for detection of SNP TSC0021846
ttacgggagattt

SEQ ID NO: 86954 - DNA, 13 bp, Artificial Sequence
  Oligonucleotide for detection of SNP TSC0021846
aaatctcccgtaa

SEQ ID NO: 86955 - DNA, 13 bp, Artificial Sequence
  Oligonucleotide for detection of SNP TSC0021846
aagtttgttgtgg

SEQ ID NO: 86956 - DNA, 13 bp, Artificial Sequence
  Oligonucleotide for detection of SNP TSC0021846
ccacaacaaactt

SEQ ID NO: 86957 - DNA, 13 bp, Artificial Sequence
  Oligonucleotide for detection of SNP TSC0021846
aagttttttgtgg

SEQ ID NO: 86958 - DNA, 13 bp, Artificial Sequence
  Oligonucleotide for detection of SNP TSC0021846
ccacaaaaaactt

SEQ ID NO: 86959 - DNA, 13 bp, Artificial Sequence
  Oligonucleotide for detection of SNP TSC0021846
aagtttgtcgtgg

SEQ ID NO: 86960 - DNA, 13 bp, Artificial Sequence
  Oligonucleotide for detection of SNP TSC0021846
ccacgacaaactt

SEQ ID NO: 86961 - DNA, 13 bp, Artificial Sequence
  Oligonucleotide for detection of SNP TSC0021846
aagtttttcgtgg

SEQ ID NO: 86962 - DNA, 13 bp, Artificial Sequence
  Oligonucleotide for detection of SNP TSC0021846
ccacgaaaaactt

SEQ ID NO: 86963 - DNA, 13 bp, Artificial Sequence
  Oligonucleotide for detection of SNP TSC0021852
tggtaaattttta

SEQ ID NO: 86964 - DNA, 13 bp, Artificial Sequence
  Oligonucleotide for detection of SNP TSC0021852
taaaaatttacca

SEQ ID NO: 86965 - DNA, 13 bp, Artificial Sequence
  Oligonucleotide for detection of SNP TSC0021852
tggtaatttttta

SEQ ID NO: 86966 - DNA, 13 bp, Artificial Sequence
  Oligonucleotide for detection of SNP TSC0021852
taaaaaattacca

SEQ ID NO: 86967 - DNA, 13 bp, Artificial Sequence
  Oligonucleotide for detection of SNP TSC0021852
taagagtttatta

SEQ ID NO: 86968 - DNA, 13 bp, Artificial Sequence
  Oligonucleotide for detection of SNP TSC0021852
taataaactctta

SEQ ID NO: 86969 - DNA, 13 bp, Artificial Sequence
  Oligonucleotide for detection of SNP TSC0021852
taagagattatta

SEQ ID NO: 86970 - DNA, 13 bp, Artificial Sequence
  Oligonucleotide for detection of SNP TSC0021852
taataatctctta

SEQ ID NO: 86971 - DNA, 13 bp, Artificial Sequence
  Oligonucleotide for detection of SNP TSC0021856
attttttgaagay

SEQ ID NO: 86972 - DNA, 13 bp, Artificial Sequence
  Oligonucleotide for detection of SNP TSC0021856
rtcttcaaaaaat

SEQ ID NO: 86973 - DNA, 13 bp, Artificial Sequence
  Oligonucleotide for detection of SNP TSC0021856
atttttcgaagay

SEQ ID NO: 86974 - DNA, 13 bp, Artificial Sequence
  Oligonucleotide for detection of SNP TSC0021856
rtcttcgaaaaat

SEQ ID NO: 86975 - DNA, 13 bp, Artificial Sequence
  Oligonucleotide for detection of SNP TSC0021856
gtttttggggaat

SEQ ID NO: 86976 - DNA, 13 bp, Artificial Sequence
  Oligonucleotide for detection of SNP TSC0021856
attccccaaaaac

SEQ ID NO: 86977 - DNA, 13 bp, Artificial Sequence
  Oligonucleotide for detection of SNP TSC0021856
gtttttagggaat

SEQ ID NO: 86978 - DNA, 13 bp, Artificial Sequence
  Oligonucleotide for detection of SNP TSC0021856
attccctaaaaac

SEQ ID NO: 86979 - DNA, 13 bp, Artificial Sequence
  Oligonucleotide for detection of SNP TSC0021856
gttttcggggaat

SEQ ID NO: 86980 - DNA, 13 bp, Artificial Sequence
  Oligonucleotide for detection of SNP TSC0021856
attccccgaaaac

SEQ ID NO: 86981 - DNA, 13 bp, Artificial Sequence
  Oligonucleotide for detection of SNP TSC0021857
agtattattggta

SEQ ID NO: 86982 - DNA, 13 bp, Artificial Sequence
  Oligonucleotide for detection of SNP TSC0021857
taccaataatact

SEQ ID NO: 86983 - DNA, 13 bp, Artificial Sequence
  Oligonucleotide for detection of SNP TSC0021857
agtatttttggta

SEQ ID NO: 86984 - DNA, 13 bp, Artificial Sequence
  Oligonucleotide for detection of SNP TSC0021857
taccaaaaatact

SEQ ID NO: 86985 - DNA, 13 bp, Artificial Sequence
  Oligonucleotide for detection of SNP TSC0021857
tgttagtgatgtt

SEQ ID NO: 86986 - DNA, 13 bp, Artificial Sequence
  Oligonucleotide for detection of SNP TSC0021857
aacatcactaaca

SEQ ID NO: 86987 - DNA, 13 bp, Artificial Sequence
  Oligonucleotide for detection of SNP TSC0021857
tgttagggatgtt

SEQ ID NO: 86988 - DNA, 13 bp, Artificial Sequence
  Oligonucleotide for detection of SNP TSC0021857
aacatccctaaca

SEQ ID NO: 86989 - DNA, 13 bp, Artificial Sequence
  Oligonucleotide for detection of SNP TSC0021858
tttgtgaggaagg

SEQ ID NO: 86990 - DNA, 13 bp, Artificial Sequence
  Oligonucleotide for detection of SNP TSC0021858
ccttcctcacaaa

SEQ ID NO: 86991 - DNA, 13 bp, Artificial Sequence
  Oligonucleotide for detection of SNP TSC0021858
tttgtggggaagg

SEQ ID NO: 86992 - DNA, 13 bp, Artificial Sequence
  Oligonucleotide for detection of SNP TSC0021858
ccttccccacaaa

SEQ ID NO: 86993 - DNA, 13 bp, Artificial Sequence
  Oligonucleotide for detection of SNP TSC0021858
ttcgtgaggaagg

SEQ ID NO: 86994 - DNA, 13 bp, Artificial Sequence
  Oligonucleotide for detection of SNP TSC0021858
ccttcctcacgaa

SEQ ID NO: 86995 - DNA, 13 bp, Artificial Sequence
  Oligonucleotide for detection of SNP TSC0021858
ttcgtggggaagg

SEQ ID NO: 86996 - DNA, 13 bp, Artificial Sequence
  Oligonucleotide for detection of SNP TSC0021858
ccttccccacgaa

SEQ ID NO: 86997 - DNA, 13 bp, Artificial Sequence
  Oligonucleotide for detection of SNP TSC0021859
gggtagggtttgy

SEQ ID NO: 86998 - DNA, 13 bp, Artificial Sequence
  Oligonucleotide for detection of SNP TSC0021859
rcaaaccctaccc

SEQ ID NO: 86999 - DNA, 13 bp, Artificial Sequence
  Oligonucleotide for detection of SNP TSC0021859
gggtagtgtttgy

SEQ ID NO: 87000 - DNA, 13 bp, Artificial Sequence
  Oligonucleotide for detection of SNP TSC0021859
rcaaacactaccc

SEQ ID NO: 87001 - DNA, 13 bp, Artificial Sequence
  Oligonucleotide for detection of SNP TSC0021859
gtaggttttgtty

SEQ ID NO: 87002 - DNA, 13 bp, Artificial Sequence
  Oligonucleotide for detection of SNP TSC0021859
raacaaaacctac

SEQ ID NO: 87003 - DNA, 13 bp, Artificial Sequence
  Oligonucleotide for detection of SNP TSC0021859
gtaggtattgtty

SEQ ID NO: 87004 - DNA, 13 bp, Artificial Sequence
  Oligonucleotide for detection of SNP TSC0021859
raacaatacctac

SEQ ID NO: 87005 - DNA, 13 bp, Artificial Sequence
  Oligonucleotide for detection of SNP TSC0021860
ttgaggtatggag

SEQ ID NO: 87006 - DNA, 13 bp, Artificial Sequence
  Oligonucleotide for detection of SNP TSC0021860
ctccatacctcaa

SEQ ID NO: 87007 - DNA, 13 bp, Artificial Sequence
  Oligonucleotide for detection of SNP TSC0021860
ttgagggatggag

SEQ ID NO: 87008 - DNA, 13 bp, Artificial Sequence
  Oligonucleotide for detection of SNP TSC0021860
ctccatccctcaa

SEQ ID NO: 87009 - DNA, 13 bp, Artificial Sequence
  Oligonucleotide for detection of SNP TSC0021860
ttgaggtacggag

SEQ ID NO: 87010 - DNA, 13 bp, Artificial Sequence
  Oligonucleotide for detection of SNP TSC0021860
ctccgtacctcaa

SEQ ID NO: 87011 - DNA, 13 bp, Artificial Sequence
  Oligonucleotide for detection of SNP TSC0021860
ttgagggacggag

SEQ ID NO: 87012 - DNA, 13 bp, Artificial Sequence
  Oligonucleotide for detection of SNP TSC0021860
ctccgtccctcaa

SEQ ID NO: 87013 - DNA, 13 bp, Artificial Sequence
  Oligonucleotide for detection of SNP TSC0021860
tttcgttttttag

SEQ ID NO: 87014 - DNA, 13 bp, Artificial Sequence
  Oligonucleotide for detection of SNP TSC0021860
ctaaaaaacgaaa

SEQ ID NO: 87015 - DNA, 13 bp, Artificial Sequence
  Oligonucleotide for detection of SNP TSC0021865
ttttttattagaa

SEQ ID NO: 87016 - DNA, 13 bp, Artificial Sequence
  Oligonucleotide for detection of SNP TSC0021865
ttctaataaaaaa

SEQ ID NO: 87017 - DNA, 13 bp, Artificial Sequence
  Oligonucleotide for detection of SNP TSC0021865
ttttttgttagaa

SEQ ID NO: 87018 - DNA, 13 bp, Artificial Sequence
  Oligonucleotide for detection of SNP TSC0021865
ttctaacaaaaaa

SEQ ID NO: 87019 - DNA, 13 bp, Artificial Sequence
  Oligonucleotide for detection of SNP TSC0021865
tttttcgttagaa

SEQ ID NO: 87020 - DNA, 13 bp, Artificial Sequence
  Oligonucleotide for detection of SNP TSC0021865
ttctaacgaaaaa

SEQ ID NO: 87021 - DNA, 13 bp, Artificial Sequence
  Oligonucleotide for detection of SNP TSC0021865
ttttgatgaggaa

SEQ ID NO: 87022 - DNA, 13 bp, Artificial Sequence
  Oligonucleotide for detection of SNP TSC0021865
ttcctcatcaaaa

SEQ ID NO: 87023 - DNA, 13 bp, Artificial Sequence
  Oligonucleotide for detection of SNP TSC0021865
ttttgacgaggaa

SEQ ID NO: 87024 - DNA, 13 bp, Artificial Sequence
  Oligonucleotide for detection of SNP TSC0021865
ttcctcgtcaaaa

SEQ ID NO: 87025 - DNA, 13 bp, Artificial Sequence
  Oligonucleotide for detection of SNP TSC0021866
ttttgtgggagag

SEQ ID NO: 87026 - DNA, 13 bp, Artificial Sequence
  Oligonucleotide for detection of SNP TSC0021866
ctctcccacaaaa

SEQ ID NO: 87027 - DNA, 13 bp, Artificial Sequence
  Oligonucleotide for detection of SNP TSC0021866
ttttgttggagag

SEQ ID NO: 87028 - DNA, 13 bp, Artificial Sequence
  Oligonucleotide for detection of SNP TSC0021866
ctctccaacaaaa

SEQ ID NO: 87029 - DNA, 13 bp, Artificial Sequence
  Oligonucleotide for detection of SNP TSC0021866
tttttttatagga

SEQ ID NO: 87030 - DNA, 13 bp, Artificial Sequence
  Oligonucleotide for detection of SNP TSC0021866
tcctataaaaaaa

SEQ ID NO: 87031 - DNA, 13 bp, Artificial Sequence
  Oligonucleotide for detection of SNP TSC0021866
ttttttaatagga

SEQ ID NO: 87032 - DNA, 13 bp, Artificial Sequence
  Oligonucleotide for detection of SNP TSC0021866
tcctattaaaaaa

SEQ ID NO: 87033 - DNA, 13 bp, Artificial Sequence
  Oligonucleotide for detection of SNP TSC0021873
agttaagtgttga

SEQ ID NO: 87034 - DNA, 13 bp, Artificial Sequence
  Oligonucleotide for detection of SNP TSC0021873
tcaacacttaact

SEQ ID NO: 87035 - DNA, 13 bp, Artificial Sequence
  Oligonucleotide for detection of SNP TSC0021873
agttaaatgttga

SEQ ID NO: 87036 - DNA, 13 bp, Artificial Sequence
  Oligonucleotide for detection of SNP TSC0021873
tcaacatttaact

SEQ ID NO: 87037 - DNA, 13 bp, Artificial Sequence
  Oligonucleotide for detection of SNP TSC0021874
agtagtattatta

SEQ ID NO: 87038 - DNA, 13 bp, Artificial Sequence
  Oligonucleotide for detection of SNP TSC0021874
taataatactact

SEQ ID NO: 87039 - DNA, 13 bp, Artificial Sequence
  Oligonucleotide for detection of SNP TSC0021874
agtagtgttatta

SEQ ID NO: 87040 - DNA, 13 bp, Artificial Sequence
  Oligonucleotide for detection of SNP TSC0021874
taataacactact

SEQ ID NO: 87041 - DNA, 13 bp, Artificial Sequence
  Oligonucleotide for detection of SNP TSC0021877
aagttaaagttty

SEQ ID NO: 87042 - DNA, 13 bp, Artificial Sequence
  Oligonucleotide for detection of SNP TSC0021877
raaactttaactt

SEQ ID NO: 87043 - DNA, 13 bp, Artificial Sequence
  Oligonucleotide for detection of SNP TSC0021877
aagttagagttty

SEQ ID NO: 87044 - DNA, 13 bp, Artificial Sequence
  Oligonucleotide for detection of SNP TSC0021877
raaactctaactt

SEQ ID NO: 87045 - DNA, 13 bp, Artificial Sequence
  Oligonucleotide for detection of SNP TSC0021878
aatagtatttaay

SEQ ID NO: 87046 - DNA, 13 bp, Artificial Sequence
  Oligonucleotide for detection of SNP TSC0021878
rttaaatactatt

SEQ ID NO: 87047 - DNA, 13 bp, Artificial Sequence
  Oligonucleotide for detection of SNP TSC0021878
aatagtgtttaay

SEQ ID NO: 87048 - DNA, 13 bp, Artificial Sequence
  Oligonucleotide for detection of SNP TSC0021878
rttaaacactatt

SEQ ID NO: 87049 - DNA, 13 bp, Artificial Sequence
  Oligonucleotide for detection of SNP TSC0021878
aatagcgtttaay

SEQ ID NO: 87050 - DNA, 13 bp, Artificial Sequence
  Oligonucleotide for detection of SNP TSC0021878
rttaaacgctatt

SEQ ID NO: 87051 - DNA, 13 bp, Artificial Sequence
  Oligonucleotide for detection of SNP TSC0021878
gttaggtgttgtt

SEQ ID NO: 87052 - DNA, 13 bp, Artificial Sequence
  Oligonucleotide for detection of SNP TSC0021878
aacaacacctaac

SEQ ID NO: 87053 - DNA, 13 bp, Artificial Sequence
  Oligonucleotide for detection of SNP TSC0021878
gttaggcgttgtt

SEQ ID NO: 87054 - DNA, 13 bp, Artificial Sequence
  Oligonucleotide for detection of SNP TSC0021878
aacaacgcctaac

SEQ ID NO: 87055 - DNA, 13 bp, Artificial Sequence
  Oligonucleotide for detection of SNP TSC0021879
ttaggtatgttaa

SEQ ID NO: 87056 - DNA, 13 bp, Artificial Sequence
  Oligonucleotide for detection of SNP TSC0021879
ttaacatacctaa

SEQ ID NO: 87057 - DNA, 13 bp, Artificial Sequence
  Oligonucleotide for detection of SNP TSC0021879
ttaggtgtgttaa

SEQ ID NO: 87058 - DNA, 13 bp, Artificial Sequence
  Oligonucleotide for detection of SNP TSC0021879
ttaacacacctaa

SEQ ID NO: 87059 - DNA, 13 bp, Artificial Sequence
  Oligonucleotide for detection of SNP TSC0021879
ttaggcgtgttaa

SEQ ID NO: 87060 - DNA, 13 bp, Artificial Sequence
  Oligonucleotide for detection of SNP TSC0021879
ttaacacgcctaa

SEQ ID NO: 87061 - DNA, 13 bp, Artificial Sequence
  Oligonucleotide for detection of SNP TSC0021879
ttagtatgtttag

SEQ ID NO: 87062 - DNA, 13 bp, Artificial Sequence
  Oligonucleotide for detection of SNP TSC0021879
ctaaacatactaa

SEQ ID NO: 87063 - DNA, 13 bp, Artificial Sequence
  Oligonucleotide for detection of SNP TSC0021879
ttagtacgtttag

SEQ ID NO: 87064 - DNA, 13 bp, Artificial Sequence
  Oligonucleotide for detection of SNP TSC0021879
ctaaacgtactaa

SEQ ID NO: 87065 - DNA, 13 bp, Artificial Sequence
  Oligonucleotide for detection of SNP TSC0021880
ggtaggaaagaaa

SEQ ID NO: 87066 - DNA, 13 bp, Artificial Sequence
  Oligonucleotide for detection of SNP TSC0021880
tttctttcctacc

SEQ ID NO: 87067 - DNA, 13 bp, Artificial Sequence
  Oligonucleotide for detection of SNP TSC0021880
ggtagggaagaaa

SEQ ID NO: 87068 - DNA, 13 bp, Artificial Sequence
  Oligonucleotide for detection of SNP TSC0021880
tttcttccctacc

SEQ ID NO: 87069 - DNA, 13 bp, Artificial Sequence
  Oligonucleotide for detection of SNP TSC0021881
ttttataatttga

SEQ ID NO: 87070 - DNA, 13 bp, Artificial Sequence
  Oligonucleotide for detection of SNP TSC0021881
tcaaattataaaa

SEQ ID NO: 87071 - DNA, 13 bp, Artificial Sequence
  Oligonucleotide for detection of SNP TSC0021881
ttttatgatttga

SEQ ID NO: 87072 - DNA, 13 bp, Artificial Sequence
  Oligonucleotide for detection of SNP TSC0021881
tcaaatcataaaa

SEQ ID NO: 87073 - DNA, 13 bp, Artificial Sequence
  Oligonucleotide for detection of SNP TSC0021881
ttttacgatttga

SEQ ID NO: 87074 - DNA, 13 bp, Artificial Sequence
  Oligonucleotide for detection of SNP TSC0021881
tcaaatcgtaaaa

SEQ ID NO: 87075 - DNA, 13 bp, Artificial Sequence
  Oligonucleotide for detection of SNP TSC0021881
ttaggttgtggag

SEQ ID NO: 87076 - DNA, 13 bp, Artificial Sequence
  Oligonucleotide for detection of SNP TSC0021881
ctccacaacctaa

SEQ ID NO: 87077 - DNA, 13 bp, Artificial Sequence
  Oligonucleotide for detection of SNP TSC0021881
ttaggtcgtggag

SEQ ID NO: 87078 - DNA, 13 bp, Artificial Sequence
  Oligonucleotide for detection of SNP TSC0021881
ctccacgacctaa

SEQ ID NO: 87079 - DNA, 13 bp, Artificial Sequence
  Oligonucleotide for detection of SNP TSC0021883
taggttttttgtg

SEQ ID NO: 87080 - DNA, 13 bp, Artificial Sequence
  Oligonucleotide for detection of SNP TSC0021883
cacaaaaaaccta

SEQ ID NO: 87081 - DNA, 13 bp, Artificial Sequence
  Oligonucleotide for detection of SNP TSC0021883
taggttgtttgtg

SEQ ID NO: 87082 - DNA, 13 bp, Artificial Sequence
  Oligonucleotide for detection of SNP TSC0021883
cacaaacaaccta

SEQ ID NO: 87083 - DNA, 13 bp, Artificial Sequence
  Oligonucleotide for detection of SNP TSC0021883
taggtttttcgtg

SEQ ID NO: 87084 - DNA, 13 bp, Artificial Sequence
  Oligonucleotide for detection of SNP TSC0021883
cacgaaaaaccta

SEQ ID NO: 87085 - DNA, 13 bp, Artificial Sequence
  Oligonucleotide for detection of SNP TSC0021883
taggttgttcgtg

SEQ ID NO: 87086 - DNA, 13 bp, Artificial Sequence
  Oligonucleotide for detection of SNP TSC0021883
cacgaacaaccta

SEQ ID NO: 87087 - DNA, 13 bp, Artificial Sequence
  Oligonucleotide for detection of SNP TSC0021883
tatgaggagtttg

SEQ ID NO: 87088 - DNA, 13 bp, Artificial Sequence
  Oligonucleotide for detection of SNP TSC0021883
caaactcctcata

SEQ ID NO: 87089 - DNA, 13 bp, Artificial Sequence
  Oligonucleotide for detection of SNP TSC0021883
tatgagtagtttg

SEQ ID NO: 87090 - DNA, 13 bp, Artificial Sequence
  Oligonucleotide for detection of SNP TSC0021883
caaactactcata

SEQ ID NO: 87091 - DNA, 13 bp, Artificial Sequence
  Oligonucleotide for detection of SNP TSC0021883
tacgaggagtttg

SEQ ID NO: 87092 - DNA, 13 bp, Artificial Sequence
  Oligonucleotide for detection of SNP TSC0021883
caaactcctcgta

SEQ ID NO: 87093 - DNA, 13 bp, Artificial Sequence
  Oligonucleotide for detection of SNP TSC0021883
tacgagtagtttg

SEQ ID NO: 87094 - DNA, 13 bp, Artificial Sequence
  Oligonucleotide for detection of SNP TSC0021883
caaactactcgta

SEQ ID NO: 87095 - DNA, 13 bp, Artificial Sequence
  Oligonucleotide for detection of SNP TSC0021887
tgtgggaagagty

SEQ ID NO: 87096 - DNA, 13 bp, Artificial Sequence
  Oligonucleotide for detection of SNP TSC0021887
ractcttcccaca

SEQ ID NO: 87097 - DNA, 13 bp, Artificial Sequence
  Oligonucleotide for detection of SNP TSC0021887
tgtggggagagty

SEQ ID NO: 87098 - DNA, 13 bp, Artificial Sequence
  Oligonucleotide for detection of SNP TSC0021887
ractctccccaca

SEQ ID NO: 87099 - DNA, 13 bp, Artificial Sequence
  Oligonucleotide for detection of SNP TSC0021889
ggagtggtttagt

SEQ ID NO: 87100 - DNA, 13 bp, Artificial Sequence
  Oligonucleotide for detection of SNP TSC0021889
actaaaccactcc

SEQ ID NO: 87101 - DNA, 13 bp, Artificial Sequence
  Oligonucleotide for detection of SNP TSC0021889
ggagtgttttagt

SEQ ID NO: 87102 - DNA, 13 bp, Artificial Sequence
  Oligonucleotide for detection of SNP TSC0021889
actaaaacactcc

SEQ ID NO: 87103 - DNA, 13 bp, Artificial Sequence
  Oligonucleotide for detection of SNP TSC0021889
attagattattty

SEQ ID NO: 87104 - DNA, 13 bp, Artificial Sequence
  Oligonucleotide for detection of SNP TSC0021889
raaataatctaat

SEQ ID NO: 87105 - DNA, 13 bp, Artificial Sequence
  Oligonucleotide for detection of SNP TSC0021889
attagaatattty

SEQ ID NO: 87106 - DNA, 13 bp, Artificial Sequence
  Oligonucleotide for detection of SNP TSC0021889
raaatattctaat

SEQ ID NO: 87107 - DNA, 13 bp, Artificial Sequence
  Oligonucleotide for detection of SNP TSC0021890
tataagtggaaay

SEQ ID NO: 87108 - DNA, 13 bp, Artificial Sequence
  Oligonucleotide for detection of SNP TSC0021890
rtttccacttata

SEQ ID NO: 87109 - DNA, 13 bp, Artificial Sequence
  Oligonucleotide for detection of SNP TSC0021890
tataagcggaaay

SEQ ID NO: 87110 - DNA, 13 bp, Artificial Sequence
  Oligonucleotide for detection of SNP TSC0021890
rtttccgcttata

SEQ ID NO: 87111 - DNA, 13 bp, Artificial Sequence
  Oligonucleotide for detection of SNP TSC0021890
gtttttgtttgtg

SEQ ID NO: 87112 - DNA, 13 bp, Artificial Sequence
  Oligonucleotide for detection of SNP TSC0021890
cacaaacaaaaac

SEQ ID NO: 87113 - DNA, 13 bp, Artificial Sequence
  Oligonucleotide for detection of SNP TSC0021890
gtttttatttgtg

SEQ ID NO: 87114 - DNA, 13 bp, Artificial Sequence
  Oligonucleotide for detection of SNP TSC0021890
cacaaataaaaac

SEQ ID NO: 87115 - DNA, 13 bp, Artificial Sequence
  Oligonucleotide for detection of SNP TSC0021890
gttttcgtttgtg

SEQ ID NO: 87116 - DNA, 13 bp, Artificial Sequence
  Oligonucleotide for detection of SNP TSC0021890
cacaaacgaaaac

SEQ ID NO: 87117 - DNA, 13 bp, Artificial Sequence
  Oligonucleotide for detection of SNP TSC0021892
gtaatatggataa

SEQ ID NO: 87118 - DNA, 13 bp, Artificial Sequence
  Oligonucleotide for detection of SNP TSC0021892
ttatccatattac

SEQ ID NO: 87119 - DNA, 13 bp, Artificial Sequence
  Oligonucleotide for detection of SNP TSC0021892
gtaatacggataa

SEQ ID NO: 87120 - DNA, 13 bp, Artificial Sequence
  Oligonucleotide for detection of SNP TSC0021892
ttatccgtattac

SEQ ID NO: 87121 - DNA, 13 bp, Artificial Sequence
  Oligonucleotide for detection of SNP TSC0021892
ttgtttgtgttay

SEQ ID NO: 87122 - DNA, 13 bp, Artificial Sequence
  Oligonucleotide for detection of SNP TSC0021892
rtaacacaaacaa

SEQ ID NO: 87123 - DNA, 13 bp, Artificial Sequence
  Oligonucleotide for detection of SNP TSC0021892
ttgtttatgttay

SEQ ID NO: 87124 - DNA, 13 bp, Artificial Sequence
  Oligonucleotide for detection of SNP TSC0021892
rtaacataaacaa

SEQ ID NO: 87125 - DNA, 13 bp, Artificial Sequence
  Oligonucleotide for detection of SNP TSC0021892
ttgttcgtgttay

SEQ ID NO: 87126 - DNA, 13 bp, Artificial Sequence
  Oligonucleotide for detection of SNP TSC0021892
rtaacacgaacaa

SEQ ID NO: 87127 - DNA, 13 bp, Artificial Sequence
  Oligonucleotide for detection of SNP TSC0021893
gaataaaatatty

SEQ ID NO: 87128 - DNA, 13 bp, Artificial Sequence
  Oligonucleotide for detection of SNP TSC0021893
raatattttattc

SEQ ID NO: 87129 - DNA, 13 bp, Artificial Sequence
  Oligonucleotide for detection of SNP TSC0021893
gaatatattgtty

SEQ ID NO: 87130 - DNA, 13 bp, Artificial Sequence
  Oligonucleotide for detection of SNP TSC0021893
raacaatatattc

SEQ ID NO: 87131 - DNA, 13 bp, Artificial Sequence
  Oligonucleotide for detection of SNP TSC0021894
ttgtaggtagtty

SEQ ID NO: 87132 - DNA, 13 bp, Artificial Sequence
  Oligonucleotide for detection of SNP TSC0021894
raactacctacaa

SEQ ID NO: 87133 - DNA, 13 bp, Artificial Sequence
  Oligonucleotide for detection of SNP TSC0021894
ttgtagatagtty

SEQ ID NO: 87134 - DNA, 13 bp, Artificial Sequence
  Oligonucleotide for detection of SNP TSC0021894
raactatctacaa

SEQ ID NO: 87135 - DNA, 13 bp, Artificial Sequence
  Oligonucleotide for detection of SNP TSC0021905
aaaataaaatagt

SEQ ID NO: 87136 - DNA, 13 bp, Artificial Sequence
  Oligonucleotide for detection of SNP TSC0021905
actattttatttt

SEQ ID NO: 87137 - DNA, 13 bp, Artificial Sequence
  Oligonucleotide for detection of SNP TSC0021905
aaaatagaatagt

SEQ ID NO: 87138 - DNA, 13 bp, Artificial Sequence
  Oligonucleotide for detection of SNP TSC0021905
actattctatttt

SEQ ID NO: 87139 - DNA, 13 bp, Artificial Sequence
  Oligonucleotide for detection of SNP TSC0021907
gaaattgatgtga

SEQ ID NO: 87140 - DNA, 13 bp, Artificial Sequence
  Oligonucleotide for detection of SNP TSC0021907
tcacatcaatttc

SEQ ID NO: 87141 - DNA, 13 bp, Artificial Sequence
  Oligonucleotide for detection of SNP TSC0021907
gaaattaatgtga

SEQ ID NO: 87142 - DNA, 13 bp, Artificial Sequence
  Oligonucleotide for detection of SNP TSC0021907
tcacattaatttc

SEQ ID NO: 87143 - DNA, 13 bp, Artificial Sequence
  Oligonucleotide for detection of SNP TSC0021907
gaaattgacgtga

SEQ ID NO: 87144 - DNA, 13 bp, Artificial Sequence
  Oligonucleotide for detection of SNP TSC0021907
tcacgtcaatttc

SEQ ID NO: 87145 - DNA, 13 bp, Artificial Sequence
  Oligonucleotide for detection of SNP TSC0021907
gaaattaacgtga

SEQ ID NO: 87146 - DNA, 13 bp, Artificial Sequence
  Oligonucleotide for detection of SNP TSC0021907
tcacgttaatttc

SEQ ID NO: 87147 - DNA, 13 bp, Artificial Sequence
  Oligonucleotide for detection of SNP TSC0021908
tatgttagtttta

SEQ ID NO: 87148 - DNA, 13 bp, Artificial Sequence
  Oligonucleotide for detection of SNP TSC0021908
taaaactaacata

SEQ ID NO: 87149 - DNA, 13 bp, Artificial Sequence
  Oligonucleotide for detection of SNP TSC0021908
tatgttggtttta

SEQ ID NO: 87150 - DNA, 13 bp, Artificial Sequence
  Oligonucleotide for detection of SNP TSC0021908
taaaaccaacata

SEQ ID NO: 87151 - DNA, 13 bp, Artificial Sequence
  Oligonucleotide for detection of SNP TSC0021908
tacgttagtttta

SEQ ID NO: 87152 - DNA, 13 bp, Artificial Sequence
  Oligonucleotide for detection of SNP TSC0021908
taaaactaacgta

SEQ ID NO: 87153 - DNA, 13 bp, Artificial Sequence
  Oligonucleotide for detection of SNP TSC0021908
tacgttggtttta

SEQ ID NO: 87154 - DNA, 13 bp, Artificial Sequence
  Oligonucleotide for detection of SNP TSC0021908
taaaaccaacgta

SEQ ID NO: 87155 - DNA, 13 bp, Artificial Sequence
  Oligonucleotide for detection of SNP TSC0021908
tatgtcggtttta

SEQ ID NO: 87156 - DNA, 13 bp, Artificial Sequence
  Oligonucleotide for detection of SNP TSC0021908
taaaaccgacata

SEQ ID NO: 87157 - DNA, 13 bp, Artificial Sequence
  Oligonucleotide for detection of SNP TSC0021908
tacgtcggtttta

SEQ ID NO: 87158 - DNA, 13 bp, Artificial Sequence
  Oligonucleotide for detection of SNP TSC0021908
taaaaccgacgta

SEQ ID NO: 87159 - DNA, 13 bp, Artificial Sequence
  Oligonucleotide for detection of SNP TSC0021908
tgaaattgatgtg

SEQ ID NO: 87160 - DNA, 13 bp, Artificial Sequence
  Oligonucleotide for detection of SNP TSC0021908
cacatcaatttca

SEQ ID NO: 87161 - DNA, 13 bp, Artificial Sequence
  Oligonucleotide for detection of SNP TSC0021908
tgaaattgacgtg

SEQ ID NO: 87162 - DNA, 13 bp, Artificial Sequence
  Oligonucleotide for detection of SNP TSC0021908
cacgtcaatttca

SEQ ID NO: 87163 - DNA, 13 bp, Artificial Sequence
  Oligonucleotide for detection of SNP TSC0021908
tgaaatcgatgtg

SEQ ID NO: 87164 - DNA, 13 bp, Artificial Sequence
  Oligonucleotide for detection of SNP TSC0021908
cacatcgatttca

SEQ ID NO: 87165 - DNA, 13 bp, Artificial Sequence
  Oligonucleotide for detection of SNP TSC0021908
tgaaatcgacgtg

SEQ ID NO: 87166 - DNA, 13 bp, Artificial Sequence
  Oligonucleotide for detection of SNP TSC0021908
cacgtcgatttca

SEQ ID NO: 87167 - DNA, 13 bp, Artificial Sequence
  Oligonucleotide for detection of SNP TSC0021913
ttgttaatagaag

SEQ ID NO: 87168 - DNA, 13 bp, Artificial Sequence
  Oligonucleotide for detection of SNP TSC0021913
cttctattaacaa

SEQ ID NO: 87169 - DNA, 13 bp, Artificial Sequence
  Oligonucleotide for detection of SNP TSC0021913
ttgttagtagaag

SEQ ID NO: 87170 - DNA, 13 bp, Artificial Sequence
  Oligonucleotide for detection of SNP TSC0021913
cttctactaacaa

SEQ ID NO: 87171 - DNA, 13 bp, Artificial Sequence
  Oligonucleotide for detection of SNP TSC0021913
tcgttaatagaag

SEQ ID NO: 87172 - DNA, 13 bp, Artificial Sequence
  Oligonucleotide for detection of SNP TSC0021913
cttctattaacga

SEQ ID NO: 87173 - DNA, 13 bp, Artificial Sequence
  Oligonucleotide for detection of SNP TSC0021913
tcgttagtagaag

SEQ ID NO: 87174 - DNA, 13 bp, Artificial Sequence
  Oligonucleotide for detection of SNP TSC0021913
cttctactaacga

SEQ ID NO: 87175 - DNA, 13 bp, Artificial Sequence
  Oligonucleotide for detection of SNP TSC0021914
aaatgtagattat

SEQ ID NO: 87176 - DNA, 13 bp, Artificial Sequence
  Oligonucleotide for detection of SNP TSC0021914
ataatctacattt

SEQ ID NO: 87177 - DNA, 13 bp, Artificial Sequence
  Oligonucleotide for detection of SNP TSC0021914
aaatgtggattat

SEQ ID NO: 87178 - DNA, 13 bp, Artificial Sequence
  Oligonucleotide for detection of SNP TSC0021914
ataatccacattt

SEQ ID NO: 87179 - DNA, 13 bp, Artificial Sequence
  Oligonucleotide for detection of SNP TSC0021916
aatgagatagtgg

SEQ ID NO: 87180 - DNA, 13 bp, Artificial Sequence
  Oligonucleotide for detection of SNP TSC0021916
ccactatctcatt

SEQ ID NO: 87181 - DNA, 13 bp, Artificial Sequence
  Oligonucleotide for detection of SNP TSC0021916
aatgaggtagtgg

SEQ ID NO: 87182 - DNA, 13 bp, Artificial Sequence
  Oligonucleotide for detection of SNP TSC0021916
ccactacctcatt

SEQ ID NO: 87183 - DNA, 13 bp, Artificial Sequence
  Oligonucleotide for detection of SNP TSC0021917
ttggggtattttt

SEQ ID NO: 87184 - DNA, 13 bp, Artificial Sequence
  Oligonucleotide for detection of SNP TSC0021917
aaaaataccccaa

SEQ ID NO: 87185 - DNA, 13 bp, Artificial Sequence
  Oligonucleotide for detection of SNP TSC0021917
ttgggggattttt

SEQ ID NO: 87186 - DNA, 13 bp, Artificial Sequence
  Oligonucleotide for detection of SNP TSC0021917
aaaaatcccccaa

SEQ ID NO: 87187 - DNA, 13 bp, Artificial Sequence
  Oligonucleotide for detection of SNP TSC0021917
agaagtgttttaa

SEQ ID NO: 87188 - DNA, 13 bp, Artificial Sequence
  Oligonucleotide for detection of SNP TSC0021917
ttaaaacacttct

SEQ ID NO: 87189 - DNA, 13 bp, Artificial Sequence
  Oligonucleotide for detection of SNP TSC0021917
agaagttttttaa

SEQ ID NO: 87190 - DNA, 13 bp, Artificial Sequence
  Oligonucleotide for detection of SNP TSC0021917
ttaaaaaacttct

SEQ ID NO: 87191 - DNA, 13 bp, Artificial Sequence
  Oligonucleotide for detection of SNP TSC0021919
gttttagtaggta

SEQ ID NO: 87192 - DNA, 13 bp, Artificial Sequence
  Oligonucleotide for detection of SNP TSC0021919
tacctactaaaac

SEQ ID NO: 87193 - DNA, 13 bp, Artificial Sequence
  Oligonucleotide for detection of SNP TSC0021919
gttttaataggta

SEQ ID NO: 87194 - DNA, 13 bp, Artificial Sequence
  Oligonucleotide for detection of SNP TSC0021919
tacctattaaaac

SEQ ID NO: 87195 - DNA, 13 bp, Artificial Sequence
  Oligonucleotide for detection of SNP TSC0021920
tagtgtgagttat

SEQ ID NO: 87196 - DNA, 13 bp, Artificial Sequence
  Oligonucleotide for detection of SNP TSC0021920
ataactcacacta

SEQ ID NO: 87197 - DNA, 13 bp, Artificial Sequence
  Oligonucleotide for detection of SNP TSC0021920
tagtgtaagttat

SEQ ID NO: 87198 - DNA, 13 bp, Artificial Sequence
  Oligonucleotide for detection of SNP TSC0021920
ataacttacacta

SEQ ID NO: 87199 - DNA, 13 bp, Artificial Sequence
  Oligonucleotide for detection of SNP TSC0021922
ataattattgaaa

SEQ ID NO: 87200 - DNA, 13 bp, Artificial Sequence
  Oligonucleotide for detection of SNP TSC0021922
tttcaataattat

SEQ ID NO: 87201 - DNA, 13 bp, Artificial Sequence
  Oligonucleotide for detection of SNP TSC0021922
ataatttttgaaa

SEQ ID NO: 87202 - DNA, 13 bp, Artificial Sequence
  Oligonucleotide for detection of SNP TSC0021922
tttcaaaaattat

SEQ ID NO: 87203 - DNA, 13 bp, Artificial Sequence
  Oligonucleotide for detection of SNP TSC0021922
ttttaataattgt

SEQ ID NO: 87204 - DNA, 13 bp, Artificial Sequence
  Oligonucleotide for detection of SNP TSC0021922
acaattattaaaa

SEQ ID NO: 87205 - DNA, 13 bp, Artificial Sequence
  Oligonucleotide for detection of SNP TSC0021922
ttttaagaattgt

SEQ ID NO: 87206 - DNA, 13 bp, Artificial Sequence
  Oligonucleotide for detection of SNP TSC0021922
acaattcttaaaa

SEQ ID NO: 87207 - DNA, 13 bp, Artificial Sequence
  Oligonucleotide for detection of SNP TSC0021923
ttatttagaatgg

SEQ ID NO: 87208 - DNA, 13 bp, Artificial Sequence
  Oligonucleotide for detection of SNP TSC0021923
ccattctaaataa

SEQ ID NO: 87209 - DNA, 13 bp, Artificial Sequence
  Oligonucleotide for detection of SNP TSC0021923
ttatttggaatgg

SEQ ID NO: 87210 - DNA, 13 bp, Artificial Sequence
  Oligonucleotide for detection of SNP TSC0021923
ccattccaaataa

SEQ ID NO: 87211 - DNA, 13 bp, Artificial Sequence
  Oligonucleotide for detection of SNP TSC0021923
ttattcggaatgg

SEQ ID NO: 87212 - DNA, 13 bp, Artificial Sequence
  Oligonucleotide for detection of SNP TSC0021923
ccattccgaataa

SEQ ID NO: 87213 - DNA, 13 bp, Artificial Sequence
  Oligonucleotide for detection of SNP TSC0021923
ttattttgggtaa

SEQ ID NO: 87214 - DNA, 13 bp, Artificial Sequence
  Oligonucleotide for detection of SNP TSC0021923
ttacccaaaataa

SEQ ID NO: 87215 - DNA, 13 bp, Artificial Sequence
  Oligonucleotide for detection of SNP TSC0021923
ttatttcgggtaa

SEQ ID NO: 87216 - DNA, 13 bp, Artificial Sequence
  Oligonucleotide for detection of SNP TSC0021923
ttacccgaaataa

SEQ ID NO: 87217 - DNA, 13 bp, Artificial Sequence
  Oligonucleotide for detection of SNP TSC0021928
ggttttatggttt

SEQ ID NO: 87218 - DNA, 13 bp, Artificial Sequence
  Oligonucleotide for detection of SNP TSC0021928
aaaccataaaacc

SEQ ID NO: 87219 - DNA, 13 bp, Artificial Sequence
  Oligonucleotide for detection of SNP TSC0021928
ggttttttggttt

SEQ ID NO: 87220 - DNA, 13 bp, Artificial Sequence
  Oligonucleotide for detection of SNP TSC0021928
aaaccaaaaaacc

SEQ ID NO: 87221 - DNA, 13 bp, Artificial Sequence
  Oligonucleotide for detection of SNP TSC0021928
aggttatggaaty

SEQ ID NO: 87222 - DNA, 13 bp, Artificial Sequence
  Oligonucleotide for detection of SNP TSC0021928
rattccataacct

SEQ ID NO: 87223 - DNA, 13 bp, Artificial Sequence
  Oligonucleotide for detection of SNP TSC0021928
aggttagggaaty

SEQ ID NO: 87224 - DNA, 13 bp, Artificial Sequence
  Oligonucleotide for detection of SNP TSC0021928
rattccctaacct

SEQ ID NO: 87225 - DNA, 13 bp, Artificial Sequence
  Oligonucleotide for detection of SNP TSC0021931
tggagtgtgaagg

SEQ ID NO: 87226 - DNA, 13 bp, Artificial Sequence
  Oligonucleotide for detection of SNP TSC0021931
ccttcacactcca

SEQ ID NO: 87227 - DNA, 13 bp, Artificial Sequence
  Oligonucleotide for detection of SNP TSC0021931
tggagtatgaagg

SEQ ID NO: 87228 - DNA, 13 bp, Artificial Sequence
  Oligonucleotide for detection of SNP TSC0021931
ccttcatactcca

SEQ ID NO: 87229 - DNA, 13 bp, Artificial Sequence
  Oligonucleotide for detection of SNP TSC0021932
attataggaattt

SEQ ID NO: 87230 - DNA, 13 bp, Artificial Sequence
  Oligonucleotide for detection of SNP TSC0021932
aaattcctataat

SEQ ID NO: 87231 - DNA, 13 bp, Artificial Sequence
  Oligonucleotide for detection of SNP TSC0021932
attatatgaattt

SEQ ID NO: 87232 - DNA, 13 bp, Artificial Sequence
  Oligonucleotide for detection of SNP TSC0021932
aaattcatataat

SEQ ID NO: 87233 - DNA, 13 bp, Artificial Sequence
  Oligonucleotide for detection of SNP TSC0021932
aggtttttgtgat

SEQ ID NO: 87234 - DNA, 13 bp, Artificial Sequence
  Oligonucleotide for detection of SNP TSC0021932
atcacaaaaacct

SEQ ID NO: 87235 - DNA, 13 bp, Artificial Sequence
  Oligonucleotide for detection of SNP TSC0021932
aggtttatgtgat

SEQ ID NO: 87236 - DNA, 13 bp, Artificial Sequence
  Oligonucleotide for detection of SNP TSC0021932
atcacataaacct

SEQ ID NO: 87237 - DNA, 13 bp, Artificial Sequence
  Oligonucleotide for detection of SNP TSC0021933
agttggtggaggy

SEQ ID NO: 87238 - DNA, 13 bp, Artificial Sequence
  Oligonucleotide for detection of SNP TSC0021933
rcctccaccaact

SEQ ID NO: 87239 - DNA, 13 bp, Artificial Sequence
  Oligonucleotide for detection of SNP TSC0021933
agttggcggaggy

SEQ ID NO: 87240 - DNA, 13 bp, Artificial Sequence
  Oligonucleotide for detection of SNP TSC0021933
rcctccgccaact

SEQ ID NO: 87241 - DNA, 13 bp, Artificial Sequence
  Oligonucleotide for detection of SNP TSC0021933
gtttttgttagtt

SEQ ID NO: 87242 - DNA, 13 bp, Artificial Sequence
  Oligonucleotide for detection of SNP TSC0021933
aactaacaaaaac

SEQ ID NO: 87243 - DNA, 13 bp, Artificial Sequence
  Oligonucleotide for detection of SNP TSC0021933
gtttttattagtt

SEQ ID NO: 87244 - DNA, 13 bp, Artificial Sequence
  Oligonucleotide for detection of SNP TSC0021933
aactaataaaaac

SEQ ID NO: 87245 - DNA, 13 bp, Artificial Sequence
  Oligonucleotide for detection of SNP TSC0021933
gttttcgttagtt

SEQ ID NO: 87246 - DNA, 13 bp, Artificial Sequence
  Oligonucleotide for detection of SNP TSC0021933
aactaacgaaaac

SEQ ID NO: 87247 - DNA, 13 bp, Artificial Sequence
  Oligonucleotide for detection of SNP TSC0021934
tatattattagta

SEQ ID NO: 87248 - DNA, 13 bp, Artificial Sequence
  Oligonucleotide for detection of SNP TSC0021934
tactaataatata

SEQ ID NO: 87249 - DNA, 13 bp, Artificial Sequence
  Oligonucleotide for detection of SNP TSC0021935
tagaggtggagay

SEQ ID NO: 87250 - DNA, 13 bp, Artificial Sequence
  Oligonucleotide for detection of SNP TSC0021935
rtctccacctcta

SEQ ID NO: 87251 - DNA, 13 bp, Artificial Sequence
  Oligonucleotide for detection of SNP TSC0021935
tagaggcggagay

SEQ ID NO: 87252 - DNA, 13 bp, Artificial Sequence
  Oligonucleotide for detection of SNP TSC0021935
rtctccgcctcta

SEQ ID NO: 87253 - DNA, 13 bp, Artificial Sequence
  Oligonucleotide for detection of SNP TSC0021941
tttttttgtatty

SEQ ID NO: 87254 - DNA, 13 bp, Artificial Sequence
  Oligonucleotide for detection of SNP TSC0021941
raatacaaaaaaa

SEQ ID NO: 87255 - DNA, 13 bp, Artificial Sequence
  Oligonucleotide for detection of SNP TSC0021941
ttttttcgtatty

SEQ ID NO: 87256 - DNA, 13 bp, Artificial Sequence
  Oligonucleotide for detection of SNP TSC0021941
raatacgaaaaaa

SEQ ID NO: 87257 - DNA, 13 bp, Artificial Sequence
  Oligonucleotide for detection of SNP TSC0021941
gggtgtgggaaag

SEQ ID NO: 87258 - DNA, 13 bp, Artificial Sequence
  Oligonucleotide for detection of SNP TSC0021941
ctttcccacaccc

SEQ ID NO: 87259 - DNA, 13 bp, Artificial Sequence
  Oligonucleotide for detection of SNP TSC0021941
gggtgtaggaaag

SEQ ID NO: 87260 - DNA, 13 bp, Artificial Sequence
  Oligonucleotide for detection of SNP TSC0021941
ctttcctacaccc

SEQ ID NO: 87261 - DNA, 13 bp, Artificial Sequence
  Oligonucleotide for detection of SNP TSC0021941
gggtgcgggaaag

SEQ ID NO: 87262 - DNA, 13 bp, Artificial Sequence
  Oligonucleotide for detection of SNP TSC0021941
ctttcccgcaccc

SEQ ID NO: 87263 - DNA, 13 bp, Artificial Sequence
  Oligonucleotide for detection of SNP TSC0021942
gggaattgtttgg

SEQ ID NO: 87264 - DNA, 13 bp, Artificial Sequence
  Oligonucleotide for detection of SNP TSC0021942
ccaaacaattccc

SEQ ID NO: 87265 - DNA, 13 bp, Artificial Sequence
  Oligonucleotide for detection of SNP TSC0021942
gggaatcgtttgg

SEQ ID NO: 87266 - DNA, 13 bp, Artificial Sequence
  Oligonucleotide for detection of SNP TSC0021942
ccaaacgattccc

SEQ ID NO: 87267 - DNA, 13 bp, Artificial Sequence
  Oligonucleotide for detection of SNP TSC0021942
ttagatggtttty

SEQ ID NO: 87268 - DNA, 13 bp, Artificial Sequence
  Oligonucleotide for detection of SNP TSC0021942
raaaaccatctaa

SEQ ID NO: 87269 - DNA, 13 bp, Artificial Sequence
  Oligonucleotide for detection of SNP TSC0021942
ttagatagtttty

SEQ ID NO: 87270 - DNA, 13 bp, Artificial Sequence
  Oligonucleotide for detection of SNP TSC0021942
raaaactatctaa

SEQ ID NO: 87271 - DNA, 13 bp, Artificial Sequence
  Oligonucleotide for detection of SNP TSC0021942
ttagacggtttty

SEQ ID NO: 87272 - DNA, 13 bp, Artificial Sequence
  Oligonucleotide for detection of SNP TSC0021942
raaaaccgtctaa

SEQ ID NO: 87273 - DNA, 13 bp, Artificial Sequence
  Oligonucleotide for detection of SNP TSC0021943
gatgggatttgay

SEQ ID NO: 87274 - DNA, 13 bp, Artificial Sequence
  Oligonucleotide for detection of SNP TSC0021943
rtcaaatcccatc

SEQ ID NO: 87275 - DNA, 13 bp, Artificial Sequence
  Oligonucleotide for detection of SNP TSC0021943
gatggggtttgay

SEQ ID NO: 87276 - DNA, 13 bp, Artificial Sequence
  Oligonucleotide for detection of SNP TSC0021943
rtcaaaccccatc

SEQ ID NO: 87277 - DNA, 13 bp, Artificial Sequence
  Oligonucleotide for detection of SNP TSC0021944
ggttattgtggta

SEQ ID NO: 87278 - DNA, 13 bp, Artificial Sequence
  Oligonucleotide for detection of SNP TSC0021944
taccacaataacc

SEQ ID NO: 87279 - DNA, 13 bp, Artificial Sequence
  Oligonucleotide for detection of SNP TSC0021944
ggttatcgtggta

SEQ ID NO: 87280 - DNA, 13 bp, Artificial Sequence
  Oligonucleotide for detection of SNP TSC0021944
taccacgataacc

SEQ ID NO: 87281 - DNA, 13 bp, Artificial Sequence
  Oligonucleotide for detection of SNP TSC0021944
tgttatggtggty

SEQ ID NO: 87282 - DNA, 13 bp, Artificial Sequence
  Oligonucleotide for detection of SNP TSC0021944
raccaccataaca

SEQ ID NO: 87283 - DNA, 13 bp, Artificial Sequence
  Oligonucleotide for detection of SNP TSC0021944
tgttatagtggty

SEQ ID NO: 87284 - DNA, 13 bp, Artificial Sequence
  Oligonucleotide for detection of SNP TSC0021944
raccactataaca

SEQ ID NO: 87285 - DNA, 13 bp, Artificial Sequence
  Oligonucleotide for detection of SNP TSC0021944
tgttacggtggty

SEQ ID NO: 87286 - DNA, 13 bp, Artificial Sequence
  Oligonucleotide for detection of SNP TSC0021944
raccaccgtaaca

SEQ ID NO: 87287 - DNA, 13 bp, Artificial Sequence
  Oligonucleotide for detection of SNP TSC0021945
ggttggagtgtag

SEQ ID NO: 87288 - DNA, 13 bp, Artificial Sequence
  Oligonucleotide for detection of SNP TSC0021945
ctacactccaacc

SEQ ID NO: 87289 - DNA, 13 bp, Artificial Sequence
  Oligonucleotide for detection of SNP TSC0021945
ggttggggtgtag

SEQ ID NO: 87290 - DNA, 13 bp, Artificial Sequence
  Oligonucleotide for detection of SNP TSC0021945
ctacaccccaacc

SEQ ID NO: 87291 - DNA, 13 bp, Artificial Sequence
  Oligonucleotide for detection of SNP TSC0021946
atttttgttttgt

SEQ ID NO: 87292 - DNA, 13 bp, Artificial Sequence
  Oligonucleotide for detection of SNP TSC0021946
acaaaacaaaaat

SEQ ID NO: 87293 - DNA, 13 bp, Artificial Sequence
  Oligonucleotide for detection of SNP TSC0021946
attttttttttgt

SEQ ID NO: 87294 - DNA, 13 bp, Artificial Sequence
  Oligonucleotide for detection of SNP TSC0021946
acaaaaaaaaaat

SEQ ID NO: 87295 - DNA, 13 bp, Artificial Sequence
  Oligonucleotide for detection of SNP TSC0021946
ataaaataaaaat

SEQ ID NO: 87296 - DNA, 13 bp, Artificial Sequence
  Oligonucleotide for detection of SNP TSC0021946
atttttattttat

SEQ ID NO: 87297 - DNA, 13 bp, Artificial Sequence
  Oligonucleotide for detection of SNP TSC0021946
ataaaaaaaaaat

SEQ ID NO: 87298 - DNA, 13 bp, Artificial Sequence
  Oligonucleotide for detection of SNP TSC0021946
attttttttttat

SEQ ID NO: 87299 - DNA, 13 bp, Artificial Sequence
  Oligonucleotide for detection of SNP TSC0021949
gagttttggtatt

SEQ ID NO: 87300 - DNA, 13 bp, Artificial Sequence
  Oligonucleotide for detection of SNP TSC0021949
aataccaaaactc

SEQ ID NO: 87301 - DNA, 13 bp, Artificial Sequence
  Oligonucleotide for detection of SNP TSC0021949
gagtttcggtatt

SEQ ID NO: 87302 - DNA, 13 bp, Artificial Sequence
  Oligonucleotide for detection of SNP TSC0021949
aataccgaaactc

SEQ ID NO: 87303 - DNA, 13 bp, Artificial Sequence
  Oligonucleotide for detection of SNP TSC0021949
agtattgaggtty

SEQ ID NO: 87304 - DNA, 13 bp, Artificial Sequence
  Oligonucleotide for detection of SNP TSC0021949
raacctcaatact

SEQ ID NO: 87305 - DNA, 13 bp, Artificial Sequence
  Oligonucleotide for detection of SNP TSC0021949
agtattaaggtty

SEQ ID NO: 87306 - DNA, 13 bp, Artificial Sequence
  Oligonucleotide for detection of SNP TSC0021949
raaccttaatact

SEQ ID NO: 87307 - DNA, 13 bp, Artificial Sequence
  Oligonucleotide for detection of SNP TSC0021949
agtatcgaggtty

SEQ ID NO: 87308 - DNA, 13 bp, Artificial Sequence
  Oligonucleotide for detection of SNP TSC0021949
raacctcgatact

SEQ ID NO: 87309 - DNA, 13 bp, Artificial Sequence
  Oligonucleotide for detection of SNP TSC0021951
aggagtataaggt

SEQ ID NO: 87310 - DNA, 13 bp, Artificial Sequence
  Oligonucleotide for detection of SNP TSC0021951
accttatactcct

SEQ ID NO: 87311 - DNA, 13 bp, Artificial Sequence
  Oligonucleotide for detection of SNP TSC0021951
aggagtttaaggt

SEQ ID NO: 87312 - DNA, 13 bp, Artificial Sequence
  Oligonucleotide for detection of SNP TSC0021951
accttaaactcct

SEQ ID NO: 87313 - DNA, 13 bp, Artificial Sequence
  Oligonucleotide for detection of SNP TSC0021951
attttatattttt

SEQ ID NO: 87314 - DNA, 13 bp, Artificial Sequence
  Oligonucleotide for detection of SNP TSC0021951
aaaaatataaaat

SEQ ID NO: 87315 - DNA, 13 bp, Artificial Sequence
  Oligonucleotide for detection of SNP TSC0021951
attttagattttt

SEQ ID NO: 87316 - DNA, 13 bp, Artificial Sequence
  Oligonucleotide for detection of SNP TSC0021951
aaaaatctaaaat

SEQ ID NO: 87317 - DNA, 13 bp, Artificial Sequence
  Oligonucleotide for detection of SNP TSC0021956
tggggaaggtaat

SEQ ID NO: 87318 - DNA, 13 bp, Artificial Sequence
  Oligonucleotide for detection of SNP TSC0021956
attaccttcccca

SEQ ID NO: 87319 - DNA, 13 bp, Artificial Sequence
  Oligonucleotide for detection of SNP TSC0021956
tggggagggtaat

SEQ ID NO: 87320 - DNA, 13 bp, Artificial Sequence
  Oligonucleotide for detection of SNP TSC0021956
attaccctcccca

SEQ ID NO: 87321 - DNA, 13 bp, Artificial Sequence
  Oligonucleotide for detection of SNP TSC0021957
aagaagggaatgg

SEQ ID NO: 87322 - DNA, 13 bp, Artificial Sequence
  Oligonucleotide for detection of SNP TSC0021957
ccattcccttctt

SEQ ID NO: 87323 - DNA, 13 bp, Artificial Sequence
  Oligonucleotide for detection of SNP TSC0021957
aagaagagaatgg

SEQ ID NO: 87324 - DNA, 13 bp, Artificial Sequence
  Oligonucleotide for detection of SNP TSC0021957
ccattctcttctt

SEQ ID NO: 87325 - DNA, 13 bp, Artificial Sequence
  Oligonucleotide for detection of SNP TSC0021967
ttagggtagaaaa

SEQ ID NO: 87326 - DNA, 13 bp, Artificial Sequence
  Oligonucleotide for detection of SNP TSC0021967
ttttctaccctaa

SEQ ID NO: 87327 - DNA, 13 bp, Artificial Sequence
  Oligonucleotide for detection of SNP TSC0021967
ttaggggagaaaa

SEQ ID NO: 87328 - DNA, 13 bp, Artificial Sequence
  Oligonucleotide for detection of SNP TSC0021967
ttttctcccctaa

SEQ ID NO: 87329 - DNA, 13 bp, Artificial Sequence
  Oligonucleotide for detection of SNP TSC0021968
gaatttgaggttg

SEQ ID NO: 87330 - DNA, 13 bp, Artificial Sequence
  Oligonucleotide for detection of SNP TSC0021968
caacctcaaattc

SEQ ID NO: 87331 - DNA, 13 bp, Artificial Sequence
  Oligonucleotide for detection of SNP TSC0021968
gaattttaggttg

SEQ ID NO: 87332 - DNA, 13 bp, Artificial Sequence
  Oligonucleotide for detection of SNP TSC0021968
caacctaaaattc

SEQ ID NO: 87333 - DNA, 13 bp, Artificial Sequence
  Oligonucleotide for detection of SNP TSC0021968
tagttttaaatty

SEQ ID NO: 87334 - DNA, 13 bp, Artificial Sequence
  Oligonucleotide for detection of SNP TSC0021968
raatttaaaacta

SEQ ID NO: 87335 - DNA, 13 bp, Artificial Sequence
  Oligonucleotide for detection of SNP TSC0021968
tagtttaaaatty

SEQ ID NO: 87336 - DNA, 13 bp, Artificial Sequence
  Oligonucleotide for detection of SNP TSC0021968
raattttaaacta

SEQ ID NO: 87337 - DNA, 13 bp, Artificial Sequence
  Oligonucleotide for detection of SNP TSC0021969
tatgttatttaaa

SEQ ID NO: 87338 - DNA, 13 bp, Artificial Sequence
  Oligonucleotide for detection of SNP TSC0021969
tttaaataacata

SEQ ID NO: 87339 - DNA, 13 bp, Artificial Sequence
  Oligonucleotide for detection of SNP TSC0021969
tatgttgtttaaa

SEQ ID NO: 87340 - DNA, 13 bp, Artificial Sequence
  Oligonucleotide for detection of SNP TSC0021969
tttaaacaacata

SEQ ID NO: 87341 - DNA, 13 bp, Artificial Sequence
  Oligonucleotide for detection of SNP TSC0021970
ggattattgatta

SEQ ID NO: 87342 - DNA, 13 bp, Artificial Sequence
  Oligonucleotide for detection of SNP TSC0021970
taatcaataatcc

SEQ ID NO: 87343 - DNA, 13 bp, Artificial Sequence
  Oligonucleotide for detection of SNP TSC0021970
ggattagtgatta

SEQ ID NO: 87344 - DNA, 13 bp, Artificial Sequence
  Oligonucleotide for detection of SNP TSC0021970
taatcactaatcc

SEQ ID NO: 87345 - DNA, 13 bp, Artificial Sequence
  Oligonucleotide for detection of SNP TSC0021970
tggttagtagtty

SEQ ID NO: 87346 - DNA, 13 bp, Artificial Sequence
  Oligonucleotide for detection of SNP TSC0021970
raactactaacca

SEQ ID NO: 87347 - DNA, 13 bp, Artificial Sequence
  Oligonucleotide for detection of SNP TSC0021970
tggttattagtty

SEQ ID NO: 87348 - DNA, 13 bp, Artificial Sequence
  Oligonucleotide for detection of SNP TSC0021970
raactaataacca

SEQ ID NO: 87349 - DNA, 13 bp, Artificial Sequence
  Oligonucleotide for detection of SNP TSC0021971
ttatggatgagty

SEQ ID NO: 87350 - DNA, 13 bp, Artificial Sequence
  Oligonucleotide for detection of SNP TSC0021971
ractcatccataa

SEQ ID NO: 87351 - DNA, 13 bp, Artificial Sequence
  Oligonucleotide for detection of SNP TSC0021971
ttatggttgagty

SEQ ID NO: 87352 - DNA, 13 bp, Artificial Sequence
  Oligonucleotide for detection of SNP TSC0021971
ractcaaccataa

SEQ ID NO: 87353 - DNA, 13 bp, Artificial Sequence
  Oligonucleotide for detection of SNP TSC0021971
gatttatttatag

SEQ ID NO: 87354 - DNA, 13 bp, Artificial Sequence
  Oligonucleotide for detection of SNP TSC0021971
ctataaataaatc

SEQ ID NO: 87355 - DNA, 13 bp, Artificial Sequence
  Oligonucleotide for detection of SNP TSC0021971
gatttagttatag

SEQ ID NO: 87356 - DNA, 13 bp, Artificial Sequence
  Oligonucleotide for detection of SNP TSC0021971
ctataactaaatc

SEQ ID NO: 87357 - DNA, 13 bp, Artificial Sequence
  Oligonucleotide for detection of SNP TSC0021972
tggatgagttttt

SEQ ID NO: 87358 - DNA, 13 bp, Artificial Sequence
  Oligonucleotide for detection of SNP TSC0021972
aaaaactcatcca

SEQ ID NO: 87359 - DNA, 13 bp, Artificial Sequence
  Oligonucleotide for detection of SNP TSC0021972
tggatgggttttt

SEQ ID NO: 87360 - DNA, 13 bp, Artificial Sequence
  Oligonucleotide for detection of SNP TSC0021972
aaaaacccatcca

SEQ ID NO: 87361 - DNA, 13 bp, Artificial Sequence
  Oligonucleotide for detection of SNP TSC0021973
tatttttggtgtg

SEQ ID NO: 87362 - DNA, 13 bp, Artificial Sequence
  Oligonucleotide for detection of SNP TSC0021973
cacaccaaaaata

SEQ ID NO: 87363 - DNA, 13 bp, Artificial Sequence
  Oligonucleotide for detection of SNP TSC0021973
tattttcggtgtg

SEQ ID NO: 87364 - DNA, 13 bp, Artificial Sequence
  Oligonucleotide for detection of SNP TSC0021973
cacaccgaaaata

SEQ ID NO: 87365 - DNA, 13 bp, Artificial Sequence
  Oligonucleotide for detection of SNP TSC0021973
tatttttggcgtg

SEQ ID NO: 87366 - DNA, 13 bp, Artificial Sequence
  Oligonucleotide for detection of SNP TSC0021973
cacgccaaaaata

SEQ ID NO: 87367 - DNA, 13 bp, Artificial Sequence
  Oligonucleotide for detection of SNP TSC0021973
tattttcggcgtg

SEQ ID NO: 87368 - DNA, 13 bp, Artificial Sequence
  Oligonucleotide for detection of SNP TSC0021973
cacgccgaaaata

SEQ ID NO: 87369 - DNA, 13 bp, Artificial Sequence
  Oligonucleotide for detection of SNP TSC0021973
tatgttgagaata

SEQ ID NO: 87370 - DNA, 13 bp, Artificial Sequence
  Oligonucleotide for detection of SNP TSC0021973
tattctcaacata

SEQ ID NO: 87371 - DNA, 13 bp, Artificial Sequence
  Oligonucleotide for detection of SNP TSC0021973
tatgttaagaata

SEQ ID NO: 87372 - DNA, 13 bp, Artificial Sequence
  Oligonucleotide for detection of SNP TSC0021973
tattcttaacata

SEQ ID NO: 87373 - DNA, 13 bp, Artificial Sequence
  Oligonucleotide for detection of SNP TSC0021973
tacgttgagaata

SEQ ID NO: 87374 - DNA, 13 bp, Artificial Sequence
  Oligonucleotide for detection of SNP TSC0021973
tattctcaacgta

SEQ ID NO: 87375 - DNA, 13 bp, Artificial Sequence
  Oligonucleotide for detection of SNP TSC0021973
tacgttaagaata

SEQ ID NO: 87376 - DNA, 13 bp, Artificial Sequence
  Oligonucleotide for detection of SNP TSC0021973
tattcttaacgta

SEQ ID NO: 87377 - DNA, 13 bp, Artificial Sequence
  Oligonucleotide for detection of SNP TSC0021973
tatgtcgagaata

SEQ ID NO: 87378 - DNA, 13 bp, Artificial Sequence
  Oligonucleotide for detection of SNP TSC0021973
tattctcgacata

SEQ ID NO: 87379 - DNA, 13 bp, Artificial Sequence
  Oligonucleotide for detection of SNP TSC0021973
tacgtcgagaata

SEQ ID NO: 87380 - DNA, 13 bp, Artificial Sequence
  Oligonucleotide for detection of SNP TSC0021973
tattctcgacgta

SEQ ID NO: 87381 - DNA, 13 bp, Artificial Sequence
  Oligonucleotide for detection of SNP TSC0021974
gaatttatgaggt

SEQ ID NO: 87382 - DNA, 13 bp, Artificial Sequence
  Oligonucleotide for detection of SNP TSC0021974
acctcataaattc

SEQ ID NO: 87383 - DNA, 13 bp, Artificial Sequence
  Oligonucleotide for detection of SNP TSC0021974
gaatttgtgaggt

SEQ ID NO: 87384 - DNA, 13 bp, Artificial Sequence
  Oligonucleotide for detection of SNP TSC0021974
acctcacaaattc

SEQ ID NO: 87385 - DNA, 13 bp, Artificial Sequence
  Oligonucleotide for detection of SNP TSC0021974
gaattcgtgaggt

SEQ ID NO: 87386 - DNA, 13 bp, Artificial Sequence
  Oligonucleotide for detection of SNP TSC0021974
acctcacgaattc

SEQ ID NO: 87387 - DNA, 13 bp, Artificial Sequence
  Oligonucleotide for detection of SNP TSC0021974
attttatgggtty

SEQ ID NO: 87388 - DNA, 13 bp, Artificial Sequence
  Oligonucleotide for detection of SNP TSC0021974
raacccataaaat

SEQ ID NO: 87389 - DNA, 13 bp, Artificial Sequence
  Oligonucleotide for detection of SNP TSC0021974
attttacgggtty

SEQ ID NO: 87390 - DNA, 13 bp, Artificial Sequence
  Oligonucleotide for detection of SNP TSC0021974
raacccgtaaaat

SEQ ID NO: 87391 - DNA, 13 bp, Artificial Sequence
  Oligonucleotide for detection of SNP TSC0021976
aaagtatggtgaa

SEQ ID NO: 87392 - DNA, 13 bp, Artificial Sequence
  Oligonucleotide for detection of SNP TSC0021976
ttcaccatacttt

SEQ ID NO: 87393 - DNA, 13 bp, Artificial Sequence
  Oligonucleotide for detection of SNP TSC0021976
aaagtacggtgaa

SEQ ID NO: 87394 - DNA, 13 bp, Artificial Sequence
  Oligonucleotide for detection of SNP TSC0021976
ttcaccgtacttt

SEQ ID NO: 87395 - DNA, 13 bp, Artificial Sequence
  Oligonucleotide for detection of SNP TSC0021977
ttttataagttat

SEQ ID NO: 87396 - DNA, 13 bp, Artificial Sequence
  Oligonucleotide for detection of SNP TSC0021977
ataacttataaaa

SEQ ID NO: 87397 - DNA, 13 bp, Artificial Sequence
  Oligonucleotide for detection of SNP TSC0021977
ttttatgagttat

SEQ ID NO: 87398 - DNA, 13 bp, Artificial Sequence
  Oligonucleotide for detection of SNP TSC0021977
ataactcataaaa

SEQ ID NO: 87399 - DNA, 13 bp, Artificial Sequence
  Oligonucleotide for detection of SNP TSC0021977
ttttacgagttat

SEQ ID NO: 87400 - DNA, 13 bp, Artificial Sequence
  Oligonucleotide for detection of SNP TSC0021977
ataactcgtaaaa

SEQ ID NO: 87401 - DNA, 13 bp, Artificial Sequence
  Oligonucleotide for detection of SNP TSC0021977
atagtttgtggaa

SEQ ID NO: 87402 - DNA, 13 bp, Artificial Sequence
  Oligonucleotide for detection of SNP TSC0021977
ttccacaaactat

SEQ ID NO: 87403 - DNA, 13 bp, Artificial Sequence
  Oligonucleotide for detection of SNP TSC0021977
atagttcgtggaa

SEQ ID NO: 87404 - DNA, 13 bp, Artificial Sequence
  Oligonucleotide for detection of SNP TSC0021977
ttccacgaactat

SEQ ID NO: 87405 - DNA, 13 bp, Artificial Sequence
  Oligonucleotide for detection of SNP TSC0021978
tatataaattata

SEQ ID NO: 87406 - DNA, 13 bp, Artificial Sequence
  Oligonucleotide for detection of SNP TSC0021978
tataatttatata

SEQ ID NO: 87407 - DNA, 13 bp, Artificial Sequence
  Oligonucleotide for detection of SNP TSC0021978
tatatatattata

SEQ ID NO: 87408 - DNA, 13 bp, Artificial Sequence
  Oligonucleotide for detection of SNP TSC0021978
tataatatatata

SEQ ID NO: 87409 - DNA, 13 bp, Artificial Sequence
  Oligonucleotide for detection of SNP TSC0021978
tgtggtttgtgta

SEQ ID NO: 87410 - DNA, 13 bp, Artificial Sequence
  Oligonucleotide for detection of SNP TSC0021978
tacacaaaccaca

SEQ ID NO: 87411 - DNA, 13 bp, Artificial Sequence
  Oligonucleotide for detection of SNP TSC0021978
tgtggtgtgtgta

SEQ ID NO: 87412 - DNA, 13 bp, Artificial Sequence
  Oligonucleotide for detection of SNP TSC0021978
tacacacaccaca

SEQ ID NO: 87413 - DNA, 13 bp, Artificial Sequence
  Oligonucleotide for detection of SNP TSC0021980
tttgttgtattty

SEQ ID NO: 87414 - DNA, 13 bp, Artificial Sequence
  Oligonucleotide for detection of SNP TSC0021980
raaatacaacaaa

SEQ ID NO: 87415 - DNA, 13 bp, Artificial Sequence
  Oligonucleotide for detection of SNP TSC0021980
tttgttatattty

SEQ ID NO: 87416 - DNA, 13 bp, Artificial Sequence
  Oligonucleotide for detection of SNP TSC0021980
raaatataacaaa

SEQ ID NO: 87417 - DNA, 13 bp, Artificial Sequence
  Oligonucleotide for detection of SNP TSC0021981
tagattagattta

SEQ ID NO: 87418 - DNA, 13 bp, Artificial Sequence
  Oligonucleotide for detection of SNP TSC0021981
taaatctaatcta

SEQ ID NO: 87419 - DNA, 13 bp, Artificial Sequence
  Oligonucleotide for detection of SNP TSC0021981
tagattggattta

SEQ ID NO: 87420 - DNA, 13 bp, Artificial Sequence
  Oligonucleotide for detection of SNP TSC0021981
taaatccaatcta

SEQ ID NO: 87421 - DNA, 13 bp, Artificial Sequence
  Oligonucleotide for detection of SNP TSC0021983
taaggaaataata

SEQ ID NO: 87422 - DNA, 13 bp, Artificial Sequence
  Oligonucleotide for detection of SNP TSC0021983
tattatttcctta

SEQ ID NO: 87423 - DNA, 13 bp, Artificial Sequence
  Oligonucleotide for detection of SNP TSC0021983
taaggatataata

SEQ ID NO: 87424 - DNA, 13 bp, Artificial Sequence
  Oligonucleotide for detection of SNP TSC0021983
tattatatcctta

SEQ ID NO: 87425 - DNA, 13 bp, Artificial Sequence
  Oligonucleotide for detection of SNP TSC0021983
tgttgttttttta

SEQ ID NO: 87426 - DNA, 13 bp, Artificial Sequence
  Oligonucleotide for detection of SNP TSC0021983
taaaaaaacaaca

SEQ ID NO: 87427 - DNA, 13 bp, Artificial Sequence
  Oligonucleotide for detection of SNP TSC0021983
tgttgtgttttta

SEQ ID NO: 87428 - DNA, 13 bp, Artificial Sequence
  Oligonucleotide for detection of SNP TSC0021983
taaaaacacaaca

SEQ ID NO: 87429 - DNA, 13 bp, Artificial Sequence
  Oligonucleotide for detection of SNP TSC0021984
ttagtatggaggt

SEQ ID NO: 87430 - DNA, 13 bp, Artificial Sequence
  Oligonucleotide for detection of SNP TSC0021984
acctccatactaa

SEQ ID NO: 87431 - DNA, 13 bp, Artificial Sequence
  Oligonucleotide for detection of SNP TSC0021984
ttagtacggaggt

SEQ ID NO: 87432 - DNA, 13 bp, Artificial Sequence
  Oligonucleotide for detection of SNP TSC0021984
acctccgtactaa

SEQ ID NO: 87433 - DNA, 13 bp, Artificial Sequence
  Oligonucleotide for detection of SNP TSC0021984
atttttgtattaa

SEQ ID NO: 87434 - DNA, 13 bp, Artificial Sequence
  Oligonucleotide for detection of SNP TSC0021984
ttaatacaaaaat

SEQ ID NO: 87435 - DNA, 13 bp, Artificial Sequence
  Oligonucleotide for detection of SNP TSC0021984
atttttatattaa

SEQ ID NO: 87436 - DNA, 13 bp, Artificial Sequence
  Oligonucleotide for detection of SNP TSC0021984
ttaatataaaaat

SEQ ID NO: 87437 - DNA, 13 bp, Artificial Sequence
  Oligonucleotide for detection of SNP TSC0021984
attttcgtattaa

SEQ ID NO: 87438 - DNA, 13 bp, Artificial Sequence
  Oligonucleotide for detection of SNP TSC0021984
ttaatacgaaaat

SEQ ID NO: 87439 - DNA, 13 bp, Artificial Sequence
  Oligonucleotide for detection of SNP TSC0021985
ttatgggggttta

SEQ ID NO: 87440 - DNA, 13 bp, Artificial Sequence
  Oligonucleotide for detection of SNP TSC0021985
taaacccccataa

SEQ ID NO: 87441 - DNA, 13 bp, Artificial Sequence
  Oligonucleotide for detection of SNP TSC0021985
ttatggtggttta

SEQ ID NO: 87442 - DNA, 13 bp, Artificial Sequence
  Oligonucleotide for detection of SNP TSC0021985
taaaccaccataa

SEQ ID NO: 87443 - DNA, 13 bp, Artificial Sequence
  Oligonucleotide for detection of SNP TSC0021985
tgggtttttatgg

SEQ ID NO: 87444 - DNA, 13 bp, Artificial Sequence
  Oligonucleotide for detection of SNP TSC0021985
ccataaaaaccca

SEQ ID NO: 87445 - DNA, 13 bp, Artificial Sequence
  Oligonucleotide for detection of SNP TSC0021985
tgggttattatgg

SEQ ID NO: 87446 - DNA, 13 bp, Artificial Sequence
  Oligonucleotide for detection of SNP TSC0021985
ccataataaccca

SEQ ID NO: 87447 - DNA, 13 bp, Artificial Sequence
  Oligonucleotide for detection of SNP TSC0021988
tagtagtgtgaty

SEQ ID NO: 87448 - DNA, 13 bp, Artificial Sequence
  Oligonucleotide for detection of SNP TSC0021988
ratcacactacta

SEQ ID NO: 87449 - DNA, 13 bp, Artificial Sequence
  Oligonucleotide for detection of SNP TSC0021988
tagtagtgcgaty

SEQ ID NO: 87450 - DNA, 13 bp, Artificial Sequence
  Oligonucleotide for detection of SNP TSC0021988
ratcgcactacta

SEQ ID NO: 87451 - DNA, 13 bp, Artificial Sequence
  Oligonucleotide for detection of SNP TSC0021988
tagtagcgtgaty

SEQ ID NO: 87452 - DNA, 13 bp, Artificial Sequence
  Oligonucleotide for detection of SNP TSC0021988
ratcacgctacta

SEQ ID NO: 87453 - DNA, 13 bp, Artificial Sequence
  Oligonucleotide for detection of SNP TSC0021988
tagtagcgcgaty

SEQ ID NO: 87454 - DNA, 13 bp, Artificial Sequence
  Oligonucleotide for detection of SNP TSC0021988
ratcgcgctacta

SEQ ID NO: 87455 - DNA, 13 bp, Artificial Sequence
  Oligonucleotide for detection of SNP TSC0021989
gaatttgtatttt

SEQ ID NO: 87456 - DNA, 13 bp, Artificial Sequence
  Oligonucleotide for detection of SNP TSC0021989
aaaatacaaattc

SEQ ID NO: 87457 - DNA, 13 bp, Artificial Sequence
  Oligonucleotide for detection of SNP TSC0021989
gaatttttatttt

SEQ ID NO: 87458 - DNA, 13 bp, Artificial Sequence
  Oligonucleotide for detection of SNP TSC0021989
aaaataaaaattc

SEQ ID NO: 87459 - DNA, 13 bp, Artificial Sequence
  Oligonucleotide for detection of SNP TSC0021989
aaaatataaatty

SEQ ID NO: 87460 - DNA, 13 bp, Artificial Sequence
  Oligonucleotide for detection of SNP TSC0021989
raatttatatttt

SEQ ID NO: 87461 - DNA, 13 bp, Artificial Sequence
  Oligonucleotide for detection of SNP TSC0021989
aaaataaaaatty

SEQ ID NO: 87462 - DNA, 13 bp, Artificial Sequence
  Oligonucleotide for detection of SNP TSC0021989
raatttttatttt

SEQ ID NO: 87463 - DNA, 13 bp, Artificial Sequence
  Oligonucleotide for detection of SNP TSC0021990
ttattacgttggy

SEQ ID NO: 87464 - DNA, 13 bp, Artificial Sequence
  Oligonucleotide for detection of SNP TSC0021990
rccaacgtaataa

SEQ ID NO: 87465 - DNA, 13 bp, Artificial Sequence
  Oligonucleotide for detection of SNP TSC0021990
gttaatgtgataa

SEQ ID NO: 87466 - DNA, 13 bp, Artificial Sequence
  Oligonucleotide for detection of SNP TSC0021990
ttatcacattaac

SEQ ID NO: 87467 - DNA, 13 bp, Artificial Sequence
  Oligonucleotide for detection of SNP TSC0021990
gttaatatgataa

SEQ ID NO: 87468 - DNA, 13 bp, Artificial Sequence
  Oligonucleotide for detection of SNP TSC0021990
ttatcatattaac

SEQ ID NO: 87469 - DNA, 13 bp, Artificial Sequence
  Oligonucleotide for detection of SNP TSC0021990
gttaacgtgataa

SEQ ID NO: 87470 - DNA, 13 bp, Artificial Sequence
  Oligonucleotide for detection of SNP TSC0021990
ttatcacgttaac

SEQ ID NO: 87471 - DNA, 13 bp, Artificial Sequence
  Oligonucleotide for detection of SNP TSC0021992
taattgggattty

SEQ ID NO: 87472 - DNA, 13 bp, Artificial Sequence
  Oligonucleotide for detection of SNP TSC0021992
raaatcccaatta

SEQ ID NO: 87473 - DNA, 13 bp, Artificial Sequence
  Oligonucleotide for detection of SNP TSC0021992
taattgtgattty

SEQ ID NO: 87474 - DNA, 13 bp, Artificial Sequence
  Oligonucleotide for detection of SNP TSC0021992
raaatcacaatta

SEQ ID NO: 87475 - DNA, 13 bp, Artificial Sequence
  Oligonucleotide for detection of SNP TSC0021992
ggagttttagttg

SEQ ID NO: 87476 - DNA, 13 bp, Artificial Sequence
  Oligonucleotide for detection of SNP TSC0021992
caactaaaactcc

SEQ ID NO: 87477 - DNA, 13 bp, Artificial Sequence
  Oligonucleotide for detection of SNP TSC0021992
ggagttatagttg

SEQ ID NO: 87478 - DNA, 13 bp, Artificial Sequence
  Oligonucleotide for detection of SNP TSC0021992
caactataactcc

SEQ ID NO: 87479 - DNA, 13 bp, Artificial Sequence
  Oligonucleotide for detection of SNP TSC0021998
atgtaagttgtat

SEQ ID NO: 87480 - DNA, 13 bp, Artificial Sequence
  Oligonucleotide for detection of SNP TSC0021998
atacaacttacat

SEQ ID NO: 87481 - DNA, 13 bp, Artificial Sequence
  Oligonucleotide for detection of SNP TSC0021998
atgtaaattgtat

SEQ ID NO: 87482 - DNA, 13 bp, Artificial Sequence
  Oligonucleotide for detection of SNP TSC0021998
atacaatttacat

SEQ ID NO: 87483 - DNA, 13 bp, Artificial Sequence
  Oligonucleotide for detection of SNP TSC0022000
aagtggttgtggt

SEQ ID NO: 87484 - DNA, 13 bp, Artificial Sequence
  Oligonucleotide for detection of SNP TSC0022000
accacaaccactt

SEQ ID NO: 87485 - DNA, 13 bp, Artificial Sequence
  Oligonucleotide for detection of SNP TSC0022000
aagtgggtgtggt

SEQ ID NO: 87486 - DNA, 13 bp, Artificial Sequence
  Oligonucleotide for detection of SNP TSC0022000
accacacccactt

SEQ ID NO: 87487 - DNA, 13 bp, Artificial Sequence
  Oligonucleotide for detection of SNP TSC0022000
aagcggttgtggt

SEQ ID NO: 87488 - DNA, 13 bp, Artificial Sequence
  Oligonucleotide for detection of SNP TSC0022000
accacaaccgctt

SEQ ID NO: 87489 - DNA, 13 bp, Artificial Sequence
  Oligonucleotide for detection of SNP TSC0022000
aagcgggtgtggt

SEQ ID NO: 87490 - DNA, 13 bp, Artificial Sequence
  Oligonucleotide for detection of SNP TSC0022000
accacacccgctt

SEQ ID NO: 87491 - DNA, 13 bp, Artificial Sequence
  Oligonucleotide for detection of SNP TSC0022000
attatagttgttt

SEQ ID NO: 87492 - DNA, 13 bp, Artificial Sequence
  Oligonucleotide for detection of SNP TSC0022000
aaacaactataat

SEQ ID NO: 87493 - DNA, 13 bp, Artificial Sequence
  Oligonucleotide for detection of SNP TSC0022000
attatatttgttt

SEQ ID NO: 87494 - DNA, 13 bp, Artificial Sequence
  Oligonucleotide for detection of SNP TSC0022000
aaacaaatataat

SEQ ID NO: 87495 - DNA, 13 bp, Artificial Sequence
  Oligonucleotide for detection of SNP TSC0022000
attatagtcgttt

SEQ ID NO: 87496 - DNA, 13 bp, Artificial Sequence
  Oligonucleotide for detection of SNP TSC0022000
aaacgactataat

SEQ ID NO: 87497 - DNA, 13 bp, Artificial Sequence
  Oligonucleotide for detection of SNP TSC0022000
attatattcgttt

SEQ ID NO: 87498 - DNA, 13 bp, Artificial Sequence
  Oligonucleotide for detection of SNP TSC0022000
aaacgaatataat

SEQ ID NO: 87499 - DNA, 13 bp, Artificial Sequence
  Oligonucleotide for detection of SNP TSC0022001
gttgttattatta

SEQ ID NO: 87500 - DNA, 13 bp, Artificial Sequence
  Oligonucleotide for detection of SNP TSC0022001
taataataacaac

SEQ ID NO: 87501 - DNA, 13 bp, Artificial Sequence
  Oligonucleotide for detection of SNP TSC0022001
gttgttgttatta

SEQ ID NO: 87502 - DNA, 13 bp, Artificial Sequence
  Oligonucleotide for detection of SNP TSC0022001
taataacaacaac

SEQ ID NO: 87503 - DNA, 13 bp, Artificial Sequence
  Oligonucleotide for detection of SNP TSC0022001
gttgtcgttatta

SEQ ID NO: 87504 - DNA, 13 bp, Artificial Sequence
  Oligonucleotide for detection of SNP TSC0022001
taataacgacaac

SEQ ID NO: 87505 - DNA, 13 bp, Artificial Sequence
  Oligonucleotide for detection of SNP TSC0022001
tggtggtggtagy

SEQ ID NO: 87506 - DNA, 13 bp, Artificial Sequence
  Oligonucleotide for detection of SNP TSC0022001
rctaccaccacca

SEQ ID NO: 87507 - DNA, 13 bp, Artificial Sequence
  Oligonucleotide for detection of SNP TSC0022001
tggtggcggtagy

SEQ ID NO: 87508 - DNA, 13 bp, Artificial Sequence
  Oligonucleotide for detection of SNP TSC0022001
rctaccgccacca

SEQ ID NO: 87509 - DNA, 13 bp, Artificial Sequence
  Oligonucleotide for detection of SNP TSC0022010
taggtttggggay

SEQ ID NO: 87510 - DNA, 13 bp, Artificial Sequence
  Oligonucleotide for detection of SNP TSC0022010
rtccccaaaccta

SEQ ID NO: 87511 - DNA, 13 bp, Artificial Sequence
  Oligonucleotide for detection of SNP TSC0022010
taggttcggggay

SEQ ID NO: 87512 - DNA, 13 bp, Artificial Sequence
  Oligonucleotide for detection of SNP TSC0022010
rtccccgaaccta

SEQ ID NO: 87513 - DNA, 13 bp, Artificial Sequence
  Oligonucleotide for detection of SNP TSC0022010
gtttttgggtttg

SEQ ID NO: 87514 - DNA, 13 bp, Artificial Sequence
  Oligonucleotide for detection of SNP TSC0022010
caaacccaaaaac

SEQ ID NO: 87515 - DNA, 13 bp, Artificial Sequence
  Oligonucleotide for detection of SNP TSC0022010
gtttttaggtttg

SEQ ID NO: 87516 - DNA, 13 bp, Artificial Sequence
  Oligonucleotide for detection of SNP TSC0022010
caaacctaaaaac

SEQ ID NO: 87517 - DNA, 13 bp, Artificial Sequence
  Oligonucleotide for detection of SNP TSC0022010
gttttcgggtttg

SEQ ID NO: 87518 - DNA, 13 bp, Artificial Sequence
  Oligonucleotide for detection of SNP TSC0022010
caaacccgaaaac

SEQ ID NO: 87519 - DNA, 13 bp, Artificial Sequence
  Oligonucleotide for detection of SNP TSC0022011
ttgggtaagggtg

SEQ ID NO: 87520 - DNA, 13 bp, Artificial Sequence
  Oligonucleotide for detection of SNP TSC0022011
cacccttacccaa

SEQ ID NO: 87521 - DNA, 13 bp, Artificial Sequence
  Oligonucleotide for detection of SNP TSC0022011
ttgggttagggtg

SEQ ID NO: 87522 - DNA, 13 bp, Artificial Sequence
  Oligonucleotide for detection of SNP TSC0022011
caccctaacccaa

SEQ ID NO: 87523 - DNA, 13 bp, Artificial Sequence
  Oligonucleotide for detection of SNP TSC0022011
tatttttgtttaa

SEQ ID NO: 87524 - DNA, 13 bp, Artificial Sequence
  Oligonucleotide for detection of SNP TSC0022011
ttaaacaaaaata

SEQ ID NO: 87525 - DNA, 13 bp, Artificial Sequence
  Oligonucleotide for detection of SNP TSC0022011
tattttggtttaa

SEQ ID NO: 87526 - DNA, 13 bp, Artificial Sequence
  Oligonucleotide for detection of SNP TSC0022011
ttaaaccaaaata

SEQ ID NO: 87527 - DNA, 13 bp, Artificial Sequence
  Oligonucleotide for detection of SNP TSC0022012
ttttaatttttgt

SEQ ID NO: 87528 - DNA, 13 bp, Artificial Sequence
  Oligonucleotide for detection of SNP TSC0022012
acaaaaattaaaa

SEQ ID NO: 87529 - DNA, 13 bp, Artificial Sequence
  Oligonucleotide for detection of SNP TSC0022012
ttttaagttttgt

SEQ ID NO: 87530 - DNA, 13 bp, Artificial Sequence
  Oligonucleotide for detection of SNP TSC0022012
acaaaacttaaaa

SEQ ID NO: 87531 - DNA, 13 bp, Artificial Sequence
  Oligonucleotide for detection of SNP TSC0022012
ataaaggttagaa

SEQ ID NO: 87532 - DNA, 13 bp, Artificial Sequence
  Oligonucleotide for detection of SNP TSC0022012
ttctaacctttat

SEQ ID NO: 87533 - DNA, 13 bp, Artificial Sequence
  Oligonucleotide for detection of SNP TSC0022012
ataaagtttagaa

SEQ ID NO: 87534 - DNA, 13 bp, Artificial Sequence
  Oligonucleotide for detection of SNP TSC0022012
ttctaaactttat

SEQ ID NO: 87535 - DNA, 13 bp, Artificial Sequence
  Oligonucleotide for detection of SNP TSC0022017
tgattataggtgt

SEQ ID NO: 87536 - DNA, 13 bp, Artificial Sequence
  Oligonucleotide for detection of SNP TSC0022017
acacctataatca

SEQ ID NO: 87537 - DNA, 13 bp, Artificial Sequence
  Oligonucleotide for detection of SNP TSC0022017
tgattagaggtgt

SEQ ID NO: 87538 - DNA, 13 bp, Artificial Sequence
  Oligonucleotide for detection of SNP TSC0022017
acacctctaatca

SEQ ID NO: 87539 - DNA, 13 bp, Artificial Sequence
  Oligonucleotide for detection of SNP TSC0022017
tgattataggcgt

SEQ ID NO: 87540 - DNA, 13 bp, Artificial Sequence
  Oligonucleotide for detection of SNP TSC0022017
acgcctataatca

SEQ ID NO: 87541 - DNA, 13 bp, Artificial Sequence
  Oligonucleotide for detection of SNP TSC0022017
tgattagaggcgt

SEQ ID NO: 87542 - DNA, 13 bp, Artificial Sequence
  Oligonucleotide for detection of SNP TSC0022017
acgcctctaatca

SEQ ID NO: 87543 - DNA, 13 bp, Artificial Sequence
  Oligonucleotide for detection of SNP TSC0022017
atgtttgtaatta

SEQ ID NO: 87544 - DNA, 13 bp, Artificial Sequence
  Oligonucleotide for detection of SNP TSC0022017
taattacaaacat

SEQ ID NO: 87545 - DNA, 13 bp, Artificial Sequence
  Oligonucleotide for detection of SNP TSC0022017
atgtttttaatta

SEQ ID NO: 87546 - DNA, 13 bp, Artificial Sequence
  Oligonucleotide for detection of SNP TSC0022017
taattaaaaacat

SEQ ID NO: 87547 - DNA, 13 bp, Artificial Sequence
  Oligonucleotide for detection of SNP TSC0022017
acgtttgtaatta

SEQ ID NO: 87548 - DNA, 13 bp, Artificial Sequence
  Oligonucleotide for detection of SNP TSC0022017
taattacaaacgt

SEQ ID NO: 87549 - DNA, 13 bp, Artificial Sequence
  Oligonucleotide for detection of SNP TSC0022017
acgtttttaatta

SEQ ID NO: 87550 - DNA, 13 bp, Artificial Sequence
  Oligonucleotide for detection of SNP TSC0022017
taattaaaaacgt

SEQ ID NO: 87551 - DNA, 13 bp, Artificial Sequence
  Oligonucleotide for detection of SNP TSC0022023
aattgtatgatay

SEQ ID NO: 87552 - DNA, 13 bp, Artificial Sequence
  Oligonucleotide for detection of SNP TSC0022023
rtatcatacaatt

SEQ ID NO: 87553 - DNA, 13 bp, Artificial Sequence
  Oligonucleotide for detection of SNP TSC0022023
aattgtgtgatay

SEQ ID NO: 87554 - DNA, 13 bp, Artificial Sequence
  Oligonucleotide for detection of SNP TSC0022023
rtatcacacaatt

SEQ ID NO: 87555 - DNA, 13 bp, Artificial Sequence
  Oligonucleotide for detection of SNP TSC0022023
aattgcgtgatay

SEQ ID NO: 87556 - DNA, 13 bp, Artificial Sequence
  Oligonucleotide for detection of SNP TSC0022023
rtatcacgcaatt

SEQ ID NO: 87557 - DNA, 13 bp, Artificial Sequence
  Oligonucleotide for detection of SNP TSC0022023
gtattatgtagtt

SEQ ID NO: 87558 - DNA, 13 bp, Artificial Sequence
  Oligonucleotide for detection of SNP TSC0022023
aactacataatac

SEQ ID NO: 87559 - DNA, 13 bp, Artificial Sequence
  Oligonucleotide for detection of SNP TSC0022023
gtattacgtagtt

SEQ ID NO: 87560 - DNA, 13 bp, Artificial Sequence
  Oligonucleotide for detection of SNP TSC0022023
aactacgtaatac

SEQ ID NO: 87561 - DNA, 13 bp, Artificial Sequence
  Oligonucleotide for detection of SNP TSC0022024
ggtggaaagtaga

SEQ ID NO: 87562 - DNA, 13 bp, Artificial Sequence
  Oligonucleotide for detection of SNP TSC0022024
tctactttccacc

SEQ ID NO: 87563 - DNA, 13 bp, Artificial Sequence
  Oligonucleotide for detection of SNP TSC0022024
ggtggagagtaga

SEQ ID NO: 87564 - DNA, 13 bp, Artificial Sequence
  Oligonucleotide for detection of SNP TSC0022024
tctactctccacc

SEQ ID NO: 87565 - DNA, 13 bp, Artificial Sequence
  Oligonucleotide for detection of SNP TSC0022025
gggattaggatag

SEQ ID NO: 87566 - DNA, 13 bp, Artificial Sequence
  Oligonucleotide for detection of SNP TSC0022025
ctatcctaatccc

SEQ ID NO: 87567 - DNA, 13 bp, Artificial Sequence
  Oligonucleotide for detection of SNP TSC0022025
gggattgggatag

SEQ ID NO: 87568 - DNA, 13 bp, Artificial Sequence
  Oligonucleotide for detection of SNP TSC0022025
ctatcccaatccc

SEQ ID NO: 87569 - DNA, 13 bp, Artificial Sequence
  Oligonucleotide for detection of SNP TSC0022025
gggatcgggatag

SEQ ID NO: 87570 - DNA, 13 bp, Artificial Sequence
  Oligonucleotide for detection of SNP TSC0022025
ctatcccgatccc

SEQ ID NO: 87571 - DNA, 13 bp, Artificial Sequence
  Oligonucleotide for detection of SNP TSC0022027
ttgttttgtgggt

SEQ ID NO: 87572 - DNA, 13 bp, Artificial Sequence
  Oligonucleotide for detection of SNP TSC0022027
acccacaaaacaa

SEQ ID NO: 87573 - DNA, 13 bp, Artificial Sequence
  Oligonucleotide for detection of SNP TSC0022027
ttgtttcgtgggt

SEQ ID NO: 87574 - DNA, 13 bp, Artificial Sequence
  Oligonucleotide for detection of SNP TSC0022027
acccacgaaacaa

SEQ ID NO: 87575 - DNA, 13 bp, Artificial Sequence
  Oligonucleotide for detection of SNP TSC0022027
atttatgagataa

SEQ ID NO: 87576 - DNA, 13 bp, Artificial Sequence
  Oligonucleotide for detection of SNP TSC0022027
ttatctcataaat

SEQ ID NO: 87577 - DNA, 13 bp, Artificial Sequence
  Oligonucleotide for detection of SNP TSC0022027
atttataagataa

SEQ ID NO: 87578 - DNA, 13 bp, Artificial Sequence
  Oligonucleotide for detection of SNP TSC0022027
ttatcttataaat

SEQ ID NO: 87579 - DNA, 13 bp, Artificial Sequence
  Oligonucleotide for detection of SNP TSC0022027
atttacgagataa

SEQ ID NO: 87580 - DNA, 13 bp, Artificial Sequence
  Oligonucleotide for detection of SNP TSC0022027
ttatctcgtaaat

SEQ ID NO: 87581 - DNA, 13 bp, Artificial Sequence
  Oligonucleotide for detection of SNP TSC0022031
ttttttaatttgg

SEQ ID NO: 87582 - DNA, 13 bp, Artificial Sequence
  Oligonucleotide for detection of SNP TSC0022031
ccaaattaaaaaa

SEQ ID NO: 87583 - DNA, 13 bp, Artificial Sequence
  Oligonucleotide for detection of SNP TSC0022031
ttttttgatttgg

SEQ ID NO: 87584 - DNA, 13 bp, Artificial Sequence
  Oligonucleotide for detection of SNP TSC0022031
ccaaatcaaaaaa

SEQ ID NO: 87585 - DNA, 13 bp, Artificial Sequence
  Oligonucleotide for detection of SNP TSC0022032
aggttaggttaag

SEQ ID NO: 87586 - DNA, 13 bp, Artificial Sequence
  Oligonucleotide for detection of SNP TSC0022032
cttaacctaacct

SEQ ID NO: 87587 - DNA, 13 bp, Artificial Sequence
  Oligonucleotide for detection of SNP TSC0022032
aggttaagttaag

SEQ ID NO: 87588 - DNA, 13 bp, Artificial Sequence
  Oligonucleotide for detection of SNP TSC0022032
cttaacttaacct

SEQ ID NO: 87589 - DNA, 13 bp, Artificial Sequence
  Oligonucleotide for detection of SNP TSC0022033
agtatcgtttttt

SEQ ID NO: 87590 - DNA, 13 bp, Artificial Sequence
  Oligonucleotide for detection of SNP TSC0022033
aaaaaacgatact

SEQ ID NO: 87591 - DNA, 13 bp, Artificial Sequence
  Oligonucleotide for detection of SNP TSC0022034
agataggatttat

SEQ ID NO: 87592 - DNA, 13 bp, Artificial Sequence
  Oligonucleotide for detection of SNP TSC0022034
ataaatcctatct

SEQ ID NO: 87593 - DNA, 13 bp, Artificial Sequence
  Oligonucleotide for detection of SNP TSC0022034
agatagaatttat

SEQ ID NO: 87594 - DNA, 13 bp, Artificial Sequence
  Oligonucleotide for detection of SNP TSC0022034
ataaattctatct

SEQ ID NO: 87595 - DNA, 13 bp, Artificial Sequence
  Oligonucleotide for detection of SNP TSC0022035
ataattgttatag

SEQ ID NO: 87596 - DNA, 13 bp, Artificial Sequence
  Oligonucleotide for detection of SNP TSC0022035
ctataacaattat

SEQ ID NO: 87597 - DNA, 13 bp, Artificial Sequence
  Oligonucleotide for detection of SNP TSC0022035
ataatttttatag

SEQ ID NO: 87598 - DNA, 13 bp, Artificial Sequence
  Oligonucleotide for detection of SNP TSC0022035
ctataaaaattat

SEQ ID NO: 87599 - DNA, 13 bp, Artificial Sequence
  Oligonucleotide for detection of SNP TSC0022035
ataatcgttatag

SEQ ID NO: 87600 - DNA, 13 bp, Artificial Sequence
  Oligonucleotide for detection of SNP TSC0022035
ctataacgattat

SEQ ID NO: 87601 - DNA, 13 bp, Artificial Sequence
  Oligonucleotide for detection of SNP TSC0022035
ttataatgattat

SEQ ID NO: 87602 - DNA, 13 bp, Artificial Sequence
  Oligonucleotide for detection of SNP TSC0022035
ataatcattataa

SEQ ID NO: 87603 - DNA, 13 bp, Artificial Sequence
  Oligonucleotide for detection of SNP TSC0022035
ttataaagattat

SEQ ID NO: 87604 - DNA, 13 bp, Artificial Sequence
  Oligonucleotide for detection of SNP TSC0022035
ataatctttataa

SEQ ID NO: 87605 - DNA, 13 bp, Artificial Sequence
  Oligonucleotide for detection of SNP TSC0022035
ttataacgattat

SEQ ID NO: 87606 - DNA, 13 bp, Artificial Sequence
  Oligonucleotide for detection of SNP TSC0022035
ataatcgttataa

SEQ ID NO: 87607 - DNA, 13 bp, Artificial Sequence
  Oligonucleotide for detection of SNP TSC0022036
ggtagaggatata

SEQ ID NO: 87608 - DNA, 13 bp, Artificial Sequence
  Oligonucleotide for detection of SNP TSC0022036
tatatcctctacc

SEQ ID NO: 87609 - DNA, 13 bp, Artificial Sequence
  Oligonucleotide for detection of SNP TSC0022036
ggtagaagatata

SEQ ID NO: 87610 - DNA, 13 bp, Artificial Sequence
  Oligonucleotide for detection of SNP TSC0022036
tatatcttctacc

SEQ ID NO: 87611 - DNA, 13 bp, Artificial Sequence
  Oligonucleotide for detection of SNP TSC0022037
aaatagggaagtt

SEQ ID NO: 87612 - DNA, 13 bp, Artificial Sequence
  Oligonucleotide for detection of SNP TSC0022037
aacttccctattt

SEQ ID NO: 87613 - DNA, 13 bp, Artificial Sequence
  Oligonucleotide for detection of SNP TSC0022037
aaatagagaagtt

SEQ ID NO: 87614 - DNA, 13 bp, Artificial Sequence
  Oligonucleotide for detection of SNP TSC0022037
aacttctctattt

SEQ ID NO: 87615 - DNA, 13 bp, Artificial Sequence
  Oligonucleotide for detection of SNP TSC0022038
aaattggagagaa

SEQ ID NO: 87616 - DNA, 13 bp, Artificial Sequence
  Oligonucleotide for detection of SNP TSC0022038
ttctctccaattt

SEQ ID NO: 87617 - DNA, 13 bp, Artificial Sequence
  Oligonucleotide for detection of SNP TSC0022038
aaattgtagagaa

SEQ ID NO: 87618 - DNA, 13 bp, Artificial Sequence
  Oligonucleotide for detection of SNP TSC0022038
ttctctacaattt

SEQ ID NO: 87619 - DNA, 13 bp, Artificial Sequence
  Oligonucleotide for detection of SNP TSC0022039
agtaggtggattt

SEQ ID NO: 87620 - DNA, 13 bp, Artificial Sequence
  Oligonucleotide for detection of SNP TSC0022039
aaatccacctact

SEQ ID NO: 87621 - DNA, 13 bp, Artificial Sequence
  Oligonucleotide for detection of SNP TSC0022039
agtaggcggattt

SEQ ID NO: 87622 - DNA, 13 bp, Artificial Sequence
  Oligonucleotide for detection of SNP TSC0022039
aaatccgcctact

SEQ ID NO: 87623 - DNA, 13 bp, Artificial Sequence
  Oligonucleotide for detection of SNP TSC0022041
tttttagtggtty

SEQ ID NO: 87624 - DNA, 13 bp, Artificial Sequence
  Oligonucleotide for detection of SNP TSC0022041
raaccactaaaaa

SEQ ID NO: 87625 - DNA, 13 bp, Artificial Sequence
  Oligonucleotide for detection of SNP TSC0022041
tttttaatggtty

SEQ ID NO: 87626 - DNA, 13 bp, Artificial Sequence
  Oligonucleotide for detection of SNP TSC0022041
raaccattaaaaa

SEQ ID NO: 87627 - DNA, 13 bp, Artificial Sequence
  Oligonucleotide for detection of SNP TSC0022045
tgtgagatttata

SEQ ID NO: 87628 - DNA, 13 bp, Artificial Sequence
  Oligonucleotide for detection of SNP TSC0022045
tataaatctcaca

SEQ ID NO: 87629 - DNA, 13 bp, Artificial Sequence
  Oligonucleotide for detection of SNP TSC0022045
tgtgaggtttata

SEQ ID NO: 87630 - DNA, 13 bp, Artificial Sequence
  Oligonucleotide for detection of SNP TSC0022045
tataaacctcaca

SEQ ID NO: 87631 - DNA, 13 bp, Artificial Sequence
  Oligonucleotide for detection of SNP TSC0022046
tgagatagagttt

SEQ ID NO: 87632 - DNA, 13 bp, Artificial Sequence
  Oligonucleotide for detection of SNP TSC0022046
aaactctatctca

SEQ ID NO: 87633 - DNA, 13 bp, Artificial Sequence
  Oligonucleotide for detection of SNP TSC0022046
tgagatggagttt

SEQ ID NO: 87634 - DNA, 13 bp, Artificial Sequence
  Oligonucleotide for detection of SNP TSC0022046
aaactccatctca

SEQ ID NO: 87635 - DNA, 13 bp, Artificial Sequence
  Oligonucleotide for detection of SNP TSC0022046
tgagacggagttt

SEQ ID NO: 87636 - DNA, 13 bp, Artificial Sequence
  Oligonucleotide for detection of SNP TSC0022046
aaactccgtctca

SEQ ID NO: 87637 - DNA, 13 bp, Artificial Sequence
  Oligonucleotide for detection of SNP TSC0022046
agattttgtttta

SEQ ID NO: 87638 - DNA, 13 bp, Artificial Sequence
  Oligonucleotide for detection of SNP TSC0022046
taaaacaaaatct

SEQ ID NO: 87639 - DNA, 13 bp, Artificial Sequence
  Oligonucleotide for detection of SNP TSC0022046
agatttcgtttta

SEQ ID NO: 87640 - DNA, 13 bp, Artificial Sequence
  Oligonucleotide for detection of SNP TSC0022046
taaaacgaaatct

SEQ ID NO: 87641 - DNA, 13 bp, Artificial Sequence
  Oligonucleotide for detection of SNP TSC0022049
atattttgaatga

SEQ ID NO: 87642 - DNA, 13 bp, Artificial Sequence
  Oligonucleotide for detection of SNP TSC0022049
tcattcaaaatat

SEQ ID NO: 87643 - DNA, 13 bp, Artificial Sequence
  Oligonucleotide for detection of SNP TSC0022049
atatttcgaatga

SEQ ID NO: 87644 - DNA, 13 bp, Artificial Sequence
  Oligonucleotide for detection of SNP TSC0022049
tcattcgaaatat

SEQ ID NO: 87645 - DNA, 13 bp, Artificial Sequence
  Oligonucleotide for detection of SNP TSC0022049
ttatttggagtgt

SEQ ID NO: 87646 - DNA, 13 bp, Artificial Sequence
  Oligonucleotide for detection of SNP TSC0022049
acactccaaataa

SEQ ID NO: 87647 - DNA, 13 bp, Artificial Sequence
  Oligonucleotide for detection of SNP TSC0022049
ttatttagagtgt

SEQ ID NO: 87648 - DNA, 13 bp, Artificial Sequence
  Oligonucleotide for detection of SNP TSC0022049
acactctaaataa

SEQ ID NO: 87649 - DNA, 13 bp, Artificial Sequence
  Oligonucleotide for detection of SNP TSC0022049
ttattcggagtgt

SEQ ID NO: 87650 - DNA, 13 bp, Artificial Sequence
  Oligonucleotide for detection of SNP TSC0022049
acactccgaataa

SEQ ID NO: 87651 - DNA, 13 bp, Artificial Sequence
  Oligonucleotide for detection of SNP TSC0022050
tggttttttttga

SEQ ID NO: 87652 - DNA, 13 bp, Artificial Sequence
  Oligonucleotide for detection of SNP TSC0022050
tcaaaaaaaacca

SEQ ID NO: 87653 - DNA, 13 bp, Artificial Sequence
  Oligonucleotide for detection of SNP TSC0022050
tggtttgttttga

SEQ ID NO: 87654 - DNA, 13 bp, Artificial Sequence
  Oligonucleotide for detection of SNP TSC0022050
tcaaaacaaacca

SEQ ID NO: 87655 - DNA, 13 bp, Artificial Sequence
  Oligonucleotide for detection of SNP TSC0022050
tggttcgttttga

SEQ ID NO: 87656 - DNA, 13 bp, Artificial Sequence
  Oligonucleotide for detection of SNP TSC0022050
tcaaaacgaacca

SEQ ID NO: 87657 - DNA, 13 bp, Artificial Sequence
  Oligonucleotide for detection of SNP TSC0022050
ttaggaggagtta

SEQ ID NO: 87658 - DNA, 13 bp, Artificial Sequence
  Oligonucleotide for detection of SNP TSC0022050
taactcctcctaa

SEQ ID NO: 87659 - DNA, 13 bp, Artificial Sequence
  Oligonucleotide for detection of SNP TSC0022051
gtagtaaagttty

SEQ ID NO: 87660 - DNA, 13 bp, Artificial Sequence
  Oligonucleotide for detection of SNP TSC0022051
raaactttactac

SEQ ID NO: 87661 - DNA, 13 bp, Artificial Sequence
  Oligonucleotide for detection of SNP TSC0022051
gtagtagagttty

SEQ ID NO: 87662 - DNA, 13 bp, Artificial Sequence
  Oligonucleotide for detection of SNP TSC0022051
raaactctactac

SEQ ID NO: 87663 - DNA, 13 bp, Artificial Sequence
  Oligonucleotide for detection of SNP TSC0022052
atttgtgagtgga

SEQ ID NO: 87664 - DNA, 13 bp, Artificial Sequence
  Oligonucleotide for detection of SNP TSC0022052
tccactcacaaat

SEQ ID NO: 87665 - DNA, 13 bp, Artificial Sequence
  Oligonucleotide for detection of SNP TSC0022052
atttgtaagtgga

SEQ ID NO: 87666 - DNA, 13 bp, Artificial Sequence
  Oligonucleotide for detection of SNP TSC0022052
tccacttacaaat

SEQ ID NO: 87667 - DNA, 13 bp, Artificial Sequence
  Oligonucleotide for detection of SNP TSC0022053
tattttaaaaaga

SEQ ID NO: 87668 - DNA, 13 bp, Artificial Sequence
  Oligonucleotide for detection of SNP TSC0022053
tctttttaaaata

SEQ ID NO: 87669 - DNA, 13 bp, Artificial Sequence
  Oligonucleotide for detection of SNP TSC0022053
tattttgaaaaga

SEQ ID NO: 87670 - DNA, 13 bp, Artificial Sequence
  Oligonucleotide for detection of SNP TSC0022053
tcttttcaaaata

SEQ ID NO: 87671 - DNA, 13 bp, Artificial Sequence
  Oligonucleotide for detection of SNP TSC0022053
tatttcgaaaaga

SEQ ID NO: 87672 - DNA, 13 bp, Artificial Sequence
  Oligonucleotide for detection of SNP TSC0022053
tcttttcgaaata

SEQ ID NO: 87673 - DNA, 13 bp, Artificial Sequence
  Oligonucleotide for detection of SNP TSC0022054
gtaaggattttty

SEQ ID NO: 87674 - DNA, 13 bp, Artificial Sequence
  Oligonucleotide for detection of SNP TSC0022054
raaaaatccttac

SEQ ID NO: 87675 - DNA, 13 bp, Artificial Sequence
  Oligonucleotide for detection of SNP TSC0022054
gtaagggttttty

SEQ ID NO: 87676 - DNA, 13 bp, Artificial Sequence
  Oligonucleotide for detection of SNP TSC0022054
raaaaacccttac

SEQ ID NO: 87677 - DNA, 13 bp, Artificial Sequence
  Oligonucleotide for detection of SNP TSC0022055
atatttattttga

SEQ ID NO: 87678 - DNA, 13 bp, Artificial Sequence
  Oligonucleotide for detection of SNP TSC0022055
tcaaaataaatat

SEQ ID NO: 87679 - DNA, 13 bp, Artificial Sequence
  Oligonucleotide for detection of SNP TSC0022055
atatttgttttga

SEQ ID NO: 87680 - DNA, 13 bp, Artificial Sequence
  Oligonucleotide for detection of SNP TSC0022055
tcaaaacaaatat

SEQ ID NO: 87681 - DNA, 13 bp, Artificial Sequence
  Oligonucleotide for detection of SNP TSC0022056
atttattttgaaa

SEQ ID NO: 87682 - DNA, 13 bp, Artificial Sequence
  Oligonucleotide for detection of SNP TSC0022056
tttcaaaataaat

SEQ ID NO: 87683 - DNA, 13 bp, Artificial Sequence
  Oligonucleotide for detection of SNP TSC0022056
atttatgttgaaa

SEQ ID NO: 87684 - DNA, 13 bp, Artificial Sequence
  Oligonucleotide for detection of SNP TSC0022056
tttcaacataaat

SEQ ID NO: 87685 - DNA, 13 bp, Artificial Sequence
  Oligonucleotide for detection of SNP TSC0022056
ttttaagataggt

SEQ ID NO: 87686 - DNA, 13 bp, Artificial Sequence
  Oligonucleotide for detection of SNP TSC0022056
acctatcttaaaa

SEQ ID NO: 87687 - DNA, 13 bp, Artificial Sequence
  Oligonucleotide for detection of SNP TSC0022056
ttttaatataggt

SEQ ID NO: 87688 - DNA, 13 bp, Artificial Sequence
  Oligonucleotide for detection of SNP TSC0022056
acctatattaaaa

SEQ ID NO: 87689 - DNA, 13 bp, Artificial Sequence
  Oligonucleotide for detection of SNP TSC0022057
ttggttatgttgy

SEQ ID NO: 87690 - DNA, 13 bp, Artificial Sequence
  Oligonucleotide for detection of SNP TSC0022057
rcaacataaccaa

SEQ ID NO: 87691 - DNA, 13 bp, Artificial Sequence
  Oligonucleotide for detection of SNP TSC0022057
ttggttgtgttgy

SEQ ID NO: 87692 - DNA, 13 bp, Artificial Sequence
  Oligonucleotide for detection of SNP TSC0022057
rcaacacaaccaa

SEQ ID NO: 87693 - DNA, 13 bp, Artificial Sequence
  Oligonucleotide for detection of SNP TSC0022057
ttggtcgtgttgy

SEQ ID NO: 87694 - DNA, 13 bp, Artificial Sequence
  Oligonucleotide for detection of SNP TSC0022057
rcaacacgaccaa

SEQ ID NO: 87695 - DNA, 13 bp, Artificial Sequence
  Oligonucleotide for detection of SNP TSC0022057
gtaatatggttag

SEQ ID NO: 87696 - DNA, 13 bp, Artificial Sequence
  Oligonucleotide for detection of SNP TSC0022057
ctaaccatattac

SEQ ID NO: 87697 - DNA, 13 bp, Artificial Sequence
  Oligonucleotide for detection of SNP TSC0022057
gtaatacggttag

SEQ ID NO: 87698 - DNA, 13 bp, Artificial Sequence
  Oligonucleotide for detection of SNP TSC0022057
ctaaccgtattac

SEQ ID NO: 87699 - DNA, 13 bp, Artificial Sequence
  Oligonucleotide for detection of SNP TSC0022058
ttttgatagttty

SEQ ID NO: 87700 - DNA, 13 bp, Artificial Sequence
  Oligonucleotide for detection of SNP TSC0022058
raaactatcaaaa

SEQ ID NO: 87701 - DNA, 13 bp, Artificial Sequence
  Oligonucleotide for detection of SNP TSC0022058
ttttgagagttty

SEQ ID NO: 87702 - DNA, 13 bp, Artificial Sequence
  Oligonucleotide for detection of SNP TSC0022058
raaactctcaaaa

SEQ ID NO: 87703 - DNA, 13 bp, Artificial Sequence
  Oligonucleotide for detection of SNP TSC0022058
ggagttgttagag

SEQ ID NO: 87704 - DNA, 13 bp, Artificial Sequence
  Oligonucleotide for detection of SNP TSC0022058
ctctaacaactcc

SEQ ID NO: 87705 - DNA, 13 bp, Artificial Sequence
  Oligonucleotide for detection of SNP TSC0022058
ggagtttttagag

SEQ ID NO: 87706 - DNA, 13 bp, Artificial Sequence
  Oligonucleotide for detection of SNP TSC0022058
ctctaaaaactcc

SEQ ID NO: 87707 - DNA, 13 bp, Artificial Sequence
  Oligonucleotide for detection of SNP TSC0022059
ttagagattatgt

SEQ ID NO: 87708 - DNA, 13 bp, Artificial Sequence
  Oligonucleotide for detection of SNP TSC0022059
acataatctctaa

SEQ ID NO: 87709 - DNA, 13 bp, Artificial Sequence
  Oligonucleotide for detection of SNP TSC0022059
ttagagtttatgt

SEQ ID NO: 87710 - DNA, 13 bp, Artificial Sequence
  Oligonucleotide for detection of SNP TSC0022059
acataaactctaa

SEQ ID NO: 87711 - DNA, 13 bp, Artificial Sequence
  Oligonucleotide for detection of SNP TSC0022059
atatagtttttga

SEQ ID NO: 87712 - DNA, 13 bp, Artificial Sequence
  Oligonucleotide for detection of SNP TSC0022059
tcaaaaactatat

SEQ ID NO: 87713 - DNA, 13 bp, Artificial Sequence
  Oligonucleotide for detection of SNP TSC0022059
atataggttttga

SEQ ID NO: 87714 - DNA, 13 bp, Artificial Sequence
  Oligonucleotide for detection of SNP TSC0022059
tcaaaacctatat

SEQ ID NO: 87715 - DNA, 13 bp, Artificial Sequence
  Oligonucleotide for detection of SNP TSC0022061
aaaaaaagtttag

SEQ ID NO: 87716 - DNA, 13 bp, Artificial Sequence
  Oligonucleotide for detection of SNP TSC0022061
ctaaacttttttt

SEQ ID NO: 87717 - DNA, 13 bp, Artificial Sequence
  Oligonucleotide for detection of SNP TSC0022061
aaaaaaggtttag

SEQ ID NO: 87718 - DNA, 13 bp, Artificial Sequence
  Oligonucleotide for detection of SNP TSC0022061
ctaaacctttttt

SEQ ID NO: 87719 - DNA, 13 bp, Artificial Sequence
  Oligonucleotide for detection of SNP TSC0022063
aaagttaggagaa

SEQ ID NO: 87720 - DNA, 13 bp, Artificial Sequence
  Oligonucleotide for detection of SNP TSC0022063
ttctcctaacttt

SEQ ID NO: 87721 - DNA, 13 bp, Artificial Sequence
  Oligonucleotide for detection of SNP TSC0022063
aaagttgggagaa

SEQ ID NO: 87722 - DNA, 13 bp, Artificial Sequence
  Oligonucleotide for detection of SNP TSC0022063
ttctcccaacttt

SEQ ID NO: 87723 - DNA, 13 bp, Artificial Sequence
  Oligonucleotide for detection of SNP TSC0022063
aaagtcgggagaa

SEQ ID NO: 87724 - DNA, 13 bp, Artificial Sequence
  Oligonucleotide for detection of SNP TSC0022063
ttctcccgacttt

SEQ ID NO: 87725 - DNA, 13 bp, Artificial Sequence
  Oligonucleotide for detection of SNP TSC0022064
gtgtaagtaaaay

SEQ ID NO: 87726 - DNA, 13 bp, Artificial Sequence
  Oligonucleotide for detection of SNP TSC0022064
rttttacttacac

SEQ ID NO: 87727 - DNA, 13 bp, Artificial Sequence
  Oligonucleotide for detection of SNP TSC0022064
gtgtaaataaaay

SEQ ID NO: 87728 - DNA, 13 bp, Artificial Sequence
  Oligonucleotide for detection of SNP TSC0022064
rttttatttacac

SEQ ID NO: 87729 - DNA, 13 bp, Artificial Sequence
  Oligonucleotide for detection of SNP TSC0022065
ggaataggtttta

SEQ ID NO: 87730 - DNA, 13 bp, Artificial Sequence
  Oligonucleotide for detection of SNP TSC0022065
taaaacctattcc

SEQ ID NO: 87731 - DNA, 13 bp, Artificial Sequence
  Oligonucleotide for detection of SNP TSC0022065
tgggatgtattty

SEQ ID NO: 87732 - DNA, 13 bp, Artificial Sequence
  Oligonucleotide for detection of SNP TSC0022065
raaatacatccca

SEQ ID NO: 87733 - DNA, 13 bp, Artificial Sequence
  Oligonucleotide for detection of SNP TSC0022065
tgggatttattty

SEQ ID NO: 87734 - DNA, 13 bp, Artificial Sequence
  Oligonucleotide for detection of SNP TSC0022065
raaataaatccca

SEQ ID NO: 87735 - DNA, 13 bp, Artificial Sequence
  Oligonucleotide for detection of SNP TSC0022065
tgggacgtattty

SEQ ID NO: 87736 - DNA, 13 bp, Artificial Sequence
  Oligonucleotide for detection of SNP TSC0022065
raaatacgtccca

SEQ ID NO: 87737 - DNA, 13 bp, Artificial Sequence
  Oligonucleotide for detection of SNP TSC0022068
tagggtgatgtgg

SEQ ID NO: 87738 - DNA, 13 bp, Artificial Sequence
  Oligonucleotide for detection of SNP TSC0022068
ccacatcacccta

SEQ ID NO: 87739 - DNA, 13 bp, Artificial Sequence
  Oligonucleotide for detection of SNP TSC0022068
tagggtaacgtgg

SEQ ID NO: 87740 - DNA, 13 bp, Artificial Sequence
  Oligonucleotide for detection of SNP TSC0022068
ccacgttacccta

SEQ ID NO: 87741 - DNA, 13 bp, Artificial Sequence
  Oligonucleotide for detection of SNP TSC0022068
tagggcgatgtgg

SEQ ID NO: 87742 - DNA, 13 bp, Artificial Sequence
  Oligonucleotide for detection of SNP TSC0022068
ccacatcgcccta

SEQ ID NO: 87743 - DNA, 13 bp, Artificial Sequence
  Oligonucleotide for detection of SNP TSC0022068
tagggtgacgtgg

SEQ ID NO: 87744 - DNA, 13 bp, Artificial Sequence
  Oligonucleotide for detection of SNP TSC0022068
ccacgtcacccta

SEQ ID NO: 87745 - DNA, 13 bp, Artificial Sequence
  Oligonucleotide for detection of SNP TSC0022068
tagggtaacgcgg

SEQ ID NO: 87746 - DNA, 13 bp, Artificial Sequence
  Oligonucleotide for detection of SNP TSC0022068
ccgcgttacccta

SEQ ID NO: 87747 - DNA, 13 bp, Artificial Sequence
  Oligonucleotide for detection of SNP TSC0022068
tagggtgatgcgg

SEQ ID NO: 87748 - DNA, 13 bp, Artificial Sequence
  Oligonucleotide for detection of SNP TSC0022068
ccgcatcacccta

SEQ ID NO: 87749 - DNA, 13 bp, Artificial Sequence
  Oligonucleotide for detection of SNP TSC0022068
tagggcgacgtgg

SEQ ID NO: 87750 - DNA, 13 bp, Artificial Sequence
  Oligonucleotide for detection of SNP TSC0022068
ccacgtcgcccta

SEQ ID NO: 87751 - DNA, 13 bp, Artificial Sequence
  Oligonucleotide for detection of SNP TSC0022068
tagggcgatgcgg

SEQ ID NO: 87752 - DNA, 13 bp, Artificial Sequence
  Oligonucleotide for detection of SNP TSC0022068
ccgcatcgcccta

SEQ ID NO: 87753 - DNA, 13 bp, Artificial Sequence
  Oligonucleotide for detection of SNP TSC0022068
tagggtgacgcgg

SEQ ID NO: 87754 - DNA, 13 bp, Artificial Sequence
  Oligonucleotide for detection of SNP TSC0022068
ccgcgtcacccta

SEQ ID NO: 87755 - DNA, 13 bp, Artificial Sequence
  Oligonucleotide for detection of SNP TSC0022068
tagggcgacgcgg

SEQ ID NO: 87756 - DNA, 13 bp, Artificial Sequence
  Oligonucleotide for detection of SNP TSC0022068
ccgcgtcgcccta

SEQ ID NO: 87757 - DNA, 13 bp, Artificial Sequence
  Oligonucleotide for detection of SNP TSC0022068
ttgtgttgttttg

SEQ ID NO: 87758 - DNA, 13 bp, Artificial Sequence
  Oligonucleotide for detection of SNP TSC0022068
caaaacaacacaa

SEQ ID NO: 87759 - DNA, 13 bp, Artificial Sequence
  Oligonucleotide for detection of SNP TSC0022068
tcgtgttgttttg

SEQ ID NO: 87760 - DNA, 13 bp, Artificial Sequence
  Oligonucleotide for detection of SNP TSC0022068
caaaacaacacga

SEQ ID NO: 87761 - DNA, 13 bp, Artificial Sequence
  Oligonucleotide for detection of SNP TSC0022068
ttgcgttgttttg

SEQ ID NO: 87762 - DNA, 13 bp, Artificial Sequence
  Oligonucleotide for detection of SNP TSC0022068
caaaacaacgcaa

SEQ ID NO: 87763 - DNA, 13 bp, Artificial Sequence
  Oligonucleotide for detection of SNP TSC0022068
tcgcgttgttttg

SEQ ID NO: 87764 - DNA, 13 bp, Artificial Sequence
  Oligonucleotide for detection of SNP TSC0022068
caaaacaacgcga

SEQ ID NO: 87765 - DNA, 13 bp, Artificial Sequence
  Oligonucleotide for detection of SNP TSC0022068
ttgtgtcgttttg

SEQ ID NO: 87766 - DNA, 13 bp, Artificial Sequence
  Oligonucleotide for detection of SNP TSC0022068
caaaacgacacaa

SEQ ID NO: 87767 - DNA, 13 bp, Artificial Sequence
  Oligonucleotide for detection of SNP TSC0022068
tcgtgtcgttttg

SEQ ID NO: 87768 - DNA, 13 bp, Artificial Sequence
  Oligonucleotide for detection of SNP TSC0022068
caaaacgacacga

SEQ ID NO: 87769 - DNA, 13 bp, Artificial Sequence
  Oligonucleotide for detection of SNP TSC0022068
ttgcgtcgttttg

SEQ ID NO: 87770 - DNA, 13 bp, Artificial Sequence
  Oligonucleotide for detection of SNP TSC0022068
caaaacgacgcaa

SEQ ID NO: 87771 - DNA, 13 bp, Artificial Sequence
  Oligonucleotide for detection of SNP TSC0022068
tcgcgtcgttttg

SEQ ID NO: 87772 - DNA, 13 bp, Artificial Sequence
  Oligonucleotide for detection of SNP TSC0022068
caaaacgacgcga

SEQ ID NO: 87773 - DNA, 13 bp, Artificial Sequence
  Oligonucleotide for detection of SNP TSC0022069
aattgttttgaty

SEQ ID NO: 87774 - DNA, 13 bp, Artificial Sequence
  Oligonucleotide for detection of SNP TSC0022069
ratcaaaacaatt

SEQ ID NO: 87775 - DNA, 13 bp, Artificial Sequence
  Oligonucleotide for detection of SNP TSC0022069
aattgtgttgaty

SEQ ID NO: 87776 - DNA, 13 bp, Artificial Sequence
  Oligonucleotide for detection of SNP TSC0022069
ratcaacacaatt

SEQ ID NO: 87777 - DNA, 13 bp, Artificial Sequence
  Oligonucleotide for detection of SNP TSC0022069
aattgtttcgaty

SEQ ID NO: 87778 - DNA, 13 bp, Artificial Sequence
  Oligonucleotide for detection of SNP TSC0022069
ratcgaaacaatt

SEQ ID NO: 87779 - DNA, 13 bp, Artificial Sequence
  Oligonucleotide for detection of SNP TSC0022069
aattgcgttgaty

SEQ ID NO: 87780 - DNA, 13 bp, Artificial Sequence
  Oligonucleotide for detection of SNP TSC0022069
ratcaacgcaatt

SEQ ID NO: 87781 - DNA, 13 bp, Artificial Sequence
  Oligonucleotide for detection of SNP TSC0022069
aattgtgtcgaty

SEQ ID NO: 87782 - DNA, 13 bp, Artificial Sequence
  Oligonucleotide for detection of SNP TSC0022069
ratcgacacaatt

SEQ ID NO: 87783 - DNA, 13 bp, Artificial Sequence
  Oligonucleotide for detection of SNP TSC0022069
aattgcgtcgaty

SEQ ID NO: 87784 - DNA, 13 bp, Artificial Sequence
  Oligonucleotide for detection of SNP TSC0022069
ratcgacgcaatt

SEQ ID NO: 87785 - DNA, 13 bp, Artificial Sequence
  Oligonucleotide for detection of SNP TSC0022069
ggttggggtaatt

SEQ ID NO: 87786 - DNA, 13 bp, Artificial Sequence
  Oligonucleotide for detection of SNP TSC0022069
aattaccccaacc

SEQ ID NO: 87787 - DNA, 13 bp, Artificial Sequence
  Oligonucleotide for detection of SNP TSC0022069
ggttggtgtaatt

SEQ ID NO: 87788 - DNA, 13 bp, Artificial Sequence
  Oligonucleotide for detection of SNP TSC0022069
aattacaccaacc

SEQ ID NO: 87789 - DNA, 13 bp, Artificial Sequence
  Oligonucleotide for detection of SNP TSC0022069
ggtcggggtaatt

SEQ ID NO: 87790 - DNA, 13 bp, Artificial Sequence
  Oligonucleotide for detection of SNP TSC0022069
aattaccccgacc

SEQ ID NO: 87791 - DNA, 13 bp, Artificial Sequence
  Oligonucleotide for detection of SNP TSC0022069
ggtcggtgtaatt

SEQ ID NO: 87792 - DNA, 13 bp, Artificial Sequence
  Oligonucleotide for detection of SNP TSC0022069
aattacaccgacc

SEQ ID NO: 87793 - DNA, 13 bp, Artificial Sequence
  Oligonucleotide for detection of SNP TSC0022069
ggttggcgtaatt

SEQ ID NO: 87794 - DNA, 13 bp, Artificial Sequence
  Oligonucleotide for detection of SNP TSC0022069
aattacgccaacc

SEQ ID NO: 87795 - DNA, 13 bp, Artificial Sequence
  Oligonucleotide for detection of SNP TSC0022069
ggtcggcgtaatt

SEQ ID NO: 87796 - DNA, 13 bp, Artificial Sequence
  Oligonucleotide for detection of SNP TSC0022069
aattacgccgacc

SEQ ID NO: 87797 - DNA, 13 bp, Artificial Sequence
  Oligonucleotide for detection of SNP TSC0022070
agtggggaagagg

SEQ ID NO: 87798 - DNA, 13 bp, Artificial Sequence
  Oligonucleotide for detection of SNP TSC0022070
cctcttccccact

SEQ ID NO: 87799 - DNA, 13 bp, Artificial Sequence
  Oligonucleotide for detection of SNP TSC0022070
agtgggtaagagg

SEQ ID NO: 87800 - DNA, 13 bp, Artificial Sequence
  Oligonucleotide for detection of SNP TSC0022070
cctcttacccact

SEQ ID NO: 87801 - DNA, 13 bp, Artificial Sequence
  Oligonucleotide for detection of SNP TSC0022070
agcggggaagagg

SEQ ID NO: 87802 - DNA, 13 bp, Artificial Sequence
  Oligonucleotide for detection of SNP TSC0022070
cctcttccccgct

SEQ ID NO: 87803 - DNA, 13 bp, Artificial Sequence
  Oligonucleotide for detection of SNP TSC0022070
agcgggtaagagg

SEQ ID NO: 87804 - DNA, 13 bp, Artificial Sequence
  Oligonucleotide for detection of SNP TSC0022070
cctcttacccgct

SEQ ID NO: 87805 - DNA, 13 bp, Artificial Sequence
  Oligonucleotide for detection of SNP TSC0022071
aggtttttatttg

SEQ ID NO: 87806 - DNA, 13 bp, Artificial Sequence
  Oligonucleotide for detection of SNP TSC0022071
caaataaaaacct

SEQ ID NO: 87807 - DNA, 13 bp, Artificial Sequence
  Oligonucleotide for detection of SNP TSC0022071
aggtttgtatttg

SEQ ID NO: 87808 - DNA, 13 bp, Artificial Sequence
  Oligonucleotide for detection of SNP TSC0022071
caaatacaaacct

SEQ ID NO: 87809 - DNA, 13 bp, Artificial Sequence
  Oligonucleotide for detection of SNP TSC0022071
aggtttttattcg

SEQ ID NO: 87810 - DNA, 13 bp, Artificial Sequence
  Oligonucleotide for detection of SNP TSC0022071
cgaataaaaacct

SEQ ID NO: 87811 - DNA, 13 bp, Artificial Sequence
  Oligonucleotide for detection of SNP TSC0022071
aggtttgtattcg

SEQ ID NO: 87812 - DNA, 13 bp, Artificial Sequence
  Oligonucleotide for detection of SNP TSC0022071
cgaatacaaacct

SEQ ID NO: 87813 - DNA, 13 bp, Artificial Sequence
  Oligonucleotide for detection of SNP TSC0022071
tgggtggaggttt

SEQ ID NO: 87814 - DNA, 13 bp, Artificial Sequence
  Oligonucleotide for detection of SNP TSC0022071
aaacctccaccca

SEQ ID NO: 87815 - DNA, 13 bp, Artificial Sequence
  Oligonucleotide for detection of SNP TSC0022071
tgggtgtaggttt

SEQ ID NO: 87816 - DNA, 13 bp, Artificial Sequence
  Oligonucleotide for detection of SNP TSC0022071
aaacctacaccca

SEQ ID NO: 87817 - DNA, 13 bp, Artificial Sequence
  Oligonucleotide for detection of SNP TSC0022071
cgggtggaggttt

SEQ ID NO: 87818 - DNA, 13 bp, Artificial Sequence
  Oligonucleotide for detection of SNP TSC0022071
aaacctccacccg

SEQ ID NO: 87819 - DNA, 13 bp, Artificial Sequence
  Oligonucleotide for detection of SNP TSC0022071
cgggtgtaggttt

SEQ ID NO: 87820 - DNA, 13 bp, Artificial Sequence
  Oligonucleotide for detection of SNP TSC0022071
aaacctacacccg

SEQ ID NO: 87821 - DNA, 13 bp, Artificial Sequence
  Oligonucleotide for detection of SNP TSC0022072
gtaaaatgttaty

SEQ ID NO: 87822 - DNA, 13 bp, Artificial Sequence
  Oligonucleotide for detection of SNP TSC0022072
rataacattttac

SEQ ID NO: 87823 - DNA, 13 bp, Artificial Sequence
  Oligonucleotide for detection of SNP TSC0022072
gtaaaacgttaty

SEQ ID NO: 87824 - DNA, 13 bp, Artificial Sequence
  Oligonucleotide for detection of SNP TSC0022072
rataacgttttac

SEQ ID NO: 87825 - DNA, 13 bp, Artificial Sequence
  Oligonucleotide for detection of SNP TSC0022072
ggtggtgttttgy

SEQ ID NO: 87826 - DNA, 13 bp, Artificial Sequence
  Oligonucleotide for detection of SNP TSC0022072
rcaaaacaccacc

SEQ ID NO: 87827 - DNA, 13 bp, Artificial Sequence
  Oligonucleotide for detection of SNP TSC0022072
ggtggtattttgy

SEQ ID NO: 87828 - DNA, 13 bp, Artificial Sequence
  Oligonucleotide for detection of SNP TSC0022072
rcaaaataccacc

SEQ ID NO: 87829 - DNA, 13 bp, Artificial Sequence
  Oligonucleotide for detection of SNP TSC0022072
ggtggcgttttgy

SEQ ID NO: 87830 - DNA, 13 bp, Artificial Sequence
  Oligonucleotide for detection of SNP TSC0022072
rcaaaacgccacc

SEQ ID NO: 87831 - DNA, 13 bp, Artificial Sequence
  Oligonucleotide for detection of SNP TSC0022073
tattttgaataty

SEQ ID NO: 87832 - DNA, 13 bp, Artificial Sequence
  Oligonucleotide for detection of SNP TSC0022073
ratattcaaaata

SEQ ID NO: 87833 - DNA, 13 bp, Artificial Sequence
  Oligonucleotide for detection of SNP TSC0022073
tattttaaataty

SEQ ID NO: 87834 - DNA, 13 bp, Artificial Sequence
  Oligonucleotide for detection of SNP TSC0022073
ratatttaaaata

SEQ ID NO: 87835 - DNA, 13 bp, Artificial Sequence
  Oligonucleotide for detection of SNP TSC0022077
tatttatgttgta

SEQ ID NO: 87836 - DNA, 13 bp, Artificial Sequence
  Oligonucleotide for detection of SNP TSC0022077
tacaacataaata

SEQ ID NO: 87837 - DNA, 13 bp, Artificial Sequence
  Oligonucleotide for detection of SNP TSC0022077
tatttacgttgta

SEQ ID NO: 87838 - DNA, 13 bp, Artificial Sequence
  Oligonucleotide for detection of SNP TSC0022077
tacaacgtaaata

SEQ ID NO: 87839 - DNA, 13 bp, Artificial Sequence
  Oligonucleotide for detection of SNP TSC0022077
tataatgtaaatg

SEQ ID NO: 87840 - DNA, 13 bp, Artificial Sequence
  Oligonucleotide for detection of SNP TSC0022077
catttacattata

SEQ ID NO: 87841 - DNA, 13 bp, Artificial Sequence
  Oligonucleotide for detection of SNP TSC0022077
tataatataaatg

SEQ ID NO: 87842 - DNA, 13 bp, Artificial Sequence
  Oligonucleotide for detection of SNP TSC0022077
catttatattata

SEQ ID NO: 87843 - DNA, 13 bp, Artificial Sequence
  Oligonucleotide for detection of SNP TSC0022077
tataacgtaaatg

SEQ ID NO: 87844 - DNA, 13 bp, Artificial Sequence
  Oligonucleotide for detection of SNP TSC0022077
catttacgttata

SEQ ID NO: 87845 - DNA, 13 bp, Artificial Sequence
  Oligonucleotide for detection of SNP TSC0022078
gggaggtggagtt

SEQ ID NO: 87846 - DNA, 13 bp, Artificial Sequence
  Oligonucleotide for detection of SNP TSC0022078
aactccacctccc

SEQ ID NO: 87847 - DNA, 13 bp, Artificial Sequence
  Oligonucleotide for detection of SNP TSC0022078
gggaggcggagtt

SEQ ID NO: 87848 - DNA, 13 bp, Artificial Sequence
  Oligonucleotide for detection of SNP TSC0022078
aactccgcctccc

SEQ ID NO: 87849 - DNA, 13 bp, Artificial Sequence
  Oligonucleotide for detection of SNP TSC0022080
ttttttagggtgg

SEQ ID NO: 87850 - DNA, 13 bp, Artificial Sequence
  Oligonucleotide for detection of SNP TSC0022080
ccaccctaaaaaa

SEQ ID NO: 87851 - DNA, 13 bp, Artificial Sequence
  Oligonucleotide for detection of SNP TSC0022080
ttttttggggtgg

SEQ ID NO: 87852 - DNA, 13 bp, Artificial Sequence
  Oligonucleotide for detection of SNP TSC0022080
ccaccccaaaaaa

SEQ ID NO: 87853 - DNA, 13 bp, Artificial Sequence
  Oligonucleotide for detection of SNP TSC0022080
tttttcggggtgg

SEQ ID NO: 87854 - DNA, 13 bp, Artificial Sequence
  Oligonucleotide for detection of SNP TSC0022080
ccaccccgaaaaa

SEQ ID NO: 87855 - DNA, 13 bp, Artificial Sequence
  Oligonucleotide for detection of SNP TSC0022080
ttattttggggaa

SEQ ID NO: 87856 - DNA, 13 bp, Artificial Sequence
  Oligonucleotide for detection of SNP TSC0022080
ttccccaaaataa

SEQ ID NO: 87857 - DNA, 13 bp, Artificial Sequence
  Oligonucleotide for detection of SNP TSC0022080
ttatttcggggaa

SEQ ID NO: 87858 - DNA, 13 bp, Artificial Sequence
  Oligonucleotide for detection of SNP TSC0022080
ttccccgaaataa

SEQ ID NO: 87859 - DNA, 13 bp, Artificial Sequence
  Oligonucleotide for detection of SNP TSC0022081
gagtagggttgga

SEQ ID NO: 87860 - DNA, 13 bp, Artificial Sequence
  Oligonucleotide for detection of SNP TSC0022081
tccaaccctactc

SEQ ID NO: 87861 - DNA, 13 bp, Artificial Sequence
  Oligonucleotide for detection of SNP TSC0022081
gagtagtgttgga

SEQ ID NO: 87862 - DNA, 13 bp, Artificial Sequence
  Oligonucleotide for detection of SNP TSC0022081
tccaacactactc

SEQ ID NO: 87863 - DNA, 13 bp, Artificial Sequence
  Oligonucleotide for detection of SNP TSC0022081
tttaattttatty

SEQ ID NO: 87864 - DNA, 13 bp, Artificial Sequence
  Oligonucleotide for detection of SNP TSC0022081
raataaaattaaa

SEQ ID NO: 87865 - DNA, 13 bp, Artificial Sequence
  Oligonucleotide for detection of SNP TSC0022081
tttaatattatty

SEQ ID NO: 87866 - DNA, 13 bp, Artificial Sequence
  Oligonucleotide for detection of SNP TSC0022081
raataatattaaa

SEQ ID NO: 87867 - DNA, 13 bp, Artificial Sequence
  Oligonucleotide for detection of SNP TSC0022082
gattttgggggtt

SEQ ID NO: 87868 - DNA, 13 bp, Artificial Sequence
  Oligonucleotide for detection of SNP TSC0022082
aacccccaaaatc

SEQ ID NO: 87869 - DNA, 13 bp, Artificial Sequence
  Oligonucleotide for detection of SNP TSC0022082
gattttaggggtt

SEQ ID NO: 87870 - DNA, 13 bp, Artificial Sequence
  Oligonucleotide for detection of SNP TSC0022082
aacccctaaaatc

SEQ ID NO: 87871 - DNA, 13 bp, Artificial Sequence
  Oligonucleotide for detection of SNP TSC0022084
tagatagttaaat

SEQ ID NO: 87872 - DNA, 13 bp, Artificial Sequence
  Oligonucleotide for detection of SNP TSC0022084
atttaactatcta

SEQ ID NO: 87873 - DNA, 13 bp, Artificial Sequence
  Oligonucleotide for detection of SNP TSC0022084
tagatatttaaat

SEQ ID NO: 87874 - DNA, 13 bp, Artificial Sequence
  Oligonucleotide for detection of SNP TSC0022084
atttaaatatcta

SEQ ID NO: 87875 - DNA, 13 bp, Artificial Sequence
  Oligonucleotide for detection of SNP TSC0022084
atttaattattta

SEQ ID NO: 87876 - DNA, 13 bp, Artificial Sequence
  Oligonucleotide for detection of SNP TSC0022084
taaataattaaat

SEQ ID NO: 87877 - DNA, 13 bp, Artificial Sequence
  Oligonucleotide for detection of SNP TSC0022090
ggatttattttta

SEQ ID NO: 87878 - DNA, 13 bp, Artificial Sequence
  Oligonucleotide for detection of SNP TSC0022090
taaaaataaatcc

SEQ ID NO: 87879 - DNA, 13 bp, Artificial Sequence
  Oligonucleotide for detection of SNP TSC0022090
ggatttgttttta

SEQ ID NO: 87880 - DNA, 13 bp, Artificial Sequence
  Oligonucleotide for detection of SNP TSC0022090
taaaaacaaatcc

SEQ ID NO: 87881 - DNA, 13 bp, Artificial Sequence
  Oligonucleotide for detection of SNP TSC0022090
ggattcgttttta

SEQ ID NO: 87882 - DNA, 13 bp, Artificial Sequence
  Oligonucleotide for detection of SNP TSC0022090
taaaaacgaatcc

SEQ ID NO: 87883 - DNA, 13 bp, Artificial Sequence
  Oligonucleotide for detection of SNP TSC0022090
taaaggtgagtty

SEQ ID NO: 87884 - DNA, 13 bp, Artificial Sequence
  Oligonucleotide for detection of SNP TSC0022090
raactcaccttta

SEQ ID NO: 87885 - DNA, 13 bp, Artificial Sequence
  Oligonucleotide for detection of SNP TSC0022090
taaaggcgagtty

SEQ ID NO: 87886 - DNA, 13 bp, Artificial Sequence
  Oligonucleotide for detection of SNP TSC0022090
raactcgccttta

SEQ ID NO: 87887 - DNA, 13 bp, Artificial Sequence
  Oligonucleotide for detection of SNP TSC0022093
atttattgagtgy

SEQ ID NO: 87888 - DNA, 13 bp, Artificial Sequence
  Oligonucleotide for detection of SNP TSC0022093
rcactcaataaat

SEQ ID NO: 87889 - DNA, 13 bp, Artificial Sequence
  Oligonucleotide for detection of SNP TSC0022093
atttatcgagtgy

SEQ ID NO: 87890 - DNA, 13 bp, Artificial Sequence
  Oligonucleotide for detection of SNP TSC0022093
rcactcgataaat

SEQ ID NO: 87891 - DNA, 13 bp, Artificial Sequence
  Oligonucleotide for detection of SNP TSC0022093
gtatttggtgaat

SEQ ID NO: 87892 - DNA, 13 bp, Artificial Sequence
  Oligonucleotide for detection of SNP TSC0022093
attcaccaaatac

SEQ ID NO: 87893 - DNA, 13 bp, Artificial Sequence
  Oligonucleotide for detection of SNP TSC0022093
gtatttagtgaat

SEQ ID NO: 87894 - DNA, 13 bp, Artificial Sequence
  Oligonucleotide for detection of SNP TSC0022093
attcactaaatac

SEQ ID NO: 87895 - DNA, 13 bp, Artificial Sequence
  Oligonucleotide for detection of SNP TSC0022093
gtattcggtgaat

SEQ ID NO: 87896 - DNA, 13 bp, Artificial Sequence
  Oligonucleotide for detection of SNP TSC0022093
attcaccgaatac

SEQ ID NO: 87897 - DNA, 13 bp, Artificial Sequence
  Oligonucleotide for detection of SNP TSC0022094
ggatggggggtta

SEQ ID NO: 87898 - DNA, 13 bp, Artificial Sequence
  Oligonucleotide for detection of SNP TSC0022094
taaccccccatcc

SEQ ID NO: 87899 - DNA, 13 bp, Artificial Sequence
  Oligonucleotide for detection of SNP TSC0022094
ggatggagggtta

SEQ ID NO: 87900 - DNA, 13 bp, Artificial Sequence
  Oligonucleotide for detection of SNP TSC0022094
taaccctccatcc

SEQ ID NO: 87901 - DNA, 13 bp, Artificial Sequence
  Oligonucleotide for detection of SNP TSC0022095
agagagtggaaty

SEQ ID NO: 87902 - DNA, 13 bp, Artificial Sequence
  Oligonucleotide for detection of SNP TSC0022095
rattccactctct

SEQ ID NO: 87903 - DNA, 13 bp, Artificial Sequence
  Oligonucleotide for detection of SNP TSC0022095
agagagcggaaty

SEQ ID NO: 87904 - DNA, 13 bp, Artificial Sequence
  Oligonucleotide for detection of SNP TSC0022095
rattccgctctct

SEQ ID NO: 87905 - DNA, 13 bp, Artificial Sequence
  Oligonucleotide for detection of SNP TSC0022096
tgggggggaggtt

SEQ ID NO: 87906 - DNA, 13 bp, Artificial Sequence
  Oligonucleotide for detection of SNP TSC0022096
aacctccccccca

SEQ ID NO: 87907 - DNA, 13 bp, Artificial Sequence
  Oligonucleotide for detection of SNP TSC0022096
tgggggagaggtt

SEQ ID NO: 87908 - DNA, 13 bp, Artificial Sequence
  Oligonucleotide for detection of SNP TSC0022096
aacctctccccca

SEQ ID NO: 87909 - DNA, 13 bp, Artificial Sequence
  Oligonucleotide for detection of SNP TSC0022097
ggtaatataattt

SEQ ID NO: 87910 - DNA, 13 bp, Artificial Sequence
  Oligonucleotide for detection of SNP TSC0022097
aaattatattacc

SEQ ID NO: 87911 - DNA, 13 bp, Artificial Sequence
  Oligonucleotide for detection of SNP TSC0022097
ggtaatttaattt

SEQ ID NO: 87912 - DNA, 13 bp, Artificial Sequence
  Oligonucleotide for detection of SNP TSC0022097
aaattaaattacc

SEQ ID NO: 87913 - DNA, 13 bp, Artificial Sequence
  Oligonucleotide for detection of SNP TSC0022097
aggttatattaty

SEQ ID NO: 87914 - DNA, 13 bp, Artificial Sequence
  Oligonucleotide for detection of SNP TSC0022097
rataatataacct

SEQ ID NO: 87915 - DNA, 13 bp, Artificial Sequence
  Oligonucleotide for detection of SNP TSC0022097
aggttaaattaty

SEQ ID NO: 87916 - DNA, 13 bp, Artificial Sequence
  Oligonucleotide for detection of SNP TSC0022097
rataatttaacct

SEQ ID NO: 87917 - DNA, 13 bp, Artificial Sequence
  Oligonucleotide for detection of SNP TSC0022099
ttagtagttggaa

SEQ ID NO: 87918 - DNA, 13 bp, Artificial Sequence
  Oligonucleotide for detection of SNP TSC0022099
ttccaactactaa

SEQ ID NO: 87919 - DNA, 13 bp, Artificial Sequence
  Oligonucleotide for detection of SNP TSC0022099
ttagtatttggaa

SEQ ID NO: 87920 - DNA, 13 bp, Artificial Sequence
  Oligonucleotide for detection of SNP TSC0022099
ttccaaatactaa

SEQ ID NO: 87921 - DNA, 13 bp, Artificial Sequence
  Oligonucleotide for detection of SNP TSC0022099
ttttagttattag

SEQ ID NO: 87922 - DNA, 13 bp, Artificial Sequence
  Oligonucleotide for detection of SNP TSC0022099
ctaataactaaaa

SEQ ID NO: 87923 - DNA, 13 bp, Artificial Sequence
  Oligonucleotide for detection of SNP TSC0022099
ttttagatattag

SEQ ID NO: 87924 - DNA, 13 bp, Artificial Sequence
  Oligonucleotide for detection of SNP TSC0022099
ctaatatctaaaa

SEQ ID NO: 87925 - DNA, 13 bp, Artificial Sequence
  Oligonucleotide for detection of SNP TSC0022100
tggattattagtg

SEQ ID NO: 87926 - DNA, 13 bp, Artificial Sequence
  Oligonucleotide for detection of SNP TSC0022100
cactaataatcca

SEQ ID NO: 87927 - DNA, 13 bp, Artificial Sequence
  Oligonucleotide for detection of SNP TSC0022100
tggattgttagtg

SEQ ID NO: 87928 - DNA, 13 bp, Artificial Sequence
  Oligonucleotide for detection of SNP TSC0022100
cactaacaatcca

SEQ ID NO: 87929 - DNA, 13 bp, Artificial Sequence
  Oligonucleotide for detection of SNP TSC0022100
cggattattagtg

SEQ ID NO: 87930 - DNA, 13 bp, Artificial Sequence
  Oligonucleotide for detection of SNP TSC0022100
cactaataatccg

SEQ ID NO: 87931 - DNA, 13 bp, Artificial Sequence
  Oligonucleotide for detection of SNP TSC0022100
cggattgttagtg

SEQ ID NO: 87932 - DNA, 13 bp, Artificial Sequence
  Oligonucleotide for detection of SNP TSC0022100
cactaacaatccg

SEQ ID NO: 87933 - DNA, 13 bp, Artificial Sequence
  Oligonucleotide for detection of SNP TSC0022101
gttttaagaataa

SEQ ID NO: 87934 - DNA, 13 bp, Artificial Sequence
  Oligonucleotide for detection of SNP TSC0022101
ttattcttaaaac

SEQ ID NO: 87935 - DNA, 13 bp, Artificial Sequence
  Oligonucleotide for detection of SNP TSC0022101
gttttaggaataa

SEQ ID NO: 87936 - DNA, 13 bp, Artificial Sequence
  Oligonucleotide for detection of SNP TSC0022101
ttattcctaaaac

SEQ ID NO: 87937 - DNA, 13 bp, Artificial Sequence
  Oligonucleotide for detection of SNP TSC0022102
gttgatgggggtt

SEQ ID NO: 87938 - DNA, 13 bp, Artificial Sequence
  Oligonucleotide for detection of SNP TSC0022102
aacccccatcaac

SEQ ID NO: 87939 - DNA, 13 bp, Artificial Sequence
  Oligonucleotide for detection of SNP TSC0022102
gttgataggggtt

SEQ ID NO: 87940 - DNA, 13 bp, Artificial Sequence
  Oligonucleotide for detection of SNP TSC0022102
aacccctatcaac

SEQ ID NO: 87941 - DNA, 13 bp, Artificial Sequence
  Oligonucleotide for detection of SNP TSC0022103
tgtttttgatgtt

SEQ ID NO: 87942 - DNA, 13 bp, Artificial Sequence
  Oligonucleotide for detection of SNP TSC0022103
aacatcaaaaaca

SEQ ID NO: 87943 - DNA, 13 bp, Artificial Sequence
  Oligonucleotide for detection of SNP TSC0022103
tgttttcgatgtt

SEQ ID NO: 87944 - DNA, 13 bp, Artificial Sequence
  Oligonucleotide for detection of SNP TSC0022103
aacatcgaaaaca

SEQ ID NO: 87945 - DNA, 13 bp, Artificial Sequence
  Oligonucleotide for detection of SNP TSC0022103
aatattgaaggta

SEQ ID NO: 87946 - DNA, 13 bp, Artificial Sequence
  Oligonucleotide for detection of SNP TSC0022103
taccttcaatatt

SEQ ID NO: 87947 - DNA, 13 bp, Artificial Sequence
  Oligonucleotide for detection of SNP TSC0022103
aatattaaaggta

SEQ ID NO: 87948 - DNA, 13 bp, Artificial Sequence
  Oligonucleotide for detection of SNP TSC0022103
tacctttaatatt

SEQ ID NO: 87949 - DNA, 13 bp, Artificial Sequence
  Oligonucleotide for detection of SNP TSC0022103
aatatcgaaggta

SEQ ID NO: 87950 - DNA, 13 bp, Artificial Sequence
  Oligonucleotide for detection of SNP TSC0022103
taccttcgatatt

SEQ ID NO: 87951 - DNA, 13 bp, Artificial Sequence
  Oligonucleotide for detection of SNP TSC0022105
tgatggtgagtga

SEQ ID NO: 87952 - DNA, 13 bp, Artificial Sequence
  Oligonucleotide for detection of SNP TSC0022105
tcactcaccatca

SEQ ID NO: 87953 - DNA, 13 bp, Artificial Sequence
  Oligonucleotide for detection of SNP TSC0022105
tgatggcgagtga

SEQ ID NO: 87954 - DNA, 13 bp, Artificial Sequence
  Oligonucleotide for detection of SNP TSC0022105
tcactcgccatca

SEQ ID NO: 87955 - DNA, 13 bp, Artificial Sequence
  Oligonucleotide for detection of SNP TSC0022106
aaagaagaaattg

SEQ ID NO: 87956 - DNA, 13 bp, Artificial Sequence
  Oligonucleotide for detection of SNP TSC0022106
caatttcttcttt

SEQ ID NO: 87957 - DNA, 13 bp, Artificial Sequence
  Oligonucleotide for detection of SNP TSC0022106
aaagaaaaaattg

SEQ ID NO: 87958 - DNA, 13 bp, Artificial Sequence
  Oligonucleotide for detection of SNP TSC0022106
caattttttcttt

SEQ ID NO: 87959 - DNA, 13 bp, Artificial Sequence
  Oligonucleotide for detection of SNP TSC0022106
aaagaagaaatcg

SEQ ID NO: 87960 - DNA, 13 bp, Artificial Sequence
  Oligonucleotide for detection of SNP TSC0022106
cgatttcttcttt

SEQ ID NO: 87961 - DNA, 13 bp, Artificial Sequence
  Oligonucleotide for detection of SNP TSC0022106
aaagaaaaaatcg

SEQ ID NO: 87962 - DNA, 13 bp, Artificial Sequence
  Oligonucleotide for detection of SNP TSC0022106
cgattttttcttt

SEQ ID NO: 87963 - DNA, 13 bp, Artificial Sequence
  Oligonucleotide for detection of SNP TSC0022108
gttgggagaattt

SEQ ID NO: 87964 - DNA, 13 bp, Artificial Sequence
  Oligonucleotide for detection of SNP TSC0022108
aaattctcccaac

SEQ ID NO: 87965 - DNA, 13 bp, Artificial Sequence
  Oligonucleotide for detection of SNP TSC0022108
gttgggggaattt

SEQ ID NO: 87966 - DNA, 13 bp, Artificial Sequence
  Oligonucleotide for detection of SNP TSC0022108
aaattcccccaac

SEQ ID NO: 87967 - DNA, 13 bp, Artificial Sequence
  Oligonucleotide for detection of SNP TSC0022109
tttggaaaaggag

SEQ ID NO: 87968 - DNA, 13 bp, Artificial Sequence
  Oligonucleotide for detection of SNP TSC0022109
ctccttttccaaa

SEQ ID NO: 87969 - DNA, 13 bp, Artificial Sequence
  Oligonucleotide for detection of SNP TSC0022109
tttggagaaggag

SEQ ID NO: 87970 - DNA, 13 bp, Artificial Sequence
  Oligonucleotide for detection of SNP TSC0022109
ctccttctccaaa

SEQ ID NO: 87971 - DNA, 13 bp, Artificial Sequence
  Oligonucleotide for detection of SNP TSC0022110
gttgttattttta

SEQ ID NO: 87972 - DNA, 13 bp, Artificial Sequence
  Oligonucleotide for detection of SNP TSC0022110
taaaaataacaac

SEQ ID NO: 87973 - DNA, 13 bp, Artificial Sequence
  Oligonucleotide for detection of SNP TSC0022110
gttgtttttttta

SEQ ID NO: 87974 - DNA, 13 bp, Artificial Sequence
  Oligonucleotide for detection of SNP TSC0022110
taaaaaaaacaac

SEQ ID NO: 87975 - DNA, 13 bp, Artificial Sequence
  Oligonucleotide for detection of SNP TSC0022110
taaaagtagtaay

SEQ ID NO: 87976 - DNA, 13 bp, Artificial Sequence
  Oligonucleotide for detection of SNP TSC0022110
rttactactttta

SEQ ID NO: 87977 - DNA, 13 bp, Artificial Sequence
  Oligonucleotide for detection of SNP TSC0022110
taaaaggagtaay

SEQ ID NO: 87978 - DNA, 13 bp, Artificial Sequence
  Oligonucleotide for detection of SNP TSC0022110
rttactcctttta

SEQ ID NO: 87979 - DNA, 13 bp, Artificial Sequence
  Oligonucleotide for detection of SNP TSC0022113
attttaagtatta

SEQ ID NO: 87980 - DNA, 13 bp, Artificial Sequence
  Oligonucleotide for detection of SNP TSC0022113
taatacttaaaat

SEQ ID NO: 87981 - DNA, 13 bp, Artificial Sequence
  Oligonucleotide for detection of SNP TSC0022113
attttaggtatta

SEQ ID NO: 87982 - DNA, 13 bp, Artificial Sequence
  Oligonucleotide for detection of SNP TSC0022113
taatacctaaaat

SEQ ID NO: 87983 - DNA, 13 bp, Artificial Sequence
  Oligonucleotide for detection of SNP TSC0022114
atttttgatattt

SEQ ID NO: 87984 - DNA, 13 bp, Artificial Sequence
  Oligonucleotide for detection of SNP TSC0022114
aaatatcaaaaat

SEQ ID NO: 87985 - DNA, 13 bp, Artificial Sequence
  Oligonucleotide for detection of SNP TSC0022114
attttttatattt

SEQ ID NO: 87986 - DNA, 13 bp, Artificial Sequence
  Oligonucleotide for detection of SNP TSC0022114
aaatataaaaaat

SEQ ID NO: 87987 - DNA, 13 bp, Artificial Sequence
  Oligonucleotide for detection of SNP TSC0022114
aaatattaaaaat

SEQ ID NO: 87988 - DNA, 13 bp, Artificial Sequence
  Oligonucleotide for detection of SNP TSC0022114
atttttaatattt

SEQ ID NO: 87989 - DNA, 13 bp, Artificial Sequence
  Oligonucleotide for detection of SNP TSC0022118
tgttaaggtaaay

SEQ ID NO: 87990 - DNA, 13 bp, Artificial Sequence
  Oligonucleotide for detection of SNP TSC0022118
rtttaccttaaca

SEQ ID NO: 87991 - DNA, 13 bp, Artificial Sequence
  Oligonucleotide for detection of SNP TSC0022118
tgttaaagtaaay

SEQ ID NO: 87992 - DNA, 13 bp, Artificial Sequence
  Oligonucleotide for detection of SNP TSC0022118
rtttactttaaca

SEQ ID NO: 87993 - DNA, 13 bp, Artificial Sequence
  Oligonucleotide for detection of SNP TSC0022119
ttgtttatgattt

SEQ ID NO: 87994 - DNA, 13 bp, Artificial Sequence
  Oligonucleotide for detection of SNP TSC0022119
aaatcataaacaa

SEQ ID NO: 87995 - DNA, 13 bp, Artificial Sequence
  Oligonucleotide for detection of SNP TSC0022119
aagttataagtaa

SEQ ID NO: 87996 - DNA, 13 bp, Artificial Sequence
  Oligonucleotide for detection of SNP TSC0022119
ttacttataactt

SEQ ID NO: 87997 - DNA, 13 bp, Artificial Sequence
  Oligonucleotide for detection of SNP TSC0022119
aagttaaaagtaa

SEQ ID NO: 87998 - DNA, 13 bp, Artificial Sequence
  Oligonucleotide for detection of SNP TSC0022119
ttacttttaactt

SEQ ID NO: 87999 - DNA, 13 bp, Artificial Sequence
  Oligonucleotide for detection of SNP TSC0022120
aggagataaggag

SEQ ID NO: 88000 - DNA, 13 bp, Artificial Sequence
  Oligonucleotide for detection of SNP TSC0022120
ctccttatctcct

SEQ ID NO: 88001 - DNA, 13 bp, Artificial Sequence
  Oligonucleotide for detection of SNP TSC0022120
aggagagaaggag

SEQ ID NO: 88002 - DNA, 13 bp, Artificial Sequence
  Oligonucleotide for detection of SNP TSC0022120
ctccttctctcct

SEQ ID NO: 88003 - DNA, 13 bp, Artificial Sequence
  Oligonucleotide for detection of SNP TSC0022128
gtttggagtggta

SEQ ID NO: 88004 - DNA, 13 bp, Artificial Sequence
  Oligonucleotide for detection of SNP TSC0022128
taccactccaaac

SEQ ID NO: 88005 - DNA, 13 bp, Artificial Sequence
  Oligonucleotide for detection of SNP TSC0022128
gtttggtgtggta

SEQ ID NO: 88006 - DNA, 13 bp, Artificial Sequence
  Oligonucleotide for detection of SNP TSC0022128
taccacaccaaac

SEQ ID NO: 88007 - DNA, 13 bp, Artificial Sequence
  Oligonucleotide for detection of SNP TSC0022128
gttcggagtggta

SEQ ID NO: 88008 - DNA, 13 bp, Artificial Sequence
  Oligonucleotide for detection of SNP TSC0022128
taccactccgaac

SEQ ID NO: 88009 - DNA, 13 bp, Artificial Sequence
  Oligonucleotide for detection of SNP TSC0022128
gttcggtgtggta

SEQ ID NO: 88010 - DNA, 13 bp, Artificial Sequence
  Oligonucleotide for detection of SNP TSC0022128
taccacaccgaac

SEQ ID NO: 88011 - DNA, 13 bp, Artificial Sequence
  Oligonucleotide for detection of SNP TSC0022128
tgttattttgggy

SEQ ID NO: 88012 - DNA, 13 bp, Artificial Sequence
  Oligonucleotide for detection of SNP TSC0022128
rcccaaaataaca

SEQ ID NO: 88013 - DNA, 13 bp, Artificial Sequence
  Oligonucleotide for detection of SNP TSC0022128
tgttatattgggy

SEQ ID NO: 88014 - DNA, 13 bp, Artificial Sequence
  Oligonucleotide for detection of SNP TSC0022128
rcccaatataaca

SEQ ID NO: 88015 - DNA, 13 bp, Artificial Sequence
  Oligonucleotide for detection of SNP TSC0022128
tgttatttcgggy

SEQ ID NO: 88016 - DNA, 13 bp, Artificial Sequence
  Oligonucleotide for detection of SNP TSC0022128
rcccgaaataaca

SEQ ID NO: 88017 - DNA, 13 bp, Artificial Sequence
  Oligonucleotide for detection of SNP TSC0022128
tgttatatcgggy

SEQ ID NO: 88018 - DNA, 13 bp, Artificial Sequence
  Oligonucleotide for detection of SNP TSC0022128
rcccgatataaca

SEQ ID NO: 88019 - DNA, 13 bp, Artificial Sequence
  Oligonucleotide for detection of SNP TSC0022129
aaataagttagta

SEQ ID NO: 88020 - DNA, 13 bp, Artificial Sequence
  Oligonucleotide for detection of SNP TSC0022129
tactaacttattt

SEQ ID NO: 88021 - DNA, 13 bp, Artificial Sequence
  Oligonucleotide for detection of SNP TSC0022129
aaataaattagta

SEQ ID NO: 88022 - DNA, 13 bp, Artificial Sequence
  Oligonucleotide for detection of SNP TSC0022129
tactaatttattt

SEQ ID NO: 88023 - DNA, 13 bp, Artificial Sequence
  Oligonucleotide for detection of SNP TSC0022130
ttgttttgtgttg

SEQ ID NO: 88024 - DNA, 13 bp, Artificial Sequence
  Oligonucleotide for detection of SNP TSC0022130
caacacaaaacaa

SEQ ID NO: 88025 - DNA, 13 bp, Artificial Sequence
  Oligonucleotide for detection of SNP TSC0022130
ttgtttcgtgttg

SEQ ID NO: 88026 - DNA, 13 bp, Artificial Sequence
  Oligonucleotide for detection of SNP TSC0022130
caacacgaaacaa

SEQ ID NO: 88027 - DNA, 13 bp, Artificial Sequence
  Oligonucleotide for detection of SNP TSC0022130
taatatggagtaa

SEQ ID NO: 88028 - DNA, 13 bp, Artificial Sequence
  Oligonucleotide for detection of SNP TSC0022130
ttactccatatta

SEQ ID NO: 88029 - DNA, 13 bp, Artificial Sequence
  Oligonucleotide for detection of SNP TSC0022130
taatatagagtaa

SEQ ID NO: 88030 - DNA, 13 bp, Artificial Sequence
  Oligonucleotide for detection of SNP TSC0022130
ttactctatatta

SEQ ID NO: 88031 - DNA, 13 bp, Artificial Sequence
  Oligonucleotide for detection of SNP TSC0022130
taatacggagtaa

SEQ ID NO: 88032 - DNA, 13 bp, Artificial Sequence
  Oligonucleotide for detection of SNP TSC0022130
ttactccgtatta

SEQ ID NO: 88033 - DNA, 13 bp, Artificial Sequence
  Oligonucleotide for detection of SNP TSC0022131
tgagtgattagaa

SEQ ID NO: 88034 - DNA, 13 bp, Artificial Sequence
  Oligonucleotide for detection of SNP TSC0022131
ttctaatcactca

SEQ ID NO: 88035 - DNA, 13 bp, Artificial Sequence
  Oligonucleotide for detection of SNP TSC0022131
tgagtggttagaa

SEQ ID NO: 88036 - DNA, 13 bp, Artificial Sequence
  Oligonucleotide for detection of SNP TSC0022131
ttctaaccactca

SEQ ID NO: 88037 - DNA, 13 bp, Artificial Sequence
  Oligonucleotide for detection of SNP TSC0022132
gttgggaggggty

SEQ ID NO: 88038 - DNA, 13 bp, Artificial Sequence
  Oligonucleotide for detection of SNP TSC0022132
racccctcccaac

SEQ ID NO: 88039 - DNA, 13 bp, Artificial Sequence
  Oligonucleotide for detection of SNP TSC0022132
gttggggggggty

SEQ ID NO: 88040 - DNA, 13 bp, Artificial Sequence
  Oligonucleotide for detection of SNP TSC0022132
raccccccccaac

SEQ ID NO: 88041 - DNA, 13 bp, Artificial Sequence
  Oligonucleotide for detection of SNP TSC0022134
agattagtttggy

SEQ ID NO: 88042 - DNA, 13 bp, Artificial Sequence
  Oligonucleotide for detection of SNP TSC0022134
rccaaactaatct

SEQ ID NO: 88043 - DNA, 13 bp, Artificial Sequence
  Oligonucleotide for detection of SNP TSC0022134
agattattttggy

SEQ ID NO: 88044 - DNA, 13 bp, Artificial Sequence
  Oligonucleotide for detection of SNP TSC0022134
rccaaaataatct

SEQ ID NO: 88045 - DNA, 13 bp, Artificial Sequence
  Oligonucleotide for detection of SNP TSC0022134
gttaggttggttt

SEQ ID NO: 88046 - DNA, 13 bp, Artificial Sequence
  Oligonucleotide for detection of SNP TSC0022134
aaaccaacctaac

SEQ ID NO: 88047 - DNA, 13 bp, Artificial Sequence
  Oligonucleotide for detection of SNP TSC0022134
gttaggatggttt

SEQ ID NO: 88048 - DNA, 13 bp, Artificial Sequence
  Oligonucleotide for detection of SNP TSC0022134
aaaccatcctaac

SEQ ID NO: 88049 - DNA, 13 bp, Artificial Sequence
  Oligonucleotide for detection of SNP TSC0022135
ttttatggaaaaa

SEQ ID NO: 88050 - DNA, 13 bp, Artificial Sequence
  Oligonucleotide for detection of SNP TSC0022135
tttttccataaaa

SEQ ID NO: 88051 - DNA, 13 bp, Artificial Sequence
  Oligonucleotide for detection of SNP TSC0022135
ttttattgaaaaa

SEQ ID NO: 88052 - DNA, 13 bp, Artificial Sequence
  Oligonucleotide for detection of SNP TSC0022135
tttttcaataaaa

SEQ ID NO: 88053 - DNA, 13 bp, Artificial Sequence
  Oligonucleotide for detection of SNP TSC0022135
ttttacggaaaaa

SEQ ID NO: 88054 - DNA, 13 bp, Artificial Sequence
  Oligonucleotide for detection of SNP TSC0022135
tttttccgtaaaa

SEQ ID NO: 88055 - DNA, 13 bp, Artificial Sequence
  Oligonucleotide for detection of SNP TSC0022135
ttttttagtagag

SEQ ID NO: 88056 - DNA, 13 bp, Artificial Sequence
  Oligonucleotide for detection of SNP TSC0022135
ctctactaaaaaa

SEQ ID NO: 88057 - DNA, 13 bp, Artificial Sequence
  Oligonucleotide for detection of SNP TSC0022137
ttttaatgttatg

SEQ ID NO: 88058 - DNA, 13 bp, Artificial Sequence
  Oligonucleotide for detection of SNP TSC0022137
cataacattaaaa

SEQ ID NO: 88059 - DNA, 13 bp, Artificial Sequence
  Oligonucleotide for detection of SNP TSC0022137
ttttaacgttatg

SEQ ID NO: 88060 - DNA, 13 bp, Artificial Sequence
  Oligonucleotide for detection of SNP TSC0022137
cataacgttaaaa

SEQ ID NO: 88061 - DNA, 13 bp, Artificial Sequence
  Oligonucleotide for detection of SNP TSC0022137
tatgatgttgagg

SEQ ID NO: 88062 - DNA, 13 bp, Artificial Sequence
  Oligonucleotide for detection of SNP TSC0022137
cctcaacatcata

SEQ ID NO: 88063 - DNA, 13 bp, Artificial Sequence
  Oligonucleotide for detection of SNP TSC0022137
tatgatattgagg

SEQ ID NO: 88064 - DNA, 13 bp, Artificial Sequence
  Oligonucleotide for detection of SNP TSC0022137
cctcaatatcata

SEQ ID NO: 88065 - DNA, 13 bp, Artificial Sequence
  Oligonucleotide for detection of SNP TSC0022137
tatgacgttgagg

SEQ ID NO: 88066 - DNA, 13 bp, Artificial Sequence
  Oligonucleotide for detection of SNP TSC0022137
cctcaacgtcata

SEQ ID NO: 88067 - DNA, 13 bp, Artificial Sequence
  Oligonucleotide for detection of SNP TSC0022140
agagatggagttt

SEQ ID NO: 88068 - DNA, 13 bp, Artificial Sequence
  Oligonucleotide for detection of SNP TSC0022140
aaactccatctct

SEQ ID NO: 88069 - DNA, 13 bp, Artificial Sequence
  Oligonucleotide for detection of SNP TSC0022140
agagatagagttt

SEQ ID NO: 88070 - DNA, 13 bp, Artificial Sequence
  Oligonucleotide for detection of SNP TSC0022140
aaactctatctct

SEQ ID NO: 88071 - DNA, 13 bp, Artificial Sequence
  Oligonucleotide for detection of SNP TSC0022141
aaaattgatgtga

SEQ ID NO: 88072 - DNA, 13 bp, Artificial Sequence
  Oligonucleotide for detection of SNP TSC0022141
tcacatcaatttt

SEQ ID NO: 88073 - DNA, 13 bp, Artificial Sequence
  Oligonucleotide for detection of SNP TSC0022141
aaaatttatgtga

SEQ ID NO: 88074 - DNA, 13 bp, Artificial Sequence
  Oligonucleotide for detection of SNP TSC0022141
tcacataaatttt

SEQ ID NO: 88075 - DNA, 13 bp, Artificial Sequence
  Oligonucleotide for detection of SNP TSC0022141
aaaatcgatgtga

SEQ ID NO: 88076 - DNA, 13 bp, Artificial Sequence
  Oligonucleotide for detection of SNP TSC0022141
tcacatcgatttt

SEQ ID NO: 88077 - DNA, 13 bp, Artificial Sequence
  Oligonucleotide for detection of SNP TSC0022141
ttatattggtttt

SEQ ID NO: 88078 - DNA, 13 bp, Artificial Sequence
  Oligonucleotide for detection of SNP TSC0022141
aaaaccaatataa

SEQ ID NO: 88079 - DNA, 13 bp, Artificial Sequence
  Oligonucleotide for detection of SNP TSC0022141
ttatataggtttt

SEQ ID NO: 88080 - DNA, 13 bp, Artificial Sequence
  Oligonucleotide for detection of SNP TSC0022141
aaaacctatataa

SEQ ID NO: 88081 - DNA, 13 bp, Artificial Sequence
  Oligonucleotide for detection of SNP TSC0022141
ttatatcggtttt

SEQ ID NO: 88082 - DNA, 13 bp, Artificial Sequence
  Oligonucleotide for detection of SNP TSC0022141
aaaaccgatataa

SEQ ID NO: 88083 - DNA, 13 bp, Artificial Sequence
  Oligonucleotide for detection of SNP TSC0022144
gaaataatgttaa

SEQ ID NO: 88084 - DNA, 13 bp, Artificial Sequence
  Oligonucleotide for detection of SNP TSC0022144
ttaacattatttc

SEQ ID NO: 88085 - DNA, 13 bp, Artificial Sequence
  Oligonucleotide for detection of SNP TSC0022144
gaaatagtgttaa

SEQ ID NO: 88086 - DNA, 13 bp, Artificial Sequence
  Oligonucleotide for detection of SNP TSC0022144
ttaacactatttc

SEQ ID NO: 88087 - DNA, 13 bp, Artificial Sequence
  Oligonucleotide for detection of SNP TSC0022147
ggtttgggaaatt

SEQ ID NO: 88088 - DNA, 13 bp, Artificial Sequence
  Oligonucleotide for detection of SNP TSC0022147
aatttcccaaacc

SEQ ID NO: 88089 - DNA, 13 bp, Artificial Sequence
  Oligonucleotide for detection of SNP TSC0022147
ggtttgagaaatt

SEQ ID NO: 88090 - DNA, 13 bp, Artificial Sequence
  Oligonucleotide for detection of SNP TSC0022147
aatttctcaaacc

SEQ ID NO: 88091 - DNA, 13 bp, Artificial Sequence
  Oligonucleotide for detection of SNP TSC0022147
ggttcgggaaatt

SEQ ID NO: 88092 - DNA, 13 bp, Artificial Sequence
  Oligonucleotide for detection of SNP TSC0022147
aatttcccgaacc

SEQ ID NO: 88093 - DNA, 13 bp, Artificial Sequence
  Oligonucleotide for detection of SNP TSC0022147
ggttcgagaaatt

SEQ ID NO: 88094 - DNA, 13 bp, Artificial Sequence
  Oligonucleotide for detection of SNP TSC0022147
aatttctcgaacc

SEQ ID NO: 88095 - DNA, 13 bp, Artificial Sequence
  Oligonucleotide for detection of SNP TSC0022148
tgtgtttgtatgt

SEQ ID NO: 88096 - DNA, 13 bp, Artificial Sequence
  Oligonucleotide for detection of SNP TSC0022148
acatacaaacaca

SEQ ID NO: 88097 - DNA, 13 bp, Artificial Sequence
  Oligonucleotide for detection of SNP TSC0022148
tgtgttcgtatgt

SEQ ID NO: 88098 - DNA, 13 bp, Artificial Sequence
  Oligonucleotide for detection of SNP TSC0022148
acatacgaacaca

SEQ ID NO: 88099 - DNA, 13 bp, Artificial Sequence
  Oligonucleotide for detection of SNP TSC0022148
atatatggatata

SEQ ID NO: 88100 - DNA, 13 bp, Artificial Sequence
  Oligonucleotide for detection of SNP TSC0022148
tatatccatatat

SEQ ID NO: 88101 - DNA, 13 bp, Artificial Sequence
  Oligonucleotide for detection of SNP TSC0022148
atatatagatata

SEQ ID NO: 88102 - DNA, 13 bp, Artificial Sequence
  Oligonucleotide for detection of SNP TSC0022148
tatatctatatat

SEQ ID NO: 88103 - DNA, 13 bp, Artificial Sequence
  Oligonucleotide for detection of SNP TSC0022148
atatacggatata

SEQ ID NO: 88104 - DNA, 13 bp, Artificial Sequence
  Oligonucleotide for detection of SNP TSC0022148
tatatccgtatat

SEQ ID NO: 88105 - DNA, 13 bp, Artificial Sequence
  Oligonucleotide for detection of SNP TSC0022152
gtgtattggtagt

SEQ ID NO: 88106 - DNA, 13 bp, Artificial Sequence
  Oligonucleotide for detection of SNP TSC0022152
actaccaatacac

SEQ ID NO: 88107 - DNA, 13 bp, Artificial Sequence
  Oligonucleotide for detection of SNP TSC0022152
gtgtatcggtagt

SEQ ID NO: 88108 - DNA, 13 bp, Artificial Sequence
  Oligonucleotide for detection of SNP TSC0022152
actaccgatacac

SEQ ID NO: 88109 - DNA, 13 bp, Artificial Sequence
  Oligonucleotide for detection of SNP TSC0022152
attattggtgtay

SEQ ID NO: 88110 - DNA, 13 bp, Artificial Sequence
  Oligonucleotide for detection of SNP TSC0022152
rtacaccaataat

SEQ ID NO: 88111 - DNA, 13 bp, Artificial Sequence
  Oligonucleotide for detection of SNP TSC0022152
attattagtgtay

SEQ ID NO: 88112 - DNA, 13 bp, Artificial Sequence
  Oligonucleotide for detection of SNP TSC0022152
rtacactaataat

SEQ ID NO: 88113 - DNA, 13 bp, Artificial Sequence
  Oligonucleotide for detection of SNP TSC0022152
attatcggtgtay

SEQ ID NO: 88114 - DNA, 13 bp, Artificial Sequence
  Oligonucleotide for detection of SNP TSC0022152
rtacaccgataat

SEQ ID NO: 88115 - DNA, 13 bp, Artificial Sequence
  Oligonucleotide for detection of SNP TSC0022153
gaaaagtggaggy

SEQ ID NO: 88116 - DNA, 13 bp, Artificial Sequence
  Oligonucleotide for detection of SNP TSC0022153
rcctccacttttc

SEQ ID NO: 88117 - DNA, 13 bp, Artificial Sequence
  Oligonucleotide for detection of SNP TSC0022153
gaaaagcggaggy

SEQ ID NO: 88118 - DNA, 13 bp, Artificial Sequence
  Oligonucleotide for detection of SNP TSC0022153
rcctccgcttttc

SEQ ID NO: 88119 - DNA, 13 bp, Artificial Sequence
  Oligonucleotide for detection of SNP TSC0022154
aaagtgatttttt

SEQ ID NO: 88120 - DNA, 13 bp, Artificial Sequence
  Oligonucleotide for detection of SNP TSC0022154
aaaaaatcacttt

SEQ ID NO: 88121 - DNA, 13 bp, Artificial Sequence
  Oligonucleotide for detection of SNP TSC0022154
aaagtggtttttt

SEQ ID NO: 88122 - DNA, 13 bp, Artificial Sequence
  Oligonucleotide for detection of SNP TSC0022154
aaaaaaccacttt

SEQ ID NO: 88123 - DNA, 13 bp, Artificial Sequence
  Oligonucleotide for detection of SNP TSC0022158
aataaagttatga

SEQ ID NO: 88124 - DNA, 13 bp, Artificial Sequence
  Oligonucleotide for detection of SNP TSC0022158
tcataactttatt

SEQ ID NO: 88125 - DNA, 13 bp, Artificial Sequence
  Oligonucleotide for detection of SNP TSC0022158
aataaaattatga

SEQ ID NO: 88126 - DNA, 13 bp, Artificial Sequence
  Oligonucleotide for detection of SNP TSC0022158
tcataattttatt

SEQ ID NO: 88127 - DNA, 13 bp, Artificial Sequence
  Oligonucleotide for detection of SNP TSC0022159
aaagatattgtty

SEQ ID NO: 88128 - DNA, 13 bp, Artificial Sequence
  Oligonucleotide for detection of SNP TSC0022159
raacaatatcttt

SEQ ID NO: 88129 - DNA, 13 bp, Artificial Sequence
  Oligonucleotide for detection of SNP TSC0022159
aaagatgttgtty

SEQ ID NO: 88130 - DNA, 13 bp, Artificial Sequence
  Oligonucleotide for detection of SNP TSC0022159
raacaacatcttt

SEQ ID NO: 88131 - DNA, 13 bp, Artificial Sequence
  Oligonucleotide for detection of SNP TSC0022159
aaagacgttgtty

SEQ ID NO: 88132 - DNA, 13 bp, Artificial Sequence
  Oligonucleotide for detection of SNP TSC0022159
raacaacgtcttt

SEQ ID NO: 88133 - DNA, 13 bp, Artificial Sequence
  Oligonucleotide for detection of SNP TSC0022159
ggataatgttttt

SEQ ID NO: 88134 - DNA, 13 bp, Artificial Sequence
  Oligonucleotide for detection of SNP TSC0022159
aaaaacattatcc

SEQ ID NO: 88135 - DNA, 13 bp, Artificial Sequence
  Oligonucleotide for detection of SNP TSC0022159
ggataacgttttt

SEQ ID NO: 88136 - DNA, 13 bp, Artificial Sequence
  Oligonucleotide for detection of SNP TSC0022159
aaaaacgttatcc

SEQ ID NO: 88137 - DNA, 13 bp, Artificial Sequence
  Oligonucleotide for detection of SNP TSC0022160
ttatatatatgta

SEQ ID NO: 88138 - DNA, 13 bp, Artificial Sequence
  Oligonucleotide for detection of SNP TSC0022160
tacatatatataa

SEQ ID NO: 88139 - DNA, 13 bp, Artificial Sequence
  Oligonucleotide for detection of SNP TSC0022160
ttatatgtatgta

SEQ ID NO: 88140 - DNA, 13 bp, Artificial Sequence
  Oligonucleotide for detection of SNP TSC0022160
tacatacatataa

SEQ ID NO: 88141 - DNA, 13 bp, Artificial Sequence
  Oligonucleotide for detection of SNP TSC0022160
ttatacgtatgta

SEQ ID NO: 88142 - DNA, 13 bp, Artificial Sequence
  Oligonucleotide for detection of SNP TSC0022160
tacatacgtataa

SEQ ID NO: 88143 - DNA, 13 bp, Artificial Sequence
  Oligonucleotide for detection of SNP TSC0022160
tgtatgtgtatgg

SEQ ID NO: 88144 - DNA, 13 bp, Artificial Sequence
  Oligonucleotide for detection of SNP TSC0022160
ccatacacataca

SEQ ID NO: 88145 - DNA, 13 bp, Artificial Sequence
  Oligonucleotide for detection of SNP TSC0022160
tgtatgcgtatgg

SEQ ID NO: 88146 - DNA, 13 bp, Artificial Sequence
  Oligonucleotide for detection of SNP TSC0022160
ccatacgcataca

SEQ ID NO: 88147 - DNA, 13 bp, Artificial Sequence
  Oligonucleotide for detection of SNP TSC0022161
gtattgtgtgtay

SEQ ID NO: 88148 - DNA, 13 bp, Artificial Sequence
  Oligonucleotide for detection of SNP TSC0022161
rtacacacaatac

SEQ ID NO: 88149 - DNA, 13 bp, Artificial Sequence
  Oligonucleotide for detection of SNP TSC0022161
gtattgggtgtay

SEQ ID NO: 88150 - DNA, 13 bp, Artificial Sequence
  Oligonucleotide for detection of SNP TSC0022161
rtacacccaatac

SEQ ID NO: 88151 - DNA, 13 bp, Artificial Sequence
  Oligonucleotide for detection of SNP TSC0022161
gtattgcgtgtay

SEQ ID NO: 88152 - DNA, 13 bp, Artificial Sequence
  Oligonucleotide for detection of SNP TSC0022161
rtacacgcaatac

SEQ ID NO: 88153 - DNA, 13 bp, Artificial Sequence
  Oligonucleotide for detection of SNP TSC0022161
gtgtatgtagtay

SEQ ID NO: 88154 - DNA, 13 bp, Artificial Sequence
  Oligonucleotide for detection of SNP TSC0022161
rtactacatacac

SEQ ID NO: 88155 - DNA, 13 bp, Artificial Sequence
  Oligonucleotide for detection of SNP TSC0022161
gtgtatttagtay

SEQ ID NO: 88156 - DNA, 13 bp, Artificial Sequence
  Oligonucleotide for detection of SNP TSC0022161
rtactaaatacac

SEQ ID NO: 88157 - DNA, 13 bp, Artificial Sequence
  Oligonucleotide for detection of SNP TSC0022161
gtgtacgtagtay

SEQ ID NO: 88158 - DNA, 13 bp, Artificial Sequence
  Oligonucleotide for detection of SNP TSC0022161
rtactacgtacac

SEQ ID NO: 88159 - DNA, 13 bp, Artificial Sequence
  Oligonucleotide for detection of SNP TSC0022162
ggtttttttttgy

SEQ ID NO: 88160 - DNA, 13 bp, Artificial Sequence
  Oligonucleotide for detection of SNP TSC0022162
rcaaaaaaaaacc

SEQ ID NO: 88161 - DNA, 13 bp, Artificial Sequence
  Oligonucleotide for detection of SNP TSC0022162
ggttttgttttgy

SEQ ID NO: 88162 - DNA, 13 bp, Artificial Sequence
  Oligonucleotide for detection of SNP TSC0022162
rcaaaacaaaacc

SEQ ID NO: 88163 - DNA, 13 bp, Artificial Sequence
  Oligonucleotide for detection of SNP TSC0022162
ggttttttttcgy

SEQ ID NO: 88164 - DNA, 13 bp, Artificial Sequence
  Oligonucleotide for detection of SNP TSC0022162
rcgaaaaaaaacc

SEQ ID NO: 88165 - DNA, 13 bp, Artificial Sequence
  Oligonucleotide for detection of SNP TSC0022162
ggtttcgttttgy

SEQ ID NO: 88166 - DNA, 13 bp, Artificial Sequence
  Oligonucleotide for detection of SNP TSC0022162
rcaaaacgaaacc

SEQ ID NO: 88167 - DNA, 13 bp, Artificial Sequence
  Oligonucleotide for detection of SNP TSC0022162
ggttttgtttcgy

SEQ ID NO: 88168 - DNA, 13 bp, Artificial Sequence
  Oligonucleotide for detection of SNP TSC0022162
rcgaaacaaaacc

SEQ ID NO: 88169 - DNA, 13 bp, Artificial Sequence
  Oligonucleotide for detection of SNP TSC0022162
ggtttcgtttcgy

SEQ ID NO: 88170 - DNA, 13 bp, Artificial Sequence
  Oligonucleotide for detection of SNP TSC0022162
rcgaaacgaaacc

SEQ ID NO: 88171 - DNA, 13 bp, Artificial Sequence
  Oligonucleotide for detection of SNP TSC0022162
gtggaggggagty

SEQ ID NO: 88172 - DNA, 13 bp, Artificial Sequence
  Oligonucleotide for detection of SNP TSC0022162
ractcccctccac

SEQ ID NO: 88173 - DNA, 13 bp, Artificial Sequence
  Oligonucleotide for detection of SNP TSC0022162
gtggagtggagty

SEQ ID NO: 88174 - DNA, 13 bp, Artificial Sequence
  Oligonucleotide for detection of SNP TSC0022162
ractccactccac

SEQ ID NO: 88175 - DNA, 13 bp, Artificial Sequence
  Oligonucleotide for detection of SNP TSC0022162
gcggaggggagty

SEQ ID NO: 88176 - DNA, 13 bp, Artificial Sequence
  Oligonucleotide for detection of SNP TSC0022162
ractcccctccgc

SEQ ID NO: 88177 - DNA, 13 bp, Artificial Sequence
  Oligonucleotide for detection of SNP TSC0022162
gcggagtggagty

SEQ ID NO: 88178 - DNA, 13 bp, Artificial Sequence
  Oligonucleotide for detection of SNP TSC0022162
ractccactccgc

SEQ ID NO: 88179 - DNA, 13 bp, Artificial Sequence
  Oligonucleotide for detection of SNP TSC0022162
gtggagcggagty

SEQ ID NO: 88180 - DNA, 13 bp, Artificial Sequence
  Oligonucleotide for detection of SNP TSC0022162
ractccgctccac

SEQ ID NO: 88181 - DNA, 13 bp, Artificial Sequence
  Oligonucleotide for detection of SNP TSC0022162
gcggagcggagty

SEQ ID NO: 88182 - DNA, 13 bp, Artificial Sequence
  Oligonucleotide for detection of SNP TSC0022162
ractccgctccgc

SEQ ID NO: 88183 - DNA, 13 bp, Artificial Sequence
  Oligonucleotide for detection of SNP TSC0022165
ttttagtgggggy

SEQ ID NO: 88184 - DNA, 13 bp, Artificial Sequence
  Oligonucleotide for detection of SNP TSC0022165
rcccccactaaaa

SEQ ID NO: 88185 - DNA, 13 bp, Artificial Sequence
  Oligonucleotide for detection of SNP TSC0022165
ttttagcgggggy

SEQ ID NO: 88186 - DNA, 13 bp, Artificial Sequence
  Oligonucleotide for detection of SNP TSC0022165
rcccccgctaaaa

SEQ ID NO: 88187 - DNA, 13 bp, Artificial Sequence
  Oligonucleotide for detection of SNP TSC0022165
gtttttgttaggg

SEQ ID NO: 88188 - DNA, 13 bp, Artificial Sequence
  Oligonucleotide for detection of SNP TSC0022165
ccctaacaaaaac

SEQ ID NO: 88189 - DNA, 13 bp, Artificial Sequence
  Oligonucleotide for detection of SNP TSC0022165
gtttttattaggg

SEQ ID NO: 88190 - DNA, 13 bp, Artificial Sequence
  Oligonucleotide for detection of SNP TSC0022165
ccctaataaaaac

SEQ ID NO: 88191 - DNA, 13 bp, Artificial Sequence
  Oligonucleotide for detection of SNP TSC0022165
gttttcgttaggg

SEQ ID NO: 88192 - DNA, 13 bp, Artificial Sequence
  Oligonucleotide for detection of SNP TSC0022165
ccctaacgaaaac

SEQ ID NO: 88193 - DNA, 13 bp, Artificial Sequence
  Oligonucleotide for detection of SNP TSC0022166
tagagaagggagt

SEQ ID NO: 88194 - DNA, 13 bp, Artificial Sequence
  Oligonucleotide for detection of SNP TSC0022166
actcccttctcta

SEQ ID NO: 88195 - DNA, 13 bp, Artificial Sequence
  Oligonucleotide for detection of SNP TSC0022166
tagagatgggagt

SEQ ID NO: 88196 - DNA, 13 bp, Artificial Sequence
  Oligonucleotide for detection of SNP TSC0022166
actcccatctcta

SEQ ID NO: 88197 - DNA, 13 bp, Artificial Sequence
  Oligonucleotide for detection of SNP TSC0022166
tagagacgggagt

SEQ ID NO: 88198 - DNA, 13 bp, Artificial Sequence
  Oligonucleotide for detection of SNP TSC0022166
actcccgtctcta

SEQ ID NO: 88199 - DNA, 13 bp, Artificial Sequence
  Oligonucleotide for detection of SNP TSC0022166
attttcgtttttg

SEQ ID NO: 88200 - DNA, 13 bp, Artificial Sequence
  Oligonucleotide for detection of SNP TSC0022166
caaaaacgaaaat

SEQ ID NO: 88201 - DNA, 13 bp, Artificial Sequence
  Oligonucleotide for detection of SNP TSC0022167
agagaagggagty

SEQ ID NO: 88202 - DNA, 13 bp, Artificial Sequence
  Oligonucleotide for detection of SNP TSC0022167
ractcccttctct

SEQ ID NO: 88203 - DNA, 13 bp, Artificial Sequence
  Oligonucleotide for detection of SNP TSC0022167
agagaatggagty

SEQ ID NO: 88204 - DNA, 13 bp, Artificial Sequence
  Oligonucleotide for detection of SNP TSC0022167
ractccattctct

SEQ ID NO: 88205 - DNA, 13 bp, Artificial Sequence
  Oligonucleotide for detection of SNP TSC0022167
gattttttttttt

SEQ ID NO: 88206 - DNA, 13 bp, Artificial Sequence
  Oligonucleotide for detection of SNP TSC0022167
aaaaaaaaaaatc

SEQ ID NO: 88207 - DNA, 13 bp, Artificial Sequence
  Oligonucleotide for detection of SNP TSC0022167
gattttatttttt

SEQ ID NO: 88208 - DNA, 13 bp, Artificial Sequence
  Oligonucleotide for detection of SNP TSC0022167
aaaaaataaaatc

SEQ ID NO: 88209 - DNA, 13 bp, Artificial Sequence
  Oligonucleotide for detection of SNP TSC0022168
tttaggtggagtt

SEQ ID NO: 88210 - DNA, 13 bp, Artificial Sequence
  Oligonucleotide for detection of SNP TSC0022168
aactccacctaaa

SEQ ID NO: 88211 - DNA, 13 bp, Artificial Sequence
  Oligonucleotide for detection of SNP TSC0022168
tttaggcggagtt

SEQ ID NO: 88212 - DNA, 13 bp, Artificial Sequence
  Oligonucleotide for detection of SNP TSC0022168
aactccgcctaaa

SEQ ID NO: 88213 - DNA, 13 bp, Artificial Sequence
  Oligonucleotide for detection of SNP TSC0022168
aattttgtttagg

SEQ ID NO: 88214 - DNA, 13 bp, Artificial Sequence
  Oligonucleotide for detection of SNP TSC0022168
cctaaacaaaatt

SEQ ID NO: 88215 - DNA, 13 bp, Artificial Sequence
  Oligonucleotide for detection of SNP TSC0022168
aattttatttagg

SEQ ID NO: 88216 - DNA, 13 bp, Artificial Sequence
  Oligonucleotide for detection of SNP TSC0022168
cctaaataaaatt

SEQ ID NO: 88217 - DNA, 13 bp, Artificial Sequence
  Oligonucleotide for detection of SNP TSC0022168
aatttcgtttagg

SEQ ID NO: 88218 - DNA, 13 bp, Artificial Sequence
  Oligonucleotide for detection of SNP TSC0022168
cctaaacgaaatt

SEQ ID NO: 88219 - DNA, 13 bp, Artificial Sequence
  Oligonucleotide for detection of SNP TSC0022169
gtattaattatgg

SEQ ID NO: 88220 - DNA, 13 bp, Artificial Sequence
  Oligonucleotide for detection of SNP TSC0022169
ccataattaatac

SEQ ID NO: 88221 - DNA, 13 bp, Artificial Sequence
  Oligonucleotide for detection of SNP TSC0022169
gtattatttatgg

SEQ ID NO: 88222 - DNA, 13 bp, Artificial Sequence
  Oligonucleotide for detection of SNP TSC0022169
ccataaataatac

SEQ ID NO: 88223 - DNA, 13 bp, Artificial Sequence
  Oligonucleotide for detection of SNP TSC0022169
ttataattaatay

SEQ ID NO: 88224 - DNA, 13 bp, Artificial Sequence
  Oligonucleotide for detection of SNP TSC0022169
rtattaattataa

SEQ ID NO: 88225 - DNA, 13 bp, Artificial Sequence
  Oligonucleotide for detection of SNP TSC0022169
ttataaataatay

SEQ ID NO: 88226 - DNA, 13 bp, Artificial Sequence
  Oligonucleotide for detection of SNP TSC0022169
rtattatttataa

SEQ ID NO: 88227 - DNA, 13 bp, Artificial Sequence
  Oligonucleotide for detection of SNP TSC0022170
ttttaagatttat

SEQ ID NO: 88228 - DNA, 13 bp, Artificial Sequence
  Oligonucleotide for detection of SNP TSC0022170
ataaatcttaaaa

SEQ ID NO: 88229 - DNA, 13 bp, Artificial Sequence
  Oligonucleotide for detection of SNP TSC0022170
ttttaaaatttat

SEQ ID NO: 88230 - DNA, 13 bp, Artificial Sequence
  Oligonucleotide for detection of SNP TSC0022170
ataaattttaaaa

SEQ ID NO: 88231 - DNA, 13 bp, Artificial Sequence
  Oligonucleotide for detection of SNP TSC0022171
ttagtaaaggtta

SEQ ID NO: 88232 - DNA, 13 bp, Artificial Sequence
  Oligonucleotide for detection of SNP TSC0022171
taacctttactaa

SEQ ID NO: 88233 - DNA, 13 bp, Artificial Sequence
  Oligonucleotide for detection of SNP TSC0022171
ttagtagaggtta

SEQ ID NO: 88234 - DNA, 13 bp, Artificial Sequence
  Oligonucleotide for detection of SNP TSC0022171
taacctctactaa

SEQ ID NO: 88235 - DNA, 13 bp, Artificial Sequence
  Oligonucleotide for detection of SNP TSC0022172
gggtgtattgggy

SEQ ID NO: 88236 - DNA, 13 bp, Artificial Sequence
  Oligonucleotide for detection of SNP TSC0022172
rcccaatacaccc

SEQ ID NO: 88237 - DNA, 13 bp, Artificial Sequence
  Oligonucleotide for detection of SNP TSC0022172
gggtgtgttgggy

SEQ ID NO: 88238 - DNA, 13 bp, Artificial Sequence
  Oligonucleotide for detection of SNP TSC0022172
rcccaacacaccc

SEQ ID NO: 88239 - DNA, 13 bp, Artificial Sequence
  Oligonucleotide for detection of SNP TSC0022172
gggtgtatcgggy

SEQ ID NO: 88240 - DNA, 13 bp, Artificial Sequence
  Oligonucleotide for detection of SNP TSC0022172
rcccgatacaccc

SEQ ID NO: 88241 - DNA, 13 bp, Artificial Sequence
  Oligonucleotide for detection of SNP TSC0022172
gggtgcgttgggy

SEQ ID NO: 88242 - DNA, 13 bp, Artificial Sequence
  Oligonucleotide for detection of SNP TSC0022172
rcccaacgcaccc

SEQ ID NO: 88243 - DNA, 13 bp, Artificial Sequence
  Oligonucleotide for detection of SNP TSC0022172
gggtgtgtcgggy

SEQ ID NO: 88244 - DNA, 13 bp, Artificial Sequence
  Oligonucleotide for detection of SNP TSC0022172
rcccgacacaccc

SEQ ID NO: 88245 - DNA, 13 bp, Artificial Sequence
  Oligonucleotide for detection of SNP TSC0022172
gggtgcgtcgggy

SEQ ID NO: 88246 - DNA, 13 bp, Artificial Sequence
  Oligonucleotide for detection of SNP TSC0022172
rcccgacgcaccc

SEQ ID NO: 88247 - DNA, 13 bp, Artificial Sequence
  Oligonucleotide for detection of SNP TSC0022172
gtttgatgtatty

SEQ ID NO: 88248 - DNA, 13 bp, Artificial Sequence
  Oligonucleotide for detection of SNP TSC0022172
raatacatcaaac

SEQ ID NO: 88249 - DNA, 13 bp, Artificial Sequence
  Oligonucleotide for detection of SNP TSC0022172
gttcgatgtatty

SEQ ID NO: 88250 - DNA, 13 bp, Artificial Sequence
  Oligonucleotide for detection of SNP TSC0022172
raatacatcgaac

SEQ ID NO: 88251 - DNA, 13 bp, Artificial Sequence
  Oligonucleotide for detection of SNP TSC0022172
gtttgacgtatty

SEQ ID NO: 88252 - DNA, 13 bp, Artificial Sequence
  Oligonucleotide for detection of SNP TSC0022172
raatacgtcaaac

SEQ ID NO: 88253 - DNA, 13 bp, Artificial Sequence
  Oligonucleotide for detection of SNP TSC0022172
gttcgacgtatty

SEQ ID NO: 88254 - DNA, 13 bp, Artificial Sequence
  Oligonucleotide for detection of SNP TSC0022172
raatacgtcgaac

SEQ ID NO: 88255 - DNA, 13 bp, Artificial Sequence
  Oligonucleotide for detection of SNP TSC0022173
ttatgggagtaga

SEQ ID NO: 88256 - DNA, 13 bp, Artificial Sequence
  Oligonucleotide for detection of SNP TSC0022173
tctactcccataa

SEQ ID NO: 88257 - DNA, 13 bp, Artificial Sequence
  Oligonucleotide for detection of SNP TSC0022173
ttatggaagtaga

SEQ ID NO: 88258 - DNA, 13 bp, Artificial Sequence
  Oligonucleotide for detection of SNP TSC0022173
tctacttccataa

SEQ ID NO: 88259 - DNA, 13 bp, Artificial Sequence
  Oligonucleotide for detection of SNP TSC0022174
gggaatgtggggg

SEQ ID NO: 88260 - DNA, 13 bp, Artificial Sequence
  Oligonucleotide for detection of SNP TSC0022174
cccccacattccc

SEQ ID NO: 88261 - DNA, 13 bp, Artificial Sequence
  Oligonucleotide for detection of SNP TSC0022174
gggaatatggggg

SEQ ID NO: 88262 - DNA, 13 bp, Artificial Sequence
  Oligonucleotide for detection of SNP TSC0022174
cccccatattccc

SEQ ID NO: 88263 - DNA, 13 bp, Artificial Sequence
  Oligonucleotide for detection of SNP TSC0022176
tttaattttattt

SEQ ID NO: 88264 - DNA, 13 bp, Artificial Sequence
  Oligonucleotide for detection of SNP TSC0022176
aaataaaattaaa

SEQ ID NO: 88265 - DNA, 13 bp, Artificial Sequence
  Oligonucleotide for detection of SNP TSC0022176
tttaatgttattt

SEQ ID NO: 88266 - DNA, 13 bp, Artificial Sequence
  Oligonucleotide for detection of SNP TSC0022176
aaataacattaaa

SEQ ID NO: 88267 - DNA, 13 bp, Artificial Sequence
  Oligonucleotide for detection of SNP TSC0022176
tttaacgttattt

SEQ ID NO: 88268 - DNA, 13 bp, Artificial Sequence
  Oligonucleotide for detection of SNP TSC0022176
aaataacgttaaa

SEQ ID NO: 88269 - DNA, 13 bp, Artificial Sequence
  Oligonucleotide for detection of SNP TSC0022176
aaataaggttgga

SEQ ID NO: 88270 - DNA, 13 bp, Artificial Sequence
  Oligonucleotide for detection of SNP TSC0022176
tccaaccttattt

SEQ ID NO: 88271 - DNA, 13 bp, Artificial Sequence
  Oligonucleotide for detection of SNP TSC0022176
aaataatgttgga

SEQ ID NO: 88272 - DNA, 13 bp, Artificial Sequence
  Oligonucleotide for detection of SNP TSC0022176
tccaacattattt

SEQ ID NO: 88273 - DNA, 13 bp, Artificial Sequence
  Oligonucleotide for detection of SNP TSC0022176
aaataacgttgga

SEQ ID NO: 88274 - DNA, 13 bp, Artificial Sequence
  Oligonucleotide for detection of SNP TSC0022176
tccaacgttattt

SEQ ID NO: 88275 - DNA, 13 bp, Artificial Sequence
  Oligonucleotide for detection of SNP TSC0022179
ggtagtagtttat

SEQ ID NO: 88276 - DNA, 13 bp, Artificial Sequence
  Oligonucleotide for detection of SNP TSC0022179
ataaactactacc

SEQ ID NO: 88277 - DNA, 13 bp, Artificial Sequence
  Oligonucleotide for detection of SNP TSC0022179
ggtagtggtttat

SEQ ID NO: 88278 - DNA, 13 bp, Artificial Sequence
  Oligonucleotide for detection of SNP TSC0022179
ataaaccactacc

SEQ ID NO: 88279 - DNA, 13 bp, Artificial Sequence
  Oligonucleotide for detection of SNP TSC0022179
ggtagcggtttat

SEQ ID NO: 88280 - DNA, 13 bp, Artificial Sequence
  Oligonucleotide for detection of SNP TSC0022179
ataaaccgctacc

SEQ ID NO: 88281 - DNA, 13 bp, Artificial Sequence
  Oligonucleotide for detection of SNP TSC0022179
atgagttgttgty

SEQ ID NO: 88282 - DNA, 13 bp, Artificial Sequence
  Oligonucleotide for detection of SNP TSC0022179
racaacaactcat
